United States Patent Application Publication US 2014/0004565 A1 - sequence listing, part 18

SEQ ID NO: 328288 - RNA, 19 nt, Artificial Sequence
  Description of Artificial Sequence: Synthetic oligonucleotide
gcaacaguuagcagacaua

SEQ ID NO: 328289 - RNA, 19 nt, Artificial Sequence
  Description of Artificial Sequence: Synthetic oligonucleotide
ccguguuagagguaagagu

SEQ ID NO: 328290 - RNA, 19 nt, Artificial Sequence
  Description of Artificial Sequence: Synthetic oligonucleotide
ccgugaagacacacacaug

SEQ ID NO: 328291 - RNA, 19 nt, Artificial Sequence
  Description of Artificial Sequence: Synthetic oligonucleotide
gcgacuugacgauguaacu

SEQ ID NO: 328292 - RNA, 19 nt, Artificial Sequence
  Description of Artificial Sequence: Synthetic oligonucleotide
cuugaacgguaggugccaa

SEQ ID NO: 328293 - RNA, 19 nt, Artificial Sequence
  Description of Artificial Sequence: Synthetic oligonucleotide
gccagaccaaggucuuuuc

SEQ ID NO: 328294 - RNA, 19 nt, Artificial Sequence
  Description of Artificial Sequence: Synthetic oligonucleotide
ggcuuucugucaccgugaa

SEQ ID NO: 328295 - RNA, 19 nt, Artificial Sequence
  Description of Artificial Sequence: Synthetic oligonucleotide
caauccgaugcacguaauu

SEQ ID NO: 328296 - RNA, 19 nt, Artificial Sequence
  Description of Artificial Sequence: Synthetic oligonucleotide
gugcaguucagaugcucuu

SEQ ID NO: 328297 - RNA, 19 nt, Artificial Sequence
  Description of Artificial Sequence: Synthetic oligonucleotide
gugcugcgacuugacgaug

SEQ ID NO: 328298 - RNA, 19 nt, Artificial Sequence
  Description of Artificial Sequence: Synthetic oligonucleotide
gugggacuagauucugcuu

SEQ ID NO: 328299 - RNA, 19 nt, Artificial Sequence
  Description of Artificial Sequence: Synthetic oligonucleotide
ccuaggucuaaggaggccu

SEQ ID NO: 328300 - RNA, 19 nt, Artificial Sequence
  Description of Artificial Sequence: Synthetic oligonucleotide
acucucccuuaaguauuuu

SEQ ID NO: 328301 - RNA, 19 nt, Artificial Sequence
  Description of Artificial Sequence: Synthetic oligonucleotide
gcacguaauucugcuucuc

SEQ ID NO: 328302 - RNA, 19 nt, Artificial Sequence
  Description of Artificial Sequence: Synthetic oligonucleotide
ccaccguguuagagguaag

SEQ ID NO: 328303 - RNA, 19 nt, Artificial Sequence
  Description of Artificial Sequence: Synthetic oligonucleotide
cuaguggcucugcacccau

SEQ ID NO: 328304 - RNA, 19 nt, Artificial Sequence
  Description of Artificial Sequence: Synthetic oligonucleotide
gagccucguguuauagcau

SEQ ID NO: 328305 - RNA, 19 nt, Artificial Sequence
  Description of Artificial Sequence: Synthetic oligonucleotide
cgaugcacguaauucugcu

SEQ ID NO: 328306 - RNA, 19 nt, Artificial Sequence
  Description of Artificial Sequence: Synthetic oligonucleotide
caaucaccugaagucuuuu

SEQ ID NO: 328307 - RNA, 19 nt, Artificial Sequence
  Description of Artificial Sequence: Synthetic oligonucleotide
ggccaacucuugaacggua

SEQ ID NO: 328308 - RNA, 19 nt, Artificial Sequence
  Description of Artificial Sequence: Synthetic oligonucleotide
cgguaggugccaagauauc

SEQ ID NO: 328309 - RNA, 19 nt, Artificial Sequence
  Description of Artificial Sequence: Synthetic oligonucleotide
cccguaacuuaggguuauc

SEQ ID NO: 328310 - RNA, 19 nt, Artificial Sequence
  Description of Artificial Sequence: Synthetic oligonucleotide
ggacgacgacauggugcac

SEQ ID NO: 328311 - RNA, 19 nt, Artificial Sequence
  Description of Artificial Sequence: Synthetic oligonucleotide
ccaauccgaugcacguaau

SEQ ID NO: 328312 - RNA, 19 nt, Artificial Sequence
  Description of Artificial Sequence: Synthetic oligonucleotide
cgacgacauggugcacagu

SEQ ID NO: 328313 - RNA, 19 nt, Artificial Sequence
  Description of Artificial Sequence: Synthetic oligonucleotide
aauucuucgacuaacagac

SEQ ID NO: 328314 - RNA, 19 nt, Artificial Sequence
  Description of Artificial Sequence: Synthetic oligonucleotide
aaauacuacauguuuaaag

SEQ ID NO: 328315 - RNA, 19 nt, Artificial Sequence
  Description of Artificial Sequence: Synthetic oligonucleotide
agaaccaaaagcaaaaucc

SEQ ID NO: 328316 - RNA, 19 nt, Artificial Sequence
  Description of Artificial Sequence: Synthetic oligonucleotide
ugugaaauuauuuuauagc

SEQ ID NO: 328317 - RNA, 19 nt, Artificial Sequence
  Description of Artificial Sequence: Synthetic oligonucleotide
uuuacauuuauacauugga

SEQ ID NO: 328318 - RNA, 19 nt, Artificial Sequence
  Description of Artificial Sequence: Synthetic oligonucleotide
caaacaaagauccaguagc

SEQ ID NO: 328319 - RNA, 19 nt, Artificial Sequence
  Description of Artificial Sequence: Synthetic oligonucleotide
uucacuaacauaaucuggc

SEQ ID NO: 328320 - RNA, 19 nt, Artificial Sequence
  Description of Artificial Sequence: Synthetic oligonucleotide
aauuauccguccuagaggu

SEQ ID NO: 328321 - RNA, 19 nt, Artificial Sequence
  Description of Artificial Sequence: Synthetic oligonucleotide
ugaacuauugccaaacgca

SEQ ID NO: 328322 - RNA, 19 nt, Artificial Sequence
  Description of Artificial Sequence: Synthetic oligonucleotide
agaaucagauucuucagac

SEQ ID NO: 328323 - RNA, 19 nt, Artificial Sequence
  Description of Artificial Sequence: Synthetic oligonucleotide
ugcuguuagaaucagauuc

SEQ ID NO: 328324 - RNA, 19 nt, Artificial Sequence
  Description of Artificial Sequence: Synthetic oligonucleotide
uaauuauccguccuagagg

SEQ ID NO: 328325 - RNA, 19 nt, Artificial Sequence
  Description of Artificial Sequence: Synthetic oligonucleotide
auaauuauccguccuagag

SEQ ID NO: 328326 - RNA, 19 nt, Artificial Sequence
  Description of Artificial Sequence: Synthetic oligonucleotide
aauauccucauuaugaacu

SEQ ID NO: 328327 - RNA, 19 nt, Artificial Sequence
  Description of Artificial Sequence: Synthetic oligonucleotide
aacgauucgaucuuucuca

SEQ ID NO: 328328 - RNA, 19 nt, Artificial Sequence
  Description of Artificial Sequence: Synthetic oligonucleotide
cauuguaugccaaagaauc

SEQ ID NO: 328329 - RNA, 19 nt, Artificial Sequence
  Description of Artificial Sequence: Synthetic oligonucleotide
uuugguaauaacaugguuu

SEQ ID NO: 328330 - RNA, 19 nt, Artificial Sequence
  Description of Artificial Sequence: Synthetic oligonucleotide
aaacgauucgaucuuucuc

SEQ ID NO: 328331 - RNA, 19 nt, Artificial Sequence
  Description of Artificial Sequence: Synthetic oligonucleotide
ugaaauuauuuuauagcug

SEQ ID NO: 328332 - RNA, 19 nt, Artificial Sequence
  Description of Artificial Sequence: Synthetic oligonucleotide
uuauauagauaaaauucac

SEQ ID NO: 328333 - RNA, 19 nt, Artificial Sequence
  Description of Artificial Sequence: Synthetic oligonucleotide
agacuuauagacaaaagag

SEQ ID NO: 328334 - RNA, 19 nt, Artificial Sequence
  Description of Artificial Sequence: Synthetic oligonucleotide
ugugauucacacuugucag

SEQ ID NO: 328335 - RNA, 19 nt, Artificial Sequence
  Description of Artificial Sequence: Synthetic oligonucleotide
aaugagaacaucaguaucu

SEQ ID NO: 328336 - RNA, 19 nt, Artificial Sequence
  Description of Artificial Sequence: Synthetic oligonucleotide
uucuaguacacaaaucuac

SEQ ID NO: 328337 - RNA, 19 nt, Artificial Sequence
  Description of Artificial Sequence: Synthetic oligonucleotide
uucauuguaugccaaagaa

SEQ ID NO: 328338 - RNA, 19 nt, Artificial Sequence
  Description of Artificial Sequence: Synthetic oligonucleotide
ucuaguacacaaaucuaca

SEQ ID NO: 328339 - RNA, 19 nt, Artificial Sequence
  Description of Artificial Sequence: Synthetic oligonucleotide
auuccauaauuauccgucc

SEQ ID NO: 328340 - RNA, 19 nt, Artificial Sequence
  Description of Artificial Sequence: Synthetic oligonucleotide
aaacuuuggaggagaaacc

SEQ ID NO: 328341 - RNA, 19 nt, Artificial Sequence
  Description of Artificial Sequence: Synthetic oligonucleotide
aaucuuuauaucuccaaua

SEQ ID NO: 328342 - RNA, 19 nt, Artificial Sequence
  Description of Artificial Sequence: Synthetic oligonucleotide
acuaacagacccuuuagga

SEQ ID NO: 328343 - RNA, 19 nt, Artificial Sequence
  Description of Artificial Sequence: Synthetic oligonucleotide
ucucauuaggauccgauaa

SEQ ID NO: 328344 - RNA, 19 nt, Artificial Sequence
  Description of Artificial Sequence: Synthetic oligonucleotide
uaagcuacaauuuuacauu

SEQ ID NO: 328345 - RNA, 19 nt, Artificial Sequence
  Description of Artificial Sequence: Synthetic oligonucleotide
ucuuuauaucuccaauacc

SEQ ID NO: 328346 - RNA, 19 nt, Artificial Sequence
  Description of Artificial Sequence: Synthetic oligonucleotide
agaaccaaacgauucgauc

SEQ ID NO: 328347 - RNA, 19 nt, Artificial Sequence
  Description of Artificial Sequence: Synthetic oligonucleotide
guaggugggagcuucaaag

SEQ ID NO: 328348 - RNA, 19 nt, Artificial Sequence
  Description of Artificial Sequence: Synthetic oligonucleotide
ugaaguuguuucuauuacc

SEQ ID NO: 328349 - RNA, 19 nt, Artificial Sequence
  Description of Artificial Sequence: Synthetic oligonucleotide
aaaggugaacauaauuauc

SEQ ID NO: 328350 - RNA, 19 nt, Artificial Sequence
  Description of Artificial Sequence: Synthetic oligonucleotide
ugaggaacgauauuugaaa

SEQ ID NO: 328351 - RNA, 19 nt, Artificial Sequence
  Description of Artificial Sequence: Synthetic oligonucleotide
uuuuggaguuucaauauau

SEQ ID NO: 328352 - RNA, 19 nt, Artificial Sequence
  Description of Artificial Sequence: Synthetic oligonucleotide
cuuuauaucuccaauaccu

SEQ ID NO: 328353 - RNA, 19 nt, Artificial Sequence
  Description of Artificial Sequence: Synthetic oligonucleotide
uagagguucaccauccaca

SEQ ID NO: 328354 - RNA, 19 nt, Artificial Sequence
  Description of Artificial Sequence: Synthetic oligonucleotide
cuucacuaacauaaucugg

SEQ ID NO: 328355 - RNA, 19 nt, Artificial Sequence
  Description of Artificial Sequence: Synthetic oligonucleotide
uuugguguuguuucagaag

SEQ ID NO: 328356 - RNA, 19 nt, Artificial Sequence
  Description of Artificial Sequence: Synthetic oligonucleotide
gauacuaauucuucgacua

SEQ ID NO: 328357 - RNA, 19 nt, Artificial Sequence
  Description of Artificial Sequence: Synthetic oligonucleotide
uguaccacuuccaaaucca

SEQ ID NO: 328358 - RNA, 19 nt, Artificial Sequence
  Description of Artificial Sequence: Synthetic oligonucleotide
ugauugacaucucuauccc

SEQ ID NO: 328359 - RNA, 19 nt, Artificial Sequence
  Description of Artificial Sequence: Synthetic oligonucleotide
aagaguuugucacuucagu

SEQ ID NO: 328360 - RNA, 19 nt, Artificial Sequence
  Description of Artificial Sequence: Synthetic oligonucleotide
uucuauuaccucaucuccc

SEQ ID NO: 328361 - RNA, 19 nt, Artificial Sequence
  Description of Artificial Sequence: Synthetic oligonucleotide
agacuauggguucaaaaug

SEQ ID NO: 328362 - RNA, 19 nt, Artificial Sequence
  Description of Artificial Sequence: Synthetic oligonucleotide
uccaguauuggcccacugg

SEQ ID NO: 328363 - RNA, 19 nt, Artificial Sequence
  Description of Artificial Sequence: Synthetic oligonucleotide
aucuauaaaguuuggcucu

SEQ ID NO: 328364 - RNA, 19 nt, Artificial Sequence
  Description of Artificial Sequence: Synthetic oligonucleotide
uuauaucuccaauaccucu

SEQ ID NO: 328365 - RNA, 19 nt, Artificial Sequence
  Description of Artificial Sequence: Synthetic oligonucleotide
uuguuuuaaaucucaccgc

SEQ ID NO: 328366 - RNA, 19 nt, Artificial Sequence
  Description of Artificial Sequence: Synthetic oligonucleotide
ucacauuaaaguuuucauc

SEQ ID NO: 328367 - RNA, 19 nt, Artificial Sequence
  Description of Artificial Sequence: Synthetic oligonucleotide
aggagaaccaaacgauucg

SEQ ID NO: 328368 - RNA, 19 nt, Artificial Sequence
  Description of Artificial Sequence: Synthetic oligonucleotide
ucacuucuaccucugguag

SEQ ID NO: 328369 - RNA, 19 nt, Artificial Sequence
  Description of Artificial Sequence: Synthetic oligonucleotide
cauuauuugaaacauuuaa

SEQ ID NO: 328370 - RNA, 19 nt, Artificial Sequence
  Description of Artificial Sequence: Synthetic oligonucleotide
acgcaaauggcuuugauuu

SEQ ID NO: 328371 - RNA, 19 nt, Artificial Sequence
  Description of Artificial Sequence: Synthetic oligonucleotide
uugauaacucugcugcgag

SEQ ID NO: 328372 - RNA, 19 nt, Artificial Sequence
  Description of Artificial Sequence: Synthetic oligonucleotide
gacuaacagacccuuuagg

SEQ ID NO: 328373 - RNA, 19 nt, Artificial Sequence
  Description of Artificial Sequence: Synthetic oligonucleotide
uaggauccgauaauaauuc

SEQ ID NO: 328374 - RNA, 19 nt, Artificial Sequence
  Description of Artificial Sequence: Synthetic oligonucleotide
uaaaucucaccgcaagcug

SEQ ID NO: 328375 - RNA, 19 nt, Artificial Sequence
  Description of Artificial Sequence: Synthetic oligonucleotide
uguuuaaaguccaaauguu

SEQ ID NO: 328376 - RNA, 19 nt, Artificial Sequence
  Description of Artificial Sequence: Synthetic oligonucleotide
cuaguacacaaaucuacag

SEQ ID NO: 328377 - RNA, 19 nt, Artificial Sequence
  Description of Artificial Sequence: Synthetic oligonucleotide
uccaauaccucucuccuuc

SEQ ID NO: 328378 - RNA, 19 nt, Artificial Sequence
  Description of Artificial Sequence: Synthetic oligonucleotide
cuuuaggagaaccaaacga

SEQ ID NO: 328379 - RNA, 19 nt, Artificial Sequence
  Description of Artificial Sequence: Synthetic oligonucleotide
uaucccaucuauaaaguuu

SEQ ID NO: 328380 - RNA, 19 nt, Artificial Sequence
  Description of Artificial Sequence: Synthetic oligonucleotide
ucuauuaccucaucucccu

SEQ ID NO: 328381 - RNA, 19 nt, Artificial Sequence
  Description of Artificial Sequence: Synthetic oligonucleotide
aguuaaaucuguccuuucu

SEQ ID NO: 328382 - RNA, 19 nt, Artificial Sequence
  Description of Artificial Sequence: Synthetic oligonucleotide
ugauacuaauucuucgacu

SEQ ID NO: 328383 - RNA, 19 nt, Artificial Sequence
  Description of Artificial Sequence: Synthetic oligonucleotide
ccuuugauaacucugcugc

SEQ ID NO: 328384 - RNA, 19 nt, Artificial Sequence
  Description of Artificial Sequence: Synthetic oligonucleotide
gauuggucuccuuugauaa

SEQ ID NO: 328385 - RNA, 19 nt, Artificial Sequence
  Description of Artificial Sequence: Synthetic oligonucleotide
gaaccaaacgauucgaucu

SEQ ID NO: 328386 - RNA, 19 nt, Artificial Sequence
  Description of Artificial Sequence: Synthetic oligonucleotide
cugaacuauugccaaacgc

SEQ ID NO: 328387 - RNA, 19 nt, Artificial Sequence
  Description of Artificial Sequence: Synthetic oligonucleotide
aacugugaauuguugguau

SEQ ID NO: 328388 - RNA, 19 nt, Artificial Sequence
  Description of Artificial Sequence: Synthetic oligonucleotide
auaaaguuuggcucucucu

SEQ ID NO: 328389 - RNA, 19 nt, Artificial Sequence
  Description of Artificial Sequence: Synthetic oligonucleotide
acuauugccaaacgcaaau

SEQ ID NO: 328390 - RNA, 19 nt, Artificial Sequence
  Description of Artificial Sequence: Synthetic oligonucleotide
aucauguuuggugauaucu

SEQ ID NO: 328391 - RNA, 19 nt, Artificial Sequence
  Description of Artificial Sequence: Synthetic oligonucleotide
gauccgauaauaauucuuc

SEQ ID NO: 328392 - RNA, 19 nt, Artificial Sequence
  Description of Artificial Sequence: Synthetic oligonucleotide
ucauuguaugccaaagaau

SEQ ID NO: 328393 - RNA, 19 nt, Artificial Sequence
  Description of Artificial Sequence: Synthetic oligonucleotide
aacgcaaauggcuuugauu

SEQ ID NO: 328394 - RNA, 19 nt, Artificial Sequence
  Description of Artificial Sequence: Synthetic oligonucleotide
ucacuaacauaaucuggcc

SEQ ID NO: 328395 - RNA, 19 nt, Artificial Sequence
  Description of Artificial Sequence: Synthetic oligonucleotide
agaaaguuggaggaagcag

SEQ ID NO: 328396 - RNA, 19 nt, Artificial Sequence
  Description of Artificial Sequence: Synthetic oligonucleotide
uggaugcucauuaccaacu

SEQ ID NO: 328397 - RNA, 19 nt, Artificial Sequence
  Description of Artificial Sequence: Synthetic oligonucleotide
uuaacagacucugagccaa

SEQ ID NO: 328398 - RNA, 19 nt, Artificial Sequence
  Description of Artificial Sequence: Synthetic oligonucleotide
ucucccugaguuaaaucug

SEQ ID NO: 328399 - RNA, 19 nt, Artificial Sequence
  Description of Artificial Sequence: Synthetic oligonucleotide
gugaauuguugguaucccg

SEQ ID NO: 328400 - RNA, 19 nt, Artificial Sequence
  Description of Artificial Sequence: Synthetic oligonucleotide
cacaguauccaugccaucc

SEQ ID NO: 328401 - RNA, 19 nt, Artificial Sequence
  Description of Artificial Sequence: Synthetic oligonucleotide
uuuugguguuguuucagaa

SEQ ID NO: 328402 - RNA, 19 nt, Artificial Sequence
  Description of Artificial Sequence: Synthetic oligonucleotide
caaaggugcauuaaaacua

SEQ ID NO: 328403 - RNA, 19 nt, Artificial Sequence
  Description of Artificial Sequence: Synthetic oligonucleotide
aacgauauuugaaaauaau

SEQ ID NO: 328404 - RNA, 19 nt, Artificial Sequence
  Description of Artificial Sequence: Synthetic oligonucleotide
acugugaauuguugguauc

SEQ ID NO: 328405 - RNA, 19 nt, Artificial Sequence
  Description of Artificial Sequence: Synthetic oligonucleotide
ugagacuauggguucaaaa

SEQ ID NO: 328406 - RNA, 19 nt, Artificial Sequence
  Description of Artificial Sequence: Synthetic oligonucleotide
ugaacugcuaaaguaacuu

SEQ ID NO: 328407 - RNA, 19 nt, Artificial Sequence
  Description of Artificial Sequence: Synthetic oligonucleotide
ggguucaaaaugaauaucc

SEQ ID NO: 328408 - RNA, 19 nt, Artificial Sequence
  Description of Artificial Sequence: Synthetic oligonucleotide
gugauucacacuugucagg

SEQ ID NO: 328409 - RNA, 19 nt, Artificial Sequence
  Description of Artificial Sequence: Synthetic oligonucleotide
gcuacagcaauuuugccac

SEQ ID NO: 328410 - RNA, 19 nt, Artificial Sequence
  Description of Artificial Sequence: Synthetic oligonucleotide
agaaucuuuauaucuccaa

SEQ ID NO: 328411 - RNA, 19 nt, Artificial Sequence
  Description of Artificial Sequence: Synthetic oligonucleotide
ugauaacucugcugcgagg

SEQ ID NO: 328412 - RNA, 19 nt, Artificial Sequence
  Description of Artificial Sequence: Synthetic oligonucleotide
aagacugucugaugucagu

SEQ ID NO: 328413 - RNA, 19 nt, Artificial Sequence
  Description of Artificial Sequence: Synthetic oligonucleotide
ucgacuaacagacccuuua

SEQ ID NO: 328414 - RNA, 19 nt, Artificial Sequence
  Description of Artificial Sequence: Synthetic oligonucleotide
ucuucgacuaacagacccu

SEQ ID NO: 328415 - RNA, 19 nt, Artificial Sequence
  Description of Artificial Sequence: Synthetic oligonucleotide
gacuauggguucaaaauga

SEQ ID NO: 328416 - RNA, 19 nt, Artificial Sequence
  Description of Artificial Sequence: Synthetic oligonucleotide
cugugauucacacuuguca

SEQ ID NO: 328417 - RNA, 19 nt, Artificial Sequence
  Description of Artificial Sequence: Synthetic oligonucleotide
ugcauaaugcucugaaguu

SEQ ID NO: 328418 - RNA, 19 nt, Artificial Sequence
  Description of Artificial Sequence: Synthetic oligonucleotide
ccauuaaguuucuugacag

SEQ ID NO: 328419 - RNA, 19 nt, Artificial Sequence
  Description of Artificial Sequence: Synthetic oligonucleotide
ggugcuuuaaauguguaac

SEQ ID NO: 328420 - RNA, 19 nt, Artificial Sequence
  Description of Artificial Sequence: Synthetic oligonucleotide
acaugguuugcacaaacuu

SEQ ID NO: 328421 - RNA, 19 nt, Artificial Sequence
  Description of Artificial Sequence: Synthetic oligonucleotide
ugugaauuguugguauccc

SEQ ID NO: 328422 - RNA, 19 nt, Artificial Sequence
  Description of Artificial Sequence: Synthetic oligonucleotide
augcuuuuaacagacucug

SEQ ID NO: 328423 - RNA, 19 nt, Artificial Sequence
  Description of Artificial Sequence: Synthetic oligonucleotide
aaaucucaccgcaagcugu

SEQ ID NO: 328424 - RNA, 19 nt, Artificial Sequence
  Description of Artificial Sequence: Synthetic oligonucleotide
uuccgugucaauuucuuuu

SEQ ID NO: 328425 - RNA, 19 nt, Artificial Sequence
  Description of Artificial Sequence: Synthetic oligonucleotide
aucauauugucuguaacaa

SEQ ID NO: 328426 - RNA, 19 nt, Artificial Sequence
  Description of Artificial Sequence: Synthetic oligonucleotide
uucuaccucugguagugag

SEQ ID NO: 328427 - RNA, 19 nt, Artificial Sequence
  Description of Artificial Sequence: Synthetic oligonucleotide
uuccauaauuauccguccu

SEQ ID NO: 328428 - RNA, 19 nt, Artificial Sequence
  Description of Artificial Sequence: Synthetic oligonucleotide
aguagcugaacuauugcca

SEQ ID NO: 328429 - RNA, 19 nt, Artificial Sequence
  Description of Artificial Sequence: Synthetic oligonucleotide
augcaagaucaauuaucac

SEQ ID NO: 328430 - RNA, 19 nt, Artificial Sequence
  Description of Artificial Sequence: Synthetic oligonucleotide
agcauaaucugaggcaguc

SEQ ID NO: 328431 - RNA, 19 nt, Artificial Sequence
  Description of Artificial Sequence: Synthetic oligonucleotide
acgauucgaucuuucucac

SEQ ID NO: 328432 - RNA, 19 nt, Artificial Sequence
  Description of Artificial Sequence: Synthetic oligonucleotide
uuguagcucugacugaaaa

SEQ ID NO: 328433 - RNA, 19 nt, Artificial Sequence
  Description of Artificial Sequence: Synthetic oligonucleotide
uuauccguccuagagguuc

SEQ ID NO: 328434 - RNA, 19 nt, Artificial Sequence
  Description of Artificial Sequence: Synthetic oligonucleotide
cugugaauuguugguaucc

SEQ ID NO: 328435 - RNA, 19 nt, Artificial Sequence
  Description of Artificial Sequence: Synthetic oligonucleotide
aaaggugcauuaaaacuaa

SEQ ID NO: 328436 - RNA, 19 nt, Artificial Sequence
  Description of Artificial Sequence: Synthetic oligonucleotide
uguuuggcuucuuuuccca

SEQ ID NO: 328437 - RNA, 19 nt, Artificial Sequence
  Description of Artificial Sequence: Synthetic oligonucleotide
uuacuuguugacuguguuc

SEQ ID NO: 328438 - RNA, 19 nt, Artificial Sequence
  Description of Artificial Sequence: Synthetic oligonucleotide
aucccaucuauaaaguuug

SEQ ID NO: 328439 - RNA, 19 nt, Artificial Sequence
  Description of Artificial Sequence: Synthetic oligonucleotide
aauuaucauauugucugua

SEQ ID NO: 328440 - RNA, 19 nt, Artificial Sequence
  Description of Artificial Sequence: Synthetic oligonucleotide
ucuaccucugguagugaga

SEQ ID NO: 328441 - RNA, 19 nt, Artificial Sequence
  Description of Artificial Sequence: Synthetic oligonucleotide
aacacucagucauuucuuu

SEQ ID NO: 328442 - RNA, 19 nt, Artificial Sequence
  Description of Artificial Sequence: Synthetic oligonucleotide
cuaagucauccagauagag

SEQ ID NO: 328443 - RNA, 19 nt, Artificial Sequence
  Description of Artificial Sequence: Synthetic oligonucleotide
guaacuaagugaagacucc

SEQ ID NO: 328444 - RNA, 19 nt, Artificial Sequence
  Description of Artificial Sequence: Synthetic oligonucleotide
uguagcucugacugaaaau

SEQ ID NO: 328445 - RNA, 19 nt, Artificial Sequence
  Description of Artificial Sequence: Synthetic oligonucleotide
aggaacgauauuugaaaau

SEQ ID NO: 328446 - RNA, 19 nt, Artificial Sequence
  Description of Artificial Sequence: Synthetic oligonucleotide
gcuagauuuucuuccaaug

SEQ ID NO: 328447 - RNA, 19 nt, Artificial Sequence
  Description of Artificial Sequence: Synthetic oligonucleotide
aaccaaacgauucgaucuu

SEQ ID NO: 328448 - RNA, 19 nt, Artificial Sequence
  Description of Artificial Sequence: Synthetic oligonucleotide
auuuaucuccauaaaugga

SEQ ID NO: 328449 - RNA, 19 nt, Artificial Sequence
  Description of Artificial Sequence: Synthetic oligonucleotide
uuaccaacugcaucaguua

SEQ ID NO: 328450 - RNA, 19 nt, Artificial Sequence
  Description of Artificial Sequence: Synthetic oligonucleotide
acgauauuugaaaauaauu

SEQ ID NO: 328451 - RNA, 19 nt, Artificial Sequence
  Description of Artificial Sequence: Synthetic oligonucleotide
ucuggccuauucuuguaac

SEQ ID NO: 328452 - RNA, 19 nt, Artificial Sequence
  Description of Artificial Sequence: Synthetic oligonucleotide
ucauuaggauccgauaaua

SEQ ID NO: 328453 - RNA, 19 nt, Artificial Sequence
  Description of Artificial Sequence: Synthetic oligonucleotide
auccgauaauaauucuuca

SEQ ID NO: 328454 - RNA, 19 nt, Artificial Sequence
  Description of Artificial Sequence: Synthetic oligonucleotide
acuuuggaggagaaaccac

SEQ ID NO: 328455 - RNA, 19 nt, Artificial Sequence
  Description of Artificial Sequence: Synthetic oligonucleotide
uccgugucaauuucuuuuc

SEQ ID NO: 328456 - RNA, 19 nt, Artificial Sequence
  Description of Artificial Sequence: Synthetic oligonucleotide
gaggaacgauauuugaaaa

SEQ ID NO: 328457 - RNA, 19 nt, Artificial Sequence
  Description of Artificial Sequence: Synthetic oligonucleotide
uccacacuaaagcauuauu

SEQ ID NO: 328458 - RNA, 19 nt, Artificial Sequence
  Description of Artificial Sequence: Synthetic oligonucleotide
uaccaacugcaucaguuau

SEQ ID NO: 328459 - RNA, 19 nt, Artificial Sequence
  Description of Artificial Sequence: Synthetic oligonucleotide
cuaccucugguagugagac

SEQ ID NO: 328460 - RNA, 19 nt, Artificial Sequence
  Description of Artificial Sequence: Synthetic oligonucleotide
uucucauuaggauccgaua

SEQ ID NO: 328461 - RNA, 19 nt, Artificial Sequence
  Description of Artificial Sequence: Synthetic oligonucleotide
agauuugcuguuagaauca

SEQ ID NO: 328462 - RNA, 19 nt, Artificial Sequence
  Description of Artificial Sequence: Synthetic oligonucleotide
gauuugcuguuagaaucag

SEQ ID NO: 328463 - RNA, 19 nt, Artificial Sequence
  Description of Artificial Sequence: Synthetic oligonucleotide
aaacgcaaauggcuuugau

SEQ ID NO: 328464 - RNA, 19 nt, Artificial Sequence
  Description of Artificial Sequence: Synthetic oligonucleotide
ucugcugcgagggauacuu

SEQ ID NO: 328465 - RNA, 19 nt, Artificial Sequence
  Description of Artificial Sequence: Synthetic oligonucleotide
uaggugggagcuucaaagu

SEQ ID NO: 328466 - RNA, 19 nt, Artificial Sequence
  Description of Artificial Sequence: Synthetic oligonucleotide
gaaucuuuauaucuccaau

SEQ ID NO: 328467 - RNA, 19 nt, Artificial Sequence
  Description of Artificial Sequence: Synthetic oligonucleotide
ucucaccgcaagcuguucu

SEQ ID NO: 328468 - RNA, 19 nt, Artificial Sequence
  Description of Artificial Sequence: Synthetic oligonucleotide
ugcuuuuaacagacucuga

SEQ ID NO: 328469 - RNA, 19 nt, Artificial Sequence
  Description of Artificial Sequence: Synthetic oligonucleotide
uguccacauucugugauac

SEQ ID NO: 328470 - RNA, 19 nt, Artificial Sequence
  Description of Artificial Sequence: Synthetic oligonucleotide
agauccaguagcugaacua

SEQ ID NO: 328471 - RNA, 19 nt, Artificial Sequence
  Description of Artificial Sequence: Synthetic oligonucleotide
agccaagucugcaaaugac

SEQ ID NO: 328472 - RNA, 19 nt, Artificial Sequence
  Description of Artificial Sequence: Synthetic oligonucleotide
gaagacugucugaugucag

SEQ ID NO: 328473 - RNA, 19 nt, Artificial Sequence
  Description of Artificial Sequence: Synthetic oligonucleotide
uggugcuuuaaauguguaa

SEQ ID NO: 328474 - RNA, 19 nt, Artificial Sequence
  Description of Artificial Sequence: Synthetic oligonucleotide
guagcugaacuauugccaa

SEQ ID NO: 328475 - RNA, 19 nt, Artificial Sequence
  Description of Artificial Sequence: Synthetic oligonucleotide
gaacuauugccaaacgcaa

SEQ ID NO: 328476 - RNA, 19 nt, Artificial Sequence
  Description of Artificial Sequence: Synthetic oligonucleotide
ugcugcgagggauacuugu

SEQ ID NO: 328477 - RNA, 19 nt, Artificial Sequence
  Description of Artificial Sequence: Synthetic oligonucleotide
gguaaugacauuucugacu

SEQ ID NO: 328478 - RNA, 19 nt, Artificial Sequence
  Description of Artificial Sequence: Synthetic oligonucleotide
gaacgauauuugaaaauaa

SEQ ID NO: 328479 - RNA, 19 nt, Artificial Sequence
  Description of Artificial Sequence: Synthetic oligonucleotide
ucuauaaaguuuggcucuc

SEQ ID NO: 328480 - RNA, 19 nt, Artificial Sequence
  Description of Artificial Sequence: Synthetic oligonucleotide
agaagugcuugauguuucu

SEQ ID NO: 328481 - RNA, 19 nt, Artificial Sequence
  Description of Artificial Sequence: Synthetic oligonucleotide
uauccguccuagagguuca

SEQ ID NO: 328482 - RNA, 19 nt, Artificial Sequence
  Description of Artificial Sequence: Synthetic oligonucleotide
auacuaauucuucgacuaa

SEQ ID NO: 328483 - RNA, 19 nt, Artificial Sequence
  Description of Artificial Sequence: Synthetic oligonucleotide
ugcucauuaccaacugcau

SEQ ID NO: 328484 - RNA, 19 nt, Artificial Sequence
  Description of Artificial Sequence: Synthetic oligonucleotide
uuucuaagucauccagaua

SEQ ID NO: 328485 - RNA, 19 nt, Artificial Sequence
  Description of Artificial Sequence: Synthetic oligonucleotide
augguuugcacaaacuuua

SEQ ID NO: 328486 - RNA, 19 nt, Artificial Sequence
  Description of Artificial Sequence: Synthetic oligonucleotide
ucgaucuuucucacaguau

SEQ ID NO: 328487 - RNA, 19 nt, Artificial Sequence
  Description of Artificial Sequence: Synthetic oligonucleotide
uucugacuuugccauccga

SEQ ID NO: 328488 - RNA, 19 nt, Artificial Sequence
  Description of Artificial Sequence: Synthetic oligonucleotide
auggacuguccuccuguuc

SEQ ID NO: 328489 - RNA, 19 nt, Artificial Sequence
  Description of Artificial Sequence: Synthetic oligonucleotide
uggguucaaaaugaauauc

SEQ ID NO: 328490 - RNA, 19 nt, Artificial Sequence
  Description of Artificial Sequence: Synthetic oligonucleotide
agcaauuuugccacauggu

SEQ ID NO: 328491 - RNA, 19 nt, Artificial Sequence
  Description of Artificial Sequence: Synthetic oligonucleotide
cauuaggauccgauaauaa

SEQ ID NO: 328492 - RNA, 19 nt, Artificial Sequence
  Description of Artificial Sequence: Synthetic oligonucleotide
aggauccgauaauaauucu

SEQ ID NO: 328493 - RNA, 19 nt, Artificial Sequence
  Description of Artificial Sequence: Synthetic oligonucleotide
accaugcaagaucaauuau

SEQ ID NO: 328494 - RNA, 19 nt, Artificial Sequence
  Description of Artificial Sequence: Synthetic oligonucleotide
agguucuacuuuuccuuca

SEQ ID NO: 328495 - RNA, 19 nt, Artificial Sequence
  Description of Artificial Sequence: Synthetic oligonucleotide
agugucaccuggaugcuca

SEQ ID NO: 328496 - RNA, 19 nt, Artificial Sequence
  Description of Artificial Sequence: Synthetic oligonucleotide
ugguuugcacaaacuuuaa

SEQ ID NO: 328497 - RNA, 19 nt, Artificial Sequence
  Description of Artificial Sequence: Synthetic oligonucleotide
cagacccuuuaggagaacc

SEQ ID NO: 328498 - RNA, 19 nt, Artificial Sequence
  Description of Artificial Sequence: Synthetic oligonucleotide
gguaucccggccccgauug

SEQ ID NO: 328499 - RNA, 19 nt, Artificial Sequence
  Description of Artificial Sequence: Synthetic oligonucleotide
aacuauugccaaacgcaaa

SEQ ID NO: 328500 - RNA, 19 nt, Artificial Sequence
  Description of Artificial Sequence: Synthetic oligonucleotide
cccuuuaggagaaccaaac

SEQ ID NO: 328501 - RNA, 19 nt, Artificial Sequence
  Description of Artificial Sequence: Synthetic oligonucleotide
gaaucagauucuucagacu

SEQ ID NO: 328502 - RNA, 19 nt, Artificial Sequence
  Description of Artificial Sequence: Synthetic oligonucleotide
ugggagcuucaaaguaucu

SEQ ID NO: 328503 - RNA, 19 nt, Artificial Sequence
  Description of Artificial Sequence: Synthetic oligonucleotide
ugccauccgaagacugucu

SEQ ID NO: 328504 - RNA, 19 nt, Artificial Sequence
  Description of Artificial Sequence: Synthetic oligonucleotide
cuuauagacaaaagaguuu

SEQ ID NO: 328505 - RNA, 19 nt, Artificial Sequence
  Description of Artificial Sequence: Synthetic oligonucleotide
auucaacuguuuauauaga

SEQ ID NO: 328506 - RNA, 19 nt, Artificial Sequence
  Description of Artificial Sequence: Synthetic oligonucleotide
cagauagaguuuuccauua

SEQ ID NO: 328507 - RNA, 19 nt, Artificial Sequence
  Description of Artificial Sequence: Synthetic oligonucleotide
cuauuaccucaucucccug

SEQ ID NO: 328508 - RNA, 19 nt, Artificial Sequence
  Description of Artificial Sequence: Synthetic oligonucleotide
aaaauguaggugggagcuu

SEQ ID NO: 328509 - RNA, 19 nt, Artificial Sequence
  Description of Artificial Sequence: Synthetic oligonucleotide
acacucagucauuucuuuu

SEQ ID NO: 328510 - RNA, 19 nt, Artificial Sequence
  Description of Artificial Sequence: Synthetic oligonucleotide
acaccaugcaagaucaauu

SEQ ID NO: 328511 - RNA, 19 nt, Artificial Sequence
  Description of Artificial Sequence: Synthetic oligonucleotide
ugggacuuccgugucaauu

SEQ ID NO: 328512 - RNA, 19 nt, Artificial Sequence
  Description of Artificial Sequence: Synthetic oligonucleotide
aggauuggucuccuuugau

SEQ ID NO: 328513 - RNA, 19 nt, Artificial Sequence
  Description of Artificial Sequence: Synthetic oligonucleotide
gugcuuuaaauguguaacu

SEQ ID NO: 328514 - RNA, 19 nt, Artificial Sequence
  Description of Artificial Sequence: Synthetic oligonucleotide
cagauccacucugaacugc

SEQ ID NO: 328515 - RNA, 19 nt, Artificial Sequence
  Description of Artificial Sequence: Synthetic oligonucleotide
uaucccggccccgauuggc

SEQ ID NO: 328516 - RNA, 19 nt, Artificial Sequence
  Description of Artificial Sequence: Synthetic oligonucleotide
agauccacucugaacugcu

SEQ ID NO: 328517 - RNA, 19 nt, Artificial Sequence
  Description of Artificial Sequence: Synthetic oligonucleotide
uggcucucucuuugaauaa

SEQ ID NO: 328518 - RNA, 19 nt, Artificial Sequence
  Description of Artificial Sequence: Synthetic oligonucleotide
cuggccuauucuuguaaca

SEQ ID NO: 328519 - RNA, 19 nt, Artificial Sequence
  Description of Artificial Sequence: Synthetic oligonucleotide
acuauggguucaaaaugaa

SEQ ID NO: 328520 - RNA, 19 nt, Artificial Sequence
  Description of Artificial Sequence: Synthetic oligonucleotide
caaacgauucgaucuuucu

SEQ ID NO: 328521 - RNA, 19 nt, Artificial Sequence
  Description of Artificial Sequence: Synthetic oligonucleotide
agcccuguaccacuuccaa

SEQ ID NO: 328522 - RNA, 19 nt, Artificial Sequence
  Description of Artificial Sequence: Synthetic oligonucleotide
gcuauaagcuacaauuuua

SEQ ID NO: 328523 - RNA, 19 nt, Artificial Sequence
  Description of Artificial Sequence: Synthetic oligonucleotide
cacuaacauaaucuggccu

SEQ ID NO: 328524 - RNA, 19 nt, Artificial Sequence
  Description of Artificial Sequence: Synthetic oligonucleotide
auuugcuguuagaaucaga

SEQ ID NO: 328525 - RNA, 19 nt, Artificial Sequence
  Description of Artificial Sequence: Synthetic oligonucleotide
uucgacuaacagacccuuu

SEQ ID NO: 328526 - RNA, 19 nt, Artificial Sequence
  Description of Artificial Sequence: Synthetic oligonucleotide
ccucauuaugaacuacuuc

SEQ ID NO: 328527 - RNA, 19 nt, Artificial Sequence
  Description of Artificial Sequence: Synthetic oligonucleotide
gccccgauuggccauggag

SEQ ID NO: 328528 - RNA, 19 nt, Artificial Sequence
  Description of Artificial Sequence: Synthetic oligonucleotide
uuccaauggucuguauuuu

SEQ ID NO: 328529 - RNA, 19 nt, Artificial Sequence
  Description of Artificial Sequence: Synthetic oligonucleotide
ccaguauuggcccacugga

SEQ ID NO: 328530 - RNA, 19 nt, Artificial Sequence
  Description of Artificial Sequence: Synthetic oligonucleotide
ucaccgcaagcuguucuac

SEQ ID NO: 328531 - RNA, 19 nt, Artificial Sequence
  Description of Artificial Sequence: Synthetic oligonucleotide
cacacuugucagguucuac

SEQ ID NO: 328532 - RNA, 19 nt, Artificial Sequence
  Description of Artificial Sequence: Synthetic oligonucleotide
gcaagccagggccagugug

SEQ ID NO: 328533 - RNA, 19 nt, Artificial Sequence
  Description of Artificial Sequence: Synthetic oligonucleotide
cucugguagugagacuaug

SEQ ID NO: 328534 - RNA, 19 nt, Artificial Sequence
  Description of Artificial Sequence: Synthetic oligonucleotide
uccguccuagagguucacc

SEQ ID NO: 328535 - RNA, 19 nt, Artificial Sequence
  Description of Artificial Sequence: Synthetic oligonucleotide
ggagaaccaaacgauucga

SEQ ID NO: 328536 - RNA, 19 nt, Artificial Sequence
  Description of Artificial Sequence: Synthetic oligonucleotide
guaucccggccccgauugg

SEQ ID NO: 328537 - RNA, 19 nt, Artificial Sequence
  Description of Artificial Sequence: Synthetic oligonucleotide
aguauccaugccauccuua

SEQ ID NO: 328538 - RNA, 19 nt, Artificial Sequence
  Description of Artificial Sequence: Synthetic oligonucleotide
cuauggguucaaaaugaau

SEQ ID NO: 328539 - RNA, 19 nt, Artificial Sequence
  Description of Artificial Sequence: Synthetic oligonucleotide
ugacagcccuguaccacuu

SEQ ID NO: 328540 - RNA, 19 nt, Artificial Sequence
  Description of Artificial Sequence: Synthetic oligonucleotide
cucauuaggauccgauaau

SEQ ID NO: 328541 - RNA, 19 nt, Artificial Sequence
  Description of Artificial Sequence: Synthetic oligonucleotide
cucuugugguuucuucuaa

SEQ ID NO: 328542 - RNA, 19 nt, Artificial Sequence
  Description of Artificial Sequence: Synthetic oligonucleotide
ccaaacgauucgaucuuuc

SEQ ID NO: 328543 - RNA, 19 nt, Artificial Sequence
  Description of Artificial Sequence: Synthetic oligonucleotide
aucucaccgcaagcuguuc

SEQ ID NO: 328544 - RNA, 19 nt, Artificial Sequence
  Description of Artificial Sequence: Synthetic oligonucleotide
gccauccgaagacugucug

SEQ ID NO: 328545 - RNA, 19 nt, Artificial Sequence
  Description of Artificial Sequence: Synthetic oligonucleotide
caauaccucucuccuucca

SEQ ID NO: 328546 - RNA, 19 nt, Artificial Sequence
  Description of Artificial Sequence: Synthetic oligonucleotide
cuugggacuuccgugucaa

SEQ ID NO: 328547 - RNA, 19 nt, Artificial Sequence
  Description of Artificial Sequence: Synthetic oligonucleotide
caguauuggcccacuggaa

SEQ ID NO: 328548 - RNA, 19 nt, Artificial Sequence
  Description of Artificial Sequence: Synthetic oligonucleotide
uaacauaaucuggccuauu

SEQ ID NO: 328549 - RNA, 19 nt, Artificial Sequence
  Description of Artificial Sequence: Synthetic oligonucleotide
cucccugaguuaaaucugu

SEQ ID NO: 328550 - RNA, 19 nt, Artificial Sequence
  Description of Artificial Sequence: Synthetic oligonucleotide
ggacuuccgugucaauuuc

SEQ ID NO: 328551 - RNA, 19 nt, Artificial Sequence
  Description of Artificial Sequence: Synthetic oligonucleotide
guaucacugcagacuccgc

SEQ ID NO: 328552 - RNA, 19 nt, Artificial Sequence
  Description of Artificial Sequence: Synthetic oligonucleotide
cgacuaacagacccuuuag

SEQ ID NO: 328553 - RNA, 19 nt, Artificial Sequence
  Description of Artificial Sequence: Synthetic oligonucleotide
ccaaacgcaaauggcuuug

SEQ ID NO: 328554 - RNA, 19 nt, Artificial Sequence
  Description of Artificial Sequence: Synthetic oligonucleotide
ccguccuagagguucacca

SEQ ID NO: 328555 - RNA, 19 nt, Artificial Sequence
  Description of Artificial Sequence: Synthetic oligonucleotide
cucaccgcaagcuguucua

SEQ ID NO: 328556 - RNA, 19 nt, Artificial Sequence
  Description of Artificial Sequence: Synthetic oligonucleotide
cuaucccaucuauaaaguu

SEQ ID NO: 328557 - RNA, 19 nt, Artificial Sequence
  Description of Artificial Sequence: Synthetic oligonucleotide
accaaacgauucgaucuuu

SEQ ID NO: 328558 - RNA, 19 nt, Artificial Sequence
  Description of Artificial Sequence: Synthetic oligonucleotide
gagaaccaaacgauucgau

SEQ ID NO: 328559 - RNA, 19 nt, Artificial Sequence
  Description of Artificial Sequence: Synthetic oligonucleotide
caaacgcaaauggcuuuga

SEQ ID NO: 328560 - RNA, 19 nt, Artificial Sequence
  Description of Artificial Sequence: Synthetic oligonucleotide
ccacacuaaagcauuauuu

SEQ ID NO: 328561 - RNA, 19 nt, Artificial Sequence
  Description of Artificial Sequence: Synthetic oligonucleotide
ccgauaauaauucuucauu

SEQ ID NO: 328562 - RNA, 19 nt, Artificial Sequence
  Description of Artificial Sequence: Synthetic oligonucleotide
cacaaaucuacaggcuugu

SEQ ID NO: 328563 - RNA, 19 nt, Artificial Sequence
  Description of Artificial Sequence: Synthetic oligonucleotide
cugcugcgagggauacuug

SEQ ID NO: 328564 - RNA, 19 nt, Artificial Sequence
  Description of Artificial Sequence: Synthetic oligonucleotide
cugcuagauuuucuuccaa

SEQ ID NO: 328565 - RNA, 19 nt, Artificial Sequence
  Description of Artificial Sequence: Synthetic oligonucleotide
cagcccuguaccacuucca

SEQ ID NO: 328566 - RNA, 19 nt, Artificial Sequence
  Description of Artificial Sequence: Synthetic oligonucleotide
gacuuccgugucaauuucu

SEQ ID NO: 328567 - RNA, 19 nt, Artificial Sequence
  Description of Artificial Sequence: Synthetic oligonucleotide
gcaguuugaggaacgauau

SEQ ID NO: 328568 - RNA, 19 nt, Artificial Sequence
  Description of Artificial Sequence: Synthetic oligonucleotide
ccgaagacugucugauguc

SEQ ID NO: 328569 - RNA, 19 nt, Artificial Sequence
  Description of Artificial Sequence: Synthetic oligonucleotide
agagcaagccagggccagu

SEQ ID NO: 328570 - RNA, 19 nt, Artificial Sequence
  Description of Artificial Sequence: Synthetic oligonucleotide
gggacuuccgugucaauuu

SEQ ID NO: 328571 - RNA, 19 nt, Artificial Sequence
  Description of Artificial Sequence: Synthetic oligonucleotide
cacaccaugcaagaucaau

SEQ ID NO: 328572 - RNA, 19 nt, Artificial Sequence
  Description of Artificial Sequence: Synthetic oligonucleotide
cacuucuaccucugguagu

SEQ ID NO: 328573 - RNA, 19 nt, Artificial Sequence
  Description of Artificial Sequence: Synthetic oligonucleotide
cauuaccaacugcaucagu

SEQ ID NO: 328574 - RNA, 19 nt, Artificial Sequence
  Description of Artificial Sequence: Synthetic oligonucleotide
ggauccgauaauaauucuu

SEQ ID NO: 328575 - RNA, 19 nt, Artificial Sequence
  Description of Artificial Sequence: Synthetic oligonucleotide
ggugggagcuucaaaguau

SEQ ID NO: 328576 - RNA, 19 nt, Artificial Sequence
  Description of Artificial Sequence: Synthetic oligonucleotide
gcugcgagggauacuuguc

SEQ ID NO: 328577 - RNA, 19 nt, Artificial Sequence
  Description of Artificial Sequence: Synthetic oligonucleotide
cuauaaaguuuggcucucu

SEQ ID NO: 328578 - RNA, 19 nt, Artificial Sequence
  Description of Artificial Sequence: Synthetic oligonucleotide
ccauccgaagacugucuga

SEQ ID NO: 328579 - RNA, 19 nt, Artificial Sequence
  Description of Artificial Sequence: Synthetic oligonucleotide
auuauccguccuagagguu

SEQ ID NO: 328580 - RNA, 19 nt, Artificial Sequence
  Description of Artificial Sequence: Synthetic oligonucleotide
guccacauucugugauacu

SEQ ID NO: 328581 - RNA, 19 nt, Artificial Sequence
  Description of Artificial Sequence: Synthetic oligonucleotide
cuucuaccucugguaguga

SEQ ID NO: 328582 - RNA, 19 nt, Artificial Sequence
  Description of Artificial Sequence: Synthetic oligonucleotide
cugaggcaguccacacuaa

SEQ ID NO: 328583 - RNA, 19 nt, Artificial Sequence
  Description of Artificial Sequence: Synthetic oligonucleotide
cagcauaaucugaggcagu

SEQ ID NO: 328584 - RNA, 19 nt, Artificial Sequence
  Description of Artificial Sequence: Synthetic oligonucleotide
cuuccgugucaauuucuuu

SEQ ID NO: 328585 - RNA, 19 nt, Artificial Sequence
  Description of Artificial Sequence: Synthetic oligonucleotide
cuucgacuaacagacccuu

SEQ ID NO: 328586 - RNA, 19 nt, Artificial Sequence
  Description of Artificial Sequence: Synthetic oligonucleotide
gugagacuauggguucaaa

SEQ ID NO: 328587 - RNA, 19 nt, Artificial Sequence
  Description of Artificial Sequence: Synthetic oligonucleotide
caccgcaagcuguucuacu

SEQ ID NO: 328588 - RNA, 19 nt, Artificial Sequence
  Description of Artificial Sequence: Synthetic oligonucleotide
cgugucaauuucuuuucua

SEQ ID NO: 328589 - RNA, 19 nt, Artificial Sequence
  Description of Artificial Sequence: Synthetic oligonucleotide
ccgauuggccauggagagc

SEQ ID NO: 328590 - RNA, 19 nt, Artificial Sequence
  Description of Artificial Sequence: Synthetic oligonucleotide
cuucaacuguuuggcuucu

SEQ ID NO: 328591 - RNA, 19 nt, Artificial Sequence
  Description of Artificial Sequence: Synthetic oligonucleotide
cuggaacuacucggugaaa

SEQ ID NO: 328592 - RNA, 19 nt, Artificial Sequence
  Description of Artificial Sequence: Synthetic oligonucleotide
caguauccaugccauccuu

SEQ ID NO: 328593 - RNA, 19 nt, Artificial Sequence
  Description of Artificial Sequence: Synthetic oligonucleotide
cagcaguuugaggaacgau

SEQ ID NO: 328594 - RNA, 19 nt, Artificial Sequence
  Description of Artificial Sequence: Synthetic oligonucleotide
gcgagggauacuuguccau

SEQ ID NO: 328595 - RNA, 19 nt, Artificial Sequence
  Description of Artificial Sequence: Synthetic oligonucleotide
ccgugucaauuucuuuucu

SEQ ID NO: 328596 - RNA, 19 nt, Artificial Sequence
  Description of Artificial Sequence: Synthetic oligonucleotide
ccuccucuggacagguaau

SEQ ID NO: 328597 - RNA, 19 nt, Artificial Sequence
  Description of Artificial Sequence: Synthetic oligonucleotide
ccgcaagcuguucuacuuu

SEQ ID NO: 328598 - RNA, 19 nt, Artificial Sequence
  Description of Artificial Sequence: Synthetic oligonucleotide
cgcaaauggcuuugauuuu

SEQ ID NO: 328599 - RNA, 19 nt, Artificial Sequence
  Description of Artificial Sequence: Synthetic oligonucleotide
ccggccccgauuggccaug

SEQ ID NO: 328600 - RNA, 19 nt, Artificial Sequence
  Description of Artificial Sequence: Synthetic oligonucleotide
cgagggauacuuguccauu

SEQ ID NO: 328601 - RNA, 19 nt, Artificial Sequence
  Description of Artificial Sequence: Synthetic oligonucleotide
cggccccgauuggccaugg

SEQ ID NO: 328602 - RNA, 19 nt, Artificial Sequence
  Description of Artificial Sequence: Synthetic oligonucleotide
aauguaucagccuuuaagc

SEQ ID NO: 328603 - RNA, 19 nt, Artificial Sequence
  Description of Artificial Sequence: Synthetic oligonucleotide
auaaaguuaaauuaggagg

SEQ ID NO: 328604 - RNA, 19 nt, Artificial Sequence
  Description of Artificial Sequence: Synthetic oligonucleotide
auuggauuaauauacacac

SEQ ID NO: 328605 - RNA, 19 nt, Artificial Sequence
  Description of Artificial Sequence: Synthetic oligonucleotide
aauaccacuucacuggucc

SEQ ID NO: 328606 - RNA, 19 nt, Artificial Sequence
  Description of Artificial Sequence: Synthetic oligonucleotide
uuugcgaucaaacaaauca

SEQ ID NO: 328607 - RNA, 19 nt, Artificial Sequence
  Description of Artificial Sequence: Synthetic oligonucleotide
aauaaaacuaaauaggcuu

SEQ ID NO: 328608 - RNA, 19 nt, Artificial Sequence
  Description of Artificial Sequence: Synthetic oligonucleotide
acaaugauaaacaaugucc

SEQ ID NO: 328609 - RNA, 19 nt, Artificial Sequence
  Description of Artificial Sequence: Synthetic oligonucleotide
ugaaguuucacacuuacga

SEQ ID NO: 328610 - RNA, 19 nt, Artificial Sequence
  Description of Artificial Sequence: Synthetic oligonucleotide
ugauaagaaauacagauau

SEQ ID NO: 328611 - RNA, 19 nt, Artificial Sequence
  Description of Artificial Sequence: Synthetic oligonucleotide
agauauugcauguauuuac

SEQ ID NO: 328612 - RNA, 19 nt, Artificial Sequence
  Description of Artificial Sequence: Synthetic oligonucleotide
aauuaugugcaauuauuug

SEQ ID NO: 328613 - RNA, 19 nt, Artificial Sequence
  Description of Artificial Sequence: Synthetic oligonucleotide
cauaaaguuaaauuaggag

SEQ ID NO: 328614 - RNA, 19 nt, Artificial Sequence
  Description of Artificial Sequence: Synthetic oligonucleotide
aaacuaaauaggcuuauga

SEQ ID NO: 328615 - RNA, 19 nt, Artificial Sequence
  Description of Artificial Sequence: Synthetic oligonucleotide
gagacuaaugugcacagcg

SEQ ID NO: 328616 - RNA, 19 nt, Artificial Sequence
  Description of Artificial Sequence: Synthetic oligonucleotide
ugaacuuuuggcuaauaag

SEQ ID NO: 328617 - RNA, 19 nt, Artificial Sequence
  Description of Artificial Sequence: Synthetic oligonucleotide
aauacuguaaagaaguggu

SEQ ID NO: 328618 - RNA, 19 nt, Artificial Sequence
  Description of Artificial Sequence: Synthetic oligonucleotide
caguauacaaauagaaugg

SEQ ID NO: 328619 - RNA, 19 nt, Artificial Sequence
  Description of Artificial Sequence: Synthetic oligonucleotide
uguacuauccauugggaag

SEQ ID NO: 328620 - RNA, 19 nt, Artificial Sequence
  Description of Artificial Sequence: Synthetic oligonucleotide
uuuuaaucacgagacagcg

SEQ ID NO: 328621 - RNA, 19 nt, Artificial Sequence
  Description of Artificial Sequence: Synthetic oligonucleotide
auuaugugcaauuauuuga

SEQ ID NO: 328622 - RNA, 19 nt, Artificial Sequence
  Description of Artificial Sequence: Synthetic oligonucleotide
ugcuguacuauccauuggg

SEQ ID NO: 328623 - RNA, 19 nt, Artificial Sequence
  Description of Artificial Sequence: Synthetic oligonucleotide
aacuacacaacaaacagcu

SEQ ID NO: 328624 - RNA, 19 nt, Artificial Sequence
  Description of Artificial Sequence: Synthetic oligonucleotide
aauaccuguaaauucaaua

SEQ ID NO: 328625 - RNA, 19 nt, Artificial Sequence
  Description of Artificial Sequence: Synthetic oligonucleotide
uauucauagucaaacauau

SEQ ID NO: 328626 - RNA, 19 nt, Artificial Sequence
  Description of Artificial Sequence: Synthetic oligonucleotide
uuuaaguccauaauuggau

SEQ ID NO: 328627 - RNA, 19 nt, Artificial Sequence
  Description of Artificial Sequence: Synthetic oligonucleotide
auaacaguaccauaaguca

SEQ ID NO: 328628 - RNA, 19 nt, Artificial Sequence
  Description of Artificial Sequence: Synthetic oligonucleotide
aguuuagacaucaugacag

SEQ ID NO: 328629 - RNA, 19 nt, Artificial Sequence
  Description of Artificial Sequence: Synthetic oligonucleotide
aauuuggucaaauacugua

SEQ ID NO: 328630 - RNA, 19 nt, Artificial Sequence
  Description of Artificial Sequence: Synthetic oligonucleotide
uuaaucacgagacagcgua

SEQ ID NO: 328631 - RNA, 19 nt, Artificial Sequence
  Description of Artificial Sequence: Synthetic oligonucleotide
auuauuugacacuuggaca

SEQ ID NO: 328632 - RNA, 19 nt, Artificial Sequence
  Description of Artificial Sequence: Synthetic oligonucleotide
uuaugugcaauuauuugac

SEQ ID NO: 328633 - RNA, 19 nt, Artificial Sequence
  Description of Artificial Sequence: Synthetic oligonucleotide
uauuauuagugcuucugcc

SEQ ID NO: 328634 - RNA, 19 nt, Artificial Sequence
  Description of Artificial Sequence: Synthetic oligonucleotide
ucauacugaaaucaaugca

SEQ ID NO: 328635 - RNA, 19 nt, Artificial Sequence
  Description of Artificial Sequence: Synthetic oligonucleotide
uuuucaaacuccagcauac

SEQ ID NO: 328636 - RNA, 19 nt, Artificial Sequence
  Description of Artificial Sequence: Synthetic oligonucleotide
ugacauuguacaaauauua

SEQ ID NO: 328637 - RNA, 19 nt, Artificial Sequence
  Description of Artificial Sequence: Synthetic oligonucleotide
cauaccugaaguuucacac

SEQ ID NO: 328638 - RNA, 19 nt, Artificial Sequence
  Description of Artificial Sequence: Synthetic oligonucleotide
uccauaauuggauuaauau

SEQ ID NO: 328639 - RNA, 19 nt, Artificial Sequence
  Description of Artificial Sequence: Synthetic oligonucleotide
ugaauguaagacaaccaca

SEQ ID NO: 328640 - RNA, 19 nt, Artificial Sequence
  Description of Artificial Sequence: Synthetic oligonucleotide
auauuuaaguccauaauug

SEQ ID NO: 328641 - RNA, 19 nt, Artificial Sequence
  Description of Artificial Sequence: Synthetic oligonucleotide
ucauagacacacaaauuug

SEQ ID NO: 328642 - RNA, 19 nt, Artificial Sequence
  Description of Artificial Sequence: Synthetic oligonucleotide
ugacaguauacaaauagaa

SEQ ID NO: 328643 - RNA, 19 nt, Artificial Sequence
  Description of Artificial Sequence: Synthetic oligonucleotide
auagaauggaaacugcuga

SEQ ID NO: 328644 - RNA, 19 nt, Artificial Sequence
  Description of Artificial Sequence: Synthetic oligonucleotide
guauaaggaguucagauca

SEQ ID NO: 328645 - RNA, 19 nt, Artificial Sequence
  Description of Artificial Sequence: Synthetic oligonucleotide
cuaaauaggcuuaugauaa

SEQ ID NO: 328646 - RNA, 19 nt, Artificial Sequence
  Description of Artificial Sequence: Synthetic oligonucleotide
uuuaaauguuacuuugaga

SEQ ID NO: 328647 - RNA, 19 nt, Artificial Sequence
  Description of Artificial Sequence: Synthetic oligonucleotide
aucauagacacacaaauuu

SEQ ID NO: 328648 - RNA, 19 nt, Artificial Sequence
  Description of Artificial Sequence: Synthetic oligonucleotide
cuuagguaaucauagucag

SEQ ID NO: 328649 - RNA, 19 nt, Artificial Sequence
  Description of Artificial Sequence: Synthetic oligonucleotide
aauuggauuaauauacaca

SEQ ID NO: 328650 - RNA, 19 nt, Artificial Sequence
  Description of Artificial Sequence: Synthetic oligonucleotide
uacgacagagaauacaaga

SEQ ID NO: 328651 - RNA, 19 nt, Artificial Sequence
  Description of Artificial Sequence: Synthetic oligonucleotide
ugauuaugcuuuuauagaa

SEQ ID NO: 328652 - RNA, 19 nt, Artificial Sequence
  Description of Artificial Sequence: Synthetic oligonucleotide
auuuuaaucacgagacagc

SEQ ID NO: 328653 - RNA, 19 nt, Artificial Sequence
  Description of Artificial Sequence: Synthetic oligonucleotide
ugaacauauggccuagagc

SEQ ID NO: 328654 - RNA, 19 nt, Artificial Sequence
  Description of Artificial Sequence: Synthetic oligonucleotide
uuaugauaagaaauacaga

SEQ ID NO: 328655 - RNA, 19 nt, Artificial Sequence
  Description of Artificial Sequence: Synthetic oligonucleotide
acauauauccuuugcgauc

SEQ ID NO: 328656 - RNA, 19 nt, Artificial Sequence
  Description of Artificial Sequence: Synthetic oligonucleotide
aauagaauggaaacugcug

SEQ ID NO: 328657 - RNA, 19 nt, Artificial Sequence
  Description of Artificial Sequence: Synthetic oligonucleotide
auaugauucaugaauaaca

SEQ ID NO: 328658 - RNA, 19 nt, Artificial Sequence
  Description of Artificial Sequence: Synthetic oligonucleotide
ucugauaccucucuuuuaa

SEQ ID NO: 328659 - RNA, 19 nt, Artificial Sequence
  Description of Artificial Sequence: Synthetic oligonucleotide
acuaaauaggcuuaugaua

SEQ ID NO: 328660 - RNA, 19 nt, Artificial Sequence
  Description of Artificial Sequence: Synthetic oligonucleotide
aguaccuaugggcagugac

SEQ ID NO: 328661 - RNA, 19 nt, Artificial Sequence
  Description of Artificial Sequence: Synthetic oligonucleotide
uuauuagugcuucugccac

SEQ ID NO: 328662 - RNA, 19 nt, Artificial Sequence
  Description of Artificial Sequence: Synthetic oligonucleotide
cauagagugacauuguaca

SEQ ID NO: 328663 - RNA, 19 nt, Artificial Sequence
  Description of Artificial Sequence: Synthetic oligonucleotide
uugcgaucaaacaaaucag

SEQ ID NO: 328664 - RNA, 19 nt, Artificial Sequence
  Description of Artificial Sequence: Synthetic oligonucleotide
ugaacauaccugcauuacc

SEQ ID NO: 328665 - RNA, 19 nt, Artificial Sequence
  Description of Artificial Sequence: Synthetic oligonucleotide
auuauuagugcuucugcca

SEQ ID NO: 328666 - RNA, 19 nt, Artificial Sequence
  Description of Artificial Sequence: Synthetic oligonucleotide
uuaacucuccguuuggacu

SEQ ID NO: 328667 - RNA, 19 nt, Artificial Sequence
  Description of Artificial Sequence: Synthetic oligonucleotide
uguauaaggaguucagauc

SEQ ID NO: 328668 - RNA, 19 nt, Artificial Sequence
  Description of Artificial Sequence: Synthetic oligonucleotide
uaauuggauuaauauacac

SEQ ID NO: 328669 - RNA, 19 nt, Artificial Sequence
  Description of Artificial Sequence: Synthetic oligonucleotide
auguaaguaacuccccagg

SEQ ID NO: 328670 - RNA, 19 nt, Artificial Sequence
  Description of Artificial Sequence: Synthetic oligonucleotide
cagcguaugaacauguaag

SEQ ID NO: 328671 - RNA, 19 nt, Artificial Sequence
  Description of Artificial Sequence: Synthetic oligonucleotide
uguuucaagagugaguccu

SEQ ID NO: 328672 - RNA, 19 nt, Artificial Sequence
  Description of Artificial Sequence: Synthetic oligonucleotide
ugcauuaccuauuaccagu

SEQ ID NO: 328673 - RNA, 19 nt, Artificial Sequence
  Description of Artificial Sequence: Synthetic oligonucleotide
auuaccuauuaccagucug

SEQ ID NO: 328674 - RNA, 19 nt, Artificial Sequence
  Description of Artificial Sequence: Synthetic oligonucleotide
aagaacuacacaacaaaca

SEQ ID NO: 328675 - RNA, 19 nt, Artificial Sequence
  Description of Artificial Sequence: Synthetic oligonucleotide
aggaguucagaucauauaa

SEQ ID NO: 328676 - RNA, 19 nt, Artificial Sequence
  Description of Artificial Sequence: Synthetic oligonucleotide
aagaagugguuucacauua

SEQ ID NO: 328677 - RNA, 19 nt, Artificial Sequence
  Description of Artificial Sequence: Synthetic oligonucleotide
auucgucguguucauaugg

SEQ ID NO: 328678 - RNA, 19 nt, Artificial Sequence
  Description of Artificial Sequence: Synthetic oligonucleotide
uccuguuugauuaugcuuu

SEQ ID NO: 328679 - RNA, 19 nt, Artificial Sequence
  Description of Artificial Sequence: Synthetic oligonucleotide
aaaacaagcagcaccacau

SEQ ID NO: 328680 - RNA, 19 nt, Artificial Sequence
  Description of Artificial Sequence: Synthetic oligonucleotide
uguuuaacucuccguuugg

SEQ ID NO: 328681 - RNA, 19 nt, Artificial Sequence
  Description of Artificial Sequence: Synthetic oligonucleotide
uuuaacuccugcaguuuag

SEQ ID NO: 328682 - RNA, 19 nt, Artificial Sequence
  Description of Artificial Sequence: Synthetic oligonucleotide
ugcucauguaucuagcugu

SEQ ID NO: 328683 - RNA, 19 nt, Artificial Sequence
  Description of Artificial Sequence: Synthetic oligonucleotide
uggucaaauacuguaaaga

SEQ ID NO: 328684 - RNA, 19 nt, Artificial Sequence
  Description of Artificial Sequence: Synthetic oligonucleotide
aacauguaaguaacucccc

SEQ ID NO: 328685 - RNA, 19 nt, Artificial Sequence
  Description of Artificial Sequence: Synthetic oligonucleotide
uuacacagcaaaaugcuuu

SEQ ID NO: 328686 - RNA, 19 nt, Artificial Sequence
  Description of Artificial Sequence: Synthetic oligonucleotide
auguauaaggaguucagau

SEQ ID NO: 328687 - RNA, 19 nt, Artificial Sequence
  Description of Artificial Sequence: Synthetic oligonucleotide
cauccagucauuugugacg

SEQ ID NO: 328688 - RNA, 19 nt, Artificial Sequence
  Description of Artificial Sequence: Synthetic oligonucleotide
aaucaaugcagauguuaca

SEQ ID NO: 328689 - RNA, 19 nt, Artificial Sequence
  Description of Artificial Sequence: Synthetic oligonucleotide
ucuaccuugcucaaagcaa

SEQ ID NO: 328690 - RNA, 19 nt, Artificial Sequence
  Description of Artificial Sequence: Synthetic oligonucleotide
aaauagaauggaaacugcu

SEQ ID NO: 328691 - RNA, 19 nt, Artificial Sequence
  Description of Artificial Sequence: Synthetic oligonucleotide
aaagcaacacauugaacuu

SEQ ID NO: 328692 - RNA, 19 nt, Artificial Sequence
  Description of Artificial Sequence: Synthetic oligonucleotide
uaagcauaccugaaguuuc

SEQ ID NO: 328693 - RNA, 19 nt, Artificial Sequence
  Description of Artificial Sequence: Synthetic oligonucleotide
gaugggcggcguuugaucg

SEQ ID NO: 328694 - RNA, 19 nt, Artificial Sequence
  Description of Artificial Sequence: Synthetic oligonucleotide
uucgucguguucauauggg

SEQ ID NO: 328695 - RNA, 19 nt, Artificial Sequence
  Description of Artificial Sequence: Synthetic oligonucleotide
uugccaaucccauagugcu

SEQ ID NO: 328696 - RNA, 19 nt, Artificial Sequence
  Description of Artificial Sequence: Synthetic oligonucleotide
cuugccaaucccauagugc

SEQ ID NO: 328697 - RNA, 19 nt, Artificial Sequence
  Description of Artificial Sequence: Synthetic oligonucleotide
cuuaaccugaacauaccug

SEQ ID NO: 328698 - RNA, 19 nt, Artificial Sequence
  Description of Artificial Sequence: Synthetic oligonucleotide
uuggucaaauacuguaaag

SEQ ID NO: 328699 - RNA, 19 nt, Artificial Sequence
  Description of Artificial Sequence: Synthetic oligonucleotide
aaauuaugugcaauuauuu

SEQ ID NO: 328700 - RNA, 19 nt, Artificial Sequence
  Description of Artificial Sequence: Synthetic oligonucleotide
uaacucuccguuuggacug

SEQ ID NO: 328701 - RNA, 19 nt, Artificial Sequence
  Description of Artificial Sequence: Synthetic oligonucleotide
augauaaacaauguccuga

SEQ ID NO: 328702 - RNA, 19 nt, Artificial Sequence
  Description of Artificial Sequence: Synthetic oligonucleotide
uuggauuaauauacacacc

SEQ ID NO: 328703 - RNA, 19 nt, Artificial Sequence
  Description of Artificial Sequence: Synthetic oligonucleotide
agaaugucaauaugauuca

SEQ ID NO: 328704 - RNA, 19 nt, Artificial Sequence
  Description of Artificial Sequence: Synthetic oligonucleotide
augaacauauggccuagag

SEQ ID NO: 328705 - RNA, 19 nt, Artificial Sequence
  Description of Artificial Sequence: Synthetic oligonucleotide
ugauucgucguguucauau

SEQ ID NO: 328706 - RNA, 19 nt, Artificial Sequence
  Description of Artificial Sequence: Synthetic oligonucleotide
uaagucauacugaaaucaa

SEQ ID NO: 328707 - RNA, 19 nt, Artificial Sequence
  Description of Artificial Sequence: Synthetic oligonucleotide
uugaacuuuuggcuaauaa

SEQ ID NO: 328708 - RNA, 19 nt, Artificial Sequence
  Description of Artificial Sequence: Synthetic oligonucleotide
aggggcucuagccuuacac

SEQ ID NO: 328709 - RNA, 19 nt, Artificial Sequence
  Description of Artificial Sequence: Synthetic oligonucleotide
uccuuugcgaucaaacaaa

SEQ ID NO: 328710 - RNA, 19 nt, Artificial Sequence
  Description of Artificial Sequence: Synthetic oligonucleotide
cauuugugacguuguaugg

SEQ ID NO: 328711 - RNA, 19 nt, Artificial Sequence
  Description of Artificial Sequence: Synthetic oligonucleotide
agucauacugaaaucaaug

SEQ ID NO: 328712 - RNA, 19 nt, Artificial Sequence
  Description of Artificial Sequence: Synthetic oligonucleotide
uuaaagcuuccauaaaguu

SEQ ID NO: 328713 - RNA, 19 nt, Artificial Sequence
  Description of Artificial Sequence: Synthetic oligonucleotide
cauguaaguaacuccccag

SEQ ID NO: 328714 - RNA, 19 nt, Artificial Sequence
  Description of Artificial Sequence: Synthetic oligonucleotide
gucguguucauaugggugc

SEQ ID NO: 328715 - RNA, 19 nt, Artificial Sequence
  Description of Artificial Sequence: Synthetic oligonucleotide
aaccacaaaaugaaauaug

SEQ ID NO: 328716 - RNA, 19 nt, Artificial Sequence
  Description of Artificial Sequence: Synthetic oligonucleotide
gguacguugccauuucugg

SEQ ID NO: 328717 - RNA, 19 nt, Artificial Sequence
  Description of Artificial Sequence: Synthetic oligonucleotide
cuuacgacagagaauacaa

SEQ ID NO: 328718 - RNA, 19 nt, Artificial Sequence
  Description of Artificial Sequence: Synthetic oligonucleotide
acacuuacgacagagaaua

SEQ ID NO: 328719 - RNA, 19 nt, Artificial Sequence
  Description of Artificial Sequence: Synthetic oligonucleotide
cauuacuucuccaguauuc

SEQ ID NO: 328720 - RNA, 19 nt, Artificial Sequence
  Description of Artificial Sequence: Synthetic oligonucleotide
uaacaguaccauaagucau

SEQ ID NO: 328721 - RNA, 19 nt, Artificial Sequence
  Description of Artificial Sequence: Synthetic oligonucleotide
uaaggaguucagaucauau

SEQ ID NO: 328722 - RNA, 19 nt, Artificial Sequence
  Description of Artificial Sequence: Synthetic oligonucleotide
gucguauucauagucaaac

SEQ ID NO: 328723 - RNA, 19 nt, Artificial Sequence
  Description of Artificial Sequence: Synthetic oligonucleotide
uaaauaggcuuaugauaag

SEQ ID NO: 328724 - RNA, 19 nt, Artificial Sequence
  Description of Artificial Sequence: Synthetic oligonucleotide
ccuauuaccagucugugug

SEQ ID NO: 328725 - RNA, 19 nt, Artificial Sequence
  Description of Artificial Sequence: Synthetic oligonucleotide
uaccauaagucauacugaa

SEQ ID NO: 328726 - RNA, 19 nt, Artificial Sequence
  Description of Artificial Sequence: Synthetic oligonucleotide
uaccaauccagucguauuc

SEQ ID NO: 328727 - RNA, 19 nt, Artificial Sequence
  Description of Artificial Sequence: Synthetic oligonucleotide
uucuuauguauaaggaguu

SEQ ID NO: 328728 - RNA, 19 nt, Artificial Sequence
  Description of Artificial Sequence: Synthetic oligonucleotide
acaacacuucuauuggugu

SEQ ID NO: 328729 - RNA, 19 nt, Artificial Sequence
  Description of Artificial Sequence: Synthetic oligonucleotide
accuguaaauucaauaaug

SEQ ID NO: 328730 - RNA, 19 nt, Artificial Sequence
  Description of Artificial Sequence: Synthetic oligonucleotide
agaucauauaaacacugua

SEQ ID NO: 328731 - RNA, 19 nt, Artificial Sequence
  Description of Artificial Sequence: Synthetic oligonucleotide
aucuaccuugcucaaagca

SEQ ID NO: 328732 - RNA, 19 nt, Artificial Sequence
  Description of Artificial Sequence: Synthetic oligonucleotide
augggugcccaauuuauca

SEQ ID NO: 328733 - RNA, 19 nt, Artificial Sequence
  Description of Artificial Sequence: Synthetic oligonucleotide
agaaaauuccuguuugauu

SEQ ID NO: 328734 - RNA, 19 nt, Artificial Sequence
  Description of Artificial Sequence: Synthetic oligonucleotide
auuuaaguccauaauugga

SEQ ID NO: 328735 - RNA, 19 nt, Artificial Sequence
  Description of Artificial Sequence: Synthetic oligonucleotide
ucuguguuuaacucuccgu

SEQ ID NO: 328736 - RNA, 19 nt, Artificial Sequence
  Description of Artificial Sequence: Synthetic oligonucleotide
guaugaacauguaaguaac

SEQ ID NO: 328737 - RNA, 19 nt, Artificial Sequence
  Description of Artificial Sequence: Synthetic oligonucleotide
uuuguguucucuguaugca

SEQ ID NO: 328738 - RNA, 19 nt, Artificial Sequence
  Description of Artificial Sequence: Synthetic oligonucleotide
agcguaugaacauguaagu

SEQ ID NO: 328739 - RNA, 19 nt, Artificial Sequence
  Description of Artificial Sequence: Synthetic oligonucleotide
aauaggcuuaugauaagaa

SEQ ID NO: 328740 - RNA, 19 nt, Artificial Sequence
  Description of Artificial Sequence: Synthetic oligonucleotide
uacauuacuucuccaguau

SEQ ID NO: 328741 - RNA, 19 nt, Artificial Sequence
  Description of Artificial Sequence: Synthetic oligonucleotide
cauccaucuaccuugcuca

SEQ ID NO: 328742 - RNA, 19 nt, Artificial Sequence
  Description of Artificial Sequence: Synthetic oligonucleotide
uaucauagacacacaaauu

SEQ ID NO: 328743 - RNA, 19 nt, Artificial Sequence
  Description of Artificial Sequence: Synthetic oligonucleotide
uuuuggcuaauaagaaaau

SEQ ID NO: 328744 - RNA, 19 nt, Artificial Sequence
  Description of Artificial Sequence: Synthetic oligonucleotide
uauguauaaggaguucaga

SEQ ID NO: 328745 - RNA, 19 nt, Artificial Sequence
  Description of Artificial Sequence: Synthetic oligonucleotide
uaccuguaaauucaauaau

SEQ ID NO: 328746 - RNA, 19 nt, Artificial Sequence
  Description of Artificial Sequence: Synthetic oligonucleotide
uuuaaucacgagacagcgu

SEQ ID NO: 328747 - RNA, 19 nt, Artificial Sequence
  Description of Artificial Sequence: Synthetic oligonucleotide
guguuuaacucuccguuug

SEQ ID NO: 328748 - RNA, 19 nt, Artificial Sequence
  Description of Artificial Sequence: Synthetic oligonucleotide
ucguauucauagucaaaca

SEQ ID NO: 328749 - RNA, 19 nt, Artificial Sequence
  Description of Artificial Sequence: Synthetic oligonucleotide
ugugcuucucuguucgaug

SEQ ID NO: 328750 - RNA, 19 nt, Artificial Sequence
  Description of Artificial Sequence: Synthetic oligonucleotide
cacuuggacaccuguauug

SEQ ID NO: 328751 - RNA, 19 nt, Artificial Sequence
  Description of Artificial Sequence: Synthetic oligonucleotide
acgacagagaauacaagag

SEQ ID NO: 328752 - RNA, 19 nt, Artificial Sequence
  Description of Artificial Sequence: Synthetic oligonucleotide
uguaacagaagagcuucug

SEQ ID NO: 328753 - RNA, 19 nt, Artificial Sequence
  Description of Artificial Sequence: Synthetic oligonucleotide
aaucacgagacagcguaug

SEQ ID NO: 328754 - RNA, 19 nt, Artificial Sequence
  Description of Artificial Sequence: Synthetic oligonucleotide
uucuagacugaguguaugu

SEQ ID NO: 328755 - RNA, 19 nt, Artificial Sequence
  Description of Artificial Sequence: Synthetic oligonucleotide
uccugauucgucguguuca

SEQ ID NO: 328756 - RNA, 19 nt, Artificial Sequence
  Description of Artificial Sequence: Synthetic oligonucleotide
uuaaguccauaauuggauu

SEQ ID NO: 328757 - RNA, 19 nt, Artificial Sequence
  Description of Artificial Sequence: Synthetic oligonucleotide
cacgagacagcguaugaac

SEQ ID NO: 328758 - RNA, 19 nt, Artificial Sequence
  Description of Artificial Sequence: Synthetic oligonucleotide
uugguguaguuuucaaacu

SEQ ID NO: 328759 - RNA, 19 nt, Artificial Sequence
  Description of Artificial Sequence: Synthetic oligonucleotide
aguugguuucauccaucac

SEQ ID NO: 328760 - RNA, 19 nt, Artificial Sequence
  Description of Artificial Sequence: Synthetic oligonucleotide
ccguacauaacgaagguac

SEQ ID NO: 328761 - RNA, 19 nt, Artificial Sequence
  Description of Artificial Sequence: Synthetic oligonucleotide
accaccgcuugccaauccc

SEQ ID NO: 328762 - RNA, 19 nt, Artificial Sequence
  Description of Artificial Sequence: Synthetic oligonucleotide
uccaauuuucugauaccuc

SEQ ID NO: 328763 - RNA, 19 nt, Artificial Sequence
  Description of Artificial Sequence: Synthetic oligonucleotide
uuucuuagguaaucauagu

SEQ ID NO: 328764 - RNA, 19 nt, Artificial Sequence
  Description of Artificial Sequence: Synthetic oligonucleotide
uaccuaugggcagugacug

SEQ ID NO: 328765 - RNA, 19 nt, Artificial Sequence
  Description of Artificial Sequence: Synthetic oligonucleotide
gaguaggcaacuguuuacc

SEQ ID NO: 328766 - RNA, 19 nt, Artificial Sequence
  Description of Artificial Sequence: Synthetic oligonucleotide
aauacagauauugcaugua

SEQ ID NO: 328767 - RNA, 19 nt, Artificial Sequence
  Description of Artificial Sequence: Synthetic oligonucleotide
aaccaccgcuugccaaucc

SEQ ID NO: 328768 - RNA, 19 nt, Artificial Sequence
  Description of Artificial Sequence: Synthetic oligonucleotide
uuuaagccuugccaaggaa

SEQ ID NO: 328769 - RNA, 19 nt, Artificial Sequence
  Description of Artificial Sequence: Synthetic oligonucleotide
aaaguggauucauuuccuu

SEQ ID NO: 328770 - RNA, 19 nt, Artificial Sequence
  Description of Artificial Sequence: Synthetic oligonucleotide
cuauuaccagucugugugc

SEQ ID NO: 328771 - RNA, 19 nt, Artificial Sequence
  Description of Artificial Sequence: Synthetic oligonucleotide
uuguucucugacacuaaaa

SEQ ID NO: 328772 - RNA, 19 nt, Artificial Sequence
  Description of Artificial Sequence: Synthetic oligonucleotide
acagcguaugaacauguaa

SEQ ID NO: 328773 - RNA, 19 nt, Artificial Sequence
  Description of Artificial Sequence: Synthetic oligonucleotide
cuacugagaauaaaacuaa

SEQ ID NO: 328774 - RNA, 19 nt, Artificial Sequence
  Description of Artificial Sequence: Synthetic oligonucleotide
cuguauuguuuucuguaac

SEQ ID NO: 328775 - RNA, 19 nt, Artificial Sequence
  Description of Artificial Sequence: Synthetic oligonucleotide
ccaguagcaggcuucaagg

SEQ ID NO: 328776 - RNA, 19 nt, Artificial Sequence
  Description of Artificial Sequence: Synthetic oligonucleotide
aaguccauaauuggauuaa

SEQ ID NO: 328777 - RNA, 19 nt, Artificial Sequence
  Description of Artificial Sequence: Synthetic oligonucleotide
gauucgucguguucauaug

SEQ ID NO: 328778 - RNA, 19 nt, Artificial Sequence
  Description of Artificial Sequence: Synthetic oligonucleotide
ucacuaucuagcauacauu

SEQ ID NO: 328779 - RNA, 19 nt, Artificial Sequence
  Description of Artificial Sequence: Synthetic oligonucleotide
uuucuagacugaguguaug

SEQ ID NO: 328780 - RNA, 19 nt, Artificial Sequence
  Description of Artificial Sequence: Synthetic oligonucleotide
ucaauacuuucuuggcagu

SEQ ID NO: 328781 - RNA, 19 nt, Artificial Sequence
  Description of Artificial Sequence: Synthetic oligonucleotide
ggccaaaacauccaucuac

SEQ ID NO: 328782 - RNA, 19 nt, Artificial Sequence
  Description of Artificial Sequence: Synthetic oligonucleotide
auaccugaaguuucacacu

SEQ ID NO: 328783 - RNA, 19 nt, Artificial Sequence
  Description of Artificial Sequence: Synthetic oligonucleotide
acauugaacuuuuggcuaa

SEQ ID NO: 328784 - RNA, 19 nt, Artificial Sequence
  Description of Artificial Sequence: Synthetic oligonucleotide
acuuacgacagagaauaca

SEQ ID NO: 328785 - RNA, 19 nt, Artificial Sequence
  Description of Artificial Sequence: Synthetic oligonucleotide
accuguauuguuuucugua

SEQ ID NO: 328786 - RNA, 19 nt, Artificial Sequence
  Description of Artificial Sequence: Synthetic oligonucleotide
caaugcagauguuacaaaa

SEQ ID NO: 328787 - RNA, 19 nt, Artificial Sequence
  Description of Artificial Sequence: Synthetic oligonucleotide
cuaaugugcacagcgggug

SEQ ID NO: 328788 - RNA, 19 nt, Artificial Sequence
  Description of Artificial Sequence: Synthetic oligonucleotide
ccuccguacauaacgaagg

SEQ ID NO: 328789 - RNA, 19 nt, Artificial Sequence
  Description of Artificial Sequence: Synthetic oligonucleotide
auuugugacguuguauggu

SEQ ID NO: 328790 - RNA, 19 nt, Artificial Sequence
  Description of Artificial Sequence: Synthetic oligonucleotide
ucuagacugaguguauguc

SEQ ID NO: 328791 - RNA, 19 nt, Artificial Sequence
  Description of Artificial Sequence: Synthetic oligonucleotide
cauacauuaucaucuggaa

SEQ ID NO: 328792 - RNA, 19 nt, Artificial Sequence
  Description of Artificial Sequence: Synthetic oligonucleotide
uguaugcaucagaggagca

SEQ ID NO: 328793 - RNA, 19 nt, Artificial Sequence
  Description of Artificial Sequence: Synthetic oligonucleotide
ccagccuccguacauaacg

SEQ ID NO: 328794 - RNA, 19 nt, Artificial Sequence
  Description of Artificial Sequence: Synthetic oligonucleotide
gaacauaccugcauuaccu

SEQ ID NO: 328795 - RNA, 19 nt, Artificial Sequence
  Description of Artificial Sequence: Synthetic oligonucleotide
auagagugacauuguacaa

SEQ ID NO: 328796 - RNA, 19 nt, Artificial Sequence
  Description of Artificial Sequence: Synthetic oligonucleotide
uggccuagagcuucuaaau

SEQ ID NO: 328797 - RNA, 19 nt, Artificial Sequence
  Description of Artificial Sequence: Synthetic oligonucleotide
augacaguauacaaauaga

SEQ ID NO: 328798 - RNA, 19 nt, Artificial Sequence
  Description of Artificial Sequence: Synthetic oligonucleotide
agacuaaugugcacagcgg

SEQ ID NO: 328799 - RNA, 19 nt, Artificial Sequence
  Description of Artificial Sequence: Synthetic oligonucleotide
uaugggugcccaauuuauc

SEQ ID NO: 328800 - RNA, 19 nt, Artificial Sequence
  Description of Artificial Sequence: Synthetic oligonucleotide
agacugaguguaugucuuc

SEQ ID NO: 328801 - RNA, 19 nt, Artificial Sequence
  Description of Artificial Sequence: Synthetic oligonucleotide
ccuacugagaauaaaacua

SEQ ID NO: 328802 - RNA, 19 nt, Artificial Sequence
  Description of Artificial Sequence: Synthetic oligonucleotide
uauaaggaguucagaucau

SEQ ID NO: 328803 - RNA, 19 nt, Artificial Sequence
  Description of Artificial Sequence: Synthetic oligonucleotide
acacuucuauugguguggc

SEQ ID NO: 328804 - RNA, 19 nt, Artificial Sequence
  Description of Artificial Sequence: Synthetic oligonucleotide
auagacacacaaauuuggu

SEQ ID NO: 328805 - RNA, 19 nt, Artificial Sequence
  Description of Artificial Sequence: Synthetic oligonucleotide
aagguacguugccauuucu

SEQ ID NO: 328806 - RNA, 19 nt, Artificial Sequence
  Description of Artificial Sequence: Synthetic oligonucleotide
caguuuagacaucaugaca

SEQ ID NO: 328807 - RNA, 19 nt, Artificial Sequence
  Description of Artificial Sequence: Synthetic oligonucleotide
gagacagcguaugaacaug

SEQ ID NO: 328808 - RNA, 19 nt, Artificial Sequence
  Description of Artificial Sequence: Synthetic oligonucleotide
ugugacguuguaugguuuu

SEQ ID NO: 328809 - RNA, 19 nt, Artificial Sequence
  Description of Artificial Sequence: Synthetic oligonucleotide
uuaccaauccagucguauu

SEQ ID NO: 328810 - RNA, 19 nt, Artificial Sequence
  Description of Artificial Sequence: Synthetic oligonucleotide
acauuauaaauggccaaaa

SEQ ID NO: 328811 - RNA, 19 nt, Artificial Sequence
  Description of Artificial Sequence: Synthetic oligonucleotide
caaauuaugugcaauuauu

SEQ ID NO: 328812 - RNA, 19 nt, Artificial Sequence
  Description of Artificial Sequence: Synthetic oligonucleotide
gugcccaauuuaucaaaag

SEQ ID NO: 328813 - RNA, 19 nt, Artificial Sequence
  Description of Artificial Sequence: Synthetic oligonucleotide
uucaaggggcucuagccuu

SEQ ID NO: 328814 - RNA, 19 nt, Artificial Sequence
  Description of Artificial Sequence: Synthetic oligonucleotide
uauggccuagagcuucuaa

SEQ ID NO: 328815 - RNA, 19 nt, Artificial Sequence
  Description of Artificial Sequence: Synthetic oligonucleotide
accuauuaccagucugugu

SEQ ID NO: 328816 - RNA, 19 nt, Artificial Sequence
  Description of Artificial Sequence: Synthetic oligonucleotide
uaccuauuaccagucugug

SEQ ID NO: 328817 - RNA, 19 nt, Artificial Sequence
  Description of Artificial Sequence: Synthetic oligonucleotide
ucgucguguucauaugggu

SEQ ID NO: 328818 - RNA, 19 nt, Artificial Sequence
  Description of Artificial Sequence: Synthetic oligonucleotide
cacauugaacuuuuggcua

SEQ ID NO: 328819 - RNA, 19 nt, Artificial Sequence
  Description of Artificial Sequence: Synthetic oligonucleotide
ucaugacaguauacaaaua

SEQ ID NO: 328820 - RNA, 19 nt, Artificial Sequence
  Description of Artificial Sequence: Synthetic oligonucleotide
cuuugcgaucaaacaaauc

SEQ ID NO: 328821 - RNA, 19 nt, Artificial Sequence
  Description of Artificial Sequence: Synthetic oligonucleotide
gcuaauaagaaaauaaauu

SEQ ID NO: 328822 - RNA, 19 nt, Artificial Sequence
  Description of Artificial Sequence: Synthetic oligonucleotide
cacuucacugguccauucc

SEQ ID NO: 328823 - RNA, 19 nt, Artificial Sequence
  Description of Artificial Sequence: Synthetic oligonucleotide
auaccugcauuaccuauua

SEQ ID NO: 328824 - RNA, 19 nt, Artificial Sequence
  Description of Artificial Sequence: Synthetic oligonucleotide
auccagucauuugugacgu

SEQ ID NO: 328825 - RNA, 19 nt, Artificial Sequence
  Description of Artificial Sequence: Synthetic oligonucleotide
cuaccuugcucaaagcaaa

SEQ ID NO: 328826 - RNA, 19 nt, Artificial Sequence
  Description of Artificial Sequence: Synthetic oligonucleotide
agugacccaggguuuauuu

SEQ ID NO: 328827 - RNA, 19 nt, Artificial Sequence
  Description of Artificial Sequence: Synthetic oligonucleotide
guaccauaagucauacuga

SEQ ID NO: 328828 - RNA, 19 nt, Artificial Sequence
  Description of Artificial Sequence: Synthetic oligonucleotide
cuguuucaagagugagucc

SEQ ID NO: 328829 - RNA, 19 nt, Artificial Sequence
  Description of Artificial Sequence: Synthetic oligonucleotide
acauuacuucuccaguauu

SEQ ID NO: 328830 - RNA, 19 nt, Artificial Sequence
  Description of Artificial Sequence: Synthetic oligonucleotide
agcauagagugacauugua

SEQ ID NO: 328831 - RNA, 19 nt, Artificial Sequence
  Description of Artificial Sequence: Synthetic oligonucleotide
aaacccuacugagaauaaa

SEQ ID NO: 328832 - RNA, 19 nt, Artificial Sequence
  Description of Artificial Sequence: Synthetic oligonucleotide
aagcauaccugaaguuuca

SEQ ID NO: 328833 - RNA, 19 nt, Artificial Sequence
  Description of Artificial Sequence: Synthetic oligonucleotide
aggcuuuuguguucucugu

SEQ ID NO: 328834 - RNA, 19 nt, Artificial Sequence
  Description of Artificial Sequence: Synthetic oligonucleotide
acuaaugugcacagcgggu

SEQ ID NO: 328835 - RNA, 19 nt, Artificial Sequence
  Description of Artificial Sequence: Synthetic oligonucleotide
auuugacacuuggacaccu

SEQ ID NO: 328836 - RNA, 19 nt, Artificial Sequence
  Description of Artificial Sequence: Synthetic oligonucleotide
caggguuuauuucugggaa

SEQ ID NO: 328837 - RNA, 19 nt, Artificial Sequence
  Description of Artificial Sequence: Synthetic oligonucleotide
agcauaccugaaguuucac

SEQ ID NO: 328838 - RNA, 19 nt, Artificial Sequence
  Description of Artificial Sequence: Synthetic oligonucleotide
guauuuaacuccugcaguu

SEQ ID NO: 328839 - RNA, 19 nt, Artificial Sequence
  Description of Artificial Sequence: Synthetic oligonucleotide
uaaucacgagacagcguau

SEQ ID NO: 328840 - RNA, 19 nt, Artificial Sequence
  Description of Artificial Sequence: Synthetic oligonucleotide
gcucuagccuuacacacug

SEQ ID NO: 328841 - RNA, 19 nt, Artificial Sequence
  Description of Artificial Sequence: Synthetic oligonucleotide
acuguaccuugauuucaca

SEQ ID NO: 328842 - RNA, 19 nt, Artificial Sequence
  Description of Artificial Sequence: Synthetic oligonucleotide
cuuuaagccuugccaagga

SEQ ID NO: 328843 - RNA, 19 nt, Artificial Sequence
  Description of Artificial Sequence: Synthetic oligonucleotide
gcaacuguuuaccaaucca

SEQ ID NO: 328844 - RNA, 19 nt, Artificial Sequence
  Description of Artificial Sequence: Synthetic oligonucleotide
auaugggugcccaauuuau

SEQ ID NO: 328845 - RNA, 19 nt, Artificial Sequence
  Description of Artificial Sequence: Synthetic oligonucleotide
ggaguaggcaacuguuuac

SEQ ID NO: 328846 - RNA, 19 nt, Artificial Sequence
  Description of Artificial Sequence: Synthetic oligonucleotide
acugcacccacuggaguag

SEQ ID NO: 328847 - RNA, 19 nt, Artificial Sequence
  Description of Artificial Sequence: Synthetic oligonucleotide
cugcauccagucauuugug

SEQ ID NO: 328848 - RNA, 19 nt, Artificial Sequence
  Description of Artificial Sequence: Synthetic oligonucleotide
cacauuauaaauggccaaa

SEQ ID NO: 328849 - RNA, 19 nt, Artificial Sequence
  Description of Artificial Sequence: Synthetic oligonucleotide
auaaggguauucauacuuu

SEQ ID NO: 328850 - RNA, 19 nt, Artificial Sequence
  Description of Artificial Sequence: Synthetic oligonucleotide
ucguguucauaugggugcc

SEQ ID NO: 328851 - RNA, 19 nt, Artificial Sequence
  Description of Artificial Sequence: Synthetic oligonucleotide
agagaauacaagagacuaa

SEQ ID NO: 328852 - RNA, 19 nt, Artificial Sequence
  Description of Artificial Sequence: Synthetic oligonucleotide
cuguaaggcuuuuguguuc

SEQ ID NO: 328853 - RNA, 19 nt, Artificial Sequence
  Description of Artificial Sequence: Synthetic oligonucleotide
cuguacuauccauugggaa

SEQ ID NO: 328854 - RNA, 19 nt, Artificial Sequence
  Description of Artificial Sequence: Synthetic oligonucleotide
ugugaugggcggcguuuga

SEQ ID NO: 328855 - RNA, 19 nt, Artificial Sequence
  Description of Artificial Sequence: Synthetic oligonucleotide
gaagacugccucucaggaa

SEQ ID NO: 328856 - RNA, 19 nt, Artificial Sequence
  Description of Artificial Sequence: Synthetic oligonucleotide
cuacaguauuuaacuccug

SEQ ID NO: 328857 - RNA, 19 nt, Artificial Sequence
  Description of Artificial Sequence: Synthetic oligonucleotide
accaauccagucguauuca

SEQ ID NO: 328858 - RNA, 19 nt, Artificial Sequence
  Description of Artificial Sequence: Synthetic oligonucleotide
agcuaccacuguaugccac

SEQ ID NO: 328859 - RNA, 19 nt, Artificial Sequence
  Description of Artificial Sequence: Synthetic oligonucleotide
gcauguauuuacaaauauc

SEQ ID NO: 328860 - RNA, 19 nt, Artificial Sequence
  Description of Artificial Sequence: Synthetic oligonucleotide
agguacguugccauuucug

SEQ ID NO: 328861 - RNA, 19 nt, Artificial Sequence
  Description of Artificial Sequence: Synthetic oligonucleotide
acgagacagcguaugaaca

SEQ ID NO: 328862 - RNA, 19 nt, Artificial Sequence
  Description of Artificial Sequence: Synthetic oligonucleotide
gcauccagucauuugugac

SEQ ID NO: 328863 - RNA, 19 nt, Artificial Sequence
  Description of Artificial Sequence: Synthetic oligonucleotide
gacguuguaugguuuuccu

SEQ ID NO: 328864 - RNA, 19 nt, Artificial Sequence
  Description of Artificial Sequence: Synthetic oligonucleotide
gggcucuagccuuacacac

SEQ ID NO: 328865 - RNA, 19 nt, Artificial Sequence
  Description of Artificial Sequence: Synthetic oligonucleotide
ccauaauuggauuaauaua

SEQ ID NO: 328866 - RNA, 19 nt, Artificial Sequence
  Description of Artificial Sequence: Synthetic oligonucleotide
agacagcguaugaacaugu

SEQ ID NO: 328867 - RNA, 19 nt, Artificial Sequence
  Description of Artificial Sequence: Synthetic oligonucleotide
cagcgggugacagagugac

SEQ ID NO: 328868 - RNA, 19 nt, Artificial Sequence
  Description of Artificial Sequence: Synthetic oligonucleotide
auuagugcuucugccacuu

SEQ ID NO: 328869 - RNA, 19 nt, Artificial Sequence
  Description of Artificial Sequence: Synthetic oligonucleotide
guaaguaacuccccaggau

SEQ ID NO: 328870 - RNA, 19 nt, Artificial Sequence
  Description of Artificial Sequence: Synthetic oligonucleotide
uugugacguuguaugguuu

SEQ ID NO: 328871 - RNA, 19 nt, Artificial Sequence
  Description of Artificial Sequence: Synthetic oligonucleotide
cauaugggugcccaauuua

SEQ ID NO: 328872 - RNA, 19 nt, Artificial Sequence
  Description of Artificial Sequence: Synthetic oligonucleotide
ugcacccacuggaguaggc

SEQ ID NO: 328873 - RNA, 19 nt, Artificial Sequence
  Description of Artificial Sequence: Synthetic oligonucleotide
cauugggaagaaaauuccu

SEQ ID NO: 328874 - RNA, 19 nt, Artificial Sequence
  Description of Artificial Sequence: Synthetic oligonucleotide
cugaguguaugucuucaaa

SEQ ID NO: 328875 - RNA, 19 nt, Artificial Sequence
  Description of Artificial Sequence: Synthetic oligonucleotide
auaaggaguucagaucaua

SEQ ID NO: 328876 - RNA, 19 nt, Artificial Sequence
  Description of Artificial Sequence: Synthetic oligonucleotide
uccguacauaacgaaggua

SEQ ID NO: 328877 - RNA, 19 nt, Artificial Sequence
  Description of Artificial Sequence: Synthetic oligonucleotide
ccuuuaagccuugccaagg

SEQ ID NO: 328878 - RNA, 19 nt, Artificial Sequence
  Description of Artificial Sequence: Synthetic oligonucleotide
cagucguauucauagucaa

SEQ ID NO: 328879 - RNA, 19 nt, Artificial Sequence
  Description of Artificial Sequence: Synthetic oligonucleotide
uuucacuaucuagcauaca

SEQ ID NO: 328880 - RNA, 19 nt, Artificial Sequence
  Description of Artificial Sequence: Synthetic oligonucleotide
acuaucuagcauacauuau

SEQ ID NO: 328881 - RNA, 19 nt, Artificial Sequence
  Description of Artificial Sequence: Synthetic oligonucleotide
cuguaaagaagugguuuca

SEQ ID NO: 328882 - RNA, 19 nt, Artificial Sequence
  Description of Artificial Sequence: Synthetic oligonucleotide
acguuguaugguuuuccuu

SEQ ID NO: 328883 - RNA, 19 nt, Artificial Sequence
  Description of Artificial Sequence: Synthetic oligonucleotide
aacauauggccuagagcuu

SEQ ID NO: 328884 - RNA, 19 nt, Artificial Sequence
  Description of Artificial Sequence: Synthetic oligonucleotide
agcaacacauugaacuuuu

SEQ ID NO: 328885 - RNA, 19 nt, Artificial Sequence
  Description of Artificial Sequence: Synthetic oligonucleotide
caauaccacuucacugguc

SEQ ID NO: 328886 - RNA, 19 nt, Artificial Sequence
  Description of Artificial Sequence: Synthetic oligonucleotide
cuagccuuacacacugcaa

SEQ ID NO: 328887 - RNA, 19 nt, Artificial Sequence
  Description of Artificial Sequence: Synthetic oligonucleotide
aucuuaucucuguguuggu

SEQ ID NO: 328888 - RNA, 19 nt, Artificial Sequence
  Description of Artificial Sequence: Synthetic oligonucleotide
uggccaaaacauccaucua

SEQ ID NO: 328889 - RNA, 19 nt, Artificial Sequence
  Description of Artificial Sequence: Synthetic oligonucleotide
guaaucauagucaggcuuu

SEQ ID NO: 328890 - RNA, 19 nt, Artificial Sequence
  Description of Artificial Sequence: Synthetic oligonucleotide
guacauaacgaagguacgu

SEQ ID NO: 328891 - RNA, 19 nt, Artificial Sequence
  Description of Artificial Sequence: Synthetic oligonucleotide
gcagauguuacaaaauagu

SEQ ID NO: 328892 - RNA, 19 nt, Artificial Sequence
  Description of Artificial Sequence: Synthetic oligonucleotide
cuauuuucucugcuguacu

SEQ ID NO: 328893 - RNA, 19 nt, Artificial Sequence
  Description of Artificial Sequence: Synthetic oligonucleotide
cacuuacgacagagaauac

SEQ ID NO: 328894 - RNA, 19 nt, Artificial Sequence
  Description of Artificial Sequence: Synthetic oligonucleotide
uccagccuccguacauaac

SEQ ID NO: 328895 - RNA, 19 nt, Artificial Sequence
  Description of Artificial Sequence: Synthetic oligonucleotide
gcauaccugaaguuucaca

SEQ ID NO: 328896 - RNA, 19 nt, Artificial Sequence
  Description of Artificial Sequence: Synthetic oligonucleotide
cuccaauuuucugauaccu

SEQ ID NO: 328897 - RNA, 19 nt, Artificial Sequence
  Description of Artificial Sequence: Synthetic oligonucleotide
cucuagccuuacacacugc

SEQ ID NO: 328898 - RNA, 19 nt, Artificial Sequence
  Description of Artificial Sequence: Synthetic oligonucleotide
ucguuucgugucuccaauu

SEQ ID NO: 328899 - RNA, 19 nt, Artificial Sequence
  Description of Artificial Sequence: Synthetic oligonucleotide
uucuauugguguggcucgu

SEQ ID NO: 328900 - RNA, 19 nt, Artificial Sequence
  Description of Artificial Sequence: Synthetic oligonucleotide
cuccguuuggacugcugca

SEQ ID NO: 328901 - RNA, 19 nt, Artificial Sequence
  Description of Artificial Sequence: Synthetic oligonucleotide
ugccaaucccauagugcuu

SEQ ID NO: 328902 - RNA, 19 nt, Artificial Sequence
  Description of Artificial Sequence: Synthetic oligonucleotide
gccuccguacauaacgaag

SEQ ID NO: 328903 - RNA, 19 nt, Artificial Sequence
  Description of Artificial Sequence: Synthetic oligonucleotide
auacuguaaagaagugguu

SEQ ID NO: 328904 - RNA, 19 nt, Artificial Sequence
  Description of Artificial Sequence: Synthetic oligonucleotide
cuucaaggggcucuagccu

SEQ ID NO: 328905 - RNA, 19 nt, Artificial Sequence
  Description of Artificial Sequence: Synthetic oligonucleotide
agccuccguacauaacgaa

SEQ ID NO: 328906 - RNA, 19 nt, Artificial Sequence
  Description of Artificial Sequence: Synthetic oligonucleotide
uugguguggcucguuucgu

SEQ ID NO: 328907 - RNA, 19 nt, Artificial Sequence
  Description of Artificial Sequence: Synthetic oligonucleotide
accauaagucauacugaaa

SEQ ID NO: 328908 - RNA, 19 nt, Artificial Sequence
  Description of Artificial Sequence: Synthetic oligonucleotide
agacaaccacaaaaugaaa

SEQ ID NO: 328909 - RNA, 19 nt, Artificial Sequence
  Description of Artificial Sequence: Synthetic oligonucleotide
gcuuaaccugaacauaccu

SEQ ID NO: 328910 - RNA, 19 nt, Artificial Sequence
  Description of Artificial Sequence: Synthetic oligonucleotide
ggggcucuagccuuacaca

SEQ ID NO: 328911 - RNA, 19 nt, Artificial Sequence
  Description of Artificial Sequence: Synthetic oligonucleotide
cgucguguucauaugggug

SEQ ID NO: 328912 - RNA, 19 nt, Artificial Sequence
  Description of Artificial Sequence: Synthetic oligonucleotide
ggcuuaaccugaacauacc

SEQ ID NO: 328913 - RNA, 19 nt, Artificial Sequence
  Description of Artificial Sequence: Synthetic oligonucleotide
cagccuccguacauaacga

SEQ ID NO: 328914 - RNA, 19 nt, Artificial Sequence
  Description of Artificial Sequence: Synthetic oligonucleotide
agaagugguuucacauuau

SEQ ID NO: 328915 - RNA, 19 nt, Artificial Sequence
  Description of Artificial Sequence: Synthetic oligonucleotide
guaccuaugggcagugacu

SEQ ID NO: 328916 - RNA, 19 nt, Artificial Sequence
  Description of Artificial Sequence: Synthetic oligonucleotide
cucuccguuuggacugcug

SEQ ID NO: 328917 - RNA, 19 nt, Artificial Sequence
  Description of Artificial Sequence: Synthetic oligonucleotide
gcguuugaucguccugccg

SEQ ID NO: 328918 - RNA, 19 nt, Artificial Sequence
  Description of Artificial Sequence: Synthetic oligonucleotide
ggcguuugaucguccugcc

SEQ ID NO: 328919 - RNA, 19 nt, Artificial Sequence
  Description of Artificial Sequence: Synthetic oligonucleotide
gcauuaccuauuaccaguc

SEQ ID NO: 328920 - RNA, 19 nt, Artificial Sequence
  Description of Artificial Sequence: Synthetic oligonucleotide
ucuauugguguggcucguu

SEQ ID NO: 328921 - RNA, 19 nt, Artificial Sequence
  Description of Artificial Sequence: Synthetic oligonucleotide
ucguccugccgugggguca

SEQ ID NO: 328922 - RNA, 19 nt, Artificial Sequence
  Description of Artificial Sequence: Synthetic oligonucleotide
ugggcggcguuugaucguc

SEQ ID NO: 328923 - RNA, 19 nt, Artificial Sequence
  Description of Artificial Sequence: Synthetic oligonucleotide
guuucgugucuccaauuuu

SEQ ID NO: 328924 - RNA, 19 nt, Artificial Sequence
  Description of Artificial Sequence: Synthetic oligonucleotide
cugcacccacuggaguagg

SEQ ID NO: 328925 - RNA, 19 nt, Artificial Sequence
  Description of Artificial Sequence: Synthetic oligonucleotide
cauuaccuauuaccagucu

SEQ ID NO: 328926 - RNA, 19 nt, Artificial Sequence
  Description of Artificial Sequence: Synthetic oligonucleotide
caauguccugauucgucgu

SEQ ID NO: 328927 - RNA, 19 nt, Artificial Sequence
  Description of Artificial Sequence: Synthetic oligonucleotide
ggugcccaauuuaucaaaa

SEQ ID NO: 328928 - RNA, 19 nt, Artificial Sequence
  Description of Artificial Sequence: Synthetic oligonucleotide
cuccguacauaacgaaggu

SEQ ID NO: 328929 - RNA, 19 nt, Artificial Sequence
  Description of Artificial Sequence: Synthetic oligonucleotide
acagcgggugacagaguga

SEQ ID NO: 328930 - RNA, 19 nt, Artificial Sequence
  Description of Artificial Sequence: Synthetic oligonucleotide
gacagcguaugaacaugua

SEQ ID NO: 328931 - RNA, 19 nt, Artificial Sequence
  Description of Artificial Sequence: Synthetic oligonucleotide
agagugacccaggguuuau

SEQ ID NO: 328932 - RNA, 19 nt, Artificial Sequence
  Description of Artificial Sequence: Synthetic oligonucleotide
cauauggccuagagcuucu

SEQ ID NO: 328933 - RNA, 19 nt, Artificial Sequence
  Description of Artificial Sequence: Synthetic oligonucleotide
uccugccguggggucaucu

SEQ ID NO: 328934 - RNA, 19 nt, Artificial Sequence
  Description of Artificial Sequence: Synthetic oligonucleotide
gcguaugaacauguaagua

SEQ ID NO: 328935 - RNA, 19 nt, Artificial Sequence
  Description of Artificial Sequence: Synthetic oligonucleotide
cucguuucgugucuccaau

SEQ ID NO: 328936 - RNA, 19 nt, Artificial Sequence
  Description of Artificial Sequence: Synthetic oligonucleotide
caaccaccgcuugccaauc

SEQ ID NO: 328937 - RNA, 19 nt, Artificial Sequence
  Description of Artificial Sequence: Synthetic oligonucleotide
cggcguuugaucguccugc

SEQ ID NO: 328938 - RNA, 19 nt, Artificial Sequence
  Description of Artificial Sequence: Synthetic oligonucleotide
gcucguuucgugucuccaa

SEQ ID NO: 328939 - RNA, 19 nt, Artificial Sequence
  Description of Artificial Sequence: Synthetic oligonucleotide
accugaaguuucacacuua

SEQ ID NO: 328940 - RNA, 19 nt, Artificial Sequence
  Description of Artificial Sequence: Synthetic oligonucleotide
gcggcguuugaucguccug

SEQ ID NO: 328941 - RNA, 19 nt, Artificial Sequence
  Description of Artificial Sequence: Synthetic oligonucleotide
ggucacuacagagaugauu

SEQ ID NO: 328942 - RNA, 19 nt, Artificial Sequence
  Description of Artificial Sequence: Synthetic oligonucleotide
gcaacaaguuucacauuua

SEQ ID NO: 328943 - RNA, 19 nt, Artificial Sequence
  Description of Artificial Sequence: Synthetic oligonucleotide
gccuuacacacugcaacaa

SEQ ID NO: 328944 - RNA, 19 nt, Artificial Sequence
  Description of Artificial Sequence: Synthetic oligonucleotide
gcacccacuggaguaggca

SEQ ID NO: 328945 - RNA, 19 nt, Artificial Sequence
  Description of Artificial Sequence: Synthetic oligonucleotide
gacugccucucaggaagua

SEQ ID NO: 328946 - RNA, 19 nt, Artificial Sequence
  Description of Artificial Sequence: Synthetic oligonucleotide
cagagugacccaggguuua

SEQ ID NO: 328947 - RNA, 19 nt, Artificial Sequence
  Description of Artificial Sequence: Synthetic oligonucleotide
ccaccgcuugccaauccca

SEQ ID NO: 328948 - RNA, 19 nt, Artificial Sequence
  Description of Artificial Sequence: Synthetic oligonucleotide
cacuucuauugguguggcu

SEQ ID NO: 328949 - RNA, 19 nt, Artificial Sequence
  Description of Artificial Sequence: Synthetic oligonucleotide
cagaagccaagcuccuauu

SEQ ID NO: 328950 - RNA, 19 nt, Artificial Sequence
  Description of Artificial Sequence: Synthetic oligonucleotide
ccuuugcgaucaaacaaau

SEQ ID NO: 328951 - RNA, 19 nt, Artificial Sequence
  Description of Artificial Sequence: Synthetic oligonucleotide
cugauucgucguguucaua

SEQ ID NO: 328952 - RNA, 19 nt, Artificial Sequence
  Description of Artificial Sequence: Synthetic oligonucleotide
gagugacccaggguuuauu

SEQ ID NO: 328953 - RNA, 19 nt, Artificial Sequence
  Description of Artificial Sequence: Synthetic oligonucleotide
caguaccuaugggcaguga

SEQ ID NO: 328954 - RNA, 19 nt, Artificial Sequence
  Description of Artificial Sequence: Synthetic oligonucleotide
cgagacagcguaugaacau

SEQ ID NO: 328955 - RNA, 19 nt, Artificial Sequence
  Description of Artificial Sequence: Synthetic oligonucleotide
ggcggcguuugaucguccu

SEQ ID NO: 328956 - RNA, 19 nt, Artificial Sequence
  Description of Artificial Sequence: Synthetic oligonucleotide
ccugauucgucguguucau

SEQ ID NO: 328957 - RNA, 19 nt, Artificial Sequence
  Description of Artificial Sequence: Synthetic oligonucleotide
gggcggcguuugaucgucc

SEQ ID NO: 328958 - RNA, 19 nt, Artificial Sequence
  Description of Artificial Sequence: Synthetic oligonucleotide
guccugccguggggucauc

SEQ ID NO: 328959 - RNA, 19 nt, Artificial Sequence
  Description of Artificial Sequence: Synthetic oligonucleotide
aauacauaaagacaccugc

SEQ ID NO: 328960 - RNA, 19 nt, Artificial Sequence
  Description of Artificial Sequence: Synthetic oligonucleotide
acuuguauaaucuguauac

SEQ ID NO: 328961 - RNA, 19 nt, Artificial Sequence
  Description of Artificial Sequence: Synthetic oligonucleotide
aaugauuaauguuagacau

SEQ ID NO: 328962 - RNA, 19 nt, Artificial Sequence
  Description of Artificial Sequence: Synthetic oligonucleotide
acucauagaacauauagag

SEQ ID NO: 328963 - RNA, 19 nt, Artificial Sequence
  Description of Artificial Sequence: Synthetic oligonucleotide
acacuaauaagcuuugggc

SEQ ID NO: 328964 - RNA, 19 nt, Artificial Sequence
  Description of Artificial Sequence: Synthetic oligonucleotide
acuaauuaggaccaauugg

SEQ ID NO: 328965 - RNA, 19 nt, Artificial Sequence
  Description of Artificial Sequence: Synthetic oligonucleotide
cuaauuaggaccaauuggc

SEQ ID NO: 328966 - RNA, 19 nt, Artificial Sequence
  Description of Artificial Sequence: Synthetic oligonucleotide
aauaguggcacucaaaaua

SEQ ID NO: 328967 - RNA, 19 nt, Artificial Sequence
  Description of Artificial Sequence: Synthetic oligonucleotide
agcuauuacaaaugaauac

SEQ ID NO: 328968 - RNA, 19 nt, Artificial Sequence
  Description of Artificial Sequence: Synthetic oligonucleotide
ugucaaucaucuaagaugu

SEQ ID NO: 328969 - RNA, 19 nt, Artificial Sequence
  Description of Artificial Sequence: Synthetic oligonucleotide
ugauuguuagcacaaacug

SEQ ID NO: 328970 - RNA, 19 nt, Artificial Sequence
  Description of Artificial Sequence: Synthetic oligonucleotide
ugucacgugauaaacaucu

SEQ ID NO: 328971 - RNA, 19 nt, Artificial Sequence
  Description of Artificial Sequence: Synthetic oligonucleotide
ugucgcaccaaaauaagag

SEQ ID NO: 328972 - RNA, 19 nt, Artificial Sequence
  Description of Artificial Sequence: Synthetic oligonucleotide
agaacauauagagagacag

SEQ ID NO: 328973 - RNA, 19 nt, Artificial Sequence
  Description of Artificial Sequence: Synthetic oligonucleotide
agaggauagaccauaauac

SEQ ID NO: 328974 - RNA, 19 nt, Artificial Sequence
  Description of Artificial Sequence: Synthetic oligonucleotide
uaaugauuaauguuagaca

SEQ ID NO: 328975 - RNA, 19 nt, Artificial Sequence
  Description of Artificial Sequence: Synthetic oligonucleotide
ugaaacauacccuaaugac

SEQ ID NO: 328976 - RNA, 19 nt, Artificial Sequence
  Description of Artificial Sequence: Synthetic oligonucleotide
caacucauagaacauauag

SEQ ID NO: 328977 - RNA, 19 nt, Artificial Sequence
  Description of Artificial Sequence: Synthetic oligonucleotide
aaaugugagaaauuguaua

SEQ ID NO: 328978 - RNA, 19 nt, Artificial Sequence
  Description of Artificial Sequence: Synthetic oligonucleotide
caauuaguaaguaaaugac

SEQ ID NO: 328979 - RNA, 19 nt, Artificial Sequence
  Description of Artificial Sequence: Synthetic oligonucleotide
cacuaauaagcuuugggcc

SEQ ID NO: 328980 - RNA, 19 nt, Artificial Sequence
  Description of Artificial Sequence: Synthetic oligonucleotide
aacacaagugucucacgac

SEQ ID NO: 328981 - RNA, 19 nt, Artificial Sequence
  Description of Artificial Sequence: Synthetic oligonucleotide
uaaauguaaacagaugcug

SEQ ID NO: 328982 - RNA, 19 nt, Artificial Sequence
  Description of Artificial Sequence: Synthetic oligonucleotide
aagguuauacaccacuaga

SEQ ID NO: 328983 - RNA, 19 nt, Artificial Sequence
  Description of Artificial Sequence: Synthetic oligonucleotide
uugugaaccacaauucagc

SEQ ID NO: 328984 - RNA, 19 nt, Artificial Sequence
  Description of Artificial Sequence: Synthetic oligonucleotide
cuguauacauauucuaggg

SEQ ID NO: 328985 - RNA, 19 nt, Artificial Sequence
  Description of Artificial Sequence: Synthetic oligonucleotide
uggaaauacaaccacccga

SEQ ID NO: 328986 - RNA, 19 nt, Artificial Sequence
  Description of Artificial Sequence: Synthetic oligonucleotide
cacaauucagcaccuaucg

SEQ ID NO: 328987 - RNA, 19 nt, Artificial Sequence
  Description of Artificial Sequence: Synthetic oligonucleotide
uugcgaaggaugaagaaga

SEQ ID NO: 328988 - RNA, 19 nt, Artificial Sequence
  Description of Artificial Sequence: Synthetic oligonucleotide
gauuguuagcacaaacugg

SEQ ID NO: 328989 - RNA, 19 nt, Artificial Sequence
  Description of Artificial Sequence: Synthetic oligonucleotide
uguuagcacaaacuggacc

SEQ ID NO: 328990 - RNA, 19 nt, Artificial Sequence
  Description of Artificial Sequence: Synthetic oligonucleotide
aauuaguaaguaaaugaca

SEQ ID NO: 328991 - RNA, 19 nt, Artificial Sequence
  Description of Artificial Sequence: Synthetic oligonucleotide
auaauacgaguacaugagg

SEQ ID NO: 328992 - RNA, 19 nt, Artificial Sequence
  Description of Artificial Sequence: Synthetic oligonucleotide
auucuagggguuuugaacu

SEQ ID NO: 328993 - RNA, 19 nt, Artificial Sequence
  Description of Artificial Sequence: Synthetic oligonucleotide
gacuaauuaggaccaauug

SEQ ID NO: 328994 - RNA, 19 nt, Artificial Sequence
  Description of Artificial Sequence: Synthetic oligonucleotide
acuacaguaggccagacua

SEQ ID NO: 328995 - RNA, 19 nt, Artificial Sequence
  Description of Artificial Sequence: Synthetic oligonucleotide
agggaagcgaaguuguugg

SEQ ID NO: 328996 - RNA, 19 nt, Artificial Sequence
  Description of Artificial Sequence: Synthetic oligonucleotide
cucacgacugcuuuggacc

SEQ ID NO: 328997 - RNA, 19 nt, Artificial Sequence
  Description of Artificial Sequence: Synthetic oligonucleotide
auaacuaauaaggcaacag

SEQ ID NO: 328998 - RNA, 19 nt, Artificial Sequence
  Description of Artificial Sequence: Synthetic oligonucleotide
uuuuaagucuuaaggcaug

SEQ ID NO: 328999 - RNA, 19 nt, Artificial Sequence
  Description of Artificial Sequence: Synthetic oligonucleotide
aagguaagucuccucuuuc

SEQ ID NO: 329000 - RNA, 19 nt, Artificial Sequence
  Description of Artificial Sequence: Synthetic oligonucleotide
aguaguaccaccagaggac

SEQ ID NO: 329001 - RNA, 19 nt, Artificial Sequence
  Description of Artificial Sequence: Synthetic oligonucleotide
ucgcaccaaaauaagagug

SEQ ID NO: 329002 - RNA, 19 nt, Artificial Sequence
  Description of Artificial Sequence: Synthetic oligonucleotide
uuuggucccagccauacaa

SEQ ID NO: 329003 - RNA, 19 nt, Artificial Sequence
  Description of Artificial Sequence: Synthetic oligonucleotide
gaugauuguuagcacaaac

SEQ ID NO: 329004 - RNA, 19 nt, Artificial Sequence
  Description of Artificial Sequence: Synthetic oligonucleotide
agguaagucuccucuuucc

SEQ ID NO: 329005 - RNA, 19 nt, Artificial Sequence
  Description of Artificial Sequence: Synthetic oligonucleotide
ugaaauagguacugaguga

SEQ ID NO: 329006 - RNA, 19 nt, Artificial Sequence
  Description of Artificial Sequence: Synthetic oligonucleotide
aaagaauccucaucuguau

SEQ ID NO: 329007 - RNA, 19 nt, Artificial Sequence
  Description of Artificial Sequence: Synthetic oligonucleotide
agccggcuuauucaaagcc

SEQ ID NO: 329008 - RNA, 19 nt, Artificial Sequence
  Description of Artificial Sequence: Synthetic oligonucleotide
uguuacgagcgucagggca

SEQ ID NO: 329009 - RNA, 19 nt, Artificial Sequence
  Description of Artificial Sequence: Synthetic oligonucleotide
uuguaagucugaauguaga

SEQ ID NO: 329010 - RNA, 19 nt, Artificial Sequence
  Description of Artificial Sequence: Synthetic oligonucleotide
guugaaacauacccuaaug

SEQ ID NO: 329011 - RNA, 19 nt, Artificial Sequence
  Description of Artificial Sequence: Synthetic oligonucleotide
uccaagguuauacaccacu

SEQ ID NO: 329012 - RNA, 19 nt, Artificial Sequence
  Description of Artificial Sequence: Synthetic oligonucleotide
gaaguaguaccaccagagg

SEQ ID NO: 329013 - RNA, 19 nt, Artificial Sequence
  Description of Artificial Sequence: Synthetic oligonucleotide
uaugccuacuuguauaauc

SEQ ID NO: 329014 - RNA, 19 nt, Artificial Sequence
  Description of Artificial Sequence: Synthetic oligonucleotide
aagcuguugagugucgcac

SEQ ID NO: 329015 - RNA, 19 nt, Artificial Sequence
  Description of Artificial Sequence: Synthetic oligonucleotide
ucaucuaagaugugucaug

SEQ ID NO: 329016 - RNA, 19 nt, Artificial Sequence
  Description of Artificial Sequence: Synthetic oligonucleotide
guaccuaggaugaagacac

SEQ ID NO: 329017 - RNA, 19 nt, Artificial Sequence
  Description of Artificial Sequence: Synthetic oligonucleotide
auaaaucacacuacaguag

SEQ ID NO: 329018 - RNA, 19 nt, Artificial Sequence
  Description of Artificial Sequence: Synthetic oligonucleotide
uguauaugccuacuuguau

SEQ ID NO: 329019 - RNA, 19 nt, Artificial Sequence
  Description of Artificial Sequence: Synthetic oligonucleotide
acuuugacagcacacuacu

SEQ ID NO: 329020 - RNA, 19 nt, Artificial Sequence
  Description of Artificial Sequence: Synthetic oligonucleotide
aacucauagaacauauaga

SEQ ID NO: 329021 - RNA, 19 nt, Artificial Sequence
  Description of Artificial Sequence: Synthetic oligonucleotide
acauucuagauuugauaag

SEQ ID NO: 329022 - RNA, 19 nt, Artificial Sequence
  Description of Artificial Sequence: Synthetic oligonucleotide
ugagccggcuuauucaaag

SEQ ID NO: 329023 - RNA, 19 nt, Artificial Sequence
  Description of Artificial Sequence: Synthetic oligonucleotide
gugugguauauccagauga

SEQ ID NO: 329024 - RNA, 19 nt, Artificial Sequence
  Description of Artificial Sequence: Synthetic oligonucleotide
uauaugccuacuuguauaa

SEQ ID NO: 329025 - RNA, 19 nt, Artificial Sequence
  Description of Artificial Sequence: Synthetic oligonucleotide
uacgaguacaugaggacgu

SEQ ID NO: 329026 - RNA, 19 nt, Artificial Sequence
  Description of Artificial Sequence: Synthetic oligonucleotide
cacauucuagauuugauaa

SEQ ID NO: 329027 - RNA, 19 nt, Artificial Sequence
  Description of Artificial Sequence: Synthetic oligonucleotide
uuuacccuuguaucucggg

SEQ ID NO: 329028 - RNA, 19 nt, Artificial Sequence
  Description of Artificial Sequence: Synthetic oligonucleotide
acugcguguucccugacag

SEQ ID NO: 329029 - RNA, 19 nt, Artificial Sequence
  Description of Artificial Sequence: Synthetic oligonucleotide
uacuuguauaaucuguaua

SEQ ID NO: 329030 - RNA, 19 nt, Artificial Sequence
  Description of Artificial Sequence: Synthetic oligonucleotide
uuuuacccuuguaucucgg

SEQ ID NO: 329031 - RNA, 19 nt, Artificial Sequence
  Description of Artificial Sequence: Synthetic oligonucleotide
aguaaugcccugaaauagg

SEQ ID NO: 329032 - RNA, 19 nt, Artificial Sequence
  Description of Artificial Sequence: Synthetic oligonucleotide
gguacugagugaugcaucg

SEQ ID NO: 329033 - RNA, 19 nt, Artificial Sequence
  Description of Artificial Sequence: Synthetic oligonucleotide
uuuacacaucgcacgcuag

SEQ ID NO: 329034 - RNA, 19 nt, Artificial Sequence
  Description of Artificial Sequence: Synthetic oligonucleotide
ugucucacgacugcuuugg

SEQ ID NO: 329035 - RNA, 19 nt, Artificial Sequence
  Description of Artificial Sequence: Synthetic oligonucleotide
auaaacaucuagucacccu

SEQ ID NO: 329036 - RNA, 19 nt, Artificial Sequence
  Description of Artificial Sequence: Synthetic oligonucleotide
uggaugauuguuagcacaa

SEQ ID NO: 329037 - RNA, 19 nt, Artificial Sequence
  Description of Artificial Sequence: Synthetic oligonucleotide
gcuguuacgagcgucaggg

SEQ ID NO: 329038 - RNA, 19 nt, Artificial Sequence
  Description of Artificial Sequence: Synthetic oligonucleotide
acgcuaguuucauaaauca

SEQ ID NO: 329039 - RNA, 19 nt, Artificial Sequence
  Description of Artificial Sequence: Synthetic oligonucleotide
uauaacuaauaaggcaaca

SEQ ID NO: 329040 - RNA, 19 nt, Artificial Sequence
  Description of Artificial Sequence: Synthetic oligonucleotide
uuauaauaugaaugugcaa

SEQ ID NO: 329041 - RNA, 19 nt, Artificial Sequence
  Description of Artificial Sequence: Synthetic oligonucleotide
ucauguauccaaucuggaa

SEQ ID NO: 329042 - RNA, 19 nt, Artificial Sequence
  Description of Artificial Sequence: Synthetic oligonucleotide
aucgaaauguuccauuuua

SEQ ID NO: 329043 - RNA, 19 nt, Artificial Sequence
  Description of Artificial Sequence: Synthetic oligonucleotide
ugagugucgcaccaaaaua

SEQ ID NO: 329044 - RNA, 19 nt, Artificial Sequence
  Description of Artificial Sequence: Synthetic oligonucleotide
uagaacauauagagagaca

SEQ ID NO: 329045 - RNA, 19 nt, Artificial Sequence
  Description of Artificial Sequence: Synthetic oligonucleotide
gauuugagccggcuuauuc

SEQ ID NO: 329046 - RNA, 19 nt, Artificial Sequence
  Description of Artificial Sequence: Synthetic oligonucleotide
acaaauguagguauguaau

SEQ ID NO: 329047 - RNA, 19 nt, Artificial Sequence
  Description of Artificial Sequence: Synthetic oligonucleotide
accaauuggcuccuuauaa

SEQ ID NO: 329048 - RNA, 19 nt, Artificial Sequence
  Description of Artificial Sequence: Synthetic oligonucleotide
aagcaguccugucacguga

SEQ ID NO: 329049 - RNA, 19 nt, Artificial Sequence
  Description of Artificial Sequence: Synthetic oligonucleotide
uagguauguaauuguccag

SEQ ID NO: 329050 - RNA, 19 nt, Artificial Sequence
  Description of Artificial Sequence: Synthetic oligonucleotide
caguaaugcccugaaauag

SEQ ID NO: 329051 - RNA, 19 nt, Artificial Sequence
  Description of Artificial Sequence: Synthetic oligonucleotide
uuguauaugccuacuugua

SEQ ID NO: 329052 - RNA, 19 nt, Artificial Sequence
  Description of Artificial Sequence: Synthetic oligonucleotide
guauguaauuguccagaag

SEQ ID NO: 329053 - RNA, 19 nt, Artificial Sequence
  Description of Artificial Sequence: Synthetic oligonucleotide
aaucacacgccguggucug

SEQ ID NO: 329054 - RNA, 19 nt, Artificial Sequence
  Description of Artificial Sequence: Synthetic oligonucleotide
aguugaaacauacccuaau

SEQ ID NO: 329055 - RNA, 19 nt, Artificial Sequence
  Description of Artificial Sequence: Synthetic oligonucleotide
uguucaacauggaggcgug

SEQ ID NO: 329056 - RNA, 19 nt, Artificial Sequence
  Description of Artificial Sequence: Synthetic oligonucleotide
auguauccaaucuggaaau

SEQ ID NO: 329057 - RNA, 19 nt, Artificial Sequence
  Description of Artificial Sequence: Synthetic oligonucleotide
uuacacaucgcacgcuagu

SEQ ID NO: 329058 - RNA, 19 nt, Artificial Sequence
  Description of Artificial Sequence: Synthetic oligonucleotide
acaagacuaauuaggacca

SEQ ID NO: 329059 - RNA, 19 nt, Artificial Sequence
  Description of Artificial Sequence: Synthetic oligonucleotide
aagguccuacauaaaucac

SEQ ID NO: 329060 - RNA, 19 nt, Artificial Sequence
  Description of Artificial Sequence: Synthetic oligonucleotide
uaacagugugguauaucca

SEQ ID NO: 329061 - RNA, 19 nt, Artificial Sequence
  Description of Artificial Sequence: Synthetic oligonucleotide
cacgccguggucuggaggg

SEQ ID NO: 329062 - RNA, 19 nt, Artificial Sequence
  Description of Artificial Sequence: Synthetic oligonucleotide
uuacaaucacacgccgugg

SEQ ID NO: 329063 - RNA, 19 nt, Artificial Sequence
  Description of Artificial Sequence: Synthetic oligonucleotide
cacgcuaguuucauaaauc

SEQ ID NO: 329064 - RNA, 19 nt, Artificial Sequence
  Description of Artificial Sequence: Synthetic oligonucleotide
uacaaucacacgccguggu

SEQ ID NO: 329065 - RNA, 19 nt, Artificial Sequence
  Description of Artificial Sequence: Synthetic oligonucleotide
uccuuauaauaugaaugug

SEQ ID NO: 329066 - RNA, 19 nt, Artificial Sequence
  Description of Artificial Sequence: Synthetic oligonucleotide
ggauagaccauaauacgag

SEQ ID NO: 329067 - RNA, 19 nt, Artificial Sequence
  Description of Artificial Sequence: Synthetic oligonucleotide
ucauguauuuuggucccag

SEQ ID NO: 329068 - RNA, 19 nt, Artificial Sequence
  Description of Artificial Sequence: Synthetic oligonucleotide
uuuaagucuuaaggcaugu

SEQ ID NO: 329069 - RNA, 19 nt, Artificial Sequence
  Description of Artificial Sequence: Synthetic oligonucleotide
ucuguaugaccaccacgcc

SEQ ID NO: 329070 - RNA, 19 nt, Artificial Sequence
  Description of Artificial Sequence: Synthetic oligonucleotide
uccugucacgugauaaaca

SEQ ID NO: 329071 - RNA, 19 nt, Artificial Sequence
  Description of Artificial Sequence: Synthetic oligonucleotide
ucgcacgcuaguuucauaa

SEQ ID NO: 329072 - RNA, 19 nt, Artificial Sequence
  Description of Artificial Sequence: Synthetic oligonucleotide
auguucaacauggaggcgu

SEQ ID NO: 329073 - RNA, 19 nt, Artificial Sequence
  Description of Artificial Sequence: Synthetic oligonucleotide
caaacccacaauuaguuua

SEQ ID NO: 329074 - RNA, 19 nt, Artificial Sequence
  Description of Artificial Sequence: Synthetic oligonucleotide
gagaaguaguaccaccaga

SEQ ID NO: 329075 - RNA, 19 nt, Artificial Sequence
  Description of Artificial Sequence: Synthetic oligonucleotide
gaggaugugcaagcgggcg

SEQ ID NO: 329076 - RNA, 19 nt, Artificial Sequence
  Description of Artificial Sequence: Synthetic oligonucleotide
agcgaaguuguuggugugc

SEQ ID NO: 329077 - RNA, 19 nt, Artificial Sequence
  Description of Artificial Sequence: Synthetic oligonucleotide
cacauuaauaguggcacuc

SEQ ID NO: 329078 - RNA, 19 nt, Artificial Sequence
  Description of Artificial Sequence: Synthetic oligonucleotide
gucgcccuagacuuugggg

SEQ ID NO: 329079 - RNA, 19 nt, Artificial Sequence
  Description of Artificial Sequence: Synthetic oligonucleotide
ucacgacugcuuuggaccc

SEQ ID NO: 329080 - RNA, 19 nt, Artificial Sequence
  Description of Artificial Sequence: Synthetic oligonucleotide
caccacuagaauuccccgg

SEQ ID NO: 329081 - RNA, 19 nt, Artificial Sequence
  Description of Artificial Sequence: Synthetic oligonucleotide
ugucccugagugauguacu

SEQ ID NO: 329082 - RNA, 19 nt, Artificial Sequence
  Description of Artificial Sequence: Synthetic oligonucleotide
auauucuagggguuuugaa

SEQ ID NO: 329083 - RNA, 19 nt, Artificial Sequence
  Description of Artificial Sequence: Synthetic oligonucleotide
cacaucgcacgcuaguuuc

SEQ ID NO: 329084 - RNA, 19 nt, Artificial Sequence
  Description of Artificial Sequence: Synthetic oligonucleotide
gaagcgaaguuguuggugu

SEQ ID NO: 329085 - RNA, 19 nt, Artificial Sequence
  Description of Artificial Sequence: Synthetic oligonucleotide
cuacaguaggccagacuag

SEQ ID NO: 329086 - RNA, 19 nt, Artificial Sequence
  Description of Artificial Sequence: Synthetic oligonucleotide
uuccccggcaagagaaugc

SEQ ID NO: 329087 - RNA, 19 nt, Artificial Sequence
  Description of Artificial Sequence: Synthetic oligonucleotide
uuuggacccguuccccacc

SEQ ID NO: 329088 - RNA, 19 nt, Artificial Sequence
  Description of Artificial Sequence: Synthetic oligonucleotide
uuguuagcacaaacuggac

SEQ ID NO: 329089 - RNA, 19 nt, Artificial Sequence
  Description of Artificial Sequence: Synthetic oligonucleotide
ucuuaaggcauguguguuu

SEQ ID NO: 329090 - RNA, 19 nt, Artificial Sequence
  Description of Artificial Sequence: Synthetic oligonucleotide
gagugucgcaccaaaauaa

SEQ ID NO: 329091 - RNA, 19 nt, Artificial Sequence
  Description of Artificial Sequence: Synthetic oligonucleotide
augccuacuuguauaaucu

SEQ ID NO: 329092 - RNA, 19 nt, Artificial Sequence
  Description of Artificial Sequence: Synthetic oligonucleotide
guuauacaccacuagaauu

SEQ ID NO: 329093 - RNA, 19 nt, Artificial Sequence
  Description of Artificial Sequence: Synthetic oligonucleotide
uuagcacaaacuggaccag

SEQ ID NO: 329094 - RNA, 19 nt, Artificial Sequence
  Description of Artificial Sequence: Synthetic oligonucleotide
ugccuacuuguauaaucug

SEQ ID NO: 329095 - RNA, 19 nt, Artificial Sequence
  Description of Artificial Sequence: Synthetic oligonucleotide
gagugaugcaucgaaaugu

SEQ ID NO: 329096 - RNA, 19 nt, Artificial Sequence
  Description of Artificial Sequence: Synthetic oligonucleotide
uuaagucuuaaggcaugug

SEQ ID NO: 329097 - RNA, 19 nt, Artificial Sequence
  Description of Artificial Sequence: Synthetic oligonucleotide
cagcucgucuggaugauug

SEQ ID NO: 329098 - RNA, 19 nt, Artificial Sequence
  Description of Artificial Sequence: Synthetic oligonucleotide
agguuauacaccacuagaa

SEQ ID NO: 329099 - RNA, 19 nt, Artificial Sequence
  Description of Artificial Sequence: Synthetic oligonucleotide
guauauccagaugagacua

SEQ ID NO: 329100 - RNA, 19 nt, Artificial Sequence
  Description of Artificial Sequence: Synthetic oligonucleotide
agugucgcaccaaaauaag

SEQ ID NO: 329101 - RNA, 19 nt, Artificial Sequence
  Description of Artificial Sequence: Synthetic oligonucleotide
acacauuaauaguggcacu

SEQ ID NO: 329102 - RNA, 19 nt, Artificial Sequence
  Description of Artificial Sequence: Synthetic oligonucleotide
aggguucgcaucuccaagu

SEQ ID NO: 329103 - RNA, 19 nt, Artificial Sequence
  Description of Artificial Sequence: Synthetic oligonucleotide
uucagcaccuaucguguua

SEQ ID NO: 329104 - RNA, 19 nt, Artificial Sequence
  Description of Artificial Sequence: Synthetic oligonucleotide
agcuguuacgagcgucagg

SEQ ID NO: 329105 - RNA, 19 nt, Artificial Sequence
  Description of Artificial Sequence: Synthetic oligonucleotide
guagggacgcauggaaggg

SEQ ID NO: 329106 - RNA, 19 nt, Artificial Sequence
  Description of Artificial Sequence: Synthetic oligonucleotide
auggacccguucugguggc

SEQ ID NO: 329107 - RNA, 19 nt, Artificial Sequence
  Description of Artificial Sequence: Synthetic oligonucleotide
agucgcccuagacuuuggg

SEQ ID NO: 329108 - RNA, 19 nt, Artificial Sequence
  Description of Artificial Sequence: Synthetic oligonucleotide
auuaauaguggcacucaaa

SEQ ID NO: 329109 - RNA, 19 nt, Artificial Sequence
  Description of Artificial Sequence: Synthetic oligonucleotide
guuacgagcgucagggcac

SEQ ID NO: 329110 - RNA, 19 nt, Artificial Sequence
  Description of Artificial Sequence: Synthetic oligonucleotide
aguccugucacgugauaaa

SEQ ID NO: 329111 - RNA, 19 nt, Artificial Sequence
  Description of Artificial Sequence: Synthetic oligonucleotide
ggagaaguaguaccaccag

SEQ ID NO: 329112 - RNA, 19 nt, Artificial Sequence
  Description of Artificial Sequence: Synthetic oligonucleotide
ugugcaagcgggcgcggga

SEQ ID NO: 329113 - RNA, 19 nt, Artificial Sequence
  Description of Artificial Sequence: Synthetic oligonucleotide
ccucaggugcacaagacac

SEQ ID NO: 329114 - RNA, 19 nt, Artificial Sequence
  Description of Artificial Sequence: Synthetic oligonucleotide
gcagccgcgaugcaagagg

SEQ ID NO: 329115 - RNA, 19 nt, Artificial Sequence
  Description of Artificial Sequence: Synthetic oligonucleotide
ugacagcacacuacugaau

SEQ ID NO: 329116 - RNA, 19 nt, Artificial Sequence
  Description of Artificial Sequence: Synthetic oligonucleotide
cccacaauuaguuuauaca

SEQ ID NO: 329117 - RNA, 19 nt, Artificial Sequence
  Description of Artificial Sequence: Synthetic oligonucleotide
guuuacacaucgcacgcua

SEQ ID NO: 329118 - RNA, 19 nt, Artificial Sequence
  Description of Artificial Sequence: Synthetic oligonucleotide
gcaccuaucguguuauaac

SEQ ID NO: 329119 - RNA, 19 nt, Artificial Sequence
  Description of Artificial Sequence: Synthetic oligonucleotide
gagccggcuuauucaaagc

SEQ ID NO: 329120 - RNA, 19 nt, Artificial Sequence
  Description of Artificial Sequence: Synthetic oligonucleotide
accgggcgguagcaggacc

SEQ ID NO: 329121 - RNA, 19 nt, Artificial Sequence
  Description of Artificial Sequence: Synthetic oligonucleotide
gguaccuaggaugaagaca

SEQ ID NO: 329122 - RNA, 19 nt, Artificial Sequence
  Description of Artificial Sequence: Synthetic oligonucleotide
guauuugccuucccacaca

SEQ ID NO: 329123 - RNA, 19 nt, Artificial Sequence
  Description of Artificial Sequence: Synthetic oligonucleotide
uauuuuggucccagccaua

SEQ ID NO: 329124 - RNA, 19 nt, Artificial Sequence
  Description of Artificial Sequence: Synthetic oligonucleotide
uccccggcaagagaaugcc

SEQ ID NO: 329125 - RNA, 19 nt, Artificial Sequence
  Description of Artificial Sequence: Synthetic oligonucleotide
cauuaauaguggcacucaa

SEQ ID NO: 329126 - RNA, 19 nt, Artificial Sequence
  Description of Artificial Sequence: Synthetic oligonucleotide
agcaccuaucguguuauaa

SEQ ID NO: 329127 - RNA, 19 nt, Artificial Sequence
  Description of Artificial Sequence: Synthetic oligonucleotide
ccagaggacacgaaugauc

SEQ ID NO: 329128 - RNA, 19 nt, Artificial Sequence
  Description of Artificial Sequence: Synthetic oligonucleotide
acagucgcccuagacuuug

SEQ ID NO: 329129 - RNA, 19 nt, Artificial Sequence
  Description of Artificial Sequence: Synthetic oligonucleotide
caccuaucguguuauaacu

SEQ ID NO: 329130 - RNA, 19 nt, Artificial Sequence
  Description of Artificial Sequence: Synthetic oligonucleotide
acacaucgcacgcuaguuu

SEQ ID NO: 329131 - RNA, 19 nt, Artificial Sequence
  Description of Artificial Sequence: Synthetic oligonucleotide
aguuuacacaucgcacgcu

SEQ ID NO: 329132 - RNA, 19 nt, Artificial Sequence
  Description of Artificial Sequence: Synthetic oligonucleotide
uagauuugagccggcuuau

SEQ ID NO: 329133 - RNA, 19 nt, Artificial Sequence
  Description of Artificial Sequence: Synthetic oligonucleotide
gucgaugagagcccagaaa

SEQ ID NO: 329134 - RNA, 19 nt, Artificial Sequence
  Description of Artificial Sequence: Synthetic oligonucleotide
gucgcaccaaaauaagagu

SEQ ID NO: 329135 - RNA, 19 nt, Artificial Sequence
  Description of Artificial Sequence: Synthetic oligonucleotide
ccggcuuauucaaagccag

SEQ ID NO: 329136 - RNA, 19 nt, Artificial Sequence
  Description of Artificial Sequence: Synthetic oligonucleotide
uacacaucgcacgcuaguu

SEQ ID NO: 329137 - RNA, 19 nt, Artificial Sequence
  Description of Artificial Sequence: Synthetic oligonucleotide
guaguaccaccagaggaca

SEQ ID NO: 329138 - RNA, 19 nt, Artificial Sequence
  Description of Artificial Sequence: Synthetic oligonucleotide
ggaagcgaaguuguuggug

SEQ ID NO: 329139 - RNA, 19 nt, Artificial Sequence
  Description of Artificial Sequence: Synthetic oligonucleotide
agugaugcaucgaaauguu

SEQ ID NO: 329140 - RNA, 19 nt, Artificial Sequence
  Description of Artificial Sequence: Synthetic oligonucleotide
uuaggaccaauuggcuccu

SEQ ID NO: 329141 - RNA, 19 nt, Artificial Sequence
  Description of Artificial Sequence: Synthetic oligonucleotide
ucacccuacagucgcccua

SEQ ID NO: 329142 - RNA, 19 nt, Artificial Sequence
  Description of Artificial Sequence: Synthetic oligonucleotide
cuacagucgcccuagacuu

SEQ ID NO: 329143 - RNA, 19 nt, Artificial Sequence
  Description of Artificial Sequence: Synthetic oligonucleotide
acgagcgucagggcacaac

SEQ ID NO: 329144 - RNA, 19 nt, Artificial Sequence
  Description of Artificial Sequence: Synthetic oligonucleotide
ggcacaacucauacugugc

SEQ ID NO: 329145 - RNA, 19 nt, Artificial Sequence
  Description of Artificial Sequence: Synthetic oligonucleotide
cuguuacgagcgucagggc

SEQ ID NO: 329146 - RNA, 19 nt, Artificial Sequence
  Description of Artificial Sequence: Synthetic oligonucleotide
caugucugauucuccugca

SEQ ID NO: 329147 - RNA, 19 nt, Artificial Sequence
  Description of Artificial Sequence: Synthetic oligonucleotide
ugcccguugauggcaguca

SEQ ID NO: 329148 - RNA, 19 nt, Artificial Sequence
  Description of Artificial Sequence: Synthetic oligonucleotide
agcucgucuggaugauugu

SEQ ID NO: 329149 - RNA, 19 nt, Artificial Sequence
  Description of Artificial Sequence: Synthetic oligonucleotide
gugguauauccagaugaga

SEQ ID NO: 329150 - RNA, 19 nt, Artificial Sequence
  Description of Artificial Sequence: Synthetic oligonucleotide
ggccagacuagugacagca

SEQ ID NO: 329151 - RNA, 19 nt, Artificial Sequence
  Description of Artificial Sequence: Synthetic oligonucleotide
gccgcgaugcaagaggaag

SEQ ID NO: 329152 - RNA, 19 nt, Artificial Sequence
  Description of Artificial Sequence: Synthetic oligonucleotide
uuacgagcgucagggcaca

SEQ ID NO: 329153 - RNA, 19 nt, Artificial Sequence
  Description of Artificial Sequence: Synthetic oligonucleotide
ccuaucguguuauaacuaa

SEQ ID NO: 329154 - RNA, 19 nt, Artificial Sequence
  Description of Artificial Sequence: Synthetic oligonucleotide
gacagaggauagaccauaa

SEQ ID NO: 329155 - RNA, 19 nt, Artificial Sequence
  Description of Artificial Sequence: Synthetic oligonucleotide
ccgcgaugcaagaggaagg

SEQ ID NO: 329156 - RNA, 19 nt, Artificial Sequence
  Description of Artificial Sequence: Synthetic oligonucleotide
augaccccgcagcucgucu

SEQ ID NO: 329157 - RNA, 19 nt, Artificial Sequence
  Description of Artificial Sequence: Synthetic oligonucleotide
ccuacuuguauaaucugua

SEQ ID NO: 329158 - RNA, 19 nt, Artificial Sequence
  Description of Artificial Sequence: Synthetic oligonucleotide
cuacuuguauaaucuguau

SEQ ID NO: 329159 - RNA, 19 nt, Artificial Sequence
  Description of Artificial Sequence: Synthetic oligonucleotide
acgaguacaugaggacgug

SEQ ID NO: 329160 - RNA, 19 nt, Artificial Sequence
  Description of Artificial Sequence: Synthetic oligonucleotide
gcaaacugauauuuacaua

SEQ ID NO: 329161 - RNA, 19 nt, Artificial Sequence
  Description of Artificial Sequence: Synthetic oligonucleotide
ugcaagcgggcgcgggaac

SEQ ID NO: 329162 - RNA, 19 nt, Artificial Sequence
  Description of Artificial Sequence: Synthetic oligonucleotide
augugcaagcgggcgcggg

SEQ ID NO: 329163 - RNA, 19 nt, Artificial Sequence
  Description of Artificial Sequence: Synthetic oligonucleotide
ccaaacgaugggaaguaga

SEQ ID NO: 329164 - RNA, 19 nt, Artificial Sequence
  Description of Artificial Sequence: Synthetic oligonucleotide
ggaccgcgcgagcaggagg

SEQ ID NO: 329165 - RNA, 19 nt, Artificial Sequence
  Description of Artificial Sequence: Synthetic oligonucleotide
accuaucguguuauaacua

SEQ ID NO: 329166 - RNA, 19 nt, Artificial Sequence
  Description of Artificial Sequence: Synthetic oligonucleotide
auaugccuacuuguauaau

SEQ ID NO: 329167 - RNA, 19 nt, Artificial Sequence
  Description of Artificial Sequence: Synthetic oligonucleotide
cuaucguguuauaacuaau

SEQ ID NO: 329168 - RNA, 19 nt, Artificial Sequence
  Description of Artificial Sequence: Synthetic oligonucleotide
gugaugcaucgaaauguuc

SEQ ID NO: 329169 - RNA, 19 nt, Artificial Sequence
  Description of Artificial Sequence: Synthetic oligonucleotide
augcaucgaaauguuccau

SEQ ID NO: 329170 - RNA, 19 nt, Artificial Sequence
  Description of Artificial Sequence: Synthetic oligonucleotide
caagagaaugccugcuuau

SEQ ID NO: 329171 - RNA, 19 nt, Artificial Sequence
  Description of Artificial Sequence: Synthetic oligonucleotide
gucaaucaucuaagaugug

SEQ ID NO: 329172 - RNA, 19 nt, Artificial Sequence
  Description of Artificial Sequence: Synthetic oligonucleotide
gcacaacucauacugugcu

SEQ ID NO: 329173 - RNA, 19 nt, Artificial Sequence
  Description of Artificial Sequence: Synthetic oligonucleotide
gguucgcaucuccaaguca

SEQ ID NO: 329174 - RNA, 19 nt, Artificial Sequence
  Description of Artificial Sequence: Synthetic oligonucleotide
accagaggacacgaaugau

SEQ ID NO: 329175 - RNA, 19 nt, Artificial Sequence
  Description of Artificial Sequence: Synthetic oligonucleotide
cagucgcccuagacuuugg

SEQ ID NO: 329176 - RNA, 19 nt, Artificial Sequence
  Description of Artificial Sequence: Synthetic oligonucleotide
guugagugucgcaccaaaa

SEQ ID NO: 329177 - RNA, 19 nt, Artificial Sequence
  Description of Artificial Sequence: Synthetic oligonucleotide
ccaguaaugcccugaaaua

SEQ ID NO: 329178 - RNA, 19 nt, Artificial Sequence
  Description of Artificial Sequence: Synthetic oligonucleotide
gggcgcgggaacaggagcg

SEQ ID NO: 329179 - RNA, 19 nt, Artificial Sequence
  Description of Artificial Sequence: Synthetic oligonucleotide
aucacacgccguggucugg

SEQ ID NO: 329180 - RNA, 19 nt, Artificial Sequence
  Description of Artificial Sequence: Synthetic oligonucleotide
ccggcaagagaaugccugc

SEQ ID NO: 329181 - RNA, 19 nt, Artificial Sequence
  Description of Artificial Sequence: Synthetic oligonucleotide
acgacugcuuuggacccgu

SEQ ID NO: 329182 - RNA, 19 nt, Artificial Sequence
  Description of Artificial Sequence: Synthetic oligonucleotide
cagccgcgaugcaagagga

SEQ ID NO: 329183 - RNA, 19 nt, Artificial Sequence
  Description of Artificial Sequence: Synthetic oligonucleotide
acaucgcacgcuaguuuca

SEQ ID NO: 329184 - RNA, 19 nt, Artificial Sequence
  Description of Artificial Sequence: Synthetic oligonucleotide
ggcuccuuauaauaugaau

SEQ ID NO: 329185 - RNA, 19 nt, Artificial Sequence
  Description of Artificial Sequence: Synthetic oligonucleotide
ccuacagucgcccuagacu

SEQ ID NO: 329186 - RNA, 19 nt, Artificial Sequence
  Description of Artificial Sequence: Synthetic oligonucleotide
gacgcauggaagggacaga

SEQ ID NO: 329187 - RNA, 19 nt, Artificial Sequence
  Description of Artificial Sequence: Synthetic oligonucleotide
ggguucgcaucuccaaguc

SEQ ID NO: 329188 - RNA, 19 nt, Artificial Sequence
  Description of Artificial Sequence: Synthetic oligonucleotide
gccucaggugcacaagaca

SEQ ID NO: 329189 - RNA, 19 nt, Artificial Sequence
  Description of Artificial Sequence: Synthetic oligonucleotide
gcgaugcaagaggaaggcg

SEQ ID NO: 329190 - RNA, 19 nt, Artificial Sequence
  Description of Artificial Sequence: Synthetic oligonucleotide
cagcuguuacgagcgucag

SEQ ID NO: 329191 - RNA, 19 nt, Artificial Sequence
  Description of Artificial Sequence: Synthetic oligonucleotide
gaugaccccgcagcucguc

SEQ ID NO: 329192 - RNA, 19 nt, Artificial Sequence
  Description of Artificial Sequence: Synthetic oligonucleotide
ggaggaugugcaagcgggc

SEQ ID NO: 329193 - RNA, 19 nt, Artificial Sequence
  Description of Artificial Sequence: Synthetic oligonucleotide
gucacccuuccugaaaggu

SEQ ID NO: 329194 - RNA, 19 nt, Artificial Sequence
  Description of Artificial Sequence: Synthetic oligonucleotide
aucgcacgcuaguuucaua

SEQ ID NO: 329195 - RNA, 19 nt, Artificial Sequence
  Description of Artificial Sequence: Synthetic oligonucleotide
ccaagguuauacaccacua

SEQ ID NO: 329196 - RNA, 19 nt, Artificial Sequence
  Description of Artificial Sequence: Synthetic oligonucleotide
guacugagugaugcaucga

SEQ ID NO: 329197 - RNA, 19 nt, Artificial Sequence
  Description of Artificial Sequence: Synthetic oligonucleotide
ccugucacgugauaaacau

SEQ ID NO: 329198 - RNA, 19 nt, Artificial Sequence
  Description of Artificial Sequence: Synthetic oligonucleotide
gcgagcaggaggaugugca

SEQ ID NO: 329199 - RNA, 19 nt, Artificial Sequence
  Description of Artificial Sequence: Synthetic oligonucleotide
gccggcuuauucaaagcca

SEQ ID NO: 329200 - RNA, 19 nt, Artificial Sequence
  Description of Artificial Sequence: Synthetic oligonucleotide
gaaccacaauucagcaccu

SEQ ID NO: 329201 - RNA, 19 nt, Artificial Sequence
  Description of Artificial Sequence: Synthetic oligonucleotide
ggcguggugguagacaugu

SEQ ID NO: 329202 - RNA, 19 nt, Artificial Sequence
  Description of Artificial Sequence: Synthetic oligonucleotide
aggaccgcgcgagcaggag

SEQ ID NO: 329203 - RNA, 19 nt, Artificial Sequence
  Description of Artificial Sequence: Synthetic oligonucleotide
cuagggguuuugaacugau

SEQ ID NO: 329204 - RNA, 19 nt, Artificial Sequence
  Description of Artificial Sequence: Synthetic oligonucleotide
agauuugagccggcuuauu

SEQ ID NO: 329205 - RNA, 19 nt, Artificial Sequence
  Description of Artificial Sequence: Synthetic oligonucleotide
cgcgaugcaagaggaaggc

SEQ ID NO: 329206 - RNA, 19 nt, Artificial Sequence
  Description of Artificial Sequence: Synthetic oligonucleotide
gccuacuuguauaaucugu

SEQ ID NO: 329207 - RNA, 19 nt, Artificial Sequence
  Description of Artificial Sequence: Synthetic oligonucleotide
gucucacgacugcuuugga

SEQ ID NO: 329208 - RNA, 19 nt, Artificial Sequence
  Description of Artificial Sequence: Synthetic oligonucleotide
caucgaaauguuccauuuu

SEQ ID NO: 329209 - RNA, 19 nt, Artificial Sequence
  Description of Artificial Sequence: Synthetic oligonucleotide
ggacccguucugguggccc

SEQ ID NO: 329210 - RNA, 19 nt, Artificial Sequence
  Description of Artificial Sequence: Synthetic oligonucleotide
uggacccguucugguggcc

SEQ ID NO: 329211 - RNA, 19 nt, Artificial Sequence
  Description of Artificial Sequence: Synthetic oligonucleotide
cccuacagucgcccuagac

SEQ ID NO: 329212 - RNA, 19 nt, Artificial Sequence
  Description of Artificial Sequence: Synthetic oligonucleotide
ggucccagccauacaauua

SEQ ID NO: 329213 - RNA, 19 nt, Artificial Sequence
  Description of Artificial Sequence: Synthetic oligonucleotide
gacccguucugguggcccu

SEQ ID NO: 329214 - RNA, 19 nt, Artificial Sequence
  Description of Artificial Sequence: Synthetic oligonucleotide
ggaugauuguuagcacaaa

SEQ ID NO: 329215 - RNA, 19 nt, Artificial Sequence
  Description of Artificial Sequence: Synthetic oligonucleotide
accugcaaacugguaccua

SEQ ID NO: 329216 - RNA, 19 nt, Artificial Sequence
  Description of Artificial Sequence: Synthetic oligonucleotide
gcguguucccugacagaag

SEQ ID NO: 329217 - RNA, 19 nt, Artificial Sequence
  Description of Artificial Sequence: Synthetic oligonucleotide
cuccgagaggcuccuuucu

SEQ ID NO: 329218 - RNA, 19 nt, Artificial Sequence
  Description of Artificial Sequence: Synthetic oligonucleotide
accacgccucaggugcaca

SEQ ID NO: 329219 - RNA, 19 nt, Artificial Sequence
  Description of Artificial Sequence: Synthetic oligonucleotide
gugcaagcgggcgcgggaa

SEQ ID NO: 329220 - RNA, 19 nt, Artificial Sequence
  Description of Artificial Sequence: Synthetic oligonucleotide
caccacgccucaggugcac

SEQ ID NO: 329221 - RNA, 19 nt, Artificial Sequence
  Description of Artificial Sequence: Synthetic oligonucleotide
gccguggucuggagggugc

SEQ ID NO: 329222 - RNA, 19 nt, Artificial Sequence
  Description of Artificial Sequence: Synthetic oligonucleotide
cucacccuacagucgcccu

SEQ ID NO: 329223 - RNA, 19 nt, Artificial Sequence
  Description of Artificial Sequence: Synthetic oligonucleotide
caccgggcgguagcaggac

SEQ ID NO: 329224 - RNA, 19 nt, Artificial Sequence
  Description of Artificial Sequence: Synthetic oligonucleotide
gugucaugagugguucaau

SEQ ID NO: 329225 - RNA, 19 nt, Artificial Sequence
  Description of Artificial Sequence: Synthetic oligonucleotide
cgccucaggugcacaagac

SEQ ID NO: 329226 - RNA, 19 nt, Artificial Sequence
  Description of Artificial Sequence: Synthetic oligonucleotide
gcaagcgggcgcgggaaca

SEQ ID NO: 329227 - RNA, 19 nt, Artificial Sequence
  Description of Artificial Sequence: Synthetic oligonucleotide
gggaagcgaaguuguuggu

SEQ ID NO: 329228 - RNA, 19 nt, Artificial Sequence
  Description of Artificial Sequence: Synthetic oligonucleotide
uacgagcgucagggcacaa

SEQ ID NO: 329229 - RNA, 19 nt, Artificial Sequence
  Description of Artificial Sequence: Synthetic oligonucleotide
gcccugaaauagguacuga

SEQ ID NO: 329230 - RNA, 19 nt, Artificial Sequence
  Description of Artificial Sequence: Synthetic oligonucleotide
agccgcgaugcaagaggaa

SEQ ID NO: 329231 - RNA, 19 nt, Artificial Sequence
  Description of Artificial Sequence: Synthetic oligonucleotide
caucgcacgcuaguuucau

SEQ ID NO: 329232 - RNA, 19 nt, Artificial Sequence
  Description of Artificial Sequence: Synthetic oligonucleotide
gggacgcauggaagggaca

SEQ ID NO: 329233 - RNA, 19 nt, Artificial Sequence
  Description of Artificial Sequence: Synthetic oligonucleotide
ccguuccccaccucuuuaa

SEQ ID NO: 329234 - RNA, 19 nt, Artificial Sequence
  Description of Artificial Sequence: Synthetic oligonucleotide
ggcgcgggaacaggagcga

SEQ ID NO: 329235 - RNA, 19 nt, Artificial Sequence
  Description of Artificial Sequence: Synthetic oligonucleotide
ccgugucaauccuuucucu

SEQ ID NO: 329236 - RNA, 19 nt, Artificial Sequence
  Description of Artificial Sequence: Synthetic oligonucleotide
gcuaaacuuccaacacuuu

SEQ ID NO: 329237 - RNA, 19 nt, Artificial Sequence
  Description of Artificial Sequence: Synthetic oligonucleotide
accgcgcgagcaggaggau

SEQ ID NO: 329238 - RNA, 19 nt, Artificial Sequence
  Description of Artificial Sequence: Synthetic oligonucleotide
cgcacgcuaguuucauaaa

SEQ ID NO: 329239 - RNA, 19 nt, Artificial Sequence
  Description of Artificial Sequence: Synthetic oligonucleotide
gcccguugauggcagucau

SEQ ID NO: 329240 - RNA, 19 nt, Artificial Sequence
  Description of Artificial Sequence: Synthetic oligonucleotide
ccgcgcgagcaggaggaug

SEQ ID NO: 329241 - RNA, 19 nt, Artificial Sequence
  Description of Artificial Sequence: Synthetic oligonucleotide
ccaccacgccucaggugca

SEQ ID NO: 329242 - RNA, 19 nt, Artificial Sequence
  Description of Artificial Sequence: Synthetic oligonucleotide
gcgcgagcaggaggaugug

SEQ ID NO: 329243 - RNA, 19 nt, Artificial Sequence
  Description of Artificial Sequence: Synthetic oligonucleotide
cccguuccccaccucuuua

SEQ ID NO: 329244 - RNA, 19 nt, Artificial Sequence
  Description of Artificial Sequence: Synthetic oligonucleotide
ccgucaggguucgcaucuc

SEQ ID NO: 329245 - RNA, 19 nt, Artificial Sequence
  Description of Artificial Sequence: Synthetic oligonucleotide
cgccguggucuggagggug

SEQ ID NO: 329246 - RNA, 19 nt, Artificial Sequence
  Description of Artificial Sequence: Synthetic oligonucleotide
gcggcucugccgugucaau

SEQ ID NO: 329247 - RNA, 19 nt, Artificial Sequence
  Description of Artificial Sequence: Synthetic oligonucleotide
gcguggugguagacaugua

SEQ ID NO: 329248 - RNA, 19 nt, Artificial Sequence
  Description of Artificial Sequence: Synthetic oligonucleotide
cgacugcuuuggacccguu

SEQ ID NO: 329249 - RNA, 19 nt, Artificial Sequence
  Description of Artificial Sequence: Synthetic oligonucleotide
uuacuauaggccaagauca

SEQ ID NO: 329250 - RNA, 19 nt, Artificial Sequence
  Description of Artificial Sequence: Synthetic oligonucleotide
aagaaauagaccuacuaca

SEQ ID NO: 329251 - RNA, 19 nt, Artificial Sequence
  Description of Artificial Sequence: Synthetic oligonucleotide
uguaacaagggaaucagcc

SEQ ID NO: 329252 - RNA, 19 nt, Artificial Sequence
  Description of Artificial Sequence: Synthetic oligonucleotide
aauccuaauugccuccugc

SEQ ID NO: 329253 - RNA, 19 nt, Artificial Sequence
  Description of Artificial Sequence: Synthetic oligonucleotide
uaucgauaaguucugacag

SEQ ID NO: 329254 - RNA, 19 nt, Artificial Sequence
  Description of Artificial Sequence: Synthetic oligonucleotide
acuauucauacucagcaac

SEQ ID NO: 329255 - RNA, 19 nt, Artificial Sequence
  Description of Artificial Sequence: Synthetic oligonucleotide
uaaugaaggaggcugugcg

SEQ ID NO: 329256 - RNA, 19 nt, Artificial Sequence
  Description of Artificial Sequence: Synthetic oligonucleotide
cuuaaugccaaacaaguug

SEQ ID NO: 329257 - RNA, 19 nt, Artificial Sequence
  Description of Artificial Sequence: Synthetic oligonucleotide
ucuaaguuuauugacaaga

SEQ ID NO: 329258 - RNA, 19 nt, Artificial Sequence
  Description of Artificial Sequence: Synthetic oligonucleotide
auuggacucaaguauuggc

SEQ ID NO: 329259 - RNA, 19 nt, Artificial Sequence
  Description of Artificial Sequence: Synthetic oligonucleotide
aaauagaccuacuacacuu

SEQ ID NO: 329260 - RNA, 19 nt, Artificial Sequence
  Description of Artificial Sequence: Synthetic oligonucleotide
aaugcugauaucgauaagu

SEQ ID NO: 329261 - RNA, 19 nt, Artificial Sequence
  Description of Artificial Sequence: Synthetic oligonucleotide
cauugcacggccuuuaucc

SEQ ID NO: 329262 - RNA, 19 nt, Artificial Sequence
  Description of Artificial Sequence: Synthetic oligonucleotide
uugauagugaccgaagcgg

SEQ ID NO: 329263 - RNA, 19 nt, Artificial Sequence
  Description of Artificial Sequence: Synthetic oligonucleotide
uguacuaccccguugguca

SEQ ID NO: 329264 - RNA, 19 nt, Artificial Sequence
  Description of Artificial Sequence: Synthetic oligonucleotide
uauugacaagauaacaugu

SEQ ID NO: 329265 - RNA, 19 nt, Artificial Sequence
  Description of Artificial Sequence: Synthetic oligonucleotide
agacuauucauacucagca

SEQ ID NO: 329266 - RNA, 19 nt, Artificial Sequence
  Description of Artificial Sequence: Synthetic oligonucleotide
caaguauuggcucucgugg

SEQ ID NO: 329267 - RNA, 19 nt, Artificial Sequence
  Description of Artificial Sequence: Synthetic oligonucleotide
aagaucauggcacaccggu

SEQ ID NO: 329268 - RNA, 19 nt, Artificial Sequence
  Description of Artificial Sequence: Synthetic oligonucleotide
aaacacuugacugaaagaa

SEQ ID NO: 329269 - RNA, 19 nt, Artificial Sequence
  Description of Artificial Sequence: Synthetic oligonucleotide
guuuuggaaguauugcugg

SEQ ID NO: 329270 - RNA, 19 nt, Artificial Sequence
  Description of Artificial Sequence: Synthetic oligonucleotide
ugaauuugccagcugagga

SEQ ID NO: 329271 - RNA, 19 nt, Artificial Sequence
  Description of Artificial Sequence: Synthetic oligonucleotide
aguacuguaaccgguauuc

SEQ ID NO: 329272 - RNA, 19 nt, Artificial Sequence
  Description of Artificial Sequence: Synthetic oligonucleotide
gagaugguuaaucaagggc

SEQ ID NO: 329273 - RNA, 19 nt, Artificial Sequence
  Description of Artificial Sequence: Synthetic oligonucleotide
uugacugaaagaaagcuua

SEQ ID NO: 329274 - RNA, 19 nt, Artificial Sequence
  Description of Artificial Sequence: Synthetic oligonucleotide
ucuacagucgaccuuugca

SEQ ID NO: 329275 - RNA, 19 nt, Artificial Sequence
  Description of Artificial Sequence: Synthetic oligonucleotide
agcacauaaagccagcuca

SEQ ID NO: 329276 - RNA, 19 nt, Artificial Sequence
  Description of Artificial Sequence: Synthetic oligonucleotide
uuuaauaccucagcagcgg

SEQ ID NO: 329277 - RNA, 19 nt, Artificial Sequence
  Description of Artificial Sequence: Synthetic oligonucleotide
acuaagaacauugcacggc

SEQ ID NO: 329278 - RNA, 19 nt, Artificial Sequence
  Description of Artificial Sequence: Synthetic oligonucleotide
cuguauacaccuucuaugc

SEQ ID NO: 329279 - RNA, 19 nt, Artificial Sequence
  Description of Artificial Sequence: Synthetic oligonucleotide
  modified_base (9)..(9): a, c, u, g, unknown or other
ugcauuggnguuuugcuug

SEQ ID NO: 329280 - RNA, 19 nt, Artificial Sequence
  Description of Artificial Sequence: Synthetic oligonucleotide
auaucgauaaguucugaca

SEQ ID NO: 329281 - RNA, 19 nt, Artificial Sequence
  Description of Artificial Sequence: Synthetic oligonucleotide
ugugacgaagaaauagacc

SEQ ID NO: 329282 - RNA, 19 nt, Artificial Sequence
  Description of Artificial Sequence: Synthetic oligonucleotide
gacacuaagaacauugcac

SEQ ID NO: 329283 - RNA, 19 nt, Artificial Sequence
  Description of Artificial Sequence: Synthetic oligonucleotide
cuaauugccuccugcaggg

SEQ ID NO: 329284 - RNA, 19 nt, Artificial Sequence
  Description of Artificial Sequence: Synthetic oligonucleotide
ugggcauaagccaaguuga

SEQ ID NO: 329285 - RNA, 19 nt, Artificial Sequence
  Description of Artificial Sequence: Synthetic oligonucleotide
aguuuguuggccgucuucc

SEQ ID NO: 329286 - RNA, 19 nt, Artificial Sequence
  Description of Artificial Sequence: Synthetic oligonucleotide
aggaccgcgaucuuguagg

SEQ ID NO: 329287 - RNA, 19 nt, Artificial Sequence
  Description of Artificial Sequence: Synthetic oligonucleotide
gacacgauucuucaauaag

SEQ ID NO: 329288 - RNA, 19 nt, Artificial Sequence
  Description of Artificial Sequence: Synthetic oligonucleotide
uguggagaaggguuaaagc

SEQ ID NO: 329289 - RNA, 19 nt, Artificial Sequence
  Description of Artificial Sequence: Synthetic oligonucleotide
uauagccuccagauggccg

SEQ ID NO: 329290 - RNA, 19 nt, Artificial Sequence
  Description of Artificial Sequence: Synthetic oligonucleotide
cuaagaacauugcacggcc

SEQ ID NO: 329291 - RNA, 19 nt, Artificial Sequence
  Description of Artificial Sequence: Synthetic oligonucleotide
uucacgggaucauaggaag

SEQ ID NO: 329292 - RNA, 19 nt, Artificial Sequence
  Description of Artificial Sequence: Synthetic oligonucleotide
cucucgguaacccaaaaug

SEQ ID NO: 329293 - RNA, 19 nt, Artificial Sequence
  Description of Artificial Sequence: Synthetic oligonucleotide
uaauaccucagcagcggcg

SEQ ID NO: 329294 - RNA, 19 nt, Artificial Sequence
  Description of Artificial Sequence: Synthetic oligonucleotide
accgcgaucuuguagggcg

SEQ ID NO: 329295 - RNA, 19 nt, Artificial Sequence
  Description of Artificial Sequence: Synthetic oligonucleotide
ucaaguauuggcucucgug

SEQ ID NO: 329296 - RNA, 19 nt, Artificial Sequence
  Description of Artificial Sequence: Synthetic oligonucleotide
agagaugguuaaucaaggg

SEQ ID NO: 329297 - RNA, 19 nt, Artificial Sequence
  Description of Artificial Sequence: Synthetic oligonucleotide
gauaucgauaaguucugac

SEQ ID NO: 329298 - RNA, 19 nt, Artificial Sequence
  Description of Artificial Sequence: Synthetic oligonucleotide
gaaaucguucccucaagug

SEQ ID NO: 329299 - RNA, 19 nt, Artificial Sequence
  Description of Artificial Sequence: Synthetic oligonucleotide
aauggaauuugccaucauu

SEQ ID NO: 329300 - RNA, 19 nt, Artificial Sequence
  Description of Artificial Sequence: Synthetic oligonucleotide
ucucgguaacccaaaaugu

SEQ ID NO: 329301 - RNA, 19 nt, Artificial Sequence
  Description of Artificial Sequence: Synthetic oligonucleotide
gagguaaugcgcuucagca

SEQ ID NO: 329302 - RNA, 19 nt, Artificial Sequence
  Description of Artificial Sequence: Synthetic oligonucleotide
agcagcguaucucaggcuc

SEQ ID NO: 329303 - RNA, 19 nt, Artificial Sequence
  Description of Artificial Sequence: Synthetic oligonucleotide
aggaagaccgccaauacag

SEQ ID NO: 329304 - RNA, 19 nt, Artificial Sequence
  Description of Artificial Sequence: Synthetic oligonucleotide
ucauugcucugucaaacug

SEQ ID NO: 329305 - RNA, 19 nt, Artificial Sequence
  Description of Artificial Sequence: Synthetic oligonucleotide
agaugguuaaucaagggca

SEQ ID NO: 329306 - RNA, 19 nt, Artificial Sequence
  Description of Artificial Sequence: Synthetic oligonucleotide
ugaucguuggacuccuggg

SEQ ID NO: 329307 - RNA, 19 nt, Artificial Sequence
  Description of Artificial Sequence: Synthetic oligonucleotide
ucgguaacccaaaauguac

SEQ ID NO: 329308 - RNA, 19 nt, Artificial Sequence
  Description of Artificial Sequence: Synthetic oligonucleotide
uguauacaccuucuaugcc

SEQ ID NO: 329309 - RNA, 19 nt, Artificial Sequence
  Description of Artificial Sequence: Synthetic oligonucleotide
accgguauucuuuggagag

SEQ ID NO: 329310 - RNA, 19 nt, Artificial Sequence
  Description of Artificial Sequence: Synthetic oligonucleotide
ugcaagauacuucuucuuc

SEQ ID NO: 329311 - RNA, 19 nt, Artificial Sequence
  Description of Artificial Sequence: Synthetic oligonucleotide
ugagguaaugcgcuucagc

SEQ ID NO: 329312 - RNA, 19 nt, Artificial Sequence
  Description of Artificial Sequence: Synthetic oligonucleotide
agguuguuuaaguagcuga

SEQ ID NO: 329313 - RNA, 19 nt, Artificial Sequence
  Description of Artificial Sequence: Synthetic oligonucleotide
ucgauaaguucugacaggc

SEQ ID NO: 329314 - RNA, 19 nt, Artificial Sequence
  Description of Artificial Sequence: Synthetic oligonucleotide
aguauuggcucucguggac

SEQ ID NO: 329315 - RNA, 19 nt, Artificial Sequence
  Description of Artificial Sequence: Synthetic oligonucleotide
aucgauaaguucugacagg

SEQ ID NO: 329316 - RNA, 19 nt, Artificial Sequence
  Description of Artificial Sequence: Synthetic oligonucleotide
ugauagugaccgaagcggc

SEQ ID NO: 329317 - RNA, 19 nt, Artificial Sequence
  Description of Artificial Sequence: Synthetic oligonucleotide
ucuauccauaucagcaucu

SEQ ID NO: 329318 - RNA, 19 nt, Artificial Sequence
  Description of Artificial Sequence: Synthetic oligonucleotide
uaaccgguauucuuuggag

SEQ ID NO: 329319 - RNA, 19 nt, Artificial Sequence
  Description of Artificial Sequence: Synthetic oligonucleotide
caugcugacuguugggugg

SEQ ID NO: 329320 - RNA, 19 nt, Artificial Sequence
  Description of Artificial Sequence: Synthetic oligonucleotide
auugacaagauaacauguc

SEQ ID NO: 329321 - RNA, 19 nt, Artificial Sequence
  Description of Artificial Sequence: Synthetic oligonucleotide
aagaucaugugacgaagaa

SEQ ID NO: 329322 - RNA, 19 nt, Artificial Sequence
  Description of Artificial Sequence: Synthetic oligonucleotide
aggucggaguccuuuaggg

SEQ ID NO: 329323 - RNA, 19 nt, Artificial Sequence
  Description of Artificial Sequence: Synthetic oligonucleotide
uacuacacuuguuuuguga

SEQ ID NO: 329324 - RNA, 19 nt, Artificial Sequence
  Description of Artificial Sequence: Synthetic oligonucleotide
ugcacgcccgcauucaccg

SEQ ID NO: 329325 - RNA, 19 nt, Artificial Sequence
  Description of Artificial Sequence: Synthetic oligonucleotide
guuggcguguacuaccccg

SEQ ID NO: 329326 - RNA, 19 nt, Artificial Sequence
  Description of Artificial Sequence: Synthetic oligonucleotide
aaucaggcggucaaaauaa

SEQ ID NO: 329327 - RNA, 19 nt, Artificial Sequence
  Description of Artificial Sequence: Synthetic oligonucleotide
uuaauaccucagcagcggc

SEQ ID NO: 329328 - RNA, 19 nt, Artificial Sequence
  Description of Artificial Sequence: Synthetic oligonucleotide
ugggcaauccuaauugccu

SEQ ID NO: 329329 - RNA, 19 nt, Artificial Sequence
  Description of Artificial Sequence: Synthetic oligonucleotide
acacuugacugaaagaaag

SEQ ID NO: 329330 - RNA, 19 nt, Artificial Sequence
  Description of Artificial Sequence: Synthetic oligonucleotide
aauaaugaaggaggcugug

SEQ ID NO: 329331 - RNA, 19 nt, Artificial Sequence
  Description of Artificial Sequence: Synthetic oligonucleotide
aucauggcacaccgguucc

SEQ ID NO: 329332 - RNA, 19 nt, Artificial Sequence
  Description of Artificial Sequence: Synthetic oligonucleotide
agacacacgugaucguugg

SEQ ID NO: 329333 - RNA, 19 nt, Artificial Sequence
  Description of Artificial Sequence: Synthetic oligonucleotide
uaaucaagggcaccccaug

SEQ ID NO: 329334 - RNA, 19 nt, Artificial Sequence
  Description of Artificial Sequence: Synthetic oligonucleotide
ucugucaaacuguauuuuc

SEQ ID NO: 329335 - RNA, 19 nt, Artificial Sequence
  Description of Artificial Sequence: Synthetic oligonucleotide
ugccggaagaucauggcac

SEQ ID NO: 329336 - RNA, 19 nt, Artificial Sequence
  Description of Artificial Sequence: Synthetic oligonucleotide
aaguauuggcucucgugga

SEQ ID NO: 329337 - RNA, 19 nt, Artificial Sequence
  Description of Artificial Sequence: Synthetic oligonucleotide
aaacaaguuggcguguacu

SEQ ID NO: 329338 - RNA, 19 nt, Artificial Sequence
  Description of Artificial Sequence: Synthetic oligonucleotide
auauccuucaauucgccuu

SEQ ID NO: 329339 - RNA, 19 nt, Artificial Sequence
  Description of Artificial Sequence: Synthetic oligonucleotide
gaucguuggacuccugggc

SEQ ID NO: 329340 - RNA, 19 nt, Artificial Sequence
  Description of Artificial Sequence: Synthetic oligonucleotide
aaauaaugaaggaggcugu

SEQ ID NO: 329341 - RNA, 19 nt, Artificial Sequence
  Description of Artificial Sequence: Synthetic oligonucleotide
guauucuuuggagagggcc

SEQ ID NO: 329342 - RNA, 19 nt, Artificial Sequence
  Description of Artificial Sequence: Synthetic oligonucleotide
gaucacacagcauccauaa

SEQ ID NO: 329343 - RNA, 19 nt, Artificial Sequence
  Description of Artificial Sequence: Synthetic oligonucleotide
uggacacuaagaacauugc

SEQ ID NO: 329344 - RNA, 19 nt, Artificial Sequence
  Description of Artificial Sequence: Synthetic oligonucleotide
gagguucucgauugcagcc

SEQ ID NO: 329345 - RNA, 19 nt, Artificial Sequence
  Description of Artificial Sequence: Synthetic oligonucleotide
ugguuaaucaagggcaccc

SEQ ID NO: 329346 - RNA, 19 nt, Artificial Sequence
  Description of Artificial Sequence: Synthetic oligonucleotide
ggucaaaauaaugaaggag

SEQ ID NO: 329347 - RNA, 19 nt, Artificial Sequence
  Description of Artificial Sequence: Synthetic oligonucleotide
aagaccgccaauacagcuc

SEQ ID NO: 329348 - RNA, 19 nt, Artificial Sequence
  Description of Artificial Sequence: Synthetic oligonucleotide
uguaauaucugggcccugc

SEQ ID NO: 329349 - RNA, 19 nt, Artificial Sequence
  Description of Artificial Sequence: Synthetic oligonucleotide
aaccgguauucuuuggaga

SEQ ID NO: 329350 - RNA, 19 nt, Artificial Sequence
  Description of Artificial Sequence: Synthetic oligonucleotide
cagacuauucauacucagc

SEQ ID NO: 329351 - RNA, 19 nt, Artificial Sequence
  Description of Artificial Sequence: Synthetic oligonucleotide
augugacgaagaaauagac

SEQ ID NO: 329352 - RNA, 19 nt, Artificial Sequence
  Description of Artificial Sequence: Synthetic oligonucleotide
ugauucgcucucuacaguc

SEQ ID NO: 329353 - RNA, 19 nt, Artificial Sequence
  Description of Artificial Sequence: Synthetic oligonucleotide
agaccuacuacacuuguuu

SEQ ID NO: 329354 - RNA, 19 nt, Artificial Sequence
  Description of Artificial Sequence: Synthetic oligonucleotide
uguaaccgguauucuuugg

SEQ ID NO: 329355 - RNA, 19 nt, Artificial Sequence
  Description of Artificial Sequence: Synthetic oligonucleotide
uuucuagagaugguuaauc

SEQ ID NO: 329356 - RNA, 19 nt, Artificial Sequence
  Description of Artificial Sequence: Synthetic oligonucleotide
cugcagacacacgugaucg

SEQ ID NO: 329357 - RNA, 19 nt, Artificial Sequence
  Description of Artificial Sequence: Synthetic oligonucleotide
uuucugacaguaugucagc

SEQ ID NO: 329358 - RNA, 19 nt, Artificial Sequence
  Description of Artificial Sequence: Synthetic oligonucleotide
ccguauagccuccagaugg

SEQ ID NO: 329359 - RNA, 19 nt, Artificial Sequence
  Description of Artificial Sequence: Synthetic oligonucleotide
gaaucaggcggucaaaaua

SEQ ID NO: 329360 - RNA, 19 nt, Artificial Sequence
  Description of Artificial Sequence: Synthetic oligonucleotide
caggcggucaaaauaauga

SEQ ID NO: 329361 - RNA, 19 nt, Artificial Sequence
  Description of Artificial Sequence: Synthetic oligonucleotide
gugaucguuggacuccugg

SEQ ID NO: 329362 - RNA, 19 nt, Artificial Sequence
  Description of Artificial Sequence: Synthetic oligonucleotide
agcagaacauagcuaucag

SEQ ID NO: 329363 - RNA, 19 nt, Artificial Sequence
  Description of Artificial Sequence: Synthetic oligonucleotide
cucuuacagacacaucaag

SEQ ID NO: 329364 - RNA, 19 nt, Artificial Sequence
  Description of Artificial Sequence: Synthetic oligonucleotide
uccagacuauucauacuca

SEQ ID NO: 329365 - RNA, 19 nt, Artificial Sequence
  Description of Artificial Sequence: Synthetic oligonucleotide
cacuugacugaaagaaagc

SEQ ID NO: 329366 - RNA, 19 nt, Artificial Sequence
  Description of Artificial Sequence: Synthetic oligonucleotide
ugcauuacaacagcuuuuc

SEQ ID NO: 329367 - RNA, 19 nt, Artificial Sequence
  Description of Artificial Sequence: Synthetic oligonucleotide
gguuaaagccuguucuggg

SEQ ID NO: 329368 - RNA, 19 nt, Artificial Sequence
  Description of Artificial Sequence: Synthetic oligonucleotide
guaacaagggaaucagcca

SEQ ID NO: 329369 - RNA, 19 nt, Artificial Sequence
  Description of Artificial Sequence: Synthetic oligonucleotide
uccccauuacuuuugcccu

SEQ ID NO: 329370 - RNA, 19 nt, Artificial Sequence
  Description of Artificial Sequence: Synthetic oligonucleotide
gaaguauugcuggagggca

SEQ ID NO: 329371 - RNA, 19 nt, Artificial Sequence
  Description of Artificial Sequence: Synthetic oligonucleotide
acggcaaaggacucggugu

SEQ ID NO: 329372 - RNA, 19 nt, Artificial Sequence
  Description of Artificial Sequence: Synthetic oligonucleotide
agagcgacggcaaaggacu

SEQ ID NO: 329373 - RNA, 19 nt, Artificial Sequence
  Description of Artificial Sequence: Synthetic oligonucleotide
  modified_base (10)..(10): a, c, u, g, unknown or other
uugcauuggnguuuugcuu

SEQ ID NO: 329374 - RNA, 19 nt, Artificial Sequence
  Description of Artificial Sequence: Synthetic oligonucleotide
gauucgcucucuacagucg

SEQ ID NO: 329375 - RNA, 19 nt, Artificial Sequence
  Description of Artificial Sequence: Synthetic oligonucleotide
uauaggccaagaucaugug

SEQ ID NO: 329376 - RNA, 19 nt, Artificial Sequence
  Description of Artificial Sequence: Synthetic oligonucleotide
gacggcaaaggacucggug

SEQ ID NO: 329377 - RNA, 19 nt, Artificial Sequence
  Description of Artificial Sequence: Synthetic oligonucleotide
augguuaaucaagggcacc

SEQ ID NO: 329378 - RNA, 19 nt, Artificial Sequence
  Description of Artificial Sequence: Synthetic oligonucleotide
auagaccuacuacacuugu

SEQ ID NO: 329379 - RNA, 19 nt, Artificial Sequence
  Description of Artificial Sequence: Synthetic oligonucleotide
guuugauucugaucugcac

SEQ ID NO: 329380 - RNA, 19 nt, Artificial Sequence
  Description of Artificial Sequence: Synthetic oligonucleotide
ucugagcuugcauuacaac

SEQ ID NO: 329381 - RNA, 19 nt, Artificial Sequence
  Description of Artificial Sequence: Synthetic oligonucleotide
uauuggcucucguggacgc

SEQ ID NO: 329382 - RNA, 19 nt, Artificial Sequence
  Description of Artificial Sequence: Synthetic oligonucleotide
ucuugaacacggagguugu

SEQ ID NO: 329383 - RNA, 19 nt, Artificial Sequence
  Description of Artificial Sequence: Synthetic oligonucleotide
gaugguuaaucaagggcac

SEQ ID NO: 329384 - RNA, 19 nt, Artificial Sequence
  Description of Artificial Sequence: Synthetic oligonucleotide
ugaucacacagcauccaua

SEQ ID NO: 329385 - RNA, 19 nt, Artificial Sequence
  Description of Artificial Sequence: Synthetic oligonucleotide
aaagcucucgguaacccaa

SEQ ID NO: 329386 - RNA, 19 nt, Artificial Sequence
  Description of Artificial Sequence: Synthetic oligonucleotide
guuaaagccuguucuggga

SEQ ID NO: 329387 - RNA, 19 nt, Artificial Sequence
  Description of Artificial Sequence: Synthetic oligonucleotide
agaccgccaauacagcucu

SEQ ID NO: 329388 - RNA, 19 nt, Artificial Sequence
  Description of Artificial Sequence: Synthetic oligonucleotide
gccaauacagcucugccac

SEQ ID NO: 329389 - RNA, 19 nt, Artificial Sequence
  Description of Artificial Sequence: Synthetic oligonucleotide
acaccgguuccucuccugg

SEQ ID NO: 329390 - RNA, 19 nt, Artificial Sequence
  Description of Artificial Sequence: Synthetic oligonucleotide
caucucguucagcaggacc

SEQ ID NO: 329391 - RNA, 19 nt, Artificial Sequence
  Description of Artificial Sequence: Synthetic oligonucleotide
agcggcagugcagagcagc

SEQ ID NO: 329392 - RNA, 19 nt, Artificial Sequence
  Description of Artificial Sequence: Synthetic oligonucleotide
aaagcuuacuauaggccaa

SEQ ID NO: 329393 - RNA, 19 nt, Artificial Sequence
  Description of Artificial Sequence: Synthetic oligonucleotide
ccuaauugccuccugcagg

SEQ ID NO: 329394 - RNA, 19 nt, Artificial Sequence
  Description of Artificial Sequence: Synthetic oligonucleotide
aguuggcguguacuacccc

SEQ ID NO: 329395 - RNA, 19 nt, Artificial Sequence
  Description of Artificial Sequence: Synthetic oligonucleotide
guaaccgguauucuuugga

SEQ ID NO: 329396 - RNA, 19 nt, Artificial Sequence
  Description of Artificial Sequence: Synthetic oligonucleotide
accgccaauacagcucugc

SEQ ID NO: 329397 - RNA, 19 nt, Artificial Sequence
  Description of Artificial Sequence: Synthetic oligonucleotide
cagauggccguuuucugug

SEQ ID NO: 329398 - RNA, 19 nt, Artificial Sequence
  Description of Artificial Sequence: Synthetic oligonucleotide
gguaacccaaaauguacug

SEQ ID NO: 329399 - RNA, 19 nt, Artificial Sequence
  Description of Artificial Sequence: Synthetic oligonucleotide
cuauaggccaagaucaugu

SEQ ID NO: 329400 - RNA, 19 nt, Artificial Sequence
  Description of Artificial Sequence: Synthetic oligonucleotide
aguguaauaucugggcccu

SEQ ID NO: 329401 - RNA, 19 nt, Artificial Sequence
  Description of Artificial Sequence: Synthetic oligonucleotide
acauugcacggccuuuauc

SEQ ID NO: 329402 - RNA, 19 nt, Artificial Sequence
  Description of Artificial Sequence: Synthetic oligonucleotide
cauuggacucaaguauugg

SEQ ID NO: 329403 - RNA, 19 nt, Artificial Sequence
  Description of Artificial Sequence: Synthetic oligonucleotide
uggugcugcggccguauag

SEQ ID NO: 329404 - RNA, 19 nt, Artificial Sequence
  Description of Artificial Sequence: Synthetic oligonucleotide
gcugauaucgauaaguucu

SEQ ID NO: 329405 - RNA, 19 nt, Artificial Sequence
  Description of Artificial Sequence: Synthetic oligonucleotide
guauuggcucucguggacg

SEQ ID NO: 329406 - RNA, 19 nt, Artificial Sequence
  Description of Artificial Sequence: Synthetic oligonucleotide
uguagggcgucacccaguc

SEQ ID NO: 329407 - RNA, 19 nt, Artificial Sequence
  Description of Artificial Sequence: Synthetic oligonucleotide
ugacgaagaaauagaccua

SEQ ID NO: 329408 - RNA, 19 nt, Artificial Sequence
  Description of Artificial Sequence: Synthetic oligonucleotide
guuaaucaagggcacccca

SEQ ID NO: 329409 - RNA, 19 nt, Artificial Sequence
  Description of Artificial Sequence: Synthetic oligonucleotide
cuacagucgaccuuugcaa

SEQ ID NO: 329410 - RNA, 19 nt, Artificial Sequence
  Description of Artificial Sequence: Synthetic oligonucleotide
ucccucaagugcuuuaaua

SEQ ID NO: 329411 - RNA, 19 nt, Artificial Sequence
  Description of Artificial Sequence: Synthetic oligonucleotide
uucuuuaguuucugacagu

SEQ ID NO: 329412 - RNA, 19 nt, Artificial Sequence
  Description of Artificial Sequence: Synthetic oligonucleotide
acuauaggccaagaucaug

SEQ ID NO: 329413 - RNA, 19 nt, Artificial Sequence
  Description of Artificial Sequence: Synthetic oligonucleotide
acagaggaccacugcaaga

SEQ ID NO: 329414 - RNA, 19 nt, Artificial Sequence
  Description of Artificial Sequence: Synthetic oligonucleotide
gaggaagaccgccaauaca

SEQ ID NO: 329415 - RNA, 19 nt, Artificial Sequence
  Description of Artificial Sequence: Synthetic oligonucleotide
auucgcucucuacagucga

SEQ ID NO: 329416 - RNA, 19 nt, Artificial Sequence
  Description of Artificial Sequence: Synthetic oligonucleotide
gacuauucauacucagcaa

SEQ ID NO: 329417 - RNA, 19 nt, Artificial Sequence
  Description of Artificial Sequence: Synthetic oligonucleotide
aaguauugcuggagggcag

SEQ ID NO: 329418 - RNA, 19 nt, Artificial Sequence
  Description of Artificial Sequence: Synthetic oligonucleotide
aacauugcacggccuuuau

SEQ ID NO: 329419 - RNA, 19 nt, Artificial Sequence
  Description of Artificial Sequence: Synthetic oligonucleotide
ugggauucccaggaugagc

SEQ ID NO: 329420 - RNA, 19 nt, Artificial Sequence
  Description of Artificial Sequence: Synthetic oligonucleotide
cagagagcgacggcaaagg

SEQ ID NO: 329421 - RNA, 19 nt, Artificial Sequence
  Description of Artificial Sequence: Synthetic oligonucleotide
gguaaugcgcuucagcaaa

SEQ ID NO: 329422 - RNA, 19 nt, Artificial Sequence
  Description of Artificial Sequence: Synthetic oligonucleotide
gagagcgacggcaaaggac

SEQ ID NO: 329423 - RNA, 19 nt, Artificial Sequence
  Description of Artificial Sequence: Synthetic oligonucleotide
gcagaacauagcuaucagc

SEQ ID NO: 329424 - RNA, 19 nt, Artificial Sequence
  Description of Artificial Sequence: Synthetic oligonucleotide
gucugugugagggugccag

SEQ ID NO: 329425 - RNA, 19 nt, Artificial Sequence
  Description of Artificial Sequence: Synthetic oligonucleotide
aaugcuccagcagaacaua

SEQ ID NO: 329426 - RNA, 19 nt, Artificial Sequence
  Description of Artificial Sequence: Synthetic oligonucleotide
uacuauaggccaagaucau

SEQ ID NO: 329427 - RNA, 19 nt, Artificial Sequence
  Description of Artificial Sequence: Synthetic oligonucleotide
agccguuagugcucuucac

SEQ ID NO: 329428 - RNA, 19 nt, Artificial Sequence
  Description of Artificial Sequence: Synthetic oligonucleotide
gggcucaauggccaugugg

SEQ ID NO: 329429 - RNA, 19 nt, Artificial Sequence
  Description of Artificial Sequence: Synthetic oligonucleotide
auaagcuuguacagcuuug

SEQ ID NO: 329430 - RNA, 19 nt, Artificial Sequence
  Description of Artificial Sequence: Synthetic oligonucleotide
accccguuggucaucauug

SEQ ID NO: 329431 - RNA, 19 nt, Artificial Sequence
  Description of Artificial Sequence: Synthetic oligonucleotide
gcauucaccgacuccagac

SEQ ID NO: 329432 - RNA, 19 nt, Artificial Sequence
  Description of Artificial Sequence: Synthetic oligonucleotide
cagacacacgugaucguug

SEQ ID NO: 329433 - RNA, 19 nt, Artificial Sequence
  Description of Artificial Sequence: Synthetic oligonucleotide
uuggcguguacuaccccgu

SEQ ID NO: 329434 - RNA, 19 nt, Artificial Sequence
  Description of Artificial Sequence: Synthetic oligonucleotide
agguaaugcgcuucagcaa

SEQ ID NO: 329435 - RNA, 19 nt, Artificial Sequence
  Description of Artificial Sequence: Synthetic oligonucleotide
ggaaguauugcuggagggc

SEQ ID NO: 329436 - RNA, 19 nt, Artificial Sequence
  Description of Artificial Sequence: Synthetic oligonucleotide
cucgauugcagccuccaga

SEQ ID NO: 329437 - RNA, 19 nt, Artificial Sequence
  Description of Artificial Sequence: Synthetic oligonucleotide
uugaacacggagguuguuu

SEQ ID NO: 329438 - RNA, 19 nt, Artificial Sequence
  Description of Artificial Sequence: Synthetic oligonucleotide
gaggacgcugaucaccauc

SEQ ID NO: 329439 - RNA, 19 nt, Artificial Sequence
  Description of Artificial Sequence: Synthetic oligonucleotide
caagaucaugugacgaaga

SEQ ID NO: 329440 - RNA, 19 nt, Artificial Sequence
  Description of Artificial Sequence: Synthetic oligonucleotide
ucggcuccagugagaauca

SEQ ID NO: 329441 - RNA, 19 nt, Artificial Sequence
  Description of Artificial Sequence: Synthetic oligonucleotide
auucaccgacuccagacua

SEQ ID NO: 329442 - RNA, 19 nt, Artificial Sequence
  Description of Artificial Sequence: Synthetic oligonucleotide
caaacaaguuggcguguac

SEQ ID NO: 329443 - RNA, 19 nt, Artificial Sequence
  Description of Artificial Sequence: Synthetic oligonucleotide
caguccuuaaugccaaaca

SEQ ID NO: 329444 - RNA, 19 nt, Artificial Sequence
  Description of Artificial Sequence: Synthetic oligonucleotide
acucaaguauuggcucucg

SEQ ID NO: 329445 - RNA, 19 nt, Artificial Sequence
  Description of Artificial Sequence: Synthetic oligonucleotide
ucgcucucuacagucgacc

SEQ ID NO: 329446 - RNA, 19 nt, Artificial Sequence
  Description of Artificial Sequence: Synthetic oligonucleotide
aauucgccuucagccauca

SEQ ID NO: 329447 - RNA, 19 nt, Artificial Sequence
  Description of Artificial Sequence: Synthetic oligonucleotide
ggcggucaaaauaaugaag

SEQ ID NO: 329448 - RNA, 19 nt, Artificial Sequence
  Description of Artificial Sequence: Synthetic oligonucleotide
cugacggcgccuucucccg

SEQ ID NO: 329449 - RNA, 19 nt, Artificial Sequence
  Description of Artificial Sequence: Synthetic oligonucleotide
cagccucuaaguuuauuga

SEQ ID NO: 329450 - RNA, 19 nt, Artificial Sequence
  Description of Artificial Sequence: Synthetic oligonucleotide
cacgugaucguuggacucc

SEQ ID NO: 329451 - RNA, 19 nt, Artificial Sequence
  Description of Artificial Sequence: Synthetic oligonucleotide
ucguccccauuacuuuugc

SEQ ID NO: 329452 - RNA, 19 nt, Artificial Sequence
  Description of Artificial Sequence: Synthetic oligonucleotide
uggguggaaaucguucccu

SEQ ID NO: 329453 - RNA, 19 nt, Artificial Sequence
  Description of Artificial Sequence: Synthetic oligonucleotide
agguucagagcagcguauc

SEQ ID NO: 329454 - RNA, 19 nt, Artificial Sequence
  Description of Artificial Sequence: Synthetic oligonucleotide
uucucgauugcagccucca

SEQ ID NO: 329455 - RNA, 19 nt, Artificial Sequence
  Description of Artificial Sequence: Synthetic oligonucleotide
ggcaauccuaauugccucc

SEQ ID NO: 329456 - RNA, 19 nt, Artificial Sequence
  Description of Artificial Sequence: Synthetic oligonucleotide
uucaccgacuccagacuau

SEQ ID NO: 329457 - RNA, 19 nt, Artificial Sequence
  Description of Artificial Sequence: Synthetic oligonucleotide
cugguucaguuccagaaaa

SEQ ID NO: 329458 - RNA, 19 nt, Artificial Sequence
  Description of Artificial Sequence: Synthetic oligonucleotide
cguuuuggaaguauugcug

SEQ ID NO: 329459 - RNA, 19 nt, Artificial Sequence
  Description of Artificial Sequence: Synthetic oligonucleotide
cucgguaacccaaaaugua

SEQ ID NO: 329460 - RNA, 19 nt, Artificial Sequence
  Description of Artificial Sequence: Synthetic oligonucleotide
aggacgcugaucaccaucu

SEQ ID NO: 329461 - RNA, 19 nt, Artificial Sequence
  Description of Artificial Sequence: Synthetic oligonucleotide
ucucccgugcggcccaucu

SEQ ID NO: 329462 - RNA, 19 nt, Artificial Sequence
  Description of Artificial Sequence: Synthetic oligonucleotide
ccagacuauucauacucag

SEQ ID NO: 329463 - RNA, 19 nt, Artificial Sequence
  Description of Artificial Sequence: Synthetic oligonucleotide
agagagcgacggcaaagga

SEQ ID NO: 329464 - RNA, 19 nt, Artificial Sequence
  Description of Artificial Sequence: Synthetic oligonucleotide
gauagugaccgaagcggca

SEQ ID NO: 329465 - RNA, 19 nt, Artificial Sequence
  Description of Artificial Sequence: Synthetic oligonucleotide
uugugagccucagucauuu

SEQ ID NO: 329466 - RNA, 19 nt, Artificial Sequence
  Description of Artificial Sequence: Synthetic oligonucleotide
cucguccccauuacuuuug

SEQ ID NO: 329467 - RNA, 19 nt, Artificial Sequence
  Description of Artificial Sequence: Synthetic oligonucleotide
ggacacuaagaacauugca

SEQ ID NO: 329468 - RNA, 19 nt, Artificial Sequence
  Description of Artificial Sequence: Synthetic oligonucleotide
uagaccuacuacacuuguu

SEQ ID NO: 329469 - RNA, 19 nt, Artificial Sequence
  Description of Artificial Sequence: Synthetic oligonucleotide
guucugagcuugcauuaca

SEQ ID NO: 329470 - RNA, 19 nt, Artificial Sequence
  Description of Artificial Sequence: Synthetic oligonucleotide
uucgcucucuacagucgac

SEQ ID NO: 329471 - RNA, 19 nt, Artificial Sequence
  Description of Artificial Sequence: Synthetic oligonucleotide
aguguacagcuuaaacacu

SEQ ID NO: 329472 - RNA, 19 nt, Artificial Sequence
  Description of Artificial Sequence: Synthetic oligonucleotide
acaccuucuaugccauuaa

SEQ ID NO: 329473 - RNA, 19 nt, Artificial Sequence
  Description of Artificial Sequence: Synthetic oligonucleotide
cuuuagggcauccaucagu

SEQ ID NO: 329474 - RNA, 19 nt, Artificial Sequence
  Description of Artificial Sequence: Synthetic oligonucleotide
aguauugcuggagggcagu

SEQ ID NO: 329475 - RNA, 19 nt, Artificial Sequence
  Description of Artificial Sequence: Synthetic oligonucleotide
caggaccgcgaucuuguag

SEQ ID NO: 329476 - RNA, 19 nt, Artificial Sequence
  Description of Artificial Sequence: Synthetic oligonucleotide
cucuacagucgaccuuugc

SEQ ID NO: 329477 - RNA, 19 nt, Artificial Sequence
  Description of Artificial Sequence: Synthetic oligonucleotide
cuuccgccgcuccacgagg

SEQ ID NO: 329478 - RNA, 19 nt, Artificial Sequence
  Description of Artificial Sequence: Synthetic oligonucleotide
ccguuggucaucauuggac

SEQ ID NO: 329479 - RNA, 19 nt, Artificial Sequence
  Description of Artificial Sequence: Synthetic oligonucleotide
cagcagaacauagcuauca

SEQ ID NO: 329480 - RNA, 19 nt, Artificial Sequence
  Description of Artificial Sequence: Synthetic oligonucleotide
guaaugcgcuucagcaaag

SEQ ID NO: 329481 - RNA, 19 nt, Artificial Sequence
  Description of Artificial Sequence: Synthetic oligonucleotide
ucccugauucgcucucuac

SEQ ID NO: 329482 - RNA, 19 nt, Artificial Sequence
  Description of Artificial Sequence: Synthetic oligonucleotide
uaucucaggcuccggccau

SEQ ID NO: 329483 - RNA, 19 nt, Artificial Sequence
  Description of Artificial Sequence: Synthetic oligonucleotide
aggauagccccaucggcua

SEQ ID NO: 329484 - RNA, 19 nt, Artificial Sequence
  Description of Artificial Sequence: Synthetic oligonucleotide
ccguuagugcucuucacug

SEQ ID NO: 329485 - RNA, 19 nt, Artificial Sequence
  Description of Artificial Sequence: Synthetic oligonucleotide
ugcagacacacgugaucgu

SEQ ID NO: 329486 - RNA, 19 nt, Artificial Sequence
  Description of Artificial Sequence: Synthetic oligonucleotide
agcgacggcaaaggacucg

SEQ ID NO: 329487 - RNA, 19 nt, Artificial Sequence
  Description of Artificial Sequence: Synthetic oligonucleotide
uaccccguuggucaucauu

SEQ ID NO: 329488 - RNA, 19 nt, Artificial Sequence
  Description of Artificial Sequence: Synthetic oligonucleotide
uguuggccgucuucccagc

SEQ ID NO: 329489 - RNA, 19 nt, Artificial Sequence
  Description of Artificial Sequence: Synthetic oligonucleotide
auugcucugucaaacugua

SEQ ID NO: 329490 - RNA, 19 nt, Artificial Sequence
  Description of Artificial Sequence: Synthetic oligonucleotide
uuccgccgcuccacgaggc

SEQ ID NO: 329491 - RNA, 19 nt, Artificial Sequence
  Description of Artificial Sequence: Synthetic oligonucleotide
ucguuggacuccugggcaa

SEQ ID NO: 329492 - RNA, 19 nt, Artificial Sequence
  Description of Artificial Sequence: Synthetic oligonucleotide
cgcuccacgaggcugacgg

SEQ ID NO: 329493 - RNA, 19 nt, Artificial Sequence
  Description of Artificial Sequence: Synthetic oligonucleotide
gacucaaguauuggcucuc

SEQ ID NO: 329494 - RNA, 19 nt, Artificial Sequence
  Description of Artificial Sequence: Synthetic oligonucleotide
accgaagcggcagugcaga

SEQ ID NO: 329495 - RNA, 19 nt, Artificial Sequence
  Description of Artificial Sequence: Synthetic oligonucleotide
caccgguuccucuccuggg

SEQ ID NO: 329496 - RNA, 19 nt, Artificial Sequence
  Description of Artificial Sequence: Synthetic oligonucleotide
ccgucuucccagcaaaagc

SEQ ID NO: 329497 - RNA, 19 nt, Artificial Sequence
  Description of Artificial Sequence: Synthetic oligonucleotide
uucugcugcacgcccgcau

SEQ ID NO: 329498 - RNA, 19 nt, Artificial Sequence
  Description of Artificial Sequence: Synthetic oligonucleotide
aguaagcaacaucccugau

SEQ ID NO: 329499 - RNA, 19 nt, Artificial Sequence
  Description of Artificial Sequence: Synthetic oligonucleotide
ccaagaucaugugacgaag

SEQ ID NO: 329500 - RNA, 19 nt, Artificial Sequence
  Description of Artificial Sequence: Synthetic oligonucleotide
uccccguuuuggaaguauu

SEQ ID NO: 329501 - RNA, 19 nt, Artificial Sequence
  Description of Artificial Sequence: Synthetic oligonucleotide
gguuaaucaagggcacccc

SEQ ID NO: 329502 - RNA, 19 nt, Artificial Sequence
  Description of Artificial Sequence: Synthetic oligonucleotide
agugaccgaagcggcagug

SEQ ID NO: 329503 - RNA, 19 nt, Artificial Sequence
  Description of Artificial Sequence: Synthetic oligonucleotide
gaccgaagcggcagugcag

SEQ ID NO: 329504 - RNA, 19 nt, Artificial Sequence
  Description of Artificial Sequence: Synthetic oligonucleotide
caauccuaauugccuccug

SEQ ID NO: 329505 - RNA, 19 nt, Artificial Sequence
  Description of Artificial Sequence: Synthetic oligonucleotide
ggugcugcggccguauagc

SEQ ID NO: 329506 - RNA, 19 nt, Artificial Sequence
  Description of Artificial Sequence: Synthetic oligonucleotide
gcaagauacuucuucuucu

SEQ ID NO: 329507 - RNA, 19 nt, Artificial Sequence
  Description of Artificial Sequence: Synthetic oligonucleotide
acggcgccuucucccgugc

SEQ ID NO: 329508 - RNA, 19 nt, Artificial Sequence
  Description of Artificial Sequence: Synthetic oligonucleotide
aggcugacggcgccuucuc

SEQ ID NO: 329509 - RNA, 19 nt, Artificial Sequence
  Description of Artificial Sequence: Synthetic oligonucleotide
gcugcggccguauagccuc

SEQ ID NO: 329510 - RNA, 19 nt, Artificial Sequence
  Description of Artificial Sequence: Synthetic oligonucleotide
ggcauggcgauggucgggg

SEQ ID NO: 329511 - RNA, 19 nt, Artificial Sequence
  Description of Artificial Sequence: Synthetic oligonucleotide
cugccggaagaucauggca

SEQ ID NO: 329512 - RNA, 19 nt, Artificial Sequence
  Description of Artificial Sequence: Synthetic oligonucleotide
ggaggucggaguccuuuag

SEQ ID NO: 329513 - RNA, 19 nt, Artificial Sequence
  Description of Artificial Sequence: Synthetic oligonucleotide
acgcuggcgaugacaggcc

SEQ ID NO: 329514 - RNA, 19 nt, Artificial Sequence
  Description of Artificial Sequence: Synthetic oligonucleotide
agcccuguucugcguguag

SEQ ID NO: 329515 - RNA, 19 nt, Artificial Sequence
  Description of Artificial Sequence: Synthetic oligonucleotide
cagcguaucucaggcuccg

SEQ ID NO: 329516 - RNA, 19 nt, Artificial Sequence
  Description of Artificial Sequence: Synthetic oligonucleotide
caggauagccccaucggcu

SEQ ID NO: 329517 - RNA, 19 nt, Artificial Sequence
  Description of Artificial Sequence: Synthetic oligonucleotide
gacuccugggcaauccuaa

SEQ ID NO: 329518 - RNA, 19 nt, Artificial Sequence
  Description of Artificial Sequence: Synthetic oligonucleotide
gugcguugagcugaagaca

SEQ ID NO: 329519 - RNA, 19 nt, Artificial Sequence
  Description of Artificial Sequence: Synthetic oligonucleotide
gauggucggggaggaagac

SEQ ID NO: 329520 - RNA, 19 nt, Artificial Sequence
  Description of Artificial Sequence: Synthetic oligonucleotide
ggcaugguacagucuggcc

SEQ ID NO: 329521 - RNA, 19 nt, Artificial Sequence
  Description of Artificial Sequence: Synthetic oligonucleotide
agucgaccuuugcaaagua

SEQ ID NO: 329522 - RNA, 19 nt, Artificial Sequence
  Description of Artificial Sequence: Synthetic oligonucleotide
gacggcgccuucucccgug

SEQ ID NO: 329523 - RNA, 19 nt, Artificial Sequence
  Description of Artificial Sequence: Synthetic oligonucleotide
ggaucauaggaagcugcug

SEQ ID NO: 329524 - RNA, 19 nt, Artificial Sequence
  Description of Artificial Sequence: Synthetic oligonucleotide
gaacauugcacggccuuua

SEQ ID NO: 329525 - RNA, 19 nt, Artificial Sequence
  Description of Artificial Sequence: Synthetic oligonucleotide
uaauugccuccugcagggc

SEQ ID NO: 329526 - RNA, 19 nt, Artificial Sequence
  Description of Artificial Sequence: Synthetic oligonucleotide
guguacuaccccguugguc

SEQ ID NO: 329527 - RNA, 19 nt, Artificial Sequence
  Description of Artificial Sequence: Synthetic oligonucleotide
guauugcuggagggcagug

SEQ ID NO: 329528 - RNA, 19 nt, Artificial Sequence
  Description of Artificial Sequence: Synthetic oligonucleotide
gcguaucucaggcuccggc

SEQ ID NO: 329529 - RNA, 19 nt, Artificial Sequence
  Description of Artificial Sequence: Synthetic oligonucleotide
cugacuguuggguggaaau

SEQ ID NO: 329530 - RNA, 19 nt, Artificial Sequence
  Description of Artificial Sequence: Synthetic oligonucleotide
caucggcuaggaugggcuc

SEQ ID NO: 329531 - RNA, 19 nt, Artificial Sequence
  Description of Artificial Sequence: Synthetic oligonucleotide
ggacacgauucuucaauaa

SEQ ID NO: 329532 - RNA, 19 nt, Artificial Sequence
  Description of Artificial Sequence: Synthetic oligonucleotide
ggaccgcgaucuuguaggg

SEQ ID NO: 329533 - RNA, 19 nt, Artificial Sequence
  Description of Artificial Sequence: Synthetic oligonucleotide
cacggagguuguuuaagua

SEQ ID NO: 329534 - RNA, 19 nt, Artificial Sequence
  Description of Artificial Sequence: Synthetic oligonucleotide
gcgacggcaaaggacucgg

SEQ ID NO: 329535 - RNA, 19 nt, Artificial Sequence
  Description of Artificial Sequence: Synthetic oligonucleotide
gccaagaucaugugacgaa

SEQ ID NO: 329536 - RNA, 19 nt, Artificial Sequence
  Description of Artificial Sequence: Synthetic oligonucleotide
cacacgugaucguuggacu

SEQ ID NO: 329537 - RNA, 19 nt, Artificial Sequence
  Description of Artificial Sequence: Synthetic oligonucleotide
ggaaaucguucccucaagu

SEQ ID NO: 329538 - RNA, 19 nt, Artificial Sequence
  Description of Artificial Sequence: Synthetic oligonucleotide
gacacacgugaucguugga

SEQ ID NO: 329539 - RNA, 19 nt, Artificial Sequence
  Description of Artificial Sequence: Synthetic oligonucleotide
ugggcucaauggccaugug

SEQ ID NO: 329540 - RNA, 19 nt, Artificial Sequence
  Description of Artificial Sequence: Synthetic oligonucleotide
ggauagccccaucggcuag

SEQ ID NO: 329541 - RNA, 19 nt, Artificial Sequence
  Description of Artificial Sequence: Synthetic oligonucleotide
gaccuacuacacuuguuuu

SEQ ID NO: 329542 - RNA, 19 nt, Artificial Sequence
  Description of Artificial Sequence: Synthetic oligonucleotide
ggaagaccgccaauacagc

SEQ ID NO: 329543 - RNA, 19 nt, Artificial Sequence
  Description of Artificial Sequence: Synthetic oligonucleotide
ggcguguacuaccccguug

SEQ ID NO: 329544 - RNA, 19 nt, Artificial Sequence
  Description of Artificial Sequence: Synthetic oligonucleotide
ucggcuaggaugggcucaa

SEQ ID NO: 329545 - RNA, 19 nt, Artificial Sequence
  Description of Artificial Sequence: Synthetic oligonucleotide
gcuuuagucucaucauucu

SEQ ID NO: 329546 - RNA, 19 nt, Artificial Sequence
  Description of Artificial Sequence: Synthetic oligonucleotide
acgugaucguuggacuccu

SEQ ID NO: 329547 - RNA, 19 nt, Artificial Sequence
  Description of Artificial Sequence: Synthetic oligonucleotide
gccguauagccuccagaug

SEQ ID NO: 329548 - RNA, 19 nt, Artificial Sequence
  Description of Artificial Sequence: Synthetic oligonucleotide
agcccucguccccauuacu

SEQ ID NO: 329549 - RNA, 19 nt, Artificial Sequence
  Description of Artificial Sequence: Synthetic oligonucleotide
cuuuaguuucugacaguau

SEQ ID NO: 329550 - RNA, 19 nt, Artificial Sequence
  Description of Artificial Sequence: Synthetic oligonucleotide
agcguaucucaggcuccgg

SEQ ID NO: 329551 - RNA, 19 nt, Artificial Sequence
  Description of Artificial Sequence: Synthetic oligonucleotide
gguucugagcuugcauuac

SEQ ID NO: 329552 - RNA, 19 nt, Artificial Sequence
  Description of Artificial Sequence: Synthetic oligonucleotide
cacgggaucauaggaagcu

SEQ ID NO: 329553 - RNA, 19 nt, Artificial Sequence
  Description of Artificial Sequence: Synthetic oligonucleotide
guagggcgucacccagucc

SEQ ID NO: 329554 - RNA, 19 nt, Artificial Sequence
  Description of Artificial Sequence: Synthetic oligonucleotide
ugacggcgccuucucccgu

SEQ ID NO: 329555 - RNA, 19 nt, Artificial Sequence
  Description of Artificial Sequence: Synthetic oligonucleotide
gggcaugguacagucuggc

SEQ ID NO: 329556 - RNA, 19 nt, Artificial Sequence
  Description of Artificial Sequence: Synthetic oligonucleotide
aucccugauucgcucucua

SEQ ID NO: 329557 - RNA, 19 nt, Artificial Sequence
  Description of Artificial Sequence: Synthetic oligonucleotide
ggccguauagccuccagau

SEQ ID NO: 329558 - RNA, 19 nt, Artificial Sequence
  Description of Artificial Sequence: Synthetic oligonucleotide
gcucucguggacgcuggcg

SEQ ID NO: 329559 - RNA, 19 nt, Artificial Sequence
  Description of Artificial Sequence: Synthetic oligonucleotide
cccugauucgcucucuaca

SEQ ID NO: 329560 - RNA, 19 nt, Artificial Sequence
  Description of Artificial Sequence: Synthetic oligonucleotide
ggguggaaaucguucccuc

SEQ ID NO: 329561 - RNA, 19 nt, Artificial Sequence
  Description of Artificial Sequence: Synthetic oligonucleotide
uggcguguacuaccccguu

SEQ ID NO: 329562 - RNA, 19 nt, Artificial Sequence
  Description of Artificial Sequence: Synthetic oligonucleotide
ccgccaauacagcucugcc

SEQ ID NO: 329563 - RNA, 19 nt, Artificial Sequence
  Description of Artificial Sequence: Synthetic oligonucleotide
uggcgauggucggggagga

SEQ ID NO: 329564 - RNA, 19 nt, Artificial Sequence
  Description of Artificial Sequence: Synthetic oligonucleotide
guuggccgucuucccagca

SEQ ID NO: 329565 - RNA, 19 nt, Artificial Sequence
  Description of Artificial Sequence: Synthetic oligonucleotide
uccggccauagcccucguc

SEQ ID NO: 329566 - RNA, 19 nt, Artificial Sequence
  Description of Artificial Sequence: Synthetic oligonucleotide
ggcgagcucugccuguuga

SEQ ID NO: 329567 - RNA, 19 nt, Artificial Sequence
  Description of Artificial Sequence: Synthetic oligonucleotide
cccgcauucaccgacucca

SEQ ID NO: 329568 - RNA, 19 nt, Artificial Sequence
  Description of Artificial Sequence: Synthetic oligonucleotide
auuggcucucguggacgcu

SEQ ID NO: 329569 - RNA, 19 nt, Artificial Sequence
  Description of Artificial Sequence: Synthetic oligonucleotide
ccgguauucuuuggagagg

SEQ ID NO: 329570 - RNA, 19 nt, Artificial Sequence
  Description of Artificial Sequence: Synthetic oligonucleotide
gcagcguaucucaggcucc

SEQ ID NO: 329571 - RNA, 19 nt, Artificial Sequence
  Description of Artificial Sequence: Synthetic oligonucleotide
ccccguuggucaucauugg

SEQ ID NO: 329572 - RNA, 19 nt, Artificial Sequence
  Description of Artificial Sequence: Synthetic oligonucleotide
aucaggcggucaaaauaau

SEQ ID NO: 329573 - RNA, 19 nt, Artificial Sequence
  Description of Artificial Sequence: Synthetic oligonucleotide
cggaagaucauggcacacc

SEQ ID NO: 329574 - RNA, 19 nt, Artificial Sequence
  Description of Artificial Sequence: Synthetic oligonucleotide
gcuuacuauaggccaagau

SEQ ID NO: 329575 - RNA, 19 nt, Artificial Sequence
  Description of Artificial Sequence: Synthetic oligonucleotide
gccguuagugcucuucacu

SEQ ID NO: 329576 - RNA, 19 nt, Artificial Sequence
  Description of Artificial Sequence: Synthetic oligonucleotide
cagucucagaggccaagua

SEQ ID NO: 329577 - RNA, 19 nt, Artificial Sequence
  Description of Artificial Sequence: Synthetic oligonucleotide
gccggaagaucauggcaca

SEQ ID NO: 329578 - RNA, 19 nt, Artificial Sequence
  Description of Artificial Sequence: Synthetic oligonucleotide
ccagaagggagucuuuucu

SEQ ID NO: 329579 - RNA, 19 nt, Artificial Sequence
  Description of Artificial Sequence: Synthetic oligonucleotide
cgucacccaguccuuaaug

SEQ ID NO: 329580 - RNA, 19 nt, Artificial Sequence
  Description of Artificial Sequence: Synthetic oligonucleotide
guguaauaucugggcccug

SEQ ID NO: 329581 - RNA, 19 nt, Artificial Sequence
  Description of Artificial Sequence: Synthetic oligonucleotide
ccguuuuggaaguauugcu

SEQ ID NO: 329582 - RNA, 19 nt, Artificial Sequence
  Description of Artificial Sequence: Synthetic oligonucleotide
uacuaccccguuggucauc

SEQ ID NO: 329583 - RNA, 19 nt, Artificial Sequence
  Description of Artificial Sequence: Synthetic oligonucleotide
cugcggccguauagccucc

SEQ ID NO: 329584 - RNA, 19 nt, Artificial Sequence
  Description of Artificial Sequence: Synthetic oligonucleotide
cagugagaaucaggcgguc

SEQ ID NO: 329585 - RNA, 19 nt, Artificial Sequence
  Description of Artificial Sequence: Synthetic oligonucleotide
caauaagcuuguacagcuu

SEQ ID NO: 329586 - RNA, 19 nt, Artificial Sequence
  Description of Artificial Sequence: Synthetic oligonucleotide
agcagccugcugagaaaga

SEQ ID NO: 329587 - RNA, 19 nt, Artificial Sequence
  Description of Artificial Sequence: Synthetic oligonucleotide
cgucuucccagcaaaagcu

SEQ ID NO: 329588 - RNA, 19 nt, Artificial Sequence
  Description of Artificial Sequence: Synthetic oligonucleotide
ggcugacggcgccuucucc

SEQ ID NO: 329589 - RNA, 19 nt, Artificial Sequence
  Description of Artificial Sequence: Synthetic oligonucleotide
cucugucaaacuguauuuu

SEQ ID NO: 329590 - RNA, 19 nt, Artificial Sequence
  Description of Artificial Sequence: Synthetic oligonucleotide
gagaaggguuaaagccugu

SEQ ID NO: 329591 - RNA, 19 nt, Artificial Sequence
  Description of Artificial Sequence: Synthetic oligonucleotide
gcccgcauucaccgacucc

SEQ ID NO: 329592 - RNA, 19 nt, Artificial Sequence
  Description of Artificial Sequence: Synthetic oligonucleotide
ugcggccguauagccucca

SEQ ID NO: 329593 - RNA, 19 nt, Artificial Sequence
  Description of Artificial Sequence: Synthetic oligonucleotide
gcaacaucccugauucgcu

SEQ ID NO: 329594 - RNA, 19 nt, Artificial Sequence
  Description of Artificial Sequence: Synthetic oligonucleotide
gcucugcaagguggcagag

SEQ ID NO: 329595 - RNA, 19 nt, Artificial Sequence
  Description of Artificial Sequence: Synthetic oligonucleotide
  modified_base (8)..(8): a, c, u, g, unknown or other
gcauuggnguuuugcuugu

SEQ ID NO: 329596 - RNA, 19 nt, Artificial Sequence
  Description of Artificial Sequence: Synthetic oligonucleotide
  modified_base (7)..(7): a, c, u, g, unknown or other
cauuggnguuuugcuugua

SEQ ID NO: 329597 - RNA, 19 nt, Artificial Sequence
  Description of Artificial Sequence: Synthetic oligonucleotide
cgccaauacagcucugcca

SEQ ID NO: 329598 - RNA, 19 nt, Artificial Sequence
  Description of Artificial Sequence: Synthetic oligonucleotide
ccaucggcuaggaugggcu

SEQ ID NO: 329599 - RNA, 19 nt, Artificial Sequence
  Description of Artificial Sequence: Synthetic oligonucleotide
ggcgucacccaguccuuaa

SEQ ID NO: 329600 - RNA, 19 nt, Artificial Sequence
  Description of Artificial Sequence: Synthetic oligonucleotide
ccgcauucaccgacuccag

SEQ ID NO: 329601 - RNA, 19 nt, Artificial Sequence
  Description of Artificial Sequence: Synthetic oligonucleotide
gcauuacaacagcuuuucu

SEQ ID NO: 329602 - RNA, 19 nt, Artificial Sequence
  Description of Artificial Sequence: Synthetic oligonucleotide
gaccgccaauacagcucug

SEQ ID NO: 329603 - RNA, 19 nt, Artificial Sequence
  Description of Artificial Sequence: Synthetic oligonucleotide
cuguuggguggaaaucguu

SEQ ID NO: 329604 - RNA, 19 nt, Artificial Sequence
  Description of Artificial Sequence: Synthetic oligonucleotide
cuaugccauuaagugcugu

SEQ ID NO: 329605 - RNA, 19 nt, Artificial Sequence
  Description of Artificial Sequence: Synthetic oligonucleotide
gcggccguauagccuccag

SEQ ID NO: 329606 - RNA, 19 nt, Artificial Sequence
  Description of Artificial Sequence: Synthetic oligonucleotide
cccguuggucaucauugga

SEQ ID NO: 329607 - RNA, 19 nt, Artificial Sequence
  Description of Artificial Sequence: Synthetic oligonucleotide
ggcagagagcgacggcaaa

SEQ ID NO: 329608 - RNA, 19 nt, Artificial Sequence
  Description of Artificial Sequence: Synthetic oligonucleotide
cccagcaaaagcucucggu

SEQ ID NO: 329609 - RNA, 19 nt, Artificial Sequence
  Description of Artificial Sequence: Synthetic oligonucleotide
ccaugggagggcaauuccu

SEQ ID NO: 329610 - RNA, 19 nt, Artificial Sequence
  Description of Artificial Sequence: Synthetic oligonucleotide
guacuaccccguuggucau

SEQ ID NO: 329611 - RNA, 19 nt, Artificial Sequence
  Description of Artificial Sequence: Synthetic oligonucleotide
cgaucuuguagggcgucac

SEQ ID NO: 329612 - RNA, 19 nt, Artificial Sequence
  Description of Artificial Sequence: Synthetic oligonucleotide
gcaauccuaauugccuccu

SEQ ID NO: 329613 - RNA, 19 nt, Artificial Sequence
  Description of Artificial Sequence: Synthetic oligonucleotide
cgauggucggggaggaaga

SEQ ID NO: 329614 - RNA, 19 nt, Artificial Sequence
  Description of Artificial Sequence: Synthetic oligonucleotide
guucugcugcacgcccgca

SEQ ID NO: 329615 - RNA, 19 nt, Artificial Sequence
  Description of Artificial Sequence: Synthetic oligonucleotide
ggcucucguggacgcuggc

SEQ ID NO: 329616 - RNA, 19 nt, Artificial Sequence
  Description of Artificial Sequence: Synthetic oligonucleotide
cgguaacccaaaauguacu

SEQ ID NO: 329617 - RNA, 19 nt, Artificial Sequence
  Description of Artificial Sequence: Synthetic oligonucleotide
ggcggcaaaacagcccugu

SEQ ID NO: 329618 - RNA, 19 nt, Artificial Sequence
  Description of Artificial Sequence: Synthetic oligonucleotide
gcgaucuuguagggcguca

SEQ ID NO: 329619 - RNA, 19 nt, Artificial Sequence
  Description of Artificial Sequence: Synthetic oligonucleotide
cagcaacaucugggcuugc

SEQ ID NO: 329620 - RNA, 19 nt, Artificial Sequence
  Description of Artificial Sequence: Synthetic oligonucleotide
gcagacacacgugaucguu

SEQ ID NO: 329621 - RNA, 19 nt, Artificial Sequence
  Description of Artificial Sequence: Synthetic oligonucleotide
ggaccacugcaagauacuu

SEQ ID NO: 329622 - RNA, 19 nt, Artificial Sequence
  Description of Artificial Sequence: Synthetic oligonucleotide
ccaaacaaguuggcgugua

SEQ ID NO: 329623 - RNA, 19 nt, Artificial Sequence
  Description of Artificial Sequence: Synthetic oligonucleotide
caucccugauucgcucucu

SEQ ID NO: 329624 - RNA, 19 nt, Artificial Sequence
  Description of Artificial Sequence: Synthetic oligonucleotide
uucucccgugcggcccauc

SEQ ID NO: 329625 - RNA, 19 nt, Artificial Sequence
  Description of Artificial Sequence: Synthetic oligonucleotide
cauggugcugcggccguau

SEQ ID NO: 329626 - RNA, 19 nt, Artificial Sequence
  Description of Artificial Sequence: Synthetic oligonucleotide
ccauguggagaaggguuaa

SEQ ID NO: 329627 - RNA, 19 nt, Artificial Sequence
  Description of Artificial Sequence: Synthetic oligonucleotide
gcauggcgauggucgggga

SEQ ID NO: 329628 - RNA, 19 nt, Artificial Sequence
  Description of Artificial Sequence: Synthetic oligonucleotide
cuccccguuuuggaaguau

SEQ ID NO: 329629 - RNA, 19 nt, Artificial Sequence
  Description of Artificial Sequence: Synthetic oligonucleotide
gccaaacaaguuggcgugu

SEQ ID NO: 329630 - RNA, 19 nt, Artificial Sequence
  Description of Artificial Sequence: Synthetic oligonucleotide
cuugaacacggagguuguu

SEQ ID NO: 329631 - RNA, 19 nt, Artificial Sequence
  Description of Artificial Sequence: Synthetic oligonucleotide
cgauaaguucugacaggcu

SEQ ID NO: 329632 - RNA, 19 nt, Artificial Sequence
  Description of Artificial Sequence: Synthetic oligonucleotide
gcuggcgaugacaggcccu

SEQ ID NO: 329633 - RNA, 19 nt, Artificial Sequence
  Description of Artificial Sequence: Synthetic oligonucleotide
gggcaccccaugggagggc

SEQ ID NO: 329634 - RNA, 19 nt, Artificial Sequence
  Description of Artificial Sequence: Synthetic oligonucleotide
cggccguauagccuccaga

SEQ ID NO: 329635 - RNA, 19 nt, Artificial Sequence
  Description of Artificial Sequence: Synthetic oligonucleotide
gcccucguccccauuacuu

SEQ ID NO: 329636 - RNA, 19 nt, Artificial Sequence
  Description of Artificial Sequence: Synthetic oligonucleotide
gcacgcccgcauucaccga

SEQ ID NO: 329637 - RNA, 19 nt, Artificial Sequence
  Description of Artificial Sequence: Synthetic oligonucleotide
cgcgaucuuguagggcguc

SEQ ID NO: 329638 - RNA, 19 nt, Artificial Sequence
  Description of Artificial Sequence: Synthetic oligonucleotide
cggcgccuucucccgugcg

SEQ ID NO: 329639 - RNA, 19 nt, Artificial Sequence
  Description of Artificial Sequence: Synthetic oligonucleotide
ccccaucggcuaggauggg

SEQ ID NO: 329640 - RNA, 19 nt, Artificial Sequence
  Description of Artificial Sequence: Synthetic oligonucleotide
cggcggcaaaacagcccug

SEQ ID NO: 329641 - RNA, 19 nt, Artificial Sequence
  Description of Artificial Sequence: Synthetic oligonucleotide
cgcccgcauucaccgacuc

SEQ ID NO: 329642 - RNA, 19 nt, Artificial Sequence
  Description of Artificial Sequence: Synthetic oligonucleotide
ccaggaccgcgaucuugua

SEQ ID NO: 329643 - RNA, 19 nt, Artificial Sequence
  Description of Artificial Sequence: Synthetic oligonucleotide
ccgcgaucuuguagggcgu

SEQ ID NO: 329644 - RNA, 19 nt, Artificial Sequence
  Description of Artificial Sequence: Synthetic oligonucleotide
cguggacgcuggcgaugac

SEQ ID NO: 329645 - RNA, 19 nt, Artificial Sequence
  Description of Artificial Sequence: Synthetic oligonucleotide
cuaccccguuggucaucau

SEQ ID NO: 329646 - RNA, 19 nt, Artificial Sequence
  Description of Artificial Sequence: Synthetic oligonucleotide
ccgacaggaggacgcugau

SEQ ID NO: 329647 - RNA, 19 nt, Artificial Sequence
  Description of Artificial Sequence: Synthetic oligonucleotide
cuucucccgugcggcccau

SEQ ID NO: 329648 - RNA, 19 nt, Artificial Sequence
  Description of Artificial Sequence: Synthetic oligonucleotide
cguuggacuccugggcaau

SEQ ID NO: 329649 - RNA, 19 nt, Artificial Sequence
  Description of Artificial Sequence: Synthetic oligonucleotide
aauaauagcuuucagucac

SEQ ID NO: 329650 - RNA, 19 nt, Artificial Sequence
  Description of Artificial Sequence: Synthetic oligonucleotide
uuuacuuuggcuuauagag

SEQ ID NO: 329651 - RNA, 19 nt, Artificial Sequence
  Description of Artificial Sequence: Synthetic oligonucleotide
aagguuaucacacccagcc

SEQ ID NO: 329652 - RNA, 19 nt, Artificial Sequence
  Description of Artificial Sequence: Synthetic oligonucleotide
aauaacauucaacaugagg

SEQ ID NO: 329653 - RNA, 19 nt, Artificial Sequence
  Description of Artificial Sequence: Synthetic oligonucleotide
aacucuaaaaccacgaagc

SEQ ID NO: 329654 - RNA, 19 nt, Artificial Sequence
  Description of Artificial Sequence: Synthetic oligonucleotide
ugucucaugauguauaagg

SEQ ID NO: 329655 - RNA, 19 nt, Artificial Sequence
  Description of Artificial Sequence: Synthetic oligonucleotide
ugaauaauagcuuucaguc

SEQ ID NO: 329656 - RNA, 19 nt, Artificial Sequence
  Description of Artificial Sequence: Synthetic oligonucleotide
uuugcauuuaacaugauua

SEQ ID NO: 329657 - RNA, 19 nt, Artificial Sequence
  Description of Artificial Sequence: Synthetic oligonucleotide
agaaucaacacacaugauc

SEQ ID NO: 329658 - RNA, 19 nt, Artificial Sequence
  Description of Artificial Sequence: Synthetic oligonucleotide
aaauaaugcuguaagcugc

SEQ ID NO: 329659 - RNA, 19 nt, Artificial Sequence
  Description of Artificial Sequence: Synthetic oligonucleotide
uauaguuaaaagcggaaug

SEQ ID NO: 329660 - RNA, 19 nt, Artificial Sequence
  Description of Artificial Sequence: Synthetic oligonucleotide
aauauaaagucauguucuc

SEQ ID NO: 329661 - RNA, 19 nt, Artificial Sequence
  Description of Artificial Sequence: Synthetic oligonucleotide
auaacauucaacaugaggu

SEQ ID NO: 329662 - RNA, 19 nt, Artificial Sequence
  Description of Artificial Sequence: Synthetic oligonucleotide
uuacaaagacauuagaaac

SEQ ID NO: 329663 - RNA, 19 nt, Artificial Sequence
  Description of Artificial Sequence: Synthetic oligonucleotide
aguggaagcacucaugggg

SEQ ID NO: 329664 - RNA, 19 nt, Artificial Sequence
  Description of Artificial Sequence: Synthetic oligonucleotide
uacgauaugauuaaagaau

SEQ ID NO: 329665 - RNA, 19 nt, Artificial Sequence
  Description of Artificial Sequence: Synthetic oligonucleotide
agagaauagguucagaaca

SEQ ID NO: 329666 - RNA, 19 nt, Artificial Sequence
  Description of Artificial Sequence: Synthetic oligonucleotide
agccuaguuacccuuaucc

SEQ ID NO: 329667 - RNA, 19 nt, Artificial Sequence
  Description of Artificial Sequence: Synthetic oligonucleotide
ucugacaggacucaagcag

SEQ ID NO: 329668 - RNA, 19 nt, Artificial Sequence
  Description of Artificial Sequence: Synthetic oligonucleotide
uguaaaguugucaugaaua

SEQ ID NO: 329669 - RNA, 19 nt, Artificial Sequence
  Description of Artificial Sequence: Synthetic oligonucleotide
ucuaacaagaucugcacug

SEQ ID NO: 329670 - RNA, 19 nt, Artificial Sequence
  Description of Artificial Sequence: Synthetic oligonucleotide
uaagcgucaggcaaggagg

SEQ ID NO: 329671 - RNA, 19 nt, Artificial Sequence
  Description of Artificial Sequence: Synthetic oligonucleotide
uuuaagauggccagaggcc

SEQ ID NO: 329672 - RNA, 19 nt, Artificial Sequence
  Description of Artificial Sequence: Synthetic oligonucleotide
aauaaaagagugagggugg

SEQ ID NO: 329673 - RNA, 19 nt, Artificial Sequence
  Description of Artificial Sequence: Synthetic oligonucleotide
aauacuaucuuacgauaug

SEQ ID NO: 329674 - RNA, 19 nt, Artificial Sequence
  Description of Artificial Sequence: Synthetic oligonucleotide
ucuauucuuacaaacuaca

SEQ ID NO: 329675 - RNA, 19 nt, Artificial Sequence
  Description of Artificial Sequence: Synthetic oligonucleotide
uguguuuauacacuacagc

SEQ ID NO: 329676 - RNA, 19 nt, Artificial Sequence
  Description of Artificial Sequence: Synthetic oligonucleotide
ugagaaugcaguuaagaga

SEQ ID NO: 329677 - RNA, 19 nt, Artificial Sequence
  Description of Artificial Sequence: Synthetic oligonucleotide
uggcuuuaaaguaagugcc

SEQ ID NO: 329678 - RNA, 19 nt, Artificial Sequence
  Description of Artificial Sequence: Synthetic oligonucleotide
uguagaaguaauuuuaauu

SEQ ID NO: 329679 - RNA, 19 nt, Artificial Sequence
  Description of Artificial Sequence: Synthetic oligonucleotide
aacauucaacaugagguac

SEQ ID NO: 329680 - RNA, 19 nt, Artificial Sequence
  Description of Artificial Sequence: Synthetic oligonucleotide
auagaauaugaguucgggg

SEQ ID NO: 329681 - RNA, 19 nt, Artificial Sequence
  Description of Artificial Sequence: Synthetic oligonucleotide
aguguacugaauuagcuga

SEQ ID NO: 329682 - RNA, 19 nt, Artificial Sequence
  Description of Artificial Sequence: Synthetic oligonucleotide
cuuucaugcgcauacugcg

SEQ ID NO: 329683 - RNA, 19 nt, Artificial Sequence
  Description of Artificial Sequence: Synthetic oligonucleotide
uuaaaagguuacaaagaca

SEQ ID NO: 329684 - RNA, 19 nt, Artificial Sequence
  Description of Artificial Sequence: Synthetic oligonucleotide
auuacaaauuaccugugcu

SEQ ID NO: 329685 - RNA, 19 nt, Artificial Sequence
  Description of Artificial Sequence: Synthetic oligonucleotide
uaaagacccugccaguugg

SEQ ID NO: 329686 - RNA, 19 nt, Artificial Sequence
  Description of Artificial Sequence: Synthetic oligonucleotide
uuacaaauuaccugugcug

SEQ ID NO: 329687 - RNA, 19 nt, Artificial Sequence
  Description of Artificial Sequence: Synthetic oligonucleotide
uaugcuaccauggacaagu

SEQ ID NO: 329688 - RNA, 19 nt, Artificial Sequence
  Description of Artificial Sequence: Synthetic oligonucleotide
aaaguugucaugaauaaua

SEQ ID NO: 329689 - RNA, 19 nt, Artificial Sequence
  Description of Artificial Sequence: Synthetic oligonucleotide
aguugucaugaauaauagc

SEQ ID NO: 329690 - RNA, 19 nt, Artificial Sequence
  Description of Artificial Sequence: Synthetic oligonucleotide
uuuaauugacaauguaccu

SEQ ID NO: 329691 - RNA, 19 nt, Artificial Sequence
  Description of Artificial Sequence: Synthetic oligonucleotide
ugaagguuaucacacccag

SEQ ID NO: 329692 - RNA, 19 nt, Artificial Sequence
  Description of Artificial Sequence: Synthetic oligonucleotide
uuguguuuauacacuacag

SEQ ID NO: 329693 - RNA, 19 nt, Artificial Sequence
  Description of Artificial Sequence: Synthetic oligonucleotide
gaggcuaaucaguaagugg

SEQ ID NO: 329694 - RNA, 19 nt, Artificial Sequence
  Description of Artificial Sequence: Synthetic oligonucleotide
uuacgauaugauuaaagaa

SEQ ID NO: 329695 - RNA, 19 nt, Artificial Sequence
  Description of Artificial Sequence: Synthetic oligonucleotide
aaauacaguacaauaacau

SEQ ID NO: 329696 - RNA, 19 nt, Artificial Sequence
  Description of Artificial Sequence: Synthetic oligonucleotide
ucccuaggcauacagacgc

SEQ ID NO: 329697 - RNA, 19 nt, Artificial Sequence
  Description of Artificial Sequence: Synthetic oligonucleotide
ugcauuagaacugcuagcc

SEQ ID NO: 329698 - RNA, 19 nt, Artificial Sequence
  Description of Artificial Sequence: Synthetic oligonucleotide
auuauugaacaucaccgca

SEQ ID NO: 329699 - RNA, 19 nt, Artificial Sequence
  Description of Artificial Sequence: Synthetic oligonucleotide
aagguucaagcauagaaua

SEQ ID NO: 329700 - RNA, 19 nt, Artificial Sequence
  Description of Artificial Sequence: Synthetic oligonucleotide
agcuaagucacaauaaaag

SEQ ID NO: 329701 - RNA, 19 nt, Artificial Sequence
  Description of Artificial Sequence: Synthetic oligonucleotide
ugcgcagacacacacacac

SEQ ID NO: 329702 - RNA, 19 nt, Artificial Sequence
  Description of Artificial Sequence: Synthetic oligonucleotide
acugcuagccuaguuaccc

SEQ ID NO: 329703 - RNA, 19 nt, Artificial Sequence
  Description of Artificial Sequence: Synthetic oligonucleotide
ucuuacaaacuacaaaguu

SEQ ID NO: 329704 - RNA, 19 nt, Artificial Sequence
  Description of Artificial Sequence: Synthetic oligonucleotide
aagguaugcugggaaaagc

SEQ ID NO: 329705 - RNA, 19 nt, Artificial Sequence
  Description of Artificial Sequence: Synthetic oligonucleotide
cuuacgauaugauuaaaga

SEQ ID NO: 329706 - RNA, 19 nt, Artificial Sequence
  Description of Artificial Sequence: Synthetic oligonucleotide
uuauuuuguaaaguuguca

SEQ ID NO: 329707 - RNA, 19 nt, Artificial Sequence
  Description of Artificial Sequence: Synthetic oligonucleotide
guaaguaauggcaaaauga

SEQ ID NO: 329708 - RNA, 19 nt, Artificial Sequence
  Description of Artificial Sequence: Synthetic oligonucleotide
auagguucagaacacaaaa

SEQ ID NO: 329709 - RNA, 19 nt, Artificial Sequence
  Description of Artificial Sequence: Synthetic oligonucleotide
aaauguacaucugccauca

SEQ ID NO: 329710 - RNA, 19 nt, Artificial Sequence
  Description of Artificial Sequence: Synthetic oligonucleotide
ucuucuaagcauauaguua

SEQ ID NO: 329711 - RNA, 19 nt, Artificial Sequence
  Description of Artificial Sequence: Synthetic oligonucleotide
aguaauggcaaaaugauua

SEQ ID NO: 329712 - RNA, 19 nt, Artificial Sequence
  Description of Artificial Sequence: Synthetic oligonucleotide
gacacuaccagggucacag

SEQ ID NO: 329713 - RNA, 19 nt, Artificial Sequence
  Description of Artificial Sequence: Synthetic oligonucleotide
uucuauucuuacaaacuac

SEQ ID NO: 329714 - RNA, 19 nt, Artificial Sequence
  Description of Artificial Sequence: Synthetic oligonucleotide
aaaagcggaauguugucau

SEQ ID NO: 329715 - RNA, 19 nt, Artificial Sequence
  Description of Artificial Sequence: Synthetic oligonucleotide
agcuaagacauauuugugu

SEQ ID NO: 329716 - RNA, 19 nt, Artificial Sequence
  Description of Artificial Sequence: Synthetic oligonucleotide
aauuagcugagcuuauuua

SEQ ID NO: 329717 - RNA, 19 nt, Artificial Sequence
  Description of Artificial Sequence: Synthetic oligonucleotide
auacacuacagcugccagc

SEQ ID NO: 329718 - RNA, 19 nt, Artificial Sequence
  Description of Artificial Sequence: Synthetic oligonucleotide
aacaucaccgcauuucuuu

SEQ ID NO: 329719 - RNA, 19 nt, Artificial Sequence
  Description of Artificial Sequence: Synthetic oligonucleotide
uguuguuacagagauugug

SEQ ID NO: 329720 - RNA, 19 nt, Artificial Sequence
  Description of Artificial Sequence: Synthetic oligonucleotide
aguuacugaaauguuuaac

SEQ ID NO: 329721 - RNA, 19 nt, Artificial Sequence
  Description of Artificial Sequence: Synthetic oligonucleotide
uuuugacacacccaccacu

SEQ ID NO: 329722 - RNA, 19 nt, Artificial Sequence
  Description of Artificial Sequence: Synthetic oligonucleotide
ugcuuaauaaaguuguguu

SEQ ID NO: 329723 - RNA, 19 nt, Artificial Sequence
  Description of Artificial Sequence: Synthetic oligonucleotide
ucucccuaggcauacagac

SEQ ID NO: 329724 - RNA, 19 nt, Artificial Sequence
  Description of Artificial Sequence: Synthetic oligonucleotide
uaugaaccuaguuuuauuu

SEQ ID NO: 329725 - RNA, 19 nt, Artificial Sequence
  Description of Artificial Sequence: Synthetic oligonucleotide
ucucuguaggggaagaagu

SEQ ID NO: 329726 - RNA, 19 nt, Artificial Sequence
  Description of Artificial Sequence: Synthetic oligonucleotide
guaugaacaaugaugaaga

SEQ ID NO: 329727 - RNA, 19 nt, Artificial Sequence
  Description of Artificial Sequence: Synthetic oligonucleotide
auuagcugagcuuauuuaa

SEQ ID NO: 329728 - RNA, 19 nt, Artificial Sequence
  Description of Artificial Sequence: Synthetic oligonucleotide
cagacacacacacacaccc

SEQ ID NO: 329729 - RNA, 19 nt, Artificial Sequence
  Description of Artificial Sequence: Synthetic oligonucleotide
aaguugucaugaauaauag

SEQ ID NO: 329730 - RNA, 19 nt, Artificial Sequence
  Description of Artificial Sequence: Synthetic oligonucleotide
cuucuaagcauauaguuaa

SEQ ID NO: 329731 - RNA, 19 nt, Artificial Sequence
  Description of Artificial Sequence: Synthetic oligonucleotide
caacucuaaaaccacgaag

SEQ ID NO: 329732 - RNA, 19 nt, Artificial Sequence
  Description of Artificial Sequence: Synthetic oligonucleotide
aaagcaagugcauuaucuu

SEQ ID NO: 329733 - RNA, 19 nt, Artificial Sequence
  Description of Artificial Sequence: Synthetic oligonucleotide
cuaagcgucaggcaaggag

SEQ ID NO: 329734 - RNA, 19 nt, Artificial Sequence
  Description of Artificial Sequence: Synthetic oligonucleotide
auacugcgcagacacacac

SEQ ID NO: 329735 - RNA, 19 nt, Artificial Sequence
  Description of Artificial Sequence: Synthetic oligonucleotide
guuguuacagagauugugc

SEQ ID NO: 329736 - RNA, 19 nt, Artificial Sequence
  Description of Artificial Sequence: Synthetic oligonucleotide
aguucauugccauccagca

SEQ ID NO: 329737 - RNA, 19 nt, Artificial Sequence
  Description of Artificial Sequence: Synthetic oligonucleotide
cauagaauaugaguucggg

SEQ ID NO: 329738 - RNA, 19 nt, Artificial Sequence
  Description of Artificial Sequence: Synthetic oligonucleotide
ucaugugucuaacaagauc

SEQ ID NO: 329739 - RNA, 19 nt, Artificial Sequence
  Description of Artificial Sequence: Synthetic oligonucleotide
agcguuuucugcuuaauaa

SEQ ID NO: 329740 - RNA, 19 nt, Artificial Sequence
  Description of Artificial Sequence: Synthetic oligonucleotide
uacaaaguucaaaauuauc

SEQ ID NO: 329741 - RNA, 19 nt, Artificial Sequence
  Description of Artificial Sequence: Synthetic oligonucleotide
augauuaaaacaguuccca

SEQ ID NO: 329742 - RNA, 19 nt, Artificial Sequence
  Description of Artificial Sequence: Synthetic oligonucleotide
uuuagccuguacauaauua

SEQ ID NO: 329743 - RNA, 19 nt, Artificial Sequence
  Description of Artificial Sequence: Synthetic oligonucleotide
ugucuaacaagaucugcac

SEQ ID NO: 329744 - RNA, 19 nt, Artificial Sequence
  Description of Artificial Sequence: Synthetic oligonucleotide
caguguuaaacaaaauauc

SEQ ID NO: 329745 - RNA, 19 nt, Artificial Sequence
  Description of Artificial Sequence: Synthetic oligonucleotide
ugaggugaauacuugguau

SEQ ID NO: 329746 - RNA, 19 nt, Artificial Sequence
  Description of Artificial Sequence: Synthetic oligonucleotide
ugagguacuucauauuuau

SEQ ID NO: 329747 - RNA, 19 nt, Artificial Sequence
  Description of Artificial Sequence: Synthetic oligonucleotide
cauuagaaacugccuaccg

SEQ ID NO: 329748 - RNA, 19 nt, Artificial Sequence
  Description of Artificial Sequence: Synthetic oligonucleotide
uuaaaguaagugccuucug

SEQ ID NO: 329749 - RNA, 19 nt, Artificial Sequence
  Description of Artificial Sequence: Synthetic oligonucleotide
gacaaguaagagcugcaug

SEQ ID NO: 329750 - RNA, 19 nt, Artificial Sequence
  Description of Artificial Sequence: Synthetic oligonucleotide
aacuacaaccugucaucuc

SEQ ID NO: 329751 - RNA, 19 nt, Artificial Sequence
  Description of Artificial Sequence: Synthetic oligonucleotide
aaagaaugcugcauuagaa

SEQ ID NO: 329752 - RNA, 19 nt, Artificial Sequence
  Description of Artificial Sequence: Synthetic oligonucleotide
gaacugcuagccuaguuac

SEQ ID NO: 329753 - RNA, 19 nt, Artificial Sequence
  Description of Artificial Sequence: Synthetic oligonucleotide
agcuuucagucaccuaugc

SEQ ID NO: 329754 - RNA, 19 nt, Artificial Sequence
  Description of Artificial Sequence: Synthetic oligonucleotide
aaaccacgaagccugagua

SEQ ID NO: 329755 - RNA, 19 nt, Artificial Sequence
  Description of Artificial Sequence: Synthetic oligonucleotide
agcauauaguuaaaagcgg

SEQ ID NO: 329756 - RNA, 19 nt, Artificial Sequence
  Description of Artificial Sequence: Synthetic oligonucleotide
gaaguaauuuuaauugaca

SEQ ID NO: 329757 - RNA, 19 nt, Artificial Sequence
  Description of Artificial Sequence: Synthetic oligonucleotide
uugaagguuaucacaccca

SEQ ID NO: 329758 - RNA, 19 nt, Artificial Sequence
  Description of Artificial Sequence: Synthetic oligonucleotide
cuugccuagccacagggag

SEQ ID NO: 329759 - RNA, 19 nt, Artificial Sequence
  Description of Artificial Sequence: Synthetic oligonucleotide
aaauacuaucuuacgauau

SEQ ID NO: 329760 - RNA, 19 nt, Artificial Sequence
  Description of Artificial Sequence: Synthetic oligonucleotide
uguaagcugcuaaagucaa

SEQ ID NO: 329761 - RNA, 19 nt, Artificial Sequence
  Description of Artificial Sequence: Synthetic oligonucleotide
uuaauugacaauguaccuu

SEQ ID NO: 329762 - RNA, 19 nt, Artificial Sequence
  Description of Artificial Sequence: Synthetic oligonucleotide
ucaccuaugcuaacagaug

SEQ ID NO: 329763 - RNA, 19 nt, Artificial Sequence
  Description of Artificial Sequence: Synthetic oligonucleotide
uggcccaaccacaaaaugu

SEQ ID NO: 329764 - RNA, 19 nt, Artificial Sequence
  Description of Artificial Sequence: Synthetic oligonucleotide
acgauaugauuaaagaaug

SEQ ID NO: 329765 - RNA, 19 nt, Artificial Sequence
  Description of Artificial Sequence: Synthetic oligonucleotide
acaauaaaagagugagggu

SEQ ID NO: 329766 - RNA, 19 nt, Artificial Sequence
  Description of Artificial Sequence: Synthetic oligonucleotide
agguuguuguuacagagau

SEQ ID NO: 329767 - RNA, 19 nt, Artificial Sequence
  Description of Artificial Sequence: Synthetic oligonucleotide
acuuuacuuuggcuuauag

SEQ ID NO: 329768 - RNA, 19 nt, Artificial Sequence
  Description of Artificial Sequence: Synthetic oligonucleotide
auaacccagugucacuccg

SEQ ID NO: 329769 - RNA, 19 nt, Artificial Sequence
  Description of Artificial Sequence: Synthetic oligonucleotide
uacccuuauccccaguaug

SEQ ID NO: 329770 - RNA, 19 nt, Artificial Sequence
  Description of Artificial Sequence: Synthetic oligonucleotide
gaccacauuggacacuacc

SEQ ID NO: 329771 - RNA, 19 nt, Artificial Sequence
  Description of Artificial Sequence: Synthetic oligonucleotide
aaucaguaaguggaugugu

SEQ ID NO: 329772 - RNA, 19 nt, Artificial Sequence
  Description of Artificial Sequence: Synthetic oligonucleotide
uuuggcuuauagagcagga

SEQ ID NO: 329773 - RNA, 19 nt, Artificial Sequence
  Description of Artificial Sequence: Synthetic oligonucleotide
agaacugcuagccuaguua

SEQ ID NO: 329774 - RNA, 19 nt, Artificial Sequence
  Description of Artificial Sequence: Synthetic oligonucleotide
gaucacauaucuggagacg

SEQ ID NO: 329775 - RNA, 19 nt, Artificial Sequence
  Description of Artificial Sequence: Synthetic oligonucleotide
uuucaugcgcauacugcgc

SEQ ID NO: 329776 - RNA, 19 nt, Artificial Sequence
  Description of Artificial Sequence: Synthetic oligonucleotide
uaaaagcggaauguuguca

SEQ ID NO: 329777 - RNA, 19 nt, Artificial Sequence
  Description of Artificial Sequence: Synthetic oligonucleotide
acugaauuagcugagcuua

SEQ ID NO: 329778 - RNA, 19 nt, Artificial Sequence
  Description of Artificial Sequence: Synthetic oligonucleotide
ucugccaucaagucauuau

SEQ ID NO: 329779 - RNA, 19 nt, Artificial Sequence
  Description of Artificial Sequence: Synthetic oligonucleotide
uugcauuuaacaugauuau

SEQ ID NO: 329780 - RNA, 19 nt, Artificial Sequence
  Description of Artificial Sequence: Synthetic oligonucleotide
uuaaaagcggaauguuguc

SEQ ID NO: 329781 - RNA, 19 nt, Artificial Sequence
  Description of Artificial Sequence: Synthetic oligonucleotide
cuagcaguccagaaacuug

SEQ ID NO: 329782 - RNA, 19 nt, Artificial Sequence
  Description of Artificial Sequence: Synthetic oligonucleotide
uucaugcgcauacugcgca

SEQ ID NO: 329783 - RNA, 19 nt, Artificial Sequence
  Description of Artificial Sequence: Synthetic oligonucleotide
aggcuaaucaguaagugga

SEQ ID NO: 329784 - RNA, 19 nt, Artificial Sequence
  Description of Artificial Sequence: Synthetic oligonucleotide
ugcuuaugcuaccauggac

SEQ ID NO: 329785 - RNA, 19 nt, Artificial Sequence
  Description of Artificial Sequence: Synthetic oligonucleotide
guaaaguugucaugaauaa

SEQ ID NO: 329786 - RNA, 19 nt, Artificial Sequence
  Description of Artificial Sequence: Synthetic oligonucleotide
ucacauaucuggagacgag

SEQ ID NO: 329787 - RNA, 19 nt, Artificial Sequence
  Description of Artificial Sequence: Synthetic oligonucleotide
uugccuagccacagggagg

SEQ ID NO: 329788 - RNA, 19 nt, Artificial Sequence
  Description of Artificial Sequence: Synthetic oligonucleotide
uguacuugccuagccacag

SEQ ID NO: 329789 - RNA, 19 nt, Artificial Sequence
  Description of Artificial Sequence: Synthetic oligonucleotide
uugaacaucaccgcauuuc

SEQ ID NO: 329790 - RNA, 19 nt, Artificial Sequence
  Description of Artificial Sequence: Synthetic oligonucleotide
uuaccugugcugaucacau

SEQ ID NO: 329791 - RNA, 19 nt, Artificial Sequence
  Description of Artificial Sequence: Synthetic oligonucleotide
aguuaagagaauagguuca

SEQ ID NO: 329792 - RNA, 19 nt, Artificial Sequence
  Description of Artificial Sequence: Synthetic oligonucleotide
cagacgcaacucuaaaacc

SEQ ID NO: 329793 - RNA, 19 nt, Artificial Sequence
  Description of Artificial Sequence: Synthetic oligonucleotide
accgcugagucccaccugg

SEQ ID NO: 329794 - RNA, 19 nt, Artificial Sequence
  Description of Artificial Sequence: Synthetic oligonucleotide
aaacuacaaccugucaucu

SEQ ID NO: 329795 - RNA, 19 nt, Artificial Sequence
  Description of Artificial Sequence: Synthetic oligonucleotide
ugugucuaacaagaucugc

SEQ ID NO: 329796 - RNA, 19 nt, Artificial Sequence
  Description of Artificial Sequence: Synthetic oligonucleotide
ugcuaacagauguaaguaa

SEQ ID NO: 329797 - RNA, 19 nt, Artificial Sequence
  Description of Artificial Sequence: Synthetic oligonucleotide
auuagaacugcuagccuag

SEQ ID NO: 329798 - RNA, 19 nt, Artificial Sequence
  Description of Artificial Sequence: Synthetic oligonucleotide
caguguacugaauuagcug

SEQ ID NO: 329799 - RNA, 19 nt, Artificial Sequence
  Description of Artificial Sequence: Synthetic oligonucleotide
aucaguaaguggauguguc

SEQ ID NO: 329800 - RNA, 19 nt, Artificial Sequence
  Description of Artificial Sequence: Synthetic oligonucleotide
uugguauaacccaguguca

SEQ ID NO: 329801 - RNA, 19 nt, Artificial Sequence
  Description of Artificial Sequence: Synthetic oligonucleotide
ggcacuuuaagauggccag

SEQ ID NO: 329802 - RNA, 19 nt, Artificial Sequence
  Description of Artificial Sequence: Synthetic oligonucleotide
agcccugucagaacaaugg

SEQ ID NO: 329803 - RNA, 19 nt, Artificial Sequence
  Description of Artificial Sequence: Synthetic oligonucleotide
uguaccccagugccguugg

SEQ ID NO: 329804 - RNA, 19 nt, Artificial Sequence
  Description of Artificial Sequence: Synthetic oligonucleotide
auacuaucuuacgauauga

SEQ ID NO: 329805 - RNA, 19 nt, Artificial Sequence
  Description of Artificial Sequence: Synthetic oligonucleotide
acaucaccgcauuucuuuc

SEQ ID NO: 329806 - RNA, 19 nt, Artificial Sequence
  Description of Artificial Sequence: Synthetic oligonucleotide
auaauagcuuucagucacc

SEQ ID NO: 329807 - RNA, 19 nt, Artificial Sequence
  Description of Artificial Sequence: Synthetic oligonucleotide
ucuuggcggaggcuaauca

SEQ ID NO: 329808 - RNA, 19 nt, Artificial Sequence
  Description of Artificial Sequence: Synthetic oligonucleotide
auauaguuaaaagcggaau

SEQ ID NO: 329809 - RNA, 19 nt, Artificial Sequence
  Description of Artificial Sequence: Synthetic oligonucleotide
auaaaagagugaggguggg

SEQ ID NO: 329810 - RNA, 19 nt, Artificial Sequence
  Description of Artificial Sequence: Synthetic oligonucleotide
cuaguuacccuuaucccca

SEQ ID NO: 329811 - RNA, 19 nt, Artificial Sequence
  Description of Artificial Sequence: Synthetic oligonucleotide
gagaauagguucagaacac

SEQ ID NO: 329812 - RNA, 19 nt, Artificial Sequence
  Description of Artificial Sequence: Synthetic oligonucleotide
guuaagagaauagguucag

SEQ ID NO: 329813 - RNA, 19 nt, Artificial Sequence
  Description of Artificial Sequence: Synthetic oligonucleotide
agcaauugaaagauuauuu

SEQ ID NO: 329814 - RNA, 19 nt, Artificial Sequence
  Description of Artificial Sequence: Synthetic oligonucleotide
cacuuuaagauggccagag

SEQ ID NO: 329815 - RNA, 19 nt, Artificial Sequence
  Description of Artificial Sequence: Synthetic oligonucleotide
uggggauaaagacccugcc

SEQ ID NO: 329816 - RNA, 19 nt, Artificial Sequence
  Description of Artificial Sequence: Synthetic oligonucleotide
uagccuguacauaauuaaa

SEQ ID NO: 329817 - RNA, 19 nt, Artificial Sequence
  Description of Artificial Sequence: Synthetic oligonucleotide
uacuaucuuacgauaugau

SEQ ID NO: 329818 - RNA, 19 nt, Artificial Sequence
  Description of Artificial Sequence: Synthetic oligonucleotide
ccuaguuacccuuaucccc

SEQ ID NO: 329819 - RNA, 19 nt, Artificial Sequence
  Description of Artificial Sequence: Synthetic oligonucleotide
uauaacccagugucacucc

SEQ ID NO: 329820 - RNA, 19 nt, Artificial Sequence
  Description of Artificial Sequence: Synthetic oligonucleotide
gacacacacacacacccca

SEQ ID NO: 329821 - RNA, 19 nt, Artificial Sequence
  Description of Artificial Sequence: Synthetic oligonucleotide
ugguauaacccagugucac

SEQ ID NO: 329822 - RNA, 19 nt, Artificial Sequence
  Description of Artificial Sequence: Synthetic oligonucleotide
uuaugaaccuaguuuuauu

SEQ ID NO: 329823 - RNA, 19 nt, Artificial Sequence
  Description of Artificial Sequence: Synthetic oligonucleotide
aagacauauuuguguccug

SEQ ID NO: 329824 - RNA, 19 nt, Artificial Sequence
  Description of Artificial Sequence: Synthetic oligonucleotide
uaucuggagacgagcuaag

SEQ ID NO: 329825 - RNA, 19 nt, Artificial Sequence
  Description of Artificial Sequence: Synthetic oligonucleotide
aacugcuagccuaguuacc

SEQ ID NO: 329826 - RNA, 19 nt, Artificial Sequence
  Description of Artificial Sequence: Synthetic oligonucleotide
ugcaggcauauauuggcac

SEQ ID NO: 329827 - RNA, 19 nt, Artificial Sequence
  Description of Artificial Sequence: Synthetic oligonucleotide
cuuggcggaggcuaaucag

SEQ ID NO: 329828 - RNA, 19 nt, Artificial Sequence
  Description of Artificial Sequence: Synthetic oligonucleotide
gacgagcuaagcgucaggc

SEQ ID NO: 329829 - RNA, 19 nt, Artificial Sequence
  Description of Artificial Sequence: Synthetic oligonucleotide
ucagucaccuaugcuaaca

SEQ ID NO: 329830 - RNA, 19 nt, Artificial Sequence
  Description of Artificial Sequence: Synthetic oligonucleotide
acgaagccugaguaagaac

SEQ ID NO: 329831 - RNA, 19 nt, Artificial Sequence
  Description of Artificial Sequence: Synthetic oligonucleotide
uccucagugaacuguacuu

SEQ ID NO: 329832 - RNA, 19 nt, Artificial Sequence
  Description of Artificial Sequence: Synthetic oligonucleotide
ugccccuugaagguuauca

SEQ ID NO: 329833 - RNA, 19 nt, Artificial Sequence
  Description of Artificial Sequence: Synthetic oligonucleotide
caacuaucugacaggacuc

SEQ ID NO: 329834 - RNA, 19 nt, Artificial Sequence
  Description of Artificial Sequence: Synthetic oligonucleotide
agauguaaguaauggcaaa

SEQ ID NO: 329835 - RNA, 19 nt, Artificial Sequence
  Description of Artificial Sequence: Synthetic oligonucleotide
uagaaacugccuaccgcug

SEQ ID NO: 329836 - RNA, 19 nt, Artificial Sequence
  Description of Artificial Sequence: Synthetic oligonucleotide
caagcacacuuucaugcgc

SEQ ID NO: 329837 - RNA, 19 nt, Artificial Sequence
  Description of Artificial Sequence: Synthetic oligonucleotide
agacgcaacucuaaaacca

SEQ ID NO: 329838 - RNA, 19 nt, Artificial Sequence
  Description of Artificial Sequence: Synthetic oligonucleotide
gaaaugagaccauuuacuu

SEQ ID NO: 329839 - RNA, 19 nt, Artificial Sequence
  Description of Artificial Sequence: Synthetic oligonucleotide
uaccauggacaaguaagag

SEQ ID NO: 329840 - RNA, 19 nt, Artificial Sequence
  Description of Artificial Sequence: Synthetic oligonucleotide
uugcuuaugcuaccaugga

SEQ ID NO: 329841 - RNA, 19 nt, Artificial Sequence
  Description of Artificial Sequence: Synthetic oligonucleotide
uccccaguaugaacaauga

SEQ ID NO: 329842 - RNA, 19 nt, Artificial Sequence
  Description of Artificial Sequence: Synthetic oligonucleotide
uuggcuuauagagcaggag

SEQ ID NO: 329843 - RNA, 19 nt, Artificial Sequence
  Description of Artificial Sequence: Synthetic oligonucleotide
gaugucucaugauguauaa

SEQ ID NO: 329844 - RNA, 19 nt, Artificial Sequence
  Description of Artificial Sequence: Synthetic oligonucleotide
gguuaucacacccagccca

SEQ ID NO: 329845 - RNA, 19 nt, Artificial Sequence
  Description of Artificial Sequence: Synthetic oligonucleotide
agaguuacugaaauguuua

SEQ ID NO: 329846 - RNA, 19 nt, Artificial Sequence
  Description of Artificial Sequence: Synthetic oligonucleotide
uacugaauuagcugagcuu

SEQ ID NO: 329847 - RNA, 19 nt, Artificial Sequence
  Description of Artificial Sequence: Synthetic oligonucleotide
cacauaucuggagacgagc

SEQ ID NO: 329848 - RNA, 19 nt, Artificial Sequence
  Description of Artificial Sequence: Synthetic oligonucleotide
aacuaucugacaggacuca

SEQ ID NO: 329849 - RNA, 19 nt, Artificial Sequence
  Description of Artificial Sequence: Synthetic oligonucleotide
acccugcaggcauauauug

SEQ ID NO: 329850 - RNA, 19 nt, Artificial Sequence
  Description of Artificial Sequence: Synthetic oligonucleotide
aguaagaacuuggcucuuc

SEQ ID NO: 329851 - RNA, 19 nt, Artificial Sequence
  Description of Artificial Sequence: Synthetic oligonucleotide
cauuagaacugcuagccua

SEQ ID NO: 329852 - RNA, 19 nt, Artificial Sequence
  Description of Artificial Sequence: Synthetic oligonucleotide
cuuuaucaggaagcaauug

SEQ ID NO: 329853 - RNA, 19 nt, Artificial Sequence
  Description of Artificial Sequence: Synthetic oligonucleotide
uugucauuuuagccuguac

SEQ ID NO: 329854 - RNA, 19 nt, Artificial Sequence
  Description of Artificial Sequence: Synthetic oligonucleotide
uuaagagaauagguucaga

SEQ ID NO: 329855 - RNA, 19 nt, Artificial Sequence
  Description of Artificial Sequence: Synthetic oligonucleotide
agcaucuacagcguuuucu

SEQ ID NO: 329856 - RNA, 19 nt, Artificial Sequence
  Description of Artificial Sequence: Synthetic oligonucleotide
augaucucccuaggcauac

SEQ ID NO: 329857 - RNA, 19 nt, Artificial Sequence
  Description of Artificial Sequence: Synthetic oligonucleotide
uaauagcuuucagucaccu

SEQ ID NO: 329858 - RNA, 19 nt, Artificial Sequence
  Description of Artificial Sequence: Synthetic oligonucleotide
cucccuaggcauacagacg

SEQ ID NO: 329859 - RNA, 19 nt, Artificial Sequence
  Description of Artificial Sequence: Synthetic oligonucleotide
ccugcaggcauauauuggc

SEQ ID NO: 329860 - RNA, 19 nt, Artificial Sequence
  Description of Artificial Sequence: Synthetic oligonucleotide
augaaccuaguuuuauuuu

SEQ ID NO: 329861 - RNA, 19 nt, Artificial Sequence
  Description of Artificial Sequence: Synthetic oligonucleotide
aagcgucaggcaaggaggg

SEQ ID NO: 329862 - RNA, 19 nt, Artificial Sequence
  Description of Artificial Sequence: Synthetic oligonucleotide
uuacccuuauccccaguau

SEQ ID NO: 329863 - RNA, 19 nt, Artificial Sequence
  Description of Artificial Sequence: Synthetic oligonucleotide
aacaagaucugcacuguua

SEQ ID NO: 329864 - RNA, 19 nt, Artificial Sequence
  Description of Artificial Sequence: Synthetic oligonucleotide
acaguguacugaauuagcu

SEQ ID NO: 329865 - RNA, 19 nt, Artificial Sequence
  Description of Artificial Sequence: Synthetic oligonucleotide
guauaacccagugucacuc

SEQ ID NO: 329866 - RNA, 19 nt, Artificial Sequence
  Description of Artificial Sequence: Synthetic oligonucleotide
ugaagacugcaagguaugc

SEQ ID NO: 329867 - RNA, 19 nt, Artificial Sequence
  Description of Artificial Sequence: Synthetic oligonucleotide
ucccucuuugcuuaugcua

SEQ ID NO: 329868 - RNA, 19 nt, Artificial Sequence
  Description of Artificial Sequence: Synthetic oligonucleotide
augcgcauacugcgcagac

SEQ ID NO: 329869 - RNA, 19 nt, Artificial Sequence
  Description of Artificial Sequence: Synthetic oligonucleotide
gcaucuacagcguuuucug

SEQ ID NO: 329870 - RNA, 19 nt, Artificial Sequence
  Description of Artificial Sequence: Synthetic oligonucleotide
aucuggagacgagcuaagc

SEQ ID NO: 329871 - RNA, 19 nt, Artificial Sequence
  Description of Artificial Sequence: Synthetic oligonucleotide
aagcaucuacagcguuuuc

SEQ ID NO: 329872 - RNA, 19 nt, Artificial Sequence
  Description of Artificial Sequence: Synthetic oligonucleotide
ucccauaauccagugcucu

SEQ ID NO: 329873 - RNA, 19 nt, Artificial Sequence
  Description of Artificial Sequence: Synthetic oligonucleotide
ucuagcaguccagaaacuu

SEQ ID NO: 329874 - RNA, 19 nt, Artificial Sequence
  Description of Artificial Sequence: Synthetic oligonucleotide
acacacacacaccccagga

SEQ ID NO: 329875 - RNA, 19 nt, Artificial Sequence
  Description of Artificial Sequence: Synthetic oligonucleotide
uucuaagcauauaguuaaa

SEQ ID NO: 329876 - RNA, 19 nt, Artificial Sequence
  Description of Artificial Sequence: Synthetic oligonucleotide
agccugaguaagaacuugg

SEQ ID NO: 329877 - RNA, 19 nt, Artificial Sequence
  Description of Artificial Sequence: Synthetic oligonucleotide
cacuuucaugcgcauacug

SEQ ID NO: 329878 - RNA, 19 nt, Artificial Sequence
  Description of Artificial Sequence: Synthetic oligonucleotide
agacacacacacacacccc

SEQ ID NO: 329879 - RNA, 19 nt, Artificial Sequence
  Description of Artificial Sequence: Synthetic oligonucleotide
cagucaccuaugcuaacag

SEQ ID NO: 329880 - RNA, 19 nt, Artificial Sequence
  Description of Artificial Sequence: Synthetic oligonucleotide
gacgcaacucuaaaaccac

SEQ ID NO: 329881 - RNA, 19 nt, Artificial Sequence
  Description of Artificial Sequence: Synthetic oligonucleotide
ucuacagcguuuucugcuu

SEQ ID NO: 329882 - RNA, 19 nt, Artificial Sequence
  Description of Artificial Sequence: Synthetic oligonucleotide
cacacacacacaccccagg

SEQ ID NO: 329883 - RNA, 19 nt, Artificial Sequence
  Description of Artificial Sequence: Synthetic oligonucleotide
ugguuucuauucuuacaaa

SEQ ID NO: 329884 - RNA, 19 nt, Artificial Sequence
  Description of Artificial Sequence: Synthetic oligonucleotide
acauaucuggagacgagcu

SEQ ID NO: 329885 - RNA, 19 nt, Artificial Sequence
  Description of Artificial Sequence: Synthetic oligonucleotide
aguaaguggaugugucuuu

SEQ ID NO: 329886 - RNA, 19 nt, Artificial Sequence
  Description of Artificial Sequence: Synthetic oligonucleotide
ucauuuuagccuguacaua

SEQ ID NO: 329887 - RNA, 19 nt, Artificial Sequence
  Description of Artificial Sequence: Synthetic oligonucleotide
ucaugcgcauacugcgcag

SEQ ID NO: 329888 - RNA, 19 nt, Artificial Sequence
  Description of Artificial Sequence: Synthetic oligonucleotide
aagcggaauguugucauuu

SEQ ID NO: 329889 - RNA, 19 nt, Artificial Sequence
  Description of Artificial Sequence: Synthetic oligonucleotide
agucaccuaugcuaacaga

SEQ ID NO: 329890 - RNA, 19 nt, Artificial Sequence
  Description of Artificial Sequence: Synthetic oligonucleotide
gcuuaugcuaccauggaca

SEQ ID NO: 329891 - RNA, 19 nt, Artificial Sequence
  Description of Artificial Sequence: Synthetic oligonucleotide
agacugcaagguaugcugg

SEQ ID NO: 329892 - RNA, 19 nt, Artificial Sequence
  Description of Artificial Sequence: Synthetic oligonucleotide
gaagguuaucacacccagc

SEQ ID NO: 329893 - RNA, 19 nt, Artificial Sequence
  Description of Artificial Sequence: Synthetic oligonucleotide
gaagguucaagcauagaau

SEQ ID NO: 329894 - RNA, 19 nt, Artificial Sequence
  Description of Artificial Sequence: Synthetic oligonucleotide
agaauagguucagaacaca

SEQ ID NO: 329895 - RNA, 19 nt, Artificial Sequence
  Description of Artificial Sequence: Synthetic oligonucleotide
gcggaggcuaaucaguaag

SEQ ID NO: 329896 - RNA, 19 nt, Artificial Sequence
  Description of Artificial Sequence: Synthetic oligonucleotide
ugaugcacaguugccuaca

SEQ ID NO: 329897 - RNA, 19 nt, Artificial Sequence
  Description of Artificial Sequence: Synthetic oligonucleotide
aaagcggaauguugucauu

SEQ ID NO: 329898 - RNA, 19 nt, Artificial Sequence
  Description of Artificial Sequence: Synthetic oligonucleotide
cuuaugcuaccauggacaa

SEQ ID NO: 329899 - RNA, 19 nt, Artificial Sequence
  Description of Artificial Sequence: Synthetic oligonucleotide
agccuguacauaauuaaaa

SEQ ID NO: 329900 - RNA, 19 nt, Artificial Sequence
  Description of Artificial Sequence: Synthetic oligonucleotide
gaauuagcugagcuuauuu

SEQ ID NO: 329901 - RNA, 19 nt, Artificial Sequence
  Description of Artificial Sequence: Synthetic oligonucleotide
accgcauuucuuucucuga

SEQ ID NO: 329902 - RNA, 19 nt, Artificial Sequence
  Description of Artificial Sequence: Synthetic oligonucleotide
gaguuacugaaauguuuaa

SEQ ID NO: 329903 - RNA, 19 nt, Artificial Sequence
  Description of Artificial Sequence: Synthetic oligonucleotide
agacgagcuaagcgucagg

SEQ ID NO: 329904 - RNA, 19 nt, Artificial Sequence
  Description of Artificial Sequence: Synthetic oligonucleotide
gucucaugauguauaagga

SEQ ID NO: 329905 - RNA, 19 nt, Artificial Sequence
  Description of Artificial Sequence: Synthetic oligonucleotide
uuaugcuaccauggacaag

SEQ ID NO: 329906 - RNA, 19 nt, Artificial Sequence
  Description of Artificial Sequence: Synthetic oligonucleotide
acacaccccaggacuagcc

SEQ ID NO: 329907 - RNA, 19 nt, Artificial Sequence
  Description of Artificial Sequence: Synthetic oligonucleotide
ucagaacaaugguuucuau

SEQ ID NO: 329908 - RNA, 19 nt, Artificial Sequence
  Description of Artificial Sequence: Synthetic oligonucleotide
caucucaggaucacacuga

SEQ ID NO: 329909 - RNA, 19 nt, Artificial Sequence
  Description of Artificial Sequence: Synthetic oligonucleotide
uaacaagaucugcacuguu

SEQ ID NO: 329910 - RNA, 19 nt, Artificial Sequence
  Description of Artificial Sequence: Synthetic oligonucleotide
uuggcucuucuaagcauau

SEQ ID NO: 329911 - RNA, 19 nt, Artificial Sequence
  Description of Artificial Sequence: Synthetic oligonucleotide
gagacgagcuaagcgucag

SEQ ID NO: 329912 - RNA, 19 nt, Artificial Sequence
  Description of Artificial Sequence: Synthetic oligonucleotide
guacugaauuagcugagcu

SEQ ID NO: 329913 - RNA, 19 nt, Artificial Sequence
  Description of Artificial Sequence: Synthetic oligonucleotide
cugucagaacaaugguuuc

SEQ ID NO: 329914 - RNA, 19 nt, Artificial Sequence
  Description of Artificial Sequence: Synthetic oligonucleotide
gcgcauacugcgcagacac

SEQ ID NO: 329915 - RNA, 19 nt, Artificial Sequence
  Description of Artificial Sequence: Synthetic oligonucleotide
guacuugccuagccacagg

SEQ ID NO: 329916 - RNA, 19 nt, Artificial Sequence
  Description of Artificial Sequence: Synthetic oligonucleotide
guggggauaaagacccugc

SEQ ID NO: 329917 - RNA, 19 nt, Artificial Sequence
  Description of Artificial Sequence: Synthetic oligonucleotide
ugucacuccgaaccauuuu

SEQ ID NO: 329918 - RNA, 19 nt, Artificial Sequence
  Description of Artificial Sequence: Synthetic oligonucleotide
gagguuguuguuacagaga

SEQ ID NO: 329919 - RNA, 19 nt, Artificial Sequence
  Description of Artificial Sequence: Synthetic oligonucleotide
cagcuaagucacaauaaaa

SEQ ID NO: 329920 - RNA, 19 nt, Artificial Sequence
  Description of Artificial Sequence: Synthetic oligonucleotide
gccuaguuacccuuauccc

SEQ ID NO: 329921 - RNA, 19 nt, Artificial Sequence
  Description of Artificial Sequence: Synthetic oligonucleotide
uaguuacccuuauccccag

SEQ ID NO: 329922 - RNA, 19 nt, Artificial Sequence
  Description of Artificial Sequence: Synthetic oligonucleotide
auacacauucaugugucua

SEQ ID NO: 329923 - RNA, 19 nt, Artificial Sequence
  Description of Artificial Sequence: Synthetic oligonucleotide
ccaucucaggaucacacug

SEQ ID NO: 329924 - RNA, 19 nt, Artificial Sequence
  Description of Artificial Sequence: Synthetic oligonucleotide
acgagcuaagcgucaggca

SEQ ID NO: 329925 - RNA, 19 nt, Artificial Sequence
  Description of Artificial Sequence: Synthetic oligonucleotide
uacagcguuuucugcuuaa

SEQ ID NO: 329926 - RNA, 19 nt, Artificial Sequence
  Description of Artificial Sequence: Synthetic oligonucleotide
gcauauaguuaaaagcgga

SEQ ID NO: 329927 - RNA, 19 nt, Artificial Sequence
  Description of Artificial Sequence: Synthetic oligonucleotide
gauugugcugguggugcug

SEQ ID NO: 329928 - RNA, 19 nt, Artificial Sequence
  Description of Artificial Sequence: Synthetic oligonucleotide
acgcaacucuaaaaccacg

SEQ ID NO: 329929 - RNA, 19 nt, Artificial Sequence
  Description of Artificial Sequence: Synthetic oligonucleotide
uggcggaggcuaaucagua

SEQ ID NO: 329930 - RNA, 19 nt, Artificial Sequence
  Description of Artificial Sequence: Synthetic oligonucleotide
ugaauuagcugagcuuauu

SEQ ID NO: 329931 - RNA, 19 nt, Artificial Sequence
  Description of Artificial Sequence: Synthetic oligonucleotide
agauugugcugguggugcu

SEQ ID NO: 329932 - RNA, 19 nt, Artificial Sequence
  Description of Artificial Sequence: Synthetic oligonucleotide
cagggaugcuggccaaagg

SEQ ID NO: 329933 - RNA, 19 nt, Artificial Sequence
  Description of Artificial Sequence: Synthetic oligonucleotide
gcauagaauaugaguucgg

SEQ ID NO: 329934 - RNA, 19 nt, Artificial Sequence
  Description of Artificial Sequence: Synthetic oligonucleotide
ugcuagccuaguuacccuu

SEQ ID NO: 329935 - RNA, 19 nt, Artificial Sequence
  Description of Artificial Sequence: Synthetic oligonucleotide
uccuggcaaccgcugaguc

SEQ ID NO: 329936 - RNA, 19 nt, Artificial Sequence
  Description of Artificial Sequence: Synthetic oligonucleotide
gcagcuaagucacaauaaa

SEQ ID NO: 329937 - RNA, 19 nt, Artificial Sequence
  Description of Artificial Sequence: Synthetic oligonucleotide
guaagcugcuaaagucaag

SEQ ID NO: 329938 - RNA, 19 nt, Artificial Sequence
  Description of Artificial Sequence: Synthetic oligonucleotide
aggacucaagcaguguuaa

SEQ ID NO: 329939 - RNA, 19 nt, Artificial Sequence
  Description of Artificial Sequence: Synthetic oligonucleotide
gcuaaucaguaaguggaug

SEQ ID NO: 329940 - RNA, 19 nt, Artificial Sequence
  Description of Artificial Sequence: Synthetic oligonucleotide
gucaccuaugcuaacagau

SEQ ID NO: 329941 - RNA, 19 nt, Artificial Sequence
  Description of Artificial Sequence: Synthetic oligonucleotide
cucauggggccuugcuggc

SEQ ID NO: 329942 - RNA, 19 nt, Artificial Sequence
  Description of Artificial Sequence: Synthetic oligonucleotide
cauccucagugaacuguac

SEQ ID NO: 329943 - RNA, 19 nt, Artificial Sequence
  Description of Artificial Sequence: Synthetic oligonucleotide
gaagcaauugaaagauuau

SEQ ID NO: 329944 - RNA, 19 nt, Artificial Sequence
  Description of Artificial Sequence: Synthetic oligonucleotide
ccaacuaucugacaggacu

SEQ ID NO: 329945 - RNA, 19 nt, Artificial Sequence
  Description of Artificial Sequence: Synthetic oligonucleotide
uagccuaguuacccuuauc

SEQ ID NO: 329946 - RNA, 19 nt, Artificial Sequence
  Description of Artificial Sequence: Synthetic oligonucleotide
ggggauaaagacccugcca

SEQ ID NO: 329947 - RNA, 19 nt, Artificial Sequence
  Description of Artificial Sequence: Synthetic oligonucleotide
gaagacugcaagguaugcu

SEQ ID NO: 329948 - RNA, 19 nt, Artificial Sequence
  Description of Artificial Sequence: Synthetic oligonucleotide
augcacaguugccuacagu

SEQ ID NO: 329949 - RNA, 19 nt, Artificial Sequence
  Description of Artificial Sequence: Synthetic oligonucleotide
agcgucaggcaaggagggc

SEQ ID NO: 329950 - RNA, 19 nt, Artificial Sequence
  Description of Artificial Sequence: Synthetic oligonucleotide
uuagaacugcuagccuagu

SEQ ID NO: 329951 - RNA, 19 nt, Artificial Sequence
  Description of Artificial Sequence: Synthetic oligonucleotide
cauacugcgcagacacaca

SEQ ID NO: 329952 - RNA, 19 nt, Artificial Sequence
  Description of Artificial Sequence: Synthetic oligonucleotide
agguucaagcauagaauau

SEQ ID NO: 329953 - RNA, 19 nt, Artificial Sequence
  Description of Artificial Sequence: Synthetic oligonucleotide
aacccugcaggcauauauu

SEQ ID NO: 329954 - RNA, 19 nt, Artificial Sequence
  Description of Artificial Sequence: Synthetic oligonucleotide
ucagaaacacauggacauu

SEQ ID NO: 329955 - RNA, 19 nt, Artificial Sequence
  Description of Artificial Sequence: Synthetic oligonucleotide
caagaucugcacuguuaca

SEQ ID NO: 329956 - RNA, 19 nt, Artificial Sequence
  Description of Artificial Sequence: Synthetic oligonucleotide
cacacccagcccaacuauc

SEQ ID NO: 329957 - RNA, 19 nt, Artificial Sequence
  Description of Artificial Sequence: Synthetic oligonucleotide
cugcaggcauauauuggca

SEQ ID NO: 329958 - RNA, 19 nt, Artificial Sequence
  Description of Artificial Sequence: Synthetic oligonucleotide
ugcugccccuugaagguua

SEQ ID NO: 329959 - RNA, 19 nt, Artificial Sequence
  Description of Artificial Sequence: Synthetic oligonucleotide
aauugacaauguaccuuua

SEQ ID NO: 329960 - RNA, 19 nt, Artificial Sequence
  Description of Artificial Sequence: Synthetic oligonucleotide
ggcuuauagagcaggagaa

SEQ ID NO: 329961 - RNA, 19 nt, Artificial Sequence
  Description of Artificial Sequence: Synthetic oligonucleotide
gcguuuucugcuuaauaaa

SEQ ID NO: 329962 - RNA, 19 nt, Artificial Sequence
  Description of Artificial Sequence: Synthetic oligonucleotide
ugcgcauacugcgcagaca

SEQ ID NO: 329963 - RNA, 19 nt, Artificial Sequence
  Description of Artificial Sequence: Synthetic oligonucleotide
gcaagugcauuaucuuuca

SEQ ID NO: 329964 - RNA, 19 nt, Artificial Sequence
  Description of Artificial Sequence: Synthetic oligonucleotide
acacacacacacaccccag

SEQ ID NO: 329965 - RNA, 19 nt, Artificial Sequence
  Description of Artificial Sequence: Synthetic oligonucleotide
aacuuuacuuuggcuuaua

SEQ ID NO: 329966 - RNA, 19 nt, Artificial Sequence
  Description of Artificial Sequence: Synthetic oligonucleotide
gguggggauaaagacccug

SEQ ID NO: 329967 - RNA, 19 nt, Artificial Sequence
  Description of Artificial Sequence: Synthetic oligonucleotide
ccagaagcacagugagugg

SEQ ID NO: 329968 - RNA, 19 nt, Artificial Sequence
  Description of Artificial Sequence: Synthetic oligonucleotide
cauaucuggagacgagcua

SEQ ID NO: 329969 - RNA, 19 nt, Artificial Sequence
  Description of Artificial Sequence: Synthetic oligonucleotide
cgcagacacacacacacac

SEQ ID NO: 329970 - RNA, 19 nt, Artificial Sequence
  Description of Artificial Sequence: Synthetic oligonucleotide
caugaucucccuaggcaua

SEQ ID NO: 329971 - RNA, 19 nt, Artificial Sequence
  Description of Artificial Sequence: Synthetic oligonucleotide
uuaucacacccagcccaac

SEQ ID NO: 329972 - RNA, 19 nt, Artificial Sequence
  Description of Artificial Sequence: Synthetic oligonucleotide
cagaggccagguucuagca

SEQ ID NO: 329973 - RNA, 19 nt, Artificial Sequence
  Description of Artificial Sequence: Synthetic oligonucleotide
uaccgcugcuucauucauu

SEQ ID NO: 329974 - RNA, 19 nt, Artificial Sequence
  Description of Artificial Sequence: Synthetic oligonucleotide
gcaacucuaaaaccacgaa

SEQ ID NO: 329975 - RNA, 19 nt, Artificial Sequence
  Description of Artificial Sequence: Synthetic oligonucleotide
ccaccacuagccaggcugg

SEQ ID NO: 329976 - RNA, 19 nt, Artificial Sequence
  Description of Artificial Sequence: Synthetic oligonucleotide
gcggccagggaccacacuc

SEQ ID NO: 329977 - RNA, 19 nt, Artificial Sequence
  Description of Artificial Sequence: Synthetic oligonucleotide
agugucacuccgaaccauu

SEQ ID NO: 329978 - RNA, 19 nt, Artificial Sequence
  Description of Artificial Sequence: Synthetic oligonucleotide
uggacacuaccagggucac

SEQ ID NO: 329979 - RNA, 19 nt, Artificial Sequence
  Description of Artificial Sequence: Synthetic oligonucleotide
cuaacaagaucugcacugu

SEQ ID NO: 329980 - RNA, 19 nt, Artificial Sequence
  Description of Artificial Sequence: Synthetic oligonucleotide
cacgaagccugaguaagaa

SEQ ID NO: 329981 - RNA, 19 nt, Artificial Sequence
  Description of Artificial Sequence: Synthetic oligonucleotide
gcagacacacacacacacc

SEQ ID NO: 329982 - RNA, 19 nt, Artificial Sequence
  Description of Artificial Sequence: Synthetic oligonucleotide
gggcagcuaagucacaaua

SEQ ID NO: 329983 - RNA, 19 nt, Artificial Sequence
  Description of Artificial Sequence: Synthetic oligonucleotide
cuguaccccagugccguug

SEQ ID NO: 329984 - RNA, 19 nt, Artificial Sequence
  Description of Artificial Sequence: Synthetic oligonucleotide
ccugucagaacaaugguuu

SEQ ID NO: 329985 - RNA, 19 nt, Artificial Sequence
  Description of Artificial Sequence: Synthetic oligonucleotide
ugccuacaguguacugaau

SEQ ID NO: 329986 - RNA, 19 nt, Artificial Sequence
  Description of Artificial Sequence: Synthetic oligonucleotide
accuaugcuaacagaugua

SEQ ID NO: 329987 - RNA, 19 nt, Artificial Sequence
  Description of Artificial Sequence: Synthetic oligonucleotide
ccuaugcuaacagauguaa

SEQ ID NO: 329988 - RNA, 19 nt, Artificial Sequence
  Description of Artificial Sequence: Synthetic oligonucleotide
gguauaacccagugucacu

SEQ ID NO: 329989 - RNA, 19 nt, Artificial Sequence
  Description of Artificial Sequence: Synthetic oligonucleotide
aagcacucauggggccuug

SEQ ID NO: 329990 - RNA, 19 nt, Artificial Sequence
  Description of Artificial Sequence: Synthetic oligonucleotide
aggcacuaagccagcacaa

SEQ ID NO: 329991 - RNA, 19 nt, Artificial Sequence
  Description of Artificial Sequence: Synthetic oligonucleotide
ggcauauauuggcacuuua

SEQ ID NO: 329992 - RNA, 19 nt, Artificial Sequence
  Description of Artificial Sequence: Synthetic oligonucleotide
cagcguuuucugcuuaaua

SEQ ID NO: 329993 - RNA, 19 nt, Artificial Sequence
  Description of Artificial Sequence: Synthetic oligonucleotide
gcaaccgcugagucccacc

SEQ ID NO: 329994 - RNA, 19 nt, Artificial Sequence
  Description of Artificial Sequence: Synthetic oligonucleotide
agucaccuugccacacuga

SEQ ID NO: 329995 - RNA, 19 nt, Artificial Sequence
  Description of Artificial Sequence: Synthetic oligonucleotide
cacugaugcacaguugccu

SEQ ID NO: 329996 - RNA, 19 nt, Artificial Sequence
  Description of Artificial Sequence: Synthetic oligonucleotide
cgcugcuucauucauuaca

SEQ ID NO: 329997 - RNA, 19 nt, Artificial Sequence
  Description of Artificial Sequence: Synthetic oligonucleotide
cgagcuaagcgucaggcaa

SEQ ID NO: 329998 - RNA, 19 nt, Artificial Sequence
  Description of Artificial Sequence: Synthetic oligonucleotide
gcggggagccaucucagga

SEQ ID NO: 329999 - RNA, 19 nt, Artificial Sequence
  Description of Artificial Sequence: Synthetic oligonucleotide
aggcauauauuggcacuuu

SEQ ID NO: 330000 - RNA, 19 nt, Artificial Sequence
  Description of Artificial Sequence: Synthetic oligonucleotide
caugcgcauacugcgcaga

SEQ ID NO: 330001 - RNA, 19 nt, Artificial Sequence
  Description of Artificial Sequence: Synthetic oligonucleotide
ccaaaacuacaaccuguca

SEQ ID NO: 330002 - RNA, 19 nt, Artificial Sequence
  Description of Artificial Sequence: Synthetic oligonucleotide
gccuaccgcugcuucauuc

SEQ ID NO: 330003 - RNA, 19 nt, Artificial Sequence
  Description of Artificial Sequence: Synthetic oligonucleotide
cugaauuagcugagcuuau

SEQ ID NO: 330004 - RNA, 19 nt, Artificial Sequence
  Description of Artificial Sequence: Synthetic oligonucleotide
guaaguggaugugucuuuu

SEQ ID NO: 330005 - RNA, 19 nt, Artificial Sequence
  Description of Artificial Sequence: Synthetic oligonucleotide
gcccaacuaucugacagga

SEQ ID NO: 330006 - RNA, 19 nt, Artificial Sequence
  Description of Artificial Sequence: Synthetic oligonucleotide
ccguuggugcugucugagg

SEQ ID NO: 330007 - RNA, 19 nt, Artificial Sequence
  Description of Artificial Sequence: Synthetic oligonucleotide
ggccagggaccacacucug

SEQ ID NO: 330008 - RNA, 19 nt, Artificial Sequence
  Description of Artificial Sequence: Synthetic oligonucleotide
ggcuuuaaaguaagugccu

SEQ ID NO: 330009 - RNA, 19 nt, Artificial Sequence
  Description of Artificial Sequence: Synthetic oligonucleotide
cuacagcguuuucugcuua

SEQ ID NO: 330010 - RNA, 19 nt, Artificial Sequence
  Description of Artificial Sequence: Synthetic oligonucleotide
gcuuucagucaccuaugcu

SEQ ID NO: 330011 - RNA, 19 nt, Artificial Sequence
  Description of Artificial Sequence: Synthetic oligonucleotide
cccaacuaucugacaggac

SEQ ID NO: 330012 - RNA, 19 nt, Artificial Sequence
  Description of Artificial Sequence: Synthetic oligonucleotide
gcggaauguugucauuuua

SEQ ID NO: 330013 - RNA, 19 nt, Artificial Sequence
  Description of Artificial Sequence: Synthetic oligonucleotide
ugccuaccgcugcuucauu

SEQ ID NO: 330014 - RNA, 19 nt, Artificial Sequence
  Description of Artificial Sequence: Synthetic oligonucleotide
cuagccuaguuacccuuau

SEQ ID NO: 330015 - RNA, 19 nt, Artificial Sequence
  Description of Artificial Sequence: Synthetic oligonucleotide
gcacuuuaagauggccaga

SEQ ID NO: 330016 - RNA, 19 nt, Artificial Sequence
  Description of Artificial Sequence: Synthetic oligonucleotide
ggcggaggcuaaucaguaa

SEQ ID NO: 330017 - RNA, 19 nt, Artificial Sequence
  Description of Artificial Sequence: Synthetic oligonucleotide
caggcauauauuggcacuu

SEQ ID NO: 330018 - RNA, 19 nt, Artificial Sequence
  Description of Artificial Sequence: Synthetic oligonucleotide
cuaccgcugcuucauucau

SEQ ID NO: 330019 - RNA, 19 nt, Artificial Sequence
  Description of Artificial Sequence: Synthetic oligonucleotide
ccacgaagccugaguaaga

SEQ ID NO: 330020 - RNA, 19 nt, Artificial Sequence
  Description of Artificial Sequence: Synthetic oligonucleotide
ccuaggcauacagacgcaa

SEQ ID NO: 330021 - RNA, 19 nt, Artificial Sequence
  Description of Artificial Sequence: Synthetic oligonucleotide
gcuagccuaguuacccuua

SEQ ID NO: 330022 - RNA, 19 nt, Artificial Sequence
  Description of Artificial Sequence: Synthetic oligonucleotide
ggcuaaucaguaaguggau

SEQ ID NO: 330023 - RNA, 19 nt, Artificial Sequence
  Description of Artificial Sequence: Synthetic oligonucleotide
augcuaccauggacaagua

SEQ ID NO: 330024 - RNA, 19 nt, Artificial Sequence
  Description of Artificial Sequence: Synthetic oligonucleotide
ggcaaccgcugagucccac

SEQ ID NO: 330025 - RNA, 19 nt, Artificial Sequence
  Description of Artificial Sequence: Synthetic oligonucleotide
ccgcugcuucauucauuac

SEQ ID NO: 330026 - RNA, 19 nt, Artificial Sequence
  Description of Artificial Sequence: Synthetic oligonucleotide
cccuaggcauacagacgca

SEQ ID NO: 330027 - RNA, 19 nt, Artificial Sequence
  Description of Artificial Sequence: Synthetic oligonucleotide
gcgcagacacacacacaca

SEQ ID NO: 330028 - RNA, 19 nt, Artificial Sequence
  Description of Artificial Sequence: Synthetic oligonucleotide
gcuaagcgucaggcaagga

SEQ ID NO: 330029 - RNA, 19 nt, Artificial Sequence
  Description of Artificial Sequence: Synthetic oligonucleotide
ggacacuaccagggucaca

SEQ ID NO: 330030 - RNA, 19 nt, Artificial Sequence
  Description of Artificial Sequence: Synthetic oligonucleotide
cagugucacuccgaaccau

SEQ ID NO: 330031 - RNA, 19 nt, Artificial Sequence
  Description of Artificial Sequence: Synthetic oligonucleotide
cggaggcuaaucaguaagu

SEQ ID NO: 330032 - RNA, 19 nt, Artificial Sequence
  Description of Artificial Sequence: Synthetic oligonucleotide
guaccccagugccguuggu

SEQ ID NO: 330033 - RNA, 19 nt, Artificial Sequence
  Description of Artificial Sequence: Synthetic oligonucleotide
ccccaguaugaacaaugau

SEQ ID NO: 330034 - RNA, 19 nt, Artificial Sequence
  Description of Artificial Sequence: Synthetic oligonucleotide
cgcauacugcgcagacaca

SEQ ID NO: 330035 - RNA, 19 nt, Artificial Sequence
  Description of Artificial Sequence: Synthetic oligonucleotide
gccuagccacagggagggc

SEQ ID NO: 330036 - RNA, 19 nt, Artificial Sequence
  Description of Artificial Sequence: Synthetic oligonucleotide
cggggagccaucucaggau

SEQ ID NO: 330037 - RNA, 19 nt, Artificial Sequence
  Description of Artificial Sequence: Synthetic oligonucleotide
gcugccccuugaagguuau

SEQ ID NO: 330038 - RNA, 19 nt, Artificial Sequence
  Description of Artificial Sequence: Synthetic oligonucleotide
uauaaauuauugauggugg

SEQ ID NO: 330039 - RNA, 19 nt, Artificial Sequence
  Description of Artificial Sequence: Synthetic oligonucleotide
aauaccauccagcaccugc

SEQ ID NO: 330040 - RNA, 19 nt, Artificial Sequence
  Description of Artificial Sequence: Synthetic oligonucleotide
ucaaauuggacaagcaggg

SEQ ID NO: 330041 - RNA, 19 nt, Artificial Sequence
  Description of Artificial Sequence: Synthetic oligonucleotide
aaugcaaacgggcggacac

SEQ ID NO: 330042 - RNA, 19 nt, Artificial Sequence
  Description of Artificial Sequence: Synthetic oligonucleotide
aauaccuguacccuaagga

SEQ ID NO: 330043 - RNA, 19 nt, Artificial Sequence
  Description of Artificial Sequence: Synthetic oligonucleotide
aauaacuuaggggauggac

SEQ ID NO: 330044 - RNA, 19 nt, Artificial Sequence
  Description of Artificial Sequence: Synthetic oligonucleotide
aaauaagcagaacaagcca

SEQ ID NO: 330045 - RNA, 19 nt, Artificial Sequence
  Description of Artificial Sequence: Synthetic oligonucleotide
uagaucuuuagcaagggga

SEQ ID NO: 330046 - RNA, 19 nt, Artificial Sequence
  Description of Artificial Sequence: Synthetic oligonucleotide
ugggcuuucuaccagagug

SEQ ID NO: 330047 - RNA, 19 nt, Artificial Sequence
  Description of Artificial Sequence: Synthetic oligonucleotide
aaggaacuuguaugcagcc

SEQ ID NO: 330048 - RNA, 19 nt, Artificial Sequence
  Description of Artificial Sequence: Synthetic oligonucleotide
aauggcuagggccuaagug

SEQ ID NO: 330049 - RNA, 19 nt, Artificial Sequence
  Description of Artificial Sequence: Synthetic oligonucleotide
uuuaaccccauauaaauua

SEQ ID NO: 330050 - RNA, 19 nt, Artificial Sequence
  Description of Artificial Sequence: Synthetic oligonucleotide
ucuugcucagaccugauac

SEQ ID NO: 330051 - RNA, 19 nt, Artificial Sequence
  Description of Artificial Sequence: Synthetic oligonucleotide
ugcuacagggaacucaagg

SEQ ID NO: 330052 - RNA, 19 nt, Artificial Sequence
  Description of Artificial Sequence: Synthetic oligonucleotide
aauacugcuauauccuccu

SEQ ID NO: 330053 - RNA, 19 nt, Artificial Sequence
  Description of Artificial Sequence: Synthetic oligonucleotide
ugucaagccaguuguauag

SEQ ID NO: 330054 - RNA, 19 nt, Artificial Sequence
  Description of Artificial Sequence: Synthetic oligonucleotide
gagagguaauaacuuaggg

SEQ ID NO: 330055 - RNA, 19 nt, Artificial Sequence
  Description of Artificial Sequence: Synthetic oligonucleotide
uuagaucuuuagcaagggg

SEQ ID NO: 330056 - RNA, 19 nt, Artificial Sequence
  Description of Artificial Sequence: Synthetic oligonucleotide
uccuuaaccuugcugaagc

SEQ ID NO: 330057 - RNA, 19 nt, Artificial Sequence
  Description of Artificial Sequence: Synthetic oligonucleotide
uaacuuaggggauggacag

SEQ ID NO: 330058 - RNA, 19 nt, Artificial Sequence
  Description of Artificial Sequence: Synthetic oligonucleotide
uaaggaacuuguaugcagc

SEQ ID NO: 330059 - RNA, 19 nt, Artificial Sequence
  Description of Artificial Sequence: Synthetic oligonucleotide
aacgggcggacacugaagg

SEQ ID NO: 330060 - RNA, 19 nt, Artificial Sequence
  Description of Artificial Sequence: Synthetic oligonucleotide
uuguuguuagaccgcaggg

SEQ ID NO: 330061 - RNA, 19 nt, Artificial Sequence
  Description of Artificial Sequence: Synthetic oligonucleotide
aaauuggacaagcaggguu

SEQ ID NO: 330062 - RNA, 19 nt, Artificial Sequence
  Description of Artificial Sequence: Synthetic oligonucleotide
uuguaugcagccauucugc

SEQ ID NO: 330063 - RNA, 19 nt, Artificial Sequence
  Description of Artificial Sequence: Synthetic oligonucleotide
aagccgagcgacccaagcc

SEQ ID NO: 330064 - RNA, 19 nt, Artificial Sequence
  Description of Artificial Sequence: Synthetic oligonucleotide
aauacugagugguguccac

SEQ ID NO: 330065 - RNA, 19 nt, Artificial Sequence
  Description of Artificial Sequence: Synthetic oligonucleotide
ucuuucaacccacaguagu

SEQ ID NO: 330066 - RNA, 19 nt, Artificial Sequence
  Description of Artificial Sequence: Synthetic oligonucleotide
aacacugcgcggcuccugc

SEQ ID NO: 330067 - RNA, 19 nt, Artificial Sequence
  Description of Artificial Sequence: Synthetic oligonucleotide
ucaaaccggacuuuguggc

SEQ ID NO: 330068 - RNA, 19 nt, Artificial Sequence
  Description of Artificial Sequence: Synthetic oligonucleotide
uaauaccuguacccuaagg

SEQ ID NO: 330069 - RNA, 19 nt, Artificial Sequence
  Description of Artificial Sequence: Synthetic oligonucleotide
cuuguuguuagaccgcagg

SEQ ID NO: 330070 - RNA, 19 nt, Artificial Sequence
  Description of Artificial Sequence: Synthetic oligonucleotide
  modified_base (4)..(4): a, c, u, g, unknown or other
gaancuggcaccaauccac

SEQ ID NO: 330071 - RNA, 19 nt, Artificial Sequence
  Description of Artificial Sequence: Synthetic oligonucleotide
caugguaccgccaucgcag

SEQ ID NO: 330072 - RNA, 19 nt, Artificial Sequence
  Description of Artificial Sequence: Synthetic oligonucleotide
cuaaggaacuuguaugcag

SEQ ID NO: 330073 - RNA, 19 nt, Artificial Sequence
  Description of Artificial Sequence: Synthetic oligonucleotide
agcagaucuggguacugcc

SEQ ID NO: 330074 - RNA, 19 nt, Artificial Sequence
  Description of Artificial Sequence: Synthetic oligonucleotide
ugucuugccaaaacugacc

SEQ ID NO: 330075 - RNA, 19 nt, Artificial Sequence
  Description of Artificial Sequence: Synthetic oligonucleotide
cucggauccaguaaauggc

SEQ ID NO: 330076 - RNA, 19 nt, Artificial Sequence
  Description of Artificial Sequence: Synthetic oligonucleotide
aagucccacacauagcaga

SEQ ID NO: 330077 - RNA, 19 nt, Artificial Sequence
  Description of Artificial Sequence: Synthetic oligonucleotide
aaccccauauaaauuauug

SEQ ID NO: 330078 - RNA, 19 nt, Artificial Sequence
  Description of Artificial Sequence: Synthetic oligonucleotide
guuguauagcugcaggaag

SEQ ID NO: 330079 - RNA, 19 nt, Artificial Sequence
  Description of Artificial Sequence: Synthetic oligonucleotide
ugcaacugagcccacagaa

SEQ ID NO: 330080 - RNA, 19 nt, Artificial Sequence
  Description of Artificial Sequence: Synthetic oligonucleotide
caucucguagucuuggggc

SEQ ID NO: 330081 - RNA, 19 nt, Artificial Sequence
  Description of Artificial Sequence: Synthetic oligonucleotide
aagguaagagagaaggucu

SEQ ID NO: 330082 - RNA, 19 nt, Artificial Sequence
  Description of Artificial Sequence: Synthetic oligonucleotide
aggccauaauaccuguacc

SEQ ID NO: 330083 - RNA, 19 nt, Artificial Sequence
  Description of Artificial Sequence: Synthetic oligonucleotide
  modified_base (2)..(2): a, c, u, g, unknown or other
ancuggcaccaauccaccc

SEQ ID NO: 330084 - RNA, 19 nt, Artificial Sequence
  Description of Artificial Sequence: Synthetic oligonucleotide
agaagguaauacugagugg

SEQ ID NO: 330085 - RNA, 19 nt, Artificial Sequence
  Description of Artificial Sequence: Synthetic oligonucleotide
aauaagcagaacaagccau

SEQ ID NO: 330086 - RNA, 19 nt, Artificial Sequence
  Description of Artificial Sequence: Synthetic oligonucleotide
cuuguaugcagccauucug

SEQ ID NO: 330087 - RNA, 19 nt, Artificial Sequence
  Description of Artificial Sequence: Synthetic oligonucleotide
cuggguacucacuuggucc

SEQ ID NO: 330088 - RNA, 19 nt, Artificial Sequence
  Description of Artificial Sequence: Synthetic oligonucleotide
guaacuucagccacuaggc

SEQ ID NO: 330089 - RNA, 19 nt, Artificial Sequence
  Description of Artificial Sequence: Synthetic oligonucleotide
caacugagcccacagaagc

SEQ ID NO: 330090 - RNA, 19 nt, Artificial Sequence
  Description of Artificial Sequence: Synthetic oligonucleotide
gaagguaagagagaagguc

SEQ ID NO: 330091 - RNA, 19 nt, Artificial Sequence
  Description of Artificial Sequence: Synthetic oligonucleotide
agagccgaagucuacgcag

SEQ ID NO: 330092 - RNA, 19 nt, Artificial Sequence
  Description of Artificial Sequence: Synthetic oligonucleotide
guagcagaagguaauacug

SEQ ID NO: 330093 - RNA, 19 nt, Artificial Sequence
  Description of Artificial Sequence: Synthetic oligonucleotide
ucuaccaucucguagucuu

SEQ ID NO: 330094 - RNA, 19 nt, Artificial Sequence
  Description of Artificial Sequence: Synthetic oligonucleotide
acccuaaggaacuuguaug

SEQ ID NO: 330095 - RNA, 19 nt, Artificial Sequence
  Description of Artificial Sequence: Synthetic oligonucleotide
gaugacuuggagccccugg

SEQ ID NO: 330096 - RNA, 19 nt, Artificial Sequence
  Description of Artificial Sequence: Synthetic oligonucleotide
aagcaucugagccugcgcu

SEQ ID NO: 330097 - RNA, 19 nt, Artificial Sequence
  Description of Artificial Sequence: Synthetic oligonucleotide
caaaacugaccacuggcgc

SEQ ID NO: 330098 - RNA, 19 nt, Artificial Sequence
  Description of Artificial Sequence: Synthetic oligonucleotide
  modified_base (3)..(3): a, c, u, g, unknown or other
aancuggcaccaauccacc

SEQ ID NO: 330099 - RNA, 19 nt, Artificial Sequence
  Description of Artificial Sequence: Synthetic oligonucleotide
cuagagcugcaacugagcc

SEQ ID NO: 330100 - RNA, 19 nt, Artificial Sequence
  Description of Artificial Sequence: Synthetic oligonucleotide
agcucuaccaucucguagu

SEQ ID NO: 330101 - RNA, 19 nt, Artificial Sequence
  Description of Artificial Sequence: Synthetic oligonucleotide
guaagcugcacaaacaguc

SEQ ID NO: 330102 - RNA, 19 nt, Artificial Sequence
  Description of Artificial Sequence: Synthetic oligonucleotide
uguagcuuagcccucccuc

SEQ ID NO: 330103 - RNA, 19 nt, Artificial Sequence
  Description of Artificial Sequence: Synthetic oligonucleotide
gaaguuguuguuccagcug

SEQ ID NO: 330104 - RNA, 19 nt, Artificial Sequence
  Description of Artificial Sequence: Synthetic oligonucleotide
caccagaggaaauaagcag

SEQ ID NO: 330105 - RNA, 19 nt, Artificial Sequence
  Description of Artificial Sequence: Synthetic oligonucleotide
ugguagacguccucugugg

SEQ ID NO: 330106 - RNA, 19 nt, Artificial Sequence
  Description of Artificial Sequence: Synthetic oligonucleotide
gaaggcucgggccauguug

SEQ ID NO: 330107 - RNA, 19 nt, Artificial Sequence
  Description of Artificial Sequence: Synthetic oligonucleotide
aaaccggacuuuguggcgg

SEQ ID NO: 330108 - RNA, 19 nt, Artificial Sequence
  Description of Artificial Sequence: Synthetic oligonucleotide
uguaaugcaaacgggcgga

SEQ ID NO: 330109 - RNA, 19 nt, Artificial Sequence
  Description of Artificial Sequence: Synthetic oligonucleotide
aaguguagcuuagcccucc

SEQ ID NO: 330110 - RNA, 19 nt, Artificial Sequence
  Description of Artificial Sequence: Synthetic oligonucleotide
ggcgcaagcaagcacaccg

SEQ ID NO: 330111 - RNA, 19 nt, Artificial Sequence
  Description of Artificial Sequence: Synthetic oligonucleotide
agcaaggggagauggccgc

SEQ ID NO: 330112 - RNA, 19 nt, Artificial Sequence
  Description of Artificial Sequence: Synthetic oligonucleotide
cuguaaugcaaacgggcgg

SEQ ID NO: 330113 - RNA, 19 nt, Artificial Sequence
  Description of Artificial Sequence: Synthetic oligonucleotide
uaccuguacccuaaggaac

SEQ ID NO: 330114 - RNA, 19 nt, Artificial Sequence
  Description of Artificial Sequence: Synthetic oligonucleotide
agaucuuuagcaaggggag

SEQ ID NO: 330115 - RNA, 19 nt, Artificial Sequence
  Description of Artificial Sequence: Synthetic oligonucleotide
auaacuuaggggauggaca

SEQ ID NO: 330116 - RNA, 19 nt, Artificial Sequence
  Description of Artificial Sequence: Synthetic oligonucleotide
cagguaaggccauaauacc

SEQ ID NO: 330117 - RNA, 19 nt, Artificial Sequence
  Description of Artificial Sequence: Synthetic oligonucleotide
ggucaaauuggacaagcag

SEQ ID NO: 330118 - RNA, 19 nt, Artificial Sequence
  Description of Artificial Sequence: Synthetic oligonucleotide
cacaugacacucacgcugg

SEQ ID NO: 330119 - RNA, 19 nt, Artificial Sequence
  Description of Artificial Sequence: Synthetic oligonucleotide
uuaggggauggacagggaa

SEQ ID NO: 330120 - RNA, 19 nt, Artificial Sequence
  Description of Artificial Sequence: Synthetic oligonucleotide
uuauuugacuuugucuugu

SEQ ID NO: 330121 - RNA, 19 nt, Artificial Sequence
  Description of Artificial Sequence: Synthetic oligonucleotide
gacaagggaggaaaauuag

SEQ ID NO: 330122 - RNA, 19 nt, Artificial Sequence
  Description of Artificial Sequence: Synthetic oligonucleotide
cuuagaucuuuagcaaggg

SEQ ID NO: 330123 - RNA, 19 nt, Artificial Sequence
  Description of Artificial Sequence: Synthetic oligonucleotide
uacugagugguguccaccc

SEQ ID NO: 330124 - RNA, 19 nt, Artificial Sequence
  Description of Artificial Sequence: Synthetic oligonucleotide
ucgcuguaaugcaaacggg

SEQ ID NO: 330125 - RNA, 19 nt, Artificial Sequence
  Description of Artificial Sequence: Synthetic oligonucleotide
gagccggucaaauuggaca

SEQ ID NO: 330126 - RNA, 19 nt, Artificial Sequence
  Description of Artificial Sequence: Synthetic oligonucleotide
gagaaguaagggcuuccag

SEQ ID NO: 330127 - RNA, 19 nt, Artificial Sequence
  Description of Artificial Sequence: Synthetic oligonucleotide
acucaaggcgcagaguaac

SEQ ID NO: 330128 - RNA, 19 nt, Artificial Sequence
  Description of Artificial Sequence: Synthetic oligonucleotide
cugagcauaggccacacca

SEQ ID NO: 330129 - RNA, 19 nt, Artificial Sequence
  Description of Artificial Sequence: Synthetic oligonucleotide
caccaauccaccccgagac

SEQ ID NO: 330130 - RNA, 19 nt, Artificial Sequence
  Description of Artificial Sequence: Synthetic oligonucleotide
aaaacagguaaggccauaa

SEQ ID NO: 330131 - RNA, 19 nt, Artificial Sequence
  Description of Artificial Sequence: Synthetic oligonucleotide
gagcauaggccacaccaag

SEQ ID NO: 330132 - RNA, 19 nt, Artificial Sequence
  Description of Artificial Sequence: Synthetic oligonucleotide
uguuguuagaccgcaggga

SEQ ID NO: 330133 - RNA, 19 nt, Artificial Sequence
  Description of Artificial Sequence: Synthetic oligonucleotide
aauuggacaagcaggguuu

SEQ ID NO: 330134 - RNA, 19 nt, Artificial Sequence
  Description of Artificial Sequence: Synthetic oligonucleotide
ucggauccaguaaauggcu

SEQ ID NO: 330135 - RNA, 19 nt, Artificial Sequence
  Description of Artificial Sequence: Synthetic oligonucleotide
accccauauaaauuauuga

SEQ ID NO: 330136 - RNA, 19 nt, Artificial Sequence
  Description of Artificial Sequence: Synthetic oligonucleotide
auaagcagaacaagccauc

SEQ ID NO: 330137 - RNA, 19 nt, Artificial Sequence
  Description of Artificial Sequence: Synthetic oligonucleotide
cauggguaacuucagccac

SEQ ID NO: 330138 - RNA, 19 nt, Artificial Sequence
  Description of Artificial Sequence: Synthetic oligonucleotide
cacacacauucucuuaccc

SEQ ID NO: 330139 - RNA, 19 nt, Artificial Sequence
  Description of Artificial Sequence: Synthetic oligonucleotide
ugagucgcuguaaugcaaa

SEQ ID NO: 330140 - RNA, 19 nt, Artificial Sequence
  Description of Artificial Sequence: Synthetic oligonucleotide
caagguggcucccaugagc

SEQ ID NO: 330141 - RNA, 19 nt, Artificial Sequence
  Description of Artificial Sequence: Synthetic oligonucleotide
ggccauaauaccuguaccc

SEQ ID NO: 330142 - RNA, 19 nt, Artificial Sequence
  Description of Artificial Sequence: Synthetic oligonucleotide
auacugagugguguccacc

SEQ ID NO: 330143 - RNA, 19 nt, Artificial Sequence
  Description of Artificial Sequence: Synthetic oligonucleotide
uccagagccgaagucuacg

SEQ ID NO: 330144 - RNA, 19 nt, Artificial Sequence
  Description of Artificial Sequence: Synthetic oligonucleotide
auggaccuuguuguuagac

SEQ ID NO: 330145 - RNA, 19 nt, Artificial Sequence
  Description of Artificial Sequence: Synthetic oligonucleotide
acagcaugcaggcgugagg

SEQ ID NO: 330146 - RNA, 19 nt, Artificial Sequence
  Description of Artificial Sequence: Synthetic oligonucleotide
uggcggaacuccuuaaccu

SEQ ID NO: 330147 - RNA, 19 nt, Artificial Sequence
  Description of Artificial Sequence: Synthetic oligonucleotide
uggguacucacuuggucca

SEQ ID NO: 330148 - RNA, 19 nt, Artificial Sequence
  Description of Artificial Sequence: Synthetic oligonucleotide
cuggucuagccccugacug

SEQ ID NO: 330149 - RNA, 19 nt, Artificial Sequence
  Description of Artificial Sequence: Synthetic oligonucleotide
uuccgaagaccuuccacca

SEQ ID NO: 330150 - RNA, 19 nt, Artificial Sequence
  Description of Artificial Sequence: Synthetic oligonucleotide
gcaaguaagcugcacaaac

SEQ ID NO: 330151 - RNA, 19 nt, Artificial Sequence
  Description of Artificial Sequence: Synthetic oligonucleotide
cagcaugcaggcgugaggg

SEQ ID NO: 330152 - RNA, 19 nt, Artificial Sequence
  Description of Artificial Sequence: Synthetic oligonucleotide
agcgggaaggcagugguuc

SEQ ID NO: 330153 - RNA, 19 nt, Artificial Sequence
  Description of Artificial Sequence: Synthetic oligonucleotide
cccaaagucccacacauag

SEQ ID NO: 330154 - RNA, 19 nt, Artificial Sequence
  Description of Artificial Sequence: Synthetic oligonucleotide
caaaccggacuuuguggcg

SEQ ID NO: 330155 - RNA, 19 nt, Artificial Sequence
  Description of Artificial Sequence: Synthetic oligonucleotide
auaauaccuguacccuaag

SEQ ID NO: 330156 - RNA, 19 nt, Artificial Sequence
  Description of Artificial Sequence: Synthetic oligonucleotide
agccccuaaccuuagggca

SEQ ID NO: 330157 - RNA, 19 nt, Artificial Sequence
  Description of Artificial Sequence: Synthetic oligonucleotide
cuggcaccaauccaccccg

SEQ ID NO: 330158 - RNA, 19 nt, Artificial Sequence
  Description of Artificial Sequence: Synthetic oligonucleotide
cauaauaccuguacccuaa

SEQ ID NO: 330159 - RNA, 19 nt, Artificial Sequence
  Description of Artificial Sequence: Synthetic oligonucleotide
agucgcuguaaugcaaacg

SEQ ID NO: 330160 - RNA, 19 nt, Artificial Sequence
  Description of Artificial Sequence: Synthetic oligonucleotide
gaaggucagccgugcacgg

SEQ ID NO: 330161 - RNA, 19 nt, Artificial Sequence
  Description of Artificial Sequence: Synthetic oligonucleotide
cuacugucuggucuagccc

SEQ ID NO: 330162 - RNA, 19 nt, Artificial Sequence
  Description of Artificial Sequence: Synthetic oligonucleotide
uaccauggguaacuucagc

SEQ ID NO: 330163 - RNA, 19 nt, Artificial Sequence
  Description of Artificial Sequence: Synthetic oligonucleotide
uugcucagaccugauacca

SEQ ID NO: 330164 - RNA, 19 nt, Artificial Sequence
  Description of Artificial Sequence: Synthetic oligonucleotide
ggaaguguagcuuagcccu

SEQ ID NO: 330165 - RNA, 19 nt, Artificial Sequence
  Description of Artificial Sequence: Synthetic oligonucleotide
guaccugaggacuugggaa

SEQ ID NO: 330166 - RNA, 19 nt, Artificial Sequence
  Description of Artificial Sequence: Synthetic oligonucleotide
caggauguagccguuuggc

SEQ ID NO: 330167 - RNA, 19 nt, Artificial Sequence
  Description of Artificial Sequence: Synthetic oligonucleotide
acauccgcagagcccaaag

SEQ ID NO: 330168 - RNA, 19 nt, Artificial Sequence
  Description of Artificial Sequence: Synthetic oligonucleotide
guagacguccucuguggcc

SEQ ID NO: 330169 - RNA, 19 nt, Artificial Sequence
  Description of Artificial Sequence: Synthetic oligonucleotide
ugguccaauacugcuauau

SEQ ID NO: 330170 - RNA, 19 nt, Artificial Sequence
  Description of Artificial Sequence: Synthetic oligonucleotide
aaggucagccgugcacggc

SEQ ID NO: 330171 - RNA, 19 nt, Artificial Sequence
  Description of Artificial Sequence: Synthetic oligonucleotide
gggaaguguagcuuagccc

SEQ ID NO: 330172 - RNA, 19 nt, Artificial Sequence
  Description of Artificial Sequence: Synthetic oligonucleotide
aaagcucuaccaucucgua

SEQ ID NO: 330173 - RNA, 19 nt, Artificial Sequence
  Description of Artificial Sequence: Synthetic oligonucleotide
uaccugaggacuugggaau

SEQ ID NO: 330174 - RNA, 19 nt, Artificial Sequence
  Description of Artificial Sequence: Synthetic oligonucleotide
uagccguuuggcuaucagu

SEQ ID NO: 330175 - RNA, 19 nt, Artificial Sequence
  Description of Artificial Sequence: Synthetic oligonucleotide
gagaccgcaacagccacug

SEQ ID NO: 330176 - RNA, 19 nt, Artificial Sequence
  Description of Artificial Sequence: Synthetic oligonucleotide
ucguuuccgaagaccuucc

SEQ ID NO: 330177 - RNA, 19 nt, Artificial Sequence
  Description of Artificial Sequence: Synthetic oligonucleotide
  modified_base (6)..(6): a, c, u, g, unknown or other
gggaancuggcaccaaucc

SEQ ID NO: 330178 - RNA, 19 nt, Artificial Sequence
  Description of Artificial Sequence: Synthetic oligonucleotide
agugcugagucgcuguaau

SEQ ID NO: 330179 - RNA, 19 nt, Artificial Sequence
  Description of Artificial Sequence: Synthetic oligonucleotide
gguaauaacuuaggggaug

SEQ ID NO: 330180 - RNA, 19 nt, Artificial Sequence
  Description of Artificial Sequence: Synthetic oligonucleotide
acuugggaauaaauuagca

SEQ ID NO: 330181 - RNA, 19 nt, Artificial Sequence
  Description of Artificial Sequence: Synthetic oligonucleotide
cuaaccuuagggcacccca

SEQ ID NO: 330182 - RNA, 19 nt, Artificial Sequence
  Description of Artificial Sequence: Synthetic oligonucleotide
cugcgcucagcccaucugg

SEQ ID NO: 330183 - RNA, 19 nt, Artificial Sequence
  Description of Artificial Sequence: Synthetic oligonucleotide
cagccccuaaccuuagggc

SEQ ID NO: 330184 - RNA, 19 nt, Artificial Sequence
  Description of Artificial Sequence: Synthetic oligonucleotide
cccuaaggaacuuguaugc

SEQ ID NO: 330185 - RNA, 19 nt, Artificial Sequence
  Description of Artificial Sequence: Synthetic oligonucleotide
agguaaggccauaauaccu

SEQ ID NO: 330186 - RNA, 19 nt, Artificial Sequence
  Description of Artificial Sequence: Synthetic oligonucleotide
caagcaagcacaccgaggu

SEQ ID NO: 330187 - RNA, 19 nt, Artificial Sequence
  Description of Artificial Sequence: Synthetic oligonucleotide
agccgagcgacccaagccu

SEQ ID NO: 330188 - RNA, 19 nt, Artificial Sequence
  Description of Artificial Sequence: Synthetic oligonucleotide
uguuguggagugugucagc

SEQ ID NO: 330189 - RNA, 19 nt, Artificial Sequence
  Description of Artificial Sequence: Synthetic oligonucleotide
gacagggaaguguagcuua

SEQ ID NO: 330190 - RNA, 19 nt, Artificial Sequence
  Description of Artificial Sequence: Synthetic oligonucleotide
gguaauacugagugguguc

SEQ ID NO: 330191 - RNA, 19 nt, Artificial Sequence
  Description of Artificial Sequence: Synthetic oligonucleotide
uauuugacuuugucuuguc

SEQ ID NO: 330192 - RNA, 19 nt, Artificial Sequence
  Description of Artificial Sequence: Synthetic oligonucleotide
aggaccuuaaggggcuccc

SEQ ID NO: 330193 - RNA, 19 nt, Artificial Sequence
  Description of Artificial Sequence: Synthetic oligonucleotide
cuaccagagugucaucuuc

SEQ ID NO: 330194 - RNA, 19 nt, Artificial Sequence
  Description of Artificial Sequence: Synthetic oligonucleotide
uagcgggugaguuccacaa

SEQ ID NO: 330195 - RNA, 19 nt, Artificial Sequence
  Description of Artificial Sequence: Synthetic oligonucleotide
ccuacugucuggucuagcc

SEQ ID NO: 330196 - RNA, 19 nt, Artificial Sequence
  Description of Artificial Sequence: Synthetic oligonucleotide
acgggcggacacugaaggc

SEQ ID NO: 330197 - RNA, 19 nt, Artificial Sequence
  Description of Artificial Sequence: Synthetic oligonucleotide
gcuaucagugagaaguaag

SEQ ID NO: 330198 - RNA, 19 nt, Artificial Sequence
  Description of Artificial Sequence: Synthetic oligonucleotide
uggucccaauaccauccag

SEQ ID NO: 330199 - RNA, 19 nt, Artificial Sequence
  Description of Artificial Sequence: Synthetic oligonucleotide
guagcuuagcccucccuca

SEQ ID NO: 330200 - RNA, 19 nt, Artificial Sequence
  Description of Artificial Sequence: Synthetic oligonucleotide
agcaugcaggcgugagggc

SEQ ID NO: 330201 - RNA, 19 nt, Artificial Sequence
  Description of Artificial Sequence: Synthetic oligonucleotide
uuaaagugcugaagcccau

SEQ ID NO: 330202 - RNA, 19 nt, Artificial Sequence
  Description of Artificial Sequence: Synthetic oligonucleotide
uaaccccauauaaauuauu

SEQ ID NO: 330203 - RNA, 19 nt, Artificial Sequence
  Description of Artificial Sequence: Synthetic oligonucleotide
gcggcuaaaggcaaguaag

SEQ ID NO: 330204 - RNA, 19 nt, Artificial Sequence
  Description of Artificial Sequence: Synthetic oligonucleotide
agcaucugagccugcgcug

SEQ ID NO: 330205 - RNA, 19 nt, Artificial Sequence
  Description of Artificial Sequence: Synthetic oligonucleotide
ugcgcucagcccaucuggc

SEQ ID NO: 330206 - RNA, 19 nt, Artificial Sequence
  Description of Artificial Sequence: Synthetic oligonucleotide
caucgcaggaggacagccc

SEQ ID NO: 330207 - RNA, 19 nt, Artificial Sequence
  Description of Artificial Sequence: Synthetic oligonucleotide
auuggacaagcaggguuuc

SEQ ID NO: 330208 - RNA, 19 nt, Artificial Sequence
  Description of Artificial Sequence: Synthetic oligonucleotide
aggucagccgugcacggcu

SEQ ID NO: 330209 - RNA, 19 nt, Artificial Sequence
  Description of Artificial Sequence: Synthetic oligonucleotide
aaacgggcggacacugaag

SEQ ID NO: 330210 - RNA, 19 nt, Artificial Sequence
  Description of Artificial Sequence: Synthetic oligonucleotide
cuagggguagagcugggca

SEQ ID NO: 330211 - RNA, 19 nt, Artificial Sequence
  Description of Artificial Sequence: Synthetic oligonucleotide
guggacauacaaagggaug

SEQ ID NO: 330212 - RNA, 19 nt, Artificial Sequence
  Description of Artificial Sequence: Synthetic oligonucleotide
guuguuagaccgcagggau

SEQ ID NO: 330213 - RNA, 19 nt, Artificial Sequence
  Description of Artificial Sequence: Synthetic oligonucleotide
ucuaccagagugucaucuu

SEQ ID NO: 330214 - RNA, 19 nt, Artificial Sequence
  Description of Artificial Sequence: Synthetic oligonucleotide
guagccguuuggcuaucag

SEQ ID NO: 330215 - RNA, 19 nt, Artificial Sequence
  Description of Artificial Sequence: Synthetic oligonucleotide
ucaaagccgagcgacccaa

SEQ ID NO: 330216 - RNA, 19 nt, Artificial Sequence
  Description of Artificial Sequence: Synthetic oligonucleotide
caggccagugcugagucgc

SEQ ID NO: 330217 - RNA, 19 nt, Artificial Sequence
  Description of Artificial Sequence: Synthetic oligonucleotide
ugauugagccggucaaauu

SEQ ID NO: 330218 - RNA, 19 nt, Artificial Sequence
  Description of Artificial Sequence: Synthetic oligonucleotide
uaaugcaaacgggcggaca

SEQ ID NO: 330219 - RNA, 19 nt, Artificial Sequence
  Description of Artificial Sequence: Synthetic oligonucleotide
cacaccgaggugaguagug

SEQ ID NO: 330220 - RNA, 19 nt, Artificial Sequence
  Description of Artificial Sequence: Synthetic oligonucleotide
cuuaccccacccuggggac

SEQ ID NO: 330221 - RNA, 19 nt, Artificial Sequence
  Description of Artificial Sequence: Synthetic oligonucleotide
accgccaucgcaggaggac

SEQ ID NO: 330222 - RNA, 19 nt, Artificial Sequence
  Description of Artificial Sequence: Synthetic oligonucleotide
gucguuuccgaagaccuuc

SEQ ID NO: 330223 - RNA, 19 nt, Artificial Sequence
  Description of Artificial Sequence: Synthetic oligonucleotide
uggagugugucagcaccag

SEQ ID NO: 330224 - RNA, 19 nt, Artificial Sequence
  Description of Artificial Sequence: Synthetic oligonucleotide
cacgguggucccaauacca

SEQ ID NO: 330225 - RNA, 19 nt, Artificial Sequence
  Description of Artificial Sequence: Synthetic oligonucleotide
ggagguucaacuggggaug

SEQ ID NO: 330226 - RNA, 19 nt, Artificial Sequence
  Description of Artificial Sequence: Synthetic oligonucleotide
gcucagaccugauaccagc

SEQ ID NO: 330227 - RNA, 19 nt, Artificial Sequence
  Description of Artificial Sequence: Synthetic oligonucleotide
ggugaguaguggcagugac

SEQ ID NO: 330228 - RNA, 19 nt, Artificial Sequence
  Description of Artificial Sequence: Synthetic oligonucleotide
  modified_base (5)..(5): a, c, u, g, unknown or other
ggaancuggcaccaaucca

SEQ ID NO: 330229 - RNA, 19 nt, Artificial Sequence
  Description of Artificial Sequence: Synthetic oligonucleotide
cacacauagcagagggguc

SEQ ID NO: 330230 - RNA, 19 nt, Artificial Sequence
  Description of Artificial Sequence: Synthetic oligonucleotide
ccuuaaggggcucccagcc

SEQ ID NO: 330231 - RNA, 19 nt, Artificial Sequence
  Description of Artificial Sequence: Synthetic oligonucleotide
ugucuggucuagccccuga

SEQ ID NO: 330232 - RNA, 19 nt, Artificial Sequence
  Description of Artificial Sequence: Synthetic oligonucleotide
uaauaacuuaggggaugga

SEQ ID NO: 330233 - RNA, 19 nt, Artificial Sequence
  Description of Artificial Sequence: Synthetic oligonucleotide
caauccaccccgagaccgc

SEQ ID NO: 330234 - RNA, 19 nt, Artificial Sequence
  Description of Artificial Sequence: Synthetic oligonucleotide
agaguaacagcagcgugua

SEQ ID NO: 330235 - RNA, 19 nt, Artificial Sequence
  Description of Artificial Sequence: Synthetic oligonucleotide
gguagcagaagguaauacu

SEQ ID NO: 330236 - RNA, 19 nt, Artificial Sequence
  Description of Artificial Sequence: Synthetic oligonucleotide
gaccgcaacagccacugcu

SEQ ID NO: 330237 - RNA, 19 nt, Artificial Sequence
  Description of Artificial Sequence: Synthetic oligonucleotide
gaucuuuagcaaggggaga

SEQ ID NO: 330238 - RNA, 19 nt, Artificial Sequence
  Description of Artificial Sequence: Synthetic oligonucleotide
gacagccccuaaccuuagg

SEQ ID NO: 330239 - RNA, 19 nt, Artificial Sequence
  Description of Artificial Sequence: Synthetic oligonucleotide
cagaguaacagcagcgugu

SEQ ID NO: 330240 - RNA, 19 nt, Artificial Sequence
  Description of Artificial Sequence: Synthetic oligonucleotide
augagcgggaaggcagugg

SEQ ID NO: 330241 - RNA, 19 nt, Artificial Sequence
  Description of Artificial Sequence: Synthetic oligonucleotide
cgcuguaaugcaaacgggc

SEQ ID NO: 330242 - RNA, 19 nt, Artificial Sequence
  Description of Artificial Sequence: Synthetic oligonucleotide
cagaccugauaccagcaga

SEQ ID NO: 330243 - RNA, 19 nt, Artificial Sequence
  Description of Artificial Sequence: Synthetic oligonucleotide
agaccugauaccagcagau

SEQ ID NO: 330244 - RNA, 19 nt, Artificial Sequence
  Description of Artificial Sequence: Synthetic oligonucleotide
caggccuagcuccugucac

SEQ ID NO: 330245 - RNA, 19 nt, Artificial Sequence
  Description of Artificial Sequence: Synthetic oligonucleotide
cuccuuaaccuugcugaag

SEQ ID NO: 330246 - RNA, 19 nt, Artificial Sequence
  Description of Artificial Sequence: Synthetic oligonucleotide
aaccggacuuuguggcgga

SEQ ID NO: 330247 - RNA, 19 nt, Artificial Sequence
  Description of Artificial Sequence: Synthetic oligonucleotide
ggcgugagggcucugguuc

SEQ ID NO: 330248 - RNA, 19 nt, Artificial Sequence
  Description of Artificial Sequence: Synthetic oligonucleotide
accuuguuguuagaccgca

SEQ ID NO: 330249 - RNA, 19 nt, Artificial Sequence
  Description of Artificial Sequence: Synthetic oligonucleotide
cuggcccuagcaagguggc

SEQ ID NO: 330250 - RNA, 19 nt, Artificial Sequence
  Description of Artificial Sequence: Synthetic oligonucleotide
acagggaaguguagcuuag

SEQ ID NO: 330251 - RNA, 19 nt, Artificial Sequence
  Description of Artificial Sequence: Synthetic oligonucleotide
aacucaaggcgcagaguaa

SEQ ID NO: 330252 - RNA, 19 nt, Artificial Sequence
  Description of Artificial Sequence: Synthetic oligonucleotide
gggugugaagcaucugagc

SEQ ID NO: 330253 - RNA, 19 nt, Artificial Sequence
  Description of Artificial Sequence: Synthetic oligonucleotide
cucagaccugauaccagca

SEQ ID NO: 330254 - RNA, 19 nt, Artificial Sequence
  Description of Artificial Sequence: Synthetic oligonucleotide
aaggcccgguacaaugucu

SEQ ID NO: 330255 - RNA, 19 nt, Artificial Sequence
  Description of Artificial Sequence: Synthetic oligonucleotide
cagucguuuccgaagaccu

SEQ ID NO: 330256 - RNA, 19 nt, Artificial Sequence
  Description of Artificial Sequence: Synthetic oligonucleotide
aaacacugcgcggcuccug

SEQ ID NO: 330257 - RNA, 19 nt, Artificial Sequence
  Description of Artificial Sequence: Synthetic oligonucleotide
gcagcguguagccccacag

SEQ ID NO: 330258 - RNA, 19 nt, Artificial Sequence
  Description of Artificial Sequence: Synthetic oligonucleotide
gggcaugguaccgccaucg

SEQ ID NO: 330259 - RNA, 19 nt, Artificial Sequence
  Description of Artificial Sequence: Synthetic oligonucleotide
uaaccuugcugaagcccau

SEQ ID NO: 330260 - RNA, 19 nt, Artificial Sequence
  Description of Artificial Sequence: Synthetic oligonucleotide
agaccgcaacagccacugc

SEQ ID NO: 330261 - RNA, 19 nt, Artificial Sequence
  Description of Artificial Sequence: Synthetic oligonucleotide
uaaagugcugaagcccaua

SEQ ID NO: 330262 - RNA, 19 nt, Artificial Sequence
  Description of Artificial Sequence: Synthetic oligonucleotide
cacuaggcccuucagccca

SEQ ID NO: 330263 - RNA, 19 nt, Artificial Sequence
  Description of Artificial Sequence: Synthetic oligonucleotide
cucuuaccccacccugggg

SEQ ID NO: 330264 - RNA, 19 nt, Artificial Sequence
  Description of Artificial Sequence: Synthetic oligonucleotide
cccgguacaaugucuugcc

SEQ ID NO: 330265 - RNA, 19 nt, Artificial Sequence
  Description of Artificial Sequence: Synthetic oligonucleotide
gcuaccaagagcaggcuga

SEQ ID NO: 330266 - RNA, 19 nt, Artificial Sequence
  Description of Artificial Sequence: Synthetic oligonucleotide
ccaaagucccacacauagc

SEQ ID NO: 330267 - RNA, 19 nt, Artificial Sequence
  Description of Artificial Sequence: Synthetic oligonucleotide
ggaggaaaauuaggccacg

SEQ ID NO: 330268 - RNA, 19 nt, Artificial Sequence
  Description of Artificial Sequence: Synthetic oligonucleotide
gacuggcccuagcaaggug

SEQ ID NO: 330269 - RNA, 19 nt, Artificial Sequence
  Description of Artificial Sequence: Synthetic oligonucleotide
cuauauccuccugugggga

SEQ ID NO: 330270 - RNA, 19 nt, Artificial Sequence
  Description of Artificial Sequence: Synthetic oligonucleotide
ggaacuuguaugcagccau

SEQ ID NO: 330271 - RNA, 19 nt, Artificial Sequence
  Description of Artificial Sequence: Synthetic oligonucleotide
ccguuuggcuaucagugag

SEQ ID NO: 330272 - RNA, 19 nt, Artificial Sequence
  Description of Artificial Sequence: Synthetic oligonucleotide
gugugaagcaucugagccu

SEQ ID NO: 330273 - RNA, 19 nt, Artificial Sequence
  Description of Artificial Sequence: Synthetic oligonucleotide
agguaauaacuuaggggau

SEQ ID NO: 330274 - RNA, 19 nt, Artificial Sequence
  Description of Artificial Sequence: Synthetic oligonucleotide
gccacgguggucccaauac

SEQ ID NO: 330275 - RNA, 19 nt, Artificial Sequence
  Description of Artificial Sequence: Synthetic oligonucleotide
uggguaacuucagccacua

SEQ ID NO: 330276 - RNA, 19 nt, Artificial Sequence
  Description of Artificial Sequence: Synthetic oligonucleotide
caaacgggcggacacugaa

SEQ ID NO: 330277 - RNA, 19 nt, Artificial Sequence
  Description of Artificial Sequence: Synthetic oligonucleotide
cacagcaugcaggcgugag

SEQ ID NO: 330278 - RNA, 19 nt, Artificial Sequence
  Description of Artificial Sequence: Synthetic oligonucleotide
cuggcgcaagcaagcacac

SEQ ID NO: 330279 - RNA, 19 nt, Artificial Sequence
  Description of Artificial Sequence: Synthetic oligonucleotide
gugcugagucgcuguaaug

SEQ ID NO: 330280 - RNA, 19 nt, Artificial Sequence
  Description of Artificial Sequence: Synthetic oligonucleotide
cacauagcagaggggucag

SEQ ID NO: 330281 - RNA, 19 nt, Artificial Sequence
  Description of Artificial Sequence: Synthetic oligonucleotide
gaaguguagcuuagcccuc

SEQ ID NO: 330282 - RNA, 19 nt, Artificial Sequence
  Description of Artificial Sequence: Synthetic oligonucleotide
caccccgagaccgcaacag

SEQ ID NO: 330283 - RNA, 19 nt, Artificial Sequence
  Description of Artificial Sequence: Synthetic oligonucleotide
gcaucugagccugcgcugg

SEQ ID NO: 330284 - RNA, 19 nt, Artificial Sequence
  Description of Artificial Sequence: Synthetic oligonucleotide
cugucaagccaguuguaua

SEQ ID NO: 330285 - RNA, 19 nt, Artificial Sequence
  Description of Artificial Sequence: Synthetic oligonucleotide
guagcgggugaguuccaca

SEQ ID NO: 330286 - RNA, 19 nt, Artificial Sequence
  Description of Artificial Sequence: Synthetic oligonucleotide
cacgcagggcaugguaccg

SEQ ID NO: 330287 - RNA, 19 nt, Artificial Sequence
  Description of Artificial Sequence: Synthetic oligonucleotide
ccgaagucuacgcagaaaa

SEQ ID NO: 330288 - RNA, 19 nt, Artificial Sequence
  Description of Artificial Sequence: Synthetic oligonucleotide
cuuaaggggcucccagcca

SEQ ID NO: 330289 - RNA, 19 nt, Artificial Sequence
  Description of Artificial Sequence: Synthetic oligonucleotide
aacccacaguaguccuggu

SEQ ID NO: 330290 - RNA, 19 nt, Artificial Sequence
  Description of Artificial Sequence: Synthetic oligonucleotide
cuguacccuaaggaacuug

SEQ ID NO: 330291 - RNA, 19 nt, Artificial Sequence
  Description of Artificial Sequence: Synthetic oligonucleotide
cacuggcgcaagcaagcac

SEQ ID NO: 330292 - RNA, 19 nt, Artificial Sequence
  Description of Artificial Sequence: Synthetic oligonucleotide
caaagccgagcgacccaag

SEQ ID NO: 330293 - RNA, 19 nt, Artificial Sequence
  Description of Artificial Sequence: Synthetic oligonucleotide
ucucguagucuuggggcuc

SEQ ID NO: 330294 - RNA, 19 nt, Artificial Sequence
  Description of Artificial Sequence: Synthetic oligonucleotide
ugcugucaagccaguugua

SEQ ID NO: 330295 - RNA, 19 nt, Artificial Sequence
  Description of Artificial Sequence: Synthetic oligonucleotide
aacugaccacuggcgcaag

SEQ ID NO: 330296 - RNA, 19 nt, Artificial Sequence
  Description of Artificial Sequence: Synthetic oligonucleotide
gacccaagccugcgcucag

SEQ ID NO: 330297 - RNA, 19 nt, Artificial Sequence
  Description of Artificial Sequence: Synthetic oligonucleotide
cacaguaguccuggucuug

SEQ ID NO: 330298 - RNA, 19 nt, Artificial Sequence
  Description of Artificial Sequence: Synthetic oligonucleotide
ugggauggaccuuguuguu

SEQ ID NO: 330299 - RNA, 19 nt, Artificial Sequence
  Description of Artificial Sequence: Synthetic oligonucleotide
uguagccguuuggcuauca

SEQ ID NO: 330300 - RNA, 19 nt, Artificial Sequence
  Description of Artificial Sequence: Synthetic oligonucleotide
guaugcagccauucugccu

SEQ ID NO: 330301 - RNA, 19 nt, Artificial Sequence
  Description of Artificial Sequence: Synthetic oligonucleotide
gagccgaagucuacgcaga

SEQ ID NO: 330302 - RNA, 19 nt, Artificial Sequence
  Description of Artificial Sequence: Synthetic oligonucleotide
gaccugauaccagcagauc

SEQ ID NO: 330303 - RNA, 19 nt, Artificial Sequence
  Description of Artificial Sequence: Synthetic oligonucleotide
gggauggcggcuaaaggca

SEQ ID NO: 330304 - RNA, 19 nt, Artificial Sequence
  Description of Artificial Sequence: Synthetic oligonucleotide
gaagggcacaggguaggga

SEQ ID NO: 330305 - RNA, 19 nt, Artificial Sequence
  Description of Artificial Sequence: Synthetic oligonucleotide
cagggaaguguagcuuagc

SEQ ID NO: 330306 - RNA, 19 nt, Artificial Sequence
  Description of Artificial Sequence: Synthetic oligonucleotide
guaaugcaaacgggcggac

SEQ ID NO: 330307 - RNA, 19 nt, Artificial Sequence
  Description of Artificial Sequence: Synthetic oligonucleotide
cugcuacagggaacucaag

SEQ ID NO: 330308 - RNA, 19 nt, Artificial Sequence
  Description of Artificial Sequence: Synthetic oligonucleotide
uuaccccacccuggggacc

SEQ ID NO: 330309 - RNA, 19 nt, Artificial Sequence
  Description of Artificial Sequence: Synthetic oligonucleotide
  modified_base (7)..(7): a, c, u, g, unknown or other
ggggaancuggcaccaauc

SEQ ID NO: 330310 - RNA, 19 nt, Artificial Sequence
  Description of Artificial Sequence: Synthetic oligonucleotide
ggcggcuaaaggcaaguaa

SEQ ID NO: 330311 - RNA, 19 nt, Artificial Sequence
  Description of Artificial Sequence: Synthetic oligonucleotide
ggcaccaauccaccccgag

SEQ ID NO: 330312 - RNA, 19 nt, Artificial Sequence
  Description of Artificial Sequence: Synthetic oligonucleotide
cggcuaaaggcaaguaagc

SEQ ID NO: 330313 - RNA, 19 nt, Artificial Sequence
  Description of Artificial Sequence: Synthetic oligonucleotide
ccggucaaauuggacaagc

SEQ ID NO: 330314 - RNA, 19 nt, Artificial Sequence
  Description of Artificial Sequence: Synthetic oligonucleotide
gagguucaacuggggauga

SEQ ID NO: 330315 - RNA, 19 nt, Artificial Sequence
  Description of Artificial Sequence: Synthetic oligonucleotide
gauggccgccuagggguag

SEQ ID NO: 330316 - RNA, 19 nt, Artificial Sequence
  Description of Artificial Sequence: Synthetic oligonucleotide
guacucacuugguccaaua

SEQ ID NO: 330317 - RNA, 19 nt, Artificial Sequence
  Description of Artificial Sequence: Synthetic oligonucleotide
ccucaaagccgagcgaccc

SEQ ID NO: 330318 - RNA, 19 nt, Artificial Sequence
  Description of Artificial Sequence: Synthetic oligonucleotide
ucccucaagcuuagaucuu

SEQ ID NO: 330319 - RNA, 19 nt, Artificial Sequence
  Description of Artificial Sequence: Synthetic oligonucleotide
aggccagacucggauccag

SEQ ID NO: 330320 - RNA, 19 nt, Artificial Sequence
  Description of Artificial Sequence: Synthetic oligonucleotide
ggggucuuguccaauaacu

SEQ ID NO: 330321 - RNA, 19 nt, Artificial Sequence
  Description of Artificial Sequence: Synthetic oligonucleotide
cucaaagccgagcgaccca

SEQ ID NO: 330322 - RNA, 19 nt, Artificial Sequence
  Description of Artificial Sequence: Synthetic oligonucleotide
augcaaacgggcggacacu

SEQ ID NO: 330323 - RNA, 19 nt, Artificial Sequence
  Description of Artificial Sequence: Synthetic oligonucleotide
ccugcuacagggaacucaa

SEQ ID NO: 330324 - RNA, 19 nt, Artificial Sequence
  Description of Artificial Sequence: Synthetic oligonucleotide
gggucagguaacaggacuc

SEQ ID NO: 330325 - RNA, 19 nt, Artificial Sequence
  Description of Artificial Sequence: Synthetic oligonucleotide
guggagugugucagcacca

SEQ ID NO: 330326 - RNA, 19 nt, Artificial Sequence
  Description of Artificial Sequence: Synthetic oligonucleotide
gaucaaggcuagagcugca

SEQ ID NO: 330327 - RNA, 19 nt, Artificial Sequence
  Description of Artificial Sequence: Synthetic oligonucleotide
ccacgcagggcaugguacc

SEQ ID NO: 330328 - RNA, 19 nt, Artificial Sequence
  Description of Artificial Sequence: Synthetic oligonucleotide
ggcuuucuaccagaguguc

SEQ ID NO: 330329 - RNA, 19 nt, Artificial Sequence
  Description of Artificial Sequence: Synthetic oligonucleotide
gccgccuagggguagagcu

SEQ ID NO: 330330 - RNA, 19 nt, Artificial Sequence
  Description of Artificial Sequence: Synthetic oligonucleotide
gcaccaauccaccccgaga

SEQ ID NO: 330331 - RNA, 19 nt, Artificial Sequence
  Description of Artificial Sequence: Synthetic oligonucleotide
gcccgguacaaugucuugc

SEQ ID NO: 330332 - RNA, 19 nt, Artificial Sequence
  Description of Artificial Sequence: Synthetic oligonucleotide
ggucagguaacaggacuca

SEQ ID NO: 330333 - RNA, 19 nt, Artificial Sequence
  Description of Artificial Sequence: Synthetic oligonucleotide
uggcgcaagcaagcacacc

SEQ ID NO: 330334 - RNA, 19 nt, Artificial Sequence
  Description of Artificial Sequence: Synthetic oligonucleotide
ggccugauugagccgguca

SEQ ID NO: 330335 - RNA, 19 nt, Artificial Sequence
  Description of Artificial Sequence: Synthetic oligonucleotide
uggcaccaauccaccccga

SEQ ID NO: 330336 - RNA, 19 nt, Artificial Sequence
  Description of Artificial Sequence: Synthetic oligonucleotide
cuuagcccucccucaagcu

SEQ ID NO: 330337 - RNA, 19 nt, Artificial Sequence
  Description of Artificial Sequence: Synthetic oligonucleotide
uugguccaauacugcuaua

SEQ ID NO: 330338 - RNA, 19 nt, Artificial Sequence
  Description of Artificial Sequence: Synthetic oligonucleotide
ccuuguuguuagaccgcag

SEQ ID NO: 330339 - RNA, 19 nt, Artificial Sequence
  Description of Artificial Sequence: Synthetic oligonucleotide
ggcuaaaggcaaguaagcu

SEQ ID NO: 330340 - RNA, 19 nt, Artificial Sequence
  Description of Artificial Sequence: Synthetic oligonucleotide
ggcaugguaccgccaucgc

SEQ ID NO: 330341 - RNA, 19 nt, Artificial Sequence
  Description of Artificial Sequence: Synthetic oligonucleotide
agaccgcagggaugcccug

SEQ ID NO: 330342 - RNA, 19 nt, Artificial Sequence
  Description of Artificial Sequence: Synthetic oligonucleotide
ccacgguggucccaauacc

SEQ ID NO: 330343 - RNA, 19 nt, Artificial Sequence
  Description of Artificial Sequence: Synthetic oligonucleotide
agacucggauccaguaaau

SEQ ID NO: 330344 - RNA, 19 nt, Artificial Sequence
  Description of Artificial Sequence: Synthetic oligonucleotide
auguagccguuuggcuauc

SEQ ID NO: 330345 - RNA, 19 nt, Artificial Sequence
  Description of Artificial Sequence: Synthetic oligonucleotide
ccaguaaauggcugcagcu

SEQ ID NO: 330346 - RNA, 19 nt, Artificial Sequence
  Description of Artificial Sequence: Synthetic oligonucleotide
gccguuuggcuaucaguga

SEQ ID NO: 330347 - RNA, 19 nt, Artificial Sequence
  Description of Artificial Sequence: Synthetic oligonucleotide
ccgaggugaguaguggcag

SEQ ID NO: 330348 - RNA, 19 nt, Artificial Sequence
  Description of Artificial Sequence: Synthetic oligonucleotide
ggggccuacugucuggucu

SEQ ID NO: 330349 - RNA, 19 nt, Artificial Sequence
  Description of Artificial Sequence: Synthetic oligonucleotide
guuagaccgcagggaugcc

SEQ ID NO: 330350 - RNA, 19 nt, Artificial Sequence
  Description of Artificial Sequence: Synthetic oligonucleotide
gcgugagggcucugguucc

SEQ ID NO: 330351 - RNA, 19 nt, Artificial Sequence
  Description of Artificial Sequence: Synthetic oligonucleotide
cugauugagccggucaaau

SEQ ID NO: 330352 - RNA, 19 nt, Artificial Sequence
  Description of Artificial Sequence: Synthetic oligonucleotide
gcguguagccccacagcag

SEQ ID NO: 330353 - RNA, 19 nt, Artificial Sequence
  Description of Artificial Sequence: Synthetic oligonucleotide
ccuaaggaacuuguaugca

SEQ ID NO: 330354 - RNA, 19 nt, Artificial Sequence
  Description of Artificial Sequence: Synthetic oligonucleotide
agucguuuccgaagaccuu

SEQ ID NO: 330355 - RNA, 19 nt, Artificial Sequence
  Description of Artificial Sequence: Synthetic oligonucleotide
caccccuaccauggguaac

SEQ ID NO: 330356 - RNA, 19 nt, Artificial Sequence
  Description of Artificial Sequence: Synthetic oligonucleotide
ggcccgguacaaugucuug

SEQ ID NO: 330357 - RNA, 19 nt, Artificial Sequence
  Description of Artificial Sequence: Synthetic oligonucleotide
aggcccgguacaaugucuu

SEQ ID NO: 330358 - RNA, 19 nt, Artificial Sequence
  Description of Artificial Sequence: Synthetic oligonucleotide
uggccgccuagggguagag

SEQ ID NO: 330359 - RNA, 19 nt, Artificial Sequence
  Description of Artificial Sequence: Synthetic oligonucleotide
caaauuggacaagcagggu

SEQ ID NO: 330360 - RNA, 19 nt, Artificial Sequence
  Description of Artificial Sequence: Synthetic oligonucleotide
ccaagguggcucccaugag

SEQ ID NO: 330361 - RNA, 19 nt, Artificial Sequence
  Description of Artificial Sequence: Synthetic oligonucleotide
caauaccauccagcaccug

SEQ ID NO: 330362 - RNA, 19 nt, Artificial Sequence
  Description of Artificial Sequence: Synthetic oligonucleotide
guacccuaaggaacuugua

SEQ ID NO: 330363 - RNA, 19 nt, Artificial Sequence
  Description of Artificial Sequence: Synthetic oligonucleotide
cauccgcagagcccaaagu

SEQ ID NO: 330364 - RNA, 19 nt, Artificial Sequence
  Description of Artificial Sequence: Synthetic oligonucleotide
gccccuaaccuuagggcac

SEQ ID NO: 330365 - RNA, 19 nt, Artificial Sequence
  Description of Artificial Sequence: Synthetic oligonucleotide
uccugcugucaagccaguu

SEQ ID NO: 330366 - RNA, 19 nt, Artificial Sequence
  Description of Artificial Sequence: Synthetic oligonucleotide
ggcaaguaagcugcacaaa

SEQ ID NO: 330367 - RNA, 19 nt, Artificial Sequence
  Description of Artificial Sequence: Synthetic oligonucleotide
guguagcuuagcccucccu

SEQ ID NO: 330368 - RNA, 19 nt, Artificial Sequence
  Description of Artificial Sequence: Synthetic oligonucleotide
ccgagaccgcaacagccac

SEQ ID NO: 330369 - RNA, 19 nt, Artificial Sequence
  Description of Artificial Sequence: Synthetic oligonucleotide
ccugcgcucagcccaucug

SEQ ID NO: 330370 - RNA, 19 nt, Artificial Sequence
  Description of Artificial Sequence: Synthetic oligonucleotide
ccuaaccuuagggcacccc

SEQ ID NO: 330371 - RNA, 19 nt, Artificial Sequence
  Description of Artificial Sequence: Synthetic oligonucleotide
caauggcuagggccuaagu

SEQ ID NO: 330372 - RNA, 19 nt, Artificial Sequence
  Description of Artificial Sequence: Synthetic oligonucleotide
gcuuucuaccagaguguca

SEQ ID NO: 330373 - RNA, 19 nt, Artificial Sequence
  Description of Artificial Sequence: Synthetic oligonucleotide
caguggccugcuacaggga

SEQ ID NO: 330374 - RNA, 19 nt, Artificial Sequence
  Description of Artificial Sequence: Synthetic oligonucleotide
cuaggcccuucagcccaag

SEQ ID NO: 330375 - RNA, 19 nt, Artificial Sequence
  Description of Artificial Sequence: Synthetic oligonucleotide
ccgccuagggguagagcug

SEQ ID NO: 330376 - RNA, 19 nt, Artificial Sequence
  Description of Artificial Sequence: Synthetic oligonucleotide
ccgagcgacccaagccugc

SEQ ID NO: 330377 - RNA, 19 nt, Artificial Sequence
  Description of Artificial Sequence: Synthetic oligonucleotide
gggauggaccuuguuguua

SEQ ID NO: 330378 - RNA, 19 nt, Artificial Sequence
  Description of Artificial Sequence: Synthetic oligonucleotide
auggccgccuagggguaga

SEQ ID NO: 330379 - RNA, 19 nt, Artificial Sequence
  Description of Artificial Sequence: Synthetic oligonucleotide
gcugucaagccaguuguau

SEQ ID NO: 330380 - RNA, 19 nt, Artificial Sequence
  Description of Artificial Sequence: Synthetic oligonucleotide
gccuaagugcugcugggau

SEQ ID NO: 330381 - RNA, 19 nt, Artificial Sequence
  Description of Artificial Sequence: Synthetic oligonucleotide
cuggcucaaccuugagggu

SEQ ID NO: 330382 - RNA, 19 nt, Artificial Sequence
  Description of Artificial Sequence: Synthetic oligonucleotide
cgccaucgcaggaggacag

SEQ ID NO: 330383 - RNA, 19 nt, Artificial Sequence
  Description of Artificial Sequence: Synthetic oligonucleotide
ggacagccccuaaccuuag

SEQ ID NO: 330384 - RNA, 19 nt, Artificial Sequence
  Description of Artificial Sequence: Synthetic oligonucleotide
gcaugcaggcgugagggcu

SEQ ID NO: 330385 - RNA, 19 nt, Artificial Sequence
  Description of Artificial Sequence: Synthetic oligonucleotide
ccccuaaccuuagggcacc

SEQ ID NO: 330386 - RNA, 19 nt, Artificial Sequence
  Description of Artificial Sequence: Synthetic oligonucleotide
ggaugacuuggagccccug

SEQ ID NO: 330387 - RNA, 19 nt, Artificial Sequence
  Description of Artificial Sequence: Synthetic oligonucleotide
caaagggauggcggcuaaa

SEQ ID NO: 330388 - RNA, 19 nt, Artificial Sequence
  Description of Artificial Sequence: Synthetic oligonucleotide
gccacaugacacucacgcu

SEQ ID NO: 330389 - RNA, 19 nt, Artificial Sequence
  Description of Artificial Sequence: Synthetic oligonucleotide
ccaauaccauccagcaccu

SEQ ID NO: 330390 - RNA, 19 nt, Artificial Sequence
  Description of Artificial Sequence: Synthetic oligonucleotide
ggccuacugucuggucuag

SEQ ID NO: 330391 - RNA, 19 nt, Artificial Sequence
  Description of Artificial Sequence: Synthetic oligonucleotide
ggaccuuaaggggcuccca

SEQ ID NO: 330392 - RNA, 19 nt, Artificial Sequence
  Description of Artificial Sequence: Synthetic oligonucleotide
acuaggcccuucagcccaa

SEQ ID NO: 330393 - RNA, 19 nt, Artificial Sequence
  Description of Artificial Sequence: Synthetic oligonucleotide
cuagggccuaagugcugcu

SEQ ID NO: 330394 - RNA, 19 nt, Artificial Sequence
  Description of Artificial Sequence: Synthetic oligonucleotide
cgagcgacccaagccugcg

SEQ ID NO: 330395 - RNA, 19 nt, Artificial Sequence
  Description of Artificial Sequence: Synthetic oligonucleotide
ccggacuuuguggcggaac

SEQ ID NO: 330396 - RNA, 19 nt, Artificial Sequence
  Description of Artificial Sequence: Synthetic oligonucleotide
gccuacugucuggucuagc

SEQ ID NO: 330397 - RNA, 19 nt, Artificial Sequence
  Description of Artificial Sequence: Synthetic oligonucleotide
gucagccgugcacggcucu

SEQ ID NO: 330398 - RNA, 19 nt, Artificial Sequence
  Description of Artificial Sequence: Synthetic oligonucleotide
cgggugaguuccacaaaca

SEQ ID NO: 330399 - RNA, 19 nt, Artificial Sequence
  Description of Artificial Sequence: Synthetic oligonucleotide
gcgcaagcaagcacaccga

SEQ ID NO: 330400 - RNA, 19 nt, Artificial Sequence
  Description of Artificial Sequence: Synthetic oligonucleotide
ggcggacacugaaggcagc

SEQ ID NO: 330401 - RNA, 19 nt, Artificial Sequence
  Description of Artificial Sequence: Synthetic oligonucleotide
ccccugacuggcccuagca

SEQ ID NO: 330402 - RNA, 19 nt, Artificial Sequence
  Description of Artificial Sequence: Synthetic oligonucleotide
ccgguacaaugucuugcca

SEQ ID NO: 330403 - RNA, 19 nt, Artificial Sequence
  Description of Artificial Sequence: Synthetic oligonucleotide
gccgaagucuacgcagaaa

SEQ ID NO: 330404 - RNA, 19 nt, Artificial Sequence
  Description of Artificial Sequence: Synthetic oligonucleotide
agccugcgcucagcccauc

SEQ ID NO: 330405 - RNA, 19 nt, Artificial Sequence
  Description of Artificial Sequence: Synthetic oligonucleotide
gccccugacuggcccuagc

SEQ ID NO: 330406 - RNA, 19 nt, Artificial Sequence
  Description of Artificial Sequence: Synthetic oligonucleotide
gcucaaccuugaggguagc

SEQ ID NO: 330407 - RNA, 19 nt, Artificial Sequence
  Description of Artificial Sequence: Synthetic oligonucleotide
accggacuuuguggcggaa

SEQ ID NO: 330408 - RNA, 19 nt, Artificial Sequence
  Description of Artificial Sequence: Synthetic oligonucleotide
gcaaacgggcggacacuga

SEQ ID NO: 330409 - RNA, 19 nt, Artificial Sequence
  Description of Artificial Sequence: Synthetic oligonucleotide
ccugauugagccggucaaa

SEQ ID NO: 330410 - RNA, 19 nt, Artificial Sequence
  Description of Artificial Sequence: Synthetic oligonucleotide
ggccacgguggucccaaua

SEQ ID NO: 330411 - RNA, 19 nt, Artificial Sequence
  Description of Artificial Sequence: Synthetic oligonucleotide
ggucagccgugcacggcuc

SEQ ID NO: 330412 - RNA, 19 nt, Artificial Sequence
  Description of Artificial Sequence: Synthetic oligonucleotide
ggccgccuagggguagagc

SEQ ID NO: 330413 - RNA, 19 nt, Artificial Sequence
  Description of Artificial Sequence: Synthetic oligonucleotide
gguacucacuugguccaau

SEQ ID NO: 330414 - RNA, 19 nt, Artificial Sequence
  Description of Artificial Sequence: Synthetic oligonucleotide
gcuggcuacacagccuuuu

SEQ ID NO: 330415 - RNA, 19 nt, Artificial Sequence
  Description of Artificial Sequence: Synthetic oligonucleotide
gccauguuguggagugugu

SEQ ID NO: 330416 - RNA, 19 nt, Artificial Sequence
  Description of Artificial Sequence: Synthetic oligonucleotide
ggguacucacuugguccaa

SEQ ID NO: 330417 - RNA, 19 nt, Artificial Sequence
  Description of Artificial Sequence: Synthetic oligonucleotide
gcacaccgaggugaguagu

SEQ ID NO: 330418 - RNA, 19 nt, Artificial Sequence
  Description of Artificial Sequence: Synthetic oligonucleotide
gagcgggaaggcagugguu

SEQ ID NO: 330419 - RNA, 19 nt, Artificial Sequence
  Description of Artificial Sequence: Synthetic oligonucleotide
ggcuggguacucacuuggu

SEQ ID NO: 330420 - RNA, 19 nt, Artificial Sequence
  Description of Artificial Sequence: Synthetic oligonucleotide
ccaccccgagaccgcaaca

SEQ ID NO: 330421 - RNA, 19 nt, Artificial Sequence
  Description of Artificial Sequence: Synthetic oligonucleotide
cgguagagcuccccacgca

SEQ ID NO: 330422 - RNA, 19 nt, Artificial Sequence
  Description of Artificial Sequence: Synthetic oligonucleotide
gccccagacaagggaggaa

SEQ ID NO: 330423 - RNA, 19 nt, Artificial Sequence
  Description of Artificial Sequence: Synthetic oligonucleotide
gccugcgcucagcccaucu

SEQ ID NO: 330424 - RNA, 19 nt, Artificial Sequence
  Description of Artificial Sequence: Synthetic oligonucleotide
ggccagacucggauccagu

SEQ ID NO: 330425 - RNA, 19 nt, Artificial Sequence
  Description of Artificial Sequence: Synthetic oligonucleotide
ggccugcuacagggaacuc

SEQ ID NO: 330426 - RNA, 19 nt, Artificial Sequence
  Description of Artificial Sequence: Synthetic oligonucleotide
cguagucuuggggcuccca

SEQ ID NO: 330427 - RNA, 19 nt, Artificial Sequence
  Description of Artificial Sequence: Synthetic oligonucleotide
ccacauccgcagagcccaa

SEQ ID NO: 330428 - RNA, 19 nt, Artificial Sequence
  Description of Artificial Sequence: Synthetic oligonucleotide
ccuguacccuaaggaacuu

SEQ ID NO: 330429 - RNA, 19 nt, Artificial Sequence
  Description of Artificial Sequence: Synthetic oligonucleotide
ccccuaccauggguaacuu

SEQ ID NO: 330430 - RNA, 19 nt, Artificial Sequence
  Description of Artificial Sequence: Synthetic oligonucleotide
agauuaauaacuuauccac

SEQ ID NO: 330431 - RNA, 19 nt, Artificial Sequence
  Description of Artificial Sequence: Synthetic oligonucleotide
auauccacuauacaaaccc

SEQ ID NO: 330432 - RNA, 19 nt, Artificial Sequence
  Description of Artificial Sequence: Synthetic oligonucleotide
uuaaauaggccucugcucg

SEQ ID NO: 330433 - RNA, 19 nt, Artificial Sequence
  Description of Artificial Sequence: Synthetic oligonucleotide
uaaauuuagagauggauug

SEQ ID NO: 330434 - RNA, 19 nt, Artificial Sequence
  Description of Artificial Sequence: Synthetic oligonucleotide
aaguuucagacauucacgg

SEQ ID NO: 330435 - RNA, 19 nt, Artificial Sequence
  Description of Artificial Sequence: Synthetic oligonucleotide
aacucugcaucccaaacac

SEQ ID NO: 330436 - RNA, 19 nt, Artificial Sequence
  Description of Artificial Sequence: Synthetic oligonucleotide
uguuacuguacacaaagcc

SEQ ID NO: 330437 - RNA, 19 nt, Artificial Sequence
  Description of Artificial Sequence: Synthetic oligonucleotide
uguuaaagaaucaucuccc

SEQ ID NO: 330438 - RNA, 19 nt, Artificial Sequence
  Description of Artificial Sequence: Synthetic oligonucleotide
auaucaaggaagcuuauag

SEQ ID NO: 330439 - RNA, 19 nt, Artificial Sequence
  Description of Artificial Sequence: Synthetic oligonucleotide
aaaucauucagcaaaugag

SEQ ID NO: 330440 - RNA, 19 nt, Artificial Sequence
  Description of Artificial Sequence: Synthetic oligonucleotide
acuauacaaacccugacag

SEQ ID NO: 330441 - RNA, 19 nt, Artificial Sequence
  Description of Artificial Sequence: Synthetic oligonucleotide
uuacucuuaaaucauucag

SEQ ID NO: 330442 - RNA, 19 nt, Artificial Sequence
  Description of Artificial Sequence: Synthetic oligonucleotide
acuuggauuagacuugagc

SEQ ID NO: 330443 - RNA, 19 nt, Artificial Sequence
  Description of Artificial Sequence: Synthetic oligonucleotide
uccucuauuaaauaggccu

SEQ ID NO: 330444 - RNA, 19 nt, Artificial Sequence
  Description of Artificial Sequence: Synthetic oligonucleotide
uuucagagcguucacauug

SEQ ID NO: 330445 - RNA, 19 nt, Artificial Sequence
  Description of Artificial Sequence: Synthetic oligonucleotide
uuugaaucgaaacggcccg

SEQ ID NO: 330446 - RNA, 19 nt, Artificial Sequence
  Description of Artificial Sequence: Synthetic oligonucleotide
uuuagagauggauuguuag

SEQ ID NO: 330447 - RNA, 19 nt, Artificial Sequence
  Description of Artificial Sequence: Synthetic oligonucleotide
uuaagacacauauaaacgu

SEQ ID NO: 330448 - RNA, 19 nt, Artificial Sequence
  Description of Artificial Sequence: Synthetic oligonucleotide
uaaguacaggcaaagagca

SEQ ID NO: 330449 - RNA, 19 nt, Artificial Sequence
  Description of Artificial Sequence: Synthetic oligonucleotide
agcauguaaauguuuugcc

SEQ ID NO: 330450 - RNA, 19 nt, Artificial Sequence
  Description of Artificial Sequence: Synthetic oligonucleotide
auugcccauauucauagac

SEQ ID NO: 330451 - RNA, 19 nt, Artificial Sequence
  Description of Artificial Sequence: Synthetic oligonucleotide
ugacuauagguuaagaaaa

SEQ ID NO: 330452 - RNA, 19 nt, Artificial Sequence
  Description of Artificial Sequence: Synthetic oligonucleotide
guugguaagaaauaggcuc

SEQ ID NO: 330453 - RNA, 19 nt, Artificial Sequence
  Description of Artificial Sequence: Synthetic oligonucleotide
ucaaggauaugacuauagg

SEQ ID NO: 330454 - RNA, 19 nt, Artificial Sequence
  Description of Artificial Sequence: Synthetic oligonucleotide
uauauuagaccuuuauacu

SEQ ID NO: 330455 - RNA, 19 nt, Artificial Sequence
  Description of Artificial Sequence: Synthetic oligonucleotide
gaaacggcugcuuuaauug

SEQ ID NO: 330456 - RNA, 19 nt, Artificial Sequence
  Description of Artificial Sequence: Synthetic oligonucleotide
uuagagauggauuguuagg

SEQ ID NO: 330457 - RNA, 19 nt, Artificial Sequence
  Description of Artificial Sequence: Synthetic oligonucleotide
aucacuuuaguuaagucgg

SEQ ID NO: 330458 - RNA, 19 nt, Artificial Sequence
  Description of Artificial Sequence: Synthetic oligonucleotide
agugcgauaacccuguugu

SEQ ID NO: 330459 - RNA, 19 nt, Artificial Sequence
  Description of Artificial Sequence: Synthetic oligonucleotide
uauagguuaagaaaaugau

SEQ ID NO: 330460 - RNA, 19 nt, Artificial Sequence
  Description of Artificial Sequence: Synthetic oligonucleotide
ugagggauaacucaugguc

SEQ ID NO: 330461 - RNA, 19 nt, Artificial Sequence
  Description of Artificial Sequence: Synthetic oligonucleotide
ugcugauucuguaaaacgc

SEQ ID NO: 330462 - RNA, 19 nt, Artificial Sequence
  Description of Artificial Sequence: Synthetic oligonucleotide
ugacuugacaagcugagac

SEQ ID NO: 330463 - RNA, 19 nt, Artificial Sequence
  Description of Artificial Sequence: Synthetic oligonucleotide
uuuucgguaugcuuuaaug

SEQ ID NO: 330464 - RNA, 19 nt, Artificial Sequence
  Description of Artificial Sequence: Synthetic oligonucleotide
auucguauuugcugguugc

SEQ ID NO: 330465 - RNA, 19 nt, Artificial Sequence
  Description of Artificial Sequence: Synthetic oligonucleotide
uauagcagcgcuguagucg

SEQ ID NO: 330466 - RNA, 19 nt, Artificial Sequence
  Description of Artificial Sequence: Synthetic oligonucleotide
uugguaagaaauaggcucc

SEQ ID NO: 330467 - RNA, 19 nt, Artificial Sequence
  Description of Artificial Sequence: Synthetic oligonucleotide
augacuauagguuaagaaa

SEQ ID NO: 330468 - RNA, 19 nt, Artificial Sequence
  Description of Artificial Sequence: Synthetic oligonucleotide
ugcaaaacaccuuuuguga

SEQ ID NO: 330469 - RNA, 19 nt, Artificial Sequence
  Description of Artificial Sequence: Synthetic oligonucleotide
uagaccuuuauacuuaaaa

SEQ ID NO: 330470 - RNA, 19 nt, Artificial Sequence
  Description of Artificial Sequence: Synthetic oligonucleotide
gaaauaggcuccuaaguac

SEQ ID NO: 330471 - RNA, 19 nt, Artificial Sequence
  Description of Artificial Sequence: Synthetic oligonucleotide
acugagagagagcaucagc

SEQ ID NO: 330472 - RNA, 19 nt, Artificial Sequence
  Description of Artificial Sequence: Synthetic oligonucleotide
auagucucguuucugugac

SEQ ID NO: 330473 - RNA, 19 nt, Artificial Sequence
  Description of Artificial Sequence: Synthetic oligonucleotide
aagacaguagcucugcgau

SEQ ID NO: 330474 - RNA, 19 nt, Artificial Sequence
  Description of Artificial Sequence: Synthetic oligonucleotide
uaugaguaguucauaaauc

SEQ ID NO: 330475 - RNA, 19 nt, Artificial Sequence
  Description of Artificial Sequence: Synthetic oligonucleotide
uaugacuauagguuaagaa

SEQ ID NO: 330476 - RNA, 19 nt, Artificial Sequence
  Description of Artificial Sequence: Synthetic oligonucleotide
uuucgguaugcuuuaauga

SEQ ID NO: 330477 - RNA, 19 nt, Artificial Sequence
  Description of Artificial Sequence: Synthetic oligonucleotide
aauaacuuauccacaucuc

SEQ ID NO: 330478 - RNA, 19 nt, Artificial Sequence
  Description of Artificial Sequence: Synthetic oligonucleotide
gagaucauguuaaagaauc

SEQ ID NO: 330479 - RNA, 19 nt, Artificial Sequence
  Description of Artificial Sequence: Synthetic oligonucleotide
uuagacuugagcacucucu

SEQ ID NO: 330480 - RNA, 19 nt, Artificial Sequence
  Description of Artificial Sequence: Synthetic oligonucleotide
aacgccucgguguuaccgc

SEQ ID NO: 330481 - RNA, 19 nt, Artificial Sequence
  Description of Artificial Sequence: Synthetic oligonucleotide
agcaccuucguacugcagg

SEQ ID NO: 330482 - RNA, 19 nt, Artificial Sequence
  Description of Artificial Sequence: Synthetic oligonucleotide
cuuuaguuaagucgggcag

SEQ ID NO: 330483 - RNA, 19 nt, Artificial Sequence
  Description of Artificial Sequence: Synthetic oligonucleotide
uuucucuaaaccuucccga

SEQ ID NO: 330484 - RNA, 19 nt, Artificial Sequence
  Description of Artificial Sequence: Synthetic oligonucleotide
accuucguacugcaggucc

SEQ ID NO: 330485 - RNA, 19 nt, Artificial Sequence
  Description of Artificial Sequence: Synthetic oligonucleotide
uaauugaaguggaauuuga

SEQ ID NO: 330486 - RNA, 19 nt, Artificial Sequence
  Description of Artificial Sequence: Synthetic oligonucleotide
ucuuuagauuuucaaugca

SEQ ID NO: 330487 - RNA, 19 nt, Artificial Sequence
  Description of Artificial Sequence: Synthetic oligonucleotide
gcugcuuuaauugaagugg

SEQ ID NO: 330488 - RNA, 19 nt, Artificial Sequence
  Description of Artificial Sequence: Synthetic oligonucleotide
ugagcugaagggauugaag

SEQ ID NO: 330489 - RNA, 19 nt, Artificial Sequence
  Description of Artificial Sequence: Synthetic oligonucleotide
cccacaauuaacuaaaaug

SEQ ID NO: 330490 - RNA, 19 nt, Artificial Sequence
  Description of Artificial Sequence: Synthetic oligonucleotide
ucacggacuucgcugaggg

SEQ ID NO: 330491 - RNA, 19 nt, Artificial Sequence
  Description of Artificial Sequence: Synthetic oligonucleotide
acauauaaacguaagauua

SEQ ID NO: 330492 - RNA, 19 nt, Artificial Sequence
  Description of Artificial Sequence: Synthetic oligonucleotide
guaucagaauugcaaacag

SEQ ID NO: 330493 - RNA, 19 nt, Artificial Sequence
  Description of Artificial Sequence: Synthetic oligonucleotide
uauuagaccuuuauacuua

SEQ ID NO: 330494 - RNA, 19 nt, Artificial Sequence
  Description of Artificial Sequence: Synthetic oligonucleotide
agaaauaggcuccuaagua

SEQ ID NO: 330495 - RNA, 19 nt, Artificial Sequence
  Description of Artificial Sequence: Synthetic oligonucleotide
agaccuuuauacuuaaaau

SEQ ID NO: 330496 - RNA, 19 nt, Artificial Sequence
  Description of Artificial Sequence: Synthetic oligonucleotide
guagucggcacuuucgaag

SEQ ID NO: 330497 - RNA, 19 nt, Artificial Sequence
  Description of Artificial Sequence: Synthetic oligonucleotide
ucuccuagcugauaguaga

SEQ ID NO: 330498 - RNA, 19 nt, Artificial Sequence
  Description of Artificial Sequence: Synthetic oligonucleotide
aaucgaaacggcccgccug

SEQ ID NO: 330499 - RNA, 19 nt, Artificial Sequence
  Description of Artificial Sequence: Synthetic oligonucleotide
gacaguagcucugcgauag

SEQ ID NO: 330500 - RNA, 19 nt, Artificial Sequence
  Description of Artificial Sequence: Synthetic oligonucleotide
uaugagucccaguugaaau

SEQ ID NO: 330501 - RNA, 19 nt, Artificial Sequence
  Description of Artificial Sequence: Synthetic oligonucleotide
acauguaugagucccaguu

SEQ ID NO: 330502 - RNA, 19 nt, Artificial Sequence
  Description of Artificial Sequence: Synthetic oligonucleotide
acuuuaguuaagucgggca

SEQ ID NO: 330503 - RNA, 19 nt, Artificial Sequence
  Description of Artificial Sequence: Synthetic oligonucleotide
uucgcugagggauaacuca

SEQ ID NO: 330504 - RNA, 19 nt, Artificial Sequence
  Description of Artificial Sequence: Synthetic oligonucleotide
uagucggcacuuucgaagg

SEQ ID NO: 330505 - RNA, 19 nt, Artificial Sequence
  Description of Artificial Sequence: Synthetic oligonucleotide
auguaugagucccaguuga

SEQ ID NO: 330506 - RNA, 19 nt, Artificial Sequence
  Description of Artificial Sequence: Synthetic oligonucleotide
auaacucauggucuccuag

SEQ ID NO: 330507 - RNA, 19 nt, Artificial Sequence
  Description of Artificial Sequence: Synthetic oligonucleotide
uucgguaugcuuuaaugau

SEQ ID NO: 330508 - RNA, 19 nt, Artificial Sequence
  Description of Artificial Sequence: Synthetic oligonucleotide
cucaaggauaugacuauag

SEQ ID NO: 330509 - RNA, 19 nt, Artificial Sequence
  Description of Artificial Sequence: Synthetic oligonucleotide
aacacugggcucuguuuuc

SEQ ID NO: 330510 - RNA, 19 nt, Artificial Sequence
  Description of Artificial Sequence: Synthetic oligonucleotide
auuagacuugagcacucuc

SEQ ID NO: 330511 - RNA, 19 nt, Artificial Sequence
  Description of Artificial Sequence: Synthetic oligonucleotide
aacucauggucuccuagcu

SEQ ID NO: 330512 - RNA, 19 nt, Artificial Sequence
  Description of Artificial Sequence: Synthetic oligonucleotide
gacucgaucagcuuauuaa

SEQ ID NO: 330513 - RNA, 19 nt, Artificial Sequence
  Description of Artificial Sequence: Synthetic oligonucleotide
gauucguauuugcugguug

SEQ ID NO: 330514 - RNA, 19 nt, Artificial Sequence
  Description of Artificial Sequence: Synthetic oligonucleotide
acugaagugcuaauuuucg

SEQ ID NO: 330515 - RNA, 19 nt, Artificial Sequence
  Description of Artificial Sequence: Synthetic oligonucleotide
acuuucgaaggcaucaagg

SEQ ID NO: 330516 - RNA, 19 nt, Artificial Sequence
  Description of Artificial Sequence: Synthetic oligonucleotide
agggauaacucauggucuc

SEQ ID NO: 330517 - RNA, 19 nt, Artificial Sequence
  Description of Artificial Sequence: Synthetic oligonucleotide
aaauuuagagauggauugu

SEQ ID NO: 330518 - RNA, 19 nt, Artificial Sequence
  Description of Artificial Sequence: Synthetic oligonucleotide
gugacuguuucaguaaccg

SEQ ID NO: 330519 - RNA, 19 nt, Artificial Sequence
  Description of Artificial Sequence: Synthetic oligonucleotide
uaaauaggccucugcucgg

SEQ ID NO: 330520 - RNA, 19 nt, Artificial Sequence
  Description of Artificial Sequence: Synthetic oligonucleotide
ugcaguaugaguaguucau

SEQ ID NO: 330521 - RNA, 19 nt, Artificial Sequence
  Description of Artificial Sequence: Synthetic oligonucleotide
aguaugcucaaggauauga

SEQ ID NO: 330522 - RNA, 19 nt, Artificial Sequence
  Description of Artificial Sequence: Synthetic oligonucleotide
ucacuuuaguuaagucggg

SEQ ID NO: 330523 - RNA, 19 nt, Artificial Sequence
  Description of Artificial Sequence: Synthetic oligonucleotide
aaacgccucgguguuaccg

SEQ ID NO: 330524 - RNA, 19 nt, Artificial Sequence
  Description of Artificial Sequence: Synthetic oligonucleotide
gacuugagcacucucuuga

SEQ ID NO: 330525 - RNA, 19 nt, Artificial Sequence
  Description of Artificial Sequence: Synthetic oligonucleotide
uuucaguaaccgcugggcu

SEQ ID NO: 330526 - RNA, 19 nt, Artificial Sequence
  Description of Artificial Sequence: Synthetic oligonucleotide
uucuugauuuagcaacaga

SEQ ID NO: 330527 - RNA, 19 nt, Artificial Sequence
  Description of Artificial Sequence: Synthetic oligonucleotide
ugcgucaagaggaucuucu

SEQ ID NO: 330528 - RNA, 19 nt, Artificial Sequence
  Description of Artificial Sequence: Synthetic oligonucleotide
cuuggagaagcaaugacaa

SEQ ID NO: 330529 - RNA, 19 nt, Artificial Sequence
  Description of Artificial Sequence: Synthetic oligonucleotide
uuguuacuguacacaaagc

SEQ ID NO: 330530 - RNA, 19 nt, Artificial Sequence
  Description of Artificial Sequence: Synthetic oligonucleotide
aaguucacgcaacucugca

SEQ ID NO: 330531 - RNA, 19 nt, Artificial Sequence
  Description of Artificial Sequence: Synthetic oligonucleotide
uuuaagucgcugauggcuu

SEQ ID NO: 330532 - RNA, 19 nt, Artificial Sequence
  Description of Artificial Sequence: Synthetic oligonucleotide
agugcuaauuuucgguaug

SEQ ID NO: 330533 - RNA, 19 nt, Artificial Sequence
  Description of Artificial Sequence: Synthetic oligonucleotide
aauuuagagauggauuguu

SEQ ID NO: 330534 - RNA, 19 nt, Artificial Sequence
  Description of Artificial Sequence: Synthetic oligonucleotide
aagugcgauaacccuguug

SEQ ID NO: 330535 - RNA, 19 nt, Artificial Sequence
  Description of Artificial Sequence: Synthetic oligonucleotide
agaacauauucuaauggcu

SEQ ID NO: 330536 - RNA, 19 nt, Artificial Sequence
  Description of Artificial Sequence: Synthetic oligonucleotide
uucuuaacuugcuuauagu

SEQ ID NO: 330537 - RNA, 19 nt, Artificial Sequence
  Description of Artificial Sequence: Synthetic oligonucleotide
uuugaguaguaaguggccu

SEQ ID NO: 330538 - RNA, 19 nt, Artificial Sequence
  Description of Artificial Sequence: Synthetic oligonucleotide
uggauuagacuugagcacu

SEQ ID NO: 330539 - RNA, 19 nt, Artificial Sequence
  Description of Artificial Sequence: Synthetic oligonucleotide
agggauugaagccuugcca

SEQ ID NO: 330540 - RNA, 19 nt, Artificial Sequence
  Description of Artificial Sequence: Synthetic oligonucleotide
gguguuaccgcucuucagc

SEQ ID NO: 330541 - RNA, 19 nt, Artificial Sequence
  Description of Artificial Sequence: Synthetic oligonucleotide
aaacggcugcuuuaauuga

SEQ ID NO: 330542 - RNA, 19 nt, Artificial Sequence
  Description of Artificial Sequence: Synthetic oligonucleotide
cagagcguucacauugucg

SEQ ID NO: 330543 - RNA, 19 nt, Artificial Sequence
  Description of Artificial Sequence: Synthetic oligonucleotide
aagugcuaauuuucgguau

SEQ ID NO: 330544 - RNA, 19 nt, Artificial Sequence
  Description of Artificial Sequence: Synthetic oligonucleotide
ucuaaaccuucccgaaucu

SEQ ID NO: 330545 - RNA, 19 nt, Artificial Sequence
  Description of Artificial Sequence: Synthetic oligonucleotide
uagugugcaaaacaccuuu

SEQ ID NO: 330546 - RNA, 19 nt, Artificial Sequence
  Description of Artificial Sequence: Synthetic oligonucleotide
aggauaugacuauagguua

SEQ ID NO: 330547 - RNA, 19 nt, Artificial Sequence
  Description of Artificial Sequence: Synthetic oligonucleotide
aacccugacaguacauuuc

SEQ ID NO: 330548 - RNA, 19 nt, Artificial Sequence
  Description of Artificial Sequence: Synthetic oligonucleotide
ugcgauaguaugcaaugua

SEQ ID NO: 330549 - RNA, 19 nt, Artificial Sequence
  Description of Artificial Sequence: Synthetic oligonucleotide
ccuagcugauaguagagcg

SEQ ID NO: 330550 - RNA, 19 nt, Artificial Sequence
  Description of Artificial Sequence: Synthetic oligonucleotide
cucuaaaccuucccgaauc

SEQ ID NO: 330551 - RNA, 19 nt, Artificial Sequence
  Description of Artificial Sequence: Synthetic oligonucleotide
uucugugacuguuucagua

SEQ ID NO: 330552 - RNA, 19 nt, Artificial Sequence
  Description of Artificial Sequence: Synthetic oligonucleotide
cugccacuaacagaaaagg

SEQ ID NO: 330553 - RNA, 19 nt, Artificial Sequence
  Description of Artificial Sequence: Synthetic oligonucleotide
uauccacuauacaaacccu

SEQ ID NO: 330554 - RNA, 19 nt, Artificial Sequence
  Description of Artificial Sequence: Synthetic oligonucleotide
guagcucugcgauaguaug

SEQ ID NO: 330555 - RNA, 19 nt, Artificial Sequence
  Description of Artificial Sequence: Synthetic oligonucleotide
uuuaguuaagucgggcagu

SEQ ID NO: 330556 - RNA, 19 nt, Artificial Sequence
  Description of Artificial Sequence: Synthetic oligonucleotide
ggauuguuaggucuguccc

SEQ ID NO: 330557 - RNA, 19 nt, Artificial Sequence
  Description of Artificial Sequence: Synthetic oligonucleotide
aguaugaguaguucauaaa

SEQ ID NO: 330558 - RNA, 19 nt, Artificial Sequence
  Description of Artificial Sequence: Synthetic oligonucleotide
uuugcccaacucaacuaug

SEQ ID NO: 330559 - RNA, 19 nt, Artificial Sequence
  Description of Artificial Sequence: Synthetic oligonucleotide
ugaaacggcugcuuuaauu

SEQ ID NO: 330560 - RNA, 19 nt, Artificial Sequence
  Description of Artificial Sequence: Synthetic oligonucleotide
uaguaaguggccucucugu

SEQ ID NO: 330561 - RNA, 19 nt, Artificial Sequence
  Description of Artificial Sequence: Synthetic oligonucleotide
aggagaggaguggugaaac

SEQ ID NO: 330562 - RNA, 19 nt, Artificial Sequence
  Description of Artificial Sequence: Synthetic oligonucleotide
cucucuuuggagcgcacgg

SEQ ID NO: 330563 - RNA, 19 nt, Artificial Sequence
  Description of Artificial Sequence: Synthetic oligonucleotide
gacaagugcgauaacccug

SEQ ID NO: 330564 - RNA, 19 nt, Artificial Sequence
  Description of Artificial Sequence: Synthetic oligonucleotide
aauaggccucugcucgguc

SEQ ID NO: 330565 - RNA, 19 nt, Artificial Sequence
  Description of Artificial Sequence: Synthetic oligonucleotide
cucugaucagcucuucagc

SEQ ID NO: 330566 - RNA, 19 nt, Artificial Sequence
  Description of Artificial Sequence: Synthetic oligonucleotide
aaaacgccucgguguuacc

SEQ ID NO: 330567 - RNA, 19 nt, Artificial Sequence
  Description of Artificial Sequence: Synthetic oligonucleotide
ucgaucagcuuauuaaguu

SEQ ID NO: 330568 - RNA, 19 nt, Artificial Sequence
  Description of Artificial Sequence: Synthetic oligonucleotide
guuucaguaaccgcugggc

SEQ ID NO: 330569 - RNA, 19 nt, Artificial Sequence
  Description of Artificial Sequence: Synthetic oligonucleotide
uagcucugcgauaguaugc

SEQ ID NO: 330570 - RNA, 19 nt, Artificial Sequence
  Description of Artificial Sequence: Synthetic oligonucleotide
aacguaagauuaauaacuu

SEQ ID NO: 330571 - RNA, 19 nt, Artificial Sequence
  Description of Artificial Sequence: Synthetic oligonucleotide
auuugugcuuggaugcuac

SEQ ID NO: 330572 - RNA, 19 nt, Artificial Sequence
  Description of Artificial Sequence: Synthetic oligonucleotide
aauaggcuccuaaguacag

SEQ ID NO: 330573 - RNA, 19 nt, Artificial Sequence
  Description of Artificial Sequence: Synthetic oligonucleotide
ugacucucugcgucaagag

SEQ ID NO: 330574 - RNA, 19 nt, Artificial Sequence
  Description of Artificial Sequence: Synthetic oligonucleotide
uucugccacuaacagaaaa

SEQ ID NO: 330575 - RNA, 19 nt, Artificial Sequence
  Description of Artificial Sequence: Synthetic oligonucleotide
gaagcuuauagcagcgcug

SEQ ID NO: 330576 - RNA, 19 nt, Artificial Sequence
  Description of Artificial Sequence: Synthetic oligonucleotide
gaagugcuaauuuucggua

SEQ ID NO: 330577 - RNA, 19 nt, Artificial Sequence
  Description of Artificial Sequence: Synthetic oligonucleotide
gauuguuaggucuguccca

SEQ ID NO: 330578 - RNA, 19 nt, Artificial Sequence
  Description of Artificial Sequence: Synthetic oligonucleotide
gcugccaguaauuucuucc

SEQ ID NO: 330579 - RNA, 19 nt, Artificial Sequence
  Description of Artificial Sequence: Synthetic oligonucleotide
ugagacugcgcuuccuucu

SEQ ID NO: 330580 - RNA, 19 nt, Artificial Sequence
  Description of Artificial Sequence: Synthetic oligonucleotide
auggcuaagaagacaguag

SEQ ID NO: 330581 - RNA, 19 nt, Artificial Sequence
  Description of Artificial Sequence: Synthetic oligonucleotide
cauagacauguaugagucc

SEQ ID NO: 330582 - RNA, 19 nt, Artificial Sequence
  Description of Artificial Sequence: Synthetic oligonucleotide
gauaguaugcaauguaguu

SEQ ID NO: 330583 - RNA, 19 nt, Artificial Sequence
  Description of Artificial Sequence: Synthetic oligonucleotide
gaacaccgcgcccagccgg

SEQ ID NO: 330584 - RNA, 19 nt, Artificial Sequence
  Description of Artificial Sequence: Synthetic oligonucleotide
ugacuguuucaguaaccgc

SEQ ID NO: 330585 - RNA, 19 nt, Artificial Sequence
  Description of Artificial Sequence: Synthetic oligonucleotide
guaugaguaguucauaaau

SEQ ID NO: 330586 - RNA, 19 nt, Artificial Sequence
  Description of Artificial Sequence: Synthetic oligonucleotide
ucuauuaaauaggccucug

SEQ ID NO: 330587 - RNA, 19 nt, Artificial Sequence
  Description of Artificial Sequence: Synthetic oligonucleotide
ugugauccuggucaaguuu

SEQ ID NO: 330588 - RNA, 19 nt, Artificial Sequence
  Description of Artificial Sequence: Synthetic oligonucleotide
cuuaacuugcuuauagugu

SEQ ID NO: 330589 - RNA, 19 nt, Artificial Sequence
  Description of Artificial Sequence: Synthetic oligonucleotide
ucugcguucacuccacauu

SEQ ID NO: 330590 - RNA, 19 nt, Artificial Sequence
  Description of Artificial Sequence: Synthetic oligonucleotide
aaguuucccuuguuugagu

SEQ ID NO: 330591 - RNA, 19 nt, Artificial Sequence
  Description of Artificial Sequence: Synthetic oligonucleotide
uugaguaguaaguggccuc

SEQ ID NO: 330592 - RNA, 19 nt, Artificial Sequence
  Description of Artificial Sequence: Synthetic oligonucleotide
cauguaugagucccaguug

SEQ ID NO: 330593 - RNA, 19 nt, Artificial Sequence
  Description of Artificial Sequence: Synthetic oligonucleotide
cugaauggcuucgucauac

SEQ ID NO: 330594 - RNA, 19 nt, Artificial Sequence
  Description of Artificial Sequence: Synthetic oligonucleotide
uuaagucgggcagugcggc

SEQ ID NO: 330595 - RNA, 19 nt, Artificial Sequence
  Description of Artificial Sequence: Synthetic oligonucleotide
ucccacaauuaacuaaaau

SEQ ID NO: 330596 - RNA, 19 nt, Artificial Sequence
  Description of Artificial Sequence: Synthetic oligonucleotide
auuagaccuuuauacuuaa

SEQ ID NO: 330597 - RNA, 19 nt, Artificial Sequence
  Description of Artificial Sequence: Synthetic oligonucleotide
guuaagucgggcagugcgg

SEQ ID NO: 330598 - RNA, 19 nt, Artificial Sequence
  Description of Artificial Sequence: Synthetic oligonucleotide
cacuauacaaacccugaca

SEQ ID NO: 330599 - RNA, 19 nt, Artificial Sequence
  Description of Artificial Sequence: Synthetic oligonucleotide
gcugagggauaacucaugg

SEQ ID NO: 330600 - RNA, 19 nt, Artificial Sequence
  Description of Artificial Sequence: Synthetic oligonucleotide
ugcggcuuuggauuucccc

SEQ ID NO: 330601 - RNA, 19 nt, Artificial Sequence
  Description of Artificial Sequence: Synthetic oligonucleotide
uucacgcaacucugcaucc

SEQ ID NO: 330602 - RNA, 19 nt, Artificial Sequence
  Description of Artificial Sequence: Synthetic oligonucleotide
ugcaucucaucugacuuga

SEQ ID NO: 330603 - RNA, 19 nt, Artificial Sequence
  Description of Artificial Sequence: Synthetic oligonucleotide
ugaguaguaaguggccucu

SEQ ID NO: 330604 - RNA, 19 nt, Artificial Sequence
  Description of Artificial Sequence: Synthetic oligonucleotide
agucucguuucugugacug

SEQ ID NO: 330605 - RNA, 19 nt, Artificial Sequence
  Description of Artificial Sequence: Synthetic oligonucleotide
uucccgaaucugcugguca

SEQ ID NO: 330606 - RNA, 19 nt, Artificial Sequence
  Description of Artificial Sequence: Synthetic oligonucleotide
uguaguugucaggaucacc

SEQ ID NO: 330607 - RNA, 19 nt, Artificial Sequence
  Description of Artificial Sequence: Synthetic oligonucleotide
cauaauccugaauggcuuc

SEQ ID NO: 330608 - RNA, 19 nt, Artificial Sequence
  Description of Artificial Sequence: Synthetic oligonucleotide
uugugagcgcaaacgcugc

SEQ ID NO: 330609 - RNA, 19 nt, Artificial Sequence
  Description of Artificial Sequence: Synthetic oligonucleotide
acgaagagaaaacuuucua

SEQ ID NO: 330610 - RNA, 19 nt, Artificial Sequence
  Description of Artificial Sequence: Synthetic oligonucleotide
auagguuaagaaaaugauu

SEQ ID NO: 330611 - RNA, 19 nt, Artificial Sequence
  Description of Artificial Sequence: Synthetic oligonucleotide
gagauggauuguuaggucu

SEQ ID NO: 330612 - RNA, 19 nt, Artificial Sequence
  Description of Artificial Sequence: Synthetic oligonucleotide
gacuguuucaguaaccgcu

SEQ ID NO: 330613 - RNA, 19 nt, Artificial Sequence
  Description of Artificial Sequence: Synthetic oligonucleotide
agacacauauaaacguaag

SEQ ID NO: 330614 - RNA, 19 nt, Artificial Sequence
  Description of Artificial Sequence: Synthetic oligonucleotide
auaacccuguuguuacugu

SEQ ID NO: 330615 - RNA, 19 nt, Artificial Sequence
  Description of Artificial Sequence: Synthetic oligonucleotide
ugcucaaggauaugacuau

SEQ ID NO: 330616 - RNA, 19 nt, Artificial Sequence
  Description of Artificial Sequence: Synthetic oligonucleotide
gauugaagccuugccauga

SEQ ID NO: 330617 - RNA, 19 nt, Artificial Sequence
  Description of Artificial Sequence: Synthetic oligonucleotide
uucagagcguucacauugu

SEQ ID NO: 330618 - RNA, 19 nt, Artificial Sequence
  Description of Artificial Sequence: Synthetic oligonucleotide
agugcggcuuuggauuucc

SEQ ID NO: 330619 - RNA, 19 nt, Artificial Sequence
  Description of Artificial Sequence: Synthetic oligonucleotide
acauauucuaauggcuuca

SEQ ID NO: 330620 - RNA, 19 nt, Artificial Sequence
  Description of Artificial Sequence: Synthetic oligonucleotide
ucgguaugcuuuaaugauu

SEQ ID NO: 330621 - RNA, 19 nt, Artificial Sequence
  Description of Artificial Sequence: Synthetic oligonucleotide
cuaagaagacaguagcucu

SEQ ID NO: 330622 - RNA, 19 nt, Artificial Sequence
  Description of Artificial Sequence: Synthetic oligonucleotide
ucgguguuaccgcucuuca

SEQ ID NO: 330623 - RNA, 19 nt, Artificial Sequence
  Description of Artificial Sequence: Synthetic oligonucleotide
ugcgauaacccuguuguua

SEQ ID NO: 330624 - RNA, 19 nt, Artificial Sequence
  Description of Artificial Sequence: Synthetic oligonucleotide
cugcguucacuccacauuc

SEQ ID NO: 330625 - RNA, 19 nt, Artificial Sequence
  Description of Artificial Sequence: Synthetic oligonucleotide
agggcuugugagcgcaaac

SEQ ID NO: 330626 - RNA, 19 nt, Artificial Sequence
  Description of Artificial Sequence: Synthetic oligonucleotide
agucggcacuuucgaaggc

SEQ ID NO: 330627 - RNA, 19 nt, Artificial Sequence
  Description of Artificial Sequence: Synthetic oligonucleotide
uucaguaaccgcugggcuu

SEQ ID NO: 330628 - RNA, 19 nt, Artificial Sequence
  Description of Artificial Sequence: Synthetic oligonucleotide
acgguauacucagcaacac

SEQ ID NO: 330629 - RNA, 19 nt, Artificial Sequence
  Description of Artificial Sequence: Synthetic oligonucleotide
gaaguucacgcaacucugc

SEQ ID NO: 330630 - RNA, 19 nt, Artificial Sequence
  Description of Artificial Sequence: Synthetic oligonucleotide
cuccuagcugauaguagag

SEQ ID NO: 330631 - RNA, 19 nt, Artificial Sequence
  Description of Artificial Sequence: Synthetic oligonucleotide
ugaaucgaaacggcccgcc

SEQ ID NO: 330632 - RNA, 19 nt, Artificial Sequence
  Description of Artificial Sequence: Synthetic oligonucleotide
uguaugagucccaguugaa

SEQ ID NO: 330633 - RNA, 19 nt, Artificial Sequence
  Description of Artificial Sequence: Synthetic oligonucleotide
aguagagcgugcugauucu

SEQ ID NO: 330634 - RNA, 19 nt, Artificial Sequence
  Description of Artificial Sequence: Synthetic oligonucleotide
aucgaaacggcccgccuga

SEQ ID NO: 330635 - RNA, 19 nt, Artificial Sequence
  Description of Artificial Sequence: Synthetic oligonucleotide
ucauuuucguuguguuccu

SEQ ID NO: 330636 - RNA, 19 nt, Artificial Sequence
  Description of Artificial Sequence: Synthetic oligonucleotide
auuuucgguaugcuuuaau

SEQ ID NO: 330637 - RNA, 19 nt, Artificial Sequence
  Description of Artificial Sequence: Synthetic oligonucleotide
guaguucauaaaucuaugu

SEQ ID NO: 330638 - RNA, 19 nt, Artificial Sequence
  Description of Artificial Sequence: Synthetic oligonucleotide
acuucgcugagggauaacu

SEQ ID NO: 330639 - RNA, 19 nt, Artificial Sequence
  Description of Artificial Sequence: Synthetic oligonucleotide
ggucugucccauuuaagac

SEQ ID NO: 330640 - RNA, 19 nt, Artificial Sequence
  Description of Artificial Sequence: Synthetic oligonucleotide
cacgguauacucagcaaca

SEQ ID NO: 330641 - RNA, 19 nt, Artificial Sequence
  Description of Artificial Sequence: Synthetic oligonucleotide
acucauggucuccuagcug

SEQ ID NO: 330642 - RNA, 19 nt, Artificial Sequence
  Description of Artificial Sequence: Synthetic oligonucleotide
agacauguaugagucccag

SEQ ID NO: 330643 - RNA, 19 nt, Artificial Sequence
  Description of Artificial Sequence: Synthetic oligonucleotide
agcgugcugauucuguaaa

SEQ ID NO: 330644 - RNA, 19 nt, Artificial Sequence
  Description of Artificial Sequence: Synthetic oligonucleotide
uucacggacuucgcugagg

SEQ ID NO: 330645 - RNA, 19 nt, Artificial Sequence
  Description of Artificial Sequence: Synthetic oligonucleotide
uguagucggcacuuucgaa

SEQ ID NO: 330646 - RNA, 19 nt, Artificial Sequence
  Description of Artificial Sequence: Synthetic oligonucleotide
cacuuuaguuaagucgggc

SEQ ID NO: 330647 - RNA, 19 nt, Artificial Sequence
  Description of Artificial Sequence: Synthetic oligonucleotide
agauggauuguuaggucug

SEQ ID NO: 330648 - RNA, 19 nt, Artificial Sequence
  Description of Artificial Sequence: Synthetic oligonucleotide
caguaugaguaguucauaa

SEQ ID NO: 330649 - RNA, 19 nt, Artificial Sequence
  Description of Artificial Sequence: Synthetic oligonucleotide
augagucccaguugaaaua

SEQ ID NO: 330650 - RNA, 19 nt, Artificial Sequence
  Description of Artificial Sequence: Synthetic oligonucleotide
uuuggagcgcacgguauac

SEQ ID NO: 330651 - RNA, 19 nt, Artificial Sequence
  Description of Artificial Sequence: Synthetic oligonucleotide
uucagcugacucgaucagc

SEQ ID NO: 330652 - RNA, 19 nt, Artificial Sequence
  Description of Artificial Sequence: Synthetic oligonucleotide
ugcuuauagugugcaaaac

SEQ ID NO: 330653 - RNA, 19 nt, Artificial Sequence
  Description of Artificial Sequence: Synthetic oligonucleotide
cucccaagauuuuauaaua

SEQ ID NO: 330654 - RNA, 19 nt, Artificial Sequence
  Description of Artificial Sequence: Synthetic oligonucleotide
auaaaggagaggaguggug

SEQ ID NO: 330655 - RNA, 19 nt, Artificial Sequence
  Description of Artificial Sequence: Synthetic oligonucleotide
uggaugcuacauucaugcc

SEQ ID NO: 330656 - RNA, 19 nt, Artificial Sequence
  Description of Artificial Sequence: Synthetic oligonucleotide
uucguauuugcugguugca

SEQ ID NO: 330657 - RNA, 19 nt, Artificial Sequence
  Description of Artificial Sequence: Synthetic oligonucleotide
cuucgcugagggauaacuc

SEQ ID NO: 330658 - RNA, 19 nt, Artificial Sequence
  Description of Artificial Sequence: Synthetic oligonucleotide
cuucaugaaacagucagcu

SEQ ID NO: 330659 - RNA, 19 nt, Artificial Sequence
  Description of Artificial Sequence: Synthetic oligonucleotide
acguaagauuaauaacuua

SEQ ID NO: 330660 - RNA, 19 nt, Artificial Sequence
  Description of Artificial Sequence: Synthetic oligonucleotide
uggagcgcacgguauacuc

SEQ ID NO: 330661 - RNA, 19 nt, Artificial Sequence
  Description of Artificial Sequence: Synthetic oligonucleotide
uuacucccaagauuuuaua

SEQ ID NO: 330662 - RNA, 19 nt, Artificial Sequence
  Description of Artificial Sequence: Synthetic oligonucleotide
acggacuucgcugagggau

SEQ ID NO: 330663 - RNA, 19 nt, Artificial Sequence
  Description of Artificial Sequence: Synthetic oligonucleotide
gcgauaguaugcaauguag

SEQ ID NO: 330664 - RNA, 19 nt, Artificial Sequence
  Description of Artificial Sequence: Synthetic oligonucleotide
gcuaagaagacaguagcuc

SEQ ID NO: 330665 - RNA, 19 nt, Artificial Sequence
  Description of Artificial Sequence: Synthetic oligonucleotide
ugacucgaucagcuuauua

SEQ ID NO: 330666 - RNA, 19 nt, Artificial Sequence
  Description of Artificial Sequence: Synthetic oligonucleotide
augcuacauucaugccucc

SEQ ID NO: 330667 - RNA, 19 nt, Artificial Sequence
  Description of Artificial Sequence: Synthetic oligonucleotide
agucagcucgaaguucacg

SEQ ID NO: 330668 - RNA, 19 nt, Artificial Sequence
  Description of Artificial Sequence: Synthetic oligonucleotide
aaauaggccucugcucggu

SEQ ID NO: 330669 - RNA, 19 nt, Artificial Sequence
  Description of Artificial Sequence: Synthetic oligonucleotide
guucuugauuuagcaacag

SEQ ID NO: 330670 - RNA, 19 nt, Artificial Sequence
  Description of Artificial Sequence: Synthetic oligonucleotide
agcgcaaacgcugcaucuc

SEQ ID NO: 330671 - RNA, 19 nt, Artificial Sequence
  Description of Artificial Sequence: Synthetic oligonucleotide
uuugugcuuggaugcuaca

SEQ ID NO: 330672 - RNA, 19 nt, Artificial Sequence
  Description of Artificial Sequence: Synthetic oligonucleotide
ucaguaaccgcugggcuuu

SEQ ID NO: 330673 - RNA, 19 nt, Artificial Sequence
  Description of Artificial Sequence: Synthetic oligonucleotide
agcucugcgauaguaugca

SEQ ID NO: 330674 - RNA, 19 nt, Artificial Sequence
  Description of Artificial Sequence: Synthetic oligonucleotide
aguucacgcaacucugcau

SEQ ID NO: 330675 - RNA, 19 nt, Artificial Sequence
  Description of Artificial Sequence: Synthetic oligonucleotide
gaucauguuaaagaaucau

SEQ ID NO: 330676 - RNA, 19 nt, Artificial Sequence
  Description of Artificial Sequence: Synthetic oligonucleotide
ggaacgggaacaccgcgcc

SEQ ID NO: 330677 - RNA, 19 nt, Artificial Sequence
  Description of Artificial Sequence: Synthetic oligonucleotide
uaaccuugcugcagugaaa

SEQ ID NO: 330678 - RNA, 19 nt, Artificial Sequence
  Description of Artificial Sequence: Synthetic oligonucleotide
cacgcaguggcuaauuuua

SEQ ID NO: 330679 - RNA, 19 nt, Artificial Sequence
  Description of Artificial Sequence: Synthetic oligonucleotide
ggcuugugagcgcaaacgc

SEQ ID NO: 330680 - RNA, 19 nt, Artificial Sequence
  Description of Artificial Sequence: Synthetic oligonucleotide
uccuaaguacaggcaaaga

SEQ ID NO: 330681 - RNA, 19 nt, Artificial Sequence
  Description of Artificial Sequence: Synthetic oligonucleotide
ggagaggaguggugaaacg

SEQ ID NO: 330682 - RNA, 19 nt, Artificial Sequence
  Description of Artificial Sequence: Synthetic oligonucleotide
gaacugagagagagcauca

SEQ ID NO: 330683 - RNA, 19 nt, Artificial Sequence
  Description of Artificial Sequence: Synthetic oligonucleotide
gaacauauucuaauggcuu

SEQ ID NO: 330684 - RNA, 19 nt, Artificial Sequence
  Description of Artificial Sequence: Synthetic oligonucleotide
aaacggcccgccugagcug

SEQ ID NO: 330685 - RNA, 19 nt, Artificial Sequence
  Description of Artificial Sequence: Synthetic oligonucleotide
uauuugcugguugcaucug

SEQ ID NO: 330686 - RNA, 19 nt, Artificial Sequence
  Description of Artificial Sequence: Synthetic oligonucleotide
uuaccgcucuucagcuuug

SEQ ID NO: 330687 - RNA, 19 nt, Artificial Sequence
  Description of Artificial Sequence: Synthetic oligonucleotide
guuuugcccaacucaacua

SEQ ID NO: 330688 - RNA, 19 nt, Artificial Sequence
  Description of Artificial Sequence: Synthetic oligonucleotide
uggcaguaauguaauucuu

SEQ ID NO: 330689 - RNA, 19 nt, Artificial Sequence
  Description of Artificial Sequence: Synthetic oligonucleotide
ccucuauuaaauaggccuc

SEQ ID NO: 330690 - RNA, 19 nt, Artificial Sequence
  Description of Artificial Sequence: Synthetic oligonucleotide
uugaaucgaaacggcccgc

SEQ ID NO: 330691 - RNA, 19 nt, Artificial Sequence
  Description of Artificial Sequence: Synthetic oligonucleotide
aacggcugcuuuaauugaa

SEQ ID NO: 330692 - RNA, 19 nt, Artificial Sequence
  Description of Artificial Sequence: Synthetic oligonucleotide
ucggcacuuucgaaggcau

SEQ ID NO: 330693 - RNA, 19 nt, Artificial Sequence
  Description of Artificial Sequence: Synthetic oligonucleotide
gggaacaccgcgcccagcc

SEQ ID NO: 330694 - RNA, 19 nt, Artificial Sequence
  Description of Artificial Sequence: Synthetic oligonucleotide
gggcuugugagcgcaaacg

SEQ ID NO: 330695 - RNA, 19 nt, Artificial Sequence
  Description of Artificial Sequence: Synthetic oligonucleotide
uucagacauucacggacuu

SEQ ID NO: 330696 - RNA, 19 nt, Artificial Sequence
  Description of Artificial Sequence: Synthetic oligonucleotide
cuugauuuagcaacagauu

SEQ ID NO: 330697 - RNA, 19 nt, Artificial Sequence
  Description of Artificial Sequence: Synthetic oligonucleotide
auguccaagggcgccgggg

SEQ ID NO: 330698 - RNA, 19 nt, Artificial Sequence
  Description of Artificial Sequence: Synthetic oligonucleotide
auucacggacuucgcugag

SEQ ID NO: 330699 - RNA, 19 nt, Artificial Sequence
  Description of Artificial Sequence: Synthetic oligonucleotide
aaggagcgcggcccagcag

SEQ ID NO: 330700 - RNA, 19 nt, Artificial Sequence
  Description of Artificial Sequence: Synthetic oligonucleotide
uuccccaauucaagaugcu

SEQ ID NO: 330701 - RNA, 19 nt, Artificial Sequence
  Description of Artificial Sequence: Synthetic oligonucleotide
gagggauaacucauggucu

SEQ ID NO: 330702 - RNA, 19 nt, Artificial Sequence
  Description of Artificial Sequence: Synthetic oligonucleotide
aguagcucugcgauaguau

SEQ ID NO: 330703 - RNA, 19 nt, Artificial Sequence
  Description of Artificial Sequence: Synthetic oligonucleotide
auuuagagauggauuguua

SEQ ID NO: 330704 - RNA, 19 nt, Artificial Sequence
  Description of Artificial Sequence: Synthetic oligonucleotide
aauuuucgguaugcuuuaa

SEQ ID NO: 330705 - RNA, 19 nt, Artificial Sequence
  Description of Artificial Sequence: Synthetic oligonucleotide
uuaagucgcugauggcuuu

SEQ ID NO: 330706 - RNA, 19 nt, Artificial Sequence
  Description of Artificial Sequence: Synthetic oligonucleotide
gauaacucauggucuccua

SEQ ID NO: 330707 - RNA, 19 nt, Artificial Sequence
  Description of Artificial Sequence: Synthetic oligonucleotide
aucugcguucacuccacau

SEQ ID NO: 330708 - RNA, 19 nt, Artificial Sequence
  Description of Artificial Sequence: Synthetic oligonucleotide
cauggcuaagaagacagua

SEQ ID NO: 330709 - RNA, 19 nt, Artificial Sequence
  Description of Artificial Sequence: Synthetic oligonucleotide
uaguugucaggaucaccau

SEQ ID NO: 330710 - RNA, 19 nt, Artificial Sequence
  Description of Artificial Sequence: Synthetic oligonucleotide
ucagacauucacggacuuc

SEQ ID NO: 330711 - RNA, 19 nt, Artificial Sequence
  Description of Artificial Sequence: Synthetic oligonucleotide
ucacgcaacucugcauccc

SEQ ID NO: 330712 - RNA, 19 nt, Artificial Sequence
  Description of Artificial Sequence: Synthetic oligonucleotide
ucccgaaucugcuggucau

SEQ ID NO: 330713 - RNA, 19 nt, Artificial Sequence
  Description of Artificial Sequence: Synthetic oligonucleotide
caaacgcugcaucucaucu

SEQ ID NO: 330714 - RNA, 19 nt, Artificial Sequence
  Description of Artificial Sequence: Synthetic oligonucleotide
gaaggagcgcggcccagca

SEQ ID NO: 330715 - RNA, 19 nt, Artificial Sequence
  Description of Artificial Sequence: Synthetic oligonucleotide
cugauucuguaaaacgccu

SEQ ID NO: 330716 - RNA, 19 nt, Artificial Sequence
  Description of Artificial Sequence: Synthetic oligonucleotide
cuguagucggcacuuucga

SEQ ID NO: 330717 - RNA, 19 nt, Artificial Sequence
  Description of Artificial Sequence: Synthetic oligonucleotide
cuguaaccuugcugcagug

SEQ ID NO: 330718 - RNA, 19 nt, Artificial Sequence
  Description of Artificial Sequence: Synthetic oligonucleotide
acgcaguggcuaauuuuac

SEQ ID NO: 330719 - RNA, 19 nt, Artificial Sequence
  Description of Artificial Sequence: Synthetic oligonucleotide
guaaccgcugggcuuucuc

SEQ ID NO: 330720 - RNA, 19 nt, Artificial Sequence
  Description of Artificial Sequence: Synthetic oligonucleotide
ccuguugacucucugcguc

SEQ ID NO: 330721 - RNA, 19 nt, Artificial Sequence
  Description of Artificial Sequence: Synthetic oligonucleotide
gaacgggaacaccgcgccc

SEQ ID NO: 330722 - RNA, 19 nt, Artificial Sequence
  Description of Artificial Sequence: Synthetic oligonucleotide
uucccuuguuugaguagua

SEQ ID NO: 330723 - RNA, 19 nt, Artificial Sequence
  Description of Artificial Sequence: Synthetic oligonucleotide
uucguacugcagguccacc

SEQ ID NO: 330724 - RNA, 19 nt, Artificial Sequence
  Description of Artificial Sequence: Synthetic oligonucleotide
ggcuccuaaguacaggcaa

SEQ ID NO: 330725 - RNA, 19 nt, Artificial Sequence
  Description of Artificial Sequence: Synthetic oligonucleotide
uaagucgggcagugcggcu

SEQ ID NO: 330726 - RNA, 19 nt, Artificial Sequence
  Description of Artificial Sequence: Synthetic oligonucleotide
cauugucgggcuccaucug

SEQ ID NO: 330727 - RNA, 19 nt, Artificial Sequence
  Description of Artificial Sequence: Synthetic oligonucleotide
aaguacaggcaaagagcau

SEQ ID NO: 330728 - RNA, 19 nt, Artificial Sequence
  Description of Artificial Sequence: Synthetic oligonucleotide
ggaagcuuauagcagcgcu

SEQ ID NO: 330729 - RNA, 19 nt, Artificial Sequence
  Description of Artificial Sequence: Synthetic oligonucleotide
guccaagggcgccggggcg

SEQ ID NO: 330730 - RNA, 19 nt, Artificial Sequence
  Description of Artificial Sequence: Synthetic oligonucleotide
ucggucuuucagagcguuc

SEQ ID NO: 330731 - RNA, 19 nt, Artificial Sequence
  Description of Artificial Sequence: Synthetic oligonucleotide
guagagcgugcugauucug

SEQ ID NO: 330732 - RNA, 19 nt, Artificial Sequence
  Description of Artificial Sequence: Synthetic oligonucleotide
cuucguacugcagguccac

SEQ ID NO: 330733 - RNA, 19 nt, Artificial Sequence
  Description of Artificial Sequence: Synthetic oligonucleotide
ugucgggcuccaucuguaa

SEQ ID NO: 330734 - RNA, 19 nt, Artificial Sequence
  Description of Artificial Sequence: Synthetic oligonucleotide
cuguugacucucugcguca

SEQ ID NO: 330735 - RNA, 19 nt, Artificial Sequence
  Description of Artificial Sequence: Synthetic oligonucleotide
ugccucccacaauuaacua

SEQ ID NO: 330736 - RNA, 19 nt, Artificial Sequence
  Description of Artificial Sequence: Synthetic oligonucleotide
ugccacugaagugcuaauu

SEQ ID NO: 330737 - RNA, 19 nt, Artificial Sequence
  Description of Artificial Sequence: Synthetic oligonucleotide
ggaaauugucuggaugcca

SEQ ID NO: 330738 - RNA, 19 nt, Artificial Sequence
  Description of Artificial Sequence: Synthetic oligonucleotide
uagucucguuucugugacu

SEQ ID NO: 330739 - RNA, 19 nt, Artificial Sequence
  Description of Artificial Sequence: Synthetic oligonucleotide
ccacuauacaaacccugac

SEQ ID NO: 330740 - RNA, 19 nt, Artificial Sequence
  Description of Artificial Sequence: Synthetic oligonucleotide
uuggagcgcacgguauacu

SEQ ID NO: 330741 - RNA, 19 nt, Artificial Sequence
  Description of Artificial Sequence: Synthetic oligonucleotide
cacgcaacucugcauccca

SEQ ID NO: 330742 - RNA, 19 nt, Artificial Sequence
  Description of Artificial Sequence: Synthetic oligonucleotide
accgcucuucagcuuugca

SEQ ID NO: 330743 - RNA, 19 nt, Artificial Sequence
  Description of Artificial Sequence: Synthetic oligonucleotide
gagcgcaaacgcugcaucu

SEQ ID NO: 330744 - RNA, 19 nt, Artificial Sequence
  Description of Artificial Sequence: Synthetic oligonucleotide
ggauaugacuauagguuaa

SEQ ID NO: 330745 - RNA, 19 nt, Artificial Sequence
  Description of Artificial Sequence: Synthetic oligonucleotide
cucaacuaugugauuuuau

SEQ ID NO: 330746 - RNA, 19 nt, Artificial Sequence
  Description of Artificial Sequence: Synthetic oligonucleotide
gacauguaugagucccagu

SEQ ID NO: 330747 - RNA, 19 nt, Artificial Sequence
  Description of Artificial Sequence: Synthetic oligonucleotide
agauucguauuugcugguu

SEQ ID NO: 330748 - RNA, 19 nt, Artificial Sequence
  Description of Artificial Sequence: Synthetic oligonucleotide
cugcucggucuuucagagc

SEQ ID NO: 330749 - RNA, 19 nt, Artificial Sequence
  Description of Artificial Sequence: Synthetic oligonucleotide
gauggauuguuaggucugu

SEQ ID NO: 330750 - RNA, 19 nt, Artificial Sequence
  Description of Artificial Sequence: Synthetic oligonucleotide
gauuagacuugagcacucu

SEQ ID NO: 330751 - RNA, 19 nt, Artificial Sequence
  Description of Artificial Sequence: Synthetic oligonucleotide
gaaucgaaacggcccgccu

SEQ ID NO: 330752 - RNA, 19 nt, Artificial Sequence
  Description of Artificial Sequence: Synthetic oligonucleotide
agcgcacgguauacucagc

SEQ ID NO: 330753 - RNA, 19 nt, Artificial Sequence
  Description of Artificial Sequence: Synthetic oligonucleotide
cuuuggagcgcacgguaua

SEQ ID NO: 330754 - RNA, 19 nt, Artificial Sequence
  Description of Artificial Sequence: Synthetic oligonucleotide
cauguccaagggcgccggg

SEQ ID NO: 330755 - RNA, 19 nt, Artificial Sequence
  Description of Artificial Sequence: Synthetic oligonucleotide
acaaacccugacaguacau

SEQ ID NO: 330756 - RNA, 19 nt, Artificial Sequence
  Description of Artificial Sequence: Synthetic oligonucleotide
agcgcuguagucggcacuu

SEQ ID NO: 330757 - RNA, 19 nt, Artificial Sequence
  Description of Artificial Sequence: Synthetic oligonucleotide
acgccucgguguuaccgcu

SEQ ID NO: 330758 - RNA, 19 nt, Artificial Sequence
  Description of Artificial Sequence: Synthetic oligonucleotide
gguaugcuuuaaugauuuc

SEQ ID NO: 330759 - RNA, 19 nt, Artificial Sequence
  Description of Artificial Sequence: Synthetic oligonucleotide
cguucacuccacauucagc

SEQ ID NO: 330760 - RNA, 19 nt, Artificial Sequence
  Description of Artificial Sequence: Synthetic oligonucleotide
cagcucgaaguucacgcaa

SEQ ID NO: 330761 - RNA, 19 nt, Artificial Sequence
  Description of Artificial Sequence: Synthetic oligonucleotide
gccucccacaauuaacuaa

SEQ ID NO: 330762 - RNA, 19 nt, Artificial Sequence
  Description of Artificial Sequence: Synthetic oligonucleotide
ccacuaacagaaaaggaau

SEQ ID NO: 330763 - RNA, 19 nt, Artificial Sequence
  Description of Artificial Sequence: Synthetic oligonucleotide
ucgaaacggcccgccugag

SEQ ID NO: 330764 - RNA, 19 nt, Artificial Sequence
  Description of Artificial Sequence: Synthetic oligonucleotide
ucucugcgucaagaggauc

SEQ ID NO: 330765 - RNA, 19 nt, Artificial Sequence
  Description of Artificial Sequence: Synthetic oligonucleotide
cacagacaagugcgauaac

SEQ ID NO: 330766 - RNA, 19 nt, Artificial Sequence
  Description of Artificial Sequence: Synthetic oligonucleotide
gguugguaagaaauaggcu

SEQ ID NO: 330767 - RNA, 19 nt, Artificial Sequence
  Description of Artificial Sequence: Synthetic oligonucleotide
gcaggaacgggaacaccgc

SEQ ID NO: 330768 - RNA, 19 nt, Artificial Sequence
  Description of Artificial Sequence: Synthetic oligonucleotide
ggauuagacuugagcacuc

SEQ ID NO: 330769 - RNA, 19 nt, Artificial Sequence
  Description of Artificial Sequence: Synthetic oligonucleotide
aggcuccuaaguacaggca

SEQ ID NO: 330770 - RNA, 19 nt, Artificial Sequence
  Description of Artificial Sequence: Synthetic oligonucleotide
agcuuauagcagcgcugua

SEQ ID NO: 330771 - RNA, 19 nt, Artificial Sequence
  Description of Artificial Sequence: Synthetic oligonucleotide
cucccacaauuaacuaaaa

SEQ ID NO: 330772 - RNA, 19 nt, Artificial Sequence
  Description of Artificial Sequence: Synthetic oligonucleotide
ggucuccuagcugauagua

SEQ ID NO: 330773 - RNA, 19 nt, Artificial Sequence
  Description of Artificial Sequence: Synthetic oligonucleotide
uuguuaggucugucccauu

SEQ ID NO: 330774 - RNA, 19 nt, Artificial Sequence
  Description of Artificial Sequence: Synthetic oligonucleotide
caguaugcucaaggauaug

SEQ ID NO: 330775 - RNA, 19 nt, Artificial Sequence
  Description of Artificial Sequence: Synthetic oligonucleotide
cugcgucaagaggaucuuc

SEQ ID NO: 330776 - RNA, 19 nt, Artificial Sequence
  Description of Artificial Sequence: Synthetic oligonucleotide
cccaauucaagaugcuucu

SEQ ID NO: 330777 - RNA, 19 nt, Artificial Sequence
  Description of Artificial Sequence: Synthetic oligonucleotide
ggagcgcacgguauacuca

SEQ ID NO: 330778 - RNA, 19 nt, Artificial Sequence
  Description of Artificial Sequence: Synthetic oligonucleotide
aguaaccgcugggcuuucu

SEQ ID NO: 330779 - RNA, 19 nt, Artificial Sequence
  Description of Artificial Sequence: Synthetic oligonucleotide
ggauaacucauggucuccu

SEQ ID NO: 330780 - RNA, 19 nt, Artificial Sequence
  Description of Artificial Sequence: Synthetic oligonucleotide
gcaccuucguacugcaggu

SEQ ID NO: 330781 - RNA, 19 nt, Artificial Sequence
  Description of Artificial Sequence: Synthetic oligonucleotide
caccuucguacugcagguc

SEQ ID NO: 330782 - RNA, 19 nt, Artificial Sequence
  Description of Artificial Sequence: Synthetic oligonucleotide
guaaaacgccucgguguua

SEQ ID NO: 330783 - RNA, 19 nt, Artificial Sequence
  Description of Artificial Sequence: Synthetic oligonucleotide
cgauaguaugcaauguagu

SEQ ID NO: 330784 - RNA, 19 nt, Artificial Sequence
  Description of Artificial Sequence: Synthetic oligonucleotide
gcaguaugaguaguucaua

SEQ ID NO: 330785 - RNA, 19 nt, Artificial Sequence
  Description of Artificial Sequence: Synthetic oligonucleotide
gggguugccgccgccuccc

SEQ ID NO: 330786 - RNA, 19 nt, Artificial Sequence
  Description of Artificial Sequence: Synthetic oligonucleotide
cacggacuucgcugaggga

SEQ ID NO: 330787 - RNA, 19 nt, Artificial Sequence
  Description of Artificial Sequence: Synthetic oligonucleotide
cgguguuaccgcucuucag

SEQ ID NO: 330788 - RNA, 19 nt, Artificial Sequence
  Description of Artificial Sequence: Synthetic oligonucleotide
agccacgcaguggcuaauu

SEQ ID NO: 330789 - RNA, 19 nt, Artificial Sequence
  Description of Artificial Sequence: Synthetic oligonucleotide
gcgugcugauucuguaaaa

SEQ ID NO: 330790 - RNA, 19 nt, Artificial Sequence
  Description of Artificial Sequence: Synthetic oligonucleotide
gccggcugcccagcgagcc

SEQ ID NO: 330791 - RNA, 19 nt, Artificial Sequence
  Description of Artificial Sequence: Synthetic oligonucleotide
gugcggcuuuggauuuccc

SEQ ID NO: 330792 - RNA, 19 nt, Artificial Sequence
  Description of Artificial Sequence: Synthetic oligonucleotide
gcucaaggauaugacuaua

SEQ ID NO: 330793 - RNA, 19 nt, Artificial Sequence
  Description of Artificial Sequence: Synthetic oligonucleotide
gugaaacggcugcuuuaau

SEQ ID NO: 330794 - RNA, 19 nt, Artificial Sequence
  Description of Artificial Sequence: Synthetic oligonucleotide
cagugcggcuuuggauuuc

SEQ ID NO: 330795 - RNA, 19 nt, Artificial Sequence
  Description of Artificial Sequence: Synthetic oligonucleotide
gcugacucgaucagcuuau

SEQ ID NO: 330796 - RNA, 19 nt, Artificial Sequence
  Description of Artificial Sequence: Synthetic oligonucleotide
cugcuaugucaaugaacuu

SEQ ID NO: 330797 - RNA, 19 nt, Artificial Sequence
  Description of Artificial Sequence: Synthetic oligonucleotide
cgguaugcuuuaaugauuu

SEQ ID NO: 330798 - RNA, 19 nt, Artificial Sequence
  Description of Artificial Sequence: Synthetic oligonucleotide
gcucugcgauaguaugcaa

SEQ ID NO: 330799 - RNA, 19 nt, Artificial Sequence
  Description of Artificial Sequence: Synthetic oligonucleotide
ggacuucgcugagggauaa

SEQ ID NO: 330800 - RNA, 19 nt, Artificial Sequence
  Description of Artificial Sequence: Synthetic oligonucleotide
cgaucagcuuauuaaguuu

SEQ ID NO: 330801 - RNA, 19 nt, Artificial Sequence
  Description of Artificial Sequence: Synthetic oligonucleotide
cccgccugagcugaaggga

SEQ ID NO: 330802 - RNA, 19 nt, Artificial Sequence
  Description of Artificial Sequence: Synthetic oligonucleotide
cucggucuuucagagcguu

SEQ ID NO: 330803 - RNA, 19 nt, Artificial Sequence
  Description of Artificial Sequence: Synthetic oligonucleotide
cgguauacucagcaacacu

SEQ ID NO: 330804 - RNA, 19 nt, Artificial Sequence
  Description of Artificial Sequence: Synthetic oligonucleotide
caagggcgccggggcggag

SEQ ID NO: 330805 - RNA, 19 nt, Artificial Sequence
  Description of Artificial Sequence: Synthetic oligonucleotide
cggacuucgcugagggaua

SEQ ID NO: 330806 - RNA, 19 nt, Artificial Sequence
  Description of Artificial Sequence: Synthetic oligonucleotide
cggcugcuuuaauugaagu

SEQ ID NO: 330807 - RNA, 19 nt, Artificial Sequence
  Description of Artificial Sequence: Synthetic oligonucleotide
caagugcgauaacccuguu

SEQ ID NO: 330808 - RNA, 19 nt, Artificial Sequence
  Description of Artificial Sequence: Synthetic oligonucleotide
cugacucgaucagcuuauu

SEQ ID NO: 330809 - RNA, 19 nt, Artificial Sequence
  Description of Artificial Sequence: Synthetic oligonucleotide
gcucggucuuucagagcgu

SEQ ID NO: 330810 - RNA, 19 nt, Artificial Sequence
  Description of Artificial Sequence: Synthetic oligonucleotide
acggcccgccugagcugaa

SEQ ID NO: 330811 - RNA, 19 nt, Artificial Sequence
  Description of Artificial Sequence: Synthetic oligonucleotide
ggguugccgccgccucccu

SEQ ID NO: 330812 - RNA, 19 nt, Artificial Sequence
  Description of Artificial Sequence: Synthetic oligonucleotide
gcgcuguagucggcacuuu

SEQ ID NO: 330813 - RNA, 19 nt, Artificial Sequence
  Description of Artificial Sequence: Synthetic oligonucleotide
aaugcaauaggcuccaggg

SEQ ID NO: 330814 - RNA, 19 nt, Artificial Sequence
  Description of Artificial Sequence: Synthetic oligonucleotide
  modified_base (9)..(9): a, c, u, g, unknown or other
ugcugaaanacccagagca

SEQ ID NO: 330815 - RNA, 19 nt, Artificial Sequence
  Description of Artificial Sequence: Synthetic oligonucleotide
aauugaacuacuuccacug

SEQ ID NO: 330816 - RNA, 19 nt, Artificial Sequence
  Description of Artificial Sequence: Synthetic oligonucleotide
  modified_base (17)..(17): a, c, u, g, unknown or other
aguuuaauugcugaaanac

SEQ ID NO: 330817 - RNA, 19 nt, Artificial Sequence
  Description of Artificial Sequence: Synthetic oligonucleotide
agccgauuagcacagaagc

SEQ ID NO: 330818 - RNA, 19 nt, Artificial Sequence
  Description of Artificial Sequence: Synthetic oligonucleotide
aaucgcagagaguagaucu

SEQ ID NO: 330819 - RNA, 19 nt, Artificial Sequence
  Description of Artificial Sequence: Synthetic oligonucleotide
caagcuaaagaucuggucc

SEQ ID NO: 330820 - RNA, 19 nt, Artificial Sequence
  Description of Artificial Sequence: Synthetic oligonucleotide
  modified_base (19)..(19): a, c, u, g, unknown or other
aaaguuuaauugcugaaan

SEQ ID NO: 330821 - RNA, 19 nt, Artificial Sequence
  Description of Artificial Sequence: Synthetic oligonucleotide
  modified_base (11)..(11): a, c, u, g, unknown or other
auugcugaaanacccagag

SEQ ID NO: 330822 - RNA, 19 nt, Artificial Sequence
  Description of Artificial Sequence: Synthetic oligonucleotide
  modified_base (14)..(14): a, c, u, g, unknown or other
uuaauugcugaaanaccca

SEQ ID NO: 330823 - RNA, 19 nt, Artificial Sequence
  Description of Artificial Sequence: Synthetic oligonucleotide
uauaagaacacacggguau

SEQ ID NO: 330824 - RNA, 19 nt, Artificial Sequence
  Description of Artificial Sequence: Synthetic oligonucleotide
acgaccaucacacacccac

SEQ ID NO: 330825 - RNA, 19 nt, Artificial Sequence
  Description of Artificial Sequence: Synthetic oligonucleotide
uuuuguuagcuuagaaaag

SEQ ID NO: 330826 - RNA, 19 nt, Artificial Sequence
  Description of Artificial Sequence: Synthetic oligonucleotide
cagacaacgaccaucacac

SEQ ID NO: 330827 - RNA, 19 nt, Artificial Sequence
  Description of Artificial Sequence: Synthetic oligonucleotide
  modified_base (13)..(13): a, c, u, g, unknown or other
uaauugcugaaanacccag

SEQ ID NO: 330828 - RNA, 19 nt, Artificial Sequence
  Description of Artificial Sequence: Synthetic oligonucleotide
uuaggucauaggaagagga

SEQ ID NO: 330829 - RNA, 19 nt, Artificial Sequence
  Description of Artificial Sequence: Synthetic oligonucleotide
ucuuucacgcaucugguug

SEQ ID NO: 330830 - RNA, 19 nt, Artificial Sequence
  Description of Artificial Sequence: Synthetic oligonucleotide
uguuagaugaagccagcag

SEQ ID NO: 330831 - RNA, 19 nt, Artificial Sequence
  Description of Artificial Sequence: Synthetic oligonucleotide
aucagcuauguacaacugc

SEQ ID NO: 330832 - RNA, 19 nt, Artificial Sequence
  Description of Artificial Sequence: Synthetic oligonucleotide
agaugaagccagcagaaag

SEQ ID NO: 330833 - RNA, 19 nt, Artificial Sequence
  Description of Artificial Sequence: Synthetic oligonucleotide
aggagcuacaucaaggccc

SEQ ID NO: 330834 - RNA, 19 nt, Artificial Sequence
  Description of Artificial Sequence: Synthetic oligonucleotide
uucacuucggcugucaaag

SEQ ID NO: 330835 - RNA, 19 nt, Artificial Sequence
  Description of Artificial Sequence: Synthetic oligonucleotide
agauccauuaccgcugucc

SEQ ID NO: 330836 - RNA, 19 nt, Artificial Sequence
  Description of Artificial Sequence: Synthetic oligonucleotide
  modified_base (6)..(6): a, c, u, g, unknown or other
ugaaanacccagagcaugu

SEQ ID NO: 330837 - RNA, 19 nt, Artificial Sequence
  Description of Artificial Sequence: Synthetic oligonucleotide
acuggugucauaugcuaac

SEQ ID NO: 330838 - RNA, 19 nt, Artificial Sequence
  Description of Artificial Sequence: Synthetic oligonucleotide
  modified_base (4)..(4): a, c, u, g, unknown or other
aaanacccagagcaugugu

SEQ ID NO: 330839 - RNA, 19 nt, Artificial Sequence
  Description of Artificial Sequence: Synthetic oligonucleotide
ucauaugcuaacaggcagc

SEQ ID NO: 330840 - RNA, 19 nt, Artificial Sequence
  Description of Artificial Sequence: Synthetic oligonucleotide
  modified_base (2)..(2): a, c, u, g, unknown or other
anacccagagcauguguag

SEQ ID NO: 330841 - RNA, 19 nt, Artificial Sequence
  Description of Artificial Sequence: Synthetic oligonucleotide
acgguuaggucauaggaag

SEQ ID NO: 330842 - RNA, 19 nt, Artificial Sequence
  Description of Artificial Sequence: Synthetic oligonucleotide
uugaacuacuuccacuggc

SEQ ID NO: 330843 - RNA, 19 nt, Artificial Sequence
  Description of Artificial Sequence: Synthetic oligonucleotide
aagauguuagaugaagcca

SEQ ID NO: 330844 - RNA, 19 nt, Artificial Sequence
  Description of Artificial Sequence: Synthetic oligonucleotide
uggaauugaacuacuucca

SEQ ID NO: 330845 - RNA, 19 nt, Artificial Sequence
  Description of Artificial Sequence: Synthetic oligonucleotide
cuaguugcugcccaucugg

SEQ ID NO: 330846 - RNA, 19 nt, Artificial Sequence
  Description of Artificial Sequence: Synthetic oligonucleotide
ugugcucaccaaaacacca

SEQ ID NO: 330847 - RNA, 19 nt, Artificial Sequence
  Description of Artificial Sequence: Synthetic oligonucleotide
agaucuuuucuguguggcc

SEQ ID NO: 330848 - RNA, 19 nt, Artificial Sequence
  Description of Artificial Sequence: Synthetic oligonucleotide
agugagaagcaccaggcca

SEQ ID NO: 330849 - RNA, 19 nt, Artificial Sequence
  Description of Artificial Sequence: Synthetic oligonucleotide
aagauagguuggcauguag

SEQ ID NO: 330850 - RNA, 19 nt, Artificial Sequence
  Description of Artificial Sequence: Synthetic oligonucleotide
ugucauaugcuaacaggca

SEQ ID NO: 330851 - RNA, 19 nt, Artificial Sequence
  Description of Artificial Sequence: Synthetic oligonucleotide
acaacgaccaucacacacc

SEQ ID NO: 330852 - RNA, 19 nt, Artificial Sequence
  Description of Artificial Sequence: Synthetic oligonucleotide
gaacacacggguaucaccc

SEQ ID NO: 330853 - RNA, 19 nt, Artificial Sequence
  Description of Artificial Sequence: Synthetic oligonucleotide
accucauauaagaacacac

SEQ ID NO: 330854 - RNA, 19 nt, Artificial Sequence
  Description of Artificial Sequence: Synthetic oligonucleotide
gucauaugcuaacaggcag

SEQ ID NO: 330855 - RNA, 19 nt, Artificial Sequence
  Description of Artificial Sequence: Synthetic oligonucleotide
agucccuuaagguugguga

SEQ ID NO: 330856 - RNA, 19 nt, Artificial Sequence
  Description of Artificial Sequence: Synthetic oligonucleotide
agauguuagaugaagccag

SEQ ID NO: 330857 - RNA, 19 nt, Artificial Sequence
  Description of Artificial Sequence: Synthetic oligonucleotide
gacaacgaccaucacacac

SEQ ID NO: 330858 - RNA, 19 nt, Artificial Sequence
  Description of Artificial Sequence: Synthetic oligonucleotide
auaccagcagacaacgacc

SEQ ID NO: 330859 - RNA, 19 nt, Artificial Sequence
  Description of Artificial Sequence: Synthetic oligonucleotide
gagacauaagguguggaag

SEQ ID NO: 330860 - RNA, 19 nt, Artificial Sequence
  Description of Artificial Sequence: Synthetic oligonucleotide
uuaugaggaucagaugacg

SEQ ID NO: 330861 - RNA, 19 nt, Artificial Sequence
  Description of Artificial Sequence: Synthetic oligonucleotide
uguuagcuccaugagaccc

SEQ ID NO: 330862 - RNA, 19 nt, Artificial Sequence
  Description of Artificial Sequence: Synthetic oligonucleotide
acggguaucacccuugcca

SEQ ID NO: 330863 - RNA, 19 nt, Artificial Sequence
  Description of Artificial Sequence: Synthetic oligonucleotide
ggugucauaugcuaacagg

SEQ ID NO: 330864 - RNA, 19 nt, Artificial Sequence
  Description of Artificial Sequence: Synthetic oligonucleotide
cagggguacagccacaugc

SEQ ID NO: 330865 - RNA, 19 nt, Artificial Sequence
  Description of Artificial Sequence: Synthetic oligonucleotide
ugauauggcugucucggug

SEQ ID NO: 330866 - RNA, 19 nt, Artificial Sequence
  Description of Artificial Sequence: Synthetic oligonucleotide
gcuacuggcaucuacuucc

SEQ ID NO: 330867 - RNA, 19 nt, Artificial Sequence
  Description of Artificial Sequence: Synthetic oligonucleotide
gauccauuaccgcuguccc

SEQ ID NO: 330868 - RNA, 19 nt, Artificial Sequence
  Description of Artificial Sequence: Synthetic oligonucleotide
cacaaugcgggcuccacgg

SEQ ID NO: 330869 - RNA, 19 nt, Artificial Sequence
  Description of Artificial Sequence: Synthetic oligonucleotide
cuuaugaggaucagaugac

SEQ ID NO: 330870 - RNA, 19 nt, Artificial Sequence
  Description of Artificial Sequence: Synthetic oligonucleotide
ucauagcuuggaagcaagg

SEQ ID NO: 330871 - RNA, 19 nt, Artificial Sequence
  Description of Artificial Sequence: Synthetic oligonucleotide
caaagggucuucucgauuc

SEQ ID NO: 330872 - RNA, 19 nt, Artificial Sequence
  Description of Artificial Sequence: Synthetic oligonucleotide
uguguccgggaacacauca

SEQ ID NO: 330873 - RNA, 19 nt, Artificial Sequence
  Description of Artificial Sequence: Synthetic oligonucleotide
acucuuuccugacucgagg

SEQ ID NO: 330874 - RNA, 19 nt, Artificial Sequence
  Description of Artificial Sequence: Synthetic oligonucleotide
auugaacuacuuccacugg

SEQ ID NO: 330875 - RNA, 19 nt, Artificial Sequence
  Description of Artificial Sequence: Synthetic oligonucleotide
guugagucccuuaagguug

SEQ ID NO: 330876 - RNA, 19 nt, Artificial Sequence
  Description of Artificial Sequence: Synthetic oligonucleotide
uguuagcuuagaaaaguuu

SEQ ID NO: 330877 - RNA, 19 nt, Artificial Sequence
  Description of Artificial Sequence: Synthetic oligonucleotide
ugucgugugguugaguccc

SEQ ID NO: 330878 - RNA, 19 nt, Artificial Sequence
  Description of Artificial Sequence: Synthetic oligonucleotide
uggugucauaugcuaacag

SEQ ID NO: 330879 - RNA, 19 nt, Artificial Sequence
  Description of Artificial Sequence: Synthetic oligonucleotide
ugaggaucagaugacguga

SEQ ID NO: 330880 - RNA, 19 nt, Artificial Sequence
  Description of Artificial Sequence: Synthetic oligonucleotide
ugugguugagucccuuaag

SEQ ID NO: 330881 - RNA, 19 nt, Artificial Sequence
  Description of Artificial Sequence: Synthetic oligonucleotide
auaaagcugcucccaacag

SEQ ID NO: 330882 - RNA, 19 nt, Artificial Sequence
  Description of Artificial Sequence: Synthetic oligonucleotide
  modified_base (7)..(7): a, c, u, g, unknown or other
cugaaanacccagagcaug

SEQ ID NO: 330883 - RNA, 19 nt, Artificial Sequence
  Description of Artificial Sequence: Synthetic oligonucleotide
augaggaucagaugacgug

SEQ ID NO: 330884 - RNA, 19 nt, Artificial Sequence
  Description of Artificial Sequence: Synthetic oligonucleotide
gucacacucagucuugggc

SEQ ID NO: 330885 - RNA, 19 nt, Artificial Sequence
  Description of Artificial Sequence: Synthetic oligonucleotide
gggaaaaugaucccaggcc

SEQ ID NO: 330886 - RNA, 19 nt, Artificial Sequence
  Description of Artificial Sequence: Synthetic oligonucleotide
ugggaucaaagaucuguag

SEQ ID NO: 330887 - RNA, 19 nt, Artificial Sequence
  Description of Artificial Sequence: Synthetic oligonucleotide
ggcggugugggucaaaggg

SEQ ID NO: 330888 - RNA, 19 nt, Artificial Sequence
  Description of Artificial Sequence: Synthetic oligonucleotide
uuuucuguguggccuguga

SEQ ID NO: 330889 - RNA, 19 nt, Artificial Sequence
  Description of Artificial Sequence: Synthetic oligonucleotide
gacuaggagagacaaggca

SEQ ID NO: 330890 - RNA, 19 nt, Artificial Sequence
  Description of Artificial Sequence: Synthetic oligonucleotide
uugagucccuuaagguugg

SEQ ID NO: 330891 - RNA, 19 nt, Artificial Sequence
  Description of Artificial Sequence: Synthetic oligonucleotide
gauagguuggcauguagua

SEQ ID NO: 330892 - RNA, 19 nt, Artificial Sequence
  Description of Artificial Sequence: Synthetic oligonucleotide
cagagcauguguaggcugg

SEQ ID NO: 330893 - RNA, 19 nt, Artificial Sequence
  Description of Artificial Sequence: Synthetic oligonucleotide
uuagaacuggggcccagca

SEQ ID NO: 330894 - RNA, 19 nt, Artificial Sequence
  Description of Artificial Sequence: Synthetic oligonucleotide
cacgcaucugguugaaucc

SEQ ID NO: 330895 - RNA, 19 nt, Artificial Sequence
  Description of Artificial Sequence: Synthetic oligonucleotide
ccucauauaagaacacacg

SEQ ID NO: 330896 - RNA, 19 nt, Artificial Sequence
  Description of Artificial Sequence: Synthetic oligonucleotide
aauccuguggacacaagau

SEQ ID NO: 330897 - RNA, 19 nt, Artificial Sequence
  Description of Artificial Sequence: Synthetic oligonucleotide
gggaucaaagaucuguagc

SEQ ID NO: 330898 - RNA, 19 nt, Artificial Sequence
  Description of Artificial Sequence: Synthetic oligonucleotide
cauggcggaauuuagaacu

SEQ ID NO: 330899 - RNA, 19 nt, Artificial Sequence
  Description of Artificial Sequence: Synthetic oligonucleotide
ugcuuguccuugcauguug

SEQ ID NO: 330900 - RNA, 19 nt, Artificial Sequence
  Description of Artificial Sequence: Synthetic oligonucleotide
agagacauaagguguggaa

SEQ ID NO: 330901 - RNA, 19 nt, Artificial Sequence
  Description of Artificial Sequence: Synthetic oligonucleotide
ggaaggagcuacaucaagg

SEQ ID NO: 330902 - RNA, 19 nt, Artificial Sequence
  Description of Artificial Sequence: Synthetic oligonucleotide
guaaacucaguagcugggg

SEQ ID NO: 330903 - RNA, 19 nt, Artificial Sequence
  Description of Artificial Sequence: Synthetic oligonucleotide
uguguaggcugguuguugu

SEQ ID NO: 330904 - RNA, 19 nt, Artificial Sequence
  Description of Artificial Sequence: Synthetic oligonucleotide
auugaguacuggcucccag

SEQ ID NO: 330905 - RNA, 19 nt, Artificial Sequence
  Description of Artificial Sequence: Synthetic oligonucleotide
guuagcuuagaaaaguuua

SEQ ID NO: 330906 - RNA, 19 nt, Artificial Sequence
  Description of Artificial Sequence: Synthetic oligonucleotide
agacuagucccacucgucu

SEQ ID NO: 330907 - RNA, 19 nt, Artificial Sequence
  Description of Artificial Sequence: Synthetic oligonucleotide
guuaggucauaggaagagg

SEQ ID NO: 330908 - RNA, 19 nt, Artificial Sequence
  Description of Artificial Sequence: Synthetic oligonucleotide
aaaaugaucccaggccccu

SEQ ID NO: 330909 - RNA, 19 nt, Artificial Sequence
  Description of Artificial Sequence: Synthetic oligonucleotide
ggagagacaaggcauccag

SEQ ID NO: 330910 - RNA, 19 nt, Artificial Sequence
  Description of Artificial Sequence: Synthetic oligonucleotide
agagacacgcuacuggcau

SEQ ID NO: 330911 - RNA, 19 nt, Artificial Sequence
  Description of Artificial Sequence: Synthetic oligonucleotide
aggugguucuagaaggugg

SEQ ID NO: 330912 - RNA, 19 nt, Artificial Sequence
  Description of Artificial Sequence: Synthetic oligonucleotide
agcuguugcacuccaagaa

SEQ ID NO: 330913 - RNA, 19 nt, Artificial Sequence
  Description of Artificial Sequence: Synthetic oligonucleotide
ucaaagggguccccaggcc

SEQ ID NO: 330914 - RNA, 19 nt, Artificial Sequence
  Description of Artificial Sequence: Synthetic oligonucleotide
uuguuagcuuagaaaaguu

SEQ ID NO: 330915 - RNA, 19 nt, Artificial Sequence
  Description of Artificial Sequence: Synthetic oligonucleotide
  modified_base (3)..(3): a, c, u, g, unknown or other
aanacccagagcaugugua

SEQ ID NO: 330916 - RNA, 19 nt, Artificial Sequence
  Description of Artificial Sequence: Synthetic oligonucleotide
acgugaagcuguugcacuc

SEQ ID NO: 330917 - RNA, 19 nt, Artificial Sequence
  Description of Artificial Sequence: Synthetic oligonucleotide
caccccuucaaaagagucc

SEQ ID NO: 330918 - RNA, 19 nt, Artificial Sequence
  Description of Artificial Sequence: Synthetic oligonucleotide
uggaaucgcagagaguaga

SEQ ID NO: 330919 - RNA, 19 nt, Artificial Sequence
  Description of Artificial Sequence: Synthetic oligonucleotide
auagucggauccuuggcau

SEQ ID NO: 330920 - RNA, 19 nt, Artificial Sequence
  Description of Artificial Sequence: Synthetic oligonucleotide
aacgguuaggucauaggaa

SEQ ID NO: 330921 - RNA, 19 nt, Artificial Sequence
  Description of Artificial Sequence: Synthetic oligonucleotide
aggccagauccauuaccgc

SEQ ID NO: 330922 - RNA, 19 nt, Artificial Sequence
  Description of Artificial Sequence: Synthetic oligonucleotide
acacggguaucacccuugc

SEQ ID NO: 330923 - RNA, 19 nt, Artificial Sequence
  Description of Artificial Sequence: Synthetic oligonucleotide
aaagaguccuggggcaaag

SEQ ID NO: 330924 - RNA, 19 nt, Artificial Sequence
  Description of Artificial Sequence: Synthetic oligonucleotide
ggguucauagacccguacg

SEQ ID NO: 330925 - RNA, 19 nt, Artificial Sequence
  Description of Artificial Sequence: Synthetic oligonucleotide
agacuaggagagacaaggc

SEQ ID NO: 330926 - RNA, 19 nt, Artificial Sequence
  Description of Artificial Sequence: Synthetic oligonucleotide
gauguuagaugaagccagc

SEQ ID NO: 330927 - RNA, 19 nt, Artificial Sequence
  Description of Artificial Sequence: Synthetic oligonucleotide
cuccgggguucauagaccc

SEQ ID NO: 330928 - RNA, 19 nt, Artificial Sequence
  Description of Artificial Sequence: Synthetic oligonucleotide
uuaccgcugucccauucug

SEQ ID NO: 330929 - RNA, 19 nt, Artificial Sequence
  Description of Artificial Sequence: Synthetic oligonucleotide
cagccggaaugcaauaggc

SEQ ID NO: 330930 - RNA, 19 nt, Artificial Sequence
  Description of Artificial Sequence: Synthetic oligonucleotide
  modified_base (5)..(5): a, c, u, g, unknown or other
gaaanacccagagcaugug

SEQ ID NO: 330931 - RNA, 19 nt, Artificial Sequence
  Description of Artificial Sequence: Synthetic oligonucleotide
auuaccgcugucccauucu

SEQ ID NO: 330932 - RNA, 19 nt, Artificial Sequence
  Description of Artificial Sequence: Synthetic oligonucleotide
ugcucaccaaaacaccauc

SEQ ID NO: 330933 - RNA, 19 nt, Artificial Sequence
  Description of Artificial Sequence: Synthetic oligonucleotide
gguugaauccuguggacac

SEQ ID NO: 330934 - RNA, 19 nt, Artificial Sequence
  Description of Artificial Sequence: Synthetic oligonucleotide
ggaucagaugacgugaagc

SEQ ID NO: 330935 - RNA, 19 nt, Artificial Sequence
  Description of Artificial Sequence: Synthetic oligonucleotide
uccaaguacugugcugagg

SEQ ID NO: 330936 - RNA, 19 nt, Artificial Sequence
  Description of Artificial Sequence: Synthetic oligonucleotide
aacucuuuccugacucgag

SEQ ID NO: 330937 - RNA, 19 nt, Artificial Sequence
  Description of Artificial Sequence: Synthetic oligonucleotide
aaggcggugugggucaaag

SEQ ID NO: 330938 - RNA, 19 nt, Artificial Sequence
  Description of Artificial Sequence: Synthetic oligonucleotide
guaaugaggcuguuagcuc

SEQ ID NO: 330939 - RNA, 19 nt, Artificial Sequence
  Description of Artificial Sequence: Synthetic oligonucleotide
uccugaaugccuguccaug

SEQ ID NO: 330940 - RNA, 19 nt, Artificial Sequence
  Description of Artificial Sequence: Synthetic oligonucleotide
uacgugcccauccuugcac

SEQ ID NO: 330941 - RNA, 19 nt, Artificial Sequence
  Description of Artificial Sequence: Synthetic oligonucleotide
gguuaggucauaggaagag

SEQ ID NO: 330942 - RNA, 19 nt, Artificial Sequence
  Description of Artificial Sequence: Synthetic oligonucleotide
aguugcuaguugcugccca

SEQ ID NO: 330943 - RNA, 19 nt, Artificial Sequence
  Description of Artificial Sequence: Synthetic oligonucleotide
augacgugaagcuguugca

SEQ ID NO: 330944 - RNA, 19 nt, Artificial Sequence
  Description of Artificial Sequence: Synthetic oligonucleotide
agauagguuggcauguagu

SEQ ID NO: 330945 - RNA, 19 nt, Artificial Sequence
  Description of Artificial Sequence: Synthetic oligonucleotide
gguggaaucgcagagagua

SEQ ID NO: 330946 - RNA, 19 nt, Artificial Sequence
  Description of Artificial Sequence: Synthetic oligonucleotide
gcuguugcacuccaagaag

SEQ ID NO: 330947 - RNA, 19 nt, Artificial Sequence
  Description of Artificial Sequence: Synthetic oligonucleotide
aguaggcaagauagguugg

SEQ ID NO: 330948 - RNA, 19 nt, Artificial Sequence
  Description of Artificial Sequence: Synthetic oligonucleotide
aacacacggguaucacccu

SEQ ID NO: 330949 - RNA, 19 nt, Artificial Sequence
  Description of Artificial Sequence: Synthetic oligonucleotide
uagcuuagaaaaguuuaau

SEQ ID NO: 330950 - RNA, 19 nt, Artificial Sequence
  Description of Artificial Sequence: Synthetic oligonucleotide
ucucgaggggcuuggcuca

SEQ ID NO: 330951 - RNA, 19 nt, Artificial Sequence
  Description of Artificial Sequence: Synthetic oligonucleotide
cauagucggauccuuggca

SEQ ID NO: 330952 - RNA, 19 nt, Artificial Sequence
  Description of Artificial Sequence: Synthetic oligonucleotide
gacccguacgugcccaucc

SEQ ID NO: 330953 - RNA, 19 nt, Artificial Sequence
  Description of Artificial Sequence: Synthetic oligonucleotide
cuguugcacuccaagaaga

SEQ ID NO: 330954 - RNA, 19 nt, Artificial Sequence
  Description of Artificial Sequence: Synthetic oligonucleotide
uggcggaauuuagaacugg

SEQ ID NO: 330955 - RNA, 19 nt, Artificial Sequence
  Description of Artificial Sequence: Synthetic oligonucleotide
ugggagcaccucauauaag

SEQ ID NO: 330956 - RNA, 19 nt, Artificial Sequence
  Description of Artificial Sequence: Synthetic oligonucleotide
aggcuguuagcuccaugag

SEQ ID NO: 330957 - RNA, 19 nt, Artificial Sequence
  Description of Artificial Sequence: Synthetic oligonucleotide
aggaucagaugacgugaag

SEQ ID NO: 330958 - RNA, 19 nt, Artificial Sequence
  Description of Artificial Sequence: Synthetic oligonucleotide
cugcaucccagauuuucac

SEQ ID NO: 330959 - RNA, 19 nt, Artificial Sequence
  Description of Artificial Sequence: Synthetic oligonucleotide
aggcaagauagguuggcau

SEQ ID NO: 330960 - RNA, 19 nt, Artificial Sequence
  Description of Artificial Sequence: Synthetic oligonucleotide
ggugcccugagcauggcgg

SEQ ID NO: 330961 - RNA, 19 nt, Artificial Sequence
  Description of Artificial Sequence: Synthetic oligonucleotide
gaaguggcgggugucccag

SEQ ID NO: 330962 - RNA, 19 nt, Artificial Sequence
  Description of Artificial Sequence: Synthetic oligonucleotide
ggugucgugugguugaguc

SEQ ID NO: 330963 - RNA, 19 nt, Artificial Sequence
  Description of Artificial Sequence: Synthetic oligonucleotide
caucagcuauguacaacug

SEQ ID NO: 330964 - RNA, 19 nt, Artificial Sequence
  Description of Artificial Sequence: Synthetic oligonucleotide
uggugcccugagcauggcg

SEQ ID NO: 330965 - RNA, 19 nt, Artificial Sequence
  Description of Artificial Sequence: Synthetic oligonucleotide
gcuaacaggcagcugaaga

SEQ ID NO: 330966 - RNA, 19 nt, Artificial Sequence
  Description of Artificial Sequence: Synthetic oligonucleotide
cuucccggaugucacacuc

SEQ ID NO: 330967 - RNA, 19 nt, Artificial Sequence
  Description of Artificial Sequence: Synthetic oligonucleotide
ggcauugaguacuggcucc

SEQ ID NO: 330968 - RNA, 19 nt, Artificial Sequence
  Description of Artificial Sequence: Synthetic oligonucleotide
cuuucacgcaucugguuga

SEQ ID NO: 330969 - RNA, 19 nt, Artificial Sequence
  Description of Artificial Sequence: Synthetic oligonucleotide
agacucugaagugaccgcu

SEQ ID NO: 330970 - RNA, 19 nt, Artificial Sequence
  Description of Artificial Sequence: Synthetic oligonucleotide
uccgggguucauagacccg

SEQ ID NO: 330971 - RNA, 19 nt, Artificial Sequence
  Description of Artificial Sequence: Synthetic oligonucleotide
cauagacccguacgugccc

SEQ ID NO: 330972 - RNA, 19 nt, Artificial Sequence
  Description of Artificial Sequence: Synthetic oligonucleotide
gcagacaacgaccaucaca

SEQ ID NO: 330973 - RNA, 19 nt, Artificial Sequence
  Description of Artificial Sequence: Synthetic oligonucleotide
ugaaguggcggguguccca

SEQ ID NO: 330974 - RNA, 19 nt, Artificial Sequence
  Description of Artificial Sequence: Synthetic oligonucleotide
agguuuggcguagucgaag

SEQ ID NO: 330975 - RNA, 19 nt, Artificial Sequence
  Description of Artificial Sequence: Synthetic oligonucleotide
auagguuggcauguaguaa

SEQ ID NO: 330976 - RNA, 19 nt, Artificial Sequence
  Description of Artificial Sequence: Synthetic oligonucleotide
auaagguguggaagggcag

SEQ ID NO: 330977 - RNA, 19 nt, Artificial Sequence
  Description of Artificial Sequence: Synthetic oligonucleotide
guaggguggaauugaacua

SEQ ID NO: 330978 - RNA, 19 nt, Artificial Sequence
  Description of Artificial Sequence: Synthetic oligonucleotide
uaccgcugucccauucugc

SEQ ID NO: 330979 - RNA, 19 nt, Artificial Sequence
  Description of Artificial Sequence: Synthetic oligonucleotide
guuuggcguagucgaaggc

SEQ ID NO: 330980 - RNA, 19 nt, Artificial Sequence
  Description of Artificial Sequence: Synthetic oligonucleotide
auuccggcuccaaacagca

SEQ ID NO: 330981 - RNA, 19 nt, Artificial Sequence
  Description of Artificial Sequence: Synthetic oligonucleotide
cugggagcaccucauauaa

SEQ ID NO: 330982 - RNA, 19 nt, Artificial Sequence
  Description of Artificial Sequence: Synthetic oligonucleotide
gcugcuccgggguucauag

SEQ ID NO: 330983 - RNA, 19 nt, Artificial Sequence
  Description of Artificial Sequence: Synthetic oligonucleotide
gguucuagaagguggcaga

SEQ ID NO: 330984 - RNA, 19 nt, Artificial Sequence
  Description of Artificial Sequence: Synthetic oligonucleotide
gccggaaugcaauaggcuc

SEQ ID NO: 330985 - RNA, 19 nt, Artificial Sequence
  Description of Artificial Sequence: Synthetic oligonucleotide
agacacgcuacuggcaucu

SEQ ID NO: 330986 - RNA, 19 nt, Artificial Sequence
  Description of Artificial Sequence: Synthetic oligonucleotide
gugcagacuagucccacuc

SEQ ID NO: 330987 - RNA, 19 nt, Artificial Sequence
  Description of Artificial Sequence: Synthetic oligonucleotide
ccaaguacugugcugagga

SEQ ID NO: 330988 - RNA, 19 nt, Artificial Sequence
  Description of Artificial Sequence: Synthetic oligonucleotide
ggcguagucgaaggcaucg

SEQ ID NO: 330989 - RNA, 19 nt, Artificial Sequence
  Description of Artificial Sequence: Synthetic oligonucleotide
agggagguuuggcguaguc

SEQ ID NO: 330990 - RNA, 19 nt, Artificial Sequence
  Description of Artificial Sequence: Synthetic oligonucleotide
cacacggguaucacccuug

SEQ ID NO: 330991 - RNA, 19 nt, Artificial Sequence
  Description of Artificial Sequence: Synthetic oligonucleotide
caguugaggccacgggugc

SEQ ID NO: 330992 - RNA, 19 nt, Artificial Sequence
  Description of Artificial Sequence: Synthetic oligonucleotide
ggcggaauuuagaacuggg

SEQ ID NO: 330993 - RNA, 19 nt, Artificial Sequence
  Description of Artificial Sequence: Synthetic oligonucleotide
gguaucacccuugccagug

SEQ ID NO: 330994 - RNA, 19 nt, Artificial Sequence
  Description of Artificial Sequence: Synthetic oligonucleotide
aaaugaucccaggccccug

SEQ ID NO: 330995 - RNA, 19 nt, Artificial Sequence
  Description of Artificial Sequence: Synthetic oligonucleotide
gaaucgcagagaguagauc

SEQ ID NO: 330996 - RNA, 19 nt, Artificial Sequence
  Description of Artificial Sequence: Synthetic oligonucleotide
gcggaauuuagaacugggg

SEQ ID NO: 330997 - RNA, 19 nt, Artificial Sequence
  Description of Artificial Sequence: Synthetic oligonucleotide
auauaagaacacacgggua

SEQ ID NO: 330998 - RNA, 19 nt, Artificial Sequence
  Description of Artificial Sequence: Synthetic oligonucleotide
cucgaggcagccggaaugc

SEQ ID NO: 330999 - RNA, 19 nt, Artificial Sequence
  Description of Artificial Sequence: Synthetic oligonucleotide
agccacaugcagccgauua

SEQ ID NO: 331000 - RNA, 19 nt, Artificial Sequence
  Description of Artificial Sequence: Synthetic oligonucleotide
auguguaggcugguuguug

SEQ ID NO: 331001 - RNA, 19 nt, Artificial Sequence
  Description of Artificial Sequence: Synthetic oligonucleotide
cagcugacguucacuucgg

SEQ ID NO: 331002 - RNA, 19 nt, Artificial Sequence
  Description of Artificial Sequence: Synthetic oligonucleotide
gcuguaaacucaguagcug

SEQ ID NO: 331003 - RNA, 19 nt, Artificial Sequence
  Description of Artificial Sequence: Synthetic oligonucleotide
cucgauuccccagcuuugc

SEQ ID NO: 331004 - RNA, 19 nt, Artificial Sequence
  Description of Artificial Sequence: Synthetic oligonucleotide
gugucgugugguugagucc

SEQ ID NO: 331005 - RNA, 19 nt, Artificial Sequence
  Description of Artificial Sequence: Synthetic oligonucleotide
gcaucagcuauguacaacu

SEQ ID NO: 331006 - RNA, 19 nt, Artificial Sequence
  Description of Artificial Sequence: Synthetic oligonucleotide
ugagaggcuuugguucuug

SEQ ID NO: 331007 - RNA, 19 nt, Artificial Sequence
  Description of Artificial Sequence: Synthetic oligonucleotide
ugcuaacaggcagcugaag

SEQ ID NO: 331008 - RNA, 19 nt, Artificial Sequence
  Description of Artificial Sequence: Synthetic oligonucleotide
aaugcgggcuccacggcaa

SEQ ID NO: 331009 - RNA, 19 nt, Artificial Sequence
  Description of Artificial Sequence: Synthetic oligonucleotide
aagcaccaggccaguauca

SEQ ID NO: 331010 - RNA, 19 nt, Artificial Sequence
  Description of Artificial Sequence: Synthetic oligonucleotide
ccaagcuaaagaucugguc

SEQ ID NO: 331011 - RNA, 19 nt, Artificial Sequence
  Description of Artificial Sequence: Synthetic oligonucleotide
gguuggcccagagacacgc

SEQ ID NO: 331012 - RNA, 19 nt, Artificial Sequence
  Description of Artificial Sequence: Synthetic oligonucleotide
guucacuucggcugucaaa

SEQ ID NO: 331013 - RNA, 19 nt, Artificial Sequence
  Description of Artificial Sequence: Synthetic oligonucleotide
auggcggaauuuagaacug

SEQ ID NO: 331014 - RNA, 19 nt, Artificial Sequence
  Description of Artificial Sequence: Synthetic oligonucleotide
uagucggauccuuggcauc

SEQ ID NO: 331015 - RNA, 19 nt, Artificial Sequence
  Description of Artificial Sequence: Synthetic oligonucleotide
guggaaucgcagagaguag

SEQ ID NO: 331016 - RNA, 19 nt, Artificial Sequence
  Description of Artificial Sequence: Synthetic oligonucleotide
auagacccguacgugccca

SEQ ID NO: 331017 - RNA, 19 nt, Artificial Sequence
  Description of Artificial Sequence: Synthetic oligonucleotide
acuucccggaugucacacu

SEQ ID NO: 331018 - RNA, 19 nt, Artificial Sequence
  Description of Artificial Sequence: Synthetic oligonucleotide
augcagccgauuagcacag

SEQ ID NO: 331019 - RNA, 19 nt, Artificial Sequence
  Description of Artificial Sequence: Synthetic oligonucleotide
aagugaccgcugacugggg

SEQ ID NO: 331020 - RNA, 19 nt, Artificial Sequence
  Description of Artificial Sequence: Synthetic oligonucleotide
agccggaaugcaauaggcu

SEQ ID NO: 331021 - RNA, 19 nt, Artificial Sequence
  Description of Artificial Sequence: Synthetic oligonucleotide
ucgcagagaguagaucuuu

SEQ ID NO: 331022 - RNA, 19 nt, Artificial Sequence
  Description of Artificial Sequence: Synthetic oligonucleotide
agacaacgaccaucacaca

SEQ ID NO: 331023 - RNA, 19 nt, Artificial Sequence
  Description of Artificial Sequence: Synthetic oligonucleotide
gccagauccauuaccgcug

SEQ ID NO: 331024 - RNA, 19 nt, Artificial Sequence
  Description of Artificial Sequence: Synthetic oligonucleotide
gccgauuagcacagaagcc

SEQ ID NO: 331025 - RNA, 19 nt, Artificial Sequence
  Description of Artificial Sequence: Synthetic oligonucleotide
ggggcacccgccauagucg

SEQ ID NO: 331026 - RNA, 19 nt, Artificial Sequence
  Description of Artificial Sequence: Synthetic oligonucleotide
auaugcuaacaggcagcug

SEQ ID NO: 331027 - RNA, 19 nt, Artificial Sequence
  Description of Artificial Sequence: Synthetic oligonucleotide
ccgauuagcacagaagcca

SEQ ID NO: 331028 - RNA, 19 nt, Artificial Sequence
  Description of Artificial Sequence: Synthetic oligonucleotide
cagagacacgcuacuggca

SEQ ID NO: 331029 - RNA, 19 nt, Artificial Sequence
  Description of Artificial Sequence: Synthetic oligonucleotide
aggagagacaaggcaucca

SEQ ID NO: 331030 - RNA, 19 nt, Artificial Sequence
  Description of Artificial Sequence: Synthetic oligonucleotide
ccauagucggauccuuggc

SEQ ID NO: 331031 - RNA, 19 nt, Artificial Sequence
  Description of Artificial Sequence: Synthetic oligonucleotide
acacacggguaucacccuu

SEQ ID NO: 331032 - RNA, 19 nt, Artificial Sequence
  Description of Artificial Sequence: Synthetic oligonucleotide
ucgaaggcaucgggcaaac

SEQ ID NO: 331033 - RNA, 19 nt, Artificial Sequence
  Description of Artificial Sequence: Synthetic oligonucleotide
uucggcugucaaagccaga

SEQ ID NO: 331034 - RNA, 19 nt, Artificial Sequence
  Description of Artificial Sequence: Synthetic oligonucleotide
uuagcuccaugagacccuu

SEQ ID NO: 331035 - RNA, 19 nt, Artificial Sequence
  Description of Artificial Sequence: Synthetic oligonucleotide
gaggaucagaugacgugaa

SEQ ID NO: 331036 - RNA, 19 nt, Artificial Sequence
  Description of Artificial Sequence: Synthetic oligonucleotide
auccaggguuggcccagag

SEQ ID NO: 331037 - RNA, 19 nt, Artificial Sequence
  Description of Artificial Sequence: Synthetic oligonucleotide
cacggguaucacccuugcc

SEQ ID NO: 331038 - RNA, 19 nt, Artificial Sequence
  Description of Artificial Sequence: Synthetic oligonucleotide
cacuggugucauaugcuaa

SEQ ID NO: 331039 - RNA, 19 nt, Artificial Sequence
  Description of Artificial Sequence: Synthetic oligonucleotide
cacccuugccagugagaag

SEQ ID NO: 331040 - RNA, 19 nt, Artificial Sequence
  Description of Artificial Sequence: Synthetic oligonucleotide
gguugagucccuuaagguu

SEQ ID NO: 331041 - RNA, 19 nt, Artificial Sequence
  Description of Artificial Sequence: Synthetic oligonucleotide
cauaugcuaacaggcagcu

SEQ ID NO: 331042 - RNA, 19 nt, Artificial Sequence
  Description of Artificial Sequence: Synthetic oligonucleotide
guacgugcccauccuugca

SEQ ID NO: 331043 - RNA, 19 nt, Artificial Sequence
  Description of Artificial Sequence: Synthetic oligonucleotide
acgggugccuggugugcag

SEQ ID NO: 331044 - RNA, 19 nt, Artificial Sequence
  Description of Artificial Sequence: Synthetic oligonucleotide
cugacuggggcugguacca

SEQ ID NO: 331045 - RNA, 19 nt, Artificial Sequence
  Description of Artificial Sequence: Synthetic oligonucleotide
acggcaaccuucagguccu

SEQ ID NO: 331046 - RNA, 19 nt, Artificial Sequence
  Description of Artificial Sequence: Synthetic oligonucleotide
acccguacgugcccauccu

SEQ ID NO: 331047 - RNA, 19 nt, Artificial Sequence
  Description of Artificial Sequence: Synthetic oligonucleotide
caguugcuaguugcugccc

SEQ ID NO: 331048 - RNA, 19 nt, Artificial Sequence
  Description of Artificial Sequence: Synthetic oligonucleotide
gggcacccgccauagucgg

SEQ ID NO: 331049 - RNA, 19 nt, Artificial Sequence
  Description of Artificial Sequence: Synthetic oligonucleotide
cacacaaugcgggcuccac

SEQ ID NO: 331050 - RNA, 19 nt, Artificial Sequence
  Description of Artificial Sequence: Synthetic oligonucleotide
agguuggcauguaguaacu

SEQ ID NO: 331051 - RNA, 19 nt, Artificial Sequence
  Description of Artificial Sequence: Synthetic oligonucleotide
ccagagcauguguaggcug

SEQ ID NO: 331052 - RNA, 19 nt, Artificial Sequence
  Description of Artificial Sequence: Synthetic oligonucleotide
cccgccacugcugagcagg

SEQ ID NO: 331053 - RNA, 19 nt, Artificial Sequence
  Description of Artificial Sequence: Synthetic oligonucleotide
cuggugucauaugcuaaca

SEQ ID NO: 331054 - RNA, 19 nt, Artificial Sequence
  Description of Artificial Sequence: Synthetic oligonucleotide
gguuggcauguaguaacug

SEQ ID NO: 331055 - RNA, 19 nt, Artificial Sequence
  Description of Artificial Sequence: Synthetic oligonucleotide
agacccguacgugcccauc

SEQ ID NO: 331056 - RNA, 19 nt, Artificial Sequence
  Description of Artificial Sequence: Synthetic oligonucleotide
uuccggcuccaaacagcac

SEQ ID NO: 331057 - RNA, 19 nt, Artificial Sequence
  Description of Artificial Sequence: Synthetic oligonucleotide
ggcagccggaaugcaauag

SEQ ID NO: 331058 - RNA, 19 nt, Artificial Sequence
  Description of Artificial Sequence: Synthetic oligonucleotide
guaucacccuugccaguga

SEQ ID NO: 331059 - RNA, 19 nt, Artificial Sequence
  Description of Artificial Sequence: Synthetic oligonucleotide
gcugaaguggcgggugucc

SEQ ID NO: 331060 - RNA, 19 nt, Artificial Sequence
  Description of Artificial Sequence: Synthetic oligonucleotide
ugcugaaguggcggguguc

SEQ ID NO: 331061 - RNA, 19 nt, Artificial Sequence
  Description of Artificial Sequence: Synthetic oligonucleotide
gcauugaguacuggcuccc

SEQ ID NO: 331062 - RNA, 19 nt, Artificial Sequence
  Description of Artificial Sequence: Synthetic oligonucleotide
guacugugcugaggauggg

SEQ ID NO: 331063 - RNA, 19 nt, Artificial Sequence
  Description of Artificial Sequence: Synthetic oligonucleotide
augcgaacgguuaggucau

SEQ ID NO: 331064 - RNA, 19 nt, Artificial Sequence
  Description of Artificial Sequence: Synthetic oligonucleotide
cagagacauaaggugugga

SEQ ID NO: 331065 - RNA, 19 nt, Artificial Sequence
  Description of Artificial Sequence: Synthetic oligonucleotide
ccguacgugcccauccuug

SEQ ID NO: 331066 - RNA, 19 nt, Artificial Sequence
  Description of Artificial Sequence: Synthetic oligonucleotide
uagggguacagggcugcuc

SEQ ID NO: 331067 - RNA, 19 nt, Artificial Sequence
  Description of Artificial Sequence: Synthetic oligonucleotide
cccuuaugaggaucagaug

SEQ ID NO: 331068 - RNA, 19 nt, Artificial Sequence
  Description of Artificial Sequence: Synthetic oligonucleotide
gcauguguaggcugguugu

SEQ ID NO: 331069 - RNA, 19 nt, Artificial Sequence
  Description of Artificial Sequence: Synthetic oligonucleotide
aucgcagagaguagaucuu

SEQ ID NO: 331070 - RNA, 19 nt, Artificial Sequence
  Description of Artificial Sequence: Synthetic oligonucleotide
ggguacagggcugcuccgg

SEQ ID NO: 331071 - RNA, 19 nt, Artificial Sequence
  Description of Artificial Sequence: Synthetic oligonucleotide
cuguguccgggaacacauc

SEQ ID NO: 331072 - RNA, 19 nt, Artificial Sequence
  Description of Artificial Sequence: Synthetic oligonucleotide
aggaaacccagggcuccug

SEQ ID NO: 331073 - RNA, 19 nt, Artificial Sequence
  Description of Artificial Sequence: Synthetic oligonucleotide
aacgaccaucacacaccca

SEQ ID NO: 331074 - RNA, 19 nt, Artificial Sequence
  Description of Artificial Sequence: Synthetic oligonucleotide
aucacccuugccagugaga

SEQ ID NO: 331075 - RNA, 19 nt, Artificial Sequence
  Description of Artificial Sequence: Synthetic oligonucleotide
gacuagucccacucgucuu

SEQ ID NO: 331076 - RNA, 19 nt, Artificial Sequence
  Description of Artificial Sequence: Synthetic oligonucleotide
gcgaacgguuaggucauag

SEQ ID NO: 331077 - RNA, 19 nt, Artificial Sequence
  Description of Artificial Sequence: Synthetic oligonucleotide
gcugcaucccagauuuuca

SEQ ID NO: 331078 - RNA, 19 nt, Artificial Sequence
  Description of Artificial Sequence: Synthetic oligonucleotide
cguacgugcccauccuugc

SEQ ID NO: 331079 - RNA, 19 nt, Artificial Sequence
  Description of Artificial Sequence: Synthetic oligonucleotide
augcuaacaggcagcugaa

SEQ ID NO: 331080 - RNA, 19 nt, Artificial Sequence
  Description of Artificial Sequence: Synthetic oligonucleotide
ucgaggcagccggaaugca

SEQ ID NO: 331081 - RNA, 19 nt, Artificial Sequence
  Description of Artificial Sequence: Synthetic oligonucleotide
gcagccgauuagcacagaa

SEQ ID NO: 331082 - RNA, 19 nt, Artificial Sequence
  Description of Artificial Sequence: Synthetic oligonucleotide
acguucacuucggcuguca

SEQ ID NO: 331083 - RNA, 19 nt, Artificial Sequence
  Description of Artificial Sequence: Synthetic oligonucleotide
uagacccguacgugcccau

SEQ ID NO: 331084 - RNA, 19 nt, Artificial Sequence
  Description of Artificial Sequence: Synthetic oligonucleotide
gcgggugucccagaguuuc

SEQ ID NO: 331085 - RNA, 19 nt, Artificial Sequence
  Description of Artificial Sequence: Synthetic oligonucleotide
gcagacuagucccacucgu

SEQ ID NO: 331086 - RNA, 19 nt, Artificial Sequence
  Description of Artificial Sequence: Synthetic oligonucleotide
gcccuuaugaggaucagau

SEQ ID NO: 331087 - RNA, 19 nt, Artificial Sequence
  Description of Artificial Sequence: Synthetic oligonucleotide
caggugucgugugguugag

SEQ ID NO: 331088 - RNA, 19 nt, Artificial Sequence
  Description of Artificial Sequence: Synthetic oligonucleotide
cauugaguacuggcuccca

SEQ ID NO: 331089 - RNA, 19 nt, Artificial Sequence
  Description of Artificial Sequence: Synthetic oligonucleotide
augcugugucaggcaggcg

SEQ ID NO: 331090 - RNA, 19 nt, Artificial Sequence
  Description of Artificial Sequence: Synthetic oligonucleotide
gccacugcugagcaggggu

SEQ ID NO: 331091 - RNA, 19 nt, Artificial Sequence
  Description of Artificial Sequence: Synthetic oligonucleotide
ccggcuccaaacagcacuc

SEQ ID NO: 331092 - RNA, 19 nt, Artificial Sequence
  Description of Artificial Sequence: Synthetic oligonucleotide
gacguucacuucggcuguc

SEQ ID NO: 331093 - RNA, 19 nt, Artificial Sequence
  Description of Artificial Sequence: Synthetic oligonucleotide
caagauagguuggcaugua

SEQ ID NO: 331094 - RNA, 19 nt, Artificial Sequence
  Description of Artificial Sequence: Synthetic oligonucleotide
gacucgaggcagccggaau

SEQ ID NO: 331095 - RNA, 19 nt, Artificial Sequence
  Description of Artificial Sequence: Synthetic oligonucleotide
ggugugcagacuaguccca

SEQ ID NO: 331096 - RNA, 19 nt, Artificial Sequence
  Description of Artificial Sequence: Synthetic oligonucleotide
cacuguaaugaggcuguua

SEQ ID NO: 331097 - RNA, 19 nt, Artificial Sequence
  Description of Artificial Sequence: Synthetic oligonucleotide
cagaugcgaacgguuaggu

SEQ ID NO: 331098 - RNA, 19 nt, Artificial Sequence
  Description of Artificial Sequence: Synthetic oligonucleotide
aggugucgugugguugagu

SEQ ID NO: 331099 - RNA, 19 nt, Artificial Sequence
  Description of Artificial Sequence: Synthetic oligonucleotide
ccuuaagguuggugauaug

SEQ ID NO: 331100 - RNA, 19 nt, Artificial Sequence
  Description of Artificial Sequence: Synthetic oligonucleotide
ccacuggugucauaugcua

SEQ ID NO: 331101 - RNA, 19 nt, Artificial Sequence
  Description of Artificial Sequence: Synthetic oligonucleotide
caaguacugugcugaggau

SEQ ID NO: 331102 - RNA, 19 nt, Artificial Sequence
  Description of Artificial Sequence: Synthetic oligonucleotide
ucgugugguugagucccuu

SEQ ID NO: 331103 - RNA, 19 nt, Artificial Sequence
  Description of Artificial Sequence: Synthetic oligonucleotide
ugcagccgauuagcacaga

SEQ ID NO: 331104 - RNA, 19 nt, Artificial Sequence
  Description of Artificial Sequence: Synthetic oligonucleotide
ggaaugcaauaggcuccag

SEQ ID NO: 331105 - RNA, 19 nt, Artificial Sequence
  Description of Artificial Sequence: Synthetic oligonucleotide
cacccgccauagucggauc

SEQ ID NO: 331106 - RNA, 19 nt, Artificial Sequence
  Description of Artificial Sequence: Synthetic oligonucleotide
ucgaggggcuuggcucacu

SEQ ID NO: 331107 - RNA, 19 nt, Artificial Sequence
  Description of Artificial Sequence: Synthetic oligonucleotide
  modified_base (8)..(8): a, c, u, g, unknown or other
gcugaaanacccagagcau

SEQ ID NO: 331108 - RNA, 19 nt, Artificial Sequence
  Description of Artificial Sequence: Synthetic oligonucleotide
gcccagagacacgcuacug

SEQ ID NO: 331109 - RNA, 19 nt, Artificial Sequence
  Description of Artificial Sequence: Synthetic oligonucleotide
cucgaggggcuuggcucac

SEQ ID NO: 331110 - RNA, 19 nt, Artificial Sequence
  Description of Artificial Sequence: Synthetic oligonucleotide
ggaaucgcagagaguagau

SEQ ID NO: 331111 - RNA, 19 nt, Artificial Sequence
  Description of Artificial Sequence: Synthetic oligonucleotide
ggcaaagggucuucucgau

SEQ ID NO: 331112 - RNA, 19 nt, Artificial Sequence
  Description of Artificial Sequence: Synthetic oligonucleotide
cgcugacuggggcugguac

SEQ ID NO: 331113 - RNA, 19 nt, Artificial Sequence
  Description of Artificial Sequence: Synthetic oligonucleotide
cacgggugccuggugugca

SEQ ID NO: 331114 - RNA, 19 nt, Artificial Sequence
  Description of Artificial Sequence: Synthetic oligonucleotide
gggguggugagaacauucu

SEQ ID NO: 331115 - RNA, 19 nt, Artificial Sequence
  Description of Artificial Sequence: Synthetic oligonucleotide
accgcugacuggggcuggu

SEQ ID NO: 331116 - RNA, 19 nt, Artificial Sequence
  Description of Artificial Sequence: Synthetic oligonucleotide
guguaggcugguuguuguu

SEQ ID NO: 331117 - RNA, 19 nt, Artificial Sequence
  Description of Artificial Sequence: Synthetic oligonucleotide
ugcgaacgguuaggucaua

SEQ ID NO: 331118 - RNA, 19 nt, Artificial Sequence
  Description of Artificial Sequence: Synthetic oligonucleotide
guggcgggugucccagagu

SEQ ID NO: 331119 - RNA, 19 nt, Artificial Sequence
  Description of Artificial Sequence: Synthetic oligonucleotide
cauguguaggcugguuguu

SEQ ID NO: 331120 - RNA, 19 nt, Artificial Sequence
  Description of Artificial Sequence: Synthetic oligonucleotide
ggggcccacaccacuguaa

SEQ ID NO: 331121 - RNA, 19 nt, Artificial Sequence
  Description of Artificial Sequence: Synthetic oligonucleotide
cgauuagcacagaagccau

SEQ ID NO: 331122 - RNA, 19 nt, Artificial Sequence
  Description of Artificial Sequence: Synthetic oligonucleotide
cggaaugcaauaggcucca

SEQ ID NO: 331123 - RNA, 19 nt, Artificial Sequence
  Description of Artificial Sequence: Synthetic oligonucleotide
guagggguacagggcugcu

SEQ ID NO: 331124 - RNA, 19 nt, Artificial Sequence
  Description of Artificial Sequence: Synthetic oligonucleotide
ccagauccauuaccgcugu

SEQ ID NO: 331125 - RNA, 19 nt, Artificial Sequence
  Description of Artificial Sequence: Synthetic oligonucleotide
gcacccgccauagucggau

SEQ ID NO: 331126 - RNA, 19 nt, Artificial Sequence
  Description of Artificial Sequence: Synthetic oligonucleotide
ccgggguucauagacccgu

SEQ ID NO: 331127 - RNA, 19 nt, Artificial Sequence
  Description of Artificial Sequence: Synthetic oligonucleotide
gcccgccacugcugagcag

SEQ ID NO: 331128 - RNA, 19 nt, Artificial Sequence
  Description of Artificial Sequence: Synthetic oligonucleotide
ggguggaauugaacuacuu

SEQ ID NO: 331129 - RNA, 19 nt, Artificial Sequence
  Description of Artificial Sequence: Synthetic oligonucleotide
gucgugugguugagucccu

SEQ ID NO: 331130 - RNA, 19 nt, Artificial Sequence
  Description of Artificial Sequence: Synthetic oligonucleotide
cgugugguugagucccuua

SEQ ID NO: 331131 - RNA, 19 nt, Artificial Sequence
  Description of Artificial Sequence: Synthetic oligonucleotide
caaggcggugugggucaaa

SEQ ID NO: 331132 - RNA, 19 nt, Artificial Sequence
  Description of Artificial Sequence: Synthetic oligonucleotide
ggguggaaucgcagagagu

SEQ ID NO: 331133 - RNA, 19 nt, Artificial Sequence
  Description of Artificial Sequence: Synthetic oligonucleotide
ggcacccgccauagucgga

SEQ ID NO: 331134 - RNA, 19 nt, Artificial Sequence
  Description of Artificial Sequence: Synthetic oligonucleotide
cccgccauagucggauccu

SEQ ID NO: 331135 - RNA, 19 nt, Artificial Sequence
  Description of Artificial Sequence: Synthetic oligonucleotide
cccggaugucacacucagu

SEQ ID NO: 331136 - RNA, 19 nt, Artificial Sequence
  Description of Artificial Sequence: Synthetic oligonucleotide
ggccaguaucagggucaua

SEQ ID NO: 331137 - RNA, 19 nt, Artificial Sequence
  Description of Artificial Sequence: Synthetic oligonucleotide
cccguacgugcccauccuu

SEQ ID NO: 331138 - RNA, 19 nt, Artificial Sequence
  Description of Artificial Sequence: Synthetic oligonucleotide
ccauuaccgcugucccauu

SEQ ID NO: 331139 - RNA, 19 nt, Artificial Sequence
  Description of Artificial Sequence: Synthetic oligonucleotide
ccgccauagucggauccuu

SEQ ID NO: 331140 - RNA, 19 nt, Artificial Sequence
  Description of Artificial Sequence: Synthetic oligonucleotide
ccgcugacuggggcuggua

SEQ ID NO: 331141 - RNA, 19 nt, Artificial Sequence
  Description of Artificial Sequence: Synthetic oligonucleotide
ccggguggucucugcuguu

SEQ ID NO: 331142 - RNA, 19 nt, Artificial Sequence
  Description of Artificial Sequence: Synthetic oligonucleotide
ccacuguaaugaggcuguu

SEQ ID NO: 331143 - RNA, 19 nt, Artificial Sequence
  Description of Artificial Sequence: Synthetic oligonucleotide
  modified_base (1)..(1): a, c, u, g, unknown or other
nacccagagcauguguagg

SEQ ID NO: 331144 - RNA, 19 nt, Artificial Sequence
  Description of Artificial Sequence: Synthetic oligonucleotide
aauguuagugguuaggacc

SEQ ID NO: 331145 - RNA, 19 nt, Artificial Sequence
  Description of Artificial Sequence: Synthetic oligonucleotide
aaagagauuacaaagacuc

SEQ ID NO: 331146 - RNA, 19 nt, Artificial Sequence
  Description of Artificial Sequence: Synthetic oligonucleotide
aaucaagugucuuagcccc

SEQ ID NO: 331147 - RNA, 19 nt, Artificial Sequence
  Description of Artificial Sequence: Synthetic oligonucleotide
uuaauugguauucacaucc

SEQ ID NO: 331148 - RNA, 19 nt, Artificial Sequence
  Description of Artificial Sequence: Synthetic oligonucleotide
aauaguugucccuaauugc

SEQ ID NO: 331149 - RNA, 19 nt, Artificial Sequence
  Description of Artificial Sequence: Synthetic oligonucleotide
aaaugaaccggguaguggc

SEQ ID NO: 331150 - RNA, 19 nt, Artificial Sequence
  Description of Artificial Sequence: Synthetic oligonucleotide
acauccauaaucuaaaauc

SEQ ID NO: 331151 - RNA, 19 nt, Artificial Sequence
  Description of Artificial Sequence: Synthetic oligonucleotide
aaagacuccuucuaaugcc

SEQ ID NO: 331152 - RNA, 19 nt, Artificial Sequence
  Description of Artificial Sequence: Synthetic oligonucleotide
ucuaaauuaaggcauauuc

SEQ ID NO: 331153 - RNA, 19 nt, Artificial Sequence
  Description of Artificial Sequence: Synthetic oligonucleotide
ugauacauaacaauuuucc

SEQ ID NO: 331154 - RNA, 19 nt, Artificial Sequence
  Description of Artificial Sequence: Synthetic oligonucleotide
uuugauuauaaaaugcagc

SEQ ID NO: 331155 - RNA, 19 nt, Artificial Sequence
  Description of Artificial Sequence: Synthetic oligonucleotide
aaauaguugucccuaauug

SEQ ID NO: 331156 - RNA, 19 nt, Artificial Sequence
  Description of Artificial Sequence: Synthetic oligonucleotide
guaauuaauaugcagauuc

SEQ ID NO: 331157 - RNA, 19 nt, Artificial Sequence
  Description of Artificial Sequence: Synthetic oligonucleotide
auugcaaauaaaugaaccg

SEQ ID NO: 331158 - RNA, 19 nt, Artificial Sequence
  Description of Artificial Sequence: Synthetic oligonucleotide
uuaaucaagugucuuagcc

SEQ ID NO: 331159 - RNA, 19 nt, Artificial Sequence
  Description of Artificial Sequence: Synthetic oligonucleotide
aagauaaaaccuuguuacc

SEQ ID NO: 331160 - RNA, 19 nt, Artificial Sequence
  Description of Artificial Sequence: Synthetic oligonucleotide
aagcuuacacgcuacauuc

SEQ ID NO: 331161 - RNA, 19 nt, Artificial Sequence
  Description of Artificial Sequence: Synthetic oligonucleotide
auuguauaaacauaugcug

SEQ ID NO: 331162 - RNA, 19 nt, Artificial Sequence
  Description of Artificial Sequence: Synthetic oligonucleotide
auaaaaggagcauucacuc

SEQ ID NO: 331163 - RNA, 19 nt, Artificial Sequence
  Description of Artificial Sequence: Synthetic oligonucleotide
uuguuuaccaaccaggaga

SEQ ID NO: 331164 - RNA, 19 nt, Artificial Sequence
  Description of Artificial Sequence: Synthetic oligonucleotide
aauuuggucagacuccuag

SEQ ID NO: 331165 - RNA, 19 nt, Artificial Sequence
  Description of Artificial Sequence: Synthetic oligonucleotide
ugcaaauaaaugaaccggg

SEQ ID NO: 331166 - RNA, 19 nt, Artificial Sequence
  Description of Artificial Sequence: Synthetic oligonucleotide
ucuaaguuaauuaccaggu

SEQ ID NO: 331167 - RNA, 19 nt, Artificial Sequence
  Description of Artificial Sequence: Synthetic oligonucleotide
uuaaaaccaaugaaggagc

SEQ ID NO: 331168 - RNA, 19 nt, Artificial Sequence
  Description of Artificial Sequence: Synthetic oligonucleotide
aagaauucugaccuuuggg

SEQ ID NO: 331169 - RNA, 19 nt, Artificial Sequence
  Description of Artificial Sequence: Synthetic oligonucleotide
uuuaauuuggucagacucc

SEQ ID NO: 331170 - RNA, 19 nt, Artificial Sequence
  Description of Artificial Sequence: Synthetic oligonucleotide
ucaauugagccuucaaugg

SEQ ID NO: 331171 - RNA, 19 nt, Artificial Sequence
  Description of Artificial Sequence: Synthetic oligonucleotide
uuuaaauggcucaaauugc

SEQ ID NO: 331172 - RNA, 19 nt, Artificial Sequence
  Description of Artificial Sequence: Synthetic oligonucleotide
ugaaauuacgcuccuaaca

SEQ ID NO: 331173 - RNA, 19 nt, Artificial Sequence
  Description of Artificial Sequence: Synthetic oligonucleotide
auucacucaaacuuaauug

SEQ ID NO: 331174 - RNA, 19 nt, Artificial Sequence
  Description of Artificial Sequence: Synthetic oligonucleotide
aaaagugaaucacuugcag

SEQ ID NO: 331175 - RNA, 19 nt, Artificial Sequence
  Description of Artificial Sequence: Synthetic oligonucleotide
aauauuuaugauaugcuca

SEQ ID NO: 331176 - RNA, 19 nt, Artificial Sequence
  Description of Artificial Sequence: Synthetic oligonucleotide
aaagaauucugaccuuugg

SEQ ID NO: 331177 - RNA, 19 nt, Artificial Sequence
  Description of Artificial Sequence: Synthetic oligonucleotide
cuauaugcaacaaccaugc

SEQ ID NO: 331178 - RNA, 19 nt, Artificial Sequence
  Description of Artificial Sequence: Synthetic oligonucleotide
aacuacauuagcuuuccug

SEQ ID NO: 331179 - RNA, 19 nt, Artificial Sequence
  Description of Artificial Sequence: Synthetic oligonucleotide
uaaguuaauuaccagguaa

SEQ ID NO: 331180 - RNA, 19 nt, Artificial Sequence
  Description of Artificial Sequence: Synthetic oligonucleotide
uuuaugauaugcucaaugu

SEQ ID NO: 331181 - RNA, 19 nt, Artificial Sequence
  Description of Artificial Sequence: Synthetic oligonucleotide
ucuaagaaccagaguaugg

SEQ ID NO: 331182 - RNA, 19 nt, Artificial Sequence
  Description of Artificial Sequence: Synthetic oligonucleotide
uguauaaacauaugcuggc

SEQ ID NO: 331183 - RNA, 19 nt, Artificial Sequence
  Description of Artificial Sequence: Synthetic oligonucleotide
ugugauagagaagacacag

SEQ ID NO: 331184 - RNA, 19 nt, Artificial Sequence
  Description of Artificial Sequence: Synthetic oligonucleotide
guaguuaacauuccacugg

SEQ ID NO: 331185 - RNA, 19 nt, Artificial Sequence
  Description of Artificial Sequence: Synthetic oligonucleotide
augaguacacauuuagaac

SEQ ID NO: 331186 - RNA, 19 nt, Artificial Sequence
  Description of Artificial Sequence: Synthetic oligonucleotide
aaauguuagaguaauuuca

SEQ ID NO: 331187 - RNA, 19 nt, Artificial Sequence
  Description of Artificial Sequence: Synthetic oligonucleotide
uguuagaguaauuucaguc

SEQ ID NO: 331188 - RNA, 19 nt, Artificial Sequence
  Description of Artificial Sequence: Synthetic oligonucleotide
uugcaaauaaaugaaccgg

SEQ ID NO: 331189 - RNA, 19 nt, Artificial Sequence
  Description of Artificial Sequence: Synthetic oligonucleotide
uuagugauacauaacaauu

SEQ ID NO: 331190 - RNA, 19 nt, Artificial Sequence
  Description of Artificial Sequence: Synthetic oligonucleotide
acuacauuagcuuuccuga

SEQ ID NO: 331191 - RNA, 19 nt, Artificial Sequence
  Description of Artificial Sequence: Synthetic oligonucleotide
acagcagaguuccugaacg

SEQ ID NO: 331192 - RNA, 19 nt, Artificial Sequence
  Description of Artificial Sequence: Synthetic oligonucleotide
aauguuagaguaauuucag

SEQ ID NO: 331193 - RNA, 19 nt, Artificial Sequence
  Description of Artificial Sequence: Synthetic oligonucleotide
acagguacaguacucauug

SEQ ID NO: 331194 - RNA, 19 nt, Artificial Sequence
  Description of Artificial Sequence: Synthetic oligonucleotide
uaugaaauaaguugagcuc

SEQ ID NO: 331195 - RNA, 19 nt, Artificial Sequence
  Description of Artificial Sequence: Synthetic oligonucleotide
cuuugauuauaaaaugcag

SEQ ID NO: 331196 - RNA, 19 nt, Artificial Sequence
  Description of Artificial Sequence: Synthetic oligonucleotide
aguuuuacuauaugcaaca

SEQ ID NO: 331197 - RNA, 19 nt, Artificial Sequence
  Description of Artificial Sequence: Synthetic oligonucleotide
ucugguaacuucauguaca

SEQ ID NO: 331198 - RNA, 19 nt, Artificial Sequence
  Description of Artificial Sequence: Synthetic oligonucleotide
uuuagugauacauaacaau

SEQ ID NO: 331199 - RNA, 19 nt, Artificial Sequence
  Description of Artificial Sequence: Synthetic oligonucleotide
uucauguuaaccuuaggaa

SEQ ID NO: 331200 - RNA, 19 nt, Artificial Sequence
  Description of Artificial Sequence: Synthetic oligonucleotide
auuggcucgaguuuuagca

SEQ ID NO: 331201 - RNA, 19 nt, Artificial Sequence
  Description of Artificial Sequence: Synthetic oligonucleotide
aaagugaaucacuugcaga

SEQ ID NO: 331202 - RNA, 19 nt, Artificial Sequence
  Description of Artificial Sequence: Synthetic oligonucleotide
agggaaaugucucaaagca

SEQ ID NO: 331203 - RNA, 19 nt, Artificial Sequence
  Description of Artificial Sequence: Synthetic oligonucleotide
uaaucaagugucuuagccc

SEQ ID NO: 331204 - RNA, 19 nt, Artificial Sequence
  Description of Artificial Sequence: Synthetic oligonucleotide
acuuaauugguauucacau

SEQ ID NO: 331205 - RNA, 19 nt, Artificial Sequence
  Description of Artificial Sequence: Synthetic oligonucleotide
auuacucucaguuuuacua

SEQ ID NO: 331206 - RNA, 19 nt, Artificial Sequence
  Description of Artificial Sequence: Synthetic oligonucleotide
ugcagaaagugauuacugg

SEQ ID NO: 331207 - RNA, 19 nt, Artificial Sequence
  Description of Artificial Sequence: Synthetic oligonucleotide
ucuaauagugguuuacuuc

SEQ ID NO: 331208 - RNA, 19 nt, Artificial Sequence
  Description of Artificial Sequence: Synthetic oligonucleotide
uguaguaucuagacagcag

SEQ ID NO: 331209 - RNA, 19 nt, Artificial Sequence
  Description of Artificial Sequence: Synthetic oligonucleotide
aggccaaagaauucugacc

SEQ ID NO: 331210 - RNA, 19 nt, Artificial Sequence
  Description of Artificial Sequence: Synthetic oligonucleotide
uguguaaggccaaagaauu

SEQ ID NO: 331211 - RNA, 19 nt, Artificial Sequence
  Description of Artificial Sequence: Synthetic oligonucleotide
ucuugauuaacaguucaag

SEQ ID NO: 331212 - RNA, 19 nt, Artificial Sequence
  Description of Artificial Sequence: Synthetic oligonucleotide
ucauguuaaccuuaggaaa

SEQ ID NO: 331213 - RNA, 19 nt, Artificial Sequence
  Description of Artificial Sequence: Synthetic oligonucleotide
uuauuugcagccauccugu

SEQ ID NO: 331214 - RNA, 19 nt, Artificial Sequence
  Description of Artificial Sequence: Synthetic oligonucleotide
uaaaagugaaucacuugca

SEQ ID NO: 331215 - RNA, 19 nt, Artificial Sequence
  Description of Artificial Sequence: Synthetic oligonucleotide
aaaacaagcuuacacgcua

SEQ ID NO: 331216 - RNA, 19 nt, Artificial Sequence
  Description of Artificial Sequence: Synthetic oligonucleotide
auugaaauuacgcuccuaa

SEQ ID NO: 331217 - RNA, 19 nt, Artificial Sequence
  Description of Artificial Sequence: Synthetic oligonucleotide
ugaacauaaagagauuaca

SEQ ID NO: 331218 - RNA, 19 nt, Artificial Sequence
  Description of Artificial Sequence: Synthetic oligonucleotide
uuuuagugauacauaacaa

SEQ ID NO: 331219 - RNA, 19 nt, Artificial Sequence
  Description of Artificial Sequence: Synthetic oligonucleotide
agauucacagaugaauuac

SEQ ID NO: 331220 - RNA, 19 nt, Artificial Sequence
  Description of Artificial Sequence: Synthetic oligonucleotide
agugguacaguuaacaugu

SEQ ID NO: 331221 - RNA, 19 nt, Artificial Sequence
  Description of Artificial Sequence: Synthetic oligonucleotide
uuaagugaauuugacuucc

SEQ ID NO: 331222 - RNA, 19 nt, Artificial Sequence
  Description of Artificial Sequence: Synthetic oligonucleotide
aucgauuugaccugaugag

SEQ ID NO: 331223 - RNA, 19 nt, Artificial Sequence
  Description of Artificial Sequence: Synthetic oligonucleotide
ugcuagugagaacacaccc

SEQ ID NO: 331224 - RNA, 19 nt, Artificial Sequence
  Description of Artificial Sequence: Synthetic oligonucleotide
agacacauauuucuaagga

SEQ ID NO: 331225 - RNA, 19 nt, Artificial Sequence
  Description of Artificial Sequence: Synthetic oligonucleotide
uuaccagguaauuaauaug

SEQ ID NO: 331226 - RNA, 19 nt, Artificial Sequence
  Description of Artificial Sequence: Synthetic oligonucleotide
aaugccugagcaucgauuu

SEQ ID NO: 331227 - RNA, 19 nt, Artificial Sequence
  Description of Artificial Sequence: Synthetic oligonucleotide
auuucagucaauugagccu

SEQ ID NO: 331228 - RNA, 19 nt, Artificial Sequence
  Description of Artificial Sequence: Synthetic oligonucleotide
ugaauuugacuuccagugc

SEQ ID NO: 331229 - RNA, 19 nt, Artificial Sequence
  Description of Artificial Sequence: Synthetic oligonucleotide
aacacacccagaaugaugu

SEQ ID NO: 331230 - RNA, 19 nt, Artificial Sequence
  Description of Artificial Sequence: Synthetic oligonucleotide
agaaaccugccuuuuaucu

SEQ ID NO: 331231 - RNA, 19 nt, Artificial Sequence
  Description of Artificial Sequence: Synthetic oligonucleotide
ucagacuccuagcagacac

SEQ ID NO: 331232 - RNA, 19 nt, Artificial Sequence
  Description of Artificial Sequence: Synthetic oligonucleotide
aagagauuacaaagacucc

SEQ ID NO: 331233 - RNA, 19 nt, Artificial Sequence
  Description of Artificial Sequence: Synthetic oligonucleotide
auuuggucagacuccuagc

SEQ ID NO: 331234 - RNA, 19 nt, Artificial Sequence
  Description of Artificial Sequence: Synthetic oligonucleotide
aaagugguacaguuaacau

SEQ ID NO: 331235 - RNA, 19 nt, Artificial Sequence
  Description of Artificial Sequence: Synthetic oligonucleotide
uuguuaccagucauguggg

SEQ ID NO: 331236 - RNA, 19 nt, Artificial Sequence
  Description of Artificial Sequence: Synthetic oligonucleotide
ucaaugugugccaaacaug

SEQ ID NO: 331237 - RNA, 19 nt, Artificial Sequence
  Description of Artificial Sequence: Synthetic oligonucleotide
agugcuagugagaacacac

SEQ ID NO: 331238 - RNA, 19 nt, Artificial Sequence
  Description of Artificial Sequence: Synthetic oligonucleotide
agugguuuacuucccauug

SEQ ID NO: 331239 - RNA, 19 nt, Artificial Sequence
  Description of Artificial Sequence: Synthetic oligonucleotide
uucuugugaagccacacaa

SEQ ID NO: 331240 - RNA, 19 nt, Artificial Sequence
  Description of Artificial Sequence: Synthetic oligonucleotide
uuuaagugaauuugacuuc

SEQ ID NO: 331241 - RNA, 19 nt, Artificial Sequence
  Description of Artificial Sequence: Synthetic oligonucleotide
aacgaaugcacgcagccau

SEQ ID NO: 331242 - RNA, 19 nt, Artificial Sequence
  Description of Artificial Sequence: Synthetic oligonucleotide
aauuacgcuccuaacagca

SEQ ID NO: 331243 - RNA, 19 nt, Artificial Sequence
  Description of Artificial Sequence: Synthetic oligonucleotide
uaauuucagucaauugagc

SEQ ID NO: 331244 - RNA, 19 nt, Artificial Sequence
  Description of Artificial Sequence: Synthetic oligonucleotide
uuagugguuaggacccugg

SEQ ID NO: 331245 - RNA, 19 nt, Artificial Sequence
  Description of Artificial Sequence: Synthetic oligonucleotide
auuaggacugugcaucaag

SEQ ID NO: 331246 - RNA, 19 nt, Artificial Sequence
  Description of Artificial Sequence: Synthetic oligonucleotide
augaauuacucucaguuuu

SEQ ID NO: 331247 - RNA, 19 nt, Artificial Sequence
  Description of Artificial Sequence: Synthetic oligonucleotide
uguccuagugcaaacuaca

SEQ ID NO: 331248 - RNA, 19 nt, Artificial Sequence
  Description of Artificial Sequence: Synthetic oligonucleotide
ugguucaacagacugcaac

SEQ ID NO: 331249 - RNA, 19 nt, Artificial Sequence
  Description of Artificial Sequence: Synthetic oligonucleotide
auaaacauaugcuggcccu

SEQ ID NO: 331250 - RNA, 19 nt, Artificial Sequence
  Description of Artificial Sequence: Synthetic oligonucleotide
gguucaacagacugcaacg

SEQ ID NO: 331251 - RNA, 19 nt, Artificial Sequence
  Description of Artificial Sequence: Synthetic oligonucleotide
agacaugugaugcaucucu

SEQ ID NO: 331252 - RNA, 19 nt, Artificial Sequence
  Description of Artificial Sequence: Synthetic oligonucleotide
agcaugcuugaauucuugc

SEQ ID NO: 331253 - RNA, 19 nt, Artificial Sequence
  Description of Artificial Sequence: Synthetic oligonucleotide
caugaguacacauuuagaa

SEQ ID NO: 331254 - RNA, 19 nt, Artificial Sequence
  Description of Artificial Sequence: Synthetic oligonucleotide
cucuaauuuugcaaauggc

SEQ ID NO: 331255 - RNA, 19 nt, Artificial Sequence
  Description of Artificial Sequence: Synthetic oligonucleotide
aauagugguuuacuuccca

SEQ ID NO: 331256 - RNA, 19 nt, Artificial Sequence
  Description of Artificial Sequence: Synthetic oligonucleotide
uucccauugaaauuacgcu

SEQ ID NO: 331257 - RNA, 19 nt, Artificial Sequence
  Description of Artificial Sequence: Synthetic oligonucleotide
uuggcuaaacuuuuccucu

SEQ ID NO: 331258 - RNA, 19 nt, Artificial Sequence
  Description of Artificial Sequence: Synthetic oligonucleotide
uguuuaccaaccaggagaa

SEQ ID NO: 331259 - RNA, 19 nt, Artificial Sequence
  Description of Artificial Sequence: Synthetic oligonucleotide
augagauuaggacugugca

SEQ ID NO: 331260 - RNA, 19 nt, Artificial Sequence
  Description of Artificial Sequence: Synthetic oligonucleotide
uuuaccaaccaggagaaau

SEQ ID NO: 331261 - RNA, 19 nt, Artificial Sequence
  Description of Artificial Sequence: Synthetic oligonucleotide
cuucauguuaaccuuagga

SEQ ID NO: 331262 - RNA, 19 nt, Artificial Sequence
  Description of Artificial Sequence: Synthetic oligonucleotide
uuaugauaugcucaaugua

SEQ ID NO: 331263 - RNA, 19 nt, Artificial Sequence
  Description of Artificial Sequence: Synthetic oligonucleotide
acuauaugcaacaaccaug

SEQ ID NO: 331264 - RNA, 19 nt, Artificial Sequence
  Description of Artificial Sequence: Synthetic oligonucleotide
gagggaaaugucucaaagc

SEQ ID NO: 331265 - RNA, 19 nt, Artificial Sequence
  Description of Artificial Sequence: Synthetic oligonucleotide
ucuaaugcccaaacuguac

SEQ ID NO: 331266 - RNA, 19 nt, Artificial Sequence
  Description of Artificial Sequence: Synthetic oligonucleotide
guaucuaagaugucgaucu

SEQ ID NO: 331267 - RNA, 19 nt, Artificial Sequence
  Description of Artificial Sequence: Synthetic oligonucleotide
gaccugaugagauuaggac

SEQ ID NO: 331268 - RNA, 19 nt, Artificial Sequence
  Description of Artificial Sequence: Synthetic oligonucleotide
uacauuagcuuuccugaug

SEQ ID NO: 331269 - RNA, 19 nt, Artificial Sequence
  Description of Artificial Sequence: Synthetic oligonucleotide
gugucuuagccccacagag

SEQ ID NO: 331270 - RNA, 19 nt, Artificial Sequence
  Description of Artificial Sequence: Synthetic oligonucleotide
agauaaaaccuuguuacca

SEQ ID NO: 331271 - RNA, 19 nt, Artificial Sequence
  Description of Artificial Sequence: Synthetic oligonucleotide
uaguuaacauuccacuggu

SEQ ID NO: 331272 - RNA, 19 nt, Artificial Sequence
  Description of Artificial Sequence: Synthetic oligonucleotide
auaaacaccagaggaagug

SEQ ID NO: 331273 - RNA, 19 nt, Artificial Sequence
  Description of Artificial Sequence: Synthetic oligonucleotide
acacgcuacauucaggacu

SEQ ID NO: 331274 - RNA, 19 nt, Artificial Sequence
  Description of Artificial Sequence: Synthetic oligonucleotide
aaucuaauagugguuuacu

SEQ ID NO: 331275 - RNA, 19 nt, Artificial Sequence
  Description of Artificial Sequence: Synthetic oligonucleotide
ugugaacauaaagagauua

SEQ ID NO: 331276 - RNA, 19 nt, Artificial Sequence
  Description of Artificial Sequence: Synthetic oligonucleotide
uagcugucugcuuugguag

SEQ ID NO: 331277 - RNA, 19 nt, Artificial Sequence
  Description of Artificial Sequence: Synthetic oligonucleotide
cagguaauuaauaugcaga

SEQ ID NO: 331278 - RNA, 19 nt, Artificial Sequence
  Description of Artificial Sequence: Synthetic oligonucleotide
ucaugaguacacauuuaga

SEQ ID NO: 331279 - RNA, 19 nt, Artificial Sequence
  Description of Artificial Sequence: Synthetic oligonucleotide
acguaguuaacauuccacu

SEQ ID NO: 331280 - RNA, 19 nt, Artificial Sequence
  Description of Artificial Sequence: Synthetic oligonucleotide
aguuucuaaauuaaggcau

SEQ ID NO: 331281 - RNA, 19 nt, Artificial Sequence
  Description of Artificial Sequence: Synthetic oligonucleotide
gagauuaggacugugcauc

SEQ ID NO: 331282 - RNA, 19 nt, Artificial Sequence
  Description of Artificial Sequence: Synthetic oligonucleotide
ucccauugaaauuacgcuc

SEQ ID NO: 331283 - RNA, 19 nt, Artificial Sequence
  Description of Artificial Sequence: Synthetic oligonucleotide
ugaugcaucucugucagcu

SEQ ID NO: 331284 - RNA, 19 nt, Artificial Sequence
  Description of Artificial Sequence: Synthetic oligonucleotide
ugaccugaugagauuagga

SEQ ID NO: 331285 - RNA, 19 nt, Artificial Sequence
  Description of Artificial Sequence: Synthetic oligonucleotide
accugaugagauuaggacu

SEQ ID NO: 331286 - RNA, 19 nt, Artificial Sequence
  Description of Artificial Sequence: Synthetic oligonucleotide
ucacucaaacuuaauuggu

SEQ ID NO: 331287 - RNA, 19 nt, Artificial Sequence
  Description of Artificial Sequence: Synthetic oligonucleotide
acuaccuuauaguucauua

SEQ ID NO: 331288 - RNA, 19 nt, Artificial Sequence
  Description of Artificial Sequence: Synthetic oligonucleotide
guaguaucuagacagcaga

SEQ ID NO: 331289 - RNA, 19 nt, Artificial Sequence
  Description of Artificial Sequence: Synthetic oligonucleotide
ucaacagacugcaacgaau

SEQ ID NO: 331290 - RNA, 19 nt, Artificial Sequence
  Description of Artificial Sequence: Synthetic oligonucleotide
uugcauaacaacaguuuaa

SEQ ID NO: 331291 - RNA, 19 nt, Artificial Sequence
  Description of Artificial Sequence: Synthetic oligonucleotide
uucuacagaaaccugccuu

SEQ ID NO: 331292 - RNA, 19 nt, Artificial Sequence
  Description of Artificial Sequence: Synthetic oligonucleotide
ugagcaucgauuugaccug

SEQ ID NO: 331293 - RNA, 19 nt, Artificial Sequence
  Description of Artificial Sequence: Synthetic oligonucleotide
ugaaucacuugcagaaagu

SEQ ID NO: 331294 - RNA, 19 nt, Artificial Sequence
  Description of Artificial Sequence: Synthetic oligonucleotide
cauguacacacuuguuucc

SEQ ID NO: 331295 - RNA, 19 nt, Artificial Sequence
  Description of Artificial Sequence: Synthetic oligonucleotide
uaauuuugcaaauggccua

SEQ ID NO: 331296 - RNA, 19 nt, Artificial Sequence
  Description of Artificial Sequence: Synthetic oligonucleotide
uuacgcuccuaacagcaug

SEQ ID NO: 331297 - RNA, 19 nt, Artificial Sequence
  Description of Artificial Sequence: Synthetic oligonucleotide
ucagccuaagacaugugau

SEQ ID NO: 331298 - RNA, 19 nt, Artificial Sequence
  Description of Artificial Sequence: Synthetic oligonucleotide
uguauaaguucacaccauu

SEQ ID NO: 331299 - RNA, 19 nt, Artificial Sequence
  Description of Artificial Sequence: Synthetic oligonucleotide
agcucuggaacucuaagaa

SEQ ID NO: 331300 - RNA, 19 nt, Artificial Sequence
  Description of Artificial Sequence: Synthetic oligonucleotide
aaacaagcuuacacgcuac

SEQ ID NO: 331301 - RNA, 19 nt, Artificial Sequence
  Description of Artificial Sequence: Synthetic oligonucleotide
ugcagauucacagaugaau

SEQ ID NO: 331302 - RNA, 19 nt, Artificial Sequence
  Description of Artificial Sequence: Synthetic oligonucleotide
ugcauaacaacaguuuaaa

SEQ ID NO: 331303 - RNA, 19 nt, Artificial Sequence
  Description of Artificial Sequence: Synthetic oligonucleotide
uaugcucaauguaguaucu

SEQ ID NO: 331304 - RNA, 19 nt, Artificial Sequence
  Description of Artificial Sequence: Synthetic oligonucleotide
gacugcaacgaaugcacgc

SEQ ID NO: 331305 - RNA, 19 nt, Artificial Sequence
  Description of Artificial Sequence: Synthetic oligonucleotide
aaacauaugcuggcccuuc

SEQ ID NO: 331306 - RNA, 19 nt, Artificial Sequence
  Description of Artificial Sequence: Synthetic oligonucleotide
agauuugcauaacaacagu

SEQ ID NO: 331307 - RNA, 19 nt, Artificial Sequence
  Description of Artificial Sequence: Synthetic oligonucleotide
cauuuaucaaggcaguaga

SEQ ID NO: 331308 - RNA, 19 nt, Artificial Sequence
  Description of Artificial Sequence: Synthetic oligonucleotide
uguacccucaugaguacac

SEQ ID NO: 331309 - RNA, 19 nt, Artificial Sequence
  Description of Artificial Sequence: Synthetic oligonucleotide
ucccaggagauuaaauacu

SEQ ID NO: 331310 - RNA, 19 nt, Artificial Sequence
  Description of Artificial Sequence: Synthetic oligonucleotide
gcaucuuacauaaaaggag

SEQ ID NO: 331311 - RNA, 19 nt, Artificial Sequence
  Description of Artificial Sequence: Synthetic oligonucleotide
aaucacuugcagaaaguga

SEQ ID NO: 331312 - RNA, 19 nt, Artificial Sequence
  Description of Artificial Sequence: Synthetic oligonucleotide
uacgcuccuaacagcaugc

SEQ ID NO: 331313 - RNA, 19 nt, Artificial Sequence
  Description of Artificial Sequence: Synthetic oligonucleotide
ugacagguggcaagcaucu

SEQ ID NO: 331314 - RNA, 19 nt, Artificial Sequence
  Description of Artificial Sequence: Synthetic oligonucleotide
uugaaauuacgcuccuaac

SEQ ID NO: 331315 - RNA, 19 nt, Artificial Sequence
  Description of Artificial Sequence: Synthetic oligonucleotide
aucagccuaagacauguga

SEQ ID NO: 331316 - RNA, 19 nt, Artificial Sequence
  Description of Artificial Sequence: Synthetic oligonucleotide
uaucuagacagcagaguuc

SEQ ID NO: 331317 - RNA, 19 nt, Artificial Sequence
  Description of Artificial Sequence: Synthetic oligonucleotide
cuaauuuugcaaauggccu

SEQ ID NO: 331318 - RNA, 19 nt, Artificial Sequence
  Description of Artificial Sequence: Synthetic oligonucleotide
ucuggcucgaauuucccuc

SEQ ID NO: 331319 - RNA, 19 nt, Artificial Sequence
  Description of Artificial Sequence: Synthetic oligonucleotide
auaguugucccuaauugca

SEQ ID NO: 331320 - RNA, 19 nt, Artificial Sequence
  Description of Artificial Sequence: Synthetic oligonucleotide
uaauugguauucacaucca

SEQ ID NO: 331321 - RNA, 19 nt, Artificial Sequence
  Description of Artificial Sequence: Synthetic oligonucleotide
cuucccuaugcccugcucc

SEQ ID NO: 331322 - RNA, 19 nt, Artificial Sequence
  Description of Artificial Sequence: Synthetic oligonucleotide
gacacauauuucuaaggaa

SEQ ID NO: 331323 - RNA, 19 nt, Artificial Sequence
  Description of Artificial Sequence: Synthetic oligonucleotide
uguaucuaagaugucgauc

SEQ ID NO: 331324 - RNA, 19 nt, Artificial Sequence
  Description of Artificial Sequence: Synthetic oligonucleotide
cugagcaucgauuugaccu

SEQ ID NO: 331325 - RNA, 19 nt, Artificial Sequence
  Description of Artificial Sequence: Synthetic oligonucleotide
aguuaacauguucacaauu

SEQ ID NO: 331326 - RNA, 19 nt, Artificial Sequence
  Description of Artificial Sequence: Synthetic oligonucleotide
agucugugaaaauauuaaa

SEQ ID NO: 331327 - RNA, 19 nt, Artificial Sequence
  Description of Artificial Sequence: Synthetic oligonucleotide
ucuacagaaaccugccuuu

SEQ ID NO: 331328 - RNA, 19 nt, Artificial Sequence
  Description of Artificial Sequence: Synthetic oligonucleotide
cacgcuacauucaggacug

SEQ ID NO: 331329 - RNA, 19 nt, Artificial Sequence
  Description of Artificial Sequence: Synthetic oligonucleotide
aacgccugucucugguaac

SEQ ID NO: 331330 - RNA, 19 nt, Artificial Sequence
  Description of Artificial Sequence: Synthetic oligonucleotide
guuuacuucccauugaaau

SEQ ID NO: 331331 - RNA, 19 nt, Artificial Sequence
  Description of Artificial Sequence: Synthetic oligonucleotide
uuggcucgaguuuuagcag

SEQ ID NO: 331332 - RNA, 19 nt, Artificial Sequence
  Description of Artificial Sequence: Synthetic oligonucleotide
ugaauuacucucaguuuua

SEQ ID NO: 331333 - RNA, 19 nt, Artificial Sequence
  Description of Artificial Sequence: Synthetic oligonucleotide
uugguagguucauaguccu

SEQ ID NO: 331334 - RNA, 19 nt, Artificial Sequence
  Description of Artificial Sequence: Synthetic oligonucleotide
caauguuagugguuaggac

SEQ ID NO: 331335 - RNA, 19 nt, Artificial Sequence
  Description of Artificial Sequence: Synthetic oligonucleotide
ugagauuaggacugugcau

SEQ ID NO: 331336 - RNA, 19 nt, Artificial Sequence
  Description of Artificial Sequence: Synthetic oligonucleotide
aacaagcuuacacgcuaca

SEQ ID NO: 331337 - RNA, 19 nt, Artificial Sequence
  Description of Artificial Sequence: Synthetic oligonucleotide
gaugucgaucugcaccucc

SEQ ID NO: 331338 - RNA, 19 nt, Artificial Sequence
  Description of Artificial Sequence: Synthetic oligonucleotide
ggaguuugggcuuugauua

SEQ ID NO: 331339 - RNA, 19 nt, Artificial Sequence
  Description of Artificial Sequence: Synthetic oligonucleotide
uucaacagacugcaacgaa

SEQ ID NO: 331340 - RNA, 19 nt, Artificial Sequence
  Description of Artificial Sequence: Synthetic oligonucleotide
caaagaauucugaccuuug

SEQ ID NO: 331341 - RNA, 19 nt, Artificial Sequence
  Description of Artificial Sequence: Synthetic oligonucleotide
ucuuacauaaaaggagcau

SEQ ID NO: 331342 - RNA, 19 nt, Artificial Sequence
  Description of Artificial Sequence: Synthetic oligonucleotide
auuggucuuuaaauggcuc

SEQ ID NO: 331343 - RNA, 19 nt, Artificial Sequence
  Description of Artificial Sequence: Synthetic oligonucleotide
acuguacccucaugaguac

SEQ ID NO: 331344 - RNA, 19 nt, Artificial Sequence
  Description of Artificial Sequence: Synthetic oligonucleotide
ucgauuugaccugaugaga

SEQ ID NO: 331345 - RNA, 19 nt, Artificial Sequence
  Description of Artificial Sequence: Synthetic oligonucleotide
uaucuaagaugucgaucug

SEQ ID NO: 331346 - RNA, 19 nt, Artificial Sequence
  Description of Artificial Sequence: Synthetic oligonucleotide
uauaugcaacaaccaugcc

SEQ ID NO: 331347 - RNA, 19 nt, Artificial Sequence
  Description of Artificial Sequence: Synthetic oligonucleotide
agaagaccaagacauuuua

SEQ ID NO: 331348 - RNA, 19 nt, Artificial Sequence
  Description of Artificial Sequence: Synthetic oligonucleotide
aucuaauagugguuuacuu

SEQ ID NO: 331349 - RNA, 19 nt, Artificial Sequence
  Description of Artificial Sequence: Synthetic oligonucleotide
uucauagcaccugguaccc

SEQ ID NO: 331350 - RNA, 19 nt, Artificial Sequence
  Description of Artificial Sequence: Synthetic oligonucleotide
aacauaugcuggcccuuca

SEQ ID NO: 331351 - RNA, 19 nt, Artificial Sequence
  Description of Artificial Sequence: Synthetic oligonucleotide
auaaaugaaccggguagug

SEQ ID NO: 331352 - RNA, 19 nt, Artificial Sequence
  Description of Artificial Sequence: Synthetic oligonucleotide
agcaaauugcaauguuagu

SEQ ID NO: 331353 - RNA, 19 nt, Artificial Sequence
  Description of Artificial Sequence: Synthetic oligonucleotide
agugucuuagccccacaga

SEQ ID NO: 331354 - RNA, 19 nt, Artificial Sequence
  Description of Artificial Sequence: Synthetic oligonucleotide
uguuaaccuuaggaaauac

SEQ ID NO: 331355 - RNA, 19 nt, Artificial Sequence
  Description of Artificial Sequence: Synthetic oligonucleotide
acagacugcaacgaaugca

SEQ ID NO: 331356 - RNA, 19 nt, Artificial Sequence
  Description of Artificial Sequence: Synthetic oligonucleotide
gucaggauaagaaaggagu

SEQ ID NO: 331357 - RNA, 19 nt, Artificial Sequence
  Description of Artificial Sequence: Synthetic oligonucleotide
gcagacacauauuucuaag

SEQ ID NO: 331358 - RNA, 19 nt, Artificial Sequence
  Description of Artificial Sequence: Synthetic oligonucleotide
uugugaagccacacaauuu

SEQ ID NO: 331359 - RNA, 19 nt, Artificial Sequence
  Description of Artificial Sequence: Synthetic oligonucleotide
gguuuauuugcagccaucc

SEQ ID NO: 331360 - RNA, 19 nt, Artificial Sequence
  Description of Artificial Sequence: Synthetic oligonucleotide
agauuaggacugugcauca

SEQ ID NO: 331361 - RNA, 19 nt, Artificial Sequence
  Description of Artificial Sequence: Synthetic oligonucleotide
agacacagaggaacccucc

SEQ ID NO: 331362 - RNA, 19 nt, Artificial Sequence
  Description of Artificial Sequence: Synthetic oligonucleotide
ggcaguagaagaccaagac

SEQ ID NO: 331363 - RNA, 19 nt, Artificial Sequence
  Description of Artificial Sequence: Synthetic oligonucleotide
gaugcaucucugucagcug

SEQ ID NO: 331364 - RNA, 19 nt, Artificial Sequence
  Description of Artificial Sequence: Synthetic oligonucleotide
auagugguuuacuucccau

SEQ ID NO: 331365 - RNA, 19 nt, Artificial Sequence
  Description of Artificial Sequence: Synthetic oligonucleotide
acugcaacgaaugcacgca

SEQ ID NO: 331366 - RNA, 19 nt, Artificial Sequence
  Description of Artificial Sequence: Synthetic oligonucleotide
aaacuacauuagcuuuccu

SEQ ID NO: 331367 - RNA, 19 nt, Artificial Sequence
  Description of Artificial Sequence: Synthetic oligonucleotide
gcuuacacgcuacauucag

SEQ ID NO: 331368 - RNA, 19 nt, Artificial Sequence
  Description of Artificial Sequence: Synthetic oligonucleotide
ucggaaauaguugucccua

SEQ ID NO: 331369 - RNA, 19 nt, Artificial Sequence
  Description of Artificial Sequence: Synthetic oligonucleotide
gucaaugugugccaaacau

SEQ ID NO: 331370 - RNA, 19 nt, Artificial Sequence
  Description of Artificial Sequence: Synthetic oligonucleotide
ggaaaugucucaaagcaaa

SEQ ID NO: 331371 - RNA, 19 nt, Artificial Sequence
  Description of Artificial Sequence: Synthetic oligonucleotide
cauaugcuggcccuucauc

SEQ ID NO: 331372 - RNA, 19 nt, Artificial Sequence
  Description of Artificial Sequence: Synthetic oligonucleotide
uucccucauuaaaucaaaa

SEQ ID NO: 331373 - RNA, 19 nt, Artificial Sequence
  Description of Artificial Sequence: Synthetic oligonucleotide
gugauacauaacaauuuuc

SEQ ID NO: 331374 - RNA, 19 nt, Artificial Sequence
  Description of Artificial Sequence: Synthetic oligonucleotide
caaguguccuagugcaaac

SEQ ID NO: 331375 - RNA, 19 nt, Artificial Sequence
  Description of Artificial Sequence: Synthetic oligonucleotide
guuaaccuuaggaaauaca

SEQ ID NO: 331376 - RNA, 19 nt, Artificial Sequence
  Description of Artificial Sequence: Synthetic oligonucleotide
ugucccuaauugcagcgua

SEQ ID NO: 331377 - RNA, 19 nt, Artificial Sequence
  Description of Artificial Sequence: Synthetic oligonucleotide
uugcaauguuagugguuag

SEQ ID NO: 331378 - RNA, 19 nt, Artificial Sequence
  Description of Artificial Sequence: Synthetic oligonucleotide
uguuaccagucaugugggc

SEQ ID NO: 331379 - RNA, 19 nt, Artificial Sequence
  Description of Artificial Sequence: Synthetic oligonucleotide
gaugaauuacucucaguuu

SEQ ID NO: 331380 - RNA, 19 nt, Artificial Sequence
  Description of Artificial Sequence: Synthetic oligonucleotide
auacagguacaguacucau

SEQ ID NO: 331381 - RNA, 19 nt, Artificial Sequence
  Description of Artificial Sequence: Synthetic oligonucleotide
cauguuaaccuuaggaaau

SEQ ID NO: 331382 - RNA, 19 nt, Artificial Sequence
  Description of Artificial Sequence: Synthetic oligonucleotide
guuaccagucaugugggca

SEQ ID NO: 331383 - RNA, 19 nt, Artificial Sequence
  Description of Artificial Sequence: Synthetic oligonucleotide
ugacuuuguguaaggccaa

SEQ ID NO: 331384 - RNA, 19 nt, Artificial Sequence
  Description of Artificial Sequence: Synthetic oligonucleotide
gcaacgaaugcacgcagcc

SEQ ID NO: 331385 - RNA, 19 nt, Artificial Sequence
  Description of Artificial Sequence: Synthetic oligonucleotide
cuaccuuauaguucauuaa

SEQ ID NO: 331386 - RNA, 19 nt, Artificial Sequence
  Description of Artificial Sequence: Synthetic oligonucleotide
uacucucaguuuuacuaua

SEQ ID NO: 331387 - RNA, 19 nt, Artificial Sequence
  Description of Artificial Sequence: Synthetic oligonucleotide
aaugaaccggguaguggca

SEQ ID NO: 331388 - RNA, 19 nt, Artificial Sequence
  Description of Artificial Sequence: Synthetic oligonucleotide
gacaugugaugcaucucug

SEQ ID NO: 331389 - RNA, 19 nt, Artificial Sequence
  Description of Artificial Sequence: Synthetic oligonucleotide
aggagauuaaauacuuaaa

SEQ ID NO: 331390 - RNA, 19 nt, Artificial Sequence
  Description of Artificial Sequence: Synthetic oligonucleotide
accuuauaguucauuaaaa

SEQ ID NO: 331391 - RNA, 19 nt, Artificial Sequence
  Description of Artificial Sequence: Synthetic oligonucleotide
guuuuagcagaugucucca

SEQ ID NO: 331392 - RNA, 19 nt, Artificial Sequence
  Description of Artificial Sequence: Synthetic oligonucleotide
agugguuaggacccugguu

SEQ ID NO: 331393 - RNA, 19 nt, Artificial Sequence
  Description of Artificial Sequence: Synthetic oligonucleotide
acugacagguggcaagcau

SEQ ID NO: 331394 - RNA, 19 nt, Artificial Sequence
  Description of Artificial Sequence: Synthetic oligonucleotide
uagugguuaggacccuggu

SEQ ID NO: 331395 - RNA, 19 nt, Artificial Sequence
  Description of Artificial Sequence: Synthetic oligonucleotide
uacacgcuacauucaggac

SEQ ID NO: 331396 - RNA, 19 nt, Artificial Sequence
  Description of Artificial Sequence: Synthetic oligonucleotide
gaguauggcacacaucuuu

SEQ ID NO: 331397 - RNA, 19 nt, Artificial Sequence
  Description of Artificial Sequence: Synthetic oligonucleotide
uacccucaugaguacacau

SEQ ID NO: 331398 - RNA, 19 nt, Artificial Sequence
  Description of Artificial Sequence: Synthetic oligonucleotide
uccugaacgccugucucug

SEQ ID NO: 331399 - RNA, 19 nt, Artificial Sequence
  Description of Artificial Sequence: Synthetic oligonucleotide
gcaagcaucuuuccucaag

SEQ ID NO: 331400 - RNA, 19 nt, Artificial Sequence
  Description of Artificial Sequence: Synthetic oligonucleotide
gucaacauuggcucgaguu

SEQ ID NO: 331401 - RNA, 19 nt, Artificial Sequence
  Description of Artificial Sequence: Synthetic oligonucleotide
uguaggcaauuaugaaaua

SEQ ID NO: 331402 - RNA, 19 nt, Artificial Sequence
  Description of Artificial Sequence: Synthetic oligonucleotide
uccaaauguuagaguaauu

SEQ ID NO: 331403 - RNA, 19 nt, Artificial Sequence
  Description of Artificial Sequence: Synthetic oligonucleotide
aguacacauuuagaacuga

SEQ ID NO: 331404 - RNA, 19 nt, Artificial Sequence
  Description of Artificial Sequence: Synthetic oligonucleotide
gucugugaaaauauuaaau

SEQ ID NO: 331405 - RNA, 19 nt, Artificial Sequence
  Description of Artificial Sequence: Synthetic oligonucleotide
gggaacucuaauuuugcaa

SEQ ID NO: 331406 - RNA, 19 nt, Artificial Sequence
  Description of Artificial Sequence: Synthetic oligonucleotide
auuuaucaaggcaguagaa

SEQ ID NO: 331407 - RNA, 19 nt, Artificial Sequence
  Description of Artificial Sequence: Synthetic oligonucleotide
acuucccauugaaauuacg

SEQ ID NO: 331408 - RNA, 19 nt, Artificial Sequence
  Description of Artificial Sequence: Synthetic oligonucleotide
ucuccacguaguuaacauu

SEQ ID NO: 331409 - RNA, 19 nt, Artificial Sequence
  Description of Artificial Sequence: Synthetic oligonucleotide
aguuaacauuccacugguc

SEQ ID NO: 331410 - RNA, 19 nt, Artificial Sequence
  Description of Artificial Sequence: Synthetic oligonucleotide
ucccuaauugcagcguagu

SEQ ID NO: 331411 - RNA, 19 nt, Artificial Sequence
  Description of Artificial Sequence: Synthetic oligonucleotide
cucuugauuaacaguucaa

SEQ ID NO: 331412 - RNA, 19 nt, Artificial Sequence
  Description of Artificial Sequence: Synthetic oligonucleotide
cugcaacgaaugcacgcag

SEQ ID NO: 331413 - RNA, 19 nt, Artificial Sequence
  Description of Artificial Sequence: Synthetic oligonucleotide
aacuaccuuauaguucauu

SEQ ID NO: 331414 - RNA, 19 nt, Artificial Sequence
  Description of Artificial Sequence: Synthetic oligonucleotide
cagauucacagaugaauua

SEQ ID NO: 331415 - RNA, 19 nt, Artificial Sequence
  Description of Artificial Sequence: Synthetic oligonucleotide
gaacgccugucucugguaa

SEQ ID NO: 331416 - RNA, 19 nt, Artificial Sequence
  Description of Artificial Sequence: Synthetic oligonucleotide
uagcagaugucuccacgua

SEQ ID NO: 331417 - RNA, 19 nt, Artificial Sequence
  Description of Artificial Sequence: Synthetic oligonucleotide
acugccuggcaagauaaaa

SEQ ID NO: 331418 - RNA, 19 nt, Artificial Sequence
  Description of Artificial Sequence: Synthetic oligonucleotide
ccuuuaaggacaaauauuu

SEQ ID NO: 331419 - RNA, 19 nt, Artificial Sequence
  Description of Artificial Sequence: Synthetic oligonucleotide
ccggguaguggcaucagcc

SEQ ID NO: 331420 - RNA, 19 nt, Artificial Sequence
  Description of Artificial Sequence: Synthetic oligonucleotide
guagagucagggcagacuu

SEQ ID NO: 331421 - RNA, 19 nt, Artificial Sequence
  Description of Artificial Sequence: Synthetic oligonucleotide
cuaaguuaauuaccaggua

SEQ ID NO: 331422 - RNA, 19 nt, Artificial Sequence
  Description of Artificial Sequence: Synthetic oligonucleotide
guggccguuccucccaccc

SEQ ID NO: 331423 - RNA, 19 nt, Artificial Sequence
  Description of Artificial Sequence: Synthetic oligonucleotide
cuuagccccacagaggaaa

SEQ ID NO: 331424 - RNA, 19 nt, Artificial Sequence
  Description of Artificial Sequence: Synthetic oligonucleotide
gugguuuacuucccauuga

SEQ ID NO: 331425 - RNA, 19 nt, Artificial Sequence
  Description of Artificial Sequence: Synthetic oligonucleotide
guuagugguuaggacccug

SEQ ID NO: 331426 - RNA, 19 nt, Artificial Sequence
  Description of Artificial Sequence: Synthetic oligonucleotide
acauuggcucgaguuuuag

SEQ ID NO: 331427 - RNA, 19 nt, Artificial Sequence
  Description of Artificial Sequence: Synthetic oligonucleotide
ugcacgcagccaugcuggg

SEQ ID NO: 331428 - RNA, 19 nt, Artificial Sequence
  Description of Artificial Sequence: Synthetic oligonucleotide
accagguaauuaauaugca

SEQ ID NO: 331429 - RNA, 19 nt, Artificial Sequence
  Description of Artificial Sequence: Synthetic oligonucleotide
aacugacagguggcaagca

SEQ ID NO: 331430 - RNA, 19 nt, Artificial Sequence
  Description of Artificial Sequence: Synthetic oligonucleotide
augccugagcaucgauuug

SEQ ID NO: 331431 - RNA, 19 nt, Artificial Sequence
  Description of Artificial Sequence: Synthetic oligonucleotide
aguauggcacacaucuuua

SEQ ID NO: 331432 - RNA, 19 nt, Artificial Sequence
  Description of Artificial Sequence: Synthetic oligonucleotide
agaacacacccagaaugau

SEQ ID NO: 331433 - RNA, 19 nt, Artificial Sequence
  Description of Artificial Sequence: Synthetic oligonucleotide
uguucacaauugucauuua

SEQ ID NO: 331434 - RNA, 19 nt, Artificial Sequence
  Description of Artificial Sequence: Synthetic oligonucleotide
cugauucucuuggcuaaac

SEQ ID NO: 331435 - RNA, 19 nt, Artificial Sequence
  Description of Artificial Sequence: Synthetic oligonucleotide
ucuuagccccacagaggaa

SEQ ID NO: 331436 - RNA, 19 nt, Artificial Sequence
  Description of Artificial Sequence: Synthetic oligonucleotide
cagcacuaccuucuuccug

SEQ ID NO: 331437 - RNA, 19 nt, Artificial Sequence
  Description of Artificial Sequence: Synthetic oligonucleotide
auguuaaccuuaggaaaua

SEQ ID NO: 331438 - RNA, 19 nt, Artificial Sequence
  Description of Artificial Sequence: Synthetic oligonucleotide
auugagccuucaauggcaa

SEQ ID NO: 331439 - RNA, 19 nt, Artificial Sequence
  Description of Artificial Sequence: Synthetic oligonucleotide
caucagccuaagacaugug

SEQ ID NO: 331440 - RNA, 19 nt, Artificial Sequence
  Description of Artificial Sequence: Synthetic oligonucleotide
uguuagugguuaggacccu

SEQ ID NO: 331441 - RNA, 19 nt, Artificial Sequence
  Description of Artificial Sequence: Synthetic oligonucleotide
gucuccacguaguuaacau

SEQ ID NO: 331442 - RNA, 19 nt, Artificial Sequence
  Description of Artificial Sequence: Synthetic oligonucleotide
caagcuuacacgcuacauu

SEQ ID NO: 331443 - RNA, 19 nt, Artificial Sequence
  Description of Artificial Sequence: Synthetic oligonucleotide
ggucaaugugugccaaaca

SEQ ID NO: 331444 - RNA, 19 nt, Artificial Sequence
  Description of Artificial Sequence: Synthetic oligonucleotide
acgccugucucugguaacu

SEQ ID NO: 331445 - RNA, 19 nt, Artificial Sequence
  Description of Artificial Sequence: Synthetic oligonucleotide
agcuuacacgcuacauuca

SEQ ID NO: 331446 - RNA, 19 nt, Artificial Sequence
  Description of Artificial Sequence: Synthetic oligonucleotide
agaugucgaucugcaccuc

SEQ ID NO: 331447 - RNA, 19 nt, Artificial Sequence
  Description of Artificial Sequence: Synthetic oligonucleotide
gauuaggacugugcaucaa

SEQ ID NO: 331448 - RNA, 19 nt, Artificial Sequence
  Description of Artificial Sequence: Synthetic oligonucleotide
gugaguggccccaagugcu

SEQ ID NO: 331449 - RNA, 19 nt, Artificial Sequence
  Description of Artificial Sequence: Synthetic oligonucleotide
acagcaugcuugaauucuu

SEQ ID NO: 331450 - RNA, 19 nt, Artificial Sequence
  Description of Artificial Sequence: Synthetic oligonucleotide
cagacuccuagcagacaca

SEQ ID NO: 331451 - RNA, 19 nt, Artificial Sequence
  Description of Artificial Sequence: Synthetic oligonucleotide
auuacgcuccuaacagcau

SEQ ID NO: 331452 - RNA, 19 nt, Artificial Sequence
  Description of Artificial Sequence: Synthetic oligonucleotide
cuaugcccugcucccagga

SEQ ID NO: 331453 - RNA, 19 nt, Artificial Sequence
  Description of Artificial Sequence: Synthetic oligonucleotide
gagcaucgauuugaccuga

SEQ ID NO: 331454 - RNA, 19 nt, Artificial Sequence
  Description of Artificial Sequence: Synthetic oligonucleotide
gugaugcaucucugucagc

SEQ ID NO: 331455 - RNA, 19 nt, Artificial Sequence
  Description of Artificial Sequence: Synthetic oligonucleotide
acgaaugcacgcagccaug

SEQ ID NO: 331456 - RNA, 19 nt, Artificial Sequence
  Description of Artificial Sequence: Synthetic oligonucleotide
ccuguagcugucugcuuug

SEQ ID NO: 331457 - RNA, 19 nt, Artificial Sequence
  Description of Artificial Sequence: Synthetic oligonucleotide
caacgaaugcacgcagcca

SEQ ID NO: 331458 - RNA, 19 nt, Artificial Sequence
  Description of Artificial Sequence: Synthetic oligonucleotide
gcuaaacuuuuccucuucu

SEQ ID NO: 331459 - RNA, 19 nt, Artificial Sequence
  Description of Artificial Sequence: Synthetic oligonucleotide
gaaugccugagcaucgauu

SEQ ID NO: 331460 - RNA, 19 nt, Artificial Sequence
  Description of Artificial Sequence: Synthetic oligonucleotide
cuacauuagcuuuccugau

SEQ ID NO: 331461 - RNA, 19 nt, Artificial Sequence
  Description of Artificial Sequence: Synthetic oligonucleotide
aucaagugucuuagcccca

SEQ ID NO: 331462 - RNA, 19 nt, Artificial Sequence
  Description of Artificial Sequence: Synthetic oligonucleotide
guacccucaugaguacaca

SEQ ID NO: 331463 - RNA, 19 nt, Artificial Sequence
  Description of Artificial Sequence: Synthetic oligonucleotide
gggaaaugucucaaagcaa

SEQ ID NO: 331464 - RNA, 19 nt, Artificial Sequence
  Description of Artificial Sequence: Synthetic oligonucleotide
gcaaauaaaugaaccgggu

SEQ ID NO: 331465 - RNA, 19 nt, Artificial Sequence
  Description of Artificial Sequence: Synthetic oligonucleotide
gugagaacacacccagaau

SEQ ID NO: 331466 - RNA, 19 nt, Artificial Sequence
  Description of Artificial Sequence: Synthetic oligonucleotide
gaguuugggcuuugauuau

SEQ ID NO: 331467 - RNA, 19 nt, Artificial Sequence
  Description of Artificial Sequence: Synthetic oligonucleotide
ucccuaugcccugcuccca

SEQ ID NO: 331468 - RNA, 19 nt, Artificial Sequence
  Description of Artificial Sequence: Synthetic oligonucleotide
agaguauggcacacaucuu

SEQ ID NO: 331469 - RNA, 19 nt, Artificial Sequence
  Description of Artificial Sequence: Synthetic oligonucleotide
ccuaugcccugcucccagg

SEQ ID NO: 331470 - RNA, 19 nt, Artificial Sequence
  Description of Artificial Sequence: Synthetic oligonucleotide
ggaaauaguugucccuaau

SEQ ID NO: 331471 - RNA, 19 nt, Artificial Sequence
  Description of Artificial Sequence: Synthetic oligonucleotide
cccuaauugcagcguaguc

SEQ ID NO: 331472 - RNA, 19 nt, Artificial Sequence
  Description of Artificial Sequence: Synthetic oligonucleotide
cuguacccucaugaguaca

SEQ ID NO: 331473 - RNA, 19 nt, Artificial Sequence
  Description of Artificial Sequence: Synthetic oligonucleotide
ucugaccuuuggguuuauu

SEQ ID NO: 331474 - RNA, 19 nt, Artificial Sequence
  Description of Artificial Sequence: Synthetic oligonucleotide
ggguuuauuugcagccauc

SEQ ID NO: 331475 - RNA, 19 nt, Artificial Sequence
  Description of Artificial Sequence: Synthetic oligonucleotide
gucagacuccuagcagaca

SEQ ID NO: 331476 - RNA, 19 nt, Artificial Sequence
  Description of Artificial Sequence: Synthetic oligonucleotide
gguaauuaauaugcagauu

SEQ ID NO: 331477 - RNA, 19 nt, Artificial Sequence
  Description of Artificial Sequence: Synthetic oligonucleotide
acgcuccuaacagcaugcu

SEQ ID NO: 331478 - RNA, 19 nt, Artificial Sequence
  Description of Artificial Sequence: Synthetic oligonucleotide
ccugauggucuucccuaug

SEQ ID NO: 331479 - RNA, 19 nt, Artificial Sequence
  Description of Artificial Sequence: Synthetic oligonucleotide
cccuaugcccugcucccag

SEQ ID NO: 331480 - RNA, 19 nt, Artificial Sequence
  Description of Artificial Sequence: Synthetic oligonucleotide
cauuagcuuuccugauggu

SEQ ID NO: 331481 - RNA, 19 nt, Artificial Sequence
  Description of Artificial Sequence: Synthetic oligonucleotide
gggguuacacagggaacuc

SEQ ID NO: 331482 - RNA, 19 nt, Artificial Sequence
  Description of Artificial Sequence: Synthetic oligonucleotide
caguacucauugugaacau

SEQ ID NO: 331483 - RNA, 19 nt, Artificial Sequence
  Description of Artificial Sequence: Synthetic oligonucleotide
cugguucaacagacugcaa

SEQ ID NO: 331484 - RNA, 19 nt, Artificial Sequence
  Description of Artificial Sequence: Synthetic oligonucleotide
guccuagugcaaacuacau

SEQ ID NO: 331485 - RNA, 19 nt, Artificial Sequence
  Description of Artificial Sequence: Synthetic oligonucleotide
guuuaccaaccaggagaaa

SEQ ID NO: 331486 - RNA, 19 nt, Artificial Sequence
  Description of Artificial Sequence: Synthetic oligonucleotide
ccagugcaguuccaauuca

SEQ ID NO: 331487 - RNA, 19 nt, Artificial Sequence
  Description of Artificial Sequence: Synthetic oligonucleotide
cgauuugaccugaugagau

SEQ ID NO: 331488 - RNA, 19 nt, Artificial Sequence
  Description of Artificial Sequence: Synthetic oligonucleotide
gccuagucugugaaaauau

SEQ ID NO: 331489 - RNA, 19 nt, Artificial Sequence
  Description of Artificial Sequence: Synthetic oligonucleotide
gccugagcaucgauuugac

SEQ ID NO: 331490 - RNA, 19 nt, Artificial Sequence
  Description of Artificial Sequence: Synthetic oligonucleotide
cagguacaguacucauugu

SEQ ID NO: 331491 - RNA, 19 nt, Artificial Sequence
  Description of Artificial Sequence: Synthetic oligonucleotide
cagaugucuccacguaguu

SEQ ID NO: 331492 - RNA, 19 nt, Artificial Sequence
  Description of Artificial Sequence: Synthetic oligonucleotide
cuccuagcagacacauauu

SEQ ID NO: 331493 - RNA, 19 nt, Artificial Sequence
  Description of Artificial Sequence: Synthetic oligonucleotide
uucugaccuuuggguuuau

SEQ ID NO: 331494 - RNA, 19 nt, Artificial Sequence
  Description of Artificial Sequence: Synthetic oligonucleotide
gguuaggacccugguucaa

SEQ ID NO: 331495 - RNA, 19 nt, Artificial Sequence
  Description of Artificial Sequence: Synthetic oligonucleotide
ggcaagcaucuuuccucaa

SEQ ID NO: 331496 - RNA, 19 nt, Artificial Sequence
  Description of Artificial Sequence: Synthetic oligonucleotide
ccuagucugugaaaauauu

SEQ ID NO: 331497 - RNA, 19 nt, Artificial Sequence
  Description of Artificial Sequence: Synthetic oligonucleotide
aauacuuccaguccaagcc

SEQ ID NO: 331498 - RNA, 19 nt, Artificial Sequence
  Description of Artificial Sequence: Synthetic oligonucleotide
uaauacauagcucaaagcc

SEQ ID NO: 331499 - RNA, 19 nt, Artificial Sequence
  Description of Artificial Sequence: Synthetic oligonucleotide
aauucaucgaaguuggagg

SEQ ID NO: 331500 - RNA, 19 nt, Artificial Sequence
  Description of Artificial Sequence: Synthetic oligonucleotide
gaaaagaaauacuuggugg

SEQ ID NO: 331501 - RNA, 19 nt, Artificial Sequence
  Description of Artificial Sequence: Synthetic oligonucleotide
aguaccauaaguaaagugc

SEQ ID NO: 331502 - RNA, 19 nt, Artificial Sequence
  Description of Artificial Sequence: Synthetic oligonucleotide
uucuagagaagcaagacag

SEQ ID NO: 331503 - RNA, 19 nt, Artificial Sequence
  Description of Artificial Sequence: Synthetic oligonucleotide
aaauacuuccaguccaagc

SEQ ID NO: 331504 - RNA, 19 nt, Artificial Sequence
  Description of Artificial Sequence: Synthetic oligonucleotide
uguuugguaauacauagcu

SEQ ID NO: 331505 - RNA, 19 nt, Artificial Sequence
  Description of Artificial Sequence: Synthetic oligonucleotide
ucagcuauaaagagaaaag

SEQ ID NO: 331506 - RNA, 19 nt, Artificial Sequence
  Description of Artificial Sequence: Synthetic oligonucleotide
ucuaaaugacagcucaagg

SEQ ID NO: 331507 - RNA, 19 nt, Artificial Sequence
  Description of Artificial Sequence: Synthetic oligonucleotide
uuaacauagaaccuccaca

SEQ ID NO: 331508 - RNA, 19 nt, Artificial Sequence
  Description of Artificial Sequence: Synthetic oligonucleotide
uccuauaaaacucuguccu

SEQ ID NO: 331509 - RNA, 19 nt, Artificial Sequence
  Description of Artificial Sequence: Synthetic oligonucleotide
guaaucaugauuccaaggc

SEQ ID NO: 331510 - RNA, 19 nt, Artificial Sequence
  Description of Artificial Sequence: Synthetic oligonucleotide
uuucgaacagcaacaaagg

SEQ ID NO: 331511 - RNA, 19 nt, Artificial Sequence
  Description of Artificial Sequence: Synthetic oligonucleotide
ucaaaauacuuccagucca

SEQ ID NO: 331512 - RNA, 19 nt, Artificial Sequence
  Description of Artificial Sequence: Synthetic oligonucleotide
agcucaaggagcuaacacc

SEQ ID NO: 331513 - RNA, 19 nt, Artificial Sequence
  Description of Artificial Sequence: Synthetic oligonucleotide
acuguuugguaauacauag

SEQ ID NO: 331514 - RNA, 19 nt, Artificial Sequence
  Description of Artificial Sequence: Synthetic oligonucleotide
uugacuaugcguguuaacg

SEQ ID NO: 331515 - RNA, 19 nt, Artificial Sequence
  Description of Artificial Sequence: Synthetic oligonucleotide
uuuaaccgaagaaacuccg

SEQ ID NO: 331516 - RNA, 19 nt, Artificial Sequence
  Description of Artificial Sequence: Synthetic oligonucleotide
auuaacauagaaccuccac

SEQ ID NO: 331517 - RNA, 19 nt, Artificial Sequence
  Description of Artificial Sequence: Synthetic oligonucleotide
aacgcagcaaacauuuucc

SEQ ID NO: 331518 - RNA, 19 nt, Artificial Sequence
  Description of Artificial Sequence: Synthetic oligonucleotide
uguaaucaugauuccaagg

SEQ ID NO: 331519 - RNA, 19 nt, Artificial Sequence
  Description of Artificial Sequence: Synthetic oligonucleotide
uuuguaaucaugauuccaa

SEQ ID NO: 331520 - RNA, 19 nt, Artificial Sequence
  Description of Artificial Sequence: Synthetic oligonucleotide
aaaacacccacaccuguag

SEQ ID NO: 331521 - RNA, 19 nt, Artificial Sequence
  Description of Artificial Sequence: Synthetic oligonucleotide
uaaaacucuguccugugug

SEQ ID NO: 331522 - RNA, 19 nt, Artificial Sequence
  Description of Artificial Sequence: Synthetic oligonucleotide
uuucaauagauaucgcagc

SEQ ID NO: 331523 - RNA, 19 nt, Artificial Sequence
  Description of Artificial Sequence: Synthetic oligonucleotide
ucgggaaauagcaagacaa

SEQ ID NO: 331524 - RNA, 19 nt, Artificial Sequence
  Description of Artificial Sequence: Synthetic oligonucleotide
uggaaagucacucgggcag

SEQ ID NO: 331525 - RNA, 19 nt, Artificial Sequence
  Description of Artificial Sequence: Synthetic oligonucleotide
uacucagugucuauaaucu

SEQ ID NO: 331526 - RNA, 19 nt, Artificial Sequence
  Description of Artificial Sequence: Synthetic oligonucleotide
aaaaugugggcauuuccca

SEQ ID NO: 331527 - RNA, 19 nt, Artificial Sequence
  Description of Artificial Sequence: Synthetic oligonucleotide
aggacuacucaucaguggg

SEQ ID NO: 331528 - RNA, 19 nt, Artificial Sequence
  Description of Artificial Sequence: Synthetic oligonucleotide
gaaagugaaaucacugggg

SEQ ID NO: 331529 - RNA, 19 nt, Artificial Sequence
  Description of Artificial Sequence: Synthetic oligonucleotide
ucgaacagcaacaaagggu

SEQ ID NO: 331530 - RNA, 19 nt, Artificial Sequence
  Description of Artificial Sequence: Synthetic oligonucleotide
uuucucaugacagaaugcc

SEQ ID NO: 331531 - RNA, 19 nt, Artificial Sequence
  Description of Artificial Sequence: Synthetic oligonucleotide
caaagggucacacuagugc

SEQ ID NO: 331532 - RNA, 19 nt, Artificial Sequence
  Description of Artificial Sequence: Synthetic oligonucleotide
caauagauaucgcagccgg

SEQ ID NO: 331533 - RNA, 19 nt, Artificial Sequence
  Description of Artificial Sequence: Synthetic oligonucleotide
aauacauagcucaaagcca

SEQ ID NO: 331534 - RNA, 19 nt, Artificial Sequence
  Description of Artificial Sequence: Synthetic oligonucleotide
ucucaugacagaaugccac

SEQ ID NO: 331535 - RNA, 19 nt, Artificial Sequence
  Description of Artificial Sequence: Synthetic oligonucleotide
ucaucgaugcucuugauuu

SEQ ID NO: 331536 - RNA, 19 nt, Artificial Sequence
  Description of Artificial Sequence: Synthetic oligonucleotide
gacuaugcguguuaacggg

SEQ ID NO: 331537 - RNA, 19 nt, Artificial Sequence
  Description of Artificial Sequence: Synthetic oligonucleotide
uugggaucgggaaauagca

SEQ ID NO: 331538 - RNA, 19 nt, Artificial Sequence
  Description of Artificial Sequence: Synthetic oligonucleotide
uaacauagaaccuccacau

SEQ ID NO: 331539 - RNA, 19 nt, Artificial Sequence
  Description of Artificial Sequence: Synthetic oligonucleotide
cuauguaaaacugagucuc

SEQ ID NO: 331540 - RNA, 19 nt, Artificial Sequence
  Description of Artificial Sequence: Synthetic oligonucleotide
uuuucuaacgcagcaaaca

SEQ ID NO: 331541 - RNA, 19 nt, Artificial Sequence
  Description of Artificial Sequence: Synthetic oligonucleotide
cacagucuuacuuugcugc

SEQ ID NO: 331542 - RNA, 19 nt, Artificial Sequence
  Description of Artificial Sequence: Synthetic oligonucleotide
ugcguuuucuuuaacuaca

SEQ ID NO: 331543 - RNA, 19 nt, Artificial Sequence
  Description of Artificial Sequence: Synthetic oligonucleotide
cauuucaccacaacacagg

SEQ ID NO: 331544 - RNA, 19 nt, Artificial Sequence
  Description of Artificial Sequence: Synthetic oligonucleotide
cuuuaaccgaagaaacucc

SEQ ID NO: 331545 - RNA, 19 nt, Artificial Sequence
  Description of Artificial Sequence: Synthetic oligonucleotide
agugugagaggagagcugc

SEQ ID NO: 331546 - RNA, 19 nt, Artificial Sequence
  Description of Artificial Sequence: Synthetic oligonucleotide
uuacaaucacauugcagag

SEQ ID NO: 331547 - RNA, 19 nt, Artificial Sequence
  Description of Artificial Sequence: Synthetic oligonucleotide
cuaaaugacagcucaagga

SEQ ID NO: 331548 - RNA, 19 nt, Artificial Sequence
  Description of Artificial Sequence: Synthetic oligonucleotide
ucuuuaaccgaagaaacuc

SEQ ID NO: 331549 - RNA, 19 nt, Artificial Sequence
  Description of Artificial Sequence: Synthetic oligonucleotide
uuccuauaaaacucugucc

SEQ ID NO: 331550 - RNA, 19 nt, Artificial Sequence
  Description of Artificial Sequence: Synthetic oligonucleotide
ugcaccaggcucuaaauga

SEQ ID NO: 331551 - RNA, 19 nt, Artificial Sequence
  Description of Artificial Sequence: Synthetic oligonucleotide
auacauagcucaaagccac

SEQ ID NO: 331552 - RNA, 19 nt, Artificial Sequence
  Description of Artificial Sequence: Synthetic oligonucleotide
uuucugcuauguaaaacug

SEQ ID NO: 331553 - RNA, 19 nt, Artificial Sequence
  Description of Artificial Sequence: Synthetic oligonucleotide
agaacgaagcauccccacc

SEQ ID NO: 331554 - RNA, 19 nt, Artificial Sequence
  Description of Artificial Sequence: Synthetic oligonucleotide
uuacccagagucaagacuu

SEQ ID NO: 331555 - RNA, 19 nt, Artificial Sequence
  Description of Artificial Sequence: Synthetic oligonucleotide
agagaguuucacauggccc

SEQ ID NO: 331556 - RNA, 19 nt, Artificial Sequence
  Description of Artificial Sequence: Synthetic oligonucleotide
aaucucaguaauggcgggc

SEQ ID NO: 331557 - RNA, 19 nt, Artificial Sequence
  Description of Artificial Sequence: Synthetic oligonucleotide
uucagcuauaaagagaaaa

SEQ ID NO: 331558 - RNA, 19 nt, Artificial Sequence
  Description of Artificial Sequence: Synthetic oligonucleotide
uuucaagagugugagagga

SEQ ID NO: 331559 - RNA, 19 nt, Artificial Sequence
  Description of Artificial Sequence: Synthetic oligonucleotide
guuaacggguucuacaaac

SEQ ID NO: 331560 - RNA, 19 nt, Artificial Sequence
  Description of Artificial Sequence: Synthetic oligonucleotide
accacaacgggucuaccac

SEQ ID NO: 331561 - RNA, 19 nt, Artificial Sequence
  Description of Artificial Sequence: Synthetic oligonucleotide
uucucuuuaaccgaagaaa

SEQ ID NO: 331562 - RNA, 19 nt, Artificial Sequence
  Description of Artificial Sequence: Synthetic oligonucleotide
ucaauagauaucgcagccg

SEQ ID NO: 331563 - RNA, 19 nt, Artificial Sequence
  Description of Artificial Sequence: Synthetic oligonucleotide
guuccuauaaaacucuguc

SEQ ID NO: 331564 - RNA, 19 nt, Artificial Sequence
  Description of Artificial Sequence: Synthetic oligonucleotide
aucguucccacucacagca

SEQ ID NO: 331565 - RNA, 19 nt, Artificial Sequence
  Description of Artificial Sequence: Synthetic oligonucleotide
ugugcugaucuccugaguc

SEQ ID NO: 331566 - RNA, 19 nt, Artificial Sequence
  Description of Artificial Sequence: Synthetic oligonucleotide
gaaaaugagaguugccaca

SEQ ID NO: 331567 - RNA, 19 nt, Artificial Sequence
  Description of Artificial Sequence: Synthetic oligonucleotide
aacaaagggucacacuagu

SEQ ID NO: 331568 - RNA, 19 nt, Artificial Sequence
  Description of Artificial Sequence: Synthetic oligonucleotide
auagauaucgcagccgguc

SEQ ID NO: 331569 - RNA, 19 nt, Artificial Sequence
  Description of Artificial Sequence: Synthetic oligonucleotide
ugucuauaaucucaguaau

SEQ ID NO: 331570 - RNA, 19 nt, Artificial Sequence
  Description of Artificial Sequence: Synthetic oligonucleotide
uuucuaacgcagcaaacau

SEQ ID NO: 331571 - RNA, 19 nt, Artificial Sequence
  Description of Artificial Sequence: Synthetic oligonucleotide
uuguaaucaugauuccaag

SEQ ID NO: 331572 - RNA, 19 nt, Artificial Sequence
  Description of Artificial Sequence: Synthetic oligonucleotide
accuccacauuuucuaacg

SEQ ID NO: 331573 - RNA, 19 nt, Artificial Sequence
  Description of Artificial Sequence: Synthetic oligonucleotide
uggguuuaagaauauccga

SEQ ID NO: 331574 - RNA, 19 nt, Artificial Sequence
  Description of Artificial Sequence: Synthetic oligonucleotide
ugagguauggggagaaaac

SEQ ID NO: 331575 - RNA, 19 nt, Artificial Sequence
  Description of Artificial Sequence: Synthetic oligonucleotide
uagagaaggcuaacuggcg

SEQ ID NO: 331576 - RNA, 19 nt, Artificial Sequence
  Description of Artificial Sequence: Synthetic oligonucleotide
uaacgcagcaaacauuuuc

SEQ ID NO: 331577 - RNA, 19 nt, Artificial Sequence
  Description of Artificial Sequence: Synthetic oligonucleotide
uuugucucauuucucguuc

SEQ ID NO: 331578 - RNA, 19 nt, Artificial Sequence
  Description of Artificial Sequence: Synthetic oligonucleotide
agugucuauaaucucagua

SEQ ID NO: 331579 - RNA, 19 nt, Artificial Sequence
  Description of Artificial Sequence: Synthetic oligonucleotide
ugaggacuacucaucagug

SEQ ID NO: 331580 - RNA, 19 nt, Artificial Sequence
  Description of Artificial Sequence: Synthetic oligonucleotide
aacuccguuuccuuccgag

SEQ ID NO: 331581 - RNA, 19 nt, Artificial Sequence
  Description of Artificial Sequence: Synthetic oligonucleotide
uaguaccauaaguaaagug

SEQ ID NO: 331582 - RNA, 19 nt, Artificial Sequence
  Description of Artificial Sequence: Synthetic oligonucleotide
guggguuuaagaauauccg

SEQ ID NO: 331583 - RNA, 19 nt, Artificial Sequence
  Description of Artificial Sequence: Synthetic oligonucleotide
agcaaacuggcucguaggg

SEQ ID NO: 331584 - RNA, 19 nt, Artificial Sequence
  Description of Artificial Sequence: Synthetic oligonucleotide
ugaauggaaucuauggcua

SEQ ID NO: 331585 - RNA, 19 nt, Artificial Sequence
  Description of Artificial Sequence: Synthetic oligonucleotide
gaauauccgacucugggaa

SEQ ID NO: 331586 - RNA, 19 nt, Artificial Sequence
  Description of Artificial Sequence: Synthetic oligonucleotide
aacggguucuacaaacuuc

SEQ ID NO: 331587 - RNA, 19 nt, Artificial Sequence
  Description of Artificial Sequence: Synthetic oligonucleotide
agcuaacaccgccagugcc

SEQ ID NO: 331588 - RNA, 19 nt, Artificial Sequence
  Description of Artificial Sequence: Synthetic oligonucleotide
agaauauccgacucuggga

SEQ ID NO: 331589 - RNA, 19 nt, Artificial Sequence
  Description of Artificial Sequence: Synthetic oligonucleotide
uuuugcuuacauuaacaua

SEQ ID NO: 331590 - RNA, 19 nt, Artificial Sequence
  Description of Artificial Sequence: Synthetic oligonucleotide
cuuucaagagugugagagg

SEQ ID NO: 331591 - RNA, 19 nt, Artificial Sequence
  Description of Artificial Sequence: Synthetic oligonucleotide
auugcguuuucuuuaacua

SEQ ID NO: 331592 - RNA, 19 nt, Artificial Sequence
  Description of Artificial Sequence: Synthetic oligonucleotide
uagcaaacuggcucguagg

SEQ ID NO: 331593 - RNA, 19 nt, Artificial Sequence
  Description of Artificial Sequence: Synthetic oligonucleotide
acauagcucaaagccaccc

SEQ ID NO: 331594 - RNA, 19 nt, Artificial Sequence
  Description of Artificial Sequence: Synthetic oligonucleotide
uggaaucuauggcuaauac

SEQ ID NO: 331595 - RNA, 19 nt, Artificial Sequence
  Description of Artificial Sequence: Synthetic oligonucleotide
agugccucccuaccaaaac

SEQ ID NO: 331596 - RNA, 19 nt, Artificial Sequence
  Description of Artificial Sequence: Synthetic oligonucleotide
ccuaguaccauaaguaaag

SEQ ID NO: 331597 - RNA, 19 nt, Artificial Sequence
  Description of Artificial Sequence: Synthetic oligonucleotide
aguaauggcgggcgauggc

SEQ ID NO: 331598 - RNA, 19 nt, Artificial Sequence
  Description of Artificial Sequence: Synthetic oligonucleotide
ucaagagugugagaggaga

SEQ ID NO: 331599 - RNA, 19 nt, Artificial Sequence
  Description of Artificial Sequence: Synthetic oligonucleotide
uuaacggguucuacaaacu

SEQ ID NO: 331600 - RNA, 19 nt, Artificial Sequence
  Description of Artificial Sequence: Synthetic oligonucleotide
gucacuguggguuuaagaa

SEQ ID NO: 331601 - RNA, 19 nt, Artificial Sequence
  Description of Artificial Sequence: Synthetic oligonucleotide
uccuaagacaugaaaccaa

SEQ ID NO: 331602 - RNA, 19 nt, Artificial Sequence
  Description of Artificial Sequence: Synthetic oligonucleotide
aagaaaggguuacuuuuau

SEQ ID NO: 331603 - RNA, 19 nt, Artificial Sequence
  Description of Artificial Sequence: Synthetic oligonucleotide
guacucagugucuauaauc

SEQ ID NO: 331604 - RNA, 19 nt, Artificial Sequence
  Description of Artificial Sequence: Synthetic oligonucleotide
uacccggucugcaugaaga

SEQ ID NO: 331605 - RNA, 19 nt, Artificial Sequence
  Description of Artificial Sequence: Synthetic oligonucleotide
ggagaaaacacccacaccu

SEQ ID NO: 331606 - RNA, 19 nt, Artificial Sequence
  Description of Artificial Sequence: Synthetic oligonucleotide
gccuuguucucuuuaaccg

SEQ ID NO: 331607 - RNA, 19 nt, Artificial Sequence
  Description of Artificial Sequence: Synthetic oligonucleotide
ugccuugacuuccacggag

SEQ ID NO: 331608 - RNA, 19 nt, Artificial Sequence
  Description of Artificial Sequence: Synthetic oligonucleotide
auuauugcguuuucuuuaa

SEQ ID NO: 331609 - RNA, 19 nt, Artificial Sequence
  Description of Artificial Sequence: Synthetic oligonucleotide
acuccguuuccuuccgagc

SEQ ID NO: 331610 - RNA, 19 nt, Artificial Sequence
  Description of Artificial Sequence: Synthetic oligonucleotide
cuguagagaaggcuaacug

SEQ ID NO: 331611 - RNA, 19 nt, Artificial Sequence
  Description of Artificial Sequence: Synthetic oligonucleotide
acacuagugccucccuacc

SEQ ID NO: 331612 - RNA, 19 nt, Artificial Sequence
  Description of Artificial Sequence: Synthetic oligonucleotide
uuccuaagacaugaaacca

SEQ ID NO: 331613 - RNA, 19 nt, Artificial Sequence
  Description of Artificial Sequence: Synthetic oligonucleotide
uggcuaauacuguuucugc

SEQ ID NO: 331614 - RNA, 19 nt, Artificial Sequence
  Description of Artificial Sequence: Synthetic oligonucleotide
uucucaugacagaaugcca

SEQ ID NO: 331615 - RNA, 19 nt, Artificial Sequence
  Description of Artificial Sequence: Synthetic oligonucleotide
auugcagagacuugacuau

SEQ ID NO: 331616 - RNA, 19 nt, Artificial Sequence
  Description of Artificial Sequence: Synthetic oligonucleotide
ucguagggcuucuagagaa

SEQ ID NO: 331617 - RNA, 19 nt, Artificial Sequence
  Description of Artificial Sequence: Synthetic oligonucleotide
uuaaccgaagaaacuccgu

SEQ ID NO: 331618 - RNA, 19 nt, Artificial Sequence
  Description of Artificial Sequence: Synthetic oligonucleotide
caccuagcaaacuggcucg

SEQ ID NO: 331619 - RNA, 19 nt, Artificial Sequence
  Description of Artificial Sequence: Synthetic oligonucleotide
auggcuaauacuguuucug

SEQ ID NO: 331620 - RNA, 19 nt, Artificial Sequence
  Description of Artificial Sequence: Synthetic oligonucleotide
uucaagagugugagaggag

SEQ ID NO: 331621 - RNA, 19 nt, Artificial Sequence
  Description of Artificial Sequence: Synthetic oligonucleotide
auuuguaaucaugauucca

SEQ ID NO: 331622 - RNA, 19 nt, Artificial Sequence
  Description of Artificial Sequence: Synthetic oligonucleotide
cucuaaaugacagcucaag

SEQ ID NO: 331623 - RNA, 19 nt, Artificial Sequence
  Description of Artificial Sequence: Synthetic oligonucleotide
ugugugggcuuucgaacag

SEQ ID NO: 331624 - RNA, 19 nt, Artificial Sequence
  Description of Artificial Sequence: Synthetic oligonucleotide
uaaccgaagaaacuccguu

SEQ ID NO: 331625 - RNA, 19 nt, Artificial Sequence
  Description of Artificial Sequence: Synthetic oligonucleotide
aucucaguaauggcgggcg

SEQ ID NO: 331626 - RNA, 19 nt, Artificial Sequence
  Description of Artificial Sequence: Synthetic oligonucleotide
cucagagcagaaagguggg

SEQ ID NO: 331627 - RNA, 19 nt, Artificial Sequence
  Description of Artificial Sequence: Synthetic oligonucleotide
aaccgaagaaacuccguuu

SEQ ID NO: 331628 - RNA, 19 nt, Artificial Sequence
  Description of Artificial Sequence: Synthetic oligonucleotide
caacaaagggucacacuag

SEQ ID NO: 331629 - RNA, 19 nt, Artificial Sequence
  Description of Artificial Sequence: Synthetic oligonucleotide
agucaagacuuccuaacau

SEQ ID NO: 331630 - RNA, 19 nt, Artificial Sequence
  Description of Artificial Sequence: Synthetic oligonucleotide
guaucaucgaugcucuuga

SEQ ID NO: 331631 - RNA, 19 nt, Artificial Sequence
  Description of Artificial Sequence: Synthetic oligonucleotide
uuccuuccgagcaugugcu

SEQ ID NO: 331632 - RNA, 19 nt, Artificial Sequence
  Description of Artificial Sequence: Synthetic oligonucleotide
cuguuugguaauacauagc

SEQ ID NO: 331633 - RNA, 19 nt, Artificial Sequence
  Description of Artificial Sequence: Synthetic oligonucleotide
cagagcuuguuguacccgg

SEQ ID NO: 331634 - RNA, 19 nt, Artificial Sequence
  Description of Artificial Sequence: Synthetic oligonucleotide
ugauauguucccagucaac

SEQ ID NO: 331635 - RNA, 19 nt, Artificial Sequence
  Description of Artificial Sequence: Synthetic oligonucleotide
agauaucgcagccggucuc

SEQ ID NO: 331636 - RNA, 19 nt, Artificial Sequence
  Description of Artificial Sequence: Synthetic oligonucleotide
acuuacaaucacauugcag

SEQ ID NO: 331637 - RNA, 19 nt, Artificial Sequence
  Description of Artificial Sequence: Synthetic oligonucleotide
uagauaucgcagccggucu

SEQ ID NO: 331638 - RNA, 19 nt, Artificial Sequence
  Description of Artificial Sequence: Synthetic oligonucleotide
auuacuugucacugugggu

SEQ ID NO: 331639 - RNA, 19 nt, Artificial Sequence
  Description of Artificial Sequence: Synthetic oligonucleotide
cucuuugaaacaccuagca

SEQ ID NO: 331640 - RNA, 19 nt, Artificial Sequence
  Description of Artificial Sequence: Synthetic oligonucleotide
cacacaggguucaggaccc

SEQ ID NO: 331641 - RNA, 19 nt, Artificial Sequence
  Description of Artificial Sequence: Synthetic oligonucleotide
gcaguauggaggcacagcc

SEQ ID NO: 331642 - RNA, 19 nt, Artificial Sequence
  Description of Artificial Sequence: Synthetic oligonucleotide
ggagcaauguaaucaggag

SEQ ID NO: 331643 - RNA, 19 nt, Artificial Sequence
  Description of Artificial Sequence: Synthetic oligonucleotide
cagacuuucauuauugcgu

SEQ ID NO: 331644 - RNA, 19 nt, Artificial Sequence
  Description of Artificial Sequence: Synthetic oligonucleotide
aggguucaggaccccaaac

SEQ ID NO: 331645 - RNA, 19 nt, Artificial Sequence
  Description of Artificial Sequence: Synthetic oligonucleotide
agggugauuacuugucacu

SEQ ID NO: 331646 - RNA, 19 nt, Artificial Sequence
  Description of Artificial Sequence: Synthetic oligonucleotide
guugggaucgggaaauagc

SEQ ID NO: 331647 - RNA, 19 nt, Artificial Sequence
  Description of Artificial Sequence: Synthetic oligonucleotide
aagaccucaggagcaaugu

SEQ ID NO: 331648 - RNA, 19 nt, Artificial Sequence
  Description of Artificial Sequence: Synthetic oligonucleotide
cuguuggguguucacacag

SEQ ID NO: 331649 - RNA, 19 nt, Artificial Sequence
  Description of Artificial Sequence: Synthetic oligonucleotide
ugcuuacauuaacauagaa

SEQ ID NO: 331650 - RNA, 19 nt, Artificial Sequence
  Description of Artificial Sequence: Synthetic oligonucleotide
agagugugagaggagagcu

SEQ ID NO: 331651 - RNA, 19 nt, Artificial Sequence
  Description of Artificial Sequence: Synthetic oligonucleotide
acuuaaaguugggaucggg

SEQ ID NO: 331652 - RNA, 19 nt, Artificial Sequence
  Description of Artificial Sequence: Synthetic oligonucleotide
uucccagaacgaagcaucc

SEQ ID NO: 331653 - RNA, 19 nt, Artificial Sequence
  Description of Artificial Sequence: Synthetic oligonucleotide
cauuauugcguuuucuuua

SEQ ID NO: 331654 - RNA, 19 nt, Artificial Sequence
  Description of Artificial Sequence: Synthetic oligonucleotide
guaccauaaguaaagugca

SEQ ID NO: 331655 - RNA, 19 nt, Artificial Sequence
  Description of Artificial Sequence: Synthetic oligonucleotide
gagucaagacuuccuaaca

SEQ ID NO: 331656 - RNA, 19 nt, Artificial Sequence
  Description of Artificial Sequence: Synthetic oligonucleotide
uucaggaccccaaacuguu

SEQ ID NO: 331657 - RNA, 19 nt, Artificial Sequence
  Description of Artificial Sequence: Synthetic oligonucleotide
agacuuucauuauugcguu

SEQ ID NO: 331658 - RNA, 19 nt, Artificial Sequence
  Description of Artificial Sequence: Synthetic oligonucleotide
uauggccgaggagaaaugc

SEQ ID NO: 331659 - RNA, 19 nt, Artificial Sequence
  Description of Artificial Sequence: Synthetic oligonucleotide
augucucuauggaugaauc

SEQ ID NO: 331660 - RNA, 19 nt, Artificial Sequence
  Description of Artificial Sequence: Synthetic oligonucleotide
uguuaacggguucuacaaa

SEQ ID NO: 331661 - RNA, 19 nt, Artificial Sequence
  Description of Artificial Sequence: Synthetic oligonucleotide
aggaccccaaacuguuugg

SEQ ID NO: 331662 - RNA, 19 nt, Artificial Sequence
  Description of Artificial Sequence: Synthetic oligonucleotide
uuauggccgaggagaaaug

SEQ ID NO: 331663 - RNA, 19 nt, Artificial Sequence
  Description of Artificial Sequence: Synthetic oligonucleotide
uccgagcaugugcugaucu

SEQ ID NO: 331664 - RNA, 19 nt, Artificial Sequence
  Description of Artificial Sequence: Synthetic oligonucleotide
aauauccgacucugggaau

SEQ ID NO: 331665 - RNA, 19 nt, Artificial Sequence
  Description of Artificial Sequence: Synthetic oligonucleotide
aacuguuugguaauacaua

SEQ ID NO: 331666 - RNA, 19 nt, Artificial Sequence
  Description of Artificial Sequence: Synthetic oligonucleotide
ggagcuaacaccgccagug

SEQ ID NO: 331667 - RNA, 19 nt, Artificial Sequence
  Description of Artificial Sequence: Synthetic oligonucleotide
cucuauggaugaaucccag

SEQ ID NO: 331668 - RNA, 19 nt, Artificial Sequence
  Description of Artificial Sequence: Synthetic oligonucleotide
gguucaggaccccaaacug

SEQ ID NO: 331669 - RNA, 19 nt, Artificial Sequence
  Description of Artificial Sequence: Synthetic oligonucleotide
aucgggaaauagcaagaca

SEQ ID NO: 331670 - RNA, 19 nt, Artificial Sequence
  Description of Artificial Sequence: Synthetic oligonucleotide
ugcuaaauucaguguuucu

SEQ ID NO: 331671 - RNA, 19 nt, Artificial Sequence
  Description of Artificial Sequence: Synthetic oligonucleotide
acaggcauuggcugguacu

SEQ ID NO: 331672 - RNA, 19 nt, Artificial Sequence
  Description of Artificial Sequence: Synthetic oligonucleotide
cacagagcuuguuguaccc

SEQ ID NO: 331673 - RNA, 19 nt, Artificial Sequence
  Description of Artificial Sequence: Synthetic oligonucleotide
uaacggguucuacaaacuu

SEQ ID NO: 331674 - RNA, 19 nt, Artificial Sequence
  Description of Artificial Sequence: Synthetic oligonucleotide
uucuaacgcagcaaacauu

SEQ ID NO: 331675 - RNA, 19 nt, Artificial Sequence
  Description of Artificial Sequence: Synthetic oligonucleotide
uacauagcucaaagccacc

SEQ ID NO: 331676 - RNA, 19 nt, Artificial Sequence
  Description of Artificial Sequence: Synthetic oligonucleotide
aguuuauucaaaaguugaa

SEQ ID NO: 331677 - RNA, 19 nt, Artificial Sequence
  Description of Artificial Sequence: Synthetic oligonucleotide
aggagcaauguaaucagga

SEQ ID NO: 331678 - RNA, 19 nt, Artificial Sequence
  Description of Artificial Sequence: Synthetic oligonucleotide
ugguccagagcuccuuggc

SEQ ID NO: 331679 - RNA, 19 nt, Artificial Sequence
  Description of Artificial Sequence: Synthetic oligonucleotide
ucaguaauggcgggcgaug

SEQ ID NO: 331680 - RNA, 19 nt, Artificial Sequence
  Description of Artificial Sequence: Synthetic oligonucleotide
aauggcgggcgauggcucu

SEQ ID NO: 331681 - RNA, 19 nt, Artificial Sequence
  Description of Artificial Sequence: Synthetic oligonucleotide
guguuaacggguucuacaa

SEQ ID NO: 331682 - RNA, 19 nt, Artificial Sequence
  Description of Artificial Sequence: Synthetic oligonucleotide
agcaacaaagggucacacu

SEQ ID NO: 331683 - RNA, 19 nt, Artificial Sequence
  Description of Artificial Sequence: Synthetic oligonucleotide
cagggugauuacuugucac

SEQ ID NO: 331684 - RNA, 19 nt, Artificial Sequence
  Description of Artificial Sequence: Synthetic oligonucleotide
augaaucccagcuggugaa

SEQ ID NO: 331685 - RNA, 19 nt, Artificial Sequence
  Description of Artificial Sequence: Synthetic oligonucleotide
gguauggggagaaaacacc

SEQ ID NO: 331686 - RNA, 19 nt, Artificial Sequence
  Description of Artificial Sequence: Synthetic oligonucleotide
uggcgucuguuucuuuucc

SEQ ID NO: 331687 - RNA, 19 nt, Artificial Sequence
  Description of Artificial Sequence: Synthetic oligonucleotide
acggguucuacaaacuucu

SEQ ID NO: 331688 - RNA, 19 nt, Artificial Sequence
  Description of Artificial Sequence: Synthetic oligonucleotide
gaucgggaaauagcaagac

SEQ ID NO: 331689 - RNA, 19 nt, Artificial Sequence
  Description of Artificial Sequence: Synthetic oligonucleotide
uuggguguucacacagacu

SEQ ID NO: 331690 - RNA, 19 nt, Artificial Sequence
  Description of Artificial Sequence: Synthetic oligonucleotide
ucuugcggggucucagagc

SEQ ID NO: 331691 - RNA, 19 nt, Artificial Sequence
  Description of Artificial Sequence: Synthetic oligonucleotide
ggcucuaaaugacagcuca

SEQ ID NO: 331692 - RNA, 19 nt, Artificial Sequence
  Description of Artificial Sequence: Synthetic oligonucleotide
ggguucuacaaacuucuug

SEQ ID NO: 331693 - RNA, 19 nt, Artificial Sequence
  Description of Artificial Sequence: Synthetic oligonucleotide
acaacgggucuaccacuac

SEQ ID NO: 331694 - RNA, 19 nt, Artificial Sequence
  Description of Artificial Sequence: Synthetic oligonucleotide
uaugcguguuaacggguuc

SEQ ID NO: 331695 - RNA, 19 nt, Artificial Sequence
  Description of Artificial Sequence: Synthetic oligonucleotide
ugcaguauggaggcacagc

SEQ ID NO: 331696 - RNA, 19 nt, Artificial Sequence
  Description of Artificial Sequence: Synthetic oligonucleotide
acccggucugcaugaagac

SEQ ID NO: 331697 - RNA, 19 nt, Artificial Sequence
  Description of Artificial Sequence: Synthetic oligonucleotide
cuugacuaugcguguuaac

SEQ ID NO: 331698 - RNA, 19 nt, Artificial Sequence
  Description of Artificial Sequence: Synthetic oligonucleotide
aauagauaucgcagccggu

SEQ ID NO: 331699 - RNA, 19 nt, Artificial Sequence
  Description of Artificial Sequence: Synthetic oligonucleotide
uccuaucaguuuccuggug

SEQ ID NO: 331700 - RNA, 19 nt, Artificial Sequence
  Description of Artificial Sequence: Synthetic oligonucleotide
guagaacggaggccguucc

SEQ ID NO: 331701 - RNA, 19 nt, Artificial Sequence
  Description of Artificial Sequence: Synthetic oligonucleotide
uuccggggaaaggucaaag

SEQ ID NO: 331702 - RNA, 19 nt, Artificial Sequence
  Description of Artificial Sequence: Synthetic oligonucleotide
uguagaacggaggccguuc

SEQ ID NO: 331703 - RNA, 19 nt, Artificial Sequence
  Description of Artificial Sequence: Synthetic oligonucleotide
gcagagacuugacuaugcg

SEQ ID NO: 331704 - RNA, 19 nt, Artificial Sequence
  Description of Artificial Sequence: Synthetic oligonucleotide
agaaaggguuacuuuuauu

SEQ ID NO: 331705 - RNA, 19 nt, Artificial Sequence
  Description of Artificial Sequence: Synthetic oligonucleotide
gaugggaacuuccggggaa

SEQ ID NO: 331706 - RNA, 19 nt, Artificial Sequence
  Description of Artificial Sequence: Synthetic oligonucleotide
uguuguacccggucugcau

SEQ ID NO: 331707 - RNA, 19 nt, Artificial Sequence
  Description of Artificial Sequence: Synthetic oligonucleotide
gaaucccagcuggugaaug

SEQ ID NO: 331708 - RNA, 19 nt, Artificial Sequence
  Description of Artificial Sequence: Synthetic oligonucleotide
uugcagagacuugacuaug

SEQ ID NO: 331709 - RNA, 19 nt, Artificial Sequence
  Description of Artificial Sequence: Synthetic oligonucleotide
agaugggaacuuccgggga

SEQ ID NO: 331710 - RNA, 19 nt, Artificial Sequence
  Description of Artificial Sequence: Synthetic oligonucleotide
auacaugaucaccccgagu

SEQ ID NO: 331711 - RNA, 19 nt, Artificial Sequence
  Description of Artificial Sequence: Synthetic oligonucleotide
agcaagacagcugcuuaug

SEQ ID NO: 331712 - RNA, 19 nt, Artificial Sequence
  Description of Artificial Sequence: Synthetic oligonucleotide
ugggaucgggaaauagcaa

SEQ ID NO: 331713 - RNA, 19 nt, Artificial Sequence
  Description of Artificial Sequence: Synthetic oligonucleotide
uccugagucguuucuccuc

SEQ ID NO: 331714 - RNA, 19 nt, Artificial Sequence
  Description of Artificial Sequence: Synthetic oligonucleotide
acucuaucguucccacuca

SEQ ID NO: 331715 - RNA, 19 nt, Artificial Sequence
  Description of Artificial Sequence: Synthetic oligonucleotide
acuacucaucagugggcug

SEQ ID NO: 331716 - RNA, 19 nt, Artificial Sequence
  Description of Artificial Sequence: Synthetic oligonucleotide
ugcugaucuccugagucgu

SEQ ID NO: 331717 - RNA, 19 nt, Artificial Sequence
  Description of Artificial Sequence: Synthetic oligonucleotide
aaagugcaccaugaaugaa

SEQ ID NO: 331718 - RNA, 19 nt, Artificial Sequence
  Description of Artificial Sequence: Synthetic oligonucleotide
cucuugcggggucucagag

SEQ ID NO: 331719 - RNA, 19 nt, Artificial Sequence
  Description of Artificial Sequence: Synthetic oligonucleotide
uccuaggucucugcuuucc

SEQ ID NO: 331720 - RNA, 19 nt, Artificial Sequence
  Description of Artificial Sequence: Synthetic oligonucleotide
caguaauggcgggcgaugg

SEQ ID NO: 331721 - RNA, 19 nt, Artificial Sequence
  Description of Artificial Sequence: Synthetic oligonucleotide
cuccguuuccuuccgagca

SEQ ID NO: 331722 - RNA, 19 nt, Artificial Sequence
  Description of Artificial Sequence: Synthetic oligonucleotide
gguuuaagaauauccgacu

SEQ ID NO: 331723 - RNA, 19 nt, Artificial Sequence
  Description of Artificial Sequence: Synthetic oligonucleotide
uaauggcgggcgauggcuc

SEQ ID NO: 331724 - RNA, 19 nt, Artificial Sequence
  Description of Artificial Sequence: Synthetic oligonucleotide
ggcauuucccagaacgaag

SEQ ID NO: 331725 - RNA, 19 nt, Artificial Sequence
  Description of Artificial Sequence: Synthetic oligonucleotide
gggaccgcuggccaguuag

SEQ ID NO: 331726 - RNA, 19 nt, Artificial Sequence
  Description of Artificial Sequence: Synthetic oligonucleotide
acgcagcaaacauuuucca

SEQ ID NO: 331727 - RNA, 19 nt, Artificial Sequence
  Description of Artificial Sequence: Synthetic oligonucleotide
uccgacucugggaauucau

SEQ ID NO: 331728 - RNA, 19 nt, Artificial Sequence
  Description of Artificial Sequence: Synthetic oligonucleotide
cugugugggcuuucgaaca

SEQ ID NO: 331729 - RNA, 19 nt, Artificial Sequence
  Description of Artificial Sequence: Synthetic oligonucleotide
ucccugauauguucccagu

SEQ ID NO: 331730 - RNA, 19 nt, Artificial Sequence
  Description of Artificial Sequence: Synthetic oligonucleotide
cugauauguucccagucaa

SEQ ID NO: 331731 - RNA, 19 nt, Artificial Sequence
  Description of Artificial Sequence: Synthetic oligonucleotide
caaggagcuaacaccgcca

SEQ ID NO: 331732 - RNA, 19 nt, Artificial Sequence
  Description of Artificial Sequence: Synthetic oligonucleotide
agcagaaccucagaaucaa

SEQ ID NO: 331733 - RNA, 19 nt, Artificial Sequence
  Description of Artificial Sequence: Synthetic oligonucleotide
agaaggcuaacuggcgucu

SEQ ID NO: 331734 - RNA, 19 nt, Artificial Sequence
  Description of Artificial Sequence: Synthetic oligonucleotide
cuuacccagagucaagacu

SEQ ID NO: 331735 - RNA, 19 nt, Artificial Sequence
  Description of Artificial Sequence: Synthetic oligonucleotide
acaaagggucacacuagug

SEQ ID NO: 331736 - RNA, 19 nt, Artificial Sequence
  Description of Artificial Sequence: Synthetic oligonucleotide
uagaacggaggccguuccu

SEQ ID NO: 331737 - RNA, 19 nt, Artificial Sequence
  Description of Artificial Sequence: Synthetic oligonucleotide
ucacacuagugccucccua

SEQ ID NO: 331738 - RNA, 19 nt, Artificial Sequence
  Description of Artificial Sequence: Synthetic oligonucleotide
uagugccucccuaccaaaa

SEQ ID NO: 331739 - RNA, 19 nt, Artificial Sequence
  Description of Artificial Sequence: Synthetic oligonucleotide
aguugggugugagcugagg

SEQ ID NO: 331740 - RNA, 19 nt, Artificial Sequence
  Description of Artificial Sequence: Synthetic oligonucleotide
ccuauaaaacucuguccug

SEQ ID NO: 331741 - RNA, 19 nt, Artificial Sequence
  Description of Artificial Sequence: Synthetic oligonucleotide
gaacggaggccguuccuuc

SEQ ID NO: 331742 - RNA, 19 nt, Artificial Sequence
  Description of Artificial Sequence: Synthetic oligonucleotide
uuuugggugcaggggcaag

SEQ ID NO: 331743 - RNA, 19 nt, Artificial Sequence
  Description of Artificial Sequence: Synthetic oligonucleotide
ugcccuuacccagagucaa

SEQ ID NO: 331744 - RNA, 19 nt, Artificial Sequence
  Description of Artificial Sequence: Synthetic oligonucleotide
ccauaaguaaagugcacca

SEQ ID NO: 331745 - RNA, 19 nt, Artificial Sequence
  Description of Artificial Sequence: Synthetic oligonucleotide
caucgaugcucuugauuuc

SEQ ID NO: 331746 - RNA, 19 nt, Artificial Sequence
  Description of Artificial Sequence: Synthetic oligonucleotide
aaagucacucgggcaggcu

SEQ ID NO: 331747 - RNA, 19 nt, Artificial Sequence
  Description of Artificial Sequence: Synthetic oligonucleotide
uccguuuccuuccgagcau

SEQ ID NO: 331748 - RNA, 19 nt, Artificial Sequence
  Description of Artificial Sequence: Synthetic oligonucleotide
gggugauuacuugucacug

SEQ ID NO: 331749 - RNA, 19 nt, Artificial Sequence
  Description of Artificial Sequence: Synthetic oligonucleotide
ggggucuuugcccuaguac

SEQ ID NO: 331750 - RNA, 19 nt, Artificial Sequence
  Description of Artificial Sequence: Synthetic oligonucleotide
gcuaacuggcgucuguuuc

SEQ ID NO: 331751 - RNA, 19 nt, Artificial Sequence
  Description of Artificial Sequence: Synthetic oligonucleotide
cacggaggcuggaaaauga

SEQ ID NO: 331752 - RNA, 19 nt, Artificial Sequence
  Description of Artificial Sequence: Synthetic oligonucleotide
ggaaucuauggcuaauacu

SEQ ID NO: 331753 - RNA, 19 nt, Artificial Sequence
  Description of Artificial Sequence: Synthetic oligonucleotide
auaggucaguggguuuggg

SEQ ID NO: 331754 - RNA, 19 nt, Artificial Sequence
  Description of Artificial Sequence: Synthetic oligonucleotide
uggagguaucaucgaugcu

SEQ ID NO: 331755 - RNA, 19 nt, Artificial Sequence
  Description of Artificial Sequence: Synthetic oligonucleotide
acuaugcguguuaacgggu

SEQ ID NO: 331756 - RNA, 19 nt, Artificial Sequence
  Description of Artificial Sequence: Synthetic oligonucleotide
ccuaccaaaacaggagagc

SEQ ID NO: 331757 - RNA, 19 nt, Artificial Sequence
  Description of Artificial Sequence: Synthetic oligonucleotide
ggggaaaggucaaaguuuc

SEQ ID NO: 331758 - RNA, 19 nt, Artificial Sequence
  Description of Artificial Sequence: Synthetic oligonucleotide
ccgcuggccaguuagggcc

SEQ ID NO: 331759 - RNA, 19 nt, Artificial Sequence
  Description of Artificial Sequence: Synthetic oligonucleotide
gcuaacaccgccagugccc

SEQ ID NO: 331760 - RNA, 19 nt, Artificial Sequence
  Description of Artificial Sequence: Synthetic oligonucleotide
agugcugcacagggaccgc

SEQ ID NO: 331761 - RNA, 19 nt, Artificial Sequence
  Description of Artificial Sequence: Synthetic oligonucleotide
cucuaucguucccacucac

SEQ ID NO: 331762 - RNA, 19 nt, Artificial Sequence
  Description of Artificial Sequence: Synthetic oligonucleotide
aacaccgccagugcccuua

SEQ ID NO: 331763 - RNA, 19 nt, Artificial Sequence
  Description of Artificial Sequence: Synthetic oligonucleotide
gugccucccuaccaaaaca

SEQ ID NO: 331764 - RNA, 19 nt, Artificial Sequence
  Description of Artificial Sequence: Synthetic oligonucleotide
augcguguuaacggguucu

SEQ ID NO: 331765 - RNA, 19 nt, Artificial Sequence
  Description of Artificial Sequence: Synthetic oligonucleotide
gacagcugcuuauggccga

SEQ ID NO: 331766 - RNA, 19 nt, Artificial Sequence
  Description of Artificial Sequence: Synthetic oligonucleotide
ucccagaacgaagcauccc

SEQ ID NO: 331767 - RNA, 19 nt, Artificial Sequence
  Description of Artificial Sequence: Synthetic oligonucleotide
gaggcuccaacucuaucgu

SEQ ID NO: 331768 - RNA, 19 nt, Artificial Sequence
  Description of Artificial Sequence: Synthetic oligonucleotide
cccuaccaaaacaggagag

SEQ ID NO: 331769 - RNA, 19 nt, Artificial Sequence
  Description of Artificial Sequence: Synthetic oligonucleotide
auauccgacucugggaauu

SEQ ID NO: 331770 - RNA, 19 nt, Artificial Sequence
  Description of Artificial Sequence: Synthetic oligonucleotide
acuugacuaugcguguuaa

SEQ ID NO: 331771 - RNA, 19 nt, Artificial Sequence
  Description of Artificial Sequence: Synthetic oligonucleotide
acggaggcuggaaaaugag

SEQ ID NO: 331772 - RNA, 19 nt, Artificial Sequence
  Description of Artificial Sequence: Synthetic oligonucleotide
guacccggucugcaugaag

SEQ ID NO: 331773 - RNA, 19 nt, Artificial Sequence
  Description of Artificial Sequence: Synthetic oligonucleotide
ggcuacuuaaaguugggau

SEQ ID NO: 331774 - RNA, 19 nt, Artificial Sequence
  Description of Artificial Sequence: Synthetic oligonucleotide
gcgcuuguagguguaauug

SEQ ID NO: 331775 - RNA, 19 nt, Artificial Sequence
  Description of Artificial Sequence: Synthetic oligonucleotide
gagguaucaucgaugcucu

SEQ ID NO: 331776 - RNA, 19 nt, Artificial Sequence
  Description of Artificial Sequence: Synthetic oligonucleotide
cuuauggccgaggagaaau

SEQ ID NO: 331777 - RNA, 19 nt, Artificial Sequence
  Description of Artificial Sequence: Synthetic oligonucleotide
aggcucuaaaugacagcuc

SEQ ID NO: 331778 - RNA, 19 nt, Artificial Sequence
  Description of Artificial Sequence: Synthetic oligonucleotide
ccugauauguucccaguca

SEQ ID NO: 331779 - RNA, 19 nt, Artificial Sequence
  Description of Artificial Sequence: Synthetic oligonucleotide
uccacggaggcuggaaaau

SEQ ID NO: 331780 - RNA, 19 nt, Artificial Sequence
  Description of Artificial Sequence: Synthetic oligonucleotide
gacuacucaucagugggcu

SEQ ID NO: 331781 - RNA, 19 nt, Artificial Sequence
  Description of Artificial Sequence: Synthetic oligonucleotide
uaucaucgaugcucuugau

SEQ ID NO: 331782 - RNA, 19 nt, Artificial Sequence
  Description of Artificial Sequence: Synthetic oligonucleotide
ggaugaaucccagcuggug

SEQ ID NO: 331783 - RNA, 19 nt, Artificial Sequence
  Description of Artificial Sequence: Synthetic oligonucleotide
gucaagacuuccuaacauu

SEQ ID NO: 331784 - RNA, 19 nt, Artificial Sequence
  Description of Artificial Sequence: Synthetic oligonucleotide
gaaggcuaacuggcgucug

SEQ ID NO: 331785 - RNA, 19 nt, Artificial Sequence
  Description of Artificial Sequence: Synthetic oligonucleotide
accaugaaugaaggcugug

SEQ ID NO: 331786 - RNA, 19 nt, Artificial Sequence
  Description of Artificial Sequence: Synthetic oligonucleotide
ugugggcauuucccagaac

SEQ ID NO: 331787 - RNA, 19 nt, Artificial Sequence
  Description of Artificial Sequence: Synthetic oligonucleotide
cuccaacucuaucguuccc

SEQ ID NO: 331788 - RNA, 19 nt, Artificial Sequence
  Description of Artificial Sequence: Synthetic oligonucleotide
cagguuccuauaaaacucu

SEQ ID NO: 331789 - RNA, 19 nt, Artificial Sequence
  Description of Artificial Sequence: Synthetic oligonucleotide
uauccgacucugggaauuc

SEQ ID NO: 331790 - RNA, 19 nt, Artificial Sequence
  Description of Artificial Sequence: Synthetic oligonucleotide
ccuaagacaugaaaccaaa

SEQ ID NO: 331791 - RNA, 19 nt, Artificial Sequence
  Description of Artificial Sequence: Synthetic oligonucleotide
uggggucuuugcccuagua

SEQ ID NO: 331792 - RNA, 19 nt, Artificial Sequence
  Description of Artificial Sequence: Synthetic oligonucleotide
uccuuccgagcaugugcug

SEQ ID NO: 331793 - RNA, 19 nt, Artificial Sequence
  Description of Artificial Sequence: Synthetic oligonucleotide
auggccgaggagaaaugcu

SEQ ID NO: 331794 - RNA, 19 nt, Artificial Sequence
  Description of Artificial Sequence: Synthetic oligonucleotide
gccgucagccccucaaagc

SEQ ID NO: 331795 - RNA, 19 nt, Artificial Sequence
  Description of Artificial Sequence: Synthetic oligonucleotide
agaacggaggccguuccuu

SEQ ID NO: 331796 - RNA, 19 nt, Artificial Sequence
  Description of Artificial Sequence: Synthetic oligonucleotide
gcguuuucuuuaacuacag

SEQ ID NO: 331797 - RNA, 19 nt, Artificial Sequence
  Description of Artificial Sequence: Synthetic oligonucleotide
guaauggcgggcgauggcu

SEQ ID NO: 331798 - RNA, 19 nt, Artificial Sequence
  Description of Artificial Sequence: Synthetic oligonucleotide
ggacuacucaucagugggc

SEQ ID NO: 331799 - RNA, 19 nt, Artificial Sequence
  Description of Artificial Sequence: Synthetic oligonucleotide
gcaaacuggcucguagggc

SEQ ID NO: 331800 - RNA, 19 nt, Artificial Sequence
  Description of Artificial Sequence: Synthetic oligonucleotide
cacuagugccucccuacca

SEQ ID NO: 331801 - RNA, 19 nt, Artificial Sequence
  Description of Artificial Sequence: Synthetic oligonucleotide
auaucgcagccggucucuc

SEQ ID NO: 331802 - RNA, 19 nt, Artificial Sequence
  Description of Artificial Sequence: Synthetic oligonucleotide
ccaaacuguuugguaauac

SEQ ID NO: 331803 - RNA, 19 nt, Artificial Sequence
  Description of Artificial Sequence: Synthetic oligonucleotide
gauaucgcagccggucucu

SEQ ID NO: 331804 - RNA, 19 nt, Artificial Sequence
  Description of Artificial Sequence: Synthetic oligonucleotide
ccgaagaaacuccguuucc

SEQ ID NO: 331805 - RNA, 19 nt, Artificial Sequence
  Description of Artificial Sequence: Synthetic oligonucleotide
ccucccuaccaaaacagga

SEQ ID NO: 331806 - RNA, 19 nt, Artificial Sequence
  Description of Artificial Sequence: Synthetic oligonucleotide
ggcuaauacuguuucugcu

SEQ ID NO: 331807 - RNA, 19 nt, Artificial Sequence
  Description of Artificial Sequence: Synthetic oligonucleotide
ggcugugugggcuuucgaa

SEQ ID NO: 331808 - RNA, 19 nt, Artificial Sequence
  Description of Artificial Sequence: Synthetic oligonucleotide
uggccgucagccccucaaa

SEQ ID NO: 331809 - RNA, 19 nt, Artificial Sequence
  Description of Artificial Sequence: Synthetic oligonucleotide
gugcaguauggaggcacag

SEQ ID NO: 331810 - RNA, 19 nt, Artificial Sequence
  Description of Artificial Sequence: Synthetic oligonucleotide
uuccuaggucucugcuuuc

SEQ ID NO: 331811 - RNA, 19 nt, Artificial Sequence
  Description of Artificial Sequence: Synthetic oligonucleotide
cacaacgggucuaccacua

SEQ ID NO: 331812 - RNA, 19 nt, Artificial Sequence
  Description of Artificial Sequence: Synthetic oligonucleotide
ugcguguuaacggguucua

SEQ ID NO: 331813 - RNA, 19 nt, Artificial Sequence
  Description of Artificial Sequence: Synthetic oligonucleotide
ggccgucagccccucaaag

SEQ ID NO: 331814 - RNA, 19 nt, Artificial Sequence
  Description of Artificial Sequence: Synthetic oligonucleotide
agacuugacuaugcguguu

SEQ ID NO: 331815 - RNA, 19 nt, Artificial Sequence
  Description of Artificial Sequence: Synthetic oligonucleotide
ggguucaggaccccaaacu

SEQ ID NO: 331816 - RNA, 19 nt, Artificial Sequence
  Description of Artificial Sequence: Synthetic oligonucleotide
gugagaggagagcugcagu

SEQ ID NO: 331817 - RNA, 19 nt, Artificial Sequence
  Description of Artificial Sequence: Synthetic oligonucleotide
ccccgagugaccaccaauc

SEQ ID NO: 331818 - RNA, 19 nt, Artificial Sequence
  Description of Artificial Sequence: Synthetic oligonucleotide
ccgagugaccaccaaucac

SEQ ID NO: 331819 - RNA, 19 nt, Artificial Sequence
  Description of Artificial Sequence: Synthetic oligonucleotide
cgggcgauggcucuuuccc

SEQ ID NO: 331820 - RNA, 19 nt, Artificial Sequence
  Description of Artificial Sequence: Synthetic oligonucleotide
ccaugaguugggugugagc

SEQ ID NO: 331821 - RNA, 19 nt, Artificial Sequence
  Description of Artificial Sequence: Synthetic oligonucleotide
ccuuacccagagucaagac

SEQ ID NO: 331822 - RNA, 19 nt, Artificial Sequence
  Description of Artificial Sequence: Synthetic oligonucleotide
augggaacuuccggggaaa

SEQ ID NO: 331823 - RNA, 19 nt, Artificial Sequence
  Description of Artificial Sequence: Synthetic oligonucleotide
cauaaguaaagugcaccau

SEQ ID NO: 331824 - RNA, 19 nt, Artificial Sequence
  Description of Artificial Sequence: Synthetic oligonucleotide
cuaguaccauaaguaaagu

SEQ ID NO: 331825 - RNA, 19 nt, Artificial Sequence
  Description of Artificial Sequence: Synthetic oligonucleotide
aaacuggcucguagggcuu

SEQ ID NO: 331826 - RNA, 19 nt, Artificial Sequence
  Description of Artificial Sequence: Synthetic oligonucleotide
agaguuucacauggcccuu

SEQ ID NO: 331827 - RNA, 19 nt, Artificial Sequence
  Description of Artificial Sequence: Synthetic oligonucleotide
gccucccuaccaaaacagg

SEQ ID NO: 331828 - RNA, 19 nt, Artificial Sequence
  Description of Artificial Sequence: Synthetic oligonucleotide
cccugauauguucccaguc

SEQ ID NO: 331829 - RNA, 19 nt, Artificial Sequence
  Description of Artificial Sequence: Synthetic oligonucleotide
ggucuaccacuacucugac

SEQ ID NO: 331830 - RNA, 19 nt, Artificial Sequence
  Description of Artificial Sequence: Synthetic oligonucleotide
ccgacucugggaauucauc

SEQ ID NO: 331831 - RNA, 19 nt, Artificial Sequence
  Description of Artificial Sequence: Synthetic oligonucleotide
caacgggucuaccacuacu

SEQ ID NO: 331832 - RNA, 19 nt, Artificial Sequence
  Description of Artificial Sequence: Synthetic oligonucleotide
gcagcacgaggcuuuggga

SEQ ID NO: 331833 - RNA, 19 nt, Artificial Sequence
  Description of Artificial Sequence: Synthetic oligonucleotide
auccgacucugggaauuca

SEQ ID NO: 331834 - RNA, 19 nt, Artificial Sequence
  Description of Artificial Sequence: Synthetic oligonucleotide
cugguacucagugucuaua

SEQ ID NO: 331835 - RNA, 19 nt, Artificial Sequence
  Description of Artificial Sequence: Synthetic oligonucleotide
gcaauguaaucaggaguuc

SEQ ID NO: 331836 - RNA, 19 nt, Artificial Sequence
  Description of Artificial Sequence: Synthetic oligonucleotide
cuaugcguguuaacggguu

SEQ ID NO: 331837 - RNA, 19 nt, Artificial Sequence
  Description of Artificial Sequence: Synthetic oligonucleotide
uuccgagcaugugcugauc

SEQ ID NO: 331838 - RNA, 19 nt, Artificial Sequence
  Description of Artificial Sequence: Synthetic oligonucleotide
cagcccuaguugcaggcaa

SEQ ID NO: 331839 - RNA, 19 nt, Artificial Sequence
  Description of Artificial Sequence: Synthetic oligonucleotide
cuggccgucagccccucaa

SEQ ID NO: 331840 - RNA, 19 nt, Artificial Sequence
  Description of Artificial Sequence: Synthetic oligonucleotide
gagauaggucaguggguuu

SEQ ID NO: 331841 - RNA, 19 nt, Artificial Sequence
  Description of Artificial Sequence: Synthetic oligonucleotide
ggagauaggucaguggguu

SEQ ID NO: 331842 - RNA, 19 nt, Artificial Sequence
  Description of Artificial Sequence: Synthetic oligonucleotide
cugccuugacuuccacgga

SEQ ID NO: 331843 - RNA, 19 nt, Artificial Sequence
  Description of Artificial Sequence: Synthetic oligonucleotide
cuaacaccgccagugcccu

SEQ ID NO: 331844 - RNA, 19 nt, Artificial Sequence
  Description of Artificial Sequence: Synthetic oligonucleotide
ggaccgcuggccaguuagg

SEQ ID NO: 331845 - RNA, 19 nt, Artificial Sequence
  Description of Artificial Sequence: Synthetic oligonucleotide
gucuaccacuacucugacu

SEQ ID NO: 331846 - RNA, 19 nt, Artificial Sequence
  Description of Artificial Sequence: Synthetic oligonucleotide
cuuuugggugcaggggcaa

SEQ ID NO: 331847 - RNA, 19 nt, Artificial Sequence
  Description of Artificial Sequence: Synthetic oligonucleotide
agguaucaucgaugcucuu

SEQ ID NO: 331848 - RNA, 19 nt, Artificial Sequence
  Description of Artificial Sequence: Synthetic oligonucleotide
cuuccgagcaugugcugau

SEQ ID NO: 331849 - RNA, 19 nt, Artificial Sequence
  Description of Artificial Sequence: Synthetic oligonucleotide
cccuaguugcaggcaaccc

SEQ ID NO: 331850 - RNA, 19 nt, Artificial Sequence
  Description of Artificial Sequence: Synthetic oligonucleotide
ccgagcaugugcugaucuc

SEQ ID NO: 331851 - RNA, 19 nt, Artificial Sequence
  Description of Artificial Sequence: Synthetic oligonucleotide
ccacggaggcuggaaaaug

SEQ ID NO: 331852 - RNA, 19 nt, Artificial Sequence
  Description of Artificial Sequence: Synthetic oligonucleotide
ccgaggagaaaugcuuguc

SEQ ID NO: 331853 - RNA, 19 nt, Artificial Sequence
  Description of Artificial Sequence: Synthetic oligonucleotide
cucaguaauggcgggcgau

SEQ ID NO: 331854 - RNA, 19 nt, Artificial Sequence
  Description of Artificial Sequence: Synthetic oligonucleotide
gcguguuaacggguucuac

SEQ ID NO: 331855 - RNA, 19 nt, Artificial Sequence
  Description of Artificial Sequence: Synthetic oligonucleotide
cccuuacccagagucaaga

SEQ ID NO: 331856 - RNA, 19 nt, Artificial Sequence
  Description of Artificial Sequence: Synthetic oligonucleotide
caccgccagugcccuuacc

SEQ ID NO: 331857 - RNA, 19 nt, Artificial Sequence
  Description of Artificial Sequence: Synthetic oligonucleotide
agccggucucucccugaua

SEQ ID NO: 331858 - RNA, 19 nt, Artificial Sequence
  Description of Artificial Sequence: Synthetic oligonucleotide
cuaacgcagcaaacauuuu

SEQ ID NO: 331859 - RNA, 19 nt, Artificial Sequence
  Description of Artificial Sequence: Synthetic oligonucleotide
gcccuuacccagagucaag

SEQ ID NO: 331860 - RNA, 19 nt, Artificial Sequence
  Description of Artificial Sequence: Synthetic oligonucleotide
ccguuuccuuccgagcaug

SEQ ID NO: 331861 - RNA, 19 nt, Artificial Sequence
  Description of Artificial Sequence: Synthetic oligonucleotide
uaacaccgccagugcccuu

SEQ ID NO: 331862 - RNA, 19 nt, Artificial Sequence
  Description of Artificial Sequence: Synthetic oligonucleotide
ggcugguacucagugucua

SEQ ID NO: 331863 - RNA, 19 nt, Artificial Sequence
  Description of Artificial Sequence: Synthetic oligonucleotide
ggaccccaaacuguuuggu

SEQ ID NO: 331864 - RNA, 19 nt, Artificial Sequence
  Description of Artificial Sequence: Synthetic oligonucleotide
gcaacccuuuugggugcag

SEQ ID NO: 331865 - RNA, 19 nt, Artificial Sequence
  Description of Artificial Sequence: Synthetic oligonucleotide
uggcgggcgauggcucuuu

SEQ ID NO: 331866 - RNA, 19 nt, Artificial Sequence
  Description of Artificial Sequence: Synthetic oligonucleotide
gggcccucagcacagucuu

SEQ ID NO: 331867 - RNA, 19 nt, Artificial Sequence
  Description of Artificial Sequence: Synthetic oligonucleotide
agggaccgcuggccaguua

SEQ ID NO: 331868 - RNA, 19 nt, Artificial Sequence
  Description of Artificial Sequence: Synthetic oligonucleotide
cauggcccuugcuguccaa

SEQ ID NO: 331869 - RNA, 19 nt, Artificial Sequence
  Description of Artificial Sequence: Synthetic oligonucleotide
cgaagaaacuccguuuccu

SEQ ID NO: 331870 - RNA, 19 nt, Artificial Sequence
  Description of Artificial Sequence: Synthetic oligonucleotide
auggcgggcgauggcucuu

SEQ ID NO: 331871 - RNA, 19 nt, Artificial Sequence
  Description of Artificial Sequence: Synthetic oligonucleotide
ggcuaacuggcgucuguuu

SEQ ID NO: 331872 - RNA, 19 nt, Artificial Sequence
  Description of Artificial Sequence: Synthetic oligonucleotide
gcuuauggccgaggagaaa

SEQ ID NO: 331873 - RNA, 19 nt, Artificial Sequence
  Description of Artificial Sequence: Synthetic oligonucleotide
gccguuccuucagccacac

SEQ ID NO: 331874 - RNA, 19 nt, Artificial Sequence
  Description of Artificial Sequence: Synthetic oligonucleotide
ccacaacgggucuaccacu

SEQ ID NO: 331875 - RNA, 19 nt, Artificial Sequence
  Description of Artificial Sequence: Synthetic oligonucleotide
ggcaacccuuuugggugca

SEQ ID NO: 331876 - RNA, 19 nt, Artificial Sequence
  Description of Artificial Sequence: Synthetic oligonucleotide
ccaccacaacgggucuacc

SEQ ID NO: 331877 - RNA, 19 nt, Artificial Sequence
  Description of Artificial Sequence: Synthetic oligonucleotide
cuguagaacggaggccguu

SEQ ID NO: 331878 - RNA, 19 nt, Artificial Sequence
  Description of Artificial Sequence: Synthetic oligonucleotide
ggcgggcgauggcucuuuc

SEQ ID NO: 331879 - RNA, 19 nt, Artificial Sequence
  Description of Artificial Sequence: Synthetic oligonucleotide
cggucucucccugauaugu

SEQ ID NO: 331880 - RNA, 19 nt, Artificial Sequence
  Description of Artificial Sequence: Synthetic oligonucleotide
cuggcucguagggcuucua

SEQ ID NO: 331881 - RNA, 19 nt, Artificial Sequence
  Description of Artificial Sequence: Synthetic oligonucleotide
gcggggucucagagcagaa

SEQ ID NO: 331882 - RNA, 19 nt, Artificial Sequence
  Description of Artificial Sequence: Synthetic oligonucleotide
gcugaucuccugagucguu

SEQ ID NO: 331883 - RNA, 19 nt, Artificial Sequence
  Description of Artificial Sequence: Synthetic oligonucleotide
cagggaccgcuggccaguu

SEQ ID NO: 331884 - RNA, 19 nt, Artificial Sequence
  Description of Artificial Sequence: Synthetic oligonucleotide
cggguucuacaaacuucuu

SEQ ID NO: 331885 - RNA, 19 nt, Artificial Sequence
  Description of Artificial Sequence: Synthetic oligonucleotide
ccguuccuucagccacacu

SEQ ID NO: 331886 - RNA, 19 nt, Artificial Sequence
  Description of Artificial Sequence: Synthetic oligonucleotide
aauaucugggaguugguac

SEQ ID NO: 331887 - RNA, 19 nt, Artificial Sequence
  Description of Artificial Sequence: Synthetic oligonucleotide
aagacuaagucggugaggg

SEQ ID NO: 331888 - RNA, 19 nt, Artificial Sequence
  Description of Artificial Sequence: Synthetic oligonucleotide
aaaacugaggaggacgggc

SEQ ID NO: 331889 - RNA, 19 nt, Artificial Sequence
  Description of Artificial Sequence: Synthetic oligonucleotide
gagaauuaauaucugggag

SEQ ID NO: 331890 - RNA, 19 nt, Artificial Sequence
  Description of Artificial Sequence: Synthetic oligonucleotide
gauggcuugaguucggagg

SEQ ID NO: 331891 - RNA, 19 nt, Artificial Sequence
  Description of Artificial Sequence: Synthetic oligonucleotide
agauccgugaucuucauca

SEQ ID NO: 331892 - RNA, 19 nt, Artificial Sequence
  Description of Artificial Sequence: Synthetic oligonucleotide
uguguguguguguugaagg

SEQ ID NO: 331893 - RNA, 19 nt, Artificial Sequence
  Description of Artificial Sequence: Synthetic oligonucleotide
ucaacgcuuggccugaugc

SEQ ID NO: 331894 - RNA, 19 nt, Artificial Sequence
  Description of Artificial Sequence: Synthetic oligonucleotide
aauaagcuccccgaccucg

SEQ ID NO: 331895 - RNA, 19 nt, Artificial Sequence
  Description of Artificial Sequence: Synthetic oligonucleotide
uuuguuucgaucguuucgc

SEQ ID NO: 331896 - RNA, 19 nt, Artificial Sequence
  Description of Artificial Sequence: Synthetic oligonucleotide
agcgagaauuaauaucugg

SEQ ID NO: 331897 - RNA, 19 nt, Artificial Sequence
  Description of Artificial Sequence: Synthetic oligonucleotide
uccugcauaagggaggacg

SEQ ID NO: 331898 - RNA, 19 nt, Artificial Sequence
  Description of Artificial Sequence: Synthetic oligonucleotide
guuucgaucguuucgcacc

SEQ ID NO: 331899 - RNA, 19 nt, Artificial Sequence
  Description of Artificial Sequence: Synthetic oligonucleotide
uuucgaucguuucgcaccg

SEQ ID NO: 331900 - RNA, 19 nt, Artificial Sequence
  Description of Artificial Sequence: Synthetic oligonucleotide
uaaugaugcacuuggugga

SEQ ID NO: 331901 - RNA, 19 nt, Artificial Sequence
  Description of Artificial Sequence: Synthetic oligonucleotide
acuaucuccuccgaacugc

SEQ ID NO: 331902 - RNA, 19 nt, Artificial Sequence
  Description of Artificial Sequence: Synthetic oligonucleotide
uuugcgaaccuucucaaua

SEQ ID NO: 331903 - RNA, 19 nt, Artificial Sequence
  Description of Artificial Sequence: Synthetic oligonucleotide
uccgcugaccccauagugg

SEQ ID NO: 331904 - RNA, 19 nt, Artificial Sequence
  Description of Artificial Sequence: Synthetic oligonucleotide
aagagggcaguccaucuug

SEQ ID NO: 331905 - RNA, 19 nt, Artificial Sequence
  Description of Artificial Sequence: Synthetic oligonucleotide
aggcuuaggagcuucuuuc

SEQ ID NO: 331906 - RNA, 19 nt, Artificial Sequence
  Description of Artificial Sequence: Synthetic oligonucleotide
ugagcacucaggcuuagga

SEQ ID NO: 331907 - RNA, 19 nt, Artificial Sequence
  Description of Artificial Sequence: Synthetic oligonucleotide
gauaagugguggcauggag

SEQ ID NO: 331908 - RNA, 19 nt, Artificial Sequence
  Description of Artificial Sequence: Synthetic oligonucleotide
augacuuguccugacagac

SEQ ID NO: 331909 - RNA, 19 nt, Artificial Sequence
  Description of Artificial Sequence: Synthetic oligonucleotide
aggucauugugucuuguuc

SEQ ID NO: 331910 - RNA, 19 nt, Artificial Sequence
  Description of Artificial Sequence: Synthetic oligonucleotide
uuucgcaccgacuccuugg

SEQ ID NO: 331911 - RNA, 19 nt, Artificial Sequence
  Description of Artificial Sequence: Synthetic oligonucleotide
aaagacuaagucggugagg

SEQ ID NO: 331912 - RNA, 19 nt, Artificial Sequence
  Description of Artificial Sequence: Synthetic oligonucleotide
uggggcuacagcuacccgg

SEQ ID NO: 331913 - RNA, 19 nt, Artificial Sequence
  Description of Artificial Sequence: Synthetic oligonucleotide
uuguucguaguguacuugc

SEQ ID NO: 331914 - RNA, 19 nt, Artificial Sequence
  Description of Artificial Sequence: Synthetic oligonucleotide
agacucguuguucugagcu

SEQ ID NO: 331915 - RNA, 19 nt, Artificial Sequence
  Description of Artificial Sequence: Synthetic oligonucleotide
gaucguuucgcaccgacuc

SEQ ID NO: 331916 - RNA, 19 nt, Artificial Sequence
  Description of Artificial Sequence: Synthetic oligonucleotide
aucugcguccgguugaggg

SEQ ID NO: 331917 - RNA, 19 nt, Artificial Sequence
  Description of Artificial Sequence: Synthetic oligonucleotide
guauuagagaaaacugagg

SEQ ID NO: 331918 - RNA, 19 nt, Artificial Sequence
  Description of Artificial Sequence: Synthetic oligonucleotide
uguccugacagacgaagca

SEQ ID NO: 331919 - RNA, 19 nt, Artificial Sequence
  Description of Artificial Sequence: Synthetic oligonucleotide
agccguuuccugcauaagg

SEQ ID NO: 331920 - RNA, 19 nt, Artificial Sequence
  Description of Artificial Sequence: Synthetic oligonucleotide
uuuggcgaacuccacaguc

SEQ ID NO: 331921 - RNA, 19 nt, Artificial Sequence
  Description of Artificial Sequence: Synthetic oligonucleotide
uuacccuuccccuacuucu

SEQ ID NO: 331922 - RNA, 19 nt, Artificial Sequence
  Description of Artificial Sequence: Synthetic oligonucleotide
auaagggaggacgaaggcg

SEQ ID NO: 331923 - RNA, 19 nt, Artificial Sequence
  Description of Artificial Sequence: Synthetic oligonucleotide
aggacccaccccuucaagc

SEQ ID NO: 331924 - RNA, 19 nt, Artificial Sequence
  Description of Artificial Sequence: Synthetic oligonucleotide
agcguugugcaucugcguc

SEQ ID NO: 331925 - RNA, 19 nt, Artificial Sequence
  Description of Artificial Sequence: Synthetic oligonucleotide
auuugcuggugaugaagac

SEQ ID NO: 331926 - RNA, 19 nt, Artificial Sequence
  Description of Artificial Sequence: Synthetic oligonucleotide
gaugcuacgucggaagaag

SEQ ID NO: 331927 - RNA, 19 nt, Artificial Sequence
  Description of Artificial Sequence: Synthetic oligonucleotide
aaggcgguggccuuggaaa

SEQ ID NO: 331928 - RNA, 19 nt, Artificial Sequence
  Description of Artificial Sequence: Synthetic oligonucleotide
ucuuguucaggcguguacc

SEQ ID NO: 331929 - RNA, 19 nt, Artificial Sequence
  Description of Artificial Sequence: Synthetic oligonucleotide
cacguggccaguaggaagg

SEQ ID NO: 331930 - RNA, 19 nt, Artificial Sequence
  Description of Artificial Sequence: Synthetic oligonucleotide
aggggcccuagcuuuaccc

SEQ ID NO: 331931 - RNA, 19 nt, Artificial Sequence
  Description of Artificial Sequence: Synthetic oligonucleotide
agcuuuacccuuccccuac

SEQ ID NO: 331932 - RNA, 19 nt, Artificial Sequence
  Description of Artificial Sequence: Synthetic oligonucleotide
ugacuuguccugacagacg

SEQ ID NO: 331933 - RNA, 19 nt, Artificial Sequence
  Description of Artificial Sequence: Synthetic oligonucleotide
caaggcuuguagaugcggg

SEQ ID NO: 331934 - RNA, 19 nt, Artificial Sequence
  Description of Artificial Sequence: Synthetic oligonucleotide
ugcuacgucggaagaagcc

SEQ ID NO: 331935 - RNA, 19 nt, Artificial Sequence
  Description of Artificial Sequence: Synthetic oligonucleotide
uguaccgcgugcagauucg

SEQ ID NO: 331936 - RNA, 19 nt, Artificial Sequence
  Description of Artificial Sequence: Synthetic oligonucleotide
ugaucacucgcucggcucc

SEQ ID NO: 331937 - RNA, 19 nt, Artificial Sequence
  Description of Artificial Sequence: Synthetic oligonucleotide
aucguuucgcaccgacucc

SEQ ID NO: 331938 - RNA, 19 nt, Artificial Sequence
  Description of Artificial Sequence: Synthetic oligonucleotide
agguacaccagugggcucc

SEQ ID NO: 331939 - RNA, 19 nt, Artificial Sequence
  Description of Artificial Sequence: Synthetic oligonucleotide
cucaauaagcuccccgacc

SEQ ID NO: 331940 - RNA, 19 nt, Artificial Sequence
  Description of Artificial Sequence: Synthetic oligonucleotide
cuuguucaggcguguaccg

SEQ ID NO: 331941 - RNA, 19 nt, Artificial Sequence
  Description of Artificial Sequence: Synthetic oligonucleotide
aagauccgugaucuucauc

SEQ ID NO: 331942 - RNA, 19 nt, Artificial Sequence
  Description of Artificial Sequence: Synthetic oligonucleotide
guguguguguguugaaggg

SEQ ID NO: 331943 - RNA, 19 nt, Artificial Sequence
  Description of Artificial Sequence: Synthetic oligonucleotide
gaguucggaggacagggag

SEQ ID NO: 331944 - RNA, 19 nt, Artificial Sequence
  Description of Artificial Sequence: Synthetic oligonucleotide
aaaaccagcgagaauuaau

SEQ ID NO: 331945 - RNA, 19 nt, Artificial Sequence
  Description of Artificial Sequence: Synthetic oligonucleotide
ugguacgcaggauauguac

SEQ ID NO: 331946 - RNA, 19 nt, Artificial Sequence
  Description of Artificial Sequence: Synthetic oligonucleotide
aaaccagcgagaauuaaua

SEQ ID NO: 331947 - RNA, 19 nt, Artificial Sequence
  Description of Artificial Sequence: Synthetic oligonucleotide
accgacuccuuggacaugc

SEQ ID NO: 331948 - RNA, 19 nt, Artificial Sequence
  Description of Artificial Sequence: Synthetic oligonucleotide
aagugugugugugugugug

SEQ ID NO: 331949 - RNA, 19 nt, Artificial Sequence
  Description of Artificial Sequence: Synthetic oligonucleotide
cggacauagaccuucagcg

SEQ ID NO: 331950 - RNA, 19 nt, Artificial Sequence
  Description of Artificial Sequence: Synthetic oligonucleotide
uccgcuuagaguguccaag

SEQ ID NO: 331951 - RNA, 19 nt, Artificial Sequence
  Description of Artificial Sequence: Synthetic oligonucleotide
gaacauguggggacgacug

SEQ ID NO: 331952 - RNA, 19 nt, Artificial Sequence
  Description of Artificial Sequence: Synthetic oligonucleotide
aagccgggaagcuguuugg

SEQ ID NO: 331953 - RNA, 19 nt, Artificial Sequence
  Description of Artificial Sequence: Synthetic oligonucleotide
gcgagaauuaauaucuggg

SEQ ID NO: 331954 - RNA, 19 nt, Artificial Sequence
  Description of Artificial Sequence: Synthetic oligonucleotide
agagacucguuguucugag

SEQ ID NO: 331955 - RNA, 19 nt, Artificial Sequence
  Description of Artificial Sequence: Synthetic oligonucleotide
agcguguagcucucugagc

SEQ ID NO: 331956 - RNA, 19 nt, Artificial Sequence
  Description of Artificial Sequence: Synthetic oligonucleotide
uuaauaucugggaguuggu

SEQ ID NO: 331957 - RNA, 19 nt, Artificial Sequence
  Description of Artificial Sequence: Synthetic oligonucleotide
uccugcggggcaaggaggg

SEQ ID NO: 331958 - RNA, 19 nt, Artificial Sequence
  Description of Artificial Sequence: Synthetic oligonucleotide
acagucuuaaugaugcacu

SEQ ID NO: 331959 - RNA, 19 nt, Artificial Sequence
  Description of Artificial Sequence: Synthetic oligonucleotide
aagacgcccacgcccaaug

SEQ ID NO: 331960 - RNA, 19 nt, Artificial Sequence
  Description of Artificial Sequence: Synthetic oligonucleotide
agaugcggggcagaggugg

SEQ ID NO: 331961 - RNA, 19 nt, Artificial Sequence
  Description of Artificial Sequence: Synthetic oligonucleotide
aaccagcgagaauuaauau

SEQ ID NO: 331962 - RNA, 19 nt, Artificial Sequence
  Description of Artificial Sequence: Synthetic oligonucleotide
cuuguccugacagacgaag

SEQ ID NO: 331963 - RNA, 19 nt, Artificial Sequence
  Description of Artificial Sequence: Synthetic oligonucleotide
aguaacagguacaccagug

SEQ ID NO: 331964 - RNA, 19 nt, Artificial Sequence
  Description of Artificial Sequence: Synthetic oligonucleotide
uuguccugacagacgaagc

SEQ ID NO: 331965 - RNA, 19 nt, Artificial Sequence
  Description of Artificial Sequence: Synthetic oligonucleotide
aaguauacaccauguucuu

SEQ ID NO: 331966 - RNA, 19 nt, Artificial Sequence
  Description of Artificial Sequence: Synthetic oligonucleotide
ugcgaaccuucucaauaag

SEQ ID NO: 331967 - RNA, 19 nt, Artificial Sequence
  Description of Artificial Sequence: Synthetic oligonucleotide
accccauagugguagcccg

SEQ ID NO: 331968 - RNA, 19 nt, Artificial Sequence
  Description of Artificial Sequence: Synthetic oligonucleotide
aguucggaggacagggagc

SEQ ID NO: 331969 - RNA, 19 nt, Artificial Sequence
  Description of Artificial Sequence: Synthetic oligonucleotide
uguuucgaucguuucgcac

SEQ ID NO: 331970 - RNA, 19 nt, Artificial Sequence
  Description of Artificial Sequence: Synthetic oligonucleotide
uaggaagugugugugugug

SEQ ID NO: 331971 - RNA, 19 nt, Artificial Sequence
  Description of Artificial Sequence: Synthetic oligonucleotide
gagaagggaagccguuucc

SEQ ID NO: 331972 - RNA, 19 nt, Artificial Sequence
  Description of Artificial Sequence: Synthetic oligonucleotide
accgcgugcagauucgcag

SEQ ID NO: 331973 - RNA, 19 nt, Artificial Sequence
  Description of Artificial Sequence: Synthetic oligonucleotide
uugcgaaccuucucaauaa

SEQ ID NO: 331974 - RNA, 19 nt, Artificial Sequence
  Description of Artificial Sequence: Synthetic oligonucleotide
aacgcuuggccugaugcca

SEQ ID NO: 331975 - RNA, 19 nt, Artificial Sequence
  Description of Artificial Sequence: Synthetic oligonucleotide
guuaguauuucacaguauu

SEQ ID NO: 331976 - RNA, 19 nt, Artificial Sequence
  Description of Artificial Sequence: Synthetic oligonucleotide
ugugaucacucgcucggcu

SEQ ID NO: 331977 - RNA, 19 nt, Artificial Sequence
  Description of Artificial Sequence: Synthetic oligonucleotide
gguagguuccccaacuggg

SEQ ID NO: 331978 - RNA, 19 nt, Artificial Sequence
  Description of Artificial Sequence: Synthetic oligonucleotide
ucuugucccggugacaagu

SEQ ID NO: 331979 - RNA, 19 nt, Artificial Sequence
  Description of Artificial Sequence: Synthetic oligonucleotide
gagcgauggcuugaguucg

SEQ ID NO: 331980 - RNA, 19 nt, Artificial Sequence
  Description of Artificial Sequence: Synthetic oligonucleotide
ucauugugucuuguucagg

SEQ ID NO: 331981 - RNA, 19 nt, Artificial Sequence
  Description of Artificial Sequence: Synthetic oligonucleotide
uuuccggacauagaccuuc

SEQ ID NO: 331982 - RNA, 19 nt, Artificial Sequence
  Description of Artificial Sequence: Synthetic oligonucleotide
acgacugggccuccguuuc

SEQ ID NO: 331983 - RNA, 19 nt, Artificial Sequence
  Description of Artificial Sequence: Synthetic oligonucleotide
uccgaacugcugcucuggg

SEQ ID NO: 331984 - RNA, 19 nt, Artificial Sequence
  Description of Artificial Sequence: Synthetic oligonucleotide
auucgcagaaucaggauau

SEQ ID NO: 331985 - RNA, 19 nt, Artificial Sequence
  Description of Artificial Sequence: Synthetic oligonucleotide
accccuucaagcucuagau

SEQ ID NO: 331986 - RNA, 19 nt, Artificial Sequence
  Description of Artificial Sequence: Synthetic oligonucleotide
gaugcuccgaagauccgug

SEQ ID NO: 331987 - RNA, 19 nt, Artificial Sequence
  Description of Artificial Sequence: Synthetic oligonucleotide
agcccgaugacuuguccug

SEQ ID NO: 331988 - RNA, 19 nt, Artificial Sequence
  Description of Artificial Sequence: Synthetic oligonucleotide
uucuccaguagaucucagu

SEQ ID NO: 331989 - RNA, 19 nt, Artificial Sequence
  Description of Artificial Sequence: Synthetic oligonucleotide
uggaugcuacgucggaaga

SEQ ID NO: 331990 - RNA, 19 nt, Artificial Sequence
  Description of Artificial Sequence: Synthetic oligonucleotide
acggggacuggguugcggg

SEQ ID NO: 331991 - RNA, 19 nt, Artificial Sequence
  Description of Artificial Sequence: Synthetic oligonucleotide
gcuuagaguguccaagccc

SEQ ID NO: 331992 - RNA, 19 nt, Artificial Sequence
  Description of Artificial Sequence: Synthetic oligonucleotide
ugcgcuuugcgaaccuucu

SEQ ID NO: 331993 - RNA, 19 nt, Artificial Sequence
  Description of Artificial Sequence: Synthetic oligonucleotide
gacguggcaaggugcguag

SEQ ID NO: 331994 - RNA, 19 nt, Artificial Sequence
  Description of Artificial Sequence: Synthetic oligonucleotide
guagguuccccaacugggg

SEQ ID NO: 331995 - RNA, 19 nt, Artificial Sequence
  Description of Artificial Sequence: Synthetic oligonucleotide
guacgcaggauauguacca

SEQ ID NO: 331996 - RNA, 19 nt, Artificial Sequence
  Description of Artificial Sequence: Synthetic oligonucleotide
guucggaggacagggagcc

SEQ ID NO: 331997 - RNA, 19 nt, Artificial Sequence
  Description of Artificial Sequence: Synthetic oligonucleotide
acgcccaauggcuggacag

SEQ ID NO: 331998 - RNA, 19 nt, Artificial Sequence
  Description of Artificial Sequence: Synthetic oligonucleotide
gacucguuguucugagcug

SEQ ID NO: 331999 - RNA, 19 nt, Artificial Sequence
  Description of Artificial Sequence: Synthetic oligonucleotide
uaagcuccccgaccucggg

SEQ ID NO: 332000 - RNA, 19 nt, Artificial Sequence
  Description of Artificial Sequence: Synthetic oligonucleotide
gaagccguuuccugcauaa

SEQ ID NO: 332001 - RNA, 19 nt, Artificial Sequence
  Description of Artificial Sequence: Synthetic oligonucleotide
acucgcucggcucccuugg

SEQ ID NO: 332002 - RNA, 19 nt, Artificial Sequence
  Description of Artificial Sequence: Synthetic oligonucleotide
guggccaguaggaaggcag

SEQ ID NO: 332003 - RNA, 19 nt, Artificial Sequence
  Description of Artificial Sequence: Synthetic oligonucleotide
uccuggugcgcuuugcgaa

SEQ ID NO: 332004 - RNA, 19 nt, Artificial Sequence
  Description of Artificial Sequence: Synthetic oligonucleotide
ucgaucguuucgcaccgac

SEQ ID NO: 332005 - RNA, 19 nt, Artificial Sequence
  Description of Artificial Sequence: Synthetic oligonucleotide
uguguguguguguguguug

SEQ ID NO: 332006 - RNA, 19 nt, Artificial Sequence
  Description of Artificial Sequence: Synthetic oligonucleotide
acgaagcaaggcuuguaga

SEQ ID NO: 332007 - RNA, 19 nt, Artificial Sequence
  Description of Artificial Sequence: Synthetic oligonucleotide
uggcucaacgcuuggccug

SEQ ID NO: 332008 - RNA, 19 nt, Artificial Sequence
  Description of Artificial Sequence: Synthetic oligonucleotide
cagcguguagcucucugag

SEQ ID NO: 332009 - RNA, 19 nt, Artificial Sequence
  Description of Artificial Sequence: Synthetic oligonucleotide
ugagggucagcccgucuga

SEQ ID NO: 332010 - RNA, 19 nt, Artificial Sequence
  Description of Artificial Sequence: Synthetic oligonucleotide
ucgggcgucagcguguagc

SEQ ID NO: 332011 - RNA, 19 nt, Artificial Sequence
  Description of Artificial Sequence: Synthetic oligonucleotide
caacgcuuggccugaugcc

SEQ ID NO: 332012 - RNA, 19 nt, Artificial Sequence
  Description of Artificial Sequence: Synthetic oligonucleotide
ucugcguccgguugagggu

SEQ ID NO: 332013 - RNA, 19 nt, Artificial Sequence
  Description of Artificial Sequence: Synthetic oligonucleotide
ugucccggugacaaguaua

SEQ ID NO: 332014 - RNA, 19 nt, Artificial Sequence
  Description of Artificial Sequence: Synthetic oligonucleotide
ggcacuaucuccuccgaac

SEQ ID NO: 332015 - RNA, 19 nt, Artificial Sequence
  Description of Artificial Sequence: Synthetic oligonucleotide
uguuguucguaguguacuu

SEQ ID NO: 332016 - RNA, 19 nt, Artificial Sequence
  Description of Artificial Sequence: Synthetic oligonucleotide
caagcccucagaguucucc

SEQ ID NO: 332017 - RNA, 19 nt, Artificial Sequence
  Description of Artificial Sequence: Synthetic oligonucleotide
ugaugcuccgaagauccgu

SEQ ID NO: 332018 - RNA, 19 nt, Artificial Sequence
  Description of Artificial Sequence: Synthetic oligonucleotide
agacuaagucggugagggg

SEQ ID NO: 332019 - RNA, 19 nt, Artificial Sequence
  Description of Artificial Sequence: Synthetic oligonucleotide
uagcccgaugacuuguccu

SEQ ID NO: 332020 - RNA, 19 nt, Artificial Sequence
  Description of Artificial Sequence: Synthetic oligonucleotide
cccggugacaaguauacac

SEQ ID NO: 332021 - RNA, 19 nt, Artificial Sequence
  Description of Artificial Sequence: Synthetic oligonucleotide
guuguucguaguguacuug

SEQ ID NO: 332022 - RNA, 19 nt, Artificial Sequence
  Description of Artificial Sequence: Synthetic oligonucleotide
gacgcccacgcccaauggc

SEQ ID NO: 332023 - RNA, 19 nt, Artificial Sequence
  Description of Artificial Sequence: Synthetic oligonucleotide
ugggucacguggccaguag

SEQ ID NO: 332024 - RNA, 19 nt, Artificial Sequence
  Description of Artificial Sequence: Synthetic oligonucleotide
agugguagcccgaugacuu

SEQ ID NO: 332025 - RNA, 19 nt, Artificial Sequence
  Description of Artificial Sequence: Synthetic oligonucleotide
uuguuucgaucguuucgca

SEQ ID NO: 332026 - RNA, 19 nt, Artificial Sequence
  Description of Artificial Sequence: Synthetic oligonucleotide
ggaagugugugugugugug

SEQ ID NO: 332027 - RNA, 19 nt, Artificial Sequence
  Description of Artificial Sequence: Synthetic oligonucleotide
guguguguguguguugaag

SEQ ID NO: 332028 - RNA, 19 nt, Artificial Sequence
  Description of Artificial Sequence: Synthetic oligonucleotide
ccggugacaaguauacacc

SEQ ID NO: 332029 - RNA, 19 nt, Artificial Sequence
  Description of Artificial Sequence: Synthetic oligonucleotide
ugugugugugugugugugu

SEQ ID NO: 332030 - RNA, 19 nt, Artificial Sequence
  Description of Artificial Sequence: Synthetic oligonucleotide
augcuacgucggaagaagc

SEQ ID NO: 332031 - RNA, 19 nt, Artificial Sequence
  Description of Artificial Sequence: Synthetic oligonucleotide
acucguuguucugagcugu

SEQ ID NO: 332032 - RNA, 19 nt, Artificial Sequence
  Description of Artificial Sequence: Synthetic oligonucleotide
ggagcgauggcuugaguuc

SEQ ID NO: 332033 - RNA, 19 nt, Artificial Sequence
  Description of Artificial Sequence: Synthetic oligonucleotide
gcguguagcucucugagca

SEQ ID NO: 332034 - RNA, 19 nt, Artificial Sequence
  Description of Artificial Sequence: Synthetic oligonucleotide
ccagcgagaauuaauaucu

SEQ ID NO: 332035 - RNA, 19 nt, Artificial Sequence
  Description of Artificial Sequence: Synthetic oligonucleotide
guguaccgcgugcagauuc

SEQ ID NO: 332036 - RNA, 19 nt, Artificial Sequence
  Description of Artificial Sequence: Synthetic oligonucleotide
gagacucguuguucugagc

SEQ ID NO: 332037 - RNA, 19 nt, Artificial Sequence
  Description of Artificial Sequence: Synthetic oligonucleotide
cuccgcugaccccauagug

SEQ ID NO: 332038 - RNA, 19 nt, Artificial Sequence
  Description of Artificial Sequence: Synthetic oligonucleotide
ugcuccgaagauccgugau

SEQ ID NO: 332039 - RNA, 19 nt, Artificial Sequence
  Description of Artificial Sequence: Synthetic oligonucleotide
agaggagaagggaagccgu

SEQ ID NO: 332040 - RNA, 19 nt, Artificial Sequence
  Description of Artificial Sequence: Synthetic oligonucleotide
gugugugugugugugugug

SEQ ID NO: 332041 - RNA, 19 nt, Artificial Sequence
  Description of Artificial Sequence: Synthetic oligonucleotide
agccgggaagcuguuuggc

SEQ ID NO: 332042 - RNA, 19 nt, Artificial Sequence
  Description of Artificial Sequence: Synthetic oligonucleotide
gguacgcaggauauguacc

SEQ ID NO: 332043 - RNA, 19 nt, Artificial Sequence
  Description of Artificial Sequence: Synthetic oligonucleotide
uguccgcuuagagugucca

SEQ ID NO: 332044 - RNA, 19 nt, Artificial Sequence
  Description of Artificial Sequence: Synthetic oligonucleotide
aggacgaaggcgguggccu

SEQ ID NO: 332045 - RNA, 19 nt, Artificial Sequence
  Description of Artificial Sequence: Synthetic oligonucleotide
agugugugugugugugugu

SEQ ID NO: 332046 - RNA, 19 nt, Artificial Sequence
  Description of Artificial Sequence: Synthetic oligonucleotide
guugguacgcaggauaugu

SEQ ID NO: 332047 - RNA, 19 nt, Artificial Sequence
  Description of Artificial Sequence: Synthetic oligonucleotide
ucguuucgcaccgacuccu

SEQ ID NO: 332048 - RNA, 19 nt, Artificial Sequence
  Description of Artificial Sequence: Synthetic oligonucleotide
ccagcguugugcaucugcg

SEQ ID NO: 332049 - RNA, 19 nt, Artificial Sequence
  Description of Artificial Sequence: Synthetic oligonucleotide
gguggugaagccgggaagc

SEQ ID NO: 332050 - RNA, 19 nt, Artificial Sequence
  Description of Artificial Sequence: Synthetic oligonucleotide
guagcccgaugacuugucc

SEQ ID NO: 332051 - RNA, 19 nt, Artificial Sequence
  Description of Artificial Sequence: Synthetic oligonucleotide
ggggugagacccuauccag

SEQ ID NO: 332052 - RNA, 19 nt, Artificial Sequence
  Description of Artificial Sequence: Synthetic oligonucleotide
gucccggugacaaguauac

SEQ ID NO: 332053 - RNA, 19 nt, Artificial Sequence
  Description of Artificial Sequence: Synthetic oligonucleotide
uuccggacauagaccuuca

SEQ ID NO: 332054 - RNA, 19 nt, Artificial Sequence
  Description of Artificial Sequence: Synthetic oligonucleotide
gcuacgucggaagaagccc

SEQ ID NO: 332055 - RNA, 19 nt, Artificial Sequence
  Description of Artificial Sequence: Synthetic oligonucleotide
auuucugcagccggcagua

SEQ ID NO: 332056 - RNA, 19 nt, Artificial Sequence
  Description of Artificial Sequence: Synthetic oligonucleotide
uugguacgcaggauaugua

SEQ ID NO: 332057 - RNA, 19 nt, Artificial Sequence
  Description of Artificial Sequence: Synthetic oligonucleotide
uuagaguguccaagcccuc

SEQ ID NO: 332058 - RNA, 19 nt, Artificial Sequence
  Description of Artificial Sequence: Synthetic oligonucleotide
ggcgaaggcaaagacuaag

SEQ ID NO: 332059 - RNA, 19 nt, Artificial Sequence
  Description of Artificial Sequence: Synthetic oligonucleotide
auaagcuccccgaccucgg

SEQ ID NO: 332060 - RNA, 19 nt, Artificial Sequence
  Description of Artificial Sequence: Synthetic oligonucleotide
gugaucacucgcucggcuc

SEQ ID NO: 332061 - RNA, 19 nt, Artificial Sequence
  Description of Artificial Sequence: Synthetic oligonucleotide
aggaagugugugugugugu

SEQ ID NO: 332062 - RNA, 19 nt, Artificial Sequence
  Description of Artificial Sequence: Synthetic oligonucleotide
ucguuguucugagcuguug

SEQ ID NO: 332063 - RNA, 19 nt, Artificial Sequence
  Description of Artificial Sequence: Synthetic oligonucleotide
cagcgagaauuaauaucug

SEQ ID NO: 332064 - RNA, 19 nt, Artificial Sequence
  Description of Artificial Sequence: Synthetic oligonucleotide
aggauccccuccucccagg

SEQ ID NO: 332065 - RNA, 19 nt, Artificial Sequence
  Description of Artificial Sequence: Synthetic oligonucleotide
cugaugcuccgaagauccg

SEQ ID NO: 332066 - RNA, 19 nt, Artificial Sequence
  Description of Artificial Sequence: Synthetic oligonucleotide
gucagcguguagcucucug

SEQ ID NO: 332067 - RNA, 19 nt, Artificial Sequence
  Description of Artificial Sequence: Synthetic oligonucleotide
guuucgcaccgacuccuug

SEQ ID NO: 332068 - RNA, 19 nt, Artificial Sequence
  Description of Artificial Sequence: Synthetic oligonucleotide
uaccgcgugcagauucgca

SEQ ID NO: 332069 - RNA, 19 nt, Artificial Sequence
  Description of Artificial Sequence: Synthetic oligonucleotide
aguggaaacccagcaguaa

SEQ ID NO: 332070 - RNA, 19 nt, Artificial Sequence
  Description of Artificial Sequence: Synthetic oligonucleotide
aucacccuacccauccaag

SEQ ID NO: 332071 - RNA, 19 nt, Artificial Sequence
  Description of Artificial Sequence: Synthetic oligonucleotide
gggaggacgaaggcggugg

SEQ ID NO: 332072 - RNA, 19 nt, Artificial Sequence
  Description of Artificial Sequence: Synthetic oligonucleotide
guguguguguguguguuga

SEQ ID NO: 332073 - RNA, 19 nt, Artificial Sequence
  Description of Artificial Sequence: Synthetic oligonucleotide
ggaccccuuagccagcccc

SEQ ID NO: 332074 - RNA, 19 nt, Artificial Sequence
  Description of Artificial Sequence: Synthetic oligonucleotide
uccggggugagacccuauc

SEQ ID NO: 332075 - RNA, 19 nt, Artificial Sequence
  Description of Artificial Sequence: Synthetic oligonucleotide
agcauccgcugggacaagg

SEQ ID NO: 332076 - RNA, 19 nt, Artificial Sequence
  Description of Artificial Sequence: Synthetic oligonucleotide
uucaggcguguaccgcgug

SEQ ID NO: 332077 - RNA, 19 nt, Artificial Sequence
  Description of Artificial Sequence: Synthetic oligonucleotide
uagcuuuacccuuccccua

SEQ ID NO: 332078 - RNA, 19 nt, Artificial Sequence
  Description of Artificial Sequence: Synthetic oligonucleotide
aguuaguauuucacaguau

SEQ ID NO: 332079 - RNA, 19 nt, Artificial Sequence
  Description of Artificial Sequence: Synthetic oligonucleotide
uguguguguguguguugaa

SEQ ID NO: 332080 - RNA, 19 nt, Artificial Sequence
  Description of Artificial Sequence: Synthetic oligonucleotide
cgaugacuuguccugacag

SEQ ID NO: 332081 - RNA, 19 nt, Artificial Sequence
  Description of Artificial Sequence: Synthetic oligonucleotide
gccgggaagcuguuuggcg

SEQ ID NO: 332082 - RNA, 19 nt, Artificial Sequence
  Description of Artificial Sequence: Synthetic oligonucleotide
cugagcaauccagucucug

SEQ ID NO: 332083 - RNA, 19 nt, Artificial Sequence
  Description of Artificial Sequence: Synthetic oligonucleotide
ggugaaggcuguccauuug

SEQ ID NO: 332084 - RNA, 19 nt, Artificial Sequence
  Description of Artificial Sequence: Synthetic oligonucleotide
agcaaggcuuguagaugcg

SEQ ID NO: 332085 - RNA, 19 nt, Artificial Sequence
  Description of Artificial Sequence: Synthetic oligonucleotide
ugccggaagagggcagucc

SEQ ID NO: 332086 - RNA, 19 nt, Artificial Sequence
  Description of Artificial Sequence: Synthetic oligonucleotide
uucugagcuguuguucgua

SEQ ID NO: 332087 - RNA, 19 nt, Artificial Sequence
  Description of Artificial Sequence: Synthetic oligonucleotide
ugcagccggcaguacuggc

SEQ ID NO: 332088 - RNA, 19 nt, Artificial Sequence
  Description of Artificial Sequence: Synthetic oligonucleotide
agggcugaugggucacgug

SEQ ID NO: 332089 - RNA, 19 nt, Artificial Sequence
  Description of Artificial Sequence: Synthetic oligonucleotide
gcaaggcuuguagaugcgg

SEQ ID NO: 332090 - RNA, 19 nt, Artificial Sequence
  Description of Artificial Sequence: Synthetic oligonucleotide
gcguugugcaucugcgucc

SEQ ID NO: 332091 - RNA, 19 nt, Artificial Sequence
  Description of Artificial Sequence: Synthetic oligonucleotide
uggggagcgauggcuugag

SEQ ID NO: 332092 - RNA, 19 nt, Artificial Sequence
  Description of Artificial Sequence: Synthetic oligonucleotide
gcccaagacgcccacgccc

SEQ ID NO: 332093 - RNA, 19 nt, Artificial Sequence
  Description of Artificial Sequence: Synthetic oligonucleotide
ggucacggggacuggguug

SEQ ID NO: 332094 - RNA, 19 nt, Artificial Sequence
  Description of Artificial Sequence: Synthetic oligonucleotide
gcgaaccuucucaauaagc

SEQ ID NO: 332095 - RNA, 19 nt, Artificial Sequence
  Description of Artificial Sequence: Synthetic oligonucleotide
guguguguugaagggcccc

SEQ ID NO: 332096 - RNA, 19 nt, Artificial Sequence
  Description of Artificial Sequence: Synthetic oligonucleotide
agcccgucugagaagguca

SEQ ID NO: 332097 - RNA, 19 nt, Artificial Sequence
  Description of Artificial Sequence: Synthetic oligonucleotide
gggugagacccuauccagg

SEQ ID NO: 332098 - RNA, 19 nt, Artificial Sequence
  Description of Artificial Sequence: Synthetic oligonucleotide
caauaagcuccccgaccuc

SEQ ID NO: 332099 - RNA, 19 nt, Artificial Sequence
  Description of Artificial Sequence: Synthetic oligonucleotide
uacccauccaaggggcccu

SEQ ID NO: 332100 - RNA, 19 nt, Artificial Sequence
  Description of Artificial Sequence: Synthetic oligonucleotide
guuggcgaaggcaaagacu

SEQ ID NO: 332101 - RNA, 19 nt, Artificial Sequence
  Description of Artificial Sequence: Synthetic oligonucleotide
uggcgcugaugcuccgaag

SEQ ID NO: 332102 - RNA, 19 nt, Artificial Sequence
  Description of Artificial Sequence: Synthetic oligonucleotide
ggguggugaagccgggaag

SEQ ID NO: 332103 - RNA, 19 nt, Artificial Sequence
  Description of Artificial Sequence: Synthetic oligonucleotide
gaucacucgcucggcuccc

SEQ ID NO: 332104 - RNA, 19 nt, Artificial Sequence
  Description of Artificial Sequence: Synthetic oligonucleotide
augcuccgaagauccguga

SEQ ID NO: 332105 - RNA, 19 nt, Artificial Sequence
  Description of Artificial Sequence: Synthetic oligonucleotide
gaagugugugugugugugu

SEQ ID NO: 332106 - RNA, 19 nt, Artificial Sequence
  Description of Artificial Sequence: Synthetic oligonucleotide
ccgcuuagaguguccaagc

SEQ ID NO: 332107 - RNA, 19 nt, Artificial Sequence
  Description of Artificial Sequence: Synthetic oligonucleotide
ccguuuccggacauagacc

SEQ ID NO: 332108 - RNA, 19 nt, Artificial Sequence
  Description of Artificial Sequence: Synthetic oligonucleotide
cauccgcugggacaaggga

SEQ ID NO: 332109 - RNA, 19 nt, Artificial Sequence
  Description of Artificial Sequence: Synthetic oligonucleotide
guaggaagugugugugugu

SEQ ID NO: 332110 - RNA, 19 nt, Artificial Sequence
  Description of Artificial Sequence: Synthetic oligonucleotide
cgugcagauucgcagaauc

SEQ ID NO: 332111 - RNA, 19 nt, Artificial Sequence
  Description of Artificial Sequence: Synthetic oligonucleotide
ggauaggccagggaaaugu

SEQ ID NO: 332112 - RNA, 19 nt, Artificial Sequence
  Description of Artificial Sequence: Synthetic oligonucleotide
aaggugcguagggcucagg

SEQ ID NO: 332113 - RNA, 19 nt, Artificial Sequence
  Description of Artificial Sequence: Synthetic oligonucleotide
aggcguguaccgcgugcag

SEQ ID NO: 332114 - RNA, 19 nt, Artificial Sequence
  Description of Artificial Sequence: Synthetic oligonucleotide
cacucgcucggcucccuug

SEQ ID NO: 332115 - RNA, 19 nt, Artificial Sequence
  Description of Artificial Sequence: Synthetic oligonucleotide
uggugcgcuuugcgaaccu

SEQ ID NO: 332116 - RNA, 19 nt, Artificial Sequence
  Description of Artificial Sequence: Synthetic oligonucleotide
cuggugcgcuuugcgaacc

SEQ ID NO: 332117 - RNA, 19 nt, Artificial Sequence
  Description of Artificial Sequence: Synthetic oligonucleotide
cauccaaggggcccuagcu

SEQ ID NO: 332118 - RNA, 19 nt, Artificial Sequence
  Description of Artificial Sequence: Synthetic oligonucleotide
cugaugggcagugaugaua

SEQ ID NO: 332119 - RNA, 19 nt, Artificial Sequence
  Description of Artificial Sequence: Synthetic oligonucleotide
cuccgaagauccgugaucu

SEQ ID NO: 332120 - RNA, 19 nt, Artificial Sequence
  Description of Artificial Sequence: Synthetic oligonucleotide
ccgaccucgggcgucagcg

SEQ ID NO: 332121 - RNA, 19 nt, Artificial Sequence
  Description of Artificial Sequence: Synthetic oligonucleotide
cuccuggugcgcuuugcga

SEQ ID NO: 332122 - RNA, 19 nt, Artificial Sequence
  Description of Artificial Sequence: Synthetic oligonucleotide
ggcagaagguucccaguuc

SEQ ID NO: 332123 - RNA, 19 nt, Artificial Sequence
  Description of Artificial Sequence: Synthetic oligonucleotide
agacguggcaaggugcgua

SEQ ID NO: 332124 - RNA, 19 nt, Artificial Sequence
  Description of Artificial Sequence: Synthetic oligonucleotide
acgcccacgcccaauggcu

SEQ ID NO: 332125 - RNA, 19 nt, Artificial Sequence
  Description of Artificial Sequence: Synthetic oligonucleotide
cucaacgcuuggccugaug

SEQ ID NO: 332126 - RNA, 19 nt, Artificial Sequence
  Description of Artificial Sequence: Synthetic oligonucleotide
uucgcagaaucaggauauc

SEQ ID NO: 332127 - RNA, 19 nt, Artificial Sequence
  Description of Artificial Sequence: Synthetic oligonucleotide
cuacgucggaagaagcccu

SEQ ID NO: 332128 - RNA, 19 nt, Artificial Sequence
  Description of Artificial Sequence: Synthetic oligonucleotide
cuacagcuacccggagggg

SEQ ID NO: 332129 - RNA, 19 nt, Artificial Sequence
  Description of Artificial Sequence: Synthetic oligonucleotide
agcgauggcuugaguucgg

SEQ ID NO: 332130 - RNA, 19 nt, Artificial Sequence
  Description of Artificial Sequence: Synthetic oligonucleotide
ucagcccgucugagaaggu

SEQ ID NO: 332131 - RNA, 19 nt, Artificial Sequence
  Description of Artificial Sequence: Synthetic oligonucleotide
ugcguccgguugaggguca

SEQ ID NO: 332132 - RNA, 19 nt, Artificial Sequence
  Description of Artificial Sequence: Synthetic oligonucleotide
aggagaagggaagccguuu

SEQ ID NO: 332133 - RNA, 19 nt, Artificial Sequence
  Description of Artificial Sequence: Synthetic oligonucleotide
uggaccccuuagccagccc

SEQ ID NO: 332134 - RNA, 19 nt, Artificial Sequence
  Description of Artificial Sequence: Synthetic oligonucleotide
ccgaagauccgugaucuuc

SEQ ID NO: 332135 - RNA, 19 nt, Artificial Sequence
  Description of Artificial Sequence: Synthetic oligonucleotide
gguuccccaacuggggagc

SEQ ID NO: 332136 - RNA, 19 nt, Artificial Sequence
  Description of Artificial Sequence: Synthetic oligonucleotide
ggcgucagcguguagcucu

SEQ ID NO: 332137 - RNA, 19 nt, Artificial Sequence
  Description of Artificial Sequence: Synthetic oligonucleotide
gcggggcuacuucuguggg

SEQ ID NO: 332138 - RNA, 19 nt, Artificial Sequence
  Description of Artificial Sequence: Synthetic oligonucleotide
gggguagguuccccaacug

SEQ ID NO: 332139 - RNA, 19 nt, Artificial Sequence
  Description of Artificial Sequence: Synthetic oligonucleotide
ggagucccguccugcgggg

SEQ ID NO: 332140 - RNA, 19 nt, Artificial Sequence
  Description of Artificial Sequence: Synthetic oligonucleotide
guggggacgacugggccuc

SEQ ID NO: 332141 - RNA, 19 nt, Artificial Sequence
  Description of Artificial Sequence: Synthetic oligonucleotide
gugcgcuuugcgaaccuuc

SEQ ID NO: 332142 - RNA, 19 nt, Artificial Sequence
  Description of Artificial Sequence: Synthetic oligonucleotide
gcauccgcugggacaaggg

SEQ ID NO: 332143 - RNA, 19 nt, Artificial Sequence
  Description of Artificial Sequence: Synthetic oligonucleotide
gagcuguuguucguagugu

SEQ ID NO: 332144 - RNA, 19 nt, Artificial Sequence
  Description of Artificial Sequence: Synthetic oligonucleotide
cccggcagaagguucccag

SEQ ID NO: 332145 - RNA, 19 nt, Artificial Sequence
  Description of Artificial Sequence: Synthetic oligonucleotide
gcgguuccgggucaccuug

SEQ ID NO: 332146 - RNA, 19 nt, Artificial Sequence
  Description of Artificial Sequence: Synthetic oligonucleotide
ucccggugacaaguauaca

SEQ ID NO: 332147 - RNA, 19 nt, Artificial Sequence
  Description of Artificial Sequence: Synthetic oligonucleotide
acugagcaauccagucucu

SEQ ID NO: 332148 - RNA, 19 nt, Artificial Sequence
  Description of Artificial Sequence: Synthetic oligonucleotide
ccggggugagacccuaucc

SEQ ID NO: 332149 - RNA, 19 nt, Artificial Sequence
  Description of Artificial Sequence: Synthetic oligonucleotide
cacggggacuggguugcgg

SEQ ID NO: 332150 - RNA, 19 nt, Artificial Sequence
  Description of Artificial Sequence: Synthetic oligonucleotide
guugcggggcuacuucugu

SEQ ID NO: 332151 - RNA, 19 nt, Artificial Sequence
  Description of Artificial Sequence: Synthetic oligonucleotide
ggacccaccccuucaagcu

SEQ ID NO: 332152 - RNA, 19 nt, Artificial Sequence
  Description of Artificial Sequence: Synthetic oligonucleotide
cugaugggucacguggcca

SEQ ID NO: 332153 - RNA, 19 nt, Artificial Sequence
  Description of Artificial Sequence: Synthetic oligonucleotide
cgcuuagaguguccaagcc

SEQ ID NO: 332154 - RNA, 19 nt, Artificial Sequence
  Description of Artificial Sequence: Synthetic oligonucleotide
cagccccuucacagugggg

SEQ ID NO: 332155 - RNA, 19 nt, Artificial Sequence
  Description of Artificial Sequence: Synthetic oligonucleotide
cagguacaccagugggcuc

SEQ ID NO: 332156 - RNA, 19 nt, Artificial Sequence
  Description of Artificial Sequence: Synthetic oligonucleotide
cucgcucggcucccuuggc

SEQ ID NO: 332157 - RNA, 19 nt, Artificial Sequence
  Description of Artificial Sequence: Synthetic oligonucleotide
uccgaagauccgugaucuu

SEQ ID NO: 332158 - RNA, 19 nt, Artificial Sequence
  Description of Artificial Sequence: Synthetic oligonucleotide
guaccgcgugcagauucgc

SEQ ID NO: 332159 - RNA, 19 nt, Artificial Sequence
  Description of Artificial Sequence: Synthetic oligonucleotide
cagcccgucugagaagguc

SEQ ID NO: 332160 - RNA, 19 nt, Artificial Sequence
  Description of Artificial Sequence: Synthetic oligonucleotide
ccagagagacucguuguuc

SEQ ID NO: 332161 - RNA, 19 nt, Artificial Sequence
  Description of Artificial Sequence: Synthetic oligonucleotide
caaggugcguagggcucag

SEQ ID NO: 332162 - RNA, 19 nt, Artificial Sequence
  Description of Artificial Sequence: Synthetic oligonucleotide
ccuggugcgcuuugcgaac

SEQ ID NO: 332163 - RNA, 19 nt, Artificial Sequence
  Description of Artificial Sequence: Synthetic oligonucleotide
ccucacauggcucaacgcu

SEQ ID NO: 332164 - RNA, 19 nt, Artificial Sequence
  Description of Artificial Sequence: Synthetic oligonucleotide
gguacaccagugggcuccg

SEQ ID NO: 332165 - RNA, 19 nt, Artificial Sequence
  Description of Artificial Sequence: Synthetic oligonucleotide
uucgaucguuucgcaccga

SEQ ID NO: 332166 - RNA, 19 nt, Artificial Sequence
  Description of Artificial Sequence: Synthetic oligonucleotide
ccauccaaggggcccuagc

SEQ ID NO: 332167 - RNA, 19 nt, Artificial Sequence
  Description of Artificial Sequence: Synthetic oligonucleotide
ccgggaagcuguuuggcga

SEQ ID NO: 332168 - RNA, 19 nt, Artificial Sequence
  Description of Artificial Sequence: Synthetic oligonucleotide
cguuuccggacauagaccu

SEQ ID NO: 332169 - RNA, 19 nt, Artificial Sequence
  Description of Artificial Sequence: Synthetic oligonucleotide
guuuggcgaacuccacagu

SEQ ID NO: 332170 - RNA, 19 nt, Artificial Sequence
  Description of Artificial Sequence: Synthetic oligonucleotide
cagucuuaaugaugcacuu

SEQ ID NO: 332171 - RNA, 19 nt, Artificial Sequence
  Description of Artificial Sequence: Synthetic oligonucleotide
ggcuugaguucggaggaca

SEQ ID NO: 332172 - RNA, 19 nt, Artificial Sequence
  Description of Artificial Sequence: Synthetic oligonucleotide
gguugcggggcuacuucug

SEQ ID NO: 332173 - RNA, 19 nt, Artificial Sequence
  Description of Artificial Sequence: Synthetic oligonucleotide
caucugcguccgguugagg

SEQ ID NO: 332174 - RNA, 19 nt, Artificial Sequence
  Description of Artificial Sequence: Synthetic oligonucleotide
uucggaggacagggagcca

SEQ ID NO: 332175 - RNA, 19 nt, Artificial Sequence
  Description of Artificial Sequence: Synthetic oligonucleotide
ggaugcuacgucggaagaa

SEQ ID NO: 332176 - RNA, 19 nt, Artificial Sequence
  Description of Artificial Sequence: Synthetic oligonucleotide
ccguuuccugcauaaggga

SEQ ID NO: 332177 - RNA, 19 nt, Artificial Sequence
  Description of Artificial Sequence: Synthetic oligonucleotide
cggugacaaguauacacca

SEQ ID NO: 332178 - RNA, 19 nt, Artificial Sequence
  Description of Artificial Sequence: Synthetic oligonucleotide
cacgcccaauggcuggaca

SEQ ID NO: 332179 - RNA, 19 nt, Artificial Sequence
  Description of Artificial Sequence: Synthetic oligonucleotide
cgauggcuugaguucggag

SEQ ID NO: 332180 - RNA, 19 nt, Artificial Sequence
  Description of Artificial Sequence: Synthetic oligonucleotide
ggaacauguggggacgacu

SEQ ID NO: 332181 - RNA, 19 nt, Artificial Sequence
  Description of Artificial Sequence: Synthetic oligonucleotide
guccgcuuagaguguccaa

SEQ ID NO: 332182 - RNA, 19 nt, Artificial Sequence
  Description of Artificial Sequence: Synthetic oligonucleotide
acuuguccugacagacgaa

SEQ ID NO: 332183 - RNA, 19 nt, Artificial Sequence
  Description of Artificial Sequence: Synthetic oligonucleotide
cccgaugacuuguccugac

SEQ ID NO: 332184 - RNA, 19 nt, Artificial Sequence
  Description of Artificial Sequence: Synthetic oligonucleotide
cugcauaagggaggacgaa

SEQ ID NO: 332185 - RNA, 19 nt, Artificial Sequence
  Description of Artificial Sequence: Synthetic oligonucleotide
guguguguguguguguguu

SEQ ID NO: 332186 - RNA, 19 nt, Artificial Sequence
  Description of Artificial Sequence: Synthetic oligonucleotide
gcagccggcaguacuggca

SEQ ID NO: 332187 - RNA, 19 nt, Artificial Sequence
  Description of Artificial Sequence: Synthetic oligonucleotide
gcccuagcuuuacccuucc

SEQ ID NO: 332188 - RNA, 19 nt, Artificial Sequence
  Description of Artificial Sequence: Synthetic oligonucleotide
guacaccagugggcuccgg

SEQ ID NO: 332189 - RNA, 19 nt, Artificial Sequence
  Description of Artificial Sequence: Synthetic oligonucleotide
cguguagcucucugagcac

SEQ ID NO: 332190 - RNA, 19 nt, Artificial Sequence
  Description of Artificial Sequence: Synthetic oligonucleotide
cccuuagccagccccuuca

SEQ ID NO: 332191 - RNA, 19 nt, Artificial Sequence
  Description of Artificial Sequence: Synthetic oligonucleotide
gcgaaggcaaagacuaagu

SEQ ID NO: 332192 - RNA, 19 nt, Artificial Sequence
  Description of Artificial Sequence: Synthetic oligonucleotide
cugccggaagagggcaguc

SEQ ID NO: 332193 - RNA, 19 nt, Artificial Sequence
  Description of Artificial Sequence: Synthetic oligonucleotide
gggaacauguggggacgac

SEQ ID NO: 332194 - RNA, 19 nt, Artificial Sequence
  Description of Artificial Sequence: Synthetic oligonucleotide
ggcguguaccgcgugcaga

SEQ ID NO: 332195 - RNA, 19 nt, Artificial Sequence
  Description of Artificial Sequence: Synthetic oligonucleotide
gguagcccgaugacuuguc

SEQ ID NO: 332196 - RNA, 19 nt, Artificial Sequence
  Description of Artificial Sequence: Synthetic oligonucleotide
ggucaccuuguugaugaua

SEQ ID NO: 332197 - RNA, 19 nt, Artificial Sequence
  Description of Artificial Sequence: Synthetic oligonucleotide
ucccguccugcggggcaag

SEQ ID NO: 332198 - RNA, 19 nt, Artificial Sequence
  Description of Artificial Sequence: Synthetic oligonucleotide
ggggcccuagcuuuacccu

SEQ ID NO: 332199 - RNA, 19 nt, Artificial Sequence
  Description of Artificial Sequence: Synthetic oligonucleotide
ggugacaaguauacaccau

SEQ ID NO: 332200 - RNA, 19 nt, Artificial Sequence
  Description of Artificial Sequence: Synthetic oligonucleotide
cggggugagacccuaucca

SEQ ID NO: 332201 - RNA, 19 nt, Artificial Sequence
  Description of Artificial Sequence: Synthetic oligonucleotide
gaggagaagggaagccguu

SEQ ID NO: 332202 - RNA, 19 nt, Artificial Sequence
  Description of Artificial Sequence: Synthetic oligonucleotide
ccccugacuguccgcuuag

SEQ ID NO: 332203 - RNA, 19 nt, Artificial Sequence
  Description of Artificial Sequence: Synthetic oligonucleotide
gcguguaccgcgugcagau

SEQ ID NO: 332204 - RNA, 19 nt, Artificial Sequence
  Description of Artificial Sequence: Synthetic oligonucleotide
ccgaugacuuguccugaca

SEQ ID NO: 332205 - RNA, 19 nt, Artificial Sequence
  Description of Artificial Sequence: Synthetic oligonucleotide
guucaggcguguaccgcgu

SEQ ID NO: 332206 - RNA, 19 nt, Artificial Sequence
  Description of Artificial Sequence: Synthetic oligonucleotide
cccuagcuuuacccuuccc

SEQ ID NO: 332207 - RNA, 19 nt, Artificial Sequence
  Description of Artificial Sequence: Synthetic oligonucleotide
ggguugcggggcuacuucu

SEQ ID NO: 332208 - RNA, 19 nt, Artificial Sequence
  Description of Artificial Sequence: Synthetic oligonucleotide
ccaguagaucucaguggaa

SEQ ID NO: 332209 - RNA, 19 nt, Artificial Sequence
  Description of Artificial Sequence: Synthetic oligonucleotide
gggccuccguuuccggaca

SEQ ID NO: 332210 - RNA, 19 nt, Artificial Sequence
  Description of Artificial Sequence: Synthetic oligonucleotide
uggggacgacugggccucc

SEQ ID NO: 332211 - RNA, 19 nt, Artificial Sequence
  Description of Artificial Sequence: Synthetic oligonucleotide
cccgucguccccaucugaa

SEQ ID NO: 332212 - RNA, 19 nt, Artificial Sequence
  Description of Artificial Sequence: Synthetic oligonucleotide
ggguaacuuggaccccuua

SEQ ID NO: 332213 - RNA, 19 nt, Artificial Sequence
  Description of Artificial Sequence: Synthetic oligonucleotide
ccgcugaccccauaguggu

SEQ ID NO: 332214 - RNA, 19 nt, Artificial Sequence
  Description of Artificial Sequence: Synthetic oligonucleotide
ggggagcccuucagagccc

SEQ ID NO: 332215 - RNA, 19 nt, Artificial Sequence
  Description of Artificial Sequence: Synthetic oligonucleotide
cucguuguucugagcuguu

SEQ ID NO: 332216 - RNA, 19 nt, Artificial Sequence
  Description of Artificial Sequence: Synthetic oligonucleotide
gcccgaugacuuguccuga

SEQ ID NO: 332217 - RNA, 19 nt, Artificial Sequence
  Description of Artificial Sequence: Synthetic oligonucleotide
gcgauggcuugaguucgga

SEQ ID NO: 332218 - RNA, 19 nt, Artificial Sequence
  Description of Artificial Sequence: Synthetic oligonucleotide
ccccuuagccagccccuuc

SEQ ID NO: 332219 - RNA, 19 nt, Artificial Sequence
  Description of Artificial Sequence: Synthetic oligonucleotide
guuuccggacauagaccuu

SEQ ID NO: 332220 - RNA, 19 nt, Artificial Sequence
  Description of Artificial Sequence: Synthetic oligonucleotide
ggcgaacuccacagucuua

SEQ ID NO: 332221 - RNA, 19 nt, Artificial Sequence
  Description of Artificial Sequence: Synthetic oligonucleotide
cccgaccucgggcgucagc

SEQ ID NO: 332222 - RNA, 19 nt, Artificial Sequence
  Description of Artificial Sequence: Synthetic oligonucleotide
gcguagggcucaggcccag

SEQ ID NO: 332223 - RNA, 19 nt, Artificial Sequence
  Description of Artificial Sequence: Synthetic oligonucleotide
ggacgacugggccuccguu

SEQ ID NO: 332224 - RNA, 19 nt, Artificial Sequence
  Description of Artificial Sequence: Synthetic oligonucleotide
ccgaacugcugcucugggu

SEQ ID NO: 332225 - RNA, 19 nt, Artificial Sequence
  Description of Artificial Sequence: Synthetic oligonucleotide
caagacgcccacgcccaau

SEQ ID NO: 332226 - RNA, 19 nt, Artificial Sequence
  Description of Artificial Sequence: Synthetic oligonucleotide
gggcgucagcguguagcuc

SEQ ID NO: 332227 - RNA, 19 nt, Artificial Sequence
  Description of Artificial Sequence: Synthetic oligonucleotide
gcguccgguugagggucag

SEQ ID NO: 332228 - RNA, 19 nt, Artificial Sequence
  Description of Artificial Sequence: Synthetic oligonucleotide
ccggcagaagguucccagu

SEQ ID NO: 332229 - RNA, 19 nt, Artificial Sequence
  Description of Artificial Sequence: Synthetic oligonucleotide
cgaucguuucgcaccgacu

SEQ ID NO: 332230 - RNA, 19 nt, Artificial Sequence
  Description of Artificial Sequence: Synthetic oligonucleotide
ccacgcccaauggcuggac

SEQ ID NO: 332231 - RNA, 19 nt, Artificial Sequence
  Description of Artificial Sequence: Synthetic oligonucleotide
ggacgaaggcgguggccuu

SEQ ID NO: 332232 - RNA, 19 nt, Artificial Sequence
  Description of Artificial Sequence: Synthetic oligonucleotide
ccuccgcugaccccauagu

SEQ ID NO: 332233 - RNA, 19 nt, Artificial Sequence
  Description of Artificial Sequence: Synthetic oligonucleotide
cgcccaauggcuggacaga

SEQ ID NO: 332234 - RNA, 19 nt, Artificial Sequence
  Description of Artificial Sequence: Synthetic oligonucleotide
ccccgucguccccaucuga

SEQ ID NO: 332235 - RNA, 19 nt, Artificial Sequence
  Description of Artificial Sequence: Synthetic oligonucleotide
ggugcgcuuugcgaaccuu

SEQ ID NO: 332236 - RNA, 19 nt, Artificial Sequence
  Description of Artificial Sequence: Synthetic oligonucleotide
cuccggggugagacccuau

SEQ ID NO: 332237 - RNA, 19 nt, Artificial Sequence
  Description of Artificial Sequence: Synthetic oligonucleotide
cgggcgucagcguguagcu

SEQ ID NO: 332238 - RNA, 19 nt, Artificial Sequence
  Description of Artificial Sequence: Synthetic oligonucleotide
ccaagacgcccacgcccaa

SEQ ID NO: 332239 - RNA, 19 nt, Artificial Sequence
  Description of Artificial Sequence: Synthetic oligonucleotide
cccugacuguccgcuuaga

SEQ ID NO: 332240 - RNA, 19 nt, Artificial Sequence
  Description of Artificial Sequence: Synthetic oligonucleotide
gcuccccgaccucgggcgu

SEQ ID NO: 332241 - RNA, 19 nt, Artificial Sequence
  Description of Artificial Sequence: Synthetic oligonucleotide
gcgugcagauucgcagaau

SEQ ID NO: 332242 - RNA, 19 nt, Artificial Sequence
  Description of Artificial Sequence: Synthetic oligonucleotide
gggguaacuuggaccccuu

SEQ ID NO: 332243 - RNA, 19 nt, Artificial Sequence
  Description of Artificial Sequence: Synthetic oligonucleotide
cgcugaccccauaguggua

SEQ ID NO: 332244 - RNA, 19 nt, Artificial Sequence
  Description of Artificial Sequence: Synthetic oligonucleotide
cguuucgcaccgacuccuu

SEQ ID NO: 332245 - RNA, 19 nt, Artificial Sequence
  Description of Artificial Sequence: Synthetic oligonucleotide
ccccgaccucgggcgucag

SEQ ID NO: 332246 - RNA, 19 nt, Artificial Sequence
  Description of Artificial Sequence: Synthetic oligonucleotide
cgguuccgggucaccuugu

SEQ ID NO: 332247 - RNA, 19 nt, Artificial Sequence
  Description of Artificial Sequence: Synthetic oligonucleotide
gcucaacgcuuggccugau

SEQ ID NO: 332248 - RNA, 19 nt, Artificial Sequence
  Description of Artificial Sequence: Synthetic oligonucleotide
cccgucugagaaggucauu

SEQ ID NO: 332249 - RNA, 19 nt, Artificial Sequence
  Description of Artificial Sequence: Synthetic oligonucleotide
cgucagcguguagcucucu

SEQ ID NO: 332250 - RNA, 19 nt, Artificial Sequence
  Description of Artificial Sequence: Synthetic oligonucleotide
cguguaccgcgugcagauu

SEQ ID NO: 332251 - RNA, 19 nt, Artificial Sequence
  Description of Artificial Sequence: Synthetic oligonucleotide
aaccauuuggggcaaaagc

SEQ ID NO: 332252 - RNA, 19 nt, Artificial Sequence
  Description of Artificial Sequence: Synthetic oligonucleotide
uguaccaugauuauugggc

SEQ ID NO: 332253 - RNA, 19 nt, Artificial Sequence
  Description of Artificial Sequence: Synthetic oligonucleotide
uggaacuuaaaucuugugg

SEQ ID NO: 332254 - RNA, 19 nt, Artificial Sequence
  Description of Artificial Sequence: Synthetic oligonucleotide
uguaauggcaagaagaauc

SEQ ID NO: 332255 - RNA, 19 nt, Artificial Sequence
  Description of Artificial Sequence: Synthetic oligonucleotide
gauaucucuaccaaggagg

SEQ ID NO: 332256 - RNA, 19 nt, Artificial Sequence
  Description of Artificial Sequence: Synthetic oligonucleotide
ucaguuaugagcaccaccc

SEQ ID NO: 332257 - RNA, 19 nt, Artificial Sequence
  Description of Artificial Sequence: Synthetic oligonucleotide
ugaaucaaguaaaaggagc

SEQ ID NO: 332258 - RNA, 19 nt, Artificial Sequence
  Description of Artificial Sequence: Synthetic oligonucleotide
ucauuugacagucacauaa

SEQ ID NO: 332259 - RNA, 19 nt, Artificial Sequence
  Description of Artificial Sequence: Synthetic oligonucleotide
ucauauuguaccaugauua

SEQ ID NO: 332260 - RNA, 19 nt, Artificial Sequence
  Description of Artificial Sequence: Synthetic oligonucleotide
aauuuuggggucccauucc

SEQ ID NO: 332261 - RNA, 19 nt, Artificial Sequence
  Description of Artificial Sequence: Synthetic oligonucleotide
aauagaggcacuucaauaa

SEQ ID NO: 332262 - RNA, 19 nt, Artificial Sequence
  Description of Artificial Sequence: Synthetic oligonucleotide
aaauccauaugcuggauga

SEQ ID NO: 332263 - RNA, 19 nt, Artificial Sequence
  Description of Artificial Sequence: Synthetic oligonucleotide
acauugucgauuuagacga

SEQ ID NO: 332264 - RNA, 19 nt, Artificial Sequence
  Description of Artificial Sequence: Synthetic oligonucleotide
aacggugugauuuccuugg

SEQ ID NO: 332265 - RNA, 19 nt, Artificial Sequence
  Description of Artificial Sequence: Synthetic oligonucleotide
uguaacauauacaaaguau

SEQ ID NO: 332266 - RNA, 19 nt, Artificial Sequence
  Description of Artificial Sequence: Synthetic oligonucleotide
caucuuaacgucaaguuag

SEQ ID NO: 332267 - RNA, 19 nt, Artificial Sequence
  Description of Artificial Sequence: Synthetic oligonucleotide
uucgcauucauuaauguaa

SEQ ID NO: 332268 - RNA, 19 nt, Artificial Sequence
  Description of Artificial Sequence: Synthetic oligonucleotide
ucugaugaaaguauccggc

SEQ ID NO: 332269 - RNA, 19 nt, Artificial Sequence
  Description of Artificial Sequence: Synthetic oligonucleotide
cacauugucgauuuagacg

SEQ ID NO: 332270 - RNA, 19 nt, Artificial Sequence
  Description of Artificial Sequence: Synthetic oligonucleotide
gucgauuuagacgauaugg

SEQ ID NO: 332271 - RNA, 19 nt, Artificial Sequence
  Description of Artificial Sequence: Synthetic oligonucleotide
uuaauagcaauuuucuauc

SEQ ID NO: 332272 - RNA, 19 nt, Artificial Sequence
  Description of Artificial Sequence: Synthetic oligonucleotide
uugauuuguguuauagaag

SEQ ID NO: 332273 - RNA, 19 nt, Artificial Sequence
  Description of Artificial Sequence: Synthetic oligonucleotide
augaaugacaaugugucac

SEQ ID NO: 332274 - RNA, 19 nt, Artificial Sequence
  Description of Artificial Sequence: Synthetic oligonucleotide
gauuagugugcucagaaca

SEQ ID NO: 332275 - RNA, 19 nt, Artificial Sequence
  Description of Artificial Sequence: Synthetic oligonucleotide
gaugaaaguauccggccgg

SEQ ID NO: 332276 - RNA, 19 nt, Artificial Sequence
  Description of Artificial Sequence: Synthetic oligonucleotide
aaauauguauguaauggca

SEQ ID NO: 332277 - RNA, 19 nt, Artificial Sequence
  Description of Artificial Sequence: Synthetic oligonucleotide
uaaucaaagcgccaacuug

SEQ ID NO: 332278 - RNA, 19 nt, Artificial Sequence
  Description of Artificial Sequence: Synthetic oligonucleotide
aauagcaauuuucuaucca

SEQ ID NO: 332279 - RNA, 19 nt, Artificial Sequence
  Description of Artificial Sequence: Synthetic oligonucleotide
aucucuaccaaggaggaac

SEQ ID NO: 332280 - RNA, 19 nt, Artificial Sequence
  Description of Artificial Sequence: Synthetic oligonucleotide
gagauugugaaucaaguaa

SEQ ID NO: 332281 - RNA, 19 nt, Artificial Sequence
  Description of Artificial Sequence: Synthetic oligonucleotide
uguuugauuagugugcuca

SEQ ID NO: 332282 - RNA, 19 nt, Artificial Sequence
  Description of Artificial Sequence: Synthetic oligonucleotide
ugucuguuugauuagugug

SEQ ID NO: 332283 - RNA, 19 nt, Artificial Sequence
  Description of Artificial Sequence: Synthetic oligonucleotide
uugaguaucggcaaguguu

SEQ ID NO: 332284 - RNA, 19 nt, Artificial Sequence
  Description of Artificial Sequence: Synthetic oligonucleotide
auuacagacguguauuucu

SEQ ID NO: 332285 - RNA, 19 nt, Artificial Sequence
  Description of Artificial Sequence: Synthetic oligonucleotide
gaucacaacaugaaauucc

SEQ ID NO: 332286 - RNA, 19 nt, Artificial Sequence
  Description of Artificial Sequence: Synthetic oligonucleotide
cucauuacgaggcaauacc

SEQ ID NO: 332287 - RNA, 19 nt, Artificial Sequence
  Description of Artificial Sequence: Synthetic oligonucleotide
cagaagaagaagaagaaga

SEQ ID NO: 332288 - RNA, 19 nt, Artificial Sequence
  Description of Artificial Sequence: Synthetic oligonucleotide
agaacauggguucgcauuc

SEQ ID NO: 332289 - RNA, 19 nt, Artificial Sequence
  Description of Artificial Sequence: Synthetic oligonucleotide
aaugcaacgguagaaggcu

SEQ ID NO: 332290 - RNA, 19 nt, Artificial Sequence
  Description of Artificial Sequence: Synthetic oligonucleotide
ucgauuuagacgauaugga

SEQ ID NO: 332291 - RNA, 19 nt, Artificial Sequence
  Description of Artificial Sequence: Synthetic oligonucleotide
uccauuuagccuuuguugu

SEQ ID NO: 332292 - RNA, 19 nt, Artificial Sequence
  Description of Artificial Sequence: Synthetic oligonucleotide
guuacuaccugguaaccag

SEQ ID NO: 332293 - RNA, 19 nt, Artificial Sequence
  Description of Artificial Sequence: Synthetic oligonucleotide
ugaugcagaaauauuuuaa

SEQ ID NO: 332294 - RNA, 19 nt, Artificial Sequence
  Description of Artificial Sequence: Synthetic oligonucleotide
uuggucuucaaugcaacgg

SEQ ID NO: 332295 - RNA, 19 nt, Artificial Sequence
  Description of Artificial Sequence: Synthetic oligonucleotide
ucuauccaaaucagaaaug

SEQ ID NO: 332296 - RNA, 19 nt, Artificial Sequence
  Description of Artificial Sequence: Synthetic oligonucleotide
aaaguauccggccggguga

SEQ ID NO: 332297 - RNA, 19 nt, Artificial Sequence
  Description of Artificial Sequence: Synthetic oligonucleotide
auugccguuguaugcauuc

SEQ ID NO: 332298 - RNA, 19 nt, Artificial Sequence
  Description of Artificial Sequence: Synthetic oligonucleotide
aaaaggagcuugaguaucg

SEQ ID NO: 332299 - RNA, 19 nt, Artificial Sequence
  Description of Artificial Sequence: Synthetic oligonucleotide
caugacauagcaagucucc

SEQ ID NO: 332300 - RNA, 19 nt, Artificial Sequence
  Description of Artificial Sequence: Synthetic oligonucleotide
auuuguauaaguuggccua

SEQ ID NO: 332301 - RNA, 19 nt, Artificial Sequence
  Description of Artificial Sequence: Synthetic oligonucleotide
auaagcuaaguguuuucag

SEQ ID NO: 332302 - RNA, 19 nt, Artificial Sequence
  Description of Artificial Sequence: Synthetic oligonucleotide
ucauuacgaggcaauacca

SEQ ID NO: 332303 - RNA, 19 nt, Artificial Sequence
  Description of Artificial Sequence: Synthetic oligonucleotide
agacguguauuucuguuag

SEQ ID NO: 332304 - RNA, 19 nt, Artificial Sequence
  Description of Artificial Sequence: Synthetic oligonucleotide
aaguugacgucauugccgu

SEQ ID NO: 332305 - RNA, 19 nt, Artificial Sequence
  Description of Artificial Sequence: Synthetic oligonucleotide
ugauuauugggcagaagaa

SEQ ID NO: 332306 - RNA, 19 nt, Artificial Sequence
  Description of Artificial Sequence: Synthetic oligonucleotide
augcuagagauugugaauc

SEQ ID NO: 332307 - RNA, 19 nt, Artificial Sequence
  Description of Artificial Sequence: Synthetic oligonucleotide
auuguaccaugauuauugg

SEQ ID NO: 332308 - RNA, 19 nt, Artificial Sequence
  Description of Artificial Sequence: Synthetic oligonucleotide
aagguuugaguaagaauuc

SEQ ID NO: 332309 - RNA, 19 nt, Artificial Sequence
  Description of Artificial Sequence: Synthetic oligonucleotide
auagcaauuuucuauccaa

SEQ ID NO: 332310 - RNA, 19 nt, Artificial Sequence
  Description of Artificial Sequence: Synthetic oligonucleotide
gaaaguauccggccgggug

SEQ ID NO: 332311 - RNA, 19 nt, Artificial Sequence
  Description of Artificial Sequence: Synthetic oligonucleotide
uuacagacguguauuucug

SEQ ID NO: 332312 - RNA, 19 nt, Artificial Sequence
  Description of Artificial Sequence: Synthetic oligonucleotide
aaggcuauguuguuuuaaa

SEQ ID NO: 332313 - RNA, 19 nt, Artificial Sequence
  Description of Artificial Sequence: Synthetic oligonucleotide
aguaucggcaaguguuugg

SEQ ID NO: 332314 - RNA, 19 nt, Artificial Sequence
  Description of Artificial Sequence: Synthetic oligonucleotide
uaauagucauuugacaguc

SEQ ID NO: 332315 - RNA, 19 nt, Artificial Sequence
  Description of Artificial Sequence: Synthetic oligonucleotide
uacgaggcaauaccaaaga

SEQ ID NO: 332316 - RNA, 19 nt, Artificial Sequence
  Description of Artificial Sequence: Synthetic oligonucleotide
ggagcuuagagccaaaaca

SEQ ID NO: 332317 - RNA, 19 nt, Artificial Sequence
  Description of Artificial Sequence: Synthetic oligonucleotide
ccuaucacgaugcugaaag

SEQ ID NO: 332318 - RNA, 19 nt, Artificial Sequence
  Description of Artificial Sequence: Synthetic oligonucleotide
acgauauggacugcuuucc

SEQ ID NO: 332319 - RNA, 19 nt, Artificial Sequence
  Description of Artificial Sequence: Synthetic oligonucleotide
uggucuucaaugcaacggu

SEQ ID NO: 332320 - RNA, 19 nt, Artificial Sequence
  Description of Artificial Sequence: Synthetic oligonucleotide
agaucacaacaugaaauuc

SEQ ID NO: 332321 - RNA, 19 nt, Artificial Sequence
  Description of Artificial Sequence: Synthetic oligonucleotide
gcugauaucucuaccaagg

SEQ ID NO: 332322 - RNA, 19 nt, Artificial Sequence
  Description of Artificial Sequence: Synthetic oligonucleotide
gacgauauggacugcuuuc

SEQ ID NO: 332323 - RNA, 19 nt, Artificial Sequence
  Description of Artificial Sequence: Synthetic oligonucleotide
cauuuauccugcauaugug

SEQ ID NO: 332324 - RNA, 19 nt, Artificial Sequence
  Description of Artificial Sequence: Synthetic oligonucleotide
uaugcuagagauugugaau

SEQ ID NO: 332325 - RNA, 19 nt, Artificial Sequence
  Description of Artificial Sequence: Synthetic oligonucleotide
uugucuguuugauuagugu

SEQ ID NO: 332326 - RNA, 19 nt, Artificial Sequence
  Description of Artificial Sequence: Synthetic oligonucleotide
caugcagggugacuaacgg

SEQ ID NO: 332327 - RNA, 19 nt, Artificial Sequence
  Description of Artificial Sequence: Synthetic oligonucleotide
acgaggcaauaccaaagac

SEQ ID NO: 332328 - RNA, 19 nt, Artificial Sequence
  Description of Artificial Sequence: Synthetic oligonucleotide
ucgugaugugaucacagaa

SEQ ID NO: 332329 - RNA, 19 nt, Artificial Sequence
  Description of Artificial Sequence: Synthetic oligonucleotide
auuacgaggcaauaccaaa

SEQ ID NO: 332330 - RNA, 19 nt, Artificial Sequence
  Description of Artificial Sequence: Synthetic oligonucleotide
cauuagccuccauuuagcc

SEQ ID NO: 332331 - RNA, 19 nt, Artificial Sequence
  Description of Artificial Sequence: Synthetic oligonucleotide
ucuauauugucuguuugau

SEQ ID NO: 332332 - RNA, 19 nt, Artificial Sequence
  Description of Artificial Sequence: Synthetic oligonucleotide
uucuaucccuuacauuuga

SEQ ID NO: 332333 - RNA, 19 nt, Artificial Sequence
  Description of Artificial Sequence: Synthetic oligonucleotide
uguauaaguuggccuaaaa

SEQ ID NO: 332334 - RNA, 19 nt, Artificial Sequence
  Description of Artificial Sequence: Synthetic oligonucleotide
gaagaagaagaagaagauc

SEQ ID NO: 332335 - RNA, 19 nt, Artificial Sequence
  Description of Artificial Sequence: Synthetic oligonucleotide
uugucgauuuagacgauau

SEQ ID NO: 332336 - RNA, 19 nt, Artificial Sequence
  Description of Artificial Sequence: Synthetic oligonucleotide
cuuaacgucaaguuagucu

SEQ ID NO: 332337 - RNA, 19 nt, Artificial Sequence
  Description of Artificial Sequence: Synthetic oligonucleotide
ugucgauuuagacgauaug

SEQ ID NO: 332338 - RNA, 19 nt, Artificial Sequence
  Description of Artificial Sequence: Synthetic oligonucleotide
auuccucucuacucauaac

SEQ ID NO: 332339 - RNA, 19 nt, Artificial Sequence
  Description of Artificial Sequence: Synthetic oligonucleotide
uagagccaaaacauaaauu

SEQ ID NO: 332340 - RNA, 19 nt, Artificial Sequence
  Description of Artificial Sequence: Synthetic oligonucleotide
aucggcaaguguuuggaga

SEQ ID NO: 332341 - RNA, 19 nt, Artificial Sequence
  Description of Artificial Sequence: Synthetic oligonucleotide
aucccuaucacgaugcuga

SEQ ID NO: 332342 - RNA, 19 nt, Artificial Sequence
  Description of Artificial Sequence: Synthetic oligonucleotide
ggaacuuaaaucuuguggu

SEQ ID NO: 332343 - RNA, 19 nt, Artificial Sequence
  Description of Artificial Sequence: Synthetic oligonucleotide
agcaggcauuucuauauug

SEQ ID NO: 332344 - RNA, 19 nt, Artificial Sequence
  Description of Artificial Sequence: Synthetic oligonucleotide
gaaucaaguaaaaggagcu

SEQ ID NO: 332345 - RNA, 19 nt, Artificial Sequence
  Description of Artificial Sequence: Synthetic oligonucleotide
agagauugugaaucaagua

SEQ ID NO: 332346 - RNA, 19 nt, Artificial Sequence
  Description of Artificial Sequence: Synthetic oligonucleotide
acgucauugccguuguaug

SEQ ID NO: 332347 - RNA, 19 nt, Artificial Sequence
  Description of Artificial Sequence: Synthetic oligonucleotide
gggaacuuaaaguuacuac

SEQ ID NO: 332348 - RNA, 19 nt, Artificial Sequence
  Description of Artificial Sequence: Synthetic oligonucleotide
ucggcaaguguuuggagaa

SEQ ID NO: 332349 - RNA, 19 nt, Artificial Sequence
  Description of Artificial Sequence: Synthetic oligonucleotide
agauugugaaucaaguaaa

SEQ ID NO: 332350 - RNA, 19 nt, Artificial Sequence
  Description of Artificial Sequence: Synthetic oligonucleotide
aaguuggccuaaaacuaag

SEQ ID NO: 332351 - RNA, 19 nt, Artificial Sequence
  Description of Artificial Sequence: Synthetic oligonucleotide
uuagacgauauggacugcu

SEQ ID NO: 332352 - RNA, 19 nt, Artificial Sequence
  Description of Artificial Sequence: Synthetic oligonucleotide
ucuugucaauaagaagacc

SEQ ID NO: 332353 - RNA, 19 nt, Artificial Sequence
  Description of Artificial Sequence: Synthetic oligonucleotide
ugcuagagauugugaauca

SEQ ID NO: 332354 - RNA, 19 nt, Artificial Sequence
  Description of Artificial Sequence: Synthetic oligonucleotide
uaccugguaaccagccuug

SEQ ID NO: 332355 - RNA, 19 nt, Artificial Sequence
  Description of Artificial Sequence: Synthetic oligonucleotide
ccuuuguuguaacauauac

SEQ ID NO: 332356 - RNA, 19 nt, Artificial Sequence
  Description of Artificial Sequence: Synthetic oligonucleotide
agaagaagaagaagaagau

SEQ ID NO: 332357 - RNA, 19 nt, Artificial Sequence
  Description of Artificial Sequence: Synthetic oligonucleotide
acaagucgugaugugauca

SEQ ID NO: 332358 - RNA, 19 nt, Artificial Sequence
  Description of Artificial Sequence: Synthetic oligonucleotide
uggugcuuagucugguagc

SEQ ID NO: 332359 - RNA, 19 nt, Artificial Sequence
  Description of Artificial Sequence: Synthetic oligonucleotide
agcgcaaguggauaguaau

SEQ ID NO: 332360 - RNA, 19 nt, Artificial Sequence
  Description of Artificial Sequence: Synthetic oligonucleotide
acuaagcacuggcugauau

SEQ ID NO: 332361 - RNA, 19 nt, Artificial Sequence
  Description of Artificial Sequence: Synthetic oligonucleotide
auggaacuuaaaucuugug

SEQ ID NO: 332362 - RNA, 19 nt, Artificial Sequence
  Description of Artificial Sequence: Synthetic oligonucleotide
ugcuuagucugguagccaa

SEQ ID NO: 332363 - RNA, 19 nt, Artificial Sequence
  Description of Artificial Sequence: Synthetic oligonucleotide
guaccaugauuauugggca

SEQ ID NO: 332364 - RNA, 19 nt, Artificial Sequence
  Description of Artificial Sequence: Synthetic oligonucleotide
cuaucacgaugcugaaagg

SEQ ID NO: 332365 - RNA, 19 nt, Artificial Sequence
  Description of Artificial Sequence: Synthetic oligonucleotide
caaagcgccaacuuggucu

SEQ ID NO: 332366 - RNA, 19 nt, Artificial Sequence
  Description of Artificial Sequence: Synthetic oligonucleotide
ucuccuagcuguccaugca

SEQ ID NO: 332367 - RNA, 19 nt, Artificial Sequence
  Description of Artificial Sequence: Synthetic oligonucleotide
caacccucugccuggcucg

SEQ ID NO: 332368 - RNA, 19 nt, Artificial Sequence
  Description of Artificial Sequence: Synthetic oligonucleotide
uguucuguauaugcacaca

SEQ ID NO: 332369 - RNA, 19 nt, Artificial Sequence
  Description of Artificial Sequence: Synthetic oligonucleotide
uuuguauaaguuggccuaa

SEQ ID NO: 332370 - RNA, 19 nt, Artificial Sequence
  Description of Artificial Sequence: Synthetic oligonucleotide
uggguucgcauucauuaau

SEQ ID NO: 332371 - RNA, 19 nt, Artificial Sequence
  Description of Artificial Sequence: Synthetic oligonucleotide
augaagucccucauuacga

SEQ ID NO: 332372 - RNA, 19 nt, Artificial Sequence
  Description of Artificial Sequence: Synthetic oligonucleotide
gagacugcacuguggugcc

SEQ ID NO: 332373 - RNA, 19 nt, Artificial Sequence
  Description of Artificial Sequence: Synthetic oligonucleotide
aagaaaguuggagcuuaga

SEQ ID NO: 332374 - RNA, 19 nt, Artificial Sequence
  Description of Artificial Sequence: Synthetic oligonucleotide
aucacuguaucuugucaau

SEQ ID NO: 332375 - RNA, 19 nt, Artificial Sequence
  Description of Artificial Sequence: Synthetic oligonucleotide
acggugugauuuccuuggc

SEQ ID NO: 332376 - RNA, 19 nt, Artificial Sequence
  Description of Artificial Sequence: Synthetic oligonucleotide
caagucgugaugugaucac

SEQ ID NO: 332377 - RNA, 19 nt, Artificial Sequence
  Description of Artificial Sequence: Synthetic oligonucleotide
ucguacgcaucacuguauc

SEQ ID NO: 332378 - RNA, 19 nt, Artificial Sequence
  Description of Artificial Sequence: Synthetic oligonucleotide
ucuaucccuuacauuugaa

SEQ ID NO: 332379 - RNA, 19 nt, Artificial Sequence
  Description of Artificial Sequence: Synthetic oligonucleotide
augaaaguauccggccggg

SEQ ID NO: 332380 - RNA, 19 nt, Artificial Sequence
  Description of Artificial Sequence: Synthetic oligonucleotide
auaucucuaccaaggagga

SEQ ID NO: 332381 - RNA, 19 nt, Artificial Sequence
  Description of Artificial Sequence: Synthetic oligonucleotide
auuagugugcucagaacau

SEQ ID NO: 332382 - RNA, 19 nt, Artificial Sequence
  Description of Artificial Sequence: Synthetic oligonucleotide
ugacuaacggugugauuuc

SEQ ID NO: 332383 - RNA, 19 nt, Artificial Sequence
  Description of Artificial Sequence: Synthetic oligonucleotide
caguacucuauuuguauaa

SEQ ID NO: 332384 - RNA, 19 nt, Artificial Sequence
  Description of Artificial Sequence: Synthetic oligonucleotide
agcuaaguguuuucaguua

SEQ ID NO: 332385 - RNA, 19 nt, Artificial Sequence
  Description of Artificial Sequence: Synthetic oligonucleotide
aagucgugaugugaucaca

SEQ ID NO: 332386 - RNA, 19 nt, Artificial Sequence
  Description of Artificial Sequence: Synthetic oligonucleotide
ucaaagcgccaacuugguc

SEQ ID NO: 332387 - RNA, 19 nt, Artificial Sequence
  Description of Artificial Sequence: Synthetic oligonucleotide
gcagaagaagaagaagaag

SEQ ID NO: 332388 - RNA, 19 nt, Artificial Sequence
  Description of Artificial Sequence: Synthetic oligonucleotide
aggcuauguuguuuuaaau

SEQ ID NO: 332389 - RNA, 19 nt, Artificial Sequence
  Description of Artificial Sequence: Synthetic oligonucleotide
aaggggugacucaaugaga

SEQ ID NO: 332390 - RNA, 19 nt, Artificial Sequence
  Description of Artificial Sequence: Synthetic oligonucleotide
guucgcauucauuaaugua

SEQ ID NO: 332391 - RNA, 19 nt, Artificial Sequence
  Description of Artificial Sequence: Synthetic oligonucleotide
cauuacgaggcaauaccaa

SEQ ID NO: 332392 - RNA, 19 nt, Artificial Sequence
  Description of Artificial Sequence: Synthetic oligonucleotide
uguccaauuuugggguccc

SEQ ID NO: 332393 - RNA, 19 nt, Artificial Sequence
  Description of Artificial Sequence: Synthetic oligonucleotide
ggcugauaucucuaccaag

SEQ ID NO: 332394 - RNA, 19 nt, Artificial Sequence
  Description of Artificial Sequence: Synthetic oligonucleotide
gagcuuagagccaaaacau

SEQ ID NO: 332395 - RNA, 19 nt, Artificial Sequence
  Description of Artificial Sequence: Synthetic oligonucleotide
aggggugacucaaugagaa

SEQ ID NO: 332396 - RNA, 19 nt, Artificial Sequence
  Description of Artificial Sequence: Synthetic oligonucleotide
ucuuaacgucaaguuaguc

SEQ ID NO: 332397 - RNA, 19 nt, Artificial Sequence
  Description of Artificial Sequence: Synthetic oligonucleotide
aauccauaugcuggaugau

SEQ ID NO: 332398 - RNA, 19 nt, Artificial Sequence
  Description of Artificial Sequence: Synthetic oligonucleotide
agacauuagccuccauuua

SEQ ID NO: 332399 - RNA, 19 nt, Artificial Sequence
  Description of Artificial Sequence: Synthetic oligonucleotide
auauuguaccaugauuauu

SEQ ID NO: 332400 - RNA, 19 nt, Artificial Sequence
  Description of Artificial Sequence: Synthetic oligonucleotide
ggugcuuagucugguagcc

SEQ ID NO: 332401 - RNA, 19 nt, Artificial Sequence
  Description of Artificial Sequence: Synthetic oligonucleotide
cuacgcugagucugggcug

SEQ ID NO: 332402 - RNA, 19 nt, Artificial Sequence
  Description of Artificial Sequence: Synthetic oligonucleotide
cgauuuagacgauauggac

SEQ ID NO: 332403 - RNA, 19 nt, Artificial Sequence
  Description of Artificial Sequence: Synthetic oligonucleotide
gacgugcccgcugucacgc

SEQ ID NO: 332404 - RNA, 19 nt, Artificial Sequence
  Description of Artificial Sequence: Synthetic oligonucleotide
uggcacccaguacucuuug

SEQ ID NO: 332405 - RNA, 19 nt, Artificial Sequence
  Description of Artificial Sequence: Synthetic oligonucleotide
acacaagucgugaugugau

SEQ ID NO: 332406 - RNA, 19 nt, Artificial Sequence
  Description of Artificial Sequence: Synthetic oligonucleotide
acgucaaguuagucuaaaa

SEQ ID NO: 332407 - RNA, 19 nt, Artificial Sequence
  Description of Artificial Sequence: Synthetic oligonucleotide
ggcaaaauaucuggcuuug

SEQ ID NO: 332408 - RNA, 19 nt, Artificial Sequence
  Description of Artificial Sequence: Synthetic oligonucleotide
agcaagucuccagaaugca

SEQ ID NO: 332409 - RNA, 19 nt, Artificial Sequence
  Description of Artificial Sequence: Synthetic oligonucleotide
ccaugcagggugacuaacg

SEQ ID NO: 332410 - RNA, 19 nt, Artificial Sequence
  Description of Artificial Sequence: Synthetic oligonucleotide
ugcacacauuuauccugca

SEQ ID NO: 332411 - RNA, 19 nt, Artificial Sequence
  Description of Artificial Sequence: Synthetic oligonucleotide
cacccggagagccaugauc

SEQ ID NO: 332412 - RNA, 19 nt, Artificial Sequence
  Description of Artificial Sequence: Synthetic oligonucleotide
cacaagucgugaugugauc

SEQ ID NO: 332413 - RNA, 19 nt, Artificial Sequence
  Description of Artificial Sequence: Synthetic oligonucleotide
uccaugcuacgcugagucu

SEQ ID NO: 332414 - RNA, 19 nt, Artificial Sequence
  Description of Artificial Sequence: Synthetic oligonucleotide
accugguaaccagccuugc

SEQ ID NO: 332415 - RNA, 19 nt, Artificial Sequence
  Description of Artificial Sequence: Synthetic oligonucleotide
cccaccaauuucuaguguc

SEQ ID NO: 332416 - RNA, 19 nt, Artificial Sequence
  Description of Artificial Sequence: Synthetic oligonucleotide
guaaucaaagcgccaacuu

SEQ ID NO: 332417 - RNA, 19 nt, Artificial Sequence
  Description of Artificial Sequence: Synthetic oligonucleotide
uuguauaaguuggccuaaa

SEQ ID NO: 332418 - RNA, 19 nt, Artificial Sequence
  Description of Artificial Sequence: Synthetic oligonucleotide
acuaacggugugauuuccu

SEQ ID NO: 332419 - RNA, 19 nt, Artificial Sequence
  Description of Artificial Sequence: Synthetic oligonucleotide
ugccugagccgcuggacuc

SEQ ID NO: 332420 - RNA, 19 nt, Artificial Sequence
  Description of Artificial Sequence: Synthetic oligonucleotide
aucuuaacgucaaguuagu

SEQ ID NO: 332421 - RNA, 19 nt, Artificial Sequence
  Description of Artificial Sequence: Synthetic oligonucleotide
gcuaugaaugacaaugugu

SEQ ID NO: 332422 - RNA, 19 nt, Artificial Sequence
  Description of Artificial Sequence: Synthetic oligonucleotide
gaggcacuucaauaagcua

SEQ ID NO: 332423 - RNA, 19 nt, Artificial Sequence
  Description of Artificial Sequence: Synthetic oligonucleotide
ugaaaguauccggccgggu

SEQ ID NO: 332424 - RNA, 19 nt, Artificial Sequence
  Description of Artificial Sequence: Synthetic oligonucleotide
auugucgauuuagacgaua

SEQ ID NO: 332425 - RNA, 19 nt, Artificial Sequence
  Description of Artificial Sequence: Synthetic oligonucleotide
ccgggugaugucaaccucc

SEQ ID NO: 332426 - RNA, 19 nt, Artificial Sequence
  Description of Artificial Sequence: Synthetic oligonucleotide
ggcuauguuguuuuaaauu

SEQ ID NO: 332427 - RNA, 19 nt, Artificial Sequence
  Description of Artificial Sequence: Synthetic oligonucleotide
agggugacuaacgguguga

SEQ ID NO: 332428 - RNA, 19 nt, Artificial Sequence
  Description of Artificial Sequence: Synthetic oligonucleotide
caucaauuacagacgugua

SEQ ID NO: 332429 - RNA, 19 nt, Artificial Sequence
  Description of Artificial Sequence: Synthetic oligonucleotide
aagcgcaaguggauaguaa

SEQ ID NO: 332430 - RNA, 19 nt, Artificial Sequence
  Description of Artificial Sequence: Synthetic oligonucleotide
gagccaaaacauaaauuau

SEQ ID NO: 332431 - RNA, 19 nt, Artificial Sequence
  Description of Artificial Sequence: Synthetic oligonucleotide
ggguucgcauucauuaaug

SEQ ID NO: 332432 - RNA, 19 nt, Artificial Sequence
  Description of Artificial Sequence: Synthetic oligonucleotide
aucaaagcgccaacuuggu

SEQ ID NO: 332433 - RNA, 19 nt, Artificial Sequence
  Description of Artificial Sequence: Synthetic oligonucleotide
gguugcaaggcuauguugu

SEQ ID NO: 332434 - RNA, 19 nt, Artificial Sequence
  Description of Artificial Sequence: Synthetic oligonucleotide
aggauuuuaccaaguuuua

SEQ ID NO: 332435 - RNA, 19 nt, Artificial Sequence
  Description of Artificial Sequence: Synthetic oligonucleotide
cuguuugauuagugugcuc

SEQ ID NO: 332436 - RNA, 19 nt, Artificial Sequence
  Description of Artificial Sequence: Synthetic oligonucleotide
aaguauccggccgggugau

SEQ ID NO: 332437 - RNA, 19 nt, Artificial Sequence
  Description of Artificial Sequence: Synthetic oligonucleotide
gugugcucagaacaugggu

SEQ ID NO: 332438 - RNA, 19 nt, Artificial Sequence
  Description of Artificial Sequence: Synthetic oligonucleotide
gaacauggguucgcauuca

SEQ ID NO: 332439 - RNA, 19 nt, Artificial Sequence
  Description of Artificial Sequence: Synthetic oligonucleotide
cuugaguaucggcaagugu

SEQ ID NO: 332440 - RNA, 19 nt, Artificial Sequence
  Description of Artificial Sequence: Synthetic oligonucleotide
gucacgccuucauccuugc

SEQ ID NO: 332441 - RNA, 19 nt, Artificial Sequence
  Description of Artificial Sequence: Synthetic oligonucleotide
agcuuagagccaaaacaua

SEQ ID NO: 332442 - RNA, 19 nt, Artificial Sequence
  Description of Artificial Sequence: Synthetic oligonucleotide
uguggccguuccagcacuc

SEQ ID NO: 332443 - RNA, 19 nt, Artificial Sequence
  Description of Artificial Sequence: Synthetic oligonucleotide
ucccuaucacgaugcugaa

SEQ ID NO: 332444 - RNA, 19 nt, Artificial Sequence
  Description of Artificial Sequence: Synthetic oligonucleotide
ccucauuacgaggcaauac

SEQ ID NO: 332445 - RNA, 19 nt, Artificial Sequence
  Description of Artificial Sequence: Synthetic oligonucleotide
ggacgugcccgcugucacg

SEQ ID NO: 332446 - RNA, 19 nt, Artificial Sequence
  Description of Artificial Sequence: Synthetic oligonucleotide
agucuccagaaugcauaca

SEQ ID NO: 332447 - RNA, 19 nt, Artificial Sequence
  Description of Artificial Sequence: Synthetic oligonucleotide
guaaccagccuugcagaaa

SEQ ID NO: 332448 - RNA, 19 nt, Artificial Sequence
  Description of Artificial Sequence: Synthetic oligonucleotide
uauccggccgggugauguc

SEQ ID NO: 332449 - RNA, 19 nt, Artificial Sequence
  Description of Artificial Sequence: Synthetic oligonucleotide
gguucgcauucauuaaugu

SEQ ID NO: 332450 - RNA, 19 nt, Artificial Sequence
  Description of Artificial Sequence: Synthetic oligonucleotide
augcaacgguagaaggcug

SEQ ID NO: 332451 - RNA, 19 nt, Artificial Sequence
  Description of Artificial Sequence: Synthetic oligonucleotide
cauagcaagucuccagaau

SEQ ID NO: 332452 - RNA, 19 nt, Artificial Sequence
  Description of Artificial Sequence: Synthetic oligonucleotide
gcaaaauaucuggcuuugc

SEQ ID NO: 332453 - RNA, 19 nt, Artificial Sequence
  Description of Artificial Sequence: Synthetic oligonucleotide
acgugcccgcugucacgcc

SEQ ID NO: 332454 - RNA, 19 nt, Artificial Sequence
  Description of Artificial Sequence: Synthetic oligonucleotide
cuaacggugugauuuccuu

SEQ ID NO: 332455 - RNA, 19 nt, Artificial Sequence
  Description of Artificial Sequence: Synthetic oligonucleotide
gguuugauuggugcacaca

SEQ ID NO: 332456 - RNA, 19 nt, Artificial Sequence
  Description of Artificial Sequence: Synthetic oligonucleotide
uccggccgggugaugucaa

SEQ ID NO: 332457 - RNA, 19 nt, Artificial Sequence
  Description of Artificial Sequence: Synthetic oligonucleotide
ugccuggcucguacgcauc

SEQ ID NO: 332458 - RNA, 19 nt, Artificial Sequence
  Description of Artificial Sequence: Synthetic oligonucleotide
gcucguacgcaucacugua

SEQ ID NO: 332459 - RNA, 19 nt, Artificial Sequence
  Description of Artificial Sequence: Synthetic oligonucleotide
ggggaacuuaaaguuacua

SEQ ID NO: 332460 - RNA, 19 nt, Artificial Sequence
  Description of Artificial Sequence: Synthetic oligonucleotide
ccggagagccaugaucugc

SEQ ID NO: 332461 - RNA, 19 nt, Artificial Sequence
  Description of Artificial Sequence: Synthetic oligonucleotide
guauccggccgggugaugu

SEQ ID NO: 332462 - RNA, 19 nt, Artificial Sequence
  Description of Artificial Sequence: Synthetic oligonucleotide
auccggccgggugauguca

SEQ ID NO: 332463 - RNA, 19 nt, Artificial Sequence
  Description of Artificial Sequence: Synthetic oligonucleotide
acauggguucgcauucauu

SEQ ID NO: 332464 - RNA, 19 nt, Artificial Sequence
  Description of Artificial Sequence: Synthetic oligonucleotide
gugacucaaugagaaggcu

SEQ ID NO: 332465 - RNA, 19 nt, Artificial Sequence
  Description of Artificial Sequence: Synthetic oligonucleotide
cucguacgcaucacuguau

SEQ ID NO: 332466 - RNA, 19 nt, Artificial Sequence
  Description of Artificial Sequence: Synthetic oligonucleotide
cgucaaguuagucuaaaau

SEQ ID NO: 332467 - RNA, 19 nt, Artificial Sequence
  Description of Artificial Sequence: Synthetic oligonucleotide
ugcccgcugucacgccuuc

SEQ ID NO: 332468 - RNA, 19 nt, Artificial Sequence
  Description of Artificial Sequence: Synthetic oligonucleotide
cuggcucguacgcaucacu

SEQ ID NO: 332469 - RNA, 19 nt, Artificial Sequence
  Description of Artificial Sequence: Synthetic oligonucleotide
gcaacgguagaaggcuguc

SEQ ID NO: 332470 - RNA, 19 nt, Artificial Sequence
  Description of Artificial Sequence: Synthetic oligonucleotide
ccaauuucuaguguccaau

SEQ ID NO: 332471 - RNA, 19 nt, Artificial Sequence
  Description of Artificial Sequence: Synthetic oligonucleotide
ggccguuccagcacuccuc

SEQ ID NO: 332472 - RNA, 19 nt, Artificial Sequence
  Description of Artificial Sequence: Synthetic oligonucleotide
caacgguagaaggcugucu

SEQ ID NO: 332473 - RNA, 19 nt, Artificial Sequence
  Description of Artificial Sequence: Synthetic oligonucleotide
cuggcacccaguacucuuu

SEQ ID NO: 332474 - RNA, 19 nt, Artificial Sequence
  Description of Artificial Sequence: Synthetic oligonucleotide
cauugucgauuuagacgau

SEQ ID NO: 332475 - RNA, 19 nt, Artificial Sequence
  Description of Artificial Sequence: Synthetic oligonucleotide
ccgcuggacucaucacuug

SEQ ID NO: 332476 - RNA, 19 nt, Artificial Sequence
  Description of Artificial Sequence: Synthetic oligonucleotide
cauugccguuguaugcauu

SEQ ID NO: 332477 - RNA, 19 nt, Artificial Sequence
  Description of Artificial Sequence: Synthetic oligonucleotide
ccaugauuauugggcagaa

SEQ ID NO: 332478 - RNA, 19 nt, Artificial Sequence
  Description of Artificial Sequence: Synthetic oligonucleotide
ccgcugucacgccuucauc

SEQ ID NO: 332479 - RNA, 19 nt, Artificial Sequence
  Description of Artificial Sequence: Synthetic oligonucleotide
gcgcaaguggauaguaauu

SEQ ID NO: 332480 - RNA, 19 nt, Artificial Sequence
  Description of Artificial Sequence: Synthetic oligonucleotide
cccucauuacgaggcaaua

SEQ ID NO: 332481 - RNA, 19 nt, Artificial Sequence
  Description of Artificial Sequence: Synthetic oligonucleotide
ccggccgggugaugucaac

SEQ ID NO: 332482 - RNA, 19 nt, Artificial Sequence
  Description of Artificial Sequence: Synthetic oligonucleotide
cccuaucacgaugcugaaa

SEQ ID NO: 332483 - RNA, 19 nt, Artificial Sequence
  Description of Artificial Sequence: Synthetic oligonucleotide
gugcccgcugucacgccuu

SEQ ID NO: 332484 - RNA, 19 nt, Artificial Sequence
  Description of Artificial Sequence: Synthetic oligonucleotide
uauauuauuauuuagacga

SEQ ID NO: 332485 - RNA, 19 nt, Artificial Sequence
  Description of Artificial Sequence: Synthetic oligonucleotide
aaauuauaaauucuaguuc

SEQ ID NO: 332486 - RNA, 19 nt, Artificial Sequence
  Description of Artificial Sequence: Synthetic oligonucleotide
aauuauaaauucuaguucu

SEQ ID NO: 332487 - RNA, 19 nt, Artificial Sequence
  Description of Artificial Sequence: Synthetic oligonucleotide
uauuauuuccuauagaucu

SEQ ID NO: 332488 - RNA, 19 nt, Artificial Sequence
  Description of Artificial Sequence: Synthetic oligonucleotide
ucuaauuacagccuaacgc

SEQ ID NO: 332489 - RNA, 19 nt, Artificial Sequence
  Description of Artificial Sequence: Synthetic oligonucleotide
aacaauaacucucuuuaac

SEQ ID NO: 332490 - RNA, 19 nt, Artificial Sequence
  Description of Artificial Sequence: Synthetic oligonucleotide
uucacguuugucaaaaugg

SEQ ID NO: 332491 - RNA, 19 nt, Artificial Sequence
  Description of Artificial Sequence: Synthetic oligonucleotide
aauuuauguuucuaauuac

SEQ ID NO: 332492 - RNA, 19 nt, Artificial Sequence
  Description of Artificial Sequence: Synthetic oligonucleotide
cagauauuguauuugaugg

SEQ ID NO: 332493 - RNA, 19 nt, Artificial Sequence
  Description of Artificial Sequence: Synthetic oligonucleotide
ugauuauucaccaugggga

SEQ ID NO: 332494 - RNA, 19 nt, Artificial Sequence
  Description of Artificial Sequence: Synthetic oligonucleotide
cugacuaccaggaagagcc

SEQ ID NO: 332495 - RNA, 19 nt, Artificial Sequence
  Description of Artificial Sequence: Synthetic oligonucleotide
caauuuauaccuuuguugc

SEQ ID NO: 332496 - RNA, 19 nt, Artificial Sequence
  Description of Artificial Sequence: Synthetic oligonucleotide
auaucuuucagcauaaagg

SEQ ID NO: 332497 - RNA, 19 nt, Artificial Sequence
  Description of Artificial Sequence: Synthetic oligonucleotide
uuaaggaaauucaugacac

SEQ ID NO: 332498 - RNA, 19 nt, Artificial Sequence
  Description of Artificial Sequence: Synthetic oligonucleotide
uuuguuaugcuuaucauua

SEQ ID NO: 332499 - RNA, 19 nt, Artificial Sequence
  Description of Artificial Sequence: Synthetic oligonucleotide
uaagucucaacacuaagug

SEQ ID NO: 332500 - RNA, 19 nt, Artificial Sequence
  Description of Artificial Sequence: Synthetic oligonucleotide
uaauuuauguuucuaauua

SEQ ID NO: 332501 - RNA, 19 nt, Artificial Sequence
  Description of Artificial Sequence: Synthetic oligonucleotide
uauuuagacgauuagcaug

SEQ ID NO: 332502 - RNA, 19 nt, Artificial Sequence
  Description of Artificial Sequence: Synthetic oligonucleotide
uagacgauuagcaugugag

SEQ ID NO: 332503 - RNA, 19 nt, Artificial Sequence
  Description of Artificial Sequence: Synthetic oligonucleotide
uuaacacaaaugcuuauug

SEQ ID NO: 332504 - RNA, 19 nt, Artificial Sequence
  Description of Artificial Sequence: Synthetic oligonucleotide
ucugucauaauauaucaac

SEQ ID NO: 332505 - RNA, 19 nt, Artificial Sequence
  Description of Artificial Sequence: Synthetic oligonucleotide
uguuuuaagacuucuggca

SEQ ID NO: 332506 - RNA, 19 nt, Artificial Sequence
  Description of Artificial Sequence: Synthetic oligonucleotide
acaucauaauuauauacag

SEQ ID NO: 332507 - RNA, 19 nt, Artificial Sequence
  Description of Artificial Sequence: Synthetic oligonucleotide
uauuguuuccuucaaccag

SEQ ID NO: 332508 - RNA, 19 nt, Artificial Sequence
  Description of Artificial Sequence: Synthetic oligonucleotide
uauaguccugucuauaaag

SEQ ID NO: 332509 - RNA, 19 nt, Artificial Sequence
  Description of Artificial Sequence: Synthetic oligonucleotide
aguaacaaggguuucuguc

SEQ ID NO: 332510 - RNA, 19 nt, Artificial Sequence
  Description of Artificial Sequence: Synthetic oligonucleotide
aguaguuuuauuaggaguc

SEQ ID NO: 332511 - RNA, 19 nt, Artificial Sequence
  Description of Artificial Sequence: Synthetic oligonucleotide
uauuauuuagacgauuagc

SEQ ID NO: 332512 - RNA, 19 nt, Artificial Sequence
  Description of Artificial Sequence: Synthetic oligonucleotide
auuuuagguauauacucuc

SEQ ID NO: 332513 - RNA, 19 nt, Artificial Sequence
  Description of Artificial Sequence: Synthetic oligonucleotide
uauaccuuguuuaaaguuc

SEQ ID NO: 332514 - RNA, 19 nt, Artificial Sequence
  Description of Artificial Sequence: Synthetic oligonucleotide
ucuuaagggugaacgaugg

SEQ ID NO: 332515 - RNA, 19 nt, Artificial Sequence
  Description of Artificial Sequence: Synthetic oligonucleotide
agcuacauaaaugacuagc

SEQ ID NO: 332516 - RNA, 19 nt, Artificial Sequence
  Description of Artificial Sequence: Synthetic oligonucleotide
uuuguugcaugguacacag

SEQ ID NO: 332517 - RNA, 19 nt, Artificial Sequence
  Description of Artificial Sequence: Synthetic oligonucleotide
uucuaacuagucuuuaaag

SEQ ID NO: 332518 - RNA, 19 nt, Artificial Sequence
  Description of Artificial Sequence: Synthetic oligonucleotide
auuauuuagacgauuagca

SEQ ID NO: 332519 - RNA, 19 nt, Artificial Sequence
  Description of Artificial Sequence: Synthetic oligonucleotide
ugucuuuucacccuccgug

SEQ ID NO: 332520 - RNA, 19 nt, Artificial Sequence
  Description of Artificial Sequence: Synthetic oligonucleotide
gugauuauucaccaugggg

SEQ ID NO: 332521 - RNA, 19 nt, Artificial Sequence
  Description of Artificial Sequence: Synthetic oligonucleotide
uucuaauuacagccuaacg

SEQ ID NO: 332522 - RNA, 19 nt, Artificial Sequence
  Description of Artificial Sequence: Synthetic oligonucleotide
acaauaacucucuuuaacu

SEQ ID NO: 332523 - RNA, 19 nt, Artificial Sequence
  Description of Artificial Sequence: Synthetic oligonucleotide
ugguucuucaauaauaaua

SEQ ID NO: 332524 - RNA, 19 nt, Artificial Sequence
  Description of Artificial Sequence: Synthetic oligonucleotide
uccuuauauaacaaaugug

SEQ ID NO: 332525 - RNA, 19 nt, Artificial Sequence
  Description of Artificial Sequence: Synthetic oligonucleotide
aaaguucuaaagcagcaau

SEQ ID NO: 332526 - RNA, 19 nt, Artificial Sequence
  Description of Artificial Sequence: Synthetic oligonucleotide
ucacuuguaauuaaagaau

SEQ ID NO: 332527 - RNA, 19 nt, Artificial Sequence
  Description of Artificial Sequence: Synthetic oligonucleotide
uauguccauaaauaaaaga

SEQ ID NO: 332528 - RNA, 19 nt, Artificial Sequence
  Description of Artificial Sequence: Synthetic oligonucleotide
auaaaugacuagcuuagca

SEQ ID NO: 332529 - RNA, 19 nt, Artificial Sequence
  Description of Artificial Sequence: Synthetic oligonucleotide
ucuccuuauauaacaaaug

SEQ ID NO: 332530 - RNA, 19 nt, Artificial Sequence
  Description of Artificial Sequence: Synthetic oligonucleotide
aacacuaagugguucuuca

SEQ ID NO: 332531 - RNA, 19 nt, Artificial Sequence
  Description of Artificial Sequence: Synthetic oligonucleotide
ugauggaacaauaacucuc

SEQ ID NO: 332532 - RNA, 19 nt, Artificial Sequence
  Description of Artificial Sequence: Synthetic oligonucleotide
uagucauuccaauuuuagg

SEQ ID NO: 332533 - RNA, 19 nt, Artificial Sequence
  Description of Artificial Sequence: Synthetic oligonucleotide
uuagguauauacucucuug

SEQ ID NO: 332534 - RNA, 19 nt, Artificial Sequence
  Description of Artificial Sequence: Synthetic oligonucleotide
aagcauaugcuucugcccu

SEQ ID NO: 332535 - RNA, 19 nt, Artificial Sequence
  Description of Artificial Sequence: Synthetic oligonucleotide
uuauuauuuccuauagauc

SEQ ID NO: 332536 - RNA, 19 nt, Artificial Sequence
  Description of Artificial Sequence: Synthetic oligonucleotide
uaaaugacuagcuuagcau

SEQ ID NO: 332537 - RNA, 19 nt, Artificial Sequence
  Description of Artificial Sequence: Synthetic oligonucleotide
uaaagcggaaaauucuuca

SEQ ID NO: 332538 - RNA, 19 nt, Artificial Sequence
  Description of Artificial Sequence: Synthetic oligonucleotide
acaaucauuaagcagugau

SEQ ID NO: 332539 - RNA, 19 nt, Artificial Sequence
  Description of Artificial Sequence: Synthetic oligonucleotide
aaaugacuagcuuagcauu

SEQ ID NO: 332540 - RNA, 19 nt, Artificial Sequence
  Description of Artificial Sequence: Synthetic oligonucleotide
ugucauaauauaucaacau

SEQ ID NO: 332541 - RNA, 19 nt, Artificial Sequence
  Description of Artificial Sequence: Synthetic oligonucleotide
aggcuugggagcuacaagg

SEQ ID NO: 332542 - RNA, 19 nt, Artificial Sequence
  Description of Artificial Sequence: Synthetic oligonucleotide
auuugauggaacaauaacu

SEQ ID NO: 332543 - RNA, 19 nt, Artificial Sequence
  Description of Artificial Sequence: Synthetic oligonucleotide
uuaucauuuccgucuacag

SEQ ID NO: 332544 - RNA, 19 nt, Artificial Sequence
  Description of Artificial Sequence: Synthetic oligonucleotide
cuauagaucuguaacucac

SEQ ID NO: 332545 - RNA, 19 nt, Artificial Sequence
  Description of Artificial Sequence: Synthetic oligonucleotide
uuuaacuucuaaagguuaa

SEQ ID NO: 332546 - RNA, 19 nt, Artificial Sequence
  Description of Artificial Sequence: Synthetic oligonucleotide
ugcauaugucuuuucaccc

SEQ ID NO: 332547 - RNA, 19 nt, Artificial Sequence
  Description of Artificial Sequence: Synthetic oligonucleotide
uucuccuuauauaacaaau

SEQ ID NO: 332548 - RNA, 19 nt, Artificial Sequence
  Description of Artificial Sequence: Synthetic oligonucleotide
uagguauauacucucuugu

SEQ ID NO: 332549 - RNA, 19 nt, Artificial Sequence
  Description of Artificial Sequence: Synthetic oligonucleotide
agacgauuagcaugugagc

SEQ ID NO: 332550 - RNA, 19 nt, Artificial Sequence
  Description of Artificial Sequence: Synthetic oligonucleotide
uauaaagcggaaaauucuu

SEQ ID NO: 332551 - RNA, 19 nt, Artificial Sequence
  Description of Artificial Sequence: Synthetic oligonucleotide
agguuuguuaugcuuauca

SEQ ID NO: 332552 - RNA, 19 nt, Artificial Sequence
  Description of Artificial Sequence: Synthetic oligonucleotide
agcauaaaggcuuuauuau

SEQ ID NO: 332553 - RNA, 19 nt, Artificial Sequence
  Description of Artificial Sequence: Synthetic oligonucleotide
acaccaagauguucuagac

SEQ ID NO: 332554 - RNA, 19 nt, Artificial Sequence
  Description of Artificial Sequence: Synthetic oligonucleotide
ccuagaaucacuguaagcc

SEQ ID NO: 332555 - RNA, 19 nt, Artificial Sequence
  Description of Artificial Sequence: Synthetic oligonucleotide
caucauuaucaucagguug

SEQ ID NO: 332556 - RNA, 19 nt, Artificial Sequence
  Description of Artificial Sequence: Synthetic oligonucleotide
uggaguauggucguggggc

SEQ ID NO: 332557 - RNA, 19 nt, Artificial Sequence
  Description of Artificial Sequence: Synthetic oligonucleotide
ugucaagcgacuguccugg

SEQ ID NO: 332558 - RNA, 19 nt, Artificial Sequence
  Description of Artificial Sequence: Synthetic oligonucleotide
agacaaagaguugugguuc

SEQ ID NO: 332559 - RNA, 19 nt, Artificial Sequence
  Description of Artificial Sequence: Synthetic oligonucleotide
auaguccugucuauaaagc

SEQ ID NO: 332560 - RNA, 19 nt, Artificial Sequence
  Description of Artificial Sequence: Synthetic oligonucleotide
ggaaccaacgcucagaguc

SEQ ID NO: 332561 - RNA, 19 nt, Artificial Sequence
  Description of Artificial Sequence: Synthetic oligonucleotide
uccuuguagacagaaaucu

SEQ ID NO: 332562 - RNA, 19 nt, Artificial Sequence
  Description of Artificial Sequence: Synthetic oligonucleotide
caauauguccauaaaucuc

SEQ ID NO: 332563 - RNA, 19 nt, Artificial Sequence
  Description of Artificial Sequence: Synthetic oligonucleotide
ugaguccauucacuuaagg

SEQ ID NO: 332564 - RNA, 19 nt, Artificial Sequence
  Description of Artificial Sequence: Synthetic oligonucleotide
ccuuauauaacaaauguga

SEQ ID NO: 332565 - RNA, 19 nt, Artificial Sequence
  Description of Artificial Sequence: Synthetic oligonucleotide
cagugauuauucaccaugg

SEQ ID NO: 332566 - RNA, 19 nt, Artificial Sequence
  Description of Artificial Sequence: Synthetic oligonucleotide
uucaucucggaaccaacgc

SEQ ID NO: 332567 - RNA, 19 nt, Artificial Sequence
  Description of Artificial Sequence: Synthetic oligonucleotide
uaauuacagccuaacgcug

SEQ ID NO: 332568 - RNA, 19 nt, Artificial Sequence
  Description of Artificial Sequence: Synthetic oligonucleotide
ucuuaaggaaauucaugac

SEQ ID NO: 332569 - RNA, 19 nt, Artificial Sequence
  Description of Artificial Sequence: Synthetic oligonucleotide
ucuguguaacaucauaauu

SEQ ID NO: 332570 - RNA, 19 nt, Artificial Sequence
  Description of Artificial Sequence: Synthetic oligonucleotide
uuauaccuuguuuaaaguu

SEQ ID NO: 332571 - RNA, 19 nt, Artificial Sequence
  Description of Artificial Sequence: Synthetic oligonucleotide
agugaugaugcucccugac

SEQ ID NO: 332572 - RNA, 19 nt, Artificial Sequence
  Description of Artificial Sequence: Synthetic oligonucleotide
uccauaaaucucaauuuau

SEQ ID NO: 332573 - RNA, 19 nt, Artificial Sequence
  Description of Artificial Sequence: Synthetic oligonucleotide
auuuagacgauuagcaugu

SEQ ID NO: 332574 - RNA, 19 nt, Artificial Sequence
  Description of Artificial Sequence: Synthetic oligonucleotide
aacgcugaggcaguaaaug

SEQ ID NO: 332575 - RNA, 19 nt, Artificial Sequence
  Description of Artificial Sequence: Synthetic oligonucleotide
uuauuuagacgauuagcau

SEQ ID NO: 332576 - RNA, 19 nt, Artificial Sequence
  Description of Artificial Sequence: Synthetic oligonucleotide
agugauuauucaccauggg

SEQ ID NO: 332577 - RNA, 19 nt, Artificial Sequence
  Description of Artificial Sequence: Synthetic oligonucleotide
agcuuuggaauguuaaaga

SEQ ID NO: 332578 - RNA, 19 nt, Artificial Sequence
  Description of Artificial Sequence: Synthetic oligonucleotide
uuuauauacuagucuucca

SEQ ID NO: 332579 - RNA, 19 nt, Artificial Sequence
  Description of Artificial Sequence: Synthetic oligonucleotide
uuccuauagaucuguaacu

SEQ ID NO: 332580 - RNA, 19 nt, Artificial Sequence
  Description of Artificial Sequence: Synthetic oligonucleotide
aagggugaacgaugggccg

SEQ ID NO: 332581 - RNA, 19 nt, Artificial Sequence
  Description of Artificial Sequence: Synthetic oligonucleotide
aacacaucaaguauuguuu

SEQ ID NO: 332582 - RNA, 19 nt, Artificial Sequence
  Description of Artificial Sequence: Synthetic oligonucleotide
agugaagugugucaagcga

SEQ ID NO: 332583 - RNA, 19 nt, Artificial Sequence
  Description of Artificial Sequence: Synthetic oligonucleotide
uggugcaaaaggaaugcca

SEQ ID NO: 332584 - RNA, 19 nt, Artificial Sequence
  Description of Artificial Sequence: Synthetic oligonucleotide
gauguuuggacaguuucug

SEQ ID NO: 332585 - RNA, 19 nt, Artificial Sequence
  Description of Artificial Sequence: Synthetic oligonucleotide
gaaacuucuaacuagucuu

SEQ ID NO: 332586 - RNA, 19 nt, Artificial Sequence
  Description of Artificial Sequence: Synthetic oligonucleotide
cuauucuccuuauauaaca

SEQ ID NO: 332587 - RNA, 19 nt, Artificial Sequence
  Description of Artificial Sequence: Synthetic oligonucleotide
aauaauaacugagcauuau

SEQ ID NO: 332588 - RNA, 19 nt, Artificial Sequence
  Description of Artificial Sequence: Synthetic oligonucleotide
ucggaaccaacgcucagag

SEQ ID NO: 332589 - RNA, 19 nt, Artificial Sequence
  Description of Artificial Sequence: Synthetic oligonucleotide
gauucuuaucauuuccguc

SEQ ID NO: 332590 - RNA, 19 nt, Artificial Sequence
  Description of Artificial Sequence: Synthetic oligonucleotide
uuuuggaugguagugucac

SEQ ID NO: 332591 - RNA, 19 nt, Artificial Sequence
  Description of Artificial Sequence: Synthetic oligonucleotide
accaucaguuuugaaagac

SEQ ID NO: 332592 - RNA, 19 nt, Artificial Sequence
  Description of Artificial Sequence: Synthetic oligonucleotide
ucuguaacucacuuguaau

SEQ ID NO: 332593 - RNA, 19 nt, Artificial Sequence
  Description of Artificial Sequence: Synthetic oligonucleotide
uucuaaagguuaaaguauu

SEQ ID NO: 332594 - RNA, 19 nt, Artificial Sequence
  Description of Artificial Sequence: Synthetic oligonucleotide
ggacgugucuuacugaacg

SEQ ID NO: 332595 - RNA, 19 nt, Artificial Sequence
  Description of Artificial Sequence: Synthetic oligonucleotide
acggauugcggucagcaag

SEQ ID NO: 332596 - RNA, 19 nt, Artificial Sequence
  Description of Artificial Sequence: Synthetic oligonucleotide
uuuagguauauacucucuu

SEQ ID NO: 332597 - RNA, 19 nt, Artificial Sequence
  Description of Artificial Sequence: Synthetic oligonucleotide
uauucuccuuauauaacaa

SEQ ID NO: 332598 - RNA, 19 nt, Artificial Sequence
  Description of Artificial Sequence: Synthetic oligonucleotide
ucacuuaagggagaaagaa

SEQ ID NO: 332599 - RNA, 19 nt, Artificial Sequence
  Description of Artificial Sequence: Synthetic oligonucleotide
uuagacgauuagcauguga

SEQ ID NO: 332600 - RNA, 19 nt, Artificial Sequence
  Description of Artificial Sequence: Synthetic oligonucleotide
uuuggucaucuuuauuccc

SEQ ID NO: 332601 - RNA, 19 nt, Artificial Sequence
  Description of Artificial Sequence: Synthetic oligonucleotide
uuucacuauuuccagggau

SEQ ID NO: 332602 - RNA, 19 nt, Artificial Sequence
  Description of Artificial Sequence: Synthetic oligonucleotide
uaacugagcauuauuuaua

SEQ ID NO: 332603 - RNA, 19 nt, Artificial Sequence
  Description of Artificial Sequence: Synthetic oligonucleotide
cuaauuacagccuaacgcu

SEQ ID NO: 332604 - RNA, 19 nt, Artificial Sequence
  Description of Artificial Sequence: Synthetic oligonucleotide
aacuggaguauggucgugg

SEQ ID NO: 332605 - RNA, 19 nt, Artificial Sequence
  Description of Artificial Sequence: Synthetic oligonucleotide
agaguugugguucccauau

SEQ ID NO: 332606 - RNA, 19 nt, Artificial Sequence
  Description of Artificial Sequence: Synthetic oligonucleotide
uauauacuagucuuccaua

SEQ ID NO: 332607 - RNA, 19 nt, Artificial Sequence
  Description of Artificial Sequence: Synthetic oligonucleotide
agcccaguaguuuuauuag

SEQ ID NO: 332608 - RNA, 19 nt, Artificial Sequence
  Description of Artificial Sequence: Synthetic oligonucleotide
guuaugcuuaucauuauca

SEQ ID NO: 332609 - RNA, 19 nt, Artificial Sequence
  Description of Artificial Sequence: Synthetic oligonucleotide
uguuucuaauuacagccua

SEQ ID NO: 332610 - RNA, 19 nt, Artificial Sequence
  Description of Artificial Sequence: Synthetic oligonucleotide
ugaacgaugggccgucagc

SEQ ID NO: 332611 - RNA, 19 nt, Artificial Sequence
  Description of Artificial Sequence: Synthetic oligonucleotide
ucacacaauauguccauaa

SEQ ID NO: 332612 - RNA, 19 nt, Artificial Sequence
  Description of Artificial Sequence: Synthetic oligonucleotide
uccauauucccaagcauau

SEQ ID NO: 332613 - RNA, 19 nt, Artificial Sequence
  Description of Artificial Sequence: Synthetic oligonucleotide
cuuauauaacaaaugugaa

SEQ ID NO: 332614 - RNA, 19 nt, Artificial Sequence
  Description of Artificial Sequence: Synthetic oligonucleotide
uuauaguccugucuauaaa

SEQ ID NO: 332615 - RNA, 19 nt, Artificial Sequence
  Description of Artificial Sequence: Synthetic oligonucleotide
uaauuaaagaaugcacaaa

SEQ ID NO: 332616 - RNA, 19 nt, Artificial Sequence
  Description of Artificial Sequence: Synthetic oligonucleotide
aacaucuuaaagucuccuu

SEQ ID NO: 332617 - RNA, 19 nt, Artificial Sequence
  Description of Artificial Sequence: Synthetic oligonucleotide
uuuuagggguauuuauagu

SEQ ID NO: 332618 - RNA, 19 nt, Artificial Sequence
  Description of Artificial Sequence: Synthetic oligonucleotide
gacaugguguggcugauuc

SEQ ID NO: 332619 - RNA, 19 nt, Artificial Sequence
  Description of Artificial Sequence: Synthetic oligonucleotide
uuaugcuuaucauuaucau

SEQ ID NO: 332620 - RNA, 19 nt, Artificial Sequence
  Description of Artificial Sequence: Synthetic oligonucleotide
uauacuagucuuccauauc

SEQ ID NO: 332621 - RNA, 19 nt, Artificial Sequence
  Description of Artificial Sequence: Synthetic oligonucleotide
auaagucucaacacuaagu

SEQ ID NO: 332622 - RNA, 19 nt, Artificial Sequence
  Description of Artificial Sequence: Synthetic oligonucleotide
acuaagugguucuucaaua

SEQ ID NO: 332623 - RNA, 19 nt, Artificial Sequence
  Description of Artificial Sequence: Synthetic oligonucleotide
uuucuaauuacagccuaac

SEQ ID NO: 332624 - RNA, 19 nt, Artificial Sequence
  Description of Artificial Sequence: Synthetic oligonucleotide
aagugugucaagcgacugu

SEQ ID NO: 332625 - RNA, 19 nt, Artificial Sequence
  Description of Artificial Sequence: Synthetic oligonucleotide
cuagacccuagaaucacug

SEQ ID NO: 332626 - RNA, 19 nt, Artificial Sequence
  Description of Artificial Sequence: Synthetic oligonucleotide
gauuauucaccauggggaa

SEQ ID NO: 332627 - RNA, 19 nt, Artificial Sequence
  Description of Artificial Sequence: Synthetic oligonucleotide
auaaagcggaaaauucuuc

SEQ ID NO: 332628 - RNA, 19 nt, Artificial Sequence
  Description of Artificial Sequence: Synthetic oligonucleotide
ucuaaagguuaaaguauua

SEQ ID NO: 332629 - RNA, 19 nt, Artificial Sequence
  Description of Artificial Sequence: Synthetic oligonucleotide
acuagcuuagcauuuuauu

SEQ ID NO: 332630 - RNA, 19 nt, Artificial Sequence
  Description of Artificial Sequence: Synthetic oligonucleotide
ugcaugguacacaguaugu

SEQ ID NO: 332631 - RNA, 19 nt, Artificial Sequence
  Description of Artificial Sequence: Synthetic oligonucleotide
ugcaaaugcugcucugugc

SEQ ID NO: 332632 - RNA, 19 nt, Artificial Sequence
  Description of Artificial Sequence: Synthetic oligonucleotide
cauggggaaagaaaaguca

SEQ ID NO: 332633 - RNA, 19 nt, Artificial Sequence
  Description of Artificial Sequence: Synthetic oligonucleotide
cucuuaagggugaacgaug

SEQ ID NO: 332634 - RNA, 19 nt, Artificial Sequence
  Description of Artificial Sequence: Synthetic oligonucleotide
aaagucauuuauaccuugu

SEQ ID NO: 332635 - RNA, 19 nt, Artificial Sequence
  Description of Artificial Sequence: Synthetic oligonucleotide
uagcccaguaguuuuauua

SEQ ID NO: 332636 - RNA, 19 nt, Artificial Sequence
  Description of Artificial Sequence: Synthetic oligonucleotide
ucuuuaacuuggaggcagc

SEQ ID NO: 332637 - RNA, 19 nt, Artificial Sequence
  Description of Artificial Sequence: Synthetic oligonucleotide
agguuuagugaugaugcuc

SEQ ID NO: 332638 - RNA, 19 nt, Artificial Sequence
  Description of Artificial Sequence: Synthetic oligonucleotide
aauuacagccuaacgcuga

SEQ ID NO: 332639 - RNA, 19 nt, Artificial Sequence
  Description of Artificial Sequence: Synthetic oligonucleotide
acuggaguauggucguggg

SEQ ID NO: 332640 - RNA, 19 nt, Artificial Sequence
  Description of Artificial Sequence: Synthetic oligonucleotide
uaccuuuguugcaugguac

SEQ ID NO: 332641 - RNA, 19 nt, Artificial Sequence
  Description of Artificial Sequence: Synthetic oligonucleotide
uccuauagaucuguaacuc

SEQ ID NO: 332642 - RNA, 19 nt, Artificial Sequence
  Description of Artificial Sequence: Synthetic oligonucleotide
cacaguauguccauaaaua

SEQ ID NO: 332643 - RNA, 19 nt, Artificial Sequence
  Description of Artificial Sequence: Synthetic oligonucleotide
ugggucagagcuuuggaau

SEQ ID NO: 332644 - RNA, 19 nt, Artificial Sequence
  Description of Artificial Sequence: Synthetic oligonucleotide
auaucuguguaacaucaua

SEQ ID NO: 332645 - RNA, 19 nt, Artificial Sequence
  Description of Artificial Sequence: Synthetic oligonucleotide
auguucuagacccuagaau

SEQ ID NO: 332646 - RNA, 19 nt, Artificial Sequence
  Description of Artificial Sequence: Synthetic oligonucleotide
auuacagccuaacgcugag

SEQ ID NO: 332647 - RNA, 19 nt, Artificial Sequence
  Description of Artificial Sequence: Synthetic oligonucleotide
acaugguguggcugauucc

SEQ ID NO: 332648 - RNA, 19 nt, Artificial Sequence
  Description of Artificial Sequence: Synthetic oligonucleotide
cagugaagugugucaagcg

SEQ ID NO: 332649 - RNA, 19 nt, Artificial Sequence
  Description of Artificial Sequence: Synthetic oligonucleotide
caguuuugaaagacugggc

SEQ ID NO: 332650 - RNA, 19 nt, Artificial Sequence
  Description of Artificial Sequence: Synthetic oligonucleotide
uguggcugauuccugacuu

SEQ ID NO: 332651 - RNA, 19 nt, Artificial Sequence
  Description of Artificial Sequence: Synthetic oligonucleotide
ggagucaaaacagugucag

SEQ ID NO: 332652 - RNA, 19 nt, Artificial Sequence
  Description of Artificial Sequence: Synthetic oligonucleotide
auauuaauguacaucugaa

SEQ ID NO: 332653 - RNA, 19 nt, Artificial Sequence
  Description of Artificial Sequence: Synthetic oligonucleotide
agaacuggaguauggucgu

SEQ ID NO: 332654 - RNA, 19 nt, Artificial Sequence
  Description of Artificial Sequence: Synthetic oligonucleotide
aucuguguaacaucauaau

SEQ ID NO: 332655 - RNA, 19 nt, Artificial Sequence
  Description of Artificial Sequence: Synthetic oligonucleotide
cuagaaucacuguaagcca

SEQ ID NO: 332656 - RNA, 19 nt, Artificial Sequence
  Description of Artificial Sequence: Synthetic oligonucleotide
uuaaagucuccuugugcaa

SEQ ID NO: 332657 - RNA, 19 nt, Artificial Sequence
  Description of Artificial Sequence: Synthetic oligonucleotide
cagccuaacgcugaggcag

SEQ ID NO: 332658 - RNA, 19 nt, Artificial Sequence
  Description of Artificial Sequence: Synthetic oligonucleotide
uuaacuucuaaagguuaaa

SEQ ID NO: 332659 - RNA, 19 nt, Artificial Sequence
  Description of Artificial Sequence: Synthetic oligonucleotide
ucucuuaagggugaacgau

SEQ ID NO: 332660 - RNA, 19 nt, Artificial Sequence
  Description of Artificial Sequence: Synthetic oligonucleotide
gccccgaaaguuuucaagg

SEQ ID NO: 332661 - RNA, 19 nt, Artificial Sequence
  Description of Artificial Sequence: Synthetic oligonucleotide
auaugcuucugcccuucag

SEQ ID NO: 332662 - RNA, 19 nt, Artificial Sequence
  Description of Artificial Sequence: Synthetic oligonucleotide
acgugucuuacugaacgac

SEQ ID NO: 332663 - RNA, 19 nt, Artificial Sequence
  Description of Artificial Sequence: Synthetic oligonucleotide
ucaagcgacuguccugggc

SEQ ID NO: 332664 - RNA, 19 nt, Artificial Sequence
  Description of Artificial Sequence: Synthetic oligonucleotide
ugggccgucagcuggaguc

SEQ ID NO: 332665 - RNA, 19 nt, Artificial Sequence
  Description of Artificial Sequence: Synthetic oligonucleotide
cagcauaaaggcuuuauua

SEQ ID NO: 332666 - RNA, 19 nt, Artificial Sequence
  Description of Artificial Sequence: Synthetic oligonucleotide
acccuagaaucacuguaag

SEQ ID NO: 332667 - RNA, 19 nt, Artificial Sequence
  Description of Artificial Sequence: Synthetic oligonucleotide
acguuugucaaaauggcau

SEQ ID NO: 332668 - RNA, 19 nt, Artificial Sequence
  Description of Artificial Sequence: Synthetic oligonucleotide
ccuugugcaauuuaacuuc

SEQ ID NO: 332669 - RNA, 19 nt, Artificial Sequence
  Description of Artificial Sequence: Synthetic oligonucleotide
cucuggacgugucuuacug

SEQ ID NO: 332670 - RNA, 19 nt, Artificial Sequence
  Description of Artificial Sequence: Synthetic oligonucleotide
guaacaaggguuucugucu

SEQ ID NO: 332671 - RNA, 19 nt, Artificial Sequence
  Description of Artificial Sequence: Synthetic oligonucleotide
cuccuuauauaacaaaugu

SEQ ID NO: 332672 - RNA, 19 nt, Artificial Sequence
  Description of Artificial Sequence: Synthetic oligonucleotide
cuuaagggugaacgauggg

SEQ ID NO: 332673 - RNA, 19 nt, Artificial Sequence
  Description of Artificial Sequence: Synthetic oligonucleotide
gguauauacucucuuguaa

SEQ ID NO: 332674 - RNA, 19 nt, Artificial Sequence
  Description of Artificial Sequence: Synthetic oligonucleotide
gcagcaauaguuaugacaa

SEQ ID NO: 332675 - RNA, 19 nt, Artificial Sequence
  Description of Artificial Sequence: Synthetic oligonucleotide
uccagaacggauugcgguc

SEQ ID NO: 332676 - RNA, 19 nt, Artificial Sequence
  Description of Artificial Sequence: Synthetic oligonucleotide
auguaauaucuguguaaca

SEQ ID NO: 332677 - RNA, 19 nt, Artificial Sequence
  Description of Artificial Sequence: Synthetic oligonucleotide
acuagucuuccauaucuuu

SEQ ID NO: 332678 - RNA, 19 nt, Artificial Sequence
  Description of Artificial Sequence: Synthetic oligonucleotide
augcuuauuguugaacaga

SEQ ID NO: 332679 - RNA, 19 nt, Artificial Sequence
  Description of Artificial Sequence: Synthetic oligonucleotide
agcaugcaucuuuugguca

SEQ ID NO: 332680 - RNA, 19 nt, Artificial Sequence
  Description of Artificial Sequence: Synthetic oligonucleotide
aacgaugggccgucagcug

SEQ ID NO: 332681 - RNA, 19 nt, Artificial Sequence
  Description of Artificial Sequence: Synthetic oligonucleotide
uuuggaugguagugucacc

SEQ ID NO: 332682 - RNA, 19 nt, Artificial Sequence
  Description of Artificial Sequence: Synthetic oligonucleotide
gacgauuagcaugugagcu

SEQ ID NO: 332683 - RNA, 19 nt, Artificial Sequence
  Description of Artificial Sequence: Synthetic oligonucleotide
gauucccaaucuuucacua

SEQ ID NO: 332684 - RNA, 19 nt, Artificial Sequence
  Description of Artificial Sequence: Synthetic oligonucleotide
uuuucacccuccgugucug

SEQ ID NO: 332685 - RNA, 19 nt, Artificial Sequence
  Description of Artificial Sequence: Synthetic oligonucleotide
aauucacguuugucaaaau

SEQ ID NO: 332686 - RNA, 19 nt, Artificial Sequence
  Description of Artificial Sequence: Synthetic oligonucleotide
uucuagacccuagaaucac

SEQ ID NO: 332687 - RNA, 19 nt, Artificial Sequence
  Description of Artificial Sequence: Synthetic oligonucleotide
augguagugucaccaucag

SEQ ID NO: 332688 - RNA, 19 nt, Artificial Sequence
  Description of Artificial Sequence: Synthetic oligonucleotide
gaaccaacgcucagagucc

SEQ ID NO: 332689 - RNA, 19 nt, Artificial Sequence
  Description of Artificial Sequence: Synthetic oligonucleotide
cuaagugguucuucaauaa

SEQ ID NO: 332690 - RNA, 19 nt, Artificial Sequence
  Description of Artificial Sequence: Synthetic oligonucleotide
caucuuuuggucaucuuua

SEQ ID NO: 332691 - RNA, 19 nt, Artificial Sequence
  Description of Artificial Sequence: Synthetic oligonucleotide
aaucaggauuuuggaaacu

SEQ ID NO: 332692 - RNA, 19 nt, Artificial Sequence
  Description of Artificial Sequence: Synthetic oligonucleotide
ucuggacgugucuuacuga

SEQ ID NO: 332693 - RNA, 19 nt, Artificial Sequence
  Description of Artificial Sequence: Synthetic oligonucleotide
agguauauacucucuugua

SEQ ID NO: 332694 - RNA, 19 nt, Artificial Sequence
  Description of Artificial Sequence: Synthetic oligonucleotide
acaucaaccagccccuauu

SEQ ID NO: 332695 - RNA, 19 nt, Artificial Sequence
  Description of Artificial Sequence: Synthetic oligonucleotide
auuagcaugugagcuacau

SEQ ID NO: 332696 - RNA, 19 nt, Artificial Sequence
  Description of Artificial Sequence: Synthetic oligonucleotide
cuuuaacuuggaggcagcc

SEQ ID NO: 332697 - RNA, 19 nt, Artificial Sequence
  Description of Artificial Sequence: Synthetic oligonucleotide
ggaaaauucuucagauaag

SEQ ID NO: 332698 - RNA, 19 nt, Artificial Sequence
  Description of Artificial Sequence: Synthetic oligonucleotide
ggugcaaaaggaaugccac

SEQ ID NO: 332699 - RNA, 19 nt, Artificial Sequence
  Description of Artificial Sequence: Synthetic oligonucleotide
cuagcuuagcauuuuauuu

SEQ ID NO: 332700 - RNA, 19 nt, Artificial Sequence
  Description of Artificial Sequence: Synthetic oligonucleotide
gagcuacauaaaugacuag

SEQ ID NO: 332701 - RNA, 19 nt, Artificial Sequence
  Description of Artificial Sequence: Synthetic oligonucleotide
gucuuacugaacgacugug

SEQ ID NO: 332702 - RNA, 19 nt, Artificial Sequence
  Description of Artificial Sequence: Synthetic oligonucleotide
guaacucacuuguaauuaa

SEQ ID NO: 332703 - RNA, 19 nt, Artificial Sequence
  Description of Artificial Sequence: Synthetic oligonucleotide
cagcaugcaucuuuugguc

SEQ ID NO: 332704 - RNA, 19 nt, Artificial Sequence
  Description of Artificial Sequence: Synthetic oligonucleotide
uuugucaaaauggcauaua

SEQ ID NO: 332705 - RNA, 19 nt, Artificial Sequence
  Description of Artificial Sequence: Synthetic oligonucleotide
aggcaguaaauguuaguuu

SEQ ID NO: 332706 - RNA, 19 nt, Artificial Sequence
  Description of Artificial Sequence: Synthetic oligonucleotide
ugaacgacugugaccuuuu

SEQ ID NO: 332707 - RNA, 19 nt, Artificial Sequence
  Description of Artificial Sequence: Synthetic oligonucleotide
aucaaccagccccuauucu

SEQ ID NO: 332708 - RNA, 19 nt, Artificial Sequence
  Description of Artificial Sequence: Synthetic oligonucleotide
uagacccuagaaucacugu

SEQ ID NO: 332709 - RNA, 19 nt, Artificial Sequence
  Description of Artificial Sequence: Synthetic oligonucleotide
uuguuaugcuuaucauuau

SEQ ID NO: 332710 - RNA, 19 nt, Artificial Sequence
  Description of Artificial Sequence: Synthetic oligonucleotide
uuacagccuaacgcugagg

SEQ ID NO: 332711 - RNA, 19 nt, Artificial Sequence
  Description of Artificial Sequence: Synthetic oligonucleotide
acgauuagcaugugagcua

SEQ ID NO: 332712 - RNA, 19 nt, Artificial Sequence
  Description of Artificial Sequence: Synthetic oligonucleotide
uuggugcaaaaggaaugcc

SEQ ID NO: 332713 - RNA, 19 nt, Artificial Sequence
  Description of Artificial Sequence: Synthetic oligonucleotide
aacggauugcggucagcaa

SEQ ID NO: 332714 - RNA, 19 nt, Artificial Sequence
  Description of Artificial Sequence: Synthetic oligonucleotide
aacaaucauuaagcaguga

SEQ ID NO: 332715 - RNA, 19 nt, Artificial Sequence
  Description of Artificial Sequence: Synthetic oligonucleotide
uaacgcugaggcaguaaau

SEQ ID NO: 332716 - RNA, 19 nt, Artificial Sequence
  Description of Artificial Sequence: Synthetic oligonucleotide
guuuguuaugcuuaucauu

SEQ ID NO: 332717 - RNA, 19 nt, Artificial Sequence
  Description of Artificial Sequence: Synthetic oligonucleotide
caucaaccagccccuauuc

SEQ ID NO: 332718 - RNA, 19 nt, Artificial Sequence
  Description of Artificial Sequence: Synthetic oligonucleotide
aggcuuuuggaugguagug

SEQ ID NO: 332719 - RNA, 19 nt, Artificial Sequence
  Description of Artificial Sequence: Synthetic oligonucleotide
cacguuugucaaaauggca

SEQ ID NO: 332720 - RNA, 19 nt, Artificial Sequence
  Description of Artificial Sequence: Synthetic oligonucleotide
gagacaaagaguugugguu

SEQ ID NO: 332721 - RNA, 19 nt, Artificial Sequence
  Description of Artificial Sequence: Synthetic oligonucleotide
auauucccaagcauaugcu

SEQ ID NO: 332722 - RNA, 19 nt, Artificial Sequence
  Description of Artificial Sequence: Synthetic oligonucleotide
auucccaaucuuucacuau

SEQ ID NO: 332723 - RNA, 19 nt, Artificial Sequence
  Description of Artificial Sequence: Synthetic oligonucleotide
guaguuuuauuaggaguca

SEQ ID NO: 332724 - RNA, 19 nt, Artificial Sequence
  Description of Artificial Sequence: Synthetic oligonucleotide
cuggaguauggucgugggg

SEQ ID NO: 332725 - RNA, 19 nt, Artificial Sequence
  Description of Artificial Sequence: Synthetic oligonucleotide
cuaacgcugaggcaguaaa

SEQ ID NO: 332726 - RNA, 19 nt, Artificial Sequence
  Description of Artificial Sequence: Synthetic oligonucleotide
gugucaagcgacuguccug

SEQ ID NO: 332727 - RNA, 19 nt, Artificial Sequence
  Description of Artificial Sequence: Synthetic oligonucleotide
cuugccuauuucucuguca

SEQ ID NO: 332728 - RNA, 19 nt, Artificial Sequence
  Description of Artificial Sequence: Synthetic oligonucleotide
gcccaguaguuuuauuagg

SEQ ID NO: 332729 - RNA, 19 nt, Artificial Sequence
  Description of Artificial Sequence: Synthetic oligonucleotide
gacgugucuuacugaacga

SEQ ID NO: 332730 - RNA, 19 nt, Artificial Sequence
  Description of Artificial Sequence: Synthetic oligonucleotide
augucuuuucacccuccgu

SEQ ID NO: 332731 - RNA, 19 nt, Artificial Sequence
  Description of Artificial Sequence: Synthetic oligonucleotide
aucaggauuuuggaaacuu

SEQ ID NO: 332732 - RNA, 19 nt, Artificial Sequence
  Description of Artificial Sequence: Synthetic oligonucleotide
ggcggagaagcccucacug

SEQ ID NO: 332733 - RNA, 19 nt, Artificial Sequence
  Description of Artificial Sequence: Synthetic oligonucleotide
aacuucuaacuagucuuua

SEQ ID NO: 332734 - RNA, 19 nt, Artificial Sequence
  Description of Artificial Sequence: Synthetic oligonucleotide
guucuagacccuagaauca

SEQ ID NO: 332735 - RNA, 19 nt, Artificial Sequence
  Description of Artificial Sequence: Synthetic oligonucleotide
aucuuucagcauaaaggcu

SEQ ID NO: 332736 - RNA, 19 nt, Artificial Sequence
  Description of Artificial Sequence: Synthetic oligonucleotide
aggucucagcaggaagagc

SEQ ID NO: 332737 - RNA, 19 nt, Artificial Sequence
  Description of Artificial Sequence: Synthetic oligonucleotide
ggucguggggccccgaaag

SEQ ID NO: 332738 - RNA, 19 nt, Artificial Sequence
  Description of Artificial Sequence: Synthetic oligonucleotide
ugguacacaguauguccau

SEQ ID NO: 332739 - RNA, 19 nt, Artificial Sequence
  Description of Artificial Sequence: Synthetic oligonucleotide
uggacgugucuuacugaac

SEQ ID NO: 332740 - RNA, 19 nt, Artificial Sequence
  Description of Artificial Sequence: Synthetic oligonucleotide
gccuauuucucugucacac

SEQ ID NO: 332741 - RNA, 19 nt, Artificial Sequence
  Description of Artificial Sequence: Synthetic oligonucleotide
ugccuauuucucugucaca

SEQ ID NO: 332742 - RNA, 19 nt, Artificial Sequence
  Description of Artificial Sequence: Synthetic oligonucleotide
aguuugugcuugccuauuu

SEQ ID NO: 332743 - RNA, 19 nt, Artificial Sequence
  Description of Artificial Sequence: Synthetic oligonucleotide
acagccuaacgcugaggca

SEQ ID NO: 332744 - RNA, 19 nt, Artificial Sequence
  Description of Artificial Sequence: Synthetic oligonucleotide
caaccaguuuggcuuucag

SEQ ID NO: 332745 - RNA, 19 nt, Artificial Sequence
  Description of Artificial Sequence: Synthetic oligonucleotide
ugcuugccuauuucucugu

SEQ ID NO: 332746 - RNA, 19 nt, Artificial Sequence
  Description of Artificial Sequence: Synthetic oligonucleotide
cuggacgugucuuacugaa

SEQ ID NO: 332747 - RNA, 19 nt, Artificial Sequence
  Description of Artificial Sequence: Synthetic oligonucleotide
aaccaacgcucagaguccu

SEQ ID NO: 332748 - RNA, 19 nt, Artificial Sequence
  Description of Artificial Sequence: Synthetic oligonucleotide
ugacuaccaggaagagcca

SEQ ID NO: 332749 - RNA, 19 nt, Artificial Sequence
  Description of Artificial Sequence: Synthetic oligonucleotide
ggccccgaaaguuuucaag

SEQ ID NO: 332750 - RNA, 19 nt, Artificial Sequence
  Description of Artificial Sequence: Synthetic oligonucleotide
caauaacucucuuuaacuu

SEQ ID NO: 332751 - RNA, 19 nt, Artificial Sequence
  Description of Artificial Sequence: Synthetic oligonucleotide
uccgucuacaggagacaaa

SEQ ID NO: 332752 - RNA, 19 nt, Artificial Sequence
  Description of Artificial Sequence: Synthetic oligonucleotide
gauugcggucagcaagcuc

SEQ ID NO: 332753 - RNA, 19 nt, Artificial Sequence
  Description of Artificial Sequence: Synthetic oligonucleotide
gugaacgaugggccgucag

SEQ ID NO: 332754 - RNA, 19 nt, Artificial Sequence
  Description of Artificial Sequence: Synthetic oligonucleotide
aaggaacaauuaaauucuu

SEQ ID NO: 332755 - RNA, 19 nt, Artificial Sequence
  Description of Artificial Sequence: Synthetic oligonucleotide
uuuagacgauuagcaugug

SEQ ID NO: 332756 - RNA, 19 nt, Artificial Sequence
  Description of Artificial Sequence: Synthetic oligonucleotide
auuauucaccauggggaaa

SEQ ID NO: 332757 - RNA, 19 nt, Artificial Sequence
  Description of Artificial Sequence: Synthetic oligonucleotide
cauauagcccaguaguuuu

SEQ ID NO: 332758 - RNA, 19 nt, Artificial Sequence
  Description of Artificial Sequence: Synthetic oligonucleotide
guucccauaugcacacgug

SEQ ID NO: 332759 - RNA, 19 nt, Artificial Sequence
  Description of Artificial Sequence: Synthetic oligonucleotide
cacacaauauguccauaaa

SEQ ID NO: 332760 - RNA, 19 nt, Artificial Sequence
  Description of Artificial Sequence: Synthetic oligonucleotide
ucaaccaguuuggcuuuca

SEQ ID NO: 332761 - RNA, 19 nt, Artificial Sequence
  Description of Artificial Sequence: Synthetic oligonucleotide
aggaacaauuaaauucuua

SEQ ID NO: 332762 - RNA, 19 nt, Artificial Sequence
  Description of Artificial Sequence: Synthetic oligonucleotide
guuucuaauuacagccuaa

SEQ ID NO: 332763 - RNA, 19 nt, Artificial Sequence
  Description of Artificial Sequence: Synthetic oligonucleotide
ucaacacuaagugguucuu

SEQ ID NO: 332764 - RNA, 19 nt, Artificial Sequence
  Description of Artificial Sequence: Synthetic oligonucleotide
acucuggacgugucuuacu

SEQ ID NO: 332765 - RNA, 19 nt, Artificial Sequence
  Description of Artificial Sequence: Synthetic oligonucleotide
uccugucuauaaagcggaa

SEQ ID NO: 332766 - RNA, 19 nt, Artificial Sequence
  Description of Artificial Sequence: Synthetic oligonucleotide
cccaguaguuuuauuagga

SEQ ID NO: 332767 - RNA, 19 nt, Artificial Sequence
  Description of Artificial Sequence: Synthetic oligonucleotide
uucacccuccgugucugca

SEQ ID NO: 332768 - RNA, 19 nt, Artificial Sequence
  Description of Artificial Sequence: Synthetic oligonucleotide
gaacgaugggccgucagcu

SEQ ID NO: 332769 - RNA, 19 nt, Artificial Sequence
  Description of Artificial Sequence: Synthetic oligonucleotide
gcuacaaggggaggagagg

SEQ ID NO: 332770 - RNA, 19 nt, Artificial Sequence
  Description of Artificial Sequence: Synthetic oligonucleotide
cccuagaaucacuguaagc

SEQ ID NO: 332771 - RNA, 19 nt, Artificial Sequence
  Description of Artificial Sequence: Synthetic oligonucleotide
caaucauuaagcagugauu

SEQ ID NO: 332772 - RNA, 19 nt, Artificial Sequence
  Description of Artificial Sequence: Synthetic oligonucleotide
agaguccugugcaaaugcu

SEQ ID NO: 332773 - RNA, 19 nt, Artificial Sequence
  Description of Artificial Sequence: Synthetic oligonucleotide
cuugugcaauuuaacuucu

SEQ ID NO: 332774 - RNA, 19 nt, Artificial Sequence
  Description of Artificial Sequence: Synthetic oligonucleotide
uauucaccauggggaaaga

SEQ ID NO: 332775 - RNA, 19 nt, Artificial Sequence
  Description of Artificial Sequence: Synthetic oligonucleotide
ggaugguagugucaccauc

SEQ ID NO: 332776 - RNA, 19 nt, Artificial Sequence
  Description of Artificial Sequence: Synthetic oligonucleotide
gguuuuagggguauuuaua

SEQ ID NO: 332777 - RNA, 19 nt, Artificial Sequence
  Description of Artificial Sequence: Synthetic oligonucleotide
agucuccuugugcaauuua

SEQ ID NO: 332778 - RNA, 19 nt, Artificial Sequence
  Description of Artificial Sequence: Synthetic oligonucleotide
ccuauagaucuguaacuca

SEQ ID NO: 332779 - RNA, 19 nt, Artificial Sequence
  Description of Artificial Sequence: Synthetic oligonucleotide
agcauaugcuucugcccuu

SEQ ID NO: 332780 - RNA, 19 nt, Artificial Sequence
  Description of Artificial Sequence: Synthetic oligonucleotide
ccacggcagauuuauuuac

SEQ ID NO: 332781 - RNA, 19 nt, Artificial Sequence
  Description of Artificial Sequence: Synthetic oligonucleotide
gucaagcgacuguccuggg

SEQ ID NO: 332782 - RNA, 19 nt, Artificial Sequence
  Description of Artificial Sequence: Synthetic oligonucleotide
auucaccauggggaaagaa

SEQ ID NO: 332783 - RNA, 19 nt, Artificial Sequence
  Description of Artificial Sequence: Synthetic oligonucleotide
ggguauuuauaguccuguc

SEQ ID NO: 332784 - RNA, 19 nt, Artificial Sequence
  Description of Artificial Sequence: Synthetic oligonucleotide
acuggacucuggacguguc

SEQ ID NO: 332785 - RNA, 19 nt, Artificial Sequence
  Description of Artificial Sequence: Synthetic oligonucleotide
auagcccaguaguuuuauu

SEQ ID NO: 332786 - RNA, 19 nt, Artificial Sequence
  Description of Artificial Sequence: Synthetic oligonucleotide
cagguugggcaaccacggc

SEQ ID NO: 332787 - RNA, 19 nt, Artificial Sequence
  Description of Artificial Sequence: Synthetic oligonucleotide
agggugaacgaugggccgu

SEQ ID NO: 332788 - RNA, 19 nt, Artificial Sequence
  Description of Artificial Sequence: Synthetic oligonucleotide
ggccagaacuggaguaugg

SEQ ID NO: 332789 - RNA, 19 nt, Artificial Sequence
  Description of Artificial Sequence: Synthetic oligonucleotide
cccgaaaguuuucaagguc

SEQ ID NO: 332790 - RNA, 19 nt, Artificial Sequence
  Description of Artificial Sequence: Synthetic oligonucleotide
cucggaaccaacgcucaga

SEQ ID NO: 332791 - RNA, 19 nt, Artificial Sequence
  Description of Artificial Sequence: Synthetic oligonucleotide
guuugucaaaauggcauau

SEQ ID NO: 332792 - RNA, 19 nt, Artificial Sequence
  Description of Artificial Sequence: Synthetic oligonucleotide
cggauugcggucagcaagc

SEQ ID NO: 332793 - RNA, 19 nt, Artificial Sequence
  Description of Artificial Sequence: Synthetic oligonucleotide
ccgaaaguuuucaaggucu

SEQ ID NO: 332794 - RNA, 19 nt, Artificial Sequence
  Description of Artificial Sequence: Synthetic oligonucleotide
agcaugugagcuacauaaa

SEQ ID NO: 332795 - RNA, 19 nt, Artificial Sequence
  Description of Artificial Sequence: Synthetic oligonucleotide
gguuuguuaugcuuaucau

SEQ ID NO: 332796 - RNA, 19 nt, Artificial Sequence
  Description of Artificial Sequence: Synthetic oligonucleotide
gacuagcuuagcauuuuau

SEQ ID NO: 332797 - RNA, 19 nt, Artificial Sequence
  Description of Artificial Sequence: Synthetic oligonucleotide
auauagcccaguaguuuua

SEQ ID NO: 332798 - RNA, 19 nt, Artificial Sequence
  Description of Artificial Sequence: Synthetic oligonucleotide
gaugggccgucagcuggag

SEQ ID NO: 332799 - RNA, 19 nt, Artificial Sequence
  Description of Artificial Sequence: Synthetic oligonucleotide
agcgacuguccugggcauc

SEQ ID NO: 332800 - RNA, 19 nt, Artificial Sequence
  Description of Artificial Sequence: Synthetic oligonucleotide
caggcuuuuggaugguagu

SEQ ID NO: 332801 - RNA, 19 nt, Artificial Sequence
  Description of Artificial Sequence: Synthetic oligonucleotide
ucguggggccccgaaaguu

SEQ ID NO: 332802 - RNA, 19 nt, Artificial Sequence
  Description of Artificial Sequence: Synthetic oligonucleotide
gguucccauaugcacacgu

SEQ ID NO: 332803 - RNA, 19 nt, Artificial Sequence
  Description of Artificial Sequence: Synthetic oligonucleotide
gcauaugucuuuucacccu

SEQ ID NO: 332804 - RNA, 19 nt, Artificial Sequence
  Description of Artificial Sequence: Synthetic oligonucleotide
uucaaccaguuuggcuuuc

SEQ ID NO: 332805 - RNA, 19 nt, Artificial Sequence
  Description of Artificial Sequence: Synthetic oligonucleotide
gaucuguaacucacuugua

SEQ ID NO: 332806 - RNA, 19 nt, Artificial Sequence
  Description of Artificial Sequence: Synthetic oligonucleotide
cacggcagauuuauuuacu

SEQ ID NO: 332807 - RNA, 19 nt, Artificial Sequence
  Description of Artificial Sequence: Synthetic oligonucleotide
cgauuagcaugugagcuac

SEQ ID NO: 332808 - RNA, 19 nt, Artificial Sequence
  Description of Artificial Sequence: Synthetic oligonucleotide
gacaucaaccagccccuau

SEQ ID NO: 332809 - RNA, 19 nt, Artificial Sequence
  Description of Artificial Sequence: Synthetic oligonucleotide
ccuuuguugcaugguacac

SEQ ID NO: 332810 - RNA, 19 nt, Artificial Sequence
  Description of Artificial Sequence: Synthetic oligonucleotide
gauuagcaugugagcuaca

SEQ ID NO: 332811 - RNA, 19 nt, Artificial Sequence
  Description of Artificial Sequence: Synthetic oligonucleotide
guagugucaccaucaguuu

SEQ ID NO: 332812 - RNA, 19 nt, Artificial Sequence
  Description of Artificial Sequence: Synthetic oligonucleotide
auggucguggggccccgaa

SEQ ID NO: 332813 - RNA, 19 nt, Artificial Sequence
  Description of Artificial Sequence: Synthetic oligonucleotide
uggggccccgaaaguuuuc

SEQ ID NO: 332814 - RNA, 19 nt, Artificial Sequence
  Description of Artificial Sequence: Synthetic oligonucleotide
cauaggcuugggagcuaca

SEQ ID NO: 332815 - RNA, 19 nt, Artificial Sequence
  Description of Artificial Sequence: Synthetic oligonucleotide
guugcaugguacacaguau

SEQ ID NO: 332816 - RNA, 19 nt, Artificial Sequence
  Description of Artificial Sequence: Synthetic oligonucleotide
cugauuccugacuucccau

SEQ ID NO: 332817 - RNA, 19 nt, Artificial Sequence
  Description of Artificial Sequence: Synthetic oligonucleotide
agccuaacgcugaggcagu

SEQ ID NO: 332818 - RNA, 19 nt, Artificial Sequence
  Description of Artificial Sequence: Synthetic oligonucleotide
agccccuauucuccuuaua

SEQ ID NO: 332819 - RNA, 19 nt, Artificial Sequence
  Description of Artificial Sequence: Synthetic oligonucleotide
gucacacaauauguccaua

SEQ ID NO: 332820 - RNA, 19 nt, Artificial Sequence
  Description of Artificial Sequence: Synthetic oligonucleotide
acugaacgacugugaccuu

SEQ ID NO: 332821 - RNA, 19 nt, Artificial Sequence
  Description of Artificial Sequence: Synthetic oligonucleotide
ccauaggcuugggagcuac

SEQ ID NO: 332822 - RNA, 19 nt, Artificial Sequence
  Description of Artificial Sequence: Synthetic oligonucleotide
aucgucauucugggagguu

SEQ ID NO: 332823 - RNA, 19 nt, Artificial Sequence
  Description of Artificial Sequence: Synthetic oligonucleotide
ggggcacuauuuuguaagu

SEQ ID NO: 332824 - RNA, 19 nt, Artificial Sequence
  Description of Artificial Sequence: Synthetic oligonucleotide
gcauauagcccaguaguuu

SEQ ID NO: 332825 - RNA, 19 nt, Artificial Sequence
  Description of Artificial Sequence: Synthetic oligonucleotide
accaacgcucagaguccug

SEQ ID NO: 332826 - RNA, 19 nt, Artificial Sequence
  Description of Artificial Sequence: Synthetic oligonucleotide
ccagaacggauugcgguca

SEQ ID NO: 332827 - RNA, 19 nt, Artificial Sequence
  Description of Artificial Sequence: Synthetic oligonucleotide
cugugagccuuuggaagua

SEQ ID NO: 332828 - RNA, 19 nt, Artificial Sequence
  Description of Artificial Sequence: Synthetic oligonucleotide
cugaacgacugugaccuuu

SEQ ID NO: 332829 - RNA, 19 nt, Artificial Sequence
  Description of Artificial Sequence: Synthetic oligonucleotide
ggggccccgaaaguuuuca

SEQ ID NO: 332830 - RNA, 19 nt, Artificial Sequence
  Description of Artificial Sequence: Synthetic oligonucleotide
cgugucuuacugaacgacu

SEQ ID NO: 332831 - RNA, 19 nt, Artificial Sequence
  Description of Artificial Sequence: Synthetic oligonucleotide
ggcauauagcccaguaguu

SEQ ID NO: 332832 - RNA, 19 nt, Artificial Sequence
  Description of Artificial Sequence: Synthetic oligonucleotide
gggugaacgaugggccguc

SEQ ID NO: 332833 - RNA, 19 nt, Artificial Sequence
  Description of Artificial Sequence: Synthetic oligonucleotide
caguguccaucgucauucu

SEQ ID NO: 332834 - RNA, 19 nt, Artificial Sequence
  Description of Artificial Sequence: Synthetic oligonucleotide
gggccccgaaaguuuucaa

SEQ ID NO: 332835 - RNA, 19 nt, Artificial Sequence
  Description of Artificial Sequence: Synthetic oligonucleotide
ggugaacgaugggccguca

SEQ ID NO: 332836 - RNA, 19 nt, Artificial Sequence
  Description of Artificial Sequence: Synthetic oligonucleotide
ccuaacgcugaggcaguaa

SEQ ID NO: 332837 - RNA, 19 nt, Artificial Sequence
  Description of Artificial Sequence: Synthetic oligonucleotide
ggcaaccacggcagauuua

SEQ ID NO: 332838 - RNA, 19 nt, Artificial Sequence
  Description of Artificial Sequence: Synthetic oligonucleotide
ggauugcggucagcaagcu

SEQ ID NO: 332839 - RNA, 19 nt, Artificial Sequence
  Description of Artificial Sequence: Synthetic oligonucleotide
cagccccuauucuccuuau

SEQ ID NO: 332840 - RNA, 19 nt, Artificial Sequence
  Description of Artificial Sequence: Synthetic oligonucleotide
cgacuguccugggcaucag

SEQ ID NO: 332841 - RNA, 19 nt, Artificial Sequence
  Description of Artificial Sequence: Synthetic oligonucleotide
gccuaacgcugaggcagua

SEQ ID NO: 332842 - RNA, 19 nt, Artificial Sequence
  Description of Artificial Sequence: Synthetic oligonucleotide
gccauaggcuugggagcua

SEQ ID NO: 332843 - RNA, 19 nt, Artificial Sequence
  Description of Artificial Sequence: Synthetic oligonucleotide
cggaaccaacgcucagagu

SEQ ID NO: 332844 - RNA, 19 nt, Artificial Sequence
  Description of Artificial Sequence: Synthetic oligonucleotide
gcccuucagcaugcaucuu

SEQ ID NO: 332845 - RNA, 19 nt, Artificial Sequence
  Description of Artificial Sequence: Synthetic oligonucleotide
ugccagaugacucuaaacg

SEQ ID NO: 332846 - RNA, 19 nt, Artificial Sequence
  Description of Artificial Sequence: Synthetic oligonucleotide
uuuacucugcacuugagag

SEQ ID NO: 332847 - RNA, 19 nt, Artificial Sequence
  Description of Artificial Sequence: Synthetic oligonucleotide
ugggauaccagaauuacgc

SEQ ID NO: 332848 - RNA, 19 nt, Artificial Sequence
  Description of Artificial Sequence: Synthetic oligonucleotide
cucaauucgcacaucauag

SEQ ID NO: 332849 - RNA, 19 nt, Artificial Sequence
  Description of Artificial Sequence: Synthetic oligonucleotide
aguagggaaguccuaaguc

SEQ ID NO: 332850 - RNA, 19 nt, Artificial Sequence
  Description of Artificial Sequence: Synthetic oligonucleotide
cuucagucgagcuucagcc

SEQ ID NO: 332851 - RNA, 19 nt, Artificial Sequence
  Description of Artificial Sequence: Synthetic oligonucleotide
gauaccucgaacaggagcc

SEQ ID NO: 332852 - RNA, 19 nt, Artificial Sequence
  Description of Artificial Sequence: Synthetic oligonucleotide
acuaggauuguggagggcc

SEQ ID NO: 332853 - RNA, 19 nt, Artificial Sequence
  Description of Artificial Sequence: Synthetic oligonucleotide
ucgguaaccaucuagucgu

SEQ ID NO: 332854 - RNA, 19 nt, Artificial Sequence
  Description of Artificial Sequence: Synthetic oligonucleotide
uugguugccuacaugguag

SEQ ID NO: 332855 - RNA, 19 nt, Artificial Sequence
  Description of Artificial Sequence: Synthetic oligonucleotide
aaauagccuaucuucagau

SEQ ID NO: 332856 - RNA, 19 nt, Artificial Sequence
  Description of Artificial Sequence: Synthetic oligonucleotide
cauuuuagggguaaaacca

SEQ ID NO: 332857 - RNA, 19 nt, Artificial Sequence
  Description of Artificial Sequence: Synthetic oligonucleotide
ucuagcugcagaauuggug

SEQ ID NO: 332858 - RNA, 19 nt, Artificial Sequence
  Description of Artificial Sequence: Synthetic oligonucleotide
gagacaacuaggauugugg

SEQ ID NO: 332859 - RNA, 19 nt, Artificial Sequence
  Description of Artificial Sequence: Synthetic oligonucleotide
aauucgcacaucauaggac

SEQ ID NO: 332860 - RNA, 19 nt, Artificial Sequence
  Description of Artificial Sequence: Synthetic oligonucleotide
ugauaccucgaacaggagc

SEQ ID NO: 332861 - RNA, 19 nt, Artificial Sequence
  Description of Artificial Sequence: Synthetic oligonucleotide
guaaccaucuagucguugg

SEQ ID NO: 332862 - RNA, 19 nt, Artificial Sequence
  Description of Artificial Sequence: Synthetic oligonucleotide
uggcauuguaucgaaaacg

SEQ ID NO: 332863 - RNA, 19 nt, Artificial Sequence
  Description of Artificial Sequence: Synthetic oligonucleotide
ucgaaaacggucuaugaaa

SEQ ID NO: 332864 - RNA, 19 nt, Artificial Sequence
  Description of Artificial Sequence: Synthetic oligonucleotide
uguuuaggaucauaguaga

SEQ ID NO: 332865 - RNA, 19 nt, Artificial Sequence
  Description of Artificial Sequence: Synthetic oligonucleotide
uuacucugcacuugagagg

SEQ ID NO: 332866 - RNA, 19 nt, Artificial Sequence
  Description of Artificial Sequence: Synthetic oligonucleotide
cucgguaaccaucuagucg

SEQ ID NO: 332867 - RNA, 19 nt, Artificial Sequence
  Description of Artificial Sequence: Synthetic oligonucleotide
augagagacaacuaggauu

SEQ ID NO: 332868 - RNA, 19 nt, Artificial Sequence
  Description of Artificial Sequence: Synthetic oligonucleotide
gacguguuuaggaucauag

SEQ ID NO: 332869 - RNA, 19 nt, Artificial Sequence
  Description of Artificial Sequence: Synthetic oligonucleotide
guguuuaggaucauaguag

SEQ ID NO: 332870 - RNA, 19 nt, Artificial Sequence
  Description of Artificial Sequence: Synthetic oligonucleotide
cuaagucuggaguugguug

SEQ ID NO: 332871 - RNA, 19 nt, Artificial Sequence
  Description of Artificial Sequence: Synthetic oligonucleotide
aauaugggcuggaacccgc

SEQ ID NO: 332872 - RNA, 19 nt, Artificial Sequence
  Description of Artificial Sequence: Synthetic oligonucleotide
uacucugcacuugagaggc

SEQ ID NO: 332873 - RNA, 19 nt, Artificial Sequence
  Description of Artificial Sequence: Synthetic oligonucleotide
agaauugguggugagaacu

SEQ ID NO: 332874 - RNA, 19 nt, Artificial Sequence
  Description of Artificial Sequence: Synthetic oligonucleotide
gacaugucuccccacaaug

SEQ ID NO: 332875 - RNA, 19 nt, Artificial Sequence
  Description of Artificial Sequence: Synthetic oligonucleotide
cuagucguuggcuaugcag

SEQ ID NO: 332876 - RNA, 19 nt, Artificial Sequence
  Description of Artificial Sequence: Synthetic oligonucleotide
ugcgcugacagacagcccu

SEQ ID NO: 332877 - RNA, 19 nt, Artificial Sequence
  Description of Artificial Sequence: Synthetic oligonucleotide
aaauaaggcuguccccaag

SEQ ID NO: 332878 - RNA, 19 nt, Artificial Sequence
  Description of Artificial Sequence: Synthetic oligonucleotide
aaagccucaauugucucca

SEQ ID NO: 332879 - RNA, 19 nt, Artificial Sequence
  Description of Artificial Sequence: Synthetic oligonucleotide
auaagcucgcaaccgggcg

SEQ ID NO: 332880 - RNA, 19 nt, Artificial Sequence
  Description of Artificial Sequence: Synthetic oligonucleotide
gaaauaugggcuggaaccc

SEQ ID NO: 332881 - RNA, 19 nt, Artificial Sequence
  Description of Artificial Sequence: Synthetic oligonucleotide
gcauuuuagggguaaaacc

SEQ ID NO: 332882 - RNA, 19 nt, Artificial Sequence
  Description of Artificial Sequence: Synthetic oligonucleotide
auuguaucgaaaacggucu

SEQ ID NO: 332883 - RNA, 19 nt, Artificial Sequence
  Description of Artificial Sequence: Synthetic oligonucleotide
uguggcgauggcauucagg

SEQ ID NO: 332884 - RNA, 19 nt, Artificial Sequence
  Description of Artificial Sequence: Synthetic oligonucleotide
uucuucgcauucacugucg

SEQ ID NO: 332885 - RNA, 19 nt, Artificial Sequence
  Description of Artificial Sequence: Synthetic oligonucleotide
aaacggucuaugaaaaccu

SEQ ID NO: 332886 - RNA, 19 nt, Artificial Sequence
  Description of Artificial Sequence: Synthetic oligonucleotide
acggaacuguucuuggagg

SEQ ID NO: 332887 - RNA, 19 nt, Artificial Sequence
  Description of Artificial Sequence: Synthetic oligonucleotide
augccugauaccucgaaca

SEQ ID NO: 332888 - RNA, 19 nt, Artificial Sequence
  Description of Artificial Sequence: Synthetic oligonucleotide
uaucgaaaacggucuauga

SEQ ID NO: 332889 - RNA, 19 nt, Artificial Sequence
  Description of Artificial Sequence: Synthetic oligonucleotide
auuuacauagcagccacgu

SEQ ID NO: 332890 - RNA, 19 nt, Artificial Sequence
  Description of Artificial Sequence: Synthetic oligonucleotide
cugcccgucaauuucuggg

SEQ ID NO: 332891 - RNA, 19 nt, Artificial Sequence
  Description of Artificial Sequence: Synthetic oligonucleotide
agacagacgacugaagaug

SEQ ID NO: 332892 - RNA, 19 nt, Artificial Sequence
  Description of Artificial Sequence: Synthetic oligonucleotide
ccaguugaaaggaaaagag

SEQ ID NO: 332893 - RNA, 19 nt, Artificial Sequence
  Description of Artificial Sequence: Synthetic oligonucleotide
agaauuacgccuccccuga

SEQ ID NO: 332894 - RNA, 19 nt, Artificial Sequence
  Description of Artificial Sequence: Synthetic oligonucleotide
aauuuacauagcagccacg

SEQ ID NO: 332895 - RNA, 19 nt, Artificial Sequence
  Description of Artificial Sequence: Synthetic oligonucleotide
auaccagaauuacgccucc

SEQ ID NO: 332896 - RNA, 19 nt, Artificial Sequence
  Description of Artificial Sequence: Synthetic oligonucleotide
aguugcggucaugagagac

SEQ ID NO: 332897 - RNA, 19 nt, Artificial Sequence
  Description of Artificial Sequence: Synthetic oligonucleotide
agaccugcccgucaauuuc

SEQ ID NO: 332898 - RNA, 19 nt, Artificial Sequence
  Description of Artificial Sequence: Synthetic oligonucleotide
caagacgccggucacguag

SEQ ID NO: 332899 - RNA, 19 nt, Artificial Sequence
  Description of Artificial Sequence: Synthetic oligonucleotide
uuuagcucggguagcuucu

SEQ ID NO: 332900 - RNA, 19 nt, Artificial Sequence
  Description of Artificial Sequence: Synthetic oligonucleotide
ugccugauaccucgaacag

SEQ ID NO: 332901 - RNA, 19 nt, Artificial Sequence
  Description of Artificial Sequence: Synthetic oligonucleotide
aucgaaaacggucuaugaa

SEQ ID NO: 332902 - RNA, 19 nt, Artificial Sequence
  Description of Artificial Sequence: Synthetic oligonucleotide
aguagucgcuccugcuugc

SEQ ID NO: 332903 - RNA, 19 nt, Artificial Sequence
  Description of Artificial Sequence: Synthetic oligonucleotide
uaagcucgcaaccgggcgc

SEQ ID NO: 332904 - RNA, 19 nt, Artificial Sequence
  Description of Artificial Sequence: Synthetic oligonucleotide
cauagcgucggccccaggc

SEQ ID NO: 332905 - RNA, 19 nt, Artificial Sequence
  Description of Artificial Sequence: Synthetic oligonucleotide
ucguagcuuuccauuaucu

SEQ ID NO: 332906 - RNA, 19 nt, Artificial Sequence
  Description of Artificial Sequence: Synthetic oligonucleotide
uauaggcccagauggcacc

SEQ ID NO: 332907 - RNA, 19 nt, Artificial Sequence
  Description of Artificial Sequence: Synthetic oligonucleotide
gaaaacggucuaugaaaac

SEQ ID NO: 332908 - RNA, 19 nt, Artificial Sequence
  Description of Artificial Sequence: Synthetic oligonucleotide
agacaacuaggauugugga

SEQ ID NO: 332909 - RNA, 19 nt, Artificial Sequence
  Description of Artificial Sequence: Synthetic oligonucleotide
cugcgagaaugacugaugc

SEQ ID NO: 332910 - RNA, 19 nt, Artificial Sequence
  Description of Artificial Sequence: Synthetic oligonucleotide
uugguugaguagucgcucc

SEQ ID NO: 332911 - RNA, 19 nt, Artificial Sequence
  Description of Artificial Sequence: Synthetic oligonucleotide
uggcuaugcagguggauga

SEQ ID NO: 332912 - RNA, 19 nt, Artificial Sequence
  Description of Artificial Sequence: Synthetic oligonucleotide
cagaauuacgccuccccug

SEQ ID NO: 332913 - RNA, 19 nt, Artificial Sequence
  Description of Artificial Sequence: Synthetic oligonucleotide
auaggacuuguucuugcca

SEQ ID NO: 332914 - RNA, 19 nt, Artificial Sequence
  Description of Artificial Sequence: Synthetic oligonucleotide
aauagccuaucuucagauu

SEQ ID NO: 332915 - RNA, 19 nt, Artificial Sequence
  Description of Artificial Sequence: Synthetic oligonucleotide
caugggauaccagaauuac

SEQ ID NO: 332916 - RNA, 19 nt, Artificial Sequence
  Description of Artificial Sequence: Synthetic oligonucleotide
caucuagcugcagaauugg

SEQ ID NO: 332917 - RNA, 19 nt, Artificial Sequence
  Description of Artificial Sequence: Synthetic oligonucleotide
guaucgaaaacggucuaug

SEQ ID NO: 332918 - RNA, 19 nt, Artificial Sequence
  Description of Artificial Sequence: Synthetic oligonucleotide
gguaucaucuccagcaacc

SEQ ID NO: 332919 - RNA, 19 nt, Artificial Sequence
  Description of Artificial Sequence: Synthetic oligonucleotide
gaguguuguacaugcgcug

SEQ ID NO: 332920 - RNA, 19 nt, Artificial Sequence
  Description of Artificial Sequence: Synthetic oligonucleotide
guugaguagucgcuccugc

SEQ ID NO: 332921 - RNA, 19 nt, Artificial Sequence
  Description of Artificial Sequence: Synthetic oligonucleotide
aucuagucguuggcuaugc

SEQ ID NO: 332922 - RNA, 19 nt, Artificial Sequence
  Description of Artificial Sequence: Synthetic oligonucleotide
gauaagcucgcaaccgggc

SEQ ID NO: 332923 - RNA, 19 nt, Artificial Sequence
  Description of Artificial Sequence: Synthetic oligonucleotide
ucgagacucaaggucagca

SEQ ID NO: 332924 - RNA, 19 nt, Artificial Sequence
  Description of Artificial Sequence: Synthetic oligonucleotide
caauucgcacaucauagga

SEQ ID NO: 332925 - RNA, 19 nt, Artificial Sequence
  Description of Artificial Sequence: Synthetic oligonucleotide
agauaagcucgcaaccggg

SEQ ID NO: 332926 - RNA, 19 nt, Artificial Sequence
  Description of Artificial Sequence: Synthetic oligonucleotide
cucgcaaccgggcgcaugg

SEQ ID NO: 332927 - RNA, 19 nt, Artificial Sequence
  Description of Artificial Sequence: Synthetic oligonucleotide
gaaguccuaagucuggagu

SEQ ID NO: 332928 - RNA, 19 nt, Artificial Sequence
  Description of Artificial Sequence: Synthetic oligonucleotide
ugaguagucgcuccugcuu

SEQ ID NO: 332929 - RNA, 19 nt, Artificial Sequence
  Description of Artificial Sequence: Synthetic oligonucleotide
acgacugaagaugacgugu

SEQ ID NO: 332930 - RNA, 19 nt, Artificial Sequence
  Description of Artificial Sequence: Synthetic oligonucleotide
uuucgagccaagaguucca

SEQ ID NO: 332931 - RNA, 19 nt, Artificial Sequence
  Description of Artificial Sequence: Synthetic oligonucleotide
caguugaaaggaaaagaga

SEQ ID NO: 332932 - RNA, 19 nt, Artificial Sequence
  Description of Artificial Sequence: Synthetic oligonucleotide
cuaugcaagacgccgguca

SEQ ID NO: 332933 - RNA, 19 nt, Artificial Sequence
  Description of Artificial Sequence: Synthetic oligonucleotide
gacgacugaagaugacgug

SEQ ID NO: 332934 - RNA, 19 nt, Artificial Sequence
  Description of Artificial Sequence: Synthetic oligonucleotide
ggcccuuacauccagcaug

SEQ ID NO: 332935 - RNA, 19 nt, Artificial Sequence
  Description of Artificial Sequence: Synthetic oligonucleotide
ucgcccaggaaacuuucga

SEQ ID NO: 332936 - RNA, 19 nt, Artificial Sequence
  Description of Artificial Sequence: Synthetic oligonucleotide
uggcaccccaaccuuuucc

SEQ ID NO: 332937 - RNA, 19 nt, Artificial Sequence
  Description of Artificial Sequence: Synthetic oligonucleotide
acggucuaugaaaaccugg

SEQ ID NO: 332938 - RNA, 19 nt, Artificial Sequence
  Description of Artificial Sequence: Synthetic oligonucleotide
guagggaaguccuaagucu

SEQ ID NO: 332939 - RNA, 19 nt, Artificial Sequence
  Description of Artificial Sequence: Synthetic oligonucleotide
augggauaccagaauuacg

SEQ ID NO: 332940 - RNA, 19 nt, Artificial Sequence
  Description of Artificial Sequence: Synthetic oligonucleotide
gaaauccaccucaucuagc

SEQ ID NO: 332941 - RNA, 19 nt, Artificial Sequence
  Description of Artificial Sequence: Synthetic oligonucleotide
ucuucgcauucacugucga

SEQ ID NO: 332942 - RNA, 19 nt, Artificial Sequence
  Description of Artificial Sequence: Synthetic oligonucleotide
aggcguagaguguuguaca

SEQ ID NO: 332943 - RNA, 19 nt, Artificial Sequence
  Description of Artificial Sequence: Synthetic oligonucleotide
uacgccuccccugaaguug

SEQ ID NO: 332944 - RNA, 19 nt, Artificial Sequence
  Description of Artificial Sequence: Synthetic oligonucleotide
gaugacucuaaacggcucu

SEQ ID NO: 332945 - RNA, 19 nt, Artificial Sequence
  Description of Artificial Sequence: Synthetic oligonucleotide
acgucgucuuccccagacc

SEQ ID NO: 332946 - RNA, 19 nt, Artificial Sequence
  Description of Artificial Sequence: Synthetic oligonucleotide
acgccggucacguagucga

SEQ ID NO: 332947 - RNA, 19 nt, Artificial Sequence
  Description of Artificial Sequence: Synthetic oligonucleotide
acguguuuaggaucauagu

SEQ ID NO: 332948 - RNA, 19 nt, Artificial Sequence
  Description of Artificial Sequence: Synthetic oligonucleotide
aguguuguacaugcgcuga

SEQ ID NO: 332949 - RNA, 19 nt, Artificial Sequence
  Description of Artificial Sequence: Synthetic oligonucleotide
agcuucagcauaguagacu

SEQ ID NO: 332950 - RNA, 19 nt, Artificial Sequence
  Description of Artificial Sequence: Synthetic oligonucleotide
aaacucgcuccgcaggaua

SEQ ID NO: 332951 - RNA, 19 nt, Artificial Sequence
  Description of Artificial Sequence: Synthetic oligonucleotide
ugcgagaaugacugaugcu

SEQ ID NO: 332952 - RNA, 19 nt, Artificial Sequence
  Description of Artificial Sequence: Synthetic oligonucleotide
uguaucgaaaacggucuau

SEQ ID NO: 332953 - RNA, 19 nt, Artificial Sequence
  Description of Artificial Sequence: Synthetic oligonucleotide
gcugccgcuaugcaagacg

SEQ ID NO: 332954 - RNA, 19 nt, Artificial Sequence
  Description of Artificial Sequence: Synthetic oligonucleotide
guccaccggcuuuagcucg

SEQ ID NO: 332955 - RNA, 19 nt, Artificial Sequence
  Description of Artificial Sequence: Synthetic oligonucleotide
ucgcuguugguugaguagu

SEQ ID NO: 332956 - RNA, 19 nt, Artificial Sequence
  Description of Artificial Sequence: Synthetic oligonucleotide
augacucuaaacggcucuc

SEQ ID NO: 332957 - RNA, 19 nt, Artificial Sequence
  Description of Artificial Sequence: Synthetic oligonucleotide
uugagggcuuggcccaaag

SEQ ID NO: 332958 - RNA, 19 nt, Artificial Sequence
  Description of Artificial Sequence: Synthetic oligonucleotide
cuucgcauucacugucgag

SEQ ID NO: 332959 - RNA, 19 nt, Artificial Sequence
  Description of Artificial Sequence: Synthetic oligonucleotide
uuccccagaccauugcguc

SEQ ID NO: 332960 - RNA, 19 nt, Artificial Sequence
  Description of Artificial Sequence: Synthetic oligonucleotide
ucccucuuuagcaguccug

SEQ ID NO: 332961 - RNA, 19 nt, Artificial Sequence
  Description of Artificial Sequence: Synthetic oligonucleotide
ucuaaacggcucucuuuuc

SEQ ID NO: 332962 - RNA, 19 nt, Artificial Sequence
  Description of Artificial Sequence: Synthetic oligonucleotide
uuguaucgaaaacggucua

SEQ ID NO: 332963 - RNA, 19 nt, Artificial Sequence
  Description of Artificial Sequence: Synthetic oligonucleotide
accacacagauucgagacu

SEQ ID NO: 332964 - RNA, 19 nt, Artificial Sequence
  Description of Artificial Sequence: Synthetic oligonucleotide
ucuagucguuggcuaugca

SEQ ID NO: 332965 - RNA, 19 nt, Artificial Sequence
  Description of Artificial Sequence: Synthetic oligonucleotide
cucgcuccgcaggauaucg

SEQ ID NO: 332966 - RNA, 19 nt, Artificial Sequence
  Description of Artificial Sequence: Synthetic oligonucleotide
agaugacucuaaacggcuc

SEQ ID NO: 332967 - RNA, 19 nt, Artificial Sequence
  Description of Artificial Sequence: Synthetic oligonucleotide
gacucgaaguccgcgcugc

SEQ ID NO: 332968 - RNA, 19 nt, Artificial Sequence
  Description of Artificial Sequence: Synthetic oligonucleotide
cauaccggcccaacuggug

SEQ ID NO: 332969 - RNA, 19 nt, Artificial Sequence
  Description of Artificial Sequence: Synthetic oligonucleotide
agcucggguagcuucucca

SEQ ID NO: 332970 - RNA, 19 nt, Artificial Sequence
  Description of Artificial Sequence: Synthetic oligonucleotide
agcgcucaucaugggauac

SEQ ID NO: 332971 - RNA, 19 nt, Artificial Sequence
  Description of Artificial Sequence: Synthetic oligonucleotide
guugguugccuacauggua

SEQ ID NO: 332972 - RNA, 19 nt, Artificial Sequence
  Description of Artificial Sequence: Synthetic oligonucleotide
gccauaccggcccaacugg

SEQ ID NO: 332973 - RNA, 19 nt, Artificial Sequence
  Description of Artificial Sequence: Synthetic oligonucleotide
uugcggucaugagagacaa

SEQ ID NO: 332974 - RNA, 19 nt, Artificial Sequence
  Description of Artificial Sequence: Synthetic oligonucleotide
gggauaccagaauuacgcc

SEQ ID NO: 332975 - RNA, 19 nt, Artificial Sequence
  Description of Artificial Sequence: Synthetic oligonucleotide
cuacccggcucuucuggcc

SEQ ID NO: 332976 - RNA, 19 nt, Artificial Sequence
  Description of Artificial Sequence: Synthetic oligonucleotide
guauaggcccagauggcac

SEQ ID NO: 332977 - RNA, 19 nt, Artificial Sequence
  Description of Artificial Sequence: Synthetic oligonucleotide
uccuaagucuggaguuggu

SEQ ID NO: 332978 - RNA, 19 nt, Artificial Sequence
  Description of Artificial Sequence: Synthetic oligonucleotide
ugacucuaaacggcucucu

SEQ ID NO: 332979 - RNA, 19 nt, Artificial Sequence
  Description of Artificial Sequence: Synthetic oligonucleotide
ucgcuccgcaggauaucgg

SEQ ID NO: 332980 - RNA, 19 nt, Artificial Sequence
  Description of Artificial Sequence: Synthetic oligonucleotide
aagcccugcgagaaugacu

SEQ ID NO: 332981 - RNA, 19 nt, Artificial Sequence
  Description of Artificial Sequence: Synthetic oligonucleotide
accggcuuuagcucgggua

SEQ ID NO: 332982 - RNA, 19 nt, Artificial Sequence
  Description of Artificial Sequence: Synthetic oligonucleotide
gucguagcuuuccauuauc

SEQ ID NO: 332983 - RNA, 19 nt, Artificial Sequence
  Description of Artificial Sequence: Synthetic oligonucleotide
cuaggauuguggagggcca

SEQ ID NO: 332984 - RNA, 19 nt, Artificial Sequence
  Description of Artificial Sequence: Synthetic oligonucleotide
uucgcacaucauaggacuu

SEQ ID NO: 332985 - RNA, 19 nt, Artificial Sequence
  Description of Artificial Sequence: Synthetic oligonucleotide
ugucuucgcaggccuugga

SEQ ID NO: 332986 - RNA, 19 nt, Artificial Sequence
  Description of Artificial Sequence: Synthetic oligonucleotide
agacucgaaguccgcgcug

SEQ ID NO: 332987 - RNA, 19 nt, Artificial Sequence
  Description of Artificial Sequence: Synthetic oligonucleotide
aagcgcucaucaugggaua

SEQ ID NO: 332988 - RNA, 19 nt, Artificial Sequence
  Description of Artificial Sequence: Synthetic oligonucleotide
uacaggcguagaguguugu

SEQ ID NO: 332989 - RNA, 19 nt, Artificial Sequence
  Description of Artificial Sequence: Synthetic oligonucleotide
ugguugccuacaugguagu

SEQ ID NO: 332990 - RNA, 19 nt, Artificial Sequence
  Description of Artificial Sequence: Synthetic oligonucleotide
cuggugucgauauuccucu

SEQ ID NO: 332991 - RNA, 19 nt, Artificial Sequence
  Description of Artificial Sequence: Synthetic oligonucleotide
aagcucgcaaccgggcgca

SEQ ID NO: 332992 - RNA, 19 nt, Artificial Sequence
  Description of Artificial Sequence: Synthetic oligonucleotide
gauuguggagggccacguc

SEQ ID NO: 332993 - RNA, 19 nt, Artificial Sequence
  Description of Artificial Sequence: Synthetic oligonucleotide
aaguugcggucaugagaga

SEQ ID NO: 332994 - RNA, 19 nt, Artificial Sequence
  Description of Artificial Sequence: Synthetic oligonucleotide
ccggcuuuagcucggguag

SEQ ID NO: 332995 - RNA, 19 nt, Artificial Sequence
  Description of Artificial Sequence: Synthetic oligonucleotide
cugauaccucgaacaggag

SEQ ID NO: 332996 - RNA, 19 nt, Artificial Sequence
  Description of Artificial Sequence: Synthetic oligonucleotide
ggcuacccggcucuucugg

SEQ ID NO: 332997 - RNA, 19 nt, Artificial Sequence
  Description of Artificial Sequence: Synthetic oligonucleotide
aacucgcuccgcaggauau

SEQ ID NO: 332998 - RNA, 19 nt, Artificial Sequence
  Description of Artificial Sequence: Synthetic oligonucleotide
guugcggucaugagagaca

SEQ ID NO: 332999 - RNA, 19 nt, Artificial Sequence
  Description of Artificial Sequence: Synthetic oligonucleotide
guguuguacaugcgcugac

SEQ ID NO: 333000 - RNA, 19 nt, Artificial Sequence
  Description of Artificial Sequence: Synthetic oligonucleotide
caucuagucguuggcuaug

SEQ ID NO: 333001 - RNA, 19 nt, Artificial Sequence
  Description of Artificial Sequence: Synthetic oligonucleotide
cuacaggcguagaguguug

SEQ ID NO: 333002 - RNA, 19 nt, Artificial Sequence
  Description of Artificial Sequence: Synthetic oligonucleotide
aagacgccggucacguagu

SEQ ID NO: 333003 - RNA, 19 nt, Artificial Sequence
  Description of Artificial Sequence: Synthetic oligonucleotide
ugaugcccgcgucaucuuu

SEQ ID NO: 333004 - RNA, 19 nt, Artificial Sequence
  Description of Artificial Sequence: Synthetic oligonucleotide
uguccccaaguagggaagu

SEQ ID NO: 333005 - RNA, 19 nt, Artificial Sequence
  Description of Artificial Sequence: Synthetic oligonucleotide
cuggggucuugugagacca

SEQ ID NO: 333006 - RNA, 19 nt, Artificial Sequence
  Description of Artificial Sequence: Synthetic oligonucleotide
cucuaaacggcucucuuuu

SEQ ID NO: 333007 - RNA, 19 nt, Artificial Sequence
  Description of Artificial Sequence: Synthetic oligonucleotide
gcccgcgucaucuuugcug

SEQ ID NO: 333008 - RNA, 19 nt, Artificial Sequence
  Description of Artificial Sequence: Synthetic oligonucleotide
uuacgccuccccugaaguu

SEQ ID NO: 333009 - RNA, 19 nt, Artificial Sequence
  Description of Artificial Sequence: Synthetic oligonucleotide
gauuccggugggcaugccu

SEQ ID NO: 333010 - RNA, 19 nt, Artificial Sequence
  Description of Artificial Sequence: Synthetic oligonucleotide
cguguuuaggaucauagua

SEQ ID NO: 333011 - RNA, 19 nt, Artificial Sequence
  Description of Artificial Sequence: Synthetic oligonucleotide
ccugcgagaaugacugaug

SEQ ID NO: 333012 - RNA, 19 nt, Artificial Sequence
  Description of Artificial Sequence: Synthetic oligonucleotide
agacgccggucacguaguc

SEQ ID NO: 333013 - RNA, 19 nt, Artificial Sequence
  Description of Artificial Sequence: Synthetic oligonucleotide
ugacguguuuaggaucaua

SEQ ID NO: 333014 - RNA, 19 nt, Artificial Sequence
  Description of Artificial Sequence: Synthetic oligonucleotide
ggcaccccaaccuuuucca

SEQ ID NO: 333015 - RNA, 19 nt, Artificial Sequence
  Description of Artificial Sequence: Synthetic oligonucleotide
uccgcgcugccgcuaugca

SEQ ID NO: 333016 - RNA, 19 nt, Artificial Sequence
  Description of Artificial Sequence: Synthetic oligonucleotide
gccugauaccucgaacagg

SEQ ID NO: 333017 - RNA, 19 nt, Artificial Sequence
  Description of Artificial Sequence: Synthetic oligonucleotide
accggcccaacuggugucg

SEQ ID NO: 333018 - RNA, 19 nt, Artificial Sequence
  Description of Artificial Sequence: Synthetic oligonucleotide
ggaggauauuuaauuuaca

SEQ ID NO: 333019 - RNA, 19 nt, Artificial Sequence
  Description of Artificial Sequence: Synthetic oligonucleotide
gucuguggcgauggcauuc

SEQ ID NO: 333020 - RNA, 19 nt, Artificial Sequence
  Description of Artificial Sequence: Synthetic oligonucleotide
uugcgucccaccaguccau

SEQ ID NO: 333021 - RNA, 19 nt, Artificial Sequence
  Description of Artificial Sequence: Synthetic oligonucleotide
acucgcuccgcaggauauc

SEQ ID NO: 333022 - RNA, 19 nt, Artificial Sequence
  Description of Artificial Sequence: Synthetic oligonucleotide
auccagcauguuugugggu

SEQ ID NO: 333023 - RNA, 19 nt, Artificial Sequence
  Description of Artificial Sequence: Synthetic oligonucleotide
uaccggcccaacugguguc

SEQ ID NO: 333024 - RNA, 19 nt, Artificial Sequence
  Description of Artificial Sequence: Synthetic oligonucleotide
ccgucaauuucugggaaac

SEQ ID NO: 333025 - RNA, 19 nt, Artificial Sequence
  Description of Artificial Sequence: Synthetic oligonucleotide
cucccgacggaacuguucu

SEQ ID NO: 333026 - RNA, 19 nt, Artificial Sequence
  Description of Artificial Sequence: Synthetic oligonucleotide
gaauuacgccuccccugaa

SEQ ID NO: 333027 - RNA, 19 nt, Artificial Sequence
  Description of Artificial Sequence: Synthetic oligonucleotide
ggcccuguugagcugggca

SEQ ID NO: 333028 - RNA, 19 nt, Artificial Sequence
  Description of Artificial Sequence: Synthetic oligonucleotide
ccgcuaugcaagacgccgg

SEQ ID NO: 333029 - RNA, 19 nt, Artificial Sequence
  Description of Artificial Sequence: Synthetic oligonucleotide
cgaaaacggucuaugaaaa

SEQ ID NO: 333030 - RNA, 19 nt, Artificial Sequence
  Description of Artificial Sequence: Synthetic oligonucleotide
gcuacccggcucuucuggc

SEQ ID NO: 333031 - RNA, 19 nt, Artificial Sequence
  Description of Artificial Sequence: Synthetic oligonucleotide
guacaugcgcugacagaca

SEQ ID NO: 333032 - RNA, 19 nt, Artificial Sequence
  Description of Artificial Sequence: Synthetic oligonucleotide
ccucgguaaccaucuaguc

SEQ ID NO: 333033 - RNA, 19 nt, Artificial Sequence
  Description of Artificial Sequence: Synthetic oligonucleotide
cauacucucgcuguugguu

SEQ ID NO: 333034 - RNA, 19 nt, Artificial Sequence
  Description of Artificial Sequence: Synthetic oligonucleotide
gaagaccugcccgucaauu

SEQ ID NO: 333035 - RNA, 19 nt, Artificial Sequence
  Description of Artificial Sequence: Synthetic oligonucleotide
guccgcgcugccgcuaugc

SEQ ID NO: 333036 - RNA, 19 nt, Artificial Sequence
  Description of Artificial Sequence: Synthetic oligonucleotide
ccugcccgucaauuucugg

SEQ ID NO: 333037 - RNA, 19 nt, Artificial Sequence
  Description of Artificial Sequence: Synthetic oligonucleotide
ugcccgcgucaucuuugcu

SEQ ID NO: 333038 - RNA, 19 nt, Artificial Sequence
  Description of Artificial Sequence: Synthetic oligonucleotide
gcguagaguguuguacaug

SEQ ID NO: 333039 - RNA, 19 nt, Artificial Sequence
  Description of Artificial Sequence: Synthetic oligonucleotide
ccagcauguuuguggguuc

SEQ ID NO: 333040 - RNA, 19 nt, Artificial Sequence
  Description of Artificial Sequence: Synthetic oligonucleotide
ggcucagcccuacaggcgu

SEQ ID NO: 333041 - RNA, 19 nt, Artificial Sequence
  Description of Artificial Sequence: Synthetic oligonucleotide
ccaccucggauucuuuguc

SEQ ID NO: 333042 - RNA, 19 nt, Artificial Sequence
  Description of Artificial Sequence: Synthetic oligonucleotide
ccucauacucucgcuguug

SEQ ID NO: 333043 - RNA, 19 nt, Artificial Sequence
  Description of Artificial Sequence: Synthetic oligonucleotide
ccaggaaacuuucgagcca

SEQ ID NO: 333044 - RNA, 19 nt, Artificial Sequence
  Description of Artificial Sequence: Synthetic oligonucleotide
gcaaccgggcgcauggcca

SEQ ID NO: 333045 - RNA, 19 nt, Artificial Sequence
  Description of Artificial Sequence: Synthetic oligonucleotide
ccggucacguagucgaaga

SEQ ID NO: 333046 - RNA, 19 nt, Artificial Sequence
  Description of Artificial Sequence: Synthetic oligonucleotide
ucgcaaccgggcgcauggc

SEQ ID NO: 333047 - RNA, 19 nt, Artificial Sequence
  Description of Artificial Sequence: Synthetic oligonucleotide
gccggucacguagucgaag

SEQ ID NO: 333048 - RNA, 19 nt, Artificial Sequence
  Description of Artificial Sequence: Synthetic oligonucleotide
ccgggcuaaggccaaucuc

SEQ ID NO: 333049 - RNA, 19 nt, Artificial Sequence
  Description of Artificial Sequence: Synthetic oligonucleotide
ccucccgacggaacuguuc

SEQ ID NO: 333050 - RNA, 19 nt, Artificial Sequence
  Description of Artificial Sequence: Synthetic oligonucleotide
uccggugggcaugccugau

SEQ ID NO: 333051 - RNA, 19 nt, Artificial Sequence
  Description of Artificial Sequence: Synthetic oligonucleotide
ccagaauuacgccuccccu

SEQ ID NO: 333052 - RNA, 19 nt, Artificial Sequence
  Description of Artificial Sequence: Synthetic oligonucleotide
agccacguggggcccuguu

SEQ ID NO: 333053 - RNA, 19 nt, Artificial Sequence
  Description of Artificial Sequence: Synthetic oligonucleotide
cgcaaccgggcgcauggcc

SEQ ID NO: 333054 - RNA, 19 nt, Artificial Sequence
  Description of Artificial Sequence: Synthetic oligonucleotide
gcuaugcaagacgccgguc

SEQ ID NO: 333055 - RNA, 19 nt, Artificial Sequence
  Description of Artificial Sequence: Synthetic oligonucleotide
guuuggugucacagucgua

SEQ ID NO: 333056 - RNA, 19 nt, Artificial Sequence
  Description of Artificial Sequence: Synthetic oligonucleotide
ccaagcccugcgagaauga

SEQ ID NO: 333057 - RNA, 19 nt, Artificial Sequence
  Description of Artificial Sequence: Synthetic oligonucleotide
ggcuuuagcucggguagcu

SEQ ID NO: 333058 - RNA, 19 nt, Artificial Sequence
  Description of Artificial Sequence: Synthetic oligonucleotide
gcgcugacagacagcccug

SEQ ID NO: 333059 - RNA, 19 nt, Artificial Sequence
  Description of Artificial Sequence: Synthetic oligonucleotide
ccaucuagucguuggcuau

SEQ ID NO: 333060 - RNA, 19 nt, Artificial Sequence
  Description of Artificial Sequence: Synthetic oligonucleotide
gucgucuuccccagaccau

SEQ ID NO: 333061 - RNA, 19 nt, Artificial Sequence
  Description of Artificial Sequence: Synthetic oligonucleotide
gcucgcaaccgggcgcaug

SEQ ID NO: 333062 - RNA, 19 nt, Artificial Sequence
  Description of Artificial Sequence: Synthetic oligonucleotide
ggcaugccugauaccucga

SEQ ID NO: 333063 - RNA, 19 nt, Artificial Sequence
  Description of Artificial Sequence: Synthetic oligonucleotide
gggccacgucugcagguaa

SEQ ID NO: 333064 - RNA, 19 nt, Artificial Sequence
  Description of Artificial Sequence: Synthetic oligonucleotide
ccccggacacuucuugcaa

SEQ ID NO: 333065 - RNA, 19 nt, Artificial Sequence
  Description of Artificial Sequence: Synthetic oligonucleotide
cggcuuuagcucggguagc

SEQ ID NO: 333066 - RNA, 19 nt, Artificial Sequence
  Description of Artificial Sequence: Synthetic oligonucleotide
gcgucggccccaggccagg

SEQ ID NO: 333067 - RNA, 19 nt, Artificial Sequence
  Description of Artificial Sequence: Synthetic oligonucleotide
ccauaccggcccaacuggu

SEQ ID NO: 333068 - RNA, 19 nt, Artificial Sequence
  Description of Artificial Sequence: Synthetic oligonucleotide
ccuaagucuggaguugguu

SEQ ID NO: 333069 - RNA, 19 nt, Artificial Sequence
  Description of Artificial Sequence: Synthetic oligonucleotide
cgacugaagaugacguguu

SEQ ID NO: 333070 - RNA, 19 nt, Artificial Sequence
  Description of Artificial Sequence: Synthetic oligonucleotide
ccgcgcugccgcuaugcaa

SEQ ID NO: 333071 - RNA, 19 nt, Artificial Sequence
  Description of Artificial Sequence: Synthetic oligonucleotide
cccugaugcccgcgucauc

SEQ ID NO: 333072 - RNA, 19 nt, Artificial Sequence
  Description of Artificial Sequence: Synthetic oligonucleotide
agcucgcaaccgggcgcau

SEQ ID NO: 333073 - RNA, 19 nt, Artificial Sequence
  Description of Artificial Sequence: Synthetic oligonucleotide
gcaagacgccggucacgua

SEQ ID NO: 333074 - RNA, 19 nt, Artificial Sequence
  Description of Artificial Sequence: Synthetic oligonucleotide
cccgggcuaaggccaaucu

SEQ ID NO: 333075 - RNA, 19 nt, Artificial Sequence
  Description of Artificial Sequence: Synthetic oligonucleotide
gcucagcccuacaggcgua

SEQ ID NO: 333076 - RNA, 19 nt, Artificial Sequence
  Description of Artificial Sequence: Synthetic oligonucleotide
gcccucccgacggaacugu

SEQ ID NO: 333077 - RNA, 19 nt, Artificial Sequence
  Description of Artificial Sequence: Synthetic oligonucleotide
cgcugccgcuaugcaagac

SEQ ID NO: 333078 - RNA, 19 nt, Artificial Sequence
  Description of Artificial Sequence: Synthetic oligonucleotide
ccucaacccgggucacagu

SEQ ID NO: 333079 - RNA, 19 nt, Artificial Sequence
  Description of Artificial Sequence: Synthetic oligonucleotide
cgccggucacguagucgaa

SEQ ID NO: 333080 - RNA, 19 nt, Artificial Sequence
  Description of Artificial Sequence: Synthetic oligonucleotide
aaaugcaacgucuaagggc

SEQ ID NO: 333081 - RNA, 19 nt, Artificial Sequence
  Description of Artificial Sequence: Synthetic oligonucleotide
aaauucaacccugaaaucc

SEQ ID NO: 333082 - RNA, 19 nt, Artificial Sequence
  Description of Artificial Sequence: Synthetic oligonucleotide
aaaugguagauuuugaugu

SEQ ID NO: 333083 - RNA, 19 nt, Artificial Sequence
  Description of Artificial Sequence: Synthetic oligonucleotide
uaaauucuaacauuagugg

SEQ ID NO: 333084 - RNA, 19 nt, Artificial Sequence
  Description of Artificial Sequence: Synthetic oligonucleotide
uguaacauagcaaugaaau

SEQ ID NO: 333085 - RNA, 19 nt, Artificial Sequence
  Description of Artificial Sequence: Synthetic oligonucleotide
ucaaugauuagucaggcca

SEQ ID NO: 333086 - RNA, 19 nt, Artificial Sequence
  Description of Artificial Sequence: Synthetic oligonucleotide
aaccguauuaacuacagca

SEQ ID NO: 333087 - RNA, 19 nt, Artificial Sequence
  Description of Artificial Sequence: Synthetic oligonucleotide
aguuuauugacucuuacug

SEQ ID NO: 333088 - RNA, 19 nt, Artificial Sequence
  Description of Artificial Sequence: Synthetic oligonucleotide
uuauacuacacaaacugag

SEQ ID NO: 333089 - RNA, 19 nt, Artificial Sequence
  Description of Artificial Sequence: Synthetic oligonucleotide
uccuuuucaagcaagaucu

SEQ ID NO: 333090 - RNA, 19 nt, Artificial Sequence
  Description of Artificial Sequence: Synthetic oligonucleotide
uguuaaauguacuucauac

SEQ ID NO: 333091 - RNA, 19 nt, Artificial Sequence
  Description of Artificial Sequence: Synthetic oligonucleotide
aaacagaugagacagucug

SEQ ID NO: 333092 - RNA, 19 nt, Artificial Sequence
  Description of Artificial Sequence: Synthetic oligonucleotide
agcucuuaaaauucaaccc

SEQ ID NO: 333093 - RNA, 19 nt, Artificial Sequence
  Description of Artificial Sequence: Synthetic oligonucleotide
aauuaaccguauuaacuac

SEQ ID NO: 333094 - RNA, 19 nt, Artificial Sequence
  Description of Artificial Sequence: Synthetic oligonucleotide
uagacauaaaucaagagua

SEQ ID NO: 333095 - RNA, 19 nt, Artificial Sequence
  Description of Artificial Sequence: Synthetic oligonucleotide
aaaacgguuauuuuccucu

SEQ ID NO: 333096 - RNA, 19 nt, Artificial Sequence
  Description of Artificial Sequence: Synthetic oligonucleotide
auaaaguuaacagugugac

SEQ ID NO: 333097 - RNA, 19 nt, Artificial Sequence
  Description of Artificial Sequence: Synthetic oligonucleotide
auuuuccuagaccagauuc

SEQ ID NO: 333098 - RNA, 19 nt, Artificial Sequence
  Description of Artificial Sequence: Synthetic oligonucleotide
uccgcuuucgcaaugacag

SEQ ID NO: 333099 - RNA, 19 nt, Artificial Sequence
  Description of Artificial Sequence: Synthetic oligonucleotide
uuagauaacccucuguucu

SEQ ID NO: 333100 - RNA, 19 nt, Artificial Sequence
  Description of Artificial Sequence: Synthetic oligonucleotide
aaaacguccuuguagugag

SEQ ID NO: 333101 - RNA, 19 nt, Artificial Sequence
  Description of Artificial Sequence: Synthetic oligonucleotide
uuuauugacucuuacugug

SEQ ID NO: 333102 - RNA, 19 nt, Artificial Sequence
  Description of Artificial Sequence: Synthetic oligonucleotide
acucuuacuguguagaguc

SEQ ID NO: 333103 - RNA, 19 nt, Artificial Sequence
  Description of Artificial Sequence: Synthetic oligonucleotide
auuaccaguagacagguug

SEQ ID NO: 333104 - RNA, 19 nt, Artificial Sequence
  Description of Artificial Sequence: Synthetic oligonucleotide
uauaaaacguccuuguagu

SEQ ID NO: 333105 - RNA, 19 nt, Artificial Sequence
  Description of Artificial Sequence: Synthetic oligonucleotide
aaaguuaacagugugacuu

SEQ ID NO: 333106 - RNA, 19 nt, Artificial Sequence
  Description of Artificial Sequence: Synthetic oligonucleotide
cagacuauaaaccaggcac

SEQ ID NO: 333107 - RNA, 19 nt, Artificial Sequence
  Description of Artificial Sequence: Synthetic oligonucleotide
aauaagcuguuuaugagag

SEQ ID NO: 333108 - RNA, 19 nt, Artificial Sequence
  Description of Artificial Sequence: Synthetic oligonucleotide
aggacuaugauuuccacug

SEQ ID NO: 333109 - RNA, 19 nt, Artificial Sequence
  Description of Artificial Sequence: Synthetic oligonucleotide
auaucuaaacaauagugcu

SEQ ID NO: 333110 - RNA, 19 nt, Artificial Sequence
  Description of Artificial Sequence: Synthetic oligonucleotide
guauaaaacguccuuguag

SEQ ID NO: 333111 - RNA, 19 nt, Artificial Sequence
  Description of Artificial Sequence: Synthetic oligonucleotide
acaauaagaagcuggagcu

SEQ ID NO: 333112 - RNA, 19 nt, Artificial Sequence
  Description of Artificial Sequence: Synthetic oligonucleotide
aaacugaguugguuguugc

SEQ ID NO: 333113 - RNA, 19 nt, Artificial Sequence
  Description of Artificial Sequence: Synthetic oligonucleotide
ucugaauugccuuucauuc

SEQ ID NO: 333114 - RNA, 19 nt, Artificial Sequence
  Description of Artificial Sequence: Synthetic oligonucleotide
ucucaguagaaaaucacug

SEQ ID NO: 333115 - RNA, 19 nt, Artificial Sequence
  Description of Artificial Sequence: Synthetic oligonucleotide
uagugguuaaggaagaaga

SEQ ID NO: 333116 - RNA, 19 nt, Artificial Sequence
  Description of Artificial Sequence: Synthetic oligonucleotide
ugucuagacauaaaucaag

SEQ ID NO: 333117 - RNA, 19 nt, Artificial Sequence
  Description of Artificial Sequence: Synthetic oligonucleotide
agauucaccaaccaccauc

SEQ ID NO: 333118 - RNA, 19 nt, Artificial Sequence
  Description of Artificial Sequence: Synthetic oligonucleotide
gagcucuuaaaauucaacc

SEQ ID NO: 333119 - RNA, 19 nt, Artificial Sequence
  Description of Artificial Sequence: Synthetic oligonucleotide
augaauuaaccguauuaac

SEQ ID NO: 333120 - RNA, 19 nt, Artificial Sequence
  Description of Artificial Sequence: Synthetic oligonucleotide
aacauuagugguuaaggaa

SEQ ID NO: 333121 - RNA, 19 nt, Artificial Sequence
  Description of Artificial Sequence: Synthetic oligonucleotide
uuaacuacagcagcaaaag

SEQ ID NO: 333122 - RNA, 19 nt, Artificial Sequence
  Description of Artificial Sequence: Synthetic oligonucleotide
aacggaaguuuucauagug

SEQ ID NO: 333123 - RNA, 19 nt, Artificial Sequence
  Description of Artificial Sequence: Synthetic oligonucleotide
uuaaccguauuaacuacag

SEQ ID NO: 333124 - RNA, 19 nt, Artificial Sequence
  Description of Artificial Sequence: Synthetic oligonucleotide
cugacauuagaagacaugg

SEQ ID NO: 333125 - RNA, 19 nt, Artificial Sequence
  Description of Artificial Sequence: Synthetic oligonucleotide
aaugcaacgucuaagggcu

SEQ ID NO: 333126 - RNA, 19 nt, Artificial Sequence
  Description of Artificial Sequence: Synthetic oligonucleotide
uaaaugcaacgucuaaggg

SEQ ID NO: 333127 - RNA, 19 nt, Artificial Sequence
  Description of Artificial Sequence: Synthetic oligonucleotide
uacuucacgcaacauaaag

SEQ ID NO: 333128 - RNA, 19 nt, Artificial Sequence
  Description of Artificial Sequence: Synthetic oligonucleotide
aguauaaacauucucucau

SEQ ID NO: 333129 - RNA, 19 nt, Artificial Sequence
  Description of Artificial Sequence: Synthetic oligonucleotide
aacaauguacccuguuguc

SEQ ID NO: 333130 - RNA, 19 nt, Artificial Sequence
  Description of Artificial Sequence: Synthetic oligonucleotide
guagagacgaccucuaacc

SEQ ID NO: 333131 - RNA, 19 nt, Artificial Sequence
  Description of Artificial Sequence: Synthetic oligonucleotide
uaaauguacuucauaccag

SEQ ID NO: 333132 - RNA, 19 nt, Artificial Sequence
  Description of Artificial Sequence: Synthetic oligonucleotide
acgucuaagggcuucaauc

SEQ ID NO: 333133 - RNA, 19 nt, Artificial Sequence
  Description of Artificial Sequence: Synthetic oligonucleotide
cuucacgcaacauaaagug

SEQ ID NO: 333134 - RNA, 19 nt, Artificial Sequence
  Description of Artificial Sequence: Synthetic oligonucleotide
cuaacauuagugguuaagg

SEQ ID NO: 333135 - RNA, 19 nt, Artificial Sequence
  Description of Artificial Sequence: Synthetic oligonucleotide
aagacauuuuauacuacac

SEQ ID NO: 333136 - RNA, 19 nt, Artificial Sequence
  Description of Artificial Sequence: Synthetic oligonucleotide
aaugaugugccgccuguuc

SEQ ID NO: 333137 - RNA, 19 nt, Artificial Sequence
  Description of Artificial Sequence: Synthetic oligonucleotide
ugcaccuaguuauacaaag

SEQ ID NO: 333138 - RNA, 19 nt, Artificial Sequence
  Description of Artificial Sequence: Synthetic oligonucleotide
uguccaaacggugagauga

SEQ ID NO: 333139 - RNA, 19 nt, Artificial Sequence
  Description of Artificial Sequence: Synthetic oligonucleotide
aacaguugaagccucaauu

SEQ ID NO: 333140 - RNA, 19 nt, Artificial Sequence
  Description of Artificial Sequence: Synthetic oligonucleotide
caaucaacugguuggagcc

SEQ ID NO: 333141 - RNA, 19 nt, Artificial Sequence
  Description of Artificial Sequence: Synthetic oligonucleotide
uguagugaguucucuacag

SEQ ID NO: 333142 - RNA, 19 nt, Artificial Sequence
  Description of Artificial Sequence: Synthetic oligonucleotide
ucaaucaacugguuggagc

SEQ ID NO: 333143 - RNA, 19 nt, Artificial Sequence
  Description of Artificial Sequence: Synthetic oligonucleotide
uguaagccgaagcuugacg

SEQ ID NO: 333144 - RNA, 19 nt, Artificial Sequence
  Description of Artificial Sequence: Synthetic oligonucleotide
gaagaguuagaggaaaacc

SEQ ID NO: 333145 - RNA, 19 nt, Artificial Sequence
  Description of Artificial Sequence: Synthetic oligonucleotide
aauaagaagcuggagcuca

SEQ ID NO: 333146 - RNA, 19 nt, Artificial Sequence
  Description of Artificial Sequence: Synthetic oligonucleotide
acuacuguaagccgaagcu

SEQ ID NO: 333147 - RNA, 19 nt, Artificial Sequence
  Description of Artificial Sequence: Synthetic oligonucleotide
auaaauguuaaauguacuu

SEQ ID NO: 333148 - RNA, 19 nt, Artificial Sequence
  Description of Artificial Sequence: Synthetic oligonucleotide
uucaccuuauuguguaugg

SEQ ID NO: 333149 - RNA, 19 nt, Artificial Sequence
  Description of Artificial Sequence: Synthetic oligonucleotide
aagaaaaucaggguuuacu

SEQ ID NO: 333150 - RNA, 19 nt, Artificial Sequence
  Description of Artificial Sequence: Synthetic oligonucleotide
ugccagacuauaaaccagg

SEQ ID NO: 333151 - RNA, 19 nt, Artificial Sequence
  Description of Artificial Sequence: Synthetic oligonucleotide
uaacagauaaaugugcaga

SEQ ID NO: 333152 - RNA, 19 nt, Artificial Sequence
  Description of Artificial Sequence: Synthetic oligonucleotide
auucucucauuagauaacc

SEQ ID NO: 333153 - RNA, 19 nt, Artificial Sequence
  Description of Artificial Sequence: Synthetic oligonucleotide
ucaaucucaacaguugaag

SEQ ID NO: 333154 - RNA, 19 nt, Artificial Sequence
  Description of Artificial Sequence: Synthetic oligonucleotide
ugacaaugacugaaaacag

SEQ ID NO: 333155 - RNA, 19 nt, Artificial Sequence
  Description of Artificial Sequence: Synthetic oligonucleotide
ugauuuucggugaacuuga

SEQ ID NO: 333156 - RNA, 19 nt, Artificial Sequence
  Description of Artificial Sequence: Synthetic oligonucleotide
aaaguauugccuucuuagu

SEQ ID NO: 333157 - RNA, 19 nt, Artificial Sequence
  Description of Artificial Sequence: Synthetic oligonucleotide
ugcucaucaauguaggaga

SEQ ID NO: 333158 - RNA, 19 nt, Artificial Sequence
  Description of Artificial Sequence: Synthetic oligonucleotide
acucucgucaugcagguag

SEQ ID NO: 333159 - RNA, 19 nt, Artificial Sequence
  Description of Artificial Sequence: Synthetic oligonucleotide
aguuuuagguguucugcac

SEQ ID NO: 333160 - RNA, 19 nt, Artificial Sequence
  Description of Artificial Sequence: Synthetic oligonucleotide
uucaauccauguccaaacg

SEQ ID NO: 333161 - RNA, 19 nt, Artificial Sequence
  Description of Artificial Sequence: Synthetic oligonucleotide
uuugcaccuaguuauacaa

SEQ ID NO: 333162 - RNA, 19 nt, Artificial Sequence
  Description of Artificial Sequence: Synthetic oligonucleotide
aaguguaacauagcaauga

SEQ ID NO: 333163 - RNA, 19 nt, Artificial Sequence
  Description of Artificial Sequence: Synthetic oligonucleotide
aacagauaaaugugcagau

SEQ ID NO: 333164 - RNA, 19 nt, Artificial Sequence
  Description of Artificial Sequence: Synthetic oligonucleotide
ucucucauuagauaacccu

SEQ ID NO: 333165 - RNA, 19 nt, Artificial Sequence
  Description of Artificial Sequence: Synthetic oligonucleotide
gagccaaccacagagaaug

SEQ ID NO: 333166 - RNA, 19 nt, Artificial Sequence
  Description of Artificial Sequence: Synthetic oligonucleotide
gaauaagcuguuuaugaga

SEQ ID NO: 333167 - RNA, 19 nt, Artificial Sequence
  Description of Artificial Sequence: Synthetic oligonucleotide
aauccagagcucuuaaaau

SEQ ID NO: 333168 - RNA, 19 nt, Artificial Sequence
  Description of Artificial Sequence: Synthetic oligonucleotide
uaacauuagugguuaagga

SEQ ID NO: 333169 - RNA, 19 nt, Artificial Sequence
  Description of Artificial Sequence: Synthetic oligonucleotide
uugaaguauaaacauucuc

SEQ ID NO: 333170 - RNA, 19 nt, Artificial Sequence
  Description of Artificial Sequence: Synthetic oligonucleotide
gaggagucuagucuguucc

SEQ ID NO: 333171 - RNA, 19 nt, Artificial Sequence
  Description of Artificial Sequence: Synthetic oligonucleotide
agugccagacuauaaacca

SEQ ID NO: 333172 - RNA, 19 nt, Artificial Sequence
  Description of Artificial Sequence: Synthetic oligonucleotide
ugggaagauuugcaaaucc

SEQ ID NO: 333173 - RNA, 19 nt, Artificial Sequence
  Description of Artificial Sequence: Synthetic oligonucleotide
ugggugaugagcauuguuc

SEQ ID NO: 333174 - RNA, 19 nt, Artificial Sequence
  Description of Artificial Sequence: Synthetic oligonucleotide
uuauucauguccucauucu

SEQ ID NO: 333175 - RNA, 19 nt, Artificial Sequence
  Description of Artificial Sequence: Synthetic oligonucleotide
aaacgguuauuuuccucuc

SEQ ID NO: 333176 - RNA, 19 nt, Artificial Sequence
  Description of Artificial Sequence: Synthetic oligonucleotide
guaagccgaagcuugacgc

SEQ ID NO: 333177 - RNA, 19 nt, Artificial Sequence
  Description of Artificial Sequence: Synthetic oligonucleotide
uucaagcaagaucuggucu

SEQ ID NO: 333178 - RNA, 19 nt, Artificial Sequence
  Description of Artificial Sequence: Synthetic oligonucleotide
aaggacuaugauuuccacu

SEQ ID NO: 333179 - RNA, 19 nt, Artificial Sequence
  Description of Artificial Sequence: Synthetic oligonucleotide
aggcaaauguuacaaaaga

SEQ ID NO: 333180 - RNA, 19 nt, Artificial Sequence
  Description of Artificial Sequence: Synthetic oligonucleotide
cauaaaugcaacgucuaag

SEQ ID NO: 333181 - RNA, 19 nt, Artificial Sequence
  Description of Artificial Sequence: Synthetic oligonucleotide
ucuagucuguuccuuaaaa

SEQ ID NO: 333182 - RNA, 19 nt, Artificial Sequence
  Description of Artificial Sequence: Synthetic oligonucleotide
ucacgcaacauaaagugua

SEQ ID NO: 333183 - RNA, 19 nt, Artificial Sequence
  Description of Artificial Sequence: Synthetic oligonucleotide
uccaacauagccaggaguu

SEQ ID NO: 333184 - RNA, 19 nt, Artificial Sequence
  Description of Artificial Sequence: Synthetic oligonucleotide
guagcguucaaacugcuca

SEQ ID NO: 333185 - RNA, 19 nt, Artificial Sequence
  Description of Artificial Sequence: Synthetic oligonucleotide
gaguuagaggaaaaccugg

SEQ ID NO: 333186 - RNA, 19 nt, Artificial Sequence
  Description of Artificial Sequence: Synthetic oligonucleotide
agaaaaucaggguuuacuu

SEQ ID NO: 333187 - RNA, 19 nt, Artificial Sequence
  Description of Artificial Sequence: Synthetic oligonucleotide
agaugaauuaaccguauua

SEQ ID NO: 333188 - RNA, 19 nt, Artificial Sequence
  Description of Artificial Sequence: Synthetic oligonucleotide
ucuuuagccgcucacgcuc

SEQ ID NO: 333189 - RNA, 19 nt, Artificial Sequence
  Description of Artificial Sequence: Synthetic oligonucleotide
gaauccagagcucuuaaaa

SEQ ID NO: 333190 - RNA, 19 nt, Artificial Sequence
  Description of Artificial Sequence: Synthetic oligonucleotide
ucuggcacuagaauccaga

SEQ ID NO: 333191 - RNA, 19 nt, Artificial Sequence
  Description of Artificial Sequence: Synthetic oligonucleotide
uuaccaguagacagguuga

SEQ ID NO: 333192 - RNA, 19 nt, Artificial Sequence
  Description of Artificial Sequence: Synthetic oligonucleotide
aaacggugagaugaaguag

SEQ ID NO: 333193 - RNA, 19 nt, Artificial Sequence
  Description of Artificial Sequence: Synthetic oligonucleotide
uucaccaaccaccaucagu

SEQ ID NO: 333194 - RNA, 19 nt, Artificial Sequence
  Description of Artificial Sequence: Synthetic oligonucleotide
caaggcguagcauaaucag

SEQ ID NO: 333195 - RNA, 19 nt, Artificial Sequence
  Description of Artificial Sequence: Synthetic oligonucleotide
agcuauugaaguauaaaca

SEQ ID NO: 333196 - RNA, 19 nt, Artificial Sequence
  Description of Artificial Sequence: Synthetic oligonucleotide
aauucaacccugaaauccu

SEQ ID NO: 333197 - RNA, 19 nt, Artificial Sequence
  Description of Artificial Sequence: Synthetic oligonucleotide
gacuauaaaccaggcacgg

SEQ ID NO: 333198 - RNA, 19 nt, Artificial Sequence
  Description of Artificial Sequence: Synthetic oligonucleotide
caaugauuagucaggccag

SEQ ID NO: 333199 - RNA, 19 nt, Artificial Sequence
  Description of Artificial Sequence: Synthetic oligonucleotide
ucuacagguauaagucuga

SEQ ID NO: 333200 - RNA, 19 nt, Artificial Sequence
  Description of Artificial Sequence: Synthetic oligonucleotide
aauucuuucuggguagaga

SEQ ID NO: 333201 - RNA, 19 nt, Artificial Sequence
  Description of Artificial Sequence: Synthetic oligonucleotide
uuauugacucuuacugugu

SEQ ID NO: 333202 - RNA, 19 nt, Artificial Sequence
  Description of Artificial Sequence: Synthetic oligonucleotide
uuaguuuaaauggcuacaa

SEQ ID NO: 333203 - RNA, 19 nt, Artificial Sequence
  Description of Artificial Sequence: Synthetic oligonucleotide
cuagacauaaaucaagagu

SEQ ID NO: 333204 - RNA, 19 nt, Artificial Sequence
  Description of Artificial Sequence: Synthetic oligonucleotide
uuugugcaagagcaccucc

SEQ ID NO: 333205 - RNA, 19 nt, Artificial Sequence
  Description of Artificial Sequence: Synthetic oligonucleotide
ugauguuaugcucuucaau

SEQ ID NO: 333206 - RNA, 19 nt, Artificial Sequence
  Description of Artificial Sequence: Synthetic oligonucleotide
aacggugagaugaaguaga

SEQ ID NO: 333207 - RNA, 19 nt, Artificial Sequence
  Description of Artificial Sequence: Synthetic oligonucleotide
uauucauguccucauucuc

SEQ ID NO: 333208 - RNA, 19 nt, Artificial Sequence
  Description of Artificial Sequence: Synthetic oligonucleotide
cugaauugccuuucauucc

SEQ ID NO: 333209 - RNA, 19 nt, Artificial Sequence
  Description of Artificial Sequence: Synthetic oligonucleotide
acaccccacggguagagac

SEQ ID NO: 333210 - RNA, 19 nt, Artificial Sequence
  Description of Artificial Sequence: Synthetic oligonucleotide
agacuauaaaccaggcacg

SEQ ID NO: 333211 - RNA, 19 nt, Artificial Sequence
  Description of Artificial Sequence: Synthetic oligonucleotide
auugacucuuacuguguag

SEQ ID NO: 333212 - RNA, 19 nt, Artificial Sequence
  Description of Artificial Sequence: Synthetic oligonucleotide
gaugauugucuuaaaacaa

SEQ ID NO: 333213 - RNA, 19 nt, Artificial Sequence
  Description of Artificial Sequence: Synthetic oligonucleotide
ugcggcacagaucugaauu

SEQ ID NO: 333214 - RNA, 19 nt, Artificial Sequence
  Description of Artificial Sequence: Synthetic oligonucleotide
uacauuucuacagguauaa

SEQ ID NO: 333215 - RNA, 19 nt, Artificial Sequence
  Description of Artificial Sequence: Synthetic oligonucleotide
uucucucauuagauaaccc

SEQ ID NO: 333216 - RNA, 19 nt, Artificial Sequence
  Description of Artificial Sequence: Synthetic oligonucleotide
agacauaaaucaagaguac

SEQ ID NO: 333217 - RNA, 19 nt, Artificial Sequence
  Description of Artificial Sequence: Synthetic oligonucleotide
uugugcaagagcaccuccc

SEQ ID NO: 333218 - RNA, 19 nt, Artificial Sequence
  Description of Artificial Sequence: Synthetic oligonucleotide
agucuuguuacaauaagaa

SEQ ID NO: 333219 - RNA, 19 nt, Artificial Sequence
  Description of Artificial Sequence: Synthetic oligonucleotide
ugauugggaagauuugcaa

SEQ ID NO: 333220 - RNA, 19 nt, Artificial Sequence
  Description of Artificial Sequence: Synthetic oligonucleotide
ucuauccgcuagcacgccg

SEQ ID NO: 333221 - RNA, 19 nt, Artificial Sequence
  Description of Artificial Sequence: Synthetic oligonucleotide
aaugguagauuuugauguu

SEQ ID NO: 333222 - RNA, 19 nt, Artificial Sequence
  Description of Artificial Sequence: Synthetic oligonucleotide
acuauaaaccaggcacggc

SEQ ID NO: 333223 - RNA, 19 nt, Artificial Sequence
  Description of Artificial Sequence: Synthetic oligonucleotide
uccgcuagcacgccggaca

SEQ ID NO: 333224 - RNA, 19 nt, Artificial Sequence
  Description of Artificial Sequence: Synthetic oligonucleotide
agauaacccucuguucugc

SEQ ID NO: 333225 - RNA, 19 nt, Artificial Sequence
  Description of Artificial Sequence: Synthetic oligonucleotide
uagugaaggucuuggguca

SEQ ID NO: 333226 - RNA, 19 nt, Artificial Sequence
  Description of Artificial Sequence: Synthetic oligonucleotide
ugauuuuccuagaccagau

SEQ ID NO: 333227 - RNA, 19 nt, Artificial Sequence
  Description of Artificial Sequence: Synthetic oligonucleotide
ucacauauggugcccgagu

SEQ ID NO: 333228 - RNA, 19 nt, Artificial Sequence
  Description of Artificial Sequence: Synthetic oligonucleotide
acgaccucuaaccuucuug

SEQ ID NO: 333229 - RNA, 19 nt, Artificial Sequence
  Description of Artificial Sequence: Synthetic oligonucleotide
ugacucuuacuguguagag

SEQ ID NO: 333230 - RNA, 19 nt, Artificial Sequence
  Description of Artificial Sequence: Synthetic oligonucleotide
auaaaacguccuuguagug

SEQ ID NO: 333231 - RNA, 19 nt, Artificial Sequence
  Description of Artificial Sequence: Synthetic oligonucleotide
aguguaacauagcaaugaa

SEQ ID NO: 333232 - RNA, 19 nt, Artificial Sequence
  Description of Artificial Sequence: Synthetic oligonucleotide
guauaagucugacauuaga

SEQ ID NO: 333233 - RNA, 19 nt, Artificial Sequence
  Description of Artificial Sequence: Synthetic oligonucleotide
cucacgcuccuucagagug

SEQ ID NO: 333234 - RNA, 19 nt, Artificial Sequence
  Description of Artificial Sequence: Synthetic oligonucleotide
agaguuagaggaaaaccug

SEQ ID NO: 333235 - RNA, 19 nt, Artificial Sequence
  Description of Artificial Sequence: Synthetic oligonucleotide
gagugccagacuauaaacc

SEQ ID NO: 333236 - RNA, 19 nt, Artificial Sequence
  Description of Artificial Sequence: Synthetic oligonucleotide
auuaacuacagcagcaaaa

SEQ ID NO: 333237 - RNA, 19 nt, Artificial Sequence
  Description of Artificial Sequence: Synthetic oligonucleotide
uagauaacccucuguucug

SEQ ID NO: 333238 - RNA, 19 nt, Artificial Sequence
  Description of Artificial Sequence: Synthetic oligonucleotide
uucgcaaugacaggcacaa

SEQ ID NO: 333239 - RNA, 19 nt, Artificial Sequence
  Description of Artificial Sequence: Synthetic oligonucleotide
aacgguuauuuuccucuca

SEQ ID NO: 333240 - RNA, 19 nt, Artificial Sequence
  Description of Artificial Sequence: Synthetic oligonucleotide
ucuaagggcuucaauccau

SEQ ID NO: 333241 - RNA, 19 nt, Artificial Sequence
  Description of Artificial Sequence: Synthetic oligonucleotide
cuauccgcuagcacgccgg

SEQ ID NO: 333242 - RNA, 19 nt, Artificial Sequence
  Description of Artificial Sequence: Synthetic oligonucleotide
ugauucugcaucugguaaa

SEQ ID NO: 333243 - RNA, 19 nt, Artificial Sequence
  Description of Artificial Sequence: Synthetic oligonucleotide
ugauuagucaggccagcuc

SEQ ID NO: 333244 - RNA, 19 nt, Artificial Sequence
  Description of Artificial Sequence: Synthetic oligonucleotide
ugaugugccgccuguucag

SEQ ID NO: 333245 - RNA, 19 nt, Artificial Sequence
  Description of Artificial Sequence: Synthetic oligonucleotide
uaaccguauuaacuacagc

SEQ ID NO: 333246 - RNA, 19 nt, Artificial Sequence
  Description of Artificial Sequence: Synthetic oligonucleotide
aaccucacauauggugccc

SEQ ID NO: 333247 - RNA, 19 nt, Artificial Sequence
  Description of Artificial Sequence: Synthetic oligonucleotide
accguauuaacuacagcag

SEQ ID NO: 333248 - RNA, 19 nt, Artificial Sequence
  Description of Artificial Sequence: Synthetic oligonucleotide
uccaaggcguagcauaauc

SEQ ID NO: 333249 - RNA, 19 nt, Artificial Sequence
  Description of Artificial Sequence: Synthetic oligonucleotide
agguauaagucugacauua

SEQ ID NO: 333250 - RNA, 19 nt, Artificial Sequence
  Description of Artificial Sequence: Synthetic oligonucleotide
cuaaggacuaugauuucca

SEQ ID NO: 333251 - RNA, 19 nt, Artificial Sequence
  Description of Artificial Sequence: Synthetic oligonucleotide
ccugguauaauucuuucug

SEQ ID NO: 333252 - RNA, 19 nt, Artificial Sequence
  Description of Artificial Sequence: Synthetic oligonucleotide
uaguuuaaauggcuacaaa

SEQ ID NO: 333253 - RNA, 19 nt, Artificial Sequence
  Description of Artificial Sequence: Synthetic oligonucleotide
uuggacaguucuuucaauu

SEQ ID NO: 333254 - RNA, 19 nt, Artificial Sequence
  Description of Artificial Sequence: Synthetic oligonucleotide
cucaguagaaaaucacuga

SEQ ID NO: 333255 - RNA, 19 nt, Artificial Sequence
  Description of Artificial Sequence: Synthetic oligonucleotide
guuuacuucacgcaacaua

SEQ ID NO: 333256 - RNA, 19 nt, Artificial Sequence
  Description of Artificial Sequence: Synthetic oligonucleotide
guuuucauagugaaggucu

SEQ ID NO: 333257 - RNA, 19 nt, Artificial Sequence
  Description of Artificial Sequence: Synthetic oligonucleotide
uguacccuguugucaauga

SEQ ID NO: 333258 - RNA, 19 nt, Artificial Sequence
  Description of Artificial Sequence: Synthetic oligonucleotide
ucaacccugaaauccugcu

SEQ ID NO: 333259 - RNA, 19 nt, Artificial Sequence
  Description of Artificial Sequence: Synthetic oligonucleotide
ccuaguuauacaaaguaca

SEQ ID NO: 333260 - RNA, 19 nt, Artificial Sequence
  Description of Artificial Sequence: Synthetic oligonucleotide
cacuacuguaagccgaagc

SEQ ID NO: 333261 - RNA, 19 nt, Artificial Sequence
  Description of Artificial Sequence: Synthetic oligonucleotide
cagguugacugauucuuag

SEQ ID NO: 333262 - RNA, 19 nt, Artificial Sequence
  Description of Artificial Sequence: Synthetic oligonucleotide
auaaaguguaacauagcaa

SEQ ID NO: 333263 - RNA, 19 nt, Artificial Sequence
  Description of Artificial Sequence: Synthetic oligonucleotide
uuuccuagaccagauucac

SEQ ID NO: 333264 - RNA, 19 nt, Artificial Sequence
  Description of Artificial Sequence: Synthetic oligonucleotide
uauaaaccaggcacggcuu

SEQ ID NO: 333265 - RNA, 19 nt, Artificial Sequence
  Description of Artificial Sequence: Synthetic oligonucleotide
uagcauaaucagcauccac

SEQ ID NO: 333266 - RNA, 19 nt, Artificial Sequence
  Description of Artificial Sequence: Synthetic oligonucleotide
gagucuuguuacaauaaga

SEQ ID NO: 333267 - RNA, 19 nt, Artificial Sequence
  Description of Artificial Sequence: Synthetic oligonucleotide
cuccacaacaccccacggg

SEQ ID NO: 333268 - RNA, 19 nt, Artificial Sequence
  Description of Artificial Sequence: Synthetic oligonucleotide
uaaggacuaugauuuccac

SEQ ID NO: 333269 - RNA, 19 nt, Artificial Sequence
  Description of Artificial Sequence: Synthetic oligonucleotide
ucuccaaggcguagcauaa

SEQ ID NO: 333270 - RNA, 19 nt, Artificial Sequence
  Description of Artificial Sequence: Synthetic oligonucleotide
guugcuuagacaucuuucu

SEQ ID NO: 333271 - RNA, 19 nt, Artificial Sequence
  Description of Artificial Sequence: Synthetic oligonucleotide
gagacgaccucuaaccuuc

SEQ ID NO: 333272 - RNA, 19 nt, Artificial Sequence
  Description of Artificial Sequence: Synthetic oligonucleotide
gauaacccucuguucugcc

SEQ ID NO: 333273 - RNA, 19 nt, Artificial Sequence
  Description of Artificial Sequence: Synthetic oligonucleotide
auuaaccguauuaacuaca

SEQ ID NO: 333274 - RNA, 19 nt, Artificial Sequence
  Description of Artificial Sequence: Synthetic oligonucleotide
aaccuggcaggcauugggg

SEQ ID NO: 333275 - RNA, 19 nt, Artificial Sequence
  Description of Artificial Sequence: Synthetic oligonucleotide
ugcagguagcguucaaacu

SEQ ID NO: 333276 - RNA, 19 nt, Artificial Sequence
  Description of Artificial Sequence: Synthetic oligonucleotide
ugacaggcacaauauucac

SEQ ID NO: 333277 - RNA, 19 nt, Artificial Sequence
  Description of Artificial Sequence: Synthetic oligonucleotide
acuucacgcaacauaaagu

SEQ ID NO: 333278 - RNA, 19 nt, Artificial Sequence
  Description of Artificial Sequence: Synthetic oligonucleotide
cuauaaaccaggcacggcu

SEQ ID NO: 333279 - RNA, 19 nt, Artificial Sequence
  Description of Artificial Sequence: Synthetic oligonucleotide
uuccuagaccagauucacc

SEQ ID NO: 333280 - RNA, 19 nt, Artificial Sequence
  Description of Artificial Sequence: Synthetic oligonucleotide
aguugauguguaaaaugug

SEQ ID NO: 333281 - RNA, 19 nt, Artificial Sequence
  Description of Artificial Sequence: Synthetic oligonucleotide
auuguguauggcuuucaua

SEQ ID NO: 333282 - RNA, 19 nt, Artificial Sequence
  Description of Artificial Sequence: Synthetic oligonucleotide
aacgucuaagggcuucaau

SEQ ID NO: 333283 - RNA, 19 nt, Artificial Sequence
  Description of Artificial Sequence: Synthetic oligonucleotide
cauauggugcccgaguguc

SEQ ID NO: 333284 - RNA, 19 nt, Artificial Sequence
  Description of Artificial Sequence: Synthetic oligonucleotide
ucgucaugcagguagcguu

SEQ ID NO: 333285 - RNA, 19 nt, Artificial Sequence
  Description of Artificial Sequence: Synthetic oligonucleotide
cuguuugcggcacagaucu

SEQ ID NO: 333286 - RNA, 19 nt, Artificial Sequence
  Description of Artificial Sequence: Synthetic oligonucleotide
uccacuacuguaagccgaa

SEQ ID NO: 333287 - RNA, 19 nt, Artificial Sequence
  Description of Artificial Sequence: Synthetic oligonucleotide
gguuauuuuccucucagua

SEQ ID NO: 333288 - RNA, 19 nt, Artificial Sequence
  Description of Artificial Sequence: Synthetic oligonucleotide
guauugccuucuuaguuga

SEQ ID NO: 333289 - RNA, 19 nt, Artificial Sequence
  Description of Artificial Sequence: Synthetic oligonucleotide
gguuugaaaaggaucuggc

SEQ ID NO: 333290 - RNA, 19 nt, Artificial Sequence
  Description of Artificial Sequence: Synthetic oligonucleotide
cauuagugguuaaggaaga

SEQ ID NO: 333291 - RNA, 19 nt, Artificial Sequence
  Description of Artificial Sequence: Synthetic oligonucleotide
caaacugaguugguuguug

SEQ ID NO: 333292 - RNA, 19 nt, Artificial Sequence
  Description of Artificial Sequence: Synthetic oligonucleotide
ugccagcuaaggacuauga

SEQ ID NO: 333293 - RNA, 19 nt, Artificial Sequence
  Description of Artificial Sequence: Synthetic oligonucleotide
guaaaugguagauuuugau

SEQ ID NO: 333294 - RNA, 19 nt, Artificial Sequence
  Description of Artificial Sequence: Synthetic oligonucleotide
caaacggugagaugaagua

SEQ ID NO: 333295 - RNA, 19 nt, Artificial Sequence
  Description of Artificial Sequence: Synthetic oligonucleotide
gguugacugauucuuagaa

SEQ ID NO: 333296 - RNA, 19 nt, Artificial Sequence
  Description of Artificial Sequence: Synthetic oligonucleotide
ucaccuuauuguguauggc

SEQ ID NO: 333297 - RNA, 19 nt, Artificial Sequence
  Description of Artificial Sequence: Synthetic oligonucleotide
caagaguacuugucaauga

SEQ ID NO: 333298 - RNA, 19 nt, Artificial Sequence
  Description of Artificial Sequence: Synthetic oligonucleotide
cuuuagccgcucacgcucc

SEQ ID NO: 333299 - RNA, 19 nt, Artificial Sequence
  Description of Artificial Sequence: Synthetic oligonucleotide
gcuauugaaguauaaacau

SEQ ID NO: 333300 - RNA, 19 nt, Artificial Sequence
  Description of Artificial Sequence: Synthetic oligonucleotide
gguagagacgaccucuaac

SEQ ID NO: 333301 - RNA, 19 nt, Artificial Sequence
  Description of Artificial Sequence: Synthetic oligonucleotide
uuugcggcacagaucugaa

SEQ ID NO: 333302 - RNA, 19 nt, Artificial Sequence
  Description of Artificial Sequence: Synthetic oligonucleotide
uguucagaccacucucguc

SEQ ID NO: 333303 - RNA, 19 nt, Artificial Sequence
  Description of Artificial Sequence: Synthetic oligonucleotide
gaucagucaggaauaagcu

SEQ ID NO: 333304 - RNA, 19 nt, Artificial Sequence
  Description of Artificial Sequence: Synthetic oligonucleotide
cuuuugcaccuaguuauac

SEQ ID NO: 333305 - RNA, 19 nt, Artificial Sequence
  Description of Artificial Sequence: Synthetic oligonucleotide
gugagaugaaguagaagca

SEQ ID NO: 333306 - RNA, 19 nt, Artificial Sequence
  Description of Artificial Sequence: Synthetic oligonucleotide
uuacuucacgcaacauaaa

SEQ ID NO: 333307 - RNA, 19 nt, Artificial Sequence
  Description of Artificial Sequence: Synthetic oligonucleotide
acgcaacauaaaguguaac

SEQ ID NO: 333308 - RNA, 19 nt, Artificial Sequence
  Description of Artificial Sequence: Synthetic oligonucleotide
auaagcuguuuaugagagu

SEQ ID NO: 333309 - RNA, 19 nt, Artificial Sequence
  Description of Artificial Sequence: Synthetic oligonucleotide
caccuaguuauacaaagua

SEQ ID NO: 333310 - RNA, 19 nt, Artificial Sequence
  Description of Artificial Sequence: Synthetic oligonucleotide
agacagguugacugauucu

SEQ ID NO: 333311 - RNA, 19 nt, Artificial Sequence
  Description of Artificial Sequence: Synthetic oligonucleotide
cagcuaaggacuaugauuu

SEQ ID NO: 333312 - RNA, 19 nt, Artificial Sequence
  Description of Artificial Sequence: Synthetic oligonucleotide
agguugacugauucuuaga

SEQ ID NO: 333313 - RNA, 19 nt, Artificial Sequence
  Description of Artificial Sequence: Synthetic oligonucleotide
ggcuucaaucaacugguug

SEQ ID NO: 333314 - RNA, 19 nt, Artificial Sequence
  Description of Artificial Sequence: Synthetic oligonucleotide
uuuugugcaagagcaccuc

SEQ ID NO: 333315 - RNA, 19 nt, Artificial Sequence
  Description of Artificial Sequence: Synthetic oligonucleotide
augugccgccuguucagac

SEQ ID NO: 333316 - RNA, 19 nt, Artificial Sequence
  Description of Artificial Sequence: Synthetic oligonucleotide
aacguccuuguagugaguu

SEQ ID NO: 333317 - RNA, 19 nt, Artificial Sequence
  Description of Artificial Sequence: Synthetic oligonucleotide
ucucgucaugcagguagcg

SEQ ID NO: 333318 - RNA, 19 nt, Artificial Sequence
  Description of Artificial Sequence: Synthetic oligonucleotide
uugcaccuaguuauacaaa

SEQ ID NO: 333319 - RNA, 19 nt, Artificial Sequence
  Description of Artificial Sequence: Synthetic oligonucleotide
guagugaguucucuacaga

SEQ ID NO: 333320 - RNA, 19 nt, Artificial Sequence
  Description of Artificial Sequence: Synthetic oligonucleotide
cauuagauaacccucuguu

SEQ ID NO: 333321 - RNA, 19 nt, Artificial Sequence
  Description of Artificial Sequence: Synthetic oligonucleotide
ugugaacucgaaccccuuu

SEQ ID NO: 333322 - RNA, 19 nt, Artificial Sequence
  Description of Artificial Sequence: Synthetic oligonucleotide
ccugguuaacagauaaaug

SEQ ID NO: 333323 - RNA, 19 nt, Artificial Sequence
  Description of Artificial Sequence: Synthetic oligonucleotide
gcuaaggacuaugauuucc

SEQ ID NO: 333324 - RNA, 19 nt, Artificial Sequence
  Description of Artificial Sequence: Synthetic oligonucleotide
agugugaacucgaaccccu

SEQ ID NO: 333325 - RNA, 19 nt, Artificial Sequence
  Description of Artificial Sequence: Synthetic oligonucleotide
cugguuggagccaaccaca

SEQ ID NO: 333326 - RNA, 19 nt, Artificial Sequence
  Description of Artificial Sequence: Synthetic oligonucleotide
gagguuugaaaaggaucug

SEQ ID NO: 333327 - RNA, 19 nt, Artificial Sequence
  Description of Artificial Sequence: Synthetic oligonucleotide
cuucagccuuucagaacgg

SEQ ID NO: 333328 - RNA, 19 nt, Artificial Sequence
  Description of Artificial Sequence: Synthetic oligonucleotide
auauggugcccgagugucc

SEQ ID NO: 333329 - RNA, 19 nt, Artificial Sequence
  Description of Artificial Sequence: Synthetic oligonucleotide
gaaugggauacuggccuug

SEQ ID NO: 333330 - RNA, 19 nt, Artificial Sequence
  Description of Artificial Sequence: Synthetic oligonucleotide
gcuagcacgccggacaccg

SEQ ID NO: 333331 - RNA, 19 nt, Artificial Sequence
  Description of Artificial Sequence: Synthetic oligonucleotide
ccguauuaacuacagcagc

SEQ ID NO: 333332 - RNA, 19 nt, Artificial Sequence
  Description of Artificial Sequence: Synthetic oligonucleotide
gcucuuaaaauucaacccu

SEQ ID NO: 333333 - RNA, 19 nt, Artificial Sequence
  Description of Artificial Sequence: Synthetic oligonucleotide
cucucgucaugcagguagc

SEQ ID NO: 333334 - RNA, 19 nt, Artificial Sequence
  Description of Artificial Sequence: Synthetic oligonucleotide
auaauucuuucuggguaga

SEQ ID NO: 333335 - RNA, 19 nt, Artificial Sequence
  Description of Artificial Sequence: Synthetic oligonucleotide
caccccacggguagagacg

SEQ ID NO: 333336 - RNA, 19 nt, Artificial Sequence
  Description of Artificial Sequence: Synthetic oligonucleotide
accucacauauggugcccg

SEQ ID NO: 333337 - RNA, 19 nt, Artificial Sequence
  Description of Artificial Sequence: Synthetic oligonucleotide
acggaaguuuucauaguga

SEQ ID NO: 333338 - RNA, 19 nt, Artificial Sequence
  Description of Artificial Sequence: Synthetic oligonucleotide
aaacaaccucacauauggu

SEQ ID NO: 333339 - RNA, 19 nt, Artificial Sequence
  Description of Artificial Sequence: Synthetic oligonucleotide
agcacggacccgccccgcc

SEQ ID NO: 333340 - RNA, 19 nt, Artificial Sequence
  Description of Artificial Sequence: Synthetic oligonucleotide
agauaaaugugcagaugaa

SEQ ID NO: 333341 - RNA, 19 nt, Artificial Sequence
  Description of Artificial Sequence: Synthetic oligonucleotide
cuacagguauaagucugac

SEQ ID NO: 333342 - RNA, 19 nt, Artificial Sequence
  Description of Artificial Sequence: Synthetic oligonucleotide
caauaagaagcuggagcuc

SEQ ID NO: 333343 - RNA, 19 nt, Artificial Sequence
  Description of Artificial Sequence: Synthetic oligonucleotide
augauuagucaggccagcu

SEQ ID NO: 333344 - RNA, 19 nt, Artificial Sequence
  Description of Artificial Sequence: Synthetic oligonucleotide
auguacccuguugucaaug

SEQ ID NO: 333345 - RNA, 19 nt, Artificial Sequence
  Description of Artificial Sequence: Synthetic oligonucleotide
ugguuuucuccaaggcgua

SEQ ID NO: 333346 - RNA, 19 nt, Artificial Sequence
  Description of Artificial Sequence: Synthetic oligonucleotide
gcugaucuuuugcaccuag

SEQ ID NO: 333347 - RNA, 19 nt, Artificial Sequence
  Description of Artificial Sequence: Synthetic oligonucleotide
caggguuuacuucacgcaa

SEQ ID NO: 333348 - RNA, 19 nt, Artificial Sequence
  Description of Artificial Sequence: Synthetic oligonucleotide
caccaucagugugaacucg

SEQ ID NO: 333349 - RNA, 19 nt, Artificial Sequence
  Description of Artificial Sequence: Synthetic oligonucleotide
auagccagguguguccacu

SEQ ID NO: 333350 - RNA, 19 nt, Artificial Sequence
  Description of Artificial Sequence: Synthetic oligonucleotide
ccucucaguagaaaaucac

SEQ ID NO: 333351 - RNA, 19 nt, Artificial Sequence
  Description of Artificial Sequence: Synthetic oligonucleotide
uguccgcuuucgcaaugac

SEQ ID NO: 333352 - RNA, 19 nt, Artificial Sequence
  Description of Artificial Sequence: Synthetic oligonucleotide
gacgccccgcucuucaauc

SEQ ID NO: 333353 - RNA, 19 nt, Artificial Sequence
  Description of Artificial Sequence: Synthetic oligonucleotide
auuagugguuaaggaagaa

SEQ ID NO: 333354 - RNA, 19 nt, Artificial Sequence
  Description of Artificial Sequence: Synthetic oligonucleotide
auacauuucuacagguaua

SEQ ID NO: 333355 - RNA, 19 nt, Artificial Sequence
  Description of Artificial Sequence: Synthetic oligonucleotide
cuauugaaguauaaacauu

SEQ ID NO: 333356 - RNA, 19 nt, Artificial Sequence
  Description of Artificial Sequence: Synthetic oligonucleotide
gguauaagucugacauuag

SEQ ID NO: 333357 - RNA, 19 nt, Artificial Sequence
  Description of Artificial Sequence: Synthetic oligonucleotide
cuuuugugcaagagcaccu

SEQ ID NO: 333358 - RNA, 19 nt, Artificial Sequence
  Description of Artificial Sequence: Synthetic oligonucleotide
gagucuagucuguuccuua

SEQ ID NO: 333359 - RNA, 19 nt, Artificial Sequence
  Description of Artificial Sequence: Synthetic oligonucleotide
uucuaacauuagugguuaa

SEQ ID NO: 333360 - RNA, 19 nt, Artificial Sequence
  Description of Artificial Sequence: Synthetic oligonucleotide
uauccgcuagcacgccgga

SEQ ID NO: 333361 - RNA, 19 nt, Artificial Sequence
  Description of Artificial Sequence: Synthetic oligonucleotide
cguauuaacuacagcagca

SEQ ID NO: 333362 - RNA, 19 nt, Artificial Sequence
  Description of Artificial Sequence: Synthetic oligonucleotide
ccuugcaaucaucuccugc

SEQ ID NO: 333363 - RNA, 19 nt, Artificial Sequence
  Description of Artificial Sequence: Synthetic oligonucleotide
ugcccgagugucccgcugu

SEQ ID NO: 333364 - RNA, 19 nt, Artificial Sequence
  Description of Artificial Sequence: Synthetic oligonucleotide
uaccaguagacagguugac

SEQ ID NO: 333365 - RNA, 19 nt, Artificial Sequence
  Description of Artificial Sequence: Synthetic oligonucleotide
ccaaccacagagaauggga

SEQ ID NO: 333366 - RNA, 19 nt, Artificial Sequence
  Description of Artificial Sequence: Synthetic oligonucleotide
cugaguugguuguugcuua

SEQ ID NO: 333367 - RNA, 19 nt, Artificial Sequence
  Description of Artificial Sequence: Synthetic oligonucleotide
cuagucuguuccuuaaaau

SEQ ID NO: 333368 - RNA, 19 nt, Artificial Sequence
  Description of Artificial Sequence: Synthetic oligonucleotide
ggacuaugauuuccacugc

SEQ ID NO: 333369 - RNA, 19 nt, Artificial Sequence
  Description of Artificial Sequence: Synthetic oligonucleotide
agcauuguucucagcuuca

SEQ ID NO: 333370 - RNA, 19 nt, Artificial Sequence
  Description of Artificial Sequence: Synthetic oligonucleotide
agccgaagcuugacgcccc

SEQ ID NO: 333371 - RNA, 19 nt, Artificial Sequence
  Description of Artificial Sequence: Synthetic oligonucleotide
uauuaccaguagacagguu

SEQ ID NO: 333372 - RNA, 19 nt, Artificial Sequence
  Description of Artificial Sequence: Synthetic oligonucleotide
guccacuacuguaagccga

SEQ ID NO: 333373 - RNA, 19 nt, Artificial Sequence
  Description of Artificial Sequence: Synthetic oligonucleotide
ccucccaaucacaagccug

SEQ ID NO: 333374 - RNA, 19 nt, Artificial Sequence
  Description of Artificial Sequence: Synthetic oligonucleotide
cacgcaacauaaaguguaa

SEQ ID NO: 333375 - RNA, 19 nt, Artificial Sequence
  Description of Artificial Sequence: Synthetic oligonucleotide
gacucuuacuguguagagu

SEQ ID NO: 333376 - RNA, 19 nt, Artificial Sequence
  Description of Artificial Sequence: Synthetic oligonucleotide
ggguuuacuucacgcaaca

SEQ ID NO: 333377 - RNA, 19 nt, Artificial Sequence
  Description of Artificial Sequence: Synthetic oligonucleotide
ggugaugagcauuguucuc

SEQ ID NO: 333378 - RNA, 19 nt, Artificial Sequence
  Description of Artificial Sequence: Synthetic oligonucleotide
aucugguaaaugguagauu

SEQ ID NO: 333379 - RNA, 19 nt, Artificial Sequence
  Description of Artificial Sequence: Synthetic oligonucleotide
aucacaagccuggguucag

SEQ ID NO: 333380 - RNA, 19 nt, Artificial Sequence
  Description of Artificial Sequence: Synthetic oligonucleotide
aggagaugauugucuuaaa

SEQ ID NO: 333381 - RNA, 19 nt, Artificial Sequence
  Description of Artificial Sequence: Synthetic oligonucleotide
caaguaugcacagccaccu

SEQ ID NO: 333382 - RNA, 19 nt, Artificial Sequence
  Description of Artificial Sequence: Synthetic oligonucleotide
ugacgccccgcucuucaau

SEQ ID NO: 333383 - RNA, 19 nt, Artificial Sequence
  Description of Artificial Sequence: Synthetic oligonucleotide
guucagauccaugccagcu

SEQ ID NO: 333384 - RNA, 19 nt, Artificial Sequence
  Description of Artificial Sequence: Synthetic oligonucleotide
uuagucaggccagcucaau

SEQ ID NO: 333385 - RNA, 19 nt, Artificial Sequence
  Description of Artificial Sequence: Synthetic oligonucleotide
cuaaacaauagugcuuuau

SEQ ID NO: 333386 - RNA, 19 nt, Artificial Sequence
  Description of Artificial Sequence: Synthetic oligonucleotide
gggauauucugagcaaaca

SEQ ID NO: 333387 - RNA, 19 nt, Artificial Sequence
  Description of Artificial Sequence: Synthetic oligonucleotide
ccaaggcguagcauaauca

SEQ ID NO: 333388 - RNA, 19 nt, Artificial Sequence
  Description of Artificial Sequence: Synthetic oligonucleotide
auuagucaggccagcucaa

SEQ ID NO: 333389 - RNA, 19 nt, Artificial Sequence
  Description of Artificial Sequence: Synthetic oligonucleotide
gaguugguuguugcuuaga

SEQ ID NO: 333390 - RNA, 19 nt, Artificial Sequence
  Description of Artificial Sequence: Synthetic oligonucleotide
cacggcuuugcucaucugu

SEQ ID NO: 333391 - RNA, 19 nt, Artificial Sequence
  Description of Artificial Sequence: Synthetic oligonucleotide
acaaacugaguugguuguu

SEQ ID NO: 333392 - RNA, 19 nt, Artificial Sequence
  Description of Artificial Sequence: Synthetic oligonucleotide
aaacguccuuguagugagu

SEQ ID NO: 333393 - RNA, 19 nt, Artificial Sequence
  Description of Artificial Sequence: Synthetic oligonucleotide
acggcuuugcucaucuguu

SEQ ID NO: 333394 - RNA, 19 nt, Artificial Sequence
  Description of Artificial Sequence: Synthetic oligonucleotide
gaugugccgccuguucaga

SEQ ID NO: 333395 - RNA, 19 nt, Artificial Sequence
  Description of Artificial Sequence: Synthetic oligonucleotide
uugcggcacagaucugaau

SEQ ID NO: 333396 - RNA, 19 nt, Artificial Sequence
  Description of Artificial Sequence: Synthetic oligonucleotide
auccgcuagcacgccggac

SEQ ID NO: 333397 - RNA, 19 nt, Artificial Sequence
  Description of Artificial Sequence: Synthetic oligonucleotide
gugaacucgaaccccuuuu

SEQ ID NO: 333398 - RNA, 19 nt, Artificial Sequence
  Description of Artificial Sequence: Synthetic oligonucleotide
ccucaauuuggacaguucu

SEQ ID NO: 333399 - RNA, 19 nt, Artificial Sequence
  Description of Artificial Sequence: Synthetic oligonucleotide
cauguccaccacacaggga

SEQ ID NO: 333400 - RNA, 19 nt, Artificial Sequence
  Description of Artificial Sequence: Synthetic oligonucleotide
ccuuuucaagcaagaucug

SEQ ID NO: 333401 - RNA, 19 nt, Artificial Sequence
  Description of Artificial Sequence: Synthetic oligonucleotide
ccauggcugaucuuuugca

SEQ ID NO: 333402 - RNA, 19 nt, Artificial Sequence
  Description of Artificial Sequence: Synthetic oligonucleotide
cuagcacgccggacaccgc

SEQ ID NO: 333403 - RNA, 19 nt, Artificial Sequence
  Description of Artificial Sequence: Synthetic oligonucleotide
ccagacuauaaaccaggca

SEQ ID NO: 333404 - RNA, 19 nt, Artificial Sequence
  Description of Artificial Sequence: Synthetic oligonucleotide
cucuauccgcuagcacgcc

SEQ ID NO: 333405 - RNA, 19 nt, Artificial Sequence
  Description of Artificial Sequence: Synthetic oligonucleotide
ccgagugucccgcugucac

SEQ ID NO: 333406 - RNA, 19 nt, Artificial Sequence
  Description of Artificial Sequence: Synthetic oligonucleotide
augcggcgaagcucagccu

SEQ ID NO: 333407 - RNA, 19 nt, Artificial Sequence
  Description of Artificial Sequence: Synthetic oligonucleotide
cugcuccugguauaauucu

SEQ ID NO: 333408 - RNA, 19 nt, Artificial Sequence
  Description of Artificial Sequence: Synthetic oligonucleotide
caucugguaaaugguagau

SEQ ID NO: 333409 - RNA, 19 nt, Artificial Sequence
  Description of Artificial Sequence: Synthetic oligonucleotide
gcaaugaaauauaaauguu

SEQ ID NO: 333410 - RNA, 19 nt, Artificial Sequence
  Description of Artificial Sequence: Synthetic oligonucleotide
ccaaacggugagaugaagu

SEQ ID NO: 333411 - RNA, 19 nt, Artificial Sequence
  Description of Artificial Sequence: Synthetic oligonucleotide
cccacggguagagacgacc

SEQ ID NO: 333412 - RNA, 19 nt, Artificial Sequence
  Description of Artificial Sequence: Synthetic oligonucleotide
ccagcucaaucaaagaaau

SEQ ID NO: 333413 - RNA, 19 nt, Artificial Sequence
  Description of Artificial Sequence: Synthetic oligonucleotide
guguccgcuuucgcaauga

SEQ ID NO: 333414 - RNA, 19 nt, Artificial Sequence
  Description of Artificial Sequence: Synthetic oligonucleotide
gcuuucgcaaugacaggca

SEQ ID NO: 333415 - RNA, 19 nt, Artificial Sequence
  Description of Artificial Sequence: Synthetic oligonucleotide
gguuggagccaaccacaga

SEQ ID NO: 333416 - RNA, 19 nt, Artificial Sequence
  Description of Artificial Sequence: Synthetic oligonucleotide
gguagcguucaaacugcuc

SEQ ID NO: 333417 - RNA, 19 nt, Artificial Sequence
  Description of Artificial Sequence: Synthetic oligonucleotide
gugucccgcugucacuguc

SEQ ID NO: 333418 - RNA, 19 nt, Artificial Sequence
  Description of Artificial Sequence: Synthetic oligonucleotide
cuguucagaccacucucgu

SEQ ID NO: 333419 - RNA, 19 nt, Artificial Sequence
  Description of Artificial Sequence: Synthetic oligonucleotide
ccgcuuucgcaaugacagg

SEQ ID NO: 333420 - RNA, 19 nt, Artificial Sequence
  Description of Artificial Sequence: Synthetic oligonucleotide
caacaguugaagccucaau

SEQ ID NO: 333421 - RNA, 19 nt, Artificial Sequence
  Description of Artificial Sequence: Synthetic oligonucleotide
cgucaugcagguagcguuc

SEQ ID NO: 333422 - RNA, 19 nt, Artificial Sequence
  Description of Artificial Sequence: Synthetic oligonucleotide
ugccgccuguucagaccac

SEQ ID NO: 333423 - RNA, 19 nt, Artificial Sequence
  Description of Artificial Sequence: Synthetic oligonucleotide
guccaaacggugagaugaa

SEQ ID NO: 333424 - RNA, 19 nt, Artificial Sequence
  Description of Artificial Sequence: Synthetic oligonucleotide
gccgaagcuugacgccccg

SEQ ID NO: 333425 - RNA, 19 nt, Artificial Sequence
  Description of Artificial Sequence: Synthetic oligonucleotide
cuacuguaagccgaagcuu

SEQ ID NO: 333426 - RNA, 19 nt, Artificial Sequence
  Description of Artificial Sequence: Synthetic oligonucleotide
ggcacaauauucaccuuau

SEQ ID NO: 333427 - RNA, 19 nt, Artificial Sequence
  Description of Artificial Sequence: Synthetic oligonucleotide
cagaugaauuaaccguauu

SEQ ID NO: 333428 - RNA, 19 nt, Artificial Sequence
  Description of Artificial Sequence: Synthetic oligonucleotide
gcaacgucuaagggcuuca

SEQ ID NO: 333429 - RNA, 19 nt, Artificial Sequence
  Description of Artificial Sequence: Synthetic oligonucleotide
gccucaauuuggacaguuc

SEQ ID NO: 333430 - RNA, 19 nt, Artificial Sequence
  Description of Artificial Sequence: Synthetic oligonucleotide
cucgucaugcagguagcgu

SEQ ID NO: 333431 - RNA, 19 nt, Artificial Sequence
  Description of Artificial Sequence: Synthetic oligonucleotide
cagagugaguguguccgcu

SEQ ID NO: 333432 - RNA, 19 nt, Artificial Sequence
  Description of Artificial Sequence: Synthetic oligonucleotide
gcaccuaguuauacaaagu

SEQ ID NO: 333433 - RNA, 19 nt, Artificial Sequence
  Description of Artificial Sequence: Synthetic oligonucleotide
agacgaccucuaaccuucu

SEQ ID NO: 333434 - RNA, 19 nt, Artificial Sequence
  Description of Artificial Sequence: Synthetic oligonucleotide
cuguccccacccugcaucu

SEQ ID NO: 333435 - RNA, 19 nt, Artificial Sequence
  Description of Artificial Sequence: Synthetic oligonucleotide
cccuguugucaaugaugug

SEQ ID NO: 333436 - RNA, 19 nt, Artificial Sequence
  Description of Artificial Sequence: Synthetic oligonucleotide
ccgcuagcacgccggacac

SEQ ID NO: 333437 - RNA, 19 nt, Artificial Sequence
  Description of Artificial Sequence: Synthetic oligonucleotide
gccagcuaaggacuaugau

SEQ ID NO: 333438 - RNA, 19 nt, Artificial Sequence
  Description of Artificial Sequence: Synthetic oligonucleotide
guagacagguugacugauu

SEQ ID NO: 333439 - RNA, 19 nt, Artificial Sequence
  Description of Artificial Sequence: Synthetic oligonucleotide
caacgucuaagggcuucaa

SEQ ID NO: 333440 - RNA, 19 nt, Artificial Sequence
  Description of Artificial Sequence: Synthetic oligonucleotide
caccaaccaccaucagugu

SEQ ID NO: 333441 - RNA, 19 nt, Artificial Sequence
  Description of Artificial Sequence: Synthetic oligonucleotide
gacgaccucuaaccuucuu

SEQ ID NO: 333442 - RNA, 19 nt, Artificial Sequence
  Description of Artificial Sequence: Synthetic oligonucleotide
ccgccuguucagaccacuc

SEQ ID NO: 333443 - RNA, 19 nt, Artificial Sequence
  Description of Artificial Sequence: Synthetic oligonucleotide
caagcaagaucuggucuuu

SEQ ID NO: 333444 - RNA, 19 nt, Artificial Sequence
  Description of Artificial Sequence: Synthetic oligonucleotide
ggcguagcauaaucagcau

SEQ ID NO: 333445 - RNA, 19 nt, Artificial Sequence
  Description of Artificial Sequence: Synthetic oligonucleotide
cagcacggacccgccccgc

SEQ ID NO: 333446 - RNA, 19 nt, Artificial Sequence
  Description of Artificial Sequence: Synthetic oligonucleotide
ccacggguagagacgaccu

SEQ ID NO: 333447 - RNA, 19 nt, Artificial Sequence
  Description of Artificial Sequence: Synthetic oligonucleotide
ggagccaaccacagagaau

SEQ ID NO: 333448 - RNA, 19 nt, Artificial Sequence
  Description of Artificial Sequence: Synthetic oligonucleotide
cagauucaccaaccaccau

SEQ ID NO: 333449 - RNA, 19 nt, Artificial Sequence
  Description of Artificial Sequence: Synthetic oligonucleotide
caccgcucggcagcccaca

SEQ ID NO: 333450 - RNA, 19 nt, Artificial Sequence
  Description of Artificial Sequence: Synthetic oligonucleotide
ccgaagcuugacgccccgc

SEQ ID NO: 333451 - RNA, 19 nt, Artificial Sequence
  Description of Artificial Sequence: Synthetic oligonucleotide
caggcacaauauucaccuu

SEQ ID NO: 333452 - RNA, 19 nt, Artificial Sequence
  Description of Artificial Sequence: Synthetic oligonucleotide
gugugaacucgaaccccuu

SEQ ID NO: 333453 - RNA, 19 nt, Artificial Sequence
  Description of Artificial Sequence: Synthetic oligonucleotide
gccuuucagaacggaaguu

SEQ ID NO: 333454 - RNA, 19 nt, Artificial Sequence
  Description of Artificial Sequence: Synthetic oligonucleotide
cggacaccgcucggcagcc

SEQ ID NO: 333455 - RNA, 19 nt, Artificial Sequence
  Description of Artificial Sequence: Synthetic oligonucleotide
ggacaccgcucggcagccc

SEQ ID NO: 333456 - RNA, 19 nt, Artificial Sequence
  Description of Artificial Sequence: Synthetic oligonucleotide
cuccaaggcguagcauaau

SEQ ID NO: 333457 - RNA, 19 nt, Artificial Sequence
  Description of Artificial Sequence: Synthetic oligonucleotide
cacucucgucaugcaggua

SEQ ID NO: 333458 - RNA, 19 nt, Artificial Sequence
  Description of Artificial Sequence: Synthetic oligonucleotide
cggguagagacgaccucua

SEQ ID NO: 333459 - RNA, 19 nt, Artificial Sequence
  Description of Artificial Sequence: Synthetic oligonucleotide
gccgccuguucagaccacu

SEQ ID NO: 333460 - RNA, 19 nt, Artificial Sequence
  Description of Artificial Sequence: Synthetic oligonucleotide
ccaacauagccaggaguuu

SEQ ID NO: 333461 - RNA, 19 nt, Artificial Sequence
  Description of Artificial Sequence: Synthetic oligonucleotide
cgcuagcacgccggacacc

SEQ ID NO: 333462 - RNA, 19 nt, Artificial Sequence
  Description of Artificial Sequence: Synthetic oligonucleotide
cccgagugucccgcuguca

SEQ ID NO: 333463 - RNA, 19 nt, Artificial Sequence
  Description of Artificial Sequence: Synthetic oligonucleotide
uuuaaacuaacauugaccc

SEQ ID NO: 333464 - RNA, 19 nt, Artificial Sequence
  Description of Artificial Sequence: Synthetic oligonucleotide
aauacuuuaaagcacgagu

SEQ ID NO: 333465 - RNA, 19 nt, Artificial Sequence
  Description of Artificial Sequence: Synthetic oligonucleotide
cuuauuacgauaaggaacc

SEQ ID NO: 333466 - RNA, 19 nt, Artificial Sequence
  Description of Artificial Sequence: Synthetic oligonucleotide
uuuagaugaacccagugcc

SEQ ID NO: 333467 - RNA, 19 nt, Artificial Sequence
  Description of Artificial Sequence: Synthetic oligonucleotide
cuaacauugacccaaacag

SEQ ID NO: 333468 - RNA, 19 nt, Artificial Sequence
  Description of Artificial Sequence: Synthetic oligonucleotide
uuuuggaagaacuaguccc

SEQ ID NO: 333469 - RNA, 19 nt, Artificial Sequence
  Description of Artificial Sequence: Synthetic oligonucleotide
ucuauuuccucucaguugc

SEQ ID NO: 333470 - RNA, 19 nt, Artificial Sequence
  Description of Artificial Sequence: Synthetic oligonucleotide
aacaagucauccgagauac

SEQ ID NO: 333471 - RNA, 19 nt, Artificial Sequence
  Description of Artificial Sequence: Synthetic oligonucleotide
agguauaacaggcucaggc

SEQ ID NO: 333472 - RNA, 19 nt, Artificial Sequence
  Description of Artificial Sequence: Synthetic oligonucleotide
aacauucuauucuacaggu

SEQ ID NO: 333473 - RNA, 19 nt, Artificial Sequence
  Description of Artificial Sequence: Synthetic oligonucleotide
ucuacauuuaggaacuaug

SEQ ID NO: 333474 - RNA, 19 nt, Artificial Sequence
  Description of Artificial Sequence: Synthetic oligonucleotide
uuuaaagauacaucgagua

SEQ ID NO: 333475 - RNA, 19 nt, Artificial Sequence
  Description of Artificial Sequence: Synthetic oligonucleotide
gauaacauagcauggcagc

SEQ ID NO: 333476 - RNA, 19 nt, Artificial Sequence
  Description of Artificial Sequence: Synthetic oligonucleotide
uaauguaauauaauacaac

SEQ ID NO: 333477 - RNA, 19 nt, Artificial Sequence
  Description of Artificial Sequence: Synthetic oligonucleotide
auugcacuacauuuaaagg

SEQ ID NO: 333478 - RNA, 19 nt, Artificial Sequence
  Description of Artificial Sequence: Synthetic oligonucleotide
uaccuuauuacgauaagga

SEQ ID NO: 333479 - RNA, 19 nt, Artificial Sequence
  Description of Artificial Sequence: Synthetic oligonucleotide
auugauaacauagcauggc

SEQ ID NO: 333480 - RNA, 19 nt, Artificial Sequence
  Description of Artificial Sequence: Synthetic oligonucleotide
uuugcauuauuucuacagc

SEQ ID NO: 333481 - RNA, 19 nt, Artificial Sequence
  Description of Artificial Sequence: Synthetic oligonucleotide
ugcucuaggauauuuggag

SEQ ID NO: 333482 - RNA, 19 nt, Artificial Sequence
  Description of Artificial Sequence: Synthetic oligonucleotide
ucuuucacccgauuuaacc

SEQ ID NO: 333483 - RNA, 19 nt, Artificial Sequence
  Description of Artificial Sequence: Synthetic oligonucleotide
acgauaaggaaccucugac

SEQ ID NO: 333484 - RNA, 19 nt, Artificial Sequence
  Description of Artificial Sequence: Synthetic oligonucleotide
uuggcaagccucuauacag

SEQ ID NO: 333485 - RNA, 19 nt, Artificial Sequence
  Description of Artificial Sequence: Synthetic oligonucleotide
uuaaagcacgaguagauuc

SEQ ID NO: 333486 - RNA, 19 nt, Artificial Sequence
  Description of Artificial Sequence: Synthetic oligonucleotide
aagggaauuauuguguucu

SEQ ID NO: 333487 - RNA, 19 nt, Artificial Sequence
  Description of Artificial Sequence: Synthetic oligonucleotide
aacauggcucuauaucagg

SEQ ID NO: 333488 - RNA, 19 nt, Artificial Sequence
  Description of Artificial Sequence: Synthetic oligonucleotide
gauaaggaaccucugacga

SEQ ID NO: 333489 - RNA, 19 nt, Artificial Sequence
  Description of Artificial Sequence: Synthetic oligonucleotide
ugauccauaagcacaccag

SEQ ID NO: 333490 - RNA, 19 nt, Artificial Sequence
  Description of Artificial Sequence: Synthetic oligonucleotide
aaguguccuuaguaggccc

SEQ ID NO: 333491 - RNA, 19 nt, Artificial Sequence
  Description of Artificial Sequence: Synthetic oligonucleotide
uuugcauacucagauugcg

SEQ ID NO: 333492 - RNA, 19 nt, Artificial Sequence
  Description of Artificial Sequence: Synthetic oligonucleotide
uucaaauggaucagugcag

SEQ ID NO: 333493 - RNA, 19 nt, Artificial Sequence
  Description of Artificial Sequence: Synthetic oligonucleotide
cugagagucuaucaguugg

SEQ ID NO: 333494 - RNA, 19 nt, Artificial Sequence
  Description of Artificial Sequence: Synthetic oligonucleotide
ugcacuacauuuaaagguc

SEQ ID NO: 333495 - RNA, 19 nt, Artificial Sequence
  Description of Artificial Sequence: Synthetic oligonucleotide
uucaagcauaagaugcggg

SEQ ID NO: 333496 - RNA, 19 nt, Artificial Sequence
  Description of Artificial Sequence: Synthetic oligonucleotide
ucugacgauucccacaucu

SEQ ID NO: 333497 - RNA, 19 nt, Artificial Sequence
  Description of Artificial Sequence: Synthetic oligonucleotide
uauaauugcccuccacacc

SEQ ID NO: 333498 - RNA, 19 nt, Artificial Sequence
  Description of Artificial Sequence: Synthetic oligonucleotide
cucacuagcuuuauucccg

SEQ ID NO: 333499 - RNA, 19 nt, Artificial Sequence
  Description of Artificial Sequence: Synthetic oligonucleotide
uucagaaugccugacauuc

SEQ ID NO: 333500 - RNA, 19 nt, Artificial Sequence
  Description of Artificial Sequence: Synthetic oligonucleotide
caaacguaagcacagaaca

SEQ ID NO: 333501 - RNA, 19 nt, Artificial Sequence
  Description of Artificial Sequence: Synthetic oligonucleotide
ucaaauggaucagugcagg

SEQ ID NO: 333502 - RNA, 19 nt, Artificial Sequence
  Description of Artificial Sequence: Synthetic oligonucleotide
aagucauccgagauacugc

SEQ ID NO: 333503 - RNA, 19 nt, Artificial Sequence
  Description of Artificial Sequence: Synthetic oligonucleotide
aaccuuuaaacugaagccu

SEQ ID NO: 333504 - RNA, 19 nt, Artificial Sequence
  Description of Artificial Sequence: Synthetic oligonucleotide
ucuaaacuuugaaagguau

SEQ ID NO: 333505 - RNA, 19 nt, Artificial Sequence
  Description of Artificial Sequence: Synthetic oligonucleotide
aaauacuuuaaagcacgag

SEQ ID NO: 333506 - RNA, 19 nt, Artificial Sequence
  Description of Artificial Sequence: Synthetic oligonucleotide
auuacgauaaggaaccucu

SEQ ID NO: 333507 - RNA, 19 nt, Artificial Sequence
  Description of Artificial Sequence: Synthetic oligonucleotide
gauccauaagcacaccagc

SEQ ID NO: 333508 - RNA, 19 nt, Artificial Sequence
  Description of Artificial Sequence: Synthetic oligonucleotide
aguuuagcuauugauaaca

SEQ ID NO: 333509 - RNA, 19 nt, Artificial Sequence
  Description of Artificial Sequence: Synthetic oligonucleotide
gauacugcuaaauggcuga

SEQ ID NO: 333510 - RNA, 19 nt, Artificial Sequence
  Description of Artificial Sequence: Synthetic oligonucleotide
uuuugcauacucagauugc

SEQ ID NO: 333511 - RNA, 19 nt, Artificial Sequence
  Description of Artificial Sequence: Synthetic oligonucleotide
caagccucuauacagauca

SEQ ID NO: 333512 - RNA, 19 nt, Artificial Sequence
  Description of Artificial Sequence: Synthetic oligonucleotide
aagcauaagaugcgggaca

SEQ ID NO: 333513 - RNA, 19 nt, Artificial Sequence
  Description of Artificial Sequence: Synthetic oligonucleotide
uccgagauacugcuaaaug

SEQ ID NO: 333514 - RNA, 19 nt, Artificial Sequence
  Description of Artificial Sequence: Synthetic oligonucleotide
ucauccgagauacugcuaa

SEQ ID NO: 333515 - RNA, 19 nt, Artificial Sequence
  Description of Artificial Sequence: Synthetic oligonucleotide
uuucaagcauaagaugcgg

SEQ ID NO: 333516 - RNA, 19 nt, Artificial Sequence
  Description of Artificial Sequence: Synthetic oligonucleotide
uucuguaucgucuguguac

SEQ ID NO: 333517 - RNA, 19 nt, Artificial Sequence
  Description of Artificial Sequence: Synthetic oligonucleotide
guauaauugcccuccacac

SEQ ID NO: 333518 - RNA, 19 nt, Artificial Sequence
  Description of Artificial Sequence: Synthetic oligonucleotide
acucagauugcguagugca

SEQ ID NO: 333519 - RNA, 19 nt, Artificial Sequence
  Description of Artificial Sequence: Synthetic oligonucleotide
ucucacuagcuuuauuccc

SEQ ID NO: 333520 - RNA, 19 nt, Artificial Sequence
  Description of Artificial Sequence: Synthetic oligonucleotide
uugauccauaagcacacca

SEQ ID NO: 333521 - RNA, 19 nt, Artificial Sequence
  Description of Artificial Sequence: Synthetic oligonucleotide
uacgauaaggaaccucuga

SEQ ID NO: 333522 - RNA, 19 nt, Artificial Sequence
  Description of Artificial Sequence: Synthetic oligonucleotide
cuaccuuauuacgauaagg

SEQ ID NO: 333523 - RNA, 19 nt, Artificial Sequence
  Description of Artificial Sequence: Synthetic oligonucleotide
uagcuauugauaacauagc

SEQ ID NO: 333524 - RNA, 19 nt, Artificial Sequence
  Description of Artificial Sequence: Synthetic oligonucleotide
ccuuauuacgauaaggaac

SEQ ID NO: 333525 - RNA, 19 nt, Artificial Sequence
  Description of Artificial Sequence: Synthetic oligonucleotide
uacagguauaacaggcuca

SEQ ID NO: 333526 - RNA, 19 nt, Artificial Sequence
  Description of Artificial Sequence: Synthetic oligonucleotide
guagcuaggcauccuaaag

SEQ ID NO: 333527 - RNA, 19 nt, Artificial Sequence
  Description of Artificial Sequence: Synthetic oligonucleotide
  modified_base (7)..(7): a, c, u, g, unknown or other
uugggunugugcuuuuggu

SEQ ID NO: 333528 - RNA, 19 nt, Artificial Sequence
  Description of Artificial Sequence: Synthetic oligonucleotide
ccauguuugauguagcuag

SEQ ID NO: 333529 - RNA, 19 nt, Artificial Sequence
  Description of Artificial Sequence: Synthetic oligonucleotide
uuacuaugcucuaggauau

SEQ ID NO: 333530 - RNA, 19 nt, Artificial Sequence
  Description of Artificial Sequence: Synthetic oligonucleotide
auccauaagcacaccagcc

SEQ ID NO: 333531 - RNA, 19 nt, Artificial Sequence
  Description of Artificial Sequence: Synthetic oligonucleotide
agcacgaguagauucucag

SEQ ID NO: 333532 - RNA, 19 nt, Artificial Sequence
  Description of Artificial Sequence: Synthetic oligonucleotide
acgaguagauucucagaac

SEQ ID NO: 333533 - RNA, 19 nt, Artificial Sequence
  Description of Artificial Sequence: Synthetic oligonucleotide
auuguguucuaacuccuga

SEQ ID NO: 333534 - RNA, 19 nt, Artificial Sequence
  Description of Artificial Sequence: Synthetic oligonucleotide
agcaugcuuaaauaaacau

SEQ ID NO: 333535 - RNA, 19 nt, Artificial Sequence
  Description of Artificial Sequence: Synthetic oligonucleotide
gauacaucgaguagggguc

SEQ ID NO: 333536 - RNA, 19 nt, Artificial Sequence
  Description of Artificial Sequence: Synthetic oligonucleotide
gaacugacuuguuagcuuc

SEQ ID NO: 333537 - RNA, 19 nt, Artificial Sequence
  Description of Artificial Sequence: Synthetic oligonucleotide
ugagagucuaucaguuggc

SEQ ID NO: 333538 - RNA, 19 nt, Artificial Sequence
  Description of Artificial Sequence: Synthetic oligonucleotide
uccuaccuuauuacgauaa

SEQ ID NO: 333539 - RNA, 19 nt, Artificial Sequence
  Description of Artificial Sequence: Synthetic oligonucleotide
agcaagauuacaugaguaa

SEQ ID NO: 333540 - RNA, 19 nt, Artificial Sequence
  Description of Artificial Sequence: Synthetic oligonucleotide
aaacauggcucuauaucag

SEQ ID NO: 333541 - RNA, 19 nt, Artificial Sequence
  Description of Artificial Sequence: Synthetic oligonucleotide
  modified_base (6)..(6): a, c, u, g, unknown or other
ugggunugugcuuuuggug

SEQ ID NO: 333542 - RNA, 19 nt, Artificial Sequence
  Description of Artificial Sequence: Synthetic oligonucleotide
gaacuauguggugaucugg

SEQ ID NO: 333543 - RNA, 19 nt, Artificial Sequence
  Description of Artificial Sequence: Synthetic oligonucleotide
uuuccuaccuuauuacgau

SEQ ID NO: 333544 - RNA, 19 nt, Artificial Sequence
  Description of Artificial Sequence: Synthetic oligonucleotide
ucgaguaggggucaagcuc

SEQ ID NO: 333545 - RNA, 19 nt, Artificial Sequence
  Description of Artificial Sequence: Synthetic oligonucleotide
ggaauuauuguguucuaac

SEQ ID NO: 333546 - RNA, 19 nt, Artificial Sequence
  Description of Artificial Sequence: Synthetic oligonucleotide
gaauuauuguguucuaacu

SEQ ID NO: 333547 - RNA, 19 nt, Artificial Sequence
  Description of Artificial Sequence: Synthetic oligonucleotide
agaacuagucccaaggccu

SEQ ID NO: 333548 - RNA, 19 nt, Artificial Sequence
  Description of Artificial Sequence: Synthetic oligonucleotide
ugguagucuuuauuauuag

SEQ ID NO: 333549 - RNA, 19 nt, Artificial Sequence
  Description of Artificial Sequence: Synthetic oligonucleotide
  modified_base (8)..(8): a, c, u, g, unknown or other
guugggunugugcuuuugg

SEQ ID NO: 333550 - RNA, 19 nt, Artificial Sequence
  Description of Artificial Sequence: Synthetic oligonucleotide
aaguggauuguuagcuugg

SEQ ID NO: 333551 - RNA, 19 nt, Artificial Sequence
  Description of Artificial Sequence: Synthetic oligonucleotide
uuuagggagugcagcaacu

SEQ ID NO: 333552 - RNA, 19 nt, Artificial Sequence
  Description of Artificial Sequence: Synthetic oligonucleotide
cccgauuuaaccaacgcag

SEQ ID NO: 333553 - RNA, 19 nt, Artificial Sequence
  Description of Artificial Sequence: Synthetic oligonucleotide
ugcauacucagauugcgua

SEQ ID NO: 333554 - RNA, 19 nt, Artificial Sequence
  Description of Artificial Sequence: Synthetic oligonucleotide
augacaaacguaagcacag

SEQ ID NO: 333555 - RNA, 19 nt, Artificial Sequence
  Description of Artificial Sequence: Synthetic oligonucleotide
aaagcacgaguagauucuc

SEQ ID NO: 333556 - RNA, 19 nt, Artificial Sequence
  Description of Artificial Sequence: Synthetic oligonucleotide
uaagaugcgggacaacauu

SEQ ID NO: 333557 - RNA, 19 nt, Artificial Sequence
  Description of Artificial Sequence: Synthetic oligonucleotide
uauuguguucuaacuccug

SEQ ID NO: 333558 - RNA, 19 nt, Artificial Sequence
  Description of Artificial Sequence: Synthetic oligonucleotide
uguaucgucuguguacuug

SEQ ID NO: 333559 - RNA, 19 nt, Artificial Sequence
  Description of Artificial Sequence: Synthetic oligonucleotide
uguucagguaccuguggca

SEQ ID NO: 333560 - RNA, 19 nt, Artificial Sequence
  Description of Artificial Sequence: Synthetic oligonucleotide
uucucagaacuaaagcuuu

SEQ ID NO: 333561 - RNA, 19 nt, Artificial Sequence
  Description of Artificial Sequence: Synthetic oligonucleotide
acguaagcacagaacauac

SEQ ID NO: 333562 - RNA, 19 nt, Artificial Sequence
  Description of Artificial Sequence: Synthetic oligonucleotide
aacguaagcacagaacaua

SEQ ID NO: 333563 - RNA, 19 nt, Artificial Sequence
  Description of Artificial Sequence: Synthetic oligonucleotide
cuauguggugaucugguuc

SEQ ID NO: 333564 - RNA, 19 nt, Artificial Sequence
  Description of Artificial Sequence: Synthetic oligonucleotide
ccgagauacugcuaaaugg

SEQ ID NO: 333565 - RNA, 19 nt, Artificial Sequence
  Description of Artificial Sequence: Synthetic oligonucleotide
ucuguaucgucuguguacu

SEQ ID NO: 333566 - RNA, 19 nt, Artificial Sequence
  Description of Artificial Sequence: Synthetic oligonucleotide
agcgcaauguucagguacc

SEQ ID NO: 333567 - RNA, 19 nt, Artificial Sequence
  Description of Artificial Sequence: Synthetic oligonucleotide
ucagauugcguagugcagu

SEQ ID NO: 333568 - RNA, 19 nt, Artificial Sequence
  Description of Artificial Sequence: Synthetic oligonucleotide
auuacaugaguaauguaau

SEQ ID NO: 333569 - RNA, 19 nt, Artificial Sequence
  Description of Artificial Sequence: Synthetic oligonucleotide
aacugacuuguuagcuucc

SEQ ID NO: 333570 - RNA, 19 nt, Artificial Sequence
  Description of Artificial Sequence: Synthetic oligonucleotide
ucucuuacaagggaauuau

SEQ ID NO: 333571 - RNA, 19 nt, Artificial Sequence
  Description of Artificial Sequence: Synthetic oligonucleotide
  modified_base (2)..(2): a, c, u, g, unknown or other
unugugcuuuuggugauug

SEQ ID NO: 333572 - RNA, 19 nt, Artificial Sequence
  Description of Artificial Sequence: Synthetic oligonucleotide
uuacgauaaggaaccucug

SEQ ID NO: 333573 - RNA, 19 nt, Artificial Sequence
  Description of Artificial Sequence: Synthetic oligonucleotide
uacugucucucccaauaga

SEQ ID NO: 333574 - RNA, 19 nt, Artificial Sequence
  Description of Artificial Sequence: Synthetic oligonucleotide
acccgauuuaaccaacgca

SEQ ID NO: 333575 - RNA, 19 nt, Artificial Sequence
  Description of Artificial Sequence: Synthetic oligonucleotide
cuuuagggagugcagcaac

SEQ ID NO: 333576 - RNA, 19 nt, Artificial Sequence
  Description of Artificial Sequence: Synthetic oligonucleotide
auacuuuaaagcacgagua

SEQ ID NO: 333577 - RNA, 19 nt, Artificial Sequence
  Description of Artificial Sequence: Synthetic oligonucleotide
uuaguaggcccacaacuuu

SEQ ID NO: 333578 - RNA, 19 nt, Artificial Sequence
  Description of Artificial Sequence: Synthetic oligonucleotide
cuaagguauucagaaugcc

SEQ ID NO: 333579 - RNA, 19 nt, Artificial Sequence
  Description of Artificial Sequence: Synthetic oligonucleotide
guuggcuuauuucacuauc

SEQ ID NO: 333580 - RNA, 19 nt, Artificial Sequence
  Description of Artificial Sequence: Synthetic oligonucleotide
aagauacaucgaguagggg

SEQ ID NO: 333581 - RNA, 19 nt, Artificial Sequence
  Description of Artificial Sequence: Synthetic oligonucleotide
aaacagaugaggccuccua

SEQ ID NO: 333582 - RNA, 19 nt, Artificial Sequence
  Description of Artificial Sequence: Synthetic oligonucleotide
uuguauaauugcccuccac

SEQ ID NO: 333583 - RNA, 19 nt, Artificial Sequence
  Description of Artificial Sequence: Synthetic oligonucleotide
uucagguaccuguggcagg

SEQ ID NO: 333584 - RNA, 19 nt, Artificial Sequence
  Description of Artificial Sequence: Synthetic oligonucleotide
cuagugaccauagccuuag

SEQ ID NO: 333585 - RNA, 19 nt, Artificial Sequence
  Description of Artificial Sequence: Synthetic oligonucleotide
  modified_base (18)..(18): a, c, u, g, unknown or other
uguccgauguguugggunu

SEQ ID NO: 333586 - RNA, 19 nt, Artificial Sequence
  Description of Artificial Sequence: Synthetic oligonucleotide
uguagcuaggcauccuaaa

SEQ ID NO: 333587 - RNA, 19 nt, Artificial Sequence
  Description of Artificial Sequence: Synthetic oligonucleotide
uugcauacucagauugcgu

SEQ ID NO: 333588 - RNA, 19 nt, Artificial Sequence
  Description of Artificial Sequence: Synthetic oligonucleotide
augguuugauccauaagca

SEQ ID NO: 333589 - RNA, 19 nt, Artificial Sequence
  Description of Artificial Sequence: Synthetic oligonucleotide
gauugcguagugcaguucu

SEQ ID NO: 333590 - RNA, 19 nt, Artificial Sequence
  Description of Artificial Sequence: Synthetic oligonucleotide
ucacuagcuuuauucccgc

SEQ ID NO: 333591 - RNA, 19 nt, Artificial Sequence
  Description of Artificial Sequence: Synthetic oligonucleotide
uaguaggcccacaacuuuc

SEQ ID NO: 333592 - RNA, 19 nt, Artificial Sequence
  Description of Artificial Sequence: Synthetic oligonucleotide
uauuacgauaaggaaccuc

SEQ ID NO: 333593 - RNA, 19 nt, Artificial Sequence
  Description of Artificial Sequence: Synthetic oligonucleotide
cucagauugcguagugcag

SEQ ID NO: 333594 - RNA, 19 nt, Artificial Sequence
  Description of Artificial Sequence: Synthetic oligonucleotide
cuuaucccuuacuaugcuc

SEQ ID NO: 333595 - RNA, 19 nt, Artificial Sequence
  Description of Artificial Sequence: Synthetic oligonucleotide
agauacugcuaaauggcug

SEQ ID NO: 333596 - RNA, 19 nt, Artificial Sequence
  Description of Artificial Sequence: Synthetic oligonucleotide
cacgaguagauucucagaa

SEQ ID NO: 333597 - RNA, 19 nt, Artificial Sequence
  Description of Artificial Sequence: Synthetic oligonucleotide
aggaaccucugacgauucc

SEQ ID NO: 333598 - RNA, 19 nt, Artificial Sequence
  Description of Artificial Sequence: Synthetic oligonucleotide
aggcucaggcuuuuaaaga

SEQ ID NO: 333599 - RNA, 19 nt, Artificial Sequence
  Description of Artificial Sequence: Synthetic oligonucleotide
caacaugaggaggaaggcc

SEQ ID NO: 333600 - RNA, 19 nt, Artificial Sequence
  Description of Artificial Sequence: Synthetic oligonucleotide
ggauuguuagcuuggucug

SEQ ID NO: 333601 - RNA, 19 nt, Artificial Sequence
  Description of Artificial Sequence: Synthetic oligonucleotide
  modified_base (5)..(5): a, c, u, g, unknown or other
gggunugugcuuuugguga

SEQ ID NO: 333602 - RNA, 19 nt, Artificial Sequence
  Description of Artificial Sequence: Synthetic oligonucleotide
guagugcaguucuagugac

SEQ ID NO: 333603 - RNA, 19 nt, Artificial Sequence
  Description of Artificial Sequence: Synthetic oligonucleotide
ucuagugaccauagccuua

SEQ ID NO: 333604 - RNA, 19 nt, Artificial Sequence
  Description of Artificial Sequence: Synthetic oligonucleotide
ucucucaguuguguguugc

SEQ ID NO: 333605 - RNA, 19 nt, Artificial Sequence
  Description of Artificial Sequence: Synthetic oligonucleotide
ucuaaacuacuaagguauu

SEQ ID NO: 333606 - RNA, 19 nt, Artificial Sequence
  Description of Artificial Sequence: Synthetic oligonucleotide
uucucuuacaagggaauua

SEQ ID NO: 333607 - RNA, 19 nt, Artificial Sequence
  Description of Artificial Sequence: Synthetic oligonucleotide
uggcaagccucuauacaga

SEQ ID NO: 333608 - RNA, 19 nt, Artificial Sequence
  Description of Artificial Sequence: Synthetic oligonucleotide
uccaugauugugguucuac

SEQ ID NO: 333609 - RNA, 19 nt, Artificial Sequence
  Description of Artificial Sequence: Synthetic oligonucleotide
ucucaguuguguguugcca

SEQ ID NO: 333610 - RNA, 19 nt, Artificial Sequence
  Description of Artificial Sequence: Synthetic oligonucleotide
cacaccucuguaucacugc

SEQ ID NO: 333611 - RNA, 19 nt, Artificial Sequence
  Description of Artificial Sequence: Synthetic oligonucleotide
uugcguagugcaguucuag

SEQ ID NO: 333612 - RNA, 19 nt, Artificial Sequence
  Description of Artificial Sequence: Synthetic oligonucleotide
uccuuaguaggcccacaac

SEQ ID NO: 333613 - RNA, 19 nt, Artificial Sequence
  Description of Artificial Sequence: Synthetic oligonucleotide
uuauucccgcacugugucc

SEQ ID NO: 333614 - RNA, 19 nt, Artificial Sequence
  Description of Artificial Sequence: Synthetic oligonucleotide
auaaggaaccucugacgau

SEQ ID NO: 333615 - RNA, 19 nt, Artificial Sequence
  Description of Artificial Sequence: Synthetic oligonucleotide
gauguagcuaggcauccua

SEQ ID NO: 333616 - RNA, 19 nt, Artificial Sequence
  Description of Artificial Sequence: Synthetic oligonucleotide
uacucagauugcguagugc

SEQ ID NO: 333617 - RNA, 19 nt, Artificial Sequence
  Description of Artificial Sequence: Synthetic oligonucleotide
uggcucuauaucaggcaga

SEQ ID NO: 333618 - RNA, 19 nt, Artificial Sequence
  Description of Artificial Sequence: Synthetic oligonucleotide
aagaugcgggacaacauuu

SEQ ID NO: 333619 - RNA, 19 nt, Artificial Sequence
  Description of Artificial Sequence: Synthetic oligonucleotide
ugcguagugcaguucuagu

SEQ ID NO: 333620 - RNA, 19 nt, Artificial Sequence
  Description of Artificial Sequence: Synthetic oligonucleotide
cuuuaaagcacgaguagau

SEQ ID NO: 333621 - RNA, 19 nt, Artificial Sequence
  Description of Artificial Sequence: Synthetic oligonucleotide
cugacgauucccacaucug

SEQ ID NO: 333622 - RNA, 19 nt, Artificial Sequence
  Description of Artificial Sequence: Synthetic oligonucleotide
uggagcaacugagaagccu

SEQ ID NO: 333623 - RNA, 19 nt, Artificial Sequence
  Description of Artificial Sequence: Synthetic oligonucleotide
guauggucuauuuccucuc

SEQ ID NO: 333624 - RNA, 19 nt, Artificial Sequence
  Description of Artificial Sequence: Synthetic oligonucleotide
ugcguaucuuggaaacuau

SEQ ID NO: 333625 - RNA, 19 nt, Artificial Sequence
  Description of Artificial Sequence: Synthetic oligonucleotide
guuguguguugccagcauc

SEQ ID NO: 333626 - RNA, 19 nt, Artificial Sequence
  Description of Artificial Sequence: Synthetic oligonucleotide
accucugacgauucccaca

SEQ ID NO: 333627 - RNA, 19 nt, Artificial Sequence
  Description of Artificial Sequence: Synthetic oligonucleotide
cacccgauuuaaccaacgc

SEQ ID NO: 333628 - RNA, 19 nt, Artificial Sequence
  Description of Artificial Sequence: Synthetic oligonucleotide
gcuuuauucccgcacugug

SEQ ID NO: 333629 - RNA, 19 nt, Artificial Sequence
  Description of Artificial Sequence: Synthetic oligonucleotide
cucucaguuguguguugcc

SEQ ID NO: 333630 - RNA, 19 nt, Artificial Sequence
  Description of Artificial Sequence: Synthetic oligonucleotide
ggccuccuaacuugaaagg

SEQ ID NO: 333631 - RNA, 19 nt, Artificial Sequence
  Description of Artificial Sequence: Synthetic oligonucleotide
agagucuaucaguuggcuu

SEQ ID NO: 333632 - RNA, 19 nt, Artificial Sequence
  Description of Artificial Sequence: Synthetic oligonucleotide
guucuagugaccauagccu

SEQ ID NO: 333633 - RNA, 19 nt, Artificial Sequence
  Description of Artificial Sequence: Synthetic oligonucleotide
ucuuuagggagugcagcaa

SEQ ID NO: 333634 - RNA, 19 nt, Artificial Sequence
  Description of Artificial Sequence: Synthetic oligonucleotide
ggccaaacaagucauccga

SEQ ID NO: 333635 - RNA, 19 nt, Artificial Sequence
  Description of Artificial Sequence: Synthetic oligonucleotide
  modified_base (16)..(16): a, c, u, g, unknown or other
uccgauguguugggunugu

SEQ ID NO: 333636 - RNA, 19 nt, Artificial Sequence
  Description of Artificial Sequence: Synthetic oligonucleotide
ugacaaacguaagcacaga

SEQ ID NO: 333637 - RNA, 19 nt, Artificial Sequence
  Description of Artificial Sequence: Synthetic oligonucleotide
gcguagugcaguucuagug

SEQ ID NO: 333638 - RNA, 19 nt, Artificial Sequence
  Description of Artificial Sequence: Synthetic oligonucleotide
gaugcgggacaacauuuua

SEQ ID NO: 333639 - RNA, 19 nt, Artificial Sequence
  Description of Artificial Sequence: Synthetic oligonucleotide
uuauuacgauaaggaaccu

SEQ ID NO: 333640 - RNA, 19 nt, Artificial Sequence
  Description of Artificial Sequence: Synthetic oligonucleotide
agcauaagaugcgggacaa

SEQ ID NO: 333641 - RNA, 19 nt, Artificial Sequence
  Description of Artificial Sequence: Synthetic oligonucleotide
gguauggucuauuuccucu

SEQ ID NO: 333642 - RNA, 19 nt, Artificial Sequence
  Description of Artificial Sequence: Synthetic oligonucleotide
ucccaaggccuauguacac

SEQ ID NO: 333643 - RNA, 19 nt, Artificial Sequence
  Description of Artificial Sequence: Synthetic oligonucleotide
ccgauuuaaccaacgcagc

SEQ ID NO: 333644 - RNA, 19 nt, Artificial Sequence
  Description of Artificial Sequence: Synthetic oligonucleotide
cuuuauucccgcacugugu

SEQ ID NO: 333645 - RNA, 19 nt, Artificial Sequence
  Description of Artificial Sequence: Synthetic oligonucleotide
auccuugcaccagagcgca

SEQ ID NO: 333646 - RNA, 19 nt, Artificial Sequence
  Description of Artificial Sequence: Synthetic oligonucleotide
aucccuuacuaugcucuag

SEQ ID NO: 333647 - RNA, 19 nt, Artificial Sequence
  Description of Artificial Sequence: Synthetic oligonucleotide
guauaacaggcucaggcuu

SEQ ID NO: 333648 - RNA, 19 nt, Artificial Sequence
  Description of Artificial Sequence: Synthetic oligonucleotide
uuccuaccuuauuacgaua

SEQ ID NO: 333649 - RNA, 19 nt, Artificial Sequence
  Description of Artificial Sequence: Synthetic oligonucleotide
agauugcguagugcaguuc

SEQ ID NO: 333650 - RNA, 19 nt, Artificial Sequence
  Description of Artificial Sequence: Synthetic oligonucleotide
aguggauuguuagcuuggu

SEQ ID NO: 333651 - RNA, 19 nt, Artificial Sequence
  Description of Artificial Sequence: Synthetic oligonucleotide
aagcacgaguagauucuca

SEQ ID NO: 333652 - RNA, 19 nt, Artificial Sequence
  Description of Artificial Sequence: Synthetic oligonucleotide
aguaggcccacaacuuucu

SEQ ID NO: 333653 - RNA, 19 nt, Artificial Sequence
  Description of Artificial Sequence: Synthetic oligonucleotide
cuaaauggcugagagucua

SEQ ID NO: 333654 - RNA, 19 nt, Artificial Sequence
  Description of Artificial Sequence: Synthetic oligonucleotide
cauugaagcccuuuugcau

SEQ ID NO: 333655 - RNA, 19 nt, Artificial Sequence
  Description of Artificial Sequence: Synthetic oligonucleotide
ugauguagcuaggcauccu

SEQ ID NO: 333656 - RNA, 19 nt, Artificial Sequence
  Description of Artificial Sequence: Synthetic oligonucleotide
augcucuaggauauuugga

SEQ ID NO: 333657 - RNA, 19 nt, Artificial Sequence
  Description of Artificial Sequence: Synthetic oligonucleotide
cuuaguaggcccacaacuu

SEQ ID NO: 333658 - RNA, 19 nt, Artificial Sequence
  Description of Artificial Sequence: Synthetic oligonucleotide
  modified_base (12)..(12): a, c, u, g, unknown or other
auguguugggunugugcuu

SEQ ID NO: 333659 - RNA, 19 nt, Artificial Sequence
  Description of Artificial Sequence: Synthetic oligonucleotide
gguuuuggaacugcguauc

SEQ ID NO: 333660 - RNA, 19 nt, Artificial Sequence
  Description of Artificial Sequence: Synthetic oligonucleotide
aggguauggucuauuuccu

SEQ ID NO: 333661 - RNA, 19 nt, Artificial Sequence
  Description of Artificial Sequence: Synthetic oligonucleotide
ggcucuauaucaggcagac

SEQ ID NO: 333662 - RNA, 19 nt, Artificial Sequence
  Description of Artificial Sequence: Synthetic oligonucleotide
gguagucuuuauuauuagu

SEQ ID NO: 333663 - RNA, 19 nt, Artificial Sequence
  Description of Artificial Sequence: Synthetic oligonucleotide
gauggucgucugaaguguc

SEQ ID NO: 333664 - RNA, 19 nt, Artificial Sequence
  Description of Artificial Sequence: Synthetic oligonucleotide
cugccuucauuguccgaug

SEQ ID NO: 333665 - RNA, 19 nt, Artificial Sequence
  Description of Artificial Sequence: Synthetic oligonucleotide
auacaucgaguagggguca

SEQ ID NO: 333666 - RNA, 19 nt, Artificial Sequence
  Description of Artificial Sequence: Synthetic oligonucleotide
uauacagaucacggccaau

SEQ ID NO: 333667 - RNA, 19 nt, Artificial Sequence
  Description of Artificial Sequence: Synthetic oligonucleotide
guccuuaguaggcccacaa

SEQ ID NO: 333668 - RNA, 19 nt, Artificial Sequence
  Description of Artificial Sequence: Synthetic oligonucleotide
agggaauuauuguguucua

SEQ ID NO: 333669 - RNA, 19 nt, Artificial Sequence
  Description of Artificial Sequence: Synthetic oligonucleotide
gaggcgucucagcuagaca

SEQ ID NO: 333670 - RNA, 19 nt, Artificial Sequence
  Description of Artificial Sequence: Synthetic oligonucleotide
ccuaccuuauuacgauaag

SEQ ID NO: 333671 - RNA, 19 nt, Artificial Sequence
  Description of Artificial Sequence: Synthetic oligonucleotide
uguccuuaguaggcccaca

SEQ ID NO: 333672 - RNA, 19 nt, Artificial Sequence
  Description of Artificial Sequence: Synthetic oligonucleotide
caguuggcuuauuucacua

SEQ ID NO: 333673 - RNA, 19 nt, Artificial Sequence
  Description of Artificial Sequence: Synthetic oligonucleotide
ccucuuuagggagugcagc

SEQ ID NO: 333674 - RNA, 19 nt, Artificial Sequence
  Description of Artificial Sequence: Synthetic oligonucleotide
agucuaucaguuggcuuau

SEQ ID NO: 333675 - RNA, 19 nt, Artificial Sequence
  Description of Artificial Sequence: Synthetic oligonucleotide
aacuagucccaaggccuau

SEQ ID NO: 333676 - RNA, 19 nt, Artificial Sequence
  Description of Artificial Sequence: Synthetic oligonucleotide
cauagcauggcagcaagau

SEQ ID NO: 333677 - RNA, 19 nt, Artificial Sequence
  Description of Artificial Sequence: Synthetic oligonucleotide
cagguauaacaggcucagg

SEQ ID NO: 333678 - RNA, 19 nt, Artificial Sequence
  Description of Artificial Sequence: Synthetic oligonucleotide
cagaaugccugacauuccu

SEQ ID NO: 333679 - RNA, 19 nt, Artificial Sequence
  Description of Artificial Sequence: Synthetic oligonucleotide
gccaaacaagucauccgag

SEQ ID NO: 333680 - RNA, 19 nt, Artificial Sequence
  Description of Artificial Sequence: Synthetic oligonucleotide
ccuuaguaggcccacaacu

SEQ ID NO: 333681 - RNA, 19 nt, Artificial Sequence
  Description of Artificial Sequence: Synthetic oligonucleotide
auguagcuaggcauccuaa

SEQ ID NO: 333682 - RNA, 19 nt, Artificial Sequence
  Description of Artificial Sequence: Synthetic oligonucleotide
gagagucuaucaguuggcu

SEQ ID NO: 333683 - RNA, 19 nt, Artificial Sequence
  Description of Artificial Sequence: Synthetic oligonucleotide
gucucagcuagacacuuuu

SEQ ID NO: 333684 - RNA, 19 nt, Artificial Sequence
  Description of Artificial Sequence: Synthetic oligonucleotide
gcuagacacuuuucuugac

SEQ ID NO: 333685 - RNA, 19 nt, Artificial Sequence
  Description of Artificial Sequence: Synthetic oligonucleotide
gaacuagucccaaggccua

SEQ ID NO: 333686 - RNA, 19 nt, Artificial Sequence
  Description of Artificial Sequence: Synthetic oligonucleotide
acauucuauucuacaggua

SEQ ID NO: 333687 - RNA, 19 nt, Artificial Sequence
  Description of Artificial Sequence: Synthetic oligonucleotide
uguccucguuuggaaggac

SEQ ID NO: 333688 - RNA, 19 nt, Artificial Sequence
  Description of Artificial Sequence: Synthetic oligonucleotide
augaaccaaucaccauguu

SEQ ID NO: 333689 - RNA, 19 nt, Artificial Sequence
  Description of Artificial Sequence: Synthetic oligonucleotide
cacugaaacuuccaugguu

SEQ ID NO: 333690 - RNA, 19 nt, Artificial Sequence
  Description of Artificial Sequence: Synthetic oligonucleotide
agaugcgggacaacauuuu

SEQ ID NO: 333691 - RNA, 19 nt, Artificial Sequence
  Description of Artificial Sequence: Synthetic oligonucleotide
gccuccuaacuugaaagga

SEQ ID NO: 333692 - RNA, 19 nt, Artificial Sequence
  Description of Artificial Sequence: Synthetic oligonucleotide
gggaauuauuguguucuaa

SEQ ID NO: 333693 - RNA, 19 nt, Artificial Sequence
  Description of Artificial Sequence: Synthetic oligonucleotide
guucuaacuccugaucaau

SEQ ID NO: 333694 - RNA, 19 nt, Artificial Sequence
  Description of Artificial Sequence: Synthetic oligonucleotide
ccagagcgcaauguucagg

SEQ ID NO: 333695 - RNA, 19 nt, Artificial Sequence
  Description of Artificial Sequence: Synthetic oligonucleotide
ccaugauugugguucuaca

SEQ ID NO: 333696 - RNA, 19 nt, Artificial Sequence
  Description of Artificial Sequence: Synthetic oligonucleotide
cgauuuaaccaacgcagca

SEQ ID NO: 333697 - RNA, 19 nt, Artificial Sequence
  Description of Artificial Sequence: Synthetic oligonucleotide
gcucuguaguggaucauca

SEQ ID NO: 333698 - RNA, 19 nt, Artificial Sequence
  Description of Artificial Sequence: Synthetic oligonucleotide
guguccuuaguaggcccac

SEQ ID NO: 333699 - RNA, 19 nt, Artificial Sequence
  Description of Artificial Sequence: Synthetic oligonucleotide
cauccgagauacugcuaaa

SEQ ID NO: 333700 - RNA, 19 nt, Artificial Sequence
  Description of Artificial Sequence: Synthetic oligonucleotide
  modified_base (17)..(17): a, c, u, g, unknown or other
guccgauguguugggunug

SEQ ID NO: 333701 - RNA, 19 nt, Artificial Sequence
  Description of Artificial Sequence: Synthetic oligonucleotide
cuucauuguccgauguguu

SEQ ID NO: 333702 - RNA, 19 nt, Artificial Sequence
  Description of Artificial Sequence: Synthetic oligonucleotide
  modified_base (4)..(4): a, c, u, g, unknown or other
ggunugugcuuuuggugau

SEQ ID NO: 333703 - RNA, 19 nt, Artificial Sequence
  Description of Artificial Sequence: Synthetic oligonucleotide
cgaguagauucucagaacu

SEQ ID NO: 333704 - RNA, 19 nt, Artificial Sequence
  Description of Artificial Sequence: Synthetic oligonucleotide
aguaggggucaagcucaca

SEQ ID NO: 333705 - RNA, 19 nt, Artificial Sequence
  Description of Artificial Sequence: Synthetic oligonucleotide
cugcuaaauggcugagagu

SEQ ID NO: 333706 - RNA, 19 nt, Artificial Sequence
  Description of Artificial Sequence: Synthetic oligonucleotide
cuguggcaggcuucuaugu

SEQ ID NO: 333707 - RNA, 19 nt, Artificial Sequence
  Description of Artificial Sequence: Synthetic oligonucleotide
auugcguagugcaguucua

SEQ ID NO: 333708 - RNA, 19 nt, Artificial Sequence
  Description of Artificial Sequence: Synthetic oligonucleotide
cuaaugccacagagaugaa

SEQ ID NO: 333709 - RNA, 19 nt, Artificial Sequence
  Description of Artificial Sequence: Synthetic oligonucleotide
cucugacgauucccacauc

SEQ ID NO: 333710 - RNA, 19 nt, Artificial Sequence
  Description of Artificial Sequence: Synthetic oligonucleotide
cagauugcguagugcaguu

SEQ ID NO: 333711 - RNA, 19 nt, Artificial Sequence
  Description of Artificial Sequence: Synthetic oligonucleotide
gcgggacaacauuuuagcu

SEQ ID NO: 333712 - RNA, 19 nt, Artificial Sequence
  Description of Artificial Sequence: Synthetic oligonucleotide
aagaggcgucucagcuaga

SEQ ID NO: 333713 - RNA, 19 nt, Artificial Sequence
  Description of Artificial Sequence: Synthetic oligonucleotide
cguaagcacagaacauaca

SEQ ID NO: 333714 - RNA, 19 nt, Artificial Sequence
  Description of Artificial Sequence: Synthetic oligonucleotide
cucguuuggaaggacuguu

SEQ ID NO: 333715 - RNA, 19 nt, Artificial Sequence
  Description of Artificial Sequence: Synthetic oligonucleotide
ccaauacaccaggcuaaug

SEQ ID NO: 333716 - RNA, 19 nt, Artificial Sequence
  Description of Artificial Sequence: Synthetic oligonucleotide
cacggccaauuucuuuaaa

SEQ ID NO: 333717 - RNA, 19 nt, Artificial Sequence
  Description of Artificial Sequence: Synthetic oligonucleotide
gucauccgagauacugcua

SEQ ID NO: 333718 - RNA, 19 nt, Artificial Sequence
  Description of Artificial Sequence: Synthetic oligonucleotide
ccuaacuugaaaggauccu

SEQ ID NO: 333719 - RNA, 19 nt, Artificial Sequence
  Description of Artificial Sequence: Synthetic oligonucleotide
ccucugacgauucccacau

SEQ ID NO: 333720 - RNA, 19 nt, Artificial Sequence
  Description of Artificial Sequence: Synthetic oligonucleotide
  modified_base (10)..(10): a, c, u, g, unknown or other
guguugggunugugcuuuu

SEQ ID NO: 333721 - RNA, 19 nt, Artificial Sequence
  Description of Artificial Sequence: Synthetic oligonucleotide
  modified_base (3)..(3): a, c, u, g, unknown or other
gunugugcuuuuggugauu

SEQ ID NO: 333722 - RNA, 19 nt, Artificial Sequence
  Description of Artificial Sequence: Synthetic oligonucleotide
cccacaucugauggucguc

SEQ ID NO: 333723 - RNA, 19 nt, Artificial Sequence
  Description of Artificial Sequence: Synthetic oligonucleotide
ccacaucugauggucgucu

SEQ ID NO: 333724 - RNA, 19 nt, Artificial Sequence
  Description of Artificial Sequence: Synthetic oligonucleotide
cuguaucgucuguguacuu

SEQ ID NO: 333725 - RNA, 19 nt, Artificial Sequence
  Description of Artificial Sequence: Synthetic oligonucleotide
caggggcuuccagucuaaa

SEQ ID NO: 333726 - RNA, 19 nt, Artificial Sequence
  Description of Artificial Sequence: Synthetic oligonucleotide
gcucuauaucaggcagacu

SEQ ID NO: 333727 - RNA, 19 nt, Artificial Sequence
  Description of Artificial Sequence: Synthetic oligonucleotide
gcgucucagcuagacacuu

SEQ ID NO: 333728 - RNA, 19 nt, Artificial Sequence
  Description of Artificial Sequence: Synthetic oligonucleotide
gcgcaauguucagguaccu

SEQ ID NO: 333729 - RNA, 19 nt, Artificial Sequence
  Description of Artificial Sequence: Synthetic oligonucleotide
cugcucuguaguggaucau

SEQ ID NO: 333730 - RNA, 19 nt, Artificial Sequence
  Description of Artificial Sequence: Synthetic oligonucleotide
gucuaucaguuggcuuauu

SEQ ID NO: 333731 - RNA, 19 nt, Artificial Sequence
  Description of Artificial Sequence: Synthetic oligonucleotide
aaaacggaaguauucacgg

SEQ ID NO: 333732 - RNA, 19 nt, Artificial Sequence
  Description of Artificial Sequence: Synthetic oligonucleotide
aacggaaguauucacggcc

SEQ ID NO: 333733 - RNA, 19 nt, Artificial Sequence
  Description of Artificial Sequence: Synthetic oligonucleotide
uuauucaugauucuacacc

SEQ ID NO: 333734 - RNA, 19 nt, Artificial Sequence
  Description of Artificial Sequence: Synthetic oligonucleotide
ugcaucaucugcaacaccg

SEQ ID NO: 333735 - RNA, 19 nt, Artificial Sequence
  Description of Artificial Sequence: Synthetic oligonucleotide
uaaaacggaaguauucacg

SEQ ID NO: 333736 - RNA, 19 nt, Artificial Sequence
  Description of Artificial Sequence: Synthetic oligonucleotide
ucucuugugccacauagcc

SEQ ID NO: 333737 - RNA, 19 nt, Artificial Sequence
  Description of Artificial Sequence: Synthetic oligonucleotide
gauagggccuuguagagcc

SEQ ID NO: 333738 - RNA, 19 nt, Artificial Sequence
  Description of Artificial Sequence: Synthetic oligonucleotide
aaacggaaguauucacggc

SEQ ID NO: 333739 - RNA, 19 nt, Artificial Sequence
  Description of Artificial Sequence: Synthetic oligonucleotide
ugaugggucuccuugguag

SEQ ID NO: 333740 - RNA, 19 nt, Artificial Sequence
  Description of Artificial Sequence: Synthetic oligonucleotide
gacgucuccacgaauaagg

SEQ ID NO: 333741 - RNA, 19 nt, Artificial Sequence
  Description of Artificial Sequence: Synthetic oligonucleotide
gaugaagggugccaggucc

SEQ ID NO: 333742 - RNA, 19 nt, Artificial Sequence
  Description of Artificial Sequence: Synthetic oligonucleotide
ucuucaagagugauagggc

SEQ ID NO: 333743 - RNA, 19 nt, Artificial Sequence
  Description of Artificial Sequence: Synthetic oligonucleotide
uguuugauuagcagaguga

SEQ ID NO: 333744 - RNA, 19 nt, Artificial Sequence
  Description of Artificial Sequence: Synthetic oligonucleotide
uuuagacacuggaugaucu

SEQ ID NO: 333745 - RNA, 19 nt, Artificial Sequence
  Description of Artificial Sequence: Synthetic oligonucleotide
uguagagccgcuuaaguau

SEQ ID NO: 333746 - RNA, 19 nt, Artificial Sequence
  Description of Artificial Sequence: Synthetic oligonucleotide
uaacuuggaagucuucaug

SEQ ID NO: 333747 - RNA, 19 nt, Artificial Sequence
  Description of Artificial Sequence: Synthetic oligonucleotide
auacaggucacaccggcuc

SEQ ID NO: 333748 - RNA, 19 nt, Artificial Sequence
  Description of Artificial Sequence: Synthetic oligonucleotide
aguauauuggucucuucca

SEQ ID NO: 333749 - RNA, 19 nt, Artificial Sequence
  Description of Artificial Sequence: Synthetic oligonucleotide
aaacguuccugugugguag

SEQ ID NO: 333750 - RNA, 19 nt, Artificial Sequence
  Description of Artificial Sequence: Synthetic oligonucleotide
gccaccaacacuaaaacgg

SEQ ID NO: 333751 - RNA, 19 nt, Artificial Sequence
  Description of Artificial Sequence: Synthetic oligonucleotide
ugaugugaauccuucugug

SEQ ID NO: 333752 - RNA, 19 nt, Artificial Sequence
  Description of Artificial Sequence: Synthetic oligonucleotide
gagugauagggccuuguag

SEQ ID NO: 333753 - RNA, 19 nt, Artificial Sequence
  Description of Artificial Sequence: Synthetic oligonucleotide
acuaaaacggaaguauuca

SEQ ID NO: 333754 - RNA, 19 nt, Artificial Sequence
  Description of Artificial Sequence: Synthetic oligonucleotide
ucuuuaggggugucagugg

SEQ ID NO: 333755 - RNA, 19 nt, Artificial Sequence
  Description of Artificial Sequence: Synthetic oligonucleotide
cuaaaacggaaguauucac

SEQ ID NO: 333756 - RNA, 19 nt, Artificial Sequence
  Description of Artificial Sequence: Synthetic oligonucleotide
agaggagugguugucuagc

SEQ ID NO: 333757 - RNA, 19 nt, Artificial Sequence
  Description of Artificial Sequence: Synthetic oligonucleotide
uucacaaucuccgcgguca

SEQ ID NO: 333758 - RNA, 19 nt, Artificial Sequence
  Description of Artificial Sequence: Synthetic oligonucleotide
gcaaugauaucccgaaugg

SEQ ID NO: 333759 - RNA, 19 nt, Artificial Sequence
  Description of Artificial Sequence: Synthetic oligonucleotide
ugugaauccuucuguggcc

SEQ ID NO: 333760 - RNA, 19 nt, Artificial Sequence
  Description of Artificial Sequence: Synthetic oligonucleotide
agcgcggucacgauggugc

SEQ ID NO: 333761 - RNA, 19 nt, Artificial Sequence
  Description of Artificial Sequence: Synthetic oligonucleotide
accgucaggcaccaccucc

SEQ ID NO: 333762 - RNA, 19 nt, Artificial Sequence
  Description of Artificial Sequence: Synthetic oligonucleotide
agcucaugggacucagccc

SEQ ID NO: 333763 - RNA, 19 nt, Artificial Sequence
  Description of Artificial Sequence: Synthetic oligonucleotide
uuggccgugcagaugaaca

SEQ ID NO: 333764 - RNA, 19 nt, Artificial Sequence
  Description of Artificial Sequence: Synthetic oligonucleotide
uuaaagacgucuccacgaa

SEQ ID NO: 333765 - RNA, 19 nt, Artificial Sequence
  Description of Artificial Sequence: Synthetic oligonucleotide
caucaaucagcaccagugg

SEQ ID NO: 333766 - RNA, 19 nt, Artificial Sequence
  Description of Artificial Sequence: Synthetic oligonucleotide
agcuagagacagcagcgcg

SEQ ID NO: 333767 - RNA, 19 nt, Artificial Sequence
  Description of Artificial Sequence: Synthetic oligonucleotide
cacuaaaacggaaguauuc

SEQ ID NO: 333768 - RNA, 19 nt, Artificial Sequence
  Description of Artificial Sequence: Synthetic oligonucleotide
ugcgaugcuggucuugccc

SEQ ID NO: 333769 - RNA, 19 nt, Artificial Sequence
  Description of Artificial Sequence: Synthetic oligonucleotide
augaucuuaagcuguuccu

SEQ ID NO: 333770 - RNA, 19 nt, Artificial Sequence
  Description of Artificial Sequence: Synthetic oligonucleotide
gagccgcuuaaguauauug

SEQ ID NO: 333771 - RNA, 19 nt, Artificial Sequence
  Description of Artificial Sequence: Synthetic oligonucleotide
acgaauaagguggaaccuc

SEQ ID NO: 333772 - RNA, 19 nt, Artificial Sequence
  Description of Artificial Sequence: Synthetic oligonucleotide
cagcucaugggacucagcc

SEQ ID NO: 333773 - RNA, 19 nt, Artificial Sequence
  Description of Artificial Sequence: Synthetic oligonucleotide
guuggcguucugcucaggg

SEQ ID NO: 333774 - RNA, 19 nt, Artificial Sequence
  Description of Artificial Sequence: Synthetic oligonucleotide
ugauuuucagggagcuccc

SEQ ID NO: 333775 - RNA, 19 nt, Artificial Sequence
  Description of Artificial Sequence: Synthetic oligonucleotide
ugcuuauucucugacucug

SEQ ID NO: 333776 - RNA, 19 nt, Artificial Sequence
  Description of Artificial Sequence: Synthetic oligonucleotide
accaacacuaaaacggaag

SEQ ID NO: 333777 - RNA, 19 nt, Artificial Sequence
  Description of Artificial Sequence: Synthetic oligonucleotide
aauggagcgugcgaugcug

SEQ ID NO: 333778 - RNA, 19 nt, Artificial Sequence
  Description of Artificial Sequence: Synthetic oligonucleotide
gaugucgcgguagugcucc

SEQ ID NO: 333779 - RNA, 19 nt, Artificial Sequence
  Description of Artificial Sequence: Synthetic oligonucleotide
auuagcagagugagcacgg

SEQ ID NO: 333780 - RNA, 19 nt, Artificial Sequence
  Description of Artificial Sequence: Synthetic oligonucleotide
aaagacgucuccacgaaua

SEQ ID NO: 333781 - RNA, 19 nt, Artificial Sequence
  Description of Artificial Sequence: Synthetic oligonucleotide
caugaggaccgucuuuagg

SEQ ID NO: 333782 - RNA, 19 nt, Artificial Sequence
  Description of Artificial Sequence: Synthetic oligonucleotide
augcguuccacagugaaga

SEQ ID NO: 333783 - RNA, 19 nt, Artificial Sequence
  Description of Artificial Sequence: Synthetic oligonucleotide
uuucgcacuccacucuccc

SEQ ID NO: 333784 - RNA, 19 nt, Artificial Sequence
  Description of Artificial Sequence: Synthetic oligonucleotide
ucagggcaaugauaucccg

SEQ ID NO: 333785 - RNA, 19 nt, Artificial Sequence
  Description of Artificial Sequence: Synthetic oligonucleotide
uccacgaauaagguggaac

SEQ ID NO: 333786 - RNA, 19 nt, Artificial Sequence
  Description of Artificial Sequence: Synthetic oligonucleotide
uuaaugccacccacgggca

SEQ ID NO: 333787 - RNA, 19 nt, Artificial Sequence
  Description of Artificial Sequence: Synthetic oligonucleotide
caugccaccaacacuaaaa

SEQ ID NO: 333788 - RNA, 19 nt, Artificial Sequence
  Description of Artificial Sequence: Synthetic oligonucleotide
agccgcuuaaguauauugg

SEQ ID NO: 333789 - RNA, 19 nt, Artificial Sequence
  Description of Artificial Sequence: Synthetic oligonucleotide
agugcagcgcccaugucac

SEQ ID NO: 333790 - RNA, 19 nt, Artificial Sequence
  Description of Artificial Sequence: Synthetic oligonucleotide
caugccauagugguccucc

SEQ ID NO: 333791 - RNA, 19 nt, Artificial Sequence
  Description of Artificial Sequence: Synthetic oligonucleotide
auuacaugcuuagggacca

SEQ ID NO: 333792 - RNA, 19 nt, Artificial Sequence
  Description of Artificial Sequence: Synthetic oligonucleotide
uugaacucagaggaguggu

SEQ ID NO: 333793 - RNA, 19 nt, Artificial Sequence
  Description of Artificial Sequence: Synthetic oligonucleotide
agcuuugcgcagcaccuuc

SEQ ID NO: 333794 - RNA, 19 nt, Artificial Sequence
  Description of Artificial Sequence: Synthetic oligonucleotide
cacucugccggccccaugg

SEQ ID NO: 333795 - RNA, 19 nt, Artificial Sequence
  Description of Artificial Sequence: Synthetic oligonucleotide
guagguacgccugugcccc

SEQ ID NO: 333796 - RNA, 19 nt, Artificial Sequence
  Description of Artificial Sequence: Synthetic oligonucleotide
uuaaguauauuggucucuu

SEQ ID NO: 333797 - RNA, 19 nt, Artificial Sequence
  Description of Artificial Sequence: Synthetic oligonucleotide
ccacgaauaagguggaacc

SEQ ID NO: 333798 - RNA, 19 nt, Artificial Sequence
  Description of Artificial Sequence: Synthetic oligonucleotide
gcucaugggacucagcccc

SEQ ID NO: 333799 - RNA, 19 nt, Artificial Sequence
  Description of Artificial Sequence: Synthetic oligonucleotide
cacucacuaucuuguaggc

SEQ ID NO: 333800 - RNA, 19 nt, Artificial Sequence
  Description of Artificial Sequence: Synthetic oligonucleotide
cucaggcacgugcaggugg

SEQ ID NO: 333801 - RNA, 19 nt, Artificial Sequence
  Description of Artificial Sequence: Synthetic oligonucleotide
caugcuuagggaccacaag

SEQ ID NO: 333802 - RNA, 19 nt, Artificial Sequence
  Description of Artificial Sequence: Synthetic oligonucleotide
guugucuagcagugcaagc

SEQ ID NO: 333803 - RNA, 19 nt, Artificial Sequence
  Description of Artificial Sequence: Synthetic oligonucleotide
caugaccacgccagcaggc

SEQ ID NO: 333804 - RNA, 19 nt, Artificial Sequence
  Description of Artificial Sequence: Synthetic oligonucleotide
agcagcgcggucacgaugg

SEQ ID NO: 333805 - RNA, 19 nt, Artificial Sequence
  Description of Artificial Sequence: Synthetic oligonucleotide
ugugacaaucaugcgcagc

SEQ ID NO: 333806 - RNA, 19 nt, Artificial Sequence
  Description of Artificial Sequence: Synthetic oligonucleotide
ggcgugacacuguacaugc

SEQ ID NO: 333807 - RNA, 19 nt, Artificial Sequence
  Description of Artificial Sequence: Synthetic oligonucleotide
gaccgguuuccccacgaag

SEQ ID NO: 333808 - RNA, 19 nt, Artificial Sequence
  Description of Artificial Sequence: Synthetic oligonucleotide
guagugcuccacgaagugg

SEQ ID NO: 333809 - RNA, 19 nt, Artificial Sequence
  Description of Artificial Sequence: Synthetic oligonucleotide
ugccacauagccugacaca

SEQ ID NO: 333810 - RNA, 19 nt, Artificial Sequence
  Description of Artificial Sequence: Synthetic oligonucleotide
aagaccgguuuccccacga

SEQ ID NO: 333811 - RNA, 19 nt, Artificial Sequence
  Description of Artificial Sequence: Synthetic oligonucleotide
gccugugacaaucaugcgc

SEQ ID NO: 333812 - RNA, 19 nt, Artificial Sequence
  Description of Artificial Sequence: Synthetic oligonucleotide
acgauggugcagccugcgc

SEQ ID NO: 333813 - RNA, 19 nt, Artificial Sequence
  Description of Artificial Sequence: Synthetic oligonucleotide
uucucggccggcaggacaa

SEQ ID NO: 333814 - RNA, 19 nt, Artificial Sequence
  Description of Artificial Sequence: Synthetic oligonucleotide
cuagggccguccuugggag

SEQ ID NO: 333815 - RNA, 19 nt, Artificial Sequence
  Description of Artificial Sequence: Synthetic oligonucleotide
ugucuagcagugcaagcuu

SEQ ID NO: 333816 - RNA, 19 nt, Artificial Sequence
  Description of Artificial Sequence: Synthetic oligonucleotide
acaugcguuccacagugaa

SEQ ID NO: 333817 - RNA, 19 nt, Artificial Sequence
  Description of Artificial Sequence: Synthetic oligonucleotide
ugggcccuagucaagucaa

SEQ ID NO: 333818 - RNA, 19 nt, Artificial Sequence
  Description of Artificial Sequence: Synthetic oligonucleotide
ucugccggccccaugggau

SEQ ID NO: 333819 - RNA, 19 nt, Artificial Sequence
  Description of Artificial Sequence: Synthetic oligonucleotide
uaaagacgucuccacgaau

SEQ ID NO: 333820 - RNA, 19 nt, Artificial Sequence
  Description of Artificial Sequence: Synthetic oligonucleotide
aggacacgcuucuucacgu

SEQ ID NO: 333821 - RNA, 19 nt, Artificial Sequence
  Description of Artificial Sequence: Synthetic oligonucleotide
gucccagagcuagagacag

SEQ ID NO: 333822 - RNA, 19 nt, Artificial Sequence
  Description of Artificial Sequence: Synthetic oligonucleotide
aagggugccagguccgcaa

SEQ ID NO: 333823 - RNA, 19 nt, Artificial Sequence
  Description of Artificial Sequence: Synthetic oligonucleotide
ccuuaaagacgucuccacg

SEQ ID NO: 333824 - RNA, 19 nt, Artificial Sequence
  Description of Artificial Sequence: Synthetic oligonucleotide
agaggguucagggcaauga

SEQ ID NO: 333825 - RNA, 19 nt, Artificial Sequence
  Description of Artificial Sequence: Synthetic oligonucleotide
cagguuucgcacuccacuc

SEQ ID NO: 333826 - RNA, 19 nt, Artificial Sequence
  Description of Artificial Sequence: Synthetic oligonucleotide
gccuguuaccucuaggcug

SEQ ID NO: 333827 - RNA, 19 nt, Artificial Sequence
  Description of Artificial Sequence: Synthetic oligonucleotide
uguaggcagcuuugcgcag

SEQ ID NO: 333828 - RNA, 19 nt, Artificial Sequence
  Description of Artificial Sequence: Synthetic oligonucleotide
aucccgaauggucuucaca

SEQ ID NO: 333829 - RNA, 19 nt, Artificial Sequence
  Description of Artificial Sequence: Synthetic oligonucleotide
ucggccggcaggacaauac

SEQ ID NO: 333830 - RNA, 19 nt, Artificial Sequence
  Description of Artificial Sequence: Synthetic oligonucleotide
uuccuccuagacuucugcu

SEQ ID NO: 333831 - RNA, 19 nt, Artificial Sequence
  Description of Artificial Sequence: Synthetic oligonucleotide
cuaccucucggcccaggcg

SEQ ID NO: 333832 - RNA, 19 nt, Artificial Sequence
  Description of Artificial Sequence: Synthetic oligonucleotide
ugaagaccgguuuccccac

SEQ ID NO: 333833 - RNA, 19 nt, Artificial Sequence
  Description of Artificial Sequence: Synthetic oligonucleotide
uuggcguucugcucagggu

SEQ ID NO: 333834 - RNA, 19 nt, Artificial Sequence
  Description of Artificial Sequence: Synthetic oligonucleotide
ugguguccgugacauuggc

SEQ ID NO: 333835 - RNA, 19 nt, Artificial Sequence
  Description of Artificial Sequence: Synthetic oligonucleotide
uucagggagcuccccgccc

SEQ ID NO: 333836 - RNA, 19 nt, Artificial Sequence
  Description of Artificial Sequence: Synthetic oligonucleotide
acaauacaggucacaccgg

SEQ ID NO: 333837 - RNA, 19 nt, Artificial Sequence
  Description of Artificial Sequence: Synthetic oligonucleotide
gaagaccgguuuccccacg

SEQ ID NO: 333838 - RNA, 19 nt, Artificial Sequence
  Description of Artificial Sequence: Synthetic oligonucleotide
augaccacgccagcaggcg

SEQ ID NO: 333839 - RNA, 19 nt, Artificial Sequence
  Description of Artificial Sequence: Synthetic oligonucleotide
gggguuguccacuacccgc

SEQ ID NO: 333840 - RNA, 19 nt, Artificial Sequence
  Description of Artificial Sequence: Synthetic oligonucleotide
accgguuuccccacgaagu

SEQ ID NO: 333841 - RNA, 19 nt, Artificial Sequence
  Description of Artificial Sequence: Synthetic oligonucleotide
ugguugucuagcagugcaa

SEQ ID NO: 333842 - RNA, 19 nt, Artificial Sequence
  Description of Artificial Sequence: Synthetic oligonucleotide
ugugccccuugauuucagc

SEQ ID NO: 333843 - RNA, 19 nt, Artificial Sequence
  Description of Artificial Sequence: Synthetic oligonucleotide
acgagcaauggagcgugcg

SEQ ID NO: 333844 - RNA, 19 nt, Artificial Sequence
  Description of Artificial Sequence: Synthetic oligonucleotide
ucuaggcugcccuccuugu

SEQ ID NO: 333845 - RNA, 19 nt, Artificial Sequence
  Description of Artificial Sequence: Synthetic oligonucleotide
agguuucgcacuccacucu

SEQ ID NO: 333846 - RNA, 19 nt, Artificial Sequence
  Description of Artificial Sequence: Synthetic oligonucleotide
cacguagguacgccugugc

SEQ ID NO: 333847 - RNA, 19 nt, Artificial Sequence
  Description of Artificial Sequence: Synthetic oligonucleotide
gaggagugguugucuagca

SEQ ID NO: 333848 - RNA, 19 nt, Artificial Sequence
  Description of Artificial Sequence: Synthetic oligonucleotide
gaccucgaggcccuccgug

SEQ ID NO: 333849 - RNA, 19 nt, Artificial Sequence
  Description of Artificial Sequence: Synthetic oligonucleotide
gggaccgucaggcaccacc

SEQ ID NO: 333850 - RNA, 19 nt, Artificial Sequence
  Description of Artificial Sequence: Synthetic oligonucleotide
cuggccuguuaccucuagg

SEQ ID NO: 333851 - RNA, 19 nt, Artificial Sequence
  Description of Artificial Sequence: Synthetic oligonucleotide
cugugcgucugcuugaucu

SEQ ID NO: 333852 - RNA, 19 nt, Artificial Sequence
  Description of Artificial Sequence: Synthetic oligonucleotide
gcuuaaguauauuggucuc

SEQ ID NO: 333853 - RNA, 19 nt, Artificial Sequence
  Description of Artificial Sequence: Synthetic oligonucleotide
aggcgugacacuguacaug

SEQ ID NO: 333854 - RNA, 19 nt, Artificial Sequence
  Description of Artificial Sequence: Synthetic oligonucleotide
gguguaggcgaugcgggcg

SEQ ID NO: 333855 - RNA, 19 nt, Artificial Sequence
  Description of Artificial Sequence: Synthetic oligonucleotide
gcaggcgugacacuguaca

SEQ ID NO: 333856 - RNA, 19 nt, Artificial Sequence
  Description of Artificial Sequence: Synthetic oligonucleotide
gauaucccgaauggucuuc

SEQ ID NO: 333857 - RNA, 19 nt, Artificial Sequence
  Description of Artificial Sequence: Synthetic oligonucleotide
ucggccaaucuuguccacc

SEQ ID NO: 333858 - RNA, 19 nt, Artificial Sequence
  Description of Artificial Sequence: Synthetic oligonucleotide
uuggccgcgaugguuuucu

SEQ ID NO: 333859 - RNA, 19 nt, Artificial Sequence
  Description of Artificial Sequence: Synthetic oligonucleotide
agacgucuccacgaauaag

SEQ ID NO: 333860 - RNA, 19 nt, Artificial Sequence
  Description of Artificial Sequence: Synthetic oligonucleotide
uacaugcguuccacaguga

SEQ ID NO: 333861 - RNA, 19 nt, Artificial Sequence
  Description of Artificial Sequence: Synthetic oligonucleotide
uggccgugcagaugaacaa

SEQ ID NO: 333862 - RNA, 19 nt, Artificial Sequence
  Description of Artificial Sequence: Synthetic oligonucleotide
cauggaucugagcaaacgu

SEQ ID NO: 333863 - RNA, 19 nt, Artificial Sequence
  Description of Artificial Sequence: Synthetic oligonucleotide
cucccauggcaguccaggc

SEQ ID NO: 333864 - RNA, 19 nt, Artificial Sequence
  Description of Artificial Sequence: Synthetic oligonucleotide
gagcgugcgaugcuggucu

SEQ ID NO: 333865 - RNA, 19 nt, Artificial Sequence
  Description of Artificial Sequence: Synthetic oligonucleotide
ugaccacgccagcaggcgu

SEQ ID NO: 333866 - RNA, 19 nt, Artificial Sequence
  Description of Artificial Sequence: Synthetic oligonucleotide
aguugcgggugacauugaa

SEQ ID NO: 333867 - RNA, 19 nt, Artificial Sequence
  Description of Artificial Sequence: Synthetic oligonucleotide
cacgggcaaagguguaggc

SEQ ID NO: 333868 - RNA, 19 nt, Artificial Sequence
  Description of Artificial Sequence: Synthetic oligonucleotide
gcaaagguguaggcgaugc

SEQ ID NO: 333869 - RNA, 19 nt, Artificial Sequence
  Description of Artificial Sequence: Synthetic oligonucleotide
gggcacgagcaauggagcg

SEQ ID NO: 333870 - RNA, 19 nt, Artificial Sequence
  Description of Artificial Sequence: Synthetic oligonucleotide
gacauuggccgugcagaug

SEQ ID NO: 333871 - RNA, 19 nt, Artificial Sequence
  Description of Artificial Sequence: Synthetic oligonucleotide
ugcagcgcccaugucacuc

SEQ ID NO: 333872 - RNA, 19 nt, Artificial Sequence
  Description of Artificial Sequence: Synthetic oligonucleotide
cugugcucguggcugcgcc

SEQ ID NO: 333873 - RNA, 19 nt, Artificial Sequence
  Description of Artificial Sequence: Synthetic oligonucleotide
ugcgggugacauugaacuc

SEQ ID NO: 333874 - RNA, 19 nt, Artificial Sequence
  Description of Artificial Sequence: Synthetic oligonucleotide
ugcguuccacagugaagac

SEQ ID NO: 333875 - RNA, 19 nt, Artificial Sequence
  Description of Artificial Sequence: Synthetic oligonucleotide
cuacccgcuggccugccug

SEQ ID NO: 333876 - RNA, 19 nt, Artificial Sequence
  Description of Artificial Sequence: Synthetic oligonucleotide
aggaccgucuuuaggggug

SEQ ID NO: 333877 - RNA, 19 nt, Artificial Sequence
  Description of Artificial Sequence: Synthetic oligonucleotide
ugugcucguggcugcgcca

SEQ ID NO: 333878 - RNA, 19 nt, Artificial Sequence
  Description of Artificial Sequence: Synthetic oligonucleotide
gguacuuccugugcgucug

SEQ ID NO: 333879 - RNA, 19 nt, Artificial Sequence
  Description of Artificial Sequence: Synthetic oligonucleotide
cuuugcgcagcaccuucuc

SEQ ID NO: 333880 - RNA, 19 nt, Artificial Sequence
  Description of Artificial Sequence: Synthetic oligonucleotide
ugcucaacucaaacuccuu

SEQ ID NO: 333881 - RNA, 19 nt, Artificial Sequence
  Description of Artificial Sequence: Synthetic oligonucleotide
acccacgggcagcacuuuc

SEQ ID NO: 333882 - RNA, 19 nt, Artificial Sequence
  Description of Artificial Sequence: Synthetic oligonucleotide
ggcccuagucaagucaagg

SEQ ID NO: 333883 - RNA, 19 nt, Artificial Sequence
  Description of Artificial Sequence: Synthetic oligonucleotide
cuucacaaucuccgcgguc

SEQ ID NO: 333884 - RNA, 19 nt, Artificial Sequence
  Description of Artificial Sequence: Synthetic oligonucleotide
uagaugggguuguccacua

SEQ ID NO: 333885 - RNA, 19 nt, Artificial Sequence
  Description of Artificial Sequence: Synthetic oligonucleotide
auaucccgaauggucuuca

SEQ ID NO: 333886 - RNA, 19 nt, Artificial Sequence
  Description of Artificial Sequence: Synthetic oligonucleotide
uaagcaggggccgccuuaa

SEQ ID NO: 333887 - RNA, 19 nt, Artificial Sequence
  Description of Artificial Sequence: Synthetic oligonucleotide
gccggcaggacaauacagg

SEQ ID NO: 333888 - RNA, 19 nt, Artificial Sequence
  Description of Artificial Sequence: Synthetic oligonucleotide
uaucccgaauggucuucac

SEQ ID NO: 333889 - RNA, 19 nt, Artificial Sequence
  Description of Artificial Sequence: Synthetic oligonucleotide
caaucuccgcggucagggc

SEQ ID NO: 333890 - RNA, 19 nt, Artificial Sequence
  Description of Artificial Sequence: Synthetic oligonucleotide
uuucccgguaagggagacc

SEQ ID NO: 333891 - RNA, 19 nt, Artificial Sequence
  Description of Artificial Sequence: Synthetic oligonucleotide
uccgugacauuggccgugc

SEQ ID NO: 333892 - RNA, 19 nt, Artificial Sequence
  Description of Artificial Sequence: Synthetic oligonucleotide
aaguggaccucgaggcccu

SEQ ID NO: 333893 - RNA, 19 nt, Artificial Sequence
  Description of Artificial Sequence: Synthetic oligonucleotide
cacgauggugcagccugcg

SEQ ID NO: 333894 - RNA, 19 nt, Artificial Sequence
  Description of Artificial Sequence: Synthetic oligonucleotide
caugauuuucagggagcuc

SEQ ID NO: 333895 - RNA, 19 nt, Artificial Sequence
  Description of Artificial Sequence: Synthetic oligonucleotide
cagguaccgcucugcaaug

SEQ ID NO: 333896 - RNA, 19 nt, Artificial Sequence
  Description of Artificial Sequence: Synthetic oligonucleotide
ggaguugcacccucaggca

SEQ ID NO: 333897 - RNA, 19 nt, Artificial Sequence
  Description of Artificial Sequence: Synthetic oligonucleotide
gguuucgcacuccacucuc

SEQ ID NO: 333898 - RNA, 19 nt, Artificial Sequence
  Description of Artificial Sequence: Synthetic oligonucleotide
ccgcuuaaguauauugguc

SEQ ID NO: 333899 - RNA, 19 nt, Artificial Sequence
  Description of Artificial Sequence: Synthetic oligonucleotide
agaugucgcgguagugcuc

SEQ ID NO: 333900 - RNA, 19 nt, Artificial Sequence
  Description of Artificial Sequence: Synthetic oligonucleotide
uacccgcuggccugccugc

SEQ ID NO: 333901 - RNA, 19 nt, Artificial Sequence
  Description of Artificial Sequence: Synthetic oligonucleotide
acgaagucuuguagguucu

SEQ ID NO: 333902 - RNA, 19 nt, Artificial Sequence
  Description of Artificial Sequence: Synthetic oligonucleotide
cacguccuccaugccauag

SEQ ID NO: 333903 - RNA, 19 nt, Artificial Sequence
  Description of Artificial Sequence: Synthetic oligonucleotide
acgccugugccccuugauu

SEQ ID NO: 333904 - RNA, 19 nt, Artificial Sequence
  Description of Artificial Sequence: Synthetic oligonucleotide
uaguugcgggugacauuga

SEQ ID NO: 333905 - RNA, 19 nt, Artificial Sequence
  Description of Artificial Sequence: Synthetic oligonucleotide
uaggcgaugcgggcgcucu

SEQ ID NO: 333906 - RNA, 19 nt, Artificial Sequence
  Description of Artificial Sequence: Synthetic oligonucleotide
aggggccgccuuaaagacg

SEQ ID NO: 333907 - RNA, 19 nt, Artificial Sequence
  Description of Artificial Sequence: Synthetic oligonucleotide
caaacguuccuguguggua

SEQ ID NO: 333908 - RNA, 19 nt, Artificial Sequence
  Description of Artificial Sequence: Synthetic oligonucleotide
uggcugcgccacaccauga

SEQ ID NO: 333909 - RNA, 19 nt, Artificial Sequence
  Description of Artificial Sequence: Synthetic oligonucleotide
gaggaccgucuuuaggggu

SEQ ID NO: 333910 - RNA, 19 nt, Artificial Sequence
  Description of Artificial Sequence: Synthetic oligonucleotide
ccgacucucuguacagagg

SEQ ID NO: 333911 - RNA, 19 nt, Artificial Sequence
  Description of Artificial Sequence: Synthetic oligonucleotide
gccgcuuaaguauauuggu

SEQ ID NO: 333912 - RNA, 19 nt, Artificial Sequence
  Description of Artificial Sequence: Synthetic oligonucleotide
cuccgugaugaagggugcc

SEQ ID NO: 333913 - RNA, 19 nt, Artificial Sequence
  Description of Artificial Sequence: Synthetic oligonucleotide
gcgggugacauugaacuca

SEQ ID NO: 333914 - RNA, 19 nt, Artificial Sequence
  Description of Artificial Sequence: Synthetic oligonucleotide
ccggaauuucuccucgaug

SEQ ID NO: 333915 - RNA, 19 nt, Artificial Sequence
  Description of Artificial Sequence: Synthetic oligonucleotide
guacuuccugugcgucugc

SEQ ID NO: 333916 - RNA, 19 nt, Artificial Sequence
  Description of Artificial Sequence: Synthetic oligonucleotide
auucuacaccugugcucgu

SEQ ID NO: 333917 - RNA, 19 nt, Artificial Sequence
  Description of Artificial Sequence: Synthetic oligonucleotide
aggcacgugcagguggaug

SEQ ID NO: 333918 - RNA, 19 nt, Artificial Sequence
  Description of Artificial Sequence: Synthetic oligonucleotide
cccacgggcagcacuuucc

SEQ ID NO: 333919 - RNA, 19 nt, Artificial Sequence
  Description of Artificial Sequence: Synthetic oligonucleotide
ugacaaucaugcgcagcuu

SEQ ID NO: 333920 - RNA, 19 nt, Artificial Sequence
  Description of Artificial Sequence: Synthetic oligonucleotide
ccaccaacacuaaaacgga

SEQ ID NO: 333921 - RNA, 19 nt, Artificial Sequence
  Description of Artificial Sequence: Synthetic oligonucleotide
cagguacuuccugugcguc

SEQ ID NO: 333922 - RNA, 19 nt, Artificial Sequence
  Description of Artificial Sequence: Synthetic oligonucleotide
acuuucccgguaagggaga

SEQ ID NO: 333923 - RNA, 19 nt, Artificial Sequence
  Description of Artificial Sequence: Synthetic oligonucleotide
agaccgguuuccccacgaa

SEQ ID NO: 333924 - RNA, 19 nt, Artificial Sequence
  Description of Artificial Sequence: Synthetic oligonucleotide
ggcgcucuccuucaucaca

SEQ ID NO: 333925 - RNA, 19 nt, Artificial Sequence
  Description of Artificial Sequence: Synthetic oligonucleotide
cacgagcaauggagcgugc

SEQ ID NO: 333926 - RNA, 19 nt, Artificial Sequence
  Description of Artificial Sequence: Synthetic oligonucleotide
ccuuucuguucucggccgg

SEQ ID NO: 333927 - RNA, 19 nt, Artificial Sequence
  Description of Artificial Sequence: Synthetic oligonucleotide
cugcaacaccgacucucug

SEQ ID NO: 333928 - RNA, 19 nt, Artificial Sequence
  Description of Artificial Sequence: Synthetic oligonucleotide
gguaagggagaccuccccu

SEQ ID NO: 333929 - RNA, 19 nt, Artificial Sequence
  Description of Artificial Sequence: Synthetic oligonucleotide
ccgccuuaaagacgucucc

SEQ ID NO: 333930 - RNA, 19 nt, Artificial Sequence
  Description of Artificial Sequence: Synthetic oligonucleotide
auggugcagccugcgcuag

SEQ ID NO: 333931 - RNA, 19 nt, Artificial Sequence
  Description of Artificial Sequence: Synthetic oligonucleotide
ccgucuuuaggggugucag

SEQ ID NO: 333932 - RNA, 19 nt, Artificial Sequence
  Description of Artificial Sequence: Synthetic oligonucleotide
ggcacgggcaaagguguag

SEQ ID NO: 333933 - RNA, 19 nt, Artificial Sequence
  Description of Artificial Sequence: Synthetic oligonucleotide
ccaacacuaaaacggaagu

SEQ ID NO: 333934 - RNA, 19 nt, Artificial Sequence
  Description of Artificial Sequence: Synthetic oligonucleotide
uccuagacuucugcuuauu

SEQ ID NO: 333935 - RNA, 19 nt, Artificial Sequence
  Description of Artificial Sequence: Synthetic oligonucleotide
cgcuuaaguauauuggucu

SEQ ID NO: 333936 - RNA, 19 nt, Artificial Sequence
  Description of Artificial Sequence: Synthetic oligonucleotide
caaugauaucccgaauggu

SEQ ID NO: 333937 - RNA, 19 nt, Artificial Sequence
  Description of Artificial Sequence: Synthetic oligonucleotide
ugucgcgguagugcuccac

SEQ ID NO: 333938 - RNA, 19 nt, Artificial Sequence
  Description of Artificial Sequence: Synthetic oligonucleotide
cugcgccacaccaugauuu

SEQ ID NO: 333939 - RNA, 19 nt, Artificial Sequence
  Description of Artificial Sequence: Synthetic oligonucleotide
caagagugauagggccuug

SEQ ID NO: 333940 - RNA, 19 nt, Artificial Sequence
  Description of Artificial Sequence: Synthetic oligonucleotide
ugcucguggcugcgccaca

SEQ ID NO: 333941 - RNA, 19 nt, Artificial Sequence
  Description of Artificial Sequence: Synthetic oligonucleotide
ggcguucugcucagggucc

SEQ ID NO: 333942 - RNA, 19 nt, Artificial Sequence
  Description of Artificial Sequence: Synthetic oligonucleotide
cucggccaaucuuguccac

SEQ ID NO: 333943 - RNA, 19 nt, Artificial Sequence
  Description of Artificial Sequence: Synthetic oligonucleotide
aggcgaugcgggcgcucuc

SEQ ID NO: 333944 - RNA, 19 nt, Artificial Sequence
  Description of Artificial Sequence: Synthetic oligonucleotide
uccugugcgucugcuugau

SEQ ID NO: 333945 - RNA, 19 nt, Artificial Sequence
  Description of Artificial Sequence: Synthetic oligonucleotide
gguuguccacuacccgcug

SEQ ID NO: 333946 - RNA, 19 nt, Artificial Sequence
  Description of Artificial Sequence: Synthetic oligonucleotide
cacgaauaagguggaaccu

SEQ ID NO: 333947 - RNA, 19 nt, Artificial Sequence
  Description of Artificial Sequence: Synthetic oligonucleotide
gugaggugaccaggaaguc

SEQ ID NO: 333948 - RNA, 19 nt, Artificial Sequence
  Description of Artificial Sequence: Synthetic oligonucleotide
acuacccgcuggccugccu

SEQ ID NO: 333949 - RNA, 19 nt, Artificial Sequence
  Description of Artificial Sequence: Synthetic oligonucleotide
cacgccagcaggcgugaca

SEQ ID NO: 333950 - RNA, 19 nt, Artificial Sequence
  Description of Artificial Sequence: Synthetic oligonucleotide
uagggccguccuugggagu

SEQ ID NO: 333951 - RNA, 19 nt, Artificial Sequence
  Description of Artificial Sequence: Synthetic oligonucleotide
gaggcgcucccggaauuuc

SEQ ID NO: 333952 - RNA, 19 nt, Artificial Sequence
  Description of Artificial Sequence: Synthetic oligonucleotide
cagaggguucagggcaaug

SEQ ID NO: 333953 - RNA, 19 nt, Artificial Sequence
  Description of Artificial Sequence: Synthetic oligonucleotide
agagccgcuuaaguauauu

SEQ ID NO: 333954 - RNA, 19 nt, Artificial Sequence
  Description of Artificial Sequence: Synthetic oligonucleotide
agggccguccuugggaguu

SEQ ID NO: 333955 - RNA, 19 nt, Artificial Sequence
  Description of Artificial Sequence: Synthetic oligonucleotide
ccgguaagggagaccuccc

SEQ ID NO: 333956 - RNA, 19 nt, Artificial Sequence
  Description of Artificial Sequence: Synthetic oligonucleotide
ccuagucaagucaagguuu

SEQ ID NO: 333957 - RNA, 19 nt, Artificial Sequence
  Description of Artificial Sequence: Synthetic oligonucleotide
ccuguggcaccagguaccg

SEQ ID NO: 333958 - RNA, 19 nt, Artificial Sequence
  Description of Artificial Sequence: Synthetic oligonucleotide
gugcucguggcugcgccac

SEQ ID NO: 333959 - RNA, 19 nt, Artificial Sequence
  Description of Artificial Sequence: Synthetic oligonucleotide
gcccuagucaagucaaggu

SEQ ID NO: 333960 - RNA, 19 nt, Artificial Sequence
  Description of Artificial Sequence: Synthetic oligonucleotide
cauccagaccacacagggu

SEQ ID NO: 333961 - RNA, 19 nt, Artificial Sequence
  Description of Artificial Sequence: Synthetic oligonucleotide
gcgaugcggaagaugucgc

SEQ ID NO: 333962 - RNA, 19 nt, Artificial Sequence
  Description of Artificial Sequence: Synthetic oligonucleotide
ugccgaugaugggucuccu

SEQ ID NO: 333963 - RNA, 19 nt, Artificial Sequence
  Description of Artificial Sequence: Synthetic oligonucleotide
ccaugcggucccucagggg

SEQ ID NO: 333964 - RNA, 19 nt, Artificial Sequence
  Description of Artificial Sequence: Synthetic oligonucleotide
ccuccuagacuucugcuua

SEQ ID NO: 333965 - RNA, 19 nt, Artificial Sequence
  Description of Artificial Sequence: Synthetic oligonucleotide
ggcgaugcgggcgcucucc

SEQ ID NO: 333966 - RNA, 19 nt, Artificial Sequence
  Description of Artificial Sequence: Synthetic oligonucleotide
ccgugaugaagggugccag

SEQ ID NO: 333967 - RNA, 19 nt, Artificial Sequence
  Description of Artificial Sequence: Synthetic oligonucleotide
gcguugcugaagcuugcuc

SEQ ID NO: 333968 - RNA, 19 nt, Artificial Sequence
  Description of Artificial Sequence: Synthetic oligonucleotide
ccgguuuccccacgaaguc

SEQ ID NO: 333969 - RNA, 19 nt, Artificial Sequence
  Description of Artificial Sequence: Synthetic oligonucleotide
gcaaacguuccuguguggu

SEQ ID NO: 333970 - RNA, 19 nt, Artificial Sequence
  Description of Artificial Sequence: Synthetic oligonucleotide
gccugacacauugaucauc

SEQ ID NO: 333971 - RNA, 19 nt, Artificial Sequence
  Description of Artificial Sequence: Synthetic oligonucleotide
gccgccuuaaagacgucuc

SEQ ID NO: 333972 - RNA, 19 nt, Artificial Sequence
  Description of Artificial Sequence: Synthetic oligonucleotide
ccucggccaaucuugucca

SEQ ID NO: 333973 - RNA, 19 nt, Artificial Sequence
  Description of Artificial Sequence: Synthetic oligonucleotide
gguacgccugugccccuug

SEQ ID NO: 333974 - RNA, 19 nt, Artificial Sequence
  Description of Artificial Sequence: Synthetic oligonucleotide
ccagguaccgcucugcaau

SEQ ID NO: 333975 - RNA, 19 nt, Artificial Sequence
  Description of Artificial Sequence: Synthetic oligonucleotide
ggccuguuaccucuaggcu

SEQ ID NO: 333976 - RNA, 19 nt, Artificial Sequence
  Description of Artificial Sequence: Synthetic oligonucleotide
uggucucuuccagcacauc

SEQ ID NO: 333977 - RNA, 19 nt, Artificial Sequence
  Description of Artificial Sequence: Synthetic oligonucleotide
gcgaugguuuucucuuuaa

SEQ ID NO: 333978 - RNA, 19 nt, Artificial Sequence
  Description of Artificial Sequence: Synthetic oligonucleotide
augcggucccucaggggcu

SEQ ID NO: 333979 - RNA, 19 nt, Artificial Sequence
  Description of Artificial Sequence: Synthetic oligonucleotide
ggggccgccuuaaagacgu

SEQ ID NO: 333980 - RNA, 19 nt, Artificial Sequence
  Description of Artificial Sequence: Synthetic oligonucleotide
cuuggccgcgaugguuuuc

SEQ ID NO: 333981 - RNA, 19 nt, Artificial Sequence
  Description of Artificial Sequence: Synthetic oligonucleotide
ccuccaugccauagugguc

SEQ ID NO: 333982 - RNA, 19 nt, Artificial Sequence
  Description of Artificial Sequence: Synthetic oligonucleotide
guacgccugugccccuuga

SEQ ID NO: 333983 - RNA, 19 nt, Artificial Sequence
  Description of Artificial Sequence: Synthetic oligonucleotide
cuagcagugcaagcuugcu

SEQ ID NO: 333984 - RNA, 19 nt, Artificial Sequence
  Description of Artificial Sequence: Synthetic oligonucleotide
acguuccugugugguagau

SEQ ID NO: 333985 - RNA, 19 nt, Artificial Sequence
  Description of Artificial Sequence: Synthetic oligonucleotide
cuguggcaccagguaccgc

SEQ ID NO: 333986 - RNA, 19 nt, Artificial Sequence
  Description of Artificial Sequence: Synthetic oligonucleotide
gggcuuggugccugacuca

SEQ ID NO: 333987 - RNA, 19 nt, Artificial Sequence
  Description of Artificial Sequence: Synthetic oligonucleotide
gccgcgaugguuuucucuu

SEQ ID NO: 333988 - RNA, 19 nt, Artificial Sequence
  Description of Artificial Sequence: Synthetic oligonucleotide
augucgcgguagugcucca

SEQ ID NO: 333989 - RNA, 19 nt, Artificial Sequence
  Description of Artificial Sequence: Synthetic oligonucleotide
cagcgcggucacgauggug

SEQ ID NO: 333990 - RNA, 19 nt, Artificial Sequence
  Description of Artificial Sequence: Synthetic oligonucleotide
caauggagcgugcgaugcu

SEQ ID NO: 333991 - RNA, 19 nt, Artificial Sequence
  Description of Artificial Sequence: Synthetic oligonucleotide
caaugccgaugaugggucu

SEQ ID NO: 333992 - RNA, 19 nt, Artificial Sequence
  Description of Artificial Sequence: Synthetic oligonucleotide
cccaugucacucagguaga

SEQ ID NO: 333993 - RNA, 19 nt, Artificial Sequence
  Description of Artificial Sequence: Synthetic oligonucleotide
gucaugccaccaacacuaa

SEQ ID NO: 333994 - RNA, 19 nt, Artificial Sequence
  Description of Artificial Sequence: Synthetic oligonucleotide
uggccgcgaugguuuucuc

SEQ ID NO: 333995 - RNA, 19 nt, Artificial Sequence
  Description of Artificial Sequence: Synthetic oligonucleotide
caccgacucucuguacaga

SEQ ID NO: 333996 - RNA, 19 nt, Artificial Sequence
  Description of Artificial Sequence: Synthetic oligonucleotide
agcgugcgaugcuggucuu

SEQ ID NO: 333997 - RNA, 19 nt, Artificial Sequence
  Description of Artificial Sequence: Synthetic oligonucleotide
ggugccagguccgcaaagu

SEQ ID NO: 333998 - RNA, 19 nt, Artificial Sequence
  Description of Artificial Sequence: Synthetic oligonucleotide
ccgucaggcaccaccucca

SEQ ID NO: 333999 - RNA, 19 nt, Artificial Sequence
  Description of Artificial Sequence: Synthetic oligonucleotide
cuccuagacuucugcuuau

SEQ ID NO: 334000 - RNA, 19 nt, Artificial Sequence
  Description of Artificial Sequence: Synthetic oligonucleotide
gcacaucaagguagugguc

SEQ ID NO: 334001 - RNA, 19 nt, Artificial Sequence
  Description of Artificial Sequence: Synthetic oligonucleotide
ggguuguccacuacccgcu

SEQ ID NO: 334002 - RNA, 19 nt, Artificial Sequence
  Description of Artificial Sequence: Synthetic oligonucleotide
cgggcgcucuccuucauca

SEQ ID NO: 334003 - RNA, 19 nt, Artificial Sequence
  Description of Artificial Sequence: Synthetic oligonucleotide
ggcacgagcaauggagcgu

SEQ ID NO: 334004 - RNA, 19 nt, Artificial Sequence
  Description of Artificial Sequence: Synthetic oligonucleotide
gggcccuagucaagucaag

SEQ ID NO: 334005 - RNA, 19 nt, Artificial Sequence
  Description of Artificial Sequence: Synthetic oligonucleotide
cccuagucaagucaagguu

SEQ ID NO: 334006 - RNA, 19 nt, Artificial Sequence
  Description of Artificial Sequence: Synthetic oligonucleotide
gggcgcucuccuucaucac

SEQ ID NO: 334007 - RNA, 19 nt, Artificial Sequence
  Description of Artificial Sequence: Synthetic oligonucleotide
ggccgcgaugguuuucucu

SEQ ID NO: 334008 - RNA, 19 nt, Artificial Sequence
  Description of Artificial Sequence: Synthetic oligonucleotide
ccccgugagugcagcgccc

SEQ ID NO: 334009 - RNA, 19 nt, Artificial Sequence
  Description of Artificial Sequence: Synthetic oligonucleotide
cacuacccgcuggccugcc

SEQ ID NO: 334010 - RNA, 19 nt, Artificial Sequence
  Description of Artificial Sequence: Synthetic oligonucleotide
ccggguccaccgcuccagg

SEQ ID NO: 334011 - RNA, 19 nt, Artificial Sequence
  Description of Artificial Sequence: Synthetic oligonucleotide
ccacguagguacgccugug

SEQ ID NO: 334012 - RNA, 19 nt, Artificial Sequence
  Description of Artificial Sequence: Synthetic oligonucleotide
agguacgccugugccccuu

SEQ ID NO: 334013 - RNA, 19 nt, Artificial Sequence
  Description of Artificial Sequence: Synthetic oligonucleotide
cuugguagccucggccaau

SEQ ID NO: 334014 - RNA, 19 nt, Artificial Sequence
  Description of Artificial Sequence: Synthetic oligonucleotide
caccaugaggaccgucuuu

SEQ ID NO: 334015 - RNA, 19 nt, Artificial Sequence
  Description of Artificial Sequence: Synthetic oligonucleotide
cuccacgaauaagguggaa

SEQ ID NO: 334016 - RNA, 19 nt, Artificial Sequence
  Description of Artificial Sequence: Synthetic oligonucleotide
gcgugcgaugcuggucuug

SEQ ID NO: 334017 - RNA, 19 nt, Artificial Sequence
  Description of Artificial Sequence: Synthetic oligonucleotide
gcgggcgcucuccuucauc

SEQ ID NO: 334018 - RNA, 19 nt, Artificial Sequence
  Description of Artificial Sequence: Synthetic oligonucleotide
ggcugcgccacaccaugau

SEQ ID NO: 334019 - RNA, 19 nt, Artificial Sequence
  Description of Artificial Sequence: Synthetic oligonucleotide
cggucacgauggugcagcc

SEQ ID NO: 334020 - RNA, 19 nt, Artificial Sequence
  Description of Artificial Sequence: Synthetic oligonucleotide
ccugugcgucugcuugauc

SEQ ID NO: 334021 - RNA, 19 nt, Artificial Sequence
  Description of Artificial Sequence: Synthetic oligonucleotide
gcugccgacugaugugaau

SEQ ID NO: 334022 - RNA, 19 nt, Artificial Sequence
  Description of Artificial Sequence: Synthetic oligonucleotide
guggacccucggagcuggc

SEQ ID NO: 334023 - RNA, 19 nt, Artificial Sequence
  Description of Artificial Sequence: Synthetic oligonucleotide
gccucaccacucacuaucu

SEQ ID NO: 334024 - RNA, 19 nt, Artificial Sequence
  Description of Artificial Sequence: Synthetic oligonucleotide
ggcguugcugaagcuugcu

SEQ ID NO: 334025 - RNA, 19 nt, Artificial Sequence
  Description of Artificial Sequence: Synthetic oligonucleotide
ggucacgauggugcagccu

SEQ ID NO: 334026 - RNA, 19 nt, Artificial Sequence
  Description of Artificial Sequence: Synthetic oligonucleotide
cucggccggcaggacaaua

SEQ ID NO: 334027 - RNA, 19 nt, Artificial Sequence
  Description of Artificial Sequence: Synthetic oligonucleotide
gcgccucacgcugcucaug

SEQ ID NO: 334028 - RNA, 19 nt, Artificial Sequence
  Description of Artificial Sequence: Synthetic oligonucleotide
gggccguccuugggaguug

SEQ ID NO: 334029 - RNA, 19 nt, Artificial Sequence
  Description of Artificial Sequence: Synthetic oligonucleotide
ggaccgucuuuaggggugu

SEQ ID NO: 334030 - RNA, 19 nt, Artificial Sequence
  Description of Artificial Sequence: Synthetic oligonucleotide
acgggcugucccagagcua

SEQ ID NO: 334031 - RNA, 19 nt, Artificial Sequence
  Description of Artificial Sequence: Synthetic oligonucleotide
cgcgaugguuuucucuuua

SEQ ID NO: 334032 - RNA, 19 nt, Artificial Sequence
  Description of Artificial Sequence: Synthetic oligonucleotide
cggccaaucuuguccaccu

SEQ ID NO: 334033 - RNA, 19 nt, Artificial Sequence
  Description of Artificial Sequence: Synthetic oligonucleotide
cggaaguauucacggccaa

SEQ ID NO: 334034 - RNA, 19 nt, Artificial Sequence
  Description of Artificial Sequence: Synthetic oligonucleotide
cccgugagugcagcgccca

SEQ ID NO: 334035 - RNA, 19 nt, Artificial Sequence
  Description of Artificial Sequence: Synthetic oligonucleotide
cggccggcaggacaauaca

SEQ ID NO: 334036 - RNA, 19 nt, Artificial Sequence
  Description of Artificial Sequence: Synthetic oligonucleotide
ccugaggcgcucccggaau

SEQ ID NO: 334037 - RNA, 19 nt, Artificial Sequence
  Description of Artificial Sequence: Synthetic oligonucleotide
ccgcggucagggccuucac

SEQ ID NO: 334038 - RNA, 19 nt, Artificial Sequence
  Description of Artificial Sequence: Synthetic oligonucleotide
cuccgcggucagggccuuc

SEQ ID NO: 334039 - RNA, 19 nt, Artificial Sequence
  Description of Artificial Sequence: Synthetic oligonucleotide
ccugcgcuagggccguccu

SEQ ID NO: 334040 - RNA, 19 nt, Artificial Sequence
  Description of Artificial Sequence: Synthetic oligonucleotide
ccgugacauuggccgugca

SEQ ID NO: 334041 - RNA, 19 nt, Artificial Sequence
  Description of Artificial Sequence: Synthetic oligonucleotide
gcagcgcggucacgauggu

SEQ ID NO: 334042 - RNA, 19 nt, Artificial Sequence
  Description of Artificial Sequence: Synthetic oligonucleotide
ccaccgcuccagggccagc

SEQ ID NO: 334043 - RNA, 19 nt, Artificial Sequence
  Description of Artificial Sequence: Synthetic oligonucleotide
gcccuccgugaugaagggu

SEQ ID NO: 334044 - RNA, 19 nt, Artificial Sequence
  Description of Artificial Sequence: Synthetic oligonucleotide
gggccgccuuaaagacguc

SEQ ID NO: 334045 - RNA, 19 nt, Artificial Sequence
  Description of Artificial Sequence: Synthetic oligonucleotide
ggggaccgucaggcaccac

SEQ ID NO: 334046 - RNA, 19 nt, Artificial Sequence
  Description of Artificial Sequence: Synthetic oligonucleotide
ccgugagugcagcgcccau

SEQ ID NO: 334047 - RNA, 19 nt, Artificial Sequence
  Description of Artificial Sequence: Synthetic oligonucleotide
cgaugcgggcgcucuccuu

SEQ ID NO: 334048 - RNA, 19 nt, Artificial Sequence
  Description of Artificial Sequence: Synthetic oligonucleotide
ccggccccaugggauggau

SEQ ID NO: 334049 - RNA, 19 nt, Artificial Sequence
  Description of Artificial Sequence: Synthetic oligonucleotide
uuuauauugaauuuugccg

SEQ ID NO: 334050 - RNA, 19 nt, Artificial Sequence
  Description of Artificial Sequence: Synthetic oligonucleotide
aaaacuauuacuucggaca

SEQ ID NO: 334051 - RNA, 19 nt, Artificial Sequence
  Description of Artificial Sequence: Synthetic oligonucleotide
aucguuaucauuuguaggc

SEQ ID NO: 334052 - RNA, 19 nt, Artificial Sequence
  Description of Artificial Sequence: Synthetic oligonucleotide
aacacacggaccuucaagc

SEQ ID NO: 334053 - RNA, 19 nt, Artificial Sequence
  Description of Artificial Sequence: Synthetic oligonucleotide
ugaaauauaauugaacucu

SEQ ID NO: 334054 - RNA, 19 nt, Artificial Sequence
  Description of Artificial Sequence: Synthetic oligonucleotide
uucacauuaguuccgagcc

SEQ ID NO: 334055 - RNA, 19 nt, Artificial Sequence
  Description of Artificial Sequence: Synthetic oligonucleotide
aaaacauucaucucccggu

SEQ ID NO: 334056 - RNA, 19 nt, Artificial Sequence
  Description of Artificial Sequence: Synthetic oligonucleotide
ucaguuucgugccaggugg

SEQ ID NO: 334057 - RNA, 19 nt, Artificial Sequence
  Description of Artificial Sequence: Synthetic oligonucleotide
ugaaccaaaagaacugccg

SEQ ID NO: 334058 - RNA, 19 nt, Artificial Sequence
  Description of Artificial Sequence: Synthetic oligonucleotide
aaacuauuacuucggacag

SEQ ID NO: 334059 - RNA, 19 nt, Artificial Sequence
  Description of Artificial Sequence: Synthetic oligonucleotide
aacaaccgcugucauaccc

SEQ ID NO: 334060 - RNA, 19 nt, Artificial Sequence
  Description of Artificial Sequence: Synthetic oligonucleotide
uuaacaaccgcugucauac

SEQ ID NO: 334061 - RNA, 19 nt, Artificial Sequence
  Description of Artificial Sequence: Synthetic oligonucleotide
uuuacguccacgacgcccg

SEQ ID NO: 334062 - RNA, 19 nt, Artificial Sequence
  Description of Artificial Sequence: Synthetic oligonucleotide
ucauaucuagaauauggcc

SEQ ID NO: 334063 - RNA, 19 nt, Artificial Sequence
  Description of Artificial Sequence: Synthetic oligonucleotide
aaagugaucaggauuaccu

SEQ ID NO: 334064 - RNA, 19 nt, Artificial Sequence
  Description of Artificial Sequence: Synthetic oligonucleotide
aacaaaacuauuacuucgg

SEQ ID NO: 334065 - RNA, 19 nt, Artificial Sequence
  Description of Artificial Sequence: Synthetic oligonucleotide
uuagaaguacauucaacgc

SEQ ID NO: 334066 - RNA, 19 nt, Artificial Sequence
  Description of Artificial Sequence: Synthetic oligonucleotide
uuaacggauauaaaguguc

SEQ ID NO: 334067 - RNA, 19 nt, Artificial Sequence
  Description of Artificial Sequence: Synthetic oligonucleotide
ucuaucaacggccuuucag

SEQ ID NO: 334068 - RNA, 19 nt, Artificial Sequence
  Description of Artificial Sequence: Synthetic oligonucleotide
aguuaacggauauaaagug

SEQ ID NO: 334069 - RNA, 19 nt, Artificial Sequence
  Description of Artificial Sequence: Synthetic oligonucleotide
ugucauacccgaagaaugg

SEQ ID NO: 334070 - RNA, 19 nt, Artificial Sequence
  Description of Artificial Sequence: Synthetic oligonucleotide
aacucuacugccauacagc

SEQ ID NO: 334071 - RNA, 19 nt, Artificial Sequence
  Description of Artificial Sequence: Synthetic oligonucleotide
uucuuuacguccacgacgc

SEQ ID NO: 334072 - RNA, 19 nt, Artificial Sequence
  Description of Artificial Sequence: Synthetic oligonucleotide
ucaucguuaucauuuguag

SEQ ID NO: 334073 - RNA, 19 nt, Artificial Sequence
  Description of Artificial Sequence: Synthetic oligonucleotide
aauuuaacaaccgcuguca

SEQ ID NO: 334074 - RNA, 19 nt, Artificial Sequence
  Description of Artificial Sequence: Synthetic oligonucleotide
aaacacacggaccuucaag

SEQ ID NO: 334075 - RNA, 19 nt, Artificial Sequence
  Description of Artificial Sequence: Synthetic oligonucleotide
auuacuucggacaggauuc

SEQ ID NO: 334076 - RNA, 19 nt, Artificial Sequence
  Description of Artificial Sequence: Synthetic oligonucleotide
agagucucaguuucgugcc

SEQ ID NO: 334077 - RNA, 19 nt, Artificial Sequence
  Description of Artificial Sequence: Synthetic oligonucleotide
gguaaaauugcuguguugg

SEQ ID NO: 334078 - RNA, 19 nt, Artificial Sequence
  Description of Artificial Sequence: Synthetic oligonucleotide
ugccggaucuuucagaacc

SEQ ID NO: 334079 - RNA, 19 nt, Artificial Sequence
  Description of Artificial Sequence: Synthetic oligonucleotide
aagguauuugcucuacuga

SEQ ID NO: 334080 - RNA, 19 nt, Artificial Sequence
  Description of Artificial Sequence: Synthetic oligonucleotide
aaguuaacggauauaaagu

SEQ ID NO: 334081 - RNA, 19 nt, Artificial Sequence
  Description of Artificial Sequence: Synthetic oligonucleotide
gagagucucaguuucgugc

SEQ ID NO: 334082 - RNA, 19 nt, Artificial Sequence
  Description of Artificial Sequence: Synthetic oligonucleotide
uauuacuucggacaggauu

SEQ ID NO: 334083 - RNA, 19 nt, Artificial Sequence
  Description of Artificial Sequence: Synthetic oligonucleotide
uguaaacgaagcauccuug

SEQ ID NO: 334084 - RNA, 19 nt, Artificial Sequence
  Description of Artificial Sequence: Synthetic oligonucleotide
cugaacuuaguauuuuccc

SEQ ID NO: 334085 - RNA, 19 nt, Artificial Sequence
  Description of Artificial Sequence: Synthetic oligonucleotide
ucaacggccuuucaggaug

SEQ ID NO: 334086 - RNA, 19 nt, Artificial Sequence
  Description of Artificial Sequence: Synthetic oligonucleotide
ugacagaacccauauugag

SEQ ID NO: 334087 - RNA, 19 nt, Artificial Sequence
  Description of Artificial Sequence: Synthetic oligonucleotide
ugcucgguaaaacuuguug

SEQ ID NO: 334088 - RNA, 19 nt, Artificial Sequence
  Description of Artificial Sequence: Synthetic oligonucleotide
uucuaucaccuuuucaggc

SEQ ID NO: 334089 - RNA, 19 nt, Artificial Sequence
  Description of Artificial Sequence: Synthetic oligonucleotide
guaaacgaagcauccuugg

SEQ ID NO: 334090 - RNA, 19 nt, Artificial Sequence
  Description of Artificial Sequence: Synthetic oligonucleotide
uugccaaucguucucaaau

SEQ ID NO: 334091 - RNA, 19 nt, Artificial Sequence
  Description of Artificial Sequence: Synthetic oligonucleotide
aguauucgacacucugugc

SEQ ID NO: 334092 - RNA, 19 nt, Artificial Sequence
  Description of Artificial Sequence: Synthetic oligonucleotide
cauacccgaagaauggagg

SEQ ID NO: 334093 - RNA, 19 nt, Artificial Sequence
  Description of Artificial Sequence: Synthetic oligonucleotide
uuaauugguccuaugcguc

SEQ ID NO: 334094 - RNA, 19 nt, Artificial Sequence
  Description of Artificial Sequence: Synthetic oligonucleotide
auacccgaagaauggaggg

SEQ ID NO: 334095 - RNA, 19 nt, Artificial Sequence
  Description of Artificial Sequence: Synthetic oligonucleotide
caucguuaucauuuguagg

SEQ ID NO: 334096 - RNA, 19 nt, Artificial Sequence
  Description of Artificial Sequence: Synthetic oligonucleotide
ucggacaggauucugguaa

SEQ ID NO: 334097 - RNA, 19 nt, Artificial Sequence
  Description of Artificial Sequence: Synthetic oligonucleotide
uaauugaacucuacugcca

SEQ ID NO: 334098 - RNA, 19 nt, Artificial Sequence
  Description of Artificial Sequence: Synthetic oligonucleotide
auuaguuccgagcccgagg

SEQ ID NO: 334099 - RNA, 19 nt, Artificial Sequence
  Description of Artificial Sequence: Synthetic oligonucleotide
ucauacccgaagaauggag

SEQ ID NO: 334100 - RNA, 19 nt, Artificial Sequence
  Description of Artificial Sequence: Synthetic oligonucleotide
gaauuuaacaaccgcuguc

SEQ ID NO: 334101 - RNA, 19 nt, Artificial Sequence
  Description of Artificial Sequence: Synthetic oligonucleotide
uuaaaagcgccaucguugu

SEQ ID NO: 334102 - RNA, 19 nt, Artificial Sequence
  Description of Artificial Sequence: Synthetic oligonucleotide
aggagguugguaaaauugc

SEQ ID NO: 334103 - RNA, 19 nt, Artificial Sequence
  Description of Artificial Sequence: Synthetic oligonucleotide
aaccaaaagaacugccgga

SEQ ID NO: 334104 - RNA, 19 nt, Artificial Sequence
  Description of Artificial Sequence: Synthetic oligonucleotide
uuugaaaacgaggagguuu

SEQ ID NO: 334105 - RNA, 19 nt, Artificial Sequence
  Description of Artificial Sequence: Synthetic oligonucleotide
ucaguauucgacacucugu

SEQ ID NO: 334106 - RNA, 19 nt, Artificial Sequence
  Description of Artificial Sequence: Synthetic oligonucleotide
cugucauacccgaagaaug

SEQ ID NO: 334107 - RNA, 19 nt, Artificial Sequence
  Description of Artificial Sequence: Synthetic oligonucleotide
ucuuucgccgaucaaguuc

SEQ ID NO: 334108 - RNA, 19 nt, Artificial Sequence
  Description of Artificial Sequence: Synthetic oligonucleotide
ugucuugauugauugcugc

SEQ ID NO: 334109 - RNA, 19 nt, Artificial Sequence
  Description of Artificial Sequence: Synthetic oligonucleotide
caaaacuauuacuucggac

SEQ ID NO: 334110 - RNA, 19 nt, Artificial Sequence
  Description of Artificial Sequence: Synthetic oligonucleotide
gaggagguugguaaaauug

SEQ ID NO: 334111 - RNA, 19 nt, Artificial Sequence
  Description of Artificial Sequence: Synthetic oligonucleotide
gagaaguuaacggauauaa

SEQ ID NO: 334112 - RNA, 19 nt, Artificial Sequence
  Description of Artificial Sequence: Synthetic oligonucleotide
uuauccauaagcgcuugcc

SEQ ID NO: 334113 - RNA, 19 nt, Artificial Sequence
  Description of Artificial Sequence: Synthetic oligonucleotide
uucugcucgguaaaacuug

SEQ ID NO: 334114 - RNA, 19 nt, Artificial Sequence
  Description of Artificial Sequence: Synthetic oligonucleotide
gcuuaauugguccuaugcg

SEQ ID NO: 334115 - RNA, 19 nt, Artificial Sequence
  Description of Artificial Sequence: Synthetic oligonucleotide
aggauuaccuguuugguuu

SEQ ID NO: 334116 - RNA, 19 nt, Artificial Sequence
  Description of Artificial Sequence: Synthetic oligonucleotide
uucaucguuaucauuugua

SEQ ID NO: 334117 - RNA, 19 nt, Artificial Sequence
  Description of Artificial Sequence: Synthetic oligonucleotide
ucuaccuuuccaccguuga

SEQ ID NO: 334118 - RNA, 19 nt, Artificial Sequence
  Description of Artificial Sequence: Synthetic oligonucleotide
aaaucuaucaacggccuuu

SEQ ID NO: 334119 - RNA, 19 nt, Artificial Sequence
  Description of Artificial Sequence: Synthetic oligonucleotide
ugucuuucgccgaucaagu

SEQ ID NO: 334120 - RNA, 19 nt, Artificial Sequence
  Description of Artificial Sequence: Synthetic oligonucleotide
acuauuacuucggacagga

SEQ ID NO: 334121 - RNA, 19 nt, Artificial Sequence
  Description of Artificial Sequence: Synthetic oligonucleotide
uguaaacccucccugcuuc

SEQ ID NO: 334122 - RNA, 19 nt, Artificial Sequence
  Description of Artificial Sequence: Synthetic oligonucleotide
cauaucuagaauauggccu

SEQ ID NO: 334123 - RNA, 19 nt, Artificial Sequence
  Description of Artificial Sequence: Synthetic oligonucleotide
auaucuagaauauggccua

SEQ ID NO: 334124 - RNA, 19 nt, Artificial Sequence
  Description of Artificial Sequence: Synthetic oligonucleotide
uccucguuauccuuuggug

SEQ ID NO: 334125 - RNA, 19 nt, Artificial Sequence
  Description of Artificial Sequence: Synthetic oligonucleotide
uaaacgaagcauccuuggu

SEQ ID NO: 334126 - RNA, 19 nt, Artificial Sequence
  Description of Artificial Sequence: Synthetic oligonucleotide
cacauuaguuccgagcccg

SEQ ID NO: 334127 - RNA, 19 nt, Artificial Sequence
  Description of Artificial Sequence: Synthetic oligonucleotide
ugcuuaauagcaccucuuc

SEQ ID NO: 334128 - RNA, 19 nt, Artificial Sequence
  Description of Artificial Sequence: Synthetic oligonucleotide
uuuuggacccacuauuaua

SEQ ID NO: 334129 - RNA, 19 nt, Artificial Sequence
  Description of Artificial Sequence: Synthetic oligonucleotide
caguauucgacacucugug

SEQ ID NO: 334130 - RNA, 19 nt, Artificial Sequence
  Description of Artificial Sequence: Synthetic oligonucleotide
uggcauuauccauaagcgc

SEQ ID NO: 334131 - RNA, 19 nt, Artificial Sequence
  Description of Artificial Sequence: Synthetic oligonucleotide
accaacaaaacuauuacuu

SEQ ID NO: 334132 - RNA, 19 nt, Artificial Sequence
  Description of Artificial Sequence: Synthetic oligonucleotide
acucuacugccauacagcu

SEQ ID NO: 334133 - RNA, 19 nt, Artificial Sequence
  Description of Artificial Sequence: Synthetic oligonucleotide
aacuauuacuucggacagg

SEQ ID NO: 334134 - RNA, 19 nt, Artificial Sequence
  Description of Artificial Sequence: Synthetic oligonucleotide
auauuucggacuuucugaa

SEQ ID NO: 334135 - RNA, 19 nt, Artificial Sequence
  Description of Artificial Sequence: Synthetic oligonucleotide
uauggccuaucacacuuga

SEQ ID NO: 334136 - RNA, 19 nt, Artificial Sequence
  Description of Artificial Sequence: Synthetic oligonucleotide
uguaaugucuuucgccgau

SEQ ID NO: 334137 - RNA, 19 nt, Artificial Sequence
  Description of Artificial Sequence: Synthetic oligonucleotide
ugagaccacuaaaaguuuc

SEQ ID NO: 334138 - RNA, 19 nt, Artificial Sequence
  Description of Artificial Sequence: Synthetic oligonucleotide
cagugaauuuaacaaccgc

SEQ ID NO: 334139 - RNA, 19 nt, Artificial Sequence
  Description of Artificial Sequence: Synthetic oligonucleotide
ugacugacagaacccauau

SEQ ID NO: 334140 - RNA, 19 nt, Artificial Sequence
  Description of Artificial Sequence: Synthetic oligonucleotide
cuucuguaaacccucccug

SEQ ID NO: 334141 - RNA, 19 nt, Artificial Sequence
  Description of Artificial Sequence: Synthetic oligonucleotide
accgcugucauacccgaag

SEQ ID NO: 334142 - RNA, 19 nt, Artificial Sequence
  Description of Artificial Sequence: Synthetic oligonucleotide
agauacuuccuuccacuug

SEQ ID NO: 334143 - RNA, 19 nt, Artificial Sequence
  Description of Artificial Sequence: Synthetic oligonucleotide
ucacauuaguuccgagccc

SEQ ID NO: 334144 - RNA, 19 nt, Artificial Sequence
  Description of Artificial Sequence: Synthetic oligonucleotide
aggaauccguucuuuacgu

SEQ ID NO: 334145 - RNA, 19 nt, Artificial Sequence
  Description of Artificial Sequence: Synthetic oligonucleotide
auacacuggaccucguccu

SEQ ID NO: 334146 - RNA, 19 nt, Artificial Sequence
  Description of Artificial Sequence: Synthetic oligonucleotide
ucgccgaucaaguucucug

SEQ ID NO: 334147 - RNA, 19 nt, Artificial Sequence
  Description of Artificial Sequence: Synthetic oligonucleotide
ggcuuaauugguccuaugc

SEQ ID NO: 334148 - RNA, 19 nt, Artificial Sequence
  Description of Artificial Sequence: Synthetic oligonucleotide
uuccucguuauccuuuggu

SEQ ID NO: 334149 - RNA, 19 nt, Artificial Sequence
  Description of Artificial Sequence: Synthetic oligonucleotide
aaagcgccaucguugugcu

SEQ ID NO: 334150 - RNA, 19 nt, Artificial Sequence
  Description of Artificial Sequence: Synthetic oligonucleotide
cuuuacguccacgacgccc

SEQ ID NO: 334151 - RNA, 19 nt, Artificial Sequence
  Description of Artificial Sequence: Synthetic oligonucleotide
cccacuauuauaaaauauc

SEQ ID NO: 334152 - RNA, 19 nt, Artificial Sequence
  Description of Artificial Sequence: Synthetic oligonucleotide
uggacccacuauuauaaaa

SEQ ID NO: 334153 - RNA, 19 nt, Artificial Sequence
  Description of Artificial Sequence: Synthetic oligonucleotide
uuucgugccagguggugug

SEQ ID NO: 334154 - RNA, 19 nt, Artificial Sequence
  Description of Artificial Sequence: Synthetic oligonucleotide
cuuaauugguccuaugcgu

SEQ ID NO: 334155 - RNA, 19 nt, Artificial Sequence
  Description of Artificial Sequence: Synthetic oligonucleotide
uuggccgaguagaucuccg

SEQ ID NO: 334156 - RNA, 19 nt, Artificial Sequence
  Description of Artificial Sequence: Synthetic oligonucleotide
cuauagacaccuucauguc

SEQ ID NO: 334157 - RNA, 19 nt, Artificial Sequence
  Description of Artificial Sequence: Synthetic oligonucleotide
aacggauauaaagugucuu

SEQ ID NO: 334158 - RNA, 19 nt, Artificial Sequence
  Description of Artificial Sequence: Synthetic oligonucleotide
ugauugauugcugcucucu

SEQ ID NO: 334159 - RNA, 19 nt, Artificial Sequence
  Description of Artificial Sequence: Synthetic oligonucleotide
gaauuuugccggaagagcu

SEQ ID NO: 334160 - RNA, 19 nt, Artificial Sequence
  Description of Artificial Sequence: Synthetic oligonucleotide
guauucgacacucugugcu

SEQ ID NO: 334161 - RNA, 19 nt, Artificial Sequence
  Description of Artificial Sequence: Synthetic oligonucleotide
ucuguauagguugaaucuu

SEQ ID NO: 334162 - RNA, 19 nt, Artificial Sequence
  Description of Artificial Sequence: Synthetic oligonucleotide
uauugcuguuuagaaguac

SEQ ID NO: 334163 - RNA, 19 nt, Artificial Sequence
  Description of Artificial Sequence: Synthetic oligonucleotide
acaaccgcugucauacccg

SEQ ID NO: 334164 - RNA, 19 nt, Artificial Sequence
  Description of Artificial Sequence: Synthetic oligonucleotide
agcuuguaugcccaucagu

SEQ ID NO: 334165 - RNA, 19 nt, Artificial Sequence
  Description of Artificial Sequence: Synthetic oligonucleotide
auucaacgcugcuucuaag

SEQ ID NO: 334166 - RNA, 19 nt, Artificial Sequence
  Description of Artificial Sequence: Synthetic oligonucleotide
guauagguugaaucuuuuc

SEQ ID NO: 334167 - RNA, 19 nt, Artificial Sequence
  Description of Artificial Sequence: Synthetic oligonucleotide
acaggaauagaugauucua

SEQ ID NO: 334168 - RNA, 19 nt, Artificial Sequence
  Description of Artificial Sequence: Synthetic oligonucleotide
agcgccaucguugugcuga

SEQ ID NO: 334169 - RNA, 19 nt, Artificial Sequence
  Description of Artificial Sequence: Synthetic oligonucleotide
ucguuaucauuuguaggcu

SEQ ID NO: 334170 - RNA, 19 nt, Artificial Sequence
  Description of Artificial Sequence: Synthetic oligonucleotide
uugagaccacuaaaaguuu

SEQ ID NO: 334171 - RNA, 19 nt, Artificial Sequence
  Description of Artificial Sequence: Synthetic oligonucleotide
ugccaaucguucucaaauc

SEQ ID NO: 334172 - RNA, 19 nt, Artificial Sequence
  Description of Artificial Sequence: Synthetic oligonucleotide
auuuaacaaccgcugucau

SEQ ID NO: 334173 - RNA, 19 nt, Artificial Sequence
  Description of Artificial Sequence: Synthetic oligonucleotide
acgaggagguuucucauuu

SEQ ID NO: 334174 - RNA, 19 nt, Artificial Sequence
  Description of Artificial Sequence: Synthetic oligonucleotide
uugcucuuugcaaccucug

SEQ ID NO: 334175 - RNA, 19 nt, Artificial Sequence
  Description of Artificial Sequence: Synthetic oligonucleotide
uacacuggaccucguccug

SEQ ID NO: 334176 - RNA, 19 nt, Artificial Sequence
  Description of Artificial Sequence: Synthetic oligonucleotide
uuuccaccguugaugucac

SEQ ID NO: 334177 - RNA, 19 nt, Artificial Sequence
  Description of Artificial Sequence: Synthetic oligonucleotide
uccuaugcgucuuccuuuc

SEQ ID NO: 334178 - RNA, 19 nt, Artificial Sequence
  Description of Artificial Sequence: Synthetic oligonucleotide
gcuuguaugcccaucaguc

SEQ ID NO: 334179 - RNA, 19 nt, Artificial Sequence
  Description of Artificial Sequence: Synthetic oligonucleotide
uugccggaagagcuuguac

SEQ ID NO: 334180 - RNA, 19 nt, Artificial Sequence
  Description of Artificial Sequence: Synthetic oligonucleotide
ggagucacucaagagcagg

SEQ ID NO: 334181 - RNA, 19 nt, Artificial Sequence
  Description of Artificial Sequence: Synthetic oligonucleotide
gacccacuauuauaaaaua

SEQ ID NO: 334182 - RNA, 19 nt, Artificial Sequence
  Description of Artificial Sequence: Synthetic oligonucleotide
uaaaagcgccaucguugug

SEQ ID NO: 334183 - RNA, 19 nt, Artificial Sequence
  Description of Artificial Sequence: Synthetic oligonucleotide
uacccgaagaauggagggc

SEQ ID NO: 334184 - RNA, 19 nt, Artificial Sequence
  Description of Artificial Sequence: Synthetic oligonucleotide
cuuucgccgaucaaguucu

SEQ ID NO: 334185 - RNA, 19 nt, Artificial Sequence
  Description of Artificial Sequence: Synthetic oligonucleotide
ugcuucuauuauguuuuga

SEQ ID NO: 334186 - RNA, 19 nt, Artificial Sequence
  Description of Artificial Sequence: Synthetic oligonucleotide
caaucguucucaaaucugu

SEQ ID NO: 334187 - RNA, 19 nt, Artificial Sequence
  Description of Artificial Sequence: Synthetic oligonucleotide
ugugaucauaggugccuuc

SEQ ID NO: 334188 - RNA, 19 nt, Artificial Sequence
  Description of Artificial Sequence: Synthetic oligonucleotide
uugcuucuauuauguuuug

SEQ ID NO: 334189 - RNA, 19 nt, Artificial Sequence
  Description of Artificial Sequence: Synthetic oligonucleotide
ugagaaguuaacggauaua

SEQ ID NO: 334190 - RNA, 19 nt, Artificial Sequence
  Description of Artificial Sequence: Synthetic oligonucleotide
guuaacggauauaaagugu

SEQ ID NO: 334191 - RNA, 19 nt, Artificial Sequence
  Description of Artificial Sequence: Synthetic oligonucleotide
ucauaggguacagcuggga

SEQ ID NO: 334192 - RNA, 19 nt, Artificial Sequence
  Description of Artificial Sequence: Synthetic oligonucleotide
cucguccugaucuguuuug

SEQ ID NO: 334193 - RNA, 19 nt, Artificial Sequence
  Description of Artificial Sequence: Synthetic oligonucleotide
gaggagguuucucauuucu

SEQ ID NO: 334194 - RNA, 19 nt, Artificial Sequence
  Description of Artificial Sequence: Synthetic oligonucleotide
ucguccugaucuguuuugc

SEQ ID NO: 334195 - RNA, 19 nt, Artificial Sequence
  Description of Artificial Sequence: Synthetic oligonucleotide
gucucaguuucgugccagg

SEQ ID NO: 334196 - RNA, 19 nt, Artificial Sequence
  Description of Artificial Sequence: Synthetic oligonucleotide
ggcauuauccauaagcgcu

SEQ ID NO: 334197 - RNA, 19 nt, Artificial Sequence
  Description of Artificial Sequence: Synthetic oligonucleotide
aaucguucucaaaucugua

SEQ ID NO: 334198 - RNA, 19 nt, Artificial Sequence
  Description of Artificial Sequence: Synthetic oligonucleotide
ucucaguuucgugccaggu

SEQ ID NO: 334199 - RNA, 19 nt, Artificial Sequence
  Description of Artificial Sequence: Synthetic oligonucleotide
ucagaucgugugcggcccc

SEQ ID NO: 334200 - RNA, 19 nt, Artificial Sequence
  Description of Artificial Sequence: Synthetic oligonucleotide
acccacuauuauaaaauau

SEQ ID NO: 334201 - RNA, 19 nt, Artificial Sequence
  Description of Artificial Sequence: Synthetic oligonucleotide
ucgugugcggccccugccu

SEQ ID NO: 334202 - RNA, 19 nt, Artificial Sequence
  Description of Artificial Sequence: Synthetic oligonucleotide
acgcuuuugauuacuguaa

SEQ ID NO: 334203 - RNA, 19 nt, Artificial Sequence
  Description of Artificial Sequence: Synthetic oligonucleotide
gaucgugugcggccccugc

SEQ ID NO: 334204 - RNA, 19 nt, Artificial Sequence
  Description of Artificial Sequence: Synthetic oligonucleotide
gguauuugcucuacugaac

SEQ ID NO: 334205 - RNA, 19 nt, Artificial Sequence
  Description of Artificial Sequence: Synthetic oligonucleotide
aucauaggguacagcuggg

SEQ ID NO: 334206 - RNA, 19 nt, Artificial Sequence
  Description of Artificial Sequence: Synthetic oligonucleotide
uggcuuaauugguccuaug

SEQ ID NO: 334207 - RNA, 19 nt, Artificial Sequence
  Description of Artificial Sequence: Synthetic oligonucleotide
agaaguuaacggauauaaa

SEQ ID NO: 334208 - RNA, 19 nt, Artificial Sequence
  Description of Artificial Sequence: Synthetic oligonucleotide
ccaaucguucucaaaucug

SEQ ID NO: 334209 - RNA, 19 nt, Artificial Sequence
  Description of Artificial Sequence: Synthetic oligonucleotide
cauucaacgcugcuucuaa

SEQ ID NO: 334210 - RNA, 19 nt, Artificial Sequence
  Description of Artificial Sequence: Synthetic oligonucleotide
uaacaaccgcugucauacc

SEQ ID NO: 334211 - RNA, 19 nt, Artificial Sequence
  Description of Artificial Sequence: Synthetic oligonucleotide
uugguccuaugcgucuucc

SEQ ID NO: 334212 - RNA, 19 nt, Artificial Sequence
  Description of Artificial Sequence: Synthetic oligonucleotide
acgcccgagagucucaguu

SEQ ID NO: 334213 - RNA, 19 nt, Artificial Sequence
  Description of Artificial Sequence: Synthetic oligonucleotide
cauuaguuccgagcccgag

SEQ ID NO: 334214 - RNA, 19 nt, Artificial Sequence
  Description of Artificial Sequence: Synthetic oligonucleotide
gagucacucaagagcagga

SEQ ID NO: 334215 - RNA, 19 nt, Artificial Sequence
  Description of Artificial Sequence: Synthetic oligonucleotide
uguuggccgaguagaucuc

SEQ ID NO: 334216 - RNA, 19 nt, Artificial Sequence
  Description of Artificial Sequence: Synthetic oligonucleotide
uuacuucggacaggauucu

SEQ ID NO: 334217 - RNA, 19 nt, Artificial Sequence
  Description of Artificial Sequence: Synthetic oligonucleotide
ugguguguucagacuuagu

SEQ ID NO: 334218 - RNA, 19 nt, Artificial Sequence
  Description of Artificial Sequence: Synthetic oligonucleotide
uccgugauuuccugucaua

SEQ ID NO: 334219 - RNA, 19 nt, Artificial Sequence
  Description of Artificial Sequence: Synthetic oligonucleotide
ggccuaucacacuugaucu

SEQ ID NO: 334220 - RNA, 19 nt, Artificial Sequence
  Description of Artificial Sequence: Synthetic oligonucleotide
guuggccgaguagaucucc

SEQ ID NO: 334221 - RNA, 19 nt, Artificial Sequence
  Description of Artificial Sequence: Synthetic oligonucleotide
ugguccuaugcgucuuccu

SEQ ID NO: 334222 - RNA, 19 nt, Artificial Sequence
  Description of Artificial Sequence: Synthetic oligonucleotide
aguuucgugccagguggug

SEQ ID NO: 334223 - RNA, 19 nt, Artificial Sequence
  Description of Artificial Sequence: Synthetic oligonucleotide
ccacauacacuggaccucg

SEQ ID NO: 334224 - RNA, 19 nt, Artificial Sequence
  Description of Artificial Sequence: Synthetic oligonucleotide
uucgccgaucaaguucucu

SEQ ID NO: 334225 - RNA, 19 nt, Artificial Sequence
  Description of Artificial Sequence: Synthetic oligonucleotide
uacuucggacaggauucug

SEQ ID NO: 334226 - RNA, 19 nt, Artificial Sequence
  Description of Artificial Sequence: Synthetic oligonucleotide
ggcuuaauuggcccagauc

SEQ ID NO: 334227 - RNA, 19 nt, Artificial Sequence
  Description of Artificial Sequence: Synthetic oligonucleotide
gucuugauugauugcugcu

SEQ ID NO: 334228 - RNA, 19 nt, Artificial Sequence
  Description of Artificial Sequence: Synthetic oligonucleotide
ugcuucggugacugacaga

SEQ ID NO: 334229 - RNA, 19 nt, Artificial Sequence
  Description of Artificial Sequence: Synthetic oligonucleotide
gucauacccgaagaaugga

SEQ ID NO: 334230 - RNA, 19 nt, Artificial Sequence
  Description of Artificial Sequence: Synthetic oligonucleotide
cauuucgaggaagaugucu

SEQ ID NO: 334231 - RNA, 19 nt, Artificial Sequence
  Description of Artificial Sequence: Synthetic oligonucleotide
cacaggaauagaugauucu

SEQ ID NO: 334232 - RNA, 19 nt, Artificial Sequence
  Description of Artificial Sequence: Synthetic oligonucleotide
gagucucaguuucgugcca

SEQ ID NO: 334233 - RNA, 19 nt, Artificial Sequence
  Description of Artificial Sequence: Synthetic oligonucleotide
caaccgcugucauacccga

SEQ ID NO: 334234 - RNA, 19 nt, Artificial Sequence
  Description of Artificial Sequence: Synthetic oligonucleotide
cugagaaguuaacggauau

SEQ ID NO: 334235 - RNA, 19 nt, Artificial Sequence
  Description of Artificial Sequence: Synthetic oligonucleotide
cuguauagguugaaucuuu

SEQ ID NO: 334236 - RNA, 19 nt, Artificial Sequence
  Description of Artificial Sequence: Synthetic oligonucleotide
ggacccacuauuauaaaau

SEQ ID NO: 334237 - RNA, 19 nt, Artificial Sequence
  Description of Artificial Sequence: Synthetic oligonucleotide
uuacguccacgacgcccga

SEQ ID NO: 334238 - RNA, 19 nt, Artificial Sequence
  Description of Artificial Sequence: Synthetic oligonucleotide
cauaggguacagcugggau

SEQ ID NO: 334239 - RNA, 19 nt, Artificial Sequence
  Description of Artificial Sequence: Synthetic oligonucleotide
aagcgccaucguugugcug

SEQ ID NO: 334240 - RNA, 19 nt, Artificial Sequence
  Description of Artificial Sequence: Synthetic oligonucleotide
ggaauccguucuuuacguc

SEQ ID NO: 334241 - RNA, 19 nt, Artificial Sequence
  Description of Artificial Sequence: Synthetic oligonucleotide
gccaaucguucucaaaucu

SEQ ID NO: 334242 - RNA, 19 nt, Artificial Sequence
  Description of Artificial Sequence: Synthetic oligonucleotide
cacgacgcccgagagucuc

SEQ ID NO: 334243 - RNA, 19 nt, Artificial Sequence
  Description of Artificial Sequence: Synthetic oligonucleotide
gcccgagagucucaguuuc

SEQ ID NO: 334244 - RNA, 19 nt, Artificial Sequence
  Description of Artificial Sequence: Synthetic oligonucleotide
uuucgccgaucaaguucuc

SEQ ID NO: 334245 - RNA, 19 nt, Artificial Sequence
  Description of Artificial Sequence: Synthetic oligonucleotide
acauuaguuccgagcccga

SEQ ID NO: 334246 - RNA, 19 nt, Artificial Sequence
  Description of Artificial Sequence: Synthetic oligonucleotide
cguucuuuacguccacgac

SEQ ID NO: 334247 - RNA, 19 nt, Artificial Sequence
  Description of Artificial Sequence: Synthetic oligonucleotide
uucgugccagguggugugu

SEQ ID NO: 334248 - RNA, 19 nt, Artificial Sequence
  Description of Artificial Sequence: Synthetic oligonucleotide
cccacgcuuuugauuacug

SEQ ID NO: 334249 - RNA, 19 nt, Artificial Sequence
  Description of Artificial Sequence: Synthetic oligonucleotide
caggauuaccuguuugguu

SEQ ID NO: 334250 - RNA, 19 nt, Artificial Sequence
  Description of Artificial Sequence: Synthetic oligonucleotide
gcugucauacccgaagaau

SEQ ID NO: 334251 - RNA, 19 nt, Artificial Sequence
  Description of Artificial Sequence: Synthetic oligonucleotide
aguucucuauagacaccuu

SEQ ID NO: 334252 - RNA, 19 nt, Artificial Sequence
  Description of Artificial Sequence: Synthetic oligonucleotide
cuaccuuuccaccguugau

SEQ ID NO: 334253 - RNA, 19 nt, Artificial Sequence
  Description of Artificial Sequence: Synthetic oligonucleotide
auggccuaucacacuugau

SEQ ID NO: 334254 - RNA, 19 nt, Artificial Sequence
  Description of Artificial Sequence: Synthetic oligonucleotide
ggauucugguaaucaguau

SEQ ID NO: 334255 - RNA, 19 nt, Artificial Sequence
  Description of Artificial Sequence: Synthetic oligonucleotide
ccucgacgccuccuuacug

SEQ ID NO: 334256 - RNA, 19 nt, Artificial Sequence
  Description of Artificial Sequence: Synthetic oligonucleotide
caucucccgguuuccacau

SEQ ID NO: 334257 - RNA, 19 nt, Artificial Sequence
  Description of Artificial Sequence: Synthetic oligonucleotide
gccgaucaaguucucugcu

SEQ ID NO: 334258 - RNA, 19 nt, Artificial Sequence
  Description of Artificial Sequence: Synthetic oligonucleotide
cuguguuggccgaguagau

SEQ ID NO: 334259 - RNA, 19 nt, Artificial Sequence
  Description of Artificial Sequence: Synthetic oligonucleotide
caacggccuuucaggaugu

SEQ ID NO: 334260 - RNA, 19 nt, Artificial Sequence
  Description of Artificial Sequence: Synthetic oligonucleotide
gucuuucgccgaucaaguu

SEQ ID NO: 334261 - RNA, 19 nt, Artificial Sequence
  Description of Artificial Sequence: Synthetic oligonucleotide
aacggccuuucaggauguu

SEQ ID NO: 334262 - RNA, 19 nt, Artificial Sequence
  Description of Artificial Sequence: Synthetic oligonucleotide
cuauuacuucggacaggau

SEQ ID NO: 334263 - RNA, 19 nt, Artificial Sequence
  Description of Artificial Sequence: Synthetic oligonucleotide
gcuggcuuaauugguccua

SEQ ID NO: 334264 - RNA, 19 nt, Artificial Sequence
  Description of Artificial Sequence: Synthetic oligonucleotide
gagcccgaggagguuggua

SEQ ID NO: 334265 - RNA, 19 nt, Artificial Sequence
  Description of Artificial Sequence: Synthetic oligonucleotide
gcgccaucguugugcugag

SEQ ID NO: 334266 - RNA, 19 nt, Artificial Sequence
  Description of Artificial Sequence: Synthetic oligonucleotide
cuuugaaaacgaggagguu

SEQ ID NO: 334267 - RNA, 19 nt, Artificial Sequence
  Description of Artificial Sequence: Synthetic oligonucleotide
caguuucgugccagguggu

SEQ ID NO: 334268 - RNA, 19 nt, Artificial Sequence
  Description of Artificial Sequence: Synthetic oligonucleotide
cuggcuuaauugguccuau

SEQ ID NO: 334269 - RNA, 19 nt, Artificial Sequence
  Description of Artificial Sequence: Synthetic oligonucleotide
ccgaucaaguucucugcua

SEQ ID NO: 334270 - RNA, 19 nt, Artificial Sequence
  Description of Artificial Sequence: Synthetic oligonucleotide
gcauuauccauaagcgcuu

SEQ ID NO: 334271 - RNA, 19 nt, Artificial Sequence
  Description of Artificial Sequence: Synthetic oligonucleotide
guggacccacgacaggcuu

SEQ ID NO: 334272 - RNA, 19 nt, Artificial Sequence
  Description of Artificial Sequence: Synthetic oligonucleotide
acgacgcccgagagucuca

SEQ ID NO: 334273 - RNA, 19 nt, Artificial Sequence
  Description of Artificial Sequence: Synthetic oligonucleotide
ccgcugucauacccgaaga

SEQ ID NO: 334274 - RNA, 19 nt, Artificial Sequence
  Description of Artificial Sequence: Synthetic oligonucleotide
gacgcccgagagucucagu

SEQ ID NO: 334275 - RNA, 19 nt, Artificial Sequence
  Description of Artificial Sequence: Synthetic oligonucleotide
gccuaucacacuugaucuu

SEQ ID NO: 334276 - RNA, 19 nt, Artificial Sequence
  Description of Artificial Sequence: Synthetic oligonucleotide
gguggacccacgacaggcu

SEQ ID NO: 334277 - RNA, 19 nt, Artificial Sequence
  Description of Artificial Sequence: Synthetic oligonucleotide
gcccgaggagguugguaaa

SEQ ID NO: 334278 - RNA, 19 nt, Artificial Sequence
  Description of Artificial Sequence: Synthetic oligonucleotide
cugcucgguaaaacuuguu

SEQ ID NO: 334279 - RNA, 19 nt, Artificial Sequence
  Description of Artificial Sequence: Synthetic oligonucleotide
ccuaugcgucuuccuuuca

SEQ ID NO: 334280 - RNA, 19 nt, Artificial Sequence
  Description of Artificial Sequence: Synthetic oligonucleotide
ccauaagcgcuugccucga

SEQ ID NO: 334281 - RNA, 19 nt, Artificial Sequence
  Description of Artificial Sequence: Synthetic oligonucleotide
ggaccucguccugaucugu

SEQ ID NO: 334282 - RNA, 19 nt, Artificial Sequence
  Description of Artificial Sequence: Synthetic oligonucleotide
cagaucgugugcggccccu

SEQ ID NO: 334283 - RNA, 19 nt, Artificial Sequence
  Description of Artificial Sequence: Synthetic oligonucleotide
gcgcuugccucgacgccuc

SEQ ID NO: 334284 - RNA, 19 nt, Artificial Sequence
  Description of Artificial Sequence: Synthetic oligonucleotide
gugugcggccccugccuuu

SEQ ID NO: 334285 - RNA, 19 nt, Artificial Sequence
  Description of Artificial Sequence: Synthetic oligonucleotide
ccucguccugaucuguuuu

SEQ ID NO: 334286 - RNA, 19 nt, Artificial Sequence
  Description of Artificial Sequence: Synthetic oligonucleotide
cagcaauauuucggacuuu

SEQ ID NO: 334287 - RNA, 19 nt, Artificial Sequence
  Description of Artificial Sequence: Synthetic oligonucleotide
ccgaggagguugguaaaau

SEQ ID NO: 334288 - RNA, 19 nt, Artificial Sequence
  Description of Artificial Sequence: Synthetic oligonucleotide
cgcuugccucgacgccucc

SEQ ID NO: 334289 - RNA, 19 nt, Artificial Sequence
  Description of Artificial Sequence: Synthetic oligonucleotide
cgcccgagagucucaguuu

SEQ ID NO: 334290 - RNA, 19 nt, Artificial Sequence
  Description of Artificial Sequence: Synthetic oligonucleotide
uuaacagacgacaugaggg

SEQ ID NO: 334291 - RNA, 19 nt, Artificial Sequence
  Description of Artificial Sequence: Synthetic oligonucleotide
aagauucagaaguaaauag

SEQ ID NO: 334292 - RNA, 19 nt, Artificial Sequence
  Description of Artificial Sequence: Synthetic oligonucleotide
  modified_base (3)..(3): a, c, u, g, unknown or other
ucnuaauccuuucucaacg

SEQ ID NO: 334293 - RNA, 19 nt, Artificial Sequence
  Description of Artificial Sequence: Synthetic oligonucleotide
aagagucauccauagauac

SEQ ID NO: 334294 - RNA, 19 nt, Artificial Sequence
  Description of Artificial Sequence: Synthetic oligonucleotide
ucaagguuaacccacacca

SEQ ID NO: 334295 - RNA, 19 nt, Artificial Sequence
  Description of Artificial Sequence: Synthetic oligonucleotide
aguaguaagguucaucagg

SEQ ID NO: 334296 - RNA, 19 nt, Artificial Sequence
  Description of Artificial Sequence: Synthetic oligonucleotide
uuaauaaccuugcaaaaga

SEQ ID NO: 334297 - RNA, 19 nt, Artificial Sequence
  Description of Artificial Sequence: Synthetic oligonucleotide
ucaguauaugcaaacauug

SEQ ID NO: 334298 - RNA, 19 nt, Artificial Sequence
  Description of Artificial Sequence: Synthetic oligonucleotide
  modified_base (7)..(7): a, c, u, g, unknown or other
uuuaucnuaauccuuucuc

SEQ ID NO: 334299 - RNA, 19 nt, Artificial Sequence
  Description of Artificial Sequence: Synthetic oligonucleotide
aaauuagucacuuauugua

SEQ ID NO: 334300 - RNA, 19 nt, Artificial Sequence
  Description of Artificial Sequence: Synthetic oligonucleotide
guuaucaggauuucgagcc

SEQ ID NO: 334301 - RNA, 19 nt, Artificial Sequence
  Description of Artificial Sequence: Synthetic oligonucleotide
agaaauuagucacuuauug

SEQ ID NO: 334302 - RNA, 19 nt, Artificial Sequence
  Description of Artificial Sequence: Synthetic oligonucleotide
aauucgaucaucaccguac

SEQ ID NO: 334303 - RNA, 19 nt, Artificial Sequence
  Description of Artificial Sequence: Synthetic oligonucleotide
caagauucaagguuaaccc

SEQ ID NO: 334304 - RNA, 19 nt, Artificial Sequence
  Description of Artificial Sequence: Synthetic oligonucleotide
aauguguuaucacagacuu

SEQ ID NO: 334305 - RNA, 19 nt, Artificial Sequence
  Description of Artificial Sequence: Synthetic oligonucleotide
aguuaucaggauuucgagc

SEQ ID NO: 334306 - RNA, 19 nt, Artificial Sequence
  Description of Artificial Sequence: Synthetic oligonucleotide
agagguuuaauaaaaggcg

SEQ ID NO: 334307 - RNA, 19 nt, Artificial Sequence
  Description of Artificial Sequence: Synthetic oligonucleotide
ugcgauaauaucuaaugug

SEQ ID NO: 334308 - RNA, 19 nt, Artificial Sequence
  Description of Artificial Sequence: Synthetic oligonucleotide
uuuaauaguaguucuucca

SEQ ID NO: 334309 - RNA, 19 nt, Artificial Sequence
  Description of Artificial Sequence: Synthetic oligonucleotide
agcaguuuguauuuaacag

SEQ ID NO: 334310 - RNA, 19 nt, Artificial Sequence
  Description of Artificial Sequence: Synthetic oligonucleotide
aauuagucacuuauuguac

SEQ ID NO: 334311 - RNA, 19 nt, Artificial Sequence
  Description of Artificial Sequence: Synthetic oligonucleotide
  modified_base (16)..(16): a, c, u, g, unknown or other
uuuaaagguuuuaucnuaa

SEQ ID NO: 334312 - RNA, 19 nt, Artificial Sequence
  Description of Artificial Sequence: Synthetic oligonucleotide
auugucccgaucaagagcc

SEQ ID NO: 334313 - RNA, 19 nt, Artificial Sequence
  Description of Artificial Sequence: Synthetic oligonucleotide
uuuaaagcggucauccaug

SEQ ID NO: 334314 - RNA, 19 nt, Artificial Sequence
  Description of Artificial Sequence: Synthetic oligonucleotide
uuuauagugagugaugagu

SEQ ID NO: 334315 - RNA, 19 nt, Artificial Sequence
  Description of Artificial Sequence: Synthetic oligonucleotide
aguaaauagagagcgacuc

SEQ ID NO: 334316 - RNA, 19 nt, Artificial Sequence
  Description of Artificial Sequence: Synthetic oligonucleotide
uuacaacauauguucaccg

SEQ ID NO: 334317 - RNA, 19 nt, Artificial Sequence
  Description of Artificial Sequence: Synthetic oligonucleotide
  modified_base (4)..(4): a, c, u, g, unknown or other
aucnuaauccuuucucaac

SEQ ID NO: 334318 - RNA, 19 nt, Artificial Sequence
  Description of Artificial Sequence: Synthetic oligonucleotide
aaguuaucaggauuucgag

SEQ ID NO: 334319 - RNA, 19 nt, Artificial Sequence
  Description of Artificial Sequence: Synthetic oligonucleotide
  modified_base (6)..(6): a, c, u, g, unknown or other
uuaucnuaauccuuucuca

SEQ ID NO: 334320 - RNA, 19 nt, Artificial Sequence
  Description of Artificial Sequence: Synthetic oligonucleotide
uaucuaauguguuaucaca

SEQ ID NO: 334321 - RNA, 19 nt, Artificial Sequence
  Description of Artificial Sequence: Synthetic oligonucleotide
aacauauguucaccguugg

SEQ ID NO: 334322 - RNA, 19 nt, Artificial Sequence
  Description of Artificial Sequence: Synthetic oligonucleotide
caacgucugauuuucaagg

SEQ ID NO: 334323 - RNA, 19 nt, Artificial Sequence
  Description of Artificial Sequence: Synthetic oligonucleotide
ugaaacucauugaagaaau

SEQ ID NO: 334324 - RNA, 19 nt, Artificial Sequence
  Description of Artificial Sequence: Synthetic oligonucleotide
uguacauaauguaguaucu

SEQ ID NO: 334325 - RNA, 19 nt, Artificial Sequence
  Description of Artificial Sequence: Synthetic oligonucleotide
aacuagaaugagcagcuca

SEQ ID NO: 334326 - RNA, 19 nt, Artificial Sequence
  Description of Artificial Sequence: Synthetic oligonucleotide
aauuaugccagcgaaacuu

SEQ ID NO: 334327 - RNA, 19 nt, Artificial Sequence
  Description of Artificial Sequence: Synthetic oligonucleotide
gagguuuaauaaaaggcgg

SEQ ID NO: 334328 - RNA, 19 nt, Artificial Sequence
  Description of Artificial Sequence: Synthetic oligonucleotide
uuauagugagugaugaguc

SEQ ID NO: 334329 - RNA, 19 nt, Artificial Sequence
  Description of Artificial Sequence: Synthetic oligonucleotide
cauagauacaguuccaauc

SEQ ID NO: 334330 - RNA, 19 nt, Artificial Sequence
  Description of Artificial Sequence: Synthetic oligonucleotide
aauaccuguauuccaugug

SEQ ID NO: 334331 - RNA, 19 nt, Artificial Sequence
  Description of Artificial Sequence: Synthetic oligonucleotide
aaguggugacuaucgagac

SEQ ID NO: 334332 - RNA, 19 nt, Artificial Sequence
  Description of Artificial Sequence: Synthetic oligonucleotide
uucauuacccaggagugcg

SEQ ID NO: 334333 - RNA, 19 nt, Artificial Sequence
  Description of Artificial Sequence: Synthetic oligonucleotide
ucaugcaucaggucuauga

SEQ ID NO: 334334 - RNA, 19 nt, Artificial Sequence
  Description of Artificial Sequence: Synthetic oligonucleotide
aagguuaacccacaccaca

SEQ ID NO: 334335 - RNA, 19 nt, Artificial Sequence
  Description of Artificial Sequence: Synthetic oligonucleotide
aaagcggucauccaugcuu

SEQ ID NO: 334336 - RNA, 19 nt, Artificial Sequence
  Description of Artificial Sequence: Synthetic oligonucleotide
cuugcuagcgcaccaaggg

SEQ ID NO: 334337 - RNA, 19 nt, Artificial Sequence
  Description of Artificial Sequence: Synthetic oligonucleotide
aagauucaagguuaaccca

SEQ ID NO: 334338 - RNA, 19 nt, Artificial Sequence
  Description of Artificial Sequence: Synthetic oligonucleotide
aaauaccuguauuccaugu

SEQ ID NO: 334339 - RNA, 19 nt, Artificial Sequence
  Description of Artificial Sequence: Synthetic oligonucleotide
ucaacgucugauuuucaag

SEQ ID NO: 334340 - RNA, 19 nt, Artificial Sequence
  Description of Artificial Sequence: Synthetic oligonucleotide
guaguaagguucaucaggg

SEQ ID NO: 334341 - RNA, 19 nt, Artificial Sequence
  Description of Artificial Sequence: Synthetic oligonucleotide
ucugcguuguagaaaaggu

SEQ ID NO: 334342 - RNA, 19 nt, Artificial Sequence
  Description of Artificial Sequence: Synthetic oligonucleotide
aaaguggugacuaucgaga

SEQ ID NO: 334343 - RNA, 19 nt, Artificial Sequence
  Description of Artificial Sequence: Synthetic oligonucleotide
augcuuauaugguaaagca

SEQ ID NO: 334344 - RNA, 19 nt, Artificial Sequence
  Description of Artificial Sequence: Synthetic oligonucleotide
uaaccuugcaaaagaagcu

SEQ ID NO: 334345 - RNA, 19 nt, Artificial Sequence
  Description of Artificial Sequence: Synthetic oligonucleotide
aauccaucugcguuguaga

SEQ ID NO: 334346 - RNA, 19 nt, Artificial Sequence
  Description of Artificial Sequence: Synthetic oligonucleotide
  modified_base (8)..(8): a, c, u, g, unknown or other
uuuuaucnuaauccuuucu

SEQ ID NO: 334347 - RNA, 19 nt, Artificial Sequence
  Description of Artificial Sequence: Synthetic oligonucleotide
ucgaucaucaccguacaag

SEQ ID NO: 334348 - RNA, 19 nt, Artificial Sequence
  Description of Artificial Sequence: Synthetic oligonucleotide
uuaucacagacuuuccgga

SEQ ID NO: 334349 - RNA, 19 nt, Artificial Sequence
  Description of Artificial Sequence: Synthetic oligonucleotide
gcuaacaacauggagaaag

SEQ ID NO: 334350 - RNA, 19 nt, Artificial Sequence
  Description of Artificial Sequence: Synthetic oligonucleotide
agguugaccaaagccaucc

SEQ ID NO: 334351 - RNA, 19 nt, Artificial Sequence
  Description of Artificial Sequence: Synthetic oligonucleotide
uuuuauagugagugaugag

SEQ ID NO: 334352 - RNA, 19 nt, Artificial Sequence
  Description of Artificial Sequence: Synthetic oligonucleotide
guuuaauaaaaggcggagg

SEQ ID NO: 334353 - RNA, 19 nt, Artificial Sequence
  Description of Artificial Sequence: Synthetic oligonucleotide
uauucugcgauaauaucua

SEQ ID NO: 334354 - RNA, 19 nt, Artificial Sequence
  Description of Artificial Sequence: Synthetic oligonucleotide
uucaagguuaacccacacc

SEQ ID NO: 334355 - RNA, 19 nt, Artificial Sequence
  Description of Artificial Sequence: Synthetic oligonucleotide
aucagggcggaauccauac

SEQ ID NO: 334356 - RNA, 19 nt, Artificial Sequence
  Description of Artificial Sequence: Synthetic oligonucleotide
gacgacaugagggucagag

SEQ ID NO: 334357 - RNA, 19 nt, Artificial Sequence
  Description of Artificial Sequence: Synthetic oligonucleotide
gaggcaaucaauccaucug

SEQ ID NO: 334358 - RNA, 19 nt, Artificial Sequence
  Description of Artificial Sequence: Synthetic oligonucleotide
ugcuuauaugguaaagcac

SEQ ID NO: 334359 - RNA, 19 nt, Artificial Sequence
  Description of Artificial Sequence: Synthetic oligonucleotide
ucuugcuagcgcaccaagg

SEQ ID NO: 334360 - RNA, 19 nt, Artificial Sequence
  Description of Artificial Sequence: Synthetic oligonucleotide
aacacaugacuuuggcuca

SEQ ID NO: 334361 - RNA, 19 nt, Artificial Sequence
  Description of Artificial Sequence: Synthetic oligonucleotide
uuguagcuaacucaacacu

SEQ ID NO: 334362 - RNA, 19 nt, Artificial Sequence
  Description of Artificial Sequence: Synthetic oligonucleotide
caucugacgacucucuacc

SEQ ID NO: 334363 - RNA, 19 nt, Artificial Sequence
  Description of Artificial Sequence: Synthetic oligonucleotide
aauccauacgcgguggcag

SEQ ID NO: 334364 - RNA, 19 nt, Artificial Sequence
  Description of Artificial Sequence: Synthetic oligonucleotide
auaccuguauuccaugugu

SEQ ID NO: 334365 - RNA, 19 nt, Artificial Sequence
  Description of Artificial Sequence: Synthetic oligonucleotide
ccuauuguuaauaaccuug

SEQ ID NO: 334366 - RNA, 19 nt, Artificial Sequence
  Description of Artificial Sequence: Synthetic oligonucleotide
ucuaagacaaggucauccu

SEQ ID NO: 334367 - RNA, 19 nt, Artificial Sequence
  Description of Artificial Sequence: Synthetic oligonucleotide
auuagucacuuauuguaca

SEQ ID NO: 334368 - RNA, 19 nt, Artificial Sequence
  Description of Artificial Sequence: Synthetic oligonucleotide
auugauuuaaagcggucau

SEQ ID NO: 334369 - RNA, 19 nt, Artificial Sequence
  Description of Artificial Sequence: Synthetic oligonucleotide
aagcccaacuuguaccauc

SEQ ID NO: 334370 - RNA, 19 nt, Artificial Sequence
  Description of Artificial Sequence: Synthetic oligonucleotide
agugcggugagcuuuggga

SEQ ID NO: 334371 - RNA, 19 nt, Artificial Sequence
  Description of Artificial Sequence: Synthetic oligonucleotide
cuuauaugguaaagcacac

SEQ ID NO: 334372 - RNA, 19 nt, Artificial Sequence
  Description of Artificial Sequence: Synthetic oligonucleotide
uuuccaggauagcaguuug

SEQ ID NO: 334373 - RNA, 19 nt, Artificial Sequence
  Description of Artificial Sequence: Synthetic oligonucleotide
uaaauagagagcgacucuc

SEQ ID NO: 334374 - RNA, 19 nt, Artificial Sequence
  Description of Artificial Sequence: Synthetic oligonucleotide
ucuuucaagaauguccccu

SEQ ID NO: 334375 - RNA, 19 nt, Artificial Sequence
  Description of Artificial Sequence: Synthetic oligonucleotide
agaguuaaccugcagcuaa

SEQ ID NO: 334376 - RNA, 19 nt, Artificial Sequence
  Description of Artificial Sequence: Synthetic oligonucleotide
agauaagcuggacauuucu

SEQ ID NO: 334377 - RNA, 19 nt, Artificial Sequence
  Description of Artificial Sequence: Synthetic oligonucleotide
uagaaugagcagcucaaaa

SEQ ID NO: 334378 - RNA, 19 nt, Artificial Sequence
  Description of Artificial Sequence: Synthetic oligonucleotide
uugagugggguucauuuaa

SEQ ID NO: 334379 - RNA, 19 nt, Artificial Sequence
  Description of Artificial Sequence: Synthetic oligonucleotide
uccccaacauaaucgauga

SEQ ID NO: 334380 - RNA, 19 nt, Artificial Sequence
  Description of Artificial Sequence: Synthetic oligonucleotide
uuaaagcggucauccaugc

SEQ ID NO: 334381 - RNA, 19 nt, Artificial Sequence
  Description of Artificial Sequence: Synthetic oligonucleotide
gauucccauagguugacca

SEQ ID NO: 334382 - RNA, 19 nt, Artificial Sequence
  Description of Artificial Sequence: Synthetic oligonucleotide
aucuaauguguuaucacag

SEQ ID NO: 334383 - RNA, 19 nt, Artificial Sequence
  Description of Artificial Sequence: Synthetic oligonucleotide
cuaucgagacccaaagcug

SEQ ID NO: 334384 - RNA, 19 nt, Artificial Sequence
  Description of Artificial Sequence: Synthetic oligonucleotide
ugcuagcgcaccaagggca

SEQ ID NO: 334385 - RNA, 19 nt, Artificial Sequence
  Description of Artificial Sequence: Synthetic oligonucleotide
aucugcguuguagaaaagg

SEQ ID NO: 334386 - RNA, 19 nt, Artificial Sequence
  Description of Artificial Sequence: Synthetic oligonucleotide
gaguauguaaguagaaaga

SEQ ID NO: 334387 - RNA, 19 nt, Artificial Sequence
  Description of Artificial Sequence: Synthetic oligonucleotide
acgucugauuuucaagguc

SEQ ID NO: 334388 - RNA, 19 nt, Artificial Sequence
  Description of Artificial Sequence: Synthetic oligonucleotide
ucaucaccguacaaguacu

SEQ ID NO: 334389 - RNA, 19 nt, Artificial Sequence
  Description of Artificial Sequence: Synthetic oligonucleotide
agcgaaacuucucacucug

SEQ ID NO: 334390 - RNA, 19 nt, Artificial Sequence
  Description of Artificial Sequence: Synthetic oligonucleotide
uuaacccacaccacacaga

SEQ ID NO: 334391 - RNA, 19 nt, Artificial Sequence
  Description of Artificial Sequence: Synthetic oligonucleotide
uuagucacuuauuguacau

SEQ ID NO: 334392 - RNA, 19 nt, Artificial Sequence
  Description of Artificial Sequence: Synthetic oligonucleotide
acaacauauguucaccguu

SEQ ID NO: 334393 - RNA, 19 nt, Artificial Sequence
  Description of Artificial Sequence: Synthetic oligonucleotide
auauccaucuccaccaugu

SEQ ID NO: 334394 - RNA, 19 nt, Artificial Sequence
  Description of Artificial Sequence: Synthetic oligonucleotide
cagggcggaauccauacgc

SEQ ID NO: 334395 - RNA, 19 nt, Artificial Sequence
  Description of Artificial Sequence: Synthetic oligonucleotide
ucccauagguugaccaaag

SEQ ID NO: 334396 - RNA, 19 nt, Artificial Sequence
  Description of Artificial Sequence: Synthetic oligonucleotide
gcuuauaugguaaagcaca

SEQ ID NO: 334397 - RNA, 19 nt, Artificial Sequence
  Description of Artificial Sequence: Synthetic oligonucleotide
aaguaaauagagagcgacu

SEQ ID NO: 334398 - RNA, 19 nt, Artificial Sequence
  Description of Artificial Sequence: Synthetic oligonucleotide
uaccuguauuccaugugug

SEQ ID NO: 334399 - RNA, 19 nt, Artificial Sequence
  Description of Artificial Sequence: Synthetic oligonucleotide
uacaaguacuguucacucu

SEQ ID NO: 334400 - RNA, 19 nt, Artificial Sequence
  Description of Artificial Sequence: Synthetic oligonucleotide
cauugaagaaaucuggacu

SEQ ID NO: 334401 - RNA, 19 nt, Artificial Sequence
  Description of Artificial Sequence: Synthetic oligonucleotide
uggacuuauggcuccuuca

SEQ ID NO: 334402 - RNA, 19 nt, Artificial Sequence
  Description of Artificial Sequence: Synthetic oligonucleotide
uggauguauggcucaauuc

SEQ ID NO: 334403 - RNA, 19 nt, Artificial Sequence
  Description of Artificial Sequence: Synthetic oligonucleotide
ggaauggucagauuugcca

SEQ ID NO: 334404 - RNA, 19 nt, Artificial Sequence
  Description of Artificial Sequence: Synthetic oligonucleotide
auagugagugaugagucca

SEQ ID NO: 334405 - RNA, 19 nt, Artificial Sequence
  Description of Artificial Sequence: Synthetic oligonucleotide
guacaaguacuguucacuc

SEQ ID NO: 334406 - RNA, 19 nt, Artificial Sequence
  Description of Artificial Sequence: Synthetic oligonucleotide
ggucuaugagauaugcugg

SEQ ID NO: 334407 - RNA, 19 nt, Artificial Sequence
  Description of Artificial Sequence: Synthetic oligonucleotide
uggaauggucagauuugcc

SEQ ID NO: 334408 - RNA, 19 nt, Artificial Sequence
  Description of Artificial Sequence: Synthetic oligonucleotide
gguuuaauaaaaggcggag

SEQ ID NO: 334409 - RNA, 19 nt, Artificial Sequence
  Description of Artificial Sequence: Synthetic oligonucleotide
ucccagauuuagcuagcag

SEQ ID NO: 334410 - RNA, 19 nt, Artificial Sequence
  Description of Artificial Sequence: Synthetic oligonucleotide
  modified_base (9)..(9): a, c, u, g, unknown or other
guuuuaucnuaauccuuuc

SEQ ID NO: 334411 - RNA, 19 nt, Artificial Sequence
  Description of Artificial Sequence: Synthetic oligonucleotide
agcgacucucaauagcugu

SEQ ID NO: 334412 - RNA, 19 nt, Artificial Sequence
  Description of Artificial Sequence: Synthetic oligonucleotide
gggauuaucccagauuuag

SEQ ID NO: 334413 - RNA, 19 nt, Artificial Sequence
  Description of Artificial Sequence: Synthetic oligonucleotide
ugaggaauggaaccagcuu

SEQ ID NO: 334414 - RNA, 19 nt, Artificial Sequence
  Description of Artificial Sequence: Synthetic oligonucleotide
agguuaacccacaccacac

SEQ ID NO: 334415 - RNA, 19 nt, Artificial Sequence
  Description of Artificial Sequence: Synthetic oligonucleotide
auuaugccagcgaaacuuc

SEQ ID NO: 334416 - RNA, 19 nt, Artificial Sequence
  Description of Artificial Sequence: Synthetic oligonucleotide
ugucaaaugagagguuuaa

SEQ ID NO: 334417 - RNA, 19 nt, Artificial Sequence
  Description of Artificial Sequence: Synthetic oligonucleotide
gaaaaguggugacuaucga

SEQ ID NO: 334418 - RNA, 19 nt, Artificial Sequence
  Description of Artificial Sequence: Synthetic oligonucleotide
agagcgacucucaauagcu

SEQ ID NO: 334419 - RNA, 19 nt, Artificial Sequence
  Description of Artificial Sequence: Synthetic oligonucleotide
ccagauuuagcuagcagug

SEQ ID NO: 334420 - RNA, 19 nt, Artificial Sequence
  Description of Artificial Sequence: Synthetic oligonucleotide
ucagggcggaauccauacg

SEQ ID NO: 334421 - RNA, 19 nt, Artificial Sequence
  Description of Artificial Sequence: Synthetic oligonucleotide
uguuuguagcuaacucaac

SEQ ID NO: 334422 - RNA, 19 nt, Artificial Sequence
  Description of Artificial Sequence: Synthetic oligonucleotide
caccguacaaguacuguuc

SEQ ID NO: 334423 - RNA, 19 nt, Artificial Sequence
  Description of Artificial Sequence: Synthetic oligonucleotide
gauguauggcucaauucga

SEQ ID NO: 334424 - RNA, 19 nt, Artificial Sequence
  Description of Artificial Sequence: Synthetic oligonucleotide
ucaccguacaaguacuguu

SEQ ID NO: 334425 - RNA, 19 nt, Artificial Sequence
  Description of Artificial Sequence: Synthetic oligonucleotide
agggcaguuucauuuaaua

SEQ ID NO: 334426 - RNA, 19 nt, Artificial Sequence
  Description of Artificial Sequence: Synthetic oligonucleotide
gauggaaaaccaucuggua

SEQ ID NO: 334427 - RNA, 19 nt, Artificial Sequence
  Description of Artificial Sequence: Synthetic oligonucleotide
auucgaucaucaccguaca

SEQ ID NO: 334428 - RNA, 19 nt, Artificial Sequence
  Description of Artificial Sequence: Synthetic oligonucleotide
gugcggugagcuuugggag

SEQ ID NO: 334429 - RNA, 19 nt, Artificial Sequence
  Description of Artificial Sequence: Synthetic oligonucleotide
uauguucaccguugguuaa

SEQ ID NO: 334430 - RNA, 19 nt, Artificial Sequence
  Description of Artificial Sequence: Synthetic oligonucleotide
accguacaaguacuguuca

SEQ ID NO: 334431 - RNA, 19 nt, Artificial Sequence
  Description of Artificial Sequence: Synthetic oligonucleotide
caagguccccaacauaauc

SEQ ID NO: 334432 - RNA, 19 nt, Artificial Sequence
  Description of Artificial Sequence: Synthetic oligonucleotide
caagguuaacccacaccac

SEQ ID NO: 334433 - RNA, 19 nt, Artificial Sequence
  Description of Artificial Sequence: Synthetic oligonucleotide
cauacgcgguggcaggacg

SEQ ID NO: 334434 - RNA, 19 nt, Artificial Sequence
  Description of Artificial Sequence: Synthetic oligonucleotide
cucaggacucuugcuagcg

SEQ ID NO: 334435 - RNA, 19 nt, Artificial Sequence
  Description of Artificial Sequence: Synthetic oligonucleotide
gaucaaggcagauccccga

SEQ ID NO: 334436 - RNA, 19 nt, Artificial Sequence
  Description of Artificial Sequence: Synthetic oligonucleotide
ccaacauaaucgaugaaca

SEQ ID NO: 334437 - RNA, 19 nt, Artificial Sequence
  Description of Artificial Sequence: Synthetic oligonucleotide
cccaacauaaucgaugaac

SEQ ID NO: 334438 - RNA, 19 nt, Artificial Sequence
  Description of Artificial Sequence: Synthetic oligonucleotide
uccaugcuuauaugguaaa

SEQ ID NO: 334439 - RNA, 19 nt, Artificial Sequence
  Description of Artificial Sequence: Synthetic oligonucleotide
auagguugaccaaagccau

SEQ ID NO: 334440 - RNA, 19 nt, Artificial Sequence
  Description of Artificial Sequence: Synthetic oligonucleotide
ucaauucgaucaucaccgu

SEQ ID NO: 334441 - RNA, 19 nt, Artificial Sequence
  Description of Artificial Sequence: Synthetic oligonucleotide
cagauuuagcuagcagugc

SEQ ID NO: 334442 - RNA, 19 nt, Artificial Sequence
  Description of Artificial Sequence: Synthetic oligonucleotide
ucgagacccaaagcuguag

SEQ ID NO: 334443 - RNA, 19 nt, Artificial Sequence
  Description of Artificial Sequence: Synthetic oligonucleotide
ccgaucaagagccuucacc

SEQ ID NO: 334444 - RNA, 19 nt, Artificial Sequence
  Description of Artificial Sequence: Synthetic oligonucleotide
gagugcggugagcuuuggg

SEQ ID NO: 334445 - RNA, 19 nt, Artificial Sequence
  Description of Artificial Sequence: Synthetic oligonucleotide
agaaguaaauagagagcga

SEQ ID NO: 334446 - RNA, 19 nt, Artificial Sequence
  Description of Artificial Sequence: Synthetic oligonucleotide
acagacgacaugaggguca

SEQ ID NO: 334447 - RNA, 19 nt, Artificial Sequence
  Description of Artificial Sequence: Synthetic oligonucleotide
guaaauagagagcgacucu

SEQ ID NO: 334448 - RNA, 19 nt, Artificial Sequence
  Description of Artificial Sequence: Synthetic oligonucleotide
uucgaucaucaccguacaa

SEQ ID NO: 334449 - RNA, 19 nt, Artificial Sequence
  Description of Artificial Sequence: Synthetic oligonucleotide
caucaccguacaaguacug

SEQ ID NO: 334450 - RNA, 19 nt, Artificial Sequence
  Description of Artificial Sequence: Synthetic oligonucleotide
uggccugauggaaaaccau

SEQ ID NO: 334451 - RNA, 19 nt, Artificial Sequence
  Description of Artificial Sequence: Synthetic oligonucleotide
  modified_base (10)..(10): a, c, u, g, unknown or other
gguuuuaucnuaauccuuu

SEQ ID NO: 334452 - RNA, 19 nt, Artificial Sequence
  Description of Artificial Sequence: Synthetic oligonucleotide
ugggauuaucccagauuua

SEQ ID NO: 334453 - RNA, 19 nt, Artificial Sequence
  Description of Artificial Sequence: Synthetic oligonucleotide
ccagucuaggucuggaaug

SEQ ID NO: 334454 - RNA, 19 nt, Artificial Sequence
  Description of Artificial Sequence: Synthetic oligonucleotide
uucucuuaagcugggcaua

SEQ ID NO: 334455 - RNA, 19 nt, Artificial Sequence
  Description of Artificial Sequence: Synthetic oligonucleotide
aucaccguacaaguacugu

SEQ ID NO: 334456 - RNA, 19 nt, Artificial Sequence
  Description of Artificial Sequence: Synthetic oligonucleotide
aguuaaccugcagcuaaca

SEQ ID NO: 334457 - RNA, 19 nt, Artificial Sequence
  Description of Artificial Sequence: Synthetic oligonucleotide
cucaacgucugauuuucaa

SEQ ID NO: 334458 - RNA, 19 nt, Artificial Sequence
  Description of Artificial Sequence: Synthetic oligonucleotide
aucaaggcagauccccgaa

SEQ ID NO: 334459 - RNA, 19 nt, Artificial Sequence
  Description of Artificial Sequence: Synthetic oligonucleotide
caggacucuugcuagcgca

SEQ ID NO: 334460 - RNA, 19 nt, Artificial Sequence
  Description of Artificial Sequence: Synthetic oligonucleotide
acgacaugagggucagagu

SEQ ID NO: 334461 - RNA, 19 nt, Artificial Sequence
  Description of Artificial Sequence: Synthetic oligonucleotide
auccaugcuuauaugguaa

SEQ ID NO: 334462 - RNA, 19 nt, Artificial Sequence
  Description of Artificial Sequence: Synthetic oligonucleotide
ggaucaaggcagauccccg

SEQ ID NO: 334463 - RNA, 19 nt, Artificial Sequence
  Description of Artificial Sequence: Synthetic oligonucleotide
agggcggaauccauacgcg

SEQ ID NO: 334464 - RNA, 19 nt, Artificial Sequence
  Description of Artificial Sequence: Synthetic oligonucleotide
gaauuaugccagcgaaacu

SEQ ID NO: 334465 - RNA, 19 nt, Artificial Sequence
  Description of Artificial Sequence: Synthetic oligonucleotide
cuggacuuauggcuccuuc

SEQ ID NO: 334466 - RNA, 19 nt, Artificial Sequence
  Description of Artificial Sequence: Synthetic oligonucleotide
cccaacuuguaccaucuug

SEQ ID NO: 334467 - RNA, 19 nt, Artificial Sequence
  Description of Artificial Sequence: Synthetic oligonucleotide
aucugacgacucucuacca

SEQ ID NO: 334468 - RNA, 19 nt, Artificial Sequence
  Description of Artificial Sequence: Synthetic oligonucleotide
ccaaguuaucaggauuucg

SEQ ID NO: 334469 - RNA, 19 nt, Artificial Sequence
  Description of Artificial Sequence: Synthetic oligonucleotide
gggcggaauccauacgcgg

SEQ ID NO: 334470 - RNA, 19 nt, Artificial Sequence
  Description of Artificial Sequence: Synthetic oligonucleotide
ggauuaucccagauuuagc

SEQ ID NO: 334471 - RNA, 19 nt, Artificial Sequence
  Description of Artificial Sequence: Synthetic oligonucleotide
ccagcgaaacuucucacuc

SEQ ID NO: 334472 - RNA, 19 nt, Artificial Sequence
  Description of Artificial Sequence: Synthetic oligonucleotide
gcgauaauaucuaaugugu

SEQ ID NO: 334473 - RNA, 19 nt, Artificial Sequence
  Description of Artificial Sequence: Synthetic oligonucleotide
ucccgaucaagagccuuca

SEQ ID NO: 334474 - RNA, 19 nt, Artificial Sequence
  Description of Artificial Sequence: Synthetic oligonucleotide
  modified_base (11)..(11): a, c, u, g, unknown or other
agguuuuaucnuaauccuu

SEQ ID NO: 334475 - RNA, 19 nt, Artificial Sequence
  Description of Artificial Sequence: Synthetic oligonucleotide
agcccaacuuguaccaucu

SEQ ID NO: 334476 - RNA, 19 nt, Artificial Sequence
  Description of Artificial Sequence: Synthetic oligonucleotide
gagcgacucucaauagcug

SEQ ID NO: 334477 - RNA, 19 nt, Artificial Sequence
  Description of Artificial Sequence: Synthetic oligonucleotide
guccccaaacacucaauua

SEQ ID NO: 334478 - RNA, 19 nt, Artificial Sequence
  Description of Artificial Sequence: Synthetic oligonucleotide
caucugcguuguagaaaag

SEQ ID NO: 334479 - RNA, 19 nt, Artificial Sequence
  Description of Artificial Sequence: Synthetic oligonucleotide
auguauggcucaauucgau

SEQ ID NO: 334480 - RNA, 19 nt, Artificial Sequence
  Description of Artificial Sequence: Synthetic oligonucleotide
ggucaaugauauucauaca

SEQ ID NO: 334481 - RNA, 19 nt, Artificial Sequence
  Description of Artificial Sequence: Synthetic oligonucleotide
gguuaacccacaccacaca

SEQ ID NO: 334482 - RNA, 19 nt, Artificial Sequence
  Description of Artificial Sequence: Synthetic oligonucleotide
uccauacgcgguggcagga

SEQ ID NO: 334483 - RNA, 19 nt, Artificial Sequence
  Description of Artificial Sequence: Synthetic oligonucleotide
cagacgacaugagggucag

SEQ ID NO: 334484 - RNA, 19 nt, Artificial Sequence
  Description of Artificial Sequence: Synthetic oligonucleotide
gcggaauccauacgcggug

SEQ ID NO: 334485 - RNA, 19 nt, Artificial Sequence
  Description of Artificial Sequence: Synthetic oligonucleotide
uaaaaggcggagggugaua

SEQ ID NO: 334486 - RNA, 19 nt, Artificial Sequence
  Description of Artificial Sequence: Synthetic oligonucleotide
gaucaucaccguacaagua

SEQ ID NO: 334487 - RNA, 19 nt, Artificial Sequence
  Description of Artificial Sequence: Synthetic oligonucleotide
gguugagugggguucauuu

SEQ ID NO: 334488 - RNA, 19 nt, Artificial Sequence
  Description of Artificial Sequence: Synthetic oligonucleotide
caauucgaucaucaccgua

SEQ ID NO: 334489 - RNA, 19 nt, Artificial Sequence
  Description of Artificial Sequence: Synthetic oligonucleotide
caugagggucagaguuaac

SEQ ID NO: 334490 - RNA, 19 nt, Artificial Sequence
  Description of Artificial Sequence: Synthetic oligonucleotide
uugucccgaucaagagccu

SEQ ID NO: 334491 - RNA, 19 nt, Artificial Sequence
  Description of Artificial Sequence: Synthetic oligonucleotide
cuagaaugagcagcucaaa

SEQ ID NO: 334492 - RNA, 19 nt, Artificial Sequence
  Description of Artificial Sequence: Synthetic oligonucleotide
auacgcgguggcaggacgu

SEQ ID NO: 334493 - RNA, 19 nt, Artificial Sequence
  Description of Artificial Sequence: Synthetic oligonucleotide
gugucaaaugagagguuua

SEQ ID NO: 334494 - RNA, 19 nt, Artificial Sequence
  Description of Artificial Sequence: Synthetic oligonucleotide
uacgcgguggcaggacguc

SEQ ID NO: 334495 - RNA, 19 nt, Artificial Sequence
  Description of Artificial Sequence: Synthetic oligonucleotide
agcuuugggagaagcccaa

SEQ ID NO: 334496 - RNA, 19 nt, Artificial Sequence
  Description of Artificial Sequence: Synthetic oligonucleotide
ccguacaaguacuguucac

SEQ ID NO: 334497 - RNA, 19 nt, Artificial Sequence
  Description of Artificial Sequence: Synthetic oligonucleotide
cagcgaaacuucucacucu

SEQ ID NO: 334498 - RNA, 19 nt, Artificial Sequence
  Description of Artificial Sequence: Synthetic oligonucleotide
gacguccaaggauucccau

SEQ ID NO: 334499 - RNA, 19 nt, Artificial Sequence
  Description of Artificial Sequence: Synthetic oligonucleotide
auguguuaucacagacuuu

SEQ ID NO: 334500 - RNA, 19 nt, Artificial Sequence
  Description of Artificial Sequence: Synthetic oligonucleotide
ggauucccauagguugacc

SEQ ID NO: 334501 - RNA, 19 nt, Artificial Sequence
  Description of Artificial Sequence: Synthetic oligonucleotide
gcgaguguccucagcaaga

SEQ ID NO: 334502 - RNA, 19 nt, Artificial Sequence
  Description of Artificial Sequence: Synthetic oligonucleotide
aucgagacccaaagcugua

SEQ ID NO: 334503 - RNA, 19 nt, Artificial Sequence
  Description of Artificial Sequence: Synthetic oligonucleotide
gccagcgaaacuucucacu

SEQ ID NO: 334504 - RNA, 19 nt, Artificial Sequence
  Description of Artificial Sequence: Synthetic oligonucleotide
caucauauucugcgauaau

SEQ ID NO: 334505 - RNA, 19 nt, Artificial Sequence
  Description of Artificial Sequence: Synthetic oligonucleotide
ggagugcggugagcuuugg

SEQ ID NO: 334506 - RNA, 19 nt, Artificial Sequence
  Description of Artificial Sequence: Synthetic oligonucleotide
cgacucucaauagcuguuc

SEQ ID NO: 334507 - RNA, 19 nt, Artificial Sequence
  Description of Artificial Sequence: Synthetic oligonucleotide
cccgaucaagagccuucac

SEQ ID NO: 334508 - RNA, 19 nt, Artificial Sequence
  Description of Artificial Sequence: Synthetic oligonucleotide
agacgacaugagggucaga

SEQ ID NO: 334509 - RNA, 19 nt, Artificial Sequence
  Description of Artificial Sequence: Synthetic oligonucleotide
ccauacgcgguggcaggac

SEQ ID NO: 334510 - RNA, 19 nt, Artificial Sequence
  Description of Artificial Sequence: Synthetic oligonucleotide
gggagauguuucugaucau

SEQ ID NO: 334511 - RNA, 19 nt, Artificial Sequence
  Description of Artificial Sequence: Synthetic oligonucleotide
caaugagugcugggauuau

SEQ ID NO: 334512 - RNA, 19 nt, Artificial Sequence
  Description of Artificial Sequence: Synthetic oligonucleotide
gguccccaacauaaucgau

SEQ ID NO: 334513 - RNA, 19 nt, Artificial Sequence
  Description of Artificial Sequence: Synthetic oligonucleotide
gcgacucucaauagcuguu

SEQ ID NO: 334514 - RNA, 19 nt, Artificial Sequence
  Description of Artificial Sequence: Synthetic oligonucleotide
aaaacagugaagcagauuc

SEQ ID NO: 334515 - RNA, 19 nt, Artificial Sequence
  Description of Artificial Sequence: Synthetic oligonucleotide
uaaguacucagguagaggg

SEQ ID NO: 334516 - RNA, 19 nt, Artificial Sequence
  Description of Artificial Sequence: Synthetic oligonucleotide
aaaucgaugaaagguauuc

SEQ ID NO: 334517 - RNA, 19 nt, Artificial Sequence
  Description of Artificial Sequence: Synthetic oligonucleotide
uuagacgucagcuacaaau

SEQ ID NO: 334518 - RNA, 19 nt, Artificial Sequence
  Description of Artificial Sequence: Synthetic oligonucleotide
gaauuuggagcucagguac

SEQ ID NO: 334519 - RNA, 19 nt, Artificial Sequence
  Description of Artificial Sequence: Synthetic oligonucleotide
ucgaacaccucucggagcg

SEQ ID NO: 334520 - RNA, 19 nt, Artificial Sequence
  Description of Artificial Sequence: Synthetic oligonucleotide
aaagguauuccuguccgcg

SEQ ID NO: 334521 - RNA, 19 nt, Artificial Sequence
  Description of Artificial Sequence: Synthetic oligonucleotide
gauauuguagaagucccgg

SEQ ID NO: 334522 - RNA, 19 nt, Artificial Sequence
  Description of Artificial Sequence: Synthetic oligonucleotide
uuacggauauuguagaagu

SEQ ID NO: 334523 - RNA, 19 nt, Artificial Sequence
  Description of Artificial Sequence: Synthetic oligonucleotide
acuguuacgggccaguuca

SEQ ID NO: 334524 - RNA, 19 nt, Artificial Sequence
  Description of Artificial Sequence: Synthetic oligonucleotide
ugaacucuagccaaagccu

SEQ ID NO: 334525 - RNA, 19 nt, Artificial Sequence
  Description of Artificial Sequence: Synthetic oligonucleotide
uaaacuugucaaaucgaug

SEQ ID NO: 334526 - RNA, 19 nt, Artificial Sequence
  Description of Artificial Sequence: Synthetic oligonucleotide
aaacccucaagggugguac

SEQ ID NO: 334527 - RNA, 19 nt, Artificial Sequence
  Description of Artificial Sequence: Synthetic oligonucleotide
uaugggaccauugauaauc

SEQ ID NO: 334528 - RNA, 19 nt, Artificial Sequence
  Description of Artificial Sequence: Synthetic oligonucleotide
aacuacgguagccuccaac

SEQ ID NO: 334529 - RNA, 19 nt, Artificial Sequence
  Description of Artificial Sequence: Synthetic oligonucleotide
uuagcgaagguguaauaca

SEQ ID NO: 334530 - RNA, 19 nt, Artificial Sequence
  Description of Artificial Sequence: Synthetic oligonucleotide
aaagggauauguggaauag

SEQ ID NO: 334531 - RNA, 19 nt, Artificial Sequence
  Description of Artificial Sequence: Synthetic oligonucleotide
uagcgaagguguaauacag

SEQ ID NO: 334532 - RNA, 19 nt, Artificial Sequence
  Description of Artificial Sequence: Synthetic oligonucleotide
guaauacagguacugcagg

SEQ ID NO: 334533 - RNA, 19 nt, Artificial Sequence
  Description of Artificial Sequence: Synthetic oligonucleotide
ucggaugucuggcacauug

SEQ ID NO: 334534 - RNA, 19 nt, Artificial Sequence
  Description of Artificial Sequence: Synthetic oligonucleotide
auguggaauagaaaggaac

SEQ ID NO: 334535 - RNA, 19 nt, Artificial Sequence
  Description of Artificial Sequence: Synthetic oligonucleotide
acaaacguauggaagcccc

SEQ ID NO: 334536 - RNA, 19 nt, Artificial Sequence
  Description of Artificial Sequence: Synthetic oligonucleotide
ucaagucguaggcagugag

SEQ ID NO: 334537 - RNA, 19 nt, Artificial Sequence
  Description of Artificial Sequence: Synthetic oligonucleotide
ggaccauugauaaucaggg

SEQ ID NO: 334538 - RNA, 19 nt, Artificial Sequence
  Description of Artificial Sequence: Synthetic oligonucleotide
caccuuacggauauuguag

SEQ ID NO: 334539 - RNA, 19 nt, Artificial Sequence
  Description of Artificial Sequence: Synthetic oligonucleotide
acuacgguagccuccaacu

SEQ ID NO: 334540 - RNA, 19 nt, Artificial Sequence
  Description of Artificial Sequence: Synthetic oligonucleotide
ucaaaucgaugaaagguau

SEQ ID NO: 334541 - RNA, 19 nt, Artificial Sequence
  Description of Artificial Sequence: Synthetic oligonucleotide
cacauuagacgucagcuac

SEQ ID NO: 334542 - RNA, 19 nt, Artificial Sequence
  Description of Artificial Sequence: Synthetic oligonucleotide
uccacacucaagucguagg

SEQ ID NO: 334543 - RNA, 19 nt, Artificial Sequence
  Description of Artificial Sequence: Synthetic oligonucleotide
gauaaguacucagguagag

SEQ ID NO: 334544 - RNA, 19 nt, Artificial Sequence
  Description of Artificial Sequence: Synthetic oligonucleotide
ugcgaaagguccaaucaga

SEQ ID NO: 334545 - RNA, 19 nt, Artificial Sequence
  Description of Artificial Sequence: Synthetic oligonucleotide
ugacuuuaugggaccauug

SEQ ID NO: 334546 - RNA, 19 nt, Artificial Sequence
  Description of Artificial Sequence: Synthetic oligonucleotide
cucgaacgcccguagaugg

SEQ ID NO: 334547 - RNA, 19 nt, Artificial Sequence
  Description of Artificial Sequence: Synthetic oligonucleotide
aaacguauggaagccccuc

SEQ ID NO: 334548 - RNA, 19 nt, Artificial Sequence
  Description of Artificial Sequence: Synthetic oligonucleotide
auaaguacucagguagagg

SEQ ID NO: 334549 - RNA, 19 nt, Artificial Sequence
  Description of Artificial Sequence: Synthetic oligonucleotide
cuuacggauauuguagaag

SEQ ID NO: 334550 - RNA, 19 nt, Artificial Sequence
  Description of Artificial Sequence: Synthetic oligonucleotide
cacgggauaaguacucagg

SEQ ID NO: 334551 - RNA, 19 nt, Artificial Sequence
  Description of Artificial Sequence: Synthetic oligonucleotide
uucauugccccgcuugaug

SEQ ID NO: 334552 - RNA, 19 nt, Artificial Sequence
  Description of Artificial Sequence: Synthetic oligonucleotide
ugucaaaaccauccacgug

SEQ ID NO: 334553 - RNA, 19 nt, Artificial Sequence
  Description of Artificial Sequence: Synthetic oligonucleotide
gacggacuccccaauaggg

SEQ ID NO: 334554 - RNA, 19 nt, Artificial Sequence
  Description of Artificial Sequence: Synthetic oligonucleotide
guucacacaugucacagga

SEQ ID NO: 334555 - RNA, 19 nt, Artificial Sequence
  Description of Artificial Sequence: Synthetic oligonucleotide
ugugagcaaaguacuuccc

SEQ ID NO: 334556 - RNA, 19 nt, Artificial Sequence
  Description of Artificial Sequence: Synthetic oligonucleotide
aagucguaggcagugagau

SEQ ID NO: 334557 - RNA, 19 nt, Artificial Sequence
  Description of Artificial Sequence: Synthetic oligonucleotide
uccgcgugcacaucaagug

SEQ ID NO: 334558 - RNA, 19 nt, Artificial Sequence
  Description of Artificial Sequence: Synthetic oligonucleotide
uccuggacgggucacuagc

SEQ ID NO: 334559 - RNA, 19 nt, Artificial Sequence
  Description of Artificial Sequence: Synthetic oligonucleotide
gaugugagcaaaguacuuc

SEQ ID NO: 334560 - RNA, 19 nt, Artificial Sequence
  Description of Artificial Sequence: Synthetic oligonucleotide
aacguauggaagccccucu

SEQ ID NO: 334561 - RNA, 19 nt, Artificial Sequence
  Description of Artificial Sequence: Synthetic oligonucleotide
guuagcgaagguguaauac

SEQ ID NO: 334562 - RNA, 19 nt, Artificial Sequence
  Description of Artificial Sequence: Synthetic oligonucleotide
acuuuaugggaccauugau

SEQ ID NO: 334563 - RNA, 19 nt, Artificial Sequence
  Description of Artificial Sequence: Synthetic oligonucleotide
acgggauaaguacucaggu

SEQ ID NO: 334564 - RNA, 19 nt, Artificial Sequence
  Description of Artificial Sequence: Synthetic oligonucleotide
acgaucaaguugcugagau

SEQ ID NO: 334565 - RNA, 19 nt, Artificial Sequence
  Description of Artificial Sequence: Synthetic oligonucleotide
agaggguuccggugguagc

SEQ ID NO: 334566 - RNA, 19 nt, Artificial Sequence
  Description of Artificial Sequence: Synthetic oligonucleotide
gauaagcgccagcucuugg

SEQ ID NO: 334567 - RNA, 19 nt, Artificial Sequence
  Description of Artificial Sequence: Synthetic oligonucleotide
auauuguagaagucccggu

SEQ ID NO: 334568 - RNA, 19 nt, Artificial Sequence
  Description of Artificial Sequence: Synthetic oligonucleotide
uauggaagccccucugccu

SEQ ID NO: 334569 - RNA, 19 nt, Artificial Sequence
  Description of Artificial Sequence: Synthetic oligonucleotide
aagguauuccuguccgcgu

SEQ ID NO: 334570 - RNA, 19 nt, Artificial Sequence
  Description of Artificial Sequence: Synthetic oligonucleotide
ugaugaaacgcagcagaug

SEQ ID NO: 334571 - RNA, 19 nt, Artificial Sequence
  Description of Artificial Sequence: Synthetic oligonucleotide
guauggaagccccucugcc

SEQ ID NO: 334572 - RNA, 19 nt, Artificial Sequence
  Description of Artificial Sequence: Synthetic oligonucleotide
aggacggacuccccaauag

SEQ ID NO: 334573 - RNA, 19 nt, Artificial Sequence
  Description of Artificial Sequence: Synthetic oligonucleotide
gaaagguauuccuguccgc

SEQ ID NO: 334574 - RNA, 19 nt, Artificial Sequence
  Description of Artificial Sequence: Synthetic oligonucleotide
aggugcgaaagguccaauc

SEQ ID NO: 334575 - RNA, 19 nt, Artificial Sequence
  Description of Artificial Sequence: Synthetic oligonucleotide
agucaggcuucugacaauc

SEQ ID NO: 334576 - RNA, 19 nt, Artificial Sequence
  Description of Artificial Sequence: Synthetic oligonucleotide
aggguacgaagcuccacuc

SEQ ID NO: 334577 - RNA, 19 nt, Artificial Sequence
  Description of Artificial Sequence: Synthetic oligonucleotide
guagcagaaugacuuuaug

SEQ ID NO: 334578 - RNA, 19 nt, Artificial Sequence
  Description of Artificial Sequence: Synthetic oligonucleotide
caagaggcuaacugggauc

SEQ ID NO: 334579 - RNA, 19 nt, Artificial Sequence
  Description of Artificial Sequence: Synthetic oligonucleotide
agggauauguggaauagaa

SEQ ID NO: 334580 - RNA, 19 nt, Artificial Sequence
  Description of Artificial Sequence: Synthetic oligonucleotide
aauacagguaguaggcgua

SEQ ID NO: 334581 - RNA, 19 nt, Artificial Sequence
  Description of Artificial Sequence: Synthetic oligonucleotide
ugccuagcacagacgagcc

SEQ ID NO: 334582 - RNA, 19 nt, Artificial Sequence
  Description of Artificial Sequence: Synthetic oligonucleotide
ucugacaauccuggacggg

SEQ ID NO: 334583 - RNA, 19 nt, Artificial Sequence
  Description of Artificial Sequence: Synthetic oligonucleotide
cauaacacaacaagaggcu

SEQ ID NO: 334584 - RNA, 19 nt, Artificial Sequence
  Description of Artificial Sequence: Synthetic oligonucleotide
uguagucggcgguagcaga

SEQ ID NO: 334585 - RNA, 19 nt, Artificial Sequence
  Description of Artificial Sequence: Synthetic oligonucleotide
aucagcacauuagacguca

SEQ ID NO: 334586 - RNA, 19 nt, Artificial Sequence
  Description of Artificial Sequence: Synthetic oligonucleotide
gguguaauacagguaguag

SEQ ID NO: 334587 - RNA, 19 nt, Artificial Sequence
  Description of Artificial Sequence: Synthetic oligonucleotide
caggugucguuucauugcc

SEQ ID NO: 334588 - RNA, 19 nt, Artificial Sequence
  Description of Artificial Sequence: Synthetic oligonucleotide
aaagguccaaucagagaca

SEQ ID NO: 334589 - RNA, 19 nt, Artificial Sequence
  Description of Artificial Sequence: Synthetic oligonucleotide
cagggacauauccagcccc

SEQ ID NO: 334590 - RNA, 19 nt, Artificial Sequence
  Description of Artificial Sequence: Synthetic oligonucleotide
uacggauauuguagaaguc

SEQ ID NO: 334591 - RNA, 19 nt, Artificial Sequence
  Description of Artificial Sequence: Synthetic oligonucleotide
ugcguucugguauuugcuc

SEQ ID NO: 334592 - RNA, 19 nt, Artificial Sequence
  Description of Artificial Sequence: Synthetic oligonucleotide
agguauuccuguccgcgug

SEQ ID NO: 334593 - RNA, 19 nt, Artificial Sequence
  Description of Artificial Sequence: Synthetic oligonucleotide
acagcgacaugcagagacc

SEQ ID NO: 334594 - RNA, 19 nt, Artificial Sequence
  Description of Artificial Sequence: Synthetic oligonucleotide
ugaugugagcaaaguacuu

SEQ ID NO: 334595 - RNA, 19 nt, Artificial Sequence
  Description of Artificial Sequence: Synthetic oligonucleotide
guacaagggagcugguaac

SEQ ID NO: 334596 - RNA, 19 nt, Artificial Sequence
  Description of Artificial Sequence: Synthetic oligonucleotide
aauuuggagcucagguacu

SEQ ID NO: 334597 - RNA, 19 nt, Artificial Sequence
  Description of Artificial Sequence: Synthetic oligonucleotide
ggugcgaaagguccaauca

SEQ ID NO: 334598 - RNA, 19 nt, Artificial Sequence
  Description of Artificial Sequence: Synthetic oligonucleotide
guaggcguaggguggguug

SEQ ID NO: 334599 - RNA, 19 nt, Artificial Sequence
  Description of Artificial Sequence: Synthetic oligonucleotide
ccuugguauaguugggucc

SEQ ID NO: 334600 - RNA, 19 nt, Artificial Sequence
  Description of Artificial Sequence: Synthetic oligonucleotide
acuaucccaagccccugug

SEQ ID NO: 334601 - RNA, 19 nt, Artificial Sequence
  Description of Artificial Sequence: Synthetic oligonucleotide
acagacgagccccuccuga

SEQ ID NO: 334602 - RNA, 19 nt, Artificial Sequence
  Description of Artificial Sequence: Synthetic oligonucleotide
ugcggcggaugucauugcc

SEQ ID NO: 334603 - RNA, 19 nt, Artificial Sequence
  Description of Artificial Sequence: Synthetic oligonucleotide
cuuugugcaccacugccca

SEQ ID NO: 334604 - RNA, 19 nt, Artificial Sequence
  Description of Artificial Sequence: Synthetic oligonucleotide
acuguagucggcgguagca

SEQ ID NO: 334605 - RNA, 19 nt, Artificial Sequence
  Description of Artificial Sequence: Synthetic oligonucleotide
gcuaacugggaucuggguc

SEQ ID NO: 334606 - RNA, 19 nt, Artificial Sequence
  Description of Artificial Sequence: Synthetic oligonucleotide
guugucgguuuugaugaag

SEQ ID NO: 334607 - RNA, 19 nt, Artificial Sequence
  Description of Artificial Sequence: Synthetic oligonucleotide
acguauggaagccccucug

SEQ ID NO: 334608 - RNA, 19 nt, Artificial Sequence
  Description of Artificial Sequence: Synthetic oligonucleotide
agcgaagguguaauacagg

SEQ ID NO: 334609 - RNA, 19 nt, Artificial Sequence
  Description of Artificial Sequence: Synthetic oligonucleotide
uacucagguagaggguucc

SEQ ID NO: 334610 - RNA, 19 nt, Artificial Sequence
  Description of Artificial Sequence: Synthetic oligonucleotide
gacaauccuggacggguca

SEQ ID NO: 334611 - RNA, 19 nt, Artificial Sequence
  Description of Artificial Sequence: Synthetic oligonucleotide
ugauaagcgccagcucuug

SEQ ID NO: 334612 - RNA, 19 nt, Artificial Sequence
  Description of Artificial Sequence: Synthetic oligonucleotide
ugccccgcuugaugaaacg

SEQ ID NO: 334613 - RNA, 19 nt, Artificial Sequence
  Description of Artificial Sequence: Synthetic oligonucleotide
aagguguaauacagguagu

SEQ ID NO: 334614 - RNA, 19 nt, Artificial Sequence
  Description of Artificial Sequence: Synthetic oligonucleotide
uucugguauuugcucuccu

SEQ ID NO: 334615 - RNA, 19 nt, Artificial Sequence
  Description of Artificial Sequence: Synthetic oligonucleotide
gaucucucggaggacggac

SEQ ID NO: 334616 - RNA, 19 nt, Artificial Sequence
  Description of Artificial Sequence: Synthetic oligonucleotide
caaagggauauguggaaua

SEQ ID NO: 334617 - RNA, 19 nt, Artificial Sequence
  Description of Artificial Sequence: Synthetic oligonucleotide
uguuagcgaagguguaaua

SEQ ID NO: 334618 - RNA, 19 nt, Artificial Sequence
  Description of Artificial Sequence: Synthetic oligonucleotide
ccuagcacagacgagcccc

SEQ ID NO: 334619 - RNA, 19 nt, Artificial Sequence
  Description of Artificial Sequence: Synthetic oligonucleotide
agucggcgguagcagaaug

SEQ ID NO: 334620 - RNA, 19 nt, Artificial Sequence
  Description of Artificial Sequence: Synthetic oligonucleotide
ucggagcgucugcucacgg

SEQ ID NO: 334621 - RNA, 19 nt, Artificial Sequence
  Description of Artificial Sequence: Synthetic oligonucleotide
uaacggcggacgcagcauc

SEQ ID NO: 334622 - RNA, 19 nt, Artificial Sequence
  Description of Artificial Sequence: Synthetic oligonucleotide
auguuagcgaagguguaau

SEQ ID NO: 334623 - RNA, 19 nt, Artificial Sequence
  Description of Artificial Sequence: Synthetic oligonucleotide
gccaugagcaagcccaagc

SEQ ID NO: 334624 - RNA, 19 nt, Artificial Sequence
  Description of Artificial Sequence: Synthetic oligonucleotide
guagccucaaacaguggca

SEQ ID NO: 334625 - RNA, 19 nt, Artificial Sequence
  Description of Artificial Sequence: Synthetic oligonucleotide
cucacacaacuaucccaag

SEQ ID NO: 334626 - RNA, 19 nt, Artificial Sequence
  Description of Artificial Sequence: Synthetic oligonucleotide
ggugcggcggaugucauug

SEQ ID NO: 334627 - RNA, 19 nt, Artificial Sequence
  Description of Artificial Sequence: Synthetic oligonucleotide
agcccacucggaugucugg

SEQ ID NO: 334628 - RNA, 19 nt, Artificial Sequence
  Description of Artificial Sequence: Synthetic oligonucleotide
ucgaacgcccguagaugga

SEQ ID NO: 334629 - RNA, 19 nt, Artificial Sequence
  Description of Artificial Sequence: Synthetic oligonucleotide
cuggacgggucacuagcag

SEQ ID NO: 334630 - RNA, 19 nt, Artificial Sequence
  Description of Artificial Sequence: Synthetic oligonucleotide
uugccccgcuugaugaaac

SEQ ID NO: 334631 - RNA, 19 nt, Artificial Sequence
  Description of Artificial Sequence: Synthetic oligonucleotide
aggugucguuucauugccc

SEQ ID NO: 334632 - RNA, 19 nt, Artificial Sequence
  Description of Artificial Sequence: Synthetic oligonucleotide
ucaggguagcugcucccuc

SEQ ID NO: 334633 - RNA, 19 nt, Artificial Sequence
  Description of Artificial Sequence: Synthetic oligonucleotide
cuguagucggcgguagcag

SEQ ID NO: 334634 - RNA, 19 nt, Artificial Sequence
  Description of Artificial Sequence: Synthetic oligonucleotide
auccuggacgggucacuag

SEQ ID NO: 334635 - RNA, 19 nt, Artificial Sequence
  Description of Artificial Sequence: Synthetic oligonucleotide
augacaaggccuacuuccu

SEQ ID NO: 334636 - RNA, 19 nt, Artificial Sequence
  Description of Artificial Sequence: Synthetic oligonucleotide
acauuagacgucagcuaca

SEQ ID NO: 334637 - RNA, 19 nt, Artificial Sequence
  Description of Artificial Sequence: Synthetic oligonucleotide
gccgaucugagccagguaa

SEQ ID NO: 334638 - RNA, 19 nt, Artificial Sequence
  Description of Artificial Sequence: Synthetic oligonucleotide
gguauuccuguccgcgugc

SEQ ID NO: 334639 - RNA, 19 nt, Artificial Sequence
  Description of Artificial Sequence: Synthetic oligonucleotide
gcgaaagguccaaucagag

SEQ ID NO: 334640 - RNA, 19 nt, Artificial Sequence
  Description of Artificial Sequence: Synthetic oligonucleotide
agacgagccccuccugacu

SEQ ID NO: 334641 - RNA, 19 nt, Artificial Sequence
  Description of Artificial Sequence: Synthetic oligonucleotide
agcgacaugcagagaccac

SEQ ID NO: 334642 - RNA, 19 nt, Artificial Sequence
  Description of Artificial Sequence: Synthetic oligonucleotide
cccaauaggguuguauuug

SEQ ID NO: 334643 - RNA, 19 nt, Artificial Sequence
  Description of Artificial Sequence: Synthetic oligonucleotide
cagggucucauggcgguag

SEQ ID NO: 334644 - RNA, 19 nt, Artificial Sequence
  Description of Artificial Sequence: Synthetic oligonucleotide
caaugccgaucugagccag

SEQ ID NO: 334645 - RNA, 19 nt, Artificial Sequence
  Description of Artificial Sequence: Synthetic oligonucleotide
gccacucaugagcacacug

SEQ ID NO: 334646 - RNA, 19 nt, Artificial Sequence
  Description of Artificial Sequence: Synthetic oligonucleotide
uuucauugccccgcuugau

SEQ ID NO: 334647 - RNA, 19 nt, Artificial Sequence
  Description of Artificial Sequence: Synthetic oligonucleotide
cauuagacgucagcuacaa

SEQ ID NO: 334648 - RNA, 19 nt, Artificial Sequence
  Description of Artificial Sequence: Synthetic oligonucleotide
agcgcacauugggagagug

SEQ ID NO: 334649 - RNA, 19 nt, Artificial Sequence
  Description of Artificial Sequence: Synthetic oligonucleotide
auuagacgucagcuacaaa

SEQ ID NO: 334650 - RNA, 19 nt, Artificial Sequence
  Description of Artificial Sequence: Synthetic oligonucleotide
cagggcuaacggcggacgc

SEQ ID NO: 334651 - RNA, 19 nt, Artificial Sequence
  Description of Artificial Sequence: Synthetic oligonucleotide
gcgguacacgucaaagagg

SEQ ID NO: 334652 - RNA, 19 nt, Artificial Sequence
  Description of Artificial Sequence: Synthetic oligonucleotide
acgcccguagauggacagc

SEQ ID NO: 334653 - RNA, 19 nt, Artificial Sequence
  Description of Artificial Sequence: Synthetic oligonucleotide
uuggcucacuaaggccccg

SEQ ID NO: 334654 - RNA, 19 nt, Artificial Sequence
  Description of Artificial Sequence: Synthetic oligonucleotide
augccgaucugagccaggu

SEQ ID NO: 334655 - RNA, 19 nt, Artificial Sequence
  Description of Artificial Sequence: Synthetic oligonucleotide
gguucauaugaaacacuuc

SEQ ID NO: 334656 - RNA, 19 nt, Artificial Sequence
  Description of Artificial Sequence: Synthetic oligonucleotide
cccacucgucccucgaacg

SEQ ID NO: 334657 - RNA, 19 nt, Artificial Sequence
  Description of Artificial Sequence: Synthetic oligonucleotide
cguuucauugccccgcuug

SEQ ID NO: 334658 - RNA, 19 nt, Artificial Sequence
  Description of Artificial Sequence: Synthetic oligonucleotide
gucccucgaacgcccguag

SEQ ID NO: 334659 - RNA, 19 nt, Artificial Sequence
  Description of Artificial Sequence: Synthetic oligonucleotide
ccucacacaacuaucccaa

SEQ ID NO: 334660 - RNA, 19 nt, Artificial Sequence
  Description of Artificial Sequence: Synthetic oligonucleotide
cucggagcgucugcucacg

SEQ ID NO: 334661 - RNA, 19 nt, Artificial Sequence
  Description of Artificial Sequence: Synthetic oligonucleotide
cucucauugcgguggccca

SEQ ID NO: 334662 - RNA, 19 nt, Artificial Sequence
  Description of Artificial Sequence: Synthetic oligonucleotide
uugguauaguuggguccca

SEQ ID NO: 334663 - RNA, 19 nt, Artificial Sequence
  Description of Artificial Sequence: Synthetic oligonucleotide
uggugcgguacacgucaaa

SEQ ID NO: 334664 - RNA, 19 nt, Artificial Sequence
  Description of Artificial Sequence: Synthetic oligonucleotide
agucguaggcagugagauu

SEQ ID NO: 334665 - RNA, 19 nt, Artificial Sequence
  Description of Artificial Sequence: Synthetic oligonucleotide
agggcuaacggcggacgca

SEQ ID NO: 334666 - RNA, 19 nt, Artificial Sequence
  Description of Artificial Sequence: Synthetic oligonucleotide
cuguuacgggccaguucac

SEQ ID NO: 334667 - RNA, 19 nt, Artificial Sequence
  Description of Artificial Sequence: Synthetic oligonucleotide
gcuaacggcggacgcagca

SEQ ID NO: 334668 - RNA, 19 nt, Artificial Sequence
  Description of Artificial Sequence: Synthetic oligonucleotide
gccauguuagcgaaggugu

SEQ ID NO: 334669 - RNA, 19 nt, Artificial Sequence
  Description of Artificial Sequence: Synthetic oligonucleotide
guagucggcgguagcagaa

SEQ ID NO: 334670 - RNA, 19 nt, Artificial Sequence
  Description of Artificial Sequence: Synthetic oligonucleotide
gaggacggacuccccaaua

SEQ ID NO: 334671 - RNA, 19 nt, Artificial Sequence
  Description of Artificial Sequence: Synthetic oligonucleotide
agaucucucggaggacgga

SEQ ID NO: 334672 - RNA, 19 nt, Artificial Sequence
  Description of Artificial Sequence: Synthetic oligonucleotide
gaggguuccggugguagcu

SEQ ID NO: 334673 - RNA, 19 nt, Artificial Sequence
  Description of Artificial Sequence: Synthetic oligonucleotide
gcacauuagacgucagcua

SEQ ID NO: 334674 - RNA, 19 nt, Artificial Sequence
  Description of Artificial Sequence: Synthetic oligonucleotide
gaaacccucaaggguggua

SEQ ID NO: 334675 - RNA, 19 nt, Artificial Sequence
  Description of Artificial Sequence: Synthetic oligonucleotide
ucgucccucgaacgcccgu

SEQ ID NO: 334676 - RNA, 19 nt, Artificial Sequence
  Description of Artificial Sequence: Synthetic oligonucleotide
ggcgguagcagaaugacuu

SEQ ID NO: 334677 - RNA, 19 nt, Artificial Sequence
  Description of Artificial Sequence: Synthetic oligonucleotide
gcgacaugcagagaccaca

SEQ ID NO: 334678 - RNA, 19 nt, Artificial Sequence
  Description of Artificial Sequence: Synthetic oligonucleotide
gauggacagccggagcucu

SEQ ID NO: 334679 - RNA, 19 nt, Artificial Sequence
  Description of Artificial Sequence: Synthetic oligonucleotide
gcgguagcccacucggaug

SEQ ID NO: 334680 - RNA, 19 nt, Artificial Sequence
  Description of Artificial Sequence: Synthetic oligonucleotide
cagcgacaugcagagacca

SEQ ID NO: 334681 - RNA, 19 nt, Artificial Sequence
  Description of Artificial Sequence: Synthetic oligonucleotide
cacagacgagccccuccug

SEQ ID NO: 334682 - RNA, 19 nt, Artificial Sequence
  Description of Artificial Sequence: Synthetic oligonucleotide
acgguagccuccaacugua

SEQ ID NO: 334683 - RNA, 19 nt, Artificial Sequence
  Description of Artificial Sequence: Synthetic oligonucleotide
ccacucgucccucgaacgc

SEQ ID NO: 334684 - RNA, 19 nt, Artificial Sequence
  Description of Artificial Sequence: Synthetic oligonucleotide
ugccgaucugagccaggua

SEQ ID NO: 334685 - RNA, 19 nt, Artificial Sequence
  Description of Artificial Sequence: Synthetic oligonucleotide
aggguuccggugguagcug

SEQ ID NO: 334686 - RNA, 19 nt, Artificial Sequence
  Description of Artificial Sequence: Synthetic oligonucleotide
caaacguauggaagccccu

SEQ ID NO: 334687 - RNA, 19 nt, Artificial Sequence
  Description of Artificial Sequence: Synthetic oligonucleotide
cugagauggggcgagcacu

SEQ ID NO: 334688 - RNA, 19 nt, Artificial Sequence
  Description of Artificial Sequence: Synthetic oligonucleotide
ccgggcucaugacaaggcc

SEQ ID NO: 334689 - RNA, 19 nt, Artificial Sequence
  Description of Artificial Sequence: Synthetic oligonucleotide
uagucggcgguagcagaau

SEQ ID NO: 334690 - RNA, 19 nt, Artificial Sequence
  Description of Artificial Sequence: Synthetic oligonucleotide
caaaucgaugaaagguauu

SEQ ID NO: 334691 - RNA, 19 nt, Artificial Sequence
  Description of Artificial Sequence: Synthetic oligonucleotide
cccgggcucaugacaaggc

SEQ ID NO: 334692 - RNA, 19 nt, Artificial Sequence
  Description of Artificial Sequence: Synthetic oligonucleotide
aggcguaggguggguuguc

SEQ ID NO: 334693 - RNA, 19 nt, Artificial Sequence
  Description of Artificial Sequence: Synthetic oligonucleotide
ccaccuuacggauauugua

SEQ ID NO: 334694 - RNA, 19 nt, Artificial Sequence
  Description of Artificial Sequence: Synthetic oligonucleotide
ucguuucauugccccgcuu

SEQ ID NO: 334695 - RNA, 19 nt, Artificial Sequence
  Description of Artificial Sequence: Synthetic oligonucleotide
cucacggccccugcucaac

SEQ ID NO: 334696 - RNA, 19 nt, Artificial Sequence
  Description of Artificial Sequence: Synthetic oligonucleotide
cucaagucguaggcaguga

SEQ ID NO: 334697 - RNA, 19 nt, Artificial Sequence
  Description of Artificial Sequence: Synthetic oligonucleotide
cauugccccgcuugaugaa

SEQ ID NO: 334698 - RNA, 19 nt, Artificial Sequence
  Description of Artificial Sequence: Synthetic oligonucleotide
aguguccaccuuacggaua

SEQ ID NO: 334699 - RNA, 19 nt, Artificial Sequence
  Description of Artificial Sequence: Synthetic oligonucleotide
ccacucggaugucuggcac

SEQ ID NO: 334700 - RNA, 19 nt, Artificial Sequence
  Description of Artificial Sequence: Synthetic oligonucleotide
gcguucugguauuugcucu

SEQ ID NO: 334701 - RNA, 19 nt, Artificial Sequence
  Description of Artificial Sequence: Synthetic oligonucleotide
ccuuacggauauuguagaa

SEQ ID NO: 334702 - RNA, 19 nt, Artificial Sequence
  Description of Artificial Sequence: Synthetic oligonucleotide
ccucgaacgcccguagaug

SEQ ID NO: 334703 - RNA, 19 nt, Artificial Sequence
  Description of Artificial Sequence: Synthetic oligonucleotide
cgcccguagauggacagcc

SEQ ID NO: 334704 - RNA, 19 nt, Artificial Sequence
  Description of Artificial Sequence: Synthetic oligonucleotide
ccccgcuugaugaaacgca

SEQ ID NO: 334705 - RNA, 19 nt, Artificial Sequence
  Description of Artificial Sequence: Synthetic oligonucleotide
gccccgcuugaugaaacgc

SEQ ID NO: 334706 - RNA, 19 nt, Artificial Sequence
  Description of Artificial Sequence: Synthetic oligonucleotide
gggcgagcacugcaugaac

SEQ ID NO: 334707 - RNA, 19 nt, Artificial Sequence
  Description of Artificial Sequence: Synthetic oligonucleotide
cacuagcagggccagcccu

SEQ ID NO: 334708 - RNA, 19 nt, Artificial Sequence
  Description of Artificial Sequence: Synthetic oligonucleotide
guccgcgugcacaucaagu

SEQ ID NO: 334709 - RNA, 19 nt, Artificial Sequence
  Description of Artificial Sequence: Synthetic oligonucleotide
cuagcacagacgagccccu

SEQ ID NO: 334710 - RNA, 19 nt, Artificial Sequence
  Description of Artificial Sequence: Synthetic oligonucleotide
ccuguccgcgugcacauca

SEQ ID NO: 334711 - RNA, 19 nt, Artificial Sequence
  Description of Artificial Sequence: Synthetic oligonucleotide
ccaacuacgguagccucca

SEQ ID NO: 334712 - RNA, 19 nt, Artificial Sequence
  Description of Artificial Sequence: Synthetic oligonucleotide
uggugcggcggaugucauu

SEQ ID NO: 334713 - RNA, 19 nt, Artificial Sequence
  Description of Artificial Sequence: Synthetic oligonucleotide
cacuaaggccccgggcuca

SEQ ID NO: 334714 - RNA, 19 nt, Artificial Sequence
  Description of Artificial Sequence: Synthetic oligonucleotide
gccagcgcacauugggaga

SEQ ID NO: 334715 - RNA, 19 nt, Artificial Sequence
  Description of Artificial Sequence: Synthetic oligonucleotide
agguccaaucagagacaca

SEQ ID NO: 334716 - RNA, 19 nt, Artificial Sequence
  Description of Artificial Sequence: Synthetic oligonucleotide
cugcaggucaggguacgaa

SEQ ID NO: 334717 - RNA, 19 nt, Artificial Sequence
  Description of Artificial Sequence: Synthetic oligonucleotide
acggcggacgcagcauccu

SEQ ID NO: 334718 - RNA, 19 nt, Artificial Sequence
  Description of Artificial Sequence: Synthetic oligonucleotide
acuaaggccccgggcucau

SEQ ID NO: 334719 - RNA, 19 nt, Artificial Sequence
  Description of Artificial Sequence: Synthetic oligonucleotide
ggguacgaagcuccacucu

SEQ ID NO: 334720 - RNA, 19 nt, Artificial Sequence
  Description of Artificial Sequence: Synthetic oligonucleotide
ccuggacgggucacuagca

SEQ ID NO: 334721 - RNA, 19 nt, Artificial Sequence
  Description of Artificial Sequence: Synthetic oligonucleotide
gcccguagauggacagccg

SEQ ID NO: 334722 - RNA, 19 nt, Artificial Sequence
  Description of Artificial Sequence: Synthetic oligonucleotide
gcgcacauugggagagugc

SEQ ID NO: 334723 - RNA, 19 nt, Artificial Sequence
  Description of Artificial Sequence: Synthetic oligonucleotide
ggcuaacugggaucugggu

SEQ ID NO: 334724 - RNA, 19 nt, Artificial Sequence
  Description of Artificial Sequence: Synthetic oligonucleotide
gcacagacgagccccuccu

SEQ ID NO: 334725 - RNA, 19 nt, Artificial Sequence
  Description of Artificial Sequence: Synthetic oligonucleotide
ggcgagcacugcaugaacu

SEQ ID NO: 334726 - RNA, 19 nt, Artificial Sequence
  Description of Artificial Sequence: Synthetic oligonucleotide
ggcgguagcccacucggau

SEQ ID NO: 334727 - RNA, 19 nt, Artificial Sequence
  Description of Artificial Sequence: Synthetic oligonucleotide
ccugcgcagaugguucaac

SEQ ID NO: 334728 - RNA, 19 nt, Artificial Sequence
  Description of Artificial Sequence: Synthetic oligonucleotide
uccuguccgcgugcacauc

SEQ ID NO: 334729 - RNA, 19 nt, Artificial Sequence
  Description of Artificial Sequence: Synthetic oligonucleotide
ccauguuagcgaaggugua

SEQ ID NO: 334730 - RNA, 19 nt, Artificial Sequence
  Description of Artificial Sequence: Synthetic oligonucleotide
cuaacggcggacgcagcau

SEQ ID NO: 334731 - RNA, 19 nt, Artificial Sequence
  Description of Artificial Sequence: Synthetic oligonucleotide
gcgagcacugcaugaacuu

SEQ ID NO: 334732 - RNA, 19 nt, Artificial Sequence
  Description of Artificial Sequence: Synthetic oligonucleotide
caauccuggacgggucacu

SEQ ID NO: 334733 - RNA, 19 nt, Artificial Sequence
  Description of Artificial Sequence: Synthetic oligonucleotide
uguccaccuuacggauauu

SEQ ID NO: 334734 - RNA, 19 nt, Artificial Sequence
  Description of Artificial Sequence: Synthetic oligonucleotide
gcguaggguggguuguccu

SEQ ID NO: 334735 - RNA, 19 nt, Artificial Sequence
  Description of Artificial Sequence: Synthetic oligonucleotide
ggcuaacggcggacgcagc

SEQ ID NO: 334736 - RNA, 19 nt, Artificial Sequence
  Description of Artificial Sequence: Synthetic oligonucleotide
ccccaauaggguuguauuu

SEQ ID NO: 334737 - RNA, 19 nt, Artificial Sequence
  Description of Artificial Sequence: Synthetic oligonucleotide
cccucgaacgcccguagau

SEQ ID NO: 334738 - RNA, 19 nt, Artificial Sequence
  Description of Artificial Sequence: Synthetic oligonucleotide
ccgcgugcacaucaagugu

SEQ ID NO: 334739 - RNA, 19 nt, Artificial Sequence
  Description of Artificial Sequence: Synthetic oligonucleotide
ccgaucugagccagguaau

SEQ ID NO: 334740 - RNA, 19 nt, Artificial Sequence
  Description of Artificial Sequence: Synthetic oligonucleotide
ggacccuccuugguauagu

SEQ ID NO: 334741 - RNA, 19 nt, Artificial Sequence
  Description of Artificial Sequence: Synthetic oligonucleotide
cccgguguggcacuuucuu

SEQ ID NO: 334742 - RNA, 19 nt, Artificial Sequence
  Description of Artificial Sequence: Synthetic oligonucleotide
caggugcgaaagguccaau

SEQ ID NO: 334743 - RNA, 19 nt, Artificial Sequence
  Description of Artificial Sequence: Synthetic oligonucleotide
cggcgguagcagaaugacu

SEQ ID NO: 334744 - RNA, 19 nt, Artificial Sequence
  Description of Artificial Sequence: Synthetic oligonucleotide
cgucccucgaacgcccgua

SEQ ID NO: 334745 - RNA, 19 nt, Artificial Sequence
  Description of Artificial Sequence: Synthetic oligonucleotide
cguaggcagugagauucau

SEQ ID NO: 334746 - RNA, 19 nt, Artificial Sequence
  Description of Artificial Sequence: Synthetic oligonucleotide
aguauguuuauacacguuc

SEQ ID NO: 334747 - RNA, 19 nt, Artificial Sequence
  Description of Artificial Sequence: Synthetic oligonucleotide
uuguuaacuuugcagaugg

SEQ ID NO: 334748 - RNA, 19 nt, Artificial Sequence
  Description of Artificial Sequence: Synthetic oligonucleotide
aacuaagaaggguagauca

SEQ ID NO: 334749 - RNA, 19 nt, Artificial Sequence
  Description of Artificial Sequence: Synthetic oligonucleotide
acagcggugacguaggucc

SEQ ID NO: 334750 - RNA, 19 nt, Artificial Sequence
  Description of Artificial Sequence: Synthetic oligonucleotide
uagaguauguuuauacacg

SEQ ID NO: 334751 - RNA, 19 nt, Artificial Sequence
  Description of Artificial Sequence: Synthetic oligonucleotide
uguaucgucauccucgucc

SEQ ID NO: 334752 - RNA, 19 nt, Artificial Sequence
  Description of Artificial Sequence: Synthetic oligonucleotide
ugugaaguggcguuugugg

SEQ ID NO: 334753 - RNA, 19 nt, Artificial Sequence
  Description of Artificial Sequence: Synthetic oligonucleotide
caccucauagucaagaagg

SEQ ID NO: 334754 - RNA, 19 nt, Artificial Sequence
  Description of Artificial Sequence: Synthetic oligonucleotide
uuauacacguucauguuug

SEQ ID NO: 334755 - RNA, 19 nt, Artificial Sequence
  Description of Artificial Sequence: Synthetic oligonucleotide
ucgauaaugcuuaacuaag

SEQ ID NO: 334756 - RNA, 19 nt, Artificial Sequence
  Description of Artificial Sequence: Synthetic oligonucleotide
ugaguuaggugucuguggg

SEQ ID NO: 334757 - RNA, 19 nt, Artificial Sequence
  Description of Artificial Sequence: Synthetic oligonucleotide
acauacggaagucaggccg

SEQ ID NO: 334758 - RNA, 19 nt, Artificial Sequence
  Description of Artificial Sequence: Synthetic oligonucleotide
aaugcgcuucucuucuucc

SEQ ID NO: 334759 - RNA, 19 nt, Artificial Sequence
  Description of Artificial Sequence: Synthetic oligonucleotide
uacacguucauguuugccc

SEQ ID NO: 334760 - RNA, 19 nt, Artificial Sequence
  Description of Artificial Sequence: Synthetic oligonucleotide
uagaaguugguccagccga

SEQ ID NO: 334761 - RNA, 19 nt, Artificial Sequence
  Description of Artificial Sequence: Synthetic oligonucleotide
auacacaucccacuugcac

SEQ ID NO: 334762 - RNA, 19 nt, Artificial Sequence
  Description of Artificial Sequence: Synthetic oligonucleotide
gucaagaagguucuugucc

SEQ ID NO: 334763 - RNA, 19 nt, Artificial Sequence
  Description of Artificial Sequence: Synthetic oligonucleotide
uguggagagguuuaguggu

SEQ ID NO: 334764 - RNA, 19 nt, Artificial Sequence
  Description of Artificial Sequence: Synthetic oligonucleotide
ucaagaagguucuuguccu

SEQ ID NO: 334765 - RNA, 19 nt, Artificial Sequence
  Description of Artificial Sequence: Synthetic oligonucleotide
agugaacugcugcagcagc

SEQ ID NO: 334766 - RNA, 19 nt, Artificial Sequence
  Description of Artificial Sequence: Synthetic oligonucleotide
aguguggagagguuuagug

SEQ ID NO: 334767 - RNA, 19 nt, Artificial Sequence
  Description of Artificial Sequence: Synthetic oligonucleotide
ugugggugcacauaccagc

SEQ ID NO: 334768 - RNA, 19 nt, Artificial Sequence
  Description of Artificial Sequence: Synthetic oligonucleotide
ugcuuaacuaagaagggua

SEQ ID NO: 334769 - RNA, 19 nt, Artificial Sequence
  Description of Artificial Sequence: Synthetic oligonucleotide
gauaaugcuuaacuaagaa

SEQ ID NO: 334770 - RNA, 19 nt, Artificial Sequence
  Description of Artificial Sequence: Synthetic oligonucleotide
ugaaguggcguuugugggg

SEQ ID NO: 334771 - RNA, 19 nt, Artificial Sequence
  Description of Artificial Sequence: Synthetic oligonucleotide
agagccaaccuguccaucg

SEQ ID NO: 334772 - RNA, 19 nt, Artificial Sequence
  Description of Artificial Sequence: Synthetic oligonucleotide
agaguauguuuauacacgu

SEQ ID NO: 334773 - RNA, 19 nt, Artificial Sequence
  Description of Artificial Sequence: Synthetic oligonucleotide
ucucggaugaucaccuugc

SEQ ID NO: 334774 - RNA, 19 nt, Artificial Sequence
  Description of Artificial Sequence: Synthetic oligonucleotide
cacauaccagcacauacgg

SEQ ID NO: 334775 - RNA, 19 nt, Artificial Sequence
  Description of Artificial Sequence: Synthetic oligonucleotide
uaacuuugcagaugggugu

SEQ ID NO: 334776 - RNA, 19 nt, Artificial Sequence
  Description of Artificial Sequence: Synthetic oligonucleotide
uuaacuaagaaggguagau

SEQ ID NO: 334777 - RNA, 19 nt, Artificial Sequence
  Description of Artificial Sequence: Synthetic oligonucleotide
ugguacaauucauuagcag

SEQ ID NO: 334778 - RNA, 19 nt, Artificial Sequence
  Description of Artificial Sequence: Synthetic oligonucleotide
guugcuagugcccaucccc

SEQ ID NO: 334779 - RNA, 19 nt, Artificial Sequence
  Description of Artificial Sequence: Synthetic oligonucleotide
agccuugcacuccaggcgc

SEQ ID NO: 334780 - RNA, 19 nt, Artificial Sequence
  Description of Artificial Sequence: Synthetic oligonucleotide
ucuacaaggcugaggggag

SEQ ID NO: 334781 - RNA, 19 nt, Artificial Sequence
  Description of Artificial Sequence: Synthetic oligonucleotide
aguacacggaaccgcuugc

SEQ ID NO: 334782 - RNA, 19 nt, Artificial Sequence
  Description of Artificial Sequence: Synthetic oligonucleotide
ucaagucggagcuugcgca

SEQ ID NO: 334783 - RNA, 19 nt, Artificial Sequence
  Description of Artificial Sequence: Synthetic oligonucleotide
gaccacaguaucuucugag

SEQ ID NO: 334784 - RNA, 19 nt, Artificial Sequence
  Description of Artificial Sequence: Synthetic oligonucleotide
uucaagucggagcuugcgc

SEQ ID NO: 334785 - RNA, 19 nt, Artificial Sequence
  Description of Artificial Sequence: Synthetic oligonucleotide
guagaaguugguccagccg

SEQ ID NO: 334786 - RNA, 19 nt, Artificial Sequence
  Description of Artificial Sequence: Synthetic oligonucleotide
ucuagacuccacacccugg

SEQ ID NO: 334787 - RNA, 19 nt, Artificial Sequence
  Description of Artificial Sequence: Synthetic oligonucleotide
caggaggcgagucuggugg

SEQ ID NO: 334788 - RNA, 19 nt, Artificial Sequence
  Description of Artificial Sequence: Synthetic oligonucleotide
cuaagaaggguagaucagc

SEQ ID NO: 334789 - RNA, 19 nt, Artificial Sequence
  Description of Artificial Sequence: Synthetic oligonucleotide
aaguugguccagccgauca

SEQ ID NO: 334790 - RNA, 19 nt, Artificial Sequence
  Description of Artificial Sequence: Synthetic oligonucleotide
ugaacuguguaaugcacau

SEQ ID NO: 334791 - RNA, 19 nt, Artificial Sequence
  Description of Artificial Sequence: Synthetic oligonucleotide
gaauucucggaugaucacc

SEQ ID NO: 334792 - RNA, 19 nt, Artificial Sequence
  Description of Artificial Sequence: Synthetic oligonucleotide
uucucugccuuaaugcgcu

SEQ ID NO: 334793 - RNA, 19 nt, Artificial Sequence
  Description of Artificial Sequence: Synthetic oligonucleotide
gugaaguggcguuuguggg

SEQ ID NO: 334794 - RNA, 19 nt, Artificial Sequence
  Description of Artificial Sequence: Synthetic oligonucleotide
uucacguugccaugcaaca

SEQ ID NO: 334795 - RNA, 19 nt, Artificial Sequence
  Description of Artificial Sequence: Synthetic oligonucleotide
auucacguugccaugcaac

SEQ ID NO: 334796 - RNA, 19 nt, Artificial Sequence
  Description of Artificial Sequence: Synthetic oligonucleotide
ucauguuugcccagggccu

SEQ ID NO: 334797 - RNA, 19 nt, Artificial Sequence
  Description of Artificial Sequence: Synthetic oligonucleotide
gucgauaaugcuuaacuaa

SEQ ID NO: 334798 - RNA, 19 nt, Artificial Sequence
  Description of Artificial Sequence: Synthetic oligonucleotide
ucuuguuaacuuugcagau

SEQ ID NO: 334799 - RNA, 19 nt, Artificial Sequence
  Description of Artificial Sequence: Synthetic oligonucleotide
auagucaagaagguucuug

SEQ ID NO: 334800 - RNA, 19 nt, Artificial Sequence
  Description of Artificial Sequence: Synthetic oligonucleotide
guguaaugcacaugguggc

SEQ ID NO: 334801 - RNA, 19 nt, Artificial Sequence
  Description of Artificial Sequence: Synthetic oligonucleotide
aggguagaucagcacauag

SEQ ID NO: 334802 - RNA, 19 nt, Artificial Sequence
  Description of Artificial Sequence: Synthetic oligonucleotide
uguuaacuuugcagauggg

SEQ ID NO: 334803 - RNA, 19 nt, Artificial Sequence
  Description of Artificial Sequence: Synthetic oligonucleotide
acaauucauuagcaggugu

SEQ ID NO: 334804 - RNA, 19 nt, Artificial Sequence
  Description of Artificial Sequence: Synthetic oligonucleotide
uccaagguagcccggcacc

SEQ ID NO: 334805 - RNA, 19 nt, Artificial Sequence
  Description of Artificial Sequence: Synthetic oligonucleotide
cuucucugccuuaaugcgc

SEQ ID NO: 334806 - RNA, 19 nt, Artificial Sequence
  Description of Artificial Sequence: Synthetic oligonucleotide
aguuggccgccucagccgc

SEQ ID NO: 334807 - RNA, 19 nt, Artificial Sequence
  Description of Artificial Sequence: Synthetic oligonucleotide
uuuaguggucaggaugucc

SEQ ID NO: 334808 - RNA, 19 nt, Artificial Sequence
  Description of Artificial Sequence: Synthetic oligonucleotide
uacagucuggaaguaacug

SEQ ID NO: 334809 - RNA, 19 nt, Artificial Sequence
  Description of Artificial Sequence: Synthetic oligonucleotide
agcgccugagcacuugugg

SEQ ID NO: 334810 - RNA, 19 nt, Artificial Sequence
  Description of Artificial Sequence: Synthetic oligonucleotide
aguugguccagccgaucac

SEQ ID NO: 334811 - RNA, 19 nt, Artificial Sequence
  Description of Artificial Sequence: Synthetic oligonucleotide
uguuugaccacagcaggca

SEQ ID NO: 334812 - RNA, 19 nt, Artificial Sequence
  Description of Artificial Sequence: Synthetic oligonucleotide
ugucgauaaugcuuaacua

SEQ ID NO: 334813 - RNA, 19 nt, Artificial Sequence
  Description of Artificial Sequence: Synthetic oligonucleotide
aagugcucuuuacauggga

SEQ ID NO: 334814 - RNA, 19 nt, Artificial Sequence
  Description of Artificial Sequence: Synthetic oligonucleotide
auacacguucauguuugcc

SEQ ID NO: 334815 - RNA, 19 nt, Artificial Sequence
  Description of Artificial Sequence: Synthetic oligonucleotide
caaccuguccaucguaccg

SEQ ID NO: 334816 - RNA, 19 nt, Artificial Sequence
  Description of Artificial Sequence: Synthetic oligonucleotide
auauaccagccuugcacuc

SEQ ID NO: 334817 - RNA, 19 nt, Artificial Sequence
  Description of Artificial Sequence: Synthetic oligonucleotide
gagcuugcgcaguuggccg

SEQ ID NO: 334818 - RNA, 19 nt, Artificial Sequence
  Description of Artificial Sequence: Synthetic oligonucleotide
ugcaguacacggaaccgcu

SEQ ID NO: 334819 - RNA, 19 nt, Artificial Sequence
  Description of Artificial Sequence: Synthetic oligonucleotide
acggaagucaggccgcuuc

SEQ ID NO: 334820 - RNA, 19 nt, Artificial Sequence
  Description of Artificial Sequence: Synthetic oligonucleotide
cuucaugcggccaaaccuc

SEQ ID NO: 334821 - RNA, 19 nt, Artificial Sequence
  Description of Artificial Sequence: Synthetic oligonucleotide
uguguaguuugcuccugcc

SEQ ID NO: 334822 - RNA, 19 nt, Artificial Sequence
  Description of Artificial Sequence: Synthetic oligonucleotide
accauguguucuuugauuu

SEQ ID NO: 334823 - RNA, 19 nt, Artificial Sequence
  Description of Artificial Sequence: Synthetic oligonucleotide
cauacggaagucaggccgc

SEQ ID NO: 334824 - RNA, 19 nt, Artificial Sequence
  Description of Artificial Sequence: Synthetic oligonucleotide
ucugacgaguuucuuguua

SEQ ID NO: 334825 - RNA, 19 nt, Artificial Sequence
  Description of Artificial Sequence: Synthetic oligonucleotide
cacguugccaugcaacagc

SEQ ID NO: 334826 - RNA, 19 nt, Artificial Sequence
  Description of Artificial Sequence: Synthetic oligonucleotide
caaucagcugucgauaaug

SEQ ID NO: 334827 - RNA, 19 nt, Artificial Sequence
  Description of Artificial Sequence: Synthetic oligonucleotide
agagguuuaguggucagga

SEQ ID NO: 334828 - RNA, 19 nt, Artificial Sequence
  Description of Artificial Sequence: Synthetic oligonucleotide
uggccgaagcgccugagca

SEQ ID NO: 334829 - RNA, 19 nt, Artificial Sequence
  Description of Artificial Sequence: Synthetic oligonucleotide
uugugggugcacauaccag

SEQ ID NO: 334830 - RNA, 19 nt, Artificial Sequence
  Description of Artificial Sequence: Synthetic oligonucleotide
caggccaugccauauacca

SEQ ID NO: 334831 - RNA, 19 nt, Artificial Sequence
  Description of Artificial Sequence: Synthetic oligonucleotide
caaaccuccuccugucagg

SEQ ID NO: 334832 - RNA, 19 nt, Artificial Sequence
  Description of Artificial Sequence: Synthetic oligonucleotide
cauuagcagguguuugacc

SEQ ID NO: 334833 - RNA, 19 nt, Artificial Sequence
  Description of Artificial Sequence: Synthetic oligonucleotide
gugacguagguccacuggc

SEQ ID NO: 334834 - RNA, 19 nt, Artificial Sequence
  Description of Artificial Sequence: Synthetic oligonucleotide
acgaguuucuuguuaacuu

SEQ ID NO: 334835 - RNA, 19 nt, Artificial Sequence
  Description of Artificial Sequence: Synthetic oligonucleotide
ugccaugcaacagcgguag

SEQ ID NO: 334836 - RNA, 19 nt, Artificial Sequence
  Description of Artificial Sequence: Synthetic oligonucleotide
uaggagcucaucccacucc

SEQ ID NO: 334837 - RNA, 19 nt, Artificial Sequence
  Description of Artificial Sequence: Synthetic oligonucleotide
aucguaccgccuuuucuuc

SEQ ID NO: 334838 - RNA, 19 nt, Artificial Sequence
  Description of Artificial Sequence: Synthetic oligonucleotide
aguaacugcucaggccucc

SEQ ID NO: 334839 - RNA, 19 nt, Artificial Sequence
  Description of Artificial Sequence: Synthetic oligonucleotide
gacguagguccacuggcag

SEQ ID NO: 334840 - RNA, 19 nt, Artificial Sequence
  Description of Artificial Sequence: Synthetic oligonucleotide
augcggccaaaccuccucc

SEQ ID NO: 334841 - RNA, 19 nt, Artificial Sequence
  Description of Artificial Sequence: Synthetic oligonucleotide
aacauuccucagucacguc

SEQ ID NO: 334842 - RNA, 19 nt, Artificial Sequence
  Description of Artificial Sequence: Synthetic oligonucleotide
cuuguuaacuuugcagaug

SEQ ID NO: 334843 - RNA, 19 nt, Artificial Sequence
  Description of Artificial Sequence: Synthetic oligonucleotide
agcgguagcagcugggcca

SEQ ID NO: 334844 - RNA, 19 nt, Artificial Sequence
  Description of Artificial Sequence: Synthetic oligonucleotide
ugacguagguccacuggca

SEQ ID NO: 334845 - RNA, 19 nt, Artificial Sequence
  Description of Artificial Sequence: Synthetic oligonucleotide
acuaagaaggguagaucag

SEQ ID NO: 334846 - RNA, 19 nt, Artificial Sequence
  Description of Artificial Sequence: Synthetic oligonucleotide
uccauucacguugccaugc

SEQ ID NO: 334847 - RNA, 19 nt, Artificial Sequence
  Description of Artificial Sequence: Synthetic oligonucleotide
cacuugugggugcacauac

SEQ ID NO: 334848 - RNA, 19 nt, Artificial Sequence
  Description of Artificial Sequence: Synthetic oligonucleotide
ucuguaucgucauccucgu

SEQ ID NO: 334849 - RNA, 19 nt, Artificial Sequence
  Description of Artificial Sequence: Synthetic oligonucleotide
uugcuagugcccaucccca

SEQ ID NO: 334850 - RNA, 19 nt, Artificial Sequence
  Description of Artificial Sequence: Synthetic oligonucleotide
uaacuaagaaggguagauc

SEQ ID NO: 334851 - RNA, 19 nt, Artificial Sequence
  Description of Artificial Sequence: Synthetic oligonucleotide
acagguacccauggggcac

SEQ ID NO: 334852 - RNA, 19 nt, Artificial Sequence
  Description of Artificial Sequence: Synthetic oligonucleotide
guauguuuauacacguuca

SEQ ID NO: 334853 - RNA, 19 nt, Artificial Sequence
  Description of Artificial Sequence: Synthetic oligonucleotide
uaaugcgcuucucuucuuc

SEQ ID NO: 334854 - RNA, 19 nt, Artificial Sequence
  Description of Artificial Sequence: Synthetic oligonucleotide
uauacacguucauguuugc

SEQ ID NO: 334855 - RNA, 19 nt, Artificial Sequence
  Description of Artificial Sequence: Synthetic oligonucleotide
aaccgcuugcccuuggcua

SEQ ID NO: 334856 - RNA, 19 nt, Artificial Sequence
  Description of Artificial Sequence: Synthetic oligonucleotide
agaccucaggggcagccgg

SEQ ID NO: 334857 - RNA, 19 nt, Artificial Sequence
  Description of Artificial Sequence: Synthetic oligonucleotide
ugucaggcacaccauccac

SEQ ID NO: 334858 - RNA, 19 nt, Artificial Sequence
  Description of Artificial Sequence: Synthetic oligonucleotide
cagccuugcacuccaggcg

SEQ ID NO: 334859 - RNA, 19 nt, Artificial Sequence
  Description of Artificial Sequence: Synthetic oligonucleotide
acguagguccacuggcagg

SEQ ID NO: 334860 - RNA, 19 nt, Artificial Sequence
  Description of Artificial Sequence: Synthetic oligonucleotide
auggcacgaccacaguauc

SEQ ID NO: 334861 - RNA, 19 nt, Artificial Sequence
  Description of Artificial Sequence: Synthetic oligonucleotide
aagugacacuccucuccag

SEQ ID NO: 334862 - RNA, 19 nt, Artificial Sequence
  Description of Artificial Sequence: Synthetic oligonucleotide
uguugcuagugcccauccc

SEQ ID NO: 334863 - RNA, 19 nt, Artificial Sequence
  Description of Artificial Sequence: Synthetic oligonucleotide
ugcucuuuacaugggaguc

SEQ ID NO: 334864 - RNA, 19 nt, Artificial Sequence
  Description of Artificial Sequence: Synthetic oligonucleotide
agcuugcgcaguuggccgc

SEQ ID NO: 334865 - RNA, 19 nt, Artificial Sequence
  Description of Artificial Sequence: Synthetic oligonucleotide
caccuugcuuccauucacg

SEQ ID NO: 334866 - RNA, 19 nt, Artificial Sequence
  Description of Artificial Sequence: Synthetic oligonucleotide
cuugcgucguuccuccuug

SEQ ID NO: 334867 - RNA, 19 nt, Artificial Sequence
  Description of Artificial Sequence: Synthetic oligonucleotide
ggugacguagguccacugg

SEQ ID NO: 334868 - RNA, 19 nt, Artificial Sequence
  Description of Artificial Sequence: Synthetic oligonucleotide
uccagccgaucacaaaggu

SEQ ID NO: 334869 - RNA, 19 nt, Artificial Sequence
  Description of Artificial Sequence: Synthetic oligonucleotide
ucccugguacaauucauua

SEQ ID NO: 334870 - RNA, 19 nt, Artificial Sequence
  Description of Artificial Sequence: Synthetic oligonucleotide
ucgggguccgaacauuccu

SEQ ID NO: 334871 - RNA, 19 nt, Artificial Sequence
  Description of Artificial Sequence: Synthetic oligonucleotide
ucggacaaagugcucuuua

SEQ ID NO: 334872 - RNA, 19 nt, Artificial Sequence
  Description of Artificial Sequence: Synthetic oligonucleotide
augcuuaacuaagaagggu

SEQ ID NO: 334873 - RNA, 19 nt, Artificial Sequence
  Description of Artificial Sequence: Synthetic oligonucleotide
aucagcugucgauaaugcu

SEQ ID NO: 334874 - RNA, 19 nt, Artificial Sequence
  Description of Artificial Sequence: Synthetic oligonucleotide
cugucgauaaugcuuaacu

SEQ ID NO: 334875 - RNA, 19 nt, Artificial Sequence
  Description of Artificial Sequence: Synthetic oligonucleotide
aagucaggccgcuucucau

SEQ ID NO: 334876 - RNA, 19 nt, Artificial Sequence
  Description of Artificial Sequence: Synthetic oligonucleotide
ggugggaagagaagugugg

SEQ ID NO: 334877 - RNA, 19 nt, Artificial Sequence
  Description of Artificial Sequence: Synthetic oligonucleotide
cacuucacucucugaagug

SEQ ID NO: 334878 - RNA, 19 nt, Artificial Sequence
  Description of Artificial Sequence: Synthetic oligonucleotide
guccgaacauuccucaguc

SEQ ID NO: 334879 - RNA, 19 nt, Artificial Sequence
  Description of Artificial Sequence: Synthetic oligonucleotide
ucgguggaagcauugccau

SEQ ID NO: 334880 - RNA, 19 nt, Artificial Sequence
  Description of Artificial Sequence: Synthetic oligonucleotide
cacauacggaagucaggcc

SEQ ID NO: 334881 - RNA, 19 nt, Artificial Sequence
  Description of Artificial Sequence: Synthetic oligonucleotide
ucacguugccaugcaacag

SEQ ID NO: 334882 - RNA, 19 nt, Artificial Sequence
  Description of Artificial Sequence: Synthetic oligonucleotide
gcacauaccagcacauacg

SEQ ID NO: 334883 - RNA, 19 nt, Artificial Sequence
  Description of Artificial Sequence: Synthetic oligonucleotide
accgucuucuuguuccaug

SEQ ID NO: 334884 - RNA, 19 nt, Artificial Sequence
  Description of Artificial Sequence: Synthetic oligonucleotide
aaguaacugcucaggccuc

SEQ ID NO: 334885 - RNA, 19 nt, Artificial Sequence
  Description of Artificial Sequence: Synthetic oligonucleotide
uaccgccuuuucuucauga

SEQ ID NO: 334886 - RNA, 19 nt, Artificial Sequence
  Description of Artificial Sequence: Synthetic oligonucleotide
gcacauacggaagucaggc

SEQ ID NO: 334887 - RNA, 19 nt, Artificial Sequence
  Description of Artificial Sequence: Synthetic oligonucleotide
augaacuguguaaugcaca

SEQ ID NO: 334888 - RNA, 19 nt, Artificial Sequence
  Description of Artificial Sequence: Synthetic oligonucleotide
caagucggagcuugcgcag

SEQ ID NO: 334889 - RNA, 19 nt, Artificial Sequence
  Description of Artificial Sequence: Synthetic oligonucleotide
uacaaggcugaggggaggc

SEQ ID NO: 334890 - RNA, 19 nt, Artificial Sequence
  Description of Artificial Sequence: Synthetic oligonucleotide
cgucguuccuccuugagcc

SEQ ID NO: 334891 - RNA, 19 nt, Artificial Sequence
  Description of Artificial Sequence: Synthetic oligonucleotide
acuugugggugcacauacc

SEQ ID NO: 334892 - RNA, 19 nt, Artificial Sequence
  Description of Artificial Sequence: Synthetic oligonucleotide
uuucccuccgcuccuucuc

SEQ ID NO: 334893 - RNA, 19 nt, Artificial Sequence
  Description of Artificial Sequence: Synthetic oligonucleotide
uggagagguuuagugguca

SEQ ID NO: 334894 - RNA, 19 nt, Artificial Sequence
  Description of Artificial Sequence: Synthetic oligonucleotide
agcacauacggaagucagg

SEQ ID NO: 334895 - RNA, 19 nt, Artificial Sequence
  Description of Artificial Sequence: Synthetic oligonucleotide
gcuuaacuaagaaggguag

SEQ ID NO: 334896 - RNA, 19 nt, Artificial Sequence
  Description of Artificial Sequence: Synthetic oligonucleotide
ugauuggcaugggugugcc

SEQ ID NO: 334897 - RNA, 19 nt, Artificial Sequence
  Description of Artificial Sequence: Synthetic oligonucleotide
ucucgggguccgaacauuc

SEQ ID NO: 334898 - RNA, 19 nt, Artificial Sequence
  Description of Artificial Sequence: Synthetic oligonucleotide
cuguccaccucauagucaa

SEQ ID NO: 334899 - RNA, 19 nt, Artificial Sequence
  Description of Artificial Sequence: Synthetic oligonucleotide
aggcgagucuggugguggc

SEQ ID NO: 334900 - RNA, 19 nt, Artificial Sequence
  Description of Artificial Sequence: Synthetic oligonucleotide
cauauaccagccuugcacu

SEQ ID NO: 334901 - RNA, 19 nt, Artificial Sequence
  Description of Artificial Sequence: Synthetic oligonucleotide
ugacgaguuucuuguuaac

SEQ ID NO: 334902 - RNA, 19 nt, Artificial Sequence
  Description of Artificial Sequence: Synthetic oligonucleotide
ccugguccaagguagcccg

SEQ ID NO: 334903 - RNA, 19 nt, Artificial Sequence
  Description of Artificial Sequence: Synthetic oligonucleotide
cuguugcuagugcccaucc

SEQ ID NO: 334904 - RNA, 19 nt, Artificial Sequence
  Description of Artificial Sequence: Synthetic oligonucleotide
uggcacgaccacaguaucu

SEQ ID NO: 334905 - RNA, 19 nt, Artificial Sequence
  Description of Artificial Sequence: Synthetic oligonucleotide
ugugggugugaaguggcgu

SEQ ID NO: 334906 - RNA, 19 nt, Artificial Sequence
  Description of Artificial Sequence: Synthetic oligonucleotide
accuugcuuccauucacgu

SEQ ID NO: 334907 - RNA, 19 nt, Artificial Sequence
  Description of Artificial Sequence: Synthetic oligonucleotide
cugacgaguuucuuguuaa

SEQ ID NO: 334908 - RNA, 19 nt, Artificial Sequence
  Description of Artificial Sequence: Synthetic oligonucleotide
cauccacgaucacacaguc

SEQ ID NO: 334909 - RNA, 19 nt, Artificial Sequence
  Description of Artificial Sequence: Synthetic oligonucleotide
acguugccaugcaacagcg

SEQ ID NO: 334910 - RNA, 19 nt, Artificial Sequence
  Description of Artificial Sequence: Synthetic oligonucleotide
uucccguaaccgcuucucu

SEQ ID NO: 334911 - RNA, 19 nt, Artificial Sequence
  Description of Artificial Sequence: Synthetic oligonucleotide
ggguccagaccucaggggc

SEQ ID NO: 334912 - RNA, 19 nt, Artificial Sequence
  Description of Artificial Sequence: Synthetic oligonucleotide
ucuuuacaugggagucagc

SEQ ID NO: 334913 - RNA, 19 nt, Artificial Sequence
  Description of Artificial Sequence: Synthetic oligonucleotide
ugcggcugcacaccugggu

SEQ ID NO: 334914 - RNA, 19 nt, Artificial Sequence
  Description of Artificial Sequence: Synthetic oligonucleotide
cuugauuggcaugggugug

SEQ ID NO: 334915 - RNA, 19 nt, Artificial Sequence
  Description of Artificial Sequence: Synthetic oligonucleotide
cuuaacuaagaaggguaga

SEQ ID NO: 334916 - RNA, 19 nt, Artificial Sequence
  Description of Artificial Sequence: Synthetic oligonucleotide
ccgaacauuccucagucac

SEQ ID NO: 334917 - RNA, 19 nt, Artificial Sequence
  Description of Artificial Sequence: Synthetic oligonucleotide
cugugggugugaaguggcg

SEQ ID NO: 334918 - RNA, 19 nt, Artificial Sequence
  Description of Artificial Sequence: Synthetic oligonucleotide
ugcgcaguuggccgccuca

SEQ ID NO: 334919 - RNA, 19 nt, Artificial Sequence
  Description of Artificial Sequence: Synthetic oligonucleotide
uugccaugcaacagcggua

SEQ ID NO: 334920 - RNA, 19 nt, Artificial Sequence
  Description of Artificial Sequence: Synthetic oligonucleotide
ucuguguaguuugcuccug

SEQ ID NO: 334921 - RNA, 19 nt, Artificial Sequence
  Description of Artificial Sequence: Synthetic oligonucleotide
gacguggugggaagagaag

SEQ ID NO: 334922 - RNA, 19 nt, Artificial Sequence
  Description of Artificial Sequence: Synthetic oligonucleotide
ggaggcauggccaccacug

SEQ ID NO: 334923 - RNA, 19 nt, Artificial Sequence
  Description of Artificial Sequence: Synthetic oligonucleotide
guccagccgaucacaaagg

SEQ ID NO: 334924 - RNA, 19 nt, Artificial Sequence
  Description of Artificial Sequence: Synthetic oligonucleotide
ucguaccgccuuuucuuca

SEQ ID NO: 334925 - RNA, 19 nt, Artificial Sequence
  Description of Artificial Sequence: Synthetic oligonucleotide
uggaagcauugccauuguc

SEQ ID NO: 334926 - RNA, 19 nt, Artificial Sequence
  Description of Artificial Sequence: Synthetic oligonucleotide
gggcaaacuuaccacagga

SEQ ID NO: 334927 - RNA, 19 nt, Artificial Sequence
  Description of Artificial Sequence: Synthetic oligonucleotide
cacgcagugaacugcugca

SEQ ID NO: 334928 - RNA, 19 nt, Artificial Sequence
  Description of Artificial Sequence: Synthetic oligonucleotide
ggguagaucagcacauagc

SEQ ID NO: 334929 - RNA, 19 nt, Artificial Sequence
  Description of Artificial Sequence: Synthetic oligonucleotide
acgaucacacagucuguau

SEQ ID NO: 334930 - RNA, 19 nt, Artificial Sequence
  Description of Artificial Sequence: Synthetic oligonucleotide
uccaucguaccgccuuuuc

SEQ ID NO: 334931 - RNA, 19 nt, Artificial Sequence
  Description of Artificial Sequence: Synthetic oligonucleotide
ggagcuugcgcaguuggcc

SEQ ID NO: 334932 - RNA, 19 nt, Artificial Sequence
  Description of Artificial Sequence: Synthetic oligonucleotide
cucgggguccgaacauucc

SEQ ID NO: 334933 - RNA, 19 nt, Artificial Sequence
  Description of Artificial Sequence: Synthetic oligonucleotide
gucguuccuccuugagccg

SEQ ID NO: 334934 - RNA, 19 nt, Artificial Sequence
  Description of Artificial Sequence: Synthetic oligonucleotide
ggggcaaacuuaccacagg

SEQ ID NO: 334935 - RNA, 19 nt, Artificial Sequence
  Description of Artificial Sequence: Synthetic oligonucleotide
ggcaaacuuaccacaggag

SEQ ID NO: 334936 - RNA, 19 nt, Artificial Sequence
  Description of Artificial Sequence: Synthetic oligonucleotide
uuguggaggagaggcucag

SEQ ID NO: 334937 - RNA, 19 nt, Artificial Sequence
  Description of Artificial Sequence: Synthetic oligonucleotide
caugcggccaaaccuccuc

SEQ ID NO: 334938 - RNA, 19 nt, Artificial Sequence
  Description of Artificial Sequence: Synthetic oligonucleotide
caggcacgcagugaacugc

SEQ ID NO: 334939 - RNA, 19 nt, Artificial Sequence
  Description of Artificial Sequence: Synthetic oligonucleotide
uccugucgcuccuugcguc

SEQ ID NO: 334940 - RNA, 19 nt, Artificial Sequence
  Description of Artificial Sequence: Synthetic oligonucleotide
ggggugucggacaaagugc

SEQ ID NO: 334941 - RNA, 19 nt, Artificial Sequence
  Description of Artificial Sequence: Synthetic oligonucleotide
gcagauggucccucgggag

SEQ ID NO: 334942 - RNA, 19 nt, Artificial Sequence
  Description of Artificial Sequence: Synthetic oligonucleotide
cuacaaggcugaggggagg

SEQ ID NO: 334943 - RNA, 19 nt, Artificial Sequence
  Description of Artificial Sequence: Synthetic oligonucleotide
gcacuuugugguucucggg

SEQ ID NO: 334944 - RNA, 19 nt, Artificial Sequence
  Description of Artificial Sequence: Synthetic oligonucleotide
ucccguaaccgcuucucuu

SEQ ID NO: 334945 - RNA, 19 nt, Artificial Sequence
  Description of Artificial Sequence: Synthetic oligonucleotide
cagcugucgauaaugcuua

SEQ ID NO: 334946 - RNA, 19 nt, Artificial Sequence
  Description of Artificial Sequence: Synthetic oligonucleotide
gcgccugagcacuuguggg

SEQ ID NO: 334947 - RNA, 19 nt, Artificial Sequence
  Description of Artificial Sequence: Synthetic oligonucleotide
gauuggcaugggugugccc

SEQ ID NO: 334948 - RNA, 19 nt, Artificial Sequence
  Description of Artificial Sequence: Synthetic oligonucleotide
cccugguacaauucauuag

SEQ ID NO: 334949 - RNA, 19 nt, Artificial Sequence
  Description of Artificial Sequence: Synthetic oligonucleotide
ucaugcggccaaaccuccu

SEQ ID NO: 334950 - RNA, 19 nt, Artificial Sequence
  Description of Artificial Sequence: Synthetic oligonucleotide
uccgcuugauuggcauggg

SEQ ID NO: 334951 - RNA, 19 nt, Artificial Sequence
  Description of Artificial Sequence: Synthetic oligonucleotide
gccucugacgaguuucuug

SEQ ID NO: 334952 - RNA, 19 nt, Artificial Sequence
  Description of Artificial Sequence: Synthetic oligonucleotide
gcuuguuccauugagcugu

SEQ ID NO: 334953 - RNA, 19 nt, Artificial Sequence
  Description of Artificial Sequence: Synthetic oligonucleotide
gguuuaguggucaggaugu

SEQ ID NO: 334954 - RNA, 19 nt, Artificial Sequence
  Description of Artificial Sequence: Synthetic oligonucleotide
ugguucucgggguccgaac

SEQ ID NO: 334955 - RNA, 19 nt, Artificial Sequence
  Description of Artificial Sequence: Synthetic oligonucleotide
ccgaucacaaagguccugg

SEQ ID NO: 334956 - RNA, 19 nt, Artificial Sequence
  Description of Artificial Sequence: Synthetic oligonucleotide
uugagggcacagcggugac

SEQ ID NO: 334957 - RNA, 19 nt, Artificial Sequence
  Description of Artificial Sequence: Synthetic oligonucleotide
gcuucaugcggccaaaccu

SEQ ID NO: 334958 - RNA, 19 nt, Artificial Sequence
  Description of Artificial Sequence: Synthetic oligonucleotide
ccucuggcgcacuuugugg

SEQ ID NO: 334959 - RNA, 19 nt, Artificial Sequence
  Description of Artificial Sequence: Synthetic oligonucleotide
caccugucaaucagcuguc

SEQ ID NO: 334960 - RNA, 19 nt, Artificial Sequence
  Description of Artificial Sequence: Synthetic oligonucleotide
gcacgcagugaacugcugc

SEQ ID NO: 334961 - RNA, 19 nt, Artificial Sequence
  Description of Artificial Sequence: Synthetic oligonucleotide
uguccaucguaccgccuuu

SEQ ID NO: 334962 - RNA, 19 nt, Artificial Sequence
  Description of Artificial Sequence: Synthetic oligonucleotide
aagucggagcuugcgcagu

SEQ ID NO: 334963 - RNA, 19 nt, Artificial Sequence
  Description of Artificial Sequence: Synthetic oligonucleotide
uggauggcacgaccacagu

SEQ ID NO: 334964 - RNA, 19 nt, Artificial Sequence
  Description of Artificial Sequence: Synthetic oligonucleotide
agggacguggugggaagag

SEQ ID NO: 334965 - RNA, 19 nt, Artificial Sequence
  Description of Artificial Sequence: Synthetic oligonucleotide
uaacugcucaggccuccuc

SEQ ID NO: 334966 - RNA, 19 nt, Artificial Sequence
  Description of Artificial Sequence: Synthetic oligonucleotide
accgccuuuucuucaugaa

SEQ ID NO: 334967 - RNA, 19 nt, Artificial Sequence
  Description of Artificial Sequence: Synthetic oligonucleotide
ccaaaccuccuccugucag

SEQ ID NO: 334968 - RNA, 19 nt, Artificial Sequence
  Description of Artificial Sequence: Synthetic oligonucleotide
acgcagugaacugcugcag

SEQ ID NO: 334969 - RNA, 19 nt, Artificial Sequence
  Description of Artificial Sequence: Synthetic oligonucleotide
cagcucuacaaggcugagg

SEQ ID NO: 334970 - RNA, 19 nt, Artificial Sequence
  Description of Artificial Sequence: Synthetic oligonucleotide
gguucucgggguccgaaca

SEQ ID NO: 334971 - RNA, 19 nt, Artificial Sequence
  Description of Artificial Sequence: Synthetic oligonucleotide
cgcuugauuggcaugggug

SEQ ID NO: 334972 - RNA, 19 nt, Artificial Sequence
  Description of Artificial Sequence: Synthetic oligonucleotide
cuuuacagucuggaaguaa

SEQ ID NO: 334973 - RNA, 19 nt, Artificial Sequence
  Description of Artificial Sequence: Synthetic oligonucleotide
gcguuuguggggcucagca

SEQ ID NO: 334974 - RNA, 19 nt, Artificial Sequence
  Description of Artificial Sequence: Synthetic oligonucleotide
ccucgggagagcugguugg

SEQ ID NO: 334975 - RNA, 19 nt, Artificial Sequence
  Description of Artificial Sequence: Synthetic oligonucleotide
gcuagugcccauccccacc

SEQ ID NO: 334976 - RNA, 19 nt, Artificial Sequence
  Description of Artificial Sequence: Synthetic oligonucleotide
gcuugauuggcaugggugu

SEQ ID NO: 334977 - RNA, 19 nt, Artificial Sequence
  Description of Artificial Sequence: Synthetic oligonucleotide
gagggcacagcggugacgu

SEQ ID NO: 334978 - RNA, 19 nt, Artificial Sequence
  Description of Artificial Sequence: Synthetic oligonucleotide
ccaaccuguccaucguacc

SEQ ID NO: 334979 - RNA, 19 nt, Artificial Sequence
  Description of Artificial Sequence: Synthetic oligonucleotide
aggccgcuucucauaggcc

SEQ ID NO: 334980 - RNA, 19 nt, Artificial Sequence
  Description of Artificial Sequence: Synthetic oligonucleotide
ggcggcaucgcucuuggaa

SEQ ID NO: 334981 - RNA, 19 nt, Artificial Sequence
  Description of Artificial Sequence: Synthetic oligonucleotide
cuggccgaagcgccugagc

SEQ ID NO: 334982 - RNA, 19 nt, Artificial Sequence
  Description of Artificial Sequence: Synthetic oligonucleotide
ucuggcgcacuuugugguu

SEQ ID NO: 334983 - RNA, 19 nt, Artificial Sequence
  Description of Artificial Sequence: Synthetic oligonucleotide
cagauggucccucgggaga

SEQ ID NO: 334984 - RNA, 19 nt, Artificial Sequence
  Description of Artificial Sequence: Synthetic oligonucleotide
uggcuugccgcgucucuuc

SEQ ID NO: 334985 - RNA, 19 nt, Artificial Sequence
  Description of Artificial Sequence: Synthetic oligonucleotide
ucccaacuggaggccuugg

SEQ ID NO: 334986 - RNA, 19 nt, Artificial Sequence
  Description of Artificial Sequence: Synthetic oligonucleotide
uggcuuccgcuugauuggc

SEQ ID NO: 334987 - RNA, 19 nt, Artificial Sequence
  Description of Artificial Sequence: Synthetic oligonucleotide
cugucaggcacaccaucca

SEQ ID NO: 334988 - RNA, 19 nt, Artificial Sequence
  Description of Artificial Sequence: Synthetic oligonucleotide
ggcacagcggugacguagg

SEQ ID NO: 334989 - RNA, 19 nt, Artificial Sequence
  Description of Artificial Sequence: Synthetic oligonucleotide
caucguaccgccuuuucuu

SEQ ID NO: 334990 - RNA, 19 nt, Artificial Sequence
  Description of Artificial Sequence: Synthetic oligonucleotide
aagcgccugagcacuugug

SEQ ID NO: 334991 - RNA, 19 nt, Artificial Sequence
  Description of Artificial Sequence: Synthetic oligonucleotide
gguguugcggcugcacacc

SEQ ID NO: 334992 - RNA, 19 nt, Artificial Sequence
  Description of Artificial Sequence: Synthetic oligonucleotide
gggcacagcggugacguag

SEQ ID NO: 334993 - RNA, 19 nt, Artificial Sequence
  Description of Artificial Sequence: Synthetic oligonucleotide
caggcaccucgguggaagc

SEQ ID NO: 334994 - RNA, 19 nt, Artificial Sequence
  Description of Artificial Sequence: Synthetic oligonucleotide
cacagucuguaucgucauc

SEQ ID NO: 334995 - RNA, 19 nt, Artificial Sequence
  Description of Artificial Sequence: Synthetic oligonucleotide
gagcacuugugggugcaca

SEQ ID NO: 334996 - RNA, 19 nt, Artificial Sequence
  Description of Artificial Sequence: Synthetic oligonucleotide
acauaccagcacauacgga

SEQ ID NO: 334997 - RNA, 19 nt, Artificial Sequence
  Description of Artificial Sequence: Synthetic oligonucleotide
ccugucgcuccuugcgucg

SEQ ID NO: 334998 - RNA, 19 nt, Artificial Sequence
  Description of Artificial Sequence: Synthetic oligonucleotide
cacgaccacaguaucuucu

SEQ ID NO: 334999 - RNA, 19 nt, Artificial Sequence
  Description of Artificial Sequence: Synthetic oligonucleotide
ccgcuuuucccuccgcucc

SEQ ID NO: 335000 - RNA, 19 nt, Artificial Sequence
  Description of Artificial Sequence: Synthetic oligonucleotide
cugcauccagcaggcacgc

SEQ ID NO: 335001 - RNA, 19 nt, Artificial Sequence
  Description of Artificial Sequence: Synthetic oligonucleotide
cucugccuuaaugcgcuuc

SEQ ID NO: 335002 - RNA, 19 nt, Artificial Sequence
  Description of Artificial Sequence: Synthetic oligonucleotide
gcaggcacgcagugaacug

SEQ ID NO: 335003 - RNA, 19 nt, Artificial Sequence
  Description of Artificial Sequence: Synthetic oligonucleotide
aggaggcgagucugguggu

SEQ ID NO: 335004 - RNA, 19 nt, Artificial Sequence
  Description of Artificial Sequence: Synthetic oligonucleotide
ccgccuuuucuucaugaac

SEQ ID NO: 335005 - RNA, 19 nt, Artificial Sequence
  Description of Artificial Sequence: Synthetic oligonucleotide
gcuuguggaggagaggcuc

SEQ ID NO: 335006 - RNA, 19 nt, Artificial Sequence
  Description of Artificial Sequence: Synthetic oligonucleotide
gaagcgccugagcacuugu

SEQ ID NO: 335007 - RNA, 19 nt, Artificial Sequence
  Description of Artificial Sequence: Synthetic oligonucleotide
agccaaccuguccaucgua

SEQ ID NO: 335008 - RNA, 19 nt, Artificial Sequence
  Description of Artificial Sequence: Synthetic oligonucleotide
gcuuccauucacguugcca

SEQ ID NO: 335009 - RNA, 19 nt, Artificial Sequence
  Description of Artificial Sequence: Synthetic oligonucleotide
cuagugcccauccccaccu

SEQ ID NO: 335010 - RNA, 19 nt, Artificial Sequence
  Description of Artificial Sequence: Synthetic oligonucleotide
ggguccgaacauuccucag

SEQ ID NO: 335011 - RNA, 19 nt, Artificial Sequence
  Description of Artificial Sequence: Synthetic oligonucleotide
ggaaccgcuugcccuuggc

SEQ ID NO: 335012 - RNA, 19 nt, Artificial Sequence
  Description of Artificial Sequence: Synthetic oligonucleotide
cauucacguugccaugcaa

SEQ ID NO: 335013 - RNA, 19 nt, Artificial Sequence
  Description of Artificial Sequence: Synthetic oligonucleotide
gagguuuaguggucaggau

SEQ ID NO: 335014 - RNA, 19 nt, Artificial Sequence
  Description of Artificial Sequence: Synthetic oligonucleotide
gggguccgaacauuccuca

SEQ ID NO: 335015 - RNA, 19 nt, Artificial Sequence
  Description of Artificial Sequence: Synthetic oligonucleotide
ccuuggauggcacgaccac

SEQ ID NO: 335016 - RNA, 19 nt, Artificial Sequence
  Description of Artificial Sequence: Synthetic oligonucleotide
ccaggccaugccauauacc

SEQ ID NO: 335017 - RNA, 19 nt, Artificial Sequence
  Description of Artificial Sequence: Synthetic oligonucleotide
guuuaguggucaggauguc

SEQ ID NO: 335018 - RNA, 19 nt, Artificial Sequence
  Description of Artificial Sequence: Synthetic oligonucleotide
cacagcggugacguagguc

SEQ ID NO: 335019 - RNA, 19 nt, Artificial Sequence
  Description of Artificial Sequence: Synthetic oligonucleotide
gccggugguucucugaaaa

SEQ ID NO: 335020 - RNA, 19 nt, Artificial Sequence
  Description of Artificial Sequence: Synthetic oligonucleotide
cugacacauccacgaucac

SEQ ID NO: 335021 - RNA, 19 nt, Artificial Sequence
  Description of Artificial Sequence: Synthetic oligonucleotide
aggcacgcagugaacugcu

SEQ ID NO: 335022 - RNA, 19 nt, Artificial Sequence
  Description of Artificial Sequence: Synthetic oligonucleotide
cggacaaagugcucuuuac

SEQ ID NO: 335023 - RNA, 19 nt, Artificial Sequence
  Description of Artificial Sequence: Synthetic oligonucleotide
ggccaaaccuccuccuguc

SEQ ID NO: 335024 - RNA, 19 nt, Artificial Sequence
  Description of Artificial Sequence: Synthetic oligonucleotide
cuugcacuccaggcgccug

SEQ ID NO: 335025 - RNA, 19 nt, Artificial Sequence
  Description of Artificial Sequence: Synthetic oligonucleotide
cgauaaugcuuaacuaaga

SEQ ID NO: 335026 - RNA, 19 nt, Artificial Sequence
  Description of Artificial Sequence: Synthetic oligonucleotide
gguccgaacauuccucagu

SEQ ID NO: 335027 - RNA, 19 nt, Artificial Sequence
  Description of Artificial Sequence: Synthetic oligonucleotide
cccaggccaugccauauac

SEQ ID NO: 335028 - RNA, 19 nt, Artificial Sequence
  Description of Artificial Sequence: Synthetic oligonucleotide
uggagccucugacgaguuu

SEQ ID NO: 335029 - RNA, 19 nt, Artificial Sequence
  Description of Artificial Sequence: Synthetic oligonucleotide
gcaacagcgguagcagcug

SEQ ID NO: 335030 - RNA, 19 nt, Artificial Sequence
  Description of Artificial Sequence: Synthetic oligonucleotide
cuucgucacuguccaccuc

SEQ ID NO: 335031 - RNA, 19 nt, Artificial Sequence
  Description of Artificial Sequence: Synthetic oligonucleotide
ugcccaggccaugccauau

SEQ ID NO: 335032 - RNA, 19 nt, Artificial Sequence
  Description of Artificial Sequence: Synthetic oligonucleotide
gcgcacuuugugguucucg

SEQ ID NO: 335033 - RNA, 19 nt, Artificial Sequence
  Description of Artificial Sequence: Synthetic oligonucleotide
cuugccgcgucucuucccu

SEQ ID NO: 335034 - RNA, 19 nt, Artificial Sequence
  Description of Artificial Sequence: Synthetic oligonucleotide
aguaugcuggccggugguu

SEQ ID NO: 335035 - RNA, 19 nt, Artificial Sequence
  Description of Artificial Sequence: Synthetic oligonucleotide
auccacgaucacacagucu

SEQ ID NO: 335036 - RNA, 19 nt, Artificial Sequence
  Description of Artificial Sequence: Synthetic oligonucleotide
gcucuuuacaugggaguca

SEQ ID NO: 335037 - RNA, 19 nt, Artificial Sequence
  Description of Artificial Sequence: Synthetic oligonucleotide
gagccaaccuguccaucgu

SEQ ID NO: 335038 - RNA, 19 nt, Artificial Sequence
  Description of Artificial Sequence: Synthetic oligonucleotide
uggcguuuguggggcucag

SEQ ID NO: 335039 - RNA, 19 nt, Artificial Sequence
  Description of Artificial Sequence: Synthetic oligonucleotide
cacgaucacacagucugua

SEQ ID NO: 335040 - RNA, 19 nt, Artificial Sequence
  Description of Artificial Sequence: Synthetic oligonucleotide
aggcucaguguggagucau

SEQ ID NO: 335041 - RNA, 19 nt, Artificial Sequence
  Description of Artificial Sequence: Synthetic oligonucleotide
cucccaacuggaggccuug

SEQ ID NO: 335042 - RNA, 19 nt, Artificial Sequence
  Description of Artificial Sequence: Synthetic oligonucleotide
ccguaaccgcuucucuucc

SEQ ID NO: 335043 - RNA, 19 nt, Artificial Sequence
  Description of Artificial Sequence: Synthetic oligonucleotide
cacugcccaggccaugcca

SEQ ID NO: 335044 - RNA, 19 nt, Artificial Sequence
  Description of Artificial Sequence: Synthetic oligonucleotide
cuguaucgucauccucguc

SEQ ID NO: 335045 - RNA, 19 nt, Artificial Sequence
  Description of Artificial Sequence: Synthetic oligonucleotide
ggcaccguggagccagcac

SEQ ID NO: 335046 - RNA, 19 nt, Artificial Sequence
  Description of Artificial Sequence: Synthetic oligonucleotide
ggccgaagcgccugagcac

SEQ ID NO: 335047 - RNA, 19 nt, Artificial Sequence
  Description of Artificial Sequence: Synthetic oligonucleotide
cagacacuccuggccgaag

SEQ ID NO: 335048 - RNA, 19 nt, Artificial Sequence
  Description of Artificial Sequence: Synthetic oligonucleotide
uagugcccauccccaccuc

SEQ ID NO: 335049 - RNA, 19 nt, Artificial Sequence
  Description of Artificial Sequence: Synthetic oligonucleotide
ggcuugccgcgucucuucc

SEQ ID NO: 335050 - RNA, 19 nt, Artificial Sequence
  Description of Artificial Sequence: Synthetic oligonucleotide
agccgaucacaaagguccu

SEQ ID NO: 335051 - RNA, 19 nt, Artificial Sequence
  Description of Artificial Sequence: Synthetic oligonucleotide
uugcgcaguuggccgccuc

SEQ ID NO: 335052 - RNA, 19 nt, Artificial Sequence
  Description of Artificial Sequence: Synthetic oligonucleotide
ccggugguucucugaaaac

SEQ ID NO: 335053 - RNA, 19 nt, Artificial Sequence
  Description of Artificial Sequence: Synthetic oligonucleotide
aggcaccucgguggaagca

SEQ ID NO: 335054 - RNA, 19 nt, Artificial Sequence
  Description of Artificial Sequence: Synthetic oligonucleotide
gaggcucaguguggaguca

SEQ ID NO: 335055 - RNA, 19 nt, Artificial Sequence
  Description of Artificial Sequence: Synthetic oligonucleotide
ugucgcuccuugcgucguu

SEQ ID NO: 335056 - RNA, 19 nt, Artificial Sequence
  Description of Artificial Sequence: Synthetic oligonucleotide
gguagcccggcaccgugga

SEQ ID NO: 335057 - RNA, 19 nt, Artificial Sequence
  Description of Artificial Sequence: Synthetic oligonucleotide
gcgagucuggugguggcug

SEQ ID NO: 335058 - RNA, 19 nt, Artificial Sequence
  Description of Artificial Sequence: Synthetic oligonucleotide
uccuugcgucguuccuccu

SEQ ID NO: 335059 - RNA, 19 nt, Artificial Sequence
  Description of Artificial Sequence: Synthetic oligonucleotide
caucccacuugcacaggcu

SEQ ID NO: 335060 - RNA, 19 nt, Artificial Sequence
  Description of Artificial Sequence: Synthetic oligonucleotide
gguccaagguagcccggca

SEQ ID NO: 335061 - RNA, 19 nt, Artificial Sequence
  Description of Artificial Sequence: Synthetic oligonucleotide
cccucgggagagcugguug

SEQ ID NO: 335062 - RNA, 19 nt, Artificial Sequence
  Description of Artificial Sequence: Synthetic oligonucleotide
guggcguuuguggggcuca

SEQ ID NO: 335063 - RNA, 19 nt, Artificial Sequence
  Description of Artificial Sequence: Synthetic oligonucleotide
cagagccaaccuguccauc

SEQ ID NO: 335064 - RNA, 19 nt, Artificial Sequence
  Description of Artificial Sequence: Synthetic oligonucleotide
gcuugccgcgucucuuccc

SEQ ID NO: 335065 - RNA, 19 nt, Artificial Sequence
  Description of Artificial Sequence: Synthetic oligonucleotide
gcuucaagucggagcuugc

SEQ ID NO: 335066 - RNA, 19 nt, Artificial Sequence
  Description of Artificial Sequence: Synthetic oligonucleotide
guucucgggguccgaacau

SEQ ID NO: 335067 - RNA, 19 nt, Artificial Sequence
  Description of Artificial Sequence: Synthetic oligonucleotide
gguccagaccucaggggca

SEQ ID NO: 335068 - RNA, 19 nt, Artificial Sequence
  Description of Artificial Sequence: Synthetic oligonucleotide
gccgcccauacacauccca

SEQ ID NO: 335069 - RNA, 19 nt, Artificial Sequence
  Description of Artificial Sequence: Synthetic oligonucleotide
acuccuggccgaagcgccu

SEQ ID NO: 335070 - RNA, 19 nt, Artificial Sequence
  Description of Artificial Sequence: Synthetic oligonucleotide
gggugucggacaaagugcu

SEQ ID NO: 335071 - RNA, 19 nt, Artificial Sequence
  Description of Artificial Sequence: Synthetic oligonucleotide
cucgggagagcugguugga

SEQ ID NO: 335072 - RNA, 19 nt, Artificial Sequence
  Description of Artificial Sequence: Synthetic oligonucleotide
cccggcaccguggagccag

SEQ ID NO: 335073 - RNA, 19 nt, Artificial Sequence
  Description of Artificial Sequence: Synthetic oligonucleotide
aggccacggcggcaucgcu

SEQ ID NO: 335074 - RNA, 19 nt, Artificial Sequence
  Description of Artificial Sequence: Synthetic oligonucleotide
guguugcggcugcacaccu

SEQ ID NO: 335075 - RNA, 19 nt, Artificial Sequence
  Description of Artificial Sequence: Synthetic oligonucleotide
ggaggcgagucugguggug

SEQ ID NO: 335076 - RNA, 19 nt, Artificial Sequence
  Description of Artificial Sequence: Synthetic oligonucleotide
gcggcaucgcucuuggaau

SEQ ID NO: 335077 - RNA, 19 nt, Artificial Sequence
  Description of Artificial Sequence: Synthetic oligonucleotide
uacggaagucaggccgcuu

SEQ ID NO: 335078 - RNA, 19 nt, Artificial Sequence
  Description of Artificial Sequence: Synthetic oligonucleotide
gcuuccgcuugauuggcau

SEQ ID NO: 335079 - RNA, 19 nt, Artificial Sequence
  Description of Artificial Sequence: Synthetic oligonucleotide
gcuugcgcaguuggccgcc

SEQ ID NO: 335080 - RNA, 19 nt, Artificial Sequence
  Description of Artificial Sequence: Synthetic oligonucleotide
cagcggugacguaggucca

SEQ ID NO: 335081 - RNA, 19 nt, Artificial Sequence
  Description of Artificial Sequence: Synthetic oligonucleotide
ggcacgaccacaguaucuu

SEQ ID NO: 335082 - RNA, 19 nt, Artificial Sequence
  Description of Artificial Sequence: Synthetic oligonucleotide
gccgaucacaaagguccug

SEQ ID NO: 335083 - RNA, 19 nt, Artificial Sequence
  Description of Artificial Sequence: Synthetic oligonucleotide
cccaguaugcuggccggug

SEQ ID NO: 335084 - RNA, 19 nt, Artificial Sequence
  Description of Artificial Sequence: Synthetic oligonucleotide
cuccugucgcuccuugcgu

SEQ ID NO: 335085 - RNA, 19 nt, Artificial Sequence
  Description of Artificial Sequence: Synthetic oligonucleotide
cacggaaccgcuugcccuu

SEQ ID NO: 335086 - RNA, 19 nt, Artificial Sequence
  Description of Artificial Sequence: Synthetic oligonucleotide
gucccugguacaauucauu

SEQ ID NO: 335087 - RNA, 19 nt, Artificial Sequence
  Description of Artificial Sequence: Synthetic oligonucleotide
guaacugcucaggccuccu

SEQ ID NO: 335088 - RNA, 19 nt, Artificial Sequence
  Description of Artificial Sequence: Synthetic oligonucleotide
cagguacccauggggcaca

SEQ ID NO: 335089 - RNA, 19 nt, Artificial Sequence
  Description of Artificial Sequence: Synthetic oligonucleotide
agccggccuuucaggucac

SEQ ID NO: 335090 - RNA, 19 nt, Artificial Sequence
  Description of Artificial Sequence: Synthetic oligonucleotide
ggugucggacaaagugcuc

SEQ ID NO: 335091 - RNA, 19 nt, Artificial Sequence
  Description of Artificial Sequence: Synthetic oligonucleotide
gccaugcaacagcgguagc

SEQ ID NO: 335092 - RNA, 19 nt, Artificial Sequence
  Description of Artificial Sequence: Synthetic oligonucleotide
cgggguccgaacauuccuc

SEQ ID NO: 335093 - RNA, 19 nt, Artificial Sequence
  Description of Artificial Sequence: Synthetic oligonucleotide
gcgcaguuggccgccucag

SEQ ID NO: 335094 - RNA, 19 nt, Artificial Sequence
  Description of Artificial Sequence: Synthetic oligonucleotide
ggccgaguucucagagaug

SEQ ID NO: 335095 - RNA, 19 nt, Artificial Sequence
  Description of Artificial Sequence: Synthetic oligonucleotide
ggcguuuguggggcucagc

SEQ ID NO: 335096 - RNA, 19 nt, Artificial Sequence
  Description of Artificial Sequence: Synthetic oligonucleotide
cagggacguggugggaaga

SEQ ID NO: 335097 - RNA, 19 nt, Artificial Sequence
  Description of Artificial Sequence: Synthetic oligonucleotide
agccucugacgaguuucuu

SEQ ID NO: 335098 - RNA, 19 nt, Artificial Sequence
  Description of Artificial Sequence: Synthetic oligonucleotide
gccgaagcgccugagcacu

SEQ ID NO: 335099 - RNA, 19 nt, Artificial Sequence
  Description of Artificial Sequence: Synthetic oligonucleotide
gcuuuacagucuggaagua

SEQ ID NO: 335100 - RNA, 19 nt, Artificial Sequence
  Description of Artificial Sequence: Synthetic oligonucleotide
ggcacgcagugaacugcug

SEQ ID NO: 335101 - RNA, 19 nt, Artificial Sequence
  Description of Artificial Sequence: Synthetic oligonucleotide
gcgccugcacuccacuucu

SEQ ID NO: 335102 - RNA, 19 nt, Artificial Sequence
  Description of Artificial Sequence: Synthetic oligonucleotide
ccucagccgcccauacaca

SEQ ID NO: 335103 - RNA, 19 nt, Artificial Sequence
  Description of Artificial Sequence: Synthetic oligonucleotide
cucugacgaguuucuuguu

SEQ ID NO: 335104 - RNA, 19 nt, Artificial Sequence
  Description of Artificial Sequence: Synthetic oligonucleotide
cacaggagccggccagggu

SEQ ID NO: 335105 - RNA, 19 nt, Artificial Sequence
  Description of Artificial Sequence: Synthetic oligonucleotide
ggcaccucgguggaagcau

SEQ ID NO: 335106 - RNA, 19 nt, Artificial Sequence
  Description of Artificial Sequence: Synthetic oligonucleotide
cggugacguagguccacug

SEQ ID NO: 335107 - RNA, 19 nt, Artificial Sequence
  Description of Artificial Sequence: Synthetic oligonucleotide
ggccggugguucucugaaa

SEQ ID NO: 335108 - RNA, 19 nt, Artificial Sequence
  Description of Artificial Sequence: Synthetic oligonucleotide
ggcuuccgcuugauuggca

SEQ ID NO: 335109 - RNA, 19 nt, Artificial Sequence
  Description of Artificial Sequence: Synthetic oligonucleotide
gucggacaaagugcucuuu

SEQ ID NO: 335110 - RNA, 19 nt, Artificial Sequence
  Description of Artificial Sequence: Synthetic oligonucleotide
gcagacacuccuggccgaa

SEQ ID NO: 335111 - RNA, 19 nt, Artificial Sequence
  Description of Artificial Sequence: Synthetic oligonucleotide
gcaucgcucuuggaauucu

SEQ ID NO: 335112 - RNA, 19 nt, Artificial Sequence
  Description of Artificial Sequence: Synthetic oligonucleotide
ccuggccgaagcgccugag

SEQ ID NO: 335113 - RNA, 19 nt, Artificial Sequence
  Description of Artificial Sequence: Synthetic oligonucleotide
gcacaccugggugggucca

SEQ ID NO: 335114 - RNA, 19 nt, Artificial Sequence
  Description of Artificial Sequence: Synthetic oligonucleotide
cggaaccgcuugcccuugg

SEQ ID NO: 335115 - RNA, 19 nt, Artificial Sequence
  Description of Artificial Sequence: Synthetic oligonucleotide
cuggccccacucugcugcu

SEQ ID NO: 335116 - RNA, 19 nt, Artificial Sequence
  Description of Artificial Sequence: Synthetic oligonucleotide
cugucgcuccuugcgucgu

SEQ ID NO: 335117 - RNA, 19 nt, Artificial Sequence
  Description of Artificial Sequence: Synthetic oligonucleotide
ggcggaugaccaccgucuu

SEQ ID NO: 335118 - RNA, 19 nt, Artificial Sequence
  Description of Artificial Sequence: Synthetic oligonucleotide
ccguaaccgcuucucuucu

SEQ ID NO: 335119 - RNA, 19 nt, Artificial Sequence
  Description of Artificial Sequence: Synthetic oligonucleotide
guccaucguaccgccuuuu

SEQ ID NO: 335120 - RNA, 19 nt, Artificial Sequence
  Description of Artificial Sequence: Synthetic oligonucleotide
ggcgagucuggugguggcu

SEQ ID NO: 335121 - RNA, 19 nt, Artificial Sequence
  Description of Artificial Sequence: Synthetic oligonucleotide
ccccucacugugggacaag

SEQ ID NO: 335122 - RNA, 19 nt, Artificial Sequence
  Description of Artificial Sequence: Synthetic oligonucleotide
guggagccucugacgaguu

SEQ ID NO: 335123 - RNA, 19 nt, Artificial Sequence
  Description of Artificial Sequence: Synthetic oligonucleotide
ccggcaccguggagccagc

SEQ ID NO: 335124 - RNA, 19 nt, Artificial Sequence
  Description of Artificial Sequence: Synthetic oligonucleotide
gcggugacguagguccacu

SEQ ID NO: 335125 - RNA, 19 nt, Artificial Sequence
  Description of Artificial Sequence: Synthetic oligonucleotide
ccaggauaugcugguuccu

SEQ ID NO: 335126 - RNA, 19 nt, Artificial Sequence
  Description of Artificial Sequence: Synthetic oligonucleotide
cuugcgcaguuggccgccu

SEQ ID NO: 335127 - RNA, 19 nt, Artificial Sequence
  Description of Artificial Sequence: Synthetic oligonucleotide
cggccaaaccuccuccugu

SEQ ID NO: 335128 - RNA, 19 nt, Artificial Sequence
  Description of Artificial Sequence: Synthetic oligonucleotide
ccuugcgucguuccuccuu

SEQ ID NO: 335129 - RNA, 19 nt, Artificial Sequence
  Description of Artificial Sequence: Synthetic oligonucleotide
ccgcuugauuggcaugggu

SEQ ID NO: 335130 - RNA, 19 nt, Artificial Sequence
  Description of Artificial Sequence: Synthetic oligonucleotide
cguaaccgcuucucuuccu

SEQ ID NO: 335131 - RNA, 19 nt, Artificial Sequence
  Description of Artificial Sequence: Synthetic oligonucleotide
gucccucgggagagcuggu

SEQ ID NO: 335132 - RNA, 19 nt, Artificial Sequence
  Description of Artificial Sequence: Synthetic oligonucleotide
ccuugcacuccaggcgccu

SEQ ID NO: 335133 - RNA, 19 nt, Artificial Sequence
  Description of Artificial Sequence: Synthetic oligonucleotide
cccuguccaugauguuggu

SEQ ID NO: 335134 - RNA, 19 nt, Artificial Sequence
  Description of Artificial Sequence: Synthetic oligonucleotide
cguaaccgcuucucuucuu

SEQ ID NO: 335135 - RNA, 19 nt, Artificial Sequence
  Description of Artificial Sequence: Synthetic oligonucleotide
ccccaguaugcuggccggu

SEQ ID NO: 335136 - RNA, 19 nt, Artificial Sequence
  Description of Artificial Sequence: Synthetic oligonucleotide
aaaagaguccgucuugucc

SEQ ID NO: 335137 - RNA, 19 nt, Artificial Sequence
  Description of Artificial Sequence: Synthetic oligonucleotide
aaaggcuuggucuaacccc

SEQ ID NO: 335138 - RNA, 19 nt, Artificial Sequence
  Description of Artificial Sequence: Synthetic oligonucleotide
aaggugaucuuguugacgg

SEQ ID NO: 335139 - RNA, 19 nt, Artificial Sequence
  Description of Artificial Sequence: Synthetic oligonucleotide
uuuaguguuuaaaauagca

SEQ ID NO: 335140 - RNA, 19 nt, Artificial Sequence
  Description of Artificial Sequence: Synthetic oligonucleotide
uguguuaaggaucuaaaga

SEQ ID NO: 335141 - RNA, 19 nt, Artificial Sequence
  Description of Artificial Sequence: Synthetic oligonucleotide
aauaaauaaguuagacccc

SEQ ID NO: 335142 - RNA, 19 nt, Artificial Sequence
  Description of Artificial Sequence: Synthetic oligonucleotide
ugugcuuacgaauuagccg

SEQ ID NO: 335143 - RNA, 19 nt, Artificial Sequence
  Description of Artificial Sequence: Synthetic oligonucleotide
acaugugggacugugaugc

SEQ ID NO: 335144 - RNA, 19 nt, Artificial Sequence
  Description of Artificial Sequence: Synthetic oligonucleotide
aguuagaccccacaugggc

SEQ ID NO: 335145 - RNA, 19 nt, Artificial Sequence
  Description of Artificial Sequence: Synthetic oligonucleotide
aacucagugagaguaggcc

SEQ ID NO: 335146 - RNA, 19 nt, Artificial Sequence
  Description of Artificial Sequence: Synthetic oligonucleotide
ugauagucacauaaugucc

SEQ ID NO: 335147 - RNA, 19 nt, Artificial Sequence
  Description of Artificial Sequence: Synthetic oligonucleotide
ugguuagugaggaagagcu

SEQ ID NO: 335148 - RNA, 19 nt, Artificial Sequence
  Description of Artificial Sequence: Synthetic oligonucleotide
ucuggcaacugcaugaccc

SEQ ID NO: 335149 - RNA, 19 nt, Artificial Sequence
  Description of Artificial Sequence: Synthetic oligonucleotide
uugauagucacauaauguc

SEQ ID NO: 335150 - RNA, 19 nt, Artificial Sequence
  Description of Artificial Sequence: Synthetic oligonucleotide
guguuaaggaucuaaagac

SEQ ID NO: 335151 - RNA, 19 nt, Artificial Sequence
  Description of Artificial Sequence: Synthetic oligonucleotide
gguaaaguagcuccgaggg

SEQ ID NO: 335152 - RNA, 19 nt, Artificial Sequence
  Description of Artificial Sequence: Synthetic oligonucleotide
uacgaauuagccgagagga

SEQ ID NO: 335153 - RNA, 19 nt, Artificial Sequence
  Description of Artificial Sequence: Synthetic oligonucleotide
auccuaguaauauggcugc

SEQ ID NO: 335154 - RNA, 19 nt, Artificial Sequence
  Description of Artificial Sequence: Synthetic oligonucleotide
cucuaugugaacuacccag

SEQ ID NO: 335155 - RNA, 19 nt, Artificial Sequence
  Description of Artificial Sequence: Synthetic oligonucleotide
cuaaauggaggucacuucc

SEQ ID NO: 335156 - RNA, 19 nt, Artificial Sequence
  Description of Artificial Sequence: Synthetic oligonucleotide
uuacgaauuagccgagagg

SEQ ID NO: 335157 - RNA, 19 nt, Artificial Sequence
  Description of Artificial Sequence: Synthetic oligonucleotide
ugaacuacccaguugcuca

SEQ ID NO: 335158 - RNA, 19 nt, Artificial Sequence
  Description of Artificial Sequence: Synthetic oligonucleotide
uaagcuggcugacuggacg

SEQ ID NO: 335159 - RNA, 19 nt, Artificial Sequence
  Description of Artificial Sequence: Synthetic oligonucleotide
guugacaucauugaccugc

SEQ ID NO: 335160 - RNA, 19 nt, Artificial Sequence
  Description of Artificial Sequence: Synthetic oligonucleotide
guagggguagccuugaccc

SEQ ID NO: 335161 - RNA, 19 nt, Artificial Sequence
  Description of Artificial Sequence: Synthetic oligonucleotide
aggaucuaaagacagagau

SEQ ID NO: 335162 - RNA, 19 nt, Artificial Sequence
  Description of Artificial Sequence: Synthetic oligonucleotide
guuaaggaucuaaagacag

SEQ ID NO: 335163 - RNA, 19 nt, Artificial Sequence
  Description of Artificial Sequence: Synthetic oligonucleotide
ugaucugaggcuccacugg

SEQ ID NO: 335164 - RNA, 19 nt, Artificial Sequence
  Description of Artificial Sequence: Synthetic oligonucleotide
uaaaggcuuggucuaaccc

SEQ ID NO: 335165 - RNA, 19 nt, Artificial Sequence
  Description of Artificial Sequence: Synthetic oligonucleotide
uugugcuuacgaauuagcc

SEQ ID NO: 335166 - RNA, 19 nt, Artificial Sequence
  Description of Artificial Sequence: Synthetic oligonucleotide
uguaaguuccggaggaaca

SEQ ID NO: 335167 - RNA, 19 nt, Artificial Sequence
  Description of Artificial Sequence: Synthetic oligonucleotide
agggacucguaccauagcg

SEQ ID NO: 335168 - RNA, 19 nt, Artificial Sequence
  Description of Artificial Sequence: Synthetic oligonucleotide
cuacagugcagacaugugg

SEQ ID NO: 335169 - RNA, 19 nt, Artificial Sequence
  Description of Artificial Sequence: Synthetic oligonucleotide
uuugugcuuacgaauuagc

SEQ ID NO: 335170 - RNA, 19 nt, Artificial Sequence
  Description of Artificial Sequence: Synthetic oligonucleotide
ucaucguugcucauguucu

SEQ ID NO: 335171 - RNA, 19 nt, Artificial Sequence
  Description of Artificial Sequence: Synthetic oligonucleotide
uggcccacgaugcugaugc

SEQ ID NO: 335172 - RNA, 19 nt, Artificial Sequence
  Description of Artificial Sequence: Synthetic oligonucleotide
ugcuaccagacccacuugg

SEQ ID NO: 335173 - RNA, 19 nt, Artificial Sequence
  Description of Artificial Sequence: Synthetic oligonucleotide
uuugggauacgaucucccg

SEQ ID NO: 335174 - RNA, 19 nt, Artificial Sequence
  Description of Artificial Sequence: Synthetic oligonucleotide
ugcguguacagccagucca

SEQ ID NO: 335175 - RNA, 19 nt, Artificial Sequence
  Description of Artificial Sequence: Synthetic oligonucleotide
aagcccauauccuaguaau

SEQ ID NO: 335176 - RNA, 19 nt, Artificial Sequence
  Description of Artificial Sequence: Synthetic oligonucleotide
uauugugugcgcuaucacu

SEQ ID NO: 335177 - RNA, 19 nt, Artificial Sequence
  Description of Artificial Sequence: Synthetic oligonucleotide
gauacgaucucccgaagca

SEQ ID NO: 335178 - RNA, 19 nt, Artificial Sequence
  Description of Artificial Sequence: Synthetic oligonucleotide
agcucuaugugaacuaccc

SEQ ID NO: 335179 - RNA, 19 nt, Artificial Sequence
  Description of Artificial Sequence: Synthetic oligonucleotide
auugugugcgcuaucacuc

SEQ ID NO: 335180 - RNA, 19 nt, Artificial Sequence
  Description of Artificial Sequence: Synthetic oligonucleotide
ucuaugugaacuacccagu

SEQ ID NO: 335181 - RNA, 19 nt, Artificial Sequence
  Description of Artificial Sequence: Synthetic oligonucleotide
acucguaccauagcggggc

SEQ ID NO: 335182 - RNA, 19 nt, Artificial Sequence
  Description of Artificial Sequence: Synthetic oligonucleotide
acaguauacaggugccugg

SEQ ID NO: 335183 - RNA, 19 nt, Artificial Sequence
  Description of Artificial Sequence: Synthetic oligonucleotide
uuaaggaucuaaagacaga

SEQ ID NO: 335184 - RNA, 19 nt, Artificial Sequence
  Description of Artificial Sequence: Synthetic oligonucleotide
cuuacgaauuagccgagag

SEQ ID NO: 335185 - RNA, 19 nt, Artificial Sequence
  Description of Artificial Sequence: Synthetic oligonucleotide
ugagacuuguguuaaggau

SEQ ID NO: 335186 - RNA, 19 nt, Artificial Sequence
  Description of Artificial Sequence: Synthetic oligonucleotide
gugcuuacgaauuagccga

SEQ ID NO: 335187 - RNA, 19 nt, Artificial Sequence
  Description of Artificial Sequence: Synthetic oligonucleotide
uugacggugugccucaaga

SEQ ID NO: 335188 - RNA, 19 nt, Artificial Sequence
  Description of Artificial Sequence: Synthetic oligonucleotide
uuggucuaaccccucaaga

SEQ ID NO: 335189 - RNA, 19 nt, Artificial Sequence
  Description of Artificial Sequence: Synthetic oligonucleotide
ugaggcuaagacaguauac

SEQ ID NO: 335190 - RNA, 19 nt, Artificial Sequence
  Description of Artificial Sequence: Synthetic oligonucleotide
gauguucagggacauggug

SEQ ID NO: 335191 - RNA, 19 nt, Artificial Sequence
  Description of Artificial Sequence: Synthetic oligonucleotide
uuguccuaaauggagguca

SEQ ID NO: 335192 - RNA, 19 nt, Artificial Sequence
  Description of Artificial Sequence: Synthetic oligonucleotide
uuaaaggcuuggucuaacc

SEQ ID NO: 335193 - RNA, 19 nt, Artificial Sequence
  Description of Artificial Sequence: Synthetic oligonucleotide
agucacauaauguccacaa

SEQ ID NO: 335194 - RNA, 19 nt, Artificial Sequence
  Description of Artificial Sequence: Synthetic oligonucleotide
aaaggaaccagaagguggu

SEQ ID NO: 335195 - RNA, 19 nt, Artificial Sequence
  Description of Artificial Sequence: Synthetic oligonucleotide
ugccgugugaucugauucg

SEQ ID NO: 335196 - RNA, 19 nt, Artificial Sequence
  Description of Artificial Sequence: Synthetic oligonucleotide
ucaagcgcugcuuccgacg

SEQ ID NO: 335197 - RNA, 19 nt, Artificial Sequence
  Description of Artificial Sequence: Synthetic oligonucleotide
gggaugguaaaguagcucc

SEQ ID NO: 335198 - RNA, 19 nt, Artificial Sequence
  Description of Artificial Sequence: Synthetic oligonucleotide
ucuuguccuaaauggaggu

SEQ ID NO: 335199 - RNA, 19 nt, Artificial Sequence
  Description of Artificial Sequence: Synthetic oligonucleotide
ugucgccuggcucaaugcg

SEQ ID NO: 335200 - RNA, 19 nt, Artificial Sequence
  Description of Artificial Sequence: Synthetic oligonucleotide
cugguagagagccaccagg

SEQ ID NO: 335201 - RNA, 19 nt, Artificial Sequence
  Description of Artificial Sequence: Synthetic oligonucleotide
gagauguccccucacaaga

SEQ ID NO: 335202 - RNA, 19 nt, Artificial Sequence
  Description of Artificial Sequence: Synthetic oligonucleotide
cuugucucccguacuagcc

SEQ ID NO: 335203 - RNA, 19 nt, Artificial Sequence
  Description of Artificial Sequence: Synthetic oligonucleotide
accauagcggggcagagca

SEQ ID NO: 335204 - RNA, 19 nt, Artificial Sequence
  Description of Artificial Sequence: Synthetic oligonucleotide
gauccaauguagaugccgc

SEQ ID NO: 335205 - RNA, 19 nt, Artificial Sequence
  Description of Artificial Sequence: Synthetic oligonucleotide
acggugugccucaagaagc

SEQ ID NO: 335206 - RNA, 19 nt, Artificial Sequence
  Description of Artificial Sequence: Synthetic oligonucleotide
aagaagccgcgcuucagca

SEQ ID NO: 335207 - RNA, 19 nt, Artificial Sequence
  Description of Artificial Sequence: Synthetic oligonucleotide
acgacauuugugcuuacga

SEQ ID NO: 335208 - RNA, 19 nt, Artificial Sequence
  Description of Artificial Sequence: Synthetic oligonucleotide
auuagccgagaggaggugc

SEQ ID NO: 335209 - RNA, 19 nt, Artificial Sequence
  Description of Artificial Sequence: Synthetic oligonucleotide
cauuggguaaccagcugcc

SEQ ID NO: 335210 - RNA, 19 nt, Artificial Sequence
  Description of Artificial Sequence: Synthetic oligonucleotide
cacauaauguccacaaaga

SEQ ID NO: 335211 - RNA, 19 nt, Artificial Sequence
  Description of Artificial Sequence: Synthetic oligonucleotide
uucagggaugcaagguuag

SEQ ID NO: 335212 - RNA, 19 nt, Artificial Sequence
  Description of Artificial Sequence: Synthetic oligonucleotide
ucuaaccccucaagaaccc

SEQ ID NO: 335213 - RNA, 19 nt, Artificial Sequence
  Description of Artificial Sequence: Synthetic oligonucleotide
gagguuuaaaggcuugguc

SEQ ID NO: 335214 - RNA, 19 nt, Artificial Sequence
  Description of Artificial Sequence: Synthetic oligonucleotide
agagugacggugaugaugu

SEQ ID NO: 335215 - RNA, 19 nt, Artificial Sequence
  Description of Artificial Sequence: Synthetic oligonucleotide
acuuucaguacaaacugug

SEQ ID NO: 335216 - RNA, 19 nt, Artificial Sequence
  Description of Artificial Sequence: Synthetic oligonucleotide
ucuacagugcagacaugug

SEQ ID NO: 335217 - RNA, 19 nt, Artificial Sequence
  Description of Artificial Sequence: Synthetic oligonucleotide
caggauagcaaugacagga

SEQ ID NO: 335218 - RNA, 19 nt, Artificial Sequence
  Description of Artificial Sequence: Synthetic oligonucleotide
agauacuugggccgcacca

SEQ ID NO: 335219 - RNA, 19 nt, Artificial Sequence
  Description of Artificial Sequence: Synthetic oligonucleotide
cagccagagagguuuaaag

SEQ ID NO: 335220 - RNA, 19 nt, Artificial Sequence
  Description of Artificial Sequence: Synthetic oligonucleotide
uugaggcuaagacaguaua

SEQ ID NO: 335221 - RNA, 19 nt, Artificial Sequence
  Description of Artificial Sequence: Synthetic oligonucleotide
gacaguauacaggugccug

SEQ ID NO: 335222 - RNA, 19 nt, Artificial Sequence
  Description of Artificial Sequence: Synthetic oligonucleotide
uccgacgacgacauuugug

SEQ ID NO: 335223 - RNA, 19 nt, Artificial Sequence
  Description of Artificial Sequence: Synthetic oligonucleotide
ugugcgcuaucacuccucc

SEQ ID NO: 335224 - RNA, 19 nt, Artificial Sequence
  Description of Artificial Sequence: Synthetic oligonucleotide
agugacggugaugauguuc

SEQ ID NO: 335225 - RNA, 19 nt, Artificial Sequence
  Description of Artificial Sequence: Synthetic oligonucleotide
ucugauucgcugccacugc

SEQ ID NO: 335226 - RNA, 19 nt, Artificial Sequence
  Description of Artificial Sequence: Synthetic oligonucleotide
guaccaaguggggaaaggg

SEQ ID NO: 335227 - RNA, 19 nt, Artificial Sequence
  Description of Artificial Sequence: Synthetic oligonucleotide
gaggcuaagacaguauaca

SEQ ID NO: 335228 - RNA, 19 nt, Artificial Sequence
  Description of Artificial Sequence: Synthetic oligonucleotide
ugcaagguuagugcacagg

SEQ ID NO: 335229 - RNA, 19 nt, Artificial Sequence
  Description of Artificial Sequence: Synthetic oligonucleotide
ugaucuaucuuggcuggcc

SEQ ID NO: 335230 - RNA, 19 nt, Artificial Sequence
  Description of Artificial Sequence: Synthetic oligonucleotide
acaguaucuacagugcaga

SEQ ID NO: 335231 - RNA, 19 nt, Artificial Sequence
  Description of Artificial Sequence: Synthetic oligonucleotide
cacuaaggcaagcccauag

SEQ ID NO: 335232 - RNA, 19 nt, Artificial Sequence
  Description of Artificial Sequence: Synthetic oligonucleotide
ugacuggacgcucccacca

SEQ ID NO: 335233 - RNA, 19 nt, Artificial Sequence
  Description of Artificial Sequence: Synthetic oligonucleotide
cuuggucuaaccccucaag

SEQ ID NO: 335234 - RNA, 19 nt, Artificial Sequence
  Description of Artificial Sequence: Synthetic oligonucleotide
gauggcugcuccuugugga

SEQ ID NO: 335235 - RNA, 19 nt, Artificial Sequence
  Description of Artificial Sequence: Synthetic oligonucleotide
uuagccgagaggaggugcu

SEQ ID NO: 335236 - RNA, 19 nt, Artificial Sequence
  Description of Artificial Sequence: Synthetic oligonucleotide
gaugccgccaucaccccgg

SEQ ID NO: 335237 - RNA, 19 nt, Artificial Sequence
  Description of Artificial Sequence: Synthetic oligonucleotide
ucccguacuagccauccuc

SEQ ID NO: 335238 - RNA, 19 nt, Artificial Sequence
  Description of Artificial Sequence: Synthetic oligonucleotide
aguaccaaguggggaaagg

SEQ ID NO: 335239 - RNA, 19 nt, Artificial Sequence
  Description of Artificial Sequence: Synthetic oligonucleotide
agcuccgagggguuggguc

SEQ ID NO: 335240 - RNA, 19 nt, Artificial Sequence
  Description of Artificial Sequence: Synthetic oligonucleotide
gaagcacccgcacagcguc

SEQ ID NO: 335241 - RNA, 19 nt, Artificial Sequence
  Description of Artificial Sequence: Synthetic oligonucleotide
ccgacgacgacauuugugc

SEQ ID NO: 335242 - RNA, 19 nt, Artificial Sequence
  Description of Artificial Sequence: Synthetic oligonucleotide
acgccugacuucuagggcu

SEQ ID NO: 335243 - RNA, 19 nt, Artificial Sequence
  Description of Artificial Sequence: Synthetic oligonucleotide
uugggaugguaaaguagcu

SEQ ID NO: 335244 - RNA, 19 nt, Artificial Sequence
  Description of Artificial Sequence: Synthetic oligonucleotide
ugguaagcaggugggaagc

SEQ ID NO: 335245 - RNA, 19 nt, Artificial Sequence
  Description of Artificial Sequence: Synthetic oligonucleotide
cugaucugaggcuccacug

SEQ ID NO: 335246 - RNA, 19 nt, Artificial Sequence
  Description of Artificial Sequence: Synthetic oligonucleotide
uccuaaauggaggucacuu

SEQ ID NO: 335247 - RNA, 19 nt, Artificial Sequence
  Description of Artificial Sequence: Synthetic oligonucleotide
acuggcggcuaccuguaag

SEQ ID NO: 335248 - RNA, 19 nt, Artificial Sequence
  Description of Artificial Sequence: Synthetic oligonucleotide
uggggcaacagcugacgcc

SEQ ID NO: 335249 - RNA, 19 nt, Artificial Sequence
  Description of Artificial Sequence: Synthetic oligonucleotide
gacgacauuugugcuuacg

SEQ ID NO: 335250 - RNA, 19 nt, Artificial Sequence
  Description of Artificial Sequence: Synthetic oligonucleotide
ugcuuacgaauuagccgag

SEQ ID NO: 335251 - RNA, 19 nt, Artificial Sequence
  Description of Artificial Sequence: Synthetic oligonucleotide
guugauagucacauaaugu

SEQ ID NO: 335252 - RNA, 19 nt, Artificial Sequence
  Description of Artificial Sequence: Synthetic oligonucleotide
cucucuucgcucucugaag

SEQ ID NO: 335253 - RNA, 19 nt, Artificial Sequence
  Description of Artificial Sequence: Synthetic oligonucleotide
uugugugcgcuaucacucc

SEQ ID NO: 335254 - RNA, 19 nt, Artificial Sequence
  Description of Artificial Sequence: Synthetic oligonucleotide
acugaaaacacugguugau

SEQ ID NO: 335255 - RNA, 19 nt, Artificial Sequence
  Description of Artificial Sequence: Synthetic oligonucleotide
ugugaacuacccaguugcu

SEQ ID NO: 335256 - RNA, 19 nt, Artificial Sequence
  Description of Artificial Sequence: Synthetic oligonucleotide
acuuguguuaaggaucuaa

SEQ ID NO: 335257 - RNA, 19 nt, Artificial Sequence
  Description of Artificial Sequence: Synthetic oligonucleotide
auagccuuuuggaaggacu

SEQ ID NO: 335258 - RNA, 19 nt, Artificial Sequence
  Description of Artificial Sequence: Synthetic oligonucleotide
cagagcccaaaagaguccg

SEQ ID NO: 335259 - RNA, 19 nt, Artificial Sequence
  Description of Artificial Sequence: Synthetic oligonucleotide
gaugggucgcacuggguca

SEQ ID NO: 335260 - RNA, 19 nt, Artificial Sequence
  Description of Artificial Sequence: Synthetic oligonucleotide
aucuccguagcuauugugu

SEQ ID NO: 335261 - RNA, 19 nt, Artificial Sequence
  Description of Artificial Sequence: Synthetic oligonucleotide
cuccguagcuauugugugc

SEQ ID NO: 335262 - RNA, 19 nt, Artificial Sequence
  Description of Artificial Sequence: Synthetic oligonucleotide
ggaaccagaaggugguccc

SEQ ID NO: 335263 - RNA, 19 nt, Artificial Sequence
  Description of Artificial Sequence: Synthetic oligonucleotide
aauuagccgagaggaggug

SEQ ID NO: 335264 - RNA, 19 nt, Artificial Sequence
  Description of Artificial Sequence: Synthetic oligonucleotide
ugccucaagaagccgcgcu

SEQ ID NO: 335265 - RNA, 19 nt, Artificial Sequence
  Description of Artificial Sequence: Synthetic oligonucleotide
aguagcuccgagggguugg

SEQ ID NO: 335266 - RNA, 19 nt, Artificial Sequence
  Description of Artificial Sequence: Synthetic oligonucleotide
cugacgccugacuucuagg

SEQ ID NO: 335267 - RNA, 19 nt, Artificial Sequence
  Description of Artificial Sequence: Synthetic oligonucleotide
uuguugacggugugccuca

SEQ ID NO: 335268 - RNA, 19 nt, Artificial Sequence
  Description of Artificial Sequence: Synthetic oligonucleotide
caguguguccugaucugag

SEQ ID NO: 335269 - RNA, 19 nt, Artificial Sequence
  Description of Artificial Sequence: Synthetic oligonucleotide
uguccccucacaagacucu

SEQ ID NO: 335270 - RNA, 19 nt, Artificial Sequence
  Description of Artificial Sequence: Synthetic oligonucleotide
acauuugugcuuacgaauu

SEQ ID NO: 335271 - RNA, 19 nt, Artificial Sequence
  Description of Artificial Sequence: Synthetic oligonucleotide
ugugugcgcuaucacuccu

SEQ ID NO: 335272 - RNA, 19 nt, Artificial Sequence
  Description of Artificial Sequence: Synthetic oligonucleotide
caugucgccuggcucaaug

SEQ ID NO: 335273 - RNA, 19 nt, Artificial Sequence
  Description of Artificial Sequence: Synthetic oligonucleotide
ucucccguacuagccaucc

SEQ ID NO: 335274 - RNA, 19 nt, Artificial Sequence
  Description of Artificial Sequence: Synthetic oligonucleotide
gcagacuagcaauaaauaa

SEQ ID NO: 335275 - RNA, 19 nt, Artificial Sequence
  Description of Artificial Sequence: Synthetic oligonucleotide
gguagggguagccuugacc

SEQ ID NO: 335276 - RNA, 19 nt, Artificial Sequence
  Description of Artificial Sequence: Synthetic oligonucleotide
caagguuagugcacagguc

SEQ ID NO: 335277 - RNA, 19 nt, Artificial Sequence
  Description of Artificial Sequence: Synthetic oligonucleotide
agauguccccucacaagac

SEQ ID NO: 335278 - RNA, 19 nt, Artificial Sequence
  Description of Artificial Sequence: Synthetic oligonucleotide
gaacucagugagaguaggc

SEQ ID NO: 335279 - RNA, 19 nt, Artificial Sequence
  Description of Artificial Sequence: Synthetic oligonucleotide
guccgucuuguccuaaaug

SEQ ID NO: 335280 - RNA, 19 nt, Artificial Sequence
  Description of Artificial Sequence: Synthetic oligonucleotide
gucagcgcugcuguguggg

SEQ ID NO: 335281 - RNA, 19 nt, Artificial Sequence
  Description of Artificial Sequence: Synthetic oligonucleotide
cacugggucagcccuuggg

SEQ ID NO: 335282 - RNA, 19 nt, Artificial Sequence
  Description of Artificial Sequence: Synthetic oligonucleotide
cagcucuaugugaacuacc

SEQ ID NO: 335283 - RNA, 19 nt, Artificial Sequence
  Description of Artificial Sequence: Synthetic oligonucleotide
gaagcccuccacaugcgug

SEQ ID NO: 335284 - RNA, 19 nt, Artificial Sequence
  Description of Artificial Sequence: Synthetic oligonucleotide
caggaccacagacucuugc

SEQ ID NO: 335285 - RNA, 19 nt, Artificial Sequence
  Description of Artificial Sequence: Synthetic oligonucleotide
caggguacagauggguggg

SEQ ID NO: 335286 - RNA, 19 nt, Artificial Sequence
  Description of Artificial Sequence: Synthetic oligonucleotide
ccauuggguaaccagcugc

SEQ ID NO: 335287 - RNA, 19 nt, Artificial Sequence
  Description of Artificial Sequence: Synthetic oligonucleotide
ccaggguacagaugggugg

SEQ ID NO: 335288 - RNA, 19 nt, Artificial Sequence
  Description of Artificial Sequence: Synthetic oligonucleotide
gugccgugugaucugauuc

SEQ ID NO: 335289 - RNA, 19 nt, Artificial Sequence
  Description of Artificial Sequence: Synthetic oligonucleotide
cuauugugugcgcuaucac

SEQ ID NO: 335290 - RNA, 19 nt, Artificial Sequence
  Description of Artificial Sequence: Synthetic oligonucleotide
cagggaugcaagguuagug

SEQ ID NO: 335291 - RNA, 19 nt, Artificial Sequence
  Description of Artificial Sequence: Synthetic oligonucleotide
ucuaucuuggcuggccauc

SEQ ID NO: 335292 - RNA, 19 nt, Artificial Sequence
  Description of Artificial Sequence: Synthetic oligonucleotide
caucuccguagcuauugug

SEQ ID NO: 335293 - RNA, 19 nt, Artificial Sequence
  Description of Artificial Sequence: Synthetic oligonucleotide
cuacagauacuugggccgc

SEQ ID NO: 335294 - RNA, 19 nt, Artificial Sequence
  Description of Artificial Sequence: Synthetic oligonucleotide
cuguaaguuccggaggaac

SEQ ID NO: 335295 - RNA, 19 nt, Artificial Sequence
  Description of Artificial Sequence: Synthetic oligonucleotide
ggauacgaucucccgaagc

SEQ ID NO: 335296 - RNA, 19 nt, Artificial Sequence
  Description of Artificial Sequence: Synthetic oligonucleotide
cuccucaagcuguggggcg

SEQ ID NO: 335297 - RNA, 19 nt, Artificial Sequence
  Description of Artificial Sequence: Synthetic oligonucleotide
agcuauugugugcgcuauc

SEQ ID NO: 335298 - RNA, 19 nt, Artificial Sequence
  Description of Artificial Sequence: Synthetic oligonucleotide
ugggaugguaaaguagcuc

SEQ ID NO: 335299 - RNA, 19 nt, Artificial Sequence
  Description of Artificial Sequence: Synthetic oligonucleotide
ugacggugugccucaagaa

SEQ ID NO: 335300 - RNA, 19 nt, Artificial Sequence
  Description of Artificial Sequence: Synthetic oligonucleotide
caaaagaguccgucuuguc

SEQ ID NO: 335301 - RNA, 19 nt, Artificial Sequence
  Description of Artificial Sequence: Synthetic oligonucleotide
gacucuugccacaggcacc

SEQ ID NO: 335302 - RNA, 19 nt, Artificial Sequence
  Description of Artificial Sequence: Synthetic oligonucleotide
agacuuugacacaguaucu

SEQ ID NO: 335303 - RNA, 19 nt, Artificial Sequence
  Description of Artificial Sequence: Synthetic oligonucleotide
ucguugcucauguucucaa

SEQ ID NO: 335304 - RNA, 19 nt, Artificial Sequence
  Description of Artificial Sequence: Synthetic oligonucleotide
cagcauacugcuggcauac

SEQ ID NO: 335305 - RNA, 19 nt, Artificial Sequence
  Description of Artificial Sequence: Synthetic oligonucleotide
ccugagacuuguguuaagg

SEQ ID NO: 335306 - RNA, 19 nt, Artificial Sequence
  Description of Artificial Sequence: Synthetic oligonucleotide
gucgccuggcucaaugcgg

SEQ ID NO: 335307 - RNA, 19 nt, Artificial Sequence
  Description of Artificial Sequence: Synthetic oligonucleotide
guuagaccccacaugggca

SEQ ID NO: 335308 - RNA, 19 nt, Artificial Sequence
  Description of Artificial Sequence: Synthetic oligonucleotide
gacuggacgcucccaccag

SEQ ID NO: 335309 - RNA, 19 nt, Artificial Sequence
  Description of Artificial Sequence: Synthetic oligonucleotide
auagcggggcagagcaccc

SEQ ID NO: 335310 - RNA, 19 nt, Artificial Sequence
  Description of Artificial Sequence: Synthetic oligonucleotide
gaauuagccgagaggaggu

SEQ ID NO: 335311 - RNA, 19 nt, Artificial Sequence
  Description of Artificial Sequence: Synthetic oligonucleotide
gcucaaugcggccaucagc

SEQ ID NO: 335312 - RNA, 19 nt, Artificial Sequence
  Description of Artificial Sequence: Synthetic oligonucleotide
guagcuauugugugcgcua

SEQ ID NO: 335313 - RNA, 19 nt, Artificial Sequence
  Description of Artificial Sequence: Synthetic oligonucleotide
agcgucaucguugcucaug

SEQ ID NO: 335314 - RNA, 19 nt, Artificial Sequence
  Description of Artificial Sequence: Synthetic oligonucleotide
uccucaagcuguggggcgc

SEQ ID NO: 335315 - RNA, 19 nt, Artificial Sequence
  Description of Artificial Sequence: Synthetic oligonucleotide
gggacucguaccauagcgg

SEQ ID NO: 335316 - RNA, 19 nt, Artificial Sequence
  Description of Artificial Sequence: Synthetic oligonucleotide
ugacggugaugauguucag

SEQ ID NO: 335317 - RNA, 19 nt, Artificial Sequence
  Description of Artificial Sequence: Synthetic oligonucleotide
agcccuugggaugguaaag

SEQ ID NO: 335318 - RNA, 19 nt, Artificial Sequence
  Description of Artificial Sequence: Synthetic oligonucleotide
acgaauuagccgagaggag

SEQ ID NO: 335319 - RNA, 19 nt, Artificial Sequence
  Description of Artificial Sequence: Synthetic oligonucleotide
cuggggcaacagcugacgc

SEQ ID NO: 335320 - RNA, 19 nt, Artificial Sequence
  Description of Artificial Sequence: Synthetic oligonucleotide
ccuaaauggaggucacuuc

SEQ ID NO: 335321 - RNA, 19 nt, Artificial Sequence
  Description of Artificial Sequence: Synthetic oligonucleotide
uccccucacaagacucuac

SEQ ID NO: 335322 - RNA, 19 nt, Artificial Sequence
  Description of Artificial Sequence: Synthetic oligonucleotide
aguccugagucuggcaacu

SEQ ID NO: 335323 - RNA, 19 nt, Artificial Sequence
  Description of Artificial Sequence: Synthetic oligonucleotide
ggcuaagcuggcugacugg

SEQ ID NO: 335324 - RNA, 19 nt, Artificial Sequence
  Description of Artificial Sequence: Synthetic oligonucleotide
auccgccccaaugacagca

SEQ ID NO: 335325 - RNA, 19 nt, Artificial Sequence
  Description of Artificial Sequence: Synthetic oligonucleotide
cagauacuugggccgcacc

SEQ ID NO: 335326 - RNA, 19 nt, Artificial Sequence
  Description of Artificial Sequence: Synthetic oligonucleotide
cugugaugccagaauggca

SEQ ID NO: 335327 - RNA, 19 nt, Artificial Sequence
  Description of Artificial Sequence: Synthetic oligonucleotide
uagggguagccuugaccca

SEQ ID NO: 335328 - RNA, 19 nt, Artificial Sequence
  Description of Artificial Sequence: Synthetic oligonucleotide
aucaccccggucguugcuc

SEQ ID NO: 335329 - RNA, 19 nt, Artificial Sequence
  Description of Artificial Sequence: Synthetic oligonucleotide
cugucugccucaagcgcug

SEQ ID NO: 335330 - RNA, 19 nt, Artificial Sequence
  Description of Artificial Sequence: Synthetic oligonucleotide
aagaguccgucuuguccua

SEQ ID NO: 335331 - RNA, 19 nt, Artificial Sequence
  Description of Artificial Sequence: Synthetic oligonucleotide
gggucgaugggucgcacug

SEQ ID NO: 335332 - RNA, 19 nt, Artificial Sequence
  Description of Artificial Sequence: Synthetic oligonucleotide
acgacgacauuugugcuua

SEQ ID NO: 335333 - RNA, 19 nt, Artificial Sequence
  Description of Artificial Sequence: Synthetic oligonucleotide
guugacggugugccucaag

SEQ ID NO: 335334 - RNA, 19 nt, Artificial Sequence
  Description of Artificial Sequence: Synthetic oligonucleotide
gcugacgccugacuucuag

SEQ ID NO: 335335 - RNA, 19 nt, Artificial Sequence
  Description of Artificial Sequence: Synthetic oligonucleotide
gcuauugugugcgcuauca

SEQ ID NO: 335336 - RNA, 19 nt, Artificial Sequence
  Description of Artificial Sequence: Synthetic oligonucleotide
ggauagcaaugacaggaca

SEQ ID NO: 335337 - RNA, 19 nt, Artificial Sequence
  Description of Artificial Sequence: Synthetic oligonucleotide
cucaagcgcugcuuccgac

SEQ ID NO: 335338 - RNA, 19 nt, Artificial Sequence
  Description of Artificial Sequence: Synthetic oligonucleotide
uuccgacgacgacauuugu

SEQ ID NO: 335339 - RNA, 19 nt, Artificial Sequence
  Description of Artificial Sequence: Synthetic oligonucleotide
aagccgcgcuucagcauac

SEQ ID NO: 335340 - RNA, 19 nt, Artificial Sequence
  Description of Artificial Sequence: Synthetic oligonucleotide
caucguugcucauguucuc

SEQ ID NO: 335341 - RNA, 19 nt, Artificial Sequence
  Description of Artificial Sequence: Synthetic oligonucleotide
gcuaccuguaaguuccgga

SEQ ID NO: 335342 - RNA, 19 nt, Artificial Sequence
  Description of Artificial Sequence: Synthetic oligonucleotide
agccgggucgaugggucgc

SEQ ID NO: 335343 - RNA, 19 nt, Artificial Sequence
  Description of Artificial Sequence: Synthetic oligonucleotide
gggucagcccuugggaugg

SEQ ID NO: 335344 - RNA, 19 nt, Artificial Sequence
  Description of Artificial Sequence: Synthetic oligonucleotide
cuuccucgccucucuucgc

SEQ ID NO: 335345 - RNA, 19 nt, Artificial Sequence
  Description of Artificial Sequence: Synthetic oligonucleotide
cccguacuagccauccucc

SEQ ID NO: 335346 - RNA, 19 nt, Artificial Sequence
  Description of Artificial Sequence: Synthetic oligonucleotide
agcagggacucguaccaua

SEQ ID NO: 335347 - RNA, 19 nt, Artificial Sequence
  Description of Artificial Sequence: Synthetic oligonucleotide
ucguaccauagcggggcag

SEQ ID NO: 335348 - RNA, 19 nt, Artificial Sequence
  Description of Artificial Sequence: Synthetic oligonucleotide
caagacucuacagauacuu

SEQ ID NO: 335349 - RNA, 19 nt, Artificial Sequence
  Description of Artificial Sequence: Synthetic oligonucleotide
ccgcgcuucagcauacugc

SEQ ID NO: 335350 - RNA, 19 nt, Artificial Sequence
  Description of Artificial Sequence: Synthetic oligonucleotide
ccucacaagacucuacaga

SEQ ID NO: 335351 - RNA, 19 nt, Artificial Sequence
  Description of Artificial Sequence: Synthetic oligonucleotide
cauggcuaagcuggcugac

SEQ ID NO: 335352 - RNA, 19 nt, Artificial Sequence
  Description of Artificial Sequence: Synthetic oligonucleotide
gucuggcaacugcaugacc

SEQ ID NO: 335353 - RNA, 19 nt, Artificial Sequence
  Description of Artificial Sequence: Synthetic oligonucleotide
uccuaguaauauggcugcu

SEQ ID NO: 335354 - RNA, 19 nt, Artificial Sequence
  Description of Artificial Sequence: Synthetic oligonucleotide
uacagauacuugggccgca

SEQ ID NO: 335355 - RNA, 19 nt, Artificial Sequence
  Description of Artificial Sequence: Synthetic oligonucleotide
cauugaggcuaagacagua

SEQ ID NO: 335356 - RNA, 19 nt, Artificial Sequence
  Description of Artificial Sequence: Synthetic oligonucleotide
cauuugugcuuacgaauua

SEQ ID NO: 335357 - RNA, 19 nt, Artificial Sequence
  Description of Artificial Sequence: Synthetic oligonucleotide
ggucccgaaucuccagucc

SEQ ID NO: 335358 - RNA, 19 nt, Artificial Sequence
  Description of Artificial Sequence: Synthetic oligonucleotide
ucgaugggucgcacugggu

SEQ ID NO: 335359 - RNA, 19 nt, Artificial Sequence
  Description of Artificial Sequence: Synthetic oligonucleotide
augggucgcacugggucag

SEQ ID NO: 335360 - RNA, 19 nt, Artificial Sequence
  Description of Artificial Sequence: Synthetic oligonucleotide
guaccauagcggggcagag

SEQ ID NO: 335361 - RNA, 19 nt, Artificial Sequence
  Description of Artificial Sequence: Synthetic oligonucleotide
gaucugauucgcugccacu

SEQ ID NO: 335362 - RNA, 19 nt, Artificial Sequence
  Description of Artificial Sequence: Synthetic oligonucleotide
gguuagugcacaggucccc

SEQ ID NO: 335363 - RNA, 19 nt, Artificial Sequence
  Description of Artificial Sequence: Synthetic oligonucleotide
augucacucuucacuguca

SEQ ID NO: 335364 - RNA, 19 nt, Artificial Sequence
  Description of Artificial Sequence: Synthetic oligonucleotide
accccggucguugcucugg

SEQ ID NO: 335365 - RNA, 19 nt, Artificial Sequence
  Description of Artificial Sequence: Synthetic oligonucleotide
ucagcgcugcuguguggga

SEQ ID NO: 335366 - RNA, 19 nt, Artificial Sequence
  Description of Artificial Sequence: Synthetic oligonucleotide
cugucaguggugccuccuc

SEQ ID NO: 335367 - RNA, 19 nt, Artificial Sequence
  Description of Artificial Sequence: Synthetic oligonucleotide
acugucaguggugccuccu

SEQ ID NO: 335368 - RNA, 19 nt, Artificial Sequence
  Description of Artificial Sequence: Synthetic oligonucleotide
ccgaagcacccgcacagcg

SEQ ID NO: 335369 - RNA, 19 nt, Artificial Sequence
  Description of Artificial Sequence: Synthetic oligonucleotide
agacccacuuggugccgug

SEQ ID NO: 335370 - RNA, 19 nt, Artificial Sequence
  Description of Artificial Sequence: Synthetic oligonucleotide
cagagcacccgucagcgcu

SEQ ID NO: 335371 - RNA, 19 nt, Artificial Sequence
  Description of Artificial Sequence: Synthetic oligonucleotide
aggcaagcccauagagguc

SEQ ID NO: 335372 - RNA, 19 nt, Artificial Sequence
  Description of Artificial Sequence: Synthetic oligonucleotide
cagccgggucgaugggucg

SEQ ID NO: 335373 - RNA, 19 nt, Artificial Sequence
  Description of Artificial Sequence: Synthetic oligonucleotide
ccgcccuucaugauggauc

SEQ ID NO: 335374 - RNA, 19 nt, Artificial Sequence
  Description of Artificial Sequence: Synthetic oligonucleotide
cacuuggugccgugugauc

SEQ ID NO: 335375 - RNA, 19 nt, Artificial Sequence
  Description of Artificial Sequence: Synthetic oligonucleotide
gguuagugaggaagagcug

SEQ ID NO: 335376 - RNA, 19 nt, Artificial Sequence
  Description of Artificial Sequence: Synthetic oligonucleotide
ggcggcuaccuguaaguuc

SEQ ID NO: 335377 - RNA, 19 nt, Artificial Sequence
  Description of Artificial Sequence: Synthetic oligonucleotide
guggacccacugcucuugc

SEQ ID NO: 335378 - RNA, 19 nt, Artificial Sequence
  Description of Artificial Sequence: Synthetic oligonucleotide
ccgcacagcgucaucguug

SEQ ID NO: 335379 - RNA, 19 nt, Artificial Sequence
  Description of Artificial Sequence: Synthetic oligonucleotide
ggcagacuagcaauaaaua

SEQ ID NO: 335380 - RNA, 19 nt, Artificial Sequence
  Description of Artificial Sequence: Synthetic oligonucleotide
uagaccccacaugggcagc

SEQ ID NO: 335381 - RNA, 19 nt, Artificial Sequence
  Description of Artificial Sequence: Synthetic oligonucleotide
gcucuaugugaacuaccca

SEQ ID NO: 335382 - RNA, 19 nt, Artificial Sequence
  Description of Artificial Sequence: Synthetic oligonucleotide
gcuaagcuggcugacugga

SEQ ID NO: 335383 - RNA, 19 nt, Artificial Sequence
  Description of Artificial Sequence: Synthetic oligonucleotide
gggauacgaucucccgaag

SEQ ID NO: 335384 - RNA, 19 nt, Artificial Sequence
  Description of Artificial Sequence: Synthetic oligonucleotide
acccggacaauggcgcuca

SEQ ID NO: 335385 - RNA, 19 nt, Artificial Sequence
  Description of Artificial Sequence: Synthetic oligonucleotide
uccucgccucucuucgcuc

SEQ ID NO: 335386 - RNA, 19 nt, Artificial Sequence
  Description of Artificial Sequence: Synthetic oligonucleotide
cuggcggcuaccuguaagu

SEQ ID NO: 335387 - RNA, 19 nt, Artificial Sequence
  Description of Artificial Sequence: Synthetic oligonucleotide
cauccgccccaaugacagc

SEQ ID NO: 335388 - RNA, 19 nt, Artificial Sequence
  Description of Artificial Sequence: Synthetic oligonucleotide
caggcagacuagcaauaaa

SEQ ID NO: 335389 - RNA, 19 nt, Artificial Sequence
  Description of Artificial Sequence: Synthetic oligonucleotide
cgcacagcgucaucguugc

SEQ ID NO: 335390 - RNA, 19 nt, Artificial Sequence
  Description of Artificial Sequence: Synthetic oligonucleotide
ccucucuugucucccguac

SEQ ID NO: 335391 - RNA, 19 nt, Artificial Sequence
  Description of Artificial Sequence: Synthetic oligonucleotide
cguacuagccauccuccac

SEQ ID NO: 335392 - RNA, 19 nt, Artificial Sequence
  Description of Artificial Sequence: Synthetic oligonucleotide
cuugggccgcaccaccaca

SEQ ID NO: 335393 - RNA, 19 nt, Artificial Sequence
  Description of Artificial Sequence: Synthetic oligonucleotide
ugucugccucaagcgcugc

SEQ ID NO: 335394 - RNA, 19 nt, Artificial Sequence
  Description of Artificial Sequence: Synthetic oligonucleotide
gaccccacggcugaucuau

SEQ ID NO: 335395 - RNA, 19 nt, Artificial Sequence
  Description of Artificial Sequence: Synthetic oligonucleotide
ggaaggacuggcggcuacc

SEQ ID NO: 335396 - RNA, 19 nt, Artificial Sequence
  Description of Artificial Sequence: Synthetic oligonucleotide
gacccggacaauggcgcuc

SEQ ID NO: 335397 - RNA, 19 nt, Artificial Sequence
  Description of Artificial Sequence: Synthetic oligonucleotide
gaaggacuggcggcuaccu

SEQ ID NO: 335398 - RNA, 19 nt, Artificial Sequence
  Description of Artificial Sequence: Synthetic oligonucleotide
ggaggaacagcagccagcu

SEQ ID NO: 335399 - RNA, 19 nt, Artificial Sequence
  Description of Artificial Sequence: Synthetic oligonucleotide
cuccgagggguuggguccc

SEQ ID NO: 335400 - RNA, 19 nt, Artificial Sequence
  Description of Artificial Sequence: Synthetic oligonucleotide
cagcgcugcugugugggac

SEQ ID NO: 335401 - RNA, 19 nt, Artificial Sequence
  Description of Artificial Sequence: Synthetic oligonucleotide
cagcccuugggaugguaaa

SEQ ID NO: 335402 - RNA, 19 nt, Artificial Sequence
  Description of Artificial Sequence: Synthetic oligonucleotide
cggugugccucaagaagcc

SEQ ID NO: 335403 - RNA, 19 nt, Artificial Sequence
  Description of Artificial Sequence: Synthetic oligonucleotide
ccauagagguccuggcaca

SEQ ID NO: 335404 - RNA, 19 nt, Artificial Sequence
  Description of Artificial Sequence: Synthetic oligonucleotide
agcccauauccuaguaaua

SEQ ID NO: 335405 - RNA, 19 nt, Artificial Sequence
  Description of Artificial Sequence: Synthetic oligonucleotide
agagcccaaaagaguccgu

SEQ ID NO: 335406 - RNA, 19 nt, Artificial Sequence
  Description of Artificial Sequence: Synthetic oligonucleotide
gucaugugcugaguaccaa

SEQ ID NO: 335407 - RNA, 19 nt, Artificial Sequence
  Description of Artificial Sequence: Synthetic oligonucleotide
gugugcgcuaucacuccuc

SEQ ID NO: 335408 - RNA, 19 nt, Artificial Sequence
  Description of Artificial Sequence: Synthetic oligonucleotide
uggcggcuaccuguaaguu

SEQ ID NO: 335409 - RNA, 19 nt, Artificial Sequence
  Description of Artificial Sequence: Synthetic oligonucleotide
agcauacugcuggcauacu

SEQ ID NO: 335410 - RNA, 19 nt, Artificial Sequence
  Description of Artificial Sequence: Synthetic oligonucleotide
ggggcaacagcugacgccu

SEQ ID NO: 335411 - RNA, 19 nt, Artificial Sequence
  Description of Artificial Sequence: Synthetic oligonucleotide
gccgcgcuucagcauacug

SEQ ID NO: 335412 - RNA, 19 nt, Artificial Sequence
  Description of Artificial Sequence: Synthetic oligonucleotide
caagcccauagagguccug

SEQ ID NO: 335413 - RNA, 19 nt, Artificial Sequence
  Description of Artificial Sequence: Synthetic oligonucleotide
cccauaaaauuaaacgcuu

SEQ ID NO: 335414 - RNA, 19 nt, Artificial Sequence
  Description of Artificial Sequence: Synthetic oligonucleotide
ugcagacaugugggacugu

SEQ ID NO: 335415 - RNA, 19 nt, Artificial Sequence
  Description of Artificial Sequence: Synthetic oligonucleotide
gcgucaucguugcucaugu

SEQ ID NO: 335416 - RNA, 19 nt, Artificial Sequence
  Description of Artificial Sequence: Synthetic oligonucleotide
ccauggcuaagcuggcuga

SEQ ID NO: 335417 - RNA, 19 nt, Artificial Sequence
  Description of Artificial Sequence: Synthetic oligonucleotide
cugcuuccgacgacgacau

SEQ ID NO: 335418 - RNA, 19 nt, Artificial Sequence
  Description of Artificial Sequence: Synthetic oligonucleotide
gcgugugauggcacuggag

SEQ ID NO: 335419 - RNA, 19 nt, Artificial Sequence
  Description of Artificial Sequence: Synthetic oligonucleotide
cgacauuugugcuuacgaa

SEQ ID NO: 335420 - RNA, 19 nt, Artificial Sequence
  Description of Artificial Sequence: Synthetic oligonucleotide
uguugacggugugccucaa

SEQ ID NO: 335421 - RNA, 19 nt, Artificial Sequence
  Description of Artificial Sequence: Synthetic oligonucleotide
cccauuggguaaccagcug

SEQ ID NO: 335422 - RNA, 19 nt, Artificial Sequence
  Description of Artificial Sequence: Synthetic oligonucleotide
guacugguagggguagccu

SEQ ID NO: 335423 - RNA, 19 nt, Artificial Sequence
  Description of Artificial Sequence: Synthetic oligonucleotide
gugcgcuaucacuccucca

SEQ ID NO: 335424 - RNA, 19 nt, Artificial Sequence
  Description of Artificial Sequence: Synthetic oligonucleotide
agcaugucgccuggcucaa

SEQ ID NO: 335425 - RNA, 19 nt, Artificial Sequence
  Description of Artificial Sequence: Synthetic oligonucleotide
gcguguacagccaguccac

SEQ ID NO: 335426 - RNA, 19 nt, Artificial Sequence
  Description of Artificial Sequence: Synthetic oligonucleotide
gguggcccacccacuacug

SEQ ID NO: 335427 - RNA, 19 nt, Artificial Sequence
  Description of Artificial Sequence: Synthetic oligonucleotide
ggucccugagacuuguguu

SEQ ID NO: 335428 - RNA, 19 nt, Artificial Sequence
  Description of Artificial Sequence: Synthetic oligonucleotide
cucguaccauagcggggca

SEQ ID NO: 335429 - RNA, 19 nt, Artificial Sequence
  Description of Artificial Sequence: Synthetic oligonucleotide
cgccccaaugacagcauug

SEQ ID NO: 335430 - RNA, 19 nt, Artificial Sequence
  Description of Artificial Sequence: Synthetic oligonucleotide
gcacccgucagcgcugcug

SEQ ID NO: 335431 - RNA, 19 nt, Artificial Sequence
  Description of Artificial Sequence: Synthetic oligonucleotide
gacgcucccaccagccagu

SEQ ID NO: 335432 - RNA, 19 nt, Artificial Sequence
  Description of Artificial Sequence: Synthetic oligonucleotide
agaccccacggcugaucua

SEQ ID NO: 335433 - RNA, 19 nt, Artificial Sequence
  Description of Artificial Sequence: Synthetic oligonucleotide
cuacugccauggcuaagcu

SEQ ID NO: 335434 - RNA, 19 nt, Artificial Sequence
  Description of Artificial Sequence: Synthetic oligonucleotide
gggguccgauggcugcucc

SEQ ID NO: 335435 - RNA, 19 nt, Artificial Sequence
  Description of Artificial Sequence: Synthetic oligonucleotide
ugggucgcacugggucagc

SEQ ID NO: 335436 - RNA, 19 nt, Artificial Sequence
  Description of Artificial Sequence: Synthetic oligonucleotide
ccgucagcgcugcugugug

SEQ ID NO: 335437 - RNA, 19 nt, Artificial Sequence
  Description of Artificial Sequence: Synthetic oligonucleotide
ccacaugcguguacagcca

SEQ ID NO: 335438 - RNA, 19 nt, Artificial Sequence
  Description of Artificial Sequence: Synthetic oligonucleotide
gcuuacgaauuagccgaga

SEQ ID NO: 335439 - RNA, 19 nt, Artificial Sequence
  Description of Artificial Sequence: Synthetic oligonucleotide
ccgauggcugcuccuugug

SEQ ID NO: 335440 - RNA, 19 nt, Artificial Sequence
  Description of Artificial Sequence: Synthetic oligonucleotide
gggguagccuugacccaag

SEQ ID NO: 335441 - RNA, 19 nt, Artificial Sequence
  Description of Artificial Sequence: Synthetic oligonucleotide
ucccggacagguggcccuc

SEQ ID NO: 335442 - RNA, 19 nt, Artificial Sequence
  Description of Artificial Sequence: Synthetic oligonucleotide
accccacggcugaucuauc

SEQ ID NO: 335443 - RNA, 19 nt, Artificial Sequence
  Description of Artificial Sequence: Synthetic oligonucleotide
gcccaaaagaguccgucuu

SEQ ID NO: 335444 - RNA, 19 nt, Artificial Sequence
  Description of Artificial Sequence: Synthetic oligonucleotide
gcagccgggucgauggguc

SEQ ID NO: 335445 - RNA, 19 nt, Artificial Sequence
  Description of Artificial Sequence: Synthetic oligonucleotide
gcagccagagagguuuaaa

SEQ ID NO: 335446 - RNA, 19 nt, Artificial Sequence
  Description of Artificial Sequence: Synthetic oligonucleotide
ccguagcuauugugugcgc

SEQ ID NO: 335447 - RNA, 19 nt, Artificial Sequence
  Description of Artificial Sequence: Synthetic oligonucleotide
guccccucacaagacucua

SEQ ID NO: 335448 - RNA, 19 nt, Artificial Sequence
  Description of Artificial Sequence: Synthetic oligonucleotide
cgcgcuucagcauacugcu

SEQ ID NO: 335449 - RNA, 19 nt, Artificial Sequence
  Description of Artificial Sequence: Synthetic oligonucleotide
ugcuuccgacgacgacauu

SEQ ID NO: 335450 - RNA, 19 nt, Artificial Sequence
  Description of Artificial Sequence: Synthetic oligonucleotide
ggccccguuugggauacga

SEQ ID NO: 335451 - RNA, 19 nt, Artificial Sequence
  Description of Artificial Sequence: Synthetic oligonucleotide
cccuugggaugguaaagua

SEQ ID NO: 335452 - RNA, 19 nt, Artificial Sequence
  Description of Artificial Sequence: Synthetic oligonucleotide
agcacccgucagcgcugcu

SEQ ID NO: 335453 - RNA, 19 nt, Artificial Sequence
  Description of Artificial Sequence: Synthetic oligonucleotide
gcuaccagacccacuuggu

SEQ ID NO: 335454 - RNA, 19 nt, Artificial Sequence
  Description of Artificial Sequence: Synthetic oligonucleotide
ccguacuagccauccucca

SEQ ID NO: 335455 - RNA, 19 nt, Artificial Sequence
  Description of Artificial Sequence: Synthetic oligonucleotide
ggugccgugugaucugauu

SEQ ID NO: 335456 - RNA, 19 nt, Artificial Sequence
  Description of Artificial Sequence: Synthetic oligonucleotide
cguaccauagcggggcaga

SEQ ID NO: 335457 - RNA, 19 nt, Artificial Sequence
  Description of Artificial Sequence: Synthetic oligonucleotide
ccucaagcgcugcuuccga

SEQ ID NO: 335458 - RNA, 19 nt, Artificial Sequence
  Description of Artificial Sequence: Synthetic oligonucleotide
agccgcgcuucagcauacu

SEQ ID NO: 335459 - RNA, 19 nt, Artificial Sequence
  Description of Artificial Sequence: Synthetic oligonucleotide
gcccuccacaugcguguac

SEQ ID NO: 335460 - RNA, 19 nt, Artificial Sequence
  Description of Artificial Sequence: Synthetic oligonucleotide
ggauuucccauagccuuuu

SEQ ID NO: 335461 - RNA, 19 nt, Artificial Sequence
  Description of Artificial Sequence: Synthetic oligonucleotide
cacuacugcauaggccuuu

SEQ ID NO: 335462 - RNA, 19 nt, Artificial Sequence
  Description of Artificial Sequence: Synthetic oligonucleotide
gagugacggugaugauguu

SEQ ID NO: 335463 - RNA, 19 nt, Artificial Sequence
  Description of Artificial Sequence: Synthetic oligonucleotide
cucccguacuagccauccu

SEQ ID NO: 335464 - RNA, 19 nt, Artificial Sequence
  Description of Artificial Sequence: Synthetic oligonucleotide
ggcagccagagagguuuaa

SEQ ID NO: 335465 - RNA, 19 nt, Artificial Sequence
  Description of Artificial Sequence: Synthetic oligonucleotide
gguccgauggcugcuccuu

SEQ ID NO: 335466 - RNA, 19 nt, Artificial Sequence
  Description of Artificial Sequence: Synthetic oligonucleotide
ccaucuccguagcuauugu

SEQ ID NO: 335467 - RNA, 19 nt, Artificial Sequence
  Description of Artificial Sequence: Synthetic oligonucleotide
cguagcuauugugugcgcu

SEQ ID NO: 335468 - RNA, 19 nt, Artificial Sequence
  Description of Artificial Sequence: Synthetic oligonucleotide
cggggcagagcacccguca

SEQ ID NO: 335469 - RNA, 19 nt, Artificial Sequence
  Description of Artificial Sequence: Synthetic oligonucleotide
cgaagcacccgcacagcgu

SEQ ID NO: 335470 - RNA, 19 nt, Artificial Sequence
  Description of Artificial Sequence: Synthetic oligonucleotide
ccucgccucucuucgcucu

SEQ ID NO: 335471 - RNA, 19 nt, Artificial Sequence
  Description of Artificial Sequence: Synthetic oligonucleotide
ggcagccgggucgaugggu

SEQ ID NO: 335472 - RNA, 19 nt, Artificial Sequence
  Description of Artificial Sequence: Synthetic oligonucleotide
ccccacggcugaucuaucu

SEQ ID NO: 335473 - RNA, 19 nt, Artificial Sequence
  Description of Artificial Sequence: Synthetic oligonucleotide
gccgggucgaugggucgca

SEQ ID NO: 335474 - RNA, 19 nt, Artificial Sequence
  Description of Artificial Sequence: Synthetic oligonucleotide
agcugacgccugacuucua

SEQ ID NO: 335475 - RNA, 19 nt, Artificial Sequence
  Description of Artificial Sequence: Synthetic oligonucleotide
cccggacagguggcccucc

SEQ ID NO: 335476 - RNA, 19 nt, Artificial Sequence
  Description of Artificial Sequence: Synthetic oligonucleotide
cgcucccaccagccagugc

SEQ ID NO: 335477 - RNA, 19 nt, Artificial Sequence
  Description of Artificial Sequence: Synthetic oligonucleotide
cgacgacgacauuugugcu

SEQ ID NO: 335478 - RNA, 19 nt, Artificial Sequence
  Description of Artificial Sequence: Synthetic oligonucleotide
ccgagggguugggucccag

SEQ ID NO: 335479 - RNA, 19 nt, Artificial Sequence
  Description of Artificial Sequence: Synthetic oligonucleotide
cccgucagcgcugcugugu

SEQ ID NO: 335480 - RNA, 19 nt, Artificial Sequence
  Description of Artificial Sequence: Synthetic oligonucleotide
guggggcgccaggcacuga

SEQ ID NO: 335481 - RNA, 19 nt, Artificial Sequence
  Description of Artificial Sequence: Synthetic oligonucleotide
ccgggucgaugggucgcac

SEQ ID NO: 335482 - RNA, 19 nt, Artificial Sequence
  Description of Artificial Sequence: Synthetic oligonucleotide
cagcgucaucguugcucau

SEQ ID NO: 335483 - RNA, 19 nt, Artificial Sequence
  Description of Artificial Sequence: Synthetic oligonucleotide
gccccguuugggauacgau

SEQ ID NO: 335484 - RNA, 19 nt, Artificial Sequence
  Description of Artificial Sequence: Synthetic oligonucleotide
cccggucugucugccucaa

SEQ ID NO: 335485 - RNA, 19 nt, Artificial Sequence
  Description of Artificial Sequence: Synthetic oligonucleotide
cgggucgaugggucgcacu

SEQ ID NO: 335486 - RNA, 19 nt, Artificial Sequence
  Description of Artificial Sequence: Synthetic oligonucleotide
ccgccccaaugacagcauu

SEQ ID NO: 335487 - RNA, 19 nt, Artificial Sequence
  Description of Artificial Sequence: Synthetic oligonucleotide
gcaugucgccuggcucaau

SEQ ID NO: 335488 - RNA, 19 nt, Artificial Sequence
  Description of Artificial Sequence: Synthetic oligonucleotide
cgucaucguugcucauguu

SEQ ID NO: 335489 - RNA, 19 nt, Artificial Sequence
  Description of Artificial Sequence: Synthetic oligonucleotide
cccggacaauggcgcucau

SEQ ID NO: 335490 - RNA, 19 nt, Artificial Sequence
  Description of Artificial Sequence: Synthetic oligonucleotide
aaaagaauguuggacuugc

SEQ ID NO: 335491 - RNA, 19 nt, Artificial Sequence
  Description of Artificial Sequence: Synthetic oligonucleotide
acuagccugaacuaggggc

SEQ ID NO: 335492 - RNA, 19 nt, Artificial Sequence
  Description of Artificial Sequence: Synthetic oligonucleotide
aacaccaaaagucagcgga

SEQ ID NO: 335493 - RNA, 19 nt, Artificial Sequence
  Description of Artificial Sequence: Synthetic oligonucleotide
aauucuagaaagcucacau

SEQ ID NO: 335494 - RNA, 19 nt, Artificial Sequence
  Description of Artificial Sequence: Synthetic oligonucleotide
aagguauugaggcaaguug

SEQ ID NO: 335495 - RNA, 19 nt, Artificial Sequence
  Description of Artificial Sequence: Synthetic oligonucleotide
gaggcauagagcuucaucc

SEQ ID NO: 335496 - RNA, 19 nt, Artificial Sequence
  Description of Artificial Sequence: Synthetic oligonucleotide
gauauuuccugguagucgc

SEQ ID NO: 335497 - RNA, 19 nt, Artificial Sequence
  Description of Artificial Sequence: Synthetic oligonucleotide
aaugucgcacuggagaugg

SEQ ID NO: 335498 - RNA, 19 nt, Artificial Sequence
  Description of Artificial Sequence: Synthetic oligonucleotide
acucgaaacaccaaaaguc

SEQ ID NO: 335499 - RNA, 19 nt, Artificial Sequence
  Description of Artificial Sequence: Synthetic oligonucleotide
auggauuccugcuggaggc

SEQ ID NO: 335500 - RNA, 19 nt, Artificial Sequence
  Description of Artificial Sequence: Synthetic oligonucleotide
ugcaucgaagcacuugccg

SEQ ID NO: 335501 - RNA, 19 nt, Artificial Sequence
  Description of Artificial Sequence: Synthetic oligonucleotide
aauucccacagcuuguuaa

SEQ ID NO: 335502 - RNA, 19 nt, Artificial Sequence
  Description of Artificial Sequence: Synthetic oligonucleotide
ugcugaucaccacaauugg

SEQ ID NO: 335503 - RNA, 19 nt, Artificial Sequence
  Description of Artificial Sequence: Synthetic oligonucleotide
auuagcgccggccccaggc

SEQ ID NO: 335504 - RNA, 19 nt, Artificial Sequence
  Description of Artificial Sequence: Synthetic oligonucleotide
uggauugggucugugaggg

SEQ ID NO: 335505 - RNA, 19 nt, Artificial Sequence
  Description of Artificial Sequence: Synthetic oligonucleotide
cuuagaguagacacugaag

SEQ ID NO: 335506 - RNA, 19 nt, Artificial Sequence
  Description of Artificial Sequence: Synthetic oligonucleotide
ucgaugaguacucggaacu

SEQ ID NO: 335507 - RNA, 19 nt, Artificial Sequence
  Description of Artificial Sequence: Synthetic oligonucleotide
gaggaauucgcaaacugag

SEQ ID NO: 335508 - RNA, 19 nt, Artificial Sequence
  Description of Artificial Sequence: Synthetic oligonucleotide
gcaaacugaguuuucacgg

SEQ ID NO: 335509 - RNA, 19 nt, Artificial Sequence
  Description of Artificial Sequence: Synthetic oligonucleotide
gaaauuggggcccuccagc

SEQ ID NO: 335510 - RNA, 19 nt, Artificial Sequence
  Description of Artificial Sequence: Synthetic oligonucleotide
accggugcaguuucgauuc

SEQ ID NO: 335511 - RNA, 19 nt, Artificial Sequence
  Description of Artificial Sequence: Synthetic oligonucleotide
gauugggucugugagggcg

SEQ ID NO: 335512 - RNA, 19 nt, Artificial Sequence
  Description of Artificial Sequence: Synthetic oligonucleotide
agauauuuccugguagucg

SEQ ID NO: 335513 - RNA, 19 nt, Artificial Sequence
  Description of Artificial Sequence: Synthetic oligonucleotide
uuugcgaugguuggaauug

SEQ ID NO: 335514 - RNA, 19 nt, Artificial Sequence
  Description of Artificial Sequence: Synthetic oligonucleotide
ucugcauuagcgccggccc

SEQ ID NO: 335515 - RNA, 19 nt, Artificial Sequence
  Description of Artificial Sequence: Synthetic oligonucleotide
uggucggaggcauagagcu

SEQ ID NO: 335516 - RNA, 19 nt, Artificial Sequence
  Description of Artificial Sequence: Synthetic oligonucleotide
uaaguuacugaagggguag

SEQ ID NO: 335517 - RNA, 19 nt, Artificial Sequence
  Description of Artificial Sequence: Synthetic oligonucleotide
ucgaaacaccaaaagucag

SEQ ID NO: 335518 - RNA, 19 nt, Artificial Sequence
  Description of Artificial Sequence: Synthetic oligonucleotide
aacuccucgaagccacugg

SEQ ID NO: 335519 - RNA, 19 nt, Artificial Sequence
  Description of Artificial Sequence: Synthetic oligonucleotide
accagauauuuccugguag

SEQ ID NO: 335520 - RNA, 19 nt, Artificial Sequence
  Description of Artificial Sequence: Synthetic oligonucleotide
aacugaguuuucacggagc

SEQ ID NO: 335521 - RNA, 19 nt, Artificial Sequence
  Description of Artificial Sequence: Synthetic oligonucleotide
agguauugaggcaaguugg

SEQ ID NO: 335522 - RNA, 19 nt, Artificial Sequence
  Description of Artificial Sequence: Synthetic oligonucleotide
gaagaacacguuaucuagg

SEQ ID NO: 335523 - RNA, 19 nt, Artificial Sequence
  Description of Artificial Sequence: Synthetic oligonucleotide
ucggaacuugcuuuccugg

SEQ ID NO: 335524 - RNA, 19 nt, Artificial Sequence
  Description of Artificial Sequence: Synthetic oligonucleotide
ucgaggaauucgcaaacug

SEQ ID NO: 335525 - RNA, 19 nt, Artificial Sequence
  Description of Artificial Sequence: Synthetic oligonucleotide
agagcaauuccuguggcag

SEQ ID NO: 335526 - RNA, 19 nt, Artificial Sequence
  Description of Artificial Sequence: Synthetic oligonucleotide
gaacacguuaucuagggcu

SEQ ID NO: 335527 - RNA, 19 nt, Artificial Sequence
  Description of Artificial Sequence: Synthetic oligonucleotide
ucguccgaugccuugagga

SEQ ID NO: 335528 - RNA, 19 nt, Artificial Sequence
  Description of Artificial Sequence: Synthetic oligonucleotide
ugcauucaccgcuucgagg

SEQ ID NO: 335529 - RNA, 19 nt, Artificial Sequence
  Description of Artificial Sequence: Synthetic oligonucleotide
acuccguucacucauguuu

SEQ ID NO: 335530 - RNA, 19 nt, Artificial Sequence
  Description of Artificial Sequence: Synthetic oligonucleotide
uucugcauggaaaccggug

SEQ ID NO: 335531 - RNA, 19 nt, Artificial Sequence
  Description of Artificial Sequence: Synthetic oligonucleotide
uuucgauuccuggauuggg

SEQ ID NO: 335532 - RNA, 19 nt, Artificial Sequence
  Description of Artificial Sequence: Synthetic oligonucleotide
aguacucggaacuugcuuu

SEQ ID NO: 335533 - RNA, 19 nt, Artificial Sequence
  Description of Artificial Sequence: Synthetic oligonucleotide
uuggcuaauuuucuggguu

SEQ ID NO: 335534 - RNA, 19 nt, Artificial Sequence
  Description of Artificial Sequence: Synthetic oligonucleotide
ugccaguuggcuaauuuuc

SEQ ID NO: 335535 - RNA, 19 nt, Artificial Sequence
  Description of Artificial Sequence: Synthetic oligonucleotide
caaguuggguggaagccgg

SEQ ID NO: 335536 - RNA, 19 nt, Artificial Sequence
  Description of Artificial Sequence: Synthetic oligonucleotide
acugguaacaagguugcug

SEQ ID NO: 335537 - RNA, 19 nt, Artificial Sequence
  Description of Artificial Sequence: Synthetic oligonucleotide
accaaaagucagcggacuc

SEQ ID NO: 335538 - RNA, 19 nt, Artificial Sequence
  Description of Artificial Sequence: Synthetic oligonucleotide
ugucgaggaauucgcaaac

SEQ ID NO: 335539 - RNA, 19 nt, Artificial Sequence
  Description of Artificial Sequence: Synthetic oligonucleotide
uagaggucaggauggauuc

SEQ ID NO: 335540 - RNA, 19 nt, Artificial Sequence
  Description of Artificial Sequence: Synthetic oligonucleotide
cugaacuaggggcugcagg

SEQ ID NO: 335541 - RNA, 19 nt, Artificial Sequence
  Description of Artificial Sequence: Synthetic oligonucleotide
uucgauuccuggauugggu

SEQ ID NO: 335542 - RNA, 19 nt, Artificial Sequence
  Description of Artificial Sequence: Synthetic oligonucleotide
ucgugcuugacguaccacu

SEQ ID NO: 335543 - RNA, 19 nt, Artificial Sequence
  Description of Artificial Sequence: Synthetic oligonucleotide
acugguucgcaguuggacu

SEQ ID NO: 335544 - RNA, 19 nt, Artificial Sequence
  Description of Artificial Sequence: Synthetic oligonucleotide
cucacauuguggagggccg

SEQ ID NO: 335545 - RNA, 19 nt, Artificial Sequence
  Description of Artificial Sequence: Synthetic oligonucleotide
ugacguaccacuggugugc

SEQ ID NO: 335546 - RNA, 19 nt, Artificial Sequence
  Description of Artificial Sequence: Synthetic oligonucleotide
aguuacugaagggguagac

SEQ ID NO: 335547 - RNA, 19 nt, Artificial Sequence
  Description of Artificial Sequence: Synthetic oligonucleotide
aagcucucgaagaacacgu

SEQ ID NO: 335548 - RNA, 19 nt, Artificial Sequence
  Description of Artificial Sequence: Synthetic oligonucleotide
ugcgggcucagauagcggc

SEQ ID NO: 335549 - RNA, 19 nt, Artificial Sequence
  Description of Artificial Sequence: Synthetic oligonucleotide
agcgccugcgucauggugc

SEQ ID NO: 335550 - RNA, 19 nt, Artificial Sequence
  Description of Artificial Sequence: Synthetic oligonucleotide
acauggcgaggugagaugg

SEQ ID NO: 335551 - RNA, 19 nt, Artificial Sequence
  Description of Artificial Sequence: Synthetic oligonucleotide
uguuggucugcguagguuu

SEQ ID NO: 335552 - RNA, 19 nt, Artificial Sequence
  Description of Artificial Sequence: Synthetic oligonucleotide
cuggauugggucugugagg

SEQ ID NO: 335553 - RNA, 19 nt, Artificial Sequence
  Description of Artificial Sequence: Synthetic oligonucleotide
ugcugcgguaugcagucag

SEQ ID NO: 335554 - RNA, 19 nt, Artificial Sequence
  Description of Artificial Sequence: Synthetic oligonucleotide
aaagaauguuggacuugcg

SEQ ID NO: 335555 - RNA, 19 nt, Artificial Sequence
  Description of Artificial Sequence: Synthetic oligonucleotide
gaugaguacucggaacuug

SEQ ID NO: 335556 - RNA, 19 nt, Artificial Sequence
  Description of Artificial Sequence: Synthetic oligonucleotide
ugcgucauggugcccagcu

SEQ ID NO: 335557 - RNA, 19 nt, Artificial Sequence
  Description of Artificial Sequence: Synthetic oligonucleotide
ggcaggcccauccacaugg

SEQ ID NO: 335558 - RNA, 19 nt, Artificial Sequence
  Description of Artificial Sequence: Synthetic oligonucleotide
guucacucauguuucucgc

SEQ ID NO: 335559 - RNA, 19 nt, Artificial Sequence
  Description of Artificial Sequence: Synthetic oligonucleotide
uucacucauguuucucgcc

SEQ ID NO: 335560 - RNA, 19 nt, Artificial Sequence
  Description of Artificial Sequence: Synthetic oligonucleotide
guaccacuggugugcaucg

SEQ ID NO: 335561 - RNA, 19 nt, Artificial Sequence
  Description of Artificial Sequence: Synthetic oligonucleotide
aucuccucgccaaugucgc

SEQ ID NO: 335562 - RNA, 19 nt, Artificial Sequence
  Description of Artificial Sequence: Synthetic oligonucleotide
guugcucacacucgaaaca

SEQ ID NO: 335563 - RNA, 19 nt, Artificial Sequence
  Description of Artificial Sequence: Synthetic oligonucleotide
uucgcaaacugaguuuuca

SEQ ID NO: 335564 - RNA, 19 nt, Artificial Sequence
  Description of Artificial Sequence: Synthetic oligonucleotide
ugguagucgcgcuggaagc

SEQ ID NO: 335565 - RNA, 19 nt, Artificial Sequence
  Description of Artificial Sequence: Synthetic oligonucleotide
augccggaccaguuguggc

SEQ ID NO: 335566 - RNA, 19 nt, Artificial Sequence
  Description of Artificial Sequence: Synthetic oligonucleotide
cacuggugugcaucgaagc

SEQ ID NO: 335567 - RNA, 19 nt, Artificial Sequence
  Description of Artificial Sequence: Synthetic oligonucleotide
uggaagccggaugaggaag

SEQ ID NO: 335568 - RNA, 19 nt, Artificial Sequence
  Description of Artificial Sequence: Synthetic oligonucleotide
augcguuccugaaugagag

SEQ ID NO: 335569 - RNA, 19 nt, Artificial Sequence
  Description of Artificial Sequence: Synthetic oligonucleotide
cagcacaagucucgcaugg

SEQ ID NO: 335570 - RNA, 19 nt, Artificial Sequence
  Description of Artificial Sequence: Synthetic oligonucleotide
ucgccaaugucgcacugga

SEQ ID NO: 335571 - RNA, 19 nt, Artificial Sequence
  Description of Artificial Sequence: Synthetic oligonucleotide
uacugaagggguagacaug

SEQ ID NO: 335572 - RNA, 19 nt, Artificial Sequence
  Description of Artificial Sequence: Synthetic oligonucleotide
gauggggcacugcaagccc

SEQ ID NO: 335573 - RNA, 19 nt, Artificial Sequence
  Description of Artificial Sequence: Synthetic oligonucleotide
auuguggagggccgaagga

SEQ ID NO: 335574 - RNA, 19 nt, Artificial Sequence
  Description of Artificial Sequence: Synthetic oligonucleotide
guugcugcgguaugcaguc

SEQ ID NO: 335575 - RNA, 19 nt, Artificial Sequence
  Description of Artificial Sequence: Synthetic oligonucleotide
ggguaugcguuccugaaug

SEQ ID NO: 335576 - RNA, 19 nt, Artificial Sequence
  Description of Artificial Sequence: Synthetic oligonucleotide
uaacaagguugcuggugag

SEQ ID NO: 335577 - RNA, 19 nt, Artificial Sequence
  Description of Artificial Sequence: Synthetic oligonucleotide
caagauggggcgcugcaug

SEQ ID NO: 335578 - RNA, 19 nt, Artificial Sequence
  Description of Artificial Sequence: Synthetic oligonucleotide
aaccggugcaguuucgauu

SEQ ID NO: 335579 - RNA, 19 nt, Artificial Sequence
  Description of Artificial Sequence: Synthetic oligonucleotide
uucugcauuagcgccggcc

SEQ ID NO: 335580 - RNA, 19 nt, Artificial Sequence
  Description of Artificial Sequence: Synthetic oligonucleotide
guuucgauuccuggauugg

SEQ ID NO: 335581 - RNA, 19 nt, Artificial Sequence
  Description of Artificial Sequence: Synthetic oligonucleotide
acugucgaggaauucgcaa

SEQ ID NO: 335582 - RNA, 19 nt, Artificial Sequence
  Description of Artificial Sequence: Synthetic oligonucleotide
uucauggucuucggagggg

SEQ ID NO: 335583 - RNA, 19 nt, Artificial Sequence
  Description of Artificial Sequence: Synthetic oligonucleotide
ucgauuccuggauuggguc

SEQ ID NO: 335584 - RNA, 19 nt, Artificial Sequence
  Description of Artificial Sequence: Synthetic oligonucleotide
ugcgcaacacagaggcuug

SEQ ID NO: 335585 - RNA, 19 nt, Artificial Sequence
  Description of Artificial Sequence: Synthetic oligonucleotide
gaugcgggcgccuucugca

SEQ ID NO: 335586 - RNA, 19 nt, Artificial Sequence
  Description of Artificial Sequence: Synthetic oligonucleotide
aaaccggugcaguuucgau

SEQ ID NO: 335587 - RNA, 19 nt, Artificial Sequence
  Description of Artificial Sequence: Synthetic oligonucleotide
uucaccgcuucgaggagcu

SEQ ID NO: 335588 - RNA, 19 nt, Artificial Sequence
  Description of Artificial Sequence: Synthetic oligonucleotide
cagauagcggccauaccuc

SEQ ID NO: 335589 - RNA, 19 nt, Artificial Sequence
  Description of Artificial Sequence: Synthetic oligonucleotide
ucgcaaacugaguuuucac

SEQ ID NO: 335590 - RNA, 19 nt, Artificial Sequence
  Description of Artificial Sequence: Synthetic oligonucleotide
ggucugcgggcucagauag

SEQ ID NO: 335591 - RNA, 19 nt, Artificial Sequence
  Description of Artificial Sequence: Synthetic oligonucleotide
agcgcaucugcgcgugagc

SEQ ID NO: 335592 - RNA, 19 nt, Artificial Sequence
  Description of Artificial Sequence: Synthetic oligonucleotide
gcauucaccgcuucgagga

SEQ ID NO: 335593 - RNA, 19 nt, Artificial Sequence
  Description of Artificial Sequence: Synthetic oligonucleotide
gagacugccuuagaguaga

SEQ ID NO: 335594 - RNA, 19 nt, Artificial Sequence
  Description of Artificial Sequence: Synthetic oligonucleotide
agaaaaccagggcccuguc

SEQ ID NO: 335595 - RNA, 19 nt, Artificial Sequence
  Description of Artificial Sequence: Synthetic oligonucleotide
caguccgaccuccagggag

SEQ ID NO: 335596 - RNA, 19 nt, Artificial Sequence
  Description of Artificial Sequence: Synthetic oligonucleotide
cgaagaacacguuaucuag

SEQ ID NO: 335597 - RNA, 19 nt, Artificial Sequence
  Description of Artificial Sequence: Synthetic oligonucleotide
acgaucugccggaacaccg

SEQ ID NO: 335598 - RNA, 19 nt, Artificial Sequence
  Description of Artificial Sequence: Synthetic oligonucleotide
cacuggagaugguuguggc

SEQ ID NO: 335599 - RNA, 19 nt, Artificial Sequence
  Description of Artificial Sequence: Synthetic oligonucleotide
gggcacacccuucugacag

SEQ ID NO: 335600 - RNA, 19 nt, Artificial Sequence
  Description of Artificial Sequence: Synthetic oligonucleotide
ugcgaugguuggaauugga

SEQ ID NO: 335601 - RNA, 19 nt, Artificial Sequence
  Description of Artificial Sequence: Synthetic oligonucleotide
cuggucggaggcauagagc

SEQ ID NO: 335602 - RNA, 19 nt, Artificial Sequence
  Description of Artificial Sequence: Synthetic oligonucleotide
cucggaacuugcuuuccug

SEQ ID NO: 335603 - RNA, 19 nt, Artificial Sequence
  Description of Artificial Sequence: Synthetic oligonucleotide
guuggguggaagccggaug

SEQ ID NO: 335604 - RNA, 19 nt, Artificial Sequence
  Description of Artificial Sequence: Synthetic oligonucleotide
guacugucgaggaauucgc

SEQ ID NO: 335605 - RNA, 19 nt, Artificial Sequence
  Description of Artificial Sequence: Synthetic oligonucleotide
guaugcguuccugaaugag

SEQ ID NO: 335606 - RNA, 19 nt, Artificial Sequence
  Description of Artificial Sequence: Synthetic oligonucleotide
aggacuggacucucaucag

SEQ ID NO: 335607 - RNA, 19 nt, Artificial Sequence
  Description of Artificial Sequence: Synthetic oligonucleotide
auguuucucgccagguagg

SEQ ID NO: 335608 - RNA, 19 nt, Artificial Sequence
  Description of Artificial Sequence: Synthetic oligonucleotide
aacacguuaucuagggcuu

SEQ ID NO: 335609 - RNA, 19 nt, Artificial Sequence
  Description of Artificial Sequence: Synthetic oligonucleotide
uugcgaugguuggaauugg

SEQ ID NO: 335610 - RNA, 19 nt, Artificial Sequence
  Description of Artificial Sequence: Synthetic oligonucleotide
ugaguugcucacacucgaa

SEQ ID NO: 335611 - RNA, 19 nt, Artificial Sequence
  Description of Artificial Sequence: Synthetic oligonucleotide
auguuggacuugcgcguac

SEQ ID NO: 335612 - RNA, 19 nt, Artificial Sequence
  Description of Artificial Sequence: Synthetic oligonucleotide
gaguugcucacacucgaaa

SEQ ID NO: 335613 - RNA, 19 nt, Artificial Sequence
  Description of Artificial Sequence: Synthetic oligonucleotide
ucucguccgaugccuugag

SEQ ID NO: 335614 - RNA, 19 nt, Artificial Sequence
  Description of Artificial Sequence: Synthetic oligonucleotide
ucggcaguagauguugguc

SEQ ID NO: 335615 - RNA, 19 nt, Artificial Sequence
  Description of Artificial Sequence: Synthetic oligonucleotide
acuugccgcacaugaguug

SEQ ID NO: 335616 - RNA, 19 nt, Artificial Sequence
  Description of Artificial Sequence: Synthetic oligonucleotide
cuugcgcguacugucgagg

SEQ ID NO: 335617 - RNA, 19 nt, Artificial Sequence
  Description of Artificial Sequence: Synthetic oligonucleotide
gaggcaaguuggguggaag

SEQ ID NO: 335618 - RNA, 19 nt, Artificial Sequence
  Description of Artificial Sequence: Synthetic oligonucleotide
cgcaaacugaguuuucacg

SEQ ID NO: 335619 - RNA, 19 nt, Artificial Sequence
  Description of Artificial Sequence: Synthetic oligonucleotide
agcauugucgaaggucuug

SEQ ID NO: 335620 - RNA, 19 nt, Artificial Sequence
  Description of Artificial Sequence: Synthetic oligonucleotide
caucgaagcacuugccgca

SEQ ID NO: 335621 - RNA, 19 nt, Artificial Sequence
  Description of Artificial Sequence: Synthetic oligonucleotide
uugcgcguacugucgagga

SEQ ID NO: 335622 - RNA, 19 nt, Artificial Sequence
  Description of Artificial Sequence: Synthetic oligonucleotide
caccgcuucgaggagcucg

SEQ ID NO: 335623 - RNA, 19 nt, Artificial Sequence
  Description of Artificial Sequence: Synthetic oligonucleotide
cacucauguuucucgccag

SEQ ID NO: 335624 - RNA, 19 nt, Artificial Sequence
  Description of Artificial Sequence: Synthetic oligonucleotide
cagcggacucuuugcagcg

SEQ ID NO: 335625 - RNA, 19 nt, Artificial Sequence
  Description of Artificial Sequence: Synthetic oligonucleotide
ggcgcuuccaggcauccag

SEQ ID NO: 335626 - RNA, 19 nt, Artificial Sequence
  Description of Artificial Sequence: Synthetic oligonucleotide
cguucacucauguuucucg

SEQ ID NO: 335627 - RNA, 19 nt, Artificial Sequence
  Description of Artificial Sequence: Synthetic oligonucleotide
ggcacugcaagcccggcgc

SEQ ID NO: 335628 - RNA, 19 nt, Artificial Sequence
  Description of Artificial Sequence: Synthetic oligonucleotide
gaugguuguggccccgguc

SEQ ID NO: 335629 - RNA, 19 nt, Artificial Sequence
  Description of Artificial Sequence: Synthetic oligonucleotide
ucgcacuggagaugguugu

SEQ ID NO: 335630 - RNA, 19 nt, Artificial Sequence
  Description of Artificial Sequence: Synthetic oligonucleotide
uguuucucgccagguaggu

SEQ ID NO: 335631 - RNA, 19 nt, Artificial Sequence
  Description of Artificial Sequence: Synthetic oligonucleotide
acagccucggcaguagaug

SEQ ID NO: 335632 - RNA, 19 nt, Artificial Sequence
  Description of Artificial Sequence: Synthetic oligonucleotide
uaccgcuucaucuguucuc

SEQ ID NO: 335633 - RNA, 19 nt, Artificial Sequence
  Description of Artificial Sequence: Synthetic oligonucleotide
aggacacuagccugaacua

SEQ ID NO: 335634 - RNA, 19 nt, Artificial Sequence
  Description of Artificial Sequence: Synthetic oligonucleotide
gccacugguucgcaguugg

SEQ ID NO: 335635 - RNA, 19 nt, Artificial Sequence
  Description of Artificial Sequence: Synthetic oligonucleotide
cagauauuuccugguaguc

SEQ ID NO: 335636 - RNA, 19 nt, Artificial Sequence
  Description of Artificial Sequence: Synthetic oligonucleotide
aagucucgcauggccagca

SEQ ID NO: 335637 - RNA, 19 nt, Artificial Sequence
  Description of Artificial Sequence: Synthetic oligonucleotide
acuugcgcguacugucgag

SEQ ID NO: 335638 - RNA, 19 nt, Artificial Sequence
  Description of Artificial Sequence: Synthetic oligonucleotide
auugggucugugagggcgg

SEQ ID NO: 335639 - RNA, 19 nt, Artificial Sequence
  Description of Artificial Sequence: Synthetic oligonucleotide
cacgucuugaacuccucga

SEQ ID NO: 335640 - RNA, 19 nt, Artificial Sequence
  Description of Artificial Sequence: Synthetic oligonucleotide
gucggaggcauagagcuuc

SEQ ID NO: 335641 - RNA, 19 nt, Artificial Sequence
  Description of Artificial Sequence: Synthetic oligonucleotide
uggggcgcugcauggaggu

SEQ ID NO: 335642 - RNA, 19 nt, Artificial Sequence
  Description of Artificial Sequence: Synthetic oligonucleotide
guacucggaacuugcuuuc

SEQ ID NO: 335643 - RNA, 19 nt, Artificial Sequence
  Description of Artificial Sequence: Synthetic oligonucleotide
cguacugucgaggaauucg

SEQ ID NO: 335644 - RNA, 19 nt, Artificial Sequence
  Description of Artificial Sequence: Synthetic oligonucleotide
augcgcaacacagaggcuu

SEQ ID NO: 335645 - RNA, 19 nt, Artificial Sequence
  Description of Artificial Sequence: Synthetic oligonucleotide
accgcuucgaggagcucgc

SEQ ID NO: 335646 - RNA, 19 nt, Artificial Sequence
  Description of Artificial Sequence: Synthetic oligonucleotide
cacugguucgcaguuggac

SEQ ID NO: 335647 - RNA, 19 nt, Artificial Sequence
  Description of Artificial Sequence: Synthetic oligonucleotide
uuugcagcgggugcacgcu

SEQ ID NO: 335648 - RNA, 19 nt, Artificial Sequence
  Description of Artificial Sequence: Synthetic oligonucleotide
cugucgaggaauucgcaaa

SEQ ID NO: 335649 - RNA, 19 nt, Artificial Sequence
  Description of Artificial Sequence: Synthetic oligonucleotide
uagacaugccggaccaguu

SEQ ID NO: 335650 - RNA, 19 nt, Artificial Sequence
  Description of Artificial Sequence: Synthetic oligonucleotide
cacauggcgaggugagaug

SEQ ID NO: 335651 - RNA, 19 nt, Artificial Sequence
  Description of Artificial Sequence: Synthetic oligonucleotide
gccauaccucuucaaaccc

SEQ ID NO: 335652 - RNA, 19 nt, Artificial Sequence
  Description of Artificial Sequence: Synthetic oligonucleotide
gcgaacacgagcucggauc

SEQ ID NO: 335653 - RNA, 19 nt, Artificial Sequence
  Description of Artificial Sequence: Synthetic oligonucleotide
cagggcacuccguucacuc

SEQ ID NO: 335654 - RNA, 19 nt, Artificial Sequence
  Description of Artificial Sequence: Synthetic oligonucleotide
gggcuucugcauuagcgcc

SEQ ID NO: 335655 - RNA, 19 nt, Artificial Sequence
  Description of Artificial Sequence: Synthetic oligonucleotide
cacucgaaacaccaaaagu

SEQ ID NO: 335656 - RNA, 19 nt, Artificial Sequence
  Description of Artificial Sequence: Synthetic oligonucleotide
cucgccaaugucgcacugg

SEQ ID NO: 335657 - RNA, 19 nt, Artificial Sequence
  Description of Artificial Sequence: Synthetic oligonucleotide
uucgaggagcucgcgcucc

SEQ ID NO: 335658 - RNA, 19 nt, Artificial Sequence
  Description of Artificial Sequence: Synthetic oligonucleotide
uggcuaccgcuucaucugu

SEQ ID NO: 335659 - RNA, 19 nt, Artificial Sequence
  Description of Artificial Sequence: Synthetic oligonucleotide
gaaaccggugcaguuucga

SEQ ID NO: 335660 - RNA, 19 nt, Artificial Sequence
  Description of Artificial Sequence: Synthetic oligonucleotide
uagguguucagagccugaa

SEQ ID NO: 335661 - RNA, 19 nt, Artificial Sequence
  Description of Artificial Sequence: Synthetic oligonucleotide
ggcauggugggcguagagg

SEQ ID NO: 335662 - RNA, 19 nt, Artificial Sequence
  Description of Artificial Sequence: Synthetic oligonucleotide
cugaagggguagacaugcc

SEQ ID NO: 335663 - RNA, 19 nt, Artificial Sequence
  Description of Artificial Sequence: Synthetic oligonucleotide
gcgugagcauugucgaagg

SEQ ID NO: 335664 - RNA, 19 nt, Artificial Sequence
  Description of Artificial Sequence: Synthetic oligonucleotide
aggaauucgcaaacugagu

SEQ ID NO: 335665 - RNA, 19 nt, Artificial Sequence
  Description of Artificial Sequence: Synthetic oligonucleotide
uagucgcgcuggaagcgug

SEQ ID NO: 335666 - RNA, 19 nt, Artificial Sequence
  Description of Artificial Sequence: Synthetic oligonucleotide
uguuggacuugcgcguacu

SEQ ID NO: 335667 - RNA, 19 nt, Artificial Sequence
  Description of Artificial Sequence: Synthetic oligonucleotide
ggggugacugucugagagg

SEQ ID NO: 335668 - RNA, 19 nt, Artificial Sequence
  Description of Artificial Sequence: Synthetic oligonucleotide
cuagugcucaaccuguccu

SEQ ID NO: 335669 - RNA, 19 nt, Artificial Sequence
  Description of Artificial Sequence: Synthetic oligonucleotide
ggaagcgugcauucaccgc

SEQ ID NO: 335670 - RNA, 19 nt, Artificial Sequence
  Description of Artificial Sequence: Synthetic oligonucleotide
gcagacacgucuugaacuc

SEQ ID NO: 335671 - RNA, 19 nt, Artificial Sequence
  Description of Artificial Sequence: Synthetic oligonucleotide
ggaggcauagagcuucauc

SEQ ID NO: 335672 - RNA, 19 nt, Artificial Sequence
  Description of Artificial Sequence: Synthetic oligonucleotide
ggacacuagccugaacuag

SEQ ID NO: 335673 - RNA, 19 nt, Artificial Sequence
  Description of Artificial Sequence: Synthetic oligonucleotide
gaccagauauuuccuggua

SEQ ID NO: 335674 - RNA, 19 nt, Artificial Sequence
  Description of Artificial Sequence: Synthetic oligonucleotide
auucgcaaacugaguuuuc

SEQ ID NO: 335675 - RNA, 19 nt, Artificial Sequence
  Description of Artificial Sequence: Synthetic oligonucleotide
guuggucugcguagguuug

SEQ ID NO: 335676 - RNA, 19 nt, Artificial Sequence
  Description of Artificial Sequence: Synthetic oligonucleotide
cauucaccgcuucgaggag

SEQ ID NO: 335677 - RNA, 19 nt, Artificial Sequence
  Description of Artificial Sequence: Synthetic oligonucleotide
ggcauagagcuucauccuc

SEQ ID NO: 335678 - RNA, 19 nt, Artificial Sequence
  Description of Artificial Sequence: Synthetic oligonucleotide
aggcauggugggcguagag

SEQ ID NO: 335679 - RNA, 19 nt, Artificial Sequence
  Description of Artificial Sequence: Synthetic oligonucleotide
agcgugcauucaccgcuuc

SEQ ID NO: 335680 - RNA, 19 nt, Artificial Sequence
  Description of Artificial Sequence: Synthetic oligonucleotide
cucgccagguaggucuugg

SEQ ID NO: 335681 - RNA, 19 nt, Artificial Sequence
  Description of Artificial Sequence: Synthetic oligonucleotide
uuggucugcguagguuugc

SEQ ID NO: 335682 - RNA, 19 nt, Artificial Sequence
  Description of Artificial Sequence: Synthetic oligonucleotide
aggcccauccacauggcga

SEQ ID NO: 335683 - RNA, 19 nt, Artificial Sequence
  Description of Artificial Sequence: Synthetic oligonucleotide
gacuugcgcguacugucga

SEQ ID NO: 335684 - RNA, 19 nt, Artificial Sequence
  Description of Artificial Sequence: Synthetic oligonucleotide
uccucgccaaugucgcacu

SEQ ID NO: 335685 - RNA, 19 nt, Artificial Sequence
  Description of Artificial Sequence: Synthetic oligonucleotide
guaaguuacugaaggggua

SEQ ID NO: 335686 - RNA, 19 nt, Artificial Sequence
  Description of Artificial Sequence: Synthetic oligonucleotide
ccuggucggaggcauagag

SEQ ID NO: 335687 - RNA, 19 nt, Artificial Sequence
  Description of Artificial Sequence: Synthetic oligonucleotide
gaaaaccagggcccugucu

SEQ ID NO: 335688 - RNA, 19 nt, Artificial Sequence
  Description of Artificial Sequence: Synthetic oligonucleotide
ggggagcuagugcucaacc

SEQ ID NO: 335689 - RNA, 19 nt, Artificial Sequence
  Description of Artificial Sequence: Synthetic oligonucleotide
cuccucgccaaugucgcac

SEQ ID NO: 335690 - RNA, 19 nt, Artificial Sequence
  Description of Artificial Sequence: Synthetic oligonucleotide
agacacgucuugaacuccu

SEQ ID NO: 335691 - RNA, 19 nt, Artificial Sequence
  Description of Artificial Sequence: Synthetic oligonucleotide
gguggaagccggaugagga

SEQ ID NO: 335692 - RNA, 19 nt, Artificial Sequence
  Description of Artificial Sequence: Synthetic oligonucleotide
cucguccgaugccuugagg

SEQ ID NO: 335693 - RNA, 19 nt, Artificial Sequence
  Description of Artificial Sequence: Synthetic oligonucleotide
ucacauuguggagggccga

SEQ ID NO: 335694 - RNA, 19 nt, Artificial Sequence
  Description of Artificial Sequence: Synthetic oligonucleotide
gugacugucugagaggccu

SEQ ID NO: 335695 - RNA, 19 nt, Artificial Sequence
  Description of Artificial Sequence: Synthetic oligonucleotide
agucgcgcuggaagcgugc

SEQ ID NO: 335696 - RNA, 19 nt, Artificial Sequence
  Description of Artificial Sequence: Synthetic oligonucleotide
ucggaggcauagagcuuca

SEQ ID NO: 335697 - RNA, 19 nt, Artificial Sequence
  Description of Artificial Sequence: Synthetic oligonucleotide
ugucgcacuggagaugguu

SEQ ID NO: 335698 - RNA, 19 nt, Artificial Sequence
  Description of Artificial Sequence: Synthetic oligonucleotide
cagacacgucuugaacucc

SEQ ID NO: 335699 - RNA, 19 nt, Artificial Sequence
  Description of Artificial Sequence: Synthetic oligonucleotide
gcugaucaccacaauuggc

SEQ ID NO: 335700 - RNA, 19 nt, Artificial Sequence
  Description of Artificial Sequence: Synthetic oligonucleotide
ugguuggaauuggagcaaa

SEQ ID NO: 335701 - RNA, 19 nt, Artificial Sequence
  Description of Artificial Sequence: Synthetic oligonucleotide
cucaggggagcuagugcuc

SEQ ID NO: 335702 - RNA, 19 nt, Artificial Sequence
  Description of Artificial Sequence: Synthetic oligonucleotide
ugcgcguacugucgaggaa

SEQ ID NO: 335703 - RNA, 19 nt, Artificial Sequence
  Description of Artificial Sequence: Synthetic oligonucleotide
cagagcaauuccuguggca

SEQ ID NO: 335704 - RNA, 19 nt, Artificial Sequence
  Description of Artificial Sequence: Synthetic oligonucleotide
cugcauggaaaccggugca

SEQ ID NO: 335705 - RNA, 19 nt, Artificial Sequence
  Description of Artificial Sequence: Synthetic oligonucleotide
ugcgggcgccuucugcaug

SEQ ID NO: 335706 - RNA, 19 nt, Artificial Sequence
  Description of Artificial Sequence: Synthetic oligonucleotide
gcggacucuuugcagcggg

SEQ ID NO: 335707 - RNA, 19 nt, Artificial Sequence
  Description of Artificial Sequence: Synthetic oligonucleotide
caaugucgcacuggagaug

SEQ ID NO: 335708 - RNA, 19 nt, Artificial Sequence
  Description of Artificial Sequence: Synthetic oligonucleotide
gaagguauugaggcaaguu

SEQ ID NO: 335709 - RNA, 19 nt, Artificial Sequence
  Description of Artificial Sequence: Synthetic oligonucleotide
cugucugagaggccuccuc

SEQ ID NO: 335710 - RNA, 19 nt, Artificial Sequence
  Description of Artificial Sequence: Synthetic oligonucleotide
agcuagugcucaaccuguc

SEQ ID NO: 335711 - RNA, 19 nt, Artificial Sequence
  Description of Artificial Sequence: Synthetic oligonucleotide
ucuccggcucgaugaguac

SEQ ID NO: 335712 - RNA, 19 nt, Artificial Sequence
  Description of Artificial Sequence: Synthetic oligonucleotide
cacugucaaucuugagguc

SEQ ID NO: 335713 - RNA, 19 nt, Artificial Sequence
  Description of Artificial Sequence: Synthetic oligonucleotide
uggauuccugcuggaggca

SEQ ID NO: 335714 - RNA, 19 nt, Artificial Sequence
  Description of Artificial Sequence: Synthetic oligonucleotide
caucugcgcgugagcauug

SEQ ID NO: 335715 - RNA, 19 nt, Artificial Sequence
  Description of Artificial Sequence: Synthetic oligonucleotide
gaacacgagcucggaucag

SEQ ID NO: 335716 - RNA, 19 nt, Artificial Sequence
  Description of Artificial Sequence: Synthetic oligonucleotide
gaguacucggaacuugcuu

SEQ ID NO: 335717 - RNA, 19 nt, Artificial Sequence
  Description of Artificial Sequence: Synthetic oligonucleotide
ucuccucgccaaugucgca

SEQ ID NO: 335718 - RNA, 19 nt, Artificial Sequence
  Description of Artificial Sequence: Synthetic oligonucleotide
cugcgggcucagauagcgg

SEQ ID NO: 335719 - RNA, 19 nt, Artificial Sequence
  Description of Artificial Sequence: Synthetic oligonucleotide
gaacagccucggcaguaga

SEQ ID NO: 335720 - RNA, 19 nt, Artificial Sequence
  Description of Artificial Sequence: Synthetic oligonucleotide
agcggacucuuugcagcgg

SEQ ID NO: 335721 - RNA, 19 nt, Artificial Sequence
  Description of Artificial Sequence: Synthetic oligonucleotide
ucgaggagcucgcgcuccu

SEQ ID NO: 335722 - RNA, 19 nt, Artificial Sequence
  Description of Artificial Sequence: Synthetic oligonucleotide
guuugcgaugguuggaauu

SEQ ID NO: 335723 - RNA, 19 nt, Artificial Sequence
  Description of Artificial Sequence: Synthetic oligonucleotide
cucaugccgcugcuggauc

SEQ ID NO: 335724 - RNA, 19 nt, Artificial Sequence
  Description of Artificial Sequence: Synthetic oligonucleotide
gagcuagugcucaaccugu

SEQ ID NO: 335725 - RNA, 19 nt, Artificial Sequence
  Description of Artificial Sequence: Synthetic oligonucleotide
ggguggaagccggaugagg

SEQ ID NO: 335726 - RNA, 19 nt, Artificial Sequence
  Description of Artificial Sequence: Synthetic oligonucleotide
gugggcguagaggucagga

SEQ ID NO: 335727 - RNA, 19 nt, Artificial Sequence
  Description of Artificial Sequence: Synthetic oligonucleotide
guggaagccggaugaggaa

SEQ ID NO: 335728 - RNA, 19 nt, Artificial Sequence
  Description of Artificial Sequence: Synthetic oligonucleotide
ggaacagccucggcaguag

SEQ ID NO: 335729 - RNA, 19 nt, Artificial Sequence
  Description of Artificial Sequence: Synthetic oligonucleotide
guagacaugccggaccagu

SEQ ID NO: 335730 - RNA, 19 nt, Artificial Sequence
  Description of Artificial Sequence: Synthetic oligonucleotide
uagcgccggccccaggcac

SEQ ID NO: 335731 - RNA, 19 nt, Artificial Sequence
  Description of Artificial Sequence: Synthetic oligonucleotide
gguaugcguuccugaauga

SEQ ID NO: 335732 - RNA, 19 nt, Artificial Sequence
  Description of Artificial Sequence: Synthetic oligonucleotide
gcgugcauucaccgcuucg

SEQ ID NO: 335733 - RNA, 19 nt, Artificial Sequence
  Description of Artificial Sequence: Synthetic oligonucleotide
gugcaucgaagcacuugcc

SEQ ID NO: 335734 - RNA, 19 nt, Artificial Sequence
  Description of Artificial Sequence: Synthetic oligonucleotide
agcgcgcaugcgcaacaca

SEQ ID NO: 335735 - RNA, 19 nt, Artificial Sequence
  Description of Artificial Sequence: Synthetic oligonucleotide
cuucuaggacuggacucuc

SEQ ID NO: 335736 - RNA, 19 nt, Artificial Sequence
  Description of Artificial Sequence: Synthetic oligonucleotide
cacgugcuugcuccagcug

SEQ ID NO: 335737 - RNA, 19 nt, Artificial Sequence
  Description of Artificial Sequence: Synthetic oligonucleotide
ggacucuuugcagcgggug

SEQ ID NO: 335738 - RNA, 19 nt, Artificial Sequence
  Description of Artificial Sequence: Synthetic oligonucleotide
cggaacaccgccaggcgcc

SEQ ID NO: 335739 - RNA, 19 nt, Artificial Sequence
  Description of Artificial Sequence: Synthetic oligonucleotide
auguuggucugcguagguu

SEQ ID NO: 335740 - RNA, 19 nt, Artificial Sequence
  Description of Artificial Sequence: Synthetic oligonucleotide
aggcagcacaagucucgca

SEQ ID NO: 335741 - RNA, 19 nt, Artificial Sequence
  Description of Artificial Sequence: Synthetic oligonucleotide
guauugaggcaaguugggu

SEQ ID NO: 335742 - RNA, 19 nt, Artificial Sequence
  Description of Artificial Sequence: Synthetic oligonucleotide
gaccucaaggaggcagcac

SEQ ID NO: 335743 - RNA, 19 nt, Artificial Sequence
  Description of Artificial Sequence: Synthetic oligonucleotide
cucuuugcagcgggugcac

SEQ ID NO: 335744 - RNA, 19 nt, Artificial Sequence
  Description of Artificial Sequence: Synthetic oligonucleotide
gacacgucuugaacuccuc

SEQ ID NO: 335745 - RNA, 19 nt, Artificial Sequence
  Description of Artificial Sequence: Synthetic oligonucleotide
cgugcuugacguaccacug

SEQ ID NO: 335746 - RNA, 19 nt, Artificial Sequence
  Description of Artificial Sequence: Synthetic oligonucleotide
ugcguagguuugcgauggu

SEQ ID NO: 335747 - RNA, 19 nt, Artificial Sequence
  Description of Artificial Sequence: Synthetic oligonucleotide
ggcuaauuuucuggguuuc

SEQ ID NO: 335748 - RNA, 19 nt, Artificial Sequence
  Description of Artificial Sequence: Synthetic oligonucleotide
ccgcacaugaguugcucac

SEQ ID NO: 335749 - RNA, 19 nt, Artificial Sequence
  Description of Artificial Sequence: Synthetic oligonucleotide
cugcgguaugcagucagca

SEQ ID NO: 335750 - RNA, 19 nt, Artificial Sequence
  Description of Artificial Sequence: Synthetic oligonucleotide
cucgugcuugacguaccac

SEQ ID NO: 335751 - RNA, 19 nt, Artificial Sequence
  Description of Artificial Sequence: Synthetic oligonucleotide
cucgcauggccagcacagc

SEQ ID NO: 335752 - RNA, 19 nt, Artificial Sequence
  Description of Artificial Sequence: Synthetic oligonucleotide
agcggccauaccucuucaa

SEQ ID NO: 335753 - RNA, 19 nt, Artificial Sequence
  Description of Artificial Sequence: Synthetic oligonucleotide
gacguaccacuggugugca

SEQ ID NO: 335754 - RNA, 19 nt, Artificial Sequence
  Description of Artificial Sequence: Synthetic oligonucleotide
aaguuggguggaagccgga

SEQ ID NO: 335755 - RNA, 19 nt, Artificial Sequence
  Description of Artificial Sequence: Synthetic oligonucleotide
ggaaaccggugcaguuucg

SEQ ID NO: 335756 - RNA, 19 nt, Artificial Sequence
  Description of Artificial Sequence: Synthetic oligonucleotide
gcaguuucgauuccuggau

SEQ ID NO: 335757 - RNA, 19 nt, Artificial Sequence
  Description of Artificial Sequence: Synthetic oligonucleotide
cauuagcgccggccccagg

SEQ ID NO: 335758 - RNA, 19 nt, Artificial Sequence
  Description of Artificial Sequence: Synthetic oligonucleotide
gucuccggcucgaugagua

SEQ ID NO: 335759 - RNA, 19 nt, Artificial Sequence
  Description of Artificial Sequence: Synthetic oligonucleotide
cgaggcucucguccgaugc

SEQ ID NO: 335760 - RNA, 19 nt, Artificial Sequence
  Description of Artificial Sequence: Synthetic oligonucleotide
ccagauauuuccugguagu

SEQ ID NO: 335761 - RNA, 19 nt, Artificial Sequence
  Description of Artificial Sequence: Synthetic oligonucleotide
guuucucgccagguagguc

SEQ ID NO: 335762 - RNA, 19 nt, Artificial Sequence
  Description of Artificial Sequence: Synthetic oligonucleotide
aagcgugcauucaccgcuu

SEQ ID NO: 335763 - RNA, 19 nt, Artificial Sequence
  Description of Artificial Sequence: Synthetic oligonucleotide
uggcgaacacgagcucgga

SEQ ID NO: 335764 - RNA, 19 nt, Artificial Sequence
  Description of Artificial Sequence: Synthetic oligonucleotide
aggcagcgcagaaacugga

SEQ ID NO: 335765 - RNA, 19 nt, Artificial Sequence
  Description of Artificial Sequence: Synthetic oligonucleotide
ugcacgcugccugcgcauc

SEQ ID NO: 335766 - RNA, 19 nt, Artificial Sequence
  Description of Artificial Sequence: Synthetic oligonucleotide
gcaagcccggcgcuuccag

SEQ ID NO: 335767 - RNA, 19 nt, Artificial Sequence
  Description of Artificial Sequence: Synthetic oligonucleotide
aggaugcgggcgccuucug

SEQ ID NO: 335768 - RNA, 19 nt, Artificial Sequence
  Description of Artificial Sequence: Synthetic oligonucleotide
cugguucgcaguuggacuu

SEQ ID NO: 335769 - RNA, 19 nt, Artificial Sequence
  Description of Artificial Sequence: Synthetic oligonucleotide
cugcacgugcuugcuccag

SEQ ID NO: 335770 - RNA, 19 nt, Artificial Sequence
  Description of Artificial Sequence: Synthetic oligonucleotide
cuaccgcuucaucuguucu

SEQ ID NO: 335771 - RNA, 19 nt, Artificial Sequence
  Description of Artificial Sequence: Synthetic oligonucleotide
cagccucggcaguagaugu

SEQ ID NO: 335772 - RNA, 19 nt, Artificial Sequence
  Description of Artificial Sequence: Synthetic oligonucleotide
cucucguccgaugccuuga

SEQ ID NO: 335773 - RNA, 19 nt, Artificial Sequence
  Description of Artificial Sequence: Synthetic oligonucleotide
ucucgccagguaggucuug

SEQ ID NO: 335774 - RNA, 19 nt, Artificial Sequence
  Description of Artificial Sequence: Synthetic oligonucleotide
cguaccacuggugugcauc

SEQ ID NO: 335775 - RNA, 19 nt, Artificial Sequence
  Description of Artificial Sequence: Synthetic oligonucleotide
caugccgcugcuggaucuc

SEQ ID NO: 335776 - RNA, 19 nt, Artificial Sequence
  Description of Artificial Sequence: Synthetic oligonucleotide
gcucucguccgaugccuug

SEQ ID NO: 335777 - RNA, 19 nt, Artificial Sequence
  Description of Artificial Sequence: Synthetic oligonucleotide
caggcggcacagugccuug

SEQ ID NO: 335778 - RNA, 19 nt, Artificial Sequence
  Description of Artificial Sequence: Synthetic oligonucleotide
augcgggcgccuucugcau

SEQ ID NO: 335779 - RNA, 19 nt, Artificial Sequence
  Description of Artificial Sequence: Synthetic oligonucleotide
ggaacaccgccaggcgccg

SEQ ID NO: 335780 - RNA, 19 nt, Artificial Sequence
  Description of Artificial Sequence: Synthetic oligonucleotide
ugguucgcaguuggacuuu

SEQ ID NO: 335781 - RNA, 19 nt, Artificial Sequence
  Description of Artificial Sequence: Synthetic oligonucleotide
cgcaugcgcaacacagagg

SEQ ID NO: 335782 - RNA, 19 nt, Artificial Sequence
  Description of Artificial Sequence: Synthetic oligonucleotide
cuggacucucaucaguguu

SEQ ID NO: 335783 - RNA, 19 nt, Artificial Sequence
  Description of Artificial Sequence: Synthetic oligonucleotide
ggacuggacucucaucagu

SEQ ID NO: 335784 - RNA, 19 nt, Artificial Sequence
  Description of Artificial Sequence: Synthetic oligonucleotide
gggagcuagugcucaaccu

SEQ ID NO: 335785 - RNA, 19 nt, Artificial Sequence
  Description of Artificial Sequence: Synthetic oligonucleotide
gaggaugcgggcgccuucu

SEQ ID NO: 335786 - RNA, 19 nt, Artificial Sequence
  Description of Artificial Sequence: Synthetic oligonucleotide
cgaacacgagcucggauca

SEQ ID NO: 335787 - RNA, 19 nt, Artificial Sequence
  Description of Artificial Sequence: Synthetic oligonucleotide
gucgaggaauucgcaaacu

SEQ ID NO: 335788 - RNA, 19 nt, Artificial Sequence
  Description of Artificial Sequence: Synthetic oligonucleotide
cucggcaguagauguuggu

SEQ ID NO: 335789 - RNA, 19 nt, Artificial Sequence
  Description of Artificial Sequence: Synthetic oligonucleotide
cggagcucggccaggggcc

SEQ ID NO: 335790 - RNA, 19 nt, Artificial Sequence
  Description of Artificial Sequence: Synthetic oligonucleotide
gccgcugcaagcucucgaa

SEQ ID NO: 335791 - RNA, 19 nt, Artificial Sequence
  Description of Artificial Sequence: Synthetic oligonucleotide
gccggaccaguuguggccc

SEQ ID NO: 335792 - RNA, 19 nt, Artificial Sequence
  Description of Artificial Sequence: Synthetic oligonucleotide
ggucugcguagguuugcga

SEQ ID NO: 335793 - RNA, 19 nt, Artificial Sequence
  Description of Artificial Sequence: Synthetic oligonucleotide
ccaggagcgcgcaugcgca

SEQ ID NO: 335794 - RNA, 19 nt, Artificial Sequence
  Description of Artificial Sequence: Synthetic oligonucleotide
aucugcgcgugagcauugu

SEQ ID NO: 335795 - RNA, 19 nt, Artificial Sequence
  Description of Artificial Sequence: Synthetic oligonucleotide
cacuugccgcacaugaguu

SEQ ID NO: 335796 - RNA, 19 nt, Artificial Sequence
  Description of Artificial Sequence: Synthetic oligonucleotide
gcacgcugccugcgcaucc

SEQ ID NO: 335797 - RNA, 19 nt, Artificial Sequence
  Description of Artificial Sequence: Synthetic oligonucleotide
cacauuguggagggccgaa

SEQ ID NO: 335798 - RNA, 19 nt, Artificial Sequence
  Description of Artificial Sequence: Synthetic oligonucleotide
gguuggaauuggagcaaaa

SEQ ID NO: 335799 - RNA, 19 nt, Artificial Sequence
  Description of Artificial Sequence: Synthetic oligonucleotide
agcgaggcucucguccgau

SEQ ID NO: 335800 - RNA, 19 nt, Artificial Sequence
  Description of Artificial Sequence: Synthetic oligonucleotide
gggugcacgcugccugcgc

SEQ ID NO: 335801 - RNA, 19 nt, Artificial Sequence
  Description of Artificial Sequence: Synthetic oligonucleotide
guagucgcgcuggaagcgu

SEQ ID NO: 335802 - RNA, 19 nt, Artificial Sequence
  Description of Artificial Sequence: Synthetic oligonucleotide
ccgggccucgugcuugacg

SEQ ID NO: 335803 - RNA, 19 nt, Artificial Sequence
  Description of Artificial Sequence: Synthetic oligonucleotide
gaacaccgccaggcgccgc

SEQ ID NO: 335804 - RNA, 19 nt, Artificial Sequence
  Description of Artificial Sequence: Synthetic oligonucleotide
caccacaauuggcucuucu

SEQ ID NO: 335805 - RNA, 19 nt, Artificial Sequence
  Description of Artificial Sequence: Synthetic oligonucleotide
gucgcgcuggaagcgugca

SEQ ID NO: 335806 - RNA, 19 nt, Artificial Sequence
  Description of Artificial Sequence: Synthetic oligonucleotide
cggcucgaugaguacucgg

SEQ ID NO: 335807 - RNA, 19 nt, Artificial Sequence
  Description of Artificial Sequence: Synthetic oligonucleotide
gcgggugcacgcugccugc

SEQ ID NO: 335808 - RNA, 19 nt, Artificial Sequence
  Description of Artificial Sequence: Synthetic oligonucleotide
acguaccacuggugugcau

SEQ ID NO: 335809 - RNA, 19 nt, Artificial Sequence
  Description of Artificial Sequence: Synthetic oligonucleotide
ccugcgucauggugcccag

SEQ ID NO: 335810 - RNA, 19 nt, Artificial Sequence
  Description of Artificial Sequence: Synthetic oligonucleotide
gcgcaacacagaggcuugg

SEQ ID NO: 335811 - RNA, 19 nt, Artificial Sequence
  Description of Artificial Sequence: Synthetic oligonucleotide
gcgggcucagauagcggcc

SEQ ID NO: 335812 - RNA, 19 nt, Artificial Sequence
  Description of Artificial Sequence: Synthetic oligonucleotide
ccacgaucugccggaacac

SEQ ID NO: 335813 - RNA, 19 nt, Artificial Sequence
  Description of Artificial Sequence: Synthetic oligonucleotide
gauagcggccauaccucuu

SEQ ID NO: 335814 - RNA, 19 nt, Artificial Sequence
  Description of Artificial Sequence: Synthetic oligonucleotide
cugcgucauggugcccagc

SEQ ID NO: 335815 - RNA, 19 nt, Artificial Sequence
  Description of Artificial Sequence: Synthetic oligonucleotide
gguucgcaguuggacuuuc

SEQ ID NO: 335816 - RNA, 19 nt, Artificial Sequence
  Description of Artificial Sequence: Synthetic oligonucleotide
gccaguuggcuaauuuucu

SEQ ID NO: 335817 - RNA, 19 nt, Artificial Sequence
  Description of Artificial Sequence: Synthetic oligonucleotide
caugcgcaacacagaggcu

SEQ ID NO: 335818 - RNA, 19 nt, Artificial Sequence
  Description of Artificial Sequence: Synthetic oligonucleotide
cgcuucgaggagcucgcgc

SEQ ID NO: 335819 - RNA, 19 nt, Artificial Sequence
  Description of Artificial Sequence: Synthetic oligonucleotide
cacuuggcuugggccuggc

SEQ ID NO: 335820 - RNA, 19 nt, Artificial Sequence
  Description of Artificial Sequence: Synthetic oligonucleotide
cuggcaccggguaugcguu

SEQ ID NO: 335821 - RNA, 19 nt, Artificial Sequence
  Description of Artificial Sequence: Synthetic oligonucleotide
ccauaccucuucaaacccu

SEQ ID NO: 335822 - RNA, 19 nt, Artificial Sequence
  Description of Artificial Sequence: Synthetic oligonucleotide
caguuucgauuccuggauu

SEQ ID NO: 335823 - RNA, 19 nt, Artificial Sequence
  Description of Artificial Sequence: Synthetic oligonucleotide
gcacgugcuugcuccagcu

SEQ ID NO: 335824 - RNA, 19 nt, Artificial Sequence
  Description of Artificial Sequence: Synthetic oligonucleotide
cacgcugccugcgcaucca

SEQ ID NO: 335825 - RNA, 19 nt, Artificial Sequence
  Description of Artificial Sequence: Synthetic oligonucleotide
gcauuagcgccggccccag

SEQ ID NO: 335826 - RNA, 19 nt, Artificial Sequence
  Description of Artificial Sequence: Synthetic oligonucleotide
gcgaggugagauggccuug

SEQ ID NO: 335827 - RNA, 19 nt, Artificial Sequence
  Description of Artificial Sequence: Synthetic oligonucleotide
cuccggcucgaugaguacu

SEQ ID NO: 335828 - RNA, 19 nt, Artificial Sequence
  Description of Artificial Sequence: Synthetic oligonucleotide
ccggguaugcguuccugaa

SEQ ID NO: 335829 - RNA, 19 nt, Artificial Sequence
  Description of Artificial Sequence: Synthetic oligonucleotide
ccguucacucauguuucuc

SEQ ID NO: 335830 - RNA, 19 nt, Artificial Sequence
  Description of Artificial Sequence: Synthetic oligonucleotide
agccucggcaguagauguu

SEQ ID NO: 335831 - RNA, 19 nt, Artificial Sequence
  Description of Artificial Sequence: Synthetic oligonucleotide
gguuugcgaugguuggaau

SEQ ID NO: 335832 - RNA, 19 nt, Artificial Sequence
  Description of Artificial Sequence: Synthetic oligonucleotide
ccggcucgaugaguacucg

SEQ ID NO: 335833 - RNA, 19 nt, Artificial Sequence
  Description of Artificial Sequence: Synthetic oligonucleotide
gcauggaggugagaaaguu

SEQ ID NO: 335834 - RNA, 19 nt, Artificial Sequence
  Description of Artificial Sequence: Synthetic oligonucleotide
gccuauggcggagcgcauc

SEQ ID NO: 335835 - RNA, 19 nt, Artificial Sequence
  Description of Artificial Sequence: Synthetic oligonucleotide
gugucugcacgugcuugcu

SEQ ID NO: 335836 - RNA, 19 nt, Artificial Sequence
  Description of Artificial Sequence: Synthetic oligonucleotide
gccugcgcauccacgaucu

SEQ ID NO: 335837 - RNA, 19 nt, Artificial Sequence
  Description of Artificial Sequence: Synthetic oligonucleotide
ccucgugcuugacguacca

SEQ ID NO: 335838 - RNA, 19 nt, Artificial Sequence
  Description of Artificial Sequence: Synthetic oligonucleotide
ccggugcaguuucgauucc

SEQ ID NO: 335839 - RNA, 19 nt, Artificial Sequence
  Description of Artificial Sequence: Synthetic oligonucleotide
guucgcaguuggacuuucu

SEQ ID NO: 335840 - RNA, 19 nt, Artificial Sequence
  Description of Artificial Sequence: Synthetic oligonucleotide
cagcgaggcucucguccga

SEQ ID NO: 335841 - RNA, 19 nt, Artificial Sequence
  Description of Artificial Sequence: Synthetic oligonucleotide
gcccauccacauggcgagg

SEQ ID NO: 335842 - RNA, 19 nt, Artificial Sequence
  Description of Artificial Sequence: Synthetic oligonucleotide
gcacuccguucacucaugu

SEQ ID NO: 335843 - RNA, 19 nt, Artificial Sequence
  Description of Artificial Sequence: Synthetic oligonucleotide
gcgcguacugucgaggaau

SEQ ID NO: 335844 - RNA, 19 nt, Artificial Sequence
  Description of Artificial Sequence: Synthetic oligonucleotide
ccucgccaaugucgcacug

SEQ ID NO: 335845 - RNA, 19 nt, Artificial Sequence
  Description of Artificial Sequence: Synthetic oligonucleotide
cguccgaugccuugaggaa

SEQ ID NO: 335846 - RNA, 19 nt, Artificial Sequence
  Description of Artificial Sequence: Synthetic oligonucleotide
cacuccguucacucauguu

SEQ ID NO: 335847 - RNA, 19 nt, Artificial Sequence
  Description of Artificial Sequence: Synthetic oligonucleotide
ggcgaacacgagcucggau

SEQ ID NO: 335848 - RNA, 19 nt, Artificial Sequence
  Description of Artificial Sequence: Synthetic oligonucleotide
cauccacgaucugccggaa

SEQ ID NO: 335849 - RNA, 19 nt, Artificial Sequence
  Description of Artificial Sequence: Synthetic oligonucleotide
agcugccaguuggcuaauu

SEQ ID NO: 335850 - RNA, 19 nt, Artificial Sequence
  Description of Artificial Sequence: Synthetic oligonucleotide
gguccucccgggaaggcau

SEQ ID NO: 335851 - RNA, 19 nt, Artificial Sequence
  Description of Artificial Sequence: Synthetic oligonucleotide
cgcgcaugcgcaacacaga

SEQ ID NO: 335852 - RNA, 19 nt, Artificial Sequence
  Description of Artificial Sequence: Synthetic oligonucleotide
ggagcgcaucugcgcguga

SEQ ID NO: 335853 - RNA, 19 nt, Artificial Sequence
  Description of Artificial Sequence: Synthetic oligonucleotide
ccggcgcuuccaggcaucc

SEQ ID NO: 335854 - RNA, 19 nt, Artificial Sequence
  Description of Artificial Sequence: Synthetic oligonucleotide
cagcucgagggaggacaga

SEQ ID NO: 335855 - RNA, 19 nt, Artificial Sequence
  Description of Artificial Sequence: Synthetic oligonucleotide
cugccugcgcauccacgau

SEQ ID NO: 335856 - RNA, 19 nt, Artificial Sequence
  Description of Artificial Sequence: Synthetic oligonucleotide
cgcacaugaguugcucaca

SEQ ID NO: 335857 - RNA, 19 nt, Artificial Sequence
  Description of Artificial Sequence: Synthetic oligonucleotide
ccgcuucgaggagcucgcg

SEQ ID NO: 335858 - RNA, 19 nt, Artificial Sequence
  Description of Artificial Sequence: Synthetic oligonucleotide
cgguaugcagucagcaauu

SEQ ID NO: 335859 - RNA, 19 nt, Artificial Sequence
  Description of Artificial Sequence: Synthetic oligonucleotide
cccauccacauggcgaggu

SEQ ID NO: 335860 - RNA, 19 nt, Artificial Sequence
  Description of Artificial Sequence: Synthetic oligonucleotide
gcggagcgcaucugcgcgu

SEQ ID NO: 335861 - RNA, 19 nt, Artificial Sequence
  Description of Artificial Sequence: Synthetic oligonucleotide
cgggugcacgcugccugcg

SEQ ID NO: 335862 - RNA, 19 nt, Artificial Sequence
  Description of Artificial Sequence: Synthetic oligonucleotide
gcaccggguaugcguuccu

SEQ ID NO: 335863 - RNA, 19 nt, Artificial Sequence
  Description of Artificial Sequence: Synthetic oligonucleotide
cacugcaagcccggcgcuu

SEQ ID NO: 335864 - RNA, 19 nt, Artificial Sequence
  Description of Artificial Sequence: Synthetic oligonucleotide
ggucggaggcauagagcuu

SEQ ID NO: 335865 - RNA, 19 nt, Artificial Sequence
  Description of Artificial Sequence: Synthetic oligonucleotide
ccccaccagugcggaugcg

SEQ ID NO: 335866 - RNA, 19 nt, Artificial Sequence
  Description of Artificial Sequence: Synthetic oligonucleotide
cgugagcauugucgaaggu

SEQ ID NO: 335867 - RNA, 19 nt, Artificial Sequence
  Description of Artificial Sequence: Synthetic oligonucleotide
cggguaugcguuccugaau

SEQ ID NO: 335868 - RNA, 19 nt, Artificial Sequence
  Description of Artificial Sequence: Synthetic oligonucleotide
cccgguccaggagcgcgca

SEQ ID NO: 335869 - RNA, 19 nt, Artificial Sequence
  Description of Artificial Sequence: Synthetic oligonucleotide
cgaugaguacucggaacuu

SEQ ID NO: 335870 - RNA, 19 nt, Artificial Sequence
  Description of Artificial Sequence: Synthetic oligonucleotide
cggacucuuugcagcgggu

SEQ ID NO: 335871 - RNA, 19 nt, Artificial Sequence
  Description of Artificial Sequence: Synthetic oligonucleotide
gcgcugcauggaggugaga

SEQ ID NO: 335872 - RNA, 19 nt, Artificial Sequence
  Description of Artificial Sequence: Synthetic oligonucleotide
ccggaccaguuguggcccu

SEQ ID NO: 335873 - RNA, 19 nt, Artificial Sequence
  Description of Artificial Sequence: Synthetic oligonucleotide
cgccugcgucauggugccc

SEQ ID NO: 335874 - RNA, 19 nt, Artificial Sequence
  Description of Artificial Sequence: Synthetic oligonucleotide
cggcgcuuccaggcaucca

SEQ ID NO: 335875 - RNA, 19 nt, Artificial Sequence
  Description of Artificial Sequence: Synthetic oligonucleotide
aauauuacgguagaaaugc

SEQ ID NO: 335876 - RNA, 19 nt, Artificial Sequence
  Description of Artificial Sequence: Synthetic oligonucleotide
ugaagcaauaucauaaacc

SEQ ID NO: 335877 - RNA, 19 nt, Artificial Sequence
  Description of Artificial Sequence: Synthetic oligonucleotide
aguacaucacaauuaaaac

SEQ ID NO: 335878 - RNA, 19 nt, Artificial Sequence
  Description of Artificial Sequence: Synthetic oligonucleotide
aagaaugggcgucugauuc

SEQ ID NO: 335879 - RNA, 19 nt, Artificial Sequence
  Description of Artificial Sequence: Synthetic oligonucleotide
aaugacgauauucucauga

SEQ ID NO: 335880 - RNA, 19 nt, Artificial Sequence
  Description of Artificial Sequence: Synthetic oligonucleotide
uacaauucguccuuuauag

SEQ ID NO: 335881 - RNA, 19 nt, Artificial Sequence
  Description of Artificial Sequence: Synthetic oligonucleotide
uauuuuagcgagcacuugg

SEQ ID NO: 335882 - RNA, 19 nt, Artificial Sequence
  Description of Artificial Sequence: Synthetic oligonucleotide
aacuacaaaagccaugcug

SEQ ID NO: 335883 - RNA, 19 nt, Artificial Sequence
  Description of Artificial Sequence: Synthetic oligonucleotide
uguucagugaacucgauga

SEQ ID NO: 335884 - RNA, 19 nt, Artificial Sequence
  Description of Artificial Sequence: Synthetic oligonucleotide
uuagcaaugacgauauucu

SEQ ID NO: 335885 - RNA, 19 nt, Artificial Sequence
  Description of Artificial Sequence: Synthetic oligonucleotide
aaugccucaagaaugggcg

SEQ ID NO: 335886 - RNA, 19 nt, Artificial Sequence
  Description of Artificial Sequence: Synthetic oligonucleotide
gacgauauucucaugaucc

SEQ ID NO: 335887 - RNA, 19 nt, Artificial Sequence
  Description of Artificial Sequence: Synthetic oligonucleotide
ucacuugagucuaucaagg

SEQ ID NO: 335888 - RNA, 19 nt, Artificial Sequence
  Description of Artificial Sequence: Synthetic oligonucleotide
aaagcaaccucuucaaagu

SEQ ID NO: 335889 - RNA, 19 nt, Artificial Sequence
  Description of Artificial Sequence: Synthetic oligonucleotide
aauuccaauauuacgguag

SEQ ID NO: 335890 - RNA, 19 nt, Artificial Sequence
  Description of Artificial Sequence: Synthetic oligonucleotide
uccucuaggguaauaagcc

SEQ ID NO: 335891 - RNA, 19 nt, Artificial Sequence
  Description of Artificial Sequence: Synthetic oligonucleotide
uucaguguaggaaagcugu

SEQ ID NO: 335892 - RNA, 19 nt, Artificial Sequence
  Description of Artificial Sequence: Synthetic oligonucleotide
ucuaucaaggucucggcag

SEQ ID NO: 335893 - RNA, 19 nt, Artificial Sequence
  Description of Artificial Sequence: Synthetic oligonucleotide
acaggaaagacauuaccag

SEQ ID NO: 335894 - RNA, 19 nt, Artificial Sequence
  Description of Artificial Sequence: Synthetic oligonucleotide
agaaagauucccuggguuc

SEQ ID NO: 335895 - RNA, 19 nt, Artificial Sequence
  Description of Artificial Sequence: Synthetic oligonucleotide
aauagcagaaugugugucu

SEQ ID NO: 335896 - RNA, 19 nt, Artificial Sequence
  Description of Artificial Sequence: Synthetic oligonucleotide
uuggacgugauuccaaaag

SEQ ID NO: 335897 - RNA, 19 nt, Artificial Sequence
  Description of Artificial Sequence: Synthetic oligonucleotide
gaagcaauaucauaaaccu

SEQ ID NO: 335898 - RNA, 19 nt, Artificial Sequence
  Description of Artificial Sequence: Synthetic oligonucleotide
uucuuaaagccgucuagcg

SEQ ID NO: 335899 - RNA, 19 nt, Artificial Sequence
  Description of Artificial Sequence: Synthetic oligonucleotide
cuuaaagccgucuagcguc

SEQ ID NO: 335900 - RNA, 19 nt, Artificial Sequence
  Description of Artificial Sequence: Synthetic oligonucleotide
auguacguguguuagauga

SEQ ID NO: 335901 - RNA, 19 nt, Artificial Sequence
  Description of Artificial Sequence: Synthetic oligonucleotide
auagaauuccacgaagacg

SEQ ID NO: 335902 - RNA, 19 nt, Artificial Sequence
  Description of Artificial Sequence: Synthetic oligonucleotide
cugguugugcuuaauaaag

SEQ ID NO: 335903 - RNA, 19 nt, Artificial Sequence
  Description of Artificial Sequence: Synthetic oligonucleotide
aaucaaugaccguucuguc

SEQ ID NO: 335904 - RNA, 19 nt, Artificial Sequence
  Description of Artificial Sequence: Synthetic oligonucleotide
uaguacaagguagagagug

SEQ ID NO: 335905 - RNA, 19 nt, Artificial Sequence
  Description of Artificial Sequence: Synthetic oligonucleotide
auuucuuaaagccgucuag

SEQ ID NO: 335906 - RNA, 19 nt, Artificial Sequence
  Description of Artificial Sequence: Synthetic oligonucleotide
agagagugacuauccaacc

SEQ ID NO: 335907 - RNA, 19 nt, Artificial Sequence
  Description of Artificial Sequence: Synthetic oligonucleotide
ucgacauccuugaagaaac

SEQ ID NO: 335908 - RNA, 19 nt, Artificial Sequence
  Description of Artificial Sequence: Synthetic oligonucleotide
aagacauuaccagugugag

SEQ ID NO: 335909 - RNA, 19 nt, Artificial Sequence
  Description of Artificial Sequence: Synthetic oligonucleotide
ugucagacaagguuguggc

SEQ ID NO: 335910 - RNA, 19 nt, Artificial Sequence
  Description of Artificial Sequence: Synthetic oligonucleotide
augggcgucugauucagcc

SEQ ID NO: 335911 - RNA, 19 nt, Artificial Sequence
  Description of Artificial Sequence: Synthetic oligonucleotide
uauuacgguagaaaugccu

SEQ ID NO: 335912 - RNA, 19 nt, Artificial Sequence
  Description of Artificial Sequence: Synthetic oligonucleotide
uuagcgagcacuugggaca

SEQ ID NO: 335913 - RNA, 19 nt, Artificial Sequence
  Description of Artificial Sequence: Synthetic oligonucleotide
aggguaauaagccgcacag

SEQ ID NO: 335914 - RNA, 19 nt, Artificial Sequence
  Description of Artificial Sequence: Synthetic oligonucleotide
caauauuacgguagaaaug

SEQ ID NO: 335915 - RNA, 19 nt, Artificial Sequence
  Description of Artificial Sequence: Synthetic oligonucleotide
aaagacauuaccaguguga

SEQ ID NO: 335916 - RNA, 19 nt, Artificial Sequence
  Description of Artificial Sequence: Synthetic oligonucleotide
ugaucuucucagcuguuag

SEQ ID NO: 335917 - RNA, 19 nt, Artificial Sequence
  Description of Artificial Sequence: Synthetic oligonucleotide
ugacucgacauccuugaag

SEQ ID NO: 335918 - RNA, 19 nt, Artificial Sequence
  Description of Artificial Sequence: Synthetic oligonucleotide
aagaugcaaugucucacag

SEQ ID NO: 335919 - RNA, 19 nt, Artificial Sequence
  Description of Artificial Sequence: Synthetic oligonucleotide
cucacuugagucuaucaag

SEQ ID NO: 335920 - RNA, 19 nt, Artificial Sequence
  Description of Artificial Sequence: Synthetic oligonucleotide
gacgccauacugcugagcc

SEQ ID NO: 335921 - RNA, 19 nt, Artificial Sequence
  Description of Artificial Sequence: Synthetic oligonucleotide
acaauucguccuuuauagc

SEQ ID NO: 335922 - RNA, 19 nt, Artificial Sequence
  Description of Artificial Sequence: Synthetic oligonucleotide
auuacgguagaaaugccuc

SEQ ID NO: 335923 - RNA, 19 nt, Artificial Sequence
  Description of Artificial Sequence: Synthetic oligonucleotide
aguuugggaaucaaggguc

SEQ ID NO: 335924 - RNA, 19 nt, Artificial Sequence
  Description of Artificial Sequence: Synthetic oligonucleotide
aaauguacguguguuagau

SEQ ID NO: 335925 - RNA, 19 nt, Artificial Sequence
  Description of Artificial Sequence: Synthetic oligonucleotide
uuuagcgagcacuugggac

SEQ ID NO: 335926 - RNA, 19 nt, Artificial Sequence
  Description of Artificial Sequence: Synthetic oligonucleotide
uuucuuaaagccgucuagc

SEQ ID NO: 335927 - RNA, 19 nt, Artificial Sequence
  Description of Artificial Sequence: Synthetic oligonucleotide
agagugacuauccaaccca

SEQ ID NO: 335928 - RNA, 19 nt, Artificial Sequence
  Description of Artificial Sequence: Synthetic oligonucleotide
gaugcaaugucucacagau

SEQ ID NO: 335929 - RNA, 19 nt, Artificial Sequence
  Description of Artificial Sequence: Synthetic oligonucleotide
aaaccgaugacagccaccu

SEQ ID NO: 335930 - RNA, 19 nt, Artificial Sequence
  Description of Artificial Sequence: Synthetic oligonucleotide
agaacucaaggauacgcug

SEQ ID NO: 335931 - RNA, 19 nt, Artificial Sequence
  Description of Artificial Sequence: Synthetic oligonucleotide
cucuaggguaauaagccgc

SEQ ID NO: 335932 - RNA, 19 nt, Artificial Sequence
  Description of Artificial Sequence: Synthetic oligonucleotide
agacagcucuuuaagaugg

SEQ ID NO: 335933 - RNA, 19 nt, Artificial Sequence
  Description of Artificial Sequence: Synthetic oligonucleotide
gaacucaaggauacgcugg

SEQ ID NO: 335934 - RNA, 19 nt, Artificial Sequence
  Description of Artificial Sequence: Synthetic oligonucleotide
cauaaaccucucuaacagg

SEQ ID NO: 335935 - RNA, 19 nt, Artificial Sequence
  Description of Artificial Sequence: Synthetic oligonucleotide
aggaauagcagaaugugug

SEQ ID NO: 335936 - RNA, 19 nt, Artificial Sequence
  Description of Artificial Sequence: Synthetic oligonucleotide
aauuccacgaagacguucu

SEQ ID NO: 335937 - RNA, 19 nt, Artificial Sequence
  Description of Artificial Sequence: Synthetic oligonucleotide
gucgaugaagauaaacagg

SEQ ID NO: 335938 - RNA, 19 nt, Artificial Sequence
  Description of Artificial Sequence: Synthetic oligonucleotide
aagccgcacagcuggacac

SEQ ID NO: 335939 - RNA, 19 nt, Artificial Sequence
  Description of Artificial Sequence: Synthetic oligonucleotide
aauauuuuagcgagcacuu

SEQ ID NO: 335940 - RNA, 19 nt, Artificial Sequence
  Description of Artificial Sequence: Synthetic oligonucleotide
ucuaggguaauaagccgca

SEQ ID NO: 335941 - RNA, 19 nt, Artificial Sequence
  Description of Artificial Sequence: Synthetic oligonucleotide
cauagaauuccacgaagac

SEQ ID NO: 335942 - RNA, 19 nt, Artificial Sequence
  Description of Artificial Sequence: Synthetic oligonucleotide
uuuaaauguacguguguua

SEQ ID NO: 335943 - RNA, 19 nt, Artificial Sequence
  Description of Artificial Sequence: Synthetic oligonucleotide
acagguuuaaauguacgug

SEQ ID NO: 335944 - RNA, 19 nt, Artificial Sequence
  Description of Artificial Sequence: Synthetic oligonucleotide
auguguucaauuccaauau

SEQ ID NO: 335945 - RNA, 19 nt, Artificial Sequence
  Description of Artificial Sequence: Synthetic oligonucleotide
gagagugacuauccaaccc

SEQ ID NO: 335946 - RNA, 19 nt, Artificial Sequence
  Description of Artificial Sequence: Synthetic oligonucleotide
uguguuagaugaguguggc

SEQ ID NO: 335947 - RNA, 19 nt, Artificial Sequence
  Description of Artificial Sequence: Synthetic oligonucleotide
aauguacguguguuagaug

SEQ ID NO: 335948 - RNA, 19 nt, Artificial Sequence
  Description of Artificial Sequence: Synthetic oligonucleotide
ggaugcuuaagucccaggg

SEQ ID NO: 335949 - RNA, 19 nt, Artificial Sequence
  Description of Artificial Sequence: Synthetic oligonucleotide
agauccaccacuuccuaca

SEQ ID NO: 335950 - RNA, 19 nt, Artificial Sequence
  Description of Artificial Sequence: Synthetic oligonucleotide
aggguuaacugaaaacuac

SEQ ID NO: 335951 - RNA, 19 nt, Artificial Sequence
  Description of Artificial Sequence: Synthetic oligonucleotide
uauccaacccagauccacc

SEQ ID NO: 335952 - RNA, 19 nt, Artificial Sequence
  Description of Artificial Sequence: Synthetic oligonucleotide
uuauuuagccaauguguuc

SEQ ID NO: 335953 - RNA, 19 nt, Artificial Sequence
  Description of Artificial Sequence: Synthetic oligonucleotide
ugaugcucccuccuuaggu

SEQ ID NO: 335954 - RNA, 19 nt, Artificial Sequence
  Description of Artificial Sequence: Synthetic oligonucleotide
accgaugacagccaccuca

SEQ ID NO: 335955 - RNA, 19 nt, Artificial Sequence
  Description of Artificial Sequence: Synthetic oligonucleotide
ugccaucguagucagacac

SEQ ID NO: 335956 - RNA, 19 nt, Artificial Sequence
  Description of Artificial Sequence: Synthetic oligonucleotide
uuagccaauguguucaauu

SEQ ID NO: 335957 - RNA, 19 nt, Artificial Sequence
  Description of Artificial Sequence: Synthetic oligonucleotide
agaacuugauuguagggua

SEQ ID NO: 335958 - RNA, 19 nt, Artificial Sequence
  Description of Artificial Sequence: Synthetic oligonucleotide
uguauacuccuuaggggac

SEQ ID NO: 335959 - RNA, 19 nt, Artificial Sequence
  Description of Artificial Sequence: Synthetic oligonucleotide
gauacgcugguugucagug

SEQ ID NO: 335960 - RNA, 19 nt, Artificial Sequence
  Description of Artificial Sequence: Synthetic oligonucleotide
uaggguaauaagccgcaca

SEQ ID NO: 335961 - RNA, 19 nt, Artificial Sequence
  Description of Artificial Sequence: Synthetic oligonucleotide
uguacguguguuagaugag

SEQ ID NO: 335962 - RNA, 19 nt, Artificial Sequence
  Description of Artificial Sequence: Synthetic oligonucleotide
uggcaacacuaguacaagg

SEQ ID NO: 335963 - RNA, 19 nt, Artificial Sequence
  Description of Artificial Sequence: Synthetic oligonucleotide
gcuguauacuccuuagggg

SEQ ID NO: 335964 - RNA, 19 nt, Artificial Sequence
  Description of Artificial Sequence: Synthetic oligonucleotide
uuaagucccaggguuaacu

SEQ ID NO: 335965 - RNA, 19 nt, Artificial Sequence
  Description of Artificial Sequence: Synthetic oligonucleotide
auuuuagcgagcacuuggg

SEQ ID NO: 335966 - RNA, 19 nt, Artificial Sequence
  Description of Artificial Sequence: Synthetic oligonucleotide
gaugugagcugcugggagc

SEQ ID NO: 335967 - RNA, 19 nt, Artificial Sequence
  Description of Artificial Sequence: Synthetic oligonucleotide
gaugcucccuccuuaggug

SEQ ID NO: 335968 - RNA, 19 nt, Artificial Sequence
  Description of Artificial Sequence: Synthetic oligonucleotide
agcgucucgaugucaaaag

SEQ ID NO: 335969 - RNA, 19 nt, Artificial Sequence
  Description of Artificial Sequence: Synthetic oligonucleotide
ucucaugauccuuguaugu

SEQ ID NO: 335970 - RNA, 19 nt, Artificial Sequence
  Description of Artificial Sequence: Synthetic oligonucleotide
aucaaugaccguucugucu

SEQ ID NO: 335971 - RNA, 19 nt, Artificial Sequence
  Description of Artificial Sequence: Synthetic oligonucleotide
aagagcaccacgccauccu

SEQ ID NO: 335972 - RNA, 19 nt, Artificial Sequence
  Description of Artificial Sequence: Synthetic oligonucleotide
cacuuugacggcuuccacc

SEQ ID NO: 335973 - RNA, 19 nt, Artificial Sequence
  Description of Artificial Sequence: Synthetic oligonucleotide
uuuuagcgagcacuuggga

SEQ ID NO: 335974 - RNA, 19 nt, Artificial Sequence
  Description of Artificial Sequence: Synthetic oligonucleotide
agguagagagugacuaucc

SEQ ID NO: 335975 - RNA, 19 nt, Artificial Sequence
  Description of Artificial Sequence: Synthetic oligonucleotide
aaaaucuucggggcugucu

SEQ ID NO: 335976 - RNA, 19 nt, Artificial Sequence
  Description of Artificial Sequence: Synthetic oligonucleotide
uuaaagccgucuagcgucc

SEQ ID NO: 335977 - RNA, 19 nt, Artificial Sequence
  Description of Artificial Sequence: Synthetic oligonucleotide
ugguugugcuuaauaaagu

SEQ ID NO: 335978 - RNA, 19 nt, Artificial Sequence
  Description of Artificial Sequence: Synthetic oligonucleotide
auuccaauauuacgguaga

SEQ ID NO: 335979 - RNA, 19 nt, Artificial Sequence
  Description of Artificial Sequence: Synthetic oligonucleotide
uaaauguacguguguuaga

SEQ ID NO: 335980 - RNA, 19 nt, Artificial Sequence
  Description of Artificial Sequence: Synthetic oligonucleotide
ugacgauauucucaugauc

SEQ ID NO: 335981 - RNA, 19 nt, Artificial Sequence
  Description of Artificial Sequence: Synthetic oligonucleotide
uaagucccaggguuaacug

SEQ ID NO: 335982 - RNA, 19 nt, Artificial Sequence
  Description of Artificial Sequence: Synthetic oligonucleotide
ugacuauccaacccagauc

SEQ ID NO: 335983 - RNA, 19 nt, Artificial Sequence
  Description of Artificial Sequence: Synthetic oligonucleotide
cuaguuguuugcaguggcc

SEQ ID NO: 335984 - RNA, 19 nt, Artificial Sequence
  Description of Artificial Sequence: Synthetic oligonucleotide
uuacgguagaaaugccuca

SEQ ID NO: 335985 - RNA, 19 nt, Artificial Sequence
  Description of Artificial Sequence: Synthetic oligonucleotide
ugaccguucugucugcagu

SEQ ID NO: 335986 - RNA, 19 nt, Artificial Sequence
  Description of Artificial Sequence: Synthetic oligonucleotide
cucagcaugucggacgucg

SEQ ID NO: 335987 - RNA, 19 nt, Artificial Sequence
  Description of Artificial Sequence: Synthetic oligonucleotide
ugugcccauagccggcugg

SEQ ID NO: 335988 - RNA, 19 nt, Artificial Sequence
  Description of Artificial Sequence: Synthetic oligonucleotide
cuaucaaggucucggcagc

SEQ ID NO: 335989 - RNA, 19 nt, Artificial Sequence
  Description of Artificial Sequence: Synthetic oligonucleotide
ggugcauagaauuccacga

SEQ ID NO: 335990 - RNA, 19 nt, Artificial Sequence
  Description of Artificial Sequence: Synthetic oligonucleotide
acuacaauucguccuuuau

SEQ ID NO: 335991 - RNA, 19 nt, Artificial Sequence
  Description of Artificial Sequence: Synthetic oligonucleotide
cugccaugaagagugagag

SEQ ID NO: 335992 - RNA, 19 nt, Artificial Sequence
  Description of Artificial Sequence: Synthetic oligonucleotide
guagcucugccaugaagag

SEQ ID NO: 335993 - RNA, 19 nt, Artificial Sequence
  Description of Artificial Sequence: Synthetic oligonucleotide
ucuucgguggcguccaccu

SEQ ID NO: 335994 - RNA, 19 nt, Artificial Sequence
  Description of Artificial Sequence: Synthetic oligonucleotide
uccgcucaccauuauaauc

SEQ ID NO: 335995 - RNA, 19 nt, Artificial Sequence
  Description of Artificial Sequence: Synthetic oligonucleotide
auauuacgguagaaaugcc

SEQ ID NO: 335996 - RNA, 19 nt, Artificial Sequence
  Description of Artificial Sequence: Synthetic oligonucleotide
ucgaugaccaaaggcagcu

SEQ ID NO: 335997 - RNA, 19 nt, Artificial Sequence
  Description of Artificial Sequence: Synthetic oligonucleotide
acggacgccauacugcuga

SEQ ID NO: 335998 - RNA, 19 nt, Artificial Sequence
  Description of Artificial Sequence: Synthetic oligonucleotide
cuguuagcucaucugacuc

SEQ ID NO: 335999 - RNA, 19 nt, Artificial Sequence
  Description of Artificial Sequence: Synthetic oligonucleotide
ccagucuucaggcaguucc

SEQ ID NO: 336000 - RNA, 19 nt, Artificial Sequence
  Description of Artificial Sequence: Synthetic oligonucleotide
ugugcuuaauaaaguccaa

SEQ ID NO: 336001 - RNA, 19 nt, Artificial Sequence
  Description of Artificial Sequence: Synthetic oligonucleotide
caauucguccuuuauagcu

SEQ ID NO: 336002 - RNA, 19 nt, Artificial Sequence
  Description of Artificial Sequence: Synthetic oligonucleotide
gaauagcagaauguguguc

SEQ ID NO: 336003 - RNA, 19 nt, Artificial Sequence
  Description of Artificial Sequence: Synthetic oligonucleotide
agacucuucgguggcgucc

SEQ ID NO: 336004 - RNA, 19 nt, Artificial Sequence
  Description of Artificial Sequence: Synthetic oligonucleotide
uguuggacgugauuccaaa

SEQ ID NO: 336005 - RNA, 19 nt, Artificial Sequence
  Description of Artificial Sequence: Synthetic oligonucleotide
auuaccagugugagacccc

SEQ ID NO: 336006 - RNA, 19 nt, Artificial Sequence
  Description of Artificial Sequence: Synthetic oligonucleotide
gguaauaagccgcacagcu

SEQ ID NO: 336007 - RNA, 19 nt, Artificial Sequence
  Description of Artificial Sequence: Synthetic oligonucleotide
uggucgguagcucugccau

SEQ ID NO: 336008 - RNA, 19 nt, Artificial Sequence
  Description of Artificial Sequence: Synthetic oligonucleotide
ccuuguaugucucuccuag

SEQ ID NO: 336009 - RNA, 19 nt, Artificial Sequence
  Description of Artificial Sequence: Synthetic oligonucleotide
aauucguccuuuauagcuu

SEQ ID NO: 336010 - RNA, 19 nt, Artificial Sequence
  Description of Artificial Sequence: Synthetic oligonucleotide
ugaccucaccuucaaaguu

SEQ ID NO: 336011 - RNA, 19 nt, Artificial Sequence
  Description of Artificial Sequence: Synthetic oligonucleotide
cuguggaacaagcgucucg

SEQ ID NO: 336012 - RNA, 19 nt, Artificial Sequence
  Description of Artificial Sequence: Synthetic oligonucleotide
uuuauagcuuucugaucau

SEQ ID NO: 336013 - RNA, 19 nt, Artificial Sequence
  Description of Artificial Sequence: Synthetic oligonucleotide
ggacgugauuccaaaaggg

SEQ ID NO: 336014 - RNA, 19 nt, Artificial Sequence
  Description of Artificial Sequence: Synthetic oligonucleotide
guagagagugacuauccaa

SEQ ID NO: 336015 - RNA, 19 nt, Artificial Sequence
  Description of Artificial Sequence: Synthetic oligonucleotide
cucgaugaccaaaggcagc

SEQ ID NO: 336016 - RNA, 19 nt, Artificial Sequence
  Description of Artificial Sequence: Synthetic oligonucleotide
gacgugauuccaaaaggga

SEQ ID NO: 336017 - RNA, 19 nt, Artificial Sequence
  Description of Artificial Sequence: Synthetic oligonucleotide
acguguguuagaugagugu

SEQ ID NO: 336018 - RNA, 19 nt, Artificial Sequence
  Description of Artificial Sequence: Synthetic oligonucleotide
ucgaugucaaaagcugucu

SEQ ID NO: 336019 - RNA, 19 nt, Artificial Sequence
  Description of Artificial Sequence: Synthetic oligonucleotide
ggaacaagcgucucgaugu

SEQ ID NO: 336020 - RNA, 19 nt, Artificial Sequence
  Description of Artificial Sequence: Synthetic oligonucleotide
caccucauuagcuguugag

SEQ ID NO: 336021 - RNA, 19 nt, Artificial Sequence
  Description of Artificial Sequence: Synthetic oligonucleotide
aggaugcuuaagucccagg

SEQ ID NO: 336022 - RNA, 19 nt, Artificial Sequence
  Description of Artificial Sequence: Synthetic oligonucleotide
cuauccaacccagauccac

SEQ ID NO: 336023 - RNA, 19 nt, Artificial Sequence
  Description of Artificial Sequence: Synthetic oligonucleotide
cagguuuaaauguacgugu

SEQ ID NO: 336024 - RNA, 19 nt, Artificial Sequence
  Description of Artificial Sequence: Synthetic oligonucleotide
guaauaagccgcacagcug

SEQ ID NO: 336025 - RNA, 19 nt, Artificial Sequence
  Description of Artificial Sequence: Synthetic oligonucleotide
uguugcggccuucaucaaa

SEQ ID NO: 336026 - RNA, 19 nt, Artificial Sequence
  Description of Artificial Sequence: Synthetic oligonucleotide
caccuucaaaguuguugcg

SEQ ID NO: 336027 - RNA, 19 nt, Artificial Sequence
  Description of Artificial Sequence: Synthetic oligonucleotide
acgguagaaaugccucaag

SEQ ID NO: 336028 - RNA, 19 nt, Artificial Sequence
  Description of Artificial Sequence: Synthetic oligonucleotide
auagccggcuggucgguag

SEQ ID NO: 336029 - RNA, 19 nt, Artificial Sequence
  Description of Artificial Sequence: Synthetic oligonucleotide
agaucuggcuuuuccacua

SEQ ID NO: 336030 - RNA, 19 nt, Artificial Sequence
  Description of Artificial Sequence: Synthetic oligonucleotide
agguuuaaauguacgugug

SEQ ID NO: 336031 - RNA, 19 nt, Artificial Sequence
  Description of Artificial Sequence: Synthetic oligonucleotide
gagugacuauccaacccag

SEQ ID NO: 336032 - RNA, 19 nt, Artificial Sequence
  Description of Artificial Sequence: Synthetic oligonucleotide
ugagucuaucaaggucucg

SEQ ID NO: 336033 - RNA, 19 nt, Artificial Sequence
  Description of Artificial Sequence: Synthetic oligonucleotide
agagaucccuuuccaaaau

SEQ ID NO: 336034 - RNA, 19 nt, Artificial Sequence
  Description of Artificial Sequence: Synthetic oligonucleotide
gaaaccgaugacagccacc

SEQ ID NO: 336035 - RNA, 19 nt, Artificial Sequence
  Description of Artificial Sequence: Synthetic oligonucleotide
cucuuuaagaugggcuggc

SEQ ID NO: 336036 - RNA, 19 nt, Artificial Sequence
  Description of Artificial Sequence: Synthetic oligonucleotide
ugcuuaagucccaggguua

SEQ ID NO: 336037 - RNA, 19 nt, Artificial Sequence
  Description of Artificial Sequence: Synthetic oligonucleotide
auauuuuagcgagcacuug

SEQ ID NO: 336038 - RNA, 19 nt, Artificial Sequence
  Description of Artificial Sequence: Synthetic oligonucleotide
auaagccgcacagcuggac

SEQ ID NO: 336039 - RNA, 19 nt, Artificial Sequence
  Description of Artificial Sequence: Synthetic oligonucleotide
ucccaggguuaacugaaaa

SEQ ID NO: 336040 - RNA, 19 nt, Artificial Sequence
  Description of Artificial Sequence: Synthetic oligonucleotide
uacuccuuaggggacucug

SEQ ID NO: 336041 - RNA, 19 nt, Artificial Sequence
  Description of Artificial Sequence: Synthetic oligonucleotide
ugggcgucugauucagccc

SEQ ID NO: 336042 - RNA, 19 nt, Artificial Sequence
  Description of Artificial Sequence: Synthetic oligonucleotide
guuugggaaucaagggucc

SEQ ID NO: 336043 - RNA, 19 nt, Artificial Sequence
  Description of Artificial Sequence: Synthetic oligonucleotide
gaagcgguggcaaaauucu

SEQ ID NO: 336044 - RNA, 19 nt, Artificial Sequence
  Description of Artificial Sequence: Synthetic oligonucleotide
aagcgucucgaugucaaaa

SEQ ID NO: 336045 - RNA, 19 nt, Artificial Sequence
  Description of Artificial Sequence: Synthetic oligonucleotide
ugccguggcaacacuagua

SEQ ID NO: 336046 - RNA, 19 nt, Artificial Sequence
  Description of Artificial Sequence: Synthetic oligonucleotide
aagaaaccgaugacagcca

SEQ ID NO: 336047 - RNA, 19 nt, Artificial Sequence
  Description of Artificial Sequence: Synthetic oligonucleotide
gaauuccacgaagacguuc

SEQ ID NO: 336048 - RNA, 19 nt, Artificial Sequence
  Description of Artificial Sequence: Synthetic oligonucleotide
gugcuuaauaaaguccaac

SEQ ID NO: 336049 - RNA, 19 nt, Artificial Sequence
  Description of Artificial Sequence: Synthetic oligonucleotide
acacuaguacaagguagag

SEQ ID NO: 336050 - RNA, 19 nt, Artificial Sequence
  Description of Artificial Sequence: Synthetic oligonucleotide
agacauuaccagugugaga

SEQ ID NO: 336051 - RNA, 19 nt, Artificial Sequence
  Description of Artificial Sequence: Synthetic oligonucleotide
accucacuugagucuauca

SEQ ID NO: 336052 - RNA, 19 nt, Artificial Sequence
  Description of Artificial Sequence: Synthetic oligonucleotide
aaugggcgucugauucagc

SEQ ID NO: 336053 - RNA, 19 nt, Artificial Sequence
  Description of Artificial Sequence: Synthetic oligonucleotide
ucggacgucggcagcgggc

SEQ ID NO: 336054 - RNA, 19 nt, Artificial Sequence
  Description of Artificial Sequence: Synthetic oligonucleotide
augaccguucugucugcag

SEQ ID NO: 336055 - RNA, 19 nt, Artificial Sequence
  Description of Artificial Sequence: Synthetic oligonucleotide
agucgaaucucagagccuu

SEQ ID NO: 336056 - RNA, 19 nt, Artificial Sequence
  Description of Artificial Sequence: Synthetic oligonucleotide
uacgguagaaaugccucaa

SEQ ID NO: 336057 - RNA, 19 nt, Artificial Sequence
  Description of Artificial Sequence: Synthetic oligonucleotide
auucguccuuuauagcuuu

SEQ ID NO: 336058 - RNA, 19 nt, Artificial Sequence
  Description of Artificial Sequence: Synthetic oligonucleotide
aacaagcgucucgauguca

SEQ ID NO: 336059 - RNA, 19 nt, Artificial Sequence
  Description of Artificial Sequence: Synthetic oligonucleotide
gaggaugcuuaagucccag

SEQ ID NO: 336060 - RNA, 19 nt, Artificial Sequence
  Description of Artificial Sequence: Synthetic oligonucleotide
gucuaucaaggucucggca

SEQ ID NO: 336061 - RNA, 19 nt, Artificial Sequence
  Description of Artificial Sequence: Synthetic oligonucleotide
acgugauuccaaaagggau

SEQ ID NO: 336062 - RNA, 19 nt, Artificial Sequence
  Description of Artificial Sequence: Synthetic oligonucleotide
accacucuccaggaauuuc

SEQ ID NO: 336063 - RNA, 19 nt, Artificial Sequence
  Description of Artificial Sequence: Synthetic oligonucleotide
augucggacgucggcagcg

SEQ ID NO: 336064 - RNA, 19 nt, Artificial Sequence
  Description of Artificial Sequence: Synthetic oligonucleotide
aaccgaugacagccaccuc

SEQ ID NO: 336065 - RNA, 19 nt, Artificial Sequence
  Description of Artificial Sequence: Synthetic oligonucleotide
uuucggggcggccuuccac

SEQ ID NO: 336066 - RNA, 19 nt, Artificial Sequence
  Description of Artificial Sequence: Synthetic oligonucleotide
ccucuaggguaauaagccg

SEQ ID NO: 336067 - RNA, 19 nt, Artificial Sequence
  Description of Artificial Sequence: Synthetic oligonucleotide
aaggcguuucggggcggcc

SEQ ID NO: 336068 - RNA, 19 nt, Artificial Sequence
  Description of Artificial Sequence: Synthetic oligonucleotide
agcgguggcaaaauucugu

SEQ ID NO: 336069 - RNA, 19 nt, Artificial Sequence
  Description of Artificial Sequence: Synthetic oligonucleotide
aaugaccguucugucugca

SEQ ID NO: 336070 - RNA, 19 nt, Artificial Sequence
  Description of Artificial Sequence: Synthetic oligonucleotide
agcugucuaaaagaugcaa

SEQ ID NO: 336071 - RNA, 19 nt, Artificial Sequence
  Description of Artificial Sequence: Synthetic oligonucleotide
aguacaagguagagaguga

SEQ ID NO: 336072 - RNA, 19 nt, Artificial Sequence
  Description of Artificial Sequence: Synthetic oligonucleotide
guagucagacacacucuug

SEQ ID NO: 336073 - RNA, 19 nt, Artificial Sequence
  Description of Artificial Sequence: Synthetic oligonucleotide
acuagcacuuuuacuggcu

SEQ ID NO: 336074 - RNA, 19 nt, Artificial Sequence
  Description of Artificial Sequence: Synthetic oligonucleotide
ucuagcguccgcucaccau

SEQ ID NO: 336075 - RNA, 19 nt, Artificial Sequence
  Description of Artificial Sequence: Synthetic oligonucleotide
ugcccaacuugccaucgua

SEQ ID NO: 336076 - RNA, 19 nt, Artificial Sequence
  Description of Artificial Sequence: Synthetic oligonucleotide
caaugaccguucugucugc

SEQ ID NO: 336077 - RNA, 19 nt, Artificial Sequence
  Description of Artificial Sequence: Synthetic oligonucleotide
guuuaaauguacguguguu

SEQ ID NO: 336078 - RNA, 19 nt, Artificial Sequence
  Description of Artificial Sequence: Synthetic oligonucleotide
caucagguggggcuugauc

SEQ ID NO: 336079 - RNA, 19 nt, Artificial Sequence
  Description of Artificial Sequence: Synthetic oligonucleotide
gaacaagcgucucgauguc

SEQ ID NO: 336080 - RNA, 19 nt, Artificial Sequence
  Description of Artificial Sequence: Synthetic oligonucleotide
agcaaaagagacagguuua

SEQ ID NO: 336081 - RNA, 19 nt, Artificial Sequence
  Description of Artificial Sequence: Synthetic oligonucleotide
cagguaguugugugccgcc

SEQ ID NO: 336082 - RNA, 19 nt, Artificial Sequence
  Description of Artificial Sequence: Synthetic oligonucleotide
auuuagccaauguguucaa

SEQ ID NO: 336083 - RNA, 19 nt, Artificial Sequence
  Description of Artificial Sequence: Synthetic oligonucleotide
gugcauagaauuccacgaa

SEQ ID NO: 336084 - RNA, 19 nt, Artificial Sequence
  Description of Artificial Sequence: Synthetic oligonucleotide
ccgcucaccauuauaauca

SEQ ID NO: 336085 - RNA, 19 nt, Artificial Sequence
  Description of Artificial Sequence: Synthetic oligonucleotide
uccaacccagauccaccac

SEQ ID NO: 336086 - RNA, 19 nt, Artificial Sequence
  Description of Artificial Sequence: Synthetic oligonucleotide
uauacuccuuaggggacuc

SEQ ID NO: 336087 - RNA, 19 nt, Artificial Sequence
  Description of Artificial Sequence: Synthetic oligonucleotide
aaguuguugcggccuucau

SEQ ID NO: 336088 - RNA, 19 nt, Artificial Sequence
  Description of Artificial Sequence: Synthetic oligonucleotide
caggcuccggggaugugag

SEQ ID NO: 336089 - RNA, 19 nt, Artificial Sequence
  Description of Artificial Sequence: Synthetic oligonucleotide
ccagcggccagccacacug

SEQ ID NO: 336090 - RNA, 19 nt, Artificial Sequence
  Description of Artificial Sequence: Synthetic oligonucleotide
ggaagcgguggcaaaauuc

SEQ ID NO: 336091 - RNA, 19 nt, Artificial Sequence
  Description of Artificial Sequence: Synthetic oligonucleotide
uuccaauauuacgguagaa

SEQ ID NO: 336092 - RNA, 19 nt, Artificial Sequence
  Description of Artificial Sequence: Synthetic oligonucleotide
ccuuaggggacucuguguc

SEQ ID NO: 336093 - RNA, 19 nt, Artificial Sequence
  Description of Artificial Sequence: Synthetic oligonucleotide
gguuaacugaaaacuacaa

SEQ ID NO: 336094 - RNA, 19 nt, Artificial Sequence
  Description of Artificial Sequence: Synthetic oligonucleotide
aauaagccgcacagcugga

SEQ ID NO: 336095 - RNA, 19 nt, Artificial Sequence
  Description of Artificial Sequence: Synthetic oligonucleotide
gguagagagugacuaucca

SEQ ID NO: 336096 - RNA, 19 nt, Artificial Sequence
  Description of Artificial Sequence: Synthetic oligonucleotide
cucgacauccuugaagaaa

SEQ ID NO: 336097 - RNA, 19 nt, Artificial Sequence
  Description of Artificial Sequence: Synthetic oligonucleotide
caugucggacgucggcagc

SEQ ID NO: 336098 - RNA, 19 nt, Artificial Sequence
  Description of Artificial Sequence: Synthetic oligonucleotide
caaugacgauauucucaug

SEQ ID NO: 336099 - RNA, 19 nt, Artificial Sequence
  Description of Artificial Sequence: Synthetic oligonucleotide
gggcuaguuguuugcagug

SEQ ID NO: 336100 - RNA, 19 nt, Artificial Sequence
  Description of Artificial Sequence: Synthetic oligonucleotide
cagcaugucggacgucggc

SEQ ID NO: 336101 - RNA, 19 nt, Artificial Sequence
  Description of Artificial Sequence: Synthetic oligonucleotide
cccaggguuaacugaaaac

SEQ ID NO: 336102 - RNA, 19 nt, Artificial Sequence
  Description of Artificial Sequence: Synthetic oligonucleotide
augccucaagaaugggcgu

SEQ ID NO: 336103 - RNA, 19 nt, Artificial Sequence
  Description of Artificial Sequence: Synthetic oligonucleotide
ugccucaagaaugggcguc

SEQ ID NO: 336104 - RNA, 19 nt, Artificial Sequence
  Description of Artificial Sequence: Synthetic oligonucleotide
guguggucgcugucgauga

SEQ ID NO: 336105 - RNA, 19 nt, Artificial Sequence
  Description of Artificial Sequence: Synthetic oligonucleotide
uuuagccaauguguucaau

SEQ ID NO: 336106 - RNA, 19 nt, Artificial Sequence
  Description of Artificial Sequence: Synthetic oligonucleotide
ggcuaguuguuugcagugg

SEQ ID NO: 336107 - RNA, 19 nt, Artificial Sequence
  Description of Artificial Sequence: Synthetic oligonucleotide
gcgguggcaaaauucugug

SEQ ID NO: 336108 - RNA, 19 nt, Artificial Sequence
  Description of Artificial Sequence: Synthetic oligonucleotide
agcggccagccacacuguc

SEQ ID NO: 336109 - RNA, 19 nt, Artificial Sequence
  Description of Artificial Sequence: Synthetic oligonucleotide
gcauagaauuccacgaaga

SEQ ID NO: 336110 - RNA, 19 nt, Artificial Sequence
  Description of Artificial Sequence: Synthetic oligonucleotide
cuuggguccgggugcccag

SEQ ID NO: 336111 - RNA, 19 nt, Artificial Sequence
  Description of Artificial Sequence: Synthetic oligonucleotide
gccguggcaacacuaguac

SEQ ID NO: 336112 - RNA, 19 nt, Artificial Sequence
  Description of Artificial Sequence: Synthetic oligonucleotide
ccaauauuacgguagaaau

SEQ ID NO: 336113 - RNA, 19 nt, Artificial Sequence
  Description of Artificial Sequence: Synthetic oligonucleotide
cacuaguacaagguagaga

SEQ ID NO: 336114 - RNA, 19 nt, Artificial Sequence
  Description of Artificial Sequence: Synthetic oligonucleotide
ugucggacgucggcagcgg

SEQ ID NO: 336115 - RNA, 19 nt, Artificial Sequence
  Description of Artificial Sequence: Synthetic oligonucleotide
gucgguagcucugccauga

SEQ ID NO: 336116 - RNA, 19 nt, Artificial Sequence
  Description of Artificial Sequence: Synthetic oligonucleotide
agauucccuggguucuggu

SEQ ID NO: 336117 - RNA, 19 nt, Artificial Sequence
  Description of Artificial Sequence: Synthetic oligonucleotide
gccaauguguucaauucca

SEQ ID NO: 336118 - RNA, 19 nt, Artificial Sequence
  Description of Artificial Sequence: Synthetic oligonucleotide
cagcucuuuaagaugggcu

SEQ ID NO: 336119 - RNA, 19 nt, Artificial Sequence
  Description of Artificial Sequence: Synthetic oligonucleotide
uccuuaggugaggcucagg

SEQ ID NO: 336120 - RNA, 19 nt, Artificial Sequence
  Description of Artificial Sequence: Synthetic oligonucleotide
cuuaagucccaggguuaac

SEQ ID NO: 336121 - RNA, 19 nt, Artificial Sequence
  Description of Artificial Sequence: Synthetic oligonucleotide
cguguguuagaugagugug

SEQ ID NO: 336122 - RNA, 19 nt, Artificial Sequence
  Description of Artificial Sequence: Synthetic oligonucleotide
cuaggguaauaagccgcac

SEQ ID NO: 336123 - RNA, 19 nt, Artificial Sequence
  Description of Artificial Sequence: Synthetic oligonucleotide
ccaacuugccaucguaguc

SEQ ID NO: 336124 - RNA, 19 nt, Artificial Sequence
  Description of Artificial Sequence: Synthetic oligonucleotide
accucaccuucaaaguugu

SEQ ID NO: 336125 - RNA, 19 nt, Artificial Sequence
  Description of Artificial Sequence: Synthetic oligonucleotide
cccauagccggcuggucgg

SEQ ID NO: 336126 - RNA, 19 nt, Artificial Sequence
  Description of Artificial Sequence: Synthetic oligonucleotide
gugugucuugauuucgccu

SEQ ID NO: 336127 - RNA, 19 nt, Artificial Sequence
  Description of Artificial Sequence: Synthetic oligonucleotide
gccagucgaaucucagagc

SEQ ID NO: 336128 - RNA, 19 nt, Artificial Sequence
  Description of Artificial Sequence: Synthetic oligonucleotide
acgccauacugcugagcca

SEQ ID NO: 336129 - RNA, 19 nt, Artificial Sequence
  Description of Artificial Sequence: Synthetic oligonucleotide
ccaccgaggucuugggucc

SEQ ID NO: 336130 - RNA, 19 nt, Artificial Sequence
  Description of Artificial Sequence: Synthetic oligonucleotide
ggggcgguuggguuggcgc

SEQ ID NO: 336131 - RNA, 19 nt, Artificial Sequence
  Description of Artificial Sequence: Synthetic oligonucleotide
uguggucgcugucgaugaa

SEQ ID NO: 336132 - RNA, 19 nt, Artificial Sequence
  Description of Artificial Sequence: Synthetic oligonucleotide
uagcguccgcucaccauua

SEQ ID NO: 336133 - RNA, 19 nt, Artificial Sequence
  Description of Artificial Sequence: Synthetic oligonucleotide
gucggacgucggcagcggg

SEQ ID NO: 336134 - RNA, 19 nt, Artificial Sequence
  Description of Artificial Sequence: Synthetic oligonucleotide
gaaggcguuucggggcggc

SEQ ID NO: 336135 - RNA, 19 nt, Artificial Sequence
  Description of Artificial Sequence: Synthetic oligonucleotide
acuccuuaggggacucugu

SEQ ID NO: 336136 - RNA, 19 nt, Artificial Sequence
  Description of Artificial Sequence: Synthetic oligonucleotide
uagcgagcacuugggacaa

SEQ ID NO: 336137 - RNA, 19 nt, Artificial Sequence
  Description of Artificial Sequence: Synthetic oligonucleotide
uugcggccuucaucaaacu

SEQ ID NO: 336138 - RNA, 19 nt, Artificial Sequence
  Description of Artificial Sequence: Synthetic oligonucleotide
agguaguugugugccgcca

SEQ ID NO: 336139 - RNA, 19 nt, Artificial Sequence
  Description of Artificial Sequence: Synthetic oligonucleotide
guacguguguuagaugagu

SEQ ID NO: 336140 - RNA, 19 nt, Artificial Sequence
  Description of Artificial Sequence: Synthetic oligonucleotide
cagaaugugugucuugauu

SEQ ID NO: 336141 - RNA, 19 nt, Artificial Sequence
  Description of Artificial Sequence: Synthetic oligonucleotide
caaaguuguugcggccuuc

SEQ ID NO: 336142 - RNA, 19 nt, Artificial Sequence
  Description of Artificial Sequence: Synthetic oligonucleotide
ucggggcggccuuccacug

SEQ ID NO: 336143 - RNA, 19 nt, Artificial Sequence
  Description of Artificial Sequence: Synthetic oligonucleotide
gacucccaguuugggaauc

SEQ ID NO: 336144 - RNA, 19 nt, Artificial Sequence
  Description of Artificial Sequence: Synthetic oligonucleotide
gcaaaagagacagguuuaa

SEQ ID NO: 336145 - RNA, 19 nt, Artificial Sequence
  Description of Artificial Sequence: Synthetic oligonucleotide
cucggcagcugcaguguca

SEQ ID NO: 336146 - RNA, 19 nt, Artificial Sequence
  Description of Artificial Sequence: Synthetic oligonucleotide
uccggggaugugagcugcu

SEQ ID NO: 336147 - RNA, 19 nt, Artificial Sequence
  Description of Artificial Sequence: Synthetic oligonucleotide
ccucucuaacaggaaagac

SEQ ID NO: 336148 - RNA, 19 nt, Artificial Sequence
  Description of Artificial Sequence: Synthetic oligonucleotide
ccucacuugagucuaucaa

SEQ ID NO: 336149 - RNA, 19 nt, Artificial Sequence
  Description of Artificial Sequence: Synthetic oligonucleotide
cuaguacaagguagagagu

SEQ ID NO: 336150 - RNA, 19 nt, Artificial Sequence
  Description of Artificial Sequence: Synthetic oligonucleotide
augugcccauagccggcug

SEQ ID NO: 336151 - RNA, 19 nt, Artificial Sequence
  Description of Artificial Sequence: Synthetic oligonucleotide
gcccaacuugccaucguag

SEQ ID NO: 336152 - RNA, 19 nt, Artificial Sequence
  Description of Artificial Sequence: Synthetic oligonucleotide
cuuugacggcuuccaccuc

SEQ ID NO: 336153 - RNA, 19 nt, Artificial Sequence
  Description of Artificial Sequence: Synthetic oligonucleotide
gggcgguuggguuggcgcc

SEQ ID NO: 336154 - RNA, 19 nt, Artificial Sequence
  Description of Artificial Sequence: Synthetic oligonucleotide
gaccguucugucugcaguu

SEQ ID NO: 336155 - RNA, 19 nt, Artificial Sequence
  Description of Artificial Sequence: Synthetic oligonucleotide
ggggcuaguuguuugcagu

SEQ ID NO: 336156 - RNA, 19 nt, Artificial Sequence
  Description of Artificial Sequence: Synthetic oligonucleotide
ggggcggccuuccacugug

SEQ ID NO: 336157 - RNA, 19 nt, Artificial Sequence
  Description of Artificial Sequence: Synthetic oligonucleotide
cuccuuaggugaggcucag

SEQ ID NO: 336158 - RNA, 19 nt, Artificial Sequence
  Description of Artificial Sequence: Synthetic oligonucleotide
accgaggucuuggguccgg

SEQ ID NO: 336159 - RNA, 19 nt, Artificial Sequence
  Description of Artificial Sequence: Synthetic oligonucleotide
gucuagcguccgcucacca

SEQ ID NO: 336160 - RNA, 19 nt, Artificial Sequence
  Description of Artificial Sequence: Synthetic oligonucleotide
uggcagugucugacucgac

SEQ ID NO: 336161 - RNA, 19 nt, Artificial Sequence
  Description of Artificial Sequence: Synthetic oligonucleotide
aggggacucugugucucca

SEQ ID NO: 336162 - RNA, 19 nt, Artificial Sequence
  Description of Artificial Sequence: Synthetic oligonucleotide
ggcgguuggguuggcgccg

SEQ ID NO: 336163 - RNA, 19 nt, Artificial Sequence
  Description of Artificial Sequence: Synthetic oligonucleotide
auacuccuuaggggacucu

SEQ ID NO: 336164 - RNA, 19 nt, Artificial Sequence
  Description of Artificial Sequence: Synthetic oligonucleotide
cguccgcucaccauuauaa

SEQ ID NO: 336165 - RNA, 19 nt, Artificial Sequence
  Description of Artificial Sequence: Synthetic oligonucleotide
ggucgguagcucugccaug

SEQ ID NO: 336166 - RNA, 19 nt, Artificial Sequence
  Description of Artificial Sequence: Synthetic oligonucleotide
caagaaugggcgucugauu

SEQ ID NO: 336167 - RNA, 19 nt, Artificial Sequence
  Description of Artificial Sequence: Synthetic oligonucleotide
ggcccaccgaggucuuggg

SEQ ID NO: 336168 - RNA, 19 nt, Artificial Sequence
  Description of Artificial Sequence: Synthetic oligonucleotide
acgucggcagcgggcgggg

SEQ ID NO: 336169 - RNA, 19 nt, Artificial Sequence
  Description of Artificial Sequence: Synthetic oligonucleotide
caagcgucucgaugucaaa

SEQ ID NO: 336170 - RNA, 19 nt, Artificial Sequence
  Description of Artificial Sequence: Synthetic oligonucleotide
ucgucgucuccugcaccgu

SEQ ID NO: 336171 - RNA, 19 nt, Artificial Sequence
  Description of Artificial Sequence: Synthetic oligonucleotide
gcuggucgguagcucugcc

SEQ ID NO: 336172 - RNA, 19 nt, Artificial Sequence
  Description of Artificial Sequence: Synthetic oligonucleotide
caccgaggucuuggguccg

SEQ ID NO: 336173 - RNA, 19 nt, Artificial Sequence
  Description of Artificial Sequence: Synthetic oligonucleotide
ugugugccgccagcgccuc

SEQ ID NO: 336174 - RNA, 19 nt, Artificial Sequence
  Description of Artificial Sequence: Synthetic oligonucleotide
caacccagauccaccacuu

SEQ ID NO: 336175 - RNA, 19 nt, Artificial Sequence
  Description of Artificial Sequence: Synthetic oligonucleotide
guuucggggcggccuucca

SEQ ID NO: 336176 - RNA, 19 nt, Artificial Sequence
  Description of Artificial Sequence: Synthetic oligonucleotide
agcguccgcucaccauuau

SEQ ID NO: 336177 - RNA, 19 nt, Artificial Sequence
  Description of Artificial Sequence: Synthetic oligonucleotide
cugacucgacauccuugaa

SEQ ID NO: 336178 - RNA, 19 nt, Artificial Sequence
  Description of Artificial Sequence: Synthetic oligonucleotide
guccgcucaccauuauaau

SEQ ID NO: 336179 - RNA, 19 nt, Artificial Sequence
  Description of Artificial Sequence: Synthetic oligonucleotide
caucguagucagacacacu

SEQ ID NO: 336180 - RNA, 19 nt, Artificial Sequence
  Description of Artificial Sequence: Synthetic oligonucleotide
gccaucguagucagacaca

SEQ ID NO: 336181 - RNA, 19 nt, Artificial Sequence
  Description of Artificial Sequence: Synthetic oligonucleotide
ggcuggucgguagcucugc

SEQ ID NO: 336182 - RNA, 19 nt, Artificial Sequence
  Description of Artificial Sequence: Synthetic oligonucleotide
ggaaggcguuucggggcgg

SEQ ID NO: 336183 - RNA, 19 nt, Artificial Sequence
  Description of Artificial Sequence: Synthetic oligonucleotide
ggacgccauacugcugagc

SEQ ID NO: 336184 - RNA, 19 nt, Artificial Sequence
  Description of Artificial Sequence: Synthetic oligonucleotide
ggcggccuuccacugugga

SEQ ID NO: 336185 - RNA, 19 nt, Artificial Sequence
  Description of Artificial Sequence: Synthetic oligonucleotide
gcgagcacuugggacaaaa

SEQ ID NO: 336186 - RNA, 19 nt, Artificial Sequence
  Description of Artificial Sequence: Synthetic oligonucleotide
cccaacuugccaucguagu

SEQ ID NO: 336187 - RNA, 19 nt, Artificial Sequence
  Description of Artificial Sequence: Synthetic oligonucleotide
ccguggcaacacuaguaca

SEQ ID NO: 336188 - RNA, 19 nt, Artificial Sequence
  Description of Artificial Sequence: Synthetic oligonucleotide
guggaacaagcgucucgau

SEQ ID NO: 336189 - RNA, 19 nt, Artificial Sequence
  Description of Artificial Sequence: Synthetic oligonucleotide
gcgucugauucagccccag

SEQ ID NO: 336190 - RNA, 19 nt, Artificial Sequence
  Description of Artificial Sequence: Synthetic oligonucleotide
gucuuggguccgggugccc

SEQ ID NO: 336191 - RNA, 19 nt, Artificial Sequence
  Description of Artificial Sequence: Synthetic oligonucleotide
ccaccucauuagcuguuga

SEQ ID NO: 336192 - RNA, 19 nt, Artificial Sequence
  Description of Artificial Sequence: Synthetic oligonucleotide
gcugugcacuuugacggcu

SEQ ID NO: 336193 - RNA, 19 nt, Artificial Sequence
  Description of Artificial Sequence: Synthetic oligonucleotide
gcguccgcucaccauuaua

SEQ ID NO: 336194 - RNA, 19 nt, Artificial Sequence
  Description of Artificial Sequence: Synthetic oligonucleotide
caccguccuggccaccacu

SEQ ID NO: 336195 - RNA, 19 nt, Artificial Sequence
  Description of Artificial Sequence: Synthetic oligonucleotide
cguagucagacacacucuu

SEQ ID NO: 336196 - RNA, 19 nt, Artificial Sequence
  Description of Artificial Sequence: Synthetic oligonucleotide
cgucuagcguccgcucacc

SEQ ID NO: 336197 - RNA, 19 nt, Artificial Sequence
  Description of Artificial Sequence: Synthetic oligonucleotide
ggcgucugauucagcccca

SEQ ID NO: 336198 - RNA, 19 nt, Artificial Sequence
  Description of Artificial Sequence: Synthetic oligonucleotide
gcaccguccuggccaccac

SEQ ID NO: 336199 - RNA, 19 nt, Artificial Sequence
  Description of Artificial Sequence: Synthetic oligonucleotide
gggcggccuuccacugugg

SEQ ID NO: 336200 - RNA, 19 nt, Artificial Sequence
  Description of Artificial Sequence: Synthetic oligonucleotide
cgucgucuccugcaccguc

SEQ ID NO: 336201 - RNA, 19 nt, Artificial Sequence
  Description of Artificial Sequence: Synthetic oligonucleotide
gcgguuggguuggcgccgc

SEQ ID NO: 336202 - RNA, 19 nt, Artificial Sequence
  Description of Artificial Sequence: Synthetic oligonucleotide
cauagccggcuggucggua

SEQ ID NO: 336203 - RNA, 19 nt, Artificial Sequence
  Description of Artificial Sequence: Synthetic oligonucleotide
cguuucggggcggccuucc

SEQ ID NO: 336204 - RNA, 19 nt, Artificial Sequence
  Description of Artificial Sequence: Synthetic oligonucleotide
cgcucaccauuauaaucaa

SEQ ID NO: 336205 - RNA, 19 nt, Artificial Sequence
  Description of Artificial Sequence: Synthetic oligonucleotide
cggacgccauacugcugag

SEQ ID NO: 336206 - RNA, 19 nt, Artificial Sequence
  Description of Artificial Sequence: Synthetic oligonucleotide
cggcuggucgguagcucug

SEQ ID NO: 336207 - RNA, 19 nt, Artificial Sequence
  Description of Artificial Sequence: Synthetic oligonucleotide
agcgagcacuugggacaaa

SEQ ID NO: 336208 - RNA, 19 nt, Artificial Sequence
  Description of Artificial Sequence: Synthetic oligonucleotide
ccggcuggucgguagcucu

SEQ ID NO: 336209 - RNA, 19 nt, Artificial Sequence
  Description of Artificial Sequence: Synthetic oligonucleotide
gcucaccauuauaaucaau

SEQ ID NO: 336210 - RNA, 19 nt, Artificial Sequence
  Description of Artificial Sequence: Synthetic oligonucleotide
cagcggccagccacacugu

SEQ ID NO: 336211 - RNA, 19 nt, Artificial Sequence
  Description of Artificial Sequence: Synthetic oligonucleotide
caccacucuccaggaauuu

SEQ ID NO: 336212 - RNA, 19 nt, Artificial Sequence
  Description of Artificial Sequence: Synthetic oligonucleotide
gccggcuggucgguagcuc

SEQ ID NO: 336213 - RNA, 19 nt, Artificial Sequence
  Description of Artificial Sequence: Synthetic oligonucleotide
gcggccagccacacugucu

SEQ ID NO: 336214 - RNA, 19 nt, Artificial Sequence
  Description of Artificial Sequence: Synthetic oligonucleotide
gguugucaguguggucgcu

SEQ ID NO: 336215 - RNA, 19 nt, Artificial Sequence
  Description of Artificial Sequence: Synthetic oligonucleotide
gcccaccgaggucuugggu

SEQ ID NO: 336216 - RNA, 19 nt, Artificial Sequence
  Description of Artificial Sequence: Synthetic oligonucleotide
cauggcccaccgaggucuu

SEQ ID NO: 336217 - RNA, 19 nt, Artificial Sequence
  Description of Artificial Sequence: Synthetic oligonucleotide
cagcaggaccuguccgcuu

SEQ ID NO: 336218 - RNA, 19 nt, Artificial Sequence
  Description of Artificial Sequence: Synthetic oligonucleotide
cgagcacuugggacaaaau

SEQ ID NO: 336219 - RNA, 19 nt, Artificial Sequence
  Description of Artificial Sequence: Synthetic oligonucleotide
gccuggagagagaucccuu

SEQ ID NO: 336220 - RNA, 19 nt, Artificial Sequence
  Description of Artificial Sequence: Synthetic oligonucleotide
cggggcgguuggguuggcg

SEQ ID NO: 336221 - RNA, 19 nt, Artificial Sequence
  Description of Artificial Sequence: Synthetic oligonucleotide
cgguuggguuggcgccgcc

SEQ ID NO: 336222 - RNA, 19 nt, Artificial Sequence
  Description of Artificial Sequence: Synthetic oligonucleotide
ccguccuggccaccacucu

SEQ ID NO: 336223 - RNA, 19 nt, Artificial Sequence
  Description of Artificial Sequence: Synthetic oligonucleotide
cgguggcguccaccuuggc

SEQ ID NO: 336224 - RNA, 19 nt, Artificial Sequence
  Description of Artificial Sequence: Synthetic oligonucleotide
ccauagccggcuggucggu

SEQ ID NO: 336225 - RNA, 19 nt, Artificial Sequence
  Description of Artificial Sequence: Synthetic oligonucleotide
ccucaccuucaaaguuguu

SEQ ID NO: 336226 - RNA, 19 nt, Artificial Sequence
  Description of Artificial Sequence: Synthetic oligonucleotide
aaguauauucgauacaggc

SEQ ID NO: 336227 - RNA, 19 nt, Artificial Sequence
  Description of Artificial Sequence: Synthetic oligonucleotide
uuaauuaucguuuaggucu

SEQ ID NO: 336228 - RNA, 19 nt, Artificial Sequence
  Description of Artificial Sequence: Synthetic oligonucleotide
aaugcguccacauagaugu

SEQ ID NO: 336229 - RNA, 19 nt, Artificial Sequence
  Description of Artificial Sequence: Synthetic oligonucleotide
uuuggaaagagcuacgucc

SEQ ID NO: 336230 - RNA, 19 nt, Artificial Sequence
  Description of Artificial Sequence: Synthetic oligonucleotide
acgacaauaagauaauuuc

SEQ ID NO: 336231 - RNA, 19 nt, Artificial Sequence
  Description of Artificial Sequence: Synthetic oligonucleotide
aauuacgacaauaagauaa

SEQ ID NO: 336232 - RNA, 19 nt, Artificial Sequence
  Description of Artificial Sequence: Synthetic oligonucleotide
auugcaucaaggcacgacc

SEQ ID NO: 336233 - RNA, 19 nt, Artificial Sequence
  Description of Artificial Sequence: Synthetic oligonucleotide
ucauuuaugaucaccguug

SEQ ID NO: 336234 - RNA, 19 nt, Artificial Sequence
  Description of Artificial Sequence: Synthetic oligonucleotide
acccauauaauguaucccc

SEQ ID NO: 336235 - RNA, 19 nt, Artificial Sequence
  Description of Artificial Sequence: Synthetic oligonucleotide
uaaucguauacaauguucc

SEQ ID NO: 336236 - RNA, 19 nt, Artificial Sequence
  Description of Artificial Sequence: Synthetic oligonucleotide
ucuuguauucgguuuagcg

SEQ ID NO: 336237 - RNA, 19 nt, Artificial Sequence
  Description of Artificial Sequence: Synthetic oligonucleotide
aaucaacccuggcagaagc

SEQ ID NO: 336238 - RNA, 19 nt, Artificial Sequence
  Description of Artificial Sequence: Synthetic oligonucleotide
guuacaacaaaugagagca

SEQ ID NO: 336239 - RNA, 19 nt, Artificial Sequence
  Description of Artificial Sequence: Synthetic oligonucleotide
aaggcgaucggcuugagga

SEQ ID NO: 336240 - RNA, 19 nt, Artificial Sequence
  Description of Artificial Sequence: Synthetic oligonucleotide
auaauguauccccagaugu

SEQ ID NO: 336241 - RNA, 19 nt, Artificial Sequence
  Description of Artificial Sequence: Synthetic oligonucleotide
uauacguuuccacaaauuc

SEQ ID NO: 336242 - RNA, 19 nt, Artificial Sequence
  Description of Artificial Sequence: Synthetic oligonucleotide
uucgauaaggccaugcucu

SEQ ID NO: 336243 - RNA, 19 nt, Artificial Sequence
  Description of Artificial Sequence: Synthetic oligonucleotide
auacaaguaauagucaaac

SEQ ID NO: 336244 - RNA, 19 nt, Artificial Sequence
  Description of Artificial Sequence: Synthetic oligonucleotide
acaauaagauaauuucagg

SEQ ID NO: 336245 - RNA, 19 nt, Artificial Sequence
  Description of Artificial Sequence: Synthetic oligonucleotide
uguuaauuaucguuuaggu

SEQ ID NO: 336246 - RNA, 19 nt, Artificial Sequence
  Description of Artificial Sequence: Synthetic oligonucleotide
acaaaugagagcaaaaucu

SEQ ID NO: 336247 - RNA, 19 nt, Artificial Sequence
  Description of Artificial Sequence: Synthetic oligonucleotide
uggcuaaucguauacaaug

SEQ ID NO: 336248 - RNA, 19 nt, Artificial Sequence
  Description of Artificial Sequence: Synthetic oligonucleotide
auaauuacgacaauaagau

SEQ ID NO: 336249 - RNA, 19 nt, Artificial Sequence
  Description of Artificial Sequence: Synthetic oligonucleotide
aauggauuuccaccacuac

SEQ ID NO: 336250 - RNA, 19 nt, Artificial Sequence
  Description of Artificial Sequence: Synthetic oligonucleotide
uguucccaaaguauauucg

SEQ ID NO: 336251 - RNA, 19 nt, Artificial Sequence
  Description of Artificial Sequence: Synthetic oligonucleotide
uauugcauacaaguaauag

SEQ ID NO: 336252 - RNA, 19 nt, Artificial Sequence
  Description of Artificial Sequence: Synthetic oligonucleotide
uauaauguauccccagaug

SEQ ID NO: 336253 - RNA, 19 nt, Artificial Sequence
  Description of Artificial Sequence: Synthetic oligonucleotide
aagguuacaacaaaugaga

SEQ ID NO: 336254 - RNA, 19 nt, Artificial Sequence
  Description of Artificial Sequence: Synthetic oligonucleotide
uggauaacgucaaaggcga

SEQ ID NO: 336255 - RNA, 19 nt, Artificial Sequence
  Description of Artificial Sequence: Synthetic oligonucleotide
uauuuagacuguaaucuga

SEQ ID NO: 336256 - RNA, 19 nt, Artificial Sequence
  Description of Artificial Sequence: Synthetic oligonucleotide
auugauaugcgaucccagg

SEQ ID NO: 336257 - RNA, 19 nt, Artificial Sequence
  Description of Artificial Sequence: Synthetic oligonucleotide
ucgugaaacgcucuucacg

SEQ ID NO: 336258 - RNA, 19 nt, Artificial Sequence
  Description of Artificial Sequence: Synthetic oligonucleotide
auugcauacaaguaauagu

SEQ ID NO: 336259 - RNA, 19 nt, Artificial Sequence
  Description of Artificial Sequence: Synthetic oligonucleotide
aacccauauaauguauccc

SEQ ID NO: 336260 - RNA, 19 nt, Artificial Sequence
  Description of Artificial Sequence: Synthetic oligonucleotide
uguuuguuaagaugggcgc

SEQ ID NO: 336261 - RNA, 19 nt, Artificial Sequence
  Description of Artificial Sequence: Synthetic oligonucleotide
aacgucaaaggcgaucggc

SEQ ID NO: 336262 - RNA, 19 nt, Artificial Sequence
  Description of Artificial Sequence: Synthetic oligonucleotide
uguaaccaaaucaacccug

SEQ ID NO: 336263 - RNA, 19 nt, Artificial Sequence
  Description of Artificial Sequence: Synthetic oligonucleotide
agagcuguguuaauuaucg

SEQ ID NO: 336264 - RNA, 19 nt, Artificial Sequence
  Description of Artificial Sequence: Synthetic oligonucleotide
ucucaugcaauguucauaa

SEQ ID NO: 336265 - RNA, 19 nt, Artificial Sequence
  Description of Artificial Sequence: Synthetic oligonucleotide
cacgacuugaaacacagug

SEQ ID NO: 336266 - RNA, 19 nt, Artificial Sequence
  Description of Artificial Sequence: Synthetic oligonucleotide
uguguuaauuaucguuuag

SEQ ID NO: 336267 - RNA, 19 nt, Artificial Sequence
  Description of Artificial Sequence: Synthetic oligonucleotide
cuaaucguauacaauguuc

SEQ ID NO: 336268 - RNA, 19 nt, Artificial Sequence
  Description of Artificial Sequence: Synthetic oligonucleotide
uguaaucugauuucuuccu

SEQ ID NO: 336269 - RNA, 19 nt, Artificial Sequence
  Description of Artificial Sequence: Synthetic oligonucleotide
uucgguuuagcguuguucu

SEQ ID NO: 336270 - RNA, 19 nt, Artificial Sequence
  Description of Artificial Sequence: Synthetic oligonucleotide
aauguauccccagauguca

SEQ ID NO: 336271 - RNA, 19 nt, Artificial Sequence
  Description of Artificial Sequence: Synthetic oligonucleotide
uauugauaugcgaucccag

SEQ ID NO: 336272 - RNA, 19 nt, Artificial Sequence
  Description of Artificial Sequence: Synthetic oligonucleotide
uauccgaacucucuuagaa

SEQ ID NO: 336273 - RNA, 19 nt, Artificial Sequence
  Description of Artificial Sequence: Synthetic oligonucleotide
ugggucuaaugucaguuag

SEQ ID NO: 336274 - RNA, 19 nt, Artificial Sequence
  Description of Artificial Sequence: Synthetic oligonucleotide
uugauauacguuuccacaa

SEQ ID NO: 336275 - RNA, 19 nt, Artificial Sequence
  Description of Artificial Sequence: Synthetic oligonucleotide
agaagauuagugcccgagg

SEQ ID NO: 336276 - RNA, 19 nt, Artificial Sequence
  Description of Artificial Sequence: Synthetic oligonucleotide
guguuaauuaucguuuagg

SEQ ID NO: 336277 - RNA, 19 nt, Artificial Sequence
  Description of Artificial Sequence: Synthetic oligonucleotide
guuaauuaucguuuagguc

SEQ ID NO: 336278 - RNA, 19 nt, Artificial Sequence
  Description of Artificial Sequence: Synthetic oligonucleotide
uucgguacucaucacauua

SEQ ID NO: 336279 - RNA, 19 nt, Artificial Sequence
  Description of Artificial Sequence: Synthetic oligonucleotide
uaaguguagccacauaaua

SEQ ID NO: 336280 - RNA, 19 nt, Artificial Sequence
  Description of Artificial Sequence: Synthetic oligonucleotide
uaauuaucguuuaggucug

SEQ ID NO: 336281 - RNA, 19 nt, Artificial Sequence
  Description of Artificial Sequence: Synthetic oligonucleotide
uuggaaagagcuacgucca

SEQ ID NO: 336282 - RNA, 19 nt, Artificial Sequence
  Description of Artificial Sequence: Synthetic oligonucleotide
auauucgauaaggccaugc

SEQ ID NO: 336283 - RNA, 19 nt, Artificial Sequence
  Description of Artificial Sequence: Synthetic oligonucleotide
ucuugacauuagcauaucc

SEQ ID NO: 336284 - RNA, 19 nt, Artificial Sequence
  Description of Artificial Sequence: Synthetic oligonucleotide
agagacugggcauauaaaa

SEQ ID NO: 336285 - RNA, 19 nt, Artificial Sequence
  Description of Artificial Sequence: Synthetic oligonucleotide
gagaguaaaacugcugcag

SEQ ID NO: 336286 - RNA, 19 nt, Artificial Sequence
  Description of Artificial Sequence: Synthetic oligonucleotide
uucaucauuuaugaucacc

SEQ ID NO: 336287 - RNA, 19 nt, Artificial Sequence
  Description of Artificial Sequence: Synthetic oligonucleotide
uauucgauaaggccaugcu

SEQ ID NO: 336288 - RNA, 19 nt, Artificial Sequence
  Description of Artificial Sequence: Synthetic oligonucleotide
gaagauuagugcccgagga

SEQ ID NO: 336289 - RNA, 19 nt, Artificial Sequence
  Description of Artificial Sequence: Synthetic oligonucleotide
uaucguuuaggucugucua

SEQ ID NO: 336290 - RNA, 19 nt, Artificial Sequence
  Description of Artificial Sequence: Synthetic oligonucleotide
auauaauguauccccagau

SEQ ID NO: 336291 - RNA, 19 nt, Artificial Sequence
  Description of Artificial Sequence: Synthetic oligonucleotide
guguauauugcauacaagu

SEQ ID NO: 336292 - RNA, 19 nt, Artificial Sequence
  Description of Artificial Sequence: Synthetic oligonucleotide
aaucacuaguugauugagg

SEQ ID NO: 336293 - RNA, 19 nt, Artificial Sequence
  Description of Artificial Sequence: Synthetic oligonucleotide
uuauugauaugcgauccca

SEQ ID NO: 336294 - RNA, 19 nt, Artificial Sequence
  Description of Artificial Sequence: Synthetic oligonucleotide
ucacuguuccgucugacuc

SEQ ID NO: 336295 - RNA, 19 nt, Artificial Sequence
  Description of Artificial Sequence: Synthetic oligonucleotide
ucguauacaauguucccaa

SEQ ID NO: 336296 - RNA, 19 nt, Artificial Sequence
  Description of Artificial Sequence: Synthetic oligonucleotide
ugcuucguugaauauuccc

SEQ ID NO: 336297 - RNA, 19 nt, Artificial Sequence
  Description of Artificial Sequence: Synthetic oligonucleotide
uacaaguaauagucaaaca

SEQ ID NO: 336298 - RNA, 19 nt, Artificial Sequence
  Description of Artificial Sequence: Synthetic oligonucleotide
uguguugugacaugaucuc

SEQ ID NO: 336299 - RNA, 19 nt, Artificial Sequence
  Description of Artificial Sequence: Synthetic oligonucleotide
cuauuuuacugacacgguc

SEQ ID NO: 336300 - RNA, 19 nt, Artificial Sequence
  Description of Artificial Sequence: Synthetic oligonucleotide
gacucguacccauuagaag

SEQ ID NO: 336301 - RNA, 19 nt, Artificial Sequence
  Description of Artificial Sequence: Synthetic oligonucleotide
aauagcuuuaccagccaca

SEQ ID NO: 336302 - RNA, 19 nt, Artificial Sequence
  Description of Artificial Sequence: Synthetic oligonucleotide
aaaggcgaucggcuugagg

SEQ ID NO: 336303 - RNA, 19 nt, Artificial Sequence
  Description of Artificial Sequence: Synthetic oligonucleotide
ugcucuuaagggucucucg

SEQ ID NO: 336304 - RNA, 19 nt, Artificial Sequence
  Description of Artificial Sequence: Synthetic oligonucleotide
uaauguauccccagauguc

SEQ ID NO: 336305 - RNA, 19 nt, Artificial Sequence
  Description of Artificial Sequence: Synthetic oligonucleotide
cuuauugauaugcgauccc

SEQ ID NO: 336306 - RNA, 19 nt, Artificial Sequence
  Description of Artificial Sequence: Synthetic oligonucleotide
agguguauauugcauacaa

SEQ ID NO: 336307 - RNA, 19 nt, Artificial Sequence
  Description of Artificial Sequence: Synthetic oligonucleotide
aaacgcucuucacgggcac

SEQ ID NO: 336308 - RNA, 19 nt, Artificial Sequence
  Description of Artificial Sequence: Synthetic oligonucleotide
uguagccacgaucaaaauu

SEQ ID NO: 336309 - RNA, 19 nt, Artificial Sequence
  Description of Artificial Sequence: Synthetic oligonucleotide
uacaugcguacagagaucu

SEQ ID NO: 336310 - RNA, 19 nt, Artificial Sequence
  Description of Artificial Sequence: Synthetic oligonucleotide
aaguguagccacauaauaa

SEQ ID NO: 336311 - RNA, 19 nt, Artificial Sequence
  Description of Artificial Sequence: Synthetic oligonucleotide
gguuacaacaaaugagagc

SEQ ID NO: 336312 - RNA, 19 nt, Artificial Sequence
  Description of Artificial Sequence: Synthetic oligonucleotide
guaaccaaaucaacccugg

SEQ ID NO: 336313 - RNA, 19 nt, Artificial Sequence
  Description of Artificial Sequence: Synthetic oligonucleotide
auauggaguugauccauug

SEQ ID NO: 336314 - RNA, 19 nt, Artificial Sequence
  Description of Artificial Sequence: Synthetic oligonucleotide
aucauuuaugaucaccguu

SEQ ID NO: 336315 - RNA, 19 nt, Artificial Sequence
  Description of Artificial Sequence: Synthetic oligonucleotide
acugacacggucuuuuaaa

SEQ ID NO: 336316 - RNA, 19 nt, Artificial Sequence
  Description of Artificial Sequence: Synthetic oligonucleotide
agcuguguuaauuaucguu

SEQ ID NO: 336317 - RNA, 19 nt, Artificial Sequence
  Description of Artificial Sequence: Synthetic oligonucleotide
ugauccauugcagucugug

SEQ ID NO: 336318 - RNA, 19 nt, Artificial Sequence
  Description of Artificial Sequence: Synthetic oligonucleotide
uguugugacaugaucucuu

SEQ ID NO: 336319 - RNA, 19 nt, Artificial Sequence
  Description of Artificial Sequence: Synthetic oligonucleotide
uagcguuguucuuagucug

SEQ ID NO: 336320 - RNA, 19 nt, Artificial Sequence
  Description of Artificial Sequence: Synthetic oligonucleotide
aaaucaacccuggcagaag

SEQ ID NO: 336321 - RNA, 19 nt, Artificial Sequence
  Description of Artificial Sequence: Synthetic oligonucleotide
agugcauauggaguugauc

SEQ ID NO: 336322 - RNA, 19 nt, Artificial Sequence
  Description of Artificial Sequence: Synthetic oligonucleotide
guucccaaaguauauucga

SEQ ID NO: 336323 - RNA, 19 nt, Artificial Sequence
  Description of Artificial Sequence: Synthetic oligonucleotide
uguauucgguuuagcguug

SEQ ID NO: 336324 - RNA, 19 nt, Artificial Sequence
  Description of Artificial Sequence: Synthetic oligonucleotide
uucaugucuuauaggugga

SEQ ID NO: 336325 - RNA, 19 nt, Artificial Sequence
  Description of Artificial Sequence: Synthetic oligonucleotide
agcacgacuugaaacacag

SEQ ID NO: 336326 - RNA, 19 nt, Artificial Sequence
  Description of Artificial Sequence: Synthetic oligonucleotide
ugcgaucccaggcaaacau

SEQ ID NO: 336327 - RNA, 19 nt, Artificial Sequence
  Description of Artificial Sequence: Synthetic oligonucleotide
uuuaucaggaaugggucua

SEQ ID NO: 336328 - RNA, 19 nt, Artificial Sequence
  Description of Artificial Sequence: Synthetic oligonucleotide
uuggcuaaucguauacaau

SEQ ID NO: 336329 - RNA, 19 nt, Artificial Sequence
  Description of Artificial Sequence: Synthetic oligonucleotide
aucguauacaauguuccca

SEQ ID NO: 336330 - RNA, 19 nt, Artificial Sequence
  Description of Artificial Sequence: Synthetic oligonucleotide
uucccaaaguauauucgau

SEQ ID NO: 336331 - RNA, 19 nt, Artificial Sequence
  Description of Artificial Sequence: Synthetic oligonucleotide
ucccaaaguauauucgaua

SEQ ID NO: 336332 - RNA, 19 nt, Artificial Sequence
  Description of Artificial Sequence: Synthetic oligonucleotide
uucguugaauauucccugu

SEQ ID NO: 336333 - RNA, 19 nt, Artificial Sequence
  Description of Artificial Sequence: Synthetic oligonucleotide
ugucuuauagguggagaga

SEQ ID NO: 336334 - RNA, 19 nt, Artificial Sequence
  Description of Artificial Sequence: Synthetic oligonucleotide
aguugauccauugcagucu

SEQ ID NO: 336335 - RNA, 19 nt, Artificial Sequence
  Description of Artificial Sequence: Synthetic oligonucleotide
cagaguugccuuagcagag

SEQ ID NO: 336336 - RNA, 19 nt, Artificial Sequence
  Description of Artificial Sequence: Synthetic oligonucleotide
ucugccgcugugagugugg

SEQ ID NO: 336337 - RNA, 19 nt, Artificial Sequence
  Description of Artificial Sequence: Synthetic oligonucleotide
uaugcgaucccaggcaaac

SEQ ID NO: 336338 - RNA, 19 nt, Artificial Sequence
  Description of Artificial Sequence: Synthetic oligonucleotide
auuaucguuuaggucuguc

SEQ ID NO: 336339 - RNA, 19 nt, Artificial Sequence
  Description of Artificial Sequence: Synthetic oligonucleotide
cuuguauucgguuuagcgu

SEQ ID NO: 336340 - RNA, 19 nt, Artificial Sequence
  Description of Artificial Sequence: Synthetic oligonucleotide
cacgaucaaaauugguuuc

SEQ ID NO: 336341 - RNA, 19 nt, Artificial Sequence
  Description of Artificial Sequence: Synthetic oligonucleotide
uguaauagcugagcaugac

SEQ ID NO: 336342 - RNA, 19 nt, Artificial Sequence
  Description of Artificial Sequence: Synthetic oligonucleotide
gguauccgaacucucuuag

SEQ ID NO: 336343 - RNA, 19 nt, Artificial Sequence
  Description of Artificial Sequence: Synthetic oligonucleotide
uucacccucuuauauuuau

SEQ ID NO: 336344 - RNA, 19 nt, Artificial Sequence
  Description of Artificial Sequence: Synthetic oligonucleotide
aaauggauuuccaccacua

SEQ ID NO: 336345 - RNA, 19 nt, Artificial Sequence
  Description of Artificial Sequence: Synthetic oligonucleotide
uggguuuucguaguucacu

SEQ ID NO: 336346 - RNA, 19 nt, Artificial Sequence
  Description of Artificial Sequence: Synthetic oligonucleotide
cuguuggcuaaucguauac

SEQ ID NO: 336347 - RNA, 19 nt, Artificial Sequence
  Description of Artificial Sequence: Synthetic oligonucleotide
uaauuacgacaauaagaua

SEQ ID NO: 336348 - RNA, 19 nt, Artificial Sequence
  Description of Artificial Sequence: Synthetic oligonucleotide
agauuagugcccgaggaaa

SEQ ID NO: 336349 - RNA, 19 nt, Artificial Sequence
  Description of Artificial Sequence: Synthetic oligonucleotide
uguuggcuaaucguauaca

SEQ ID NO: 336350 - RNA, 19 nt, Artificial Sequence
  Description of Artificial Sequence: Synthetic oligonucleotide
gucaaaggcgaucggcuug

SEQ ID NO: 336351 - RNA, 19 nt, Artificial Sequence
  Description of Artificial Sequence: Synthetic oligonucleotide
caauagcuuuaccagccac

SEQ ID NO: 336352 - RNA, 19 nt, Artificial Sequence
  Description of Artificial Sequence: Synthetic oligonucleotide
accguuguaaccaaaucaa

SEQ ID NO: 336353 - RNA, 19 nt, Artificial Sequence
  Description of Artificial Sequence: Synthetic oligonucleotide
ucguuuaggucugucuaug

SEQ ID NO: 336354 - RNA, 19 nt, Artificial Sequence
  Description of Artificial Sequence: Synthetic oligonucleotide
uccacguaaucccguuuca

SEQ ID NO: 336355 - RNA, 19 nt, Artificial Sequence
  Description of Artificial Sequence: Synthetic oligonucleotide
uuacaugcguacagagauc

SEQ ID NO: 336356 - RNA, 19 nt, Artificial Sequence
  Description of Artificial Sequence: Synthetic oligonucleotide
uagcauauccuuccacaau

SEQ ID NO: 336357 - RNA, 19 nt, Artificial Sequence
  Description of Artificial Sequence: Synthetic oligonucleotide
auuacgacaauaagauaau

SEQ ID NO: 336358 - RNA, 19 nt, Artificial Sequence
  Description of Artificial Sequence: Synthetic oligonucleotide
gguuuucguaguucacugg

SEQ ID NO: 336359 - RNA, 19 nt, Artificial Sequence
  Description of Artificial Sequence: Synthetic oligonucleotide
ucaaaggcgaucggcuuga

SEQ ID NO: 336360 - RNA, 19 nt, Artificial Sequence
  Description of Artificial Sequence: Synthetic oligonucleotide
auuuagacuguaaucugau

SEQ ID NO: 336361 - RNA, 19 nt, Artificial Sequence
  Description of Artificial Sequence: Synthetic oligonucleotide
aucguuuaggucugucuau

SEQ ID NO: 336362 - RNA, 19 nt, Artificial Sequence
  Description of Artificial Sequence: Synthetic oligonucleotide
uguuccgucugacucugua

SEQ ID NO: 336363 - RNA, 19 nt, Artificial Sequence
  Description of Artificial Sequence: Synthetic oligonucleotide
uuuagacuguaaucugauu

SEQ ID NO: 336364 - RNA, 19 nt, Artificial Sequence
  Description of Artificial Sequence: Synthetic oligonucleotide
uucucaugcaauguucaua

SEQ ID NO: 336365 - RNA, 19 nt, Artificial Sequence
  Description of Artificial Sequence: Synthetic oligonucleotide
gcugcuaggagcuuuuguc

SEQ ID NO: 336366 - RNA, 19 nt, Artificial Sequence
  Description of Artificial Sequence: Synthetic oligonucleotide
ucuguuggcuaaucguaua

SEQ ID NO: 336367 - RNA, 19 nt, Artificial Sequence
  Description of Artificial Sequence: Synthetic oligonucleotide
acgaucaaaauugguuucu

SEQ ID NO: 336368 - RNA, 19 nt, Artificial Sequence
  Description of Artificial Sequence: Synthetic oligonucleotide
caaagguauccgaacucuc

SEQ ID NO: 336369 - RNA, 19 nt, Artificial Sequence
  Description of Artificial Sequence: Synthetic oligonucleotide
gucuuauagguggagagaa

SEQ ID NO: 336370 - RNA, 19 nt, Artificial Sequence
  Description of Artificial Sequence: Synthetic oligonucleotide
ggguuuucguaguucacug

SEQ ID NO: 336371 - RNA, 19 nt, Artificial Sequence
  Description of Artificial Sequence: Synthetic oligonucleotide
guucuuagucugcuacuac

SEQ ID NO: 336372 - RNA, 19 nt, Artificial Sequence
  Description of Artificial Sequence: Synthetic oligonucleotide
ugccaacccauauaaugua

SEQ ID NO: 336373 - RNA, 19 nt, Artificial Sequence
  Description of Artificial Sequence: Synthetic oligonucleotide
gaaggaacucaaacuguuc

SEQ ID NO: 336374 - RNA, 19 nt, Artificial Sequence
  Description of Artificial Sequence: Synthetic oligonucleotide
uguauccccagaugucaaa

SEQ ID NO: 336375 - RNA, 19 nt, Artificial Sequence
  Description of Artificial Sequence: Synthetic oligonucleotide
ugacacggucuuuuaaauu

SEQ ID NO: 336376 - RNA, 19 nt, Artificial Sequence
  Description of Artificial Sequence: Synthetic oligonucleotide
ugccuuagcagagaauuuu

SEQ ID NO: 336377 - RNA, 19 nt, Artificial Sequence
  Description of Artificial Sequence: Synthetic oligonucleotide
guaauagcugagcaugacu

SEQ ID NO: 336378 - RNA, 19 nt, Artificial Sequence
  Description of Artificial Sequence: Synthetic oligonucleotide
cuaguugauugaggugugg

SEQ ID NO: 336379 - RNA, 19 nt, Artificial Sequence
  Description of Artificial Sequence: Synthetic oligonucleotide
ccauauaauguauccccag

SEQ ID NO: 336380 - RNA, 19 nt, Artificial Sequence
  Description of Artificial Sequence: Synthetic oligonucleotide
auucucaguuagguaguag

SEQ ID NO: 336381 - RNA, 19 nt, Artificial Sequence
  Description of Artificial Sequence: Synthetic oligonucleotide
aguuagguaguaggcuuug

SEQ ID NO: 336382 - RNA, 19 nt, Artificial Sequence
  Description of Artificial Sequence: Synthetic oligonucleotide
auccgaacucucuuagaaa

SEQ ID NO: 336383 - RNA, 19 nt, Artificial Sequence
  Description of Artificial Sequence: Synthetic oligonucleotide
agcauccaaauguggcuga

SEQ ID NO: 336384 - RNA, 19 nt, Artificial Sequence
  Description of Artificial Sequence: Synthetic oligonucleotide
ccaaugaaucauuccggcc

SEQ ID NO: 336385 - RNA, 19 nt, Artificial Sequence
  Description of Artificial Sequence: Synthetic oligonucleotide
gguguauauugcauacaag

SEQ ID NO: 336386 - RNA, 19 nt, Artificial Sequence
  Description of Artificial Sequence: Synthetic oligonucleotide
agcugcuaggagcuuuugu

SEQ ID NO: 336387 - RNA, 19 nt, Artificial Sequence
  Description of Artificial Sequence: Synthetic oligonucleotide
ccaagcacgacuugaaaca

SEQ ID NO: 336388 - RNA, 19 nt, Artificial Sequence
  Description of Artificial Sequence: Synthetic oligonucleotide
caagcacgacuugaaacac

SEQ ID NO: 336389 - RNA, 19 nt, Artificial Sequence
  Description of Artificial Sequence: Synthetic oligonucleotide
ugaucaccguuguaaccaa

SEQ ID NO: 336390 - RNA, 19 nt, Artificial Sequence
  Description of Artificial Sequence: Synthetic oligonucleotide
ucggggacgucgcugucac

SEQ ID NO: 336391 - RNA, 19 nt, Artificial Sequence
  Description of Artificial Sequence: Synthetic oligonucleotide
auauccuuccacaaucguu

SEQ ID NO: 336392 - RNA, 19 nt, Artificial Sequence
  Description of Artificial Sequence: Synthetic oligonucleotide
ucuuugaauucagcucacu

SEQ ID NO: 336393 - RNA, 19 nt, Artificial Sequence
  Description of Artificial Sequence: Synthetic oligonucleotide
cucgugaaacgcucuucac

SEQ ID NO: 336394 - RNA, 19 nt, Artificial Sequence
  Description of Artificial Sequence: Synthetic oligonucleotide
agacucguacccauuagaa

SEQ ID NO: 336395 - RNA, 19 nt, Artificial Sequence
  Description of Artificial Sequence: Synthetic oligonucleotide
auuuaugaucaccguugua

SEQ ID NO: 336396 - RNA, 19 nt, Artificial Sequence
  Description of Artificial Sequence: Synthetic oligonucleotide
ucacccucuuauauuuauu

SEQ ID NO: 336397 - RNA, 19 nt, Artificial Sequence
  Description of Artificial Sequence: Synthetic oligonucleotide
cugccaacccauauaaugu

SEQ ID NO: 336398 - RNA, 19 nt, Artificial Sequence
  Description of Artificial Sequence: Synthetic oligonucleotide
ugcguacagagaucuuuau

SEQ ID NO: 336399 - RNA, 19 nt, Artificial Sequence
  Description of Artificial Sequence: Synthetic oligonucleotide
uuacgacaauaagauaauu

SEQ ID NO: 336400 - RNA, 19 nt, Artificial Sequence
  Description of Artificial Sequence: Synthetic oligonucleotide
caaucguucuguuggcuaa

SEQ ID NO: 336401 - RNA, 19 nt, Artificial Sequence
  Description of Artificial Sequence: Synthetic oligonucleotide
guaaucccguuucagcucu

SEQ ID NO: 336402 - RNA, 19 nt, Artificial Sequence
  Description of Artificial Sequence: Synthetic oligonucleotide
uggaaagagcuacguccaa

SEQ ID NO: 336403 - RNA, 19 nt, Artificial Sequence
  Description of Artificial Sequence: Synthetic oligonucleotide
auauacguuuccacaaauu

SEQ ID NO: 336404 - RNA, 19 nt, Artificial Sequence
  Description of Artificial Sequence: Synthetic oligonucleotide
acuaguugauugaggugug

SEQ ID NO: 336405 - RNA, 19 nt, Artificial Sequence
  Description of Artificial Sequence: Synthetic oligonucleotide
aauuaucguuuaggucugu

SEQ ID NO: 336406 - RNA, 19 nt, Artificial Sequence
  Description of Artificial Sequence: Synthetic oligonucleotide
augggucuaaugucaguua

SEQ ID NO: 336407 - RNA, 19 nt, Artificial Sequence
  Description of Artificial Sequence: Synthetic oligonucleotide
aagcacgacuugaaacaca

SEQ ID NO: 336408 - RNA, 19 nt, Artificial Sequence
  Description of Artificial Sequence: Synthetic oligonucleotide
agguauccgaacucucuua

SEQ ID NO: 336409 - RNA, 19 nt, Artificial Sequence
  Description of Artificial Sequence: Synthetic oligonucleotide
cauucacccucuuauauuu

SEQ ID NO: 336410 - RNA, 19 nt, Artificial Sequence
  Description of Artificial Sequence: Synthetic oligonucleotide
cacaauccaguaaaugggu

SEQ ID NO: 336411 - RNA, 19 nt, Artificial Sequence
  Description of Artificial Sequence: Synthetic oligonucleotide
ggcaaagguauccgaacuc

SEQ ID NO: 336412 - RNA, 19 nt, Artificial Sequence
  Description of Artificial Sequence: Synthetic oligonucleotide
uccgucugacucuguauuu

SEQ ID NO: 336413 - RNA, 19 nt, Artificial Sequence
  Description of Artificial Sequence: Synthetic oligonucleotide
guauccgaacucucuuaga

SEQ ID NO: 336414 - RNA, 19 nt, Artificial Sequence
  Description of Artificial Sequence: Synthetic oligonucleotide
gcuaggagcuuuugucuug

SEQ ID NO: 336415 - RNA, 19 nt, Artificial Sequence
  Description of Artificial Sequence: Synthetic oligonucleotide
cuguguuaauuaucguuua

SEQ ID NO: 336416 - RNA, 19 nt, Artificial Sequence
  Description of Artificial Sequence: Synthetic oligonucleotide
ggcacgaccuucauugcug

SEQ ID NO: 336417 - RNA, 19 nt, Artificial Sequence
  Description of Artificial Sequence: Synthetic oligonucleotide
ggaaagagcuacguccaac

SEQ ID NO: 336418 - RNA, 19 nt, Artificial Sequence
  Description of Artificial Sequence: Synthetic oligonucleotide
uugauccauugcagucugu

SEQ ID NO: 336419 - RNA, 19 nt, Artificial Sequence
  Description of Artificial Sequence: Synthetic oligonucleotide
agcugcuucguugaauauu

SEQ ID NO: 336420 - RNA, 19 nt, Artificial Sequence
  Description of Artificial Sequence: Synthetic oligonucleotide
ucguacccauuagaagcca

SEQ ID NO: 336421 - RNA, 19 nt, Artificial Sequence
  Description of Artificial Sequence: Synthetic oligonucleotide
uauucgguuuagcguuguu

SEQ ID NO: 336422 - RNA, 19 nt, Artificial Sequence
  Description of Artificial Sequence: Synthetic oligonucleotide
cauuuaugaucaccguugu

SEQ ID NO: 336423 - RNA, 19 nt, Artificial Sequence
  Description of Artificial Sequence: Synthetic oligonucleotide
ucgguuuagcguuguucuu

SEQ ID NO: 336424 - RNA, 19 nt, Artificial Sequence
  Description of Artificial Sequence: Synthetic oligonucleotide
acaauccaguaaauggguu

SEQ ID NO: 336425 - RNA, 19 nt, Artificial Sequence
  Description of Artificial Sequence: Synthetic oligonucleotide
guauccccagaugucaaaa

SEQ ID NO: 336426 - RNA, 19 nt, Artificial Sequence
  Description of Artificial Sequence: Synthetic oligonucleotide
caucauuuaugaucaccgu

SEQ ID NO: 336427 - RNA, 19 nt, Artificial Sequence
  Description of Artificial Sequence: Synthetic oligonucleotide
ggaguugauccauugcagu

SEQ ID NO: 336428 - RNA, 19 nt, Artificial Sequence
  Description of Artificial Sequence: Synthetic oligonucleotide
cucucgugaaacgcucuuc

SEQ ID NO: 336429 - RNA, 19 nt, Artificial Sequence
  Description of Artificial Sequence: Synthetic oligonucleotide
aggcgaucggcuugaggau

SEQ ID NO: 336430 - RNA, 19 nt, Artificial Sequence
  Description of Artificial Sequence: Synthetic oligonucleotide
gacgucgcugucacuguca

SEQ ID NO: 336431 - RNA, 19 nt, Artificial Sequence
  Description of Artificial Sequence: Synthetic oligonucleotide
ccguuguaaccaaaucaac

SEQ ID NO: 336432 - RNA, 19 nt, Artificial Sequence
  Description of Artificial Sequence: Synthetic oligonucleotide
cgaucccaggcaaacauuc

SEQ ID NO: 336433 - RNA, 19 nt, Artificial Sequence
  Description of Artificial Sequence: Synthetic oligonucleotide
augcguacagagaucuuua

SEQ ID NO: 336434 - RNA, 19 nt, Artificial Sequence
  Description of Artificial Sequence: Synthetic oligonucleotide
cccauauaauguaucccca

SEQ ID NO: 336435 - RNA, 19 nt, Artificial Sequence
  Description of Artificial Sequence: Synthetic oligonucleotide
cauauucgauaaggccaug

SEQ ID NO: 336436 - RNA, 19 nt, Artificial Sequence
  Description of Artificial Sequence: Synthetic oligonucleotide
gcacgaccuucauugcugc

SEQ ID NO: 336437 - RNA, 19 nt, Artificial Sequence
  Description of Artificial Sequence: Synthetic oligonucleotide
cauauccuuccacaaucgu

SEQ ID NO: 336438 - RNA, 19 nt, Artificial Sequence
  Description of Artificial Sequence: Synthetic oligonucleotide
gcgaucggcuugaggaugg

SEQ ID NO: 336439 - RNA, 19 nt, Artificial Sequence
  Description of Artificial Sequence: Synthetic oligonucleotide
gcucuuaagggucucucgu

SEQ ID NO: 336440 - RNA, 19 nt, Artificial Sequence
  Description of Artificial Sequence: Synthetic oligonucleotide
agccacgaucaaaauuggu

SEQ ID NO: 336441 - RNA, 19 nt, Artificial Sequence
  Description of Artificial Sequence: Synthetic oligonucleotide
gcuacguccaacuguuccu

SEQ ID NO: 336442 - RNA, 19 nt, Artificial Sequence
  Description of Artificial Sequence: Synthetic oligonucleotide
auguauccccagaugucaa

SEQ ID NO: 336443 - RNA, 19 nt, Artificial Sequence
  Description of Artificial Sequence: Synthetic oligonucleotide
caugccacuccaugguccu

SEQ ID NO: 336444 - RNA, 19 nt, Artificial Sequence
  Description of Artificial Sequence: Synthetic oligonucleotide
caugcguacagagaucuuu

SEQ ID NO: 336445 - RNA, 19 nt, Artificial Sequence
  Description of Artificial Sequence: Synthetic oligonucleotide
ggucuaaugucaguuaguu

SEQ ID NO: 336446 - RNA, 19 nt, Artificial Sequence
  Description of Artificial Sequence: Synthetic oligonucleotide
gcaaagguauccgaacucu

SEQ ID NO: 336447 - RNA, 19 nt, Artificial Sequence
  Description of Artificial Sequence: Synthetic oligonucleotide
cguaaucccguuucagcuc

SEQ ID NO: 336448 - RNA, 19 nt, Artificial Sequence
  Description of Artificial Sequence: Synthetic oligonucleotide
gagcuguguuaauuaucgu

SEQ ID NO: 336449 - RNA, 19 nt, Artificial Sequence
  Description of Artificial Sequence: Synthetic oligonucleotide
gccuuauuacauucagugu

SEQ ID NO: 336450 - RNA, 19 nt, Artificial Sequence
  Description of Artificial Sequence: Synthetic oligonucleotide
ggcgaucggcuugaggaug

SEQ ID NO: 336451 - RNA, 19 nt, Artificial Sequence
  Description of Artificial Sequence: Synthetic oligonucleotide
guuccgucugacucuguau

SEQ ID NO: 336452 - RNA, 19 nt, Artificial Sequence
  Description of Artificial Sequence: Synthetic oligonucleotide
ggcuaaucguauacaaugu

SEQ ID NO: 336453 - RNA, 19 nt, Artificial Sequence
  Description of Artificial Sequence: Synthetic oligonucleotide
gcuaaucguauacaauguu

SEQ ID NO: 336454 - RNA, 19 nt, Artificial Sequence
  Description of Artificial Sequence: Synthetic oligonucleotide
ccacguaaucccguuucag

SEQ ID NO: 336455 - RNA, 19 nt, Artificial Sequence
  Description of Artificial Sequence: Synthetic oligonucleotide
gcguacagagaucuuuaua

SEQ ID NO: 336456 - RNA, 19 nt, Artificial Sequence
  Description of Artificial Sequence: Synthetic oligonucleotide
cauauggaguugauccauu

SEQ ID NO: 336457 - RNA, 19 nt, Artificial Sequence
  Description of Artificial Sequence: Synthetic oligonucleotide
auucacccucuuauauuua

SEQ ID NO: 336458 - RNA, 19 nt, Artificial Sequence
  Description of Artificial Sequence: Synthetic oligonucleotide
caaaggcgaucggcuugag

SEQ ID NO: 336459 - RNA, 19 nt, Artificial Sequence
  Description of Artificial Sequence: Synthetic oligonucleotide
caauugcaucaaggcacga

SEQ ID NO: 336460 - RNA, 19 nt, Artificial Sequence
  Description of Artificial Sequence: Synthetic oligonucleotide
guauucgguuuagcguugu

SEQ ID NO: 336461 - RNA, 19 nt, Artificial Sequence
  Description of Artificial Sequence: Synthetic oligonucleotide
acaugcguacagagaucuu

SEQ ID NO: 336462 - RNA, 19 nt, Artificial Sequence
  Description of Artificial Sequence: Synthetic oligonucleotide
gggucuaaugucaguuagu

SEQ ID NO: 336463 - RNA, 19 nt, Artificial Sequence
  Description of Artificial Sequence: Synthetic oligonucleotide
gggucucucgugaaacgcu

SEQ ID NO: 336464 - RNA, 19 nt, Artificial Sequence
  Description of Artificial Sequence: Synthetic oligonucleotide
ccgaacucucuuagaaacu

SEQ ID NO: 336465 - RNA, 19 nt, Artificial Sequence
  Description of Artificial Sequence: Synthetic oligonucleotide
cauccacguaaucccguuu

SEQ ID NO: 336466 - RNA, 19 nt, Artificial Sequence
  Description of Artificial Sequence: Synthetic oligonucleotide
gccaacccauauaauguau

SEQ ID NO: 336467 - RNA, 19 nt, Artificial Sequence
  Description of Artificial Sequence: Synthetic oligonucleotide
cguccaacuguuccucuaa

SEQ ID NO: 336468 - RNA, 19 nt, Artificial Sequence
  Description of Artificial Sequence: Synthetic oligonucleotide
augcguccacauagauguu

SEQ ID NO: 336469 - RNA, 19 nt, Artificial Sequence
  Description of Artificial Sequence: Synthetic oligonucleotide
ggauaacgucaaaggcgau

SEQ ID NO: 336470 - RNA, 19 nt, Artificial Sequence
  Description of Artificial Sequence: Synthetic oligonucleotide
gcacgacuugaaacacagu

SEQ ID NO: 336471 - RNA, 19 nt, Artificial Sequence
  Description of Artificial Sequence: Synthetic oligonucleotide
gcgaucccaggcaaacauu

SEQ ID NO: 336472 - RNA, 19 nt, Artificial Sequence
  Description of Artificial Sequence: Synthetic oligonucleotide
cgaucggcuugaggauggu

SEQ ID NO: 336473 - RNA, 19 nt, Artificial Sequence
  Description of Artificial Sequence: Synthetic oligonucleotide
uaagauacgaucaauaucc

SEQ ID NO: 336474 - RNA, 19 nt, Artificial Sequence
  Description of Artificial Sequence: Synthetic oligonucleotide
aagccgaucauuuaauggc

SEQ ID NO: 336475 - RNA, 19 nt, Artificial Sequence
  Description of Artificial Sequence: Synthetic oligonucleotide
aaaauuugggaguugcgac

SEQ ID NO: 336476 - RNA, 19 nt, Artificial Sequence
  Description of Artificial Sequence: Synthetic oligonucleotide
aaauaugccaaugggaccg

SEQ ID NO: 336477 - RNA, 19 nt, Artificial Sequence
  Description of Artificial Sequence: Synthetic oligonucleotide
aaggaaauaugccaauggg

SEQ ID NO: 336478 - RNA, 19 nt, Artificial Sequence
  Description of Artificial Sequence: Synthetic oligonucleotide
acacuugggauauacacgc

SEQ ID NO: 336479 - RNA, 19 nt, Artificial Sequence
  Description of Artificial Sequence: Synthetic oligonucleotide
aagugagucaacaugauag

SEQ ID NO: 336480 - RNA, 19 nt, Artificial Sequence
  Description of Artificial Sequence: Synthetic oligonucleotide
acuuuaaagcuguagauga

SEQ ID NO: 336481 - RNA, 19 nt, Artificial Sequence
  Description of Artificial Sequence: Synthetic oligonucleotide
ucuucgauguuuaucagcu

SEQ ID NO: 336482 - RNA, 19 nt, Artificial Sequence
  Description of Artificial Sequence: Synthetic oligonucleotide
gaagccgaucauuuaaugg

SEQ ID NO: 336483 - RNA, 19 nt, Artificial Sequence
  Description of Artificial Sequence: Synthetic oligonucleotide
uguguaguuacauccgagg

SEQ ID NO: 336484 - RNA, 19 nt, Artificial Sequence
  Description of Artificial Sequence: Synthetic oligonucleotide
acgaucaauauccucuagc

SEQ ID NO: 336485 - RNA, 19 nt, Artificial Sequence
  Description of Artificial Sequence: Synthetic oligonucleotide
agaagcggugguuugagac

SEQ ID NO: 336486 - RNA, 19 nt, Artificial Sequence
  Description of Artificial Sequence: Synthetic oligonucleotide
cauuuaauggccucucagg

SEQ ID NO: 336487 - RNA, 19 nt, Artificial Sequence
  Description of Artificial Sequence: Synthetic oligonucleotide
ugcagauuagguguggugg

SEQ ID NO: 336488 - RNA, 19 nt, Artificial Sequence
  Description of Artificial Sequence: Synthetic oligonucleotide
auuagacuguucugggacc

SEQ ID NO: 336489 - RNA, 19 nt, Artificial Sequence
  Description of Artificial Sequence: Synthetic oligonucleotide
ugagucaacaugauaggga

SEQ ID NO: 336490 - RNA, 19 nt, Artificial Sequence
  Description of Artificial Sequence: Synthetic oligonucleotide
gugguuguagaauaguugc

SEQ ID NO: 336491 - RNA, 19 nt, Artificial Sequence
  Description of Artificial Sequence: Synthetic oligonucleotide
caugauagggacuugucug

SEQ ID NO: 336492 - RNA, 19 nt, Artificial Sequence
  Description of Artificial Sequence: Synthetic oligonucleotide
gaauaguugcugcagcucc

SEQ ID NO: 336493 - RNA, 19 nt, Artificial Sequence
  Description of Artificial Sequence: Synthetic oligonucleotide
uccaaagaaagugugaccu

SEQ ID NO: 336494 - RNA, 19 nt, Artificial Sequence
  Description of Artificial Sequence: Synthetic oligonucleotide
acuugcauuagacuguucu

SEQ ID NO: 336495 - RNA, 19 nt, Artificial Sequence
  Description of Artificial Sequence: Synthetic oligonucleotide
gaccugguuugcuauaucg

SEQ ID NO: 336496 - RNA, 19 nt, Artificial Sequence
  Description of Artificial Sequence: Synthetic oligonucleotide
ucgauccucucuaagauac

SEQ ID NO: 336497 - RNA, 19 nt, Artificial Sequence
  Description of Artificial Sequence: Synthetic oligonucleotide
aauuccgggcccguaaggc

SEQ ID NO: 336498 - RNA, 19 nt, Artificial Sequence
  Description of Artificial Sequence: Synthetic oligonucleotide
aguacuccagugcaguacg

SEQ ID NO: 336499 - RNA, 19 nt, Artificial Sequence
  Description of Artificial Sequence: Synthetic oligonucleotide
agugagucaacaugauagg

SEQ ID NO: 336500 - RNA, 19 nt, Artificial Sequence
  Description of Artificial Sequence: Synthetic oligonucleotide
uguaguuacauccgagggu

SEQ ID NO: 336501 - RNA, 19 nt, Artificial Sequence
  Description of Artificial Sequence: Synthetic oligonucleotide
guacucauaauuccgggcc

SEQ ID NO: 336502 - RNA, 19 nt, Artificial Sequence
  Description of Artificial Sequence: Synthetic oligonucleotide
ucuguaguguaauuuggca

SEQ ID NO: 336503 - RNA, 19 nt, Artificial Sequence
  Description of Artificial Sequence: Synthetic oligonucleotide
gaaauaugccaaugggacc

SEQ ID NO: 336504 - RNA, 19 nt, Artificial Sequence
  Description of Artificial Sequence: Synthetic oligonucleotide
ucucuauaaggucucgagc

SEQ ID NO: 336505 - RNA, 19 nt, Artificial Sequence
  Description of Artificial Sequence: Synthetic oligonucleotide
uguagaauaguugcugcag

SEQ ID NO: 336506 - RNA, 19 nt, Artificial Sequence
  Description of Artificial Sequence: Synthetic oligonucleotide
augauagggacuugucugg

SEQ ID NO: 336507 - RNA, 19 nt, Artificial Sequence
  Description of Artificial Sequence: Synthetic oligonucleotide
ugcaauacuccagcaaugg

SEQ ID NO: 336508 - RNA, 19 nt, Artificial Sequence
  Description of Artificial Sequence: Synthetic oligonucleotide
uuaauggccucucaggaua

SEQ ID NO: 336509 - RNA, 19 nt, Artificial Sequence
  Description of Artificial Sequence: Synthetic oligonucleotide
guguaguuacauccgaggg

SEQ ID NO: 336510 - RNA, 19 nt, Artificial Sequence
  Description of Artificial Sequence: Synthetic oligonucleotide
aacaccuuccgccuauucu

SEQ ID NO: 336511 - RNA, 19 nt, Artificial Sequence
  Description of Artificial Sequence: Synthetic oligonucleotide
uggaucgacuuacagcugc

SEQ ID NO: 336512 - RNA, 19 nt, Artificial Sequence
  Description of Artificial Sequence: Synthetic oligonucleotide
aaggaggacaaacugcaau

SEQ ID NO: 336513 - RNA, 19 nt, Artificial Sequence
  Description of Artificial Sequence: Synthetic oligonucleotide
gaggacaaacugcaaugcg

SEQ ID NO: 336514 - RNA, 19 nt, Artificial Sequence
  Description of Artificial Sequence: Synthetic oligonucleotide
guagaugguauccagggga

SEQ ID NO: 336515 - RNA, 19 nt, Artificial Sequence
  Description of Artificial Sequence: Synthetic oligonucleotide
ucuauaaggucucgagcca

SEQ ID NO: 336516 - RNA, 19 nt, Artificial Sequence
  Description of Artificial Sequence: Synthetic oligonucleotide
gaaccgguuguugacacgg

SEQ ID NO: 336517 - RNA, 19 nt, Artificial Sequence
  Description of Artificial Sequence: Synthetic oligonucleotide
uccgccuauucucacaggc

SEQ ID NO: 336518 - RNA, 19 nt, Artificial Sequence
  Description of Artificial Sequence: Synthetic oligonucleotide
uggauuuaagugucugugc

SEQ ID NO: 336519 - RNA, 19 nt, Artificial Sequence
  Description of Artificial Sequence: Synthetic oligonucleotide
ugaagaaccucgcggacgu

SEQ ID NO: 336520 - RNA, 19 nt, Artificial Sequence
  Description of Artificial Sequence: Synthetic oligonucleotide
ugguuugcuauaucggggc

SEQ ID NO: 336521 - RNA, 19 nt, Artificial Sequence
  Description of Artificial Sequence: Synthetic oligonucleotide
cucucuauaaggucucgag

SEQ ID NO: 336522 - RNA, 19 nt, Artificial Sequence
  Description of Artificial Sequence: Synthetic oligonucleotide
gauguuucugggugcacgc

SEQ ID NO: 336523 - RNA, 19 nt, Artificial Sequence
  Description of Artificial Sequence: Synthetic oligonucleotide
ggugagacugaacaagggg

SEQ ID NO: 336524 - RNA, 19 nt, Artificial Sequence
  Description of Artificial Sequence: Synthetic oligonucleotide
agacuuuaaagcuguagau

SEQ ID NO: 336525 - RNA, 19 nt, Artificial Sequence
  Description of Artificial Sequence: Synthetic oligonucleotide
cucacacccacacacacac

SEQ ID NO: 336526 - RNA, 19 nt, Artificial Sequence
  Description of Artificial Sequence: Synthetic oligonucleotide
ucuuucggaguuuugccac

SEQ ID NO: 336527 - RNA, 19 nt, Artificial Sequence
  Description of Artificial Sequence: Synthetic oligonucleotide
uagaauaguugcugcagcu

SEQ ID NO: 336528 - RNA, 19 nt, Artificial Sequence
  Description of Artificial Sequence: Synthetic oligonucleotide
acaaacugcaaugcgucgg

SEQ ID NO: 336529 - RNA, 19 nt, Artificial Sequence
  Description of Artificial Sequence: Synthetic oligonucleotide
agauuaggugugguggugc

SEQ ID NO: 336530 - RNA, 19 nt, Artificial Sequence
  Description of Artificial Sequence: Synthetic oligonucleotide
acaugauagggacuugucu

SEQ ID NO: 336531 - RNA, 19 nt, Artificial Sequence
  Description of Artificial Sequence: Synthetic oligonucleotide
cagguacucauaauuccgg

SEQ ID NO: 336532 - RNA, 19 nt, Artificial Sequence
  Description of Artificial Sequence: Synthetic oligonucleotide
aacaugauagggacuuguc

SEQ ID NO: 336533 - RNA, 19 nt, Artificial Sequence
  Description of Artificial Sequence: Synthetic oligonucleotide
ccugacuacaugaaaauac

SEQ ID NO: 336534 - RNA, 19 nt, Artificial Sequence
  Description of Artificial Sequence: Synthetic oligonucleotide
auuccgggcccguaaggcc

SEQ ID NO: 336535 - RNA, 19 nt, Artificial Sequence
  Description of Artificial Sequence: Synthetic oligonucleotide
uugucgaggccuuuguucu

SEQ ID NO: 336536 - RNA, 19 nt, Artificial Sequence
  Description of Artificial Sequence: Synthetic oligonucleotide
uguuucugggugcacgcug

SEQ ID NO: 336537 - RNA, 19 nt, Artificial Sequence
  Description of Artificial Sequence: Synthetic oligonucleotide
aaagucugagcaacacuuc

SEQ ID NO: 336538 - RNA, 19 nt, Artificial Sequence
  Description of Artificial Sequence: Synthetic oligonucleotide
aggcagaggaucaaauccc

SEQ ID NO: 336539 - RNA, 19 nt, Artificial Sequence
  Description of Artificial Sequence: Synthetic oligonucleotide
uacucauaauuccgggccc

SEQ ID NO: 336540 - RNA, 19 nt, Artificial Sequence
  Description of Artificial Sequence: Synthetic oligonucleotide
cuauaucggggccaagugc

SEQ ID NO: 336541 - RNA, 19 nt, Artificial Sequence
  Description of Artificial Sequence: Synthetic oligonucleotide
gauauacacgcugucuuug

SEQ ID NO: 336542 - RNA, 19 nt, Artificial Sequence
  Description of Artificial Sequence: Synthetic oligonucleotide
ugaagccgaucauuuaaug

SEQ ID NO: 336543 - RNA, 19 nt, Artificial Sequence
  Description of Artificial Sequence: Synthetic oligonucleotide
aaccucgcggacguuuucc

SEQ ID NO: 336544 - RNA, 19 nt, Artificial Sequence
  Description of Artificial Sequence: Synthetic oligonucleotide
cugaacaagggguggaaug

SEQ ID NO: 336545 - RNA, 19 nt, Artificial Sequence
  Description of Artificial Sequence: Synthetic oligonucleotide
uaaugaccggaagaagagg

SEQ ID NO: 336546 - RNA, 19 nt, Artificial Sequence
  Description of Artificial Sequence: Synthetic oligonucleotide
ucggaguuuugccacuugc

SEQ ID NO: 336547 - RNA, 19 nt, Artificial Sequence
  Description of Artificial Sequence: Synthetic oligonucleotide
uaauuccgggcccguaagg

SEQ ID NO: 336548 - RNA, 19 nt, Artificial Sequence
  Description of Artificial Sequence: Synthetic oligonucleotide
gaacccacugcugucuucg

SEQ ID NO: 336549 - RNA, 19 nt, Artificial Sequence
  Description of Artificial Sequence: Synthetic oligonucleotide
auaauuccgggcccguaag

SEQ ID NO: 336550 - RNA, 19 nt, Artificial Sequence
  Description of Artificial Sequence: Synthetic oligonucleotide
caaacugcaaugcgucggg

SEQ ID NO: 336551 - RNA, 19 nt, Artificial Sequence
  Description of Artificial Sequence: Synthetic oligonucleotide
gauuuaagugucugugcuc

SEQ ID NO: 336552 - RNA, 19 nt, Artificial Sequence
  Description of Artificial Sequence: Synthetic oligonucleotide
guuacauccgaggguaggg

SEQ ID NO: 336553 - RNA, 19 nt, Artificial Sequence
  Description of Artificial Sequence: Synthetic oligonucleotide
ugacguacgaguagauggu

SEQ ID NO: 336554 - RNA, 19 nt, Artificial Sequence
  Description of Artificial Sequence: Synthetic oligonucleotide
acgaguagaugguauccag

SEQ ID NO: 336555 - RNA, 19 nt, Artificial Sequence
  Description of Artificial Sequence: Synthetic oligonucleotide
cauaggacccgacagccug

SEQ ID NO: 336556 - RNA, 19 nt, Artificial Sequence
  Description of Artificial Sequence: Synthetic oligonucleotide
cuuuaaagcuguagaugac

SEQ ID NO: 336557 - RNA, 19 nt, Artificial Sequence
  Description of Artificial Sequence: Synthetic oligonucleotide
uacagucagaucucucccc

SEQ ID NO: 336558 - RNA, 19 nt, Artificial Sequence
  Description of Artificial Sequence: Synthetic oligonucleotide
uggucugacguacgaguag

SEQ ID NO: 336559 - RNA, 19 nt, Artificial Sequence
  Description of Artificial Sequence: Synthetic oligonucleotide
agccgaucauuuaauggcc

SEQ ID NO: 336560 - RNA, 19 nt, Artificial Sequence
  Description of Artificial Sequence: Synthetic oligonucleotide
ugcacgcugguacaacacc

SEQ ID NO: 336561 - RNA, 19 nt, Artificial Sequence
  Description of Artificial Sequence: Synthetic oligonucleotide
gugagucaacaugauaggg

SEQ ID NO: 336562 - RNA, 19 nt, Artificial Sequence
  Description of Artificial Sequence: Synthetic oligonucleotide
aggaguggguuacacuauc

SEQ ID NO: 336563 - RNA, 19 nt, Artificial Sequence
  Description of Artificial Sequence: Synthetic oligonucleotide
ggcccguaaggccagaugg

SEQ ID NO: 336564 - RNA, 19 nt, Artificial Sequence
  Description of Artificial Sequence: Synthetic oligonucleotide
uacacgcugucuuugucga

SEQ ID NO: 336565 - RNA, 19 nt, Artificial Sequence
  Description of Artificial Sequence: Synthetic oligonucleotide
ugcaagucccacuggugag

SEQ ID NO: 336566 - RNA, 19 nt, Artificial Sequence
  Description of Artificial Sequence: Synthetic oligonucleotide
ucgagcaccaaaauaccuu

SEQ ID NO: 336567 - RNA, 19 nt, Artificial Sequence
  Description of Artificial Sequence: Synthetic oligonucleotide
agcagccgcauugacagac

SEQ ID NO: 336568 - RNA, 19 nt, Artificial Sequence
  Description of Artificial Sequence: Synthetic oligonucleotide
guaagugccugcuguauca

SEQ ID NO: 336569 - RNA, 19 nt, Artificial Sequence
  Description of Artificial Sequence: Synthetic oligonucleotide
uacgaucaauauccucuag

SEQ ID NO: 336570 - RNA, 19 nt, Artificial Sequence
  Description of Artificial Sequence: Synthetic oligonucleotide
cacuaucacucccaccugg

SEQ ID NO: 336571 - RNA, 19 nt, Artificial Sequence
  Description of Artificial Sequence: Synthetic oligonucleotide
uacagugcucucucuauaa

SEQ ID NO: 336572 - RNA, 19 nt, Artificial Sequence
  Description of Artificial Sequence: Synthetic oligonucleotide
acgcuuuuaaaagucugag

SEQ ID NO: 336573 - RNA, 19 nt, Artificial Sequence
  Description of Artificial Sequence: Synthetic oligonucleotide
acuguguaguuacauccga

SEQ ID NO: 336574 - RNA, 19 nt, Artificial Sequence
  Description of Artificial Sequence: Synthetic oligonucleotide
cucagguaagucuguuugc

SEQ ID NO: 336575 - RNA, 19 nt, Artificial Sequence
  Description of Artificial Sequence: Synthetic oligonucleotide
gaguggguuacacuaucac

SEQ ID NO: 336576 - RNA, 19 nt, Artificial Sequence
  Description of Artificial Sequence: Synthetic oligonucleotide
caaaauuugggaguugcga

SEQ ID NO: 336577 - RNA, 19 nt, Artificial Sequence
  Description of Artificial Sequence: Synthetic oligonucleotide
uaugccaaugggaccgaga

SEQ ID NO: 336578 - RNA, 19 nt, Artificial Sequence
  Description of Artificial Sequence: Synthetic oligonucleotide
agugugaccucccaaggua

SEQ ID NO: 336579 - RNA, 19 nt, Artificial Sequence
  Description of Artificial Sequence: Synthetic oligonucleotide
cuuccgccuauucucacag

SEQ ID NO: 336580 - RNA, 19 nt, Artificial Sequence
  Description of Artificial Sequence: Synthetic oligonucleotide
agccauguacacuugggau

SEQ ID NO: 336581 - RNA, 19 nt, Artificial Sequence
  Description of Artificial Sequence: Synthetic oligonucleotide
uccacguuggagcccuucc

SEQ ID NO: 336582 - RNA, 19 nt, Artificial Sequence
  Description of Artificial Sequence: Synthetic oligonucleotide
aggcaccucuugcugagac

SEQ ID NO: 336583 - RNA, 19 nt, Artificial Sequence
  Description of Artificial Sequence: Synthetic oligonucleotide
aggauacaggccuggaggu

SEQ ID NO: 336584 - RNA, 19 nt, Artificial Sequence
  Description of Artificial Sequence: Synthetic oligonucleotide
ugcuauaucggggccaagu

SEQ ID NO: 336585 - RNA, 19 nt, Artificial Sequence
  Description of Artificial Sequence: Synthetic oligonucleotide
uguucccugaugacacagc

SEQ ID NO: 336586 - RNA, 19 nt, Artificial Sequence
  Description of Artificial Sequence: Synthetic oligonucleotide
gaugacaugcagauuaggu

SEQ ID NO: 336587 - RNA, 19 nt, Artificial Sequence
  Description of Artificial Sequence: Synthetic oligonucleotide
gguacucauaauuccgggc

SEQ ID NO: 336588 - RNA, 19 nt, Artificial Sequence
  Description of Artificial Sequence: Synthetic oligonucleotide
cgaucaauauccucuagcc

SEQ ID NO: 336589 - RNA, 19 nt, Artificial Sequence
  Description of Artificial Sequence: Synthetic oligonucleotide
guacgaguagaugguaucc

SEQ ID NO: 336590 - RNA, 19 nt, Artificial Sequence
  Description of Artificial Sequence: Synthetic oligonucleotide
uauaaggucucgagccauc

SEQ ID NO: 336591 - RNA, 19 nt, Artificial Sequence
  Description of Artificial Sequence: Synthetic oligonucleotide
acucauaauuccgggcccg

SEQ ID NO: 336592 - RNA, 19 nt, Artificial Sequence
  Description of Artificial Sequence: Synthetic oligonucleotide
uccuccugaaagcgacagg

SEQ ID NO: 336593 - RNA, 19 nt, Artificial Sequence
  Description of Artificial Sequence: Synthetic oligonucleotide
aggacaaacugcaaugcgu

SEQ ID NO: 336594 - RNA, 19 nt, Artificial Sequence
  Description of Artificial Sequence: Synthetic oligonucleotide
uuccuaguacacuggcucu

SEQ ID NO: 336595 - RNA, 19 nt, Artificial Sequence
  Description of Artificial Sequence: Synthetic oligonucleotide
agaugacaugcagauuagg

SEQ ID NO: 336596 - RNA, 19 nt, Artificial Sequence
  Description of Artificial Sequence: Synthetic oligonucleotide
guaguuacauccgagggua

SEQ ID NO: 336597 - RNA, 19 nt, Artificial Sequence
  Description of Artificial Sequence: Synthetic oligonucleotide
uacgaguagaugguaucca

SEQ ID NO: 336598 - RNA, 19 nt, Artificial Sequence
  Description of Artificial Sequence: Synthetic oligonucleotide
ucccugacuacaugaaaau

SEQ ID NO: 336599 - RNA, 19 nt, Artificial Sequence
  Description of Artificial Sequence: Synthetic oligonucleotide
agauggucaauaagcagca

SEQ ID NO: 336600 - RNA, 19 nt, Artificial Sequence
  Description of Artificial Sequence: Synthetic oligonucleotide
uuugcuauaucggggccaa

SEQ ID NO: 336601 - RNA, 19 nt, Artificial Sequence
  Description of Artificial Sequence: Synthetic oligonucleotide
ucucccugacuacaugaaa

SEQ ID NO: 336602 - RNA, 19 nt, Artificial Sequence
  Description of Artificial Sequence: Synthetic oligonucleotide
acuaucacucccaccuggg

SEQ ID NO: 336603 - RNA, 19 nt, Artificial Sequence
  Description of Artificial Sequence: Synthetic oligonucleotide
gcgacauaggacccgacag

SEQ ID NO: 336604 - RNA, 19 nt, Artificial Sequence
  Description of Artificial Sequence: Synthetic oligonucleotide
uugggauauacacgcuguc

SEQ ID NO: 336605 - RNA, 19 nt, Artificial Sequence
  Description of Artificial Sequence: Synthetic oligonucleotide
ugccaaugggaccgagaag

SEQ ID NO: 336606 - RNA, 19 nt, Artificial Sequence
  Description of Artificial Sequence: Synthetic oligonucleotide
ucgaaccgguuguugacac

SEQ ID NO: 336607 - RNA, 19 nt, Artificial Sequence
  Description of Artificial Sequence: Synthetic oligonucleotide
auuuggcaauaaugaccgg

SEQ ID NO: 336608 - RNA, 19 nt, Artificial Sequence
  Description of Artificial Sequence: Synthetic oligonucleotide
aguugcgacagguuccgau

SEQ ID NO: 336609 - RNA, 19 nt, Artificial Sequence
  Description of Artificial Sequence: Synthetic oligonucleotide
gaagugagucaacaugaua

SEQ ID NO: 336610 - RNA, 19 nt, Artificial Sequence
  Description of Artificial Sequence: Synthetic oligonucleotide
ugcuucucuguuccuagua

SEQ ID NO: 336611 - RNA, 19 nt, Artificial Sequence
  Description of Artificial Sequence: Synthetic oligonucleotide
cgagaaggcaaaauuuggg

SEQ ID NO: 336612 - RNA, 19 nt, Artificial Sequence
  Description of Artificial Sequence: Synthetic oligonucleotide
cucccugacuacaugaaaa

SEQ ID NO: 336613 - RNA, 19 nt, Artificial Sequence
  Description of Artificial Sequence: Synthetic oligonucleotide
cgcucgagcaccaaaauac

SEQ ID NO: 336614 - RNA, 19 nt, Artificial Sequence
  Description of Artificial Sequence: Synthetic oligonucleotide
ucucucuggucugacguac

SEQ ID NO: 336615 - RNA, 19 nt, Artificial Sequence
  Description of Artificial Sequence: Synthetic oligonucleotide
aagauacgaucaauauccu

SEQ ID NO: 336616 - RNA, 19 nt, Artificial Sequence
  Description of Artificial Sequence: Synthetic oligonucleotide
aguucauugccucgugguu

SEQ ID NO: 336617 - RNA, 19 nt, Artificial Sequence
  Description of Artificial Sequence: Synthetic oligonucleotide
uucgauccucucuaagaua

SEQ ID NO: 336618 - RNA, 19 nt, Artificial Sequence
  Description of Artificial Sequence: Synthetic oligonucleotide
gcaauaaugaccggaagaa

SEQ ID NO: 336619 - RNA, 19 nt, Artificial Sequence
  Description of Artificial Sequence: Synthetic oligonucleotide
ucucucuauaaggucucga

SEQ ID NO: 336620 - RNA, 19 nt, Artificial Sequence
  Description of Artificial Sequence: Synthetic oligonucleotide
uacuccagugcaguacgug

SEQ ID NO: 336621 - RNA, 19 nt, Artificial Sequence
  Description of Artificial Sequence: Synthetic oligonucleotide
gcuauaucggggccaagug

SEQ ID NO: 336622 - RNA, 19 nt, Artificial Sequence
  Description of Artificial Sequence: Synthetic oligonucleotide
acguuuuccuccagccagc

SEQ ID NO: 336623 - RNA, 19 nt, Artificial Sequence
  Description of Artificial Sequence: Synthetic oligonucleotide
uccuguucucaggucugcg

SEQ ID NO: 336624 - RNA, 19 nt, Artificial Sequence
  Description of Artificial Sequence: Synthetic oligonucleotide
ggauuuaagugucugugcu

SEQ ID NO: 336625 - RNA, 19 nt, Artificial Sequence
  Description of Artificial Sequence: Synthetic oligonucleotide
aagaaccucgcggacguuu

SEQ ID NO: 336626 - RNA, 19 nt, Artificial Sequence
  Description of Artificial Sequence: Synthetic oligonucleotide
cacacccacacacacacaa

SEQ ID NO: 336627 - RNA, 19 nt, Artificial Sequence
  Description of Artificial Sequence: Synthetic oligonucleotide
auaaggucucgagccaucu

SEQ ID NO: 336628 - RNA, 19 nt, Artificial Sequence
  Description of Artificial Sequence: Synthetic oligonucleotide
cauaauuccgggcccguaa

SEQ ID NO: 336629 - RNA, 19 nt, Artificial Sequence
  Description of Artificial Sequence: Synthetic oligonucleotide
aauaugccaaugggaccga

SEQ ID NO: 336630 - RNA, 19 nt, Artificial Sequence
  Description of Artificial Sequence: Synthetic oligonucleotide
gggaaguuuccugaaggcc

SEQ ID NO: 336631 - RNA, 19 nt, Artificial Sequence
  Description of Artificial Sequence: Synthetic oligonucleotide
agucagaucucuccccguu

SEQ ID NO: 336632 - RNA, 19 nt, Artificial Sequence
  Description of Artificial Sequence: Synthetic oligonucleotide
cuugggauauacacgcugu

SEQ ID NO: 336633 - RNA, 19 nt, Artificial Sequence
  Description of Artificial Sequence: Synthetic oligonucleotide
uuccgccuauucucacagg

SEQ ID NO: 336634 - RNA, 19 nt, Artificial Sequence
  Description of Artificial Sequence: Synthetic oligonucleotide
ggaguugcgacagguuccg

SEQ ID NO: 336635 - RNA, 19 nt, Artificial Sequence
  Description of Artificial Sequence: Synthetic oligonucleotide
cucucuaagauacgaucaa

SEQ ID NO: 336636 - RNA, 19 nt, Artificial Sequence
  Description of Artificial Sequence: Synthetic oligonucleotide
ccgacccuuguuuuggucc

SEQ ID NO: 336637 - RNA, 19 nt, Artificial Sequence
  Description of Artificial Sequence: Synthetic oligonucleotide
ggacaaacugcaaugcguc

SEQ ID NO: 336638 - RNA, 19 nt, Artificial Sequence
  Description of Artificial Sequence: Synthetic oligonucleotide
guuugcuauaucggggcca

SEQ ID NO: 336639 - RNA, 19 nt, Artificial Sequence
  Description of Artificial Sequence: Synthetic oligonucleotide
ccucucuaagauacgauca

SEQ ID NO: 336640 - RNA, 19 nt, Artificial Sequence
  Description of Artificial Sequence: Synthetic oligonucleotide
cuucgauguuuaucagcuc

SEQ ID NO: 336641 - RNA, 19 nt, Artificial Sequence
  Description of Artificial Sequence: Synthetic oligonucleotide
cacccacacacacacaaaa

SEQ ID NO: 336642 - RNA, 19 nt, Artificial Sequence
  Description of Artificial Sequence: Synthetic oligonucleotide
cccguuuaccacaagguca

SEQ ID NO: 336643 - RNA, 19 nt, Artificial Sequence
  Description of Artificial Sequence: Synthetic oligonucleotide
ggacccgacagccugaugu

SEQ ID NO: 336644 - RNA, 19 nt, Artificial Sequence
  Description of Artificial Sequence: Synthetic oligonucleotide
gugcacgcuuuuaaaaguc

SEQ ID NO: 336645 - RNA, 19 nt, Artificial Sequence
  Description of Artificial Sequence: Synthetic oligonucleotide
cgguaauccagccugcaag

SEQ ID NO: 336646 - RNA, 19 nt, Artificial Sequence
  Description of Artificial Sequence: Synthetic oligonucleotide
ugaacccacugcugucuuc

SEQ ID NO: 336647 - RNA, 19 nt, Artificial Sequence
  Description of Artificial Sequence: Synthetic oligonucleotide
cagauuaggugugguggug

SEQ ID NO: 336648 - RNA, 19 nt, Artificial Sequence
  Description of Artificial Sequence: Synthetic oligonucleotide
gcucuuagggguugucagc

SEQ ID NO: 336649 - RNA, 19 nt, Artificial Sequence
  Description of Artificial Sequence: Synthetic oligonucleotide
ucucaggucugcgguaauc

SEQ ID NO: 336650 - RNA, 19 nt, Artificial Sequence
  Description of Artificial Sequence: Synthetic oligonucleotide
cuucgauccucucuaagau

SEQ ID NO: 336651 - RNA, 19 nt, Artificial Sequence
  Description of Artificial Sequence: Synthetic oligonucleotide
ggggccaagugcucuuagg

SEQ ID NO: 336652 - RNA, 19 nt, Artificial Sequence
  Description of Artificial Sequence: Synthetic oligonucleotide
aacccacugcugucuucga

SEQ ID NO: 336653 - RNA, 19 nt, Artificial Sequence
  Description of Artificial Sequence: Synthetic oligonucleotide
ugcgguaauccagccugca

SEQ ID NO: 336654 - RNA, 19 nt, Artificial Sequence
  Description of Artificial Sequence: Synthetic oligonucleotide
ucacacccacacacacaca

SEQ ID NO: 336655 - RNA, 19 nt, Artificial Sequence
  Description of Artificial Sequence: Synthetic oligonucleotide
ucgcggacguuuuccucca

SEQ ID NO: 336656 - RNA, 19 nt, Artificial Sequence
  Description of Artificial Sequence: Synthetic oligonucleotide
cugcgguaauccagccugc

SEQ ID NO: 336657 - RNA, 19 nt, Artificial Sequence
  Description of Artificial Sequence: Synthetic oligonucleotide
cuagcccauuuuccgagga

SEQ ID NO: 336658 - RNA, 19 nt, Artificial Sequence
  Description of Artificial Sequence: Synthetic oligonucleotide
gaucgacuuacagcugcuc

SEQ ID NO: 336659 - RNA, 19 nt, Artificial Sequence
  Description of Artificial Sequence: Synthetic oligonucleotide
acguuggagcccuuccuuu

SEQ ID NO: 336660 - RNA, 19 nt, Artificial Sequence
  Description of Artificial Sequence: Synthetic oligonucleotide
ugccucgugguuguagaau

SEQ ID NO: 336661 - RNA, 19 nt, Artificial Sequence
  Description of Artificial Sequence: Synthetic oligonucleotide
accucgcggacguuuuccu

SEQ ID NO: 336662 - RNA, 19 nt, Artificial Sequence
  Description of Artificial Sequence: Synthetic oligonucleotide
ggugcacgcuuuuaaaagu

SEQ ID NO: 336663 - RNA, 19 nt, Artificial Sequence
  Description of Artificial Sequence: Synthetic oligonucleotide
accgcucgagcaccaaaau

SEQ ID NO: 336664 - RNA, 19 nt, Artificial Sequence
  Description of Artificial Sequence: Synthetic oligonucleotide
acagaccugguuugcuaua

SEQ ID NO: 336665 - RNA, 19 nt, Artificial Sequence
  Description of Artificial Sequence: Synthetic oligonucleotide
uccuaguacacuggcucuu

SEQ ID NO: 336666 - RNA, 19 nt, Artificial Sequence
  Description of Artificial Sequence: Synthetic oligonucleotide
gcacgcuuuuaaaagucug

SEQ ID NO: 336667 - RNA, 19 nt, Artificial Sequence
  Description of Artificial Sequence: Synthetic oligonucleotide
cacggacuccuuccuuccc

SEQ ID NO: 336668 - RNA, 19 nt, Artificial Sequence
  Description of Artificial Sequence: Synthetic oligonucleotide
caagugcucuuagggguug

SEQ ID NO: 336669 - RNA, 19 nt, Artificial Sequence
  Description of Artificial Sequence: Synthetic oligonucleotide
uuucggaguuuugccacuu

SEQ ID NO: 336670 - RNA, 19 nt, Artificial Sequence
  Description of Artificial Sequence: Synthetic oligonucleotide
gcauuagacuguucuggga

SEQ ID NO: 336671 - RNA, 19 nt, Artificial Sequence
  Description of Artificial Sequence: Synthetic oligonucleotide
gaccgcucgagcaccaaaa

SEQ ID NO: 336672 - RNA, 19 nt, Artificial Sequence
  Description of Artificial Sequence: Synthetic oligonucleotide
acguacgaguagaugguau

SEQ ID NO: 336673 - RNA, 19 nt, Artificial Sequence
  Description of Artificial Sequence: Synthetic oligonucleotide
ggucugacguacgaguaga

SEQ ID NO: 336674 - RNA, 19 nt, Artificial Sequence
  Description of Artificial Sequence: Synthetic oligonucleotide
caacaccuuccgccuauuc

SEQ ID NO: 336675 - RNA, 19 nt, Artificial Sequence
  Description of Artificial Sequence: Synthetic oligonucleotide
gcucgaaccgguuguugac

SEQ ID NO: 336676 - RNA, 19 nt, Artificial Sequence
  Description of Artificial Sequence: Synthetic oligonucleotide
gaaccucgcggacguuuuc

SEQ ID NO: 336677 - RNA, 19 nt, Artificial Sequence
  Description of Artificial Sequence: Synthetic oligonucleotide
cguacgaguagaugguauc

SEQ ID NO: 336678 - RNA, 19 nt, Artificial Sequence
  Description of Artificial Sequence: Synthetic oligonucleotide
caaugggaccgagaaggca

SEQ ID NO: 336679 - RNA, 19 nt, Artificial Sequence
  Description of Artificial Sequence: Synthetic oligonucleotide
gggauauacacgcugucuu

SEQ ID NO: 336680 - RNA, 19 nt, Artificial Sequence
  Description of Artificial Sequence: Synthetic oligonucleotide
ccgccuauucucacaggcc

SEQ ID NO: 336681 - RNA, 19 nt, Artificial Sequence
  Description of Artificial Sequence: Synthetic oligonucleotide
agggcccggcgcgacauag

SEQ ID NO: 336682 - RNA, 19 nt, Artificial Sequence
  Description of Artificial Sequence: Synthetic oligonucleotide
cucgaaccgguuguugaca

SEQ ID NO: 336683 - RNA, 19 nt, Artificial Sequence
  Description of Artificial Sequence: Synthetic oligonucleotide
ccgaucauuuaauggccuc

SEQ ID NO: 336684 - RNA, 19 nt, Artificial Sequence
  Description of Artificial Sequence: Synthetic oligonucleotide
cugaagccgaucauuuaau

SEQ ID NO: 336685 - RNA, 19 nt, Artificial Sequence
  Description of Artificial Sequence: Synthetic oligonucleotide
gcgacagguuccgaugugc

SEQ ID NO: 336686 - RNA, 19 nt, Artificial Sequence
  Description of Artificial Sequence: Synthetic oligonucleotide
gacguacgaguagauggua

SEQ ID NO: 336687 - RNA, 19 nt, Artificial Sequence
  Description of Artificial Sequence: Synthetic oligonucleotide
agaaccucgcggacguuuu

SEQ ID NO: 336688 - RNA, 19 nt, Artificial Sequence
  Description of Artificial Sequence: Synthetic oligonucleotide
ggaguggguuacacuauca

SEQ ID NO: 336689 - RNA, 19 nt, Artificial Sequence
  Description of Artificial Sequence: Synthetic oligonucleotide
gacuggacucagucucucu

SEQ ID NO: 336690 - RNA, 19 nt, Artificial Sequence
  Description of Artificial Sequence: Synthetic oligonucleotide
uugcuauaucggggccaag

SEQ ID NO: 336691 - RNA, 19 nt, Artificial Sequence
  Description of Artificial Sequence: Synthetic oligonucleotide
ggaaugcacacuccaugcu

SEQ ID NO: 336692 - RNA, 19 nt, Artificial Sequence
  Description of Artificial Sequence: Synthetic oligonucleotide
gcagauuaggugugguggu

SEQ ID NO: 336693 - RNA, 19 nt, Artificial Sequence
  Description of Artificial Sequence: Synthetic oligonucleotide
guggcggguucuuuccaaa

SEQ ID NO: 336694 - RNA, 19 nt, Artificial Sequence
  Description of Artificial Sequence: Synthetic oligonucleotide
acccgacccuuguuuuggu

SEQ ID NO: 336695 - RNA, 19 nt, Artificial Sequence
  Description of Artificial Sequence: Synthetic oligonucleotide
ggauauacacgcugucuuu

SEQ ID NO: 336696 - RNA, 19 nt, Artificial Sequence
  Description of Artificial Sequence: Synthetic oligonucleotide
acacccacacacacacaaa

SEQ ID NO: 336697 - RNA, 19 nt, Artificial Sequence
  Description of Artificial Sequence: Synthetic oligonucleotide
cuauaaggucucgagccau

SEQ ID NO: 336698 - RNA, 19 nt, Artificial Sequence
  Description of Artificial Sequence: Synthetic oligonucleotide
ggcaggguacagucagauc

SEQ ID NO: 336699 - RNA, 19 nt, Artificial Sequence
  Description of Artificial Sequence: Synthetic oligonucleotide
cgauccucucuaagauacg

SEQ ID NO: 336700 - RNA, 19 nt, Artificial Sequence
  Description of Artificial Sequence: Synthetic oligonucleotide
gcucaugcucagguaaguc

SEQ ID NO: 336701 - RNA, 19 nt, Artificial Sequence
  Description of Artificial Sequence: Synthetic oligonucleotide
cucaggauacaggccugga

SEQ ID NO: 336702 - RNA, 19 nt, Artificial Sequence
  Description of Artificial Sequence: Synthetic oligonucleotide
ccguaaggccagaugguca

SEQ ID NO: 336703 - RNA, 19 nt, Artificial Sequence
  Description of Artificial Sequence: Synthetic oligonucleotide
cuaucacucccaccugggu

SEQ ID NO: 336704 - RNA, 19 nt, Artificial Sequence
  Description of Artificial Sequence: Synthetic oligonucleotide
gucugcgguaauccagccu

SEQ ID NO: 336705 - RNA, 19 nt, Artificial Sequence
  Description of Artificial Sequence: Synthetic oligonucleotide
ggcccggcgcgacauagga

SEQ ID NO: 336706 - RNA, 19 nt, Artificial Sequence
  Description of Artificial Sequence: Synthetic oligonucleotide
cgaaccgguuguugacacg

SEQ ID NO: 336707 - RNA, 19 nt, Artificial Sequence
  Description of Artificial Sequence: Synthetic oligonucleotide
ccuaguacacuggcucuuc

SEQ ID NO: 336708 - RNA, 19 nt, Artificial Sequence
  Description of Artificial Sequence: Synthetic oligonucleotide
cccguaaggccagaugguc

SEQ ID NO: 336709 - RNA, 19 nt, Artificial Sequence
  Description of Artificial Sequence: Synthetic oligonucleotide
ggacuugucuggagcagaa

SEQ ID NO: 336710 - RNA, 19 nt, Artificial Sequence
  Description of Artificial Sequence: Synthetic oligonucleotide
gucagaucucuccccguuu

SEQ ID NO: 336711 - RNA, 19 nt, Artificial Sequence
  Description of Artificial Sequence: Synthetic oligonucleotide
ccacccgacccuuguuuug

SEQ ID NO: 336712 - RNA, 19 nt, Artificial Sequence
  Description of Artificial Sequence: Synthetic oligonucleotide
guacgugggcauccucgcu

SEQ ID NO: 336713 - RNA, 19 nt, Artificial Sequence
  Description of Artificial Sequence: Synthetic oligonucleotide
cuuugucgaggccuuuguu

SEQ ID NO: 336714 - RNA, 19 nt, Artificial Sequence
  Description of Artificial Sequence: Synthetic oligonucleotide
ccguuuaccacaaggucau

SEQ ID NO: 336715 - RNA, 19 nt, Artificial Sequence
  Description of Artificial Sequence: Synthetic oligonucleotide
ccuuccgccuauucucaca

SEQ ID NO: 336716 - RNA, 19 nt, Artificial Sequence
  Description of Artificial Sequence: Synthetic oligonucleotide
gcgguaauccagccugcaa

SEQ ID NO: 336717 - RNA, 19 nt, Artificial Sequence
  Description of Artificial Sequence: Synthetic oligonucleotide
cacuugggauauacacgcu

SEQ ID NO: 336718 - RNA, 19 nt, Artificial Sequence
  Description of Artificial Sequence: Synthetic oligonucleotide
cacguuggagcccuuccuu

SEQ ID NO: 336719 - RNA, 19 nt, Artificial Sequence
  Description of Artificial Sequence: Synthetic oligonucleotide
ccggcgcgacauaggaccc

SEQ ID NO: 336720 - RNA, 19 nt, Artificial Sequence
  Description of Artificial Sequence: Synthetic oligonucleotide
cagccgcauugacagaccu

SEQ ID NO: 336721 - RNA, 19 nt, Artificial Sequence
  Description of Artificial Sequence: Synthetic oligonucleotide
ggaccgcucgagcaccaaa

SEQ ID NO: 336722 - RNA, 19 nt, Artificial Sequence
  Description of Artificial Sequence: Synthetic oligonucleotide
ggcgcgacauaggacccga

SEQ ID NO: 336723 - RNA, 19 nt, Artificial Sequence
  Description of Artificial Sequence: Synthetic oligonucleotide
gaguugcgacagguuccga

SEQ ID NO: 336724 - RNA, 19 nt, Artificial Sequence
  Description of Artificial Sequence: Synthetic oligonucleotide
cgcgacauaggacccgaca

SEQ ID NO: 336725 - RNA, 19 nt, Artificial Sequence
  Description of Artificial Sequence: Synthetic oligonucleotide
ccgcgucaucgucaucaag

SEQ ID NO: 336726 - RNA, 19 nt, Artificial Sequence
  Description of Artificial Sequence: Synthetic oligonucleotide
gccgaucauuuaauggccu

SEQ ID NO: 336727 - RNA, 19 nt, Artificial Sequence
  Description of Artificial Sequence: Synthetic oligonucleotide
ggaucgacuuacagcugcu

SEQ ID NO: 336728 - RNA, 19 nt, Artificial Sequence
  Description of Artificial Sequence: Synthetic oligonucleotide
aggaccgcucgagcaccaa

SEQ ID NO: 336729 - RNA, 19 nt, Artificial Sequence
  Description of Artificial Sequence: Synthetic oligonucleotide
gucugacguacgaguagau

SEQ ID NO: 336730 - RNA, 19 nt, Artificial Sequence
  Description of Artificial Sequence: Synthetic oligonucleotide
gggcccggcgcgacauagg

SEQ ID NO: 336731 - RNA, 19 nt, Artificial Sequence
  Description of Artificial Sequence: Synthetic oligonucleotide
ccgcucgagcaccaaaaua

SEQ ID NO: 336732 - RNA, 19 nt, Artificial Sequence
  Description of Artificial Sequence: Synthetic oligonucleotide
guaucacauggcgguggau

SEQ ID NO: 336733 - RNA, 19 nt, Artificial Sequence
  Description of Artificial Sequence: Synthetic oligonucleotide
ccacguuggagcccuuccu

SEQ ID NO: 336734 - RNA, 19 nt, Artificial Sequence
  Description of Artificial Sequence: Synthetic oligonucleotide
gcccguaaggccagauggu

SEQ ID NO: 336735 - RNA, 19 nt, Artificial Sequence
  Description of Artificial Sequence: Synthetic oligonucleotide
gaagaaccucgcggacguu

SEQ ID NO: 336736 - RNA, 19 nt, Artificial Sequence
  Description of Artificial Sequence: Synthetic oligonucleotide
gcccggcgcgacauaggac

SEQ ID NO: 336737 - RNA, 19 nt, Artificial Sequence
  Description of Artificial Sequence: Synthetic oligonucleotide
ggagggcccggcgcgacau

SEQ ID NO: 336738 - RNA, 19 nt, Artificial Sequence
  Description of Artificial Sequence: Synthetic oligonucleotide
gcgcgacauaggacccgac

SEQ ID NO: 336739 - RNA, 19 nt, Artificial Sequence
  Description of Artificial Sequence: Synthetic oligonucleotide
ccgcauugacagaccuggu

SEQ ID NO: 336740 - RNA, 19 nt, Artificial Sequence
  Description of Artificial Sequence: Synthetic oligonucleotide
ccggccacccgacccuugu

SEQ ID NO: 336741 - RNA, 19 nt, Artificial Sequence
  Description of Artificial Sequence: Synthetic oligonucleotide
gcgucgggcccuagggguu

SEQ ID NO: 336742 - RNA, 19 nt, Artificial Sequence
  Description of Artificial Sequence: Synthetic oligonucleotide
ugaaguauaaccuucccag

SEQ ID NO: 336743 - RNA, 19 nt, Artificial Sequence
  Description of Artificial Sequence: Synthetic oligonucleotide
auauaagagguucucaggc

SEQ ID NO: 336744 - RNA, 19 nt, Artificial Sequence
  Description of Artificial Sequence: Synthetic oligonucleotide
aguaaagacaauuuugcuc

SEQ ID NO: 336745 - RNA, 19 nt, Artificial Sequence
  Description of Artificial Sequence: Synthetic oligonucleotide
agaauauacaugaugacac

SEQ ID NO: 336746 - RNA, 19 nt, Artificial Sequence
  Description of Artificial Sequence: Synthetic oligonucleotide
ucauagucaacacgcaucg

SEQ ID NO: 336747 - RNA, 19 nt, Artificial Sequence
  Description of Artificial Sequence: Synthetic oligonucleotide
guuaauaacggcaagauga

SEQ ID NO: 336748 - RNA, 19 nt, Artificial Sequence
  Description of Artificial Sequence: Synthetic oligonucleotide
gauggaacaacccagggac

SEQ ID NO: 336749 - RNA, 19 nt, Artificial Sequence
  Description of Artificial Sequence: Synthetic oligonucleotide
uaaaagaaguuccauaaaa

SEQ ID NO: 336750 - RNA, 19 nt, Artificial Sequence
  Description of Artificial Sequence: Synthetic oligonucleotide
uuggaaguauauaagaggu

SEQ ID NO: 336751 - RNA, 19 nt, Artificial Sequence
  Description of Artificial Sequence: Synthetic oligonucleotide
ucuacgucaaauuacagau

SEQ ID NO: 336752 - RNA, 19 nt, Artificial Sequence
  Description of Artificial Sequence: Synthetic oligonucleotide
aaauucuacgucaaauuac

SEQ ID NO: 336753 - RNA, 19 nt, Artificial Sequence
  Description of Artificial Sequence: Synthetic oligonucleotide
uauauaagagguucucagg

SEQ ID NO: 336754 - RNA, 19 nt, Artificial Sequence
  Description of Artificial Sequence: Synthetic oligonucleotide
ucuucaugauuucugacgc

SEQ ID NO: 336755 - RNA, 19 nt, Artificial Sequence
  Description of Artificial Sequence: Synthetic oligonucleotide
caugauuggaauagaaggg

SEQ ID NO: 336756 - RNA, 19 nt, Artificial Sequence
  Description of Artificial Sequence: Synthetic oligonucleotide
auagacauccacaaugugc

SEQ ID NO: 336757 - RNA, 19 nt, Artificial Sequence
  Description of Artificial Sequence: Synthetic oligonucleotide
caagaguggguuaauaacg

SEQ ID NO: 336758 - RNA, 19 nt, Artificial Sequence
  Description of Artificial Sequence: Synthetic oligonucleotide
uuuacaacagucugagugc

SEQ ID NO: 336759 - RNA, 19 nt, Artificial Sequence
  Description of Artificial Sequence: Synthetic oligonucleotide
aaaauucuacgucaaauua

SEQ ID NO: 336760 - RNA, 19 nt, Artificial Sequence
  Description of Artificial Sequence: Synthetic oligonucleotide
uaugguguauaacacggag

SEQ ID NO: 336761 - RNA, 19 nt, Artificial Sequence
  Description of Artificial Sequence: Synthetic oligonucleotide
aucuagacaagcuaccuag

SEQ ID NO: 336762 - RNA, 19 nt, Artificial Sequence
  Description of Artificial Sequence: Synthetic oligonucleotide
cuggauucgacuaaagagc

SEQ ID NO: 336763 - RNA, 19 nt, Artificial Sequence
  Description of Artificial Sequence: Synthetic oligonucleotide
cauauaguggaaauccagg

SEQ ID NO: 336764 - RNA, 19 nt, Artificial Sequence
  Description of Artificial Sequence: Synthetic oligonucleotide
uggggugggaaacacagcg

SEQ ID NO: 336765 - RNA, 19 nt, Artificial Sequence
  Description of Artificial Sequence: Synthetic oligonucleotide
uucguagauugcaugaucc

SEQ ID NO: 336766 - RNA, 19 nt, Artificial Sequence
  Description of Artificial Sequence: Synthetic oligonucleotide
uacgucaaauuacagauaa

SEQ ID NO: 336767 - RNA, 19 nt, Artificial Sequence
  Description of Artificial Sequence: Synthetic oligonucleotide
agagaguugugacuggugg

SEQ ID NO: 336768 - RNA, 19 nt, Artificial Sequence
  Description of Artificial Sequence: Synthetic oligonucleotide
uucauguagaguuauugcu

SEQ ID NO: 336769 - RNA, 19 nt, Artificial Sequence
  Description of Artificial Sequence: Synthetic oligonucleotide
gauacgugucuucauaccc

SEQ ID NO: 336770 - RNA, 19 nt, Artificial Sequence
  Description of Artificial Sequence: Synthetic oligonucleotide
aguaugguguauaacacgg

SEQ ID NO: 336771 - RNA, 19 nt, Artificial Sequence
  Description of Artificial Sequence: Synthetic oligonucleotide
aauuuugcucauacaaaac

SEQ ID NO: 336772 - RNA, 19 nt, Artificial Sequence
  Description of Artificial Sequence: Synthetic oligonucleotide
uucauacccggagagaugg

SEQ ID NO: 336773 - RNA, 19 nt, Artificial Sequence
  Description of Artificial Sequence: Synthetic oligonucleotide
aauucuacgucaaauuaca

SEQ ID NO: 336774 - RNA, 19 nt, Artificial Sequence
  Description of Artificial Sequence: Synthetic oligonucleotide
guugauugagugcaaauac

SEQ ID NO: 336775 - RNA, 19 nt, Artificial Sequence
  Description of Artificial Sequence: Synthetic oligonucleotide
ugagaagacugucuggccc

SEQ ID NO: 336776 - RNA, 19 nt, Artificial Sequence
  Description of Artificial Sequence: Synthetic oligonucleotide
aaguauauaagagguucuc

SEQ ID NO: 336777 - RNA, 19 nt, Artificial Sequence
  Description of Artificial Sequence: Synthetic oligonucleotide
agucaagacaucuuuggug

SEQ ID NO: 336778 - RNA, 19 nt, Artificial Sequence
  Description of Artificial Sequence: Synthetic oligonucleotide
agaguuauugcuuguccuc

SEQ ID NO: 336779 - RNA, 19 nt, Artificial Sequence
  Description of Artificial Sequence: Synthetic oligonucleotide
uauaacacggaguggucag

SEQ ID NO: 336780 - RNA, 19 nt, Artificial Sequence
  Description of Artificial Sequence: Synthetic oligonucleotide
gaaguauaaccuucccagg

SEQ ID NO: 336781 - RNA, 19 nt, Artificial Sequence
  Description of Artificial Sequence: Synthetic oligonucleotide
uucuacgucaaauuacaga

SEQ ID NO: 336782 - RNA, 19 nt, Artificial Sequence
  Description of Artificial Sequence: Synthetic oligonucleotide
gaacacaccuucaaagacg

SEQ ID NO: 336783 - RNA, 19 nt, Artificial Sequence
  Description of Artificial Sequence: Synthetic oligonucleotide
augauuggaauagaagggg

SEQ ID NO: 336784 - RNA, 19 nt, Artificial Sequence
  Description of Artificial Sequence: Synthetic oligonucleotide
aagaguggguuaauaacgg

SEQ ID NO: 336785 - RNA, 19 nt, Artificial Sequence
  Description of Artificial Sequence: Synthetic oligonucleotide
auauaguggaaauccagga

SEQ ID NO: 336786 - RNA, 19 nt, Artificial Sequence
  Description of Artificial Sequence: Synthetic oligonucleotide
gacuaaagagcucuccacc

SEQ ID NO: 336787 - RNA, 19 nt, Artificial Sequence
  Description of Artificial Sequence: Synthetic oligonucleotide
uaggcauuuaggcagguuc

SEQ ID NO: 336788 - RNA, 19 nt, Artificial Sequence
  Description of Artificial Sequence: Synthetic oligonucleotide
guuguuagaggguaaggug

SEQ ID NO: 336789 - RNA, 19 nt, Artificial Sequence
  Description of Artificial Sequence: Synthetic oligonucleotide
auggcacaaagacucuucc

SEQ ID NO: 336790 - RNA, 19 nt, Artificial Sequence
  Description of Artificial Sequence: Synthetic oligonucleotide
uuccggauaagcaucuuca

SEQ ID NO: 336791 - RNA, 19 nt, Artificial Sequence
  Description of Artificial Sequence: Synthetic oligonucleotide
uauaguggaaauccaggaa

SEQ ID NO: 336792 - RNA, 19 nt, Artificial Sequence
  Description of Artificial Sequence: Synthetic oligonucleotide
aaugcaaaaggagcccggg

SEQ ID NO: 336793 - RNA, 19 nt, Artificial Sequence
  Description of Artificial Sequence: Synthetic oligonucleotide
ugcuaaagaagggagguug

SEQ ID NO: 336794 - RNA, 19 nt, Artificial Sequence
  Description of Artificial Sequence: Synthetic oligonucleotide
uucccuagacccuccaacg

SEQ ID NO: 336795 - RNA, 19 nt, Artificial Sequence
  Description of Artificial Sequence: Synthetic oligonucleotide
aacgcccagucacugguac

SEQ ID NO: 336796 - RNA, 19 nt, Artificial Sequence
  Description of Artificial Sequence: Synthetic oligonucleotide
agaguggguuaauaacggc

SEQ ID NO: 336797 - RNA, 19 nt, Artificial Sequence
  Description of Artificial Sequence: Synthetic oligonucleotide
ucuagacaagcuaccuagg

SEQ ID NO: 336798 - RNA, 19 nt, Artificial Sequence
  Description of Artificial Sequence: Synthetic oligonucleotide
uggauucgacuaaagagcu

SEQ ID NO: 336799 - RNA, 19 nt, Artificial Sequence
  Description of Artificial Sequence: Synthetic oligonucleotide
acacggaguggucagagag

SEQ ID NO: 336800 - RNA, 19 nt, Artificial Sequence
  Description of Artificial Sequence: Synthetic oligonucleotide
cauguagaguuauugcuug

SEQ ID NO: 336801 - RNA, 19 nt, Artificial Sequence
  Description of Artificial Sequence: Synthetic oligonucleotide
gucaagacaucuuugguga

SEQ ID NO: 336802 - RNA, 19 nt, Artificial Sequence
  Description of Artificial Sequence: Synthetic oligonucleotide
cacaccuucaaagacgagg

SEQ ID NO: 336803 - RNA, 19 nt, Artificial Sequence
  Description of Artificial Sequence: Synthetic oligonucleotide
aaaccccagccuuugaaga

SEQ ID NO: 336804 - RNA, 19 nt, Artificial Sequence
  Description of Artificial Sequence: Synthetic oligonucleotide
ucgacuaaagagcucucca

SEQ ID NO: 336805 - RNA, 19 nt, Artificial Sequence
  Description of Artificial Sequence: Synthetic oligonucleotide
uauaagagguucucaggcu

SEQ ID NO: 336806 - RNA, 19 nt, Artificial Sequence
  Description of Artificial Sequence: Synthetic oligonucleotide
aggaagaccacacgugguc

SEQ ID NO: 336807 - RNA, 19 nt, Artificial Sequence
  Description of Artificial Sequence: Synthetic oligonucleotide
ccuggauucgacuaaagag

SEQ ID NO: 336808 - RNA, 19 nt, Artificial Sequence
  Description of Artificial Sequence: Synthetic oligonucleotide
uuggaugcgucuucuaucu

SEQ ID NO: 336809 - RNA, 19 nt, Artificial Sequence
  Description of Artificial Sequence: Synthetic oligonucleotide
guagaguuauugcuugucc

SEQ ID NO: 336810 - RNA, 19 nt, Artificial Sequence
  Description of Artificial Sequence: Synthetic oligonucleotide
ggcaucuggacucugaccc

SEQ ID NO: 336811 - RNA, 19 nt, Artificial Sequence
  Description of Artificial Sequence: Synthetic oligonucleotide
aguauaaccuucccaggcu

SEQ ID NO: 336812 - RNA, 19 nt, Artificial Sequence
  Description of Artificial Sequence: Synthetic oligonucleotide
cuagacaagcuaccuaggc

SEQ ID NO: 336813 - RNA, 19 nt, Artificial Sequence
  Description of Artificial Sequence: Synthetic oligonucleotide
uacgugucuucauacccgg

SEQ ID NO: 336814 - RNA, 19 nt, Artificial Sequence
  Description of Artificial Sequence: Synthetic oligonucleotide
aacucaacaagaguggguu

SEQ ID NO: 336815 - RNA, 19 nt, Artificial Sequence
  Description of Artificial Sequence: Synthetic oligonucleotide
ucaagagcaccucaccccu

SEQ ID NO: 336816 - RNA, 19 nt, Artificial Sequence
  Description of Artificial Sequence: Synthetic oligonucleotide
gcuaccuaggcauuuaggc

SEQ ID NO: 336817 - RNA, 19 nt, Artificial Sequence
  Description of Artificial Sequence: Synthetic oligonucleotide
acaaugugcacaaugugug

SEQ ID NO: 336818 - RNA, 19 nt, Artificial Sequence
  Description of Artificial Sequence: Synthetic oligonucleotide
cagaccugggcauacacac

SEQ ID NO: 336819 - RNA, 19 nt, Artificial Sequence
  Description of Artificial Sequence: Synthetic oligonucleotide
uugagugcaaauacuggau

SEQ ID NO: 336820 - RNA, 19 nt, Artificial Sequence
  Description of Artificial Sequence: Synthetic oligonucleotide
cuucggacaguccuggagc

SEQ ID NO: 336821 - RNA, 19 nt, Artificial Sequence
  Description of Artificial Sequence: Synthetic oligonucleotide
aaaugcaaaaggagcccgg

SEQ ID NO: 336822 - RNA, 19 nt, Artificial Sequence
  Description of Artificial Sequence: Synthetic oligonucleotide
cuacucaguggucagugcc

SEQ ID NO: 336823 - RNA, 19 nt, Artificial Sequence
  Description of Artificial Sequence: Synthetic oligonucleotide
uagaggguaagguggcuag

SEQ ID NO: 336824 - RNA, 19 nt, Artificial Sequence
  Description of Artificial Sequence: Synthetic oligonucleotide
uccuggauucgacuaaaga

SEQ ID NO: 336825 - RNA, 19 nt, Artificial Sequence
  Description of Artificial Sequence: Synthetic oligonucleotide
uccggagcuacguaguaug

SEQ ID NO: 336826 - RNA, 19 nt, Artificial Sequence
  Description of Artificial Sequence: Synthetic oligonucleotide
aaaggacgaguagggaagg

SEQ ID NO: 336827 - RNA, 19 nt, Artificial Sequence
  Description of Artificial Sequence: Synthetic oligonucleotide
gaccccagguuacaguagg

SEQ ID NO: 336828 - RNA, 19 nt, Artificial Sequence
  Description of Artificial Sequence: Synthetic oligonucleotide
cuuccucccagcauacagg

SEQ ID NO: 336829 - RNA, 19 nt, Artificial Sequence
  Description of Artificial Sequence: Synthetic oligonucleotide
cuagugggcagagacagag

SEQ ID NO: 336830 - RNA, 19 nt, Artificial Sequence
  Description of Artificial Sequence: Synthetic oligonucleotide
ucucuugucgaagauccgc

SEQ ID NO: 336831 - RNA, 19 nt, Artificial Sequence
  Description of Artificial Sequence: Synthetic oligonucleotide
aagcuaccuaggcauuuag

SEQ ID NO: 336832 - RNA, 19 nt, Artificial Sequence
  Description of Artificial Sequence: Synthetic oligonucleotide
uguugauugagugcaaaua

SEQ ID NO: 336833 - RNA, 19 nt, Artificial Sequence
  Description of Artificial Sequence: Synthetic oligonucleotide
ugauacuucugaccauucu

SEQ ID NO: 336834 - RNA, 19 nt, Artificial Sequence
  Description of Artificial Sequence: Synthetic oligonucleotide
uauaaccuucccaggcuca

SEQ ID NO: 336835 - RNA, 19 nt, Artificial Sequence
  Description of Artificial Sequence: Synthetic oligonucleotide
uggguuaauaacggcaaga

SEQ ID NO: 336836 - RNA, 19 nt, Artificial Sequence
  Description of Artificial Sequence: Synthetic oligonucleotide
ucaacacgcaucguggcca

SEQ ID NO: 336837 - RNA, 19 nt, Artificial Sequence
  Description of Artificial Sequence: Synthetic oligonucleotide
gagggaccuucguagauug

SEQ ID NO: 336838 - RNA, 19 nt, Artificial Sequence
  Description of Artificial Sequence: Synthetic oligonucleotide
uuuguuuaguaaagacaau

SEQ ID NO: 336839 - RNA, 19 nt, Artificial Sequence
  Description of Artificial Sequence: Synthetic oligonucleotide
cuugucgaagauccgcagc

SEQ ID NO: 336840 - RNA, 19 nt, Artificial Sequence
  Description of Artificial Sequence: Synthetic oligonucleotide
ucauacugucccauucgga

SEQ ID NO: 336841 - RNA, 19 nt, Artificial Sequence
  Description of Artificial Sequence: Synthetic oligonucleotide
accuucguagauugcauga

SEQ ID NO: 336842 - RNA, 19 nt, Artificial Sequence
  Description of Artificial Sequence: Synthetic oligonucleotide
guaguaugguguauaacac

SEQ ID NO: 336843 - RNA, 19 nt, Artificial Sequence
  Description of Artificial Sequence: Synthetic oligonucleotide
auacgugucuucauacccg

SEQ ID NO: 336844 - RNA, 19 nt, Artificial Sequence
  Description of Artificial Sequence: Synthetic oligonucleotide
agggacaugcccuguaaca

SEQ ID NO: 336845 - RNA, 19 nt, Artificial Sequence
  Description of Artificial Sequence: Synthetic oligonucleotide
cuucccuagacccuccaac

SEQ ID NO: 336846 - RNA, 19 nt, Artificial Sequence
  Description of Artificial Sequence: Synthetic oligonucleotide
ggccauauaguggaaaucc

SEQ ID NO: 336847 - RNA, 19 nt, Artificial Sequence
  Description of Artificial Sequence: Synthetic oligonucleotide
uuauugcuuguccuccagu

SEQ ID NO: 336848 - RNA, 19 nt, Artificial Sequence
  Description of Artificial Sequence: Synthetic oligonucleotide
ggagcuacguaguauggug

SEQ ID NO: 336849 - RNA, 19 nt, Artificial Sequence
  Description of Artificial Sequence: Synthetic oligonucleotide
uguagaguuauugcuuguc

SEQ ID NO: 336850 - RNA, 19 nt, Artificial Sequence
  Description of Artificial Sequence: Synthetic oligonucleotide
uucgacuaaagagcucucc

SEQ ID NO: 336851 - RNA, 19 nt, Artificial Sequence
  Description of Artificial Sequence: Synthetic oligonucleotide
ucguagauugcaugaucca

SEQ ID NO: 336852 - RNA, 19 nt, Artificial Sequence
  Description of Artificial Sequence: Synthetic oligonucleotide
gaguggguuaauaacggca

SEQ ID NO: 336853 - RNA, 19 nt, Artificial Sequence
  Description of Artificial Sequence: Synthetic oligonucleotide
cuagagccaguggagaccc

SEQ ID NO: 336854 - RNA, 19 nt, Artificial Sequence
  Description of Artificial Sequence: Synthetic oligonucleotide
ugucccauucggauacgug

SEQ ID NO: 336855 - RNA, 19 nt, Artificial Sequence
  Description of Artificial Sequence: Synthetic oligonucleotide
augacuaccuggcucugga

SEQ ID NO: 336856 - RNA, 19 nt, Artificial Sequence
  Description of Artificial Sequence: Synthetic oligonucleotide
ugaccauucuggguuagga

SEQ ID NO: 336857 - RNA, 19 nt, Artificial Sequence
  Description of Artificial Sequence: Synthetic oligonucleotide
ggcaagaugagcaagcaga

SEQ ID NO: 336858 - RNA, 19 nt, Artificial Sequence
  Description of Artificial Sequence: Synthetic oligonucleotide
ggguaagguggcuaguggg

SEQ ID NO: 336859 - RNA, 19 nt, Artificial Sequence
  Description of Artificial Sequence: Synthetic oligonucleotide
cuaccuaggcauuuaggca

SEQ ID NO: 336860 - RNA, 19 nt, Artificial Sequence
  Description of Artificial Sequence: Synthetic oligonucleotide
ucggauacgugucuucaua

SEQ ID NO: 336861 - RNA, 19 nt, Artificial Sequence
  Description of Artificial Sequence: Synthetic oligonucleotide
gaccuucguagauugcaug

SEQ ID NO: 336862 - RNA, 19 nt, Artificial Sequence
  Description of Artificial Sequence: Synthetic oligonucleotide
ucugagggaccuucguaga

SEQ ID NO: 336863 - RNA, 19 nt, Artificial Sequence
  Description of Artificial Sequence: Synthetic oligonucleotide
gguuaauaacggcaagaug

SEQ ID NO: 336864 - RNA, 19 nt, Artificial Sequence
  Description of Artificial Sequence: Synthetic oligonucleotide
uaauaacggcaagaugagc

SEQ ID NO: 336865 - RNA, 19 nt, Artificial Sequence
  Description of Artificial Sequence: Synthetic oligonucleotide
uuacaacagucugagugcu

SEQ ID NO: 336866 - RNA, 19 nt, Artificial Sequence
  Description of Artificial Sequence: Synthetic oligonucleotide
agauugcaugauccagggg

SEQ ID NO: 336867 - RNA, 19 nt, Artificial Sequence
  Description of Artificial Sequence: Synthetic oligonucleotide
auaaccuucccaggcucac

SEQ ID NO: 336868 - RNA, 19 nt, Artificial Sequence
  Description of Artificial Sequence: Synthetic oligonucleotide
ucccuagacccuccaacgc

SEQ ID NO: 336869 - RNA, 19 nt, Artificial Sequence
  Description of Artificial Sequence: Synthetic oligonucleotide
cuaaagaagggagguuggc

SEQ ID NO: 336870 - RNA, 19 nt, Artificial Sequence
  Description of Artificial Sequence: Synthetic oligonucleotide
agcccauugagaaauggcu

SEQ ID NO: 336871 - RNA, 19 nt, Artificial Sequence
  Description of Artificial Sequence: Synthetic oligonucleotide
ucccauucggauacguguc

SEQ ID NO: 336872 - RNA, 19 nt, Artificial Sequence
  Description of Artificial Sequence: Synthetic oligonucleotide
gcaagcagaggcuacucag

SEQ ID NO: 336873 - RNA, 19 nt, Artificial Sequence
  Description of Artificial Sequence: Synthetic oligonucleotide
uccaacgcccagucacugg

SEQ ID NO: 336874 - RNA, 19 nt, Artificial Sequence
  Description of Artificial Sequence: Synthetic oligonucleotide
cuucguagauugcaugauc

SEQ ID NO: 336875 - RNA, 19 nt, Artificial Sequence
  Description of Artificial Sequence: Synthetic oligonucleotide
gagacacuccaugacaauc

SEQ ID NO: 336876 - RNA, 19 nt, Artificial Sequence
  Description of Artificial Sequence: Synthetic oligonucleotide
uggaaguauauaagagguu

SEQ ID NO: 336877 - RNA, 19 nt, Artificial Sequence
  Description of Artificial Sequence: Synthetic oligonucleotide
auguugauugagugcaaau

SEQ ID NO: 336878 - RNA, 19 nt, Artificial Sequence
  Description of Artificial Sequence: Synthetic oligonucleotide
ugccagugcccacucacca

SEQ ID NO: 336879 - RNA, 19 nt, Artificial Sequence
  Description of Artificial Sequence: Synthetic oligonucleotide
aguuauugcuuguccucca

SEQ ID NO: 336880 - RNA, 19 nt, Artificial Sequence
  Description of Artificial Sequence: Synthetic oligonucleotide
uucggacaguccuggagca

SEQ ID NO: 336881 - RNA, 19 nt, Artificial Sequence
  Description of Artificial Sequence: Synthetic oligonucleotide
gucgaagauccgcagcacc

SEQ ID NO: 336882 - RNA, 19 nt, Artificial Sequence
  Description of Artificial Sequence: Synthetic oligonucleotide
guauaaccuucccaggcuc

SEQ ID NO: 336883 - RNA, 19 nt, Artificial Sequence
  Description of Artificial Sequence: Synthetic oligonucleotide
aaccccagccuuugaagau

SEQ ID NO: 336884 - RNA, 19 nt, Artificial Sequence
  Description of Artificial Sequence: Synthetic oligonucleotide
aguggagaccccagguuac

SEQ ID NO: 336885 - RNA, 19 nt, Artificial Sequence
  Description of Artificial Sequence: Synthetic oligonucleotide
gucaacacgcaucguggcc

SEQ ID NO: 336886 - RNA, 19 nt, Artificial Sequence
  Description of Artificial Sequence: Synthetic oligonucleotide
uucaaagacgagggaggag

SEQ ID NO: 336887 - RNA, 19 nt, Artificial Sequence
  Description of Artificial Sequence: Synthetic oligonucleotide
cacaaugugcacaaugugu

SEQ ID NO: 336888 - RNA, 19 nt, Artificial Sequence
  Description of Artificial Sequence: Synthetic oligonucleotide
uacccggagagauggcaag

SEQ ID NO: 336889 - RNA, 19 nt, Artificial Sequence
  Description of Artificial Sequence: Synthetic oligonucleotide
ggucagagaguugugacug

SEQ ID NO: 336890 - RNA, 19 nt, Artificial Sequence
  Description of Artificial Sequence: Synthetic oligonucleotide
ugugcacaaugugugggca

SEQ ID NO: 336891 - RNA, 19 nt, Artificial Sequence
  Description of Artificial Sequence: Synthetic oligonucleotide
acguaguaugguguauaac

SEQ ID NO: 336892 - RNA, 19 nt, Artificial Sequence
  Description of Artificial Sequence: Synthetic oligonucleotide
uccggauaagcaucuucac

SEQ ID NO: 336893 - RNA, 19 nt, Artificial Sequence
  Description of Artificial Sequence: Synthetic oligonucleotide
aagcagaggguuggaugcg

SEQ ID NO: 336894 - RNA, 19 nt, Artificial Sequence
  Description of Artificial Sequence: Synthetic oligonucleotide
agaggcuacucagugguca

SEQ ID NO: 336895 - RNA, 19 nt, Artificial Sequence
  Description of Artificial Sequence: Synthetic oligonucleotide
guugccuucggacaguccu

SEQ ID NO: 336896 - RNA, 19 nt, Artificial Sequence
  Description of Artificial Sequence: Synthetic oligonucleotide
ccuugcuaaagaagggagg

SEQ ID NO: 336897 - RNA, 19 nt, Artificial Sequence
  Description of Artificial Sequence: Synthetic oligonucleotide
gcccagcuaacacagaggc

SEQ ID NO: 336898 - RNA, 19 nt, Artificial Sequence
  Description of Artificial Sequence: Synthetic oligonucleotide
caccaggccauauagugga

SEQ ID NO: 336899 - RNA, 19 nt, Artificial Sequence
  Description of Artificial Sequence: Synthetic oligonucleotide
aguggguuaauaacggcaa

SEQ ID NO: 336900 - RNA, 19 nt, Artificial Sequence
  Description of Artificial Sequence: Synthetic oligonucleotide
uguugugcacacuggugau

SEQ ID NO: 336901 - RNA, 19 nt, Artificial Sequence
  Description of Artificial Sequence: Synthetic oligonucleotide
acaugucacaggauuuguc

SEQ ID NO: 336902 - RNA, 19 nt, Artificial Sequence
  Description of Artificial Sequence: Synthetic oligonucleotide
ggcugagugacaccuacug

SEQ ID NO: 336903 - RNA, 19 nt, Artificial Sequence
  Description of Artificial Sequence: Synthetic oligonucleotide
uaucugggcuccacauagc

SEQ ID NO: 336904 - RNA, 19 nt, Artificial Sequence
  Description of Artificial Sequence: Synthetic oligonucleotide
gaucuagacaagcuaccua

SEQ ID NO: 336905 - RNA, 19 nt, Artificial Sequence
  Description of Artificial Sequence: Synthetic oligonucleotide
acacgcaucguggccaagg

SEQ ID NO: 336906 - RNA, 19 nt, Artificial Sequence
  Description of Artificial Sequence: Synthetic oligonucleotide
auucuagagccaguggaga

SEQ ID NO: 336907 - RNA, 19 nt, Artificial Sequence
  Description of Artificial Sequence: Synthetic oligonucleotide
ggggagaugcaugaaauac

SEQ ID NO: 336908 - RNA, 19 nt, Artificial Sequence
  Description of Artificial Sequence: Synthetic oligonucleotide
gugagaagacugucuggcc

SEQ ID NO: 336909 - RNA, 19 nt, Artificial Sequence
  Description of Artificial Sequence: Synthetic oligonucleotide
aggccauauaguggaaauc

SEQ ID NO: 336910 - RNA, 19 nt, Artificial Sequence
  Description of Artificial Sequence: Synthetic oligonucleotide
auucggauacgugucuuca

SEQ ID NO: 336911 - RNA, 19 nt, Artificial Sequence
  Description of Artificial Sequence: Synthetic oligonucleotide
ccuuggguaaaccccagcc

SEQ ID NO: 336912 - RNA, 19 nt, Artificial Sequence
  Description of Artificial Sequence: Synthetic oligonucleotide
ggauacgugucuucauacc

SEQ ID NO: 336913 - RNA, 19 nt, Artificial Sequence
  Description of Artificial Sequence: Synthetic oligonucleotide
guauaacacggagugguca

SEQ ID NO: 336914 - RNA, 19 nt, Artificial Sequence
  Description of Artificial Sequence: Synthetic oligonucleotide
ggcuagugggcagagacag

SEQ ID NO: 336915 - RNA, 19 nt, Artificial Sequence
  Description of Artificial Sequence: Synthetic oligonucleotide
caagcaggagucccugcag

SEQ ID NO: 336916 - RNA, 19 nt, Artificial Sequence
  Description of Artificial Sequence: Synthetic oligonucleotide
uggaacaacccagggacau

SEQ ID NO: 336917 - RNA, 19 nt, Artificial Sequence
  Description of Artificial Sequence: Synthetic oligonucleotide
gcauugggccuuuuggaag

SEQ ID NO: 336918 - RNA, 19 nt, Artificial Sequence
  Description of Artificial Sequence: Synthetic oligonucleotide
gaaguauauaagagguucu

SEQ ID NO: 336919 - RNA, 19 nt, Artificial Sequence
  Description of Artificial Sequence: Synthetic oligonucleotide
auguagaguuauugcuugu

SEQ ID NO: 336920 - RNA, 19 nt, Artificial Sequence
  Description of Artificial Sequence: Synthetic oligonucleotide
ucaauccuggggagucccc

SEQ ID NO: 336921 - RNA, 19 nt, Artificial Sequence
  Description of Artificial Sequence: Synthetic oligonucleotide
caguucaagcaggaguccc

SEQ ID NO: 336922 - RNA, 19 nt, Artificial Sequence
  Description of Artificial Sequence: Synthetic oligonucleotide
agugccucggggcccuagg

SEQ ID NO: 336923 - RNA, 19 nt, Artificial Sequence
  Description of Artificial Sequence: Synthetic oligonucleotide
uuaggcagguucaguucaa

SEQ ID NO: 336924 - RNA, 19 nt, Artificial Sequence
  Description of Artificial Sequence: Synthetic oligonucleotide
ucuccucgguccuggauuc

SEQ ID NO: 336925 - RNA, 19 nt, Artificial Sequence
  Description of Artificial Sequence: Synthetic oligonucleotide
uggcuagugggcagagaca

SEQ ID NO: 336926 - RNA, 19 nt, Artificial Sequence
  Description of Artificial Sequence: Synthetic oligonucleotide
agcuaccuaggcauuuagg

SEQ ID NO: 336927 - RNA, 19 nt, Artificial Sequence
  Description of Artificial Sequence: Synthetic oligonucleotide
cauucggauacgugucuuc

SEQ ID NO: 336928 - RNA, 19 nt, Artificial Sequence
  Description of Artificial Sequence: Synthetic oligonucleotide
auucuacgucaaauuacag

SEQ ID NO: 336929 - RNA, 19 nt, Artificial Sequence
  Description of Artificial Sequence: Synthetic oligonucleotide
uacccacauagcagaauau

SEQ ID NO: 336930 - RNA, 19 nt, Artificial Sequence
  Description of Artificial Sequence: Synthetic oligonucleotide
aggcucacccaugggagcg

SEQ ID NO: 336931 - RNA, 19 nt, Artificial Sequence
  Description of Artificial Sequence: Synthetic oligonucleotide
ggaugcgucuucuaucuuc

SEQ ID NO: 336932 - RNA, 19 nt, Artificial Sequence
  Description of Artificial Sequence: Synthetic oligonucleotide
gccaugauuggaauagaag

SEQ ID NO: 336933 - RNA, 19 nt, Artificial Sequence
  Description of Artificial Sequence: Synthetic oligonucleotide
ucgguccuggauucgacua

SEQ ID NO: 336934 - RNA, 19 nt, Artificial Sequence
  Description of Artificial Sequence: Synthetic oligonucleotide
agcacuuccggagcuacgu

SEQ ID NO: 336935 - RNA, 19 nt, Artificial Sequence
  Description of Artificial Sequence: Synthetic oligonucleotide
cagagaguugugacuggug

SEQ ID NO: 336936 - RNA, 19 nt, Artificial Sequence
  Description of Artificial Sequence: Synthetic oligonucleotide
gguaagguggcuagugggc

SEQ ID NO: 336937 - RNA, 19 nt, Artificial Sequence
  Description of Artificial Sequence: Synthetic oligonucleotide
cugugaaugccuggucucc

SEQ ID NO: 336938 - RNA, 19 nt, Artificial Sequence
  Description of Artificial Sequence: Synthetic oligonucleotide
guugugacuggugguuucc

SEQ ID NO: 336939 - RNA, 19 nt, Artificial Sequence
  Description of Artificial Sequence: Synthetic oligonucleotide
ccagcuaacacagaggcca

SEQ ID NO: 336940 - RNA, 19 nt, Artificial Sequence
  Description of Artificial Sequence: Synthetic oligonucleotide
gucccauucggauacgugu

SEQ ID NO: 336941 - RNA, 19 nt, Artificial Sequence
  Description of Artificial Sequence: Synthetic oligonucleotide
cuugcuaaagaagggaggu

SEQ ID NO: 336942 - RNA, 19 nt, Artificial Sequence
  Description of Artificial Sequence: Synthetic oligonucleotide
cugcguugccuucggacag

SEQ ID NO: 336943 - RNA, 19 nt, Artificial Sequence
  Description of Artificial Sequence: Synthetic oligonucleotide
ugugaaugccuggucuccu

SEQ ID NO: 336944 - RNA, 19 nt, Artificial Sequence
  Description of Artificial Sequence: Synthetic oligonucleotide
acaacacccuuggguaaac

SEQ ID NO: 336945 - RNA, 19 nt, Artificial Sequence
  Description of Artificial Sequence: Synthetic oligonucleotide
gcaagaugagcaagcagag

SEQ ID NO: 336946 - RNA, 19 nt, Artificial Sequence
  Description of Artificial Sequence: Synthetic oligonucleotide
caguccuucugacggcugc

SEQ ID NO: 336947 - RNA, 19 nt, Artificial Sequence
  Description of Artificial Sequence: Synthetic oligonucleotide
aguuuacaacagucugagu

SEQ ID NO: 336948 - RNA, 19 nt, Artificial Sequence
  Description of Artificial Sequence: Synthetic oligonucleotide
gguguauaacacggagugg

SEQ ID NO: 336949 - RNA, 19 nt, Artificial Sequence
  Description of Artificial Sequence: Synthetic oligonucleotide
uucugauacuucugaccau

SEQ ID NO: 336950 - RNA, 19 nt, Artificial Sequence
  Description of Artificial Sequence: Synthetic oligonucleotide
gagugacaccuacugccac

SEQ ID NO: 336951 - RNA, 19 nt, Artificial Sequence
  Description of Artificial Sequence: Synthetic oligonucleotide
acggcuggugugcagugga

SEQ ID NO: 336952 - RNA, 19 nt, Artificial Sequence
  Description of Artificial Sequence: Synthetic oligonucleotide
uucggauacgugucuucau

SEQ ID NO: 336953 - RNA, 19 nt, Artificial Sequence
  Description of Artificial Sequence: Synthetic oligonucleotide
cacgcaucguggccaaggc

SEQ ID NO: 336954 - RNA, 19 nt, Artificial Sequence
  Description of Artificial Sequence: Synthetic oligonucleotide
ucauacccggagagauggc

SEQ ID NO: 336955 - RNA, 19 nt, Artificial Sequence
  Description of Artificial Sequence: Synthetic oligonucleotide
cugagugcugaacacaccu

SEQ ID NO: 336956 - RNA, 19 nt, Artificial Sequence
  Description of Artificial Sequence: Synthetic oligonucleotide
cucaacaagaguggguuaa

SEQ ID NO: 336957 - RNA, 19 nt, Artificial Sequence
  Description of Artificial Sequence: Synthetic oligonucleotide
cacauacuccucuguugug

SEQ ID NO: 336958 - RNA, 19 nt, Artificial Sequence
  Description of Artificial Sequence: Synthetic oligonucleotide
aagguggcuagugggcaga

SEQ ID NO: 336959 - RNA, 19 nt, Artificial Sequence
  Description of Artificial Sequence: Synthetic oligonucleotide
cauuuaggcagguucaguu

SEQ ID NO: 336960 - RNA, 19 nt, Artificial Sequence
  Description of Artificial Sequence: Synthetic oligonucleotide
ccuagacccuccaacgccc

SEQ ID NO: 336961 - RNA, 19 nt, Artificial Sequence
  Description of Artificial Sequence: Synthetic oligonucleotide
uagacccuccaacgcccag

SEQ ID NO: 336962 - RNA, 19 nt, Artificial Sequence
  Description of Artificial Sequence: Synthetic oligonucleotide
gaccacacgugguccugcc

SEQ ID NO: 336963 - RNA, 19 nt, Artificial Sequence
  Description of Artificial Sequence: Synthetic oligonucleotide
ucaacaagaguggguuaau

SEQ ID NO: 336964 - RNA, 19 nt, Artificial Sequence
  Description of Artificial Sequence: Synthetic oligonucleotide
ugugacuggugguuuccuu

SEQ ID NO: 336965 - RNA, 19 nt, Artificial Sequence
  Description of Artificial Sequence: Synthetic oligonucleotide
auucgacuaaagagcucuc

SEQ ID NO: 336966 - RNA, 19 nt, Artificial Sequence
  Description of Artificial Sequence: Synthetic oligonucleotide
uagugggcagagacagagu

SEQ ID NO: 336967 - RNA, 19 nt, Artificial Sequence
  Description of Artificial Sequence: Synthetic oligonucleotide
gagaguugugacugguggu

SEQ ID NO: 336968 - RNA, 19 nt, Artificial Sequence
  Description of Artificial Sequence: Synthetic oligonucleotide
ggcccuaggaccagcauug

SEQ ID NO: 336969 - RNA, 19 nt, Artificial Sequence
  Description of Artificial Sequence: Synthetic oligonucleotide
cacccuuggguaaacccca

SEQ ID NO: 336970 - RNA, 19 nt, Artificial Sequence
  Description of Artificial Sequence: Synthetic oligonucleotide
ggaagaccacacguggucc

SEQ ID NO: 336971 - RNA, 19 nt, Artificial Sequence
  Description of Artificial Sequence: Synthetic oligonucleotide
uaaccuucccaggcucacc

SEQ ID NO: 336972 - RNA, 19 nt, Artificial Sequence
  Description of Artificial Sequence: Synthetic oligonucleotide
guugugcacacuggugaug

SEQ ID NO: 336973 - RNA, 19 nt, Artificial Sequence
  Description of Artificial Sequence: Synthetic oligonucleotide
gugcacaaugugugggcac

SEQ ID NO: 336974 - RNA, 19 nt, Artificial Sequence
  Description of Artificial Sequence: Synthetic oligonucleotide
cugagggagccaccccucc

SEQ ID NO: 336975 - RNA, 19 nt, Artificial Sequence
  Description of Artificial Sequence: Synthetic oligonucleotide
acucaacaagaguggguua

SEQ ID NO: 336976 - RNA, 19 nt, Artificial Sequence
  Description of Artificial Sequence: Synthetic oligonucleotide
augggagcggagagacagc

SEQ ID NO: 336977 - RNA, 19 nt, Artificial Sequence
  Description of Artificial Sequence: Synthetic oligonucleotide
caguggagucugagggacc

SEQ ID NO: 336978 - RNA, 19 nt, Artificial Sequence
  Description of Artificial Sequence: Synthetic oligonucleotide
gccuuugaagaugggaaug

SEQ ID NO: 336979 - RNA, 19 nt, Artificial Sequence
  Description of Artificial Sequence: Synthetic oligonucleotide
auaacacggaguggucaga

SEQ ID NO: 336980 - RNA, 19 nt, Artificial Sequence
  Description of Artificial Sequence: Synthetic oligonucleotide
cauugggccuuuuggaagu

SEQ ID NO: 336981 - RNA, 19 nt, Artificial Sequence
  Description of Artificial Sequence: Synthetic oligonucleotide
gaacucaacaagagugggu

SEQ ID NO: 336982 - RNA, 19 nt, Artificial Sequence
  Description of Artificial Sequence: Synthetic oligonucleotide
cccuagacccuccaacgcc

SEQ ID NO: 336983 - RNA, 19 nt, Artificial Sequence
  Description of Artificial Sequence: Synthetic oligonucleotide
cuguaacaacuuccacaac

SEQ ID NO: 336984 - RNA, 19 nt, Artificial Sequence
  Description of Artificial Sequence: Synthetic oligonucleotide
ccuucggacaguccuggag

SEQ ID NO: 336985 - RNA, 19 nt, Artificial Sequence
  Description of Artificial Sequence: Synthetic oligonucleotide
ggcuacucaguggucagug

SEQ ID NO: 336986 - RNA, 19 nt, Artificial Sequence
  Description of Artificial Sequence: Synthetic oligonucleotide
ggcauugggccuuuuggaa

SEQ ID NO: 336987 - RNA, 19 nt, Artificial Sequence
  Description of Artificial Sequence: Synthetic oligonucleotide
guaugguguauaacacgga

SEQ ID NO: 336988 - RNA, 19 nt, Artificial Sequence
  Description of Artificial Sequence: Synthetic oligonucleotide
ggcauuuaggcagguucag

SEQ ID NO: 336989 - RNA, 19 nt, Artificial Sequence
  Description of Artificial Sequence: Synthetic oligonucleotide
cuacgucaaauuacagaua

SEQ ID NO: 336990 - RNA, 19 nt, Artificial Sequence
  Description of Artificial Sequence: Synthetic oligonucleotide
uugcuaaagaagggagguu

SEQ ID NO: 336991 - RNA, 19 nt, Artificial Sequence
  Description of Artificial Sequence: Synthetic oligonucleotide
ggaguggucagagaguugu

SEQ ID NO: 336992 - RNA, 19 nt, Artificial Sequence
  Description of Artificial Sequence: Synthetic oligonucleotide
acaagcuaccuaggcauuu

SEQ ID NO: 336993 - RNA, 19 nt, Artificial Sequence
  Description of Artificial Sequence: Synthetic oligonucleotide
ggaccagauggaacaaccc

SEQ ID NO: 336994 - RNA, 19 nt, Artificial Sequence
  Description of Artificial Sequence: Synthetic oligonucleotide
caaccccugagggagccac

SEQ ID NO: 336995 - RNA, 19 nt, Artificial Sequence
  Description of Artificial Sequence: Synthetic oligonucleotide
uuccggagcuacguaguau

SEQ ID NO: 336996 - RNA, 19 nt, Artificial Sequence
  Description of Artificial Sequence: Synthetic oligonucleotide
caacccagggacaugcccu

SEQ ID NO: 336997 - RNA, 19 nt, Artificial Sequence
  Description of Artificial Sequence: Synthetic oligonucleotide
gggaccuucguagauugca

SEQ ID NO: 336998 - RNA, 19 nt, Artificial Sequence
  Description of Artificial Sequence: Synthetic oligonucleotide
ugacuaccuggcucuggau

SEQ ID NO: 336999 - RNA, 19 nt, Artificial Sequence
  Description of Artificial Sequence: Synthetic oligonucleotide
agggaccuucguagauugc

SEQ ID NO: 337000 - RNA, 19 nt, Artificial Sequence
  Description of Artificial Sequence: Synthetic oligonucleotide
gcuacucaguggucagugc

SEQ ID NO: 337001 - RNA, 19 nt, Artificial Sequence
  Description of Artificial Sequence: Synthetic oligonucleotide
cacgugguccugcccuugc

SEQ ID NO: 337002 - RNA, 19 nt, Artificial Sequence
  Description of Artificial Sequence: Synthetic oligonucleotide
agaggguuggaugcgucuu

SEQ ID NO: 337003 - RNA, 19 nt, Artificial Sequence
  Description of Artificial Sequence: Synthetic oligonucleotide
caacacccuuggguaaacc

SEQ ID NO: 337004 - RNA, 19 nt, Artificial Sequence
  Description of Artificial Sequence: Synthetic oligonucleotide
agacccuccaacgcccagu

SEQ ID NO: 337005 - RNA, 19 nt, Artificial Sequence
  Description of Artificial Sequence: Synthetic oligonucleotide
agguaccccagagcucggg

SEQ ID NO: 337006 - RNA, 19 nt, Artificial Sequence
  Description of Artificial Sequence: Synthetic oligonucleotide
agcagaggguuggaugcgu

SEQ ID NO: 337007 - RNA, 19 nt, Artificial Sequence
  Description of Artificial Sequence: Synthetic oligonucleotide
ggggugggaaacacagcgg

SEQ ID NO: 337008 - RNA, 19 nt, Artificial Sequence
  Description of Artificial Sequence: Synthetic oligonucleotide
auacccggagagauggcaa

SEQ ID NO: 337009 - RNA, 19 nt, Artificial Sequence
  Description of Artificial Sequence: Synthetic oligonucleotide
cccauugagaaauggcuaa

SEQ ID NO: 337010 - RNA, 19 nt, Artificial Sequence
  Description of Artificial Sequence: Synthetic oligonucleotide
aacacgcaucguggccaag

SEQ ID NO: 337011 - RNA, 19 nt, Artificial Sequence
  Description of Artificial Sequence: Synthetic oligonucleotide
auggaacaacccagggaca

SEQ ID NO: 337012 - RNA, 19 nt, Artificial Sequence
  Description of Artificial Sequence: Synthetic oligonucleotide
gggcccaguccuucugacg

SEQ ID NO: 337013 - RNA, 19 nt, Artificial Sequence
  Description of Artificial Sequence: Synthetic oligonucleotide
cuccacggcacgagcuuuc

SEQ ID NO: 337014 - RNA, 19 nt, Artificial Sequence
  Description of Artificial Sequence: Synthetic oligonucleotide
cggauacgugucuucauac

SEQ ID NO: 337015 - RNA, 19 nt, Artificial Sequence
  Description of Artificial Sequence: Synthetic oligonucleotide
caagagcaccucaccccuc

SEQ ID NO: 337016 - RNA, 19 nt, Artificial Sequence
  Description of Artificial Sequence: Synthetic oligonucleotide
ccggagcuacguaguaugg

SEQ ID NO: 337017 - RNA, 19 nt, Artificial Sequence
  Description of Artificial Sequence: Synthetic oligonucleotide
acgcccagucacugguaca

SEQ ID NO: 337018 - RNA, 19 nt, Artificial Sequence
  Description of Artificial Sequence: Synthetic oligonucleotide
acgugguccugcccuugcu

SEQ ID NO: 337019 - RNA, 19 nt, Artificial Sequence
  Description of Artificial Sequence: Synthetic oligonucleotide
uccacggcacgagcuuucu

SEQ ID NO: 337020 - RNA, 19 nt, Artificial Sequence
  Description of Artificial Sequence: Synthetic oligonucleotide
cuccaacgcccagucacug

SEQ ID NO: 337021 - RNA, 19 nt, Artificial Sequence
  Description of Artificial Sequence: Synthetic oligonucleotide
cagaggcuacucagugguc

SEQ ID NO: 337022 - RNA, 19 nt, Artificial Sequence
  Description of Artificial Sequence: Synthetic oligonucleotide
uggaugcgucuucuaucuu

SEQ ID NO: 337023 - RNA, 19 nt, Artificial Sequence
  Description of Artificial Sequence: Synthetic oligonucleotide
ugcguugccuucggacagu

SEQ ID NO: 337024 - RNA, 19 nt, Artificial Sequence
  Description of Artificial Sequence: Synthetic oligonucleotide
cuucaugauuucugacgcu

SEQ ID NO: 337025 - RNA, 19 nt, Artificial Sequence
  Description of Artificial Sequence: Synthetic oligonucleotide
cuagacccuccaacgccca

SEQ ID NO: 337026 - RNA, 19 nt, Artificial Sequence
  Description of Artificial Sequence: Synthetic oligonucleotide
gcggagagacagcccauug

SEQ ID NO: 337027 - RNA, 19 nt, Artificial Sequence
  Description of Artificial Sequence: Synthetic oligonucleotide
ggaacaacccagggacaug

SEQ ID NO: 337028 - RNA, 19 nt, Artificial Sequence
  Description of Artificial Sequence: Synthetic oligonucleotide
acccaugggagcggagaga

SEQ ID NO: 337029 - RNA, 19 nt, Artificial Sequence
  Description of Artificial Sequence: Synthetic oligonucleotide
caccuucaaagacgaggga

SEQ ID NO: 337030 - RNA, 19 nt, Artificial Sequence
  Description of Artificial Sequence: Synthetic oligonucleotide
caggaagaccacacguggu

SEQ ID NO: 337031 - RNA, 19 nt, Artificial Sequence
  Description of Artificial Sequence: Synthetic oligonucleotide
ggaucuagacaagcuaccu

SEQ ID NO: 337032 - RNA, 19 nt, Artificial Sequence
  Description of Artificial Sequence: Synthetic oligonucleotide
gcccuugcuaaagaaggga

SEQ ID NO: 337033 - RNA, 19 nt, Artificial Sequence
  Description of Artificial Sequence: Synthetic oligonucleotide
agacucuucccaaccuguu

SEQ ID NO: 337034 - RNA, 19 nt, Artificial Sequence
  Description of Artificial Sequence: Synthetic oligonucleotide
uggucuccucgguccugga

SEQ ID NO: 337035 - RNA, 19 nt, Artificial Sequence
  Description of Artificial Sequence: Synthetic oligonucleotide
caagcuaccuaggcauuua

SEQ ID NO: 337036 - RNA, 19 nt, Artificial Sequence
  Description of Artificial Sequence: Synthetic oligonucleotide
caccucaccccuccucaca

SEQ ID NO: 337037 - RNA, 19 nt, Artificial Sequence
  Description of Artificial Sequence: Synthetic oligonucleotide
agcggagagacagcccauu

SEQ ID NO: 337038 - RNA, 19 nt, Artificial Sequence
  Description of Artificial Sequence: Synthetic oligonucleotide
cuuccggagcuacguagua

SEQ ID NO: 337039 - RNA, 19 nt, Artificial Sequence
  Description of Artificial Sequence: Synthetic oligonucleotide
ucggacaguccuggagcau

SEQ ID NO: 337040 - RNA, 19 nt, Artificial Sequence
  Description of Artificial Sequence: Synthetic oligonucleotide
cuccucgguccuggauucg

SEQ ID NO: 337041 - RNA, 19 nt, Artificial Sequence
  Description of Artificial Sequence: Synthetic oligonucleotide
caacacgcaucguggccaa

SEQ ID NO: 337042 - RNA, 19 nt, Artificial Sequence
  Description of Artificial Sequence: Synthetic oligonucleotide
gugccucggggcccuagga

SEQ ID NO: 337043 - RNA, 19 nt, Artificial Sequence
  Description of Artificial Sequence: Synthetic oligonucleotide
cucgguccuggauucgacu

SEQ ID NO: 337044 - RNA, 19 nt, Artificial Sequence
  Description of Artificial Sequence: Synthetic oligonucleotide
guuagaggguaagguggcu

SEQ ID NO: 337045 - RNA, 19 nt, Artificial Sequence
  Description of Artificial Sequence: Synthetic oligonucleotide
ggacacggcuggugugcag

SEQ ID NO: 337046 - RNA, 19 nt, Artificial Sequence
  Description of Artificial Sequence: Synthetic oligonucleotide
cucaccccuccucacacau

SEQ ID NO: 337047 - RNA, 19 nt, Artificial Sequence
  Description of Artificial Sequence: Synthetic oligonucleotide
cagaaucagccagaggcau

SEQ ID NO: 337048 - RNA, 19 nt, Artificial Sequence
  Description of Artificial Sequence: Synthetic oligonucleotide
ucggggcccuaggaccagc

SEQ ID NO: 337049 - RNA, 19 nt, Artificial Sequence
  Description of Artificial Sequence: Synthetic oligonucleotide
cccuuggguaaaccccagc

SEQ ID NO: 337050 - RNA, 19 nt, Artificial Sequence
  Description of Artificial Sequence: Synthetic oligonucleotide
ggcucacccaugggagcgg

SEQ ID NO: 337051 - RNA, 19 nt, Artificial Sequence
  Description of Artificial Sequence: Synthetic oligonucleotide
gcacugggaggcccuccag

SEQ ID NO: 337052 - RNA, 19 nt, Artificial Sequence
  Description of Artificial Sequence: Synthetic oligonucleotide
gacaagcuaccuaggcauu

SEQ ID NO: 337053 - RNA, 19 nt, Artificial Sequence
  Description of Artificial Sequence: Synthetic oligonucleotide
ccucaauccuggggagucc

SEQ ID NO: 337054 - RNA, 19 nt, Artificial Sequence
  Description of Artificial Sequence: Synthetic oligonucleotide
cucggggcccuaggaccag

SEQ ID NO: 337055 - RNA, 19 nt, Artificial Sequence
  Description of Artificial Sequence: Synthetic oligonucleotide
gcccuaggaccagcauugg

SEQ ID NO: 337056 - RNA, 19 nt, Artificial Sequence
  Description of Artificial Sequence: Synthetic oligonucleotide
caucccgaugagcaauguu

SEQ ID NO: 337057 - RNA, 19 nt, Artificial Sequence
  Description of Artificial Sequence: Synthetic oligonucleotide
ccacacgugguccugcccu

SEQ ID NO: 337058 - RNA, 19 nt, Artificial Sequence
  Description of Artificial Sequence: Synthetic oligonucleotide
gggccuuuuggaaguauau

SEQ ID NO: 337059 - RNA, 19 nt, Artificial Sequence
  Description of Artificial Sequence: Synthetic oligonucleotide
cccuaggaccagcauugga

SEQ ID NO: 337060 - RNA, 19 nt, Artificial Sequence
  Description of Artificial Sequence: Synthetic oligonucleotide
gggcccuaggaccagcauu

SEQ ID NO: 337061 - RNA, 19 nt, Artificial Sequence
  Description of Artificial Sequence: Synthetic oligonucleotide
ggaccuucguagauugcau

SEQ ID NO: 337062 - RNA, 19 nt, Artificial Sequence
  Description of Artificial Sequence: Synthetic oligonucleotide
cguugccuucggacagucc

SEQ ID NO: 337063 - RNA, 19 nt, Artificial Sequence
  Description of Artificial Sequence: Synthetic oligonucleotide
gcccgggcucaagagcacc

SEQ ID NO: 337064 - RNA, 19 nt, Artificial Sequence
  Description of Artificial Sequence: Synthetic oligonucleotide
gcuagugggcagagacaga

SEQ ID NO: 337065 - RNA, 19 nt, Artificial Sequence
  Description of Artificial Sequence: Synthetic oligonucleotide
cuaccuggcucuggaucua

SEQ ID NO: 337066 - RNA, 19 nt, Artificial Sequence
  Description of Artificial Sequence: Synthetic oligonucleotide
cugucccauucggauacgu

SEQ ID NO: 337067 - RNA, 19 nt, Artificial Sequence
  Description of Artificial Sequence: Synthetic oligonucleotide
gcuacguaguaugguguau

SEQ ID NO: 337068 - RNA, 19 nt, Artificial Sequence
  Description of Artificial Sequence: Synthetic oligonucleotide
gcacuuccggagcuacgua

SEQ ID NO: 337069 - RNA, 19 nt, Artificial Sequence
  Description of Artificial Sequence: Synthetic oligonucleotide
ggguuggaugcgucuucua

SEQ ID NO: 337070 - RNA, 19 nt, Artificial Sequence
  Description of Artificial Sequence: Synthetic oligonucleotide
gggcacccugcaagggccc

SEQ ID NO: 337071 - RNA, 19 nt, Artificial Sequence
  Description of Artificial Sequence: Synthetic oligonucleotide
ccgccucuucagaagcaga

SEQ ID NO: 337072 - RNA, 19 nt, Artificial Sequence
  Description of Artificial Sequence: Synthetic oligonucleotide
gagcggagagacagcccau

SEQ ID NO: 337073 - RNA, 19 nt, Artificial Sequence
  Description of Artificial Sequence: Synthetic oligonucleotide
gcguugccuucggacaguc

SEQ ID NO: 337074 - RNA, 19 nt, Artificial Sequence
  Description of Artificial Sequence: Synthetic oligonucleotide
cacacgugguccugcccuu

SEQ ID NO: 337075 - RNA, 19 nt, Artificial Sequence
  Description of Artificial Sequence: Synthetic oligonucleotide
gccuucggacaguccugga

SEQ ID NO: 337076 - RNA, 19 nt, Artificial Sequence
  Description of Artificial Sequence: Synthetic oligonucleotide
cccauucggauacgugucu

SEQ ID NO: 337077 - RNA, 19 nt, Artificial Sequence
  Description of Artificial Sequence: Synthetic oligonucleotide
ccuccaacgcccagucacu

SEQ ID NO: 337078 - RNA, 19 nt, Artificial Sequence
  Description of Artificial Sequence: Synthetic oligonucleotide
ccuucguagauugcaugau

SEQ ID NO: 337079 - RNA, 19 nt, Artificial Sequence
  Description of Artificial Sequence: Synthetic oligonucleotide
ggggcccuaggaccagcau

SEQ ID NO: 337080 - RNA, 19 nt, Artificial Sequence
  Description of Artificial Sequence: Synthetic oligonucleotide
cggagcuacguaguauggu

SEQ ID NO: 337081 - RNA, 19 nt, Artificial Sequence
  Description of Artificial Sequence: Synthetic oligonucleotide
cuggcccaccaggccauau

SEQ ID NO: 337082 - RNA, 19 nt, Artificial Sequence
  Description of Artificial Sequence: Synthetic oligonucleotide
ccauucggauacgugucuu

SEQ ID NO: 337083 - RNA, 19 nt, Artificial Sequence
  Description of Artificial Sequence: Synthetic oligonucleotide
ccuaggcauuuaggcaggu

SEQ ID NO: 337084 - RNA, 19 nt, Artificial Sequence
  Description of Artificial Sequence: Synthetic oligonucleotide
ccaaccccugagggagcca

SEQ ID NO: 337085 - RNA, 19 nt, Artificial Sequence
  Description of Artificial Sequence: Synthetic oligonucleotide
ccacggcacgagcuuucuu

SEQ ID NO: 337086 - RNA, 19 nt, Artificial Sequence
  Description of Artificial Sequence: Synthetic oligonucleotide
gauucgauaacuuuuaucc

SEQ ID NO: 337087 - RNA, 19 nt, Artificial Sequence
  Description of Artificial Sequence: Synthetic oligonucleotide
uuggauaacaaaauaaggg

SEQ ID NO: 337088 - RNA, 19 nt, Artificial Sequence
  Description of Artificial Sequence: Synthetic oligonucleotide
uagguaauaagcaugguag

SEQ ID NO: 337089 - RNA, 19 nt, Artificial Sequence
  Description of Artificial Sequence: Synthetic oligonucleotide
ucaaauacaaggucaaggg

SEQ ID NO: 337090 - RNA, 19 nt, Artificial Sequence
  Description of Artificial Sequence: Synthetic oligonucleotide
aauuacaugaaccuauacu

SEQ ID NO: 337091 - RNA, 19 nt, Artificial Sequence
  Description of Artificial Sequence: Synthetic oligonucleotide
uggaacauaauccauaacu

SEQ ID NO: 337092 - RNA, 19 nt, Artificial Sequence
  Description of Artificial Sequence: Synthetic oligonucleotide
ucuuuaacaacucaacuca

SEQ ID NO: 337093 - RNA, 19 nt, Artificial Sequence
  Description of Artificial Sequence: Synthetic oligonucleotide
uuucuauuaaaguaaguag

SEQ ID NO: 337094 - RNA, 19 nt, Artificial Sequence
  Description of Artificial Sequence: Synthetic oligonucleotide
aguaguguaagguacagag

SEQ ID NO: 337095 - RNA, 19 nt, Artificial Sequence
  Description of Artificial Sequence: Synthetic oligonucleotide
aaugguaacaugucuuaac

SEQ ID NO: 337096 - RNA, 19 nt, Artificial Sequence
  Description of Artificial Sequence: Synthetic oligonucleotide
aaaaguacuaccucuguga

SEQ ID NO: 337097 - RNA, 19 nt, Artificial Sequence
  Description of Artificial Sequence: Synthetic oligonucleotide
uuauuauucggucacggcc

SEQ ID NO: 337098 - RNA, 19 nt, Artificial Sequence
  Description of Artificial Sequence: Synthetic oligonucleotide
uguaaaacuauugucuugg

SEQ ID NO: 337099 - RNA, 19 nt, Artificial Sequence
  Description of Artificial Sequence: Synthetic oligonucleotide
cuuuggauagguaauaagc

SEQ ID NO: 337100 - RNA, 19 nt, Artificial Sequence
  Description of Artificial Sequence: Synthetic oligonucleotide
aaaucaaacaagcaauggu

SEQ ID NO: 337101 - RNA, 19 nt, Artificial Sequence
  Description of Artificial Sequence: Synthetic oligonucleotide
ugaucugccaaugauaggg

SEQ ID NO: 337102 - RNA, 19 nt, Artificial Sequence
  Description of Artificial Sequence: Synthetic oligonucleotide
aagaauaugcacucuuuag

SEQ ID NO: 337103 - RNA, 19 nt, Artificial Sequence
  Description of Artificial Sequence: Synthetic oligonucleotide
caaugauagggcaauaugg

SEQ ID NO: 337104 - RNA, 19 nt, Artificial Sequence
  Description of Artificial Sequence: Synthetic oligonucleotide
uacuagcucaaauacaagg

SEQ ID NO: 337105 - RNA, 19 nt, Artificial Sequence
  Description of Artificial Sequence: Synthetic oligonucleotide
uuuggauagguaauaagca

SEQ ID NO: 337106 - RNA, 19 nt, Artificial Sequence
  Description of Artificial Sequence: Synthetic oligonucleotide
uguauuucaguucugccca

SEQ ID NO: 337107 - RNA, 19 nt, Artificial Sequence
  Description of Artificial Sequence: Synthetic oligonucleotide
aauuauccacacaagaguc

SEQ ID NO: 337108 - RNA, 19 nt, Artificial Sequence
  Description of Artificial Sequence: Synthetic oligonucleotide
uuaaguaaacagaaucccc

SEQ ID NO: 337109 - RNA, 19 nt, Artificial Sequence
  Description of Artificial Sequence: Synthetic oligonucleotide
aacuuuuauccucugcuag

SEQ ID NO: 337110 - RNA, 19 nt, Artificial Sequence
  Description of Artificial Sequence: Synthetic oligonucleotide
uguacaagugugaaugaag

SEQ ID NO: 337111 - RNA, 19 nt, Artificial Sequence
  Description of Artificial Sequence: Synthetic oligonucleotide
agucauauaagucacuggu

SEQ ID NO: 337112 - RNA, 19 nt, Artificial Sequence
  Description of Artificial Sequence: Synthetic oligonucleotide
uaguguaagguacagaguc

SEQ ID NO: 337113 - RNA, 19 nt, Artificial Sequence
  Description of Artificial Sequence: Synthetic oligonucleotide
aacauaauccauaacuuug

SEQ ID NO: 337114 - RNA, 19 nt, Artificial Sequence
  Description of Artificial Sequence: Synthetic oligonucleotide
uuauaauugaaugaacgac

SEQ ID NO: 337115 - RNA, 19 nt, Artificial Sequence
  Description of Artificial Sequence: Synthetic oligonucleotide
uuuauccucugcuagaaac

SEQ ID NO: 337116 - RNA, 19 nt, Artificial Sequence
  Description of Artificial Sequence: Synthetic oligonucleotide
uauacuaccccaaaguaua

SEQ ID NO: 337117 - RNA, 19 nt, Artificial Sequence
  Description of Artificial Sequence: Synthetic oligonucleotide
cacauaaugcuuuggauag

SEQ ID NO: 337118 - RNA, 19 nt, Artificial Sequence
  Description of Artificial Sequence: Synthetic oligonucleotide
aguaaguaguguaagguac

SEQ ID NO: 337119 - RNA, 19 nt, Artificial Sequence
  Description of Artificial Sequence: Synthetic oligonucleotide
ugucuuaacuugaaaacga

SEQ ID NO: 337120 - RNA, 19 nt, Artificial Sequence
  Description of Artificial Sequence: Synthetic oligonucleotide
acaaguuauaauugaauga

SEQ ID NO: 337121 - RNA, 19 nt, Artificial Sequence
  Description of Artificial Sequence: Synthetic oligonucleotide
uggauuguaaaacuauugu

SEQ ID NO: 337122 - RNA, 19 nt, Artificial Sequence
  Description of Artificial Sequence: Synthetic oligonucleotide
ugugaaugaagaauaugca

SEQ ID NO: 337123 - RNA, 19 nt, Artificial Sequence
  Description of Artificial Sequence: Synthetic oligonucleotide
ugauagggcaauauggugu

SEQ ID NO: 337124 - RNA, 19 nt, Artificial Sequence
  Description of Artificial Sequence: Synthetic oligonucleotide
uauuaaaguaaguagugua

SEQ ID NO: 337125 - RNA, 19 nt, Artificial Sequence
  Description of Artificial Sequence: Synthetic oligonucleotide
ucuacuacaucuugggaug

SEQ ID NO: 337126 - RNA, 19 nt, Artificial Sequence
  Description of Artificial Sequence: Synthetic oligonucleotide
aauuaggcuagucaguuuu

SEQ ID NO: 337127 - RNA, 19 nt, Artificial Sequence
  Description of Artificial Sequence: Synthetic oligonucleotide
uauuauucggucacggcca

SEQ ID NO: 337128 - RNA, 19 nt, Artificial Sequence
  Description of Artificial Sequence: Synthetic oligonucleotide
uggauagguaauaagcaug

SEQ ID NO: 337129 - RNA, 19 nt, Artificial Sequence
  Description of Artificial Sequence: Synthetic oligonucleotide
aacagaauccccacuuugc

SEQ ID NO: 337130 - RNA, 19 nt, Artificial Sequence
  Description of Artificial Sequence: Synthetic oligonucleotide
aauaugcacucuuuagucu

SEQ ID NO: 337131 - RNA, 19 nt, Artificial Sequence
  Description of Artificial Sequence: Synthetic oligonucleotide
auuggauaacaaaauaagg

SEQ ID NO: 337132 - RNA, 19 nt, Artificial Sequence
  Description of Artificial Sequence: Synthetic oligonucleotide
aacacauguaucacacucc

SEQ ID NO: 337133 - RNA, 19 nt, Artificial Sequence
  Description of Artificial Sequence: Synthetic oligonucleotide
aauuauguggaagcccugg

SEQ ID NO: 337134 - RNA, 19 nt, Artificial Sequence
  Description of Artificial Sequence: Synthetic oligonucleotide
uuguauaucugccagucaa

SEQ ID NO: 337135 - RNA, 19 nt, Artificial Sequence
  Description of Artificial Sequence: Synthetic oligonucleotide
uauaaacccaccauacuuc

SEQ ID NO: 337136 - RNA, 19 nt, Artificial Sequence
  Description of Artificial Sequence: Synthetic oligonucleotide
uaguaucaguuccaguugg

SEQ ID NO: 337137 - RNA, 19 nt, Artificial Sequence
  Description of Artificial Sequence: Synthetic oligonucleotide
agaauaugcacucuuuagu

SEQ ID NO: 337138 - RNA, 19 nt, Artificial Sequence
  Description of Artificial Sequence: Synthetic oligonucleotide
cuccacaacuaauuaaugg

SEQ ID NO: 337139 - RNA, 19 nt, Artificial Sequence
  Description of Artificial Sequence: Synthetic oligonucleotide
ugucuuggaaaguuccugg

SEQ ID NO: 337140 - RNA, 19 nt, Artificial Sequence
  Description of Artificial Sequence: Synthetic oligonucleotide
acaaaauaaggguaacucu

SEQ ID NO: 337141 - RNA, 19 nt, Artificial Sequence
  Description of Artificial Sequence: Synthetic oligonucleotide
guaaaguuuggguaaauga

SEQ ID NO: 337142 - RNA, 19 nt, Artificial Sequence
  Description of Artificial Sequence: Synthetic oligonucleotide
uugaaaacgacuugggaau

SEQ ID NO: 337143 - RNA, 19 nt, Artificial Sequence
  Description of Artificial Sequence: Synthetic oligonucleotide
aacuuaguaguaccaaggu

SEQ ID NO: 337144 - RNA, 19 nt, Artificial Sequence
  Description of Artificial Sequence: Synthetic oligonucleotide
gaaaaguuaugagaguagc

SEQ ID NO: 337145 - RNA, 19 nt, Artificial Sequence
  Description of Artificial Sequence: Synthetic oligonucleotide
auaucugccagucaacacu

SEQ ID NO: 337146 - RNA, 19 nt, Artificial Sequence
  Description of Artificial Sequence: Synthetic oligonucleotide
gugaguaugguacuguagc

SEQ ID NO: 337147 - RNA, 19 nt, Artificial Sequence
  Description of Artificial Sequence: Synthetic oligonucleotide
aaaguuaugagaguagcuu

SEQ ID NO: 337148 - RNA, 19 nt, Artificial Sequence
  Description of Artificial Sequence: Synthetic oligonucleotide
gaaugaacgacugccacag

SEQ ID NO: 337149 - RNA, 19 nt, Artificial Sequence
  Description of Artificial Sequence: Synthetic oligonucleotide
gguaacaugucuuaacuug

SEQ ID NO: 337150 - RNA, 19 nt, Artificial Sequence
  Description of Artificial Sequence: Synthetic oligonucleotide
auauaaacccaccauacuu

SEQ ID NO: 337151 - RNA, 19 nt, Artificial Sequence
  Description of Artificial Sequence: Synthetic oligonucleotide
gagauggaugcauauaaac

SEQ ID NO: 337152 - RNA, 19 nt, Artificial Sequence
  Description of Artificial Sequence: Synthetic oligonucleotide
uuacaaguuauaauugaau

SEQ ID NO: 337153 - RNA, 19 nt, Artificial Sequence
  Description of Artificial Sequence: Synthetic oligonucleotide
aaugauagggcaauauggu

SEQ ID NO: 337154 - RNA, 19 nt, Artificial Sequence
  Description of Artificial Sequence: Synthetic oligonucleotide
ucaggaaaauuuuggaggu

SEQ ID NO: 337155 - RNA, 19 nt, Artificial Sequence
  Description of Artificial Sequence: Synthetic oligonucleotide
aauacaaggucaagggaag

SEQ ID NO: 337156 - RNA, 19 nt, Artificial Sequence
  Description of Artificial Sequence: Synthetic oligonucleotide
uuugaccaaacuccuacca

SEQ ID NO: 337157 - RNA, 19 nt, Artificial Sequence
  Description of Artificial Sequence: Synthetic oligonucleotide
uuuauuauucggucacggc

SEQ ID NO: 337158 - RNA, 19 nt, Artificial Sequence
  Description of Artificial Sequence: Synthetic oligonucleotide
auuuauuauucggucacgg

SEQ ID NO: 337159 - RNA, 19 nt, Artificial Sequence
  Description of Artificial Sequence: Synthetic oligonucleotide
aacaacuagggcaaaauaa

SEQ ID NO: 337160 - RNA, 19 nt, Artificial Sequence
  Description of Artificial Sequence: Synthetic oligonucleotide
uaauauugcugccuauaug

SEQ ID NO: 337161 - RNA, 19 nt, Artificial Sequence
  Description of Artificial Sequence: Synthetic oligonucleotide
uucgauaacuuuuauccuc

SEQ ID NO: 337162 - RNA, 19 nt, Artificial Sequence
  Description of Artificial Sequence: Synthetic oligonucleotide
gauaacuuuuauccucugc

SEQ ID NO: 337163 - RNA, 19 nt, Artificial Sequence
  Description of Artificial Sequence: Synthetic oligonucleotide
auggugugauguuucaaac

SEQ ID NO: 337164 - RNA, 19 nt, Artificial Sequence
  Description of Artificial Sequence: Synthetic oligonucleotide
ucuuaacuugaaaacgacu

SEQ ID NO: 337165 - RNA, 19 nt, Artificial Sequence
  Description of Artificial Sequence: Synthetic oligonucleotide
auuacuuucuagcacuuaa

SEQ ID NO: 337166 - RNA, 19 nt, Artificial Sequence
  Description of Artificial Sequence: Synthetic oligonucleotide
acaugaaccuauacuaccc

SEQ ID NO: 337167 - RNA, 19 nt, Artificial Sequence
  Description of Artificial Sequence: Synthetic oligonucleotide
agaauccccacuuugcuca

SEQ ID NO: 337168 - RNA, 19 nt, Artificial Sequence
  Description of Artificial Sequence: Synthetic oligonucleotide
guuuugaccaaacuccuac

SEQ ID NO: 337169 - RNA, 19 nt, Artificial Sequence
  Description of Artificial Sequence: Synthetic oligonucleotide
uuggguaaaugagauaacc

SEQ ID NO: 337170 - RNA, 19 nt, Artificial Sequence
  Description of Artificial Sequence: Synthetic oligonucleotide
ugaguucauaucaaauaac

SEQ ID NO: 337171 - RNA, 19 nt, Artificial Sequence
  Description of Artificial Sequence: Synthetic oligonucleotide
cuugaaaacgacuugggaa

SEQ ID NO: 337172 - RNA, 19 nt, Artificial Sequence
  Description of Artificial Sequence: Synthetic oligonucleotide
aaccuauacuaccccaaag

SEQ ID NO: 337173 - RNA, 19 nt, Artificial Sequence
  Description of Artificial Sequence: Synthetic oligonucleotide
gugaaugaagaauaugcac

SEQ ID NO: 337174 - RNA, 19 nt, Artificial Sequence
  Description of Artificial Sequence: Synthetic oligonucleotide
aaaacgacuugggaaucac

SEQ ID NO: 337175 - RNA, 19 nt, Artificial Sequence
  Description of Artificial Sequence: Synthetic oligonucleotide
gauagggcaauauggugug

SEQ ID NO: 337176 - RNA, 19 nt, Artificial Sequence
  Description of Artificial Sequence: Synthetic oligonucleotide
aaauaaggguaacucuggu

SEQ ID NO: 337177 - RNA, 19 nt, Artificial Sequence
  Description of Artificial Sequence: Synthetic oligonucleotide
uucuggguuacaauaaaau

SEQ ID NO: 337178 - RNA, 19 nt, Artificial Sequence
  Description of Artificial Sequence: Synthetic oligonucleotide
ugaguacacuaacaauuag

SEQ ID NO: 337179 - RNA, 19 nt, Artificial Sequence
  Description of Artificial Sequence: Synthetic oligonucleotide
auaacuuugucuaugcagu

SEQ ID NO: 337180 - RNA, 19 nt, Artificial Sequence
  Description of Artificial Sequence: Synthetic oligonucleotide
ugucucucauuuauuauuc

SEQ ID NO: 337181 - RNA, 19 nt, Artificial Sequence
  Description of Artificial Sequence: Synthetic oligonucleotide
ucucauuuauuauucgguc

SEQ ID NO: 337182 - RNA, 19 nt, Artificial Sequence
  Description of Artificial Sequence: Synthetic oligonucleotide
gagucauauaagucacugg

SEQ ID NO: 337183 - RNA, 19 nt, Artificial Sequence
  Description of Artificial Sequence: Synthetic oligonucleotide
aaaguacuaccucugugaa

SEQ ID NO: 337184 - RNA, 19 nt, Artificial Sequence
  Description of Artificial Sequence: Synthetic oligonucleotide
uccauaacuuugucuaugc

SEQ ID NO: 337185 - RNA, 19 nt, Artificial Sequence
  Description of Artificial Sequence: Synthetic oligonucleotide
gcaaauuucaaucccauuc

SEQ ID NO: 337186 - RNA, 19 nt, Artificial Sequence
  Description of Artificial Sequence: Synthetic oligonucleotide
aaauccagugcaucuggca

SEQ ID NO: 337187 - RNA, 19 nt, Artificial Sequence
  Description of Artificial Sequence: Synthetic oligonucleotide
accuauacuaccccaaagu

SEQ ID NO: 337188 - RNA, 19 nt, Artificial Sequence
  Description of Artificial Sequence: Synthetic oligonucleotide
accuuccaaaauuacauga

SEQ ID NO: 337189 - RNA, 19 nt, Artificial Sequence
  Description of Artificial Sequence: Synthetic oligonucleotide
uacuuucuagcacuuaaaa

SEQ ID NO: 337190 - RNA, 19 nt, Artificial Sequence
  Description of Artificial Sequence: Synthetic oligonucleotide
ccagucaacacuuuggacc

SEQ ID NO: 337191 - RNA, 19 nt, Artificial Sequence
  Description of Artificial Sequence: Synthetic oligonucleotide
cagacugauucacugagag

SEQ ID NO: 337192 - RNA, 19 nt, Artificial Sequence
  Description of Artificial Sequence: Synthetic oligonucleotide
uuaaauaaugaguggccau

SEQ ID NO: 337193 - RNA, 19 nt, Artificial Sequence
  Description of Artificial Sequence: Synthetic oligonucleotide
auuaaauaaugaguggcca

SEQ ID NO: 337194 - RNA, 19 nt, Artificial Sequence
  Description of Artificial Sequence: Synthetic oligonucleotide
ugaggcaacagcacauuca

SEQ ID NO: 337195 - RNA, 19 nt, Artificial Sequence
  Description of Artificial Sequence: Synthetic oligonucleotide
acgagggucaaaguugugc

SEQ ID NO: 337196 - RNA, 19 nt, Artificial Sequence
  Description of Artificial Sequence: Synthetic oligonucleotide
uuuggaggacuucuuagaa

SEQ ID NO: 337197 - RNA, 19 nt, Artificial Sequence
  Description of Artificial Sequence: Synthetic oligonucleotide
auagguaauaagcauggua

SEQ ID NO: 337198 - RNA, 19 nt, Artificial Sequence
  Description of Artificial Sequence: Synthetic oligonucleotide
acacauaaugcuuuggaua

SEQ ID NO: 337199 - RNA, 19 nt, Artificial Sequence
  Description of Artificial Sequence: Synthetic oligonucleotide
uauaagucacuggugacac

SEQ ID NO: 337200 - RNA, 19 nt, Artificial Sequence
  Description of Artificial Sequence: Synthetic oligonucleotide
ucaaauggcaacaguguua

SEQ ID NO: 337201 - RNA, 19 nt, Artificial Sequence
  Description of Artificial Sequence: Synthetic oligonucleotide
uuauuuuacuuccucugua

SEQ ID NO: 337202 - RNA, 19 nt, Artificial Sequence
  Description of Artificial Sequence: Synthetic oligonucleotide
ucauguauuucaguucugc

SEQ ID NO: 337203 - RNA, 19 nt, Artificial Sequence
  Description of Artificial Sequence: Synthetic oligonucleotide
uacagcuauacuuugcuuu

SEQ ID NO: 337204 - RNA, 19 nt, Artificial Sequence
  Description of Artificial Sequence: Synthetic oligonucleotide
uauugcugccuauauguac

SEQ ID NO: 337205 - RNA, 19 nt, Artificial Sequence
  Description of Artificial Sequence: Synthetic oligonucleotide
uuugucuaugcagucagga

SEQ ID NO: 337206 - RNA, 19 nt, Artificial Sequence
  Description of Artificial Sequence: Synthetic oligonucleotide
augagaguagcuugccuuc

SEQ ID NO: 337207 - RNA, 19 nt, Artificial Sequence
  Description of Artificial Sequence: Synthetic oligonucleotide
uaugagaguagcuugccuu

SEQ ID NO: 337208 - RNA, 19 nt, Artificial Sequence
  Description of Artificial Sequence: Synthetic oligonucleotide
aggcacuuggaugaagucc

SEQ ID NO: 337209 - RNA, 19 nt, Artificial Sequence
  Description of Artificial Sequence: Synthetic oligonucleotide
uguauagauacugaauuuu

SEQ ID NO: 337210 - RNA, 19 nt, Artificial Sequence
  Description of Artificial Sequence: Synthetic oligonucleotide
agccaagaaauccagugca

SEQ ID NO: 337211 - RNA, 19 nt, Artificial Sequence
  Description of Artificial Sequence: Synthetic oligonucleotide
cagcuuaucacugguaucc

SEQ ID NO: 337212 - RNA, 19 nt, Artificial Sequence
  Description of Artificial Sequence: Synthetic oligonucleotide
ugaaugaacgacugccaca

SEQ ID NO: 337213 - RNA, 19 nt, Artificial Sequence
  Description of Artificial Sequence: Synthetic oligonucleotide
acaaggagagguugguauc

SEQ ID NO: 337214 - RNA, 19 nt, Artificial Sequence
  Description of Artificial Sequence: Synthetic oligonucleotide
cuggauugaguucauauca

SEQ ID NO: 337215 - RNA, 19 nt, Artificial Sequence
  Description of Artificial Sequence: Synthetic oligonucleotide
gacugauucacugagaggu

SEQ ID NO: 337216 - RNA, 19 nt, Artificial Sequence
  Description of Artificial Sequence: Synthetic oligonucleotide
cauaaaugcaagugccuug

SEQ ID NO: 337217 - RNA, 19 nt, Artificial Sequence
  Description of Artificial Sequence: Synthetic oligonucleotide
ugauucgauaacuuuuauc

SEQ ID NO: 337218 - RNA, 19 nt, Artificial Sequence
  Description of Artificial Sequence: Synthetic oligonucleotide
uacuggauuguaaaacuau

SEQ ID NO: 337219 - RNA, 19 nt, Artificial Sequence
  Description of Artificial Sequence: Synthetic oligonucleotide
agagucauauaagucacug

SEQ ID NO: 337220 - RNA, 19 nt, Artificial Sequence
  Description of Artificial Sequence: Synthetic oligonucleotide
uuuucuggguuacaauaaa

SEQ ID NO: 337221 - RNA, 19 nt, Artificial Sequence
  Description of Artificial Sequence: Synthetic oligonucleotide
gaggcaacagcacauucac

SEQ ID NO: 337222 - RNA, 19 nt, Artificial Sequence
  Description of Artificial Sequence: Synthetic oligonucleotide
uuacuagcucaaauacaag

SEQ ID NO: 337223 - RNA, 19 nt, Artificial Sequence
  Description of Artificial Sequence: Synthetic oligonucleotide
ugcuuaaaaguacuaccuc

SEQ ID NO: 337224 - RNA, 19 nt, Artificial Sequence
  Description of Artificial Sequence: Synthetic oligonucleotide
uguauaucugccagucaac

SEQ ID NO: 337225 - RNA, 19 nt, Artificial Sequence
  Description of Artificial Sequence: Synthetic oligonucleotide
ugguuuacuagcucaaaua

SEQ ID NO: 337226 - RNA, 19 nt, Artificial Sequence
  Description of Artificial Sequence: Synthetic oligonucleotide
aggacuaguaggaacauca

SEQ ID NO: 337227 - RNA, 19 nt, Artificial Sequence
  Description of Artificial Sequence: Synthetic oligonucleotide
cugccauaaaugcaagugc

SEQ ID NO: 337228 - RNA, 19 nt, Artificial Sequence
  Description of Artificial Sequence: Synthetic oligonucleotide
acugaguacacuaacaauu

SEQ ID NO: 337229 - RNA, 19 nt, Artificial Sequence
  Description of Artificial Sequence: Synthetic oligonucleotide
ucauaucaaauaacuuagu

SEQ ID NO: 337230 - RNA, 19 nt, Artificial Sequence
  Description of Artificial Sequence: Synthetic oligonucleotide
aaugauucgauaacuuuua

SEQ ID NO: 337231 - RNA, 19 nt, Artificial Sequence
  Description of Artificial Sequence: Synthetic oligonucleotide
cuuugcuuaaaaguacuac

SEQ ID NO: 337232 - RNA, 19 nt, Artificial Sequence
  Description of Artificial Sequence: Synthetic oligonucleotide
gaauugaggcaacagcaca

SEQ ID NO: 337233 - RNA, 19 nt, Artificial Sequence
  Description of Artificial Sequence: Synthetic oligonucleotide
ugagaaucauuggaaacac

SEQ ID NO: 337234 - RNA, 19 nt, Artificial Sequence
  Description of Artificial Sequence: Synthetic oligonucleotide
auaaacccaccauacuuca

SEQ ID NO: 337235 - RNA, 19 nt, Artificial Sequence
  Description of Artificial Sequence: Synthetic oligonucleotide
ugguauccaaaauguacug

SEQ ID NO: 337236 - RNA, 19 nt, Artificial Sequence
  Description of Artificial Sequence: Synthetic oligonucleotide
guaguaucaguuccaguug

SEQ ID NO: 337237 - RNA, 19 nt, Artificial Sequence
  Description of Artificial Sequence: Synthetic oligonucleotide
cauucacccaacaaugcuc

SEQ ID NO: 337238 - RNA, 19 nt, Artificial Sequence
  Description of Artificial Sequence: Synthetic oligonucleotide
cuuaguaguaccaagguuu

SEQ ID NO: 337239 - RNA, 19 nt, Artificial Sequence
  Description of Artificial Sequence: Synthetic oligonucleotide
ugaaccuauacuaccccaa

SEQ ID NO: 337240 - RNA, 19 nt, Artificial Sequence
  Description of Artificial Sequence: Synthetic oligonucleotide
cuagcucaaauacaagguc

SEQ ID NO: 337241 - RNA, 19 nt, Artificial Sequence
  Description of Artificial Sequence: Synthetic oligonucleotide
uaaguaguguaagguacag

SEQ ID NO: 337242 - RNA, 19 nt, Artificial Sequence
  Description of Artificial Sequence: Synthetic oligonucleotide
uuucuggguuacaauaaaa

SEQ ID NO: 337243 - RNA, 19 nt, Artificial Sequence
  Description of Artificial Sequence: Synthetic oligonucleotide
acuugaaaacgacuuggga

SEQ ID NO: 337244 - RNA, 19 nt, Artificial Sequence
  Description of Artificial Sequence: Synthetic oligonucleotide
ugccuauauguacaagugu

SEQ ID NO: 337245 - RNA, 19 nt, Artificial Sequence
  Description of Artificial Sequence: Synthetic oligonucleotide
cuauuuguuuugaccaaac

SEQ ID NO: 337246 - RNA, 19 nt, Artificial Sequence
  Description of Artificial Sequence: Synthetic oligonucleotide
uugggauguuccaugaaau

SEQ ID NO: 337247 - RNA, 19 nt, Artificial Sequence
  Description of Artificial Sequence: Synthetic oligonucleotide
aacccauuauuucuuuaaa

SEQ ID NO: 337248 - RNA, 19 nt, Artificial Sequence
  Description of Artificial Sequence: Synthetic oligonucleotide
ugaguaugguacuguagcu

SEQ ID NO: 337249 - RNA, 19 nt, Artificial Sequence
  Description of Artificial Sequence: Synthetic oligonucleotide
aacaugucuuaacuugaaa

SEQ ID NO: 337250 - RNA, 19 nt, Artificial Sequence
  Description of Artificial Sequence: Synthetic oligonucleotide
auucgauaacuuuuauccu

SEQ ID NO: 337251 - RNA, 19 nt, Artificial Sequence
  Description of Artificial Sequence: Synthetic oligonucleotide
gauacugaauuuucaggaa

SEQ ID NO: 337252 - RNA, 19 nt, Artificial Sequence
  Description of Artificial Sequence: Synthetic oligonucleotide
auaacacauaaugcuuugg

SEQ ID NO: 337253 - RNA, 19 nt, Artificial Sequence
  Description of Artificial Sequence: Synthetic oligonucleotide
uuacuuucuagcacuuaaa

SEQ ID NO: 337254 - RNA, 19 nt, Artificial Sequence
  Description of Artificial Sequence: Synthetic oligonucleotide
auauaagucacuggugaca

SEQ ID NO: 337255 - RNA, 19 nt, Artificial Sequence
  Description of Artificial Sequence: Synthetic oligonucleotide
uuaugagaguagcuugccu

SEQ ID NO: 337256 - RNA, 19 nt, Artificial Sequence
  Description of Artificial Sequence: Synthetic oligonucleotide
agacugauucacugagagg

SEQ ID NO: 337257 - RNA, 19 nt, Artificial Sequence
  Description of Artificial Sequence: Synthetic oligonucleotide
ggauuguaaaacuauuguc

SEQ ID NO: 337258 - RNA, 19 nt, Artificial Sequence
  Description of Artificial Sequence: Synthetic oligonucleotide
uaagcaugguaguaucagu

SEQ ID NO: 337259 - RNA, 19 nt, Artificial Sequence
  Description of Artificial Sequence: Synthetic oligonucleotide
caugaaccuauacuacccc

SEQ ID NO: 337260 - RNA, 19 nt, Artificial Sequence
  Description of Artificial Sequence: Synthetic oligonucleotide
acuagcucaaauacaaggu

SEQ ID NO: 337261 - RNA, 19 nt, Artificial Sequence
  Description of Artificial Sequence: Synthetic oligonucleotide
auggcaacaguguuacuga

SEQ ID NO: 337262 - RNA, 19 nt, Artificial Sequence
  Description of Artificial Sequence: Synthetic oligonucleotide
uugcaaauaacugccuugu

SEQ ID NO: 337263 - RNA, 19 nt, Artificial Sequence
  Description of Artificial Sequence: Synthetic oligonucleotide
aauaagugucucucauuua

SEQ ID NO: 337264 - RNA, 19 nt, Artificial Sequence
  Description of Artificial Sequence: Synthetic oligonucleotide
augucauaaagcuuuuguu

SEQ ID NO: 337265 - RNA, 19 nt, Artificial Sequence
  Description of Artificial Sequence: Synthetic oligonucleotide
cauuguauaucugccaguc

SEQ ID NO: 337266 - RNA, 19 nt, Artificial Sequence
  Description of Artificial Sequence: Synthetic oligonucleotide
uuaguaguaccaagguuuu

SEQ ID NO: 337267 - RNA, 19 nt, Artificial Sequence
  Description of Artificial Sequence: Synthetic oligonucleotide
uaaauaaugaguggccauu

SEQ ID NO: 337268 - RNA, 19 nt, Artificial Sequence
  Description of Artificial Sequence: Synthetic oligonucleotide
cauaucaaauaacuuagua

SEQ ID NO: 337269 - RNA, 19 nt, Artificial Sequence
  Description of Artificial Sequence: Synthetic oligonucleotide
uggauugaguucauaucaa

SEQ ID NO: 337270 - RNA, 19 nt, Artificial Sequence
  Description of Artificial Sequence: Synthetic oligonucleotide
aacuagggcaaaauaaaua

SEQ ID NO: 337271 - RNA, 19 nt, Artificial Sequence
  Description of Artificial Sequence: Synthetic oligonucleotide
auaugcacucuuuagucuu

SEQ ID NO: 337272 - RNA, 19 nt, Artificial Sequence
  Description of Artificial Sequence: Synthetic oligonucleotide
cuuaacuugaaaacgacuu

SEQ ID NO: 337273 - RNA, 19 nt, Artificial Sequence
  Description of Artificial Sequence: Synthetic oligonucleotide
acagccucuauuuguuuug

SEQ ID NO: 337274 - RNA, 19 nt, Artificial Sequence
  Description of Artificial Sequence: Synthetic oligonucleotide
caaaauuacaugaaccuau

SEQ ID NO: 337275 - RNA, 19 nt, Artificial Sequence
  Description of Artificial Sequence: Synthetic oligonucleotide
cuucucaugccaugacugc

SEQ ID NO: 337276 - RNA, 19 nt, Artificial Sequence
  Description of Artificial Sequence: Synthetic oligonucleotide
augcauauaaacccaccau

SEQ ID NO: 337277 - RNA, 19 nt, Artificial Sequence
  Description of Artificial Sequence: Synthetic oligonucleotide
cacccaacaaugcucuugc

SEQ ID NO: 337278 - RNA, 19 nt, Artificial Sequence
  Description of Artificial Sequence: Synthetic oligonucleotide
gaguaugguacuguagcug

SEQ ID NO: 337279 - RNA, 19 nt, Artificial Sequence
  Description of Artificial Sequence: Synthetic oligonucleotide
uugucuaugcagucaggac

SEQ ID NO: 337280 - RNA, 19 nt, Artificial Sequence
  Description of Artificial Sequence: Synthetic oligonucleotide
uauucggucacggccaaac

SEQ ID NO: 337281 - RNA, 19 nt, Artificial Sequence
  Description of Artificial Sequence: Synthetic oligonucleotide
gaguucauaucaaauaacu

SEQ ID NO: 337282 - RNA, 19 nt, Artificial Sequence
  Description of Artificial Sequence: Synthetic oligonucleotide
uacaucuugggauguucca

SEQ ID NO: 337283 - RNA, 19 nt, Artificial Sequence
  Description of Artificial Sequence: Synthetic oligonucleotide
uaauuauguggaagcccug

SEQ ID NO: 337284 - RNA, 19 nt, Artificial Sequence
  Description of Artificial Sequence: Synthetic oligonucleotide
ucuauuuguuuugaccaaa

SEQ ID NO: 337285 - RNA, 19 nt, Artificial Sequence
  Description of Artificial Sequence: Synthetic oligonucleotide
acauuguagcaugcuuucc

SEQ ID NO: 337286 - RNA, 19 nt, Artificial Sequence
  Description of Artificial Sequence: Synthetic oligonucleotide
aaaauuacaugaaccuaua

SEQ ID NO: 337287 - RNA, 19 nt, Artificial Sequence
  Description of Artificial Sequence: Synthetic oligonucleotide
augacugcccauuguauau

SEQ ID NO: 337288 - RNA, 19 nt, Artificial Sequence
  Description of Artificial Sequence: Synthetic oligonucleotide
augaaccuauacuacccca

SEQ ID NO: 337289 - RNA, 19 nt, Artificial Sequence
  Description of Artificial Sequence: Synthetic oligonucleotide
cauuuauuauucggucacg

SEQ ID NO: 337290 - RNA, 19 nt, Artificial Sequence
  Description of Artificial Sequence: Synthetic oligonucleotide
cugagaaucauuggaaaca

SEQ ID NO: 337291 - RNA, 19 nt, Artificial Sequence
  Description of Artificial Sequence: Synthetic oligonucleotide
uuaacacauguaucacacu

SEQ ID NO: 337292 - RNA, 19 nt, Artificial Sequence
  Description of Artificial Sequence: Synthetic oligonucleotide
acauaauccauaacuuugu

SEQ ID NO: 337293 - RNA, 19 nt, Artificial Sequence
  Description of Artificial Sequence: Synthetic oligonucleotide
aagugcuuaaacagacuga

SEQ ID NO: 337294 - RNA, 19 nt, Artificial Sequence
  Description of Artificial Sequence: Synthetic oligonucleotide
aaauugggccugaaaagaa

SEQ ID NO: 337295 - RNA, 19 nt, Artificial Sequence
  Description of Artificial Sequence: Synthetic oligonucleotide
uccuaccagacccaagcaa

SEQ ID NO: 337296 - RNA, 19 nt, Artificial Sequence
  Description of Artificial Sequence: Synthetic oligonucleotide
gugcaucuggcaaagcagg

SEQ ID NO: 337297 - RNA, 19 nt, Artificial Sequence
  Description of Artificial Sequence: Synthetic oligonucleotide
agugucucucauuuauuau

SEQ ID NO: 337298 - RNA, 19 nt, Artificial Sequence
  Description of Artificial Sequence: Synthetic oligonucleotide
gguauccaaaauguacugg

SEQ ID NO: 337299 - RNA, 19 nt, Artificial Sequence
  Description of Artificial Sequence: Synthetic oligonucleotide
uucucaugccaugacugcc

SEQ ID NO: 337300 - RNA, 19 nt, Artificial Sequence
  Description of Artificial Sequence: Synthetic oligonucleotide
uaucugccagucaacacuu

SEQ ID NO: 337301 - RNA, 19 nt, Artificial Sequence
  Description of Artificial Sequence: Synthetic oligonucleotide
acagcuauacuuugcuuua

SEQ ID NO: 337302 - RNA, 19 nt, Artificial Sequence
  Description of Artificial Sequence: Synthetic oligonucleotide
auuguauaucugccaguca

SEQ ID NO: 337303 - RNA, 19 nt, Artificial Sequence
  Description of Artificial Sequence: Synthetic oligonucleotide
aaucugaggcucaaagaaa

SEQ ID NO: 337304 - RNA, 19 nt, Artificial Sequence
  Description of Artificial Sequence: Synthetic oligonucleotide
acuaccucugugaauugag

SEQ ID NO: 337305 - RNA, 19 nt, Artificial Sequence
  Description of Artificial Sequence: Synthetic oligonucleotide
uuggaggacuucuuagaaa

SEQ ID NO: 337306 - RNA, 19 nt, Artificial Sequence
  Description of Artificial Sequence: Synthetic oligonucleotide
aaguacuaccucugugaau

SEQ ID NO: 337307 - RNA, 19 nt, Artificial Sequence
  Description of Artificial Sequence: Synthetic oligonucleotide
aacauuuaauuaggcuagu

SEQ ID NO: 337308 - RNA, 19 nt, Artificial Sequence
  Description of Artificial Sequence: Synthetic oligonucleotide
ucagcuuaucacugguauc

SEQ ID NO: 337309 - RNA, 19 nt, Artificial Sequence
  Description of Artificial Sequence: Synthetic oligonucleotide
auugaaugaacgacugcca

SEQ ID NO: 337310 - RNA, 19 nt, Artificial Sequence
  Description of Artificial Sequence: Synthetic oligonucleotide
uuuuaugaacagucacuuu

SEQ ID NO: 337311 - RNA, 19 nt, Artificial Sequence
  Description of Artificial Sequence: Synthetic oligonucleotide
acacuccacaacuaauuaa

SEQ ID NO: 337312 - RNA, 19 nt, Artificial Sequence
  Description of Artificial Sequence: Synthetic oligonucleotide
cagucaacacuuuggacca

SEQ ID NO: 337313 - RNA, 19 nt, Artificial Sequence
  Description of Artificial Sequence: Synthetic oligonucleotide
uuccauggcugaauuuaac

SEQ ID NO: 337314 - RNA, 19 nt, Artificial Sequence
  Description of Artificial Sequence: Synthetic oligonucleotide
guuaugagaguagcuugcc

SEQ ID NO: 337315 - RNA, 19 nt, Artificial Sequence
  Description of Artificial Sequence: Synthetic oligonucleotide
agacccaagcaacauuuaa

SEQ ID NO: 337316 - RNA, 19 nt, Artificial Sequence
  Description of Artificial Sequence: Synthetic oligonucleotide
gguaguaucaguuccaguu

SEQ ID NO: 337317 - RNA, 19 nt, Artificial Sequence
  Description of Artificial Sequence: Synthetic oligonucleotide
caaacaaucccugccauaa

SEQ ID NO: 337318 - RNA, 19 nt, Artificial Sequence
  Description of Artificial Sequence: Synthetic oligonucleotide
acuaauauugcugccuaua

SEQ ID NO: 337319 - RNA, 19 nt, Artificial Sequence
  Description of Artificial Sequence: Synthetic oligonucleotide
gaacauaauccauaacuuu

SEQ ID NO: 337320 - RNA, 19 nt, Artificial Sequence
  Description of Artificial Sequence: Synthetic oligonucleotide
gaacaacuagggcaaaaua

SEQ ID NO: 337321 - RNA, 19 nt, Artificial Sequence
  Description of Artificial Sequence: Synthetic oligonucleotide
aauugggccugaaaagaau

SEQ ID NO: 337322 - RNA, 19 nt, Artificial Sequence
  Description of Artificial Sequence: Synthetic oligonucleotide
guuuccauggcugaauuua

SEQ ID NO: 337323 - RNA, 19 nt, Artificial Sequence
  Description of Artificial Sequence: Synthetic oligonucleotide
uguuuugaccaaacuccua

SEQ ID NO: 337324 - RNA, 19 nt, Artificial Sequence
  Description of Artificial Sequence: Synthetic oligonucleotide
gcauauaaacccaccauac

SEQ ID NO: 337325 - RNA, 19 nt, Artificial Sequence
  Description of Artificial Sequence: Synthetic oligonucleotide
auuauccacacaagaguca

SEQ ID NO: 337326 - RNA, 19 nt, Artificial Sequence
  Description of Artificial Sequence: Synthetic oligonucleotide
augguaguaucaguuccag

SEQ ID NO: 337327 - RNA, 19 nt, Artificial Sequence
  Description of Artificial Sequence: Synthetic oligonucleotide
ucaaacaaucccugccaua

SEQ ID NO: 337328 - RNA, 19 nt, Artificial Sequence
  Description of Artificial Sequence: Synthetic oligonucleotide
ucugugaauugaggcaaca

SEQ ID NO: 337329 - RNA, 19 nt, Artificial Sequence
  Description of Artificial Sequence: Synthetic oligonucleotide
gaguacacuaacaauuagu

SEQ ID NO: 337330 - RNA, 19 nt, Artificial Sequence
  Description of Artificial Sequence: Synthetic oligonucleotide
gccaggauugacugggagg

SEQ ID NO: 337331 - RNA, 19 nt, Artificial Sequence
  Description of Artificial Sequence: Synthetic oligonucleotide
ugggauguuccaugaaaua

SEQ ID NO: 337332 - RNA, 19 nt, Artificial Sequence
  Description of Artificial Sequence: Synthetic oligonucleotide
gaucugccaaugauagggc

SEQ ID NO: 337333 - RNA, 19 nt, Artificial Sequence
  Description of Artificial Sequence: Synthetic oligonucleotide
agggcaauauggugugaug

SEQ ID NO: 337334 - RNA, 19 nt, Artificial Sequence
  Description of Artificial Sequence: Synthetic oligonucleotide
ccuaccagacccaagcaac

SEQ ID NO: 337335 - RNA, 19 nt, Artificial Sequence
  Description of Artificial Sequence: Synthetic oligonucleotide
aauaugucauaaagcuuuu

SEQ ID NO: 337336 - RNA, 19 nt, Artificial Sequence
  Description of Artificial Sequence: Synthetic oligonucleotide
aguucauaucaaauaacuu

SEQ ID NO: 337337 - RNA, 19 nt, Artificial Sequence
  Description of Artificial Sequence: Synthetic oligonucleotide
guaaguaguguaagguaca

SEQ ID NO: 337338 - RNA, 19 nt, Artificial Sequence
  Description of Artificial Sequence: Synthetic oligonucleotide
cugaguacacuaacaauua

SEQ ID NO: 337339 - RNA, 19 nt, Artificial Sequence
  Description of Artificial Sequence: Synthetic oligonucleotide
cugugaauugaggcaacag

SEQ ID NO: 337340 - RNA, 19 nt, Artificial Sequence
  Description of Artificial Sequence: Synthetic oligonucleotide
gucuuaacuugaaaacgac

SEQ ID NO: 337341 - RNA, 19 nt, Artificial Sequence
  Description of Artificial Sequence: Synthetic oligonucleotide
aggucuguacagcuauacu

SEQ ID NO: 337342 - RNA, 19 nt, Artificial Sequence
  Description of Artificial Sequence: Synthetic oligonucleotide
agcuauacuuugcuuuaaa

SEQ ID NO: 337343 - RNA, 19 nt, Artificial Sequence
  Description of Artificial Sequence: Synthetic oligonucleotide
gaaaacgacuugggaauca

SEQ ID NO: 337344 - RNA, 19 nt, Artificial Sequence
  Description of Artificial Sequence: Synthetic oligonucleotide
ggcaaaguuuccauggcug

SEQ ID NO: 337345 - RNA, 19 nt, Artificial Sequence
  Description of Artificial Sequence: Synthetic oligonucleotide
augcaagugccuugcagaa

SEQ ID NO: 337346 - RNA, 19 nt, Artificial Sequence
  Description of Artificial Sequence: Synthetic oligonucleotide
aguucugcccacagaauga

SEQ ID NO: 337347 - RNA, 19 nt, Artificial Sequence
  Description of Artificial Sequence: Synthetic oligonucleotide
ccaaugauagggcaauaug

SEQ ID NO: 337348 - RNA, 19 nt, Artificial Sequence
  Description of Artificial Sequence: Synthetic oligonucleotide
aauuacuuucuagcacuua

SEQ ID NO: 337349 - RNA, 19 nt, Artificial Sequence
  Description of Artificial Sequence: Synthetic oligonucleotide
cagaauccccacuuugcuc

SEQ ID NO: 337350 - RNA, 19 nt, Artificial Sequence
  Description of Artificial Sequence: Synthetic oligonucleotide
agcaaugguaacaugucuu

SEQ ID NO: 337351 - RNA, 19 nt, Artificial Sequence
  Description of Artificial Sequence: Synthetic oligonucleotide
ggucauguauuucaguucu

SEQ ID NO: 337352 - RNA, 19 nt, Artificial Sequence
  Description of Artificial Sequence: Synthetic oligonucleotide
ccugguaagugcuuaaaca

SEQ ID NO: 337353 - RNA, 19 nt, Artificial Sequence
  Description of Artificial Sequence: Synthetic oligonucleotide
uacuaccucugugaauuga

SEQ ID NO: 337354 - RNA, 19 nt, Artificial Sequence
  Description of Artificial Sequence: Synthetic oligonucleotide
acugauucacugagagguc

SEQ ID NO: 337355 - RNA, 19 nt, Artificial Sequence
  Description of Artificial Sequence: Synthetic oligonucleotide
aguguaagguacagaguca

SEQ ID NO: 337356 - RNA, 19 nt, Artificial Sequence
  Description of Artificial Sequence: Synthetic oligonucleotide
ucuugggauguuccaugaa

SEQ ID NO: 337357 - RNA, 19 nt, Artificial Sequence
  Description of Artificial Sequence: Synthetic oligonucleotide
aucaaauaacuuaguagua

SEQ ID NO: 337358 - RNA, 19 nt, Artificial Sequence
  Description of Artificial Sequence: Synthetic oligonucleotide
uacuaauauugcugccuau

SEQ ID NO: 337359 - RNA, 19 nt, Artificial Sequence
  Description of Artificial Sequence: Synthetic oligonucleotide
cuauacuaccccaaaguau

SEQ ID NO: 337360 - RNA, 19 nt, Artificial Sequence
  Description of Artificial Sequence: Synthetic oligonucleotide
augauucgauaacuuuuau

SEQ ID NO: 337361 - RNA, 19 nt, Artificial Sequence
  Description of Artificial Sequence: Synthetic oligonucleotide
aaugaacgacugccacagu

SEQ ID NO: 337362 - RNA, 19 nt, Artificial Sequence
  Description of Artificial Sequence: Synthetic oligonucleotide
uacuuccucuguauagaua

SEQ ID NO: 337363 - RNA, 19 nt, Artificial Sequence
  Description of Artificial Sequence: Synthetic oligonucleotide
aagagucauauaagucacu

SEQ ID NO: 337364 - RNA, 19 nt, Artificial Sequence
  Description of Artificial Sequence: Synthetic oligonucleotide
guaauaagcaugguaguau

SEQ ID NO: 337365 - RNA, 19 nt, Artificial Sequence
  Description of Artificial Sequence: Synthetic oligonucleotide
uaauuaggcuagucaguuu

SEQ ID NO: 337366 - RNA, 19 nt, Artificial Sequence
  Description of Artificial Sequence: Synthetic oligonucleotide
ggauaacaaaauaagggua

SEQ ID NO: 337367 - RNA, 19 nt, Artificial Sequence
  Description of Artificial Sequence: Synthetic oligonucleotide
ccacacaagagucauauaa

SEQ ID NO: 337368 - RNA, 19 nt, Artificial Sequence
  Description of Artificial Sequence: Synthetic oligonucleotide
ucccaccuuccaaaauuac

SEQ ID NO: 337369 - RNA, 19 nt, Artificial Sequence
  Description of Artificial Sequence: Synthetic oligonucleotide
uagggcaauauggugugau

SEQ ID NO: 337370 - RNA, 19 nt, Artificial Sequence
  Description of Artificial Sequence: Synthetic oligonucleotide
ugguaguaucaguuccagu

SEQ ID NO: 337371 - RNA, 19 nt, Artificial Sequence
  Description of Artificial Sequence: Synthetic oligonucleotide
aaacgacuugggaaucacu

SEQ ID NO: 337372 - RNA, 19 nt, Artificial Sequence
  Description of Artificial Sequence: Synthetic oligonucleotide
aggagagguugguaucuga

SEQ ID NO: 337373 - RNA, 19 nt, Artificial Sequence
  Description of Artificial Sequence: Synthetic oligonucleotide
acuccacaacuaauuaaug

SEQ ID NO: 337374 - RNA, 19 nt, Artificial Sequence
  Description of Artificial Sequence: Synthetic oligonucleotide
cuggaacauaauccauaac

SEQ ID NO: 337375 - RNA, 19 nt, Artificial Sequence
  Description of Artificial Sequence: Synthetic oligonucleotide
cuacuaauauugcugccua

SEQ ID NO: 337376 - RNA, 19 nt, Artificial Sequence
  Description of Artificial Sequence: Synthetic oligonucleotide
agaguagcuugccuucuuu

SEQ ID NO: 337377 - RNA, 19 nt, Artificial Sequence
  Description of Artificial Sequence: Synthetic oligonucleotide
auuauucggucacggccaa

SEQ ID NO: 337378 - RNA, 19 nt, Artificial Sequence
  Description of Artificial Sequence: Synthetic oligonucleotide
agcucaaauacaaggucaa

SEQ ID NO: 337379 - RNA, 19 nt, Artificial Sequence
  Description of Artificial Sequence: Synthetic oligonucleotide
aacugguuuugaacucuca

SEQ ID NO: 337380 - RNA, 19 nt, Artificial Sequence
  Description of Artificial Sequence: Synthetic oligonucleotide
cuauuaaaguaaguagugu

SEQ ID NO: 337381 - RNA, 19 nt, Artificial Sequence
  Description of Artificial Sequence: Synthetic oligonucleotide
cuaauauugcugccuauau

SEQ ID NO: 337382 - RNA, 19 nt, Artificial Sequence
  Description of Artificial Sequence: Synthetic oligonucleotide
cauauaaacccaccauacu

SEQ ID NO: 337383 - RNA, 19 nt, Artificial Sequence
  Description of Artificial Sequence: Synthetic oligonucleotide
acacgagggucaaaguugu

SEQ ID NO: 337384 - RNA, 19 nt, Artificial Sequence
  Description of Artificial Sequence: Synthetic oligonucleotide
gcugccuauauguacaagu

SEQ ID NO: 337385 - RNA, 19 nt, Artificial Sequence
  Description of Artificial Sequence: Synthetic oligonucleotide
gggauguuccaugaaauaa

SEQ ID NO: 337386 - RNA, 19 nt, Artificial Sequence
  Description of Artificial Sequence: Synthetic oligonucleotide
cacaacuaauuaauggaau

SEQ ID NO: 337387 - RNA, 19 nt, Artificial Sequence
  Description of Artificial Sequence: Synthetic oligonucleotide
caucuacuacaucuuggga

SEQ ID NO: 337388 - RNA, 19 nt, Artificial Sequence
  Description of Artificial Sequence: Synthetic oligonucleotide
aagugcuccugagaaucau

SEQ ID NO: 337389 - RNA, 19 nt, Artificial Sequence
  Description of Artificial Sequence: Synthetic oligonucleotide
cauaaugcuuuggauaggu

SEQ ID NO: 337390 - RNA, 19 nt, Artificial Sequence
  Description of Artificial Sequence: Synthetic oligonucleotide
gugucucucauuuauuauu

SEQ ID NO: 337391 - RNA, 19 nt, Artificial Sequence
  Description of Artificial Sequence: Synthetic oligonucleotide
cucuguauagauacugaau

SEQ ID NO: 337392 - RNA, 19 nt, Artificial Sequence
  Description of Artificial Sequence: Synthetic oligonucleotide
ccaagugcuccugagaauc

SEQ ID NO: 337393 - RNA, 19 nt, Artificial Sequence
  Description of Artificial Sequence: Synthetic oligonucleotide
aaacuccuaccagacccaa

SEQ ID NO: 337394 - RNA, 19 nt, Artificial Sequence
  Description of Artificial Sequence: Synthetic oligonucleotide
ugcuagaaacaggcacuug

SEQ ID NO: 337395 - RNA, 19 nt, Artificial Sequence
  Description of Artificial Sequence: Synthetic oligonucleotide
ggauugaguucauaucaaa

SEQ ID NO: 337396 - RNA, 19 nt, Artificial Sequence
  Description of Artificial Sequence: Synthetic oligonucleotide
gguaauaagcaugguagua

SEQ ID NO: 337397 - RNA, 19 nt, Artificial Sequence
  Description of Artificial Sequence: Synthetic oligonucleotide
guauaacacauaaugcuuu

SEQ ID NO: 337398 - RNA, 19 nt, Artificial Sequence
  Description of Artificial Sequence: Synthetic oligonucleotide
ccuauauguacaaguguga

SEQ ID NO: 337399 - RNA, 19 nt, Artificial Sequence
  Description of Artificial Sequence: Synthetic oligonucleotide
ggaugcauauaaacccacc

SEQ ID NO: 337400 - RNA, 19 nt, Artificial Sequence
  Description of Artificial Sequence: Synthetic oligonucleotide
aguaucaguuccaguuggu

SEQ ID NO: 337401 - RNA, 19 nt, Artificial Sequence
  Description of Artificial Sequence: Synthetic oligonucleotide
gacugcccauuguauaucu

SEQ ID NO: 337402 - RNA, 19 nt, Artificial Sequence
  Description of Artificial Sequence: Synthetic oligonucleotide
aucacacuccacaacuaau

SEQ ID NO: 337403 - RNA, 19 nt, Artificial Sequence
  Description of Artificial Sequence: Synthetic oligonucleotide
cucagcuuaucacugguau

SEQ ID NO: 337404 - RNA, 19 nt, Artificial Sequence
  Description of Artificial Sequence: Synthetic oligonucleotide
ugacugcccauuguauauc

SEQ ID NO: 337405 - RNA, 19 nt, Artificial Sequence
  Description of Artificial Sequence: Synthetic oligonucleotide
ugagugggucauguauuuc

SEQ ID NO: 337406 - RNA, 19 nt, Artificial Sequence
  Description of Artificial Sequence: Synthetic oligonucleotide
ugacacugccaggauugac

SEQ ID NO: 337407 - RNA, 19 nt, Artificial Sequence
  Description of Artificial Sequence: Synthetic oligonucleotide
guugugcuugcagauucca

SEQ ID NO: 337408 - RNA, 19 nt, Artificial Sequence
  Description of Artificial Sequence: Synthetic oligonucleotide
aaugcuggauugaguucau

SEQ ID NO: 337409 - RNA, 19 nt, Artificial Sequence
  Description of Artificial Sequence: Synthetic oligonucleotide
caacagcacauucacccaa

SEQ ID NO: 337410 - RNA, 19 nt, Artificial Sequence
  Description of Artificial Sequence: Synthetic oligonucleotide
cuguauagauacugaauuu

SEQ ID NO: 337411 - RNA, 19 nt, Artificial Sequence
  Description of Artificial Sequence: Synthetic oligonucleotide
caacuagggcaaaauaaau

SEQ ID NO: 337412 - RNA, 19 nt, Artificial Sequence
  Description of Artificial Sequence: Synthetic oligonucleotide
guacuggauuguaaaacua

SEQ ID NO: 337413 - RNA, 19 nt, Artificial Sequence
  Description of Artificial Sequence: Synthetic oligonucleotide
acuuugcuuaaaaguacua

SEQ ID NO: 337414 - RNA, 19 nt, Artificial Sequence
  Description of Artificial Sequence: Synthetic oligonucleotide
gucauguauuucaguucug

SEQ ID NO: 337415 - RNA, 19 nt, Artificial Sequence
  Description of Artificial Sequence: Synthetic oligonucleotide
ggaacauaauccauaacuu

SEQ ID NO: 337416 - RNA, 19 nt, Artificial Sequence
  Description of Artificial Sequence: Synthetic oligonucleotide
ugcaagugccuugcagaaa

SEQ ID NO: 337417 - RNA, 19 nt, Artificial Sequence
  Description of Artificial Sequence: Synthetic oligonucleotide
auauugcugccuauaugua

SEQ ID NO: 337418 - RNA, 19 nt, Artificial Sequence
  Description of Artificial Sequence: Synthetic oligonucleotide
ccuauacuaccccaaagua

SEQ ID NO: 337419 - RNA, 19 nt, Artificial Sequence
  Description of Artificial Sequence: Synthetic oligonucleotide
caaaguuuccauggcugaa

SEQ ID NO: 337420 - RNA, 19 nt, Artificial Sequence
  Description of Artificial Sequence: Synthetic oligonucleotide
gauagguaauaagcauggu

SEQ ID NO: 337421 - RNA, 19 nt, Artificial Sequence
  Description of Artificial Sequence: Synthetic oligonucleotide
gccagucaacacuuuggac

SEQ ID NO: 337422 - RNA, 19 nt, Artificial Sequence
  Description of Artificial Sequence: Synthetic oligonucleotide
caaugguaacaugucuuaa

SEQ ID NO: 337423 - RNA, 19 nt, Artificial Sequence
  Description of Artificial Sequence: Synthetic oligonucleotide
cccugguaagugcuuaaac

SEQ ID NO: 337424 - RNA, 19 nt, Artificial Sequence
  Description of Artificial Sequence: Synthetic oligonucleotide
gccugaaaagaauucuacu

SEQ ID NO: 337425 - RNA, 19 nt, Artificial Sequence
  Description of Artificial Sequence: Synthetic oligonucleotide
cacugaguacacuaacaau

SEQ ID NO: 337426 - RNA, 19 nt, Artificial Sequence
  Description of Artificial Sequence: Synthetic oligonucleotide
caggacuaguaggaacauc

SEQ ID NO: 337427 - RNA, 19 nt, Artificial Sequence
  Description of Artificial Sequence: Synthetic oligonucleotide
guaguguaagguacagagu

SEQ ID NO: 337428 - RNA, 19 nt, Artificial Sequence
  Description of Artificial Sequence: Synthetic oligonucleotide
agcugguuuacuagcucaa

SEQ ID NO: 337429 - RNA, 19 nt, Artificial Sequence
  Description of Artificial Sequence: Synthetic oligonucleotide
auaaugcuuuggauaggua

SEQ ID NO: 337430 - RNA, 19 nt, Artificial Sequence
  Description of Artificial Sequence: Synthetic oligonucleotide
cucacagccucuauuuguu

SEQ ID NO: 337431 - RNA, 19 nt, Artificial Sequence
  Description of Artificial Sequence: Synthetic oligonucleotide
ggacuaguaggaacaucac

SEQ ID NO: 337432 - RNA, 19 nt, Artificial Sequence
  Description of Artificial Sequence: Synthetic oligonucleotide
cacgagggucaaaguugug

SEQ ID NO: 337433 - RNA, 19 nt, Artificial Sequence
  Description of Artificial Sequence: Synthetic oligonucleotide
auagggcaauaugguguga

SEQ ID NO: 337434 - RNA, 19 nt, Artificial Sequence
  Description of Artificial Sequence: Synthetic oligonucleotide
gggcaauauggugugaugu

SEQ ID NO: 337435 - RNA, 19 nt, Artificial Sequence
  Description of Artificial Sequence: Synthetic oligonucleotide
uucacccaacaaugcucuu

SEQ ID NO: 337436 - RNA, 19 nt, Artificial Sequence
  Description of Artificial Sequence: Synthetic oligonucleotide
uuauucggucacggccaaa

SEQ ID NO: 337437 - RNA, 19 nt, Artificial Sequence
  Description of Artificial Sequence: Synthetic oligonucleotide
cacuuuaguuauucagguu

SEQ ID NO: 337438 - RNA, 19 nt, Artificial Sequence
  Description of Artificial Sequence: Synthetic oligonucleotide
ccagucccacccaaaccug

SEQ ID NO: 337439 - RNA, 19 nt, Artificial Sequence
  Description of Artificial Sequence: Synthetic oligonucleotide
guaucaguuccaguugguu

SEQ ID NO: 337440 - RNA, 19 nt, Artificial Sequence
  Description of Artificial Sequence: Synthetic oligonucleotide
cauucucauucugucauuu

SEQ ID NO: 337441 - RNA, 19 nt, Artificial Sequence
  Description of Artificial Sequence: Synthetic oligonucleotide
cccaagcaacauuuaauua

SEQ ID NO: 337442 - RNA, 19 nt, Artificial Sequence
  Description of Artificial Sequence: Synthetic oligonucleotide
ccauaacuuugucuaugca

SEQ ID NO: 337443 - RNA, 19 nt, Artificial Sequence
  Description of Artificial Sequence: Synthetic oligonucleotide
cagacccaagcaacauuua

SEQ ID NO: 337444 - RNA, 19 nt, Artificial Sequence
  Description of Artificial Sequence: Synthetic oligonucleotide
cagaaaguccaugcaaauu

SEQ ID NO: 337445 - RNA, 19 nt, Artificial Sequence
  Description of Artificial Sequence: Synthetic oligonucleotide
gacuugggaaucacugguu

SEQ ID NO: 337446 - RNA, 19 nt, Artificial Sequence
  Description of Artificial Sequence: Synthetic oligonucleotide
gguuucugagugggucaug

SEQ ID NO: 337447 - RNA, 19 nt, Artificial Sequence
  Description of Artificial Sequence: Synthetic oligonucleotide
cagacacgagggucaaagu

SEQ ID NO: 337448 - RNA, 19 nt, Artificial Sequence
  Description of Artificial Sequence: Synthetic oligonucleotide
gcaauauggugugauguuu

SEQ ID NO: 337449 - RNA, 19 nt, Artificial Sequence
  Description of Artificial Sequence: Synthetic oligonucleotide
cagcuauacuuugcuuuaa

SEQ ID NO: 337450 - RNA, 19 nt, Artificial Sequence
  Description of Artificial Sequence: Synthetic oligonucleotide
cuacuacaucuugggaugu

SEQ ID NO: 337451 - RNA, 19 nt, Artificial Sequence
  Description of Artificial Sequence: Synthetic oligonucleotide
cuaugcagucaggacuagu

SEQ ID NO: 337452 - RNA, 19 nt, Artificial Sequence
  Description of Artificial Sequence: Synthetic oligonucleotide
gcccugguaagugcuuaaa

SEQ ID NO: 337453 - RNA, 19 nt, Artificial Sequence
  Description of Artificial Sequence: Synthetic oligonucleotide
ggucacggccaaacauuuu

SEQ ID NO: 337454 - RNA, 19 nt, Artificial Sequence
  Description of Artificial Sequence: Synthetic oligonucleotide
cggucacggccaaacauuu

SEQ ID NO: 337455 - RNA, 19 nt, Artificial Sequence
  Description of Artificial Sequence: Synthetic oligonucleotide
  modified_base (3)..(3): a, c, u, g, unknown or other
aanaaaacaaaauaaauac

SEQ ID NO: 337456 - RNA, 19 nt, Artificial Sequence
  Description of Artificial Sequence: Synthetic oligonucleotide
aauucuuagaguuuuacag

SEQ ID NO: 337457 - RNA, 19 nt, Artificial Sequence
  Description of Artificial Sequence: Synthetic oligonucleotide
aagauuauuagaaagcucc

SEQ ID NO: 337458 - RNA, 19 nt, Artificial Sequence
  Description of Artificial Sequence: Synthetic oligonucleotide
aauauuuccugccagagag

SEQ ID NO: 337459 - RNA, 19 nt, Artificial Sequence
  Description of Artificial Sequence: Synthetic oligonucleotide
aaucaugcuccauagacuc

SEQ ID NO: 337460 - RNA, 19 nt, Artificial Sequence
  Description of Artificial Sequence: Synthetic oligonucleotide
auguuaacuauauaguuac

SEQ ID NO: 337461 - RNA, 19 nt, Artificial Sequence
  Description of Artificial Sequence: Synthetic oligonucleotide
auaacagcuaauuagagga

SEQ ID NO: 337462 - RNA, 19 nt, Artificial Sequence
  Description of Artificial Sequence: Synthetic oligonucleotide
ucuuuagacauucaaaugu

SEQ ID NO: 337463 - RNA, 19 nt, Artificial Sequence
  Description of Artificial Sequence: Synthetic oligonucleotide
uauaguuacagcuggaagc

SEQ ID NO: 337464 - RNA, 19 nt, Artificial Sequence
  Description of Artificial Sequence: Synthetic oligonucleotide
ucauuaguaugcaucaugg

SEQ ID NO: 337465 - RNA, 19 nt, Artificial Sequence
  Description of Artificial Sequence: Synthetic oligonucleotide
aaucggacuccauuaaggc

SEQ ID NO: 337466 - RNA, 19 nt, Artificial Sequence
  Description of Artificial Sequence: Synthetic oligonucleotide
auaaccauuauugcaaacc

SEQ ID NO: 337467 - RNA, 19 nt, Artificial Sequence
  Description of Artificial Sequence: Synthetic oligonucleotide
aaugauucacaugcaaacc

SEQ ID NO: 337468 - RNA, 19 nt, Artificial Sequence
  Description of Artificial Sequence: Synthetic oligonucleotide
acuauauaguuacagcugg

SEQ ID NO: 337469 - RNA, 19 nt, Artificial Sequence
  Description of Artificial Sequence: Synthetic oligonucleotide
aaacgaauccuucaggucu

SEQ ID NO: 337470 - RNA, 19 nt, Artificial Sequence
  Description of Artificial Sequence: Synthetic oligonucleotide
cauaugugacacuagaggg

SEQ ID NO: 337471 - RNA, 19 nt, Artificial Sequence
  Description of Artificial Sequence: Synthetic oligonucleotide
acagaauuaugauaaacag

SEQ ID NO: 337472 - RNA, 19 nt, Artificial Sequence
  Description of Artificial Sequence: Synthetic oligonucleotide
uagauuuuaagucaaugcu

SEQ ID NO: 337473 - RNA, 19 nt, Artificial Sequence
  Description of Artificial Sequence: Synthetic oligonucleotide
uaguuguccaacaauaacc

SEQ ID NO: 337474 - RNA, 19 nt, Artificial Sequence
  Description of Artificial Sequence: Synthetic oligonucleotide
gauuaaccaauucuuagag

SEQ ID NO: 337475 - RNA, 19 nt, Artificial Sequence
  Description of Artificial Sequence: Synthetic oligonucleotide
aguauuuaaaugcacuaag

SEQ ID NO: 337476 - RNA, 19 nt, Artificial Sequence
  Description of Artificial Sequence: Synthetic oligonucleotide
acuaaaaugguuucuuuag

SEQ ID NO: 337477 - RNA, 19 nt, Artificial Sequence
  Description of Artificial Sequence: Synthetic oligonucleotide
ucuucgacaacccucacug

SEQ ID NO: 337478 - RNA, 19 nt, Artificial Sequence
  Description of Artificial Sequence: Synthetic oligonucleotide
ucggacuccauuaaggcgg

SEQ ID NO: 337479 - RNA, 19 nt, Artificial Sequence
  Description of Artificial Sequence: Synthetic oligonucleotide
uauugagccacacaugacc

SEQ ID NO: 337480 - RNA, 19 nt, Artificial Sequence
  Description of Artificial Sequence: Synthetic oligonucleotide
uacauaacagcuaauuaga

SEQ ID NO: 337481 - RNA, 19 nt, Artificial Sequence
  Description of Artificial Sequence: Synthetic oligonucleotide
aggauaugcuucuuguucc

SEQ ID NO: 337482 - RNA, 19 nt, Artificial Sequence
  Description of Artificial Sequence: Synthetic oligonucleotide
uggaagauuauuagaaagc

SEQ ID NO: 337483 - RNA, 19 nt, Artificial Sequence
  Description of Artificial Sequence: Synthetic oligonucleotide
cuauccacacuauugagcc

SEQ ID NO: 337484 - RNA, 19 nt, Artificial Sequence
  Description of Artificial Sequence: Synthetic oligonucleotide
aaucauaugugacacuaga

SEQ ID NO: 337485 - RNA, 19 nt, Artificial Sequence
  Description of Artificial Sequence: Synthetic oligonucleotide
guagauuuuaagucaaugc

SEQ ID NO: 337486 - RNA, 19 nt, Artificial Sequence
  Description of Artificial Sequence: Synthetic oligonucleotide
uuuacuagccauuuaaaua

SEQ ID NO: 337487 - RNA, 19 nt, Artificial Sequence
  Description of Artificial Sequence: Synthetic oligonucleotide
uccuguuuuacauucagac

SEQ ID NO: 337488 - RNA, 19 nt, Artificial Sequence
  Description of Artificial Sequence: Synthetic oligonucleotide
aagucauuaguaugcauca

SEQ ID NO: 337489 - RNA, 19 nt, Artificial Sequence
  Description of Artificial Sequence: Synthetic oligonucleotide
aaugcacuaagcuuggcaa

SEQ ID NO: 337490 - RNA, 19 nt, Artificial Sequence
  Description of Artificial Sequence: Synthetic oligonucleotide
agugauucauauuauaaaa

SEQ ID NO: 337491 - RNA, 19 nt, Artificial Sequence
  Description of Artificial Sequence: Synthetic oligonucleotide
cauaacagcuaauuagagg

SEQ ID NO: 337492 - RNA, 19 nt, Artificial Sequence
  Description of Artificial Sequence: Synthetic oligonucleotide
acuagcuagacauauacaa

SEQ ID NO: 337493 - RNA, 19 nt, Artificial Sequence
  Description of Artificial Sequence: Synthetic oligonucleotide
ugaaauacauaacuucccu

SEQ ID NO: 337494 - RNA, 19 nt, Artificial Sequence
  Description of Artificial Sequence: Synthetic oligonucleotide
auauuugcgacuuccaaca

SEQ ID NO: 337495 - RNA, 19 nt, Artificial Sequence
  Description of Artificial Sequence: Synthetic oligonucleotide
uuaaaugcacuaagcuugg

SEQ ID NO: 337496 - RNA, 19 nt, Artificial Sequence
  Description of Artificial Sequence: Synthetic oligonucleotide
uucgacaacccucacugcg

SEQ ID NO: 337497 - RNA, 19 nt, Artificial Sequence
  Description of Artificial Sequence: Synthetic oligonucleotide
auuaguaugcaucauggau

SEQ ID NO: 337498 - RNA, 19 nt, Artificial Sequence
  Description of Artificial Sequence: Synthetic oligonucleotide
uuacuauccacacuauuga

SEQ ID NO: 337499 - RNA, 19 nt, Artificial Sequence
  Description of Artificial Sequence: Synthetic oligonucleotide
acuauugagccacacauga

SEQ ID NO: 337500 - RNA, 19 nt, Artificial Sequence
  Description of Artificial Sequence: Synthetic oligonucleotide
uuaguaugcaucauggaua

SEQ ID NO: 337501 - RNA, 19 nt, Artificial Sequence
  Description of Artificial Sequence: Synthetic oligonucleotide
uuugcgacuuccaacauuc

SEQ ID NO: 337502 - RNA, 19 nt, Artificial Sequence
  Description of Artificial Sequence: Synthetic oligonucleotide
cuaauuagaggaaaccgug

SEQ ID NO: 337503 - RNA, 19 nt, Artificial Sequence
  Description of Artificial Sequence: Synthetic oligonucleotide
guuaacuauauaguuacag

SEQ ID NO: 337504 - RNA, 19 nt, Artificial Sequence
  Description of Artificial Sequence: Synthetic oligonucleotide
uaaccauuauugcaaacca

SEQ ID NO: 337505 - RNA, 19 nt, Artificial Sequence
  Description of Artificial Sequence: Synthetic oligonucleotide
uagcuagacauauacaaga

SEQ ID NO: 337506 - RNA, 19 nt, Artificial Sequence
  Description of Artificial Sequence: Synthetic oligonucleotide
ugcucuauucccuugugag

SEQ ID NO: 337507 - RNA, 19 nt, Artificial Sequence
  Description of Artificial Sequence: Synthetic oligonucleotide
auuacuauccacacuauug

SEQ ID NO: 337508 - RNA, 19 nt, Artificial Sequence
  Description of Artificial Sequence: Synthetic oligonucleotide
aaguugggugagcagugcc

SEQ ID NO: 337509 - RNA, 19 nt, Artificial Sequence
  Description of Artificial Sequence: Synthetic oligonucleotide
auauacaagaauucccaug

SEQ ID NO: 337510 - RNA, 19 nt, Artificial Sequence
  Description of Artificial Sequence: Synthetic oligonucleotide
uccgugauuaaccaauucu

SEQ ID NO: 337511 - RNA, 19 nt, Artificial Sequence
  Description of Artificial Sequence: Synthetic oligonucleotide
ucuagaaacuauguuaacu

SEQ ID NO: 337512 - RNA, 19 nt, Artificial Sequence
  Description of Artificial Sequence: Synthetic oligonucleotide
gacaagcacauuuacagca

SEQ ID NO: 337513 - RNA, 19 nt, Artificial Sequence
  Description of Artificial Sequence: Synthetic oligonucleotide
auauaguuacagcuggaag

SEQ ID NO: 337514 - RNA, 19 nt, Artificial Sequence
  Description of Artificial Sequence: Synthetic oligonucleotide
ugugaguuacugaauagaa

SEQ ID NO: 337515 - RNA, 19 nt, Artificial Sequence
  Description of Artificial Sequence: Synthetic oligonucleotide
augaaauacauaacuuccc

SEQ ID NO: 337516 - RNA, 19 nt, Artificial Sequence
  Description of Artificial Sequence: Synthetic oligonucleotide
agauuuuaagucaaugcuc

SEQ ID NO: 337517 - RNA, 19 nt, Artificial Sequence
  Description of Artificial Sequence: Synthetic oligonucleotide
aguuuuagacaaaccaagc

SEQ ID NO: 337518 - RNA, 19 nt, Artificial Sequence
  Description of Artificial Sequence: Synthetic oligonucleotide
aaauaaguugggugagcag

SEQ ID NO: 337519 - RNA, 19 nt, Artificial Sequence
  Description of Artificial Sequence: Synthetic oligonucleotide
aacuauauaguuacagcug

SEQ ID NO: 337520 - RNA, 19 nt, Artificial Sequence
  Description of Artificial Sequence: Synthetic oligonucleotide
uuccguaagucccuucugg

SEQ ID NO: 337521 - RNA, 19 nt, Artificial Sequence
  Description of Artificial Sequence: Synthetic oligonucleotide
cuuauucuugcgugcaugg

SEQ ID NO: 337522 - RNA, 19 nt, Artificial Sequence
  Description of Artificial Sequence: Synthetic oligonucleotide
aaaugagcuaagaauauau

SEQ ID NO: 337523 - RNA, 19 nt, Artificial Sequence
  Description of Artificial Sequence: Synthetic oligonucleotide
acacuauugagccacacau

SEQ ID NO: 337524 - RNA, 19 nt, Artificial Sequence
  Description of Artificial Sequence: Synthetic oligonucleotide
uauucuugcgugcauggac

SEQ ID NO: 337525 - RNA, 19 nt, Artificial Sequence
  Description of Artificial Sequence: Synthetic oligonucleotide
uaaugcuuggggaaggccu

SEQ ID NO: 337526 - RNA, 19 nt, Artificial Sequence
  Description of Artificial Sequence: Synthetic oligonucleotide
gguaauguccuuuggacag

SEQ ID NO: 337527 - RNA, 19 nt, Artificial Sequence
  Description of Artificial Sequence: Synthetic oligonucleotide
ugauucacaugcaaaccug

SEQ ID NO: 337528 - RNA, 19 nt, Artificial Sequence
  Description of Artificial Sequence: Synthetic oligonucleotide
auugaguuacauaacagcu

SEQ ID NO: 337529 - RNA, 19 nt, Artificial Sequence
  Description of Artificial Sequence: Synthetic oligonucleotide
ucugcuaugugcagauaag

SEQ ID NO: 337530 - RNA, 19 nt, Artificial Sequence
  Description of Artificial Sequence: Synthetic oligonucleotide
cucaacuuuccguaagucc

SEQ ID NO: 337531 - RNA, 19 nt, Artificial Sequence
  Description of Artificial Sequence: Synthetic oligonucleotide
aaaccguguguucaugucu

SEQ ID NO: 337532 - RNA, 19 nt, Artificial Sequence
  Description of Artificial Sequence: Synthetic oligonucleotide
uucaaaugugauuuauggu

SEQ ID NO: 337533 - RNA, 19 nt, Artificial Sequence
  Description of Artificial Sequence: Synthetic oligonucleotide
auugagccacacaugaccc

SEQ ID NO: 337534 - RNA, 19 nt, Artificial Sequence
  Description of Artificial Sequence: Synthetic oligonucleotide
agauaagacucaucaucac

SEQ ID NO: 337535 - RNA, 19 nt, Artificial Sequence
  Description of Artificial Sequence: Synthetic oligonucleotide
ugcuaugugcagauaagac

SEQ ID NO: 337536 - RNA, 19 nt, Artificial Sequence
  Description of Artificial Sequence: Synthetic oligonucleotide
ugggucacaccccaccugg

SEQ ID NO: 337537 - RNA, 19 nt, Artificial Sequence
  Description of Artificial Sequence: Synthetic oligonucleotide
auaagacucaucaucaccu

SEQ ID NO: 337538 - RNA, 19 nt, Artificial Sequence
  Description of Artificial Sequence: Synthetic oligonucleotide
aaugcauauuugcgacuuc

SEQ ID NO: 337539 - RNA, 19 nt, Artificial Sequence
  Description of Artificial Sequence: Synthetic oligonucleotide
gucauuaguaugcaucaug

SEQ ID NO: 337540 - RNA, 19 nt, Artificial Sequence
  Description of Artificial Sequence: Synthetic oligonucleotide
guauuuaaaugcacuaagc

SEQ ID NO: 337541 - RNA, 19 nt, Artificial Sequence
  Description of Artificial Sequence: Synthetic oligonucleotide
uccauuaaggcggcgacag

SEQ ID NO: 337542 - RNA, 19 nt, Artificial Sequence
  Description of Artificial Sequence: Synthetic oligonucleotide
uugaauauuuccugccaga

SEQ ID NO: 337543 - RNA, 19 nt, Artificial Sequence
  Description of Artificial Sequence: Synthetic oligonucleotide
auggaccuaagcugaauuc

SEQ ID NO: 337544 - RNA, 19 nt, Artificial Sequence
  Description of Artificial Sequence: Synthetic oligonucleotide
aagaguucgcuaucuccag

SEQ ID NO: 337545 - RNA, 19 nt, Artificial Sequence
  Description of Artificial Sequence: Synthetic oligonucleotide
aaguaaaggcagcugcgcu

SEQ ID NO: 337546 - RNA, 19 nt, Artificial Sequence
  Description of Artificial Sequence: Synthetic oligonucleotide
ucaugucucaacuuuccgu

SEQ ID NO: 337547 - RNA, 19 nt, Artificial Sequence
  Description of Artificial Sequence: Synthetic oligonucleotide
ucuuuuccgugauuaacca

SEQ ID NO: 337548 - RNA, 19 nt, Artificial Sequence
  Description of Artificial Sequence: Synthetic oligonucleotide
auccacacuauugagccac

SEQ ID NO: 337549 - RNA, 19 nt, Artificial Sequence
  Description of Artificial Sequence: Synthetic oligonucleotide
ugucucaacuuuccguaag

SEQ ID NO: 337550 - RNA, 19 nt, Artificial Sequence
  Description of Artificial Sequence: Synthetic oligonucleotide
auugcacgggcccuggcac

SEQ ID NO: 337551 - RNA, 19 nt, Artificial Sequence
  Description of Artificial Sequence: Synthetic oligonucleotide
auggcuuuaaaugagcuaa

SEQ ID NO: 337552 - RNA, 19 nt, Artificial Sequence
  Description of Artificial Sequence: Synthetic oligonucleotide
gaugguggaagcccgcugc

SEQ ID NO: 337553 - RNA, 19 nt, Artificial Sequence
  Description of Artificial Sequence: Synthetic oligonucleotide
uucuuaauaguuguccaac

SEQ ID NO: 337554 - RNA, 19 nt, Artificial Sequence
  Description of Artificial Sequence: Synthetic oligonucleotide
agagcaguccccugugugg

SEQ ID NO: 337555 - RNA, 19 nt, Artificial Sequence
  Description of Artificial Sequence: Synthetic oligonucleotide
uguucacaagucauuagua

SEQ ID NO: 337556 - RNA, 19 nt, Artificial Sequence
  Description of Artificial Sequence: Synthetic oligonucleotide
uuaaagugucuacugucuc

SEQ ID NO: 337557 - RNA, 19 nt, Artificial Sequence
  Description of Artificial Sequence: Synthetic oligonucleotide
uucgcuaucuccaggcccu

SEQ ID NO: 337558 - RNA, 19 nt, Artificial Sequence
  Description of Artificial Sequence: Synthetic oligonucleotide
aaggaaaguaaaggcagcu

SEQ ID NO: 337559 - RNA, 19 nt, Artificial Sequence
  Description of Artificial Sequence: Synthetic oligonucleotide
gaguucgcuaucuccaggc

SEQ ID NO: 337560 - RNA, 19 nt, Artificial Sequence
  Description of Artificial Sequence: Synthetic oligonucleotide
auaguuacagcuggaagcu

SEQ ID NO: 337561 - RNA, 19 nt, Artificial Sequence
  Description of Artificial Sequence: Synthetic oligonucleotide
auuaaccaauucuuagagu

SEQ ID NO: 337562 - RNA, 19 nt, Artificial Sequence
  Description of Artificial Sequence: Synthetic oligonucleotide
aaccaagcuggcuucuucu

SEQ ID NO: 337563 - RNA, 19 nt, Artificial Sequence
  Description of Artificial Sequence: Synthetic oligonucleotide
acagcuaauuagaggaaac

SEQ ID NO: 337564 - RNA, 19 nt, Artificial Sequence
  Description of Artificial Sequence: Synthetic oligonucleotide
aguucgcuaucuccaggcc

SEQ ID NO: 337565 - RNA, 19 nt, Artificial Sequence
  Description of Artificial Sequence: Synthetic oligonucleotide
cucuauucccuugugagug

SEQ ID NO: 337566 - RNA, 19 nt, Artificial Sequence
  Description of Artificial Sequence: Synthetic oligonucleotide
gcagauaagacucaucauc

SEQ ID NO: 337567 - RNA, 19 nt, Artificial Sequence
  Description of Artificial Sequence: Synthetic oligonucleotide
cagaauuaugauaaacaga

SEQ ID NO: 337568 - RNA, 19 nt, Artificial Sequence
  Description of Artificial Sequence: Synthetic oligonucleotide
agacaaaccaagcuggcuu

SEQ ID NO: 337569 - RNA, 19 nt, Artificial Sequence
  Description of Artificial Sequence: Synthetic oligonucleotide
gaagaguucgcuaucucca

SEQ ID NO: 337570 - RNA, 19 nt, Artificial Sequence
  Description of Artificial Sequence: Synthetic oligonucleotide
aguuacauaacagcuaauu

SEQ ID NO: 337571 - RNA, 19 nt, Artificial Sequence
  Description of Artificial Sequence: Synthetic oligonucleotide
auuaaggcggcgacagacc

SEQ ID NO: 337572 - RNA, 19 nt, Artificial Sequence
  Description of Artificial Sequence: Synthetic oligonucleotide
cuacguagguauuugaaaa

SEQ ID NO: 337573 - RNA, 19 nt, Artificial Sequence
  Description of Artificial Sequence: Synthetic oligonucleotide
agaaagcuccuagaagaac

SEQ ID NO: 337574 - RNA, 19 nt, Artificial Sequence
  Description of Artificial Sequence: Synthetic oligonucleotide
agcagagugcaucucccuc

SEQ ID NO: 337575 - RNA, 19 nt, Artificial Sequence
  Description of Artificial Sequence: Synthetic oligonucleotide
ggaaagcuggagaacaugg

SEQ ID NO: 337576 - RNA, 19 nt, Artificial Sequence
  Description of Artificial Sequence: Synthetic oligonucleotide
uguuaacuauauaguuaca

SEQ ID NO: 337577 - RNA, 19 nt, Artificial Sequence
  Description of Artificial Sequence: Synthetic oligonucleotide
ucgacaacccucacugcgc

SEQ ID NO: 337578 - RNA, 19 nt, Artificial Sequence
  Description of Artificial Sequence: Synthetic oligonucleotide
cauuaaggcggcgacagac

SEQ ID NO: 337579 - RNA, 19 nt, Artificial Sequence
  Description of Artificial Sequence: Synthetic oligonucleotide
ggcaaauacaagugagggg

SEQ ID NO: 337580 - RNA, 19 nt, Artificial Sequence
  Description of Artificial Sequence: Synthetic oligonucleotide
uucgggagaaucugauacc

SEQ ID NO: 337581 - RNA, 19 nt, Artificial Sequence
  Description of Artificial Sequence: Synthetic oligonucleotide
ugcauauuugcgacuucca

SEQ ID NO: 337582 - RNA, 19 nt, Artificial Sequence
  Description of Artificial Sequence: Synthetic oligonucleotide
aacagcuaauuagaggaaa

SEQ ID NO: 337583 - RNA, 19 nt, Artificial Sequence
  Description of Artificial Sequence: Synthetic oligonucleotide
agcugcagggaguuaaaug

SEQ ID NO: 337584 - RNA, 19 nt, Artificial Sequence
  Description of Artificial Sequence: Synthetic oligonucleotide
auagacucuuuagugaagu

SEQ ID NO: 337585 - RNA, 19 nt, Artificial Sequence
  Description of Artificial Sequence: Synthetic oligonucleotide
aggggauaguuuuaacugu

SEQ ID NO: 337586 - RNA, 19 nt, Artificial Sequence
  Description of Artificial Sequence: Synthetic oligonucleotide
uagaaagcuccuagaagaa

SEQ ID NO: 337587 - RNA, 19 nt, Artificial Sequence
  Description of Artificial Sequence: Synthetic oligonucleotide
uaugugcagauaagacuca

SEQ ID NO: 337588 - RNA, 19 nt, Artificial Sequence
  Description of Artificial Sequence: Synthetic oligonucleotide
gccacacuaagccucaggg

SEQ ID NO: 337589 - RNA, 19 nt, Artificial Sequence
  Description of Artificial Sequence: Synthetic oligonucleotide
aucauaugugacacuagag

SEQ ID NO: 337590 - RNA, 19 nt, Artificial Sequence
  Description of Artificial Sequence: Synthetic oligonucleotide
agaguucgcuaucuccagg

SEQ ID NO: 337591 - RNA, 19 nt, Artificial Sequence
  Description of Artificial Sequence: Synthetic oligonucleotide
aggcucucaauguagggga

SEQ ID NO: 337592 - RNA, 19 nt, Artificial Sequence
  Description of Artificial Sequence: Synthetic oligonucleotide
augcucaccugugaguuac

SEQ ID NO: 337593 - RNA, 19 nt, Artificial Sequence
  Description of Artificial Sequence: Synthetic oligonucleotide
aggguacccacauugaguu

SEQ ID NO: 337594 - RNA, 19 nt, Artificial Sequence
  Description of Artificial Sequence: Synthetic oligonucleotide
aggcccuggauuccuaagg

SEQ ID NO: 337595 - RNA, 19 nt, Artificial Sequence
  Description of Artificial Sequence: Synthetic oligonucleotide
uggcuuuaaaugagcuaag

SEQ ID NO: 337596 - RNA, 19 nt, Artificial Sequence
  Description of Artificial Sequence: Synthetic oligonucleotide
uuacagugauucauauuau

SEQ ID NO: 337597 - RNA, 19 nt, Artificial Sequence
  Description of Artificial Sequence: Synthetic oligonucleotide
gggagaaucugauaccagc

SEQ ID NO: 337598 - RNA, 19 nt, Artificial Sequence
  Description of Artificial Sequence: Synthetic oligonucleotide
auauuaauacugucccaaa

SEQ ID NO: 337599 - RNA, 19 nt, Artificial Sequence
  Description of Artificial Sequence: Synthetic oligonucleotide
cauaacuucccugucucac

SEQ ID NO: 337600 - RNA, 19 nt, Artificial Sequence
  Description of Artificial Sequence: Synthetic oligonucleotide
gaaucauaugugacacuag

SEQ ID NO: 337601 - RNA, 19 nt, Artificial Sequence
  Description of Artificial Sequence: Synthetic oligonucleotide
agaauucccaugguguuca

SEQ ID NO: 337602 - RNA, 19 nt, Artificial Sequence
  Description of Artificial Sequence: Synthetic oligonucleotide
acauaacagcuaauuagag

SEQ ID NO: 337603 - RNA, 19 nt, Artificial Sequence
  Description of Artificial Sequence: Synthetic oligonucleotide
guaacuauauguucauaua

SEQ ID NO: 337604 - RNA, 19 nt, Artificial Sequence
  Description of Artificial Sequence: Synthetic oligonucleotide
gacaaaccaagcuggcuuc

SEQ ID NO: 337605 - RNA, 19 nt, Artificial Sequence
  Description of Artificial Sequence: Synthetic oligonucleotide
cucucaauguaggggauag

SEQ ID NO: 337606 - RNA, 19 nt, Artificial Sequence
  Description of Artificial Sequence: Synthetic oligonucleotide
uuaagucaaugcucaccug

SEQ ID NO: 337607 - RNA, 19 nt, Artificial Sequence
  Description of Artificial Sequence: Synthetic oligonucleotide
guucgcuaucuccaggccc

SEQ ID NO: 337608 - RNA, 19 nt, Artificial Sequence
  Description of Artificial Sequence: Synthetic oligonucleotide
aaaccugcugacaggugag

SEQ ID NO: 337609 - RNA, 19 nt, Artificial Sequence
  Description of Artificial Sequence: Synthetic oligonucleotide
uaacagcuaauuagaggaa

SEQ ID NO: 337610 - RNA, 19 nt, Artificial Sequence
  Description of Artificial Sequence: Synthetic oligonucleotide
gaaaccguguguucauguc

SEQ ID NO: 337611 - RNA, 19 nt, Artificial Sequence
  Description of Artificial Sequence: Synthetic oligonucleotide
cccacauugaguuacauaa

SEQ ID NO: 337612 - RNA, 19 nt, Artificial Sequence
  Description of Artificial Sequence: Synthetic oligonucleotide
uucuagaaacuauguuaac

SEQ ID NO: 337613 - RNA, 19 nt, Artificial Sequence
  Description of Artificial Sequence: Synthetic oligonucleotide
uccguaagucccuucugga

SEQ ID NO: 337614 - RNA, 19 nt, Artificial Sequence
  Description of Artificial Sequence: Synthetic oligonucleotide
cagcuaauuagaggaaacc

SEQ ID NO: 337615 - RNA, 19 nt, Artificial Sequence
  Description of Artificial Sequence: Synthetic oligonucleotide
uacuagccauuuaaauaac

SEQ ID NO: 337616 - RNA, 19 nt, Artificial Sequence
  Description of Artificial Sequence: Synthetic oligonucleotide
gcagugaugucaaaguaag

SEQ ID NO: 337617 - RNA, 19 nt, Artificial Sequence
  Description of Artificial Sequence: Synthetic oligonucleotide
ugugaagaccugcgggcca

SEQ ID NO: 337618 - RNA, 19 nt, Artificial Sequence
  Description of Artificial Sequence: Synthetic oligonucleotide
uaguuuuaacuguuucuua

SEQ ID NO: 337619 - RNA, 19 nt, Artificial Sequence
  Description of Artificial Sequence: Synthetic oligonucleotide
ugugcagauaagacucauc

SEQ ID NO: 337620 - RNA, 19 nt, Artificial Sequence
  Description of Artificial Sequence: Synthetic oligonucleotide
auaugugacacuagagggu

SEQ ID NO: 337621 - RNA, 19 nt, Artificial Sequence
  Description of Artificial Sequence: Synthetic oligonucleotide
caaaccugcugacagguga

SEQ ID NO: 337622 - RNA, 19 nt, Artificial Sequence
  Description of Artificial Sequence: Synthetic oligonucleotide
ggaguuaaaugcauauuug

SEQ ID NO: 337623 - RNA, 19 nt, Artificial Sequence
  Description of Artificial Sequence: Synthetic oligonucleotide
uggaagguugggugguaag

SEQ ID NO: 337624 - RNA, 19 nt, Artificial Sequence
  Description of Artificial Sequence: Synthetic oligonucleotide
gaaaacuagcuagacauau

SEQ ID NO: 337625 - RNA, 19 nt, Artificial Sequence
  Description of Artificial Sequence: Synthetic oligonucleotide
ggaagcuauuguuagggca

SEQ ID NO: 337626 - RNA, 19 nt, Artificial Sequence
  Description of Artificial Sequence: Synthetic oligonucleotide
uugggugguaagagcuucc

SEQ ID NO: 337627 - RNA, 19 nt, Artificial Sequence
  Description of Artificial Sequence: Synthetic oligonucleotide
cuauugagccacacaugac

SEQ ID NO: 337628 - RNA, 19 nt, Artificial Sequence
  Description of Artificial Sequence: Synthetic oligonucleotide
ugcagauaagacucaucau

SEQ ID NO: 337629 - RNA, 19 nt, Artificial Sequence
  Description of Artificial Sequence: Synthetic oligonucleotide
gccauuacuauccacacua

SEQ ID NO: 337630 - RNA, 19 nt, Artificial Sequence
  Description of Artificial Sequence: Synthetic oligonucleotide
uauuguuagggcagccauu

SEQ ID NO: 337631 - RNA, 19 nt, Artificial Sequence
  Description of Artificial Sequence: Synthetic oligonucleotide
agcuauuguuagggcagcc

SEQ ID NO: 337632 - RNA, 19 nt, Artificial Sequence
  Description of Artificial Sequence: Synthetic oligonucleotide
agaaacuauguuaacuaua

SEQ ID NO: 337633 - RNA, 19 nt, Artificial Sequence
  Description of Artificial Sequence: Synthetic oligonucleotide
ucuauucccuugugagugu

SEQ ID NO: 337634 - RNA, 19 nt, Artificial Sequence
  Description of Artificial Sequence: Synthetic oligonucleotide
uuccgugauuaaccaauuc

SEQ ID NO: 337635 - RNA, 19 nt, Artificial Sequence
  Description of Artificial Sequence: Synthetic oligonucleotide
agauuauuagaaagcuccu

SEQ ID NO: 337636 - RNA, 19 nt, Artificial Sequence
  Description of Artificial Sequence: Synthetic oligonucleotide
gguguucacaagucauuag

SEQ ID NO: 337637 - RNA, 19 nt, Artificial Sequence
  Description of Artificial Sequence: Synthetic oligonucleotide
ugaggauaugcuucuuguu

SEQ ID NO: 337638 - RNA, 19 nt, Artificial Sequence
  Description of Artificial Sequence: Synthetic oligonucleotide
aaaacuagcuagacauaua

SEQ ID NO: 337639 - RNA, 19 nt, Artificial Sequence
  Description of Artificial Sequence: Synthetic oligonucleotide
ugcacuaagcuuggcaaau

SEQ ID NO: 337640 - RNA, 19 nt, Artificial Sequence
  Description of Artificial Sequence: Synthetic oligonucleotide
accagacuaaauugucuau

SEQ ID NO: 337641 - RNA, 19 nt, Artificial Sequence
  Description of Artificial Sequence: Synthetic oligonucleotide
agcuccuagaagaacauuu

SEQ ID NO: 337642 - RNA, 19 nt, Artificial Sequence
  Description of Artificial Sequence: Synthetic oligonucleotide
accuaagcugaauucuaaa

SEQ ID NO: 337643 - RNA, 19 nt, Artificial Sequence
  Description of Artificial Sequence: Synthetic oligonucleotide
uuauucuugcgugcaugga

SEQ ID NO: 337644 - RNA, 19 nt, Artificial Sequence
  Description of Artificial Sequence: Synthetic oligonucleotide
auuugcgacuuccaacauu

SEQ ID NO: 337645 - RNA, 19 nt, Artificial Sequence
  Description of Artificial Sequence: Synthetic oligonucleotide
uuuccgugauuaaccaauu

SEQ ID NO: 337646 - RNA, 19 nt, Artificial Sequence
  Description of Artificial Sequence: Synthetic oligonucleotide
acuaagcuuggcaaauaca

SEQ ID NO: 337647 - RNA, 19 nt, Artificial Sequence
  Description of Artificial Sequence: Synthetic oligonucleotide
aguuuuacagugauucaua

SEQ ID NO: 337648 - RNA, 19 nt, Artificial Sequence
  Description of Artificial Sequence: Synthetic oligonucleotide
acuuuccguaagucccuuc

SEQ ID NO: 337649 - RNA, 19 nt, Artificial Sequence
  Description of Artificial Sequence: Synthetic oligonucleotide
cauuaguaugcaucaugga

SEQ ID NO: 337650 - RNA, 19 nt, Artificial Sequence
  Description of Artificial Sequence: Synthetic oligonucleotide
cuagccauuuaaauaacau

SEQ ID NO: 337651 - RNA, 19 nt, Artificial Sequence
  Description of Artificial Sequence: Synthetic oligonucleotide
accauggcgagggcugugc

SEQ ID NO: 337652 - RNA, 19 nt, Artificial Sequence
  Description of Artificial Sequence: Synthetic oligonucleotide
cuauauaguuacagcugga

SEQ ID NO: 337653 - RNA, 19 nt, Artificial Sequence
  Description of Artificial Sequence: Synthetic oligonucleotide
acaacccucacugcgcaug

SEQ ID NO: 337654 - RNA, 19 nt, Artificial Sequence
  Description of Artificial Sequence: Synthetic oligonucleotide
gaucaggcacugcuccagc

SEQ ID NO: 337655 - RNA, 19 nt, Artificial Sequence
  Description of Artificial Sequence: Synthetic oligonucleotide
auucgcuggaagccaguca

SEQ ID NO: 337656 - RNA, 19 nt, Artificial Sequence
  Description of Artificial Sequence: Synthetic oligonucleotide
uauccacacuauugagcca

SEQ ID NO: 337657 - RNA, 19 nt, Artificial Sequence
  Description of Artificial Sequence: Synthetic oligonucleotide
uaagacucaucaucaccuu

SEQ ID NO: 337658 - RNA, 19 nt, Artificial Sequence
  Description of Artificial Sequence: Synthetic oligonucleotide
aaugcucaccugugaguua

SEQ ID NO: 337659 - RNA, 19 nt, Artificial Sequence
  Description of Artificial Sequence: Synthetic oligonucleotide
uauuugcgacuuccaacau

SEQ ID NO: 337660 - RNA, 19 nt, Artificial Sequence
  Description of Artificial Sequence: Synthetic oligonucleotide
aauguaggggauaguuuua

SEQ ID NO: 337661 - RNA, 19 nt, Artificial Sequence
  Description of Artificial Sequence: Synthetic oligonucleotide
ggugaaucggacuccauua

SEQ ID NO: 337662 - RNA, 19 nt, Artificial Sequence
  Description of Artificial Sequence: Synthetic oligonucleotide
caauguaggggauaguuuu

SEQ ID NO: 337663 - RNA, 19 nt, Artificial Sequence
  Description of Artificial Sequence: Synthetic oligonucleotide
guaaugcuuggggaaggcc

SEQ ID NO: 337664 - RNA, 19 nt, Artificial Sequence
  Description of Artificial Sequence: Synthetic oligonucleotide
agccauuacuauccacacu

SEQ ID NO: 337665 - RNA, 19 nt, Artificial Sequence
  Description of Artificial Sequence: Synthetic oligonucleotide
guucacaagucauuaguau

SEQ ID NO: 337666 - RNA, 19 nt, Artificial Sequence
  Description of Artificial Sequence: Synthetic oligonucleotide
cugugaguuacugaauaga

SEQ ID NO: 337667 - RNA, 19 nt, Artificial Sequence
  Description of Artificial Sequence: Synthetic oligonucleotide
guucuuauucuugcgugca

SEQ ID NO: 337668 - RNA, 19 nt, Artificial Sequence
  Description of Artificial Sequence: Synthetic oligonucleotide
cacaugcaaaccugcugac

SEQ ID NO: 337669 - RNA, 19 nt, Artificial Sequence
  Description of Artificial Sequence: Synthetic oligonucleotide
ugcgugcauggaccuaagc

SEQ ID NO: 337670 - RNA, 19 nt, Artificial Sequence
  Description of Artificial Sequence: Synthetic oligonucleotide
gcuaugugcagauaagacu

SEQ ID NO: 337671 - RNA, 19 nt, Artificial Sequence
  Description of Artificial Sequence: Synthetic oligonucleotide
augcacuaagcuuggcaaa

SEQ ID NO: 337672 - RNA, 19 nt, Artificial Sequence
  Description of Artificial Sequence: Synthetic oligonucleotide
gucacugacauggcuguac

SEQ ID NO: 337673 - RNA, 19 nt, Artificial Sequence
  Description of Artificial Sequence: Synthetic oligonucleotide
cacaucuuuuccgugauua

SEQ ID NO: 337674 - RNA, 19 nt, Artificial Sequence
  Description of Artificial Sequence: Synthetic oligonucleotide
cuucgacaacccucacugc

SEQ ID NO: 337675 - RNA, 19 nt, Artificial Sequence
  Description of Artificial Sequence: Synthetic oligonucleotide
cacagaagaguucgcuauc

SEQ ID NO: 337676 - RNA, 19 nt, Artificial Sequence
  Description of Artificial Sequence: Synthetic oligonucleotide
uagacucuuuagugaagua

SEQ ID NO: 337677 - RNA, 19 nt, Artificial Sequence
  Description of Artificial Sequence: Synthetic oligonucleotide
agcuagacauauacaagaa

SEQ ID NO: 337678 - RNA, 19 nt, Artificial Sequence
  Description of Artificial Sequence: Synthetic oligonucleotide
cacacuauugagccacaca

SEQ ID NO: 337679 - RNA, 19 nt, Artificial Sequence
  Description of Artificial Sequence: Synthetic oligonucleotide
gcagccauuacuauccaca

SEQ ID NO: 337680 - RNA, 19 nt, Artificial Sequence
  Description of Artificial Sequence: Synthetic oligonucleotide
ccacucaccuuccaugugc

SEQ ID NO: 337681 - RNA, 19 nt, Artificial Sequence
  Description of Artificial Sequence: Synthetic oligonucleotide
gacucuuuagugaaguauu

SEQ ID NO: 337682 - RNA, 19 nt, Artificial Sequence
  Description of Artificial Sequence: Synthetic oligonucleotide
cacugcgcaugcauuccag

SEQ ID NO: 337683 - RNA, 19 nt, Artificial Sequence
  Description of Artificial Sequence: Synthetic oligonucleotide
gauucgcuggaagccaguc

SEQ ID NO: 337684 - RNA, 19 nt, Artificial Sequence
  Description of Artificial Sequence: Synthetic oligonucleotide
accauguccgcugccacgu

SEQ ID NO: 337685 - RNA, 19 nt, Artificial Sequence
  Description of Artificial Sequence: Synthetic oligonucleotide
gcgacuuccaacauucuuc

SEQ ID NO: 337686 - RNA, 19 nt, Artificial Sequence
  Description of Artificial Sequence: Synthetic oligonucleotide
aguugggugagcagugccu

SEQ ID NO: 337687 - RNA, 19 nt, Artificial Sequence
  Description of Artificial Sequence: Synthetic oligonucleotide
aacgaauccuucaggucuu

SEQ ID NO: 337688 - RNA, 19 nt, Artificial Sequence
  Description of Artificial Sequence: Synthetic oligonucleotide
uccacacuauugagccaca

SEQ ID NO: 337689 - RNA, 19 nt, Artificial Sequence
  Description of Artificial Sequence: Synthetic oligonucleotide
gugugaagaccugcgggcc

SEQ ID NO: 337690 - RNA, 19 nt, Artificial Sequence
  Description of Artificial Sequence: Synthetic oligonucleotide
auguaggggauaguuuuaa

SEQ ID NO: 337691 - RNA, 19 nt, Artificial Sequence
  Description of Artificial Sequence: Synthetic oligonucleotide
ccacacuaagccucagggg

SEQ ID NO: 337692 - RNA, 19 nt, Artificial Sequence
  Description of Artificial Sequence: Synthetic oligonucleotide
gugaguuacugaauagaaa

SEQ ID NO: 337693 - RNA, 19 nt, Artificial Sequence
  Description of Artificial Sequence: Synthetic oligonucleotide
uugcgugcauggaccuaag

SEQ ID NO: 337694 - RNA, 19 nt, Artificial Sequence
  Description of Artificial Sequence: Synthetic oligonucleotide
acccacauugaguuacaua

SEQ ID NO: 337695 - RNA, 19 nt, Artificial Sequence
  Description of Artificial Sequence: Synthetic oligonucleotide
cacucuugcagcuggugaa

SEQ ID NO: 337696 - RNA, 19 nt, Artificial Sequence
  Description of Artificial Sequence: Synthetic oligonucleotide
cuuuccguaagucccuucu

SEQ ID NO: 337697 - RNA, 19 nt, Artificial Sequence
  Description of Artificial Sequence: Synthetic oligonucleotide
aacuucccugucucacaaa

SEQ ID NO: 337698 - RNA, 19 nt, Artificial Sequence
  Description of Artificial Sequence: Synthetic oligonucleotide
agugccuacguagguauuu

SEQ ID NO: 337699 - RNA, 19 nt, Artificial Sequence
  Description of Artificial Sequence: Synthetic oligonucleotide
gguaagagcuucccugcca

SEQ ID NO: 337700 - RNA, 19 nt, Artificial Sequence
  Description of Artificial Sequence: Synthetic oligonucleotide
gggugugauucgcuggaag

SEQ ID NO: 337701 - RNA, 19 nt, Artificial Sequence
  Description of Artificial Sequence: Synthetic oligonucleotide
gggauaaaacaguauuaua

SEQ ID NO: 337702 - RNA, 19 nt, Artificial Sequence
  Description of Artificial Sequence: Synthetic oligonucleotide
ccagacuaaauugucuaug

SEQ ID NO: 337703 - RNA, 19 nt, Artificial Sequence
  Description of Artificial Sequence: Synthetic oligonucleotide
ccuaagcugaauucuaaaa

SEQ ID NO: 337704 - RNA, 19 nt, Artificial Sequence
  Description of Artificial Sequence: Synthetic oligonucleotide
cugcuaugugcagauaaga

SEQ ID NO: 337705 - RNA, 19 nt, Artificial Sequence
  Description of Artificial Sequence: Synthetic oligonucleotide
cuuuuccgugauuaaccaa

SEQ ID NO: 337706 - RNA, 19 nt, Artificial Sequence
  Description of Artificial Sequence: Synthetic oligonucleotide
gccgugcucaugcugcagg

SEQ ID NO: 337707 - RNA, 19 nt, Artificial Sequence
  Description of Artificial Sequence: Synthetic oligonucleotide
gugacacuagaggguaccc

SEQ ID NO: 337708 - RNA, 19 nt, Artificial Sequence
  Description of Artificial Sequence: Synthetic oligonucleotide
gcuaauuagaggaaaccgu

SEQ ID NO: 337709 - RNA, 19 nt, Artificial Sequence
  Description of Artificial Sequence: Synthetic oligonucleotide
cauugcacgggcccuggca

SEQ ID NO: 337710 - RNA, 19 nt, Artificial Sequence
  Description of Artificial Sequence: Synthetic oligonucleotide
ggagcucugacagaaucca

SEQ ID NO: 337711 - RNA, 19 nt, Artificial Sequence
  Description of Artificial Sequence: Synthetic oligonucleotide
cuauuguuagggcagccau

SEQ ID NO: 337712 - RNA, 19 nt, Artificial Sequence
  Description of Artificial Sequence: Synthetic oligonucleotide
gaccuaagcugaauucuaa

SEQ ID NO: 337713 - RNA, 19 nt, Artificial Sequence
  Description of Artificial Sequence: Synthetic oligonucleotide
acauuccuuuuaagugggg

SEQ ID NO: 337714 - RNA, 19 nt, Artificial Sequence
  Description of Artificial Sequence: Synthetic oligonucleotide
uugcacgggcccuggcacc

SEQ ID NO: 337715 - RNA, 19 nt, Artificial Sequence
  Description of Artificial Sequence: Synthetic oligonucleotide
cguucuuauucuugcgugc

SEQ ID NO: 337716 - RNA, 19 nt, Artificial Sequence
  Description of Artificial Sequence: Synthetic oligonucleotide
cauauacaagaauucccau

SEQ ID NO: 337717 - RNA, 19 nt, Artificial Sequence
  Description of Artificial Sequence: Synthetic oligonucleotide
cuccauauacacuucuuuu

SEQ ID NO: 337718 - RNA, 19 nt, Artificial Sequence
  Description of Artificial Sequence: Synthetic oligonucleotide
agaaaacuagcuagacaua

SEQ ID NO: 337719 - RNA, 19 nt, Artificial Sequence
  Description of Artificial Sequence: Synthetic oligonucleotide
uggaagcccgcugcauugc

SEQ ID NO: 337720 - RNA, 19 nt, Artificial Sequence
  Description of Artificial Sequence: Synthetic oligonucleotide
gcauauuugcgacuuccaa

SEQ ID NO: 337721 - RNA, 19 nt, Artificial Sequence
  Description of Artificial Sequence: Synthetic oligonucleotide
ucgaugguggaagcccgcu

SEQ ID NO: 337722 - RNA, 19 nt, Artificial Sequence
  Description of Artificial Sequence: Synthetic oligonucleotide
uugcgacuuccaacauucu

SEQ ID NO: 337723 - RNA, 19 nt, Artificial Sequence
  Description of Artificial Sequence: Synthetic oligonucleotide
agggaguuaaaugcauauu

SEQ ID NO: 337724 - RNA, 19 nt, Artificial Sequence
  Description of Artificial Sequence: Synthetic oligonucleotide
gcggcgacagaccucagca

SEQ ID NO: 337725 - RNA, 19 nt, Artificial Sequence
  Description of Artificial Sequence: Synthetic oligonucleotide
agucauuaguaugcaucau

SEQ ID NO: 337726 - RNA, 19 nt, Artificial Sequence
  Description of Artificial Sequence: Synthetic oligonucleotide
gccacacauuccuuuuaag

SEQ ID NO: 337727 - RNA, 19 nt, Artificial Sequence
  Description of Artificial Sequence: Synthetic oligonucleotide
acuagaggguacccacauu

SEQ ID NO: 337728 - RNA, 19 nt, Artificial Sequence
  Description of Artificial Sequence: Synthetic oligonucleotide
aggaaaccguguguucaug

SEQ ID NO: 337729 - RNA, 19 nt, Artificial Sequence
  Description of Artificial Sequence: Synthetic oligonucleotide
agagcggagcagugagcca

SEQ ID NO: 337730 - RNA, 19 nt, Artificial Sequence
  Description of Artificial Sequence: Synthetic oligonucleotide
uucuaaagacaagcacauu

SEQ ID NO: 337731 - RNA, 19 nt, Artificial Sequence
  Description of Artificial Sequence: Synthetic oligonucleotide
ccuacguagguauuugaaa

SEQ ID NO: 337732 - RNA, 19 nt, Artificial Sequence
  Description of Artificial Sequence: Synthetic oligonucleotide
uccaugugccaugcccuga

SEQ ID NO: 337733 - RNA, 19 nt, Artificial Sequence
  Description of Artificial Sequence: Synthetic oligonucleotide
ggcagugaugucaaaguaa

SEQ ID NO: 337734 - RNA, 19 nt, Artificial Sequence
  Description of Artificial Sequence: Synthetic oligonucleotide
cagggaguuaaaugcauau

SEQ ID NO: 337735 - RNA, 19 nt, Artificial Sequence
  Description of Artificial Sequence: Synthetic oligonucleotide
accguguguucaugucuca

SEQ ID NO: 337736 - RNA, 19 nt, Artificial Sequence
  Description of Artificial Sequence: Synthetic oligonucleotide
agaacauggcaaacauuua

SEQ ID NO: 337737 - RNA, 19 nt, Artificial Sequence
  Description of Artificial Sequence: Synthetic oligonucleotide
cugcucuauucccuuguga

SEQ ID NO: 337738 - RNA, 19 nt, Artificial Sequence
  Description of Artificial Sequence: Synthetic oligonucleotide
ggaagguugggugguaaga

SEQ ID NO: 337739 - RNA, 19 nt, Artificial Sequence
  Description of Artificial Sequence: Synthetic oligonucleotide
gagguaccuccuguuuuac

SEQ ID NO: 337740 - RNA, 19 nt, Artificial Sequence
  Description of Artificial Sequence: Synthetic oligonucleotide
gaauucccaugguguucac

SEQ ID NO: 337741 - RNA, 19 nt, Artificial Sequence
  Description of Artificial Sequence: Synthetic oligonucleotide
augugcagauaagacucau

SEQ ID NO: 337742 - RNA, 19 nt, Artificial Sequence
  Description of Artificial Sequence: Synthetic oligonucleotide
agaaaacacugaagccaca

SEQ ID NO: 337743 - RNA, 19 nt, Artificial Sequence
  Description of Artificial Sequence: Synthetic oligonucleotide
cccucucaggcucucaaug

SEQ ID NO: 337744 - RNA, 19 nt, Artificial Sequence
  Description of Artificial Sequence: Synthetic oligonucleotide
ggccuguaaugcuugggga

SEQ ID NO: 337745 - RNA, 19 nt, Artificial Sequence
  Description of Artificial Sequence: Synthetic oligonucleotide
agcagugccuacguaggua

SEQ ID NO: 337746 - RNA, 19 nt, Artificial Sequence
  Description of Artificial Sequence: Synthetic oligonucleotide
cguguguucaugucucaac

SEQ ID NO: 337747 - RNA, 19 nt, Artificial Sequence
  Description of Artificial Sequence: Synthetic oligonucleotide
gcgugcauggaccuaagcu

SEQ ID NO: 337748 - RNA, 19 nt, Artificial Sequence
  Description of Artificial Sequence: Synthetic oligonucleotide
gaggaaaccguguguucau

SEQ ID NO: 337749 - RNA, 19 nt, Artificial Sequence
  Description of Artificial Sequence: Synthetic oligonucleotide
ccucacugcgcaugcauuc

SEQ ID NO: 337750 - RNA, 19 nt, Artificial Sequence
  Description of Artificial Sequence: Synthetic oligonucleotide
ggagguaccuccuguuuua

SEQ ID NO: 337751 - RNA, 19 nt, Artificial Sequence
  Description of Artificial Sequence: Synthetic oligonucleotide
ugcucaccugugaguuacu

SEQ ID NO: 337752 - RNA, 19 nt, Artificial Sequence
  Description of Artificial Sequence: Synthetic oligonucleotide
gcuauuguuagggcagcca

SEQ ID NO: 337753 - RNA, 19 nt, Artificial Sequence
  Description of Artificial Sequence: Synthetic oligonucleotide
cauggaccuaagcugaauu

SEQ ID NO: 337754 - RNA, 19 nt, Artificial Sequence
  Description of Artificial Sequence: Synthetic oligonucleotide
ggaaaccguguguucaugu

SEQ ID NO: 337755 - RNA, 19 nt, Artificial Sequence
  Description of Artificial Sequence: Synthetic oligonucleotide
uacccacauugaguuacau

SEQ ID NO: 337756 - RNA, 19 nt, Artificial Sequence
  Description of Artificial Sequence: Synthetic oligonucleotide
ugccgugcucaugcugcag

SEQ ID NO: 337757 - RNA, 19 nt, Artificial Sequence
  Description of Artificial Sequence: Synthetic oligonucleotide
gcuagacauauacaagaau

SEQ ID NO: 337758 - RNA, 19 nt, Artificial Sequence
  Description of Artificial Sequence: Synthetic oligonucleotide
ugccacgucgaugguggaa

SEQ ID NO: 337759 - RNA, 19 nt, Artificial Sequence
  Description of Artificial Sequence: Synthetic oligonucleotide
cauuacuauccacacuauu

SEQ ID NO: 337760 - RNA, 19 nt, Artificial Sequence
  Description of Artificial Sequence: Synthetic oligonucleotide
uaguuacagcuggaagcua

SEQ ID NO: 337761 - RNA, 19 nt, Artificial Sequence
  Description of Artificial Sequence: Synthetic oligonucleotide
gucgaugguggaagcccgc

SEQ ID NO: 337762 - RNA, 19 nt, Artificial Sequence
  Description of Artificial Sequence: Synthetic oligonucleotide
gacgccacacauuccuuuu

SEQ ID NO: 337763 - RNA, 19 nt, Artificial Sequence
  Description of Artificial Sequence: Synthetic oligonucleotide
ugaagaccugcgggccaug

SEQ ID NO: 337764 - RNA, 19 nt, Artificial Sequence
  Description of Artificial Sequence: Synthetic oligonucleotide
cuggauuccuaagguggca

SEQ ID NO: 337765 - RNA, 19 nt, Artificial Sequence
  Description of Artificial Sequence: Synthetic oligonucleotide
auguccgcugccacgucga

SEQ ID NO: 337766 - RNA, 19 nt, Artificial Sequence
  Description of Artificial Sequence: Synthetic oligonucleotide
acgggcccuggcaccaugg

SEQ ID NO: 337767 - RNA, 19 nt, Artificial Sequence
  Description of Artificial Sequence: Synthetic oligonucleotide
cucuucgacaacccucacu

SEQ ID NO: 337768 - RNA, 19 nt, Artificial Sequence
  Description of Artificial Sequence: Synthetic oligonucleotide
cgugauuaaccaauucuua

SEQ ID NO: 337769 - RNA, 19 nt, Artificial Sequence
  Description of Artificial Sequence: Synthetic oligonucleotide
cuccauuaaggcggcgaca

SEQ ID NO: 337770 - RNA, 19 nt, Artificial Sequence
  Description of Artificial Sequence: Synthetic oligonucleotide
aguccccuguguggaaggu

SEQ ID NO: 337771 - RNA, 19 nt, Artificial Sequence
  Description of Artificial Sequence: Synthetic oligonucleotide
gagcagugccuacguaggu

SEQ ID NO: 337772 - RNA, 19 nt, Artificial Sequence
  Description of Artificial Sequence: Synthetic oligonucleotide
guacccacauugaguuaca

SEQ ID NO: 337773 - RNA, 19 nt, Artificial Sequence
  Description of Artificial Sequence: Synthetic oligonucleotide
cacuagaggguacccacau

SEQ ID NO: 337774 - RNA, 19 nt, Artificial Sequence
  Description of Artificial Sequence: Synthetic oligonucleotide
cccuacagauuccaacaca

SEQ ID NO: 337775 - RNA, 19 nt, Artificial Sequence
  Description of Artificial Sequence: Synthetic oligonucleotide
ggaccuaagcugaauucua

SEQ ID NO: 337776 - RNA, 19 nt, Artificial Sequence
  Description of Artificial Sequence: Synthetic oligonucleotide
gcucuauucccuugugagu

SEQ ID NO: 337777 - RNA, 19 nt, Artificial Sequence
  Description of Artificial Sequence: Synthetic oligonucleotide
gccacucaccuuccaugug

SEQ ID NO: 337778 - RNA, 19 nt, Artificial Sequence
  Description of Artificial Sequence: Synthetic oligonucleotide
ucgcuaucuccaggcccug

SEQ ID NO: 337779 - RNA, 19 nt, Artificial Sequence
  Description of Artificial Sequence: Synthetic oligonucleotide
ccgugauuaaccaauucuu

SEQ ID NO: 337780 - RNA, 19 nt, Artificial Sequence
  Description of Artificial Sequence: Synthetic oligonucleotide
ggauuccuaagguggcagu

SEQ ID NO: 337781 - RNA, 19 nt, Artificial Sequence
  Description of Artificial Sequence: Synthetic oligonucleotide
ggcccuggauuccuaaggu

SEQ ID NO: 337782 - RNA, 19 nt, Artificial Sequence
  Description of Artificial Sequence: Synthetic oligonucleotide
cccuguguggaagguuggg

SEQ ID NO: 337783 - RNA, 19 nt, Artificial Sequence
  Description of Artificial Sequence: Synthetic oligonucleotide
cgggagaaucugauaccag

SEQ ID NO: 337784 - RNA, 19 nt, Artificial Sequence
  Description of Artificial Sequence: Synthetic oligonucleotide
ccagggcuugugugaagac

SEQ ID NO: 337785 - RNA, 19 nt, Artificial Sequence
  Description of Artificial Sequence: Synthetic oligonucleotide
cccacagaagaguucgcua

SEQ ID NO: 337786 - RNA, 19 nt, Artificial Sequence
  Description of Artificial Sequence: Synthetic oligonucleotide
gggagguaccuccuguuuu

SEQ ID NO: 337787 - RNA, 19 nt, Artificial Sequence
  Description of Artificial Sequence: Synthetic oligonucleotide
caugcauuccagggcuugu

SEQ ID NO: 337788 - RNA, 19 nt, Artificial Sequence
  Description of Artificial Sequence: Synthetic oligonucleotide
ggcuucuucuagaaacuau

SEQ ID NO: 337789 - RNA, 19 nt, Artificial Sequence
  Description of Artificial Sequence: Synthetic oligonucleotide
ggggauaguuuuaacuguu

SEQ ID NO: 337790 - RNA, 19 nt, Artificial Sequence
  Description of Artificial Sequence: Synthetic oligonucleotide
ccacacuauugagccacac

SEQ ID NO: 337791 - RNA, 19 nt, Artificial Sequence
  Description of Artificial Sequence: Synthetic oligonucleotide
cacuaagccucaggggccu

SEQ ID NO: 337792 - RNA, 19 nt, Artificial Sequence
  Description of Artificial Sequence: Synthetic oligonucleotide
cagcgucacugacauggcu

SEQ ID NO: 337793 - RNA, 19 nt, Artificial Sequence
  Description of Artificial Sequence: Synthetic oligonucleotide
gggugagcagugccuacgu

SEQ ID NO: 337794 - RNA, 19 nt, Artificial Sequence
  Description of Artificial Sequence: Synthetic oligonucleotide
ggucuucuugaagaaucau

SEQ ID NO: 337795 - RNA, 19 nt, Artificial Sequence
  Description of Artificial Sequence: Synthetic oligonucleotide
ccugcgggccaugccgugc

SEQ ID NO: 337796 - RNA, 19 nt, Artificial Sequence
  Description of Artificial Sequence: Synthetic oligonucleotide
gcucucaauguaggggaua

SEQ ID NO: 337797 - RNA, 19 nt, Artificial Sequence
  Description of Artificial Sequence: Synthetic oligonucleotide
gggauaguuuuaacuguuu

SEQ ID NO: 337798 - RNA, 19 nt, Artificial Sequence
  Description of Artificial Sequence: Synthetic oligonucleotide
gcgacagaccucagcagcu

SEQ ID NO: 337799 - RNA, 19 nt, Artificial Sequence
  Description of Artificial Sequence: Synthetic oligonucleotide
acuaagccucaggggccuu

SEQ ID NO: 337800 - RNA, 19 nt, Artificial Sequence
  Description of Artificial Sequence: Synthetic oligonucleotide
cugcgggccaugccgugcu

SEQ ID NO: 337801 - RNA, 19 nt, Artificial Sequence
  Description of Artificial Sequence: Synthetic oligonucleotide
ccauuaaggcggcgacaga

SEQ ID NO: 337802 - RNA, 19 nt, Artificial Sequence
  Description of Artificial Sequence: Synthetic oligonucleotide
cagacgccacacauuccuu

SEQ ID NO: 337803 - RNA, 19 nt, Artificial Sequence
  Description of Artificial Sequence: Synthetic oligonucleotide
cuggugaaucggacuccau

SEQ ID NO: 337804 - RNA, 19 nt, Artificial Sequence
  Description of Artificial Sequence: Synthetic oligonucleotide
ccauuacuauccacacuau

SEQ ID NO: 337805 - RNA, 19 nt, Artificial Sequence
  Description of Artificial Sequence: Synthetic oligonucleotide
gcgggccaugccgugcuca

SEQ ID NO: 337806 - RNA, 19 nt, Artificial Sequence
  Description of Artificial Sequence: Synthetic oligonucleotide
cuaagccucaggggccuuu

SEQ ID NO: 337807 - RNA, 19 nt, Artificial Sequence
  Description of Artificial Sequence: Synthetic oligonucleotide
ccguguguucaugucucaa

SEQ ID NO: 337808 - RNA, 19 nt, Artificial Sequence
  Description of Artificial Sequence: Synthetic oligonucleotide
ccauguccgcugccacguc

SEQ ID NO: 337809 - RNA, 19 nt, Artificial Sequence
  Description of Artificial Sequence: Synthetic oligonucleotide
aggcggcgacagaccucag

SEQ ID NO: 337810 - RNA, 19 nt, Artificial Sequence
  Description of Artificial Sequence: Synthetic oligonucleotide
gcccucucaggcucucaau

SEQ ID NO: 337811 - RNA, 19 nt, Artificial Sequence
  Description of Artificial Sequence: Synthetic oligonucleotide
cccucacugcgcaugcauu

SEQ ID NO: 337812 - RNA, 19 nt, Artificial Sequence
  Description of Artificial Sequence: Synthetic oligonucleotide
gcgagggcugugcucucuu

SEQ ID NO: 337813 - RNA, 19 nt, Artificial Sequence
  Description of Artificial Sequence: Synthetic oligonucleotide
ccacaucuuuuccgugauu

SEQ ID NO: 337814 - RNA, 19 nt, Artificial Sequence
  Description of Artificial Sequence: Synthetic oligonucleotide
cgucacugacauggcugua

SEQ ID NO: 337815 - RNA, 19 nt, Artificial Sequence
  Description of Artificial Sequence: Synthetic oligonucleotide
cgcaugcauuccagggcuu

SEQ ID NO: 337816 - RNA, 19 nt, Artificial Sequence
  Description of Artificial Sequence: Synthetic oligonucleotide
gaguacgagaccuagagcg

SEQ ID NO: 337817 - RNA, 19 nt, Artificial Sequence
  Description of Artificial Sequence: Synthetic oligonucleotide
gauaauuugcagcagccgg

SEQ ID NO: 337818 - RNA, 19 nt, Artificial Sequence
  Description of Artificial Sequence: Synthetic oligonucleotide
aacgugaccgaucagaacu

SEQ ID NO: 337819 - RNA, 19 nt, Artificial Sequence
  Description of Artificial Sequence: Synthetic oligonucleotide
uuuacuucugaaauagggc

SEQ ID NO: 337820 - RNA, 19 nt, Artificial Sequence
  Description of Artificial Sequence: Synthetic oligonucleotide
aucuacaucgaucaagagg

SEQ ID NO: 337821 - RNA, 19 nt, Artificial Sequence
  Description of Artificial Sequence: Synthetic oligonucleotide
uuacuucugaaauagggcc

SEQ ID NO: 337822 - RNA, 19 nt, Artificial Sequence
  Description of Artificial Sequence: Synthetic oligonucleotide
agucgcuagaacuggagcc

SEQ ID NO: 337823 - RNA, 19 nt, Artificial Sequence
  Description of Artificial Sequence: Synthetic oligonucleotide
uaagaaauggcccauucaa

SEQ ID NO: 337824 - RNA, 19 nt, Artificial Sequence
  Description of Artificial Sequence: Synthetic oligonucleotide
accgaucagaacuacuucc

SEQ ID NO: 337825 - RNA, 19 nt, Artificial Sequence
  Description of Artificial Sequence: Synthetic oligonucleotide
ucgaggaucagcaagguuc

SEQ ID NO: 337826 - RNA, 19 nt, Artificial Sequence
  Description of Artificial Sequence: Synthetic oligonucleotide
uaagcucuaaagaugacuc

SEQ ID NO: 337827 - RNA, 19 nt, Artificial Sequence
  Description of Artificial Sequence: Synthetic oligonucleotide
auuauggagaccuggagga

SEQ ID NO: 337828 - RNA, 19 nt, Artificial Sequence
  Description of Artificial Sequence: Synthetic oligonucleotide
ugaucuacaucgaucaaga

SEQ ID NO: 337829 - RNA, 19 nt, Artificial Sequence
  Description of Artificial Sequence: Synthetic oligonucleotide
gaugauacagggaauccgg

SEQ ID NO: 337830 - RNA, 19 nt, Artificial Sequence
  Description of Artificial Sequence: Synthetic oligonucleotide
uggacuuugcuacaguccc

SEQ ID NO: 337831 - RNA, 19 nt, Artificial Sequence
  Description of Artificial Sequence: Synthetic oligonucleotide
agaucgaggacccaccagg

SEQ ID NO: 337832 - RNA, 19 nt, Artificial Sequence
  Description of Artificial Sequence: Synthetic oligonucleotide
ugagacucaaagcugccag

SEQ ID NO: 337833 - RNA, 19 nt, Artificial Sequence
  Description of Artificial Sequence: Synthetic oligonucleotide
ugagggaucgggaaucccg

SEQ ID NO: 337834 - RNA, 19 nt, Artificial Sequence
  Description of Artificial Sequence: Synthetic oligonucleotide
agcgguggcgauuaggucg

SEQ ID NO: 337835 - RNA, 19 nt, Artificial Sequence
  Description of Artificial Sequence: Synthetic oligonucleotide
ucuagcacuuccaaggggu

SEQ ID NO: 337836 - RNA, 19 nt, Artificial Sequence
  Description of Artificial Sequence: Synthetic oligonucleotide
gagucuauuggcuuucgag

SEQ ID NO: 337837 - RNA, 19 nt, Artificial Sequence
  Description of Artificial Sequence: Synthetic oligonucleotide
guguacgagauccagaaug

SEQ ID NO: 337838 - RNA, 19 nt, Artificial Sequence
  Description of Artificial Sequence: Synthetic oligonucleotide
gaguuucuaagcucuaaag

SEQ ID NO: 337839 - RNA, 19 nt, Artificial Sequence
  Description of Artificial Sequence: Synthetic oligonucleotide
aggaguacgagaccuagag

SEQ ID NO: 337840 - RNA, 19 nt, Artificial Sequence
  Description of Artificial Sequence: Synthetic oligonucleotide
gaugaugaugaugaugaag

SEQ ID NO: 337841 - RNA, 19 nt, Artificial Sequence
  Description of Artificial Sequence: Synthetic oligonucleotide
ucuguugaucccuugguga

SEQ ID NO: 337842 - RNA, 19 nt, Artificial Sequence
  Description of Artificial Sequence: Synthetic oligonucleotide
ucgggaaucccgaagggag

SEQ ID NO: 337843 - RNA, 19 nt, Artificial Sequence
  Description of Artificial Sequence: Synthetic oligonucleotide
gucuauuggcuuucgaggg

SEQ ID NO: 337844 - RNA, 19 nt, Artificial Sequence
  Description of Artificial Sequence: Synthetic oligonucleotide
caagguucacagcugaagg

SEQ ID NO: 337845 - RNA, 19 nt, Artificial Sequence
  Description of Artificial Sequence: Synthetic oligonucleotide
agaggcguuggugacaugc

SEQ ID NO: 337846 - RNA, 19 nt, Artificial Sequence
  Description of Artificial Sequence: Synthetic oligonucleotide
aggaugaugaugaugauga

SEQ ID NO: 337847 - RNA, 19 nt, Artificial Sequence
  Description of Artificial Sequence: Synthetic oligonucleotide
uacuucugaaauagggccc

SEQ ID NO: 337848 - RNA, 19 nt, Artificial Sequence
  Description of Artificial Sequence: Synthetic oligonucleotide
ugacaugcuaggacgacug

SEQ ID NO: 337849 - RNA, 19 nt, Artificial Sequence
  Description of Artificial Sequence: Synthetic oligonucleotide
ucuuguuagggaccgcuug

SEQ ID NO: 337850 - RNA, 19 nt, Artificial Sequence
  Description of Artificial Sequence: Synthetic oligonucleotide
uucgagagcgcuugcgugg

SEQ ID NO: 337851 - RNA, 19 nt, Artificial Sequence
  Description of Artificial Sequence: Synthetic oligonucleotide
ucggucaagcaauaaaggu

SEQ ID NO: 337852 - RNA, 19 nt, Artificial Sequence
  Description of Artificial Sequence: Synthetic oligonucleotide
ucaagcaauaaaggugagg

SEQ ID NO: 337853 - RNA, 19 nt, Artificial Sequence
  Description of Artificial Sequence: Synthetic oligonucleotide
agauuauggagaccuggag

SEQ ID NO: 337854 - RNA, 19 nt, Artificial Sequence
  Description of Artificial Sequence: Synthetic oligonucleotide
caugcuaggacgacugaag

SEQ ID NO: 337855 - RNA, 19 nt, Artificial Sequence
  Description of Artificial Sequence: Synthetic oligonucleotide
cacgcucauaagcagaaag

SEQ ID NO: 337856 - RNA, 19 nt, Artificial Sequence
  Description of Artificial Sequence: Synthetic oligonucleotide
gauuaggucggggacuggg

SEQ ID NO: 337857 - RNA, 19 nt, Artificial Sequence
  Description of Artificial Sequence: Synthetic oligonucleotide
ucagagucgcuagaacugg

SEQ ID NO: 337858 - RNA, 19 nt, Artificial Sequence
  Description of Artificial Sequence: Synthetic oligonucleotide
agaugacucaaagcuauuc

SEQ ID NO: 337859 - RNA, 19 nt, Artificial Sequence
  Description of Artificial Sequence: Synthetic oligonucleotide
acggauagcaaguggugag

SEQ ID NO: 337860 - RNA, 19 nt, Artificial Sequence
  Description of Artificial Sequence: Synthetic oligonucleotide
ugcuagagcgccucuuccg

SEQ ID NO: 337861 - RNA, 19 nt, Artificial Sequence
  Description of Artificial Sequence: Synthetic oligonucleotide
ugaccgaucagaacuacuu

SEQ ID NO: 337862 - RNA, 19 nt, Artificial Sequence
  Description of Artificial Sequence: Synthetic oligonucleotide
ucauucuagacuggcuggg

SEQ ID NO: 337863 - RNA, 19 nt, Artificial Sequence
  Description of Artificial Sequence: Synthetic oligonucleotide
caauugaacgagauugguc

SEQ ID NO: 337864 - RNA, 19 nt, Artificial Sequence
  Description of Artificial Sequence: Synthetic oligonucleotide
gaguggcagaacgugaccg

SEQ ID NO: 337865 - RNA, 19 nt, Artificial Sequence
  Description of Artificial Sequence: Synthetic oligonucleotide
gugaucuacaucgaucaag

SEQ ID NO: 337866 - RNA, 19 nt, Artificial Sequence
  Description of Artificial Sequence: Synthetic oligonucleotide
cacugacacgcucauaagc

SEQ ID NO: 337867 - RNA, 19 nt, Artificial Sequence
  Description of Artificial Sequence: Synthetic oligonucleotide
aaagggacugagacccagc

SEQ ID NO: 337868 - RNA, 19 nt, Artificial Sequence
  Description of Artificial Sequence: Synthetic oligonucleotide
agguguacgagauccagaa

SEQ ID NO: 337869 - RNA, 19 nt, Artificial Sequence
  Description of Artificial Sequence: Synthetic oligonucleotide
ugacacgcucauaagcaga

SEQ ID NO: 337870 - RNA, 19 nt, Artificial Sequence
  Description of Artificial Sequence: Synthetic oligonucleotide
ggaucgggaaucccgaagg

SEQ ID NO: 337871 - RNA, 19 nt, Artificial Sequence
  Description of Artificial Sequence: Synthetic oligonucleotide
ugccauuguggucacuagc

SEQ ID NO: 337872 - RNA, 19 nt, Artificial Sequence
  Description of Artificial Sequence: Synthetic oligonucleotide
uacgagaccuagagcggcg

SEQ ID NO: 337873 - RNA, 19 nt, Artificial Sequence
  Description of Artificial Sequence: Synthetic oligonucleotide
ggucauucuagacuggcug

SEQ ID NO: 337874 - RNA, 19 nt, Artificial Sequence
  Description of Artificial Sequence: Synthetic oligonucleotide
agaugcagaccgccuacgg

SEQ ID NO: 337875 - RNA, 19 nt, Artificial Sequence
  Description of Artificial Sequence: Synthetic oligonucleotide
ugcuaggacgacugaagca

SEQ ID NO: 337876 - RNA, 19 nt, Artificial Sequence
  Description of Artificial Sequence: Synthetic oligonucleotide
uacgagauccagaaugauu

SEQ ID NO: 337877 - RNA, 19 nt, Artificial Sequence
  Description of Artificial Sequence: Synthetic oligonucleotide
gagucgcuagaacuggagc

SEQ ID NO: 337878 - RNA, 19 nt, Artificial Sequence
  Description of Artificial Sequence: Synthetic oligonucleotide
gacuuugcuacagucccag

SEQ ID NO: 337879 - RNA, 19 nt, Artificial Sequence
  Description of Artificial Sequence: Synthetic oligonucleotide
agcggcgacggauagcaag

SEQ ID NO: 337880 - RNA, 19 nt, Artificial Sequence
  Description of Artificial Sequence: Synthetic oligonucleotide
auugaacgagauuggucug

SEQ ID NO: 337881 - RNA, 19 nt, Artificial Sequence
  Description of Artificial Sequence: Synthetic oligonucleotide
ucgaguugcucuaggagua

SEQ ID NO: 337882 - RNA, 19 nt, Artificial Sequence
  Description of Artificial Sequence: Synthetic oligonucleotide
caagcaauaaaggugaggu

SEQ ID NO: 337883 - RNA, 19 nt, Artificial Sequence
  Description of Artificial Sequence: Synthetic oligonucleotide
gaacuagagcugcuagagc

SEQ ID NO: 337884 - RNA, 19 nt, Artificial Sequence
  Description of Artificial Sequence: Synthetic oligonucleotide
caggugaucuacaucgauc

SEQ ID NO: 337885 - RNA, 19 nt, Artificial Sequence
  Description of Artificial Sequence: Synthetic oligonucleotide
gacguuccuuuguugguug

SEQ ID NO: 337886 - RNA, 19 nt, Artificial Sequence
  Description of Artificial Sequence: Synthetic oligonucleotide
agaccuagagcgucucuug

SEQ ID NO: 337887 - RNA, 19 nt, Artificial Sequence
  Description of Artificial Sequence: Synthetic oligonucleotide
gagaccuagagcggcgacg

SEQ ID NO: 337888 - RNA, 19 nt, Artificial Sequence
  Description of Artificial Sequence: Synthetic oligonucleotide
acuucgagagcgcuugcgu

SEQ ID NO: 337889 - RNA, 19 nt, Artificial Sequence
  Description of Artificial Sequence: Synthetic oligonucleotide
ggaugauacagggaauccg

SEQ ID NO: 337890 - RNA, 19 nt, Artificial Sequence
  Description of Artificial Sequence: Synthetic oligonucleotide
cuaggaguacgagaccuag

SEQ ID NO: 337891 - RNA, 19 nt, Artificial Sequence
  Description of Artificial Sequence: Synthetic oligonucleotide
aguacgagaccuagagcgg

SEQ ID NO: 337892 - RNA, 19 nt, Artificial Sequence
  Description of Artificial Sequence: Synthetic oligonucleotide
uugaacgagauuggucuga

SEQ ID NO: 337893 - RNA, 19 nt, Artificial Sequence
  Description of Artificial Sequence: Synthetic oligonucleotide
gaccuagagcgucucuugc

SEQ ID NO: 337894 - RNA, 19 nt, Artificial Sequence
  Description of Artificial Sequence: Synthetic oligonucleotide
gaugcagaccgccuacgga

SEQ ID NO: 337895 - RNA, 19 nt, Artificial Sequence
  Description of Artificial Sequence: Synthetic oligonucleotide
uacaucgaucaagaggcgu

SEQ ID NO: 337896 - RNA, 19 nt, Artificial Sequence
  Description of Artificial Sequence: Synthetic oligonucleotide
ugcgugaccuccucucgcc

SEQ ID NO: 337897 - RNA, 19 nt, Artificial Sequence
  Description of Artificial Sequence: Synthetic oligonucleotide
ugauuaagaaauggcccau

SEQ ID NO: 337898 - RNA, 19 nt, Artificial Sequence
  Description of Artificial Sequence: Synthetic oligonucleotide
cuaggacgacugaagcagc

SEQ ID NO: 337899 - RNA, 19 nt, Artificial Sequence
  Description of Artificial Sequence: Synthetic oligonucleotide
gacuucgagagcgcuugcg

SEQ ID NO: 337900 - RNA, 19 nt, Artificial Sequence
  Description of Artificial Sequence: Synthetic oligonucleotide
uggcgauuaggucggggac

SEQ ID NO: 337901 - RNA, 19 nt, Artificial Sequence
  Description of Artificial Sequence: Synthetic oligonucleotide
gaccgaucagaacuacuuc

SEQ ID NO: 337902 - RNA, 19 nt, Artificial Sequence
  Description of Artificial Sequence: Synthetic oligonucleotide
augauacagggaauccggg

SEQ ID NO: 337903 - RNA, 19 nt, Artificial Sequence
  Description of Artificial Sequence: Synthetic oligonucleotide
gagcccuccccucaagaug

SEQ ID NO: 337904 - RNA, 19 nt, Artificial Sequence
  Description of Artificial Sequence: Synthetic oligonucleotide
gucugggcaauugaacgag

SEQ ID NO: 337905 - RNA, 19 nt, Artificial Sequence
  Description of Artificial Sequence: Synthetic oligonucleotide
ucugggcaauugaacgaga

SEQ ID NO: 337906 - RNA, 19 nt, Artificial Sequence
  Description of Artificial Sequence: Synthetic oligonucleotide
uuguuagggaccgcuugcc

SEQ ID NO: 337907 - RNA, 19 nt, Artificial Sequence
  Description of Artificial Sequence: Synthetic oligonucleotide
cuagagcugcuagagcgcc

SEQ ID NO: 337908 - RNA, 19 nt, Artificial Sequence
  Description of Artificial Sequence: Synthetic oligonucleotide
cuacaucgaucaagaggcg

SEQ ID NO: 337909 - RNA, 19 nt, Artificial Sequence
  Description of Artificial Sequence: Synthetic oligonucleotide
agcacagacauggguguuc

SEQ ID NO: 337910 - RNA, 19 nt, Artificial Sequence
  Description of Artificial Sequence: Synthetic oligonucleotide
ggauagcaaguggugagcg

SEQ ID NO: 337911 - RNA, 19 nt, Artificial Sequence
  Description of Artificial Sequence: Synthetic oligonucleotide
ugcagaccgccuacggaug

SEQ ID NO: 337912 - RNA, 19 nt, Artificial Sequence
  Description of Artificial Sequence: Synthetic oligonucleotide
ccuacggauggcuggaggg

SEQ ID NO: 337913 - RNA, 19 nt, Artificial Sequence
  Description of Artificial Sequence: Synthetic oligonucleotide
gaacgugaccgaucagaac

SEQ ID NO: 337914 - RNA, 19 nt, Artificial Sequence
  Description of Artificial Sequence: Synthetic oligonucleotide
ugguguucucgagucagca

SEQ ID NO: 337915 - RNA, 19 nt, Artificial Sequence
  Description of Artificial Sequence: Synthetic oligonucleotide
cauucuagacuggcugggg

SEQ ID NO: 337916 - RNA, 19 nt, Artificial Sequence
  Description of Artificial Sequence: Synthetic oligonucleotide
agagcuccgacguuccuuu

SEQ ID NO: 337917 - RNA, 19 nt, Artificial Sequence
  Description of Artificial Sequence: Synthetic oligonucleotide
guggcgauuaggucgggga

SEQ ID NO: 337918 - RNA, 19 nt, Artificial Sequence
  Description of Artificial Sequence: Synthetic oligonucleotide
cuuucgagggcugcgugac

SEQ ID NO: 337919 - RNA, 19 nt, Artificial Sequence
  Description of Artificial Sequence: Synthetic oligonucleotide
gggauaauuugcagcagcc

SEQ ID NO: 337920 - RNA, 19 nt, Artificial Sequence
  Description of Artificial Sequence: Synthetic oligonucleotide
cagaacgugaccgaucaga

SEQ ID NO: 337921 - RNA, 19 nt, Artificial Sequence
  Description of Artificial Sequence: Synthetic oligonucleotide
uguccgagaccuagagcgu

SEQ ID NO: 337922 - RNA, 19 nt, Artificial Sequence
  Description of Artificial Sequence: Synthetic oligonucleotide
uccgagaccuagagcgucu

SEQ ID NO: 337923 - RNA, 19 nt, Artificial Sequence
  Description of Artificial Sequence: Synthetic oligonucleotide
aucgaucaagaggcguugg

SEQ ID NO: 337924 - RNA, 19 nt, Artificial Sequence
  Description of Artificial Sequence: Synthetic oligonucleotide
cuacaggagguguacgaga

SEQ ID NO: 337925 - RNA, 19 nt, Artificial Sequence
  Description of Artificial Sequence: Synthetic oligonucleotide
ugaacgagauuggucugaa

SEQ ID NO: 337926 - RNA, 19 nt, Artificial Sequence
  Description of Artificial Sequence: Synthetic oligonucleotide
cuagagcggcgacggauag

SEQ ID NO: 337927 - RNA, 19 nt, Artificial Sequence
  Description of Artificial Sequence: Synthetic oligonucleotide
agaacgugaccgaucagaa

SEQ ID NO: 337928 - RNA, 19 nt, Artificial Sequence
  Description of Artificial Sequence: Synthetic oligonucleotide
gacccuuuucagugccacc

SEQ ID NO: 337929 - RNA, 19 nt, Artificial Sequence
  Description of Artificial Sequence: Synthetic oligonucleotide
aggacgacugaagcagcuc

SEQ ID NO: 337930 - RNA, 19 nt, Artificial Sequence
  Description of Artificial Sequence: Synthetic oligonucleotide
ggaguacgagaccuagagc

SEQ ID NO: 337931 - RNA, 19 nt, Artificial Sequence
  Description of Artificial Sequence: Synthetic oligonucleotide
gacacgcucauaagcagaa

SEQ ID NO: 337932 - RNA, 19 nt, Artificial Sequence
  Description of Artificial Sequence: Synthetic oligonucleotide
caucgaucaagaggcguug

SEQ ID NO: 337933 - RNA, 19 nt, Artificial Sequence
  Description of Artificial Sequence: Synthetic oligonucleotide
cagaucgaggacccaccag

SEQ ID NO: 337934 - RNA, 19 nt, Artificial Sequence
  Description of Artificial Sequence: Synthetic oligonucleotide
gaucuuguuagggaccgcu

SEQ ID NO: 337935 - RNA, 19 nt, Artificial Sequence
  Description of Artificial Sequence: Synthetic oligonucleotide
ccgaagggagucuauuggc

SEQ ID NO: 337936 - RNA, 19 nt, Artificial Sequence
  Description of Artificial Sequence: Synthetic oligonucleotide
acaugcuaggacgacugaa

SEQ ID NO: 337937 - RNA, 19 nt, Artificial Sequence
  Description of Artificial Sequence: Synthetic oligonucleotide
ggauaacucagaacugcug

SEQ ID NO: 337938 - RNA, 19 nt, Artificial Sequence
  Description of Artificial Sequence: Synthetic oligonucleotide
aguugcucuaggaguacga

SEQ ID NO: 337939 - RNA, 19 nt, Artificial Sequence
  Description of Artificial Sequence: Synthetic oligonucleotide
acaucgaucaagaggcguu

SEQ ID NO: 337940 - RNA, 19 nt, Artificial Sequence
  Description of Artificial Sequence: Synthetic oligonucleotide
gaaacccgcucacugcucu

SEQ ID NO: 337941 - RNA, 19 nt, Artificial Sequence
  Description of Artificial Sequence: Synthetic oligonucleotide
gggaucgggaaucccgaag

SEQ ID NO: 337942 - RNA, 19 nt, Artificial Sequence
  Description of Artificial Sequence: Synthetic oligonucleotide
gucgcuagaacuggagcca

SEQ ID NO: 337943 - RNA, 19 nt, Artificial Sequence
  Description of Artificial Sequence: Synthetic oligonucleotide
cugagugcuacaggaggug

SEQ ID NO: 337944 - RNA, 19 nt, Artificial Sequence
  Description of Artificial Sequence: Synthetic oligonucleotide
cugcgugaccuccucucgc

SEQ ID NO: 337945 - RNA, 19 nt, Artificial Sequence
  Description of Artificial Sequence: Synthetic oligonucleotide
ucgagagcgcuugcguggc

SEQ ID NO: 337946 - RNA, 19 nt, Artificial Sequence
  Description of Artificial Sequence: Synthetic oligonucleotide
cagaugcagaccgccuacg

SEQ ID NO: 337947 - RNA, 19 nt, Artificial Sequence
  Description of Artificial Sequence: Synthetic oligonucleotide
gcuacaggagguguacgag

SEQ ID NO: 337948 - RNA, 19 nt, Artificial Sequence
  Description of Artificial Sequence: Synthetic oligonucleotide
uccugcgcuuguguccagg

SEQ ID NO: 337949 - RNA, 19 nt, Artificial Sequence
  Description of Artificial Sequence: Synthetic oligonucleotide
gagggaucgggaaucccga

SEQ ID NO: 337950 - RNA, 19 nt, Artificial Sequence
  Description of Artificial Sequence: Synthetic oligonucleotide
gccauuguggucacuagca

SEQ ID NO: 337951 - RNA, 19 nt, Artificial Sequence
  Description of Artificial Sequence: Synthetic oligonucleotide
accuagagcggcgacggau

SEQ ID NO: 337952 - RNA, 19 nt, Artificial Sequence
  Description of Artificial Sequence: Synthetic oligonucleotide
gugcagaucgaggacccac

SEQ ID NO: 337953 - RNA, 19 nt, Artificial Sequence
  Description of Artificial Sequence: Synthetic oligonucleotide
gugcuacaggagguguacg

SEQ ID NO: 337954 - RNA, 19 nt, Artificial Sequence
  Description of Artificial Sequence: Synthetic oligonucleotide
cuugccucgaguugcucua

SEQ ID NO: 337955 - RNA, 19 nt, Artificial Sequence
  Description of Artificial Sequence: Synthetic oligonucleotide
gcagaccgccuacggaugg

SEQ ID NO: 337956 - RNA, 19 nt, Artificial Sequence
  Description of Artificial Sequence: Synthetic oligonucleotide
aggucauucuagacuggcu

SEQ ID NO: 337957 - RNA, 19 nt, Artificial Sequence
  Description of Artificial Sequence: Synthetic oligonucleotide
cucuaggaguacgagaccu

SEQ ID NO: 337958 - RNA, 19 nt, Artificial Sequence
  Description of Artificial Sequence: Synthetic oligonucleotide
gaccgaggccuauccugug

SEQ ID NO: 337959 - RNA, 19 nt, Artificial Sequence
  Description of Artificial Sequence: Synthetic oligonucleotide
gcgacuucgagagcgcuug

SEQ ID NO: 337960 - RNA, 19 nt, Artificial Sequence
  Description of Artificial Sequence: Synthetic oligonucleotide
gagcgguggcgauuagguc

SEQ ID NO: 337961 - RNA, 19 nt, Artificial Sequence
  Description of Artificial Sequence: Synthetic oligonucleotide
ggcucggucaagcaauaaa

SEQ ID NO: 337962 - RNA, 19 nt, Artificial Sequence
  Description of Artificial Sequence: Synthetic oligonucleotide
ggucaagagcagacaauac

SEQ ID NO: 337963 - RNA, 19 nt, Artificial Sequence
  Description of Artificial Sequence: Synthetic oligonucleotide
ggaagagcuccgacguucc

SEQ ID NO: 337964 - RNA, 19 nt, Artificial Sequence
  Description of Artificial Sequence: Synthetic oligonucleotide
uggcuuucgagggcugcgu

SEQ ID NO: 337965 - RNA, 19 nt, Artificial Sequence
  Description of Artificial Sequence: Synthetic oligonucleotide
aucgaggacccaccagguu

SEQ ID NO: 337966 - RNA, 19 nt, Artificial Sequence
  Description of Artificial Sequence: Synthetic oligonucleotide
agcucauucuagagcuacu

SEQ ID NO: 337967 - RNA, 19 nt, Artificial Sequence
  Description of Artificial Sequence: Synthetic oligonucleotide
cagagucgcuagaacugga

SEQ ID NO: 337968 - RNA, 19 nt, Artificial Sequence
  Description of Artificial Sequence: Synthetic oligonucleotide
agaccgccuacggauggcu

SEQ ID NO: 337969 - RNA, 19 nt, Artificial Sequence
  Description of Artificial Sequence: Synthetic oligonucleotide
cuauuggcuuucgagggcu

SEQ ID NO: 337970 - RNA, 19 nt, Artificial Sequence
  Description of Artificial Sequence: Synthetic oligonucleotide
gaccuggcucggucaagca

SEQ ID NO: 337971 - RNA, 19 nt, Artificial Sequence
  Description of Artificial Sequence: Synthetic oligonucleotide
gcgauuaggucggggacug

SEQ ID NO: 337972 - RNA, 19 nt, Artificial Sequence
  Description of Artificial Sequence: Synthetic oligonucleotide
caucauggagccaccacuu

SEQ ID NO: 337973 - RNA, 19 nt, Artificial Sequence
  Description of Artificial Sequence: Synthetic oligonucleotide
gguggcgauuaggucgggg

SEQ ID NO: 337974 - RNA, 19 nt, Artificial Sequence
  Description of Artificial Sequence: Synthetic oligonucleotide
ggugacaugcuaggacgac

SEQ ID NO: 337975 - RNA, 19 nt, Artificial Sequence
  Description of Artificial Sequence: Synthetic oligonucleotide
gagagcgcuugcguggcaa

SEQ ID NO: 337976 - RNA, 19 nt, Artificial Sequence
  Description of Artificial Sequence: Synthetic oligonucleotide
gaucgaggacccaccaggu

SEQ ID NO: 337977 - RNA, 19 nt, Artificial Sequence
  Description of Artificial Sequence: Synthetic oligonucleotide
gcuuucgagggcugcguga

SEQ ID NO: 337978 - RNA, 19 nt, Artificial Sequence
  Description of Artificial Sequence: Synthetic oligonucleotide
gagaccuagagcgucucuu

SEQ ID NO: 337979 - RNA, 19 nt, Artificial Sequence
  Description of Artificial Sequence: Synthetic oligonucleotide
ggcccgaguuucuaagcuc

SEQ ID NO: 337980 - RNA, 19 nt, Artificial Sequence
  Description of Artificial Sequence: Synthetic oligonucleotide
acgagaccuagagcggcga

SEQ ID NO: 337981 - RNA, 19 nt, Artificial Sequence
  Description of Artificial Sequence: Synthetic oligonucleotide
gagcuccgacguuccuuug

SEQ ID NO: 337982 - RNA, 19 nt, Artificial Sequence
  Description of Artificial Sequence: Synthetic oligonucleotide
acgacugaagcagcucauu

SEQ ID NO: 337983 - RNA, 19 nt, Artificial Sequence
  Description of Artificial Sequence: Synthetic oligonucleotide
gagugcuacaggaggugua

SEQ ID NO: 337984 - RNA, 19 nt, Artificial Sequence
  Description of Artificial Sequence: Synthetic oligonucleotide
gaccgccuacggauggcug

SEQ ID NO: 337985 - RNA, 19 nt, Artificial Sequence
  Description of Artificial Sequence: Synthetic oligonucleotide
ggagucuauuggcuuucga

SEQ ID NO: 337986 - RNA, 19 nt, Artificial Sequence
  Description of Artificial Sequence: Synthetic oligonucleotide
ccucagagucgcuagaacu

SEQ ID NO: 337987 - RNA, 19 nt, Artificial Sequence
  Description of Artificial Sequence: Synthetic oligonucleotide
cugggcaauugaacgagau

SEQ ID NO: 337988 - RNA, 19 nt, Artificial Sequence
  Description of Artificial Sequence: Synthetic oligonucleotide
gcuugcagguuuggguaag

SEQ ID NO: 337989 - RNA, 19 nt, Artificial Sequence
  Description of Artificial Sequence: Synthetic oligonucleotide
gcagaucgaggacccacca

SEQ ID NO: 337990 - RNA, 19 nt, Artificial Sequence
  Description of Artificial Sequence: Synthetic oligonucleotide
gggagucuauuggcuuucg

SEQ ID NO: 337991 - RNA, 19 nt, Artificial Sequence
  Description of Artificial Sequence: Synthetic oligonucleotide
gagcgcuugcguggcaaca

SEQ ID NO: 337992 - RNA, 19 nt, Artificial Sequence
  Description of Artificial Sequence: Synthetic oligonucleotide
cagaccgccuacggauggc

SEQ ID NO: 337993 - RNA, 19 nt, Artificial Sequence
  Description of Artificial Sequence: Synthetic oligonucleotide
ccaagggguucaagcauuc

SEQ ID NO: 337994 - RNA, 19 nt, Artificial Sequence
  Description of Artificial Sequence: Synthetic oligonucleotide
gugacaugcuaggacgacu

SEQ ID NO: 337995 - RNA, 19 nt, Artificial Sequence
  Description of Artificial Sequence: Synthetic oligonucleotide
ggagcgguggcgauuaggu

SEQ ID NO: 337996 - RNA, 19 nt, Artificial Sequence
  Description of Artificial Sequence: Synthetic oligonucleotide
aucuuguuagggaccgcuu

SEQ ID NO: 337997 - RNA, 19 nt, Artificial Sequence
  Description of Artificial Sequence: Synthetic oligonucleotide
aggagguguacgagaucca

SEQ ID NO: 337998 - RNA, 19 nt, Artificial Sequence
  Description of Artificial Sequence: Synthetic oligonucleotide
ggaugaugaugaugaugaa

SEQ ID NO: 337999 - RNA, 19 nt, Artificial Sequence
  Description of Artificial Sequence: Synthetic oligonucleotide
gaagagcuccgacguuccu

SEQ ID NO: 338000 - RNA, 19 nt, Artificial Sequence
  Description of Artificial Sequence: Synthetic oligonucleotide
uuccugcgcuuguguccag

SEQ ID NO: 338001 - RNA, 19 nt, Artificial Sequence
  Description of Artificial Sequence: Synthetic oligonucleotide
ggugagguucugccacuga

SEQ ID NO: 338002 - RNA, 19 nt, Artificial Sequence
  Description of Artificial Sequence: Synthetic oligonucleotide
gcagaacgugaccgaucag

SEQ ID NO: 338003 - RNA, 19 nt, Artificial Sequence
  Description of Artificial Sequence: Synthetic oligonucleotide
acgugaccgaucagaacua

SEQ ID NO: 338004 - RNA, 19 nt, Artificial Sequence
  Description of Artificial Sequence: Synthetic oligonucleotide
cgaggaucagcaagguuca

SEQ ID NO: 338005 - RNA, 19 nt, Artificial Sequence
  Description of Artificial Sequence: Synthetic oligonucleotide
gcuagagcgccucuuccgu

SEQ ID NO: 338006 - RNA, 19 nt, Artificial Sequence
  Description of Artificial Sequence: Synthetic oligonucleotide
gggauaacucagaacugcu

SEQ ID NO: 338007 - RNA, 19 nt, Artificial Sequence
  Description of Artificial Sequence: Synthetic oligonucleotide
agggaccgcuugccucgag

SEQ ID NO: 338008 - RNA, 19 nt, Artificial Sequence
  Description of Artificial Sequence: Synthetic oligonucleotide
acacgcucauaagcagaaa

SEQ ID NO: 338009 - RNA, 19 nt, Artificial Sequence
  Description of Artificial Sequence: Synthetic oligonucleotide
gugguguccgagaccuaga

SEQ ID NO: 338010 - RNA, 19 nt, Artificial Sequence
  Description of Artificial Sequence: Synthetic oligonucleotide
gacgacugaagcagcucau

SEQ ID NO: 338011 - RNA, 19 nt, Artificial Sequence
  Description of Artificial Sequence: Synthetic oligonucleotide
gaccuagagcggcgacgga

SEQ ID NO: 338012 - RNA, 19 nt, Artificial Sequence
  Description of Artificial Sequence: Synthetic oligonucleotide
gugaccgaucagaacuacu

SEQ ID NO: 338013 - RNA, 19 nt, Artificial Sequence
  Description of Artificial Sequence: Synthetic oligonucleotide
ggaucuuguuagggaccgc

SEQ ID NO: 338014 - RNA, 19 nt, Artificial Sequence
  Description of Artificial Sequence: Synthetic oligonucleotide
gucggggacugggugucuc

SEQ ID NO: 338015 - RNA, 19 nt, Artificial Sequence
  Description of Artificial Sequence: Synthetic oligonucleotide
cgcuugcguggcaacagug

SEQ ID NO: 338016 - RNA, 19 nt, Artificial Sequence
  Description of Artificial Sequence: Synthetic oligonucleotide
ccuagagcggcgacggaua

SEQ ID NO: 338017 - RNA, 19 nt, Artificial Sequence
  Description of Artificial Sequence: Synthetic oligonucleotide
ccuggcucggucaagcaau

SEQ ID NO: 338018 - RNA, 19 nt, Artificial Sequence
  Description of Artificial Sequence: Synthetic oligonucleotide
ggcgauuaggucggggacu

SEQ ID NO: 338019 - RNA, 19 nt, Artificial Sequence
  Description of Artificial Sequence: Synthetic oligonucleotide
ggaaacccgcucacugcuc

SEQ ID NO: 338020 - RNA, 19 nt, Artificial Sequence
  Description of Artificial Sequence: Synthetic oligonucleotide
gcccgaguuucuaagcucu

SEQ ID NO: 338021 - RNA, 19 nt, Artificial Sequence
  Description of Artificial Sequence: Synthetic oligonucleotide
ugccacugacacgcucaua

SEQ ID NO: 338022 - RNA, 19 nt, Artificial Sequence
  Description of Artificial Sequence: Synthetic oligonucleotide
gagcgacuucgagagcgcu

SEQ ID NO: 338023 - RNA, 19 nt, Artificial Sequence
  Description of Artificial Sequence: Synthetic oligonucleotide
guggcagaacgugaccgau

SEQ ID NO: 338024 - RNA, 19 nt, Artificial Sequence
  Description of Artificial Sequence: Synthetic oligonucleotide
ccugcgcuuguguccagga

SEQ ID NO: 338025 - RNA, 19 nt, Artificial Sequence
  Description of Artificial Sequence: Synthetic oligonucleotide
gguguacgagauccagaau

SEQ ID NO: 338026 - RNA, 19 nt, Artificial Sequence
  Description of Artificial Sequence: Synthetic oligonucleotide
cgaagggagucuauuggcu

SEQ ID NO: 338027 - RNA, 19 nt, Artificial Sequence
  Description of Artificial Sequence: Synthetic oligonucleotide
cucgaggaucagcaagguu

SEQ ID NO: 338028 - RNA, 19 nt, Artificial Sequence
  Description of Artificial Sequence: Synthetic oligonucleotide
ggaccgcuugccucgaguu

SEQ ID NO: 338029 - RNA, 19 nt, Artificial Sequence
  Description of Artificial Sequence: Synthetic oligonucleotide
gggaccgcuugccucgagu

SEQ ID NO: 338030 - RNA, 19 nt, Artificial Sequence
  Description of Artificial Sequence: Synthetic oligonucleotide
gcgugaccuccucucgcca

SEQ ID NO: 338031 - RNA, 19 nt, Artificial Sequence
  Description of Artificial Sequence: Synthetic oligonucleotide
cgugaccgaucagaacuac

SEQ ID NO: 338032 - RNA, 19 nt, Artificial Sequence
  Description of Artificial Sequence: Synthetic oligonucleotide
ccgaguuucuaagcucuaa

SEQ ID NO: 338033 - RNA, 19 nt, Artificial Sequence
  Description of Artificial Sequence: Synthetic oligonucleotide
cgaguugcucuaggaguac

SEQ ID NO: 338034 - RNA, 19 nt, Artificial Sequence
  Description of Artificial Sequence: Synthetic oligonucleotide
ccgcucagaggucauucua

SEQ ID NO: 338035 - RNA, 19 nt, Artificial Sequence
  Description of Artificial Sequence: Synthetic oligonucleotide
agcccgcucagaggucauu

SEQ ID NO: 338036 - RNA, 19 nt, Artificial Sequence
  Description of Artificial Sequence: Synthetic oligonucleotide
ccgagaccuagagcgucuc

SEQ ID NO: 338037 - RNA, 19 nt, Artificial Sequence
  Description of Artificial Sequence: Synthetic oligonucleotide
gagcggcgacggauagcaa

SEQ ID NO: 338038 - RNA, 19 nt, Artificial Sequence
  Description of Artificial Sequence: Synthetic oligonucleotide
cccgaguuucuaagcucua

SEQ ID NO: 338039 - RNA, 19 nt, Artificial Sequence
  Description of Artificial Sequence: Synthetic oligonucleotide
cccgcucagaggucauucu

SEQ ID NO: 338040 - RNA, 19 nt, Artificial Sequence
  Description of Artificial Sequence: Synthetic oligonucleotide
acggggcuggggacccuuu

SEQ ID NO: 338041 - RNA, 19 nt, Artificial Sequence
  Description of Artificial Sequence: Synthetic oligonucleotide
ccgccuacggauggcugga

SEQ ID NO: 338042 - RNA, 19 nt, Artificial Sequence
  Description of Artificial Sequence: Synthetic oligonucleotide
cggcgacggauagcaagug

SEQ ID NO: 338043 - RNA, 19 nt, Artificial Sequence
  Description of Artificial Sequence: Synthetic oligonucleotide
cgggaaucccgaagggagu

SEQ ID NO: 338044 - RNA, 19 nt, Artificial Sequence
  Description of Artificial Sequence: Synthetic oligonucleotide
cgagaccuagagcgucucu

SEQ ID NO: 338045 - RNA, 19 nt, Artificial Sequence
  Description of Artificial Sequence: Synthetic oligonucleotide
cgagagcgcuugcguggca

SEQ ID NO: 338046 - RNA, 19 nt, Artificial Sequence
  Description of Artificial Sequence: Synthetic oligonucleotide
cgguggcgauuaggucggg

SEQ ID NO: 338047 - RNA, 19 nt, Artificial Sequence
  Description of Artificial Sequence: Synthetic oligonucleotide
uuauauaugauauaaaggg

SEQ ID NO: 338048 - RNA, 19 nt, Artificial Sequence
  Description of Artificial Sequence: Synthetic oligonucleotide
aaacaugaauuguauaccc

SEQ ID NO: 338049 - RNA, 19 nt, Artificial Sequence
  Description of Artificial Sequence: Synthetic oligonucleotide
aacucuaucaaguagagaa

SEQ ID NO: 338050 - RNA, 19 nt, Artificial Sequence
  Description of Artificial Sequence: Synthetic oligonucleotide
uguuaaauuaguuucaugu

SEQ ID NO: 338051 - RNA, 19 nt, Artificial Sequence
  Description of Artificial Sequence: Synthetic oligonucleotide
uguauauuaagguagccag

SEQ ID NO: 338052 - RNA, 19 nt, Artificial Sequence
  Description of Artificial Sequence: Synthetic oligonucleotide
aaauuuuacuauuagggga

SEQ ID NO: 338053 - RNA, 19 nt, Artificial Sequence
  Description of Artificial Sequence: Synthetic oligonucleotide
aguauuuuggguuaaagca

SEQ ID NO: 338054 - RNA, 19 nt, Artificial Sequence
  Description of Artificial Sequence: Synthetic oligonucleotide
aggguuaaggaguaaaucc

SEQ ID NO: 338055 - RNA, 19 nt, Artificial Sequence
  Description of Artificial Sequence: Synthetic oligonucleotide
ugaucauucacuuagagua

SEQ ID NO: 338056 - RNA, 19 nt, Artificial Sequence
  Description of Artificial Sequence: Synthetic oligonucleotide
uauauguuggcaauggacc

SEQ ID NO: 338057 - RNA, 19 nt, Artificial Sequence
  Description of Artificial Sequence: Synthetic oligonucleotide
uuaaauuuaucgauggucu

SEQ ID NO: 338058 - RNA, 19 nt, Artificial Sequence
  Description of Artificial Sequence: Synthetic oligonucleotide
ugaagaaucgucaugcuug

SEQ ID NO: 338059 - RNA, 19 nt, Artificial Sequence
  Description of Artificial Sequence: Synthetic oligonucleotide
aauggaccaagucuuaggg

SEQ ID NO: 338060 - RNA, 19 nt, Artificial Sequence
  Description of Artificial Sequence: Synthetic oligonucleotide
aaauuagauacucagcagu

SEQ ID NO: 338061 - RNA, 19 nt, Artificial Sequence
  Description of Artificial Sequence: Synthetic oligonucleotide
aauuuugagguauacagaa

SEQ ID NO: 338062 - RNA, 19 nt, Artificial Sequence
  Description of Artificial Sequence: Synthetic oligonucleotide
aguaucuuguaaaagauac

SEQ ID NO: 338063 - RNA, 19 nt, Artificial Sequence
  Description of Artificial Sequence: Synthetic oligonucleotide
aauagaagcccuaauacag

SEQ ID NO: 338064 - RNA, 19 nt, Artificial Sequence
  Description of Artificial Sequence: Synthetic oligonucleotide
uuagauagagcccuuaacu

SEQ ID NO: 338065 - RNA, 19 nt, Artificial Sequence
  Description of Artificial Sequence: Synthetic oligonucleotide
uuagcuggaauucauaacu

SEQ ID NO: 338066 - RNA, 19 nt, Artificial Sequence
  Description of Artificial Sequence: Synthetic oligonucleotide
aaaugcauuaaacagugau

SEQ ID NO: 338067 - RNA, 19 nt, Artificial Sequence
  Description of Artificial Sequence: Synthetic oligonucleotide
uuuagcucagauuuguaag

SEQ ID NO: 338068 - RNA, 19 nt, Artificial Sequence
  Description of Artificial Sequence: Synthetic oligonucleotide
uuugaguuauucuacuucc

SEQ ID NO: 338069 - RNA, 19 nt, Artificial Sequence
  Description of Artificial Sequence: Synthetic oligonucleotide
uguaacaagugccugaagu

SEQ ID NO: 338070 - RNA, 19 nt, Artificial Sequence
  Description of Artificial Sequence: Synthetic oligonucleotide
aguuauucuacuucccuac

SEQ ID NO: 338071 - RNA, 19 nt, Artificial Sequence
  Description of Artificial Sequence: Synthetic oligonucleotide
uuagaguauauuaaauaca

SEQ ID NO: 338072 - RNA, 19 nt, Artificial Sequence
  Description of Artificial Sequence: Synthetic oligonucleotide
uauauaaucuauuaucuuu

SEQ ID NO: 338073 - RNA, 19 nt, Artificial Sequence
  Description of Artificial Sequence: Synthetic oligonucleotide
uuuugagguauacagaauc

SEQ ID NO: 338074 - RNA, 19 nt, Artificial Sequence
  Description of Artificial Sequence: Synthetic oligonucleotide
auacagaaucuauaauugc

SEQ ID NO: 338075 - RNA, 19 nt, Artificial Sequence
  Description of Artificial Sequence: Synthetic oligonucleotide
aauacuagacaccaacuau

SEQ ID NO: 338076 - RNA, 19 nt, Artificial Sequence
  Description of Artificial Sequence: Synthetic oligonucleotide
aguuauuaaauuuaucgau

SEQ ID NO: 338077 - RNA, 19 nt, Artificial Sequence
  Description of Artificial Sequence: Synthetic oligonucleotide
gauacuauuuccugucggg

SEQ ID NO: 338078 - RNA, 19 nt, Artificial Sequence
  Description of Artificial Sequence: Synthetic oligonucleotide
cucacuuagagauucgucc

SEQ ID NO: 338079 - RNA, 19 nt, Artificial Sequence
  Description of Artificial Sequence: Synthetic oligonucleotide
uauuaggggaagcauuacg

SEQ ID NO: 338080 - RNA, 19 nt, Artificial Sequence
  Description of Artificial Sequence: Synthetic oligonucleotide
ucaacaaauacuagacacc

SEQ ID NO: 338081 - RNA, 19 nt, Artificial Sequence
  Description of Artificial Sequence: Synthetic oligonucleotide
uuucuuaugugacaucuca

SEQ ID NO: 338082 - RNA, 19 nt, Artificial Sequence
  Description of Artificial Sequence: Synthetic oligonucleotide
acagucgacacuuaaaaca

SEQ ID NO: 338083 - RNA, 19 nt, Artificial Sequence
  Description of Artificial Sequence: Synthetic oligonucleotide
ugaauuguauacccuauga

SEQ ID NO: 338084 - RNA, 19 nt, Artificial Sequence
  Description of Artificial Sequence: Synthetic oligonucleotide
ucgaaauauuucuaaaaug

SEQ ID NO: 338085 - RNA, 19 nt, Artificial Sequence
  Description of Artificial Sequence: Synthetic oligonucleotide
uaguuauuaaauuuaucga

SEQ ID NO: 338086 - RNA, 19 nt, Artificial Sequence
  Description of Artificial Sequence: Synthetic oligonucleotide
aacacaauccaugauucuc

SEQ ID NO: 338087 - RNA, 19 nt, Artificial Sequence
  Description of Artificial Sequence: Synthetic oligonucleotide
uuaauuacuuuuaguauaa

SEQ ID NO: 338088 - RNA, 19 nt, Artificial Sequence
  Description of Artificial Sequence: Synthetic oligonucleotide
aucaaagcguugcugaaac

SEQ ID NO: 338089 - RNA, 19 nt, Artificial Sequence
  Description of Artificial Sequence: Synthetic oligonucleotide
auauaugacacuccauauc

SEQ ID NO: 338090 - RNA, 19 nt, Artificial Sequence
  Description of Artificial Sequence: Synthetic oligonucleotide
ucuauuaucuuucuacaau

SEQ ID NO: 338091 - RNA, 19 nt, Artificial Sequence
  Description of Artificial Sequence: Synthetic oligonucleotide
acggaagcacuuuagauag

SEQ ID NO: 338092 - RNA, 19 nt, Artificial Sequence
  Description of Artificial Sequence: Synthetic oligonucleotide
aacuauauguuggcaaugg

SEQ ID NO: 338093 - RNA, 19 nt, Artificial Sequence
  Description of Artificial Sequence: Synthetic oligonucleotide
aaacaggauauccacgucu

SEQ ID NO: 338094 - RNA, 19 nt, Artificial Sequence
  Description of Artificial Sequence: Synthetic oligonucleotide
ucccaguuaaaccugaacu

SEQ ID NO: 338095 - RNA, 19 nt, Artificial Sequence
  Description of Artificial Sequence: Synthetic oligonucleotide
uauuaagguagccaggaaa

SEQ ID NO: 338096 - RNA, 19 nt, Artificial Sequence
  Description of Artificial Sequence: Synthetic oligonucleotide
uaugaucauucacuuagag

SEQ ID NO: 338097 - RNA, 19 nt, Artificial Sequence
  Description of Artificial Sequence: Synthetic oligonucleotide
uuaacucuaucaaguagag

SEQ ID NO: 338098 - RNA, 19 nt, Artificial Sequence
  Description of Artificial Sequence: Synthetic oligonucleotide
uacauuaaugcuugcaugu

SEQ ID NO: 338099 - RNA, 19 nt, Artificial Sequence
  Description of Artificial Sequence: Synthetic oligonucleotide
uauuuuggguuaaagcaug

SEQ ID NO: 338100 - RNA, 19 nt, Artificial Sequence
  Description of Artificial Sequence: Synthetic oligonucleotide
ugauacuauuuccugucgg

SEQ ID NO: 338101 - RNA, 19 nt, Artificial Sequence
  Description of Artificial Sequence: Synthetic oligonucleotide
uuaucuuucuacaauguuu

SEQ ID NO: 338102 - RNA, 19 nt, Artificial Sequence
  Description of Artificial Sequence: Synthetic oligonucleotide
ucagacauuauauaugaua

SEQ ID NO: 338103 - RNA, 19 nt, Artificial Sequence
  Description of Artificial Sequence: Synthetic oligonucleotide
agaaucgucaugcuugguc

SEQ ID NO: 338104 - RNA, 19 nt, Artificial Sequence
  Description of Artificial Sequence: Synthetic oligonucleotide
auucuacuucccuacaaac

SEQ ID NO: 338105 - RNA, 19 nt, Artificial Sequence
  Description of Artificial Sequence: Synthetic oligonucleotide
gaauucauaacuuggucca

SEQ ID NO: 338106 - RNA, 19 nt, Artificial Sequence
  Description of Artificial Sequence: Synthetic oligonucleotide
ucagaauacuuguagcuug

SEQ ID NO: 338107 - RNA, 19 nt, Artificial Sequence
  Description of Artificial Sequence: Synthetic oligonucleotide
auagaagguaaagcgaggc

SEQ ID NO: 338108 - RNA, 19 nt, Artificial Sequence
  Description of Artificial Sequence: Synthetic oligonucleotide
agugcccaaacccugaguc

SEQ ID NO: 338109 - RNA, 19 nt, Artificial Sequence
  Description of Artificial Sequence: Synthetic oligonucleotide
uuuaccuuguaauaucuaa

SEQ ID NO: 338110 - RNA, 19 nt, Artificial Sequence
  Description of Artificial Sequence: Synthetic oligonucleotide
aaagauaccgugcacucaa

SEQ ID NO: 338111 - RNA, 19 nt, Artificial Sequence
  Description of Artificial Sequence: Synthetic oligonucleotide
auuacgagaauaaauauau

SEQ ID NO: 338112 - RNA, 19 nt, Artificial Sequence
  Description of Artificial Sequence: Synthetic oligonucleotide
uaugugacaucucaaccug

SEQ ID NO: 338113 - RNA, 19 nt, Artificial Sequence
  Description of Artificial Sequence: Synthetic oligonucleotide
aaauacuagacaccaacua

SEQ ID NO: 338114 - RNA, 19 nt, Artificial Sequence
  Description of Artificial Sequence: Synthetic oligonucleotide
gaaucgucaugcuuggucc

SEQ ID NO: 338115 - RNA, 19 nt, Artificial Sequence
  Description of Artificial Sequence: Synthetic oligonucleotide
uauauuaagguagccagga

SEQ ID NO: 338116 - RNA, 19 nt, Artificial Sequence
  Description of Artificial Sequence: Synthetic oligonucleotide
aaagucuguaguuauuaaa

SEQ ID NO: 338117 - RNA, 19 nt, Artificial Sequence
  Description of Artificial Sequence: Synthetic oligonucleotide
ucggaaaacaagaucuuca

SEQ ID NO: 338118 - RNA, 19 nt, Artificial Sequence
  Description of Artificial Sequence: Synthetic oligonucleotide
auaccgugcacucaaaugu

SEQ ID NO: 338119 - RNA, 19 nt, Artificial Sequence
  Description of Artificial Sequence: Synthetic oligonucleotide
acaaguuaauuacuuuuag

SEQ ID NO: 338120 - RNA, 19 nt, Artificial Sequence
  Description of Artificial Sequence: Synthetic oligonucleotide
gguacaaucauccagguaa

SEQ ID NO: 338121 - RNA, 19 nt, Artificial Sequence
  Description of Artificial Sequence: Synthetic oligonucleotide
aaaacggaagcacuuuaga

SEQ ID NO: 338122 - RNA, 19 nt, Artificial Sequence
  Description of Artificial Sequence: Synthetic oligonucleotide
guuauuaaauuuaucgaug

SEQ ID NO: 338123 - RNA, 19 nt, Artificial Sequence
  Description of Artificial Sequence: Synthetic oligonucleotide
aguuaauuacuuuuaguau

SEQ ID NO: 338124 - RNA, 19 nt, Artificial Sequence
  Description of Artificial Sequence: Synthetic oligonucleotide
uucuacuucccuacaaacc

SEQ ID NO: 338125 - RNA, 19 nt, Artificial Sequence
  Description of Artificial Sequence: Synthetic oligonucleotide
aauguugcauaccagugua

SEQ ID NO: 338126 - RNA, 19 nt, Artificial Sequence
  Description of Artificial Sequence: Synthetic oligonucleotide
uuuuaaggccuauaguagu

SEQ ID NO: 338127 - RNA, 19 nt, Artificial Sequence
  Description of Artificial Sequence: Synthetic oligonucleotide
uuuccagccaaguaucuug

SEQ ID NO: 338128 - RNA, 19 nt, Artificial Sequence
  Description of Artificial Sequence: Synthetic oligonucleotide
aauuagauacucagcagug

SEQ ID NO: 338129 - RNA, 19 nt, Artificial Sequence
  Description of Artificial Sequence: Synthetic oligonucleotide
aacggaagcacuuuagaua

SEQ ID NO: 338130 - RNA, 19 nt, Artificial Sequence
  Description of Artificial Sequence: Synthetic oligonucleotide
auguuuagaaaucuccugu

SEQ ID NO: 338131 - RNA, 19 nt, Artificial Sequence
  Description of Artificial Sequence: Synthetic oligonucleotide
aaacuuuaggugacuaggg

SEQ ID NO: 338132 - RNA, 19 nt, Artificial Sequence
  Description of Artificial Sequence: Synthetic oligonucleotide
ugcucagacauuauauaug

SEQ ID NO: 338133 - RNA, 19 nt, Artificial Sequence
  Description of Artificial Sequence: Synthetic oligonucleotide
uuagaaaucuccugugccu

SEQ ID NO: 338134 - RNA, 19 nt, Artificial Sequence
  Description of Artificial Sequence: Synthetic oligonucleotide
uguuuagaaaucuccugug

SEQ ID NO: 338135 - RNA, 19 nt, Artificial Sequence
  Description of Artificial Sequence: Synthetic oligonucleotide
aggaacuucaucagaaugg

SEQ ID NO: 338136 - RNA, 19 nt, Artificial Sequence
  Description of Artificial Sequence: Synthetic oligonucleotide
gaagaaucgucaugcuugg

SEQ ID NO: 338137 - RNA, 19 nt, Artificial Sequence
  Description of Artificial Sequence: Synthetic oligonucleotide
aaacggaagcacuuuagau

SEQ ID NO: 338138 - RNA, 19 nt, Artificial Sequence
  Description of Artificial Sequence: Synthetic oligonucleotide
guuaauuacuuuuaguaua

SEQ ID NO: 338139 - RNA, 19 nt, Artificial Sequence
  Description of Artificial Sequence: Synthetic oligonucleotide
uaagccuguagaaugcucu

SEQ ID NO: 338140 - RNA, 19 nt, Artificial Sequence
  Description of Artificial Sequence: Synthetic oligonucleotide
cuagacaccaacuauaugu

SEQ ID NO: 338141 - RNA, 19 nt, Artificial Sequence
  Description of Artificial Sequence: Synthetic oligonucleotide
gauaccgugcacucaaaug

SEQ ID NO: 338142 - RNA, 19 nt, Artificial Sequence
  Description of Artificial Sequence: Synthetic oligonucleotide
auauaagccuguagaaugc

SEQ ID NO: 338143 - RNA, 19 nt, Artificial Sequence
  Description of Artificial Sequence: Synthetic oligonucleotide
ugaguuauucuacuucccu

SEQ ID NO: 338144 - RNA, 19 nt, Artificial Sequence
  Description of Artificial Sequence: Synthetic oligonucleotide
ucucgaaauauuucuaaaa

SEQ ID NO: 338145 - RNA, 19 nt, Artificial Sequence
  Description of Artificial Sequence: Synthetic oligonucleotide
ugacaucucaaccuguccu

SEQ ID NO: 338146 - RNA, 19 nt, Artificial Sequence
  Description of Artificial Sequence: Synthetic oligonucleotide
caaauuagauacucagcag

SEQ ID NO: 338147 - RNA, 19 nt, Artificial Sequence
  Description of Artificial Sequence: Synthetic oligonucleotide
uuauacuaguuuugaaacu

SEQ ID NO: 338148 - RNA, 19 nt, Artificial Sequence
  Description of Artificial Sequence: Synthetic oligonucleotide
ggacaaauuagauacucag

SEQ ID NO: 338149 - RNA, 19 nt, Artificial Sequence
  Description of Artificial Sequence: Synthetic oligonucleotide
ucuaauucucucacacuug

SEQ ID NO: 338150 - RNA, 19 nt, Artificial Sequence
  Description of Artificial Sequence: Synthetic oligonucleotide
agguuuaccuuguaauauc

SEQ ID NO: 338151 - RNA, 19 nt, Artificial Sequence
  Description of Artificial Sequence: Synthetic oligonucleotide
aacaggcacauuucaaccu

SEQ ID NO: 338152 - RNA, 19 nt, Artificial Sequence
  Description of Artificial Sequence: Synthetic oligonucleotide
aguccucccaguuaaaccu

SEQ ID NO: 338153 - RNA, 19 nt, Artificial Sequence
  Description of Artificial Sequence: Synthetic oligonucleotide
ugagguauacagaaucuau

SEQ ID NO: 338154 - RNA, 19 nt, Artificial Sequence
  Description of Artificial Sequence: Synthetic oligonucleotide
uaguuauaugaucauucac

SEQ ID NO: 338155 - RNA, 19 nt, Artificial Sequence
  Description of Artificial Sequence: Synthetic oligonucleotide
uuaggggaagcauuacgag

SEQ ID NO: 338156 - RNA, 19 nt, Artificial Sequence
  Description of Artificial Sequence: Synthetic oligonucleotide
ugcagacuuaauuccauca

SEQ ID NO: 338157 - RNA, 19 nt, Artificial Sequence
  Description of Artificial Sequence: Synthetic oligonucleotide
uguagucuugggaaaaguc

SEQ ID NO: 338158 - RNA, 19 nt, Artificial Sequence
  Description of Artificial Sequence: Synthetic oligonucleotide
cacaggugaacaaucaaug

SEQ ID NO: 338159 - RNA, 19 nt, Artificial Sequence
  Description of Artificial Sequence: Synthetic oligonucleotide
auagcuauauaacucuaaa

SEQ ID NO: 338160 - RNA, 19 nt, Artificial Sequence
  Description of Artificial Sequence: Synthetic oligonucleotide
ucacuuagaguauauuaaa

SEQ ID NO: 338161 - RNA, 19 nt, Artificial Sequence
  Description of Artificial Sequence: Synthetic oligonucleotide
ugcacucaaauguacauua

SEQ ID NO: 338162 - RNA, 19 nt, Artificial Sequence
  Description of Artificial Sequence: Synthetic oligonucleotide
gaaucuauaauugccaugu

SEQ ID NO: 338163 - RNA, 19 nt, Artificial Sequence
  Description of Artificial Sequence: Synthetic oligonucleotide
gugaacauccuguaacaag

SEQ ID NO: 338164 - RNA, 19 nt, Artificial Sequence
  Description of Artificial Sequence: Synthetic oligonucleotide
guacauuaaugcuugcaug

SEQ ID NO: 338165 - RNA, 19 nt, Artificial Sequence
  Description of Artificial Sequence: Synthetic oligonucleotide
acaaucaaugaauuugaau

SEQ ID NO: 338166 - RNA, 19 nt, Artificial Sequence
  Description of Artificial Sequence: Synthetic oligonucleotide
aguguauauuaagguagcc

SEQ ID NO: 338167 - RNA, 19 nt, Artificial Sequence
  Description of Artificial Sequence: Synthetic oligonucleotide
cauuaaugcuugcauguag

SEQ ID NO: 338168 - RNA, 19 nt, Artificial Sequence
  Description of Artificial Sequence: Synthetic oligonucleotide
agaaucuauaauugccaug

SEQ ID NO: 338169 - RNA, 19 nt, Artificial Sequence
  Description of Artificial Sequence: Synthetic oligonucleotide
acagugauacuauuuccug

SEQ ID NO: 338170 - RNA, 19 nt, Artificial Sequence
  Description of Artificial Sequence: Synthetic oligonucleotide
ucacuuagagauucgucca

SEQ ID NO: 338171 - RNA, 19 nt, Artificial Sequence
  Description of Artificial Sequence: Synthetic oligonucleotide
uuucucggaaaacaagauc

SEQ ID NO: 338172 - RNA, 19 nt, Artificial Sequence
  Description of Artificial Sequence: Synthetic oligonucleotide
augaucauucacuuagagu

SEQ ID NO: 338173 - RNA, 19 nt, Artificial Sequence
  Description of Artificial Sequence: Synthetic oligonucleotide
ucgacacuuaaaacaacca

SEQ ID NO: 338174 - RNA, 19 nt, Artificial Sequence
  Description of Artificial Sequence: Synthetic oligonucleotide
aaccuguccuaauugcuca

SEQ ID NO: 338175 - RNA, 19 nt, Artificial Sequence
  Description of Artificial Sequence: Synthetic oligonucleotide
uaccaguguauauuaaggu

SEQ ID NO: 338176 - RNA, 19 nt, Artificial Sequence
  Description of Artificial Sequence: Synthetic oligonucleotide
auuguauacccuaugauua

SEQ ID NO: 338177 - RNA, 19 nt, Artificial Sequence
  Description of Artificial Sequence: Synthetic oligonucleotide
aacaagaucuucagagcag

SEQ ID NO: 338178 - RNA, 19 nt, Artificial Sequence
  Description of Artificial Sequence: Synthetic oligonucleotide
cacccgacacccaagaggc

SEQ ID NO: 338179 - RNA, 19 nt, Artificial Sequence
  Description of Artificial Sequence: Synthetic oligonucleotide
ucaugcuugguccauugaa

SEQ ID NO: 338180 - RNA, 19 nt, Artificial Sequence
  Description of Artificial Sequence: Synthetic oligonucleotide
cccuaauacagaaacaggc

SEQ ID NO: 338181 - RNA, 19 nt, Artificial Sequence
  Description of Artificial Sequence: Synthetic oligonucleotide
ugggaaauuucccaagcau

SEQ ID NO: 338182 - RNA, 19 nt, Artificial Sequence
  Description of Artificial Sequence: Synthetic oligonucleotide
uugaguuauucuacuuccc

SEQ ID NO: 338183 - RNA, 19 nt, Artificial Sequence
  Description of Artificial Sequence: Synthetic oligonucleotide
aggccuauaguaguuuagc

SEQ ID NO: 338184 - RNA, 19 nt, Artificial Sequence
  Description of Artificial Sequence: Synthetic oligonucleotide
caauggaccaagucuuagg

SEQ ID NO: 338185 - RNA, 19 nt, Artificial Sequence
  Description of Artificial Sequence: Synthetic oligonucleotide
uggguuaaagcaugaugcc

SEQ ID NO: 338186 - RNA, 19 nt, Artificial Sequence
  Description of Artificial Sequence: Synthetic oligonucleotide
uuaaugcuugcauguagac

SEQ ID NO: 338187 - RNA, 19 nt, Artificial Sequence
  Description of Artificial Sequence: Synthetic oligonucleotide
acacaauccaugauucucg

SEQ ID NO: 338188 - RNA, 19 nt, Artificial Sequence
  Description of Artificial Sequence: Synthetic oligonucleotide
cucuaucaaguagagaaag

SEQ ID NO: 338189 - RNA, 19 nt, Artificial Sequence
  Description of Artificial Sequence: Synthetic oligonucleotide
ucguccaccgcuccaagcc

SEQ ID NO: 338190 - RNA, 19 nt, Artificial Sequence
  Description of Artificial Sequence: Synthetic oligonucleotide
auauauaaucuauuaucuu

SEQ ID NO: 338191 - RNA, 19 nt, Artificial Sequence
  Description of Artificial Sequence: Synthetic oligonucleotide
uugggaaauuucccaagca

SEQ ID NO: 338192 - RNA, 19 nt, Artificial Sequence
  Description of Artificial Sequence: Synthetic oligonucleotide
ucuuagggacaaauuagau

SEQ ID NO: 338193 - RNA, 19 nt, Artificial Sequence
  Description of Artificial Sequence: Synthetic oligonucleotide
aaugcauuaaacagugaua

SEQ ID NO: 338194 - RNA, 19 nt, Artificial Sequence
  Description of Artificial Sequence: Synthetic oligonucleotide
aaucuauaauugccaugug

SEQ ID NO: 338195 - RNA, 19 nt, Artificial Sequence
  Description of Artificial Sequence: Synthetic oligonucleotide
uuuaaggccuauaguaguu

SEQ ID NO: 338196 - RNA, 19 nt, Artificial Sequence
  Description of Artificial Sequence: Synthetic oligonucleotide
auaucuaaaguagucacuu

SEQ ID NO: 338197 - RNA, 19 nt, Artificial Sequence
  Description of Artificial Sequence: Synthetic oligonucleotide
uagcuauauaacucuaaaa

SEQ ID NO: 338198 - RNA, 19 nt, Artificial Sequence
  Description of Artificial Sequence: Synthetic oligonucleotide
uacuauuaggggaagcauu

SEQ ID NO: 338199 - RNA, 19 nt, Artificial Sequence
  Description of Artificial Sequence: Synthetic oligonucleotide
uauacccuaugauuacaca

SEQ ID NO: 338200 - RNA, 19 nt, Artificial Sequence
  Description of Artificial Sequence: Synthetic oligonucleotide
acaugaauuguauacccua

SEQ ID NO: 338201 - RNA, 19 nt, Artificial Sequence
  Description of Artificial Sequence: Synthetic oligonucleotide
uacuagacaccaacuauau

SEQ ID NO: 338202 - RNA, 19 nt, Artificial Sequence
  Description of Artificial Sequence: Synthetic oligonucleotide
aagcauuacgagaauaaau

SEQ ID NO: 338203 - RNA, 19 nt, Artificial Sequence
  Description of Artificial Sequence: Synthetic oligonucleotide
guauauuaagguagccagg

SEQ ID NO: 338204 - RNA, 19 nt, Artificial Sequence
  Description of Artificial Sequence: Synthetic oligonucleotide
aguuucucggaaaacaaga

SEQ ID NO: 338205 - RNA, 19 nt, Artificial Sequence
  Description of Artificial Sequence: Synthetic oligonucleotide
agcauuacgagaauaaaua

SEQ ID NO: 338206 - RNA, 19 nt, Artificial Sequence
  Description of Artificial Sequence: Synthetic oligonucleotide
auacucagcgucaggagac

SEQ ID NO: 338207 - RNA, 19 nt, Artificial Sequence
  Description of Artificial Sequence: Synthetic oligonucleotide
uaaugcuugcauguagacc

SEQ ID NO: 338208 - RNA, 19 nt, Artificial Sequence
  Description of Artificial Sequence: Synthetic oligonucleotide
uaggggaagcauuacgaga

SEQ ID NO: 338209 - RNA, 19 nt, Artificial Sequence
  Description of Artificial Sequence: Synthetic oligonucleotide
agcgucaggagacuguaug

SEQ ID NO: 338210 - RNA, 19 nt, Artificial Sequence
  Description of Artificial Sequence: Synthetic oligonucleotide
uaaauuuaucgauggucuc

SEQ ID NO: 338211 - RNA, 19 nt, Artificial Sequence
  Description of Artificial Sequence: Synthetic oligonucleotide
auuaggggaagcauuacga

SEQ ID NO: 338212 - RNA, 19 nt, Artificial Sequence
  Description of Artificial Sequence: Synthetic oligonucleotide
accaacuauauguuggcaa

SEQ ID NO: 338213 - RNA, 19 nt, Artificial Sequence
  Description of Artificial Sequence: Synthetic oligonucleotide
ccuaugauuacacagguca

SEQ ID NO: 338214 - RNA, 19 nt, Artificial Sequence
  Description of Artificial Sequence: Synthetic oligonucleotide
auaguaguuuagcucagau

SEQ ID NO: 338215 - RNA, 19 nt, Artificial Sequence
  Description of Artificial Sequence: Synthetic oligonucleotide
ugugacaucucaaccuguc

SEQ ID NO: 338216 - RNA, 19 nt, Artificial Sequence
  Description of Artificial Sequence: Synthetic oligonucleotide
gucgacacuuaaaacaacc

SEQ ID NO: 338217 - RNA, 19 nt, Artificial Sequence
  Description of Artificial Sequence: Synthetic oligonucleotide
auuaagguagccaggaaaa

SEQ ID NO: 338218 - RNA, 19 nt, Artificial Sequence
  Description of Artificial Sequence: Synthetic oligonucleotide
uuguauacccuaugauuac

SEQ ID NO: 338219 - RNA, 19 nt, Artificial Sequence
  Description of Artificial Sequence: Synthetic oligonucleotide
aaccugacagaagcagcgc

SEQ ID NO: 338220 - RNA, 19 nt, Artificial Sequence
  Description of Artificial Sequence: Synthetic oligonucleotide
aauagcuauauaacucuaa

SEQ ID NO: 338221 - RNA, 19 nt, Artificial Sequence
  Description of Artificial Sequence: Synthetic oligonucleotide
aacaagugccugaaguucu

SEQ ID NO: 338222 - RNA, 19 nt, Artificial Sequence
  Description of Artificial Sequence: Synthetic oligonucleotide
cagaauacuuguagcuugc

SEQ ID NO: 338223 - RNA, 19 nt, Artificial Sequence
  Description of Artificial Sequence: Synthetic oligonucleotide
ugcauaccaguguauauua

SEQ ID NO: 338224 - RNA, 19 nt, Artificial Sequence
  Description of Artificial Sequence: Synthetic oligonucleotide
acaaucauccagguaacca

SEQ ID NO: 338225 - RNA, 19 nt, Artificial Sequence
  Description of Artificial Sequence: Synthetic oligonucleotide
gugauacuauuuccugucg

SEQ ID NO: 338226 - RNA, 19 nt, Artificial Sequence
  Description of Artificial Sequence: Synthetic oligonucleotide
ccuauaguaguuuagcuca

SEQ ID NO: 338227 - RNA, 19 nt, Artificial Sequence
  Description of Artificial Sequence: Synthetic oligonucleotide
accaguguauauuaaggua

SEQ ID NO: 338228 - RNA, 19 nt, Artificial Sequence
  Description of Artificial Sequence: Synthetic oligonucleotide
acgagaauaaauauauaau

SEQ ID NO: 338229 - RNA, 19 nt, Artificial Sequence
  Description of Artificial Sequence: Synthetic oligonucleotide
caaccuguccuccucagug

SEQ ID NO: 338230 - RNA, 19 nt, Artificial Sequence
  Description of Artificial Sequence: Synthetic oligonucleotide
aacaugaauuguauacccu

SEQ ID NO: 338231 - RNA, 19 nt, Artificial Sequence
  Description of Artificial Sequence: Synthetic oligonucleotide
ucagcaguguaaagugaca

SEQ ID NO: 338232 - RNA, 19 nt, Artificial Sequence
  Description of Artificial Sequence: Synthetic oligonucleotide
aaaagauaccgugcacuca

SEQ ID NO: 338233 - RNA, 19 nt, Artificial Sequence
  Description of Artificial Sequence: Synthetic oligonucleotide
uaugauuacacaggucaaa

SEQ ID NO: 338234 - RNA, 19 nt, Artificial Sequence
  Description of Artificial Sequence: Synthetic oligonucleotide
uaacaagugccugaaguuc

SEQ ID NO: 338235 - RNA, 19 nt, Artificial Sequence
  Description of Artificial Sequence: Synthetic oligonucleotide
guuuagcucagauuuguaa

SEQ ID NO: 338236 - RNA, 19 nt, Artificial Sequence
  Description of Artificial Sequence: Synthetic oligonucleotide
ucucuaauucucucacacu

SEQ ID NO: 338237 - RNA, 19 nt, Artificial Sequence
  Description of Artificial Sequence: Synthetic oligonucleotide
uuauaugaucauucacuua

SEQ ID NO: 338238 - RNA, 19 nt, Artificial Sequence
  Description of Artificial Sequence: Synthetic oligonucleotide
guuggacacauuguuaaac

SEQ ID NO: 338239 - RNA, 19 nt, Artificial Sequence
  Description of Artificial Sequence: Synthetic oligonucleotide
cauuacgagaauaaauaua

SEQ ID NO: 338240 - RNA, 19 nt, Artificial Sequence
  Description of Artificial Sequence: Synthetic oligonucleotide
uccuccaagcauccggccc

SEQ ID NO: 338241 - RNA, 19 nt, Artificial Sequence
  Description of Artificial Sequence: Synthetic oligonucleotide
uucauauaugacacuccau

SEQ ID NO: 338242 - RNA, 19 nt, Artificial Sequence
  Description of Artificial Sequence: Synthetic oligonucleotide
caguccucccaguuaaacc

SEQ ID NO: 338243 - RNA, 19 nt, Artificial Sequence
  Description of Artificial Sequence: Synthetic oligonucleotide
ugacuagggcgugagaugu

SEQ ID NO: 338244 - RNA, 19 nt, Artificial Sequence
  Description of Artificial Sequence: Synthetic oligonucleotide
uguauacccuaugauuaca

SEQ ID NO: 338245 - RNA, 19 nt, Artificial Sequence
  Description of Artificial Sequence: Synthetic oligonucleotide
auuaaacagugauacuauu

SEQ ID NO: 338246 - RNA, 19 nt, Artificial Sequence
  Description of Artificial Sequence: Synthetic oligonucleotide
cuauaguaguuuagcucag

SEQ ID NO: 338247 - RNA, 19 nt, Artificial Sequence
  Description of Artificial Sequence: Synthetic oligonucleotide
acuauauguuggcaaugga

SEQ ID NO: 338248 - RNA, 19 nt, Artificial Sequence
  Description of Artificial Sequence: Synthetic oligonucleotide
gguaaagcgaggccugagg

SEQ ID NO: 338249 - RNA, 19 nt, Artificial Sequence
  Description of Artificial Sequence: Synthetic oligonucleotide
guagcgcucaggguuaagg

SEQ ID NO: 338250 - RNA, 19 nt, Artificial Sequence
  Description of Artificial Sequence: Synthetic oligonucleotide
uagggcgugagauguuucc

SEQ ID NO: 338251 - RNA, 19 nt, Artificial Sequence
  Description of Artificial Sequence: Synthetic oligonucleotide
guaaagcgaggccugagga

SEQ ID NO: 338252 - RNA, 19 nt, Artificial Sequence
  Description of Artificial Sequence: Synthetic oligonucleotide
agucuguaguuauuaaauu

SEQ ID NO: 338253 - RNA, 19 nt, Artificial Sequence
  Description of Artificial Sequence: Synthetic oligonucleotide
ccacuaaccugacagaagc

SEQ ID NO: 338254 - RNA, 19 nt, Artificial Sequence
  Description of Artificial Sequence: Synthetic oligonucleotide
aaggccuauaguaguuuag

SEQ ID NO: 338255 - RNA, 19 nt, Artificial Sequence
  Description of Artificial Sequence: Synthetic oligonucleotide
acccuaugauuacacaggu

SEQ ID NO: 338256 - RNA, 19 nt, Artificial Sequence
  Description of Artificial Sequence: Synthetic oligonucleotide
guguauauuaagguagcca

SEQ ID NO: 338257 - RNA, 19 nt, Artificial Sequence
  Description of Artificial Sequence: Synthetic oligonucleotide
aaggaauguugcauaccag

SEQ ID NO: 338258 - RNA, 19 nt, Artificial Sequence
  Description of Artificial Sequence: Synthetic oligonucleotide
uucagaauacuuguagcuu

SEQ ID NO: 338259 - RNA, 19 nt, Artificial Sequence
  Description of Artificial Sequence: Synthetic oligonucleotide
ccagauauaagccuguaga

SEQ ID NO: 338260 - RNA, 19 nt, Artificial Sequence
  Description of Artificial Sequence: Synthetic oligonucleotide
cacagucgacacuuaaaac

SEQ ID NO: 338261 - RNA, 19 nt, Artificial Sequence
  Description of Artificial Sequence: Synthetic oligonucleotide
acuagacaccaacuauaug

SEQ ID NO: 338262 - RNA, 19 nt, Artificial Sequence
  Description of Artificial Sequence: Synthetic oligonucleotide
uuacgagaauaaauauaua

SEQ ID NO: 338263 - RNA, 19 nt, Artificial Sequence
  Description of Artificial Sequence: Synthetic oligonucleotide
uccccagugugggauaggg

SEQ ID NO: 338264 - RNA, 19 nt, Artificial Sequence
  Description of Artificial Sequence: Synthetic oligonucleotide
uuacuauuaggggaagcau

SEQ ID NO: 338265 - RNA, 19 nt, Artificial Sequence
  Description of Artificial Sequence: Synthetic oligonucleotide
uuaagguagccaggaaaac

SEQ ID NO: 338266 - RNA, 19 nt, Artificial Sequence
  Description of Artificial Sequence: Synthetic oligonucleotide
uauccacgucuacauagaa

SEQ ID NO: 338267 - RNA, 19 nt, Artificial Sequence
  Description of Artificial Sequence: Synthetic oligonucleotide
uacuucccuacaaaccaaa

SEQ ID NO: 338268 - RNA, 19 nt, Artificial Sequence
  Description of Artificial Sequence: Synthetic oligonucleotide
ggaaauuucccaagcauca

SEQ ID NO: 338269 - RNA, 19 nt, Artificial Sequence
  Description of Artificial Sequence: Synthetic oligonucleotide
ugucggguuagcuggaauu

SEQ ID NO: 338270 - RNA, 19 nt, Artificial Sequence
  Description of Artificial Sequence: Synthetic oligonucleotide
gaguuauucuacuucccua

SEQ ID NO: 338271 - RNA, 19 nt, Artificial Sequence
  Description of Artificial Sequence: Synthetic oligonucleotide
ggagcuuuccccacagucg

SEQ ID NO: 338272 - RNA, 19 nt, Artificial Sequence
  Description of Artificial Sequence: Synthetic oligonucleotide
cauacucagcgucaggaga

SEQ ID NO: 338273 - RNA, 19 nt, Artificial Sequence
  Description of Artificial Sequence: Synthetic oligonucleotide
aaauagcuauauaacucua

SEQ ID NO: 338274 - RNA, 19 nt, Artificial Sequence
  Description of Artificial Sequence: Synthetic oligonucleotide
uaaagcgaggccugaggau

SEQ ID NO: 338275 - RNA, 19 nt, Artificial Sequence
  Description of Artificial Sequence: Synthetic oligonucleotide
gagcccuuaacucuaucaa

SEQ ID NO: 338276 - RNA, 19 nt, Artificial Sequence
  Description of Artificial Sequence: Synthetic oligonucleotide
ucaauccccagugugggau

SEQ ID NO: 338277 - RNA, 19 nt, Artificial Sequence
  Description of Artificial Sequence: Synthetic oligonucleotide
ucuuccacacugguugaug

SEQ ID NO: 338278 - RNA, 19 nt, Artificial Sequence
  Description of Artificial Sequence: Synthetic oligonucleotide
cccaaaauuuuacuauuag

SEQ ID NO: 338279 - RNA, 19 nt, Artificial Sequence
  Description of Artificial Sequence: Synthetic oligonucleotide
uugcauaccaguguauauu

SEQ ID NO: 338280 - RNA, 19 nt, Artificial Sequence
  Description of Artificial Sequence: Synthetic oligonucleotide
auugccaugugauguuaaa

SEQ ID NO: 338281 - RNA, 19 nt, Artificial Sequence
  Description of Artificial Sequence: Synthetic oligonucleotide
ucuaaccauuacauauaua

SEQ ID NO: 338282 - RNA, 19 nt, Artificial Sequence
  Description of Artificial Sequence: Synthetic oligonucleotide
agucuggagcuuuccccac

SEQ ID NO: 338283 - RNA, 19 nt, Artificial Sequence
  Description of Artificial Sequence: Synthetic oligonucleotide
uugagguauacagaaucua

SEQ ID NO: 338284 - RNA, 19 nt, Artificial Sequence
  Description of Artificial Sequence: Synthetic oligonucleotide
aggggaagcauuacgagaa

SEQ ID NO: 338285 - RNA, 19 nt, Artificial Sequence
  Description of Artificial Sequence: Synthetic oligonucleotide
gugacuagggcgugagaug

SEQ ID NO: 338286 - RNA, 19 nt, Artificial Sequence
  Description of Artificial Sequence: Synthetic oligonucleotide
agccaaguaucuuguaaaa

SEQ ID NO: 338287 - RNA, 19 nt, Artificial Sequence
  Description of Artificial Sequence: Synthetic oligonucleotide
auacuauuuccugucgggu

SEQ ID NO: 338288 - RNA, 19 nt, Artificial Sequence
  Description of Artificial Sequence: Synthetic oligonucleotide
gaacauccuguaacaagug

SEQ ID NO: 338289 - RNA, 19 nt, Artificial Sequence
  Description of Artificial Sequence: Synthetic oligonucleotide
cauccggccccuuguagcc

SEQ ID NO: 338290 - RNA, 19 nt, Artificial Sequence
  Description of Artificial Sequence: Synthetic oligonucleotide
ccuuaacucuaucaaguag

SEQ ID NO: 338291 - RNA, 19 nt, Artificial Sequence
  Description of Artificial Sequence: Synthetic oligonucleotide
guauacccuaugauuacac

SEQ ID NO: 338292 - RNA, 19 nt, Artificial Sequence
  Description of Artificial Sequence: Synthetic oligonucleotide
guagcuugcagacuuaauu

SEQ ID NO: 338293 - RNA, 19 nt, Artificial Sequence
  Description of Artificial Sequence: Synthetic oligonucleotide
uucaucagaauggcagggu

SEQ ID NO: 338294 - RNA, 19 nt, Artificial Sequence
  Description of Artificial Sequence: Synthetic oligonucleotide
cuuuaggugacuagggcgu

SEQ ID NO: 338295 - RNA, 19 nt, Artificial Sequence
  Description of Artificial Sequence: Synthetic oligonucleotide
auauuaagguagccaggaa

SEQ ID NO: 338296 - RNA, 19 nt, Artificial Sequence
  Description of Artificial Sequence: Synthetic oligonucleotide
gccuauaguaguuuagcuc

SEQ ID NO: 338297 - RNA, 19 nt, Artificial Sequence
  Description of Artificial Sequence: Synthetic oligonucleotide
guuauucuacuucccuaca

SEQ ID NO: 338298 - RNA, 19 nt, Artificial Sequence
  Description of Artificial Sequence: Synthetic oligonucleotide
guagaccagauauaagccu

SEQ ID NO: 338299 - RNA, 19 nt, Artificial Sequence
  Description of Artificial Sequence: Synthetic oligonucleotide
gguuagcuggaauucauaa

SEQ ID NO: 338300 - RNA, 19 nt, Artificial Sequence
  Description of Artificial Sequence: Synthetic oligonucleotide
caggguuaaggaguaaauc

SEQ ID NO: 338301 - RNA, 19 nt, Artificial Sequence
  Description of Artificial Sequence: Synthetic oligonucleotide
gaagcagcgcugcgcugcg

SEQ ID NO: 338302 - RNA, 19 nt, Artificial Sequence
  Description of Artificial Sequence: Synthetic oligonucleotide
agauaccgugcacucaaau

SEQ ID NO: 338303 - RNA, 19 nt, Artificial Sequence
  Description of Artificial Sequence: Synthetic oligonucleotide
gauagagcccuuaacucua

SEQ ID NO: 338304 - RNA, 19 nt, Artificial Sequence
  Description of Artificial Sequence: Synthetic oligonucleotide
guagucuugggaaaagucu

SEQ ID NO: 338305 - RNA, 19 nt, Artificial Sequence
  Description of Artificial Sequence: Synthetic oligonucleotide
caaauacuagacaccaacu

SEQ ID NO: 338306 - RNA, 19 nt, Artificial Sequence
  Description of Artificial Sequence: Synthetic oligonucleotide
aucuuguaaaagauaccgu

SEQ ID NO: 338307 - RNA, 19 nt, Artificial Sequence
  Description of Artificial Sequence: Synthetic oligonucleotide
uaggugacuagggcgugag

SEQ ID NO: 338308 - RNA, 19 nt, Artificial Sequence
  Description of Artificial Sequence: Synthetic oligonucleotide
ucaaagcguugcugaaacu

SEQ ID NO: 338309 - RNA, 19 nt, Artificial Sequence
  Description of Artificial Sequence: Synthetic oligonucleotide
gagguauacagaaucuaua

SEQ ID NO: 338310 - RNA, 19 nt, Artificial Sequence
  Description of Artificial Sequence: Synthetic oligonucleotide
uaacucuaucaaguagaga

SEQ ID NO: 338311 - RNA, 19 nt, Artificial Sequence
  Description of Artificial Sequence: Synthetic oligonucleotide
acauaguuauaugaucauu

SEQ ID NO: 338312 - RNA, 19 nt, Artificial Sequence
  Description of Artificial Sequence: Synthetic oligonucleotide
cauuaaacagugauacuau

SEQ ID NO: 338313 - RNA, 19 nt, Artificial Sequence
  Description of Artificial Sequence: Synthetic oligonucleotide
gagauucguccaccgcucc

SEQ ID NO: 338314 - RNA, 19 nt, Artificial Sequence
  Description of Artificial Sequence: Synthetic oligonucleotide
uuuaggugacuagggcgug

SEQ ID NO: 338315 - RNA, 19 nt, Artificial Sequence
  Description of Artificial Sequence: Synthetic oligonucleotide
cucggaaaacaagaucuuc

SEQ ID NO: 338316 - RNA, 19 nt, Artificial Sequence
  Description of Artificial Sequence: Synthetic oligonucleotide
aguauaaauagaagcccua

SEQ ID NO: 338317 - RNA, 19 nt, Artificial Sequence
  Description of Artificial Sequence: Synthetic oligonucleotide
caacuauauguuggcaaug

SEQ ID NO: 338318 - RNA, 19 nt, Artificial Sequence
  Description of Artificial Sequence: Synthetic oligonucleotide
cagccaaguaucuuguaaa

SEQ ID NO: 338319 - RNA, 19 nt, Artificial Sequence
  Description of Artificial Sequence: Synthetic oligonucleotide
ucucaacaucacagguaca

SEQ ID NO: 338320 - RNA, 19 nt, Artificial Sequence
  Description of Artificial Sequence: Synthetic oligonucleotide
accgugcacucaaauguac

SEQ ID NO: 338321 - RNA, 19 nt, Artificial Sequence
  Description of Artificial Sequence: Synthetic oligonucleotide
cuaugauuacacaggucaa

SEQ ID NO: 338322 - RNA, 19 nt, Artificial Sequence
  Description of Artificial Sequence: Synthetic oligonucleotide
ucccaucaaagcguugcug

SEQ ID NO: 338323 - RNA, 19 nt, Artificial Sequence
  Description of Artificial Sequence: Synthetic oligonucleotide
cuggcauauuugcuaucag

SEQ ID NO: 338324 - RNA, 19 nt, Artificial Sequence
  Description of Artificial Sequence: Synthetic oligonucleotide
agcauccggccccuuguag

SEQ ID NO: 338325 - RNA, 19 nt, Artificial Sequence
  Description of Artificial Sequence: Synthetic oligonucleotide
cauauaugacacuccauau

SEQ ID NO: 338326 - RNA, 19 nt, Artificial Sequence
  Description of Artificial Sequence: Synthetic oligonucleotide
accacuaaccugacagaag

SEQ ID NO: 338327 - RNA, 19 nt, Artificial Sequence
  Description of Artificial Sequence: Synthetic oligonucleotide
gguuaaggaguaaauccac

SEQ ID NO: 338328 - RNA, 19 nt, Artificial Sequence
  Description of Artificial Sequence: Synthetic oligonucleotide
uccucacuuagagauucgu

SEQ ID NO: 338329 - RNA, 19 nt, Artificial Sequence
  Description of Artificial Sequence: Synthetic oligonucleotide
aggaguaaauccacauacu

SEQ ID NO: 338330 - RNA, 19 nt, Artificial Sequence
  Description of Artificial Sequence: Synthetic oligonucleotide
ccacccgacacccaagagg

SEQ ID NO: 338331 - RNA, 19 nt, Artificial Sequence
  Description of Artificial Sequence: Synthetic oligonucleotide
ugggauaggguaagacauu

SEQ ID NO: 338332 - RNA, 19 nt, Artificial Sequence
  Description of Artificial Sequence: Synthetic oligonucleotide
ucggguuagcuggaauuca

SEQ ID NO: 338333 - RNA, 19 nt, Artificial Sequence
  Description of Artificial Sequence: Synthetic oligonucleotide
guaacaagugccugaaguu

SEQ ID NO: 338334 - RNA, 19 nt, Artificial Sequence
  Description of Artificial Sequence: Synthetic oligonucleotide
auauccacgucuacauaga

SEQ ID NO: 338335 - RNA, 19 nt, Artificial Sequence
  Description of Artificial Sequence: Synthetic oligonucleotide
ggguuaaggaguaaaucca

SEQ ID NO: 338336 - RNA, 19 nt, Artificial Sequence
  Description of Artificial Sequence: Synthetic oligonucleotide
guacaaucauccagguaac

SEQ ID NO: 338337 - RNA, 19 nt, Artificial Sequence
  Description of Artificial Sequence: Synthetic oligonucleotide
guauuuuggguuaaagcau

SEQ ID NO: 338338 - RNA, 19 nt, Artificial Sequence
  Description of Artificial Sequence: Synthetic oligonucleotide
agauucguccaccgcucca

SEQ ID NO: 338339 - RNA, 19 nt, Artificial Sequence
  Description of Artificial Sequence: Synthetic oligonucleotide
caggauauccacgucuaca

SEQ ID NO: 338340 - RNA, 19 nt, Artificial Sequence
  Description of Artificial Sequence: Synthetic oligonucleotide
gccaaguaucuuguaaaag

SEQ ID NO: 338341 - RNA, 19 nt, Artificial Sequence
  Description of Artificial Sequence: Synthetic oligonucleotide
ucagcgucaggagacugua

SEQ ID NO: 338342 - RNA, 19 nt, Artificial Sequence
  Description of Artificial Sequence: Synthetic oligonucleotide
uuaggugacuagggcguga

SEQ ID NO: 338343 - RNA, 19 nt, Artificial Sequence
  Description of Artificial Sequence: Synthetic oligonucleotide
auaugacacuccauauccu

SEQ ID NO: 338344 - RNA, 19 nt, Artificial Sequence
  Description of Artificial Sequence: Synthetic oligonucleotide
auccaugauucucgaaaua

SEQ ID NO: 338345 - RNA, 19 nt, Artificial Sequence
  Description of Artificial Sequence: Synthetic oligonucleotide
agaauacuuguagcuugca

SEQ ID NO: 338346 - RNA, 19 nt, Artificial Sequence
  Description of Artificial Sequence: Synthetic oligonucleotide
gcccuaauacagaaacagg

SEQ ID NO: 338347 - RNA, 19 nt, Artificial Sequence
  Description of Artificial Sequence: Synthetic oligonucleotide
acauuaaugcuugcaugua

SEQ ID NO: 338348 - RNA, 19 nt, Artificial Sequence
  Description of Artificial Sequence: Synthetic oligonucleotide
cuguaacaagugccugaag

SEQ ID NO: 338349 - RNA, 19 nt, Artificial Sequence
  Description of Artificial Sequence: Synthetic oligonucleotide
gauucguccaccgcuccaa

SEQ ID NO: 338350 - RNA, 19 nt, Artificial Sequence
  Description of Artificial Sequence: Synthetic oligonucleotide
gucggguuagcuggaauuc

SEQ ID NO: 338351 - RNA, 19 nt, Artificial Sequence
  Description of Artificial Sequence: Synthetic oligonucleotide
agucggaaguccuccuuua

SEQ ID NO: 338352 - RNA, 19 nt, Artificial Sequence
  Description of Artificial Sequence: Synthetic oligonucleotide
guugcauaccaguguauau

SEQ ID NO: 338353 - RNA, 19 nt, Artificial Sequence
  Description of Artificial Sequence: Synthetic oligonucleotide
agguaaagcgaggccugag

SEQ ID NO: 338354 - RNA, 19 nt, Artificial Sequence
  Description of Artificial Sequence: Synthetic oligonucleotide
cuagggcgugagauguuuc

SEQ ID NO: 338355 - RNA, 19 nt, Artificial Sequence
  Description of Artificial Sequence: Synthetic oligonucleotide
gugugggauaggguaagac

SEQ ID NO: 338356 - RNA, 19 nt, Artificial Sequence
  Description of Artificial Sequence: Synthetic oligonucleotide
gcauccggccccuuguagc

SEQ ID NO: 338357 - RNA, 19 nt, Artificial Sequence
  Description of Artificial Sequence: Synthetic oligonucleotide
auacuaguuuugaaacuuu

SEQ ID NO: 338358 - RNA, 19 nt, Artificial Sequence
  Description of Artificial Sequence: Synthetic oligonucleotide
agguacaaucauccaggua

SEQ ID NO: 338359 - RNA, 19 nt, Artificial Sequence
  Description of Artificial Sequence: Synthetic oligonucleotide
acucaaacuuuaggugacu

SEQ ID NO: 338360 - RNA, 19 nt, Artificial Sequence
  Description of Artificial Sequence: Synthetic oligonucleotide
ccauauccuccaagcaucc

SEQ ID NO: 338361 - RNA, 19 nt, Artificial Sequence
  Description of Artificial Sequence: Synthetic oligonucleotide
aagaaucgucaugcuuggu

SEQ ID NO: 338362 - RNA, 19 nt, Artificial Sequence
  Description of Artificial Sequence: Synthetic oligonucleotide
uccggccccuuguagccug

SEQ ID NO: 338363 - RNA, 19 nt, Artificial Sequence
  Description of Artificial Sequence: Synthetic oligonucleotide
cacuaaccugacagaagca

SEQ ID NO: 338364 - RNA, 19 nt, Artificial Sequence
  Description of Artificial Sequence: Synthetic oligonucleotide
gcaauggaccaagucuuag

SEQ ID NO: 338365 - RNA, 19 nt, Artificial Sequence
  Description of Artificial Sequence: Synthetic oligonucleotide
ugaugcccaugacuacuuu

SEQ ID NO: 338366 - RNA, 19 nt, Artificial Sequence
  Description of Artificial Sequence: Synthetic oligonucleotide
acuagggcgugagauguuu

SEQ ID NO: 338367 - RNA, 19 nt, Artificial Sequence
  Description of Artificial Sequence: Synthetic oligonucleotide
cagaaucuauaauugccau

SEQ ID NO: 338368 - RNA, 19 nt, Artificial Sequence
  Description of Artificial Sequence: Synthetic oligonucleotide
cacucaaauguacauuaau

SEQ ID NO: 338369 - RNA, 19 nt, Artificial Sequence
  Description of Artificial Sequence: Synthetic oligonucleotide
ugcuugcauguagaccaga

SEQ ID NO: 338370 - RNA, 19 nt, Artificial Sequence
  Description of Artificial Sequence: Synthetic oligonucleotide
ccuaauugcucagacauua

SEQ ID NO: 338371 - RNA, 19 nt, Artificial Sequence
  Description of Artificial Sequence: Synthetic oligonucleotide
uccuuauuuuaaggccuau

SEQ ID NO: 338372 - RNA, 19 nt, Artificial Sequence
  Description of Artificial Sequence: Synthetic oligonucleotide
gaucauucacuuagaguau

SEQ ID NO: 338373 - RNA, 19 nt, Artificial Sequence
  Description of Artificial Sequence: Synthetic oligonucleotide
ccucacuuagagauucguc

SEQ ID NO: 338374 - RNA, 19 nt, Artificial Sequence
  Description of Artificial Sequence: Synthetic oligonucleotide
uuccugugaagagcugaaa

SEQ ID NO: 338375 - RNA, 19 nt, Artificial Sequence
  Description of Artificial Sequence: Synthetic oligonucleotide
agggcgugagauguuuccu

SEQ ID NO: 338376 - RNA, 19 nt, Artificial Sequence
  Description of Artificial Sequence: Synthetic oligonucleotide
ccacagucgacacuuaaaa

SEQ ID NO: 338377 - RNA, 19 nt, Artificial Sequence
  Description of Artificial Sequence: Synthetic oligonucleotide
acucagcgucaggagacug

SEQ ID NO: 338378 - RNA, 19 nt, Artificial Sequence
  Description of Artificial Sequence: Synthetic oligonucleotide
guuucucggaaaacaagau

SEQ ID NO: 338379 - RNA, 19 nt, Artificial Sequence
  Description of Artificial Sequence: Synthetic oligonucleotide
gguuuaccuuguaauaucu

SEQ ID NO: 338380 - RNA, 19 nt, Artificial Sequence
  Description of Artificial Sequence: Synthetic oligonucleotide
acuucccuacaaaccaaaa

SEQ ID NO: 338381 - RNA, 19 nt, Artificial Sequence
  Description of Artificial Sequence: Synthetic oligonucleotide
augugacaucucaaccugu

SEQ ID NO: 338382 - RNA, 19 nt, Artificial Sequence
  Description of Artificial Sequence: Synthetic oligonucleotide
cugugccuuugaguuauuc

SEQ ID NO: 338383 - RNA, 19 nt, Artificial Sequence
  Description of Artificial Sequence: Synthetic oligonucleotide
agcuuuccccacagucgac

SEQ ID NO: 338384 - RNA, 19 nt, Artificial Sequence
  Description of Artificial Sequence: Synthetic oligonucleotide
cagguuuaccuuguaauau

SEQ ID NO: 338385 - RNA, 19 nt, Artificial Sequence
  Description of Artificial Sequence: Synthetic oligonucleotide
aguuuagcucagauuugua

SEQ ID NO: 338386 - RNA, 19 nt, Artificial Sequence
  Description of Artificial Sequence: Synthetic oligonucleotide
agugugggauaggguaaga

SEQ ID NO: 338387 - RNA, 19 nt, Artificial Sequence
  Description of Artificial Sequence: Synthetic oligonucleotide
gguaaccacuaaccugaca

SEQ ID NO: 338388 - RNA, 19 nt, Artificial Sequence
  Description of Artificial Sequence: Synthetic oligonucleotide
ggugacuagggcgugagau

SEQ ID NO: 338389 - RNA, 19 nt, Artificial Sequence
  Description of Artificial Sequence: Synthetic oligonucleotide
ggccuauaguaguuuagcu

SEQ ID NO: 338390 - RNA, 19 nt, Artificial Sequence
  Description of Artificial Sequence: Synthetic oligonucleotide
caucaacuucacagaagcu

SEQ ID NO: 338391 - RNA, 19 nt, Artificial Sequence
  Description of Artificial Sequence: Synthetic oligonucleotide
aucgucaugcuugguccau

SEQ ID NO: 338392 - RNA, 19 nt, Artificial Sequence
  Description of Artificial Sequence: Synthetic oligonucleotide
aggugacuagggcgugaga

SEQ ID NO: 338393 - RNA, 19 nt, Artificial Sequence
  Description of Artificial Sequence: Synthetic oligonucleotide
acauuacaacacaggugaa

SEQ ID NO: 338394 - RNA, 19 nt, Artificial Sequence
  Description of Artificial Sequence: Synthetic oligonucleotide
gacacccaagaggccgaug

SEQ ID NO: 338395 - RNA, 19 nt, Artificial Sequence
  Description of Artificial Sequence: Synthetic oligonucleotide
caccaacuauauguuggca

SEQ ID NO: 338396 - RNA, 19 nt, Artificial Sequence
  Description of Artificial Sequence: Synthetic oligonucleotide
caagcauccggccccuugu

SEQ ID NO: 338397 - RNA, 19 nt, Artificial Sequence
  Description of Artificial Sequence: Synthetic oligonucleotide
ggugaacaaucaaugaauu

SEQ ID NO: 338398 - RNA, 19 nt, Artificial Sequence
  Description of Artificial Sequence: Synthetic oligonucleotide
cccaagcaucacauuuaag

SEQ ID NO: 338399 - RNA, 19 nt, Artificial Sequence
  Description of Artificial Sequence: Synthetic oligonucleotide
ggcgugagauguuuccuua

SEQ ID NO: 338400 - RNA, 19 nt, Artificial Sequence
  Description of Artificial Sequence: Synthetic oligonucleotide
ccaacuauauguuggcaau

SEQ ID NO: 338401 - RNA, 19 nt, Artificial Sequence
  Description of Artificial Sequence: Synthetic oligonucleotide
cucagcgucaggagacugu

SEQ ID NO: 338402 - RNA, 19 nt, Artificial Sequence
  Description of Artificial Sequence: Synthetic oligonucleotide
auagagcccuuaacucuau

SEQ ID NO: 338403 - RNA, 19 nt, Artificial Sequence
  Description of Artificial Sequence: Synthetic oligonucleotide
cccuaugauuacacagguc

SEQ ID NO: 338404 - RNA, 19 nt, Artificial Sequence
  Description of Artificial Sequence: Synthetic oligonucleotide
gcuuuccccacagucgaca

SEQ ID NO: 338405 - RNA, 19 nt, Artificial Sequence
  Description of Artificial Sequence: Synthetic oligonucleotide
ucgucaugcuugguccauu

SEQ ID NO: 338406 - RNA, 19 nt, Artificial Sequence
  Description of Artificial Sequence: Synthetic oligonucleotide
ccuugaccagaagccaaag

SEQ ID NO: 338407 - RNA, 19 nt, Artificial Sequence
  Description of Artificial Sequence: Synthetic oligonucleotide
ccccaaaauuuuacuauua

SEQ ID NO: 338408 - RNA, 19 nt, Artificial Sequence
  Description of Artificial Sequence: Synthetic oligonucleotide
ccgugcacucaaauguaca

SEQ ID NO: 338409 - RNA, 19 nt, Artificial Sequence
  Description of Artificial Sequence: Synthetic oligonucleotide
ccuguaacaagugccugaa

SEQ ID NO: 338410 - RNA, 19 nt, Artificial Sequence
  Description of Artificial Sequence: Synthetic oligonucleotide
cguccaccgcuccaagccg

SEQ ID NO: 338411 - RNA, 19 nt, Artificial Sequence
  Description of Artificial Sequence: Synthetic oligonucleotide
cccacagucgacacuuaaa

SEQ ID NO: 338412 - RNA, 19 nt, Artificial Sequence
  Description of Artificial Sequence: Synthetic oligonucleotide
gcgucaggagacuguaugu

SEQ ID NO: 338413 - RNA, 19 nt, Artificial Sequence
  Description of Artificial Sequence: Synthetic oligonucleotide
aguagccacccgacaccca

SEQ ID NO: 338414 - RNA, 19 nt, Artificial Sequence
  Description of Artificial Sequence: Synthetic oligonucleotide
cuccugugccuuugaguua

SEQ ID NO: 338415 - RNA, 19 nt, Artificial Sequence
  Description of Artificial Sequence: Synthetic oligonucleotide
caucucaaccuguccuaau

SEQ ID NO: 338416 - RNA, 19 nt, Artificial Sequence
  Description of Artificial Sequence: Synthetic oligonucleotide
ggguuagcuggaauucaua

SEQ ID NO: 338417 - RNA, 19 nt, Artificial Sequence
  Description of Artificial Sequence: Synthetic oligonucleotide
ggccgaugaacaagcccca

SEQ ID NO: 338418 - RNA, 19 nt, Artificial Sequence
  Description of Artificial Sequence: Synthetic oligonucleotide
cacuuuagauagagcccuu

SEQ ID NO: 338419 - RNA, 19 nt, Artificial Sequence
  Description of Artificial Sequence: Synthetic oligonucleotide
gggcgugagauguuuccuu

SEQ ID NO: 338420 - RNA, 19 nt, Artificial Sequence
  Description of Artificial Sequence: Synthetic oligonucleotide
ccgacacccaagaggccga

SEQ ID NO: 338421 - RNA, 19 nt, Artificial Sequence
  Description of Artificial Sequence: Synthetic oligonucleotide
guccaccgcuccaagccgu

SEQ ID NO: 338422 - RNA, 19 nt, Artificial Sequence
  Description of Artificial Sequence: Synthetic oligonucleotide
guguagcgcucaggguuaa

SEQ ID NO: 338423 - RNA, 19 nt, Artificial Sequence
  Description of Artificial Sequence: Synthetic oligonucleotide
ccacgucuacauagaaggu

SEQ ID NO: 338424 - RNA, 19 nt, Artificial Sequence
  Description of Artificial Sequence: Synthetic oligonucleotide
gccuucuagccagcuguaa

SEQ ID NO: 338425 - RNA, 19 nt, Artificial Sequence
  Description of Artificial Sequence: Synthetic oligonucleotide
gacuagggcgugagauguu

SEQ ID NO: 338426 - RNA, 19 nt, Artificial Sequence
  Description of Artificial Sequence: Synthetic oligonucleotide
uccaagcauccggccccuu

SEQ ID NO: 338427 - RNA, 19 nt, Artificial Sequence
  Description of Artificial Sequence: Synthetic oligonucleotide
cagcgucaggagacuguau

SEQ ID NO: 338428 - RNA, 19 nt, Artificial Sequence
  Description of Artificial Sequence: Synthetic oligonucleotide
ggccuucuagccagcugua

SEQ ID NO: 338429 - RNA, 19 nt, Artificial Sequence
  Description of Artificial Sequence: Synthetic oligonucleotide
cggaagcacuuuagauaga

SEQ ID NO: 338430 - RNA, 19 nt, Artificial Sequence
  Description of Artificial Sequence: Synthetic oligonucleotide
cggguuagcuggaauucau

SEQ ID NO: 338431 - RNA, 19 nt, Artificial Sequence
  Description of Artificial Sequence: Synthetic oligonucleotide
ccccagugugggauagggu

SEQ ID NO: 338432 - RNA, 19 nt, Artificial Sequence
  Description of Artificial Sequence: Synthetic oligonucleotide
gcgaggccugaggaugccu

SEQ ID NO: 338433 - RNA, 19 nt, Artificial Sequence
  Description of Artificial Sequence: Synthetic oligonucleotide
uaauauaccccuucgaagg

SEQ ID NO: 338434 - RNA, 19 nt, Artificial Sequence
  Description of Artificial Sequence: Synthetic oligonucleotide
auagcugaaacuuuauggc

SEQ ID NO: 338435 - RNA, 19 nt, Artificial Sequence
  Description of Artificial Sequence: Synthetic oligonucleotide
uguagauuagaccccaagg

SEQ ID NO: 338436 - RNA, 19 nt, Artificial Sequence
  Description of Artificial Sequence: Synthetic oligonucleotide
auugcguucaaagagacag

SEQ ID NO: 338437 - RNA, 19 nt, Artificial Sequence
  Description of Artificial Sequence: Synthetic oligonucleotide
aauaaucaccccagaaucc

SEQ ID NO: 338438 - RNA, 19 nt, Artificial Sequence
  Description of Artificial Sequence: Synthetic oligonucleotide
uggagauuggaccaaauga

SEQ ID NO: 338439 - RNA, 19 nt, Artificial Sequence
  Description of Artificial Sequence: Synthetic oligonucleotide
ugaguaauauaccccuucg

SEQ ID NO: 338440 - RNA, 19 nt, Artificial Sequence
  Description of Artificial Sequence: Synthetic oligonucleotide
  modified_base (5)..(5): a, c, u, g, unknown or other
auggnguugaugcagcugg

SEQ ID NO: 338441 - RNA, 19 nt, Artificial Sequence
  Description of Artificial Sequence: Synthetic oligonucleotide
aucaguuaggcugaggagc

SEQ ID NO: 338442 - RNA, 19 nt, Artificial Sequence
  Description of Artificial Sequence: Synthetic oligonucleotide
uacacuuccaugcagucca

SEQ ID NO: 338443 - RNA, 19 nt, Artificial Sequence
  Description of Artificial Sequence: Synthetic oligonucleotide
aguuaucaggcccaggagg

SEQ ID NO: 338444 - RNA, 19 nt, Artificial Sequence
  Description of Artificial Sequence: Synthetic oligonucleotide
ucaauaaucaccccagaau

SEQ ID NO: 338445 - RNA, 19 nt, Artificial Sequence
  Description of Artificial Sequence: Synthetic oligonucleotide
aacuuuauggcaaugugcu

SEQ ID NO: 338446 - RNA, 19 nt, Artificial Sequence
  Description of Artificial Sequence: Synthetic oligonucleotide
acucgaguacccuuguacc

SEQ ID NO: 338447 - RNA, 19 nt, Artificial Sequence
  Description of Artificial Sequence: Synthetic oligonucleotide
guaauauaccccuucgaag

SEQ ID NO: 338448 - RNA, 19 nt, Artificial Sequence
  Description of Artificial Sequence: Synthetic oligonucleotide
gaaacuuuauggcaaugug

SEQ ID NO: 338449 - RNA, 19 nt, Artificial Sequence
  Description of Artificial Sequence: Synthetic oligonucleotide
ggagaagcagaauacaccg

SEQ ID NO: 338450 - RNA, 19 nt, Artificial Sequence
  Description of Artificial Sequence: Synthetic oligonucleotide
acauuugaaagaccccagc

SEQ ID NO: 338451 - RNA, 19 nt, Artificial Sequence
  Description of Artificial Sequence: Synthetic oligonucleotide
caauaaucaccccagaauc

SEQ ID NO: 338452 - RNA, 19 nt, Artificial Sequence
  Description of Artificial Sequence: Synthetic oligonucleotide
cagacgacaguuaucaggc

SEQ ID NO: 338453 - RNA, 19 nt, Artificial Sequence
  Description of Artificial Sequence: Synthetic oligonucleotide
cauuugaaagaccccagcg

SEQ ID NO: 338454 - RNA, 19 nt, Artificial Sequence
  Description of Artificial Sequence: Synthetic oligonucleotide
uuaggauuggguaccagac

SEQ ID NO: 338455 - RNA, 19 nt, Artificial Sequence
  Description of Artificial Sequence: Synthetic oligonucleotide
acccuuguacccuugacgg

SEQ ID NO: 338456 - RNA, 19 nt, Artificial Sequence
  Description of Artificial Sequence: Synthetic oligonucleotide
aguaauauaccccuucgaa

SEQ ID NO: 338457 - RNA, 19 nt, Artificial Sequence
  Description of Artificial Sequence: Synthetic oligonucleotide
ucguaccugaguaauauac

SEQ ID NO: 338458 - RNA, 19 nt, Artificial Sequence
  Description of Artificial Sequence: Synthetic oligonucleotide
ugucuugucacgccaaccc

SEQ ID NO: 338459 - RNA, 19 nt, Artificial Sequence
  Description of Artificial Sequence: Synthetic oligonucleotide
aggagcuguagauuagacc

SEQ ID NO: 338460 - RNA, 19 nt, Artificial Sequence
  Description of Artificial Sequence: Synthetic oligonucleotide
uguccaauccauuagggau

SEQ ID NO: 338461 - RNA, 19 nt, Artificial Sequence
  Description of Artificial Sequence: Synthetic oligonucleotide
uuuccggacacacauccag

SEQ ID NO: 338462 - RNA, 19 nt, Artificial Sequence
  Description of Artificial Sequence: Synthetic oligonucleotide
uuguuauccaugcagggaa

SEQ ID NO: 338463 - RNA, 19 nt, Artificial Sequence
  Description of Artificial Sequence: Synthetic oligonucleotide
ugugucguugcaucgauac

SEQ ID NO: 338464 - RNA, 19 nt, Artificial Sequence
  Description of Artificial Sequence: Synthetic oligonucleotide
uaggauugcucauuucagg

SEQ ID NO: 338465 - RNA, 19 nt, Artificial Sequence
  Description of Artificial Sequence: Synthetic oligonucleotide
acaguuaucaggcccagga

SEQ ID NO: 338466 - RNA, 19 nt, Artificial Sequence
  Description of Artificial Sequence: Synthetic oligonucleotide
aacauugggacaguuguca

SEQ ID NO: 338467 - RNA, 19 nt, Artificial Sequence
  Description of Artificial Sequence: Synthetic oligonucleotide
gaaaccgcacaccugacac

SEQ ID NO: 338468 - RNA, 19 nt, Artificial Sequence
  Description of Artificial Sequence: Synthetic oligonucleotide
gacgugucaauaaucaccc

SEQ ID NO: 338469 - RNA, 19 nt, Artificial Sequence
  Description of Artificial Sequence: Synthetic oligonucleotide
auuugaaagaccccagcgu

SEQ ID NO: 338470 - RNA, 19 nt, Artificial Sequence
  Description of Artificial Sequence: Synthetic oligonucleotide
auaaucaccccagaauccg

SEQ ID NO: 338471 - RNA, 19 nt, Artificial Sequence
  Description of Artificial Sequence: Synthetic oligonucleotide
uuccacaugaccacguaga

SEQ ID NO: 338472 - RNA, 19 nt, Artificial Sequence
  Description of Artificial Sequence: Synthetic oligonucleotide
ugucguugcaucgauacug

SEQ ID NO: 338473 - RNA, 19 nt, Artificial Sequence
  Description of Artificial Sequence: Synthetic oligonucleotide
acagcgguagccuggguac

SEQ ID NO: 338474 - RNA, 19 nt, Artificial Sequence
  Description of Artificial Sequence: Synthetic oligonucleotide
auuaggauuggguaccaga

SEQ ID NO: 338475 - RNA, 19 nt, Artificial Sequence
  Description of Artificial Sequence: Synthetic oligonucleotide
accguguucacguggaaag

SEQ ID NO: 338476 - RNA, 19 nt, Artificial Sequence
  Description of Artificial Sequence: Synthetic oligonucleotide
uauaccccuucgaaggucc

SEQ ID NO: 338477 - RNA, 19 nt, Artificial Sequence
  Description of Artificial Sequence: Synthetic oligonucleotide
ucagugaccguguucacgu

SEQ ID NO: 338478 - RNA, 19 nt, Artificial Sequence
  Description of Artificial Sequence: Synthetic oligonucleotide
aauauaccccuucgaaggu

SEQ ID NO: 338479 - RNA, 19 nt, Artificial Sequence
  Description of Artificial Sequence: Synthetic oligonucleotide
guugcaucgauacuggaga

SEQ ID NO: 338480 - RNA, 19 nt, Artificial Sequence
  Description of Artificial Sequence: Synthetic oligonucleotide
uucggaggugcucaccugg

SEQ ID NO: 338481 - RNA, 19 nt, Artificial Sequence
  Description of Artificial Sequence: Synthetic oligonucleotide
gacgacaguuaucaggccc

SEQ ID NO: 338482 - RNA, 19 nt, Artificial Sequence
  Description of Artificial Sequence: Synthetic oligonucleotide
cuugggagaagcagaauac

SEQ ID NO: 338483 - RNA, 19 nt, Artificial Sequence
  Description of Artificial Sequence: Synthetic oligonucleotide
uaccagacgacaguuauca

SEQ ID NO: 338484 - RNA, 19 nt, Artificial Sequence
  Description of Artificial Sequence: Synthetic oligonucleotide
guaacugaagaggaagccg

SEQ ID NO: 338485 - RNA, 19 nt, Artificial Sequence
  Description of Artificial Sequence: Synthetic oligonucleotide
ugaugggugccagagaacc

SEQ ID NO: 338486 - RNA, 19 nt, Artificial Sequence
  Description of Artificial Sequence: Synthetic oligonucleotide
caauccauuagggaugccg

SEQ ID NO: 338487 - RNA, 19 nt, Artificial Sequence
  Description of Artificial Sequence: Synthetic oligonucleotide
ucugauaggcccgaaaauc

SEQ ID NO: 338488 - RNA, 19 nt, Artificial Sequence
  Description of Artificial Sequence: Synthetic oligonucleotide
uaccugaguaauauacccc

SEQ ID NO: 338489 - RNA, 19 nt, Artificial Sequence
  Description of Artificial Sequence: Synthetic oligonucleotide
accugaguaauauaccccu

SEQ ID NO: 338490 - RNA, 19 nt, Artificial Sequence
  Description of Artificial Sequence: Synthetic oligonucleotide
  modified_base (2)..(2): a, c, u, g, unknown or other
gnguugaugcagcuggagc

SEQ ID NO: 338491 - RNA, 19 nt, Artificial Sequence
  Description of Artificial Sequence: Synthetic oligonucleotide
aguguuccggaugagggac

SEQ ID NO: 338492 - RNA, 19 nt, Artificial Sequence
  Description of Artificial Sequence: Synthetic oligonucleotide
uguucacguggaaagugcc

SEQ ID NO: 338493 - RNA, 19 nt, Artificial Sequence
  Description of Artificial Sequence: Synthetic oligonucleotide
uagcugaaacuuuauggca

SEQ ID NO: 338494 - RNA, 19 nt, Artificial Sequence
  Description of Artificial Sequence: Synthetic oligonucleotide
accauugaaggccguguac

SEQ ID NO: 338495 - RNA, 19 nt, Artificial Sequence
  Description of Artificial Sequence: Synthetic oligonucleotide
aggccguguacccaacugc

SEQ ID NO: 338496 - RNA, 19 nt, Artificial Sequence
  Description of Artificial Sequence: Synthetic oligonucleotide
agucguaccugaucagggg

SEQ ID NO: 338497 - RNA, 19 nt, Artificial Sequence
  Description of Artificial Sequence: Synthetic oligonucleotide
ugauaggcccgaaaaucug

SEQ ID NO: 338498 - RNA, 19 nt, Artificial Sequence
  Description of Artificial Sequence: Synthetic oligonucleotide
ugaggguaacuucugcacu

SEQ ID NO: 338499 - RNA, 19 nt, Artificial Sequence
  Description of Artificial Sequence: Synthetic oligonucleotide
aauccauuagggaugccgu

SEQ ID NO: 338500 - RNA, 19 nt, Artificial Sequence
  Description of Artificial Sequence: Synthetic oligonucleotide
cacgccaacccacauuucg

SEQ ID NO: 338501 - RNA, 19 nt, Artificial Sequence
  Description of Artificial Sequence: Synthetic oligonucleotide
agucugauaggcccgaaaa

SEQ ID NO: 338502 - RNA, 19 nt, Artificial Sequence
  Description of Artificial Sequence: Synthetic oligonucleotide
agaauacaccgagacgccc

SEQ ID NO: 338503 - RNA, 19 nt, Artificial Sequence
  Description of Artificial Sequence: Synthetic oligonucleotide
agauuagaccccaaggucu

SEQ ID NO: 338504 - RNA, 19 nt, Artificial Sequence
  Description of Artificial Sequence: Synthetic oligonucleotide
ugcguucaaagagacagug

SEQ ID NO: 338505 - RNA, 19 nt, Artificial Sequence
  Description of Artificial Sequence: Synthetic oligonucleotide
auuucggaggugcucaccu

SEQ ID NO: 338506 - RNA, 19 nt, Artificial Sequence
  Description of Artificial Sequence: Synthetic oligonucleotide
guagccuggguacucauac

SEQ ID NO: 338507 - RNA, 19 nt, Artificial Sequence
  Description of Artificial Sequence: Synthetic oligonucleotide
aaggccguguacccaacug

SEQ ID NO: 338508 - RNA, 19 nt, Artificial Sequence
  Description of Artificial Sequence: Synthetic oligonucleotide
cuauuuggcagcugaggac

SEQ ID NO: 338509 - RNA, 19 nt, Artificial Sequence
  Description of Artificial Sequence: Synthetic oligonucleotide
uccggacacacauccagag

SEQ ID NO: 338510 - RNA, 19 nt, Artificial Sequence
  Description of Artificial Sequence: Synthetic oligonucleotide
acuuuagggcaauugucca

SEQ ID NO: 338511 - RNA, 19 nt, Artificial Sequence
  Description of Artificial Sequence: Synthetic oligonucleotide
gagauuggaccaaaugaug

SEQ ID NO: 338512 - RNA, 19 nt, Artificial Sequence
  Description of Artificial Sequence: Synthetic oligonucleotide
guccugguaacugaagagg

SEQ ID NO: 338513 - RNA, 19 nt, Artificial Sequence
  Description of Artificial Sequence: Synthetic oligonucleotide
aggcccgaaaaucugugag

SEQ ID NO: 338514 - RNA, 19 nt, Artificial Sequence
  Description of Artificial Sequence: Synthetic oligonucleotide
guagauuagaccccaaggu

SEQ ID NO: 338515 - RNA, 19 nt, Artificial Sequence
  Description of Artificial Sequence: Synthetic oligonucleotide
gaauccgccacuagcuggg

SEQ ID NO: 338516 - RNA, 19 nt, Artificial Sequence
  Description of Artificial Sequence: Synthetic oligonucleotide
cauugaaggccguguaccc

SEQ ID NO: 338517 - RNA, 19 nt, Artificial Sequence
  Description of Artificial Sequence: Synthetic oligonucleotide
agauuggaccaaaugaugu

SEQ ID NO: 338518 - RNA, 19 nt, Artificial Sequence
  Description of Artificial Sequence: Synthetic oligonucleotide
ucguggaaaccgcacaccu

SEQ ID NO: 338519 - RNA, 19 nt, Artificial Sequence
  Description of Artificial Sequence: Synthetic oligonucleotide
uccauuagggaugccgucc

SEQ ID NO: 338520 - RNA, 19 nt, Artificial Sequence
  Description of Artificial Sequence: Synthetic oligonucleotide
gugucaauaaucaccccag

SEQ ID NO: 338521 - RNA, 19 nt, Artificial Sequence
  Description of Artificial Sequence: Synthetic oligonucleotide
cagucguaccugaucaggg

SEQ ID NO: 338522 - RNA, 19 nt, Artificial Sequence
  Description of Artificial Sequence: Synthetic oligonucleotide
uaaccgucgaugucggugu

SEQ ID NO: 338523 - RNA, 19 nt, Artificial Sequence
  Description of Artificial Sequence: Synthetic oligonucleotide
gccaguaugccacagagca

SEQ ID NO: 338524 - RNA, 19 nt, Artificial Sequence
  Description of Artificial Sequence: Synthetic oligonucleotide
gaauacaccgagacgcccc

SEQ ID NO: 338525 - RNA, 19 nt, Artificial Sequence
  Description of Artificial Sequence: Synthetic oligonucleotide
auaaucugggaugccauca

SEQ ID NO: 338526 - RNA, 19 nt, Artificial Sequence
  Description of Artificial Sequence: Synthetic oligonucleotide
ccagacgacaguuaucagg

SEQ ID NO: 338527 - RNA, 19 nt, Artificial Sequence
  Description of Artificial Sequence: Synthetic oligonucleotide
cacucgaguacccuuguac

SEQ ID NO: 338528 - RNA, 19 nt, Artificial Sequence
  Description of Artificial Sequence: Synthetic oligonucleotide
ugcagaccugcuuacuggc

SEQ ID NO: 338529 - RNA, 19 nt, Artificial Sequence
  Description of Artificial Sequence: Synthetic oligonucleotide
cugaguaauauaccccuuc

SEQ ID NO: 338530 - RNA, 19 nt, Artificial Sequence
  Description of Artificial Sequence: Synthetic oligonucleotide
auagagcuucacccgaaug

SEQ ID NO: 338531 - RNA, 19 nt, Artificial Sequence
  Description of Artificial Sequence: Synthetic oligonucleotide
uccacaucguugucacagg

SEQ ID NO: 338532 - RNA, 19 nt, Artificial Sequence
  Description of Artificial Sequence: Synthetic oligonucleotide
ugucaauaaucaccccaga

SEQ ID NO: 338533 - RNA, 19 nt, Artificial Sequence
  Description of Artificial Sequence: Synthetic oligonucleotide
cuguagauuagaccccaag

SEQ ID NO: 338534 - RNA, 19 nt, Artificial Sequence
  Description of Artificial Sequence: Synthetic oligonucleotide
cuuucugauuaggauuggg

SEQ ID NO: 338535 - RNA, 19 nt, Artificial Sequence
  Description of Artificial Sequence: Synthetic oligonucleotide
ggaacauaaucugggaugc

SEQ ID NO: 338536 - RNA, 19 nt, Artificial Sequence
  Description of Artificial Sequence: Synthetic oligonucleotide
gugaggguaacuucugcac

SEQ ID NO: 338537 - RNA, 19 nt, Artificial Sequence
  Description of Artificial Sequence: Synthetic oligonucleotide
guaaccgucgaugucggug

SEQ ID NO: 338538 - RNA, 19 nt, Artificial Sequence
  Description of Artificial Sequence: Synthetic oligonucleotide
gugccguucgcccugcagg

SEQ ID NO: 338539 - RNA, 19 nt, Artificial Sequence
  Description of Artificial Sequence: Synthetic oligonucleotide
ggacgugucaauaaucacc

SEQ ID NO: 338540 - RNA, 19 nt, Artificial Sequence
  Description of Artificial Sequence: Synthetic oligonucleotide
cauggacgugucaauaauc

SEQ ID NO: 338541 - RNA, 19 nt, Artificial Sequence
  Description of Artificial Sequence: Synthetic oligonucleotide
gaguaauauaccccuucga

SEQ ID NO: 338542 - RNA, 19 nt, Artificial Sequence
  Description of Artificial Sequence: Synthetic oligonucleotide
agcacuacccaguuuggau

SEQ ID NO: 338543 - RNA, 19 nt, Artificial Sequence
  Description of Artificial Sequence: Synthetic oligonucleotide
augucuugucacgccaacc

SEQ ID NO: 338544 - RNA, 19 nt, Artificial Sequence
  Description of Artificial Sequence: Synthetic oligonucleotide
cagagcauuucggaggugc

SEQ ID NO: 338545 - RNA, 19 nt, Artificial Sequence
  Description of Artificial Sequence: Synthetic oligonucleotide
cagaauacaccgagacgcc

SEQ ID NO: 338546 - RNA, 19 nt, Artificial Sequence
  Description of Artificial Sequence: Synthetic oligonucleotide
auggacgugucaauaauca

SEQ ID NO: 338547 - RNA, 19 nt, Artificial Sequence
  Description of Artificial Sequence: Synthetic oligonucleotide
auccauuagggaugccguc

SEQ ID NO: 338548 - RNA, 19 nt, Artificial Sequence
  Description of Artificial Sequence: Synthetic oligonucleotide
guaaauagcugaaacuuua

SEQ ID NO: 338549 - RNA, 19 nt, Artificial Sequence
  Description of Artificial Sequence: Synthetic oligonucleotide
ugcucguggaaaccgcaca

SEQ ID NO: 338550 - RNA, 19 nt, Artificial Sequence
  Description of Artificial Sequence: Synthetic oligonucleotide
agaccugcuuacuggcccg

SEQ ID NO: 338551 - RNA, 19 nt, Artificial Sequence
  Description of Artificial Sequence: Synthetic oligonucleotide
uucacccgaauguagccaa

SEQ ID NO: 338552 - RNA, 19 nt, Artificial Sequence
  Description of Artificial Sequence: Synthetic oligonucleotide
uccaauccauuagggaugc

SEQ ID NO: 338553 - RNA, 19 nt, Artificial Sequence
  Description of Artificial Sequence: Synthetic oligonucleotide
accgcaucauuaucaaagu

SEQ ID NO: 338554 - RNA, 19 nt, Artificial Sequence
  Description of Artificial Sequence: Synthetic oligonucleotide
gucaauaaucaccccagaa

SEQ ID NO: 338555 - RNA, 19 nt, Artificial Sequence
  Description of Artificial Sequence: Synthetic oligonucleotide
accugaucagggguguggc

SEQ ID NO: 338556 - RNA, 19 nt, Artificial Sequence
  Description of Artificial Sequence: Synthetic oligonucleotide
cauugucugaguccagcug

SEQ ID NO: 338557 - RNA, 19 nt, Artificial Sequence
  Description of Artificial Sequence: Synthetic oligonucleotide
ugucauugcagaccugcuu

SEQ ID NO: 338558 - RNA, 19 nt, Artificial Sequence
  Description of Artificial Sequence: Synthetic oligonucleotide
ucgugggucaguccacagc

SEQ ID NO: 338559 - RNA, 19 nt, Artificial Sequence
  Description of Artificial Sequence: Synthetic oligonucleotide
guggcggcaccucacaccc

SEQ ID NO: 338560 - RNA, 19 nt, Artificial Sequence
  Description of Artificial Sequence: Synthetic oligonucleotide
ucaaagagacagugagcgu

SEQ ID NO: 338561 - RNA, 19 nt, Artificial Sequence
  Description of Artificial Sequence: Synthetic oligonucleotide
uccgccacuagcuggggac

SEQ ID NO: 338562 - RNA, 19 nt, Artificial Sequence
  Description of Artificial Sequence: Synthetic oligonucleotide
acacucguugaugucauca

SEQ ID NO: 338563 - RNA, 19 nt, Artificial Sequence
  Description of Artificial Sequence: Synthetic oligonucleotide
augccgacaccagacacuc

SEQ ID NO: 338564 - RNA, 19 nt, Artificial Sequence
  Description of Artificial Sequence: Synthetic oligonucleotide
agcauuucggaggugcuca

SEQ ID NO: 338565 - RNA, 19 nt, Artificial Sequence
  Description of Artificial Sequence: Synthetic oligonucleotide
uaaucugggaugccaucau

SEQ ID NO: 338566 - RNA, 19 nt, Artificial Sequence
  Description of Artificial Sequence: Synthetic oligonucleotide
gaaaggcguggccugccag

SEQ ID NO: 338567 - RNA, 19 nt, Artificial Sequence
  Description of Artificial Sequence: Synthetic oligonucleotide
acgugucaauaaucacccc

SEQ ID NO: 338568 - RNA, 19 nt, Artificial Sequence
  Description of Artificial Sequence: Synthetic oligonucleotide
auauaccccuucgaagguc

SEQ ID NO: 338569 - RNA, 19 nt, Artificial Sequence
  Description of Artificial Sequence: Synthetic oligonucleotide
uggacgugucaauaaucac

SEQ ID NO: 338570 - RNA, 19 nt, Artificial Sequence
  Description of Artificial Sequence: Synthetic oligonucleotide
guuaucaggcccaggagga

SEQ ID NO: 338571 - RNA, 19 nt, Artificial Sequence
  Description of Artificial Sequence: Synthetic oligonucleotide
aucgucacacuggucuccc

SEQ ID NO: 338572 - RNA, 19 nt, Artificial Sequence
  Description of Artificial Sequence: Synthetic oligonucleotide
gucauugcagaccugcuua

SEQ ID NO: 338573 - RNA, 19 nt, Artificial Sequence
  Description of Artificial Sequence: Synthetic oligonucleotide
gaagccggcguagucauca

SEQ ID NO: 338574 - RNA, 19 nt, Artificial Sequence
  Description of Artificial Sequence: Synthetic oligonucleotide
aggcaucaccaaaugaauc

SEQ ID NO: 338575 - RNA, 19 nt, Artificial Sequence
  Description of Artificial Sequence: Synthetic oligonucleotide
uccggguaaccgucgaugu

SEQ ID NO: 338576 - RNA, 19 nt, Artificial Sequence
  Description of Artificial Sequence: Synthetic oligonucleotide
agggucaaccaccgcauca

SEQ ID NO: 338577 - RNA, 19 nt, Artificial Sequence
  Description of Artificial Sequence: Synthetic oligonucleotide
cgauacuggagauuggacc

SEQ ID NO: 338578 - RNA, 19 nt, Artificial Sequence
  Description of Artificial Sequence: Synthetic oligonucleotide
auuagaccccaaggucucc

SEQ ID NO: 338579 - RNA, 19 nt, Artificial Sequence
  Description of Artificial Sequence: Synthetic oligonucleotide
gauuggguaccagacgaca

SEQ ID NO: 338580 - RNA, 19 nt, Artificial Sequence
  Description of Artificial Sequence: Synthetic oligonucleotide
ucgaguacccuuguacccu

SEQ ID NO: 338581 - RNA, 19 nt, Artificial Sequence
  Description of Artificial Sequence: Synthetic oligonucleotide
uuaggcugaggagcuguag

SEQ ID NO: 338582 - RNA, 19 nt, Artificial Sequence
  Description of Artificial Sequence: Synthetic oligonucleotide
uacccaacugcaagaccug

SEQ ID NO: 338583 - RNA, 19 nt, Artificial Sequence
  Description of Artificial Sequence: Synthetic oligonucleotide
ggauugcucauuucagggc

SEQ ID NO: 338584 - RNA, 19 nt, Artificial Sequence
  Description of Artificial Sequence: Synthetic oligonucleotide
cuuugguguccugaugccc

SEQ ID NO: 338585 - RNA, 19 nt, Artificial Sequence
  Description of Artificial Sequence: Synthetic oligonucleotide
aacccacauuucguggguc

SEQ ID NO: 338586 - RNA, 19 nt, Artificial Sequence
  Description of Artificial Sequence: Synthetic oligonucleotide
cagagggucaaccaccgca

SEQ ID NO: 338587 - RNA, 19 nt, Artificial Sequence
  Description of Artificial Sequence: Synthetic oligonucleotide
  modified_base (9)..(9): a, c, u, g, unknown or other
aggcauggnguugaugcag

SEQ ID NO: 338588 - RNA, 19 nt, Artificial Sequence
  Description of Artificial Sequence: Synthetic oligonucleotide
caguuaucaggcccaggag

SEQ ID NO: 338589 - RNA, 19 nt, Artificial Sequence
  Description of Artificial Sequence: Synthetic oligonucleotide
accauugcguucaaagaga

SEQ ID NO: 338590 - RNA, 19 nt, Artificial Sequence
  Description of Artificial Sequence: Synthetic oligonucleotide
gaacgcugcucguggaaac

SEQ ID NO: 338591 - RNA, 19 nt, Artificial Sequence
  Description of Artificial Sequence: Synthetic oligonucleotide
agcugaaacuuuauggcaa

SEQ ID NO: 338592 - RNA, 19 nt, Artificial Sequence
  Description of Artificial Sequence: Synthetic oligonucleotide
  modified_base (4)..(4): a, c, u, g, unknown or other
uggnguugaugcagcugga

SEQ ID NO: 338593 - RNA, 19 nt, Artificial Sequence
  Description of Artificial Sequence: Synthetic oligonucleotide
uguagccaacuuggggccg

SEQ ID NO: 338594 - RNA, 19 nt, Artificial Sequence
  Description of Artificial Sequence: Synthetic oligonucleotide
guguucacguggaaagugc

SEQ ID NO: 338595 - RNA, 19 nt, Artificial Sequence
  Description of Artificial Sequence: Synthetic oligonucleotide
gcccgaaaaucugugaggg

SEQ ID NO: 338596 - RNA, 19 nt, Artificial Sequence
  Description of Artificial Sequence: Synthetic oligonucleotide
caccagacacucgaguacc

SEQ ID NO: 338597 - RNA, 19 nt, Artificial Sequence
  Description of Artificial Sequence: Synthetic oligonucleotide
ggcccgaaaaucugugagg

SEQ ID NO: 338598 - RNA, 19 nt, Artificial Sequence
  Description of Artificial Sequence: Synthetic oligonucleotide
ugccguucgcccugcaggc

SEQ ID NO: 338599 - RNA, 19 nt, Artificial Sequence
  Description of Artificial Sequence: Synthetic oligonucleotide
gagucuuucugauuaggau

SEQ ID NO: 338600 - RNA, 19 nt, Artificial Sequence
  Description of Artificial Sequence: Synthetic oligonucleotide
ugcucggaaaggcguggcc

SEQ ID NO: 338601 - RNA, 19 nt, Artificial Sequence
  Description of Artificial Sequence: Synthetic oligonucleotide
auuucgugggucaguccac

SEQ ID NO: 338602 - RNA, 19 nt, Artificial Sequence
  Description of Artificial Sequence: Synthetic oligonucleotide
uacuggcccgagcauaguc

SEQ ID NO: 338603 - RNA, 19 nt, Artificial Sequence
  Description of Artificial Sequence: Synthetic oligonucleotide
agacagugagcguggacau

SEQ ID NO: 338604 - RNA, 19 nt, Artificial Sequence
  Description of Artificial Sequence: Synthetic oligonucleotide
gcauagucgaugccgacac

SEQ ID NO: 338605 - RNA, 19 nt, Artificial Sequence
  Description of Artificial Sequence: Synthetic oligonucleotide
ccaucuauaggaugucuug

SEQ ID NO: 338606 - RNA, 19 nt, Artificial Sequence
  Description of Artificial Sequence: Synthetic oligonucleotide
gauuaggauuggguaccag

SEQ ID NO: 338607 - RNA, 19 nt, Artificial Sequence
  Description of Artificial Sequence: Synthetic oligonucleotide
ggguuggguacuuuagggc

SEQ ID NO: 338608 - RNA, 19 nt, Artificial Sequence
  Description of Artificial Sequence: Synthetic oligonucleotide
uuucggaggugcucaccug

SEQ ID NO: 338609 - RNA, 19 nt, Artificial Sequence
  Description of Artificial Sequence: Synthetic oligonucleotide
uaggcccgaaaaucuguga

SEQ ID NO: 338610 - RNA, 19 nt, Artificial Sequence
  Description of Artificial Sequence: Synthetic oligonucleotide
guacccaacugcaagaccu

SEQ ID NO: 338611 - RNA, 19 nt, Artificial Sequence
  Description of Artificial Sequence: Synthetic oligonucleotide
agcauagucgaugccgaca

SEQ ID NO: 338612 - RNA, 19 nt, Artificial Sequence
  Description of Artificial Sequence: Synthetic oligonucleotide
ggcaucaccaaaugaaucu

SEQ ID NO: 338613 - RNA, 19 nt, Artificial Sequence
  Description of Artificial Sequence: Synthetic oligonucleotide
uucgugggucaguccacag

SEQ ID NO: 338614 - RNA, 19 nt, Artificial Sequence
  Description of Artificial Sequence: Synthetic oligonucleotide
aaccgucgaugucgguguc

SEQ ID NO: 338615 - RNA, 19 nt, Artificial Sequence
  Description of Artificial Sequence: Synthetic oligonucleotide
cacauuucgugggucaguc

SEQ ID NO: 338616 - RNA, 19 nt, Artificial Sequence
  Description of Artificial Sequence: Synthetic oligonucleotide
gagcuguagauuagacccc

SEQ ID NO: 338617 - RNA, 19 nt, Artificial Sequence
  Description of Artificial Sequence: Synthetic oligonucleotide
auaccauccccaucagcau

SEQ ID NO: 338618 - RNA, 19 nt, Artificial Sequence
  Description of Artificial Sequence: Synthetic oligonucleotide
gaacauaaucugggaugcc

SEQ ID NO: 338619 - RNA, 19 nt, Artificial Sequence
  Description of Artificial Sequence: Synthetic oligonucleotide
cugauaggcccgaaaaucu

SEQ ID NO: 338620 - RNA, 19 nt, Artificial Sequence
  Description of Artificial Sequence: Synthetic oligonucleotide
cacuacccaguuuggauca

SEQ ID NO: 338621 - RNA, 19 nt, Artificial Sequence
  Description of Artificial Sequence: Synthetic oligonucleotide
cagaauccgccacuagcug

SEQ ID NO: 338622 - RNA, 19 nt, Artificial Sequence
  Description of Artificial Sequence: Synthetic oligonucleotide
agacacucgaguacccuug

SEQ ID NO: 338623 - RNA, 19 nt, Artificial Sequence
  Description of Artificial Sequence: Synthetic oligonucleotide
ugucacgccaacccacauu

SEQ ID NO: 338624 - RNA, 19 nt, Artificial Sequence
  Description of Artificial Sequence: Synthetic oligonucleotide
  modified_base (6)..(6): a, c, u, g, unknown or other
cauggnguugaugcagcug

SEQ ID NO: 338625 - RNA, 19 nt, Artificial Sequence
  Description of Artificial Sequence: Synthetic oligonucleotide
acgacaguuaucaggccca

SEQ ID NO: 338626 - RNA, 19 nt, Artificial Sequence
  Description of Artificial Sequence: Synthetic oligonucleotide
augccacagagcauuucgg

SEQ ID NO: 338627 - RNA, 19 nt, Artificial Sequence
  Description of Artificial Sequence: Synthetic oligonucleotide
accaccgcaucauuaucaa

SEQ ID NO: 338628 - RNA, 19 nt, Artificial Sequence
  Description of Artificial Sequence: Synthetic oligonucleotide
gacaguuaucaggcccagg

SEQ ID NO: 338629 - RNA, 19 nt, Artificial Sequence
  Description of Artificial Sequence: Synthetic oligonucleotide
caccucacacccuucccug

SEQ ID NO: 338630 - RNA, 19 nt, Artificial Sequence
  Description of Artificial Sequence: Synthetic oligonucleotide
ugagagcuauuuggcagcu

SEQ ID NO: 338631 - RNA, 19 nt, Artificial Sequence
  Description of Artificial Sequence: Synthetic oligonucleotide
auaggcccgaaaaucugug

SEQ ID NO: 338632 - RNA, 19 nt, Artificial Sequence
  Description of Artificial Sequence: Synthetic oligonucleotide
gccaacccacauuucgugg

SEQ ID NO: 338633 - RNA, 19 nt, Artificial Sequence
  Description of Artificial Sequence: Synthetic oligonucleotide
cacauugcacuggcaagag

SEQ ID NO: 338634 - RNA, 19 nt, Artificial Sequence
  Description of Artificial Sequence: Synthetic oligonucleotide
uugcaucgauacuggagau

SEQ ID NO: 338635 - RNA, 19 nt, Artificial Sequence
  Description of Artificial Sequence: Synthetic oligonucleotide
gaacauugggacaguuguc

SEQ ID NO: 338636 - RNA, 19 nt, Artificial Sequence
  Description of Artificial Sequence: Synthetic oligonucleotide
ccgagcauagucgaugccg

SEQ ID NO: 338637 - RNA, 19 nt, Artificial Sequence
  Description of Artificial Sequence: Synthetic oligonucleotide
accagacacucgaguaccc

SEQ ID NO: 338638 - RNA, 19 nt, Artificial Sequence
  Description of Artificial Sequence: Synthetic oligonucleotide
ccaucaguuaggcugagga

SEQ ID NO: 338639 - RNA, 19 nt, Artificial Sequence
  Description of Artificial Sequence: Synthetic oligonucleotide
acauaaucugggaugccau

SEQ ID NO: 338640 - RNA, 19 nt, Artificial Sequence
  Description of Artificial Sequence: Synthetic oligonucleotide
uucguaccugaguaauaua

SEQ ID NO: 338641 - RNA, 19 nt, Artificial Sequence
  Description of Artificial Sequence: Synthetic oligonucleotide
cuugucacgccaacccaca

SEQ ID NO: 338642 - RNA, 19 nt, Artificial Sequence
  Description of Artificial Sequence: Synthetic oligonucleotide
ccacauacguucccguucc

SEQ ID NO: 338643 - RNA, 19 nt, Artificial Sequence
  Description of Artificial Sequence: Synthetic oligonucleotide
ggugccagagaaccaucag

SEQ ID NO: 338644 - RNA, 19 nt, Artificial Sequence
  Description of Artificial Sequence: Synthetic oligonucleotide
cucguggaaaccgcacacc

SEQ ID NO: 338645 - RNA, 19 nt, Artificial Sequence
  Description of Artificial Sequence: Synthetic oligonucleotide
ccuuguacccuugacgggc

SEQ ID NO: 338646 - RNA, 19 nt, Artificial Sequence
  Description of Artificial Sequence: Synthetic oligonucleotide
ugccaucuauaggaugucu

SEQ ID NO: 338647 - RNA, 19 nt, Artificial Sequence
  Description of Artificial Sequence: Synthetic oligonucleotide
guagccaacuuggggccgg

SEQ ID NO: 338648 - RNA, 19 nt, Artificial Sequence
  Description of Artificial Sequence: Synthetic oligonucleotide
accagacgacaguuaucag

SEQ ID NO: 338649 - RNA, 19 nt, Artificial Sequence
  Description of Artificial Sequence: Synthetic oligonucleotide
acgcugcucguggaaaccg

SEQ ID NO: 338650 - RNA, 19 nt, Artificial Sequence
  Description of Artificial Sequence: Synthetic oligonucleotide
gcaguugccuccggaaugg

SEQ ID NO: 338651 - RNA, 19 nt, Artificial Sequence
  Description of Artificial Sequence: Synthetic oligonucleotide
guacccuuguacccuugac

SEQ ID NO: 338652 - RNA, 19 nt, Artificial Sequence
  Description of Artificial Sequence: Synthetic oligonucleotide
aggcccacauacguucccg

SEQ ID NO: 338653 - RNA, 19 nt, Artificial Sequence
  Description of Artificial Sequence: Synthetic oligonucleotide
cauuagggaugccgucccc

SEQ ID NO: 338654 - RNA, 19 nt, Artificial Sequence
  Description of Artificial Sequence: Synthetic oligonucleotide
gauggaauuugggucacau

SEQ ID NO: 338655 - RNA, 19 nt, Artificial Sequence
  Description of Artificial Sequence: Synthetic oligonucleotide
guccggguaaccgucgaug

SEQ ID NO: 338656 - RNA, 19 nt, Artificial Sequence
  Description of Artificial Sequence: Synthetic oligonucleotide
ucguugcaucgauacugga

SEQ ID NO: 338657 - RNA, 19 nt, Artificial Sequence
  Description of Artificial Sequence: Synthetic oligonucleotide
agccggcguagucaucauc

SEQ ID NO: 338658 - RNA, 19 nt, Artificial Sequence
  Description of Artificial Sequence: Synthetic oligonucleotide
ucaguccacagcagucgua

SEQ ID NO: 338659 - RNA, 19 nt, Artificial Sequence
  Description of Artificial Sequence: Synthetic oligonucleotide
gagaagcagaauacaccga

SEQ ID NO: 338660 - RNA, 19 nt, Artificial Sequence
  Description of Artificial Sequence: Synthetic oligonucleotide
gauaggcccgaaaaucugu

SEQ ID NO: 338661 - RNA, 19 nt, Artificial Sequence
  Description of Artificial Sequence: Synthetic oligonucleotide
ccauugcguucaaagagac

SEQ ID NO: 338662 - RNA, 19 nt, Artificial Sequence
  Description of Artificial Sequence: Synthetic oligonucleotide
gagcauagucgaugccgac

SEQ ID NO: 338663 - RNA, 19 nt, Artificial Sequence
  Description of Artificial Sequence: Synthetic oligonucleotide
ggcaaugugcugaugaugu

SEQ ID NO: 338664 - RNA, 19 nt, Artificial Sequence
  Description of Artificial Sequence: Synthetic oligonucleotide
  modified_base (3)..(3): a, c, u, g, unknown or other
ggnguugaugcagcuggag

SEQ ID NO: 338665 - RNA, 19 nt, Artificial Sequence
  Description of Artificial Sequence: Synthetic oligonucleotide
gucgcugucugcaucuguc

SEQ ID NO: 338666 - RNA, 19 nt, Artificial Sequence
  Description of Artificial Sequence: Synthetic oligonucleotide
ugccgacaccagacacucg

SEQ ID NO: 338667 - RNA, 19 nt, Artificial Sequence
  Description of Artificial Sequence: Synthetic oligonucleotide
caaccaccgcaucauuauc

SEQ ID NO: 338668 - RNA, 19 nt, Artificial Sequence
  Description of Artificial Sequence: Synthetic oligonucleotide
guugggugucaaaaggcaa

SEQ ID NO: 338669 - RNA, 19 nt, Artificial Sequence
  Description of Artificial Sequence: Synthetic oligonucleotide
gccgacaccagacacucga

SEQ ID NO: 338670 - RNA, 19 nt, Artificial Sequence
  Description of Artificial Sequence: Synthetic oligonucleotide
agcgguagccuggguacuc

SEQ ID NO: 338671 - RNA, 19 nt, Artificial Sequence
  Description of Artificial Sequence: Synthetic oligonucleotide
agagggucaaccaccgcau

SEQ ID NO: 338672 - RNA, 19 nt, Artificial Sequence
  Description of Artificial Sequence: Synthetic oligonucleotide
ccguguacccaacugcaag

SEQ ID NO: 338673 - RNA, 19 nt, Artificial Sequence
  Description of Artificial Sequence: Synthetic oligonucleotide
uugucacgccaacccacau

SEQ ID NO: 338674 - RNA, 19 nt, Artificial Sequence
  Description of Artificial Sequence: Synthetic oligonucleotide
guucguaccugaguaauau

SEQ ID NO: 338675 - RNA, 19 nt, Artificial Sequence
  Description of Artificial Sequence: Synthetic oligonucleotide
cauugcguucaaagagaca

SEQ ID NO: 338676 - RNA, 19 nt, Artificial Sequence
  Description of Artificial Sequence: Synthetic oligonucleotide
cggguaaccgucgaugucg

SEQ ID NO: 338677 - RNA, 19 nt, Artificial Sequence
  Description of Artificial Sequence: Synthetic oligonucleotide
cacaccauugaaggccgug

SEQ ID NO: 338678 - RNA, 19 nt, Artificial Sequence
  Description of Artificial Sequence: Synthetic oligonucleotide
ggagauuggaccaaaugau

SEQ ID NO: 338679 - RNA, 19 nt, Artificial Sequence
  Description of Artificial Sequence: Synthetic oligonucleotide
augccguccccauccacau

SEQ ID NO: 338680 - RNA, 19 nt, Artificial Sequence
  Description of Artificial Sequence: Synthetic oligonucleotide
cacguagaagcggccacug

SEQ ID NO: 338681 - RNA, 19 nt, Artificial Sequence
  Description of Artificial Sequence: Synthetic oligonucleotide
uuaucaggcccaggaggaa

SEQ ID NO: 338682 - RNA, 19 nt, Artificial Sequence
  Description of Artificial Sequence: Synthetic oligonucleotide
gaugucggugucaggccca

SEQ ID NO: 338683 - RNA, 19 nt, Artificial Sequence
  Description of Artificial Sequence: Synthetic oligonucleotide
ccauuagggaugccguccc

SEQ ID NO: 338684 - RNA, 19 nt, Artificial Sequence
  Description of Artificial Sequence: Synthetic oligonucleotide
caguguuccggaugaggga

SEQ ID NO: 338685 - RNA, 19 nt, Artificial Sequence
  Description of Artificial Sequence: Synthetic oligonucleotide
gcccugauugagcacuacc

SEQ ID NO: 338686 - RNA, 19 nt, Artificial Sequence
  Description of Artificial Sequence: Synthetic oligonucleotide
gaugccgacaccagacacu

SEQ ID NO: 338687 - RNA, 19 nt, Artificial Sequence
  Description of Artificial Sequence: Synthetic oligonucleotide
ucgcauggacgugucaaua

SEQ ID NO: 338688 - RNA, 19 nt, Artificial Sequence
  Description of Artificial Sequence: Synthetic oligonucleotide
cacuuuccggacacacauc

SEQ ID NO: 338689 - RNA, 19 nt, Artificial Sequence
  Description of Artificial Sequence: Synthetic oligonucleotide
gcucguggaaaccgcacac

SEQ ID NO: 338690 - RNA, 19 nt, Artificial Sequence
  Description of Artificial Sequence: Synthetic oligonucleotide
agagcauuucggaggugcu

SEQ ID NO: 338691 - RNA, 19 nt, Artificial Sequence
  Description of Artificial Sequence: Synthetic oligonucleotide
cagucggcaauuguccuca

SEQ ID NO: 338692 - RNA, 19 nt, Artificial Sequence
  Description of Artificial Sequence: Synthetic oligonucleotide
caucagugaccguguucac

SEQ ID NO: 338693 - RNA, 19 nt, Artificial Sequence
  Description of Artificial Sequence: Synthetic oligonucleotide
gggacccucauagagcuuc

SEQ ID NO: 338694 - RNA, 19 nt, Artificial Sequence
  Description of Artificial Sequence: Synthetic oligonucleotide
caaugucauugcagaccug

SEQ ID NO: 338695 - RNA, 19 nt, Artificial Sequence
  Description of Artificial Sequence: Synthetic oligonucleotide
  modified_base (8)..(8): a, c, u, g, unknown or other
ggcauggnguugaugcagc

SEQ ID NO: 338696 - RNA, 19 nt, Artificial Sequence
  Description of Artificial Sequence: Synthetic oligonucleotide
ccccgucacacucaucucc

SEQ ID NO: 338697 - RNA, 19 nt, Artificial Sequence
  Description of Artificial Sequence: Synthetic oligonucleotide
ugaccguguucacguggaa

SEQ ID NO: 338698 - RNA, 19 nt, Artificial Sequence
  Description of Artificial Sequence: Synthetic oligonucleotide
cuuuccggacacacaucca

SEQ ID NO: 338699 - RNA, 19 nt, Artificial Sequence
  Description of Artificial Sequence: Synthetic oligonucleotide
gacacuccaugacaguguu

SEQ ID NO: 338700 - RNA, 19 nt, Artificial Sequence
  Description of Artificial Sequence: Synthetic oligonucleotide
caauuguccucaacauucu

SEQ ID NO: 338701 - RNA, 19 nt, Artificial Sequence
  Description of Artificial Sequence: Synthetic oligonucleotide
gaccguguucacguggaaa

SEQ ID NO: 338702 - RNA, 19 nt, Artificial Sequence
  Description of Artificial Sequence: Synthetic oligonucleotide
gugggugccguucgcccug

SEQ ID NO: 338703 - RNA, 19 nt, Artificial Sequence
  Description of Artificial Sequence: Synthetic oligonucleotide
ggagcugcgcucccugaug

SEQ ID NO: 338704 - RNA, 19 nt, Artificial Sequence
  Description of Artificial Sequence: Synthetic oligonucleotide
guuggguacuuuagggcaa

SEQ ID NO: 338705 - RNA, 19 nt, Artificial Sequence
  Description of Artificial Sequence: Synthetic oligonucleotide
ugacgggcagggccucaca

SEQ ID NO: 338706 - RNA, 19 nt, Artificial Sequence
  Description of Artificial Sequence: Synthetic oligonucleotide
caucuauaggaugucuugu

SEQ ID NO: 338707 - RNA, 19 nt, Artificial Sequence
  Description of Artificial Sequence: Synthetic oligonucleotide
gugaccguguucacgugga

SEQ ID NO: 338708 - RNA, 19 nt, Artificial Sequence
  Description of Artificial Sequence: Synthetic oligonucleotide
gggccagauacugauguca

SEQ ID NO: 338709 - RNA, 19 nt, Artificial Sequence
  Description of Artificial Sequence: Synthetic oligonucleotide
aaggcguggccugccagua

SEQ ID NO: 338710 - RNA, 19 nt, Artificial Sequence
  Description of Artificial Sequence: Synthetic oligonucleotide
acgccaacccacauuucgu

SEQ ID NO: 338711 - RNA, 19 nt, Artificial Sequence
  Description of Artificial Sequence: Synthetic oligonucleotide
cacauacguucccguuccc

SEQ ID NO: 338712 - RNA, 19 nt, Artificial Sequence
  Description of Artificial Sequence: Synthetic oligonucleotide
cacagcgguagccugggua

SEQ ID NO: 338713 - RNA, 19 nt, Artificial Sequence
  Description of Artificial Sequence: Synthetic oligonucleotide
acguggaaagugccuucaa

SEQ ID NO: 338714 - RNA, 19 nt, Artificial Sequence
  Description of Artificial Sequence: Synthetic oligonucleotide
gccggcguagucaucauca

SEQ ID NO: 338715 - RNA, 19 nt, Artificial Sequence
  Description of Artificial Sequence: Synthetic oligonucleotide
gucaaccaccgcaucauua

SEQ ID NO: 338716 - RNA, 19 nt, Artificial Sequence
  Description of Artificial Sequence: Synthetic oligonucleotide
gagagcuauuuggcagcug

SEQ ID NO: 338717 - RNA, 19 nt, Artificial Sequence
  Description of Artificial Sequence: Synthetic oligonucleotide
cccacauacguucccguuc

SEQ ID NO: 338718 - RNA, 19 nt, Artificial Sequence
  Description of Artificial Sequence: Synthetic oligonucleotide
acacuccaugacaguguuc

SEQ ID NO: 338719 - RNA, 19 nt, Artificial Sequence
  Description of Artificial Sequence: Synthetic oligonucleotide
ggugccguucgcccugcag

SEQ ID NO: 338720 - RNA, 19 nt, Artificial Sequence
  Description of Artificial Sequence: Synthetic oligonucleotide
ggguaaccgucgaugucgg

SEQ ID NO: 338721 - RNA, 19 nt, Artificial Sequence
  Description of Artificial Sequence: Synthetic oligonucleotide
ccggacacacauccagagg

SEQ ID NO: 338722 - RNA, 19 nt, Artificial Sequence
  Description of Artificial Sequence: Synthetic oligonucleotide
aagccggcguagucaucau

SEQ ID NO: 338723 - RNA, 19 nt, Artificial Sequence
  Description of Artificial Sequence: Synthetic oligonucleotide
gcacuuuccggacacacau

SEQ ID NO: 338724 - RNA, 19 nt, Artificial Sequence
  Description of Artificial Sequence: Synthetic oligonucleotide
gucggugucaggcccacau

SEQ ID NO: 338725 - RNA, 19 nt, Artificial Sequence
  Description of Artificial Sequence: Synthetic oligonucleotide
ggaaacagucggcaauugu

SEQ ID NO: 338726 - RNA, 19 nt, Artificial Sequence
  Description of Artificial Sequence: Synthetic oligonucleotide
gacacucgaguacccuugu

SEQ ID NO: 338727 - RNA, 19 nt, Artificial Sequence
  Description of Artificial Sequence: Synthetic oligonucleotide
ugucuuuccugggguucgu

SEQ ID NO: 338728 - RNA, 19 nt, Artificial Sequence
  Description of Artificial Sequence: Synthetic oligonucleotide
uugacgggcagggccucac

SEQ ID NO: 338729 - RNA, 19 nt, Artificial Sequence
  Description of Artificial Sequence: Synthetic oligonucleotide
caguaugccacagagcauu

SEQ ID NO: 338730 - RNA, 19 nt, Artificial Sequence
  Description of Artificial Sequence: Synthetic oligonucleotide
ccgaaaaucugugagggua

SEQ ID NO: 338731 - RNA, 19 nt, Artificial Sequence
  Description of Artificial Sequence: Synthetic oligonucleotide
cugcucggaaaggcguggc

SEQ ID NO: 338732 - RNA, 19 nt, Artificial Sequence
  Description of Artificial Sequence: Synthetic oligonucleotide
ccagaauccgccacuagcu

SEQ ID NO: 338733 - RNA, 19 nt, Artificial Sequence
  Description of Artificial Sequence: Synthetic oligonucleotide
caguggguuggguacuuua

SEQ ID NO: 338734 - RNA, 19 nt, Artificial Sequence
  Description of Artificial Sequence: Synthetic oligonucleotide
ccguucgcccugcaggccg

SEQ ID NO: 338735 - RNA, 19 nt, Artificial Sequence
  Description of Artificial Sequence: Synthetic oligonucleotide
uucgcccugcaggccgggg

SEQ ID NO: 338736 - RNA, 19 nt, Artificial Sequence
  Description of Artificial Sequence: Synthetic oligonucleotide
cacugugucguugcaucga

SEQ ID NO: 338737 - RNA, 19 nt, Artificial Sequence
  Description of Artificial Sequence: Synthetic oligonucleotide
aggguaacuucugcacuuu

SEQ ID NO: 338738 - RNA, 19 nt, Artificial Sequence
  Description of Artificial Sequence: Synthetic oligonucleotide
gcguagucaucaucaguga

SEQ ID NO: 338739 - RNA, 19 nt, Artificial Sequence
  Description of Artificial Sequence: Synthetic oligonucleotide
acacucgaguacccuugua

SEQ ID NO: 338740 - RNA, 19 nt, Artificial Sequence
  Description of Artificial Sequence: Synthetic oligonucleotide
ccagaguugggugucaaaa

SEQ ID NO: 338741 - RNA, 19 nt, Artificial Sequence
  Description of Artificial Sequence: Synthetic oligonucleotide
cagcguguuggugcagaug

SEQ ID NO: 338742 - RNA, 19 nt, Artificial Sequence
  Description of Artificial Sequence: Synthetic oligonucleotide
ccgcaucauuaucaaaguc

SEQ ID NO: 338743 - RNA, 19 nt, Artificial Sequence
  Description of Artificial Sequence: Synthetic oligonucleotide
cagucugauaggcccgaaa

SEQ ID NO: 338744 - RNA, 19 nt, Artificial Sequence
  Description of Artificial Sequence: Synthetic oligonucleotide
caccauugaaggccgugua

SEQ ID NO: 338745 - RNA, 19 nt, Artificial Sequence
  Description of Artificial Sequence: Synthetic oligonucleotide
ggauuggguaccagacgac

SEQ ID NO: 338746 - RNA, 19 nt, Artificial Sequence
  Description of Artificial Sequence: Synthetic oligonucleotide
cguguucacguggaaagug

SEQ ID NO: 338747 - RNA, 19 nt, Artificial Sequence
  Description of Artificial Sequence: Synthetic oligonucleotide
ugcccugauugagcacuac

SEQ ID NO: 338748 - RNA, 19 nt, Artificial Sequence
  Description of Artificial Sequence: Synthetic oligonucleotide
accgucgaugucgguguca

SEQ ID NO: 338749 - RNA, 19 nt, Artificial Sequence
  Description of Artificial Sequence: Synthetic oligonucleotide
accugcuuacuggcccgag

SEQ ID NO: 338750 - RNA, 19 nt, Artificial Sequence
  Description of Artificial Sequence: Synthetic oligonucleotide
guucacguggaaagugccu

SEQ ID NO: 338751 - RNA, 19 nt, Artificial Sequence
  Description of Artificial Sequence: Synthetic oligonucleotide
ggccguguacccaacugca

SEQ ID NO: 338752 - RNA, 19 nt, Artificial Sequence
  Description of Artificial Sequence: Synthetic oligonucleotide
uggcccgagcauagucgau

SEQ ID NO: 338753 - RNA, 19 nt, Artificial Sequence
  Description of Artificial Sequence: Synthetic oligonucleotide
caacaccguugccaucuga

SEQ ID NO: 338754 - RNA, 19 nt, Artificial Sequence
  Description of Artificial Sequence: Synthetic oligonucleotide
acagagcauuucggaggug

SEQ ID NO: 338755 - RNA, 19 nt, Artificial Sequence
  Description of Artificial Sequence: Synthetic oligonucleotide
cguguacccaacugcaaga

SEQ ID NO: 338756 - RNA, 19 nt, Artificial Sequence
  Description of Artificial Sequence: Synthetic oligonucleotide
gcggcagggaccacauuug

SEQ ID NO: 338757 - RNA, 19 nt, Artificial Sequence
  Description of Artificial Sequence: Synthetic oligonucleotide
gugucguugcaucgauacu

SEQ ID NO: 338758 - RNA, 19 nt, Artificial Sequence
  Description of Artificial Sequence: Synthetic oligonucleotide
ggaaaggcguggccugcca

SEQ ID NO: 338759 - RNA, 19 nt, Artificial Sequence
  Description of Artificial Sequence: Synthetic oligonucleotide
ggcaauuguccucaacauu

SEQ ID NO: 338760 - RNA, 19 nt, Artificial Sequence
  Description of Artificial Sequence: Synthetic oligonucleotide
ccgucgaugucggugucag

SEQ ID NO: 338761 - RNA, 19 nt, Artificial Sequence
  Description of Artificial Sequence: Synthetic oligonucleotide
cgaugccgacaccagacac

SEQ ID NO: 338762 - RNA, 19 nt, Artificial Sequence
  Description of Artificial Sequence: Synthetic oligonucleotide
cguggaaaccgcacaccug

SEQ ID NO: 338763 - RNA, 19 nt, Artificial Sequence
  Description of Artificial Sequence: Synthetic oligonucleotide
ggaacgcugcucguggaaa

SEQ ID NO: 338764 - RNA, 19 nt, Artificial Sequence
  Description of Artificial Sequence: Synthetic oligonucleotide
caguugccuccggaauggc

SEQ ID NO: 338765 - RNA, 19 nt, Artificial Sequence
  Description of Artificial Sequence: Synthetic oligonucleotide
cgagcauagucgaugccga

SEQ ID NO: 338766 - RNA, 19 nt, Artificial Sequence
  Description of Artificial Sequence: Synthetic oligonucleotide
ccggcguagucaucaucag

SEQ ID NO: 338767 - RNA, 19 nt, Artificial Sequence
  Description of Artificial Sequence: Synthetic oligonucleotide
cgccaacccacauuucgug

SEQ ID NO: 338768 - RNA, 19 nt, Artificial Sequence
  Description of Artificial Sequence: Synthetic oligonucleotide
guguuccggaugagggaca

SEQ ID NO: 338769 - RNA, 19 nt, Artificial Sequence
  Description of Artificial Sequence: Synthetic oligonucleotide
  modified_base (7)..(7): a, c, u, g, unknown or other
gcauggnguugaugcagcu

SEQ ID NO: 338770 - RNA, 19 nt, Artificial Sequence
  Description of Artificial Sequence: Synthetic oligonucleotide
ugggugccguucgcccugc

SEQ ID NO: 338771 - RNA, 19 nt, Artificial Sequence
  Description of Artificial Sequence: Synthetic oligonucleotide
agucggcaauuguccucaa

SEQ ID NO: 338772 - RNA, 19 nt, Artificial Sequence
  Description of Artificial Sequence: Synthetic oligonucleotide
ggaugucuugucacgccaa

SEQ ID NO: 338773 - RNA, 19 nt, Artificial Sequence
  Description of Artificial Sequence: Synthetic oligonucleotide
uggguacuuuagggcaauu

SEQ ID NO: 338774 - RNA, 19 nt, Artificial Sequence
  Description of Artificial Sequence: Synthetic oligonucleotide
acagucugauaggcccgaa

SEQ ID NO: 338775 - RNA, 19 nt, Artificial Sequence
  Description of Artificial Sequence: Synthetic oligonucleotide
gcugcucguggaaaccgca

SEQ ID NO: 338776 - RNA, 19 nt, Artificial Sequence
  Description of Artificial Sequence: Synthetic oligonucleotide
gguucguaccugaguaaua

SEQ ID NO: 338777 - RNA, 19 nt, Artificial Sequence
  Description of Artificial Sequence: Synthetic oligonucleotide
guucgcccugcaggccggg

SEQ ID NO: 338778 - RNA, 19 nt, Artificial Sequence
  Description of Artificial Sequence: Synthetic oligonucleotide
ggaagcgaggggucagagu

SEQ ID NO: 338779 - RNA, 19 nt, Artificial Sequence
  Description of Artificial Sequence: Synthetic oligonucleotide
cauugcagaccugcuuacu

SEQ ID NO: 338780 - RNA, 19 nt, Artificial Sequence
  Description of Artificial Sequence: Synthetic oligonucleotide
agccaacuuggggccggug

SEQ ID NO: 338781 - RNA, 19 nt, Artificial Sequence
  Description of Artificial Sequence: Synthetic oligonucleotide
ccucgcauggacgugucaa

SEQ ID NO: 338782 - RNA, 19 nt, Artificial Sequence
  Description of Artificial Sequence: Synthetic oligonucleotide
cgcugcucguggaaaccgc

SEQ ID NO: 338783 - RNA, 19 nt, Artificial Sequence
  Description of Artificial Sequence: Synthetic oligonucleotide
cagagugagcacacucguu

SEQ ID NO: 338784 - RNA, 19 nt, Artificial Sequence
  Description of Artificial Sequence: Synthetic oligonucleotide
ccggguaaccgucgauguc

SEQ ID NO: 338785 - RNA, 19 nt, Artificial Sequence
  Description of Artificial Sequence: Synthetic oligonucleotide
cgcauggacgugucaauaa

SEQ ID NO: 338786 - RNA, 19 nt, Artificial Sequence
  Description of Artificial Sequence: Synthetic oligonucleotide
ugccuccggaauggcucaa

SEQ ID NO: 338787 - RNA, 19 nt, Artificial Sequence
  Description of Artificial Sequence: Synthetic oligonucleotide
cuugacgggcagggccuca

SEQ ID NO: 338788 - RNA, 19 nt, Artificial Sequence
  Description of Artificial Sequence: Synthetic oligonucleotide
cggcaccucacacccuucc

SEQ ID NO: 338789 - RNA, 19 nt, Artificial Sequence
  Description of Artificial Sequence: Synthetic oligonucleotide
gguagccuggguacucaua

SEQ ID NO: 338790 - RNA, 19 nt, Artificial Sequence
  Description of Artificial Sequence: Synthetic oligonucleotide
ggacccucauagagcuuca

SEQ ID NO: 338791 - RNA, 19 nt, Artificial Sequence
  Description of Artificial Sequence: Synthetic oligonucleotide
ccgccacuagcuggggacc

SEQ ID NO: 338792 - RNA, 19 nt, Artificial Sequence
  Description of Artificial Sequence: Synthetic oligonucleotide
caccaccccucuggagcug

SEQ ID NO: 338793 - RNA, 19 nt, Artificial Sequence
  Description of Artificial Sequence: Synthetic oligonucleotide
ggcggcaccucacacccuu

SEQ ID NO: 338794 - RNA, 19 nt, Artificial Sequence
  Description of Artificial Sequence: Synthetic oligonucleotide
cgacaguuaucaggcccag

SEQ ID NO: 338795 - RNA, 19 nt, Artificial Sequence
  Description of Artificial Sequence: Synthetic oligonucleotide
gcugcgcucccugaugggu

SEQ ID NO: 338796 - RNA, 19 nt, Artificial Sequence
  Description of Artificial Sequence: Synthetic oligonucleotide
gcuguagauuagaccccaa

SEQ ID NO: 338797 - RNA, 19 nt, Artificial Sequence
  Description of Artificial Sequence: Synthetic oligonucleotide
gaccugggucacuguucau

SEQ ID NO: 338798 - RNA, 19 nt, Artificial Sequence
  Description of Artificial Sequence: Synthetic oligonucleotide
ccaauccauuagggaugcc

SEQ ID NO: 338799 - RNA, 19 nt, Artificial Sequence
  Description of Artificial Sequence: Synthetic oligonucleotide
gccguucgcccugcaggcc

SEQ ID NO: 338800 - RNA, 19 nt, Artificial Sequence
  Description of Artificial Sequence: Synthetic oligonucleotide
cagugggaacgcugcucgu

SEQ ID NO: 338801 - RNA, 19 nt, Artificial Sequence
  Description of Artificial Sequence: Synthetic oligonucleotide
gccguguacccaacugcaa

SEQ ID NO: 338802 - RNA, 19 nt, Artificial Sequence
  Description of Artificial Sequence: Synthetic oligonucleotide
gguaaccgucgaugucggu

SEQ ID NO: 338803 - RNA, 19 nt, Artificial Sequence
  Description of Artificial Sequence: Synthetic oligonucleotide
ccugaguaauauaccccuu

SEQ ID NO: 338804 - RNA, 19 nt, Artificial Sequence
  Description of Artificial Sequence: Synthetic oligonucleotide
cgccacuagcuggggaccc

SEQ ID NO: 338805 - RNA, 19 nt, Artificial Sequence
  Description of Artificial Sequence: Synthetic oligonucleotide
ggucauuguugggaacauu

SEQ ID NO: 338806 - RNA, 19 nt, Artificial Sequence
  Description of Artificial Sequence: Synthetic oligonucleotide
ccaguaugccacagagcau

SEQ ID NO: 338807 - RNA, 19 nt, Artificial Sequence
  Description of Artificial Sequence: Synthetic oligonucleotide
ccccucgcauggacguguc

SEQ ID NO: 338808 - RNA, 19 nt, Artificial Sequence
  Description of Artificial Sequence: Synthetic oligonucleotide
cguucccguucccugccca

SEQ ID NO: 338809 - RNA, 19 nt, Artificial Sequence
  Description of Artificial Sequence: Synthetic oligonucleotide
cgacaccagacacucgagu

SEQ ID NO: 338810 - RNA, 19 nt, Artificial Sequence
  Description of Artificial Sequence: Synthetic oligonucleotide
gcgcucccugaugggugcc

SEQ ID NO: 338811 - RNA, 19 nt, Artificial Sequence
  Description of Artificial Sequence: Synthetic oligonucleotide
ccacauuucgugggucagu

SEQ ID NO: 338812 - RNA, 19 nt, Artificial Sequence
  Description of Artificial Sequence: Synthetic oligonucleotide
gccuccggaauggcucaaa

SEQ ID NO: 338813 - RNA, 19 nt, Artificial Sequence
  Description of Artificial Sequence: Synthetic oligonucleotide
cguaccugaucaggggugu

SEQ ID NO: 338814 - RNA, 19 nt, Artificial Sequence
  Description of Artificial Sequence: Synthetic oligonucleotide
cccucgcauggacguguca

SEQ ID NO: 338815 - RNA, 19 nt, Artificial Sequence
  Description of Artificial Sequence: Synthetic oligonucleotide
ccguguucacguggaaagu

SEQ ID NO: 338816 - RNA, 19 nt, Artificial Sequence
  Description of Artificial Sequence: Synthetic oligonucleotide
gcggcaccucacacccuuc

SEQ ID NO: 338817 - RNA, 19 nt, Artificial Sequence
  Description of Artificial Sequence: Synthetic oligonucleotide
cguggacauggcaggggcu

SEQ ID NO: 338818 - RNA, 19 nt, Artificial Sequence
  Description of Artificial Sequence: Synthetic oligonucleotide
ccucgggauccaggaccac

SEQ ID NO: 338819 - RNA, 19 nt, Artificial Sequence
  Description of Artificial Sequence: Synthetic oligonucleotide
ccccuucgaagguccccaa

SEQ ID NO: 338820 - RNA, 19 nt, Artificial Sequence
  Description of Artificial Sequence: Synthetic oligonucleotide
gggugccguucgcccugca

SEQ ID NO: 338821 - RNA, 19 nt, Artificial Sequence
  Description of Artificial Sequence: Synthetic oligonucleotide
cgggaagcgaggggucaga

SEQ ID NO: 338822 - RNA, 19 nt, Artificial Sequence
  Description of Artificial Sequence: Synthetic oligonucleotide
gcaguggguuggguacuuu

SEQ ID NO: 338823 - RNA, 19 nt, Artificial Sequence
  Description of Artificial Sequence: Synthetic oligonucleotide
uuaagagcgaauuaaaucc

SEQ ID NO: 338824 - RNA, 19 nt, Artificial Sequence
  Description of Artificial Sequence: Synthetic oligonucleotide
ucauaagucagcaagguga

SEQ ID NO: 338825 - RNA, 19 nt, Artificial Sequence
  Description of Artificial Sequence: Synthetic oligonucleotide
uuacuaaacauccucaaug

SEQ ID NO: 338826 - RNA, 19 nt, Artificial Sequence
  Description of Artificial Sequence: Synthetic oligonucleotide
aguuaaauggaauauguug

SEQ ID NO: 338827 - RNA, 19 nt, Artificial Sequence
  Description of Artificial Sequence: Synthetic oligonucleotide
aguuuuauggccuucuccg

SEQ ID NO: 338828 - RNA, 19 nt, Artificial Sequence
  Description of Artificial Sequence: Synthetic oligonucleotide
uuacucuagaucaaguuag

SEQ ID NO: 338829 - RNA, 19 nt, Artificial Sequence
  Description of Artificial Sequence: Synthetic oligonucleotide
ucagacuuacucuagauca

SEQ ID NO: 338830 - RNA, 19 nt, Artificial Sequence
  Description of Artificial Sequence: Synthetic oligonucleotide
uuucaguagacucagcgag

SEQ ID NO: 338831 - RNA, 19 nt, Artificial Sequence
  Description of Artificial Sequence: Synthetic oligonucleotide
cugaaucccaguuaaaugg

SEQ ID NO: 338832 - RNA, 19 nt, Artificial Sequence
  Description of Artificial Sequence: Synthetic oligonucleotide
uguaaucuagucuugauaa

SEQ ID NO: 338833 - RNA, 19 nt, Artificial Sequence
  Description of Artificial Sequence: Synthetic oligonucleotide
uuccuuaacauccaaaacu

SEQ ID NO: 338834 - RNA, 19 nt, Artificial Sequence
  Description of Artificial Sequence: Synthetic oligonucleotide
aaauggaauauguugguga

SEQ ID NO: 338835 - RNA, 19 nt, Artificial Sequence
  Description of Artificial Sequence: Synthetic oligonucleotide
uauaaaagauacaaacaca

SEQ ID NO: 338836 - RNA, 19 nt, Artificial Sequence
  Description of Artificial Sequence: Synthetic oligonucleotide
aguaggauuguguuucucc

SEQ ID NO: 338837 - RNA, 19 nt, Artificial Sequence
  Description of Artificial Sequence: Synthetic oligonucleotide
agaugauuacuaaacaucc

SEQ ID NO: 338838 - RNA, 19 nt, Artificial Sequence
  Description of Artificial Sequence: Synthetic oligonucleotide
ugugcauaaauuuaucucu

SEQ ID NO: 338839 - RNA, 19 nt, Artificial Sequence
  Description of Artificial Sequence: Synthetic oligonucleotide
auaaaagauacaaacacag

SEQ ID NO: 338840 - RNA, 19 nt, Artificial Sequence
  Description of Artificial Sequence: Synthetic oligonucleotide
ucauaauauaauccagagg

SEQ ID NO: 338841 - RNA, 19 nt, Artificial Sequence
  Description of Artificial Sequence: Synthetic oligonucleotide
ucucuaauaaagaaugcca

SEQ ID NO: 338842 - RNA, 19 nt, Artificial Sequence
  Description of Artificial Sequence: Synthetic oligonucleotide
ucugcuaacugaaacaaga

SEQ ID NO: 338843 - RNA, 19 nt, Artificial Sequence
  Description of Artificial Sequence: Synthetic oligonucleotide
augauuacuaaacauccuc

SEQ ID NO: 338844 - RNA, 19 nt, Artificial Sequence
  Description of Artificial Sequence: Synthetic oligonucleotide
uacaaggucaauaggauac

SEQ ID NO: 338845 - RNA, 19 nt, Artificial Sequence
  Description of Artificial Sequence: Synthetic oligonucleotide
ugugaaaaucaccugggag

SEQ ID NO: 338846 - RNA, 19 nt, Artificial Sequence
  Description of Artificial Sequence: Synthetic oligonucleotide
aaacaagaugucaacuucc

SEQ ID NO: 338847 - RNA, 19 nt, Artificial Sequence
  Description of Artificial Sequence: Synthetic oligonucleotide
aacacacaagcuucugacc

SEQ ID NO: 338848 - RNA, 19 nt, Artificial Sequence
  Description of Artificial Sequence: Synthetic oligonucleotide
uaauccgggauuuaggagc

SEQ ID NO: 338849 - RNA, 19 nt, Artificial Sequence
  Description of Artificial Sequence: Synthetic oligonucleotide
uuugcucuaggaaccaugg

SEQ ID NO: 338850 - RNA, 19 nt, Artificial Sequence
  Description of Artificial Sequence: Synthetic oligonucleotide
aacguagaaccaucgcugc

SEQ ID NO: 338851 - RNA, 19 nt, Artificial Sequence
  Description of Artificial Sequence: Synthetic oligonucleotide
aaucccaguguauaaaaga

SEQ ID NO: 338852 - RNA, 19 nt, Artificial Sequence
  Description of Artificial Sequence: Synthetic oligonucleotide
cuugaugggauguagugcc

SEQ ID NO: 338853 - RNA, 19 nt, Artificial Sequence
  Description of Artificial Sequence: Synthetic oligonucleotide
auagaacccagaccaaacc

SEQ ID NO: 338854 - RNA, 19 nt, Artificial Sequence
  Description of Artificial Sequence: Synthetic oligonucleotide
cuugguacuaguaagagaa

SEQ ID NO: 338855 - RNA, 19 nt, Artificial Sequence
  Description of Artificial Sequence: Synthetic oligonucleotide
ucuagaucaaguuaguguu

SEQ ID NO: 338856 - RNA, 19 nt, Artificial Sequence
  Description of Artificial Sequence: Synthetic oligonucleotide
uaagagaagaugauuacua

SEQ ID NO: 338857 - RNA, 19 nt, Artificial Sequence
  Description of Artificial Sequence: Synthetic oligonucleotide
aauagaacccagaccaaac

SEQ ID NO: 338858 - RNA, 19 nt, Artificial Sequence
  Description of Artificial Sequence: Synthetic oligonucleotide
ucaacguagaaccaucgcu

SEQ ID NO: 338859 - RNA, 19 nt, Artificial Sequence
  Description of Artificial Sequence: Synthetic oligonucleotide
gaugcugacggcuugaaga

SEQ ID NO: 338860 - RNA, 19 nt, Artificial Sequence
  Description of Artificial Sequence: Synthetic oligonucleotide
aacuugaugggauguagug

SEQ ID NO: 338861 - RNA, 19 nt, Artificial Sequence
  Description of Artificial Sequence: Synthetic oligonucleotide
uagacuugguacuaguaag

SEQ ID NO: 338862 - RNA, 19 nt, Artificial Sequence
  Description of Artificial Sequence: Synthetic oligonucleotide
auaaagaaugccaaaagca

SEQ ID NO: 338863 - RNA, 19 nt, Artificial Sequence
  Description of Artificial Sequence: Synthetic oligonucleotide
ugauuacuaaacauccuca

SEQ ID NO: 338864 - RNA, 19 nt, Artificial Sequence
  Description of Artificial Sequence: Synthetic oligonucleotide
aaaacgaaugauugcauuu

SEQ ID NO: 338865 - RNA, 19 nt, Artificial Sequence
  Description of Artificial Sequence: Synthetic oligonucleotide
aagauacaaacacagguuu

SEQ ID NO: 338866 - RNA, 19 nt, Artificial Sequence
  Description of Artificial Sequence: Synthetic oligonucleotide
uccuccgaaaucaacguag

SEQ ID NO: 338867 - RNA, 19 nt, Artificial Sequence
  Description of Artificial Sequence: Synthetic oligonucleotide
uguaaccugaccaaacuuc

SEQ ID NO: 338868 - RNA, 19 nt, Artificial Sequence
  Description of Artificial Sequence: Synthetic oligonucleotide
ucugcuaaggucaugcguc

SEQ ID NO: 338869 - RNA, 19 nt, Artificial Sequence
  Description of Artificial Sequence: Synthetic oligonucleotide
uccgacauggucaggauug

SEQ ID NO: 338870 - RNA, 19 nt, Artificial Sequence
  Description of Artificial Sequence: Synthetic oligonucleotide
caaacgagccgguugaccg

SEQ ID NO: 338871 - RNA, 19 nt, Artificial Sequence
  Description of Artificial Sequence: Synthetic oligonucleotide
auguuggugaauuguaguc

SEQ ID NO: 338872 - RNA, 19 nt, Artificial Sequence
  Description of Artificial Sequence: Synthetic oligonucleotide
augauugcauuuaauauag

SEQ ID NO: 338873 - RNA, 19 nt, Artificial Sequence
  Description of Artificial Sequence: Synthetic oligonucleotide
aguauuaaccccaaaucag

SEQ ID NO: 338874 - RNA, 19 nt, Artificial Sequence
  Description of Artificial Sequence: Synthetic oligonucleotide
ucucuaaaggauuugugaa

SEQ ID NO: 338875 - RNA, 19 nt, Artificial Sequence
  Description of Artificial Sequence: Synthetic oligonucleotide
uacuaaacauccucaaugu

SEQ ID NO: 338876 - RNA, 19 nt, Artificial Sequence
  Description of Artificial Sequence: Synthetic oligonucleotide
ugcuaacugaaacaagaug

SEQ ID NO: 338877 - RNA, 19 nt, Artificial Sequence
  Description of Artificial Sequence: Synthetic oligonucleotide
aaaucaacguagaaccauc

SEQ ID NO: 338878 - RNA, 19 nt, Artificial Sequence
  Description of Artificial Sequence: Synthetic oligonucleotide
agguagguaaaguccaaac

SEQ ID NO: 338879 - RNA, 19 nt, Artificial Sequence
  Description of Artificial Sequence: Synthetic oligonucleotide
uugacgaucucuaaaggau

SEQ ID NO: 338880 - RNA, 19 nt, Artificial Sequence
  Description of Artificial Sequence: Synthetic oligonucleotide
uaaucuagucuugauaaca

SEQ ID NO: 338881 - RNA, 19 nt, Artificial Sequence
  Description of Artificial Sequence: Synthetic oligonucleotide
auaauauaauccagaggcc

SEQ ID NO: 338882 - RNA, 19 nt, Artificial Sequence
  Description of Artificial Sequence: Synthetic oligonucleotide
aguuccaaccauucuacag

SEQ ID NO: 338883 - RNA, 19 nt, Artificial Sequence
  Description of Artificial Sequence: Synthetic oligonucleotide
accugaauuuaaaugagac

SEQ ID NO: 338884 - RNA, 19 nt, Artificial Sequence
  Description of Artificial Sequence: Synthetic oligonucleotide
uuaaauggaauauguuggu

SEQ ID NO: 338885 - RNA, 19 nt, Artificial Sequence
  Description of Artificial Sequence: Synthetic oligonucleotide
caaaacuuuucccuaguag

SEQ ID NO: 338886 - RNA, 19 nt, Artificial Sequence
  Description of Artificial Sequence: Synthetic oligonucleotide
ucucgcaccacagacagag

SEQ ID NO: 338887 - RNA, 19 nt, Artificial Sequence
  Description of Artificial Sequence: Synthetic oligonucleotide
aguaauccgggauuuagga

SEQ ID NO: 338888 - RNA, 19 nt, Artificial Sequence
  Description of Artificial Sequence: Synthetic oligonucleotide
aacucauaagucagcaagg

SEQ ID NO: 338889 - RNA, 19 nt, Artificial Sequence
  Description of Artificial Sequence: Synthetic oligonucleotide
gucucucuaauaaagaaug

SEQ ID NO: 338890 - RNA, 19 nt, Artificial Sequence
  Description of Artificial Sequence: Synthetic oligonucleotide
guuccaaccauucuacagc

SEQ ID NO: 338891 - RNA, 19 nt, Artificial Sequence
  Description of Artificial Sequence: Synthetic oligonucleotide
aucaacguagaaccaucgc

SEQ ID NO: 338892 - RNA, 19 nt, Artificial Sequence
  Description of Artificial Sequence: Synthetic oligonucleotide
cauccgagucuuuacaagg

SEQ ID NO: 338893 - RNA, 19 nt, Artificial Sequence
  Description of Artificial Sequence: Synthetic oligonucleotide
aaacuaacuugaugggaug

SEQ ID NO: 338894 - RNA, 19 nt, Artificial Sequence
  Description of Artificial Sequence: Synthetic oligonucleotide
agaauaauuaggaauaauu

SEQ ID NO: 338895 - RNA, 19 nt, Artificial Sequence
  Description of Artificial Sequence: Synthetic oligonucleotide
uauguuggugaauuguagu

SEQ ID NO: 338896 - RNA, 19 nt, Artificial Sequence
  Description of Artificial Sequence: Synthetic oligonucleotide
cacuccuccgaaaucaacg

SEQ ID NO: 338897 - RNA, 19 nt, Artificial Sequence
  Description of Artificial Sequence: Synthetic oligonucleotide
uaagagcgaauuaaaucca

SEQ ID NO: 338898 - RNA, 19 nt, Artificial Sequence
  Description of Artificial Sequence: Synthetic oligonucleotide
aaggcaaaugggugccagc

SEQ ID NO: 338899 - RNA, 19 nt, Artificial Sequence
  Description of Artificial Sequence: Synthetic oligonucleotide
aaaauuugagucggggcug

SEQ ID NO: 338900 - RNA, 19 nt, Artificial Sequence
  Description of Artificial Sequence: Synthetic oligonucleotide
uccuuaacauccaaaacuu

SEQ ID NO: 338901 - RNA, 19 nt, Artificial Sequence
  Description of Artificial Sequence: Synthetic oligonucleotide
ggauuuaggagcuggcucg

SEQ ID NO: 338902 - RNA, 19 nt, Artificial Sequence
  Description of Artificial Sequence: Synthetic oligonucleotide
auuauucuuacagugucug

SEQ ID NO: 338903 - RNA, 19 nt, Artificial Sequence
  Description of Artificial Sequence: Synthetic oligonucleotide
ugucugacaugauucaaga

SEQ ID NO: 338904 - RNA, 19 nt, Artificial Sequence
  Description of Artificial Sequence: Synthetic oligonucleotide
acacacaagcuucugacca

SEQ ID NO: 338905 - RNA, 19 nt, Artificial Sequence
  Description of Artificial Sequence: Synthetic oligonucleotide
aauccagaggccaaauuug

SEQ ID NO: 338906 - RNA, 19 nt, Artificial Sequence
  Description of Artificial Sequence: Synthetic oligonucleotide
aagagaagaugauuacuaa

SEQ ID NO: 338907 - RNA, 19 nt, Artificial Sequence
  Description of Artificial Sequence: Synthetic oligonucleotide
aaucaacguagaaccaucg

SEQ ID NO: 338908 - RNA, 19 nt, Artificial Sequence
  Description of Artificial Sequence: Synthetic oligonucleotide
agcgaauuaaauccaauuu

SEQ ID NO: 338909 - RNA, 19 nt, Artificial Sequence
  Description of Artificial Sequence: Synthetic oligonucleotide
caaauguugcaacugccag

SEQ ID NO: 338910 - RNA, 19 nt, Artificial Sequence
  Description of Artificial Sequence: Synthetic oligonucleotide
uuuucccuaguagacuugg

SEQ ID NO: 338911 - RNA, 19 nt, Artificial Sequence
  Description of Artificial Sequence: Synthetic oligonucleotide
ugcaguuccaaccauucua

SEQ ID NO: 338912 - RNA, 19 nt, Artificial Sequence
  Description of Artificial Sequence: Synthetic oligonucleotide
ucccuaguagacuugguac

SEQ ID NO: 338913 - RNA, 19 nt, Artificial Sequence
  Description of Artificial Sequence: Synthetic oligonucleotide
ucucucuaauaaagaaugc

SEQ ID NO: 338914 - RNA, 19 nt, Artificial Sequence
  Description of Artificial Sequence: Synthetic oligonucleotide
ugaaucccaguuaaaugga

SEQ ID NO: 338915 - RNA, 19 nt, Artificial Sequence
  Description of Artificial Sequence: Synthetic oligonucleotide
uucuaaagcaguccaucac

SEQ ID NO: 338916 - RNA, 19 nt, Artificial Sequence
  Description of Artificial Sequence: Synthetic oligonucleotide
uuggcacccuuguagaugc

SEQ ID NO: 338917 - RNA, 19 nt, Artificial Sequence
  Description of Artificial Sequence: Synthetic oligonucleotide
uguugcaacugccaguuua

SEQ ID NO: 338918 - RNA, 19 nt, Artificial Sequence
  Description of Artificial Sequence: Synthetic oligonucleotide
aaaugggugccagcuaggg

SEQ ID NO: 338919 - RNA, 19 nt, Artificial Sequence
  Description of Artificial Sequence: Synthetic oligonucleotide
uucagacuuacucuagauc

SEQ ID NO: 338920 - RNA, 19 nt, Artificial Sequence
  Description of Artificial Sequence: Synthetic oligonucleotide
uuccaaccauucuacagcc

SEQ ID NO: 338921 - RNA, 19 nt, Artificial Sequence
  Description of Artificial Sequence: Synthetic oligonucleotide
caugauacaaagcacccca

SEQ ID NO: 338922 - RNA, 19 nt, Artificial Sequence
  Description of Artificial Sequence: Synthetic oligonucleotide
uuggcucguauaaaucugc

SEQ ID NO: 338923 - RNA, 19 nt, Artificial Sequence
  Description of Artificial Sequence: Synthetic oligonucleotide
guauuaaccccaaaucagc

SEQ ID NO: 338924 - RNA, 19 nt, Artificial Sequence
  Description of Artificial Sequence: Synthetic oligonucleotide
aaauuugagucggggcugg

SEQ ID NO: 338925 - RNA, 19 nt, Artificial Sequence
  Description of Artificial Sequence: Synthetic oligonucleotide
aguuuauagccuccgacau

SEQ ID NO: 338926 - RNA, 19 nt, Artificial Sequence
  Description of Artificial Sequence: Synthetic oligonucleotide
aacugaaacaagaugucaa

SEQ ID NO: 338927 - RNA, 19 nt, Artificial Sequence
  Description of Artificial Sequence: Synthetic oligonucleotide
cauaagucagcaaggugac

SEQ ID NO: 338928 - RNA, 19 nt, Artificial Sequence
  Description of Artificial Sequence: Synthetic oligonucleotide
ucgcaccacagacagagca

SEQ ID NO: 338929 - RNA, 19 nt, Artificial Sequence
  Description of Artificial Sequence: Synthetic oligonucleotide
acuaaacauccucaaugug

SEQ ID NO: 338930 - RNA, 19 nt, Artificial Sequence
  Description of Artificial Sequence: Synthetic oligonucleotide
aacgaaugauugcauuuaa

SEQ ID NO: 338931 - RNA, 19 nt, Artificial Sequence
  Description of Artificial Sequence: Synthetic oligonucleotide
gauuacuaaacauccucaa

SEQ ID NO: 338932 - RNA, 19 nt, Artificial Sequence
  Description of Artificial Sequence: Synthetic oligonucleotide
acggcuugaagagagguag

SEQ ID NO: 338933 - RNA, 19 nt, Artificial Sequence
  Description of Artificial Sequence: Synthetic oligonucleotide
uguuggugaauuguagucu

SEQ ID NO: 338934 - RNA, 19 nt, Artificial Sequence
  Description of Artificial Sequence: Synthetic oligonucleotide
agaguaauccgggauuuag

SEQ ID NO: 338935 - RNA, 19 nt, Artificial Sequence
  Description of Artificial Sequence: Synthetic oligonucleotide
aguuaguguugcccaaauc

SEQ ID NO: 338936 - RNA, 19 nt, Artificial Sequence
  Description of Artificial Sequence: Synthetic oligonucleotide
uacgcuugugccagcauga

SEQ ID NO: 338937 - RNA, 19 nt, Artificial Sequence
  Description of Artificial Sequence: Synthetic oligonucleotide
guaauccgggauuuaggag

SEQ ID NO: 338938 - RNA, 19 nt, Artificial Sequence
  Description of Artificial Sequence: Synthetic oligonucleotide
ugaccguugguucugcauc

SEQ ID NO: 338939 - RNA, 19 nt, Artificial Sequence
  Description of Artificial Sequence: Synthetic oligonucleotide
gaguaauccgggauuuagg

SEQ ID NO: 338940 - RNA, 19 nt, Artificial Sequence
  Description of Artificial Sequence: Synthetic oligonucleotide
aguagacucagcgagacua

SEQ ID NO: 338941 - RNA, 19 nt, Artificial Sequence
  Description of Artificial Sequence: Synthetic oligonucleotide
cuugacgaucucuaaagga

SEQ ID NO: 338942 - RNA, 19 nt, Artificial Sequence
  Description of Artificial Sequence: Synthetic oligonucleotide
ucguauaaaucugcuaacu

SEQ ID NO: 338943 - RNA, 19 nt, Artificial Sequence
  Description of Artificial Sequence: Synthetic oligonucleotide
uugugaaaaucaccuggga

SEQ ID NO: 338944 - RNA, 19 nt, Artificial Sequence
  Description of Artificial Sequence: Synthetic oligonucleotide
agcgagacuaucauucagg

SEQ ID NO: 338945 - RNA, 19 nt, Artificial Sequence
  Description of Artificial Sequence: Synthetic oligonucleotide
cuuggcucguauaaaucug

SEQ ID NO: 338946 - RNA, 19 nt, Artificial Sequence
  Description of Artificial Sequence: Synthetic oligonucleotide
aaucuagucuugauaacau

SEQ ID NO: 338947 - RNA, 19 nt, Artificial Sequence
  Description of Artificial Sequence: Synthetic oligonucleotide
ucccuaauuuccuuucaga

SEQ ID NO: 338948 - RNA, 19 nt, Artificial Sequence
  Description of Artificial Sequence: Synthetic oligonucleotide
aacuaacuugaugggaugu

SEQ ID NO: 338949 - RNA, 19 nt, Artificial Sequence
  Description of Artificial Sequence: Synthetic oligonucleotide
caucacaccgcuguaagug

SEQ ID NO: 338950 - RNA, 19 nt, Artificial Sequence
  Description of Artificial Sequence: Synthetic oligonucleotide
uugaagagagguagguaaa

SEQ ID NO: 338951 - RNA, 19 nt, Artificial Sequence
  Description of Artificial Sequence: Synthetic oligonucleotide
caugcguccccuuggcucg

SEQ ID NO: 338952 - RNA, 19 nt, Artificial Sequence
  Description of Artificial Sequence: Synthetic oligonucleotide
ggagacaucccuaauuucc

SEQ ID NO: 338953 - RNA, 19 nt, Artificial Sequence
  Description of Artificial Sequence: Synthetic oligonucleotide
cuaacuugaugggauguag

SEQ ID NO: 338954 - RNA, 19 nt, Artificial Sequence
  Description of Artificial Sequence: Synthetic oligonucleotide
agcaccccagauuaaauaa

SEQ ID NO: 338955 - RNA, 19 nt, Artificial Sequence
  Description of Artificial Sequence: Synthetic oligonucleotide
acaaacgagccgguugacc

SEQ ID NO: 338956 - RNA, 19 nt, Artificial Sequence
  Description of Artificial Sequence: Synthetic oligonucleotide
aacugcggcagcaaaccuc

SEQ ID NO: 338957 - RNA, 19 nt, Artificial Sequence
  Description of Artificial Sequence: Synthetic oligonucleotide
uucaguagacucagcgaga

SEQ ID NO: 338958 - RNA, 19 nt, Artificial Sequence
  Description of Artificial Sequence: Synthetic oligonucleotide
acgcuucaaucugagaugg

SEQ ID NO: 338959 - RNA, 19 nt, Artificial Sequence
  Description of Artificial Sequence: Synthetic oligonucleotide
aaguccaaacuuguuuuca

SEQ ID NO: 338960 - RNA, 19 nt, Artificial Sequence
  Description of Artificial Sequence: Synthetic oligonucleotide
acauuugagguagaugcug

SEQ ID NO: 338961 - RNA, 19 nt, Artificial Sequence
  Description of Artificial Sequence: Synthetic oligonucleotide
gaucucuaaaggauuugug

SEQ ID NO: 338962 - RNA, 19 nt, Artificial Sequence
  Description of Artificial Sequence: Synthetic oligonucleotide
agcuacuagacauucuuuu

SEQ ID NO: 338963 - RNA, 19 nt, Artificial Sequence
  Description of Artificial Sequence: Synthetic oligonucleotide
uugguacuaguaagagaag

SEQ ID NO: 338964 - RNA, 19 nt, Artificial Sequence
  Description of Artificial Sequence: Synthetic oligonucleotide
uccagcggcagcuacuaga

SEQ ID NO: 338965 - RNA, 19 nt, Artificial Sequence
  Description of Artificial Sequence: Synthetic oligonucleotide
uccgggauuuaggagcugg

SEQ ID NO: 338966 - RNA, 19 nt, Artificial Sequence
  Description of Artificial Sequence: Synthetic oligonucleotide
aacauccucaauguggcuu

SEQ ID NO: 338967 - RNA, 19 nt, Artificial Sequence
  Description of Artificial Sequence: Synthetic oligonucleotide
ucccgaaggaucuuucuaa

SEQ ID NO: 338968 - RNA, 19 nt, Artificial Sequence
  Description of Artificial Sequence: Synthetic oligonucleotide
cuuacucuagaucaaguua

SEQ ID NO: 338969 - RNA, 19 nt, Artificial Sequence
  Description of Artificial Sequence: Synthetic oligonucleotide
caaccauucuacagccacg

SEQ ID NO: 338970 - RNA, 19 nt, Artificial Sequence
  Description of Artificial Sequence: Synthetic oligonucleotide
augauucaagauaaaguga

SEQ ID NO: 338971 - RNA, 19 nt, Artificial Sequence
  Description of Artificial Sequence: Synthetic oligonucleotide
gcaaaugggugccagcuag

SEQ ID NO: 338972 - RNA, 19 nt, Artificial Sequence
  Description of Artificial Sequence: Synthetic oligonucleotide
aagcaccccagauuaaaua

SEQ ID NO: 338973 - RNA, 19 nt, Artificial Sequence
  Description of Artificial Sequence: Synthetic oligonucleotide
gacucagcgagcuggagaa

SEQ ID NO: 338974 - RNA, 19 nt, Artificial Sequence
  Description of Artificial Sequence: Synthetic oligonucleotide
aaggucaauaggauacaca

SEQ ID NO: 338975 - RNA, 19 nt, Artificial Sequence
  Description of Artificial Sequence: Synthetic oligonucleotide
gcuucaaucugagaugggg

SEQ ID NO: 338976 - RNA, 19 nt, Artificial Sequence
  Description of Artificial Sequence: Synthetic oligonucleotide
ccauucuacagccacgucc

SEQ ID NO: 338977 - RNA, 19 nt, Artificial Sequence
  Description of Artificial Sequence: Synthetic oligonucleotide
auacaaagcaccccagauu

SEQ ID NO: 338978 - RNA, 19 nt, Artificial Sequence
  Description of Artificial Sequence: Synthetic oligonucleotide
caguuuauagccuccgaca

SEQ ID NO: 338979 - RNA, 19 nt, Artificial Sequence
  Description of Artificial Sequence: Synthetic oligonucleotide
caauguggcuuucauuaug

SEQ ID NO: 338980 - RNA, 19 nt, Artificial Sequence
  Description of Artificial Sequence: Synthetic oligonucleotide
ugguggacauuauucuuac

SEQ ID NO: 338981 - RNA, 19 nt, Artificial Sequence
  Description of Artificial Sequence: Synthetic oligonucleotide
gugggaguacgcuugugcc

SEQ ID NO: 338982 - RNA, 19 nt, Artificial Sequence
  Description of Artificial Sequence: Synthetic oligonucleotide
cagcaauagaacccagacc

SEQ ID NO: 338983 - RNA, 19 nt, Artificial Sequence
  Description of Artificial Sequence: Synthetic oligonucleotide
guagguaaaguccaaacuu

SEQ ID NO: 338984 - RNA, 19 nt, Artificial Sequence
  Description of Artificial Sequence: Synthetic oligonucleotide
guaaucuagucuugauaac

SEQ ID NO: 338985 - RNA, 19 nt, Artificial Sequence
  Description of Artificial Sequence: Synthetic oligonucleotide
guuuaaaauuugagucggg

SEQ ID NO: 338986 - RNA, 19 nt, Artificial Sequence
  Description of Artificial Sequence: Synthetic oligonucleotide
cuuaaacauccucagaacu

SEQ ID NO: 338987 - RNA, 19 nt, Artificial Sequence
  Description of Artificial Sequence: Synthetic oligonucleotide
gucggggcuggauauuugg

SEQ ID NO: 338988 - RNA, 19 nt, Artificial Sequence
  Description of Artificial Sequence: Synthetic oligonucleotide
uugcccaaaucccagugua

SEQ ID NO: 338989 - RNA, 19 nt, Artificial Sequence
  Description of Artificial Sequence: Synthetic oligonucleotide
uaaccugaccaaacuucug

SEQ ID NO: 338990 - RNA, 19 nt, Artificial Sequence
  Description of Artificial Sequence: Synthetic oligonucleotide
uauacccagcuuucuauua

SEQ ID NO: 338991 - RNA, 19 nt, Artificial Sequence
  Description of Artificial Sequence: Synthetic oligonucleotide
gauuuaggagcuggcucgg

SEQ ID NO: 338992 - RNA, 19 nt, Artificial Sequence
  Description of Artificial Sequence: Synthetic oligonucleotide
ucagcgagacuaucauuca

SEQ ID NO: 338993 - RNA, 19 nt, Artificial Sequence
  Description of Artificial Sequence: Synthetic oligonucleotide
acuccuccgaaaucaacgu

SEQ ID NO: 338994 - RNA, 19 nt, Artificial Sequence
  Description of Artificial Sequence: Synthetic oligonucleotide
ugacgaucucuaaaggauu

SEQ ID NO: 338995 - RNA, 19 nt, Artificial Sequence
  Description of Artificial Sequence: Synthetic oligonucleotide
uugaagggcagcauuccuu

SEQ ID NO: 338996 - RNA, 19 nt, Artificial Sequence
  Description of Artificial Sequence: Synthetic oligonucleotide
agacuuacucuagaucaag

SEQ ID NO: 338997 - RNA, 19 nt, Artificial Sequence
  Description of Artificial Sequence: Synthetic oligonucleotide
guacgcuugugccagcaug

SEQ ID NO: 338998 - RNA, 19 nt, Artificial Sequence
  Description of Artificial Sequence: Synthetic oligonucleotide
ggucucgcaccacagacag

SEQ ID NO: 338999 - RNA, 19 nt, Artificial Sequence
  Description of Artificial Sequence: Synthetic oligonucleotide
agcaacucauaagucagca

SEQ ID NO: 339000 - RNA, 19 nt, Artificial Sequence
  Description of Artificial Sequence: Synthetic oligonucleotide
guaguuguacaaauucuga

SEQ ID NO: 339001 - RNA, 19 nt, Artificial Sequence
  Description of Artificial Sequence: Synthetic oligonucleotide
cucuaggaaccaugguugc

SEQ ID NO: 339002 - RNA, 19 nt, Artificial Sequence
  Description of Artificial Sequence: Synthetic oligonucleotide
aaacgagccgguugaccgu

SEQ ID NO: 339003 - RNA, 19 nt, Artificial Sequence
  Description of Artificial Sequence: Synthetic oligonucleotide
acucauaagucagcaaggu

SEQ ID NO: 339004 - RNA, 19 nt, Artificial Sequence
  Description of Artificial Sequence: Synthetic oligonucleotide
cacuaaggaugcugcaggc

SEQ ID NO: 339005 - RNA, 19 nt, Artificial Sequence
  Description of Artificial Sequence: Synthetic oligonucleotide
uuugugggcagagugccaa

SEQ ID NO: 339006 - RNA, 19 nt, Artificial Sequence
  Description of Artificial Sequence: Synthetic oligonucleotide
uccgagucuuuacaagguc

SEQ ID NO: 339007 - RNA, 19 nt, Artificial Sequence
  Description of Artificial Sequence: Synthetic oligonucleotide
ugggaguacgcuugugcca

SEQ ID NO: 339008 - RNA, 19 nt, Artificial Sequence
  Description of Artificial Sequence: Synthetic oligonucleotide
ucgcagaaagcaugcuuug

SEQ ID NO: 339009 - RNA, 19 nt, Artificial Sequence
  Description of Artificial Sequence: Synthetic oligonucleotide
aauccgggauuuaggagcu

SEQ ID NO: 339010 - RNA, 19 nt, Artificial Sequence
  Description of Artificial Sequence: Synthetic oligonucleotide
ugccaguuuauagccuccg

SEQ ID NO: 339011 - RNA, 19 nt, Artificial Sequence
  Description of Artificial Sequence: Synthetic oligonucleotide
cuucacuccuccgaaauca

SEQ ID NO: 339012 - RNA, 19 nt, Artificial Sequence
  Description of Artificial Sequence: Synthetic oligonucleotide
aguaacauuugagguagau

SEQ ID NO: 339013 - RNA, 19 nt, Artificial Sequence
  Description of Artificial Sequence: Synthetic oligonucleotide
ucccaguuaaauggaauau

SEQ ID NO: 339014 - RNA, 19 nt, Artificial Sequence
  Description of Artificial Sequence: Synthetic oligonucleotide
ggauuugugaaaaucaccu

SEQ ID NO: 339015 - RNA, 19 nt, Artificial Sequence
  Description of Artificial Sequence: Synthetic oligonucleotide
auagcaggggaaguagaug

SEQ ID NO: 339016 - RNA, 19 nt, Artificial Sequence
  Description of Artificial Sequence: Synthetic oligonucleotide
agacuaucauucagguagg

SEQ ID NO: 339017 - RNA, 19 nt, Artificial Sequence
  Description of Artificial Sequence: Synthetic oligonucleotide
agaaugccaaaagcacuuc

SEQ ID NO: 339018 - RNA, 19 nt, Artificial Sequence
  Description of Artificial Sequence: Synthetic oligonucleotide
gcauguuuaaaauuugagu

SEQ ID NO: 339019 - RNA, 19 nt, Artificial Sequence
  Description of Artificial Sequence: Synthetic oligonucleotide
ccagcaauagaacccagac

SEQ ID NO: 339020 - RNA, 19 nt, Artificial Sequence
  Description of Artificial Sequence: Synthetic oligonucleotide
ccgccaguaacauuugagg

SEQ ID NO: 339021 - RNA, 19 nt, Artificial Sequence
  Description of Artificial Sequence: Synthetic oligonucleotide
gcgaauuaaauccaauuua

SEQ ID NO: 339022 - RNA, 19 nt, Artificial Sequence
  Description of Artificial Sequence: Synthetic oligonucleotide
uggcucguauaaaucugcu

SEQ ID NO: 339023 - RNA, 19 nt, Artificial Sequence
  Description of Artificial Sequence: Synthetic oligonucleotide
gcuuucuauuaccuuaaac

SEQ ID NO: 339024 - RNA, 19 nt, Artificial Sequence
  Description of Artificial Sequence: Synthetic oligonucleotide
ugacggcuugaagagaggu

SEQ ID NO: 339025 - RNA, 19 nt, Artificial Sequence
  Description of Artificial Sequence: Synthetic oligonucleotide
agccaccuguaaucuaguc

SEQ ID NO: 339026 - RNA, 19 nt, Artificial Sequence
  Description of Artificial Sequence: Synthetic oligonucleotide
cucccaguaacugcggcag

SEQ ID NO: 339027 - RNA, 19 nt, Artificial Sequence
  Description of Artificial Sequence: Synthetic oligonucleotide
gaaaacgaaugauugcauu

SEQ ID NO: 339028 - RNA, 19 nt, Artificial Sequence
  Description of Artificial Sequence: Synthetic oligonucleotide
augggcauagcaggggaag

SEQ ID NO: 339029 - RNA, 19 nt, Artificial Sequence
  Description of Artificial Sequence: Synthetic oligonucleotide
ggaauauguuggugaauug

SEQ ID NO: 339030 - RNA, 19 nt, Artificial Sequence
  Description of Artificial Sequence: Synthetic oligonucleotide
aaagcaccccagauuaaau

SEQ ID NO: 339031 - RNA, 19 nt, Artificial Sequence
  Description of Artificial Sequence: Synthetic oligonucleotide
ugggaccgagccaucuuug

SEQ ID NO: 339032 - RNA, 19 nt, Artificial Sequence
  Description of Artificial Sequence: Synthetic oligonucleotide
uugaccguugguucugcau

SEQ ID NO: 339033 - RNA, 19 nt, Artificial Sequence
  Description of Artificial Sequence: Synthetic oligonucleotide
uggcucggaucccaugggc

SEQ ID NO: 339034 - RNA, 19 nt, Artificial Sequence
  Description of Artificial Sequence: Synthetic oligonucleotide
gaaaucaacguagaaccau

SEQ ID NO: 339035 - RNA, 19 nt, Artificial Sequence
  Description of Artificial Sequence: Synthetic oligonucleotide
ccuuaaacauccucagaac

SEQ ID NO: 339036 - RNA, 19 nt, Artificial Sequence
  Description of Artificial Sequence: Synthetic oligonucleotide
ccaaccauucuacagccac

SEQ ID NO: 339037 - RNA, 19 nt, Artificial Sequence
  Description of Artificial Sequence: Synthetic oligonucleotide
gacucccaguaacugcggc

SEQ ID NO: 339038 - RNA, 19 nt, Artificial Sequence
  Description of Artificial Sequence: Synthetic oligonucleotide
uucacuccuccgaaaucaa

SEQ ID NO: 339039 - RNA, 19 nt, Artificial Sequence
  Description of Artificial Sequence: Synthetic oligonucleotide
uaacugcggcagcaaaccu

SEQ ID NO: 339040 - RNA, 19 nt, Artificial Sequence
  Description of Artificial Sequence: Synthetic oligonucleotide
guaggauuguguuucuccu

SEQ ID NO: 339041 - RNA, 19 nt, Artificial Sequence
  Description of Artificial Sequence: Synthetic oligonucleotide
uugaugggauguagugccu

SEQ ID NO: 339042 - RNA, 19 nt, Artificial Sequence
  Description of Artificial Sequence: Synthetic oligonucleotide
agcaguccaucacaccgcu

SEQ ID NO: 339043 - RNA, 19 nt, Artificial Sequence
  Description of Artificial Sequence: Synthetic oligonucleotide
aacacacgggcagcagcuc

SEQ ID NO: 339044 - RNA, 19 nt, Artificial Sequence
  Description of Artificial Sequence: Synthetic oligonucleotide
ccaaagaauaauuaggaau

SEQ ID NO: 339045 - RNA, 19 nt, Artificial Sequence
  Description of Artificial Sequence: Synthetic oligonucleotide
uuucccuaguagacuuggu

SEQ ID NO: 339046 - RNA, 19 nt, Artificial Sequence
  Description of Artificial Sequence: Synthetic oligonucleotide
cagcgagacuaucauucag

SEQ ID NO: 339047 - RNA, 19 nt, Artificial Sequence
  Description of Artificial Sequence: Synthetic oligonucleotide
gaccugaauuuaaaugaga

SEQ ID NO: 339048 - RNA, 19 nt, Artificial Sequence
  Description of Artificial Sequence: Synthetic oligonucleotide
accgagccaucuuugugca

SEQ ID NO: 339049 - RNA, 19 nt, Artificial Sequence
  Description of Artificial Sequence: Synthetic oligonucleotide
uccaaccauucuacagcca

SEQ ID NO: 339050 - RNA, 19 nt, Artificial Sequence
  Description of Artificial Sequence: Synthetic oligonucleotide
gagcgaauuaaauccaauu

SEQ ID NO: 339051 - RNA, 19 nt, Artificial Sequence
  Description of Artificial Sequence: Synthetic oligonucleotide
auauaauccagaggccaaa

SEQ ID NO: 339052 - RNA, 19 nt, Artificial Sequence
  Description of Artificial Sequence: Synthetic oligonucleotide
aggccaaauuugugcaugu

SEQ ID NO: 339053 - RNA, 19 nt, Artificial Sequence
  Description of Artificial Sequence: Synthetic oligonucleotide
ccaaaaucucugccgaaag

SEQ ID NO: 339054 - RNA, 19 nt, Artificial Sequence
  Description of Artificial Sequence: Synthetic oligonucleotide
accagcuauagcaccagcu

SEQ ID NO: 339055 - RNA, 19 nt, Artificial Sequence
  Description of Artificial Sequence: Synthetic oligonucleotide
acuaaggaugcugcaggca

SEQ ID NO: 339056 - RNA, 19 nt, Artificial Sequence
  Description of Artificial Sequence: Synthetic oligonucleotide
gcugacggcuugaagagag

SEQ ID NO: 339057 - RNA, 19 nt, Artificial Sequence
  Description of Artificial Sequence: Synthetic oligonucleotide
ccaguuuauagccuccgac

SEQ ID NO: 339058 - RNA, 19 nt, Artificial Sequence
  Description of Artificial Sequence: Synthetic oligonucleotide
gguagguaaaguccaaacu

SEQ ID NO: 339059 - RNA, 19 nt, Artificial Sequence
  Description of Artificial Sequence: Synthetic oligonucleotide
auaccagcuauagcaccag

SEQ ID NO: 339060 - RNA, 19 nt, Artificial Sequence
  Description of Artificial Sequence: Synthetic oligonucleotide
ccagaccaaaccuguaggc

SEQ ID NO: 339061 - RNA, 19 nt, Artificial Sequence
  Description of Artificial Sequence: Synthetic oligonucleotide
cugacggcuugaagagagg

SEQ ID NO: 339062 - RNA, 19 nt, Artificial Sequence
  Description of Artificial Sequence: Synthetic oligonucleotide
cccagaccaaaccuguagg

SEQ ID NO: 339063 - RNA, 19 nt, Artificial Sequence
  Description of Artificial Sequence: Synthetic oligonucleotide
ugaugggauguagugccuc

SEQ ID NO: 339064 - RNA, 19 nt, Artificial Sequence
  Description of Artificial Sequence: Synthetic oligonucleotide
ugcccaaaucccaguguau

SEQ ID NO: 339065 - RNA, 19 nt, Artificial Sequence
  Description of Artificial Sequence: Synthetic oligonucleotide
agaggccaaauuugugcau

SEQ ID NO: 339066 - RNA, 19 nt, Artificial Sequence
  Description of Artificial Sequence: Synthetic oligonucleotide
gggagcaauccgcucaaug

SEQ ID NO: 339067 - RNA, 19 nt, Artificial Sequence
  Description of Artificial Sequence: Synthetic oligonucleotide
gagugccaaagaauaauua

SEQ ID NO: 339068 - RNA, 19 nt, Artificial Sequence
  Description of Artificial Sequence: Synthetic oligonucleotide
gaccaaaccuguaggcuga

SEQ ID NO: 339069 - RNA, 19 nt, Artificial Sequence
  Description of Artificial Sequence: Synthetic oligonucleotide
aaagugggaccgagccauc

SEQ ID NO: 339070 - RNA, 19 nt, Artificial Sequence
  Description of Artificial Sequence: Synthetic oligonucleotide
ugccgaaagugggaccgag

SEQ ID NO: 339071 - RNA, 19 nt, Artificial Sequence
  Description of Artificial Sequence: Synthetic oligonucleotide
ggcgacucccaguaacugc

SEQ ID NO: 339072 - RNA, 19 nt, Artificial Sequence
  Description of Artificial Sequence: Synthetic oligonucleotide
caggggagcaauccgcuca

SEQ ID NO: 339073 - RNA, 19 nt, Artificial Sequence
  Description of Artificial Sequence: Synthetic oligonucleotide
uggguguaaccugaccaaa

SEQ ID NO: 339074 - RNA, 19 nt, Artificial Sequence
  Description of Artificial Sequence: Synthetic oligonucleotide
guaaguggucuggccagcc

SEQ ID NO: 339075 - RNA, 19 nt, Artificial Sequence
  Description of Artificial Sequence: Synthetic oligonucleotide
guaaccugaccaaacuucu

SEQ ID NO: 339076 - RNA, 19 nt, Artificial Sequence
  Description of Artificial Sequence: Synthetic oligonucleotide
agccacuugcaagcggauc

SEQ ID NO: 339077 - RNA, 19 nt, Artificial Sequence
  Description of Artificial Sequence: Synthetic oligonucleotide
auccgagucuuuacaaggu

SEQ ID NO: 339078 - RNA, 19 nt, Artificial Sequence
  Description of Artificial Sequence: Synthetic oligonucleotide
ugcuaaggucaugcguccc

SEQ ID NO: 339079 - RNA, 19 nt, Artificial Sequence
  Description of Artificial Sequence: Synthetic oligonucleotide
caauagaacccagaccaaa

SEQ ID NO: 339080 - RNA, 19 nt, Artificial Sequence
  Description of Artificial Sequence: Synthetic oligonucleotide
agagcgaauuaaauccaau

SEQ ID NO: 339081 - RNA, 19 nt, Artificial Sequence
  Description of Artificial Sequence: Synthetic oligonucleotide
ggcagagugccaaagaaua

SEQ ID NO: 339082 - RNA, 19 nt, Artificial Sequence
  Description of Artificial Sequence: Synthetic oligonucleotide
ccaguuaaauggaauaugu

SEQ ID NO: 339083 - RNA, 19 nt, Artificial Sequence
  Description of Artificial Sequence: Synthetic oligonucleotide
ucccaguaacugcggcagc

SEQ ID NO: 339084 - RNA, 19 nt, Artificial Sequence
  Description of Artificial Sequence: Synthetic oligonucleotide
gacucagcgagacuaucau

SEQ ID NO: 339085 - RNA, 19 nt, Artificial Sequence
  Description of Artificial Sequence: Synthetic oligonucleotide
cagcuauagcaccagcuaa

SEQ ID NO: 339086 - RNA, 19 nt, Artificial Sequence
  Description of Artificial Sequence: Synthetic oligonucleotide
guccccuuggcucguauaa

SEQ ID NO: 339087 - RNA, 19 nt, Artificial Sequence
  Description of Artificial Sequence: Synthetic oligonucleotide
caguccaucacaccgcugu

SEQ ID NO: 339088 - RNA, 19 nt, Artificial Sequence
  Description of Artificial Sequence: Synthetic oligonucleotide
agcuucugaccaugauaca

SEQ ID NO: 339089 - RNA, 19 nt, Artificial Sequence
  Description of Artificial Sequence: Synthetic oligonucleotide
gccaguaacauuugaggua

SEQ ID NO: 339090 - RNA, 19 nt, Artificial Sequence
  Description of Artificial Sequence: Synthetic oligonucleotide
uuauagccuccgacauggu

SEQ ID NO: 339091 - RNA, 19 nt, Artificial Sequence
  Description of Artificial Sequence: Synthetic oligonucleotide
cagacuuacucuagaucaa

SEQ ID NO: 339092 - RNA, 19 nt, Artificial Sequence
  Description of Artificial Sequence: Synthetic oligonucleotide
acgaaugauugcauuuaau

SEQ ID NO: 339093 - RNA, 19 nt, Artificial Sequence
  Description of Artificial Sequence: Synthetic oligonucleotide
acucagcgagacuaucauu

SEQ ID NO: 339094 - RNA, 19 nt, Artificial Sequence
  Description of Artificial Sequence: Synthetic oligonucleotide
gucugcuaaggucaugcgu

SEQ ID NO: 339095 - RNA, 19 nt, Artificial Sequence
  Description of Artificial Sequence: Synthetic oligonucleotide
gcgagcuggagaagaaagg

SEQ ID NO: 339096 - RNA, 19 nt, Artificial Sequence
  Description of Artificial Sequence: Synthetic oligonucleotide
ggugaggaccggaacacac

SEQ ID NO: 339097 - RNA, 19 nt, Artificial Sequence
  Description of Artificial Sequence: Synthetic oligonucleotide
gugguggacauuauucuua

SEQ ID NO: 339098 - RNA, 19 nt, Artificial Sequence
  Description of Artificial Sequence: Synthetic oligonucleotide
ccgaaggaucuuucuaaag

SEQ ID NO: 339099 - RNA, 19 nt, Artificial Sequence
  Description of Artificial Sequence: Synthetic oligonucleotide
aauuugagucggggcugga

SEQ ID NO: 339100 - RNA, 19 nt, Artificial Sequence
  Description of Artificial Sequence: Synthetic oligonucleotide
cccaguuaaauggaauaug

SEQ ID NO: 339101 - RNA, 19 nt, Artificial Sequence
  Description of Artificial Sequence: Synthetic oligonucleotide
cagcuaagagcaggcuucc

SEQ ID NO: 339102 - RNA, 19 nt, Artificial Sequence
  Description of Artificial Sequence: Synthetic oligonucleotide
gcuucugaccaugauacaa

SEQ ID NO: 339103 - RNA, 19 nt, Artificial Sequence
  Description of Artificial Sequence: Synthetic oligonucleotide
cacaccgcuguaagugguc

SEQ ID NO: 339104 - RNA, 19 nt, Artificial Sequence
  Description of Artificial Sequence: Synthetic oligonucleotide
cauugaccugaauuuaaau

SEQ ID NO: 339105 - RNA, 19 nt, Artificial Sequence
  Description of Artificial Sequence: Synthetic oligonucleotide
uaggaaccaugguugccuu

SEQ ID NO: 339106 - RNA, 19 nt, Artificial Sequence
  Description of Artificial Sequence: Synthetic oligonucleotide
cugaaacaagaugucaacu

SEQ ID NO: 339107 - RNA, 19 nt, Artificial Sequence
  Description of Artificial Sequence: Synthetic oligonucleotide
auacaaguauuaaccccaa

SEQ ID NO: 339108 - RNA, 19 nt, Artificial Sequence
  Description of Artificial Sequence: Synthetic oligonucleotide
acaccgcuguaaguggucu

SEQ ID NO: 339109 - RNA, 19 nt, Artificial Sequence
  Description of Artificial Sequence: Synthetic oligonucleotide
auaagucagcaaggugaca

SEQ ID NO: 339110 - RNA, 19 nt, Artificial Sequence
  Description of Artificial Sequence: Synthetic oligonucleotide
accguugguucugcauccg

SEQ ID NO: 339111 - RNA, 19 nt, Artificial Sequence
  Description of Artificial Sequence: Synthetic oligonucleotide
accaaaccuguaggcugac

SEQ ID NO: 339112 - RNA, 19 nt, Artificial Sequence
  Description of Artificial Sequence: Synthetic oligonucleotide
aaccaucgcugcagcaacu

SEQ ID NO: 339113 - RNA, 19 nt, Artificial Sequence
  Description of Artificial Sequence: Synthetic oligonucleotide
aguacgcuugugccagcau

SEQ ID NO: 339114 - RNA, 19 nt, Artificial Sequence
  Description of Artificial Sequence: Synthetic oligonucleotide
aggggagcaauccgcucaa

SEQ ID NO: 339115 - RNA, 19 nt, Artificial Sequence
  Description of Artificial Sequence: Synthetic oligonucleotide
gacuaucauucagguagga

SEQ ID NO: 339116 - RNA, 19 nt, Artificial Sequence
  Description of Artificial Sequence: Synthetic oligonucleotide
aacgagccgguugaccguu

SEQ ID NO: 339117 - RNA, 19 nt, Artificial Sequence
  Description of Artificial Sequence: Synthetic oligonucleotide
ccaugauacaaagcacccc

SEQ ID NO: 339118 - RNA, 19 nt, Artificial Sequence
  Description of Artificial Sequence: Synthetic oligonucleotide
ggcauaccagcuauagcac

SEQ ID NO: 339119 - RNA, 19 nt, Artificial Sequence
  Description of Artificial Sequence: Synthetic oligonucleotide
gaguaggauuguguuucuc

SEQ ID NO: 339120 - RNA, 19 nt, Artificial Sequence
  Description of Artificial Sequence: Synthetic oligonucleotide
ugcugacggcuugaagaga

SEQ ID NO: 339121 - RNA, 19 nt, Artificial Sequence
  Description of Artificial Sequence: Synthetic oligonucleotide
ccuaauuuccuuucagacu

SEQ ID NO: 339122 - RNA, 19 nt, Artificial Sequence
  Description of Artificial Sequence: Synthetic oligonucleotide
cgcucaaugucugcuaagg

SEQ ID NO: 339123 - RNA, 19 nt, Artificial Sequence
  Description of Artificial Sequence: Synthetic oligonucleotide
cucgcaccacagacagagc

SEQ ID NO: 339124 - RNA, 19 nt, Artificial Sequence
  Description of Artificial Sequence: Synthetic oligonucleotide
cguugguucugcauccgag

SEQ ID NO: 339125 - RNA, 19 nt, Artificial Sequence
  Description of Artificial Sequence: Synthetic oligonucleotide
ccgagucuuuacaagguca

SEQ ID NO: 339126 - RNA, 19 nt, Artificial Sequence
  Description of Artificial Sequence: Synthetic oligonucleotide
caaggucucgcaccacaga

SEQ ID NO: 339127 - RNA, 19 nt, Artificial Sequence
  Description of Artificial Sequence: Synthetic oligonucleotide
agccgguugaccguugguu

SEQ ID NO: 339128 - RNA, 19 nt, Artificial Sequence
  Description of Artificial Sequence: Synthetic oligonucleotide
gcauuccuucuuccagggg

SEQ ID NO: 339129 - RNA, 19 nt, Artificial Sequence
  Description of Artificial Sequence: Synthetic oligonucleotide
gacgaucucuaaaggauuu

SEQ ID NO: 339130 - RNA, 19 nt, Artificial Sequence
  Description of Artificial Sequence: Synthetic oligonucleotide
caccgcuguaaguggucug

SEQ ID NO: 339131 - RNA, 19 nt, Artificial Sequence
  Description of Artificial Sequence: Synthetic oligonucleotide
caguuaaauggaauauguu

SEQ ID NO: 339132 - RNA, 19 nt, Artificial Sequence
  Description of Artificial Sequence: Synthetic oligonucleotide
cugcuaacugaaacaagau

SEQ ID NO: 339133 - RNA, 19 nt, Artificial Sequence
  Description of Artificial Sequence: Synthetic oligonucleotide
aggucucgcaccacagaca

SEQ ID NO: 339134 - RNA, 19 nt, Artificial Sequence
  Description of Artificial Sequence: Synthetic oligonucleotide
caacuuccauggguguaac

SEQ ID NO: 339135 - RNA, 19 nt, Artificial Sequence
  Description of Artificial Sequence: Synthetic oligonucleotide
gccgguugaccguugguuc

SEQ ID NO: 339136 - RNA, 19 nt, Artificial Sequence
  Description of Artificial Sequence: Synthetic oligonucleotide
ggguguaaccugaccaaac

SEQ ID NO: 339137 - RNA, 19 nt, Artificial Sequence
  Description of Artificial Sequence: Synthetic oligonucleotide
acgcuugugccagcaugag

SEQ ID NO: 339138 - RNA, 19 nt, Artificial Sequence
  Description of Artificial Sequence: Synthetic oligonucleotide
ccacaaacgagccgguuga

SEQ ID NO: 339139 - RNA, 19 nt, Artificial Sequence
  Description of Artificial Sequence: Synthetic oligonucleotide
gccaccuguaaucuagucu

SEQ ID NO: 339140 - RNA, 19 nt, Artificial Sequence
  Description of Artificial Sequence: Synthetic oligonucleotide
uccccuuggcucguauaaa

SEQ ID NO: 339141 - RNA, 19 nt, Artificial Sequence
  Description of Artificial Sequence: Synthetic oligonucleotide
ggugaagccacgcuucaau

SEQ ID NO: 339142 - RNA, 19 nt, Artificial Sequence
  Description of Artificial Sequence: Synthetic oligonucleotide
caugggcauagcaggggaa

SEQ ID NO: 339143 - RNA, 19 nt, Artificial Sequence
  Description of Artificial Sequence: Synthetic oligonucleotide
guugaccguugguucugca

SEQ ID NO: 339144 - RNA, 19 nt, Artificial Sequence
  Description of Artificial Sequence: Synthetic oligonucleotide
gacggcuugaagagaggua

SEQ ID NO: 339145 - RNA, 19 nt, Artificial Sequence
  Description of Artificial Sequence: Synthetic oligonucleotide
cucggaucccaugggcuuc

SEQ ID NO: 339146 - RNA, 19 nt, Artificial Sequence
  Description of Artificial Sequence: Synthetic oligonucleotide
cuccgaaaucaacguagaa

SEQ ID NO: 339147 - RNA, 19 nt, Artificial Sequence
  Description of Artificial Sequence: Synthetic oligonucleotide
guugcaacugccaguuuau

SEQ ID NO: 339148 - RNA, 19 nt, Artificial Sequence
  Description of Artificial Sequence: Synthetic oligonucleotide
cugacucagcgagcuggag

SEQ ID NO: 339149 - RNA, 19 nt, Artificial Sequence
  Description of Artificial Sequence: Synthetic oligonucleotide
cagaccaaaccuguaggcu

SEQ ID NO: 339150 - RNA, 19 nt, Artificial Sequence
  Description of Artificial Sequence: Synthetic oligonucleotide
ccaccuguaaucuagucuu

SEQ ID NO: 339151 - RNA, 19 nt, Artificial Sequence
  Description of Artificial Sequence: Synthetic oligonucleotide
gcgagacuaucauucaggu

SEQ ID NO: 339152 - RNA, 19 nt, Artificial Sequence
  Description of Artificial Sequence: Synthetic oligonucleotide
cacaaacgagccgguugac

SEQ ID NO: 339153 - RNA, 19 nt, Artificial Sequence
  Description of Artificial Sequence: Synthetic oligonucleotide
gucugacaugauucaagau

SEQ ID NO: 339154 - RNA, 19 nt, Artificial Sequence
  Description of Artificial Sequence: Synthetic oligonucleotide
aacccagaccaaaccugua

SEQ ID NO: 339155 - RNA, 19 nt, Artificial Sequence
  Description of Artificial Sequence: Synthetic oligonucleotide
agucggggcuggauauuug

SEQ ID NO: 339156 - RNA, 19 nt, Artificial Sequence
  Description of Artificial Sequence: Synthetic oligonucleotide
gccaaaaucucugccgaaa

SEQ ID NO: 339157 - RNA, 19 nt, Artificial Sequence
  Description of Artificial Sequence: Synthetic oligonucleotide
ggcucguauaaaucugcua

SEQ ID NO: 339158 - RNA, 19 nt, Artificial Sequence
  Description of Artificial Sequence: Synthetic oligonucleotide
ccgggauuuaggagcuggc

SEQ ID NO: 339159 - RNA, 19 nt, Artificial Sequence
  Description of Artificial Sequence: Synthetic oligonucleotide
ccuucacaugggcauagca

SEQ ID NO: 339160 - RNA, 19 nt, Artificial Sequence
  Description of Artificial Sequence: Synthetic oligonucleotide
gggcagcccuccuacgggc

SEQ ID NO: 339161 - RNA, 19 nt, Artificial Sequence
  Description of Artificial Sequence: Synthetic oligonucleotide
ccagcuauagcaccagcua

SEQ ID NO: 339162 - RNA, 19 nt, Artificial Sequence
  Description of Artificial Sequence: Synthetic oligonucleotide
guuugugggcagagugcca

SEQ ID NO: 339163 - RNA, 19 nt, Artificial Sequence
  Description of Artificial Sequence: Synthetic oligonucleotide
cccaaaucccaguguauaa

SEQ ID NO: 339164 - RNA, 19 nt, Artificial Sequence
  Description of Artificial Sequence: Synthetic oligonucleotide
ccuccgaaaucaacguaga

SEQ ID NO: 339165 - RNA, 19 nt, Artificial Sequence
  Description of Artificial Sequence: Synthetic oligonucleotide
cuccuccgaaaucaacgua

SEQ ID NO: 339166 - RNA, 19 nt, Artificial Sequence
  Description of Artificial Sequence: Synthetic oligonucleotide
gccaguuuauagccuccga

SEQ ID NO: 339167 - RNA, 19 nt, Artificial Sequence
  Description of Artificial Sequence: Synthetic oligonucleotide
cgaaaucaacguagaacca

SEQ ID NO: 339168 - RNA, 19 nt, Artificial Sequence
  Description of Artificial Sequence: Synthetic oligonucleotide
cuauuaccuuaaacauccu

SEQ ID NO: 339169 - RNA, 19 nt, Artificial Sequence
  Description of Artificial Sequence: Synthetic oligonucleotide
cgcaccacagacagagcac

SEQ ID NO: 339170 - RNA, 19 nt, Artificial Sequence
  Description of Artificial Sequence: Synthetic oligonucleotide
gcggcagcaaaccucugua

SEQ ID NO: 339171 - RNA, 19 nt, Artificial Sequence
  Description of Artificial Sequence: Synthetic oligonucleotide
gguugaccguugguucugc

SEQ ID NO: 339172 - RNA, 19 nt, Artificial Sequence
  Description of Artificial Sequence: Synthetic oligonucleotide
cuaaggucaugcguccccu

SEQ ID NO: 339173 - RNA, 19 nt, Artificial Sequence
  Description of Artificial Sequence: Synthetic oligonucleotide
caggaguaggauuguguuu

SEQ ID NO: 339174 - RNA, 19 nt, Artificial Sequence
  Description of Artificial Sequence: Synthetic oligonucleotide
auguugcaacugccaguuu

SEQ ID NO: 339175 - RNA, 19 nt, Artificial Sequence
  Description of Artificial Sequence: Synthetic oligonucleotide
gcggagcacuuucuuaaaa

SEQ ID NO: 339176 - RNA, 19 nt, Artificial Sequence
  Description of Artificial Sequence: Synthetic oligonucleotide
gugggaccgagccaucuuu

SEQ ID NO: 339177 - RNA, 19 nt, Artificial Sequence
  Description of Artificial Sequence: Synthetic oligonucleotide
cccuaguagacuugguacu

SEQ ID NO: 339178 - RNA, 19 nt, Artificial Sequence
  Description of Artificial Sequence: Synthetic oligonucleotide
gggcgacucccaguaacug

SEQ ID NO: 339179 - RNA, 19 nt, Artificial Sequence
  Description of Artificial Sequence: Synthetic oligonucleotide
gccgaaagugggaccgagc

SEQ ID NO: 339180 - RNA, 19 nt, Artificial Sequence
  Description of Artificial Sequence: Synthetic oligonucleotide
ggcaaaugggugccagcua

SEQ ID NO: 339181 - RNA, 19 nt, Artificial Sequence
  Description of Artificial Sequence: Synthetic oligonucleotide
guagacucagcgagacuau

SEQ ID NO: 339182 - RNA, 19 nt, Artificial Sequence
  Description of Artificial Sequence: Synthetic oligonucleotide
cagcuacuagacauucuuu

SEQ ID NO: 339183 - RNA, 19 nt, Artificial Sequence
  Description of Artificial Sequence: Synthetic oligonucleotide
cccgaaggaucuuucuaaa

SEQ ID NO: 339184 - RNA, 19 nt, Artificial Sequence
  Description of Artificial Sequence: Synthetic oligonucleotide
gagccgguugaccguuggu

SEQ ID NO: 339185 - RNA, 19 nt, Artificial Sequence
  Description of Artificial Sequence: Synthetic oligonucleotide
gagucggggcuggauauuu

SEQ ID NO: 339186 - RNA, 19 nt, Artificial Sequence
  Description of Artificial Sequence: Synthetic oligonucleotide
cgcuucaaucugagauggg

SEQ ID NO: 339187 - RNA, 19 nt, Artificial Sequence
  Description of Artificial Sequence: Synthetic oligonucleotide
auccgggauuuaggagcug

SEQ ID NO: 339188 - RNA, 19 nt, Artificial Sequence
  Description of Artificial Sequence: Synthetic oligonucleotide
ccuaguagacuugguacua

SEQ ID NO: 339189 - RNA, 19 nt, Artificial Sequence
  Description of Artificial Sequence: Synthetic oligonucleotide
cggggcgacucccaguaac

SEQ ID NO: 339190 - RNA, 19 nt, Artificial Sequence
  Description of Artificial Sequence: Synthetic oligonucleotide
cagcgagcuggagaagaaa

SEQ ID NO: 339191 - RNA, 19 nt, Artificial Sequence
  Description of Artificial Sequence: Synthetic oligonucleotide
cgagccgguugaccguugg

SEQ ID NO: 339192 - RNA, 19 nt, Artificial Sequence
  Description of Artificial Sequence: Synthetic oligonucleotide
gcugacucagcgagcugga

SEQ ID NO: 339193 - RNA, 19 nt, Artificial Sequence
  Description of Artificial Sequence: Synthetic oligonucleotide
cgacauggucaggauuggg

SEQ ID NO: 339194 - RNA, 19 nt, Artificial Sequence
  Description of Artificial Sequence: Synthetic oligonucleotide
gggaccgagccaucuuugu

SEQ ID NO: 339195 - RNA, 19 nt, Artificial Sequence
  Description of Artificial Sequence: Synthetic oligonucleotide
agccuccgacauggucagg

SEQ ID NO: 339196 - RNA, 19 nt, Artificial Sequence
  Description of Artificial Sequence: Synthetic oligonucleotide
gcagaguaauccgggauuu

SEQ ID NO: 339197 - RNA, 19 nt, Artificial Sequence
  Description of Artificial Sequence: Synthetic oligonucleotide
gccuucacaugggcauagc

SEQ ID NO: 339198 - RNA, 19 nt, Artificial Sequence
  Description of Artificial Sequence: Synthetic oligonucleotide
ggggccaguggugaucucu

SEQ ID NO: 339199 - RNA, 19 nt, Artificial Sequence
  Description of Artificial Sequence: Synthetic oligonucleotide
uggggccaguggugaucuc

SEQ ID NO: 339200 - RNA, 19 nt, Artificial Sequence
  Description of Artificial Sequence: Synthetic oligonucleotide
acgagccgguugaccguug

SEQ ID NO: 339201 - RNA, 19 nt, Artificial Sequence
  Description of Artificial Sequence: Synthetic oligonucleotide
gccuuucaguagacucagc

SEQ ID NO: 339202 - RNA, 19 nt, Artificial Sequence
  Description of Artificial Sequence: Synthetic oligonucleotide
gggugggaguacgcuugug

SEQ ID NO: 339203 - RNA, 19 nt, Artificial Sequence
  Description of Artificial Sequence: Synthetic oligonucleotide
cugccgaaagugggaccga

SEQ ID NO: 339204 - RNA, 19 nt, Artificial Sequence
  Description of Artificial Sequence: Synthetic oligonucleotide
gcaguccaucacaccgcug

SEQ ID NO: 339205 - RNA, 19 nt, Artificial Sequence
  Description of Artificial Sequence: Synthetic oligonucleotide
cgaucucuaaaggauuugu

SEQ ID NO: 339206 - RNA, 19 nt, Artificial Sequence
  Description of Artificial Sequence: Synthetic oligonucleotide
ggggcgacucccaguaacu

SEQ ID NO: 339207 - RNA, 19 nt, Artificial Sequence
  Description of Artificial Sequence: Synthetic oligonucleotide
cgagacuaucauucaggua

SEQ ID NO: 339208 - RNA, 19 nt, Artificial Sequence
  Description of Artificial Sequence: Synthetic oligonucleotide
ccguugguucugcauccga

SEQ ID NO: 339209 - RNA, 19 nt, Artificial Sequence
  Description of Artificial Sequence: Synthetic oligonucleotide
ccccuuggcucguauaaau

SEQ ID NO: 339210 - RNA, 19 nt, Artificial Sequence
  Description of Artificial Sequence: Synthetic oligonucleotide
ccgguugaccguugguucu

SEQ ID NO: 339211 - RNA, 19 nt, Artificial Sequence
  Description of Artificial Sequence: Synthetic oligonucleotide
cgguugaccguugguucug

SEQ ID NO: 339212 - RNA, 19 nt, Artificial Sequence
  Description of Artificial Sequence: Synthetic oligonucleotide
ugcguccccuuggcucgua

SEQ ID NO: 339213 - RNA, 19 nt, Artificial Sequence
  Description of Artificial Sequence: Synthetic oligonucleotide
gggucucagccaaguugaa

SEQ ID NO: 339214 - RNA, 19 nt, Artificial Sequence
  Description of Artificial Sequence: Synthetic oligonucleotide
gagcuggcucggaucccau

SEQ ID NO: 339215 - RNA, 19 nt, Artificial Sequence
  Description of Artificial Sequence: Synthetic oligonucleotide
ccuccgacauggucaggau

SEQ ID NO: 339216 - RNA, 19 nt, Artificial Sequence
  Description of Artificial Sequence: Synthetic oligonucleotide
gcggcagcuacuagacauu

SEQ ID NO: 339217 - RNA, 19 nt, Artificial Sequence
  Description of Artificial Sequence: Synthetic oligonucleotide
cguccccuuggcucguaua

SEQ ID NO: 339218 - RNA, 19 nt, Artificial Sequence
  Description of Artificial Sequence: Synthetic oligonucleotide
gcguccccuuggcucguau

SEQ ID NO: 339219 - RNA, 19 nt, Artificial Sequence
  Description of Artificial Sequence: Synthetic oligonucleotide
ccggggcgacucccaguaa

SEQ ID NO: 339220 - RNA, 19 nt, Artificial Sequence
  Description of Artificial Sequence: Synthetic oligonucleotide
aaaacacgaagauggaucc

SEQ ID NO: 339221 - RNA, 19 nt, Artificial Sequence
  Description of Artificial Sequence: Synthetic oligonucleotide
uuuuauaucagaguguacc

SEQ ID NO: 339222 - RNA, 19 nt, Artificial Sequence
  Description of Artificial Sequence: Synthetic oligonucleotide
aauauuaaguccaagggca

SEQ ID NO: 339223 - RNA, 19 nt, Artificial Sequence
  Description of Artificial Sequence: Synthetic oligonucleotide
ucuauagcagaucauuagg

SEQ ID NO: 339224 - RNA, 19 nt, Artificial Sequence
  Description of Artificial Sequence: Synthetic oligonucleotide
cuuaagaguacuaaagagc

SEQ ID NO: 339225 - RNA, 19 nt, Artificial Sequence
  Description of Artificial Sequence: Synthetic oligonucleotide
aaagagauguuccugauuu

SEQ ID NO: 339226 - RNA, 19 nt, Artificial Sequence
  Description of Artificial Sequence: Synthetic oligonucleotide
uuacaaacccauauuauca

SEQ ID NO: 339227 - RNA, 19 nt, Artificial Sequence
  Description of Artificial Sequence: Synthetic oligonucleotide
uacgugguaauucacaggc

SEQ ID NO: 339228 - RNA, 19 nt, Artificial Sequence
  Description of Artificial Sequence: Synthetic oligonucleotide
agcacuguagcccaugggc

SEQ ID NO: 339229 - RNA, 19 nt, Artificial Sequence
  Description of Artificial Sequence: Synthetic oligonucleotide
guaccaugcacucugaagg

SEQ ID NO: 339230 - RNA, 19 nt, Artificial Sequence
  Description of Artificial Sequence: Synthetic oligonucleotide
gaucauuagguauaauaag

SEQ ID NO: 339231 - RNA, 19 nt, Artificial Sequence
  Description of Artificial Sequence: Synthetic oligonucleotide
uauucucuauagcagauca

SEQ ID NO: 339232 - RNA, 19 nt, Artificial Sequence
  Description of Artificial Sequence: Synthetic oligonucleotide
uacuaaagagccaagugug

SEQ ID NO: 339233 - RNA, 19 nt, Artificial Sequence
  Description of Artificial Sequence: Synthetic oligonucleotide
acuaugauacaacuggaag

SEQ ID NO: 339234 - RNA, 19 nt, Artificial Sequence
  Description of Artificial Sequence: Synthetic oligonucleotide
aagguacccagacuugugc

SEQ ID NO: 339235 - RNA, 19 nt, Artificial Sequence
  Description of Artificial Sequence: Synthetic oligonucleotide
uguccuuaagcauuccucg

SEQ ID NO: 339236 - RNA, 19 nt, Artificial Sequence
  Description of Artificial Sequence: Synthetic oligonucleotide
uucucauaaauauuaaguc

SEQ ID NO: 339237 - RNA, 19 nt, Artificial Sequence
  Description of Artificial Sequence: Synthetic oligonucleotide
aauaaguccaacaacguau

SEQ ID NO: 339238 - RNA, 19 nt, Artificial Sequence
  Description of Artificial Sequence: Synthetic oligonucleotide
acaaaaucgauuugagcuc

SEQ ID NO: 339239 - RNA, 19 nt, Artificial Sequence
  Description of Artificial Sequence: Synthetic oligonucleotide
ggcacuaugauacaacugg

SEQ ID NO: 339240 - RNA, 19 nt, Artificial Sequence
  Description of Artificial Sequence: Synthetic oligonucleotide
aacguaugcuaccaguaag

SEQ ID NO: 339241 - RNA, 19 nt, Artificial Sequence
  Description of Artificial Sequence: Synthetic oligonucleotide
uuccuuguuauaauccccg

SEQ ID NO: 339242 - RNA, 19 nt, Artificial Sequence
  Description of Artificial Sequence: Synthetic oligonucleotide
caaguuucaaccagguagg

SEQ ID NO: 339243 - RNA, 19 nt, Artificial Sequence
  Description of Artificial Sequence: Synthetic oligonucleotide
uguacgugguaauucacag

SEQ ID NO: 339244 - RNA, 19 nt, Artificial Sequence
  Description of Artificial Sequence: Synthetic oligonucleotide
uuuauaucagaguguacca

SEQ ID NO: 339245 - RNA, 19 nt, Artificial Sequence
  Description of Artificial Sequence: Synthetic oligonucleotide
aguacuaaagagccaagug

SEQ ID NO: 339246 - RNA, 19 nt, Artificial Sequence
  Description of Artificial Sequence: Synthetic oligonucleotide
acuagagagaguauggcac

SEQ ID NO: 339247 - RNA, 19 nt, Artificial Sequence
  Description of Artificial Sequence: Synthetic oligonucleotide
caaaacacgaagauggauc

SEQ ID NO: 339248 - RNA, 19 nt, Artificial Sequence
  Description of Artificial Sequence: Synthetic oligonucleotide
uauaucagaguguaccaug

SEQ ID NO: 339249 - RNA, 19 nt, Artificial Sequence
  Description of Artificial Sequence: Synthetic oligonucleotide
ucauuagguauaauaaguc

SEQ ID NO: 339250 - RNA, 19 nt, Artificial Sequence
  Description of Artificial Sequence: Synthetic oligonucleotide
cagguauuccaacauagcg

SEQ ID NO: 339251 - RNA, 19 nt, Artificial Sequence
  Description of Artificial Sequence: Synthetic oligonucleotide
agguauuccaacauagcgc

SEQ ID NO: 339252 - RNA, 19 nt, Artificial Sequence
  Description of Artificial Sequence: Synthetic oligonucleotide
uacaacuggaaguaaccag

SEQ ID NO: 339253 - RNA, 19 nt, Artificial Sequence
  Description of Artificial Sequence: Synthetic oligonucleotide
cccacuaacauauauacag

SEQ ID NO: 339254 - RNA, 19 nt, Artificial Sequence
  Description of Artificial Sequence: Synthetic oligonucleotide
aacaacguaugcuaccagu

SEQ ID NO: 339255 - RNA, 19 nt, Artificial Sequence
  Description of Artificial Sequence: Synthetic oligonucleotide
uguaccaugcacucugaag

SEQ ID NO: 339256 - RNA, 19 nt, Artificial Sequence
  Description of Artificial Sequence: Synthetic oligonucleotide
guugaucccauacauuucc

SEQ ID NO: 339257 - RNA, 19 nt, Artificial Sequence
  Description of Artificial Sequence: Synthetic oligonucleotide
uuguuauaauccccgaacu

SEQ ID NO: 339258 - RNA, 19 nt, Artificial Sequence
  Description of Artificial Sequence: Synthetic oligonucleotide
uguucugcgugccacaccu

SEQ ID NO: 339259 - RNA, 19 nt, Artificial Sequence
  Description of Artificial Sequence: Synthetic oligonucleotide
uccaacauagcgcuguccu

SEQ ID NO: 339260 - RNA, 19 nt, Artificial Sequence
  Description of Artificial Sequence: Synthetic oligonucleotide
ucccaugucggauuaagug

SEQ ID NO: 339261 - RNA, 19 nt, Artificial Sequence
  Description of Artificial Sequence: Synthetic oligonucleotide
uaugauacaacuggaagua

SEQ ID NO: 339262 - RNA, 19 nt, Artificial Sequence
  Description of Artificial Sequence: Synthetic oligonucleotide
agauggauccuucauagaa

SEQ ID NO: 339263 - RNA, 19 nt, Artificial Sequence
  Description of Artificial Sequence: Synthetic oligonucleotide
uggccuggccuuuacaugg

SEQ ID NO: 339264 - RNA, 19 nt, Artificial Sequence
  Description of Artificial Sequence: Synthetic oligonucleotide
agguauaauaaguccaaca

SEQ ID NO: 339265 - RNA, 19 nt, Artificial Sequence
  Description of Artificial Sequence: Synthetic oligonucleotide
auaucagaguguaccaugc

SEQ ID NO: 339266 - RNA, 19 nt, Artificial Sequence
  Description of Artificial Sequence: Synthetic oligonucleotide
aguccaagggcaucaacuc

SEQ ID NO: 339267 - RNA, 19 nt, Artificial Sequence
  Description of Artificial Sequence: Synthetic oligonucleotide
uguaacuccuccuugguuu

SEQ ID NO: 339268 - RNA, 19 nt, Artificial Sequence
  Description of Artificial Sequence: Synthetic oligonucleotide
uuuacauggccucgaauuc

SEQ ID NO: 339269 - RNA, 19 nt, Artificial Sequence
  Description of Artificial Sequence: Synthetic oligonucleotide
gaauucgucgauccgcugc

SEQ ID NO: 339270 - RNA, 19 nt, Artificial Sequence
  Description of Artificial Sequence: Synthetic oligonucleotide
aucauuagguauaauaagu

SEQ ID NO: 339271 - RNA, 19 nt, Artificial Sequence
  Description of Artificial Sequence: Synthetic oligonucleotide
ucucgaucugcucggagag

SEQ ID NO: 339272 - RNA, 19 nt, Artificial Sequence
  Description of Artificial Sequence: Synthetic oligonucleotide
auaggaccccaguagcacc

SEQ ID NO: 339273 - RNA, 19 nt, Artificial Sequence
  Description of Artificial Sequence: Synthetic oligonucleotide
ucgggguagaacuuggccc

SEQ ID NO: 339274 - RNA, 19 nt, Artificial Sequence
  Description of Artificial Sequence: Synthetic oligonucleotide
uaauaaguccaacaacgua

SEQ ID NO: 339275 - RNA, 19 nt, Artificial Sequence
  Description of Artificial Sequence: Synthetic oligonucleotide
aacuccaagccaaaggucu

SEQ ID NO: 339276 - RNA, 19 nt, Artificial Sequence
  Description of Artificial Sequence: Synthetic oligonucleotide
cuaccaguaagcaugaaaa

SEQ ID NO: 339277 - RNA, 19 nt, Artificial Sequence
  Description of Artificial Sequence: Synthetic oligonucleotide
aauucgucgauccgcugcu

SEQ ID NO: 339278 - RNA, 19 nt, Artificial Sequence
  Description of Artificial Sequence: Synthetic oligonucleotide
uacaaacccauauuaucac

SEQ ID NO: 339279 - RNA, 19 nt, Artificial Sequence
  Description of Artificial Sequence: Synthetic oligonucleotide
cauagcgcuguccuuaagc

SEQ ID NO: 339280 - RNA, 19 nt, Artificial Sequence
  Description of Artificial Sequence: Synthetic oligonucleotide
ucuuauucucaucccgggc

SEQ ID NO: 339281 - RNA, 19 nt, Artificial Sequence
  Description of Artificial Sequence: Synthetic oligonucleotide
uuacauggccucgaauucg

SEQ ID NO: 339282 - RNA, 19 nt, Artificial Sequence
  Description of Artificial Sequence: Synthetic oligonucleotide
gguauaauaaguccaacaa

SEQ ID NO: 339283 - RNA, 19 nt, Artificial Sequence
  Description of Artificial Sequence: Synthetic oligonucleotide
aaagcuguuucccgguggu

SEQ ID NO: 339284 - RNA, 19 nt, Artificial Sequence
  Description of Artificial Sequence: Synthetic oligonucleotide
acaguagucaguuucccaa

SEQ ID NO: 339285 - RNA, 19 nt, Artificial Sequence
  Description of Artificial Sequence: Synthetic oligonucleotide
uauagcagaucauuaggua

SEQ ID NO: 339286 - RNA, 19 nt, Artificial Sequence
  Description of Artificial Sequence: Synthetic oligonucleotide
cauaaugcccucacuggag

SEQ ID NO: 339287 - RNA, 19 nt, Artificial Sequence
  Description of Artificial Sequence: Synthetic oligonucleotide
agcuaagguacccagacuu

SEQ ID NO: 339288 - RNA, 19 nt, Artificial Sequence
  Description of Artificial Sequence: Synthetic oligonucleotide
uuggcccggaauuugaacu

SEQ ID NO: 339289 - RNA, 19 nt, Artificial Sequence
  Description of Artificial Sequence: Synthetic oligonucleotide
uuggcacuaugauacaacu

SEQ ID NO: 339290 - RNA, 19 nt, Artificial Sequence
  Description of Artificial Sequence: Synthetic oligonucleotide
cuugucccgaccuugccgc

SEQ ID NO: 339291 - RNA, 19 nt, Artificial Sequence
  Description of Artificial Sequence: Synthetic oligonucleotide
uagaacuuggcccggaauu

SEQ ID NO: 339292 - RNA, 19 nt, Artificial Sequence
  Description of Artificial Sequence: Synthetic oligonucleotide
cauuccucgguguucugcg

SEQ ID NO: 339293 - RNA, 19 nt, Artificial Sequence
  Description of Artificial Sequence: Synthetic oligonucleotide
uccaacaacguaugcuacc

SEQ ID NO: 339294 - RNA, 19 nt, Artificial Sequence
  Description of Artificial Sequence: Synthetic oligonucleotide
uaggaccccaguagcaccg

SEQ ID NO: 339295 - RNA, 19 nt, Artificial Sequence
  Description of Artificial Sequence: Synthetic oligonucleotide
guuucuagacuuaagagua

SEQ ID NO: 339296 - RNA, 19 nt, Artificial Sequence
  Description of Artificial Sequence: Synthetic oligonucleotide
ucuggcgggcaguagaucu

SEQ ID NO: 339297 - RNA, 19 nt, Artificial Sequence
  Description of Artificial Sequence: Synthetic oligonucleotide
gauucgguccucccacugg

SEQ ID NO: 339298 - RNA, 19 nt, Artificial Sequence
  Description of Artificial Sequence: Synthetic oligonucleotide
auagcgcuguccuuaagca

SEQ ID NO: 339299 - RNA, 19 nt, Artificial Sequence
  Description of Artificial Sequence: Synthetic oligonucleotide
ugggacaacucguugcuca

SEQ ID NO: 339300 - RNA, 19 nt, Artificial Sequence
  Description of Artificial Sequence: Synthetic oligonucleotide
cggaauuugaacuggacgg

SEQ ID NO: 339301 - RNA, 19 nt, Artificial Sequence
  Description of Artificial Sequence: Synthetic oligonucleotide
uaagaguacuaaagagcca

SEQ ID NO: 339302 - RNA, 19 nt, Artificial Sequence
  Description of Artificial Sequence: Synthetic oligonucleotide
uucucgaucugcucggaga

SEQ ID NO: 339303 - RNA, 19 nt, Artificial Sequence
  Description of Artificial Sequence: Synthetic oligonucleotide
uccuguacgugguaauuca

SEQ ID NO: 339304 - RNA, 19 nt, Artificial Sequence
  Description of Artificial Sequence: Synthetic oligonucleotide
ucgaugggcuuaaugacaa

SEQ ID NO: 339305 - RNA, 19 nt, Artificial Sequence
  Description of Artificial Sequence: Synthetic oligonucleotide
ugucggauuaagugucucc

SEQ ID NO: 339306 - RNA, 19 nt, Artificial Sequence
  Description of Artificial Sequence: Synthetic oligonucleotide
aacccauauuaucacuuau

SEQ ID NO: 339307 - RNA, 19 nt, Artificial Sequence
  Description of Artificial Sequence: Synthetic oligonucleotide
aggccaauagucuuuacua

SEQ ID NO: 339308 - RNA, 19 nt, Artificial Sequence
  Description of Artificial Sequence: Synthetic oligonucleotide
uaccacaccucccggaggc

SEQ ID NO: 339309 - RNA, 19 nt, Artificial Sequence
  Description of Artificial Sequence: Synthetic oligonucleotide
aggccaaaguaccacaccu

SEQ ID NO: 339310 - RNA, 19 nt, Artificial Sequence
  Description of Artificial Sequence: Synthetic oligonucleotide
aggauccgcuuguugauuc

SEQ ID NO: 339311 - RNA, 19 nt, Artificial Sequence
  Description of Artificial Sequence: Synthetic oligonucleotide
uaagguacccagacuugug

SEQ ID NO: 339312 - RNA, 19 nt, Artificial Sequence
  Description of Artificial Sequence: Synthetic oligonucleotide
aaacccauauuaucacuua

SEQ ID NO: 339313 - RNA, 19 nt, Artificial Sequence
  Description of Artificial Sequence: Synthetic oligonucleotide
ucgaauucgucgauccgcu

SEQ ID NO: 339314 - RNA, 19 nt, Artificial Sequence
  Description of Artificial Sequence: Synthetic oligonucleotide
uagcagaucauuagguaua

SEQ ID NO: 339315 - RNA, 19 nt, Artificial Sequence
  Description of Artificial Sequence: Synthetic oligonucleotide
acuaacauauauacagaca

SEQ ID NO: 339316 - RNA, 19 nt, Artificial Sequence
  Description of Artificial Sequence: Synthetic oligonucleotide
cucgaauucgucgauccgc

SEQ ID NO: 339317 - RNA, 19 nt, Artificial Sequence
  Description of Artificial Sequence: Synthetic oligonucleotide
acguccucgggguagaacu

SEQ ID NO: 339318 - RNA, 19 nt, Artificial Sequence
  Description of Artificial Sequence: Synthetic oligonucleotide
acaaacccauauuaucacu

SEQ ID NO: 339319 - RNA, 19 nt, Artificial Sequence
  Description of Artificial Sequence: Synthetic oligonucleotide
guacgugguaauucacagg

SEQ ID NO: 339320 - RNA, 19 nt, Artificial Sequence
  Description of Artificial Sequence: Synthetic oligonucleotide
cuguccuuaagcauuccuc

SEQ ID NO: 339321 - RNA, 19 nt, Artificial Sequence
  Description of Artificial Sequence: Synthetic oligonucleotide
uucaccccucaaaacacga

SEQ ID NO: 339322 - RNA, 19 nt, Artificial Sequence
  Description of Artificial Sequence: Synthetic oligonucleotide
auaaugcccucacuggaga

SEQ ID NO: 339323 - RNA, 19 nt, Artificial Sequence
  Description of Artificial Sequence: Synthetic oligonucleotide
uucuagacuuaagaguacu

SEQ ID NO: 339324 - RNA, 19 nt, Artificial Sequence
  Description of Artificial Sequence: Synthetic oligonucleotide
uuaagcauuccucgguguu

SEQ ID NO: 339325 - RNA, 19 nt, Artificial Sequence
  Description of Artificial Sequence: Synthetic oligonucleotide
uaccaguaagcaugaaaac

SEQ ID NO: 339326 - RNA, 19 nt, Artificial Sequence
  Description of Artificial Sequence: Synthetic oligonucleotide
uccgagcuaagguacccag

SEQ ID NO: 339327 - RNA, 19 nt, Artificial Sequence
  Description of Artificial Sequence: Synthetic oligonucleotide
aauuugaacuggacggggu

SEQ ID NO: 339328 - RNA, 19 nt, Artificial Sequence
  Description of Artificial Sequence: Synthetic oligonucleotide
auaauaaguccaacaacgu

SEQ ID NO: 339329 - RNA, 19 nt, Artificial Sequence
  Description of Artificial Sequence: Synthetic oligonucleotide
agacacaaucaccacagua

SEQ ID NO: 339330 - RNA, 19 nt, Artificial Sequence
  Description of Artificial Sequence: Synthetic oligonucleotide
aagauggauccuucauaga

SEQ ID NO: 339331 - RNA, 19 nt, Artificial Sequence
  Description of Artificial Sequence: Synthetic oligonucleotide
uuuggucgcaguguggccu

SEQ ID NO: 339332 - RNA, 19 nt, Artificial Sequence
  Description of Artificial Sequence: Synthetic oligonucleotide
uccucgggguagaacuugg

SEQ ID NO: 339333 - RNA, 19 nt, Artificial Sequence
  Description of Artificial Sequence: Synthetic oligonucleotide
ucaaaacuagagagaguau

SEQ ID NO: 339334 - RNA, 19 nt, Artificial Sequence
  Description of Artificial Sequence: Synthetic oligonucleotide
auaaguccaacaacguaug

SEQ ID NO: 339335 - RNA, 19 nt, Artificial Sequence
  Description of Artificial Sequence: Synthetic oligonucleotide
aaguaccacaccucccgga

SEQ ID NO: 339336 - RNA, 19 nt, Artificial Sequence
  Description of Artificial Sequence: Synthetic oligonucleotide
uagucuuuacuaccugauc

SEQ ID NO: 339337 - RNA, 19 nt, Artificial Sequence
  Description of Artificial Sequence: Synthetic oligonucleotide
gccaauagucuuuacuacc

SEQ ID NO: 339338 - RNA, 19 nt, Artificial Sequence
  Description of Artificial Sequence: Synthetic oligonucleotide
ucgguccucccacuggucc

SEQ ID NO: 339339 - RNA, 19 nt, Artificial Sequence
  Description of Artificial Sequence: Synthetic oligonucleotide
uuauaucagaguguaccau

SEQ ID NO: 339340 - RNA, 19 nt, Artificial Sequence
  Description of Artificial Sequence: Synthetic oligonucleotide
cucgggguagaacuuggcc

SEQ ID NO: 339341 - RNA, 19 nt, Artificial Sequence
  Description of Artificial Sequence: Synthetic oligonucleotide
uugccgcauguucucauug

SEQ ID NO: 339342 - RNA, 19 nt, Artificial Sequence
  Description of Artificial Sequence: Synthetic oligonucleotide
uaccaugcacucugaagga

SEQ ID NO: 339343 - RNA, 19 nt, Artificial Sequence
  Description of Artificial Sequence: Synthetic oligonucleotide
caaaguuuuauaucagagu

SEQ ID NO: 339344 - RNA, 19 nt, Artificial Sequence
  Description of Artificial Sequence: Synthetic oligonucleotide
caucaccagguguaacucc

SEQ ID NO: 339345 - RNA, 19 nt, Artificial Sequence
  Description of Artificial Sequence: Synthetic oligonucleotide
cuuuacauggccucgaauu

SEQ ID NO: 339346 - RNA, 19 nt, Artificial Sequence
  Description of Artificial Sequence: Synthetic oligonucleotide
gucgggugccuucuugucg

SEQ ID NO: 339347 - RNA, 19 nt, Artificial Sequence
  Description of Artificial Sequence: Synthetic oligonucleotide
agugauccgcuucuccuca

SEQ ID NO: 339348 - RNA, 19 nt, Artificial Sequence
  Description of Artificial Sequence: Synthetic oligonucleotide
gguuucuagacuuaagagu

SEQ ID NO: 339349 - RNA, 19 nt, Artificial Sequence
  Description of Artificial Sequence: Synthetic oligonucleotide
agucgcuccgagcuaaggu

SEQ ID NO: 339350 - RNA, 19 nt, Artificial Sequence
  Description of Artificial Sequence: Synthetic oligonucleotide
agugauucuguaacuguca

SEQ ID NO: 339351 - RNA, 19 nt, Artificial Sequence
  Description of Artificial Sequence: Synthetic oligonucleotide
uuggccugcacugcauagg

SEQ ID NO: 339352 - RNA, 19 nt, Artificial Sequence
  Description of Artificial Sequence: Synthetic oligonucleotide
ccggaauuugaacuggacg

SEQ ID NO: 339353 - RNA, 19 nt, Artificial Sequence
  Description of Artificial Sequence: Synthetic oligonucleotide
cuguugccgcucuaguugc

SEQ ID NO: 339354 - RNA, 19 nt, Artificial Sequence
  Description of Artificial Sequence: Synthetic oligonucleotide
acgaagauggauccuucau

SEQ ID NO: 339355 - RNA, 19 nt, Artificial Sequence
  Description of Artificial Sequence: Synthetic oligonucleotide
ucccauacauuuccagguc

SEQ ID NO: 339356 - RNA, 19 nt, Artificial Sequence
  Description of Artificial Sequence: Synthetic oligonucleotide
cuauagcagaucauuaggu

SEQ ID NO: 339357 - RNA, 19 nt, Artificial Sequence
  Description of Artificial Sequence: Synthetic oligonucleotide
gggguuucuagacuuaaga

SEQ ID NO: 339358 - RNA, 19 nt, Artificial Sequence
  Description of Artificial Sequence: Synthetic oligonucleotide
uccuuguuauaauccccga

SEQ ID NO: 339359 - RNA, 19 nt, Artificial Sequence
  Description of Artificial Sequence: Synthetic oligonucleotide
ucgcuccgagcuaagguac

SEQ ID NO: 339360 - RNA, 19 nt, Artificial Sequence
  Description of Artificial Sequence: Synthetic oligonucleotide
uccugcggcgcauguacag

SEQ ID NO: 339361 - RNA, 19 nt, Artificial Sequence
  Description of Artificial Sequence: Synthetic oligonucleotide
cuuggcccggaauuugaac

SEQ ID NO: 339362 - RNA, 19 nt, Artificial Sequence
  Description of Artificial Sequence: Synthetic oligonucleotide
agguacccagacuugugca

SEQ ID NO: 339363 - RNA, 19 nt, Artificial Sequence
  Description of Artificial Sequence: Synthetic oligonucleotide
accaugcacucugaaggac

SEQ ID NO: 339364 - RNA, 19 nt, Artificial Sequence
  Description of Artificial Sequence: Synthetic oligonucleotide
ugauccugugccugucucu

SEQ ID NO: 339365 - RNA, 19 nt, Artificial Sequence
  Description of Artificial Sequence: Synthetic oligonucleotide
caaaaucgauuugagcuca

SEQ ID NO: 339366 - RNA, 19 nt, Artificial Sequence
  Description of Artificial Sequence: Synthetic oligonucleotide
cuguacgugguaauucaca

SEQ ID NO: 339367 - RNA, 19 nt, Artificial Sequence
  Description of Artificial Sequence: Synthetic oligonucleotide
gaggccaauagucuuuacu

SEQ ID NO: 339368 - RNA, 19 nt, Artificial Sequence
  Description of Artificial Sequence: Synthetic oligonucleotide
gucuccauuacaugguucu

SEQ ID NO: 339369 - RNA, 19 nt, Artificial Sequence
  Description of Artificial Sequence: Synthetic oligonucleotide
aguagcaccgcggucucug

SEQ ID NO: 339370 - RNA, 19 nt, Artificial Sequence
  Description of Artificial Sequence: Synthetic oligonucleotide
caguagucaguuucccaac

SEQ ID NO: 339371 - RNA, 19 nt, Artificial Sequence
  Description of Artificial Sequence: Synthetic oligonucleotide
uggccuuuacauggccucg

SEQ ID NO: 339372 - RNA, 19 nt, Artificial Sequence
  Description of Artificial Sequence: Synthetic oligonucleotide
ucgauccgcugcuuggugu

SEQ ID NO: 339373 - RNA, 19 nt, Artificial Sequence
  Description of Artificial Sequence: Synthetic oligonucleotide
acuaaagagccaaguguga

SEQ ID NO: 339374 - RNA, 19 nt, Artificial Sequence
  Description of Artificial Sequence: Synthetic oligonucleotide
gucggauuaagugucucca

SEQ ID NO: 339375 - RNA, 19 nt, Artificial Sequence
  Description of Artificial Sequence: Synthetic oligonucleotide
cuuuggucgcaguguggcc

SEQ ID NO: 339376 - RNA, 19 nt, Artificial Sequence
  Description of Artificial Sequence: Synthetic oligonucleotide
gugacacccugcugggagg

SEQ ID NO: 339377 - RNA, 19 nt, Artificial Sequence
  Description of Artificial Sequence: Synthetic oligonucleotide
aaacacgaagauggauccu

SEQ ID NO: 339378 - RNA, 19 nt, Artificial Sequence
  Description of Artificial Sequence: Synthetic oligonucleotide
ccguaacugcucuuuaagg

SEQ ID NO: 339379 - RNA, 19 nt, Artificial Sequence
  Description of Artificial Sequence: Synthetic oligonucleotide
uguuuggcuggauggcaaa

SEQ ID NO: 339380 - RNA, 19 nt, Artificial Sequence
  Description of Artificial Sequence: Synthetic oligonucleotide
uuuggcccggugcugccac

SEQ ID NO: 339381 - RNA, 19 nt, Artificial Sequence
  Description of Artificial Sequence: Synthetic oligonucleotide
acuauucucuauagcagau

SEQ ID NO: 339382 - RNA, 19 nt, Artificial Sequence
  Description of Artificial Sequence: Synthetic oligonucleotide
ggugagcuugugcuggucc

SEQ ID NO: 339383 - RNA, 19 nt, Artificial Sequence
  Description of Artificial Sequence: Synthetic oligonucleotide
uguuucccggugguguuug

SEQ ID NO: 339384 - RNA, 19 nt, Artificial Sequence
  Description of Artificial Sequence: Synthetic oligonucleotide
ucggauuaagugucuccau

SEQ ID NO: 339385 - RNA, 19 nt, Artificial Sequence
  Description of Artificial Sequence: Synthetic oligonucleotide
ucucuggcgggcaguagau

SEQ ID NO: 339386 - RNA, 19 nt, Artificial Sequence
  Description of Artificial Sequence: Synthetic oligonucleotide
ggugcagaacaguucuggc

SEQ ID NO: 339387 - RNA, 19 nt, Artificial Sequence
  Description of Artificial Sequence: Synthetic oligonucleotide
ugccgcauguucucauugu

SEQ ID NO: 339388 - RNA, 19 nt, Artificial Sequence
  Description of Artificial Sequence: Synthetic oligonucleotide
ggccaauagucuuuacuac

SEQ ID NO: 339389 - RNA, 19 nt, Artificial Sequence
  Description of Artificial Sequence: Synthetic oligonucleotide
acaaagucgggugccuucu

SEQ ID NO: 339390 - RNA, 19 nt, Artificial Sequence
  Description of Artificial Sequence: Synthetic oligonucleotide
ccaugcacucugaaggacc

SEQ ID NO: 339391 - RNA, 19 nt, Artificial Sequence
  Description of Artificial Sequence: Synthetic oligonucleotide
gguccaugacucucugggg

SEQ ID NO: 339392 - RNA, 19 nt, Artificial Sequence
  Description of Artificial Sequence: Synthetic oligonucleotide
gaacuggacgggguucucc

SEQ ID NO: 339393 - RNA, 19 nt, Artificial Sequence
  Description of Artificial Sequence: Synthetic oligonucleotide
caacaacguaugcuaccag

SEQ ID NO: 339394 - RNA, 19 nt, Artificial Sequence
  Description of Artificial Sequence: Synthetic oligonucleotide
ggaucagucgcuccgagcu

SEQ ID NO: 339395 - RNA, 19 nt, Artificial Sequence
  Description of Artificial Sequence: Synthetic oligonucleotide
aaaucgauuugagcucauu

SEQ ID NO: 339396 - RNA, 19 nt, Artificial Sequence
  Description of Artificial Sequence: Synthetic oligonucleotide
acaacguaugcuaccagua

SEQ ID NO: 339397 - RNA, 19 nt, Artificial Sequence
  Description of Artificial Sequence: Synthetic oligonucleotide
guggccuggccuuuacaug

SEQ ID NO: 339398 - RNA, 19 nt, Artificial Sequence
  Description of Artificial Sequence: Synthetic oligonucleotide
ggcucuuuaucugauccug

SEQ ID NO: 339399 - RNA, 19 nt, Artificial Sequence
  Description of Artificial Sequence: Synthetic oligonucleotide
ugcgggagcgugcuuuaaa

SEQ ID NO: 339400 - RNA, 19 nt, Artificial Sequence
  Description of Artificial Sequence: Synthetic oligonucleotide
uuccaacauagcgcugucc

SEQ ID NO: 339401 - RNA, 19 nt, Artificial Sequence
  Description of Artificial Sequence: Synthetic oligonucleotide
aacugcucccaugucggau

SEQ ID NO: 339402 - RNA, 19 nt, Artificial Sequence
  Description of Artificial Sequence: Synthetic oligonucleotide
ccaugucggauuaaguguc

SEQ ID NO: 339403 - RNA, 19 nt, Artificial Sequence
  Description of Artificial Sequence: Synthetic oligonucleotide
caucaacuccaagccaaag

SEQ ID NO: 339404 - RNA, 19 nt, Artificial Sequence
  Description of Artificial Sequence: Synthetic oligonucleotide
auauuaaguccaagggcau

SEQ ID NO: 339405 - RNA, 19 nt, Artificial Sequence
  Description of Artificial Sequence: Synthetic oligonucleotide
gcuaccaguaagcaugaaa

SEQ ID NO: 339406 - RNA, 19 nt, Artificial Sequence
  Description of Artificial Sequence: Synthetic oligonucleotide
ucagucgcuccgagcuaag

SEQ ID NO: 339407 - RNA, 19 nt, Artificial Sequence
  Description of Artificial Sequence: Synthetic oligonucleotide
cacaguagucaguuuccca

SEQ ID NO: 339408 - RNA, 19 nt, Artificial Sequence
  Description of Artificial Sequence: Synthetic oligonucleotide
cugggaggugcccuccgcc

SEQ ID NO: 339409 - RNA, 19 nt, Artificial Sequence
  Description of Artificial Sequence: Synthetic oligonucleotide
ccgcauguucucauugugg

SEQ ID NO: 339410 - RNA, 19 nt, Artificial Sequence
  Description of Artificial Sequence: Synthetic oligonucleotide
ucgauggugucaggcuucc

SEQ ID NO: 339411 - RNA, 19 nt, Artificial Sequence
  Description of Artificial Sequence: Synthetic oligonucleotide
cagccccuccuguacgugg

SEQ ID NO: 339412 - RNA, 19 nt, Artificial Sequence
  Description of Artificial Sequence: Synthetic oligonucleotide
agcgcuguccuuaagcauu

SEQ ID NO: 339413 - RNA, 19 nt, Artificial Sequence
  Description of Artificial Sequence: Synthetic oligonucleotide
guacucugccagcucugcc

SEQ ID NO: 339414 - RNA, 19 nt, Artificial Sequence
  Description of Artificial Sequence: Synthetic oligonucleotide
accccucaaaacacgaaga

SEQ ID NO: 339415 - RNA, 19 nt, Artificial Sequence
  Description of Artificial Sequence: Synthetic oligonucleotide
augucauuguggguccucu

SEQ ID NO: 339416 - RNA, 19 nt, Artificial Sequence
  Description of Artificial Sequence: Synthetic oligonucleotide
guacuugucccgaccuugc

SEQ ID NO: 339417 - RNA, 19 nt, Artificial Sequence
  Description of Artificial Sequence: Synthetic oligonucleotide
gaguacuaaagagccaagu

SEQ ID NO: 339418 - RNA, 19 nt, Artificial Sequence
  Description of Artificial Sequence: Synthetic oligonucleotide
gucgcuccgagcuaaggua

SEQ ID NO: 339419 - RNA, 19 nt, Artificial Sequence
  Description of Artificial Sequence: Synthetic oligonucleotide
agcagaucauuagguauaa

SEQ ID NO: 339420 - RNA, 19 nt, Artificial Sequence
  Description of Artificial Sequence: Synthetic oligonucleotide
guagcaccgcggucucugg

SEQ ID NO: 339421 - RNA, 19 nt, Artificial Sequence
  Description of Artificial Sequence: Synthetic oligonucleotide
caaacccauauuaucacuu

SEQ ID NO: 339422 - RNA, 19 nt, Artificial Sequence
  Description of Artificial Sequence: Synthetic oligonucleotide
gagcgugcuuuaaauuuca

SEQ ID NO: 339423 - RNA, 19 nt, Artificial Sequence
  Description of Artificial Sequence: Synthetic oligonucleotide
uagcaccgcggucucuggc

SEQ ID NO: 339424 - RNA, 19 nt, Artificial Sequence
  Description of Artificial Sequence: Synthetic oligonucleotide
caacguaugcuaccaguaa

SEQ ID NO: 339425 - RNA, 19 nt, Artificial Sequence
  Description of Artificial Sequence: Synthetic oligonucleotide
uagcgcuguccuuaagcau

SEQ ID NO: 339426 - RNA, 19 nt, Artificial Sequence
  Description of Artificial Sequence: Synthetic oligonucleotide
acauagcgcuguccuuaag

SEQ ID NO: 339427 - RNA, 19 nt, Artificial Sequence
  Description of Artificial Sequence: Synthetic oligonucleotide
uauucucaucccgggccug

SEQ ID NO: 339428 - RNA, 19 nt, Artificial Sequence
  Description of Artificial Sequence: Synthetic oligonucleotide
acccauauuaucacuuaua

SEQ ID NO: 339429 - RNA, 19 nt, Artificial Sequence
  Description of Artificial Sequence: Synthetic oligonucleotide
cgggguagaacuuggcccg

SEQ ID NO: 339430 - RNA, 19 nt, Artificial Sequence
  Description of Artificial Sequence: Synthetic oligonucleotide
cacgaagauggauccuuca

SEQ ID NO: 339431 - RNA, 19 nt, Artificial Sequence
  Description of Artificial Sequence: Synthetic oligonucleotide
uuccugcggcgcauguaca

SEQ ID NO: 339432 - RNA, 19 nt, Artificial Sequence
  Description of Artificial Sequence: Synthetic oligonucleotide
accgcggucucuggcgggc

SEQ ID NO: 339433 - RNA, 19 nt, Artificial Sequence
  Description of Artificial Sequence: Synthetic oligonucleotide
aaaaucgauuugagcucau

SEQ ID NO: 339434 - RNA, 19 nt, Artificial Sequence
  Description of Artificial Sequence: Synthetic oligonucleotide
aucagucgcuccgagcuaa

SEQ ID NO: 339435 - RNA, 19 nt, Artificial Sequence
  Description of Artificial Sequence: Synthetic oligonucleotide
guuuggcuggauggcaaac

SEQ ID NO: 339436 - RNA, 19 nt, Artificial Sequence
  Description of Artificial Sequence: Synthetic oligonucleotide
ccagcgguguggaggaagg

SEQ ID NO: 339437 - RNA, 19 nt, Artificial Sequence
  Description of Artificial Sequence: Synthetic oligonucleotide
uggcgggcaguagaucuca

SEQ ID NO: 339438 - RNA, 19 nt, Artificial Sequence
  Description of Artificial Sequence: Synthetic oligonucleotide
guccaacaacguaugcuac

SEQ ID NO: 339439 - RNA, 19 nt, Artificial Sequence
  Description of Artificial Sequence: Synthetic oligonucleotide
acccacuaacauauauaca

SEQ ID NO: 339440 - RNA, 19 nt, Artificial Sequence
  Description of Artificial Sequence: Synthetic oligonucleotide
ugucauuguggguccucuu

SEQ ID NO: 339441 - RNA, 19 nt, Artificial Sequence
  Description of Artificial Sequence: Synthetic oligonucleotide
ugacacccugcugggaggu

SEQ ID NO: 339442 - RNA, 19 nt, Artificial Sequence
  Description of Artificial Sequence: Synthetic oligonucleotide
ggagcgugcuuuaaauuuc

SEQ ID NO: 339443 - RNA, 19 nt, Artificial Sequence
  Description of Artificial Sequence: Synthetic oligonucleotide
guaugcuaccaguaagcau

SEQ ID NO: 339444 - RNA, 19 nt, Artificial Sequence
  Description of Artificial Sequence: Synthetic oligonucleotide
ugcgugccacaccuggauu

SEQ ID NO: 339445 - RNA, 19 nt, Artificial Sequence
  Description of Artificial Sequence: Synthetic oligonucleotide
auccccgaacuuggccugc

SEQ ID NO: 339446 - RNA, 19 nt, Artificial Sequence
  Description of Artificial Sequence: Synthetic oligonucleotide
cugcacccucaucaugcag

SEQ ID NO: 339447 - RNA, 19 nt, Artificial Sequence
  Description of Artificial Sequence: Synthetic oligonucleotide
gccgcauguucucauugug

SEQ ID NO: 339448 - RNA, 19 nt, Artificial Sequence
  Description of Artificial Sequence: Synthetic oligonucleotide
ugugcgggagcgugcuuua

SEQ ID NO: 339449 - RNA, 19 nt, Artificial Sequence
  Description of Artificial Sequence: Synthetic oligonucleotide
ugcccuccgcccuuugguc

SEQ ID NO: 339450 - RNA, 19 nt, Artificial Sequence
  Description of Artificial Sequence: Synthetic oligonucleotide
gggcaguagaucucaucac

SEQ ID NO: 339451 - RNA, 19 nt, Artificial Sequence
  Description of Artificial Sequence: Synthetic oligonucleotide
cagugcaaucuuggcagug

SEQ ID NO: 339452 - RNA, 19 nt, Artificial Sequence
  Description of Artificial Sequence: Synthetic oligonucleotide
cuggcgggcaguagaucuc

SEQ ID NO: 339453 - RNA, 19 nt, Artificial Sequence
  Description of Artificial Sequence: Synthetic oligonucleotide
gcucccaugucggauuaag

SEQ ID NO: 339454 - RNA, 19 nt, Artificial Sequence
  Description of Artificial Sequence: Synthetic oligonucleotide
ugcggcgcauguacagcuc

SEQ ID NO: 339455 - RNA, 19 nt, Artificial Sequence
  Description of Artificial Sequence: Synthetic oligonucleotide
cuaagguacccagacuugu

SEQ ID NO: 339456 - RNA, 19 nt, Artificial Sequence
  Description of Artificial Sequence: Synthetic oligonucleotide
gguggcggagccgucauca

SEQ ID NO: 339457 - RNA, 19 nt, Artificial Sequence
  Description of Artificial Sequence: Synthetic oligonucleotide
guauuccaacauagcgcug

SEQ ID NO: 339458 - RNA, 19 nt, Artificial Sequence
  Description of Artificial Sequence: Synthetic oligonucleotide
gggaucagucgcuccgagc

SEQ ID NO: 339459 - RNA, 19 nt, Artificial Sequence
  Description of Artificial Sequence: Synthetic oligonucleotide
ccuguacgugguaauucac

SEQ ID NO: 339460 - RNA, 19 nt, Artificial Sequence
  Description of Artificial Sequence: Synthetic oligonucleotide
guccucgggguagaacuug

SEQ ID NO: 339461 - RNA, 19 nt, Artificial Sequence
  Description of Artificial Sequence: Synthetic oligonucleotide
ccauaaugcccucacugga

SEQ ID NO: 339462 - RNA, 19 nt, Artificial Sequence
  Description of Artificial Sequence: Synthetic oligonucleotide
cagucgcuccgagcuaagg

SEQ ID NO: 339463 - RNA, 19 nt, Artificial Sequence
  Description of Artificial Sequence: Synthetic oligonucleotide
ggucaacuugucaucuuuc

SEQ ID NO: 339464 - RNA, 19 nt, Artificial Sequence
  Description of Artificial Sequence: Synthetic oligonucleotide
ccucgaauucgucgauccg

SEQ ID NO: 339465 - RNA, 19 nt, Artificial Sequence
  Description of Artificial Sequence: Synthetic oligonucleotide
ggcggagccgucaucacca

SEQ ID NO: 339466 - RNA, 19 nt, Artificial Sequence
  Description of Artificial Sequence: Synthetic oligonucleotide
gcccuccgcccuuuggucg

SEQ ID NO: 339467 - RNA, 19 nt, Artificial Sequence
  Description of Artificial Sequence: Synthetic oligonucleotide
gaucagucgcuccgagcua

SEQ ID NO: 339468 - RNA, 19 nt, Artificial Sequence
  Description of Artificial Sequence: Synthetic oligonucleotide
ccaacaacguaugcuacca

SEQ ID NO: 339469 - RNA, 19 nt, Artificial Sequence
  Description of Artificial Sequence: Synthetic oligonucleotide
agguggcggagccgucauc

SEQ ID NO: 339470 - RNA, 19 nt, Artificial Sequence
  Description of Artificial Sequence: Synthetic oligonucleotide
cuugcgccuccgagccucc

SEQ ID NO: 339471 - RNA, 19 nt, Artificial Sequence
  Description of Artificial Sequence: Synthetic oligonucleotide
acgugguaauucacaggcu

SEQ ID NO: 339472 - RNA, 19 nt, Artificial Sequence
  Description of Artificial Sequence: Synthetic oligonucleotide
cccggaauuugaacuggac

SEQ ID NO: 339473 - RNA, 19 nt, Artificial Sequence
  Description of Artificial Sequence: Synthetic oligonucleotide
ucccgaccuugccgcaugu

SEQ ID NO: 339474 - RNA, 19 nt, Artificial Sequence
  Description of Artificial Sequence: Synthetic oligonucleotide
ccgaccuugccgcauguuc

SEQ ID NO: 339475 - RNA, 19 nt, Artificial Sequence
  Description of Artificial Sequence: Synthetic oligonucleotide
guguaccaugcacucugaa

SEQ ID NO: 339476 - RNA, 19 nt, Artificial Sequence
  Description of Artificial Sequence: Synthetic oligonucleotide
gcacuaugauacaacugga

SEQ ID NO: 339477 - RNA, 19 nt, Artificial Sequence
  Description of Artificial Sequence: Synthetic oligonucleotide
cccaugucggauuaagugu

SEQ ID NO: 339478 - RNA, 19 nt, Artificial Sequence
  Description of Artificial Sequence: Synthetic oligonucleotide
ugaacuggacgggguucuc

SEQ ID NO: 339479 - RNA, 19 nt, Artificial Sequence
  Description of Artificial Sequence: Synthetic oligonucleotide
gcaccgcggucucuggcgg

SEQ ID NO: 339480 - RNA, 19 nt, Artificial Sequence
  Description of Artificial Sequence: Synthetic oligonucleotide
caccgcggucucuggcggg

SEQ ID NO: 339481 - RNA, 19 nt, Artificial Sequence
  Description of Artificial Sequence: Synthetic oligonucleotide
ccuuguuauaauccccgaa

SEQ ID NO: 339482 - RNA, 19 nt, Artificial Sequence
  Description of Artificial Sequence: Synthetic oligonucleotide
uccgcccuuuggucgcagu

SEQ ID NO: 339483 - RNA, 19 nt, Artificial Sequence
  Description of Artificial Sequence: Synthetic oligonucleotide
ggacgggguucuccuuccg

SEQ ID NO: 339484 - RNA, 19 nt, Artificial Sequence
  Description of Artificial Sequence: Synthetic oligonucleotide
accuugccgcauguucuca

SEQ ID NO: 339485 - RNA, 19 nt, Artificial Sequence
  Description of Artificial Sequence: Synthetic oligonucleotide
agaacaguucuggcccgua

SEQ ID NO: 339486 - RNA, 19 nt, Artificial Sequence
  Description of Artificial Sequence: Synthetic oligonucleotide
gccacaccuggauucgguc

SEQ ID NO: 339487 - RNA, 19 nt, Artificial Sequence
  Description of Artificial Sequence: Synthetic oligonucleotide
guggcggagccgucaucac

SEQ ID NO: 339488 - RNA, 19 nt, Artificial Sequence
  Description of Artificial Sequence: Synthetic oligonucleotide
gggguucuccuuccgaacu

SEQ ID NO: 339489 - RNA, 19 nt, Artificial Sequence
  Description of Artificial Sequence: Synthetic oligonucleotide
cauccauaaugcccucacu

SEQ ID NO: 339490 - RNA, 19 nt, Artificial Sequence
  Description of Artificial Sequence: Synthetic oligonucleotide
gacacccugcugggaggug

SEQ ID NO: 339491 - RNA, 19 nt, Artificial Sequence
  Description of Artificial Sequence: Synthetic oligonucleotide
gccgucaucaccaggugua

SEQ ID NO: 339492 - RNA, 19 nt, Artificial Sequence
  Description of Artificial Sequence: Synthetic oligonucleotide
caacugcucccaugucgga

SEQ ID NO: 339493 - RNA, 19 nt, Artificial Sequence
  Description of Artificial Sequence: Synthetic oligonucleotide
agcgugcuuuaaauuucaa

SEQ ID NO: 339494 - RNA, 19 nt, Artificial Sequence
  Description of Artificial Sequence: Synthetic oligonucleotide
ccucgggguagaacuuggc

SEQ ID NO: 339495 - RNA, 19 nt, Artificial Sequence
  Description of Artificial Sequence: Synthetic oligonucleotide
gugucuccauuacaugguu

SEQ ID NO: 339496 - RNA, 19 nt, Artificial Sequence
  Description of Artificial Sequence: Synthetic oligonucleotide
ggaggccaauagucuuuac

SEQ ID NO: 339497 - RNA, 19 nt, Artificial Sequence
  Description of Artificial Sequence: Synthetic oligonucleotide
gggucaacuugucaucuuu

SEQ ID NO: 339498 - RNA, 19 nt, Artificial Sequence
  Description of Artificial Sequence: Synthetic oligonucleotide
cgugccacaccuggauucg

SEQ ID NO: 339499 - RNA, 19 nt, Artificial Sequence
  Description of Artificial Sequence: Synthetic oligonucleotide
cucuggcgggcaguagauc

SEQ ID NO: 339500 - RNA, 19 nt, Artificial Sequence
  Description of Artificial Sequence: Synthetic oligonucleotide
ccguagacucugccagcgg

SEQ ID NO: 339501 - RNA, 19 nt, Artificial Sequence
  Description of Artificial Sequence: Synthetic oligonucleotide
cacucugaaggaccaccgu

SEQ ID NO: 339502 - RNA, 19 nt, Artificial Sequence
  Description of Artificial Sequence: Synthetic oligonucleotide
gcccguaacugcucuuuaa

SEQ ID NO: 339503 - RNA, 19 nt, Artificial Sequence
  Description of Artificial Sequence: Synthetic oligonucleotide
cguaugcuaccaguaagca

SEQ ID NO: 339504 - RNA, 19 nt, Artificial Sequence
  Description of Artificial Sequence: Synthetic oligonucleotide
ggacaacucguugcucaga

SEQ ID NO: 339505 - RNA, 19 nt, Artificial Sequence
  Description of Artificial Sequence: Synthetic oligonucleotide
gcucuuuaagggacuggaa

SEQ ID NO: 339506 - RNA, 19 nt, Artificial Sequence
  Description of Artificial Sequence: Synthetic oligonucleotide
ccgcccuuuggucgcagug

SEQ ID NO: 339507 - RNA, 19 nt, Artificial Sequence
  Description of Artificial Sequence: Synthetic oligonucleotide
cuugccgcauguucucauu

SEQ ID NO: 339508 - RNA, 19 nt, Artificial Sequence
  Description of Artificial Sequence: Synthetic oligonucleotide
gugugacacccugcuggga

SEQ ID NO: 339509 - RNA, 19 nt, Artificial Sequence
  Description of Artificial Sequence: Synthetic oligonucleotide
auucgucgauccgcugcuu

SEQ ID NO: 339510 - RNA, 19 nt, Artificial Sequence
  Description of Artificial Sequence: Synthetic oligonucleotide
cgcuccgagcuaagguacc

SEQ ID NO: 339511 - RNA, 19 nt, Artificial Sequence
  Description of Artificial Sequence: Synthetic oligonucleotide
ggccuggccuuuacauggc

SEQ ID NO: 339512 - RNA, 19 nt, Artificial Sequence
  Description of Artificial Sequence: Synthetic oligonucleotide
gcggagccgucaucaccag

SEQ ID NO: 339513 - RNA, 19 nt, Artificial Sequence
  Description of Artificial Sequence: Synthetic oligonucleotide
cgaauucgucgauccgcug

SEQ ID NO: 339514 - RNA, 19 nt, Artificial Sequence
  Description of Artificial Sequence: Synthetic oligonucleotide
ggaccaccguagacucugc

SEQ ID NO: 339515 - RNA, 19 nt, Artificial Sequence
  Description of Artificial Sequence: Synthetic oligonucleotide
ggucgcaguguggccuggc

SEQ ID NO: 339516 - RNA, 19 nt, Artificial Sequence
  Description of Artificial Sequence: Synthetic oligonucleotide
gcgugauguccuggaugag

SEQ ID NO: 339517 - RNA, 19 nt, Artificial Sequence
  Description of Artificial Sequence: Synthetic oligonucleotide
cugugcgggagcgugcuuu

SEQ ID NO: 339518 - RNA, 19 nt, Artificial Sequence
  Description of Artificial Sequence: Synthetic oligonucleotide
cgaccuugccgcauguucu

SEQ ID NO: 339519 - RNA, 19 nt, Artificial Sequence
  Description of Artificial Sequence: Synthetic oligonucleotide
cgucaucaccagguguaac

SEQ ID NO: 339520 - RNA, 19 nt, Artificial Sequence
  Description of Artificial Sequence: Synthetic oligonucleotide
ccccaguagcaccgcgguc

SEQ ID NO: 339521 - RNA, 19 nt, Artificial Sequence
  Description of Artificial Sequence: Synthetic oligonucleotide
gugcgggagcgugcuuuaa

SEQ ID NO: 339522 - RNA, 19 nt, Artificial Sequence
  Description of Artificial Sequence: Synthetic oligonucleotide
cugccacguccucggggua

SEQ ID NO: 339523 - RNA, 19 nt, Artificial Sequence
  Description of Artificial Sequence: Synthetic oligonucleotide
cuguuucccggugguguuu

SEQ ID NO: 339524 - RNA, 19 nt, Artificial Sequence
  Description of Artificial Sequence: Synthetic oligonucleotide
cgcggucucuggcgggcag

SEQ ID NO: 339525 - RNA, 19 nt, Artificial Sequence
  Description of Artificial Sequence: Synthetic oligonucleotide
cccggaggccaauagucuu

SEQ ID NO: 339526 - RNA, 19 nt, Artificial Sequence
  Description of Artificial Sequence: Synthetic oligonucleotide
ccggaggccaauagucuuu

SEQ ID NO: 339527 - RNA, 19 nt, Artificial Sequence
  Description of Artificial Sequence: Synthetic oligonucleotide
cuggcccguaacugcucuu

SEQ ID NO: 339528 - RNA, 19 nt, Artificial Sequence
  Description of Artificial Sequence: Synthetic oligonucleotide
ccgucaucaccagguguaa

SEQ ID NO: 339529 - RNA, 19 nt, Artificial Sequence
  Description of Artificial Sequence: Synthetic oligonucleotide
ccccuccuguacgugguaa

SEQ ID NO: 339530 - RNA, 19 nt, Artificial Sequence
  Description of Artificial Sequence: Synthetic oligonucleotide
caguagcaccgcggucucu

SEQ ID NO: 339531 - RNA, 19 nt, Artificial Sequence
  Description of Artificial Sequence: Synthetic oligonucleotide
ccggugguguuuggcugga

SEQ ID NO: 339532 - RNA, 19 nt, Artificial Sequence
  Description of Artificial Sequence: Synthetic oligonucleotide
cuucccgggcuugggccuu

SEQ ID NO: 339533 - RNA, 19 nt, Artificial Sequence
  Description of Artificial Sequence: Synthetic oligonucleotide
cuggccuguuuggcacuau

SEQ ID NO: 339534 - RNA, 19 nt, Artificial Sequence
  Description of Artificial Sequence: Synthetic oligonucleotide
gcggucucuggcgggcagu

SEQ ID NO: 339535 - RNA, 19 nt, Artificial Sequence
  Description of Artificial Sequence: Synthetic oligonucleotide
cgucgauccgcugcuuggu

SEQ ID NO: 339536 - RNA, 19 nt, Artificial Sequence
  Description of Artificial Sequence: Synthetic oligonucleotide
ggcgggcaguagaucucau

SEQ ID NO: 339537 - RNA, 19 nt, Artificial Sequence
  Description of Artificial Sequence: Synthetic oligonucleotide
cguccucgggguagaacuu

SEQ ID NO: 339538 - RNA, 19 nt, Artificial Sequence
  Description of Artificial Sequence: Synthetic oligonucleotide
ccuccgcccuuuggucgca

SEQ ID NO: 339539 - RNA, 19 nt, Artificial Sequence
  Description of Artificial Sequence: Synthetic oligonucleotide
ccgcggucucuggcgggca

SEQ ID NO: 339540 - RNA, 19 nt, Artificial Sequence
  Description of Artificial Sequence: Synthetic oligonucleotide
cccgaccuugccgcauguu

SEQ ID NO: 339541 - RNA, 19 nt, Artificial Sequence
  Description of Artificial Sequence: Synthetic oligonucleotide
auuauuucgggauagaaca

SEQ ID NO: 339542 - RNA, 19 nt, Artificial Sequence
  Description of Artificial Sequence: Synthetic oligonucleotide
cuuaagaugaccuaaucug

SEQ ID NO: 339543 - RNA, 19 nt, Artificial Sequence
  Description of Artificial Sequence: Synthetic oligonucleotide
agcaucgccggauaaaugc

SEQ ID NO: 339544 - RNA, 19 nt, Artificial Sequence
  Description of Artificial Sequence: Synthetic oligonucleotide
guaacuacuggcuuuggcg

SEQ ID NO: 339545 - RNA, 19 nt, Artificial Sequence
  Description of Artificial Sequence: Synthetic oligonucleotide
agauguaacaacaaguauc

SEQ ID NO: 339546 - RNA, 19 nt, Artificial Sequence
  Description of Artificial Sequence: Synthetic oligonucleotide
cauaauaauggaucgggcc

SEQ ID NO: 339547 - RNA, 19 nt, Artificial Sequence
  Description of Artificial Sequence: Synthetic oligonucleotide
ucuuaagaugaccuaaucu

SEQ ID NO: 339548 - RNA, 19 nt, Artificial Sequence
  Description of Artificial Sequence: Synthetic oligonucleotide
aauggaucgggccucuuuc

SEQ ID NO: 339549 - RNA, 19 nt, Artificial Sequence
  Description of Artificial Sequence: Synthetic oligonucleotide
auagacacuggacuagccc

SEQ ID NO: 339550 - RNA, 19 nt, Artificial Sequence
  Description of Artificial Sequence: Synthetic oligonucleotide
uuaaaagggacaaccguca

SEQ ID NO: 339551 - RNA, 19 nt, Artificial Sequence
  Description of Artificial Sequence: Synthetic oligonucleotide
uuaauucccugauauguag

SEQ ID NO: 339552 - RNA, 19 nt, Artificial Sequence
  Description of Artificial Sequence: Synthetic oligonucleotide
uagaacacuaacucuagug

SEQ ID NO: 339553 - RNA, 19 nt, Artificial Sequence
  Description of Artificial Sequence: Synthetic oligonucleotide
cauaucuuugcucuguuag

SEQ ID NO: 339554 - RNA, 19 nt, Artificial Sequence
  Description of Artificial Sequence: Synthetic oligonucleotide
uucgauaggccaagcaucg

SEQ ID NO: 339555 - RNA, 19 nt, Artificial Sequence
  Description of Artificial Sequence: Synthetic oligonucleotide
auaauaauggaucgggccu

SEQ ID NO: 339556 - RNA, 19 nt, Artificial Sequence
  Description of Artificial Sequence: Synthetic oligonucleotide
uaacuacuggcuuuggcgg

SEQ ID NO: 339557 - RNA, 19 nt, Artificial Sequence
  Description of Artificial Sequence: Synthetic oligonucleotide
uccgacauuaauuugugcu

SEQ ID NO: 339558 - RNA, 19 nt, Artificial Sequence
  Description of Artificial Sequence: Synthetic oligonucleotide
ucauaguguaugaugggag

SEQ ID NO: 339559 - RNA, 19 nt, Artificial Sequence
  Description of Artificial Sequence: Synthetic oligonucleotide
uuuaaugggcgauagcaac

SEQ ID NO: 339560 - RNA, 19 nt, Artificial Sequence
  Description of Artificial Sequence: Synthetic oligonucleotide
uucacuuuaugaccaaaug

SEQ ID NO: 339561 - RNA, 19 nt, Artificial Sequence
  Description of Artificial Sequence: Synthetic oligonucleotide
ucuguuaggucaaaugccu

SEQ ID NO: 339562 - RNA, 19 nt, Artificial Sequence
  Description of Artificial Sequence: Synthetic oligonucleotide
guuuugcuaacauuuuccg

SEQ ID NO: 339563 - RNA, 19 nt, Artificial Sequence
  Description of Artificial Sequence: Synthetic oligonucleotide
ugaaauuauuucgggauag

SEQ ID NO: 339564 - RNA, 19 nt, Artificial Sequence
  Description of Artificial Sequence: Synthetic oligonucleotide
aacugaaauuauuucggga

SEQ ID NO: 339565 - RNA, 19 nt, Artificial Sequence
  Description of Artificial Sequence: Synthetic oligonucleotide
aacgagucgguguccagcg

SEQ ID NO: 339566 - RNA, 19 nt, Artificial Sequence
  Description of Artificial Sequence: Synthetic oligonucleotide
aaaagggacaaccgucaag

SEQ ID NO: 339567 - RNA, 19 nt, Artificial Sequence
  Description of Artificial Sequence: Synthetic oligonucleotide
ucaaugagaaucgaugcug

SEQ ID NO: 339568 - RNA, 19 nt, Artificial Sequence
  Description of Artificial Sequence: Synthetic oligonucleotide
uucuccgacauuaauuugu

SEQ ID NO: 339569 - RNA, 19 nt, Artificial Sequence
  Description of Artificial Sequence: Synthetic oligonucleotide
cuggacaucgauacggucc

SEQ ID NO: 339570 - RNA, 19 nt, Artificial Sequence
  Description of Artificial Sequence: Synthetic oligonucleotide
aaugagaaucgaugcuguc

SEQ ID NO: 339571 - RNA, 19 nt, Artificial Sequence
  Description of Artificial Sequence: Synthetic oligonucleotide
cacguacuugcuaauacgg

SEQ ID NO: 339572 - RNA, 19 nt, Artificial Sequence
  Description of Artificial Sequence: Synthetic oligonucleotide
uuucgauaggccaagcauc

SEQ ID NO: 339573 - RNA, 19 nt, Artificial Sequence
  Description of Artificial Sequence: Synthetic oligonucleotide
uuauuggacgccccagagg

SEQ ID NO: 339574 - RNA, 19 nt, Artificial Sequence
  Description of Artificial Sequence: Synthetic oligonucleotide
gacaguaguaaaguggccc

SEQ ID NO: 339575 - RNA, 19 nt, Artificial Sequence
  Description of Artificial Sequence: Synthetic oligonucleotide
uacaaaacgagucgguguc

SEQ ID NO: 339576 - RNA, 19 nt, Artificial Sequence
  Description of Artificial Sequence: Synthetic oligonucleotide
aguuccauaccauccacug

SEQ ID NO: 339577 - RNA, 19 nt, Artificial Sequence
  Description of Artificial Sequence: Synthetic oligonucleotide
cucuguuaggucaaaugcc

SEQ ID NO: 339578 - RNA, 19 nt, Artificial Sequence
  Description of Artificial Sequence: Synthetic oligonucleotide
auuauguauccuuuuaauu

SEQ ID NO: 339579 - RNA, 19 nt, Artificial Sequence
  Description of Artificial Sequence: Synthetic oligonucleotide
ucgaagaacuguuauugga

SEQ ID NO: 339580 - RNA, 19 nt, Artificial Sequence
  Description of Artificial Sequence: Synthetic oligonucleotide
ucuccuaugaggccuggcc

SEQ ID NO: 339581 - RNA, 19 nt, Artificial Sequence
  Description of Artificial Sequence: Synthetic oligonucleotide
auaguauucucuuguagaa

SEQ ID NO: 339582 - RNA, 19 nt, Artificial Sequence
  Description of Artificial Sequence: Synthetic oligonucleotide
acacucuggugguaaauac

SEQ ID NO: 339583 - RNA, 19 nt, Artificial Sequence
  Description of Artificial Sequence: Synthetic oligonucleotide
uguaacuacuggcuuuggc

SEQ ID NO: 339584 - RNA, 19 nt, Artificial Sequence
  Description of Artificial Sequence: Synthetic oligonucleotide
acuguacaaaacgagucgg

SEQ ID NO: 339585 - RNA, 19 nt, Artificial Sequence
  Description of Artificial Sequence: Synthetic oligonucleotide
aacuacuggcuuuggcggg

SEQ ID NO: 339586 - RNA, 19 nt, Artificial Sequence
  Description of Artificial Sequence: Synthetic oligonucleotide
ucgggauagaacacuaacu

SEQ ID NO: 339587 - RNA, 19 nt, Artificial Sequence
  Description of Artificial Sequence: Synthetic oligonucleotide
aaaugccuuugcuucaggu

SEQ ID NO: 339588 - RNA, 19 nt, Artificial Sequence
  Description of Artificial Sequence: Synthetic oligonucleotide
aagaugaccuaaucugagu

SEQ ID NO: 339589 - RNA, 19 nt, Artificial Sequence
  Description of Artificial Sequence: Synthetic oligonucleotide
gauagaacacuaacucuag

SEQ ID NO: 339590 - RNA, 19 nt, Artificial Sequence
  Description of Artificial Sequence: Synthetic oligonucleotide
caguauucuaauacuguac

SEQ ID NO: 339591 - RNA, 19 nt, Artificial Sequence
  Description of Artificial Sequence: Synthetic oligonucleotide
uuuuccuccgaagucaaac

SEQ ID NO: 339592 - RNA, 19 nt, Artificial Sequence
  Description of Artificial Sequence: Synthetic oligonucleotide
acagugaccguugacgccg

SEQ ID NO: 339593 - RNA, 19 nt, Artificial Sequence
  Description of Artificial Sequence: Synthetic oligonucleotide
uuuugcuaacauuuuccgu

SEQ ID NO: 339594 - RNA, 19 nt, Artificial Sequence
  Description of Artificial Sequence: Synthetic oligonucleotide
ugauccuuaaauugugaau

SEQ ID NO: 339595 - RNA, 19 nt, Artificial Sequence
  Description of Artificial Sequence: Synthetic oligonucleotide
ucucaauucgaagaacugu

SEQ ID NO: 339596 - RNA, 19 nt, Artificial Sequence
  Description of Artificial Sequence: Synthetic oligonucleotide
uuucuuaagaugaccuaau

SEQ ID NO: 339597 - RNA, 19 nt, Artificial Sequence
  Description of Artificial Sequence: Synthetic oligonucleotide
acgccccagagguugaugc

SEQ ID NO: 339598 - RNA, 19 nt, Artificial Sequence
  Description of Artificial Sequence: Synthetic oligonucleotide
gaugcaauagcagcuccag

SEQ ID NO: 339599 - RNA, 19 nt, Artificial Sequence
  Description of Artificial Sequence: Synthetic oligonucleotide
uguuauuggacgccccaga

SEQ ID NO: 339600 - RNA, 19 nt, Artificial Sequence
  Description of Artificial Sequence: Synthetic oligonucleotide
uuuuaucucuccacaugcu

SEQ ID NO: 339601 - RNA, 19 nt, Artificial Sequence
  Description of Artificial Sequence: Synthetic oligonucleotide
cacuuuaugaccaaaugua

SEQ ID NO: 339602 - RNA, 19 nt, Artificial Sequence
  Description of Artificial Sequence: Synthetic oligonucleotide
ugguacagguuucaugaga

SEQ ID NO: 339603 - RNA, 19 nt, Artificial Sequence
  Description of Artificial Sequence: Synthetic oligonucleotide
ucuccgacauuaauuugug

SEQ ID NO: 339604 - RNA, 19 nt, Artificial Sequence
  Description of Artificial Sequence: Synthetic oligonucleotide
uccuccgaagucaaacacc

SEQ ID NO: 339605 - RNA, 19 nt, Artificial Sequence
  Description of Artificial Sequence: Synthetic oligonucleotide
guuauuggacgccccagag

SEQ ID NO: 339606 - RNA, 19 nt, Artificial Sequence
  Description of Artificial Sequence: Synthetic oligonucleotide
uuauuucgggauagaacac

SEQ ID NO: 339607 - RNA, 19 nt, Artificial Sequence
  Description of Artificial Sequence: Synthetic oligonucleotide
acuggacuagcccagucug

SEQ ID NO: 339608 - RNA, 19 nt, Artificial Sequence
  Description of Artificial Sequence: Synthetic oligonucleotide
uuuaaucgcuccuuguauu

SEQ ID NO: 339609 - RNA, 19 nt, Artificial Sequence
  Description of Artificial Sequence: Synthetic oligonucleotide
acaguaguaaaguggccca

SEQ ID NO: 339610 - RNA, 19 nt, Artificial Sequence
  Description of Artificial Sequence: Synthetic oligonucleotide
ugaacauugccacguacuu

SEQ ID NO: 339611 - RNA, 19 nt, Artificial Sequence
  Description of Artificial Sequence: Synthetic oligonucleotide
uuuccuccgaagucaaaca

SEQ ID NO: 339612 - RNA, 19 nt, Artificial Sequence
  Description of Artificial Sequence: Synthetic oligonucleotide
aguuggucucaauucgaag

SEQ ID NO: 339613 - RNA, 19 nt, Artificial Sequence
  Description of Artificial Sequence: Synthetic oligonucleotide
agaugaccuaaucugaguu

SEQ ID NO: 339614 - RNA, 19 nt, Artificial Sequence
  Description of Artificial Sequence: Synthetic oligonucleotide
uucuuaagaugaccuaauc

SEQ ID NO: 339615 - RNA, 19 nt, Artificial Sequence
  Description of Artificial Sequence: Synthetic oligonucleotide
ugcucuauggaugggaaaa

SEQ ID NO: 339616 - RNA, 19 nt, Artificial Sequence
  Description of Artificial Sequence: Synthetic oligonucleotide
uuuccguugucuuucuauc

SEQ ID NO: 339617 - RNA, 19 nt, Artificial Sequence
  Description of Artificial Sequence: Synthetic oligonucleotide
ugaugcaauagcagcucca

SEQ ID NO: 339618 - RNA, 19 nt, Artificial Sequence
  Description of Artificial Sequence: Synthetic oligonucleotide
augaccuaaucugaguuug

SEQ ID NO: 339619 - RNA, 19 nt, Artificial Sequence
  Description of Artificial Sequence: Synthetic oligonucleotide
aauccgguauucccuacau

SEQ ID NO: 339620 - RNA, 19 nt, Artificial Sequence
  Description of Artificial Sequence: Synthetic oligonucleotide
gguaccuaaacuuuauuaa

SEQ ID NO: 339621 - RNA, 19 nt, Artificial Sequence
  Description of Artificial Sequence: Synthetic oligonucleotide
ugaugggagguuuuauuuc

SEQ ID NO: 339622 - RNA, 19 nt, Artificial Sequence
  Description of Artificial Sequence: Synthetic oligonucleotide
aacuguuauuggacgcccc

SEQ ID NO: 339623 - RNA, 19 nt, Artificial Sequence
  Description of Artificial Sequence: Synthetic oligonucleotide
uauuucgggauagaacacu

SEQ ID NO: 339624 - RNA, 19 nt, Artificial Sequence
  Description of Artificial Sequence: Synthetic oligonucleotide
augaugggagguuuuauuu

SEQ ID NO: 339625 - RNA, 19 nt, Artificial Sequence
  Description of Artificial Sequence: Synthetic oligonucleotide
guauucccuacaugcaugc

SEQ ID NO: 339626 - RNA, 19 nt, Artificial Sequence
  Description of Artificial Sequence: Synthetic oligonucleotide
uaauacggguuucacuuua

SEQ ID NO: 339627 - RNA, 19 nt, Artificial Sequence
  Description of Artificial Sequence: Synthetic oligonucleotide
agggacaaccgucaagugu

SEQ ID NO: 339628 - RNA, 19 nt, Artificial Sequence
  Description of Artificial Sequence: Synthetic oligonucleotide
uuccuccgaagucaaacac

SEQ ID NO: 339629 - RNA, 19 nt, Artificial Sequence
  Description of Artificial Sequence: Synthetic oligonucleotide
cagcgagaaguaaucauac

SEQ ID NO: 339630 - RNA, 19 nt, Artificial Sequence
  Description of Artificial Sequence: Synthetic oligonucleotide
gauacgguccuccuuucga

SEQ ID NO: 339631 - RNA, 19 nt, Artificial Sequence
  Description of Artificial Sequence: Synthetic oligonucleotide
ucaauucgaagaacuguua

SEQ ID NO: 339632 - RNA, 19 nt, Artificial Sequence
  Description of Artificial Sequence: Synthetic oligonucleotide
ucgucggauggcaaagccc

SEQ ID NO: 339633 - RNA, 19 nt, Artificial Sequence
  Description of Artificial Sequence: Synthetic oligonucleotide
auagccaucuguccacugu

SEQ ID NO: 339634 - RNA, 19 nt, Artificial Sequence
  Description of Artificial Sequence: Synthetic oligonucleotide
uuaaucgcuccuuguauuu

SEQ ID NO: 339635 - RNA, 19 nt, Artificial Sequence
  Description of Artificial Sequence: Synthetic oligonucleotide
ucuucgucggauggcaaag

SEQ ID NO: 339636 - RNA, 19 nt, Artificial Sequence
  Description of Artificial Sequence: Synthetic oligonucleotide
augagaaucgaugcuguca

SEQ ID NO: 339637 - RNA, 19 nt, Artificial Sequence
  Description of Artificial Sequence: Synthetic oligonucleotide
acgucaacuuuauuugaga

SEQ ID NO: 339638 - RNA, 19 nt, Artificial Sequence
  Description of Artificial Sequence: Synthetic oligonucleotide
acuguuauuggacgcccca

SEQ ID NO: 339639 - RNA, 19 nt, Artificial Sequence
  Description of Artificial Sequence: Synthetic oligonucleotide
ccucaaugagaaucgaugc

SEQ ID NO: 339640 - RNA, 19 nt, Artificial Sequence
  Description of Artificial Sequence: Synthetic oligonucleotide
acgguccuccuuucgauag

SEQ ID NO: 339641 - RNA, 19 nt, Artificial Sequence
  Description of Artificial Sequence: Synthetic oligonucleotide
ucuuugugaauccgguauu

SEQ ID NO: 339642 - RNA, 19 nt, Artificial Sequence
  Description of Artificial Sequence: Synthetic oligonucleotide
auucccuacaugcaugcuu

SEQ ID NO: 339643 - RNA, 19 nt, Artificial Sequence
  Description of Artificial Sequence: Synthetic oligonucleotide
gcuacaagcuuuucaggag

SEQ ID NO: 339644 - RNA, 19 nt, Artificial Sequence
  Description of Artificial Sequence: Synthetic oligonucleotide
uuuggcgggaacuguacuu

SEQ ID NO: 339645 - RNA, 19 nt, Artificial Sequence
  Description of Artificial Sequence: Synthetic oligonucleotide
gagacugacuuucggaugu

SEQ ID NO: 339646 - RNA, 19 nt, Artificial Sequence
  Description of Artificial Sequence: Synthetic oligonucleotide
ccugguacagguuucauga

SEQ ID NO: 339647 - RNA, 19 nt, Artificial Sequence
  Description of Artificial Sequence: Synthetic oligonucleotide
acguacuugcuaauacggg

SEQ ID NO: 339648 - RNA, 19 nt, Artificial Sequence
  Description of Artificial Sequence: Synthetic oligonucleotide
auacggguuucacuuuaug

SEQ ID NO: 339649 - RNA, 19 nt, Artificial Sequence
  Description of Artificial Sequence: Synthetic oligonucleotide
ugacgccggaccccgggcg

SEQ ID NO: 339650 - RNA, 19 nt, Artificial Sequence
  Description of Artificial Sequence: Synthetic oligonucleotide
agcgagaaguaaucauaca

SEQ ID NO: 339651 - RNA, 19 nt, Artificial Sequence
  Description of Artificial Sequence: Synthetic oligonucleotide
uguaugaugggagguuuua

SEQ ID NO: 339652 - RNA, 19 nt, Artificial Sequence
  Description of Artificial Sequence: Synthetic oligonucleotide
uucuucgucggauggcaaa

SEQ ID NO: 339653 - RNA, 19 nt, Artificial Sequence
  Description of Artificial Sequence: Synthetic oligonucleotide
gaccguugacgccggaccc

SEQ ID NO: 339654 - RNA, 19 nt, Artificial Sequence
  Description of Artificial Sequence: Synthetic oligonucleotide
cggacaguaguaaaguggc

SEQ ID NO: 339655 - RNA, 19 nt, Artificial Sequence
  Description of Artificial Sequence: Synthetic oligonucleotide
cacagugaccguugacgcc

SEQ ID NO: 339656 - RNA, 19 nt, Artificial Sequence
  Description of Artificial Sequence: Synthetic oligonucleotide
auucggauucacuguucca

SEQ ID NO: 339657 - RNA, 19 nt, Artificial Sequence
  Description of Artificial Sequence: Synthetic oligonucleotide
gcuaauacggguuucacuu

SEQ ID NO: 339658 - RNA, 19 nt, Artificial Sequence
  Description of Artificial Sequence: Synthetic oligonucleotide
agaggcgccaugccggaca

SEQ ID NO: 339659 - RNA, 19 nt, Artificial Sequence
  Description of Artificial Sequence: Synthetic oligonucleotide
ucacuauucugggaugguc

SEQ ID NO: 339660 - RNA, 19 nt, Artificial Sequence
  Description of Artificial Sequence: Synthetic oligonucleotide
ugccggacaguaguaaagu

SEQ ID NO: 339661 - RNA, 19 nt, Artificial Sequence
  Description of Artificial Sequence: Synthetic oligonucleotide
agguguaacuacuggcuuu

SEQ ID NO: 339662 - RNA, 19 nt, Artificial Sequence
  Description of Artificial Sequence: Synthetic oligonucleotide
ggauagaacacuaacucua

SEQ ID NO: 339663 - RNA, 19 nt, Artificial Sequence
  Description of Artificial Sequence: Synthetic oligonucleotide
ccgacauuaauuugugcug

SEQ ID NO: 339664 - RNA, 19 nt, Artificial Sequence
  Description of Artificial Sequence: Synthetic oligonucleotide
ccuuuaaugggcgauagca

SEQ ID NO: 339665 - RNA, 19 nt, Artificial Sequence
  Description of Artificial Sequence: Synthetic oligonucleotide
ugcuaagguuaacguuuca

SEQ ID NO: 339666 - RNA, 19 nt, Artificial Sequence
  Description of Artificial Sequence: Synthetic oligonucleotide
auacgguccuccuuucgau

SEQ ID NO: 339667 - RNA, 19 nt, Artificial Sequence
  Description of Artificial Sequence: Synthetic oligonucleotide
cugguacagguuucaugag

SEQ ID NO: 339668 - RNA, 19 nt, Artificial Sequence
  Description of Artificial Sequence: Synthetic oligonucleotide
cuccgacauuaauuugugc

SEQ ID NO: 339669 - RNA, 19 nt, Artificial Sequence
  Description of Artificial Sequence: Synthetic oligonucleotide
cuuucgauaggccaagcau

SEQ ID NO: 339670 - RNA, 19 nt, Artificial Sequence
  Description of Artificial Sequence: Synthetic oligonucleotide
uuauggccaaaaggcuucc

SEQ ID NO: 339671 - RNA, 19 nt, Artificial Sequence
  Description of Artificial Sequence: Synthetic oligonucleotide
ugaauccgguauucccuac

SEQ ID NO: 339672 - RNA, 19 nt, Artificial Sequence
  Description of Artificial Sequence: Synthetic oligonucleotide
gggguuuccguuuugcuaa

SEQ ID NO: 339673 - RNA, 19 nt, Artificial Sequence
  Description of Artificial Sequence: Synthetic oligonucleotide
gguguaacuacuggcuuug

SEQ ID NO: 339674 - RNA, 19 nt, Artificial Sequence
  Description of Artificial Sequence: Synthetic oligonucleotide
cacugaauuguagcuauca

SEQ ID NO: 339675 - RNA, 19 nt, Artificial Sequence
  Description of Artificial Sequence: Synthetic oligonucleotide
accguugacgccggacccc

SEQ ID NO: 339676 - RNA, 19 nt, Artificial Sequence
  Description of Artificial Sequence: Synthetic oligonucleotide
cugaaauuauuucgggaua

SEQ ID NO: 339677 - RNA, 19 nt, Artificial Sequence
  Description of Artificial Sequence: Synthetic oligonucleotide
cucaauucgaagaacuguu

SEQ ID NO: 339678 - RNA, 19 nt, Artificial Sequence
  Description of Artificial Sequence: Synthetic oligonucleotide
gagaaucgaugcugucaug

SEQ ID NO: 339679 - RNA, 19 nt, Artificial Sequence
  Description of Artificial Sequence: Synthetic oligonucleotide
augccggacaguaguaaag

SEQ ID NO: 339680 - RNA, 19 nt, Artificial Sequence
  Description of Artificial Sequence: Synthetic oligonucleotide
uggaucgggccucuuucuc

SEQ ID NO: 339681 - RNA, 19 nt, Artificial Sequence
  Description of Artificial Sequence: Synthetic oligonucleotide
aauacggguuucacuuuau

SEQ ID NO: 339682 - RNA, 19 nt, Artificial Sequence
  Description of Artificial Sequence: Synthetic oligonucleotide
aucgcagucgguccugcau

SEQ ID NO: 339683 - RNA, 19 nt, Artificial Sequence
  Description of Artificial Sequence: Synthetic oligonucleotide
uucacuauucugggauggu

SEQ ID NO: 339684 - RNA, 19 nt, Artificial Sequence
  Description of Artificial Sequence: Synthetic oligonucleotide
cuguuauuggacgccccag

SEQ ID NO: 339685 - RNA, 19 nt, Artificial Sequence
  Description of Artificial Sequence: Synthetic oligonucleotide
aguaguaaaguggcccaau

SEQ ID NO: 339686 - RNA, 19 nt, Artificial Sequence
  Description of Artificial Sequence: Synthetic oligonucleotide
ccauguguccacucugugc

SEQ ID NO: 339687 - RNA, 19 nt, Artificial Sequence
  Description of Artificial Sequence: Synthetic oligonucleotide
guuccauaccauccacuga

SEQ ID NO: 339688 - RNA, 19 nt, Artificial Sequence
  Description of Artificial Sequence: Synthetic oligonucleotide
acauuaauuugugcuguuu

SEQ ID NO: 339689 - RNA, 19 nt, Artificial Sequence
  Description of Artificial Sequence: Synthetic oligonucleotide
uaguguaugaugggagguu

SEQ ID NO: 339690 - RNA, 19 nt, Artificial Sequence
  Description of Artificial Sequence: Synthetic oligonucleotide
gaaucgaugcugucaugcu

SEQ ID NO: 339691 - RNA, 19 nt, Artificial Sequence
  Description of Artificial Sequence: Synthetic oligonucleotide
aagcaucgccggauaaaug

SEQ ID NO: 339692 - RNA, 19 nt, Artificial Sequence
  Description of Artificial Sequence: Synthetic oligonucleotide
acuaacucuagugccuuua

SEQ ID NO: 339693 - RNA, 19 nt, Artificial Sequence
  Description of Artificial Sequence: Synthetic oligonucleotide
gaugaccuaaucugaguuu

SEQ ID NO: 339694 - RNA, 19 nt, Artificial Sequence
  Description of Artificial Sequence: Synthetic oligonucleotide
agauccauucggauucacu

SEQ ID NO: 339695 - RNA, 19 nt, Artificial Sequence
  Description of Artificial Sequence: Synthetic oligonucleotide
uucuaaccucauucuucgu

SEQ ID NO: 339696 - RNA, 19 nt, Artificial Sequence
  Description of Artificial Sequence: Synthetic oligonucleotide
gcauaauaauggaucgggc

SEQ ID NO: 339697 - RNA, 19 nt, Artificial Sequence
  Description of Artificial Sequence: Synthetic oligonucleotide
uguccacucugugcuaaac

SEQ ID NO: 339698 - RNA, 19 nt, Artificial Sequence
  Description of Artificial Sequence: Synthetic oligonucleotide
cuccuaugaggccuggcca

SEQ ID NO: 339699 - RNA, 19 nt, Artificial Sequence
  Description of Artificial Sequence: Synthetic oligonucleotide
cucaaugagaaucgaugcu

SEQ ID NO: 339700 - RNA, 19 nt, Artificial Sequence
  Description of Artificial Sequence: Synthetic oligonucleotide
auuucgggauagaacacua

SEQ ID NO: 339701 - RNA, 19 nt, Artificial Sequence
  Description of Artificial Sequence: Synthetic oligonucleotide
gaggcgccaugccggacag

SEQ ID NO: 339702 - RNA, 19 nt, Artificial Sequence
  Description of Artificial Sequence: Synthetic oligonucleotide
caaugagaaucgaugcugu

SEQ ID NO: 339703 - RNA, 19 nt, Artificial Sequence
  Description of Artificial Sequence: Synthetic oligonucleotide
ggaaugaacauugccacgu

SEQ ID NO: 339704 - RNA, 19 nt, Artificial Sequence
  Description of Artificial Sequence: Synthetic oligonucleotide
cuucgucggauggcaaagc

SEQ ID NO: 339705 - RNA, 19 nt, Artificial Sequence
  Description of Artificial Sequence: Synthetic oligonucleotide
gaguuggucucaauucgaa

SEQ ID NO: 339706 - RNA, 19 nt, Artificial Sequence
  Description of Artificial Sequence: Synthetic oligonucleotide
caauucgaagaacuguuau

SEQ ID NO: 339707 - RNA, 19 nt, Artificial Sequence
  Description of Artificial Sequence: Synthetic oligonucleotide
caaaacgagucggugucca

SEQ ID NO: 339708 - RNA, 19 nt, Artificial Sequence
  Description of Artificial Sequence: Synthetic oligonucleotide
uacgguccuccuuucgaua

SEQ ID NO: 339709 - RNA, 19 nt, Artificial Sequence
  Description of Artificial Sequence: Synthetic oligonucleotide
gaugguaccuaaacuuuau

SEQ ID NO: 339710 - RNA, 19 nt, Artificial Sequence
  Description of Artificial Sequence: Synthetic oligonucleotide
caugccggacaguaguaaa

SEQ ID NO: 339711 - RNA, 19 nt, Artificial Sequence
  Description of Artificial Sequence: Synthetic oligonucleotide
gggauagaacacuaacucu

SEQ ID NO: 339712 - RNA, 19 nt, Artificial Sequence
  Description of Artificial Sequence: Synthetic oligonucleotide
cacacccacugaccagacg

SEQ ID NO: 339713 - RNA, 19 nt, Artificial Sequence
  Description of Artificial Sequence: Synthetic oligonucleotide
cuaugaggccuggccagag

SEQ ID NO: 339714 - RNA, 19 nt, Artificial Sequence
  Description of Artificial Sequence: Synthetic oligonucleotide
cgauaggccaagcaucgcc

SEQ ID NO: 339715 - RNA, 19 nt, Artificial Sequence
  Description of Artificial Sequence: Synthetic oligonucleotide
ucgauaggccaagcaucgc

SEQ ID NO: 339716 - RNA, 19 nt, Artificial Sequence
  Description of Artificial Sequence: Synthetic oligonucleotide
gaauuguagcuaucaucau

SEQ ID NO: 339717 - RNA, 19 nt, Artificial Sequence
  Description of Artificial Sequence: Synthetic oligonucleotide
gccggauaaaugccuuugc

SEQ ID NO: 339718 - RNA, 19 nt, Artificial Sequence
  Description of Artificial Sequence: Synthetic oligonucleotide
acacuaacucuagugccuu

SEQ ID NO: 339719 - RNA, 19 nt, Artificial Sequence
  Description of Artificial Sequence: Synthetic oligonucleotide
augggcgauagcaacuuuu

SEQ ID NO: 339720 - RNA, 19 nt, Artificial Sequence
  Description of Artificial Sequence: Synthetic oligonucleotide
agggcuacuuguagagacu

SEQ ID NO: 339721 - RNA, 19 nt, Artificial Sequence
  Description of Artificial Sequence: Synthetic oligonucleotide
cagugaccguugacgccgg

SEQ ID NO: 339722 - RNA, 19 nt, Artificial Sequence
  Description of Artificial Sequence: Synthetic oligonucleotide
ucccuacaugcaugcuugu

SEQ ID NO: 339723 - RNA, 19 nt, Artificial Sequence
  Description of Artificial Sequence: Synthetic oligonucleotide
gacauuaauuugugcuguu

SEQ ID NO: 339724 - RNA, 19 nt, Artificial Sequence
  Description of Artificial Sequence: Synthetic oligonucleotide
ugccacguacuugcuaaua

SEQ ID NO: 339725 - RNA, 19 nt, Artificial Sequence
  Description of Artificial Sequence: Synthetic oligonucleotide
gagauccauucggauucac

SEQ ID NO: 339726 - RNA, 19 nt, Artificial Sequence
  Description of Artificial Sequence: Synthetic oligonucleotide
ccagcgagaaguaaucaua

SEQ ID NO: 339727 - RNA, 19 nt, Artificial Sequence
  Description of Artificial Sequence: Synthetic oligonucleotide
gcaucgccggauaaaugcc

SEQ ID NO: 339728 - RNA, 19 nt, Artificial Sequence
  Description of Artificial Sequence: Synthetic oligonucleotide
uugccacguacuugcuaau

SEQ ID NO: 339729 - RNA, 19 nt, Artificial Sequence
  Description of Artificial Sequence: Synthetic oligonucleotide
gcccaaucgcagucggucc

SEQ ID NO: 339730 - RNA, 19 nt, Artificial Sequence
  Description of Artificial Sequence: Synthetic oligonucleotide
uggcccaaucgcagucggu

SEQ ID NO: 339731 - RNA, 19 nt, Artificial Sequence
  Description of Artificial Sequence: Synthetic oligonucleotide
ggacaguaguaaaguggcc

SEQ ID NO: 339732 - RNA, 19 nt, Artificial Sequence
  Description of Artificial Sequence: Synthetic oligonucleotide
gccuuuaaugggcgauagc

SEQ ID NO: 339733 - RNA, 19 nt, Artificial Sequence
  Description of Artificial Sequence: Synthetic oligonucleotide
ucgccggauaaaugccuuu

SEQ ID NO: 339734 - RNA, 19 nt, Artificial Sequence
  Description of Artificial Sequence: Synthetic oligonucleotide
guccagcgagaaguaauca

SEQ ID NO: 339735 - RNA, 19 nt, Artificial Sequence
  Description of Artificial Sequence: Synthetic oligonucleotide
ggcccaaucgcagucgguc

SEQ ID NO: 339736 - RNA, 19 nt, Artificial Sequence
  Description of Artificial Sequence: Synthetic oligonucleotide
acaaaacacucugguggua

SEQ ID NO: 339737 - RNA, 19 nt, Artificial Sequence
  Description of Artificial Sequence: Synthetic oligonucleotide
gguuaacguuucauuuuca

SEQ ID NO: 339738 - RNA, 19 nt, Artificial Sequence
  Description of Artificial Sequence: Synthetic oligonucleotide
caucgccggauaaaugccu

SEQ ID NO: 339739 - RNA, 19 nt, Artificial Sequence
  Description of Artificial Sequence: Synthetic oligonucleotide
gggacaaccgucaaguguu

SEQ ID NO: 339740 - RNA, 19 nt, Artificial Sequence
  Description of Artificial Sequence: Synthetic oligonucleotide
acgagucgguguccagcga

SEQ ID NO: 339741 - RNA, 19 nt, Artificial Sequence
  Description of Artificial Sequence: Synthetic oligonucleotide
cacuggacuagcccagucu

SEQ ID NO: 339742 - RNA, 19 nt, Artificial Sequence
  Description of Artificial Sequence: Synthetic oligonucleotide
cucccgcgggagaccagag

SEQ ID NO: 339743 - RNA, 19 nt, Artificial Sequence
  Description of Artificial Sequence: Synthetic oligonucleotide
gcuggacaucgauacgguc

SEQ ID NO: 339744 - RNA, 19 nt, Artificial Sequence
  Description of Artificial Sequence: Synthetic oligonucleotide
aucgccggauaaaugccuu

SEQ ID NO: 339745 - RNA, 19 nt, Artificial Sequence
  Description of Artificial Sequence: Synthetic oligonucleotide
ggcgggaacuguacuucag

SEQ ID NO: 339746 - RNA, 19 nt, Artificial Sequence
  Description of Artificial Sequence: Synthetic oligonucleotide
cuaauacggguuucacuuu

SEQ ID NO: 339747 - RNA, 19 nt, Artificial Sequence
  Description of Artificial Sequence: Synthetic oligonucleotide
cuuuggcgggaacuguacu

SEQ ID NO: 339748 - RNA, 19 nt, Artificial Sequence
  Description of Artificial Sequence: Synthetic oligonucleotide
gcuuuggcgggaacuguac

SEQ ID NO: 339749 - RNA, 19 nt, Artificial Sequence
  Description of Artificial Sequence: Synthetic oligonucleotide
cguacuugcuaauacgggu

SEQ ID NO: 339750 - RNA, 19 nt, Artificial Sequence
  Description of Artificial Sequence: Synthetic oligonucleotide
auucuucgucggauggcaa

SEQ ID NO: 339751 - RNA, 19 nt, Artificial Sequence
  Description of Artificial Sequence: Synthetic oligonucleotide
guaugaugggagguuuuau

SEQ ID NO: 339752 - RNA, 19 nt, Artificial Sequence
  Description of Artificial Sequence: Synthetic oligonucleotide
gcuccguuggucuugcuuu

SEQ ID NO: 339753 - RNA, 19 nt, Artificial Sequence
  Description of Artificial Sequence: Synthetic oligonucleotide
cuugugacgucaguuccau

SEQ ID NO: 339754 - RNA, 19 nt, Artificial Sequence
  Description of Artificial Sequence: Synthetic oligonucleotide
caguaguaaaguggcccaa

SEQ ID NO: 339755 - RNA, 19 nt, Artificial Sequence
  Description of Artificial Sequence: Synthetic oligonucleotide
cgauacgguccuccuuucg

SEQ ID NO: 339756 - RNA, 19 nt, Artificial Sequence
  Description of Artificial Sequence: Synthetic oligonucleotide
ggguuuccguuuugcuaac

SEQ ID NO: 339757 - RNA, 19 nt, Artificial Sequence
  Description of Artificial Sequence: Synthetic oligonucleotide
gugccuuuaaugggcgaua

SEQ ID NO: 339758 - RNA, 19 nt, Artificial Sequence
  Description of Artificial Sequence: Synthetic oligonucleotide
cuggacuagcccagucugu

SEQ ID NO: 339759 - RNA, 19 nt, Artificial Sequence
  Description of Artificial Sequence: Synthetic oligonucleotide
ccacugaauuguagcuauc

SEQ ID NO: 339760 - RNA, 19 nt, Artificial Sequence
  Description of Artificial Sequence: Synthetic oligonucleotide
ccguugacgccggaccccg

SEQ ID NO: 339761 - RNA, 19 nt, Artificial Sequence
  Description of Artificial Sequence: Synthetic oligonucleotide
gcgggaacuguacuucagu

SEQ ID NO: 339762 - RNA, 19 nt, Artificial Sequence
  Description of Artificial Sequence: Synthetic oligonucleotide
ccggauaaaugccuuugcu

SEQ ID NO: 339763 - RNA, 19 nt, Artificial Sequence
  Description of Artificial Sequence: Synthetic oligonucleotide
gguuuccguuuugcuaaca

SEQ ID NO: 339764 - RNA, 19 nt, Artificial Sequence
  Description of Artificial Sequence: Synthetic oligonucleotide
auuggacgccccagagguu

SEQ ID NO: 339765 - RNA, 19 nt, Artificial Sequence
  Description of Artificial Sequence: Synthetic oligonucleotide
gccaagcaucgccggauaa

SEQ ID NO: 339766 - RNA, 19 nt, Artificial Sequence
  Description of Artificial Sequence: Synthetic oligonucleotide
ccaagcaucgccggauaaa

SEQ ID NO: 339767 - RNA, 19 nt, Artificial Sequence
  Description of Artificial Sequence: Synthetic oligonucleotide
gcucccgcgggagaccaga

SEQ ID NO: 339768 - RNA, 19 nt, Artificial Sequence
  Description of Artificial Sequence: Synthetic oligonucleotide
ggccaagcaucgccggaua

SEQ ID NO: 339769 - RNA, 19 nt, Artificial Sequence
  Description of Artificial Sequence: Synthetic oligonucleotide
cuccgaagucaaacaccau

SEQ ID NO: 339770 - RNA, 19 nt, Artificial Sequence
  Description of Artificial Sequence: Synthetic oligonucleotide
cacuaacucuagugccuuu

SEQ ID NO: 339771 - RNA, 19 nt, Artificial Sequence
  Description of Artificial Sequence: Synthetic oligonucleotide
gcgccaugccggacaguag

SEQ ID NO: 339772 - RNA, 19 nt, Artificial Sequence
  Description of Artificial Sequence: Synthetic oligonucleotide
ccaugccggacaguaguaa

SEQ ID NO: 339773 - RNA, 19 nt, Artificial Sequence
  Description of Artificial Sequence: Synthetic oligonucleotide
cgguauucccuacaugcau

SEQ ID NO: 339774 - RNA, 19 nt, Artificial Sequence
  Description of Artificial Sequence: Synthetic oligonucleotide
ggacaucgauacgguccuc

SEQ ID NO: 339775 - RNA, 19 nt, Artificial Sequence
  Description of Artificial Sequence: Synthetic oligonucleotide
cguugacgccggaccccgg

SEQ ID NO: 339776 - RNA, 19 nt, Artificial Sequence
  Description of Artificial Sequence: Synthetic oligonucleotide
aggcgccaugccggacagu

SEQ ID NO: 339777 - RNA, 19 nt, Artificial Sequence
  Description of Artificial Sequence: Synthetic oligonucleotide
caccugguacagguuucau

SEQ ID NO: 339778 - RNA, 19 nt, Artificial Sequence
  Description of Artificial Sequence: Synthetic oligonucleotide
cagcuccguuggucuugcu

SEQ ID NO: 339779 - RNA, 19 nt, Artificial Sequence
  Description of Artificial Sequence: Synthetic oligonucleotide
aauaccaucaguccuaggg

SEQ ID NO: 339780 - RNA, 19 nt, Artificial Sequence
  Description of Artificial Sequence: Synthetic oligonucleotide
auauauuugaauugggcgg

SEQ ID NO: 339781 - RNA, 19 nt, Artificial Sequence
  Description of Artificial Sequence: Synthetic oligonucleotide
ucaaggacgaggcagaugc

SEQ ID NO: 339782 - RNA, 19 nt, Artificial Sequence
  Description of Artificial Sequence: Synthetic oligonucleotide
auaguuauccgaugggucc

SEQ ID NO: 339783 - RNA, 19 nt, Artificial Sequence
  Description of Artificial Sequence: Synthetic oligonucleotide
aaaauaacgucuuuauacu

SEQ ID NO: 339784 - RNA, 19 nt, Artificial Sequence
  Description of Artificial Sequence: Synthetic oligonucleotide
uaaaggcccacucagagag

SEQ ID NO: 339785 - RNA, 19 nt, Artificial Sequence
  Description of Artificial Sequence: Synthetic oligonucleotide
acuauuuccgcagauagcg

SEQ ID NO: 339786 - RNA, 19 nt, Artificial Sequence
  Description of Artificial Sequence: Synthetic oligonucleotide
aagcagaucagguaucuag

SEQ ID NO: 339787 - RNA, 19 nt, Artificial Sequence
  Description of Artificial Sequence: Synthetic oligonucleotide
uguaugacaccagugaggg

SEQ ID NO: 339788 - RNA, 19 nt, Artificial Sequence
  Description of Artificial Sequence: Synthetic oligonucleotide
auugcugacaugcaggaag

SEQ ID NO: 339789 - RNA, 19 nt, Artificial Sequence
  Description of Artificial Sequence: Synthetic oligonucleotide
agaucaggaaguuuuauug

SEQ ID NO: 339790 - RNA, 19 nt, Artificial Sequence
  Description of Artificial Sequence: Synthetic oligonucleotide
aaaacgaccacagccuccc

SEQ ID NO: 339791 - RNA, 19 nt, Artificial Sequence
  Description of Artificial Sequence: Synthetic oligonucleotide
ugauuaaaagcagaucagg

SEQ ID NO: 339792 - RNA, 19 nt, Artificial Sequence
  Description of Artificial Sequence: Synthetic oligonucleotide
ucucaagccagguagguag

SEQ ID NO: 339793 - RNA, 19 nt, Artificial Sequence
  Description of Artificial Sequence: Synthetic oligonucleotide
uuccggauaagacacacug

SEQ ID NO: 339794 - RNA, 19 nt, Artificial Sequence
  Description of Artificial Sequence: Synthetic oligonucleotide
cacacucuaggaaacaugg

SEQ ID NO: 339795 - RNA, 19 nt, Artificial Sequence
  Description of Artificial Sequence: Synthetic oligonucleotide
auggaugcaggccuaagac

SEQ ID NO: 339796 - RNA, 19 nt, Artificial Sequence
  Description of Artificial Sequence: Synthetic oligonucleotide
guuagguagacagagguag

SEQ ID NO: 339797 - RNA, 19 nt, Artificial Sequence
  Description of Artificial Sequence: Synthetic oligonucleotide
aggucgugugcacagaggc

SEQ ID NO: 339798 - RNA, 19 nt, Artificial Sequence
  Description of Artificial Sequence: Synthetic oligonucleotide
acuaauaggacuucucagu

SEQ ID NO: 339799 - RNA, 19 nt, Artificial Sequence
  Description of Artificial Sequence: Synthetic oligonucleotide
agcauuucuggcaagacgg

SEQ ID NO: 339800 - RNA, 19 nt, Artificial Sequence
  Description of Artificial Sequence: Synthetic oligonucleotide
uagaaaacgaccacagccu

SEQ ID NO: 339801 - RNA, 19 nt, Artificial Sequence
  Description of Artificial Sequence: Synthetic oligonucleotide
uacuaauaggacuucucag

SEQ ID NO: 339802 - RNA, 19 nt, Artificial Sequence
  Description of Artificial Sequence: Synthetic oligonucleotide
cuuguaaaggcccacucag

SEQ ID NO: 339803 - RNA, 19 nt, Artificial Sequence
  Description of Artificial Sequence: Synthetic oligonucleotide
ucguagaaaacgaccacag

SEQ ID NO: 339804 - RNA, 19 nt, Artificial Sequence
  Description of Artificial Sequence: Synthetic oligonucleotide
uuaaaaggaggacuaugga

SEQ ID NO: 339805 - RNA, 19 nt, Artificial Sequence
  Description of Artificial Sequence: Synthetic oligonucleotide
guaucuagaauucucagaa

SEQ ID NO: 339806 - RNA, 19 nt, Artificial Sequence
  Description of Artificial Sequence: Synthetic oligonucleotide
cacucuaggaaacauggcc

SEQ ID NO: 339807 - RNA, 19 nt, Artificial Sequence
  Description of Artificial Sequence: Synthetic oligonucleotide
ugguuagguagacagaggu

SEQ ID NO: 339808 - RNA, 19 nt, Artificial Sequence
  Description of Artificial Sequence: Synthetic oligonucleotide
agaucagguaucuagaauu

SEQ ID NO: 339809 - RNA, 19 nt, Artificial Sequence
  Description of Artificial Sequence: Synthetic oligonucleotide
ugcaaggucagcuuauaug

SEQ ID NO: 339810 - RNA, 19 nt, Artificial Sequence
  Description of Artificial Sequence: Synthetic oligonucleotide
uuuuguuaucaaauaaaua

SEQ ID NO: 339811 - RNA, 19 nt, Artificial Sequence
  Description of Artificial Sequence: Synthetic oligonucleotide
gauggguccuuuuauugag

SEQ ID NO: 339812 - RNA, 19 nt, Artificial Sequence
  Description of Artificial Sequence: Synthetic oligonucleotide
gaucaggaaguuuuauugc

SEQ ID NO: 339813 - RNA, 19 nt, Artificial Sequence
  Description of Artificial Sequence: Synthetic oligonucleotide
uuuuaaaaggaggacuaug

SEQ ID NO: 339814 - RNA, 19 nt, Artificial Sequence
  Description of Artificial Sequence: Synthetic oligonucleotide
ucagaauugcucauuuggu

SEQ ID NO: 339815 - RNA, 19 nt, Artificial Sequence
  Description of Artificial Sequence: Synthetic oligonucleotide
auuaaaagcagaucaggua

SEQ ID NO: 339816 - RNA, 19 nt, Artificial Sequence
  Description of Artificial Sequence: Synthetic oligonucleotide
uauauggacugugaggagc

SEQ ID NO: 339817 - RNA, 19 nt, Artificial Sequence
  Description of Artificial Sequence: Synthetic oligonucleotide
cuaauaggacuucucagug

SEQ ID NO: 339818 - RNA, 19 nt, Artificial Sequence
  Description of Artificial Sequence: Synthetic oligonucleotide
gaugguguauuccgcagcc

SEQ ID NO: 339819 - RNA, 19 nt, Artificial Sequence
  Description of Artificial Sequence: Synthetic oligonucleotide
caugguuagguagacagag

SEQ ID NO: 339820 - RNA, 19 nt, Artificial Sequence
  Description of Artificial Sequence: Synthetic oligonucleotide
ucggggaugguguauuccg

SEQ ID NO: 339821 - RNA, 19 nt, Artificial Sequence
  Description of Artificial Sequence: Synthetic oligonucleotide
aaauaacgucuuuauacua

SEQ ID NO: 339822 - RNA, 19 nt, Artificial Sequence
  Description of Artificial Sequence: Synthetic oligonucleotide
aucuagaauucucagaauu

SEQ ID NO: 339823 - RNA, 19 nt, Artificial Sequence
  Description of Artificial Sequence: Synthetic oligonucleotide
ucaguguaugacaccagug

SEQ ID NO: 339824 - RNA, 19 nt, Artificial Sequence
  Description of Artificial Sequence: Synthetic oligonucleotide
ugugcaucgugucccagcc

SEQ ID NO: 339825 - RNA, 19 nt, Artificial Sequence
  Description of Artificial Sequence: Synthetic oligonucleotide
uauggaugcaggccuaaga

SEQ ID NO: 339826 - RNA, 19 nt, Artificial Sequence
  Description of Artificial Sequence: Synthetic oligonucleotide
guuuaaccaggccucagag

SEQ ID NO: 339827 - RNA, 19 nt, Artificial Sequence
  Description of Artificial Sequence: Synthetic oligonucleotide
agaaaacgaccacagccuc

SEQ ID NO: 339828 - RNA, 19 nt, Artificial Sequence
  Description of Artificial Sequence: Synthetic oligonucleotide
aggcugacugcauuucugc

SEQ ID NO: 339829 - RNA, 19 nt, Artificial Sequence
  Description of Artificial Sequence: Synthetic oligonucleotide
ucaaacucguacugggagc

SEQ ID NO: 339830 - RNA, 19 nt, Artificial Sequence
  Description of Artificial Sequence: Synthetic oligonucleotide
gcuuauauggacugugagg

SEQ ID NO: 339831 - RNA, 19 nt, Artificial Sequence
  Description of Artificial Sequence: Synthetic oligonucleotide
acagguuuucuccaagucu

SEQ ID NO: 339832 - RNA, 19 nt, Artificial Sequence
  Description of Artificial Sequence: Synthetic oligonucleotide
uauuuccgcagauagcgcu

SEQ ID NO: 339833 - RNA, 19 nt, Artificial Sequence
  Description of Artificial Sequence: Synthetic oligonucleotide
cacaucaggacugauguag

SEQ ID NO: 339834 - RNA, 19 nt, Artificial Sequence
  Description of Artificial Sequence: Synthetic oligonucleotide
caguuuccggauaagacac

SEQ ID NO: 339835 - RNA, 19 nt, Artificial Sequence
  Description of Artificial Sequence: Synthetic oligonucleotide
caaauugccgcuugggcac

SEQ ID NO: 339836 - RNA, 19 nt, Artificial Sequence
  Description of Artificial Sequence: Synthetic oligonucleotide
agguuuggguaacuugccc

SEQ ID NO: 339837 - RNA, 19 nt, Artificial Sequence
  Description of Artificial Sequence: Synthetic oligonucleotide
agcuuauauggacugugag

SEQ ID NO: 339838 - RNA, 19 nt, Artificial Sequence
  Description of Artificial Sequence: Synthetic oligonucleotide
aaggauagcagggcuguuc

SEQ ID NO: 339839 - RNA, 19 nt, Artificial Sequence
  Description of Artificial Sequence: Synthetic oligonucleotide
aggaagaguccccauguag

SEQ ID NO: 339840 - RNA, 19 nt, Artificial Sequence
  Description of Artificial Sequence: Synthetic oligonucleotide
ugaauugggcgggagauga

SEQ ID NO: 339841 - RNA, 19 nt, Artificial Sequence
  Description of Artificial Sequence: Synthetic oligonucleotide
aguccuaggguugaccucg

SEQ ID NO: 339842 - RNA, 19 nt, Artificial Sequence
  Description of Artificial Sequence: Synthetic oligonucleotide
aggucacucacagugaguc

SEQ ID NO: 339843 - RNA, 19 nt, Artificial Sequence
  Description of Artificial Sequence: Synthetic oligonucleotide
uguuaccuuugccuccugg

SEQ ID NO: 339844 - RNA, 19 nt, Artificial Sequence
  Description of Artificial Sequence: Synthetic oligonucleotide
gugauaguuauccgauggg

SEQ ID NO: 339845 - RNA, 19 nt, Artificial Sequence
  Description of Artificial Sequence: Synthetic oligonucleotide
cacuucaaaauuucggcuc

SEQ ID NO: 339846 - RNA, 19 nt, Artificial Sequence
  Description of Artificial Sequence: Synthetic oligonucleotide
ucgugaauggagcuuuucu

SEQ ID NO: 339847 - RNA, 19 nt, Artificial Sequence
  Description of Artificial Sequence: Synthetic oligonucleotide
uuugaauugggcgggagau

SEQ ID NO: 339848 - RNA, 19 nt, Artificial Sequence
  Description of Artificial Sequence: Synthetic oligonucleotide
gaugcguuucuucaucuuc

SEQ ID NO: 339849 - RNA, 19 nt, Artificial Sequence
  Description of Artificial Sequence: Synthetic oligonucleotide
uggauggcgagcauaggcu

SEQ ID NO: 339850 - RNA, 19 nt, Artificial Sequence
  Description of Artificial Sequence: Synthetic oligonucleotide
agguaucuagaauucucag

SEQ ID NO: 339851 - RNA, 19 nt, Artificial Sequence
  Description of Artificial Sequence: Synthetic oligonucleotide
ugauaguuauccgaugggu

SEQ ID NO: 339852 - RNA, 19 nt, Artificial Sequence
  Description of Artificial Sequence: Synthetic oligonucleotide
ucaguccuaggguugaccu

SEQ ID NO: 339853 - RNA, 19 nt, Artificial Sequence
  Description of Artificial Sequence: Synthetic oligonucleotide
auccacuucaaaauuucgg

SEQ ID NO: 339854 - RNA, 19 nt, Artificial Sequence
  Description of Artificial Sequence: Synthetic oligonucleotide
augauuaaaagcagaucag

SEQ ID NO: 339855 - RNA, 19 nt, Artificial Sequence
  Description of Artificial Sequence: Synthetic oligonucleotide
ugaggucgugugcacagag

SEQ ID NO: 339856 - RNA, 19 nt, Artificial Sequence
  Description of Artificial Sequence: Synthetic oligonucleotide
aguagcgagcugcaagguc

SEQ ID NO: 339857 - RNA, 19 nt, Artificial Sequence
  Description of Artificial Sequence: Synthetic oligonucleotide
ucgaucguccucucugagg

SEQ ID NO: 339858 - RNA, 19 nt, Artificial Sequence
  Description of Artificial Sequence: Synthetic oligonucleotide
cagaauugcucauuugguc

SEQ ID NO: 339859 - RNA, 19 nt, Artificial Sequence
  Description of Artificial Sequence: Synthetic oligonucleotide
gauaguuauccgauggguc

SEQ ID NO: 339860 - RNA, 19 nt, Artificial Sequence
  Description of Artificial Sequence: Synthetic oligonucleotide
agucaugggcugugcaucg

SEQ ID NO: 339861 - RNA, 19 nt, Artificial Sequence
  Description of Artificial Sequence: Synthetic oligonucleotide
uaauaggacuucucagugu

SEQ ID NO: 339862 - RNA, 19 nt, Artificial Sequence
  Description of Artificial Sequence: Synthetic oligonucleotide
uccucuuaucugcauugcc

SEQ ID NO: 339863 - RNA, 19 nt, Artificial Sequence
  Description of Artificial Sequence: Synthetic oligonucleotide
gguccuuuuauugagcacc

SEQ ID NO: 339864 - RNA, 19 nt, Artificial Sequence
  Description of Artificial Sequence: Synthetic oligonucleotide
ggcuagauaggggauaugg

SEQ ID NO: 339865 - RNA, 19 nt, Artificial Sequence
  Description of Artificial Sequence: Synthetic oligonucleotide
uuagguagacagagguaga

SEQ ID NO: 339866 - RNA, 19 nt, Artificial Sequence
  Description of Artificial Sequence: Synthetic oligonucleotide
uggguccuuuuauugagca

SEQ ID NO: 339867 - RNA, 19 nt, Artificial Sequence
  Description of Artificial Sequence: Synthetic oligonucleotide
ucggaccagagacagcaug

SEQ ID NO: 339868 - RNA, 19 nt, Artificial Sequence
  Description of Artificial Sequence: Synthetic oligonucleotide
caggccuaagacacuaggc

SEQ ID NO: 339869 - RNA, 19 nt, Artificial Sequence
  Description of Artificial Sequence: Synthetic oligonucleotide
acucggaccagagacagca

SEQ ID NO: 339870 - RNA, 19 nt, Artificial Sequence
  Description of Artificial Sequence: Synthetic oligonucleotide
ugucagaauugcucauuug

SEQ ID NO: 339871 - RNA, 19 nt, Artificial Sequence
  Description of Artificial Sequence: Synthetic oligonucleotide
aggauagcagggcuguucu

SEQ ID NO: 339872 - RNA, 19 nt, Artificial Sequence
  Description of Artificial Sequence: Synthetic oligonucleotide
ugcuacggcuggcaagagg

SEQ ID NO: 339873 - RNA, 19 nt, Artificial Sequence
  Description of Artificial Sequence: Synthetic oligonucleotide
gucgugugcacagaggcag

SEQ ID NO: 339874 - RNA, 19 nt, Artificial Sequence
  Description of Artificial Sequence: Synthetic oligonucleotide
aaauugccgcuugggcacc

SEQ ID NO: 339875 - RNA, 19 nt, Artificial Sequence
  Description of Artificial Sequence: Synthetic oligonucleotide
ugugggaugcugucguaga

SEQ ID NO: 339876 - RNA, 19 nt, Artificial Sequence
  Description of Artificial Sequence: Synthetic oligonucleotide
uggguaacuugcccaaggu

SEQ ID NO: 339877 - RNA, 19 nt, Artificial Sequence
  Description of Artificial Sequence: Synthetic oligonucleotide
cacuauuuccgcagauagc

SEQ ID NO: 339878 - RNA, 19 nt, Artificial Sequence
  Description of Artificial Sequence: Synthetic oligonucleotide
agguagauuaaaaugucau

SEQ ID NO: 339879 - RNA, 19 nt, Artificial Sequence
  Description of Artificial Sequence: Synthetic oligonucleotide
caguguaugacaccaguga

SEQ ID NO: 339880 - RNA, 19 nt, Artificial Sequence
  Description of Artificial Sequence: Synthetic oligonucleotide
cuauuuccgcagauagcgc

SEQ ID NO: 339881 - RNA, 19 nt, Artificial Sequence
  Description of Artificial Sequence: Synthetic oligonucleotide
uccggauaagacacacugu

SEQ ID NO: 339882 - RNA, 19 nt, Artificial Sequence
  Description of Artificial Sequence: Synthetic oligonucleotide
ucuaggaaacauggccucc

SEQ ID NO: 339883 - RNA, 19 nt, Artificial Sequence
  Description of Artificial Sequence: Synthetic oligonucleotide
ccaaccuccucuuaucugc

SEQ ID NO: 339884 - RNA, 19 nt, Artificial Sequence
  Description of Artificial Sequence: Synthetic oligonucleotide
gaaaacgaccacagccucc

SEQ ID NO: 339885 - RNA, 19 nt, Artificial Sequence
  Description of Artificial Sequence: Synthetic oligonucleotide
aggagggcccguuuaacca

SEQ ID NO: 339886 - RNA, 19 nt, Artificial Sequence
  Description of Artificial Sequence: Synthetic oligonucleotide
aggaggacuauggaugcag

SEQ ID NO: 339887 - RNA, 19 nt, Artificial Sequence
  Description of Artificial Sequence: Synthetic oligonucleotide
cagguaucuagaauucuca

SEQ ID NO: 339888 - RNA, 19 nt, Artificial Sequence
  Description of Artificial Sequence: Synthetic oligonucleotide
ggccuaagacacuaggcag

SEQ ID NO: 339889 - RNA, 19 nt, Artificial Sequence
  Description of Artificial Sequence: Synthetic oligonucleotide
gguaucuagaauucucaga

SEQ ID NO: 339890 - RNA, 19 nt, Artificial Sequence
  Description of Artificial Sequence: Synthetic oligonucleotide
uagacagagguagauuaaa

SEQ ID NO: 339891 - RNA, 19 nt, Artificial Sequence
  Description of Artificial Sequence: Synthetic oligonucleotide
guagcgagcugcaagguca

SEQ ID NO: 339892 - RNA, 19 nt, Artificial Sequence
  Description of Artificial Sequence: Synthetic oligonucleotide
cucuaggaaacauggccuc

SEQ ID NO: 339893 - RNA, 19 nt, Artificial Sequence
  Description of Artificial Sequence: Synthetic oligonucleotide
cuaccaaauugccgcuugg

SEQ ID NO: 339894 - RNA, 19 nt, Artificial Sequence
  Description of Artificial Sequence: Synthetic oligonucleotide
gagguagauuaaaauguca

SEQ ID NO: 339895 - RNA, 19 nt, Artificial Sequence
  Description of Artificial Sequence: Synthetic oligonucleotide
uaucuagaauucucagaau

SEQ ID NO: 339896 - RNA, 19 nt, Artificial Sequence
  Description of Artificial Sequence: Synthetic oligonucleotide
cacucggaccacaucguag

SEQ ID NO: 339897 - RNA, 19 nt, Artificial Sequence
  Description of Artificial Sequence: Synthetic oligonucleotide
ucuguuaccuuugccuccu

SEQ ID NO: 339898 - RNA, 19 nt, Artificial Sequence
  Description of Artificial Sequence: Synthetic oligonucleotide
cuagaauucucagaauuaa

SEQ ID NO: 339899 - RNA, 19 nt, Artificial Sequence
  Description of Artificial Sequence: Synthetic oligonucleotide
ucguacugggagcauuccu

SEQ ID NO: 339900 - RNA, 19 nt, Artificial Sequence
  Description of Artificial Sequence: Synthetic oligonucleotide
ccaguagcgagcugcaagg

SEQ ID NO: 339901 - RNA, 19 nt, Artificial Sequence
  Description of Artificial Sequence: Synthetic oligonucleotide
acacucuaggaaacauggc

SEQ ID NO: 339902 - RNA, 19 nt, Artificial Sequence
  Description of Artificial Sequence: Synthetic oligonucleotide
accacaucguagaaaacga

SEQ ID NO: 339903 - RNA, 19 nt, Artificial Sequence
  Description of Artificial Sequence: Synthetic oligonucleotide
ggaugcaggccuaagacac

SEQ ID NO: 339904 - RNA, 19 nt, Artificial Sequence
  Description of Artificial Sequence: Synthetic oligonucleotide
augggcugugcaucguguc

SEQ ID NO: 339905 - RNA, 19 nt, Artificial Sequence
  Description of Artificial Sequence: Synthetic oligonucleotide
aaaguugggugcaguaaaa

SEQ ID NO: 339906 - RNA, 19 nt, Artificial Sequence
  Description of Artificial Sequence: Synthetic oligonucleotide
acauccgcagcggccaggc

SEQ ID NO: 339907 - RNA, 19 nt, Artificial Sequence
  Description of Artificial Sequence: Synthetic oligonucleotide
aauugggucuuugcuuggu

SEQ ID NO: 339908 - RNA, 19 nt, Artificial Sequence
  Description of Artificial Sequence: Synthetic oligonucleotide
auggcgagcauaggcuccc

SEQ ID NO: 339909 - RNA, 19 nt, Artificial Sequence
  Description of Artificial Sequence: Synthetic oligonucleotide
agggcuguucucaagccag

SEQ ID NO: 339910 - RNA, 19 nt, Artificial Sequence
  Description of Artificial Sequence: Synthetic oligonucleotide
ggcgcccagggcuagauag

SEQ ID NO: 339911 - RNA, 19 nt, Artificial Sequence
  Description of Artificial Sequence: Synthetic oligonucleotide
aauugccgcuugggcaccc

SEQ ID NO: 339912 - RNA, 19 nt, Artificial Sequence
  Description of Artificial Sequence: Synthetic oligonucleotide
gauggcugaacuagaggca

SEQ ID NO: 339913 - RNA, 19 nt, Artificial Sequence
  Description of Artificial Sequence: Synthetic oligonucleotide
gagacccucccauccucgg

SEQ ID NO: 339914 - RNA, 19 nt, Artificial Sequence
  Description of Artificial Sequence: Synthetic oligonucleotide
auauggacugugaggagca

SEQ ID NO: 339915 - RNA, 19 nt, Artificial Sequence
  Description of Artificial Sequence: Synthetic oligonucleotide
gauggcgagcauaggcucc

SEQ ID NO: 339916 - RNA, 19 nt, Artificial Sequence
  Description of Artificial Sequence: Synthetic oligonucleotide
uguccgggccucgugaaug

SEQ ID NO: 339917 - RNA, 19 nt, Artificial Sequence
  Description of Artificial Sequence: Synthetic oligonucleotide
acgaccacagccucccgcu

SEQ ID NO: 339918 - RNA, 19 nt, Artificial Sequence
  Description of Artificial Sequence: Synthetic oligonucleotide
accacuuguaaaggcccac

SEQ ID NO: 339919 - RNA, 19 nt, Artificial Sequence
  Description of Artificial Sequence: Synthetic oligonucleotide
acucguacugggagcauuc

SEQ ID NO: 339920 - RNA, 19 nt, Artificial Sequence
  Description of Artificial Sequence: Synthetic oligonucleotide
aaacgaccacagccucccg

SEQ ID NO: 339921 - RNA, 19 nt, Artificial Sequence
  Description of Artificial Sequence: Synthetic oligonucleotide
gcuagauaggggauauggg

SEQ ID NO: 339922 - RNA, 19 nt, Artificial Sequence
  Description of Artificial Sequence: Synthetic oligonucleotide
gacugauguaggcagggcu

SEQ ID NO: 339923 - RNA, 19 nt, Artificial Sequence
  Description of Artificial Sequence: Synthetic oligonucleotide
aucgaucguccucucugag

SEQ ID NO: 339924 - RNA, 19 nt, Artificial Sequence
  Description of Artificial Sequence: Synthetic oligonucleotide
gcaggccuaagacacuagg

SEQ ID NO: 339925 - RNA, 19 nt, Artificial Sequence
  Description of Artificial Sequence: Synthetic oligonucleotide
uugaauugggcgggagaug

SEQ ID NO: 339926 - RNA, 19 nt, Artificial Sequence
  Description of Artificial Sequence: Synthetic oligonucleotide
cacuuguaaaggcccacuc

SEQ ID NO: 339927 - RNA, 19 nt, Artificial Sequence
  Description of Artificial Sequence: Synthetic oligonucleotide
agcagaucagguaucuaga

SEQ ID NO: 339928 - RNA, 19 nt, Artificial Sequence
  Description of Artificial Sequence: Synthetic oligonucleotide
augguuagguagacagagg

SEQ ID NO: 339929 - RNA, 19 nt, Artificial Sequence
  Description of Artificial Sequence: Synthetic oligonucleotide
gaggucgugugcacagagg

SEQ ID NO: 339930 - RNA, 19 nt, Artificial Sequence
  Description of Artificial Sequence: Synthetic oligonucleotide
ugcaggccuaagacacuag

SEQ ID NO: 339931 - RNA, 19 nt, Artificial Sequence
  Description of Artificial Sequence: Synthetic oligonucleotide
acacuaggcaggggcgucc

SEQ ID NO: 339932 - RNA, 19 nt, Artificial Sequence
  Description of Artificial Sequence: Synthetic oligonucleotide
cuugccccgguauggccgg

SEQ ID NO: 339933 - RNA, 19 nt, Artificial Sequence
  Description of Artificial Sequence: Synthetic oligonucleotide
uccgcagauagcgcugugc

SEQ ID NO: 339934 - RNA, 19 nt, Artificial Sequence
  Description of Artificial Sequence: Synthetic oligonucleotide
aucagguaucuagaauucu

SEQ ID NO: 339935 - RNA, 19 nt, Artificial Sequence
  Description of Artificial Sequence: Synthetic oligonucleotide
acuaggcuugccccgguau

SEQ ID NO: 339936 - RNA, 19 nt, Artificial Sequence
  Description of Artificial Sequence: Synthetic oligonucleotide
gacaccagugagggaaggc

SEQ ID NO: 339937 - RNA, 19 nt, Artificial Sequence
  Description of Artificial Sequence: Synthetic oligonucleotide
auaggggauauggggagga

SEQ ID NO: 339938 - RNA, 19 nt, Artificial Sequence
  Description of Artificial Sequence: Synthetic oligonucleotide
aacuagaggcagggcuggg

SEQ ID NO: 339939 - RNA, 19 nt, Artificial Sequence
  Description of Artificial Sequence: Synthetic oligonucleotide
caaacucguacugggagca

SEQ ID NO: 339940 - RNA, 19 nt, Artificial Sequence
  Description of Artificial Sequence: Synthetic oligonucleotide
cuaggcaggggcguccacc

SEQ ID NO: 339941 - RNA, 19 nt, Artificial Sequence
  Description of Artificial Sequence: Synthetic oligonucleotide
gucacuaggcuugccccgg

SEQ ID NO: 339942 - RNA, 19 nt, Artificial Sequence
  Description of Artificial Sequence: Synthetic oligonucleotide
gaauugcucauuuggucau

SEQ ID NO: 339943 - RNA, 19 nt, Artificial Sequence
  Description of Artificial Sequence: Synthetic oligonucleotide
aggacauccgcagcggcca

SEQ ID NO: 339944 - RNA, 19 nt, Artificial Sequence
  Description of Artificial Sequence: Synthetic oligonucleotide
gaggguacacaggguguag

SEQ ID NO: 339945 - RNA, 19 nt, Artificial Sequence
  Description of Artificial Sequence: Synthetic oligonucleotide
agacagagguagauuaaaa

SEQ ID NO: 339946 - RNA, 19 nt, Artificial Sequence
  Description of Artificial Sequence: Synthetic oligonucleotide
agguggguuccugcagacc

SEQ ID NO: 339947 - RNA, 19 nt, Artificial Sequence
  Description of Artificial Sequence: Synthetic oligonucleotide
aacucguacugggagcauu

SEQ ID NO: 339948 - RNA, 19 nt, Artificial Sequence
  Description of Artificial Sequence: Synthetic oligonucleotide
uguauuccgcagccuugau

SEQ ID NO: 339949 - RNA, 19 nt, Artificial Sequence
  Description of Artificial Sequence: Synthetic oligonucleotide
auugggucuuugcuuggua

SEQ ID NO: 339950 - RNA, 19 nt, Artificial Sequence
  Description of Artificial Sequence: Synthetic oligonucleotide
ugggugcuaggggaagugc

SEQ ID NO: 339951 - RNA, 19 nt, Artificial Sequence
  Description of Artificial Sequence: Synthetic oligonucleotide
uagguagguagguccccgu

SEQ ID NO: 339952 - RNA, 19 nt, Artificial Sequence
  Description of Artificial Sequence: Synthetic oligonucleotide
aaagcagaucagguaucua

SEQ ID NO: 339953 - RNA, 19 nt, Artificial Sequence
  Description of Artificial Sequence: Synthetic oligonucleotide
ccucuuaucugcauugcca

SEQ ID NO: 339954 - RNA, 19 nt, Artificial Sequence
  Description of Artificial Sequence: Synthetic oligonucleotide
aggcuugccccgguauggc

SEQ ID NO: 339955 - RNA, 19 nt, Artificial Sequence
  Description of Artificial Sequence: Synthetic oligonucleotide
gucgcugaggucgugugca

SEQ ID NO: 339956 - RNA, 19 nt, Artificial Sequence
  Description of Artificial Sequence: Synthetic oligonucleotide
cagcuuauauggacuguga

SEQ ID NO: 339957 - RNA, 19 nt, Artificial Sequence
  Description of Artificial Sequence: Synthetic oligonucleotide
cucggggaugguguauucc

SEQ ID NO: 339958 - RNA, 19 nt, Artificial Sequence
  Description of Artificial Sequence: Synthetic oligonucleotide
cuccucuuaucugcauugc

SEQ ID NO: 339959 - RNA, 19 nt, Artificial Sequence
  Description of Artificial Sequence: Synthetic oligonucleotide
cgugaauggagcuuuucuc

SEQ ID NO: 339960 - RNA, 19 nt, Artificial Sequence
  Description of Artificial Sequence: Synthetic oligonucleotide
gacgaggcagaugcguuuc

SEQ ID NO: 339961 - RNA, 19 nt, Artificial Sequence
  Description of Artificial Sequence: Synthetic oligonucleotide
cuugggcacccauguccgg

SEQ ID NO: 339962 - RNA, 19 nt, Artificial Sequence
  Description of Artificial Sequence: Synthetic oligonucleotide
cuauggaugcaggccuaag

SEQ ID NO: 339963 - RNA, 19 nt, Artificial Sequence
  Description of Artificial Sequence: Synthetic oligonucleotide
aggggcguccacccaggag

SEQ ID NO: 339964 - RNA, 19 nt, Artificial Sequence
  Description of Artificial Sequence: Synthetic oligonucleotide
ccucuguuaccuuugccuc

SEQ ID NO: 339965 - RNA, 19 nt, Artificial Sequence
  Description of Artificial Sequence: Synthetic oligonucleotide
ggucuuugcuugguacugg

SEQ ID NO: 339966 - RNA, 19 nt, Artificial Sequence
  Description of Artificial Sequence: Synthetic oligonucleotide
uagguccccguucccuaca

SEQ ID NO: 339967 - RNA, 19 nt, Artificial Sequence
  Description of Artificial Sequence: Synthetic oligonucleotide
agaccugaagguauugcuu

SEQ ID NO: 339968 - RNA, 19 nt, Artificial Sequence
  Description of Artificial Sequence: Synthetic oligonucleotide
ccgauggguccuuuuauug

SEQ ID NO: 339969 - RNA, 19 nt, Artificial Sequence
  Description of Artificial Sequence: Synthetic oligonucleotide
uugcugucgcauguaguuc

SEQ ID NO: 339970 - RNA, 19 nt, Artificial Sequence
  Description of Artificial Sequence: Synthetic oligonucleotide
aguugcugucgcauguagu

SEQ ID NO: 339971 - RNA, 19 nt, Artificial Sequence
  Description of Artificial Sequence: Synthetic oligonucleotide
ugguggcaugcuaccaaau

SEQ ID NO: 339972 - RNA, 19 nt, Artificial Sequence
  Description of Artificial Sequence: Synthetic oligonucleotide
ucgugucccagccgccgca

SEQ ID NO: 339973 - RNA, 19 nt, Artificial Sequence
  Description of Artificial Sequence: Synthetic oligonucleotide
agguccccguucccuacag

SEQ ID NO: 339974 - RNA, 19 nt, Artificial Sequence
  Description of Artificial Sequence: Synthetic oligonucleotide
gcagaugcguuucuucauc

SEQ ID NO: 339975 - RNA, 19 nt, Artificial Sequence
  Description of Artificial Sequence: Synthetic oligonucleotide
ugggcggcccugcuacggc

SEQ ID NO: 339976 - RNA, 19 nt, Artificial Sequence
  Description of Artificial Sequence: Synthetic oligonucleotide
uccuaggguugaccucggc

SEQ ID NO: 339977 - RNA, 19 nt, Artificial Sequence
  Description of Artificial Sequence: Synthetic oligonucleotide
ggguaacuugcccaagguc

SEQ ID NO: 339978 - RNA, 19 nt, Artificial Sequence
  Description of Artificial Sequence: Synthetic oligonucleotide
cucaguguaugacaccagu

SEQ ID NO: 339979 - RNA, 19 nt, Artificial Sequence
  Description of Artificial Sequence: Synthetic oligonucleotide
guagguccccguucccuac

SEQ ID NO: 339980 - RNA, 19 nt, Artificial Sequence
  Description of Artificial Sequence: Synthetic oligonucleotide
ggauggcgagcauaggcuc

SEQ ID NO: 339981 - RNA, 19 nt, Artificial Sequence
  Description of Artificial Sequence: Synthetic oligonucleotide
ccgcagauagcgcugugcc

SEQ ID NO: 339982 - RNA, 19 nt, Artificial Sequence
  Description of Artificial Sequence: Synthetic oligonucleotide
cucguacugggagcauucc

SEQ ID NO: 339983 - RNA, 19 nt, Artificial Sequence
  Description of Artificial Sequence: Synthetic oligonucleotide
gguguauuccgcagccuug

SEQ ID NO: 339984 - RNA, 19 nt, Artificial Sequence
  Description of Artificial Sequence: Synthetic oligonucleotide
caagacgggcauccacuuc

SEQ ID NO: 339985 - RNA, 19 nt, Artificial Sequence
  Description of Artificial Sequence: Synthetic oligonucleotide
guagagcauggugaagaga

SEQ ID NO: 339986 - RNA, 19 nt, Artificial Sequence
  Description of Artificial Sequence: Synthetic oligonucleotide
gcaugggcggcccugcuac

SEQ ID NO: 339987 - RNA, 19 nt, Artificial Sequence
  Description of Artificial Sequence: Synthetic oligonucleotide
agcauaggcuccccucuuu

SEQ ID NO: 339988 - RNA, 19 nt, Artificial Sequence
  Description of Artificial Sequence: Synthetic oligonucleotide
augggcggcccugcuacgg

SEQ ID NO: 339989 - RNA, 19 nt, Artificial Sequence
  Description of Artificial Sequence: Synthetic oligonucleotide
gcuugccccgguauggccg

SEQ ID NO: 339990 - RNA, 19 nt, Artificial Sequence
  Description of Artificial Sequence: Synthetic oligonucleotide
gcauuucuggcaagacggg

SEQ ID NO: 339991 - RNA, 19 nt, Artificial Sequence
  Description of Artificial Sequence: Synthetic oligonucleotide
uccccguucccuacagguu

SEQ ID NO: 339992 - RNA, 19 nt, Artificial Sequence
  Description of Artificial Sequence: Synthetic oligonucleotide
ggugcccuagcugagggca

SEQ ID NO: 339993 - RNA, 19 nt, Artificial Sequence
  Description of Artificial Sequence: Synthetic oligonucleotide
agguagguccccguucccu

SEQ ID NO: 339994 - RNA, 19 nt, Artificial Sequence
  Description of Artificial Sequence: Synthetic oligonucleotide
guccccguucccuacaggu

SEQ ID NO: 339995 - RNA, 19 nt, Artificial Sequence
  Description of Artificial Sequence: Synthetic oligonucleotide
ugcuugguacugggugugc

SEQ ID NO: 339996 - RNA, 19 nt, Artificial Sequence
  Description of Artificial Sequence: Synthetic oligonucleotide
ucacuaggcuugccccggu

SEQ ID NO: 339997 - RNA, 19 nt, Artificial Sequence
  Description of Artificial Sequence: Synthetic oligonucleotide
gcagaucagguaucuagaa

SEQ ID NO: 339998 - RNA, 19 nt, Artificial Sequence
  Description of Artificial Sequence: Synthetic oligonucleotide
uuccgcagauagcgcugug

SEQ ID NO: 339999 - RNA, 19 nt, Artificial Sequence
  Description of Artificial Sequence: Synthetic oligonucleotide
ccacaucguagaaaacgac

SEQ ID NO: 340000 - RNA, 19 nt, Artificial Sequence
  Description of Artificial Sequence: Synthetic oligonucleotide
agguagguagguccccguu

SEQ ID NO: 340001 - RNA, 19 nt, Artificial Sequence
  Description of Artificial Sequence: Synthetic oligonucleotide
gaaggggcaugggcggccc

SEQ ID NO: 340002 - RNA, 19 nt, Artificial Sequence
  Description of Artificial Sequence: Synthetic oligonucleotide
ggggaugguguauuccgca

SEQ ID NO: 340003 - RNA, 19 nt, Artificial Sequence
  Description of Artificial Sequence: Synthetic oligonucleotide
gcagaccugaagguauugc

SEQ ID NO: 340004 - RNA, 19 nt, Artificial Sequence
  Description of Artificial Sequence: Synthetic oligonucleotide
caugggcggcccugcuacg

SEQ ID NO: 340005 - RNA, 19 nt, Artificial Sequence
  Description of Artificial Sequence: Synthetic oligonucleotide
ggcccguuuaaccaggccu

SEQ ID NO: 340006 - RNA, 19 nt, Artificial Sequence
  Description of Artificial Sequence: Synthetic oligonucleotide
cucgugaauggagcuuuuc

SEQ ID NO: 340007 - RNA, 19 nt, Artificial Sequence
  Description of Artificial Sequence: Synthetic oligonucleotide
acuauggaugcaggccuaa

SEQ ID NO: 340008 - RNA, 19 nt, Artificial Sequence
  Description of Artificial Sequence: Synthetic oligonucleotide
acgaggcagaugcguuucu

SEQ ID NO: 340009 - RNA, 19 nt, Artificial Sequence
  Description of Artificial Sequence: Synthetic oligonucleotide
ggcucagguggguuccugc

SEQ ID NO: 340010 - RNA, 19 nt, Artificial Sequence
  Description of Artificial Sequence: Synthetic oligonucleotide
aaacucguacugggagcau

SEQ ID NO: 340011 - RNA, 19 nt, Artificial Sequence
  Description of Artificial Sequence: Synthetic oligonucleotide
agggcccguuuaaccaggc

SEQ ID NO: 340012 - RNA, 19 nt, Artificial Sequence
  Description of Artificial Sequence: Synthetic oligonucleotide
cacucggaccagagacagc

SEQ ID NO: 340013 - RNA, 19 nt, Artificial Sequence
  Description of Artificial Sequence: Synthetic oligonucleotide
aguuuccggauaagacaca

SEQ ID NO: 340014 - RNA, 19 nt, Artificial Sequence
  Description of Artificial Sequence: Synthetic oligonucleotide
ggguccuuuuauugagcac

SEQ ID NO: 340015 - RNA, 19 nt, Artificial Sequence
  Description of Artificial Sequence: Synthetic oligonucleotide
cggcacucggaccagagac

SEQ ID NO: 340016 - RNA, 19 nt, Artificial Sequence
  Description of Artificial Sequence: Synthetic oligonucleotide
uccucggggaugguguauu

SEQ ID NO: 340017 - RNA, 19 nt, Artificial Sequence
  Description of Artificial Sequence: Synthetic oligonucleotide
aggaaucaggcggucugau

SEQ ID NO: 340018 - RNA, 19 nt, Artificial Sequence
  Description of Artificial Sequence: Synthetic oligonucleotide
cagaugcguuucuucaucu

SEQ ID NO: 340019 - RNA, 19 nt, Artificial Sequence
  Description of Artificial Sequence: Synthetic oligonucleotide
agauagcgcugugccagga

SEQ ID NO: 340020 - RNA, 19 nt, Artificial Sequence
  Description of Artificial Sequence: Synthetic oligonucleotide
guaugacaccagugaggga

SEQ ID NO: 340021 - RNA, 19 nt, Artificial Sequence
  Description of Artificial Sequence: Synthetic oligonucleotide
gguguaggccuccaaaauu

SEQ ID NO: 340022 - RNA, 19 nt, Artificial Sequence
  Description of Artificial Sequence: Synthetic oligonucleotide
cagaucagguaucuagaau

SEQ ID NO: 340023 - RNA, 19 nt, Artificial Sequence
  Description of Artificial Sequence: Synthetic oligonucleotide
ccuaggguugaccucggca

SEQ ID NO: 340024 - RNA, 19 nt, Artificial Sequence
  Description of Artificial Sequence: Synthetic oligonucleotide
ugcucccuuaggagacuuu

SEQ ID NO: 340025 - RNA, 19 nt, Artificial Sequence
  Description of Artificial Sequence: Synthetic oligonucleotide
uugccgcuugggcacccau

SEQ ID NO: 340026 - RNA, 19 nt, Artificial Sequence
  Description of Artificial Sequence: Synthetic oligonucleotide
ucuugucgcugaggucgug

SEQ ID NO: 340027 - RNA, 19 nt, Artificial Sequence
  Description of Artificial Sequence: Synthetic oligonucleotide
cauguccgggccucgugaa

SEQ ID NO: 340028 - RNA, 19 nt, Artificial Sequence
  Description of Artificial Sequence: Synthetic oligonucleotide
caugggcugugcaucgugu

SEQ ID NO: 340029 - RNA, 19 nt, Artificial Sequence
  Description of Artificial Sequence: Synthetic oligonucleotide
auguccgggccucgugaau

SEQ ID NO: 340030 - RNA, 19 nt, Artificial Sequence
  Description of Artificial Sequence: Synthetic oligonucleotide
gcguccacccaggagggcc

SEQ ID NO: 340031 - RNA, 19 nt, Artificial Sequence
  Description of Artificial Sequence: Synthetic oligonucleotide
guucucaagccagguaggu

SEQ ID NO: 340032 - RNA, 19 nt, Artificial Sequence
  Description of Artificial Sequence: Synthetic oligonucleotide
gggagaucgaucguccucu

SEQ ID NO: 340033 - RNA, 19 nt, Artificial Sequence
  Description of Artificial Sequence: Synthetic oligonucleotide
guccuaggguugaccucgg

SEQ ID NO: 340034 - RNA, 19 nt, Artificial Sequence
  Description of Artificial Sequence: Synthetic oligonucleotide
ugaggucggcggucuuguc

SEQ ID NO: 340035 - RNA, 19 nt, Artificial Sequence
  Description of Artificial Sequence: Synthetic oligonucleotide
gucucgcugugaggugagg

SEQ ID NO: 340036 - RNA, 19 nt, Artificial Sequence
  Description of Artificial Sequence: Synthetic oligonucleotide
aguuauccgauggguccuu

SEQ ID NO: 340037 - RNA, 19 nt, Artificial Sequence
  Description of Artificial Sequence: Synthetic oligonucleotide
caucaguccuaggguugac

SEQ ID NO: 340038 - RNA, 19 nt, Artificial Sequence
  Description of Artificial Sequence: Synthetic oligonucleotide
gguagguccccguucccua

SEQ ID NO: 340039 - RNA, 19 nt, Artificial Sequence
  Description of Artificial Sequence: Synthetic oligonucleotide
gguuagguagacagaggua

SEQ ID NO: 340040 - RNA, 19 nt, Artificial Sequence
  Description of Artificial Sequence: Synthetic oligonucleotide
gcugaacuagaggcagggc

SEQ ID NO: 340041 - RNA, 19 nt, Artificial Sequence
  Description of Artificial Sequence: Synthetic oligonucleotide
gcccguuuaaccaggccuc

SEQ ID NO: 340042 - RNA, 19 nt, Artificial Sequence
  Description of Artificial Sequence: Synthetic oligonucleotide
gggcuguucucaagccagg

SEQ ID NO: 340043 - RNA, 19 nt, Artificial Sequence
  Description of Artificial Sequence: Synthetic oligonucleotide
gguggcaugcuaccaaauu

SEQ ID NO: 340044 - RNA, 19 nt, Artificial Sequence
  Description of Artificial Sequence: Synthetic oligonucleotide
cgauggguccuuuuauuga

SEQ ID NO: 340045 - RNA, 19 nt, Artificial Sequence
  Description of Artificial Sequence: Synthetic oligonucleotide
ggcggucuugucgcugagg

SEQ ID NO: 340046 - RNA, 19 nt, Artificial Sequence
  Description of Artificial Sequence: Synthetic oligonucleotide
gucaugggcuggaguccag

SEQ ID NO: 340047 - RNA, 19 nt, Artificial Sequence
  Description of Artificial Sequence: Synthetic oligonucleotide
cauggucaguggcaagggu

SEQ ID NO: 340048 - RNA, 19 nt, Artificial Sequence
  Description of Artificial Sequence: Synthetic oligonucleotide
ugccccgguauggccggcc

SEQ ID NO: 340049 - RNA, 19 nt, Artificial Sequence
  Description of Artificial Sequence: Synthetic oligonucleotide
ggauagcagggcuguucuc

SEQ ID NO: 340050 - RNA, 19 nt, Artificial Sequence
  Description of Artificial Sequence: Synthetic oligonucleotide
gcaugguuagguagacaga

SEQ ID NO: 340051 - RNA, 19 nt, Artificial Sequence
  Description of Artificial Sequence: Synthetic oligonucleotide
cguuuaaccaggccucaga

SEQ ID NO: 340052 - RNA, 19 nt, Artificial Sequence
  Description of Artificial Sequence: Synthetic oligonucleotide
cuggcaagagguggcccca

SEQ ID NO: 340053 - RNA, 19 nt, Artificial Sequence
  Description of Artificial Sequence: Synthetic oligonucleotide
gggcccguuuaaccaggcc

SEQ ID NO: 340054 - RNA, 19 nt, Artificial Sequence
  Description of Artificial Sequence: Synthetic oligonucleotide
ggucgugugcacagaggca

SEQ ID NO: 340055 - RNA, 19 nt, Artificial Sequence
  Description of Artificial Sequence: Synthetic oligonucleotide
ggcacucggaccagagaca

SEQ ID NO: 340056 - RNA, 19 nt, Artificial Sequence
  Description of Artificial Sequence: Synthetic oligonucleotide
ggagaucgaucguccucuc

SEQ ID NO: 340057 - RNA, 19 nt, Artificial Sequence
  Description of Artificial Sequence: Synthetic oligonucleotide
gcaggaagucuaggacugc

SEQ ID NO: 340058 - RNA, 19 nt, Artificial Sequence
  Description of Artificial Sequence: Synthetic oligonucleotide
auugccgcuugggcaccca

SEQ ID NO: 340059 - RNA, 19 nt, Artificial Sequence
  Description of Artificial Sequence: Synthetic oligonucleotide
ggguguaggccuccaaaau

SEQ ID NO: 340060 - RNA, 19 nt, Artificial Sequence
  Description of Artificial Sequence: Synthetic oligonucleotide
cauccucggggauggugua

SEQ ID NO: 340061 - RNA, 19 nt, Artificial Sequence
  Description of Artificial Sequence: Synthetic oligonucleotide
ggcugacugcauuucugcu

SEQ ID NO: 340062 - RNA, 19 nt, Artificial Sequence
  Description of Artificial Sequence: Synthetic oligonucleotide
cugcaaggucagcuuauau

SEQ ID NO: 340063 - RNA, 19 nt, Artificial Sequence
  Description of Artificial Sequence: Synthetic oligonucleotide
gcgcccagggcuagauagg

SEQ ID NO: 340064 - RNA, 19 nt, Artificial Sequence
  Description of Artificial Sequence: Synthetic oligonucleotide
gagcauaggcuccccucuu

SEQ ID NO: 340065 - RNA, 19 nt, Artificial Sequence
  Description of Artificial Sequence: Synthetic oligonucleotide
cacccauguccgggccucg

SEQ ID NO: 340066 - RNA, 19 nt, Artificial Sequence
  Description of Artificial Sequence: Synthetic oligonucleotide
ccauguccgggccucguga

SEQ ID NO: 340067 - RNA, 19 nt, Artificial Sequence
  Description of Artificial Sequence: Synthetic oligonucleotide
gugcccuagcugagggcac

SEQ ID NO: 340068 - RNA, 19 nt, Artificial Sequence
  Description of Artificial Sequence: Synthetic oligonucleotide
cacuaggcaggggcgucca

SEQ ID NO: 340069 - RNA, 19 nt, Artificial Sequence
  Description of Artificial Sequence: Synthetic oligonucleotide
ccguuuaaccaggccucag

SEQ ID NO: 340070 - RNA, 19 nt, Artificial Sequence
  Description of Artificial Sequence: Synthetic oligonucleotide
ccccucacucacaaggugu

SEQ ID NO: 340071 - RNA, 19 nt, Artificial Sequence
  Description of Artificial Sequence: Synthetic oligonucleotide
cguugcugagggucaagga

SEQ ID NO: 340072 - RNA, 19 nt, Artificial Sequence
  Description of Artificial Sequence: Synthetic oligonucleotide
ccucggggaugguguauuc

SEQ ID NO: 340073 - RNA, 19 nt, Artificial Sequence
  Description of Artificial Sequence: Synthetic oligonucleotide
aggcgcccagggcuagaua

SEQ ID NO: 340074 - RNA, 19 nt, Artificial Sequence
  Description of Artificial Sequence: Synthetic oligonucleotide
cccacaugucacuaggcuu

SEQ ID NO: 340075 - RNA, 19 nt, Artificial Sequence
  Description of Artificial Sequence: Synthetic oligonucleotide
gggcuagauaggggauaug

SEQ ID NO: 340076 - RNA, 19 nt, Artificial Sequence
  Description of Artificial Sequence: Synthetic oligonucleotide
ggcggucugaugggcucug

SEQ ID NO: 340077 - RNA, 19 nt, Artificial Sequence
  Description of Artificial Sequence: Synthetic oligonucleotide
gcaagacgggcauccacuu

SEQ ID NO: 340078 - RNA, 19 nt, Artificial Sequence
  Description of Artificial Sequence: Synthetic oligonucleotide
uugccccgguauggccggc

SEQ ID NO: 340079 - RNA, 19 nt, Artificial Sequence
  Description of Artificial Sequence: Synthetic oligonucleotide
gcugucagaauugcucauu

SEQ ID NO: 340080 - RNA, 19 nt, Artificial Sequence
  Description of Artificial Sequence: Synthetic oligonucleotide
gcucccuuaggagacuuuu

SEQ ID NO: 340081 - RNA, 19 nt, Artificial Sequence
  Description of Artificial Sequence: Synthetic oligonucleotide
caguagcgagcugcaaggu

SEQ ID NO: 340082 - RNA, 19 nt, Artificial Sequence
  Description of Artificial Sequence: Synthetic oligonucleotide
caggggcguccacccagga

SEQ ID NO: 340083 - RNA, 19 nt, Artificial Sequence
  Description of Artificial Sequence: Synthetic oligonucleotide
cgcagauagcgcugugcca

SEQ ID NO: 340084 - RNA, 19 nt, Artificial Sequence
  Description of Artificial Sequence: Synthetic oligonucleotide
gccucgugaauggagcuuu

SEQ ID NO: 340085 - RNA, 19 nt, Artificial Sequence
  Description of Artificial Sequence: Synthetic oligonucleotide
guuauccgauggguccuuu

SEQ ID NO: 340086 - RNA, 19 nt, Artificial Sequence
  Description of Artificial Sequence: Synthetic oligonucleotide
ccgguauggccggccacug

SEQ ID NO: 340087 - RNA, 19 nt, Artificial Sequence
  Description of Artificial Sequence: Synthetic oligonucleotide
cucggaccagagacagcau

SEQ ID NO: 340088 - RNA, 19 nt, Artificial Sequence
  Description of Artificial Sequence: Synthetic oligonucleotide
gccccgguauggccggcca

SEQ ID NO: 340089 - RNA, 19 nt, Artificial Sequence
  Description of Artificial Sequence: Synthetic oligonucleotide
cggucugaugggcucugca

SEQ ID NO: 340090 - RNA, 19 nt, Artificial Sequence
  Description of Artificial Sequence: Synthetic oligonucleotide
ccacucggaccacaucgua

SEQ ID NO: 340091 - RNA, 19 nt, Artificial Sequence
  Description of Artificial Sequence: Synthetic oligonucleotide
ccccgguauggccggccac

SEQ ID NO: 340092 - RNA, 19 nt, Artificial Sequence
  Description of Artificial Sequence: Synthetic oligonucleotide
ccccguucccuacagguuu

SEQ ID NO: 340093 - RNA, 19 nt, Artificial Sequence
  Description of Artificial Sequence: Synthetic oligonucleotide
ccuagcugagggcacuauu

SEQ ID NO: 340094 - RNA, 19 nt, Artificial Sequence
  Description of Artificial Sequence: Synthetic oligonucleotide
ccgcuugggcacccauguc

SEQ ID NO: 340095 - RNA, 19 nt, Artificial Sequence
  Description of Artificial Sequence: Synthetic oligonucleotide
ccguucccuacagguuuuc

SEQ ID NO: 340096 - RNA, 19 nt, Artificial Sequence
  Description of Artificial Sequence: Synthetic oligonucleotide
gggcggcccugcuacggcu

SEQ ID NO: 340097 - RNA, 19 nt, Artificial Sequence
  Description of Artificial Sequence: Synthetic oligonucleotide
gcacaagguuuggguaacu

SEQ ID NO: 340098 - RNA, 19 nt, Artificial Sequence
  Description of Artificial Sequence: Synthetic oligonucleotide
ggcaagagguggccccauu

SEQ ID NO: 340099 - RNA, 19 nt, Artificial Sequence
  Description of Artificial Sequence: Synthetic oligonucleotide
cggccagauggcugaacua

SEQ ID NO: 340100 - RNA, 19 nt, Artificial Sequence
  Description of Artificial Sequence: Synthetic oligonucleotide
gcccuagcugagggcacua

SEQ ID NO: 340101 - RNA, 19 nt, Artificial Sequence
  Description of Artificial Sequence: Synthetic oligonucleotide
cguccucucugaggguaca

SEQ ID NO: 340102 - RNA, 19 nt, Artificial Sequence
  Description of Artificial Sequence: Synthetic oligonucleotide
cgguauggccggccacuga

SEQ ID NO: 340103 - RNA, 19 nt, Artificial Sequence
  Description of Artificial Sequence: Synthetic oligonucleotide
cccguucccuacagguuuu

SEQ ID NO: 340104 - RNA, 19 nt, Artificial Sequence
  Description of Artificial Sequence: Synthetic oligonucleotide
ccucgugaauggagcuuuu

SEQ ID NO: 340105 - RNA, 19 nt, Artificial Sequence
  Description of Artificial Sequence: Synthetic oligonucleotide
ccgcagcggccaggcguug

SEQ ID NO: 340106 - RNA, 19 nt, Artificial Sequence
  Description of Artificial Sequence: Synthetic oligonucleotide
aagauuaucagguauacac

SEQ ID NO: 340107 - RNA, 19 nt, Artificial Sequence
  Description of Artificial Sequence: Synthetic oligonucleotide
aaaaucgagagccugguag

SEQ ID NO: 340108 - RNA, 19 nt, Artificial Sequence
  Description of Artificial Sequence: Synthetic oligonucleotide
uauacuacagugcuggucc

SEQ ID NO: 340109 - RNA, 19 nt, Artificial Sequence
  Description of Artificial Sequence: Synthetic oligonucleotide
aacagcaacgaacggaggc

SEQ ID NO: 340110 - RNA, 19 nt, Artificial Sequence
  Description of Artificial Sequence: Synthetic oligonucleotide
auaguaucuucccaguccc

SEQ ID NO: 340111 - RNA, 19 nt, Artificial Sequence
  Description of Artificial Sequence: Synthetic oligonucleotide
uauauuguggaccacucca

SEQ ID NO: 340112 - RNA, 19 nt, Artificial Sequence
  Description of Artificial Sequence: Synthetic oligonucleotide
aauaaaaucgagagccugg

SEQ ID NO: 340113 - RNA, 19 nt, Artificial Sequence
  Description of Artificial Sequence: Synthetic oligonucleotide
aacgggaugacguggcagc

SEQ ID NO: 340114 - RNA, 19 nt, Artificial Sequence
  Description of Artificial Sequence: Synthetic oligonucleotide
gauaguaucuucccagucc

SEQ ID NO: 340115 - RNA, 19 nt, Artificial Sequence
  Description of Artificial Sequence: Synthetic oligonucleotide
auguguucauccuaaaauc

SEQ ID NO: 340116 - RNA, 19 nt, Artificial Sequence
  Description of Artificial Sequence: Synthetic oligonucleotide
aaaagggcaccacucauug

SEQ ID NO: 340117 - RNA, 19 nt, Artificial Sequence
  Description of Artificial Sequence: Synthetic oligonucleotide
uguguucauccuaaaaucc

SEQ ID NO: 340118 - RNA, 19 nt, Artificial Sequence
  Description of Artificial Sequence: Synthetic oligonucleotide
aaaagucgggcccuuccgc

SEQ ID NO: 340119 - RNA, 19 nt, Artificial Sequence
  Description of Artificial Sequence: Synthetic oligonucleotide
caucuuacgucucugaagc

SEQ ID NO: 340120 - RNA, 19 nt, Artificial Sequence
  Description of Artificial Sequence: Synthetic oligonucleotide
aaagucgggcccuuccgcc

SEQ ID NO: 340121 - RNA, 19 nt, Artificial Sequence
  Description of Artificial Sequence: Synthetic oligonucleotide
agcggcacaccucaaaagc

SEQ ID NO: 340122 - RNA, 19 nt, Artificial Sequence
  Description of Artificial Sequence: Synthetic oligonucleotide
uuagccaguugcaaagagg

SEQ ID NO: 340123 - RNA, 19 nt, Artificial Sequence
  Description of Artificial Sequence: Synthetic oligonucleotide
aguuccugaguugacagcc

SEQ ID NO: 340124 - RNA, 19 nt, Artificial Sequence
  Description of Artificial Sequence: Synthetic oligonucleotide
agaacuaggcugcugauca

SEQ ID NO: 340125 - RNA, 19 nt, Artificial Sequence
  Description of Artificial Sequence: Synthetic oligonucleotide
aagggaaacaagauuauca

SEQ ID NO: 340126 - RNA, 19 nt, Artificial Sequence
  Description of Artificial Sequence: Synthetic oligonucleotide
caccguauagucauuagcc

SEQ ID NO: 340127 - RNA, 19 nt, Artificial Sequence
  Description of Artificial Sequence: Synthetic oligonucleotide
agggaaacaagauuaucag

SEQ ID NO: 340128 - RNA, 19 nt, Artificial Sequence
  Description of Artificial Sequence: Synthetic oligonucleotide
aacagugcugccucaauga

SEQ ID NO: 340129 - RNA, 19 nt, Artificial Sequence
  Description of Artificial Sequence: Synthetic oligonucleotide
uuuacguguuuccaguaca

SEQ ID NO: 340130 - RNA, 19 nt, Artificial Sequence
  Description of Artificial Sequence: Synthetic oligonucleotide
caagaccucacccugacag

SEQ ID NO: 340131 - RNA, 19 nt, Artificial Sequence
  Description of Artificial Sequence: Synthetic oligonucleotide
auguauaucaaagggcacg

SEQ ID NO: 340132 - RNA, 19 nt, Artificial Sequence
  Description of Artificial Sequence: Synthetic oligonucleotide
uuaucagguauacacuacu

SEQ ID NO: 340133 - RNA, 19 nt, Artificial Sequence
  Description of Artificial Sequence: Synthetic oligonucleotide
cugacagcuauacaagggg

SEQ ID NO: 340134 - RNA, 19 nt, Artificial Sequence
  Description of Artificial Sequence: Synthetic oligonucleotide
aagaccucacccugacagc

SEQ ID NO: 340135 - RNA, 19 nt, Artificial Sequence
  Description of Artificial Sequence: Synthetic oligonucleotide
agagcuuagaguccaagga

SEQ ID NO: 340136 - RNA, 19 nt, Artificial Sequence
  Description of Artificial Sequence: Synthetic oligonucleotide
uauacacuacucuuccacc

SEQ ID NO: 340137 - RNA, 19 nt, Artificial Sequence
  Description of Artificial Sequence: Synthetic oligonucleotide
acaagcugagcccuggauc

SEQ ID NO: 340138 - RNA, 19 nt, Artificial Sequence
  Description of Artificial Sequence: Synthetic oligonucleotide
aaaucgagagccugguaga

SEQ ID NO: 340139 - RNA, 19 nt, Artificial Sequence
  Description of Artificial Sequence: Synthetic oligonucleotide
guauguauaucaaagggca

SEQ ID NO: 340140 - RNA, 19 nt, Artificial Sequence
  Description of Artificial Sequence: Synthetic oligonucleotide
acaagauuaucagguauac

SEQ ID NO: 340141 - RNA, 19 nt, Artificial Sequence
  Description of Artificial Sequence: Synthetic oligonucleotide
cuguauguaaaguccagac

SEQ ID NO: 340142 - RNA, 19 nt, Artificial Sequence
  Description of Artificial Sequence: Synthetic oligonucleotide
uuuccaguacagcacuucc

SEQ ID NO: 340143 - RNA, 19 nt, Artificial Sequence
  Description of Artificial Sequence: Synthetic oligonucleotide
augucugcaaaagucgggc

SEQ ID NO: 340144 - RNA, 19 nt, Artificial Sequence
  Description of Artificial Sequence: Synthetic oligonucleotide
gaugacguggcagccaugg

SEQ ID NO: 340145 - RNA, 19 nt, Artificial Sequence
  Description of Artificial Sequence: Synthetic oligonucleotide
aggacuauauuguggacca

SEQ ID NO: 340146 - RNA, 19 nt, Artificial Sequence
  Description of Artificial Sequence: Synthetic oligonucleotide
aaaccuccaguccucagga

SEQ ID NO: 340147 - RNA, 19 nt, Artificial Sequence
  Description of Artificial Sequence: Synthetic oligonucleotide
ggugcuacaggcucuaggg

SEQ ID NO: 340148 - RNA, 19 nt, Artificial Sequence
  Description of Artificial Sequence: Synthetic oligonucleotide
uguacuaaagagagcugcu

SEQ ID NO: 340149 - RNA, 19 nt, Artificial Sequence
  Description of Artificial Sequence: Synthetic oligonucleotide
ugacguggcagccauggcc

SEQ ID NO: 340150 - RNA, 19 nt, Artificial Sequence
  Description of Artificial Sequence: Synthetic oligonucleotide
uuacguguuuccaguacag

SEQ ID NO: 340151 - RNA, 19 nt, Artificial Sequence
  Description of Artificial Sequence: Synthetic oligonucleotide
uucauagugguuuugccuu

SEQ ID NO: 340152 - RNA, 19 nt, Artificial Sequence
  Description of Artificial Sequence: Synthetic oligonucleotide
acagcaacgaacggaggcc

SEQ ID NO: 340153 - RNA, 19 nt, Artificial Sequence
  Description of Artificial Sequence: Synthetic oligonucleotide
acuacuauggucggaguag

SEQ ID NO: 340154 - RNA, 19 nt, Artificial Sequence
  Description of Artificial Sequence: Synthetic oligonucleotide
uauguaaaguccagacacu

SEQ ID NO: 340155 - RNA, 19 nt, Artificial Sequence
  Description of Artificial Sequence: Synthetic oligonucleotide
aagcguucuuccucuacag

SEQ ID NO: 340156 - RNA, 19 nt, Artificial Sequence
  Description of Artificial Sequence: Synthetic oligonucleotide
aguaaauggccccaccgca

SEQ ID NO: 340157 - RNA, 19 nt, Artificial Sequence
  Description of Artificial Sequence: Synthetic oligonucleotide
ucagguauacacuacucuu

SEQ ID NO: 340158 - RNA, 19 nt, Artificial Sequence
  Description of Artificial Sequence: Synthetic oligonucleotide
ucgagagccugguagacca

SEQ ID NO: 340159 - RNA, 19 nt, Artificial Sequence
  Description of Artificial Sequence: Synthetic oligonucleotide
auuguggaccacuccauug

SEQ ID NO: 340160 - RNA, 19 nt, Artificial Sequence
  Description of Artificial Sequence: Synthetic oligonucleotide
ucccgcagcauauaucucc

SEQ ID NO: 340161 - RNA, 19 nt, Artificial Sequence
  Description of Artificial Sequence: Synthetic oligonucleotide
aucagguauacacuacucu

SEQ ID NO: 340162 - RNA, 19 nt, Artificial Sequence
  Description of Artificial Sequence: Synthetic oligonucleotide
gaguaaauggccccaccgc

SEQ ID NO: 340163 - RNA, 19 nt, Artificial Sequence
  Description of Artificial Sequence: Synthetic oligonucleotide
gauaucugcccugaugagc

SEQ ID NO: 340164 - RNA, 19 nt, Artificial Sequence
  Description of Artificial Sequence: Synthetic oligonucleotide
aaccuugaaaccaacuggu

SEQ ID NO: 340165 - RNA, 19 nt, Artificial Sequence
  Description of Artificial Sequence: Synthetic oligonucleotide
uccacauuagcccgggagu

SEQ ID NO: 340166 - RNA, 19 nt, Artificial Sequence
  Description of Artificial Sequence: Synthetic oligonucleotide
cuugguagcacccuuccuc

SEQ ID NO: 340167 - RNA, 19 nt, Artificial Sequence
  Description of Artificial Sequence: Synthetic oligonucleotide
acagauuguagacagugua

SEQ ID NO: 340168 - RNA, 19 nt, Artificial Sequence
  Description of Artificial Sequence: Synthetic oligonucleotide
auuaucagguauacacuac

SEQ ID NO: 340169 - RNA, 19 nt, Artificial Sequence
  Description of Artificial Sequence: Synthetic oligonucleotide
aagucauccagugaccgga

SEQ ID NO: 340170 - RNA, 19 nt, Artificial Sequence
  Description of Artificial Sequence: Synthetic oligonucleotide
ucauccagugaccggagcu

SEQ ID NO: 340171 - RNA, 19 nt, Artificial Sequence
  Description of Artificial Sequence: Synthetic oligonucleotide
gaugcguuggcucagcucu

SEQ ID NO: 340172 - RNA, 19 nt, Artificial Sequence
  Description of Artificial Sequence: Synthetic oligonucleotide
aaucgagagccugguagac

SEQ ID NO: 340173 - RNA, 19 nt, Artificial Sequence
  Description of Artificial Sequence: Synthetic oligonucleotide
uggugcuacaggcucuagg

SEQ ID NO: 340174 - RNA, 19 nt, Artificial Sequence
  Description of Artificial Sequence: Synthetic oligonucleotide
uacugauguacuuuggcuu

SEQ ID NO: 340175 - RNA, 19 nt, Artificial Sequence
  Description of Artificial Sequence: Synthetic oligonucleotide
aucuccaccguauagucau

SEQ ID NO: 340176 - RNA, 19 nt, Artificial Sequence
  Description of Artificial Sequence: Synthetic oligonucleotide
uccaguacagcacuuccau

SEQ ID NO: 340177 - RNA, 19 nt, Artificial Sequence
  Description of Artificial Sequence: Synthetic oligonucleotide
ucuacuugcucaacccaga

SEQ ID NO: 340178 - RNA, 19 nt, Artificial Sequence
  Description of Artificial Sequence: Synthetic oligonucleotide
agaggcgucaacagcaacg

SEQ ID NO: 340179 - RNA, 19 nt, Artificial Sequence
  Description of Artificial Sequence: Synthetic oligonucleotide
gaguaggucagcagaacag

SEQ ID NO: 340180 - RNA, 19 nt, Artificial Sequence
  Description of Artificial Sequence: Synthetic oligonucleotide
agccuacuggaccacaaag

SEQ ID NO: 340181 - RNA, 19 nt, Artificial Sequence
  Description of Artificial Sequence: Synthetic oligonucleotide
acuauggucggaguagguc

SEQ ID NO: 340182 - RNA, 19 nt, Artificial Sequence
  Description of Artificial Sequence: Synthetic oligonucleotide
uagagaguuccugaguuga

SEQ ID NO: 340183 - RNA, 19 nt, Artificial Sequence
  Description of Artificial Sequence: Synthetic oligonucleotide
aacaagauuaucagguaua

SEQ ID NO: 340184 - RNA, 19 nt, Artificial Sequence
  Description of Artificial Sequence: Synthetic oligonucleotide
gaacaaguggcccaggcua

SEQ ID NO: 340185 - RNA, 19 nt, Artificial Sequence
  Description of Artificial Sequence: Synthetic oligonucleotide
cuuacgucucugaagcuuc

SEQ ID NO: 340186 - RNA, 19 nt, Artificial Sequence
  Description of Artificial Sequence: Synthetic oligonucleotide
gaacagaggcgucaacagc

SEQ ID NO: 340187 - RNA, 19 nt, Artificial Sequence
  Description of Artificial Sequence: Synthetic oligonucleotide
caggacuauauuguggacc

SEQ ID NO: 340188 - RNA, 19 nt, Artificial Sequence
  Description of Artificial Sequence: Synthetic oligonucleotide
cugacugguucuaaagaac

SEQ ID NO: 340189 - RNA, 19 nt, Artificial Sequence
  Description of Artificial Sequence: Synthetic oligonucleotide
cuauauuguggaccacucc

SEQ ID NO: 340190 - RNA, 19 nt, Artificial Sequence
  Description of Artificial Sequence: Synthetic oligonucleotide
auauaucuccuuggcaagg

SEQ ID NO: 340191 - RNA, 19 nt, Artificial Sequence
  Description of Artificial Sequence: Synthetic oligonucleotide
acccagauggacucuucac

SEQ ID NO: 340192 - RNA, 19 nt, Artificial Sequence
  Description of Artificial Sequence: Synthetic oligonucleotide
auagagaguuccugaguug

SEQ ID NO: 340193 - RNA, 19 nt, Artificial Sequence
  Description of Artificial Sequence: Synthetic oligonucleotide
ugcaucgcugggcacuggg

SEQ ID NO: 340194 - RNA, 19 nt, Artificial Sequence
  Description of Artificial Sequence: Synthetic oligonucleotide
cuauggucggaguagguca

SEQ ID NO: 340195 - RNA, 19 nt, Artificial Sequence
  Description of Artificial Sequence: Synthetic oligonucleotide
auacuacagugcugguccc

SEQ ID NO: 340196 - RNA, 19 nt, Artificial Sequence
  Description of Artificial Sequence: Synthetic oligonucleotide
ugauaucugcccugaugag

SEQ ID NO: 340197 - RNA, 19 nt, Artificial Sequence
  Description of Artificial Sequence: Synthetic oligonucleotide
gaccaggacuauauugugg

SEQ ID NO: 340198 - RNA, 19 nt, Artificial Sequence
  Description of Artificial Sequence: Synthetic oligonucleotide
uccuaaaauccuuccggcu

SEQ ID NO: 340199 - RNA, 19 nt, Artificial Sequence
  Description of Artificial Sequence: Synthetic oligonucleotide
acuaccguguauacuacag

SEQ ID NO: 340200 - RNA, 19 nt, Artificial Sequence
  Description of Artificial Sequence: Synthetic oligonucleotide
gucugcaaaagucgggccc

SEQ ID NO: 340201 - RNA, 19 nt, Artificial Sequence
  Description of Artificial Sequence: Synthetic oligonucleotide
accguauagucauuagcca

SEQ ID NO: 340202 - RNA, 19 nt, Artificial Sequence
  Description of Artificial Sequence: Synthetic oligonucleotide
cuuuacguguuuccaguac

SEQ ID NO: 340203 - RNA, 19 nt, Artificial Sequence
  Description of Artificial Sequence: Synthetic oligonucleotide
aagucgggcccuuccgccg

SEQ ID NO: 340204 - RNA, 19 nt, Artificial Sequence
  Description of Artificial Sequence: Synthetic oligonucleotide
aacccagauggacucuuca

SEQ ID NO: 340205 - RNA, 19 nt, Artificial Sequence
  Description of Artificial Sequence: Synthetic oligonucleotide
aacuaccguguauacuaca

SEQ ID NO: 340206 - RNA, 19 nt, Artificial Sequence
  Description of Artificial Sequence: Synthetic oligonucleotide
agcgaguagagguacucca

SEQ ID NO: 340207 - RNA, 19 nt, Artificial Sequence
  Description of Artificial Sequence: Synthetic oligonucleotide
uagggcuuaccuuucugga

SEQ ID NO: 340208 - RNA, 19 nt, Artificial Sequence
  Description of Artificial Sequence: Synthetic oligonucleotide
uacacuacucuuccacccu

SEQ ID NO: 340209 - RNA, 19 nt, Artificial Sequence
  Description of Artificial Sequence: Synthetic oligonucleotide
agaacaaguggcccaggcu

SEQ ID NO: 340210 - RNA, 19 nt, Artificial Sequence
  Description of Artificial Sequence: Synthetic oligonucleotide
cuuaccuuucuggaagagc

SEQ ID NO: 340211 - RNA, 19 nt, Artificial Sequence
  Description of Artificial Sequence: Synthetic oligonucleotide
cagacuacuauggucggag

SEQ ID NO: 340212 - RNA, 19 nt, Artificial Sequence
  Description of Artificial Sequence: Synthetic oligonucleotide
auaaaaucgagagccuggu

SEQ ID NO: 340213 - RNA, 19 nt, Artificial Sequence
  Description of Artificial Sequence: Synthetic oligonucleotide
uuccaguacagcacuucca

SEQ ID NO: 340214 - RNA, 19 nt, Artificial Sequence
  Description of Artificial Sequence: Synthetic oligonucleotide
uggauaguaucuucccagu

SEQ ID NO: 340215 - RNA, 19 nt, Artificial Sequence
  Description of Artificial Sequence: Synthetic oligonucleotide
auuagcccgggagucaggg

SEQ ID NO: 340216 - RNA, 19 nt, Artificial Sequence
  Description of Artificial Sequence: Synthetic oligonucleotide
ucuagggcccagaguuugg

SEQ ID NO: 340217 - RNA, 19 nt, Artificial Sequence
  Description of Artificial Sequence: Synthetic oligonucleotide
agggguaugauaagcagcu

SEQ ID NO: 340218 - RNA, 19 nt, Artificial Sequence
  Description of Artificial Sequence: Synthetic oligonucleotide
caggcuagucgcaacuacc

SEQ ID NO: 340219 - RNA, 19 nt, Artificial Sequence
  Description of Artificial Sequence: Synthetic oligonucleotide
agauuaucagguauacacu

SEQ ID NO: 340220 - RNA, 19 nt, Artificial Sequence
  Description of Artificial Sequence: Synthetic oligonucleotide
ucccgggcuaagaacuagg

SEQ ID NO: 340221 - RNA, 19 nt, Artificial Sequence
  Description of Artificial Sequence: Synthetic oligonucleotide
cagugcucuucacucaagg

SEQ ID NO: 340222 - RNA, 19 nt, Artificial Sequence
  Description of Artificial Sequence: Synthetic oligonucleotide
caagcugagcccuggauca

SEQ ID NO: 340223 - RNA, 19 nt, Artificial Sequence
  Description of Artificial Sequence: Synthetic oligonucleotide
aacgcguaugggcucgcug

SEQ ID NO: 340224 - RNA, 19 nt, Artificial Sequence
  Description of Artificial Sequence: Synthetic oligonucleotide
gcuggcggaaccuugaaac

SEQ ID NO: 340225 - RNA, 19 nt, Artificial Sequence
  Description of Artificial Sequence: Synthetic oligonucleotide
ugucugcaaaagucgggcc

SEQ ID NO: 340226 - RNA, 19 nt, Artificial Sequence
  Description of Artificial Sequence: Synthetic oligonucleotide
ggaggcgaaacucuguaug

SEQ ID NO: 340227 - RNA, 19 nt, Artificial Sequence
  Description of Artificial Sequence: Synthetic oligonucleotide
ucugcuaccccuaggucuu

SEQ ID NO: 340228 - RNA, 19 nt, Artificial Sequence
  Description of Artificial Sequence: Synthetic oligonucleotide
gacguggcagccauggccc

SEQ ID NO: 340229 - RNA, 19 nt, Artificial Sequence
  Description of Artificial Sequence: Synthetic oligonucleotide
aacagauuguagacagugu

SEQ ID NO: 340230 - RNA, 19 nt, Artificial Sequence
  Description of Artificial Sequence: Synthetic oligonucleotide
ugagcuggcggaaccuuga

SEQ ID NO: 340231 - RNA, 19 nt, Artificial Sequence
  Description of Artificial Sequence: Synthetic oligonucleotide
acauguguucauccuaaaa

SEQ ID NO: 340232 - RNA, 19 nt, Artificial Sequence
  Description of Artificial Sequence: Synthetic oligonucleotide
aucuacuugcucaacccag

SEQ ID NO: 340233 - RNA, 19 nt, Artificial Sequence
  Description of Artificial Sequence: Synthetic oligonucleotide
aucgagagccugguagacc

SEQ ID NO: 340234 - RNA, 19 nt, Artificial Sequence
  Description of Artificial Sequence: Synthetic oligonucleotide
ucuucggaccagcuccuca

SEQ ID NO: 340235 - RNA, 19 nt, Artificial Sequence
  Description of Artificial Sequence: Synthetic oligonucleotide
gcaacuaccguguauacua

SEQ ID NO: 340236 - RNA, 19 nt, Artificial Sequence
  Description of Artificial Sequence: Synthetic oligonucleotide
uagcccgggagucagggaa

SEQ ID NO: 340237 - RNA, 19 nt, Artificial Sequence
  Description of Artificial Sequence: Synthetic oligonucleotide
cacagauccuccguggccc

SEQ ID NO: 340238 - RNA, 19 nt, Artificial Sequence
  Description of Artificial Sequence: Synthetic oligonucleotide
aggcaaagcauauucuguu

SEQ ID NO: 340239 - RNA, 19 nt, Artificial Sequence
  Description of Artificial Sequence: Synthetic oligonucleotide
gucggaguaggucagcaga

SEQ ID NO: 340240 - RNA, 19 nt, Artificial Sequence
  Description of Artificial Sequence: Synthetic oligonucleotide
aggcuagucgcaacuaccg

SEQ ID NO: 340241 - RNA, 19 nt, Artificial Sequence
  Description of Artificial Sequence: Synthetic oligonucleotide
gucaacagcaacgaacgga

SEQ ID NO: 340242 - RNA, 19 nt, Artificial Sequence
  Description of Artificial Sequence: Synthetic oligonucleotide
uuggcucgccucuugccag

SEQ ID NO: 340243 - RNA, 19 nt, Artificial Sequence
  Description of Artificial Sequence: Synthetic oligonucleotide
cuggcggaaccuugaaacc

SEQ ID NO: 340244 - RNA, 19 nt, Artificial Sequence
  Description of Artificial Sequence: Synthetic oligonucleotide
uguggacccagaacgggau

SEQ ID NO: 340245 - RNA, 19 nt, Artificial Sequence
  Description of Artificial Sequence: Synthetic oligonucleotide
accaacugguccccauagg

SEQ ID NO: 340246 - RNA, 19 nt, Artificial Sequence
  Description of Artificial Sequence: Synthetic oligonucleotide
cuuccggcuggccaagacc

SEQ ID NO: 340247 - RNA, 19 nt, Artificial Sequence
  Description of Artificial Sequence: Synthetic oligonucleotide
ucuuacgucucugaagcuu

SEQ ID NO: 340248 - RNA, 19 nt, Artificial Sequence
  Description of Artificial Sequence: Synthetic oligonucleotide
ucaggaucccaggaggcga

SEQ ID NO: 340249 - RNA, 19 nt, Artificial Sequence
  Description of Artificial Sequence: Synthetic oligonucleotide
uauuguggaccacuccauu

SEQ ID NO: 340250 - RNA, 19 nt, Artificial Sequence
  Description of Artificial Sequence: Synthetic oligonucleotide
agcuauacaagggguuguc

SEQ ID NO: 340251 - RNA, 19 nt, Artificial Sequence
  Description of Artificial Sequence: Synthetic oligonucleotide
guucauagugguuuugccu

SEQ ID NO: 340252 - RNA, 19 nt, Artificial Sequence
  Description of Artificial Sequence: Synthetic oligonucleotide
gcuagucgcaacuaccgug

SEQ ID NO: 340253 - RNA, 19 nt, Artificial Sequence
  Description of Artificial Sequence: Synthetic oligonucleotide
ggguaugauaagcagcuca

SEQ ID NO: 340254 - RNA, 19 nt, Artificial Sequence
  Description of Artificial Sequence: Synthetic oligonucleotide
cagauccacauuagcccgg

SEQ ID NO: 340255 - RNA, 19 nt, Artificial Sequence
  Description of Artificial Sequence: Synthetic oligonucleotide
uggcggaaccuugaaacca

SEQ ID NO: 340256 - RNA, 19 nt, Artificial Sequence
  Description of Artificial Sequence: Synthetic oligonucleotide
ugaccggagcucauccucu

SEQ ID NO: 340257 - RNA, 19 nt, Artificial Sequence
  Description of Artificial Sequence: Synthetic oligonucleotide
augacguggcagccauggc

SEQ ID NO: 340258 - RNA, 19 nt, Artificial Sequence
  Description of Artificial Sequence: Synthetic oligonucleotide
uaagaacuaggcugcugau

SEQ ID NO: 340259 - RNA, 19 nt, Artificial Sequence
  Description of Artificial Sequence: Synthetic oligonucleotide
ucagccuacuggaccacaa

SEQ ID NO: 340260 - RNA, 19 nt, Artificial Sequence
  Description of Artificial Sequence: Synthetic oligonucleotide
guagacaguguacgucagc

SEQ ID NO: 340261 - RNA, 19 nt, Artificial Sequence
  Description of Artificial Sequence: Synthetic oligonucleotide
aauggccccaccgcacaag

SEQ ID NO: 340262 - RNA, 19 nt, Artificial Sequence
  Description of Artificial Sequence: Synthetic oligonucleotide
ccguauagucauuagccag

SEQ ID NO: 340263 - RNA, 19 nt, Artificial Sequence
  Description of Artificial Sequence: Synthetic oligonucleotide
gguaugauaagcagcucac

SEQ ID NO: 340264 - RNA, 19 nt, Artificial Sequence
  Description of Artificial Sequence: Synthetic oligonucleotide
uguauacuacagugcuggu

SEQ ID NO: 340265 - RNA, 19 nt, Artificial Sequence
  Description of Artificial Sequence: Synthetic oligonucleotide
cucacccugacagcuauac

SEQ ID NO: 340266 - RNA, 19 nt, Artificial Sequence
  Description of Artificial Sequence: Synthetic oligonucleotide
uacguguuuccaguacagc

SEQ ID NO: 340267 - RNA, 19 nt, Artificial Sequence
  Description of Artificial Sequence: Synthetic oligonucleotide
guauacuacagugcugguc

SEQ ID NO: 340268 - RNA, 19 nt, Artificial Sequence
  Description of Artificial Sequence: Synthetic oligonucleotide
gacuacuauggucggagua

SEQ ID NO: 340269 - RNA, 19 nt, Artificial Sequence
  Description of Artificial Sequence: Synthetic oligonucleotide
uacuauggucggaguaggu

SEQ ID NO: 340270 - RNA, 19 nt, Artificial Sequence
  Description of Artificial Sequence: Synthetic oligonucleotide
cacuacucuuccacccugc

SEQ ID NO: 340271 - RNA, 19 nt, Artificial Sequence
  Description of Artificial Sequence: Synthetic oligonucleotide
augaggaccaggacuauau

SEQ ID NO: 340272 - RNA, 19 nt, Artificial Sequence
  Description of Artificial Sequence: Synthetic oligonucleotide
agagaguuccugaguugac

SEQ ID NO: 340273 - RNA, 19 nt, Artificial Sequence
  Description of Artificial Sequence: Synthetic oligonucleotide
caacuaccguguauacuac

SEQ ID NO: 340274 - RNA, 19 nt, Artificial Sequence
  Description of Artificial Sequence: Synthetic oligonucleotide
gcuacaagcuccgcaaaag

SEQ ID NO: 340275 - RNA, 19 nt, Artificial Sequence
  Description of Artificial Sequence: Synthetic oligonucleotide
uuacgucucugaagcuucu

SEQ ID NO: 340276 - RNA, 19 nt, Artificial Sequence
  Description of Artificial Sequence: Synthetic oligonucleotide
guacgucagcacauagagg

SEQ ID NO: 340277 - RNA, 19 nt, Artificial Sequence
  Description of Artificial Sequence: Synthetic oligonucleotide
ggcgucaacagcaacgaac

SEQ ID NO: 340278 - RNA, 19 nt, Artificial Sequence
  Description of Artificial Sequence: Synthetic oligonucleotide
cagaauagggcuuaccuuu

SEQ ID NO: 340279 - RNA, 19 nt, Artificial Sequence
  Description of Artificial Sequence: Synthetic oligonucleotide
gucuggaaacgcguauggg

SEQ ID NO: 340280 - RNA, 19 nt, Artificial Sequence
  Description of Artificial Sequence: Synthetic oligonucleotide
uccaaggccaguggguacu

SEQ ID NO: 340281 - RNA, 19 nt, Artificial Sequence
  Description of Artificial Sequence: Synthetic oligonucleotide
agaccucacccugacagcu

SEQ ID NO: 340282 - RNA, 19 nt, Artificial Sequence
  Description of Artificial Sequence: Synthetic oligonucleotide
cccauagguauguauauca

SEQ ID NO: 340283 - RNA, 19 nt, Artificial Sequence
  Description of Artificial Sequence: Synthetic oligonucleotide
gccuacuggaccacaaagg

SEQ ID NO: 340284 - RNA, 19 nt, Artificial Sequence
  Description of Artificial Sequence: Synthetic oligonucleotide
ggguugucuguucuuuucc

SEQ ID NO: 340285 - RNA, 19 nt, Artificial Sequence
  Description of Artificial Sequence: Synthetic oligonucleotide
accuugaaaccaacugguc

SEQ ID NO: 340286 - RNA, 19 nt, Artificial Sequence
  Description of Artificial Sequence: Synthetic oligonucleotide
acccagaacgggaugacgu

SEQ ID NO: 340287 - RNA, 19 nt, Artificial Sequence
  Description of Artificial Sequence: Synthetic oligonucleotide
agccaguugcaaagaggcc

SEQ ID NO: 340288 - RNA, 19 nt, Artificial Sequence
  Description of Artificial Sequence: Synthetic oligonucleotide
ggcuggauaguaucuuccc

SEQ ID NO: 340289 - RNA, 19 nt, Artificial Sequence
  Description of Artificial Sequence: Synthetic oligonucleotide
gaggcgaaacucuguaugu

SEQ ID NO: 340290 - RNA, 19 nt, Artificial Sequence
  Description of Artificial Sequence: Synthetic oligonucleotide
acgggaugacguggcagcc

SEQ ID NO: 340291 - RNA, 19 nt, Artificial Sequence
  Description of Artificial Sequence: Synthetic oligonucleotide
acccaagacugcugggucu

SEQ ID NO: 340292 - RNA, 19 nt, Artificial Sequence
  Description of Artificial Sequence: Synthetic oligonucleotide
ggacuuccacccaagacug

SEQ ID NO: 340293 - RNA, 19 nt, Artificial Sequence
  Description of Artificial Sequence: Synthetic oligonucleotide
aggucuggaaacgcguaug

SEQ ID NO: 340294 - RNA, 19 nt, Artificial Sequence
  Description of Artificial Sequence: Synthetic oligonucleotide
gugaccggagcucauccuc

SEQ ID NO: 340295 - RNA, 19 nt, Artificial Sequence
  Description of Artificial Sequence: Synthetic oligonucleotide
agugaccggagcucauccu

SEQ ID NO: 340296 - RNA, 19 nt, Artificial Sequence
  Description of Artificial Sequence: Synthetic oligonucleotide
ugucgcucccgcagcauau

SEQ ID NO: 340297 - RNA, 19 nt, Artificial Sequence
  Description of Artificial Sequence: Synthetic oligonucleotide
uggaaacgcguaugggcuc

SEQ ID NO: 340298 - RNA, 19 nt, Artificial Sequence
  Description of Artificial Sequence: Synthetic oligonucleotide
uggagcggcacaccucaaa

SEQ ID NO: 340299 - RNA, 19 nt, Artificial Sequence
  Description of Artificial Sequence: Synthetic oligonucleotide
cuuggcucgccucuugcca

SEQ ID NO: 340300 - RNA, 19 nt, Artificial Sequence
  Description of Artificial Sequence: Synthetic oligonucleotide
cucuagggcccagaguuug

SEQ ID NO: 340301 - RNA, 19 nt, Artificial Sequence
  Description of Artificial Sequence: Synthetic oligonucleotide
ggaaacgcguaugggcucg

SEQ ID NO: 340302 - RNA, 19 nt, Artificial Sequence
  Description of Artificial Sequence: Synthetic oligonucleotide
guuuccaguacagcacuuc

SEQ ID NO: 340303 - RNA, 19 nt, Artificial Sequence
  Description of Artificial Sequence: Synthetic oligonucleotide
ucgcaacuaccguguauac

SEQ ID NO: 340304 - RNA, 19 nt, Artificial Sequence
  Description of Artificial Sequence: Synthetic oligonucleotide
cuagucgcaacuaccgugu

SEQ ID NO: 340305 - RNA, 19 nt, Artificial Sequence
  Description of Artificial Sequence: Synthetic oligonucleotide
gaacuaggcugcugaucac

SEQ ID NO: 340306 - RNA, 19 nt, Artificial Sequence
  Description of Artificial Sequence: Synthetic oligonucleotide
ugaggaccaggacuauauu

SEQ ID NO: 340307 - RNA, 19 nt, Artificial Sequence
  Description of Artificial Sequence: Synthetic oligonucleotide
agacuacuauggucggagu

SEQ ID NO: 340308 - RNA, 19 nt, Artificial Sequence
  Description of Artificial Sequence: Synthetic oligonucleotide
cacugcccugauaucugcc

SEQ ID NO: 340309 - RNA, 19 nt, Artificial Sequence
  Description of Artificial Sequence: Synthetic oligonucleotide
gucgcaacuaccguguaua

SEQ ID NO: 340310 - RNA, 19 nt, Artificial Sequence
  Description of Artificial Sequence: Synthetic oligonucleotide
cauaggucuggaaacgcgu

SEQ ID NO: 340311 - RNA, 19 nt, Artificial Sequence
  Description of Artificial Sequence: Synthetic oligonucleotide
agucgcaacuaccguguau

SEQ ID NO: 340312 - RNA, 19 nt, Artificial Sequence
  Description of Artificial Sequence: Synthetic oligonucleotide
cucgaugcaaagcugacuu

SEQ ID NO: 340313 - RNA, 19 nt, Artificial Sequence
  Description of Artificial Sequence: Synthetic oligonucleotide
gucagcagaacagauugua

SEQ ID NO: 340314 - RNA, 19 nt, Artificial Sequence
  Description of Artificial Sequence: Synthetic oligonucleotide
ggauaguaucuucccaguc

SEQ ID NO: 340315 - RNA, 19 nt, Artificial Sequence
  Description of Artificial Sequence: Synthetic oligonucleotide
gccaguugcaaagaggcca

SEQ ID NO: 340316 - RNA, 19 nt, Artificial Sequence
  Description of Artificial Sequence: Synthetic oligonucleotide
guauaucaaagggcacgug

SEQ ID NO: 340317 - RNA, 19 nt, Artificial Sequence
  Description of Artificial Sequence: Synthetic oligonucleotide
ggccacagauccuccgugg

SEQ ID NO: 340318 - RNA, 19 nt, Artificial Sequence
  Description of Artificial Sequence: Synthetic oligonucleotide
cacccaagacugcuggguc

SEQ ID NO: 340319 - RNA, 19 nt, Artificial Sequence
  Description of Artificial Sequence: Synthetic oligonucleotide
auggucggaguaggucagc

SEQ ID NO: 340320 - RNA, 19 nt, Artificial Sequence
  Description of Artificial Sequence: Synthetic oligonucleotide
ugaaaccaacuggucccca

SEQ ID NO: 340321 - RNA, 19 nt, Artificial Sequence
  Description of Artificial Sequence: Synthetic oligonucleotide
aggaggcgaaacucuguau

SEQ ID NO: 340322 - RNA, 19 nt, Artificial Sequence
  Description of Artificial Sequence: Synthetic oligonucleotide
gacugguucuaaagaacaa

SEQ ID NO: 340323 - RNA, 19 nt, Artificial Sequence
  Description of Artificial Sequence: Synthetic oligonucleotide
caucugcuaccccuagguc

SEQ ID NO: 340324 - RNA, 19 nt, Artificial Sequence
  Description of Artificial Sequence: Synthetic oligonucleotide
ggcgaaacucuguauguaa

SEQ ID NO: 340325 - RNA, 19 nt, Artificial Sequence
  Description of Artificial Sequence: Synthetic oligonucleotide
cagcgaguagagguacucc

SEQ ID NO: 340326 - RNA, 19 nt, Artificial Sequence
  Description of Artificial Sequence: Synthetic oligonucleotide
uuagcccgggagucaggga

SEQ ID NO: 340327 - RNA, 19 nt, Artificial Sequence
  Description of Artificial Sequence: Synthetic oligonucleotide
guaugggcucgcuggugug

SEQ ID NO: 340328 - RNA, 19 nt, Artificial Sequence
  Description of Artificial Sequence: Synthetic oligonucleotide
cuacagugcuggucccaag

SEQ ID NO: 340329 - RNA, 19 nt, Artificial Sequence
  Description of Artificial Sequence: Synthetic oligonucleotide
caagauuaucagguauaca

SEQ ID NO: 340330 - RNA, 19 nt, Artificial Sequence
  Description of Artificial Sequence: Synthetic oligonucleotide
ucgccucuugccagaaaua

SEQ ID NO: 340331 - RNA, 19 nt, Artificial Sequence
  Description of Artificial Sequence: Synthetic oligonucleotide
cauggcccgguaugugcag

SEQ ID NO: 340332 - RNA, 19 nt, Artificial Sequence
  Description of Artificial Sequence: Synthetic oligonucleotide
ucaacccagauggacucuu

SEQ ID NO: 340333 - RNA, 19 nt, Artificial Sequence
  Description of Artificial Sequence: Synthetic oligonucleotide
caccggguggcacagaaua

SEQ ID NO: 340334 - RNA, 19 nt, Artificial Sequence
  Description of Artificial Sequence: Synthetic oligonucleotide
guucaaaccuccaguccuc

SEQ ID NO: 340335 - RNA, 19 nt, Artificial Sequence
  Description of Artificial Sequence: Synthetic oligonucleotide
uccugaguugacagcccua

SEQ ID NO: 340336 - RNA, 19 nt, Artificial Sequence
  Description of Artificial Sequence: Synthetic oligonucleotide
gcccugaugagcuggaaaa

SEQ ID NO: 340337 - RNA, 19 nt, Artificial Sequence
  Description of Artificial Sequence: Synthetic oligonucleotide
gcucccgcagcauauaucu

SEQ ID NO: 340338 - RNA, 19 nt, Artificial Sequence
  Description of Artificial Sequence: Synthetic oligonucleotide
caacgaacggaggcccugc

SEQ ID NO: 340339 - RNA, 19 nt, Artificial Sequence
  Description of Artificial Sequence: Synthetic oligonucleotide
gaacggaggcccugcgcca

SEQ ID NO: 340340 - RNA, 19 nt, Artificial Sequence
  Description of Artificial Sequence: Synthetic oligonucleotide
auacaagggguugucuguu

SEQ ID NO: 340341 - RNA, 19 nt, Artificial Sequence
  Description of Artificial Sequence: Synthetic oligonucleotide
ggucggaguaggucagcag

SEQ ID NO: 340342 - RNA, 19 nt, Artificial Sequence
  Description of Artificial Sequence: Synthetic oligonucleotide
agcuggcggaaccuugaaa

SEQ ID NO: 340343 - RNA, 19 nt, Artificial Sequence
  Description of Artificial Sequence: Synthetic oligonucleotide
cgaacggaggcccugcgcc

SEQ ID NO: 340344 - RNA, 19 nt, Artificial Sequence
  Description of Artificial Sequence: Synthetic oligonucleotide
ucgcucccgcagcauauau

SEQ ID NO: 340345 - RNA, 19 nt, Artificial Sequence
  Description of Artificial Sequence: Synthetic oligonucleotide
ggaccagcuccucauaucu

SEQ ID NO: 340346 - RNA, 19 nt, Artificial Sequence
  Description of Artificial Sequence: Synthetic oligonucleotide
accgcacaagggaaacaag

SEQ ID NO: 340347 - RNA, 19 nt, Artificial Sequence
  Description of Artificial Sequence: Synthetic oligonucleotide
caaggucccgggcuaagaa

SEQ ID NO: 340348 - RNA, 19 nt, Artificial Sequence
  Description of Artificial Sequence: Synthetic oligonucleotide
gggcuggauaguaucuucc

SEQ ID NO: 340349 - RNA, 19 nt, Artificial Sequence
  Description of Artificial Sequence: Synthetic oligonucleotide
gaugaggaccaggacuaua

SEQ ID NO: 340350 - RNA, 19 nt, Artificial Sequence
  Description of Artificial Sequence: Synthetic oligonucleotide
caacccagauggacucuuc

SEQ ID NO: 340351 - RNA, 19 nt, Artificial Sequence
  Description of Artificial Sequence: Synthetic oligonucleotide
accggguggcacagaauag

SEQ ID NO: 340352 - RNA, 19 nt, Artificial Sequence
  Description of Artificial Sequence: Synthetic oligonucleotide
auaggucuggaaacgcgua

SEQ ID NO: 340353 - RNA, 19 nt, Artificial Sequence
  Description of Artificial Sequence: Synthetic oligonucleotide
ggguacugauguacuuugg

SEQ ID NO: 340354 - RNA, 19 nt, Artificial Sequence
  Description of Artificial Sequence: Synthetic oligonucleotide
cagaggcgucaacagcaac

SEQ ID NO: 340355 - RNA, 19 nt, Artificial Sequence
  Description of Artificial Sequence: Synthetic oligonucleotide
ccgcacaagggaaacaaga

SEQ ID NO: 340356 - RNA, 19 nt, Artificial Sequence
  Description of Artificial Sequence: Synthetic oligonucleotide
aaacgcguaugggcucgcu

SEQ ID NO: 340357 - RNA, 19 nt, Artificial Sequence
  Description of Artificial Sequence: Synthetic oligonucleotide
agucgggcccuuccgccga

SEQ ID NO: 340358 - RNA, 19 nt, Artificial Sequence
  Description of Artificial Sequence: Synthetic oligonucleotide
cauagugguuuugccuuca

SEQ ID NO: 340359 - RNA, 19 nt, Artificial Sequence
  Description of Artificial Sequence: Synthetic oligonucleotide
cccgggcuaagaacuaggc

SEQ ID NO: 340360 - RNA, 19 nt, Artificial Sequence
  Description of Artificial Sequence: Synthetic oligonucleotide
caccgcacaagggaaacaa

SEQ ID NO: 340361 - RNA, 19 nt, Artificial Sequence
  Description of Artificial Sequence: Synthetic oligonucleotide
cuuccaaggccagugggua

SEQ ID NO: 340362 - RNA, 19 nt, Artificial Sequence
  Description of Artificial Sequence: Synthetic oligonucleotide
gcuaagaacuaggcugcug

SEQ ID NO: 340363 - RNA, 19 nt, Artificial Sequence
  Description of Artificial Sequence: Synthetic oligonucleotide
gucccgggcuaagaacuag

SEQ ID NO: 340364 - RNA, 19 nt, Artificial Sequence
  Description of Artificial Sequence: Synthetic oligonucleotide
caggaggcgaaacucugua

SEQ ID NO: 340365 - RNA, 19 nt, Artificial Sequence
  Description of Artificial Sequence: Synthetic oligonucleotide
gaaacgcguaugggcucgc

SEQ ID NO: 340366 - RNA, 19 nt, Artificial Sequence
  Description of Artificial Sequence: Synthetic oligonucleotide
cucgccucuugccagaaau

SEQ ID NO: 340367 - RNA, 19 nt, Artificial Sequence
  Description of Artificial Sequence: Synthetic oligonucleotide
uagucgcaacuaccgugua

SEQ ID NO: 340368 - RNA, 19 nt, Artificial Sequence
  Description of Artificial Sequence: Synthetic oligonucleotide
uggcucgccucuugccaga

SEQ ID NO: 340369 - RNA, 19 nt, Artificial Sequence
  Description of Artificial Sequence: Synthetic oligonucleotide
gacagcuauacaagggguu

SEQ ID NO: 340370 - RNA, 19 nt, Artificial Sequence
  Description of Artificial Sequence: Synthetic oligonucleotide
ccgcaaaagggcaccacuc

SEQ ID NO: 340371 - RNA, 19 nt, Artificial Sequence
  Description of Artificial Sequence: Synthetic oligonucleotide
cuaccguguauacuacagu

SEQ ID NO: 340372 - RNA, 19 nt, Artificial Sequence
  Description of Artificial Sequence: Synthetic oligonucleotide
guaugauaagcagcucacu

SEQ ID NO: 340373 - RNA, 19 nt, Artificial Sequence
  Description of Artificial Sequence: Synthetic oligonucleotide
gguacucugcugugagguc

SEQ ID NO: 340374 - RNA, 19 nt, Artificial Sequence
  Description of Artificial Sequence: Synthetic oligonucleotide
aggcgaaacucuguaugua

SEQ ID NO: 340375 - RNA, 19 nt, Artificial Sequence
  Description of Artificial Sequence: Synthetic oligonucleotide
gcgucuugggucuccugug

SEQ ID NO: 340376 - RNA, 19 nt, Artificial Sequence
  Description of Artificial Sequence: Synthetic oligonucleotide
gcuuaccuuucuggaagag

SEQ ID NO: 340377 - RNA, 19 nt, Artificial Sequence
  Description of Artificial Sequence: Synthetic oligonucleotide
ccaggcuagucgcaacuac

SEQ ID NO: 340378 - RNA, 19 nt, Artificial Sequence
  Description of Artificial Sequence: Synthetic oligonucleotide
cggcacaccucaaaagcag

SEQ ID NO: 340379 - RNA, 19 nt, Artificial Sequence
  Description of Artificial Sequence: Synthetic oligonucleotide
ugccaucuacuugcucaac

SEQ ID NO: 340380 - RNA, 19 nt, Artificial Sequence
  Description of Artificial Sequence: Synthetic oligonucleotide
cccagaacgggaugacgug

SEQ ID NO: 340381 - RNA, 19 nt, Artificial Sequence
  Description of Artificial Sequence: Synthetic oligonucleotide
ugcuaccccuaggucuucu

SEQ ID NO: 340382 - RNA, 19 nt, Artificial Sequence
  Description of Artificial Sequence: Synthetic oligonucleotide
acagaggcgucaacagcaa

SEQ ID NO: 340383 - RNA, 19 nt, Artificial Sequence
  Description of Artificial Sequence: Synthetic oligonucleotide
cuucggaccagcuccucau

SEQ ID NO: 340384 - RNA, 19 nt, Artificial Sequence
  Description of Artificial Sequence: Synthetic oligonucleotide
cuccgcaaaagggcaccac

SEQ ID NO: 340385 - RNA, 19 nt, Artificial Sequence
  Description of Artificial Sequence: Synthetic oligonucleotide
guacuaaagagagcugcuu

SEQ ID NO: 340386 - RNA, 19 nt, Artificial Sequence
  Description of Artificial Sequence: Synthetic oligonucleotide
ccguguauacuacagugcu

SEQ ID NO: 340387 - RNA, 19 nt, Artificial Sequence
  Description of Artificial Sequence: Synthetic oligonucleotide
gagcuggcggaaccuugaa

SEQ ID NO: 340388 - RNA, 19 nt, Artificial Sequence
  Description of Artificial Sequence: Synthetic oligonucleotide
agcaacgaacggaggcccu

SEQ ID NO: 340389 - RNA, 19 nt, Artificial Sequence
  Description of Artificial Sequence: Synthetic oligonucleotide
ccaacugguccccauaggu

SEQ ID NO: 340390 - RNA, 19 nt, Artificial Sequence
  Description of Artificial Sequence: Synthetic oligonucleotide
gcaacgaacggaggcccug

SEQ ID NO: 340391 - RNA, 19 nt, Artificial Sequence
  Description of Artificial Sequence: Synthetic oligonucleotide
gcgaaacucuguauguaaa

SEQ ID NO: 340392 - RNA, 19 nt, Artificial Sequence
  Description of Artificial Sequence: Synthetic oligonucleotide
cagcccuauugcucccauc

SEQ ID NO: 340393 - RNA, 19 nt, Artificial Sequence
  Description of Artificial Sequence: Synthetic oligonucleotide
cucaaggcugggccaugga

SEQ ID NO: 340394 - RNA, 19 nt, Artificial Sequence
  Description of Artificial Sequence: Synthetic oligonucleotide
gaguuuggcccaggcucuc

SEQ ID NO: 340395 - RNA, 19 nt, Artificial Sequence
  Description of Artificial Sequence: Synthetic oligonucleotide
accagcgaguagagguacu

SEQ ID NO: 340396 - RNA, 19 nt, Artificial Sequence
  Description of Artificial Sequence: Synthetic oligonucleotide
guggguacugauguacuuu

SEQ ID NO: 340397 - RNA, 19 nt, Artificial Sequence
  Description of Artificial Sequence: Synthetic oligonucleotide
ggugugugagcagucucaa

SEQ ID NO: 340398 - RNA, 19 nt, Artificial Sequence
  Description of Artificial Sequence: Synthetic oligonucleotide
cgguaugugcaggacuucc

SEQ ID NO: 340399 - RNA, 19 nt, Artificial Sequence
  Description of Artificial Sequence: Synthetic oligonucleotide
gggcaccacucauugagcu

SEQ ID NO: 340400 - RNA, 19 nt, Artificial Sequence
  Description of Artificial Sequence: Synthetic oligonucleotide
ggaucccaggaggcgaaac

SEQ ID NO: 340401 - RNA, 19 nt, Artificial Sequence
  Description of Artificial Sequence: Synthetic oligonucleotide
cagccuacuggaccacaaa

SEQ ID NO: 340402 - RNA, 19 nt, Artificial Sequence
  Description of Artificial Sequence: Synthetic oligonucleotide
ccagcgaguagagguacuc

SEQ ID NO: 340403 - RNA, 19 nt, Artificial Sequence
  Description of Artificial Sequence: Synthetic oligonucleotide
augcguuggcucagcucug

SEQ ID NO: 340404 - RNA, 19 nt, Artificial Sequence
  Description of Artificial Sequence: Synthetic oligonucleotide
ucgggcccuuccgccgagg

SEQ ID NO: 340405 - RNA, 19 nt, Artificial Sequence
  Description of Artificial Sequence: Synthetic oligonucleotide
ggcggaaccuugaaaccaa

SEQ ID NO: 340406 - RNA, 19 nt, Artificial Sequence
  Description of Artificial Sequence: Synthetic oligonucleotide
cuccaccguauagucauua

SEQ ID NO: 340407 - RNA, 19 nt, Artificial Sequence
  Description of Artificial Sequence: Synthetic oligonucleotide
ccauggcccgguaugugca

SEQ ID NO: 340408 - RNA, 19 nt, Artificial Sequence
  Description of Artificial Sequence: Synthetic oligonucleotide
gcaucgcugggcacugggc

SEQ ID NO: 340409 - RNA, 19 nt, Artificial Sequence
  Description of Artificial Sequence: Synthetic oligonucleotide
gggaugacguggcagccau

SEQ ID NO: 340410 - RNA, 19 nt, Artificial Sequence
  Description of Artificial Sequence: Synthetic oligonucleotide
cgcaaaagggcaccacuca

SEQ ID NO: 340411 - RNA, 19 nt, Artificial Sequence
  Description of Artificial Sequence: Synthetic oligonucleotide
ucgcugggcacugggccuu

SEQ ID NO: 340412 - RNA, 19 nt, Artificial Sequence
  Description of Artificial Sequence: Synthetic oligonucleotide
ggacuauauuguggaccac

SEQ ID NO: 340413 - RNA, 19 nt, Artificial Sequence
  Description of Artificial Sequence: Synthetic oligonucleotide
ccugaugcguuggcucagc

SEQ ID NO: 340414 - RNA, 19 nt, Artificial Sequence
  Description of Artificial Sequence: Synthetic oligonucleotide
cccgugucgcucccgcagc

SEQ ID NO: 340415 - RNA, 19 nt, Artificial Sequence
  Description of Artificial Sequence: Synthetic oligonucleotide
ggcuagucgcaacuaccgu

SEQ ID NO: 340416 - RNA, 19 nt, Artificial Sequence
  Description of Artificial Sequence: Synthetic oligonucleotide
cccaccgcacaagggaaac

SEQ ID NO: 340417 - RNA, 19 nt, Artificial Sequence
  Description of Artificial Sequence: Synthetic oligonucleotide
gaccucacccugacagcua

SEQ ID NO: 340418 - RNA, 19 nt, Artificial Sequence
  Description of Artificial Sequence: Synthetic oligonucleotide
agggcacgugcugcuccug

SEQ ID NO: 340419 - RNA, 19 nt, Artificial Sequence
  Description of Artificial Sequence: Synthetic oligonucleotide
ccugguagaccagcgagua

SEQ ID NO: 340420 - RNA, 19 nt, Artificial Sequence
  Description of Artificial Sequence: Synthetic oligonucleotide
gccucuugccagaaauaaa

SEQ ID NO: 340421 - RNA, 19 nt, Artificial Sequence
  Description of Artificial Sequence: Synthetic oligonucleotide
gggguaugauaagcagcuc

SEQ ID NO: 340422 - RNA, 19 nt, Artificial Sequence
  Description of Artificial Sequence: Synthetic oligonucleotide
cugaugcguuggcucagcu

SEQ ID NO: 340423 - RNA, 19 nt, Artificial Sequence
  Description of Artificial Sequence: Synthetic oligonucleotide
acaccggguggcacagaau

SEQ ID NO: 340424 - RNA, 19 nt, Artificial Sequence
  Description of Artificial Sequence: Synthetic oligonucleotide
gcggaaccuugaaaccaac

SEQ ID NO: 340425 - RNA, 19 nt, Artificial Sequence
  Description of Artificial Sequence: Synthetic oligonucleotide
ccugcgccaggcugcugug

SEQ ID NO: 340426 - RNA, 19 nt, Artificial Sequence
  Description of Artificial Sequence: Synthetic oligonucleotide
gcccgguaugugcaggacu

SEQ ID NO: 340427 - RNA, 19 nt, Artificial Sequence
  Description of Artificial Sequence: Synthetic oligonucleotide
cccgguaugugcaggacuu

SEQ ID NO: 340428 - RNA, 19 nt, Artificial Sequence
  Description of Artificial Sequence: Synthetic oligonucleotide
cggaguaggucagcagaac

SEQ ID NO: 340429 - RNA, 19 nt, Artificial Sequence
  Description of Artificial Sequence: Synthetic oligonucleotide
cgcucccgcagcauauauc

SEQ ID NO: 340430 - RNA, 19 nt, Artificial Sequence
  Description of Artificial Sequence: Synthetic oligonucleotide
cugcuaccccuaggucuuc

SEQ ID NO: 340431 - RNA, 19 nt, Artificial Sequence
  Description of Artificial Sequence: Synthetic oligonucleotide
gucgcucccgcagcauaua

SEQ ID NO: 340432 - RNA, 19 nt, Artificial Sequence
  Description of Artificial Sequence: Synthetic oligonucleotide
ccgggcuaagaacuaggcu

SEQ ID NO: 340433 - RNA, 19 nt, Artificial Sequence
  Description of Artificial Sequence: Synthetic oligonucleotide
gcugaucacugcccuguuu

SEQ ID NO: 340434 - RNA, 19 nt, Artificial Sequence
  Description of Artificial Sequence: Synthetic oligonucleotide
gccccaccgcacaagggaa

SEQ ID NO: 340435 - RNA, 19 nt, Artificial Sequence
  Description of Artificial Sequence: Synthetic oligonucleotide
gcaucuaggucagcagcuu

SEQ ID NO: 340436 - RNA, 19 nt, Artificial Sequence
  Description of Artificial Sequence: Synthetic oligonucleotide
ccucgaugcaaagcugacu

SEQ ID NO: 340437 - RNA, 19 nt, Artificial Sequence
  Description of Artificial Sequence: Synthetic oligonucleotide
ccccaccgcacaagggaaa

SEQ ID NO: 340438 - RNA, 19 nt, Artificial Sequence
  Description of Artificial Sequence: Synthetic oligonucleotide
ccaccgcacaagggaaaca

SEQ ID NO: 340439 - RNA, 19 nt, Artificial Sequence
  Description of Artificial Sequence: Synthetic oligonucleotide
gcucgccucuugccagaaa

SEQ ID NO: 340440 - RNA, 19 nt, Artificial Sequence
  Description of Artificial Sequence: Synthetic oligonucleotide
ggaugaggaccaggacuau

SEQ ID NO: 340441 - RNA, 19 nt, Artificial Sequence
  Description of Artificial Sequence: Synthetic oligonucleotide
ccaagacugcugggucuga

SEQ ID NO: 340442 - RNA, 19 nt, Artificial Sequence
  Description of Artificial Sequence: Synthetic oligonucleotide
cccgggagucagggaaguc

SEQ ID NO: 340443 - RNA, 19 nt, Artificial Sequence
  Description of Artificial Sequence: Synthetic oligonucleotide
cgcaacuaccguguauacu

SEQ ID NO: 340444 - RNA, 19 nt, Artificial Sequence
  Description of Artificial Sequence: Synthetic oligonucleotide
gccaucucucagucaucuu

SEQ ID NO: 340445 - RNA, 19 nt, Artificial Sequence
  Description of Artificial Sequence: Synthetic oligonucleotide
cccaggcuagucgcaacua

SEQ ID NO: 340446 - RNA, 19 nt, Artificial Sequence
  Description of Artificial Sequence: Synthetic oligonucleotide
cgggaugacguggcagcca

SEQ ID NO: 340447 - RNA, 19 nt, Artificial Sequence
  Description of Artificial Sequence: Synthetic oligonucleotide
cccuuccgccgaggccucc

SEQ ID NO: 340448 - RNA, 19 nt, Artificial Sequence
  Description of Artificial Sequence: Synthetic oligonucleotide
gcccuuccgccgaggccuc

SEQ ID NO: 340449 - RNA, 19 nt, Artificial Sequence
  Description of Artificial Sequence: Synthetic oligonucleotide
auuaagaaaauuuagguac

SEQ ID NO: 340450 - RNA, 19 nt, Artificial Sequence
  Description of Artificial Sequence: Synthetic oligonucleotide
auauauauauaauauauag

SEQ ID NO: 340451 - RNA, 19 nt, Artificial Sequence
  Description of Artificial Sequence: Synthetic oligonucleotide
auauauauaauauauagau

SEQ ID NO: 340452 - RNA, 19 nt, Artificial Sequence
  Description of Artificial Sequence: Synthetic oligonucleotide
agcauuuagauauaaaagg

SEQ ID NO: 340453 - RNA, 19 nt, Artificial Sequence
  Description of Artificial Sequence: Synthetic oligonucleotide
aaaauauauauauauaaua

SEQ ID NO: 340454 - RNA, 19 nt, Artificial Sequence
  Description of Artificial Sequence: Synthetic oligonucleotide
uucaucaucaucaucaucu

SEQ ID NO: 340455 - RNA, 19 nt, Artificial Sequence
  Description of Artificial Sequence: Synthetic oligonucleotide
aaauugguagaacauuuac

SEQ ID NO: 340456 - RNA, 19 nt, Artificial Sequence
  Description of Artificial Sequence: Synthetic oligonucleotide
ucauaauacaauauguggc

SEQ ID NO: 340457 - RNA, 19 nt, Artificial Sequence
  Description of Artificial Sequence: Synthetic oligonucleotide
uuauuaagaaaauuuaggu

SEQ ID NO: 340458 - RNA, 19 nt, Artificial Sequence
  Description of Artificial Sequence: Synthetic oligonucleotide
caauacuagauuuuggucg

SEQ ID NO: 340459 - RNA, 19 nt, Artificial Sequence
  Description of Artificial Sequence: Synthetic oligonucleotide
aauacuagauuuuggucgg

SEQ ID NO: 340460 - RNA, 19 nt, Artificial Sequence
  Description of Artificial Sequence: Synthetic oligonucleotide
ucacauagcauuuagauau

SEQ ID NO: 340461 - RNA, 19 nt, Artificial Sequence
  Description of Artificial Sequence: Synthetic oligonucleotide
uuacagauuaaauugaggu

SEQ ID NO: 340462 - RNA, 19 nt, Artificial Sequence
  Description of Artificial Sequence: Synthetic oligonucleotide
auaaugaauacauuugaag

SEQ ID NO: 340463 - RNA, 19 nt, Artificial Sequence
  Description of Artificial Sequence: Synthetic oligonucleotide
uauauauauaauauauaga

SEQ ID NO: 340464 - RNA, 19 nt, Artificial Sequence
  Description of Artificial Sequence: Synthetic oligonucleotide
uuauuaugcuccaugauga

SEQ ID NO: 340465 - RNA, 19 nt, Artificial Sequence
  Description of Artificial Sequence: Synthetic oligonucleotide
aauauauauauauaauaua

SEQ ID NO: 340466 - RNA, 19 nt, Artificial Sequence
  Description of Artificial Sequence: Synthetic oligonucleotide
aaauauauauauauaauau

SEQ ID NO: 340467 - RNA, 19 nt, Artificial Sequence
  Description of Artificial Sequence: Synthetic oligonucleotide
uaguguacuguaaagaggc

SEQ ID NO: 340468 - RNA, 19 nt, Artificial Sequence
  Description of Artificial Sequence: Synthetic oligonucleotide
uuaguguacuguaaagagg

SEQ ID NO: 340469 - RNA, 19 nt, Artificial Sequence
  Description of Artificial Sequence: Synthetic oligonucleotide
aaacauacgguguacguga

SEQ ID NO: 340470 - RNA, 19 nt, Artificial Sequence
  Description of Artificial Sequence: Synthetic oligonucleotide
aauacaauauguggcuagc

SEQ ID NO: 340471 - RNA, 19 nt, Artificial Sequence
  Description of Artificial Sequence: Synthetic oligonucleotide
auugguagaacauuuacau

SEQ ID NO: 340472 - RNA, 19 nt, Artificial Sequence
  Description of Artificial Sequence: Synthetic oligonucleotide
ugugcaauguaucagcuuc

SEQ ID NO: 340473 - RNA, 19 nt, Artificial Sequence
  Description of Artificial Sequence: Synthetic oligonucleotide
caauguaucagcuucaaca

SEQ ID NO: 340474 - RNA, 19 nt, Artificial Sequence
  Description of Artificial Sequence: Synthetic oligonucleotide
ugcauaacaagugugcagg

SEQ ID NO: 340475 - RNA, 19 nt, Artificial Sequence
  Description of Artificial Sequence: Synthetic oligonucleotide
auauauauauauaauauau

SEQ ID NO: 340476 - RNA, 19 nt, Artificial Sequence
  Description of Artificial Sequence: Synthetic oligonucleotide
uauauauaauauauagauc

SEQ ID NO: 340477 - RNA, 19 nt, Artificial Sequence
  Description of Artificial Sequence: Synthetic oligonucleotide
aauuuagguacagaaaagu

SEQ ID NO: 340478 - RNA, 19 nt, Artificial Sequence
  Description of Artificial Sequence: Synthetic oligonucleotide
uaucacauagcauuuagau

SEQ ID NO: 340479 - RNA, 19 nt, Artificial Sequence
  Description of Artificial Sequence: Synthetic oligonucleotide
uuaaccgucuuacuguacc

SEQ ID NO: 340480 - RNA, 19 nt, Artificial Sequence
  Description of Artificial Sequence: Synthetic oligonucleotide
uauauauauauaauauaua

SEQ ID NO: 340481 - RNA, 19 nt, Artificial Sequence
  Description of Artificial Sequence: Synthetic oligonucleotide
ugugugagggcucaccagg

SEQ ID NO: 340482 - RNA, 19 nt, Artificial Sequence
  Description of Artificial Sequence: Synthetic oligonucleotide
ugcaugaucacuaaagauu

SEQ ID NO: 340483 - RNA, 19 nt, Artificial Sequence
  Description of Artificial Sequence: Synthetic oligonucleotide
auaugcauaacaagugugc

SEQ ID NO: 340484 - RNA, 19 nt, Artificial Sequence
  Description of Artificial Sequence: Synthetic oligonucleotide
ucacuaaagauuaugugau

SEQ ID NO: 340485 - RNA, 19 nt, Artificial Sequence
  Description of Artificial Sequence: Synthetic oligonucleotide
uaauugucuaccuaaaauu

SEQ ID NO: 340486 - RNA, 19 nt, Artificial Sequence
  Description of Artificial Sequence: Synthetic oligonucleotide
aaauuaguuauguauucua

SEQ ID NO: 340487 - RNA, 19 nt, Artificial Sequence
  Description of Artificial Sequence: Synthetic oligonucleotide
uguaaagaggcaaggaaaa

SEQ ID NO: 340488 - RNA, 19 nt, Artificial Sequence
  Description of Artificial Sequence: Synthetic oligonucleotide
ugaugcacagguauagugc

SEQ ID NO: 340489 - RNA, 19 nt, Artificial Sequence
  Description of Artificial Sequence: Synthetic oligonucleotide
gaauugagagucucuaggc

SEQ ID NO: 340490 - RNA, 19 nt, Artificial Sequence
  Description of Artificial Sequence: Synthetic oligonucleotide
cauauucaaaaugaagggg

SEQ ID NO: 340491 - RNA, 19 nt, Artificial Sequence
  Description of Artificial Sequence: Synthetic oligonucleotide
aaauaugaaauggccaucu

SEQ ID NO: 340492 - RNA, 19 nt, Artificial Sequence
  Description of Artificial Sequence: Synthetic oligonucleotide
uacaauauguggcuagcug

SEQ ID NO: 340493 - RNA, 19 nt, Artificial Sequence
  Description of Artificial Sequence: Synthetic oligonucleotide
aagaauugagagucucuag

SEQ ID NO: 340494 - RNA, 19 nt, Artificial Sequence
  Description of Artificial Sequence: Synthetic oligonucleotide
ucacguagcugauauauca

SEQ ID NO: 340495 - RNA, 19 nt, Artificial Sequence
  Description of Artificial Sequence: Synthetic oligonucleotide
ugacguucuaacuaaauua

SEQ ID NO: 340496 - RNA, 19 nt, Artificial Sequence
  Description of Artificial Sequence: Synthetic oligonucleotide
aaauaaguuggaaacaaau

SEQ ID NO: 340497 - RNA, 19 nt, Artificial Sequence
  Description of Artificial Sequence: Synthetic oligonucleotide
gaucacuaaagauuaugug

SEQ ID NO: 340498 - RNA, 19 nt, Artificial Sequence
  Description of Artificial Sequence: Synthetic oligonucleotide
uaguguuuaguauuucacc

SEQ ID NO: 340499 - RNA, 19 nt, Artificial Sequence
  Description of Artificial Sequence: Synthetic oligonucleotide
cuaaaguuuacaucacuug

SEQ ID NO: 340500 - RNA, 19 nt, Artificial Sequence
  Description of Artificial Sequence: Synthetic oligonucleotide
aaaacauacgguguacgug

SEQ ID NO: 340501 - RNA, 19 nt, Artificial Sequence
  Description of Artificial Sequence: Synthetic oligonucleotide
uugaauaacuuaaccgucu

SEQ ID NO: 340502 - RNA, 19 nt, Artificial Sequence
  Description of Artificial Sequence: Synthetic oligonucleotide
gaugcacagguauagugcc

SEQ ID NO: 340503 - RNA, 19 nt, Artificial Sequence
  Description of Artificial Sequence: Synthetic oligonucleotide
ucuaucaaauuaguuaugu

SEQ ID NO: 340504 - RNA, 19 nt, Artificial Sequence
  Description of Artificial Sequence: Synthetic oligonucleotide
aaucacguagcugauauau

SEQ ID NO: 340505 - RNA, 19 nt, Artificial Sequence
  Description of Artificial Sequence: Synthetic oligonucleotide
uuaugcuccaugaugaauu

SEQ ID NO: 340506 - RNA, 19 nt, Artificial Sequence
  Description of Artificial Sequence: Synthetic oligonucleotide
acaauauguggcuagcuga

SEQ ID NO: 340507 - RNA, 19 nt, Artificial Sequence
  Description of Artificial Sequence: Synthetic oligonucleotide
acaugauaauuuuacagau

SEQ ID NO: 340508 - RNA, 19 nt, Artificial Sequence
  Description of Artificial Sequence: Synthetic oligonucleotide
uucacuagugucuguagug

SEQ ID NO: 340509 - RNA, 19 nt, Artificial Sequence
  Description of Artificial Sequence: Synthetic oligonucleotide
aaguaggguaugaaaauag

SEQ ID NO: 340510 - RNA, 19 nt, Artificial Sequence
  Description of Artificial Sequence: Synthetic oligonucleotide
gaugaauugccaccagugc

SEQ ID NO: 340511 - RNA, 19 nt, Artificial Sequence
  Description of Artificial Sequence: Synthetic oligonucleotide
uauugugacuauaaugaau

SEQ ID NO: 340512 - RNA, 19 nt, Artificial Sequence
  Description of Artificial Sequence: Synthetic oligonucleotide
uuacauuaagguuugugua

SEQ ID NO: 340513 - RNA, 19 nt, Artificial Sequence
  Description of Artificial Sequence: Synthetic oligonucleotide
uugucuaccuaaaauuuaa

SEQ ID NO: 340514 - RNA, 19 nt, Artificial Sequence
  Description of Artificial Sequence: Synthetic oligonucleotide
ggauauugugacuauaaug

SEQ ID NO: 340515 - RNA, 19 nt, Artificial Sequence
  Description of Artificial Sequence: Synthetic oligonucleotide
auuuuaacacaccaucuaa

SEQ ID NO: 340516 - RNA, 19 nt, Artificial Sequence
  Description of Artificial Sequence: Synthetic oligonucleotide
agaaaaguaggguaugaaa

SEQ ID NO: 340517 - RNA, 19 nt, Artificial Sequence
  Description of Artificial Sequence: Synthetic oligonucleotide
uuuuaacacaccaucuaau

SEQ ID NO: 340518 - RNA, 19 nt, Artificial Sequence
  Description of Artificial Sequence: Synthetic oligonucleotide
gagacguacaacugguacc

SEQ ID NO: 340519 - RNA, 19 nt, Artificial Sequence
  Description of Artificial Sequence: Synthetic oligonucleotide
aagguaacguucuuugaau

SEQ ID NO: 340520 - RNA, 19 nt, Artificial Sequence
  Description of Artificial Sequence: Synthetic oligonucleotide
uaccuuacucggcagagug

SEQ ID NO: 340521 - RNA, 19 nt, Artificial Sequence
  Description of Artificial Sequence: Synthetic oligonucleotide
ugugacuauaaugaauaca

SEQ ID NO: 340522 - RNA, 19 nt, Artificial Sequence
  Description of Artificial Sequence: Synthetic oligonucleotide
ugaauugccaccagugcaa

SEQ ID NO: 340523 - RNA, 19 nt, Artificial Sequence
  Description of Artificial Sequence: Synthetic oligonucleotide
aacauccuauucacuauac

SEQ ID NO: 340524 - RNA, 19 nt, Artificial Sequence
  Description of Artificial Sequence: Synthetic oligonucleotide
ucaguugaaugcccugccg

SEQ ID NO: 340525 - RNA, 19 nt, Artificial Sequence
  Description of Artificial Sequence: Synthetic oligonucleotide
augaugcacagguauagug

SEQ ID NO: 340526 - RNA, 19 nt, Artificial Sequence
  Description of Artificial Sequence: Synthetic oligonucleotide
aauugucuaccuaaaauuu

SEQ ID NO: 340527 - RNA, 19 nt, Artificial Sequence
  Description of Artificial Sequence: Synthetic oligonucleotide
ucuugcaaggaagguaacg

SEQ ID NO: 340528 - RNA, 19 nt, Artificial Sequence
  Description of Artificial Sequence: Synthetic oligonucleotide
gacguucuaacuaaauuac

SEQ ID NO: 340529 - RNA, 19 nt, Artificial Sequence
  Description of Artificial Sequence: Synthetic oligonucleotide
auauaucagugagacuugc

SEQ ID NO: 340530 - RNA, 19 nt, Artificial Sequence
  Description of Artificial Sequence: Synthetic oligonucleotide
ucgauaaauggaauugaau

SEQ ID NO: 340531 - RNA, 19 nt, Artificial Sequence
  Description of Artificial Sequence: Synthetic oligonucleotide
gaagguaacguucuuugaa

SEQ ID NO: 340532 - RNA, 19 nt, Artificial Sequence
  Description of Artificial Sequence: Synthetic oligonucleotide
uagauuuuggucgguauac

SEQ ID NO: 340533 - RNA, 19 nt, Artificial Sequence
  Description of Artificial Sequence: Synthetic oligonucleotide
aaaguuuacaucacuugaa

SEQ ID NO: 340534 - RNA, 19 nt, Artificial Sequence
  Description of Artificial Sequence: Synthetic oligonucleotide
cacuuaacugcuuucagca

SEQ ID NO: 340535 - RNA, 19 nt, Artificial Sequence
  Description of Artificial Sequence: Synthetic oligonucleotide
agcuccuauaauuuagacu

SEQ ID NO: 340536 - RNA, 19 nt, Artificial Sequence
  Description of Artificial Sequence: Synthetic oligonucleotide
uaugcauaacaagugugca

SEQ ID NO: 340537 - RNA, 19 nt, Artificial Sequence
  Description of Artificial Sequence: Synthetic oligonucleotide
cugacaauaacuagaugca

SEQ ID NO: 340538 - RNA, 19 nt, Artificial Sequence
  Description of Artificial Sequence: Synthetic oligonucleotide
auugguaccaucaaucuuu

SEQ ID NO: 340539 - RNA, 19 nt, Artificial Sequence
  Description of Artificial Sequence: Synthetic oligonucleotide
uauaucagugagacuugca

SEQ ID NO: 340540 - RNA, 19 nt, Artificial Sequence
  Description of Artificial Sequence: Synthetic oligonucleotide
uagcauuugugcauacugu

SEQ ID NO: 340541 - RNA, 19 nt, Artificial Sequence
  Description of Artificial Sequence: Synthetic oligonucleotide
guaggguaugaaaauagug

SEQ ID NO: 340542 - RNA, 19 nt, Artificial Sequence
  Description of Artificial Sequence: Synthetic oligonucleotide
uguacgugagguuuagcau

SEQ ID NO: 340543 - RNA, 19 nt, Artificial Sequence
  Description of Artificial Sequence: Synthetic oligonucleotide
gagucucuaggcaagcucc

SEQ ID NO: 340544 - RNA, 19 nt, Artificial Sequence
  Description of Artificial Sequence: Synthetic oligonucleotide
gacacuuacaauuugcauu

SEQ ID NO: 340545 - RNA, 19 nt, Artificial Sequence
  Description of Artificial Sequence: Synthetic oligonucleotide
gcugauauaucagugagac

SEQ ID NO: 340546 - RNA, 19 nt, Artificial Sequence
  Description of Artificial Sequence: Synthetic oligonucleotide
aauguagugcuaugcuaaa

SEQ ID NO: 340547 - RNA, 19 nt, Artificial Sequence
  Description of Artificial Sequence: Synthetic oligonucleotide
gauaauugucuaccuaaaa

SEQ ID NO: 340548 - RNA, 19 nt, Artificial Sequence
  Description of Artificial Sequence: Synthetic oligonucleotide
gauuuacucuucaugccug

SEQ ID NO: 340549 - RNA, 19 nt, Artificial Sequence
  Description of Artificial Sequence: Synthetic oligonucleotide
gaauguagugcuaugcuaa

SEQ ID NO: 340550 - RNA, 19 nt, Artificial Sequence
  Description of Artificial Sequence: Synthetic oligonucleotide
agugaggacugagacguac

SEQ ID NO: 340551 - RNA, 19 nt, Artificial Sequence
  Description of Artificial Sequence: Synthetic oligonucleotide
ugacuauuuaaaucagaua

SEQ ID NO: 340552 - RNA, 19 nt, Artificial Sequence
  Description of Artificial Sequence: Synthetic oligonucleotide
auauguggcuagcugaaau

SEQ ID NO: 340553 - RNA, 19 nt, Artificial Sequence
  Description of Artificial Sequence: Synthetic oligonucleotide
ucagucgauaaauggaauu

SEQ ID NO: 340554 - RNA, 19 nt, Artificial Sequence
  Description of Artificial Sequence: Synthetic oligonucleotide
uuaguuggauauugugacu

SEQ ID NO: 340555 - RNA, 19 nt, Artificial Sequence
  Description of Artificial Sequence: Synthetic oligonucleotide
aauuuaaaguagguaggua

SEQ ID NO: 340556 - RNA, 19 nt, Artificial Sequence
  Description of Artificial Sequence: Synthetic oligonucleotide
aaaguaguguuuaguauuu

SEQ ID NO: 340557 - RNA, 19 nt, Artificial Sequence
  Description of Artificial Sequence: Synthetic oligonucleotide
uguugcccaacaaucugac

SEQ ID NO: 340558 - RNA, 19 nt, Artificial Sequence
  Description of Artificial Sequence: Synthetic oligonucleotide
ugaauaacuuaaccgucuu

SEQ ID NO: 340559 - RNA, 19 nt, Artificial Sequence
  Description of Artificial Sequence: Synthetic oligonucleotide
uguggcuagcugaaauugu

SEQ ID NO: 340560 - RNA, 19 nt, Artificial Sequence
  Description of Artificial Sequence: Synthetic oligonucleotide
cagucgauaaauggaauug

SEQ ID NO: 340561 - RNA, 19 nt, Artificial Sequence
  Description of Artificial Sequence: Synthetic oligonucleotide
aaguagguagguagguaag

SEQ ID NO: 340562 - RNA, 19 nt, Artificial Sequence
  Description of Artificial Sequence: Synthetic oligonucleotide
aucacauagcauuuagaua

SEQ ID NO: 340563 - RNA, 19 nt, Artificial Sequence
  Description of Artificial Sequence: Synthetic oligonucleotide
auauugugacuauaaugaa

SEQ ID NO: 340564 - RNA, 19 nt, Artificial Sequence
  Description of Artificial Sequence: Synthetic oligonucleotide
ggagaaaccaucaaaagua

SEQ ID NO: 340565 - RNA, 19 nt, Artificial Sequence
  Description of Artificial Sequence: Synthetic oligonucleotide
ugcuaugcuaaauuuuauu

SEQ ID NO: 340566 - RNA, 19 nt, Artificial Sequence
  Description of Artificial Sequence: Synthetic oligonucleotide
aacugguaccuuacucggc

SEQ ID NO: 340567 - RNA, 19 nt, Artificial Sequence
  Description of Artificial Sequence: Synthetic oligonucleotide
gaugugugagggcucacca

SEQ ID NO: 340568 - RNA, 19 nt, Artificial Sequence
  Description of Artificial Sequence: Synthetic oligonucleotide
cugcuuucagcaacuaaac

SEQ ID NO: 340569 - RNA, 19 nt, Artificial Sequence
  Description of Artificial Sequence: Synthetic oligonucleotide
guaacguucuuugaauaac

SEQ ID NO: 340570 - RNA, 19 nt, Artificial Sequence
  Description of Artificial Sequence: Synthetic oligonucleotide
gauuaugugauaaacuguu

SEQ ID NO: 340571 - RNA, 19 nt, Artificial Sequence
  Description of Artificial Sequence: Synthetic oligonucleotide
agguuuagcauuugugcau

SEQ ID NO: 340572 - RNA, 19 nt, Artificial Sequence
  Description of Artificial Sequence: Synthetic oligonucleotide
guacuguaaagaggcaagg

SEQ ID NO: 340573 - RNA, 19 nt, Artificial Sequence
  Description of Artificial Sequence: Synthetic oligonucleotide
ugagcacccucucuaauuu

SEQ ID NO: 340574 - RNA, 19 nt, Artificial Sequence
  Description of Artificial Sequence: Synthetic oligonucleotide
agauuaaauugagguauug

SEQ ID NO: 340575 - RNA, 19 nt, Artificial Sequence
  Description of Artificial Sequence: Synthetic oligonucleotide
cacguagcugauauaucag

SEQ ID NO: 340576 - RNA, 19 nt, Artificial Sequence
  Description of Artificial Sequence: Synthetic oligonucleotide
agacguacaacugguaccu

SEQ ID NO: 340577 - RNA, 19 nt, Artificial Sequence
  Description of Artificial Sequence: Synthetic oligonucleotide
uagugcuaugcuaaauuuu

SEQ ID NO: 340578 - RNA, 19 nt, Artificial Sequence
  Description of Artificial Sequence: Synthetic oligonucleotide
gcaaauaauauaaccuccc

SEQ ID NO: 340579 - RNA, 19 nt, Artificial Sequence
  Description of Artificial Sequence: Synthetic oligonucleotide
agugcuaugcuaaauuuua

SEQ ID NO: 340580 - RNA, 19 nt, Artificial Sequence
  Description of Artificial Sequence: Synthetic oligonucleotide
uauguggcuagcugaaauu

SEQ ID NO: 340581 - RNA, 19 nt, Artificial Sequence
  Description of Artificial Sequence: Synthetic oligonucleotide
uugugacuauaaugaauac

SEQ ID NO: 340582 - RNA, 19 nt, Artificial Sequence
  Description of Artificial Sequence: Synthetic oligonucleotide
uuaggcagauuaguguacu

SEQ ID NO: 340583 - RNA, 19 nt, Artificial Sequence
  Description of Artificial Sequence: Synthetic oligonucleotide
uggcuagcugaaauugucu

SEQ ID NO: 340584 - RNA, 19 nt, Artificial Sequence
  Description of Artificial Sequence: Synthetic oligonucleotide
guaauuacucuugcaagga

SEQ ID NO: 340585 - RNA, 19 nt, Artificial Sequence
  Description of Artificial Sequence: Synthetic oligonucleotide
acagguauagugccaccca

SEQ ID NO: 340586 - RNA, 19 nt, Artificial Sequence
  Description of Artificial Sequence: Synthetic oligonucleotide
agucgauaaauggaauuga

SEQ ID NO: 340587 - RNA, 19 nt, Artificial Sequence
  Description of Artificial Sequence: Synthetic oligonucleotide
auaaccucccauguauaug

SEQ ID NO: 340588 - RNA, 19 nt, Artificial Sequence
  Description of Artificial Sequence: Synthetic oligonucleotide
uggucgguauacuucuaga

SEQ ID NO: 340589 - RNA, 19 nt, Artificial Sequence
  Description of Artificial Sequence: Synthetic oligonucleotide
gagcuccuauaauuuagac

SEQ ID NO: 340590 - RNA, 19 nt, Artificial Sequence
  Description of Artificial Sequence: Synthetic oligonucleotide
uaaccgucuuacuguacca

SEQ ID NO: 340591 - RNA, 19 nt, Artificial Sequence
  Description of Artificial Sequence: Synthetic oligonucleotide
ugacuauaaugaauacauu

SEQ ID NO: 340592 - RNA, 19 nt, Artificial Sequence
  Description of Artificial Sequence: Synthetic oligonucleotide
acauacgguguacgugagg

SEQ ID NO: 340593 - RNA, 19 nt, Artificial Sequence
  Description of Artificial Sequence: Synthetic oligonucleotide
cacagguauagugccaccc

SEQ ID NO: 340594 - RNA, 19 nt, Artificial Sequence
  Description of Artificial Sequence: Synthetic oligonucleotide
uaacuagaugcaugaucac

SEQ ID NO: 340595 - RNA, 19 nt, Artificial Sequence
  Description of Artificial Sequence: Synthetic oligonucleotide
augugugagggcucaccag

SEQ ID NO: 340596 - RNA, 19 nt, Artificial Sequence
  Description of Artificial Sequence: Synthetic oligonucleotide
gccguaucuggucuaaaag

SEQ ID NO: 340597 - RNA, 19 nt, Artificial Sequence
  Description of Artificial Sequence: Synthetic oligonucleotide
acuuaaccgucuuacugua

SEQ ID NO: 340598 - RNA, 19 nt, Artificial Sequence
  Description of Artificial Sequence: Synthetic oligonucleotide
uacgguguacgugagguuu

SEQ ID NO: 340599 - RNA, 19 nt, Artificial Sequence
  Description of Artificial Sequence: Synthetic oligonucleotide
cagauuaguguacuguaaa

SEQ ID NO: 340600 - RNA, 19 nt, Artificial Sequence
  Description of Artificial Sequence: Synthetic oligonucleotide
agaggcaaggaaaaccuaa

SEQ ID NO: 340601 - RNA, 19 nt, Artificial Sequence
  Description of Artificial Sequence: Synthetic oligonucleotide
aacauacgguguacgugag

SEQ ID NO: 340602 - RNA, 19 nt, Artificial Sequence
  Description of Artificial Sequence: Synthetic oligonucleotide
agguaacguucuuugaaua

SEQ ID NO: 340603 - RNA, 19 nt, Artificial Sequence
  Description of Artificial Sequence: Synthetic oligonucleotide
gaauaacuuaaccgucuua

SEQ ID NO: 340604 - RNA, 19 nt, Artificial Sequence
  Description of Artificial Sequence: Synthetic oligonucleotide
auuaugcuccaugaugaau

SEQ ID NO: 340605 - RNA, 19 nt, Artificial Sequence
  Description of Artificial Sequence: Synthetic oligonucleotide
aguugaaugcccugccgua

SEQ ID NO: 340606 - RNA, 19 nt, Artificial Sequence
  Description of Artificial Sequence: Synthetic oligonucleotide
ucaucaucaucaucaucuu

SEQ ID NO: 340607 - RNA, 19 nt, Artificial Sequence
  Description of Artificial Sequence: Synthetic oligonucleotide
ucuaggcaagcuccugguc

SEQ ID NO: 340608 - RNA, 19 nt, Artificial Sequence
  Description of Artificial Sequence: Synthetic oligonucleotide
auaauacaauauguggcua

SEQ ID NO: 340609 - RNA, 19 nt, Artificial Sequence
  Description of Artificial Sequence: Synthetic oligonucleotide
gguagguaagauaauuauc

SEQ ID NO: 340610 - RNA, 19 nt, Artificial Sequence
  Description of Artificial Sequence: Synthetic oligonucleotide
auacaauauguggcuagcu

SEQ ID NO: 340611 - RNA, 19 nt, Artificial Sequence
  Description of Artificial Sequence: Synthetic oligonucleotide
agccccuuuggucaaguau

SEQ ID NO: 340612 - RNA, 19 nt, Artificial Sequence
  Description of Artificial Sequence: Synthetic oligonucleotide
cuuaaccgucuuacuguac

SEQ ID NO: 340613 - RNA, 19 nt, Artificial Sequence
  Description of Artificial Sequence: Synthetic oligonucleotide
aucacguagcugauauauc

SEQ ID NO: 340614 - RNA, 19 nt, Artificial Sequence
  Description of Artificial Sequence: Synthetic oligonucleotide
cuucaucaucaucaucauc

SEQ ID NO: 340615 - RNA, 19 nt, Artificial Sequence
  Description of Artificial Sequence: Synthetic oligonucleotide
agauaauugucuaccuaaa

SEQ ID NO: 340616 - RNA, 19 nt, Artificial Sequence
  Description of Artificial Sequence: Synthetic oligonucleotide
gguaacguucuuugaauaa

SEQ ID NO: 340617 - RNA, 19 nt, Artificial Sequence
  Description of Artificial Sequence: Synthetic oligonucleotide
agagcuccuauaauuuaga

SEQ ID NO: 340618 - RNA, 19 nt, Artificial Sequence
  Description of Artificial Sequence: Synthetic oligonucleotide
caccaucuaauaugcauaa

SEQ ID NO: 340619 - RNA, 19 nt, Artificial Sequence
  Description of Artificial Sequence: Synthetic oligonucleotide
cuagauuuuggucgguaua

SEQ ID NO: 340620 - RNA, 19 nt, Artificial Sequence
  Description of Artificial Sequence: Synthetic oligonucleotide
gauuuuggucgguauacuu

SEQ ID NO: 340621 - RNA, 19 nt, Artificial Sequence
  Description of Artificial Sequence: Synthetic oligonucleotide
gguaccuuacucggcagag

SEQ ID NO: 340622 - RNA, 19 nt, Artificial Sequence
  Description of Artificial Sequence: Synthetic oligonucleotide
uuacucggcagaguggauu

SEQ ID NO: 340623 - RNA, 19 nt, Artificial Sequence
  Description of Artificial Sequence: Synthetic oligonucleotide
agauuuuggucgguauacu

SEQ ID NO: 340624 - RNA, 19 nt, Artificial Sequence
  Description of Artificial Sequence: Synthetic oligonucleotide
aucaguguagugaugucua

SEQ ID NO: 340625 - RNA, 19 nt, Artificial Sequence
  Description of Artificial Sequence: Synthetic oligonucleotide
uuccggaaggagcgggaac

SEQ ID NO: 340626 - RNA, 19 nt, Artificial Sequence
  Description of Artificial Sequence: Synthetic oligonucleotide
agcugcuuuguuuccggaa

SEQ ID NO: 340627 - RNA, 19 nt, Artificial Sequence
  Description of Artificial Sequence: Synthetic oligonucleotide
gucgauaaauggaauugaa

SEQ ID NO: 340628 - RNA, 19 nt, Artificial Sequence
  Description of Artificial Sequence: Synthetic oligonucleotide
cauacgguguacgugaggu

SEQ ID NO: 340629 - RNA, 19 nt, Artificial Sequence
  Description of Artificial Sequence: Synthetic oligonucleotide
gcggcccuccccuugaggg

SEQ ID NO: 340630 - RNA, 19 nt, Artificial Sequence
  Description of Artificial Sequence: Synthetic oligonucleotide
guggcuagcugaaauuguc

SEQ ID NO: 340631 - RNA, 19 nt, Artificial Sequence
  Description of Artificial Sequence: Synthetic oligonucleotide
uacuagauuuuggucggua

SEQ ID NO: 340632 - RNA, 19 nt, Artificial Sequence
  Description of Artificial Sequence: Synthetic oligonucleotide
guagugcuaugcuaaauuu

SEQ ID NO: 340633 - RNA, 19 nt, Artificial Sequence
  Description of Artificial Sequence: Synthetic oligonucleotide
gaauugccaccagugcaac

SEQ ID NO: 340634 - RNA, 19 nt, Artificial Sequence
  Description of Artificial Sequence: Synthetic oligonucleotide
caaauuaguuauguauucu

SEQ ID NO: 340635 - RNA, 19 nt, Artificial Sequence
  Description of Artificial Sequence: Synthetic oligonucleotide
accuuacucggcagagugg

SEQ ID NO: 340636 - RNA, 19 nt, Artificial Sequence
  Description of Artificial Sequence: Synthetic oligonucleotide
guacgugagguuuagcauu

SEQ ID NO: 340637 - RNA, 19 nt, Artificial Sequence
  Description of Artificial Sequence: Synthetic oligonucleotide
gggccgacuguucugcucc

SEQ ID NO: 340638 - RNA, 19 nt, Artificial Sequence
  Description of Artificial Sequence: Synthetic oligonucleotide
agcugauauaucagugaga

SEQ ID NO: 340639 - RNA, 19 nt, Artificial Sequence
  Description of Artificial Sequence: Synthetic oligonucleotide
uuuggucgguauacuucua

SEQ ID NO: 340640 - RNA, 19 nt, Artificial Sequence
  Description of Artificial Sequence: Synthetic oligonucleotide
gguaagggacaucagaauu

SEQ ID NO: 340641 - RNA, 19 nt, Artificial Sequence
  Description of Artificial Sequence: Synthetic oligonucleotide
ggcagauuaguguacugua

SEQ ID NO: 340642 - RNA, 19 nt, Artificial Sequence
  Description of Artificial Sequence: Synthetic oligonucleotide
ccucaugcuaguuuguuaa

SEQ ID NO: 340643 - RNA, 19 nt, Artificial Sequence
  Description of Artificial Sequence: Synthetic oligonucleotide
caacauccuauucacuaua

SEQ ID NO: 340644 - RNA, 19 nt, Artificial Sequence
  Description of Artificial Sequence: Synthetic oligonucleotide
cucuugcaaggaagguaac

SEQ ID NO: 340645 - RNA, 19 nt, Artificial Sequence
  Description of Artificial Sequence: Synthetic oligonucleotide
gagguauugcacagauuaa

SEQ ID NO: 340646 - RNA, 19 nt, Artificial Sequence
  Description of Artificial Sequence: Synthetic oligonucleotide
auguagugcuaugcuaaau

SEQ ID NO: 340647 - RNA, 19 nt, Artificial Sequence
  Description of Artificial Sequence: Synthetic oligonucleotide
aguguacuguaaagaggca

SEQ ID NO: 340648 - RNA, 19 nt, Artificial Sequence
  Description of Artificial Sequence: Synthetic oligonucleotide
cuucacuagugucuguagu

SEQ ID NO: 340649 - RNA, 19 nt, Artificial Sequence
  Description of Artificial Sequence: Synthetic oligonucleotide
ggucuaaaagcgcaucccu

SEQ ID NO: 340650 - RNA, 19 nt, Artificial Sequence
  Description of Artificial Sequence: Synthetic oligonucleotide
gaugaugcacagguauagu

SEQ ID NO: 340651 - RNA, 19 nt, Artificial Sequence
  Description of Artificial Sequence: Synthetic oligonucleotide
guugcccaacaaucugaca

SEQ ID NO: 340652 - RNA, 19 nt, Artificial Sequence
  Description of Artificial Sequence: Synthetic oligonucleotide
caucuuuaggcagauuagu

SEQ ID NO: 340653 - RNA, 19 nt, Artificial Sequence
  Description of Artificial Sequence: Synthetic oligonucleotide
gccugucaagaucauguca

SEQ ID NO: 340654 - RNA, 19 nt, Artificial Sequence
  Description of Artificial Sequence: Synthetic oligonucleotide
acaaugcaaaagagccugu

SEQ ID NO: 340655 - RNA, 19 nt, Artificial Sequence
  Description of Artificial Sequence: Synthetic oligonucleotide
ggcuagcugaaauugucua

SEQ ID NO: 340656 - RNA, 19 nt, Artificial Sequence
  Description of Artificial Sequence: Synthetic oligonucleotide
ugggccgacuguucugcuc

SEQ ID NO: 340657 - RNA, 19 nt, Artificial Sequence
  Description of Artificial Sequence: Synthetic oligonucleotide
agguuuguguaggauuaua

SEQ ID NO: 340658 - RNA, 19 nt, Artificial Sequence
  Description of Artificial Sequence: Synthetic oligonucleotide
gcaauacuacagaagaggu

SEQ ID NO: 340659 - RNA, 19 nt, Artificial Sequence
  Description of Artificial Sequence: Synthetic oligonucleotide
ugccuucggaguucauuuu

SEQ ID NO: 340660 - RNA, 19 nt, Artificial Sequence
  Description of Artificial Sequence: Synthetic oligonucleotide
caguugaaugcccugccgu

SEQ ID NO: 340661 - RNA, 19 nt, Artificial Sequence
  Description of Artificial Sequence: Synthetic oligonucleotide
gugaggacugagacguaca

SEQ ID NO: 340662 - RNA, 19 nt, Artificial Sequence
  Description of Artificial Sequence: Synthetic oligonucleotide
auacuagauuuuggucggu

SEQ ID NO: 340663 - RNA, 19 nt, Artificial Sequence
  Description of Artificial Sequence: Synthetic oligonucleotide
gacaaucacguagcugaua

SEQ ID NO: 340664 - RNA, 19 nt, Artificial Sequence
  Description of Artificial Sequence: Synthetic oligonucleotide
ggucgguauacuucuagau

SEQ ID NO: 340665 - RNA, 19 nt, Artificial Sequence
  Description of Artificial Sequence: Synthetic oligonucleotide
gguggugcuugccuucgga

SEQ ID NO: 340666 - RNA, 19 nt, Artificial Sequence
  Description of Artificial Sequence: Synthetic oligonucleotide
aucuggucuaaaagcgcau

SEQ ID NO: 340667 - RNA, 19 nt, Artificial Sequence
  Description of Artificial Sequence: Synthetic oligonucleotide
ugcaggcuguaaaguuauu

SEQ ID NO: 340668 - RNA, 19 nt, Artificial Sequence
  Description of Artificial Sequence: Synthetic oligonucleotide
cucuaggcaagcuccuggu

SEQ ID NO: 340669 - RNA, 19 nt, Artificial Sequence
  Description of Artificial Sequence: Synthetic oligonucleotide
agacaaucacguagcugau

SEQ ID NO: 340670 - RNA, 19 nt, Artificial Sequence
  Description of Artificial Sequence: Synthetic oligonucleotide
cauugguaccaucaaucuu

SEQ ID NO: 340671 - RNA, 19 nt, Artificial Sequence
  Description of Artificial Sequence: Synthetic oligonucleotide
gucuaucacauagcauuua

SEQ ID NO: 340672 - RNA, 19 nt, Artificial Sequence
  Description of Artificial Sequence: Synthetic oligonucleotide
cacuuacaauuugcauuuc

SEQ ID NO: 340673 - RNA, 19 nt, Artificial Sequence
  Description of Artificial Sequence: Synthetic oligonucleotide
cugagacguacaacuggua

SEQ ID NO: 340674 - RNA, 19 nt, Artificial Sequence
  Description of Artificial Sequence: Synthetic oligonucleotide
gcuagcugaaauugucuau

SEQ ID NO: 340675 - RNA, 19 nt, Artificial Sequence
  Description of Artificial Sequence: Synthetic oligonucleotide
ccaaugugcuguaauuacu

SEQ ID NO: 340676 - RNA, 19 nt, Artificial Sequence
  Description of Artificial Sequence: Synthetic oligonucleotide
ggcuaccagacaaucacgu

SEQ ID NO: 340677 - RNA, 19 nt, Artificial Sequence
  Description of Artificial Sequence: Synthetic oligonucleotide
cagguauagugccacccau

SEQ ID NO: 340678 - RNA, 19 nt, Artificial Sequence
  Description of Artificial Sequence: Synthetic oligonucleotide
cccucucuaauuugaucca

SEQ ID NO: 340679 - RNA, 19 nt, Artificial Sequence
  Description of Artificial Sequence: Synthetic oligonucleotide
ggcggcccuccccuugagg

SEQ ID NO: 340680 - RNA, 19 nt, Artificial Sequence
  Description of Artificial Sequence: Synthetic oligonucleotide
gccucaugcuaguuuguua

SEQ ID NO: 340681 - RNA, 19 nt, Artificial Sequence
  Description of Artificial Sequence: Synthetic oligonucleotide
acgguguacgugagguuua

SEQ ID NO: 340682 - RNA, 19 nt, Artificial Sequence
  Description of Artificial Sequence: Synthetic oligonucleotide
gugcuaugcuaaauuuuau

SEQ ID NO: 340683 - RNA, 19 nt, Artificial Sequence
  Description of Artificial Sequence: Synthetic oligonucleotide
caauaacuagaugcaugau

SEQ ID NO: 340684 - RNA, 19 nt, Artificial Sequence
  Description of Artificial Sequence: Synthetic oligonucleotide
guaccuuacucggcagagu

SEQ ID NO: 340685 - RNA, 19 nt, Artificial Sequence
  Description of Artificial Sequence: Synthetic oligonucleotide
ggacgugggccgacuguuc

SEQ ID NO: 340686 - RNA, 19 nt, Artificial Sequence
  Description of Artificial Sequence: Synthetic oligonucleotide
cgugagguuuagcauuugu

SEQ ID NO: 340687 - RNA, 19 nt, Artificial Sequence
  Description of Artificial Sequence: Synthetic oligonucleotide
gugggccgacuguucugcu

SEQ ID NO: 340688 - RNA, 19 nt, Artificial Sequence
  Description of Artificial Sequence: Synthetic oligonucleotide
cugccguaucuggucuaaa

SEQ ID NO: 340689 - RNA, 19 nt, Artificial Sequence
  Description of Artificial Sequence: Synthetic oligonucleotide
gacguacaacugguaccuu

SEQ ID NO: 340690 - RNA, 19 nt, Artificial Sequence
  Description of Artificial Sequence: Synthetic oligonucleotide
ggccucaugcuaguuuguu

SEQ ID NO: 340691 - RNA, 19 nt, Artificial Sequence
  Description of Artificial Sequence: Synthetic oligonucleotide
gcgggcgguguggacucuu

SEQ ID NO: 340692 - RNA, 19 nt, Artificial Sequence
  Description of Artificial Sequence: Synthetic oligonucleotide
aaagagaauccucugaggg

SEQ ID NO: 340693 - RNA, 19 nt, Artificial Sequence
  Description of Artificial Sequence: Synthetic oligonucleotide
uguaucuugagguaggccg

SEQ ID NO: 340694 - RNA, 19 nt, Artificial Sequence
  Description of Artificial Sequence: Synthetic oligonucleotide
agaggauaaaggcacaucc

SEQ ID NO: 340695 - RNA, 19 nt, Artificial Sequence
  Description of Artificial Sequence: Synthetic oligonucleotide
gauaagagcagcuccagcg

SEQ ID NO: 340696 - RNA, 19 nt, Artificial Sequence
  Description of Artificial Sequence: Synthetic oligonucleotide
ucgaaaaugcauaucaccc

SEQ ID NO: 340697 - RNA, 19 nt, Artificial Sequence
  Description of Artificial Sequence: Synthetic oligonucleotide
ucgauuaccacgauugcgg

SEQ ID NO: 340698 - RNA, 19 nt, Artificial Sequence
  Description of Artificial Sequence: Synthetic oligonucleotide
uuuagcacugagcuaauag

SEQ ID NO: 340699 - RNA, 19 nt, Artificial Sequence
  Description of Artificial Sequence: Synthetic oligonucleotide
uucauugcgggacauaagc

SEQ ID NO: 340700 - RNA, 19 nt, Artificial Sequence
  Description of Artificial Sequence: Synthetic oligonucleotide
uuuucauuggagcaggccu

SEQ ID NO: 340701 - RNA, 19 nt, Artificial Sequence
  Description of Artificial Sequence: Synthetic oligonucleotide
guagcuucgagcuugucgg

SEQ ID NO: 340702 - RNA, 19 nt, Artificial Sequence
  Description of Artificial Sequence: Synthetic oligonucleotide
cauuagaggauaaaggcac

SEQ ID NO: 340703 - RNA, 19 nt, Artificial Sequence
  Description of Artificial Sequence: Synthetic oligonucleotide
gucguuaucaccuucaaca

SEQ ID NO: 340704 - RNA, 19 nt, Artificial Sequence
  Description of Artificial Sequence: Synthetic oligonucleotide
auaaauacgccuucuuauc

SEQ ID NO: 340705 - RNA, 19 nt, Artificial Sequence
  Description of Artificial Sequence: Synthetic oligonucleotide
ucaauuugcagucucucca

SEQ ID NO: 340706 - RNA, 19 nt, Artificial Sequence
  Description of Artificial Sequence: Synthetic oligonucleotide
auagaugacgaguuguauc

SEQ ID NO: 340707 - RNA, 19 nt, Artificial Sequence
  Description of Artificial Sequence: Synthetic oligonucleotide
uaucacccagcaaagaugc

SEQ ID NO: 340708 - RNA, 19 nt, Artificial Sequence
  Description of Artificial Sequence: Synthetic oligonucleotide
aauacgccuucuuauccac

SEQ ID NO: 340709 - RNA, 19 nt, Artificial Sequence
  Description of Artificial Sequence: Synthetic oligonucleotide
aaaugcauaucacccagca

SEQ ID NO: 340710 - RNA, 19 nt, Artificial Sequence
  Description of Artificial Sequence: Synthetic oligonucleotide
uaaauacgccuucuuaucc

SEQ ID NO: 340711 - RNA, 19 nt, Artificial Sequence
  Description of Artificial Sequence: Synthetic oligonucleotide
cagcaauuuaguucgaagg

SEQ ID NO: 340712 - RNA, 19 nt, Artificial Sequence
  Description of Artificial Sequence: Synthetic oligonucleotide
agugcaggucucuucaccc

SEQ ID NO: 340713 - RNA, 19 nt, Artificial Sequence
  Description of Artificial Sequence: Synthetic oligonucleotide
ugaaaccccauucaccaag

SEQ ID NO: 340714 - RNA, 19 nt, Artificial Sequence
  Description of Artificial Sequence: Synthetic oligonucleotide
gaacugucaaaucugggug

SEQ ID NO: 340715 - RNA, 19 nt, Artificial Sequence
  Description of Artificial Sequence: Synthetic oligonucleotide
uagaugacgaguuguaucu

SEQ ID NO: 340716 - RNA, 19 nt, Artificial Sequence
  Description of Artificial Sequence: Synthetic oligonucleotide
auauguucgggucgugugc

SEQ ID NO: 340717 - RNA, 19 nt, Artificial Sequence
  Description of Artificial Sequence: Synthetic oligonucleotide
gucuucaucaguacgacgg

SEQ ID NO: 340718 - RNA, 19 nt, Artificial Sequence
  Description of Artificial Sequence: Synthetic oligonucleotide
ucaacacgaacccucacca

SEQ ID NO: 340719 - RNA, 19 nt, Artificial Sequence
  Description of Artificial Sequence: Synthetic oligonucleotide
ggcacauccagucugauag

SEQ ID NO: 340720 - RNA, 19 nt, Artificial Sequence
  Description of Artificial Sequence: Synthetic oligonucleotide
uuucgugcguuccagaggu

SEQ ID NO: 340721 - RNA, 19 nt, Artificial Sequence
  Description of Artificial Sequence: Synthetic oligonucleotide
aguucgauuaccacgauug

SEQ ID NO: 340722 - RNA, 19 nt, Artificial Sequence
  Description of Artificial Sequence: Synthetic oligonucleotide
uuagcacugagcuaauaga

SEQ ID NO: 340723 - RNA, 19 nt, Artificial Sequence
  Description of Artificial Sequence: Synthetic oligonucleotide
gacgaguuguaucuugagg

SEQ ID NO: 340724 - RNA, 19 nt, Artificial Sequence
  Description of Artificial Sequence: Synthetic oligonucleotide
ugagcuaauagaugacgag

SEQ ID NO: 340725 - RNA, 19 nt, Artificial Sequence
  Description of Artificial Sequence: Synthetic oligonucleotide
uccccauagauucggaaag

SEQ ID NO: 340726 - RNA, 19 nt, Artificial Sequence
  Description of Artificial Sequence: Synthetic oligonucleotide
cauagauucggaaagugca

SEQ ID NO: 340727 - RNA, 19 nt, Artificial Sequence
  Description of Artificial Sequence: Synthetic oligonucleotide
ucacccaacucaauggcag

SEQ ID NO: 340728 - RNA, 19 nt, Artificial Sequence
  Description of Artificial Sequence: Synthetic oligonucleotide
ucauguuaggaccauccga

SEQ ID NO: 340729 - RNA, 19 nt, Artificial Sequence
  Description of Artificial Sequence: Synthetic oligonucleotide
uauccaccagacaagguug

SEQ ID NO: 340730 - RNA, 19 nt, Artificial Sequence
  Description of Artificial Sequence: Synthetic oligonucleotide
uuauccaccagacaagguu

SEQ ID NO: 340731 - RNA, 19 nt, Artificial Sequence
  Description of Artificial Sequence: Synthetic oligonucleotide
accccauucaccaagcuac

SEQ ID NO: 340732 - RNA, 19 nt, Artificial Sequence
  Description of Artificial Sequence: Synthetic oligonucleotide
uucgauuaccacgauugcg

SEQ ID NO: 340733 - RNA, 19 nt, Artificial Sequence
  Description of Artificial Sequence: Synthetic oligonucleotide
uggagguuuaugaaacccc

SEQ ID NO: 340734 - RNA, 19 nt, Artificial Sequence
  Description of Artificial Sequence: Synthetic oligonucleotide
aguucgaaggcuucgaaaa

SEQ ID NO: 340735 - RNA, 19 nt, Artificial Sequence
  Description of Artificial Sequence: Synthetic oligonucleotide
ugcauaucacccagcaaag

SEQ ID NO: 340736 - RNA, 19 nt, Artificial Sequence
  Description of Artificial Sequence: Synthetic oligonucleotide
aagagaauccucugagggu

SEQ ID NO: 340737 - RNA, 19 nt, Artificial Sequence
  Description of Artificial Sequence: Synthetic oligonucleotide
aaaaugcauaucacccagc

SEQ ID NO: 340738 - RNA, 19 nt, Artificial Sequence
  Description of Artificial Sequence: Synthetic oligonucleotide
aaaccucgaccucacucac

SEQ ID NO: 340739 - RNA, 19 nt, Artificial Sequence
  Description of Artificial Sequence: Synthetic oligonucleotide
auuuucauuggagcaggcc

SEQ ID NO: 340740 - RNA, 19 nt, Artificial Sequence
  Description of Artificial Sequence: Synthetic oligonucleotide
ucgggugccaacaaauaug

SEQ ID NO: 340741 - RNA, 19 nt, Artificial Sequence
  Description of Artificial Sequence: Synthetic oligonucleotide
aaaucugggugggucaagg

SEQ ID NO: 340742 - RNA, 19 nt, Artificial Sequence
  Description of Artificial Sequence: Synthetic oligonucleotide
ucugauagggaaggggagg

SEQ ID NO: 340743 - RNA, 19 nt, Artificial Sequence
  Description of Artificial Sequence: Synthetic oligonucleotide
uuuucgagccugcuggaug

SEQ ID NO: 340744 - RNA, 19 nt, Artificial Sequence
  Description of Artificial Sequence: Synthetic oligonucleotide
acugagcuaauagaugacg

SEQ ID NO: 340745 - RNA, 19 nt, Artificial Sequence
  Description of Artificial Sequence: Synthetic oligonucleotide
aaccgggccagccaccaac

SEQ ID NO: 340746 - RNA, 19 nt, Artificial Sequence
  Description of Artificial Sequence: Synthetic oligonucleotide
guuaggaccauccgauucc

SEQ ID NO: 340747 - RNA, 19 nt, Artificial Sequence
  Description of Artificial Sequence: Synthetic oligonucleotide
ugccaacaaauaugaaggg

SEQ ID NO: 340748 - RNA, 19 nt, Artificial Sequence
  Description of Artificial Sequence: Synthetic oligonucleotide
ucuaugaagcucuucucuc

SEQ ID NO: 340749 - RNA, 19 nt, Artificial Sequence
  Description of Artificial Sequence: Synthetic oligonucleotide
gauuaccacgauugcggcg

SEQ ID NO: 340750 - RNA, 19 nt, Artificial Sequence
  Description of Artificial Sequence: Synthetic oligonucleotide
gguagcuucgagcuugucg

SEQ ID NO: 340751 - RNA, 19 nt, Artificial Sequence
  Description of Artificial Sequence: Synthetic oligonucleotide
uaauagaugacgaguugua

SEQ ID NO: 340752 - RNA, 19 nt, Artificial Sequence
  Description of Artificial Sequence: Synthetic oligonucleotide
uggguacuuguacagaguc

SEQ ID NO: 340753 - RNA, 19 nt, Artificial Sequence
  Description of Artificial Sequence: Synthetic oligonucleotide
caugguaaccuugaagaag

SEQ ID NO: 340754 - RNA, 19 nt, Artificial Sequence
  Description of Artificial Sequence: Synthetic oligonucleotide
uaggcuguaaggguuacug

SEQ ID NO: 340755 - RNA, 19 nt, Artificial Sequence
  Description of Artificial Sequence: Synthetic oligonucleotide
aguuggacccaugaggguc

SEQ ID NO: 340756 - RNA, 19 nt, Artificial Sequence
  Description of Artificial Sequence: Synthetic oligonucleotide
gagggauguggacuggagg

SEQ ID NO: 340757 - RNA, 19 nt, Artificial Sequence
  Description of Artificial Sequence: Synthetic oligonucleotide
ucucacuguaaacuccucu

SEQ ID NO: 340758 - RNA, 19 nt, Artificial Sequence
  Description of Artificial Sequence: Synthetic oligonucleotide
auuuaguucgaaggcuucg

SEQ ID NO: 340759 - RNA, 19 nt, Artificial Sequence
  Description of Artificial Sequence: Synthetic oligonucleotide
ucauugcgggacauaagca

SEQ ID NO: 340760 - RNA, 19 nt, Artificial Sequence
  Description of Artificial Sequence: Synthetic oligonucleotide
auuaccacgauugcggcga

SEQ ID NO: 340761 - RNA, 19 nt, Artificial Sequence
  Description of Artificial Sequence: Synthetic oligonucleotide
uuucauuggagcaggccuc

SEQ ID NO: 340762 - RNA, 19 nt, Artificial Sequence
  Description of Artificial Sequence: Synthetic oligonucleotide
aucaguacgacggcggcgg

SEQ ID NO: 340763 - RNA, 19 nt, Artificial Sequence
  Description of Artificial Sequence: Synthetic oligonucleotide
gaggucggggcauuagagg

SEQ ID NO: 340764 - RNA, 19 nt, Artificial Sequence
  Description of Artificial Sequence: Synthetic oligonucleotide
cauauguucgggucgugug

SEQ ID NO: 340765 - RNA, 19 nt, Artificial Sequence
  Description of Artificial Sequence: Synthetic oligonucleotide
gaguuguaucuugagguag

SEQ ID NO: 340766 - RNA, 19 nt, Artificial Sequence
  Description of Artificial Sequence: Synthetic oligonucleotide
caccaagcuacccaacucc

SEQ ID NO: 340767 - RNA, 19 nt, Artificial Sequence
  Description of Artificial Sequence: Synthetic oligonucleotide
aauagaugacgaguuguau

SEQ ID NO: 340768 - RNA, 19 nt, Artificial Sequence
  Description of Artificial Sequence: Synthetic oligonucleotide
ucguuaucaccuucaacac

SEQ ID NO: 340769 - RNA, 19 nt, Artificial Sequence
  Description of Artificial Sequence: Synthetic oligonucleotide
cauugcugauauucucucg

SEQ ID NO: 340770 - RNA, 19 nt, Artificial Sequence
  Description of Artificial Sequence: Synthetic oligonucleotide
gucauguuaggaccauccg

SEQ ID NO: 340771 - RNA, 19 nt, Artificial Sequence
  Description of Artificial Sequence: Synthetic oligonucleotide
uacgccuucuuauccacca

SEQ ID NO: 340772 - RNA, 19 nt, Artificial Sequence
  Description of Artificial Sequence: Synthetic oligonucleotide
aguuguaucuugagguagg

SEQ ID NO: 340773 - RNA, 19 nt, Artificial Sequence
  Description of Artificial Sequence: Synthetic oligonucleotide
uucgauuccgucgcugggg

SEQ ID NO: 340774 - RNA, 19 nt, Artificial Sequence
  Description of Artificial Sequence: Synthetic oligonucleotide
cuugucucuaggugcuugg

SEQ ID NO: 340775 - RNA, 19 nt, Artificial Sequence
  Description of Artificial Sequence: Synthetic oligonucleotide
aaggcuucgaaaaugcaua

SEQ ID NO: 340776 - RNA, 19 nt, Artificial Sequence
  Description of Artificial Sequence: Synthetic oligonucleotide
guuucgugcguuccagagg

SEQ ID NO: 340777 - RNA, 19 nt, Artificial Sequence
  Description of Artificial Sequence: Synthetic oligonucleotide
uuuaguucgaaggcuucga

SEQ ID NO: 340778 - RNA, 19 nt, Artificial Sequence
  Description of Artificial Sequence: Synthetic oligonucleotide
gugaaggguggacaagagg

SEQ ID NO: 340779 - RNA, 19 nt, Artificial Sequence
  Description of Artificial Sequence: Synthetic oligonucleotide
auaucacccagcaaagaug

SEQ ID NO: 340780 - RNA, 19 nt, Artificial Sequence
  Description of Artificial Sequence: Synthetic oligonucleotide
aggucggggcauuagagga

SEQ ID NO: 340781 - RNA, 19 nt, Artificial Sequence
  Description of Artificial Sequence: Synthetic oligonucleotide
cuggagguuuaugaaaccc

SEQ ID NO: 340782 - RNA, 19 nt, Artificial Sequence
  Description of Artificial Sequence: Synthetic oligonucleotide
ugacgaguuguaucuugag

SEQ ID NO: 340783 - RNA, 19 nt, Artificial Sequence
  Description of Artificial Sequence: Synthetic oligonucleotide
cuucuugucguuaucaccu

SEQ ID NO: 340784 - RNA, 19 nt, Artificial Sequence
  Description of Artificial Sequence: Synthetic oligonucleotide
guaucuugagguaggccgg

SEQ ID NO: 340785 - RNA, 19 nt, Artificial Sequence
  Description of Artificial Sequence: Synthetic oligonucleotide
ugucguuaucaccuucaac

SEQ ID NO: 340786 - RNA, 19 nt, Artificial Sequence
  Description of Artificial Sequence: Synthetic oligonucleotide
aauaaaccucgaccucacu

SEQ ID NO: 340787 - RNA, 19 nt, Artificial Sequence
  Description of Artificial Sequence: Synthetic oligonucleotide
agauucggaaagugcaggu

SEQ ID NO: 340788 - RNA, 19 nt, Artificial Sequence
  Description of Artificial Sequence: Synthetic oligonucleotide
accucgaccucacucaccu

SEQ ID NO: 340789 - RNA, 19 nt, Artificial Sequence
  Description of Artificial Sequence: Synthetic oligonucleotide
caagcgagauggagaaagg

SEQ ID NO: 340790 - RNA, 19 nt, Artificial Sequence
  Description of Artificial Sequence: Synthetic oligonucleotide
gguugggauuaacaggccg

SEQ ID NO: 340791 - RNA, 19 nt, Artificial Sequence
  Description of Artificial Sequence: Synthetic oligonucleotide
agucugauagggaagggga

SEQ ID NO: 340792 - RNA, 19 nt, Artificial Sequence
  Description of Artificial Sequence: Synthetic oligonucleotide
guauagccagccuugucac

SEQ ID NO: 340793 - RNA, 19 nt, Artificial Sequence
  Description of Artificial Sequence: Synthetic oligonucleotide
guucgggucgugugcaagg

SEQ ID NO: 340794 - RNA, 19 nt, Artificial Sequence
  Description of Artificial Sequence: Synthetic oligonucleotide
cacauccagucugauaggg

SEQ ID NO: 340795 - RNA, 19 nt, Artificial Sequence
  Description of Artificial Sequence: Synthetic oligonucleotide
gcaagcgagauggagaaag

SEQ ID NO: 340796 - RNA, 19 nt, Artificial Sequence
  Description of Artificial Sequence: Synthetic oligonucleotide
cacgauugcggcgacggcg

SEQ ID NO: 340797 - RNA, 19 nt, Artificial Sequence
  Description of Artificial Sequence: Synthetic oligonucleotide
cugagcuaauagaugacga

SEQ ID NO: 340798 - RNA, 19 nt, Artificial Sequence
  Description of Artificial Sequence: Synthetic oligonucleotide
uaguucgaaggcuucgaaa

SEQ ID NO: 340799 - RNA, 19 nt, Artificial Sequence
  Description of Artificial Sequence: Synthetic oligonucleotide
acuauccccgucuuccaca

SEQ ID NO: 340800 - RNA, 19 nt, Artificial Sequence
  Description of Artificial Sequence: Synthetic oligonucleotide
ugauauucucucgggugcc

SEQ ID NO: 340801 - RNA, 19 nt, Artificial Sequence
  Description of Artificial Sequence: Synthetic oligonucleotide
agagaauccucugaggguu

SEQ ID NO: 340802 - RNA, 19 nt, Artificial Sequence
  Description of Artificial Sequence: Synthetic oligonucleotide
aggucaguuggacccauga

SEQ ID NO: 340803 - RNA, 19 nt, Artificial Sequence
  Description of Artificial Sequence: Synthetic oligonucleotide
acacgaacccucaccacac

SEQ ID NO: 340804 - RNA, 19 nt, Artificial Sequence
  Description of Artificial Sequence: Synthetic oligonucleotide
agagagcuccccuugggaa

SEQ ID NO: 340805 - RNA, 19 nt, Artificial Sequence
  Description of Artificial Sequence: Synthetic oligonucleotide
agagcucacuguuugugau

SEQ ID NO: 340806 - RNA, 19 nt, Artificial Sequence
  Description of Artificial Sequence: Synthetic oligonucleotide
ucugagacucugcccguga

SEQ ID NO: 340807 - RNA, 19 nt, Artificial Sequence
  Description of Artificial Sequence: Synthetic oligonucleotide
agucguuccagggugacaa

SEQ ID NO: 340808 - RNA, 19 nt, Artificial Sequence
  Description of Artificial Sequence: Synthetic oligonucleotide
acagucacugguuggcggu

SEQ ID NO: 340809 - RNA, 19 nt, Artificial Sequence
  Description of Artificial Sequence: Synthetic oligonucleotide
ggacccaucaguucgauua

SEQ ID NO: 340810 - RNA, 19 nt, Artificial Sequence
  Description of Artificial Sequence: Synthetic oligonucleotide
gaccauccgauuccaggcc

SEQ ID NO: 340811 - RNA, 19 nt, Artificial Sequence
  Description of Artificial Sequence: Synthetic oligonucleotide
ggaccauccgauuccaggc

SEQ ID NO: 340812 - RNA, 19 nt, Artificial Sequence
  Description of Artificial Sequence: Synthetic oligonucleotide
uacgacggcggcgggaacg

SEQ ID NO: 340813 - RNA, 19 nt, Artificial Sequence
  Description of Artificial Sequence: Synthetic oligonucleotide
ucuugucguuaucaccuuc

SEQ ID NO: 340814 - RNA, 19 nt, Artificial Sequence
  Description of Artificial Sequence: Synthetic oligonucleotide
ggcgucuccccauagauuc

SEQ ID NO: 340815 - RNA, 19 nt, Artificial Sequence
  Description of Artificial Sequence: Synthetic oligonucleotide
ccauagauucggaaagugc

SEQ ID NO: 340816 - RNA, 19 nt, Artificial Sequence
  Description of Artificial Sequence: Synthetic oligonucleotide
guucgauuaccacgauugc

SEQ ID NO: 340817 - RNA, 19 nt, Artificial Sequence
  Description of Artificial Sequence: Synthetic oligonucleotide
gaacgcugccgccaacugc

SEQ ID NO: 340818 - RNA, 19 nt, Artificial Sequence
  Description of Artificial Sequence: Synthetic oligonucleotide
caccaacaggcggagaacg

SEQ ID NO: 340819 - RNA, 19 nt, Artificial Sequence
  Description of Artificial Sequence: Synthetic oligonucleotide
cuugucggcaugccucagg

SEQ ID NO: 340820 - RNA, 19 nt, Artificial Sequence
  Description of Artificial Sequence: Synthetic oligonucleotide
uucggaaagugcaggucuc

SEQ ID NO: 340821 - RNA, 19 nt, Artificial Sequence
  Description of Artificial Sequence: Synthetic oligonucleotide
cuauccccgucuuccacag

SEQ ID NO: 340822 - RNA, 19 nt, Artificial Sequence
  Description of Artificial Sequence: Synthetic oligonucleotide
aaucggccgccuccggcuc

SEQ ID NO: 340823 - RNA, 19 nt, Artificial Sequence
  Description of Artificial Sequence: Synthetic oligonucleotide
aaaggcacauccagucuga

SEQ ID NO: 340824 - RNA, 19 nt, Artificial Sequence
  Description of Artificial Sequence: Synthetic oligonucleotide
ugcguuccagagguggccg

SEQ ID NO: 340825 - RNA, 19 nt, Artificial Sequence
  Description of Artificial Sequence: Synthetic oligonucleotide
ggggcauuagaggauaaag

SEQ ID NO: 340826 - RNA, 19 nt, Artificial Sequence
  Description of Artificial Sequence: Synthetic oligonucleotide
ucgauuccgucgcuggggu

SEQ ID NO: 340827 - RNA, 19 nt, Artificial Sequence
  Description of Artificial Sequence: Synthetic oligonucleotide
uccgaaccgggccagccac

SEQ ID NO: 340828 - RNA, 19 nt, Artificial Sequence
  Description of Artificial Sequence: Synthetic oligonucleotide
cuucgauuccgucgcuggg

SEQ ID NO: 340829 - RNA, 19 nt, Artificial Sequence
  Description of Artificial Sequence: Synthetic oligonucleotide
uguuggcaccauguguucc

SEQ ID NO: 340830 - RNA, 19 nt, Artificial Sequence
  Description of Artificial Sequence: Synthetic oligonucleotide
aaccucgaccucacucacc

SEQ ID NO: 340831 - RNA, 19 nt, Artificial Sequence
  Description of Artificial Sequence: Synthetic oligonucleotide
cauguuaggaccauccgau

SEQ ID NO: 340832 - RNA, 19 nt, Artificial Sequence
  Description of Artificial Sequence: Synthetic oligonucleotide
caaucucauuguagguagc

SEQ ID NO: 340833 - RNA, 19 nt, Artificial Sequence
  Description of Artificial Sequence: Synthetic oligonucleotide
gcuaauagaugacgaguug

SEQ ID NO: 340834 - RNA, 19 nt, Artificial Sequence
  Description of Artificial Sequence: Synthetic oligonucleotide
ggagaggugguacucuagc

SEQ ID NO: 340835 - RNA, 19 nt, Artificial Sequence
  Description of Artificial Sequence: Synthetic oligonucleotide
agaggucggggcauuagag

SEQ ID NO: 340836 - RNA, 19 nt, Artificial Sequence
  Description of Artificial Sequence: Synthetic oligonucleotide
agcuaauagaugacgaguu

SEQ ID NO: 340837 - RNA, 19 nt, Artificial Sequence
  Description of Artificial Sequence: Synthetic oligonucleotide
guugggauuaacaggccga

SEQ ID NO: 340838 - RNA, 19 nt, Artificial Sequence
  Description of Artificial Sequence: Synthetic oligonucleotide
gcuucgauuccgucgcugg

SEQ ID NO: 340839 - RNA, 19 nt, Artificial Sequence
  Description of Artificial Sequence: Synthetic oligonucleotide
ucgaccucacucaccuucu

SEQ ID NO: 340840 - RNA, 19 nt, Artificial Sequence
  Description of Artificial Sequence: Synthetic oligonucleotide
gguacaggaugggaggagg

SEQ ID NO: 340841 - RNA, 19 nt, Artificial Sequence
  Description of Artificial Sequence: Synthetic oligonucleotide
acggaagcccagcccaauc

SEQ ID NO: 340842 - RNA, 19 nt, Artificial Sequence
  Description of Artificial Sequence: Synthetic oligonucleotide
uuaggaccauccgauucca

SEQ ID NO: 340843 - RNA, 19 nt, Artificial Sequence
  Description of Artificial Sequence: Synthetic oligonucleotide
gacccaucaguucgauuac

SEQ ID NO: 340844 - RNA, 19 nt, Artificial Sequence
  Description of Artificial Sequence: Synthetic oligonucleotide
gaagccguggaugggucug

SEQ ID NO: 340845 - RNA, 19 nt, Artificial Sequence
  Description of Artificial Sequence: Synthetic oligonucleotide
acaccagacuuauccacaa

SEQ ID NO: 340846 - RNA, 19 nt, Artificial Sequence
  Description of Artificial Sequence: Synthetic oligonucleotide
gagcuaauagaugacgagu

SEQ ID NO: 340847 - RNA, 19 nt, Artificial Sequence
  Description of Artificial Sequence: Synthetic oligonucleotide
cuaauagaugacgaguugu

SEQ ID NO: 340848 - RNA, 19 nt, Artificial Sequence
  Description of Artificial Sequence: Synthetic oligonucleotide
cuccaagcgaagcuguuca

SEQ ID NO: 340849 - RNA, 19 nt, Artificial Sequence
  Description of Artificial Sequence: Synthetic oligonucleotide
acgauugcggcgacggcgg

SEQ ID NO: 340850 - RNA, 19 nt, Artificial Sequence
  Description of Artificial Sequence: Synthetic oligonucleotide
gcuacccaacuccaagggg

SEQ ID NO: 340851 - RNA, 19 nt, Artificial Sequence
  Description of Artificial Sequence: Synthetic oligonucleotide
ucucgggugccaacaaaua

SEQ ID NO: 340852 - RNA, 19 nt, Artificial Sequence
  Description of Artificial Sequence: Synthetic oligonucleotide
ucacucaccuucugugauc

SEQ ID NO: 340853 - RNA, 19 nt, Artificial Sequence
  Description of Artificial Sequence: Synthetic oligonucleotide
gucugauagggaaggggag

SEQ ID NO: 340854 - RNA, 19 nt, Artificial Sequence
  Description of Artificial Sequence: Synthetic oligonucleotide
auacgccuucuuauccacc

SEQ ID NO: 340855 - RNA, 19 nt, Artificial Sequence
  Description of Artificial Sequence: Synthetic oligonucleotide
guacucuagcagugccugg

SEQ ID NO: 340856 - RNA, 19 nt, Artificial Sequence
  Description of Artificial Sequence: Synthetic oligonucleotide
cauaucacccagcaaagau

SEQ ID NO: 340857 - RNA, 19 nt, Artificial Sequence
  Description of Artificial Sequence: Synthetic oligonucleotide
uguggacuggagguuuaug

SEQ ID NO: 340858 - RNA, 19 nt, Artificial Sequence
  Description of Artificial Sequence: Synthetic oligonucleotide
auuagaggauaaaggcaca

SEQ ID NO: 340859 - RNA, 19 nt, Artificial Sequence
  Description of Artificial Sequence: Synthetic oligonucleotide
gggauuaacaggccgaagu

SEQ ID NO: 340860 - RNA, 19 nt, Artificial Sequence
  Description of Artificial Sequence: Synthetic oligonucleotide
caucaguacgacggcggcg

SEQ ID NO: 340861 - RNA, 19 nt, Artificial Sequence
  Description of Artificial Sequence: Synthetic oligonucleotide
ugguaaccuugaagaagcu

SEQ ID NO: 340862 - RNA, 19 nt, Artificial Sequence
  Description of Artificial Sequence: Synthetic oligonucleotide
uuaucaccuucaacacgaa

SEQ ID NO: 340863 - RNA, 19 nt, Artificial Sequence
  Description of Artificial Sequence: Synthetic oligonucleotide
uucgagcuugucggcaugc

SEQ ID NO: 340864 - RNA, 19 nt, Artificial Sequence
  Description of Artificial Sequence: Synthetic oligonucleotide
ugguuggcggucuccgcug

SEQ ID NO: 340865 - RNA, 19 nt, Artificial Sequence
  Description of Artificial Sequence: Synthetic oligonucleotide
aggguggacaagagggagg

SEQ ID NO: 340866 - RNA, 19 nt, Artificial Sequence
  Description of Artificial Sequence: Synthetic oligonucleotide
cuccccauagauucggaaa

SEQ ID NO: 340867 - RNA, 19 nt, Artificial Sequence
  Description of Artificial Sequence: Synthetic oligonucleotide
gccaccaccaccaccaccc

SEQ ID NO: 340868 - RNA, 19 nt, Artificial Sequence
  Description of Artificial Sequence: Synthetic oligonucleotide
aggcuguaaggguuacugu

SEQ ID NO: 340869 - RNA, 19 nt, Artificial Sequence
  Description of Artificial Sequence: Synthetic oligonucleotide
uaggaccauccgauuccag

SEQ ID NO: 340870 - RNA, 19 nt, Artificial Sequence
  Description of Artificial Sequence: Synthetic oligonucleotide
aggcuucgaaaaugcauau

SEQ ID NO: 340871 - RNA, 19 nt, Artificial Sequence
  Description of Artificial Sequence: Synthetic oligonucleotide
aacugcuuacuugucucua

SEQ ID NO: 340872 - RNA, 19 nt, Artificial Sequence
  Description of Artificial Sequence: Synthetic oligonucleotide
ucaguacgacggcggcggg

SEQ ID NO: 340873 - RNA, 19 nt, Artificial Sequence
  Description of Artificial Sequence: Synthetic oligonucleotide
ggguguuuagaggucgggg

SEQ ID NO: 340874 - RNA, 19 nt, Artificial Sequence
  Description of Artificial Sequence: Synthetic oligonucleotide
ugccaccaccaccaccacc

SEQ ID NO: 340875 - RNA, 19 nt, Artificial Sequence
  Description of Artificial Sequence: Synthetic oligonucleotide
gucggcaugccucaggcgu

SEQ ID NO: 340876 - RNA, 19 nt, Artificial Sequence
  Description of Artificial Sequence: Synthetic oligonucleotide
cagcccaaucugccgaagc

SEQ ID NO: 340877 - RNA, 19 nt, Artificial Sequence
  Description of Artificial Sequence: Synthetic oligonucleotide
caacacgaacccucaccac

SEQ ID NO: 340878 - RNA, 19 nt, Artificial Sequence
  Description of Artificial Sequence: Synthetic oligonucleotide
ggagguuuaugaaacccca

SEQ ID NO: 340879 - RNA, 19 nt, Artificial Sequence
  Description of Artificial Sequence: Synthetic oligonucleotide
cuaugaagcucuucucucu

SEQ ID NO: 340880 - RNA, 19 nt, Artificial Sequence
  Description of Artificial Sequence: Synthetic oligonucleotide
auacccucacuauccccgu

SEQ ID NO: 340881 - RNA, 19 nt, Artificial Sequence
  Description of Artificial Sequence: Synthetic oligonucleotide
ugcccgugagauguagucu

SEQ ID NO: 340882 - RNA, 19 nt, Artificial Sequence
  Description of Artificial Sequence: Synthetic oligonucleotide
gauuccgucgcuggggucu

SEQ ID NO: 340883 - RNA, 19 nt, Artificial Sequence
  Description of Artificial Sequence: Synthetic oligonucleotide
uagcuucgagcuugucggc

SEQ ID NO: 340884 - RNA, 19 nt, Artificial Sequence
  Description of Artificial Sequence: Synthetic oligonucleotide
aguacgacggcggcgggaa

SEQ ID NO: 340885 - RNA, 19 nt, Artificial Sequence
  Description of Artificial Sequence: Synthetic oligonucleotide
cuaggugcuugguggcuuc

SEQ ID NO: 340886 - RNA, 19 nt, Artificial Sequence
  Description of Artificial Sequence: Synthetic oligonucleotide
uccccgucuuccacaguga

SEQ ID NO: 340887 - RNA, 19 nt, Artificial Sequence
  Description of Artificial Sequence: Synthetic oligonucleotide
cccugaacugucaaaucug

SEQ ID NO: 340888 - RNA, 19 nt, Artificial Sequence
  Description of Artificial Sequence: Synthetic oligonucleotide
cguuaucaccuucaacacg

SEQ ID NO: 340889 - RNA, 19 nt, Artificial Sequence
  Description of Artificial Sequence: Synthetic oligonucleotide
gaagguaggagagguggua

SEQ ID NO: 340890 - RNA, 19 nt, Artificial Sequence
  Description of Artificial Sequence: Synthetic oligonucleotide
ggagggauagcaggggagc

SEQ ID NO: 340891 - RNA, 19 nt, Artificial Sequence
  Description of Artificial Sequence: Synthetic oligonucleotide
cauuaaguccucucucacu

SEQ ID NO: 340892 - RNA, 19 nt, Artificial Sequence
  Description of Artificial Sequence: Synthetic oligonucleotide
ggccgaagucguuccaggg

SEQ ID NO: 340893 - RNA, 19 nt, Artificial Sequence
  Description of Artificial Sequence: Synthetic oligonucleotide
augaaaccccauucaccaa

SEQ ID NO: 340894 - RNA, 19 nt, Artificial Sequence
  Description of Artificial Sequence: Synthetic oligonucleotide
cccuguuacacaccccucc

SEQ ID NO: 340895 - RNA, 19 nt, Artificial Sequence
  Description of Artificial Sequence: Synthetic oligonucleotide
ggacuggagguuuaugaaa

SEQ ID NO: 340896 - RNA, 19 nt, Artificial Sequence
  Description of Artificial Sequence: Synthetic oligonucleotide
uccaagcgaagcuguucaa

SEQ ID NO: 340897 - RNA, 19 nt, Artificial Sequence
  Description of Artificial Sequence: Synthetic oligonucleotide
ucaguucgauuaccacgau

SEQ ID NO: 340898 - RNA, 19 nt, Artificial Sequence
  Description of Artificial Sequence: Synthetic oligonucleotide
cacaccccugguucuacuc

SEQ ID NO: 340899 - RNA, 19 nt, Artificial Sequence
  Description of Artificial Sequence: Synthetic oligonucleotide
gcgacggcggcuucgauuc

SEQ ID NO: 340900 - RNA, 19 nt, Artificial Sequence
  Description of Artificial Sequence: Synthetic oligonucleotide
aucauccgaaccgggccag

SEQ ID NO: 340901 - RNA, 19 nt, Artificial Sequence
  Description of Artificial Sequence: Synthetic oligonucleotide
gcgggcacuugcuggaggg

SEQ ID NO: 340902 - RNA, 19 nt, Artificial Sequence
  Description of Artificial Sequence: Synthetic oligonucleotide
gccgccaacugcuuacuug

SEQ ID NO: 340903 - RNA, 19 nt, Artificial Sequence
  Description of Artificial Sequence: Synthetic oligonucleotide
uugucucuaggugcuuggu

SEQ ID NO: 340904 - RNA, 19 nt, Artificial Sequence
  Description of Artificial Sequence: Synthetic oligonucleotide
ucacugguuggcggucucc

SEQ ID NO: 340905 - RNA, 19 nt, Artificial Sequence
  Description of Artificial Sequence: Synthetic oligonucleotide
gccaacaaauaugaaggga

SEQ ID NO: 340906 - RNA, 19 nt, Artificial Sequence
  Description of Artificial Sequence: Synthetic oligonucleotide
guuggacccaugaggguca

SEQ ID NO: 340907 - RNA, 19 nt, Artificial Sequence
  Description of Artificial Sequence: Synthetic oligonucleotide
auguuaggaccauccgauu

SEQ ID NO: 340908 - RNA, 19 nt, Artificial Sequence
  Description of Artificial Sequence: Synthetic oligonucleotide
ucgagcuugucggcaugcc

SEQ ID NO: 340909 - RNA, 19 nt, Artificial Sequence
  Description of Artificial Sequence: Synthetic oligonucleotide
ggugaaggguggacaagag

SEQ ID NO: 340910 - RNA, 19 nt, Artificial Sequence
  Description of Artificial Sequence: Synthetic oligonucleotide
cuucgagcuugucggcaug

SEQ ID NO: 340911 - RNA, 19 nt, Artificial Sequence
  Description of Artificial Sequence: Synthetic oligonucleotide
caaaucugggugggucaag

SEQ ID NO: 340912 - RNA, 19 nt, Artificial Sequence
  Description of Artificial Sequence: Synthetic oligonucleotide
agcuucgagcuugucggca

SEQ ID NO: 340913 - RNA, 19 nt, Artificial Sequence
  Description of Artificial Sequence: Synthetic oligonucleotide
cacuggguccagcucuaug

SEQ ID NO: 340914 - RNA, 19 nt, Artificial Sequence
  Description of Artificial Sequence: Synthetic oligonucleotide
uuaccacgauugcggcgac

SEQ ID NO: 340915 - RNA, 19 nt, Artificial Sequence
  Description of Artificial Sequence: Synthetic oligonucleotide
uucgugcguuccagaggug

SEQ ID NO: 340916 - RNA, 19 nt, Artificial Sequence
  Description of Artificial Sequence: Synthetic oligonucleotide
uaccacgauugcggcgacg

SEQ ID NO: 340917 - RNA, 19 nt, Artificial Sequence
  Description of Artificial Sequence: Synthetic oligonucleotide
agguagcaucacaggcagc

SEQ ID NO: 340918 - RNA, 19 nt, Artificial Sequence
  Description of Artificial Sequence: Synthetic oligonucleotide
cgaaaaugcauaucaccca

SEQ ID NO: 340919 - RNA, 19 nt, Artificial Sequence
  Description of Artificial Sequence: Synthetic oligonucleotide
ucuccgcugauggacccau

SEQ ID NO: 340920 - RNA, 19 nt, Artificial Sequence
  Description of Artificial Sequence: Synthetic oligonucleotide
aaggcacauccagucugau

SEQ ID NO: 340921 - RNA, 19 nt, Artificial Sequence
  Description of Artificial Sequence: Synthetic oligonucleotide
ggaacgcugccgccaacug

SEQ ID NO: 340922 - RNA, 19 nt, Artificial Sequence
  Description of Artificial Sequence: Synthetic oligonucleotide
uacccucacuauccccguc

SEQ ID NO: 340923 - RNA, 19 nt, Artificial Sequence
  Description of Artificial Sequence: Synthetic oligonucleotide
ugaacucuuuauggacauu

SEQ ID NO: 340924 - RNA, 19 nt, Artificial Sequence
  Description of Artificial Sequence: Synthetic oligonucleotide
cuuggaacgcugccgccaa

SEQ ID NO: 340925 - RNA, 19 nt, Artificial Sequence
  Description of Artificial Sequence: Synthetic oligonucleotide
cucucgggugccaacaaau

SEQ ID NO: 340926 - RNA, 19 nt, Artificial Sequence
  Description of Artificial Sequence: Synthetic oligonucleotide
cccauagauucggaaagug

SEQ ID NO: 340927 - RNA, 19 nt, Artificial Sequence
  Description of Artificial Sequence: Synthetic oligonucleotide
gggguguuuagaggucggg

SEQ ID NO: 340928 - RNA, 19 nt, Artificial Sequence
  Description of Artificial Sequence: Synthetic oligonucleotide
cgauuaccacgauugcggc

SEQ ID NO: 340929 - RNA, 19 nt, Artificial Sequence
  Description of Artificial Sequence: Synthetic oligonucleotide
cuuauccaccagacaaggu

SEQ ID NO: 340930 - RNA, 19 nt, Artificial Sequence
  Description of Artificial Sequence: Synthetic oligonucleotide
guucgaaggcuucgaaaau

SEQ ID NO: 340931 - RNA, 19 nt, Artificial Sequence
  Description of Artificial Sequence: Synthetic oligonucleotide
uccgucgcuggggucuuga

SEQ ID NO: 340932 - RNA, 19 nt, Artificial Sequence
  Description of Artificial Sequence: Synthetic oligonucleotide
cugucauguuaggaccauc

SEQ ID NO: 340933 - RNA, 19 nt, Artificial Sequence
  Description of Artificial Sequence: Synthetic oligonucleotide
cgaacccucaccacaccag

SEQ ID NO: 340934 - RNA, 19 nt, Artificial Sequence
  Description of Artificial Sequence: Synthetic oligonucleotide
ggucuccgcugauggaccc

SEQ ID NO: 340935 - RNA, 19 nt, Artificial Sequence
  Description of Artificial Sequence: Synthetic oligonucleotide
cccaucaguucgauuacca

SEQ ID NO: 340936 - RNA, 19 nt, Artificial Sequence
  Description of Artificial Sequence: Synthetic oligonucleotide
ucauccgaaccgggccagc

SEQ ID NO: 340937 - RNA, 19 nt, Artificial Sequence
  Description of Artificial Sequence: Synthetic oligonucleotide
cucgggugccaacaaauau

SEQ ID NO: 340938 - RNA, 19 nt, Artificial Sequence
  Description of Artificial Sequence: Synthetic oligonucleotide
uauccccgucuuccacagu

SEQ ID NO: 340939 - RNA, 19 nt, Artificial Sequence
  Description of Artificial Sequence: Synthetic oligonucleotide
uggacccaucaguucgauu

SEQ ID NO: 340940 - RNA, 19 nt, Artificial Sequence
  Description of Artificial Sequence: Synthetic oligonucleotide
agaugacgaguuguaucuu

SEQ ID NO: 340941 - RNA, 19 nt, Artificial Sequence
  Description of Artificial Sequence: Synthetic oligonucleotide
ccccguagauaagagcagc

SEQ ID NO: 340942 - RNA, 19 nt, Artificial Sequence
  Description of Artificial Sequence: Synthetic oligonucleotide
caaucggccgccuccggcu

SEQ ID NO: 340943 - RNA, 19 nt, Artificial Sequence
  Description of Artificial Sequence: Synthetic oligonucleotide
gcggucuccgcugauggac

SEQ ID NO: 340944 - RNA, 19 nt, Artificial Sequence
  Description of Artificial Sequence: Synthetic oligonucleotide
auguucgggucgugugcaa

SEQ ID NO: 340945 - RNA, 19 nt, Artificial Sequence
  Description of Artificial Sequence: Synthetic oligonucleotide
cccgugagauguagucugc

SEQ ID NO: 340946 - RNA, 19 nt, Artificial Sequence
  Description of Artificial Sequence: Synthetic oligonucleotide
ugccgccaacugcuuacuu

SEQ ID NO: 340947 - RNA, 19 nt, Artificial Sequence
  Description of Artificial Sequence: Synthetic oligonucleotide
ccguagauaagagcagcuc

SEQ ID NO: 340948 - RNA, 19 nt, Artificial Sequence
  Description of Artificial Sequence: Synthetic oligonucleotide
uccaccagacaagguuguu

SEQ ID NO: 340949 - RNA, 19 nt, Artificial Sequence
  Description of Artificial Sequence: Synthetic oligonucleotide
ggcuucgaaaaugcauauc

SEQ ID NO: 340950 - RNA, 19 nt, Artificial Sequence
  Description of Artificial Sequence: Synthetic oligonucleotide
auguggacuggagguuuau

SEQ ID NO: 340951 - RNA, 19 nt, Artificial Sequence
  Description of Artificial Sequence: Synthetic oligonucleotide
agguagcuucgagcuuguc

SEQ ID NO: 340952 - RNA, 19 nt, Artificial Sequence
  Description of Artificial Sequence: Synthetic oligonucleotide
agccguggaugggucugag

SEQ ID NO: 340953 - RNA, 19 nt, Artificial Sequence
  Description of Artificial Sequence: Synthetic oligonucleotide
gguucuacuccaaaaccuu

SEQ ID NO: 340954 - RNA, 19 nt, Artificial Sequence
  Description of Artificial Sequence: Synthetic oligonucleotide
gcauaucacccagcaaaga

SEQ ID NO: 340955 - RNA, 19 nt, Artificial Sequence
  Description of Artificial Sequence: Synthetic oligonucleotide
ggcuucgauuccgucgcug

SEQ ID NO: 340956 - RNA, 19 nt, Artificial Sequence
  Description of Artificial Sequence: Synthetic oligonucleotide
gcugacagagucgcccuuc

SEQ ID NO: 340957 - RNA, 19 nt, Artificial Sequence
  Description of Artificial Sequence: Synthetic oligonucleotide
cguggaugggucugagcug

SEQ ID NO: 340958 - RNA, 19 nt, Artificial Sequence
  Description of Artificial Sequence: Synthetic oligonucleotide
agucgcccuucuguccuga

SEQ ID NO: 340959 - RNA, 19 nt, Artificial Sequence
  Description of Artificial Sequence: Synthetic oligonucleotide
ggguugggauuaacaggcc

SEQ ID NO: 340960 - RNA, 19 nt, Artificial Sequence
  Description of Artificial Sequence: Synthetic oligonucleotide
gcgucuccccauagauucg

SEQ ID NO: 340961 - RNA, 19 nt, Artificial Sequence
  Description of Artificial Sequence: Synthetic oligonucleotide
cgucuccccauagauucgg

SEQ ID NO: 340962 - RNA, 19 nt, Artificial Sequence
  Description of Artificial Sequence: Synthetic oligonucleotide
agcaagcgagauggagaaa

SEQ ID NO: 340963 - RNA, 19 nt, Artificial Sequence
  Description of Artificial Sequence: Synthetic oligonucleotide
cugacagagucgcccuucu

SEQ ID NO: 340964 - RNA, 19 nt, Artificial Sequence
  Description of Artificial Sequence: Synthetic oligonucleotide
ggguuucgugcguuccaga

SEQ ID NO: 340965 - RNA, 19 nt, Artificial Sequence
  Description of Artificial Sequence: Synthetic oligonucleotide
gauugcggcgacggcggcu

SEQ ID NO: 340966 - RNA, 19 nt, Artificial Sequence
  Description of Artificial Sequence: Synthetic oligonucleotide
ggucgugugcaaggaagaa

SEQ ID NO: 340967 - RNA, 19 nt, Artificial Sequence
  Description of Artificial Sequence: Synthetic oligonucleotide
ccauccgauuccaggccuc

SEQ ID NO: 340968 - RNA, 19 nt, Artificial Sequence
  Description of Artificial Sequence: Synthetic oligonucleotide
aggcgucuccccauagauu

SEQ ID NO: 340969 - RNA, 19 nt, Artificial Sequence
  Description of Artificial Sequence: Synthetic oligonucleotide
cggucuccgcugauggacc

SEQ ID NO: 340970 - RNA, 19 nt, Artificial Sequence
  Description of Artificial Sequence: Synthetic oligonucleotide
gcguuccagagguggccgc

SEQ ID NO: 340971 - RNA, 19 nt, Artificial Sequence
  Description of Artificial Sequence: Synthetic oligonucleotide
ccgccaacugcuuacuugu

SEQ ID NO: 340972 - RNA, 19 nt, Artificial Sequence
  Description of Artificial Sequence: Synthetic oligonucleotide
uuggacccaugagggucau

SEQ ID NO: 340973 - RNA, 19 nt, Artificial Sequence
  Description of Artificial Sequence: Synthetic oligonucleotide
ggccaccaguccuccggcc

SEQ ID NO: 340974 - RNA, 19 nt, Artificial Sequence
  Description of Artificial Sequence: Synthetic oligonucleotide
gguuggcggucuccgcuga

SEQ ID NO: 340975 - RNA, 19 nt, Artificial Sequence
  Description of Artificial Sequence: Synthetic oligonucleotide
ccaccaacaggcggagaac

SEQ ID NO: 340976 - RNA, 19 nt, Artificial Sequence
  Description of Artificial Sequence: Synthetic oligonucleotide
gucuccccauagauucgga

SEQ ID NO: 340977 - RNA, 19 nt, Artificial Sequence
  Description of Artificial Sequence: Synthetic oligonucleotide
cuccgcugauggacccauc

SEQ ID NO: 340978 - RNA, 19 nt, Artificial Sequence
  Description of Artificial Sequence: Synthetic oligonucleotide
caguucgauuaccacgauu

SEQ ID NO: 340979 - RNA, 19 nt, Artificial Sequence
  Description of Artificial Sequence: Synthetic oligonucleotide
gaaccgggccagccaccaa

SEQ ID NO: 340980 - RNA, 19 nt, Artificial Sequence
  Description of Artificial Sequence: Synthetic oligonucleotide
acggcgacggcgggcacuu

SEQ ID NO: 340981 - RNA, 19 nt, Artificial Sequence
  Description of Artificial Sequence: Synthetic oligonucleotide
gcaggucucuucacccaac

SEQ ID NO: 340982 - RNA, 19 nt, Artificial Sequence
  Description of Artificial Sequence: Synthetic oligonucleotide
acggcggcuucgauuccgu

SEQ ID NO: 340983 - RNA, 19 nt, Artificial Sequence
  Description of Artificial Sequence: Synthetic oligonucleotide
guacgacggcggcgggaac

SEQ ID NO: 340984 - RNA, 19 nt, Artificial Sequence
  Description of Artificial Sequence: Synthetic oligonucleotide
gucuccgcugauggaccca

SEQ ID NO: 340985 - RNA, 19 nt, Artificial Sequence
  Description of Artificial Sequence: Synthetic oligonucleotide
caguacgacggcggcggga

SEQ ID NO: 340986 - RNA, 19 nt, Artificial Sequence
  Description of Artificial Sequence: Synthetic oligonucleotide
auuccgucgcuggggucuu

SEQ ID NO: 340987 - RNA, 19 nt, Artificial Sequence
  Description of Artificial Sequence: Synthetic oligonucleotide
gcuucgagcuugucggcau

SEQ ID NO: 340988 - RNA, 19 nt, Artificial Sequence
  Description of Artificial Sequence: Synthetic oligonucleotide
cccguagauaagagcagcu

SEQ ID NO: 340989 - RNA, 19 nt, Artificial Sequence
  Description of Artificial Sequence: Synthetic oligonucleotide
ggauguggacuggagguuu

SEQ ID NO: 340990 - RNA, 19 nt, Artificial Sequence
  Description of Artificial Sequence: Synthetic oligonucleotide
cuagcagugccugggcauu

SEQ ID NO: 340991 - RNA, 19 nt, Artificial Sequence
  Description of Artificial Sequence: Synthetic oligonucleotide
uuccgucgcuggggucuug

SEQ ID NO: 340992 - RNA, 19 nt, Artificial Sequence
  Description of Artificial Sequence: Synthetic oligonucleotide
gacggaagcccagcccaau

SEQ ID NO: 340993 - RNA, 19 nt, Artificial Sequence
  Description of Artificial Sequence: Synthetic oligonucleotide
caauuggcucccagugcuu

SEQ ID NO: 340994 - RNA, 19 nt, Artificial Sequence
  Description of Artificial Sequence: Synthetic oligonucleotide
uugcggcgacggcggcuuc

SEQ ID NO: 340995 - RNA, 19 nt, Artificial Sequence
  Description of Artificial Sequence: Synthetic oligonucleotide
ccaccaccaccaccacccc

SEQ ID NO: 340996 - RNA, 19 nt, Artificial Sequence
  Description of Artificial Sequence: Synthetic oligonucleotide
ggcgacggcggcuucgauu

SEQ ID NO: 340997 - RNA, 19 nt, Artificial Sequence
  Description of Artificial Sequence: Synthetic oligonucleotide
ccauauguucgggucgugu

SEQ ID NO: 340998 - RNA, 19 nt, Artificial Sequence
  Description of Artificial Sequence: Synthetic oligonucleotide
gcucugagacucugcccgu

SEQ ID NO: 340999 - RNA, 19 nt, Artificial Sequence
  Description of Artificial Sequence: Synthetic oligonucleotide
guuggcggucuccgcugau

SEQ ID NO: 341000 - RNA, 19 nt, Artificial Sequence
  Description of Artificial Sequence: Synthetic oligonucleotide
ggacggaagcccagcccaa

SEQ ID NO: 341001 - RNA, 19 nt, Artificial Sequence
  Description of Artificial Sequence: Synthetic oligonucleotide
ccccuucauacacaccccu

SEQ ID NO: 341002 - RNA, 19 nt, Artificial Sequence
  Description of Artificial Sequence: Synthetic oligonucleotide
ggucggggcauuagaggau

SEQ ID NO: 341003 - RNA, 19 nt, Artificial Sequence
  Description of Artificial Sequence: Synthetic oligonucleotide
cugccgccaacugcuuacu

SEQ ID NO: 341004 - RNA, 19 nt, Artificial Sequence
  Description of Artificial Sequence: Synthetic oligonucleotide
cgauuccgucgcugggguc

SEQ ID NO: 341005 - RNA, 19 nt, Artificial Sequence
  Description of Artificial Sequence: Synthetic oligonucleotide
cgaaccgggccagccacca

SEQ ID NO: 341006 - RNA, 19 nt, Artificial Sequence
  Description of Artificial Sequence: Synthetic oligonucleotide
ccccauagauucggaaagu

SEQ ID NO: 341007 - RNA, 19 nt, Artificial Sequence
  Description of Artificial Sequence: Synthetic oligonucleotide
ggguuacugucuggauccu

SEQ ID NO: 341008 - RNA, 19 nt, Artificial Sequence
  Description of Artificial Sequence: Synthetic oligonucleotide
ccuuuagcacugagcuaau

SEQ ID NO: 341009 - RNA, 19 nt, Artificial Sequence
  Description of Artificial Sequence: Synthetic oligonucleotide
acgcugccgccaacugcuu

SEQ ID NO: 341010 - RNA, 19 nt, Artificial Sequence
  Description of Artificial Sequence: Synthetic oligonucleotide
cgacggcggcuucgauucc

SEQ ID NO: 341011 - RNA, 19 nt, Artificial Sequence
  Description of Artificial Sequence: Synthetic oligonucleotide
gcaggucaguuggacccau

SEQ ID NO: 341012 - RNA, 19 nt, Artificial Sequence
  Description of Artificial Sequence: Synthetic oligonucleotide
cggggcauuagaggauaaa

SEQ ID NO: 341013 - RNA, 19 nt, Artificial Sequence
  Description of Artificial Sequence: Synthetic oligonucleotide
ccccgucuuccacagugau

SEQ ID NO: 341014 - RNA, 19 nt, Artificial Sequence
  Description of Artificial Sequence: Synthetic oligonucleotide
ccgucgcuggggucuugau

SEQ ID NO: 341015 - RNA, 19 nt, Artificial Sequence
  Description of Artificial Sequence: Synthetic oligonucleotide
ccucgaccucacucaccuu

SEQ ID NO: 341016 - RNA, 19 nt, Artificial Sequence
  Description of Artificial Sequence: Synthetic oligonucleotide
cgcuggcggcucugagacu

SEQ ID NO: 341017 - RNA, 19 nt, Artificial Sequence
  Description of Artificial Sequence: Synthetic oligonucleotide
aaaaccauacucucauugc

SEQ ID NO: 341018 - RNA, 19 nt, Artificial Sequence
  Description of Artificial Sequence: Synthetic oligonucleotide
aaaccauacucucauugcc

SEQ ID NO: 341019 - RNA, 19 nt, Artificial Sequence
  Description of Artificial Sequence: Synthetic oligonucleotide
aaaggaucggaacaccgcc

SEQ ID NO: 341020 - RNA, 19 nt, Artificial Sequence
  Description of Artificial Sequence: Synthetic oligonucleotide
aacgaguuuccauauuugc

SEQ ID NO: 341021 - RNA, 19 nt, Artificial Sequence
  Description of Artificial Sequence: Synthetic oligonucleotide
ucuuuagacacuucgauug

SEQ ID NO: 341022 - RNA, 19 nt, Artificial Sequence
  Description of Artificial Sequence: Synthetic oligonucleotide
aaacaagccaacuugguga

SEQ ID NO: 341023 - RNA, 19 nt, Artificial Sequence
  Description of Artificial Sequence: Synthetic oligonucleotide
guaccaacgaaacagaaag

SEQ ID NO: 341024 - RNA, 19 nt, Artificial Sequence
  Description of Artificial Sequence: Synthetic oligonucleotide
ucuaaacaagccaacuugg

SEQ ID NO: 341025 - RNA, 19 nt, Artificial Sequence
  Description of Artificial Sequence: Synthetic oligonucleotide
guaacuucuacagugaccg

SEQ ID NO: 341026 - RNA, 19 nt, Artificial Sequence
  Description of Artificial Sequence: Synthetic oligonucleotide
ugagacaauaauuugcccc

SEQ ID NO: 341027 - RNA, 19 nt, Artificial Sequence
  Description of Artificial Sequence: Synthetic oligonucleotide
aaugcagccaguuuacuca

SEQ ID NO: 341028 - RNA, 19 nt, Artificial Sequence
  Description of Artificial Sequence: Synthetic oligonucleotide
acuauuaauuucauguagc

SEQ ID NO: 341029 - RNA, 19 nt, Artificial Sequence
  Description of Artificial Sequence: Synthetic oligonucleotide
ugcuccauuacaaugcucc

SEQ ID NO: 341030 - RNA, 19 nt, Artificial Sequence
  Description of Artificial Sequence: Synthetic oligonucleotide
aaaauuugccaacugucca

SEQ ID NO: 341031 - RNA, 19 nt, Artificial Sequence
  Description of Artificial Sequence: Synthetic oligonucleotide
gacuauuaauuucauguag

SEQ ID NO: 341032 - RNA, 19 nt, Artificial Sequence
  Description of Artificial Sequence: Synthetic oligonucleotide
acaggcauugcacuaagac

SEQ ID NO: 341033 - RNA, 19 nt, Artificial Sequence
  Description of Artificial Sequence: Synthetic oligonucleotide
ucuacaaaugucauaucug

SEQ ID NO: 341034 - RNA, 19 nt, Artificial Sequence
  Description of Artificial Sequence: Synthetic oligonucleotide
uuaaccgacauguaaucag

SEQ ID NO: 341035 - RNA, 19 nt, Artificial Sequence
  Description of Artificial Sequence: Synthetic oligonucleotide
auugacauggaucgccacc

SEQ ID NO: 341036 - RNA, 19 nt, Artificial Sequence
  Description of Artificial Sequence: Synthetic oligonucleotide
uacgaaagaagacaucggc

SEQ ID NO: 341037 - RNA, 19 nt, Artificial Sequence
  Description of Artificial Sequence: Synthetic oligonucleotide
uucgauuggaucaucuuug

SEQ ID NO: 341038 - RNA, 19 nt, Artificial Sequence
  Description of Artificial Sequence: Synthetic oligonucleotide
uauccuagagaaaaggauc

SEQ ID NO: 341039 - RNA, 19 nt, Artificial Sequence
  Description of Artificial Sequence: Synthetic oligonucleotide
auuacaaugcuccggaggu

SEQ ID NO: 341040 - RNA, 19 nt, Artificial Sequence
  Description of Artificial Sequence: Synthetic oligonucleotide
uaaacaagccaacuuggug

SEQ ID NO: 341041 - RNA, 19 nt, Artificial Sequence
  Description of Artificial Sequence: Synthetic oligonucleotide
gauagugucuaccugggac

SEQ ID NO: 341042 - RNA, 19 nt, Artificial Sequence
  Description of Artificial Sequence: Synthetic oligonucleotide
cugaauaggccaaagacuc

SEQ ID NO: 341043 - RNA, 19 nt, Artificial Sequence
  Description of Artificial Sequence: Synthetic oligonucleotide
agaccagucaucucucugc

SEQ ID NO: 341044 - RNA, 19 nt, Artificial Sequence
  Description of Artificial Sequence: Synthetic oligonucleotide
aauggguugagacaauaau

SEQ ID NO: 341045 - RNA, 19 nt, Artificial Sequence
  Description of Artificial Sequence: Synthetic oligonucleotide
uaaccgacauguaaucagg

SEQ ID NO: 341046 - RNA, 19 nt, Artificial Sequence
  Description of Artificial Sequence: Synthetic oligonucleotide
aacugggucauguagcgcu

SEQ ID NO: 341047 - RNA, 19 nt, Artificial Sequence
  Description of Artificial Sequence: Synthetic oligonucleotide
gucuaaacaagccaacuug

SEQ ID NO: 341048 - RNA, 19 nt, Artificial Sequence
  Description of Artificial Sequence: Synthetic oligonucleotide
cuaacgaaacaucacgaag

SEQ ID NO: 341049 - RNA, 19 nt, Artificial Sequence
  Description of Artificial Sequence: Synthetic oligonucleotide
uguauugacauggaucgcc

SEQ ID NO: 341050 - RNA, 19 nt, Artificial Sequence
  Description of Artificial Sequence: Synthetic oligonucleotide
guuuaggcgauaaugagug

SEQ ID NO: 341051 - RNA, 19 nt, Artificial Sequence
  Description of Artificial Sequence: Synthetic oligonucleotide
uguuuaggcgauaaugagu

SEQ ID NO: 341052 - RNA, 19 nt, Artificial Sequence
  Description of Artificial Sequence: Synthetic oligonucleotide
gaccguaucugacauuugg

SEQ ID NO: 341053 - RNA, 19 nt, Artificial Sequence
  Description of Artificial Sequence: Synthetic oligonucleotide
ugcagaaugaucagcgaug

SEQ ID NO: 341054 - RNA, 19 nt, Artificial Sequence
  Description of Artificial Sequence: Synthetic oligonucleotide
ucguccaccaacugaauag

SEQ ID NO: 341055 - RNA, 19 nt, Artificial Sequence
  Description of Artificial Sequence: Synthetic oligonucleotide
accaacgaaacagaaaguc

SEQ ID NO: 341056 - RNA, 19 nt, Artificial Sequence
  Description of Artificial Sequence: Synthetic oligonucleotide
uuagaagcaacaauuucua

SEQ ID NO: 341057 - RNA, 19 nt, Artificial Sequence
  Description of Artificial Sequence: Synthetic oligonucleotide
ugaacuagaccagucaucu

SEQ ID NO: 341058 - RNA, 19 nt, Artificial Sequence
  Description of Artificial Sequence: Synthetic oligonucleotide
uguacugaguaacuucuac

SEQ ID NO: 341059 - RNA, 19 nt, Artificial Sequence
  Description of Artificial Sequence: Synthetic oligonucleotide
uugucuuaucuucaugggc

SEQ ID NO: 341060 - RNA, 19 nt, Artificial Sequence
  Description of Artificial Sequence: Synthetic oligonucleotide
agacacuucgauuggauca

SEQ ID NO: 341061 - RNA, 19 nt, Artificial Sequence
  Description of Artificial Sequence: Synthetic oligonucleotide
uuucauguagccagcugag

SEQ ID NO: 341062 - RNA, 19 nt, Artificial Sequence
  Description of Artificial Sequence: Synthetic oligonucleotide
uuguguaucaaagacaauu

SEQ ID NO: 341063 - RNA, 19 nt, Artificial Sequence
  Description of Artificial Sequence: Synthetic oligonucleotide
acuucuagauugcuguauc

SEQ ID NO: 341064 - RNA, 19 nt, Artificial Sequence
  Description of Artificial Sequence: Synthetic oligonucleotide
agauaggucaucuggcuug

SEQ ID NO: 341065 - RNA, 19 nt, Artificial Sequence
  Description of Artificial Sequence: Synthetic oligonucleotide
agcaacaauuucuacaaau

SEQ ID NO: 341066 - RNA, 19 nt, Artificial Sequence
  Description of Artificial Sequence: Synthetic oligonucleotide
ugcuaauagggacacauuu

SEQ ID NO: 341067 - RNA, 19 nt, Artificial Sequence
  Description of Artificial Sequence: Synthetic oligonucleotide
aguaacuucuacagugacc

SEQ ID NO: 341068 - RNA, 19 nt, Artificial Sequence
  Description of Artificial Sequence: Synthetic oligonucleotide
acuaagacucagcugucuc

SEQ ID NO: 341069 - RNA, 19 nt, Artificial Sequence
  Description of Artificial Sequence: Synthetic oligonucleotide
ugucuuuagacacuucgau

SEQ ID NO: 341070 - RNA, 19 nt, Artificial Sequence
  Description of Artificial Sequence: Synthetic oligonucleotide
uuaggcgauaaugaguggc

SEQ ID NO: 341071 - RNA, 19 nt, Artificial Sequence
  Description of Artificial Sequence: Synthetic oligonucleotide
uccuuguguaucaaagaca

SEQ ID NO: 341072 - RNA, 19 nt, Artificial Sequence
  Description of Artificial Sequence: Synthetic oligonucleotide
acgaguuuccauauuugcc

SEQ ID NO: 341073 - RNA, 19 nt, Artificial Sequence
  Description of Artificial Sequence: Synthetic oligonucleotide
auaauuugccccgcuuucc

SEQ ID NO: 341074 - RNA, 19 nt, Artificial Sequence
  Description of Artificial Sequence: Synthetic oligonucleotide
ucauguagccagcugagau

SEQ ID NO: 341075 - RNA, 19 nt, Artificial Sequence
  Description of Artificial Sequence: Synthetic oligonucleotide
uugaggguacaccaucugc

SEQ ID NO: 341076 - RNA, 19 nt, Artificial Sequence
  Description of Artificial Sequence: Synthetic oligonucleotide
ugggaaacguaacugucca

SEQ ID NO: 341077 - RNA, 19 nt, Artificial Sequence
  Description of Artificial Sequence: Synthetic oligonucleotide
auagacuucagcugggaaa

SEQ ID NO: 341078 - RNA, 19 nt, Artificial Sequence
  Description of Artificial Sequence: Synthetic oligonucleotide
uuuucccucggagugacag

SEQ ID NO: 341079 - RNA, 19 nt, Artificial Sequence
  Description of Artificial Sequence: Synthetic oligonucleotide
uccaacaaguccaaggcuu

SEQ ID NO: 341080 - RNA, 19 nt, Artificial Sequence
  Description of Artificial Sequence: Synthetic oligonucleotide
cacauuuucccucggagug

SEQ ID NO: 341081 - RNA, 19 nt, Artificial Sequence
  Description of Artificial Sequence: Synthetic oligonucleotide
uucagacuggaaagguggg

SEQ ID NO: 341082 - RNA, 19 nt, Artificial Sequence
  Description of Artificial Sequence: Synthetic oligonucleotide
auccuagagaaaaggaucg

SEQ ID NO: 341083 - RNA, 19 nt, Artificial Sequence
  Description of Artificial Sequence: Synthetic oligonucleotide
ugcgaaguaacgaguuucc

SEQ ID NO: 341084 - RNA, 19 nt, Artificial Sequence
  Description of Artificial Sequence: Synthetic oligonucleotide
ucuaacgaaacaucacgaa

SEQ ID NO: 341085 - RNA, 19 nt, Artificial Sequence
  Description of Artificial Sequence: Synthetic oligonucleotide
gaaggaaguccaccaagag

SEQ ID NO: 341086 - RNA, 19 nt, Artificial Sequence
  Description of Artificial Sequence: Synthetic oligonucleotide
ugcauguucgcagagcagc

SEQ ID NO: 341087 - RNA, 19 nt, Artificial Sequence
  Description of Artificial Sequence: Synthetic oligonucleotide
auuggcucgucuguuuucc

SEQ ID NO: 341088 - RNA, 19 nt, Artificial Sequence
  Description of Artificial Sequence: Synthetic oligonucleotide
cugucccugaacauaauac

SEQ ID NO: 341089 - RNA, 19 nt, Artificial Sequence
  Description of Artificial Sequence: Synthetic oligonucleotide
auagugucuaccugggaca

SEQ ID NO: 341090 - RNA, 19 nt, Artificial Sequence
  Description of Artificial Sequence: Synthetic oligonucleotide
accacuauccuagagaaaa

SEQ ID NO: 341091 - RNA, 19 nt, Artificial Sequence
  Description of Artificial Sequence: Synthetic oligonucleotide
accauacucucauugccuc

SEQ ID NO: 341092 - RNA, 19 nt, Artificial Sequence
  Description of Artificial Sequence: Synthetic oligonucleotide
uucccgacuguacauggag

SEQ ID NO: 341093 - RNA, 19 nt, Artificial Sequence
  Description of Artificial Sequence: Synthetic oligonucleotide
cauauuugccaaaccgagc

SEQ ID NO: 341094 - RNA, 19 nt, Artificial Sequence
  Description of Artificial Sequence: Synthetic oligonucleotide
ugagagucuaacgaaacau

SEQ ID NO: 341095 - RNA, 19 nt, Artificial Sequence
  Description of Artificial Sequence: Synthetic oligonucleotide
cuccuuguguaucaaagac

SEQ ID NO: 341096 - RNA, 19 nt, Artificial Sequence
  Description of Artificial Sequence: Synthetic oligonucleotide
uuuugagugugauggcagc

SEQ ID NO: 341097 - RNA, 19 nt, Artificial Sequence
  Description of Artificial Sequence: Synthetic oligonucleotide
cuacgaaagaagacaucgg

SEQ ID NO: 341098 - RNA, 19 nt, Artificial Sequence
  Description of Artificial Sequence: Synthetic oligonucleotide
aaugaguggcagccuguag

SEQ ID NO: 341099 - RNA, 19 nt, Artificial Sequence
  Description of Artificial Sequence: Synthetic oligonucleotide
cuuuagacacuucgauugg

SEQ ID NO: 341100 - RNA, 19 nt, Artificial Sequence
  Description of Artificial Sequence: Synthetic oligonucleotide
cuguuuaggcgauaaugag

SEQ ID NO: 341101 - RNA, 19 nt, Artificial Sequence
  Description of Artificial Sequence: Synthetic oligonucleotide
ucuuugcgaaguaacgagu

SEQ ID NO: 341102 - RNA, 19 nt, Artificial Sequence
  Description of Artificial Sequence: Synthetic oligonucleotide
agaccacuauccuagagaa

SEQ ID NO: 341103 - RNA, 19 nt, Artificial Sequence
  Description of Artificial Sequence: Synthetic oligonucleotide
ucuggcaaguauucgcuga

SEQ ID NO: 341104 - RNA, 19 nt, Artificial Sequence
  Description of Artificial Sequence: Synthetic oligonucleotide
ugacuauuaauuucaugua

SEQ ID NO: 341105 - RNA, 19 nt, Artificial Sequence
  Description of Artificial Sequence: Synthetic oligonucleotide
ggaaacguaacuguccagg

SEQ ID NO: 341106 - RNA, 19 nt, Artificial Sequence
  Description of Artificial Sequence: Synthetic oligonucleotide
aaccgagcagcguuguaug

SEQ ID NO: 341107 - RNA, 19 nt, Artificial Sequence
  Description of Artificial Sequence: Synthetic oligonucleotide
agcuaaugcagccaguuua

SEQ ID NO: 341108 - RNA, 19 nt, Artificial Sequence
  Description of Artificial Sequence: Synthetic oligonucleotide
aagacucagcugucucucg

SEQ ID NO: 341109 - RNA, 19 nt, Artificial Sequence
  Description of Artificial Sequence: Synthetic oligonucleotide
uaggcgauaaugaguggca

SEQ ID NO: 341110 - RNA, 19 nt, Artificial Sequence
  Description of Artificial Sequence: Synthetic oligonucleotide
aagacggcauucuccauaa

SEQ ID NO: 341111 - RNA, 19 nt, Artificial Sequence
  Description of Artificial Sequence: Synthetic oligonucleotide
aacaagccaacuuggugaa

SEQ ID NO: 341112 - RNA, 19 nt, Artificial Sequence
  Description of Artificial Sequence: Synthetic oligonucleotide
aaguaacgaguuuccauau

SEQ ID NO: 341113 - RNA, 19 nt, Artificial Sequence
  Description of Artificial Sequence: Synthetic oligonucleotide
aggucaucuggcuugaaaa

SEQ ID NO: 341114 - RNA, 19 nt, Artificial Sequence
  Description of Artificial Sequence: Synthetic oligonucleotide
cacuauccuagagaaaagg

SEQ ID NO: 341115 - RNA, 19 nt, Artificial Sequence
  Description of Artificial Sequence: Synthetic oligonucleotide
accgacauguaaucagguc

SEQ ID NO: 341116 - RNA, 19 nt, Artificial Sequence
  Description of Artificial Sequence: Synthetic oligonucleotide
cauuaaccgacauguaauc

SEQ ID NO: 341117 - RNA, 19 nt, Artificial Sequence
  Description of Artificial Sequence: Synthetic oligonucleotide
uaccggauggaccacuugu

SEQ ID NO: 341118 - RNA, 19 nt, Artificial Sequence
  Description of Artificial Sequence: Synthetic oligonucleotide
uaaugcagccaguuuacuc

SEQ ID NO: 341119 - RNA, 19 nt, Artificial Sequence
  Description of Artificial Sequence: Synthetic oligonucleotide
aggaucggaacaccgccac

SEQ ID NO: 341120 - RNA, 19 nt, Artificial Sequence
  Description of Artificial Sequence: Synthetic oligonucleotide
ugcaguacugaaggaaugc

SEQ ID NO: 341121 - RNA, 19 nt, Artificial Sequence
  Description of Artificial Sequence: Synthetic oligonucleotide
aaacugggucauguagcgc

SEQ ID NO: 341122 - RNA, 19 nt, Artificial Sequence
  Description of Artificial Sequence: Synthetic oligonucleotide
accucuacgaaagaagaca

SEQ ID NO: 341123 - RNA, 19 nt, Artificial Sequence
  Description of Artificial Sequence: Synthetic oligonucleotide
uacaaugcuccggagguug

SEQ ID NO: 341124 - RNA, 19 nt, Artificial Sequence
  Description of Artificial Sequence: Synthetic oligonucleotide
uuuaggcgauaaugagugg

SEQ ID NO: 341125 - RNA, 19 nt, Artificial Sequence
  Description of Artificial Sequence: Synthetic oligonucleotide
ucagcgauguguugcucag

SEQ ID NO: 341126 - RNA, 19 nt, Artificial Sequence
  Description of Artificial Sequence: Synthetic oligonucleotide
agagucuaacgaaacauca

SEQ ID NO: 341127 - RNA, 19 nt, Artificial Sequence
  Description of Artificial Sequence: Synthetic oligonucleotide
ugucccucugauuggauaa

SEQ ID NO: 341128 - RNA, 19 nt, Artificial Sequence
  Description of Artificial Sequence: Synthetic oligonucleotide
ugcggauaccggauggacc

SEQ ID NO: 341129 - RNA, 19 nt, Artificial Sequence
  Description of Artificial Sequence: Synthetic oligonucleotide
cugucucucggucagcagc

SEQ ID NO: 341130 - RNA, 19 nt, Artificial Sequence
  Description of Artificial Sequence: Synthetic oligonucleotide
auuugccaacuguccaugg

SEQ ID NO: 341131 - RNA, 19 nt, Artificial Sequence
  Description of Artificial Sequence: Synthetic oligonucleotide
ugagccuuuucuaauucuu

SEQ ID NO: 341132 - RNA, 19 nt, Artificial Sequence
  Description of Artificial Sequence: Synthetic oligonucleotide
gaagcgcucuugcucagcc

SEQ ID NO: 341133 - RNA, 19 nt, Artificial Sequence
  Description of Artificial Sequence: Synthetic oligonucleotide
cauugcacuaagacucagc

SEQ ID NO: 341134 - RNA, 19 nt, Artificial Sequence
  Description of Artificial Sequence: Synthetic oligonucleotide
aaaccgagcagcguuguau

SEQ ID NO: 341135 - RNA, 19 nt, Artificial Sequence
  Description of Artificial Sequence: Synthetic oligonucleotide
cacccaaaaugccaucucc

SEQ ID NO: 341136 - RNA, 19 nt, Artificial Sequence
  Description of Artificial Sequence: Synthetic oligonucleotide
uacauggagcuucuguuua

SEQ ID NO: 341137 - RNA, 19 nt, Artificial Sequence
  Description of Artificial Sequence: Synthetic oligonucleotide
aguuuacucaagccaagaa

SEQ ID NO: 341138 - RNA, 19 nt, Artificial Sequence
  Description of Artificial Sequence: Synthetic oligonucleotide
ucgauuggaucaucuuugc

SEQ ID NO: 341139 - RNA, 19 nt, Artificial Sequence
  Description of Artificial Sequence: Synthetic oligonucleotide
cuagagaaaaggaucggaa

SEQ ID NO: 341140 - RNA, 19 nt, Artificial Sequence
  Description of Artificial Sequence: Synthetic oligonucleotide
gacggcauucuccauaaaa

SEQ ID NO: 341141 - RNA, 19 nt, Artificial Sequence
  Description of Artificial Sequence: Synthetic oligonucleotide
ucccguggagcacacgaag

SEQ ID NO: 341142 - RNA, 19 nt, Artificial Sequence
  Description of Artificial Sequence: Synthetic oligonucleotide
ugucucucggucagcagcu

SEQ ID NO: 341143 - RNA, 19 nt, Artificial Sequence
  Description of Artificial Sequence: Synthetic oligonucleotide
gaguccgaauccaagucag

SEQ ID NO: 341144 - RNA, 19 nt, Artificial Sequence
  Description of Artificial Sequence: Synthetic oligonucleotide
gaacaccgccacaagaacc

SEQ ID NO: 341145 - RNA, 19 nt, Artificial Sequence
  Description of Artificial Sequence: Synthetic oligonucleotide
caugcuggcgcaugauugc

SEQ ID NO: 341146 - RNA, 19 nt, Artificial Sequence
  Description of Artificial Sequence: Synthetic oligonucleotide
ggaaagguggguuguacug

SEQ ID NO: 341147 - RNA, 19 nt, Artificial Sequence
  Description of Artificial Sequence: Synthetic oligonucleotide
guacugaguaacuucuaca

SEQ ID NO: 341148 - RNA, 19 nt, Artificial Sequence
  Description of Artificial Sequence: Synthetic oligonucleotide
ucugaaaggucugaagcua

SEQ ID NO: 341149 - RNA, 19 nt, Artificial Sequence
  Description of Artificial Sequence: Synthetic oligonucleotide
aaccauacucucauugccu

SEQ ID NO: 341150 - RNA, 19 nt, Artificial Sequence
  Description of Artificial Sequence: Synthetic oligonucleotide
uuuagacacuucgauugga

SEQ ID NO: 341151 - RNA, 19 nt, Artificial Sequence
  Description of Artificial Sequence: Synthetic oligonucleotide
ggagguugcuaucagcuug

SEQ ID NO: 341152 - RNA, 19 nt, Artificial Sequence
  Description of Artificial Sequence: Synthetic oligonucleotide
aacuucuacagugaccgua

SEQ ID NO: 341153 - RNA, 19 nt, Artificial Sequence
  Description of Artificial Sequence: Synthetic oligonucleotide
acguaacuguccaggaagc

SEQ ID NO: 341154 - RNA, 19 nt, Artificial Sequence
  Description of Artificial Sequence: Synthetic oligonucleotide
uugcgaaguaacgaguuuc

SEQ ID NO: 341155 - RNA, 19 nt, Artificial Sequence
  Description of Artificial Sequence: Synthetic oligonucleotide
ucuaacucagaguccgaau

SEQ ID NO: 341156 - RNA, 19 nt, Artificial Sequence
  Description of Artificial Sequence: Synthetic oligonucleotide
ucugacauuugguuaccau

SEQ ID NO: 341157 - RNA, 19 nt, Artificial Sequence
  Description of Artificial Sequence: Synthetic oligonucleotide
auuaaccgacauguaauca

SEQ ID NO: 341158 - RNA, 19 nt, Artificial Sequence
  Description of Artificial Sequence: Synthetic oligonucleotide
uccuagagaaaaggaucgg

SEQ ID NO: 341159 - RNA, 19 nt, Artificial Sequence
  Description of Artificial Sequence: Synthetic oligonucleotide
agacaauaauuugccccgc

SEQ ID NO: 341160 - RNA, 19 nt, Artificial Sequence
  Description of Artificial Sequence: Synthetic oligonucleotide
aagacaucggcaggaguca

SEQ ID NO: 341161 - RNA, 19 nt, Artificial Sequence
  Description of Artificial Sequence: Synthetic oligonucleotide
uggguuguacugaguaacu

SEQ ID NO: 341162 - RNA, 19 nt, Artificial Sequence
  Description of Artificial Sequence: Synthetic oligonucleotide
agucaacacaggcauugca

SEQ ID NO: 341163 - RNA, 19 nt, Artificial Sequence
  Description of Artificial Sequence: Synthetic oligonucleotide
uagaagcaacaauuucuac

SEQ ID NO: 341164 - RNA, 19 nt, Artificial Sequence
  Description of Artificial Sequence: Synthetic oligonucleotide
aguucggaucuuuucugca

SEQ ID NO: 341165 - RNA, 19 nt, Artificial Sequence
  Description of Artificial Sequence: Synthetic oligonucleotide
cugaacuagaccagucauc

SEQ ID NO: 341166 - RNA, 19 nt, Artificial Sequence
  Description of Artificial Sequence: Synthetic oligonucleotide
gcaacaauuucuacaaaug

SEQ ID NO: 341167 - RNA, 19 nt, Artificial Sequence
  Description of Artificial Sequence: Synthetic oligonucleotide
uagacacuucgauuggauc

SEQ ID NO: 341168 - RNA, 19 nt, Artificial Sequence
  Description of Artificial Sequence: Synthetic oligonucleotide
uaccaacgaaacagaaagu

SEQ ID NO: 341169 - RNA, 19 nt, Artificial Sequence
  Description of Artificial Sequence: Synthetic oligonucleotide
aaguaaggauuggauuuca

SEQ ID NO: 341170 - RNA, 19 nt, Artificial Sequence
  Description of Artificial Sequence: Synthetic oligonucleotide
gagagucuaacgaaacauc

SEQ ID NO: 341171 - RNA, 19 nt, Artificial Sequence
  Description of Artificial Sequence: Synthetic oligonucleotide
agucaucucucugcagagc

SEQ ID NO: 341172 - RNA, 19 nt, Artificial Sequence
  Description of Artificial Sequence: Synthetic oligonucleotide
uuugcgaaguaacgaguuu

SEQ ID NO: 341173 - RNA, 19 nt, Artificial Sequence
  Description of Artificial Sequence: Synthetic oligonucleotide
ggucaucuggcuugaaaag

SEQ ID NO: 341174 - RNA, 19 nt, Artificial Sequence
  Description of Artificial Sequence: Synthetic oligonucleotide
gguuguacugaguaacuuc

SEQ ID NO: 341175 - RNA, 19 nt, Artificial Sequence
  Description of Artificial Sequence: Synthetic oligonucleotide
uuccccuugugguucuucc

SEQ ID NO: 341176 - RNA, 19 nt, Artificial Sequence
  Description of Artificial Sequence: Synthetic oligonucleotide
uguucgcagagcagcaguc

SEQ ID NO: 341177 - RNA, 19 nt, Artificial Sequence
  Description of Artificial Sequence: Synthetic oligonucleotide
ugccaaaccgagcagcguu

SEQ ID NO: 341178 - RNA, 19 nt, Artificial Sequence
  Description of Artificial Sequence: Synthetic oligonucleotide
cagcguguccucugaaagg

SEQ ID NO: 341179 - RNA, 19 nt, Artificial Sequence
  Description of Artificial Sequence: Synthetic oligonucleotide
ggauaucaaagucacagua

SEQ ID NO: 341180 - RNA, 19 nt, Artificial Sequence
  Description of Artificial Sequence: Synthetic oligonucleotide
ucccgacuguacauggagc

SEQ ID NO: 341181 - RNA, 19 nt, Artificial Sequence
  Description of Artificial Sequence: Synthetic oligonucleotide
acaauaauuugccccgcuu

SEQ ID NO: 341182 - RNA, 19 nt, Artificial Sequence
  Description of Artificial Sequence: Synthetic oligonucleotide
gauaagagcccagacgucu

SEQ ID NO: 341183 - RNA, 19 nt, Artificial Sequence
  Description of Artificial Sequence: Synthetic oligonucleotide
guggguuguacugaguaac

SEQ ID NO: 341184 - RNA, 19 nt, Artificial Sequence
  Description of Artificial Sequence: Synthetic oligonucleotide
acgaaagaagacaucggca

SEQ ID NO: 341185 - RNA, 19 nt, Artificial Sequence
  Description of Artificial Sequence: Synthetic oligonucleotide
ugugguucuucccgacugu

SEQ ID NO: 341186 - RNA, 19 nt, Artificial Sequence
  Description of Artificial Sequence: Synthetic oligonucleotide
uccgaauccaagucaguuu

SEQ ID NO: 341187 - RNA, 19 nt, Artificial Sequence
  Description of Artificial Sequence: Synthetic oligonucleotide
cagaccacuauccuagaga

SEQ ID NO: 341188 - RNA, 19 nt, Artificial Sequence
  Description of Artificial Sequence: Synthetic oligonucleotide
ugaaaggucugaagcuaau

SEQ ID NO: 341189 - RNA, 19 nt, Artificial Sequence
  Description of Artificial Sequence: Synthetic oligonucleotide
cuggcaaguauucgcugag

SEQ ID NO: 341190 - RNA, 19 nt, Artificial Sequence
  Description of Artificial Sequence: Synthetic oligonucleotide
acuagaccagucaucucuc

SEQ ID NO: 341191 - RNA, 19 nt, Artificial Sequence
  Description of Artificial Sequence: Synthetic oligonucleotide
caucugaacuagaccaguc

SEQ ID NO: 341192 - RNA, 19 nt, Artificial Sequence
  Description of Artificial Sequence: Synthetic oligonucleotide
uauugacauggaucgccac

SEQ ID NO: 341193 - RNA, 19 nt, Artificial Sequence
  Description of Artificial Sequence: Synthetic oligonucleotide
gaaagguggguuguacuga

SEQ ID NO: 341194 - RNA, 19 nt, Artificial Sequence
  Description of Artificial Sequence: Synthetic oligonucleotide
gcuguaucuuucuugguca

SEQ ID NO: 341195 - RNA, 19 nt, Artificial Sequence
  Description of Artificial Sequence: Synthetic oligonucleotide
acgaaacaucacgaagaac

SEQ ID NO: 341196 - RNA, 19 nt, Artificial Sequence
  Description of Artificial Sequence: Synthetic oligonucleotide
gcgauaaugaguggcagcc

SEQ ID NO: 341197 - RNA, 19 nt, Artificial Sequence
  Description of Artificial Sequence: Synthetic oligonucleotide
cauggagcuucuguuuagg

SEQ ID NO: 341198 - RNA, 19 nt, Artificial Sequence
  Description of Artificial Sequence: Synthetic oligonucleotide
gucauguagcgcuggaguc

SEQ ID NO: 341199 - RNA, 19 nt, Artificial Sequence
  Description of Artificial Sequence: Synthetic oligonucleotide
uugcugugcggauaccgga

SEQ ID NO: 341200 - RNA, 19 nt, Artificial Sequence
  Description of Artificial Sequence: Synthetic oligonucleotide
agugugauggcagcugaca

SEQ ID NO: 341201 - RNA, 19 nt, Artificial Sequence
  Description of Artificial Sequence: Synthetic oligonucleotide
uucuagauugcuguaucuu

SEQ ID NO: 341202 - RNA, 19 nt, Artificial Sequence
  Description of Artificial Sequence: Synthetic oligonucleotide
cugugcggauaccggaugg

SEQ ID NO: 341203 - RNA, 19 nt, Artificial Sequence
  Description of Artificial Sequence: Synthetic oligonucleotide
gcugcauucaccaggucag

SEQ ID NO: 341204 - RNA, 19 nt, Artificial Sequence
  Description of Artificial Sequence: Synthetic oligonucleotide
agaagacaucggcaggagu

SEQ ID NO: 341205 - RNA, 19 nt, Artificial Sequence
  Description of Artificial Sequence: Synthetic oligonucleotide
aagcuaaugcagccaguuu

SEQ ID NO: 341206 - RNA, 19 nt, Artificial Sequence
  Description of Artificial Sequence: Synthetic oligonucleotide
ugcauucaccaggucaggc

SEQ ID NO: 341207 - RNA, 19 nt, Artificial Sequence
  Description of Artificial Sequence: Synthetic oligonucleotide
uucccucggagugacagac

SEQ ID NO: 341208 - RNA, 19 nt, Artificial Sequence
  Description of Artificial Sequence: Synthetic oligonucleotide
gacauggaucgccaccuca

SEQ ID NO: 341209 - RNA, 19 nt, Artificial Sequence
  Description of Artificial Sequence: Synthetic oligonucleotide
gauuucaggcuucccagcu

SEQ ID NO: 341210 - RNA, 19 nt, Artificial Sequence
  Description of Artificial Sequence: Synthetic oligonucleotide
acauggaucgccaccucag

SEQ ID NO: 341211 - RNA, 19 nt, Artificial Sequence
  Description of Artificial Sequence: Synthetic oligonucleotide
agcguguccucugaaaggu

SEQ ID NO: 341212 - RNA, 19 nt, Artificial Sequence
  Description of Artificial Sequence: Synthetic oligonucleotide
gagcccagacgucuaaaca

SEQ ID NO: 341213 - RNA, 19 nt, Artificial Sequence
  Description of Artificial Sequence: Synthetic oligonucleotide
acucgcagauagugucuac

SEQ ID NO: 341214 - RNA, 19 nt, Artificial Sequence
  Description of Artificial Sequence: Synthetic oligonucleotide
uccggagguugcuaucagc

SEQ ID NO: 341215 - RNA, 19 nt, Artificial Sequence
  Description of Artificial Sequence: Synthetic oligonucleotide
uaucugacauuugguuacc

SEQ ID NO: 341216 - RNA, 19 nt, Artificial Sequence
  Description of Artificial Sequence: Synthetic oligonucleotide
gucuaacgaaacaucacga

SEQ ID NO: 341217 - RNA, 19 nt, Artificial Sequence
  Description of Artificial Sequence: Synthetic oligonucleotide
ugaggacuguauugacaug

SEQ ID NO: 341218 - RNA, 19 nt, Artificial Sequence
  Description of Artificial Sequence: Synthetic oligonucleotide
guaacgaguuuccauauuu

SEQ ID NO: 341219 - RNA, 19 nt, Artificial Sequence
  Description of Artificial Sequence: Synthetic oligonucleotide
agacgucuaaacaagccaa

SEQ ID NO: 341220 - RNA, 19 nt, Artificial Sequence
  Description of Artificial Sequence: Synthetic oligonucleotide
cuugaggguacaccaucug

SEQ ID NO: 341221 - RNA, 19 nt, Artificial Sequence
  Description of Artificial Sequence: Synthetic oligonucleotide
agcagucggguggucaugg

SEQ ID NO: 341222 - RNA, 19 nt, Artificial Sequence
  Description of Artificial Sequence: Synthetic oligonucleotide
agucggguggucaugggug

SEQ ID NO: 341223 - RNA, 19 nt, Artificial Sequence
  Description of Artificial Sequence: Synthetic oligonucleotide
aagcagucaaucagugcca

SEQ ID NO: 341224 - RNA, 19 nt, Artificial Sequence
  Description of Artificial Sequence: Synthetic oligonucleotide
caggcacucgcagauagug

SEQ ID NO: 341225 - RNA, 19 nt, Artificial Sequence
  Description of Artificial Sequence: Synthetic oligonucleotide
uucuucccgacuguacaug

SEQ ID NO: 341226 - RNA, 19 nt, Artificial Sequence
  Description of Artificial Sequence: Synthetic oligonucleotide
cccaccgugggucugaggc

SEQ ID NO: 341227 - RNA, 19 nt, Artificial Sequence
  Description of Artificial Sequence: Synthetic oligonucleotide
ccgaauccaagucaguuug

SEQ ID NO: 341228 - RNA, 19 nt, Artificial Sequence
  Description of Artificial Sequence: Synthetic oligonucleotide
gucccugaacauaauacuc

SEQ ID NO: 341229 - RNA, 19 nt, Artificial Sequence
  Description of Artificial Sequence: Synthetic oligonucleotide
gcuuuuagaacaaacucaa

SEQ ID NO: 341230 - RNA, 19 nt, Artificial Sequence
  Description of Artificial Sequence: Synthetic oligonucleotide
gaucggaacaccgccacaa

SEQ ID NO: 341231 - RNA, 19 nt, Artificial Sequence
  Description of Artificial Sequence: Synthetic oligonucleotide
acuucgauuggaucaucuu

SEQ ID NO: 341232 - RNA, 19 nt, Artificial Sequence
  Description of Artificial Sequence: Synthetic oligonucleotide
cauggaucgccaccucagc

SEQ ID NO: 341233 - RNA, 19 nt, Artificial Sequence
  Description of Artificial Sequence: Synthetic oligonucleotide
uguagcgcuggagucggga

SEQ ID NO: 341234 - RNA, 19 nt, Artificial Sequence
  Description of Artificial Sequence: Synthetic oligonucleotide
aaccgacauguaaucaggu

SEQ ID NO: 341235 - RNA, 19 nt, Artificial Sequence
  Description of Artificial Sequence: Synthetic oligonucleotide
acauguaaucaggucuuca

SEQ ID NO: 341236 - RNA, 19 nt, Artificial Sequence
  Description of Artificial Sequence: Synthetic oligonucleotide
ugucuaacucagaguccga

SEQ ID NO: 341237 - RNA, 19 nt, Artificial Sequence
  Description of Artificial Sequence: Synthetic oligonucleotide
cucauugccucguccacca

SEQ ID NO: 341238 - RNA, 19 nt, Artificial Sequence
  Description of Artificial Sequence: Synthetic oligonucleotide
acgucuaaacaagccaacu

SEQ ID NO: 341239 - RNA, 19 nt, Artificial Sequence
  Description of Artificial Sequence: Synthetic oligonucleotide
accgccacaagaaccagca

SEQ ID NO: 341240 - RNA, 19 nt, Artificial Sequence
  Description of Artificial Sequence: Synthetic oligonucleotide
ggacugauucugcccaccg

SEQ ID NO: 341241 - RNA, 19 nt, Artificial Sequence
  Description of Artificial Sequence: Synthetic oligonucleotide
aguaacgaguuuccauauu

SEQ ID NO: 341242 - RNA, 19 nt, Artificial Sequence
  Description of Artificial Sequence: Synthetic oligonucleotide
ugcugugcggauaccggau

SEQ ID NO: 341243 - RNA, 19 nt, Artificial Sequence
  Description of Artificial Sequence: Synthetic oligonucleotide
gcaaguauucgcugagcug

SEQ ID NO: 341244 - RNA, 19 nt, Artificial Sequence
  Description of Artificial Sequence: Synthetic oligonucleotide
aaggaucggaacaccgcca

SEQ ID NO: 341245 - RNA, 19 nt, Artificial Sequence
  Description of Artificial Sequence: Synthetic oligonucleotide
ggcaccauuaaccgacaug

SEQ ID NO: 341246 - RNA, 19 nt, Artificial Sequence
  Description of Artificial Sequence: Synthetic oligonucleotide
agcacggcccaaaucuuuc

SEQ ID NO: 341247 - RNA, 19 nt, Artificial Sequence
  Description of Artificial Sequence: Synthetic oligonucleotide
ggcacucgcagauaguguc

SEQ ID NO: 341248 - RNA, 19 nt, Artificial Sequence
  Description of Artificial Sequence: Synthetic oligonucleotide
uccccuugugguucuuccc

SEQ ID NO: 341249 - RNA, 19 nt, Artificial Sequence
  Description of Artificial Sequence: Synthetic oligonucleotide
agcagcguuguaugagccu

SEQ ID NO: 341250 - RNA, 19 nt, Artificial Sequence
  Description of Artificial Sequence: Synthetic oligonucleotide
gauggaccacuuguagcug

SEQ ID NO: 341251 - RNA, 19 nt, Artificial Sequence
  Description of Artificial Sequence: Synthetic oligonucleotide
uucauguagccagcugaga

SEQ ID NO: 341252 - RNA, 19 nt, Artificial Sequence
  Description of Artificial Sequence: Synthetic oligonucleotide
ggcgcaugauugcugugcg

SEQ ID NO: 341253 - RNA, 19 nt, Artificial Sequence
  Description of Artificial Sequence: Synthetic oligonucleotide
acuucuacagugaccguau

SEQ ID NO: 341254 - RNA, 19 nt, Artificial Sequence
  Description of Artificial Sequence: Synthetic oligonucleotide
cagucaaucagugccacaa

SEQ ID NO: 341255 - RNA, 19 nt, Artificial Sequence
  Description of Artificial Sequence: Synthetic oligonucleotide
ugaccguaucugacauuug

SEQ ID NO: 341256 - RNA, 19 nt, Artificial Sequence
  Description of Artificial Sequence: Synthetic oligonucleotide
ggauggaccacuuguagcu

SEQ ID NO: 341257 - RNA, 19 nt, Artificial Sequence
  Description of Artificial Sequence: Synthetic oligonucleotide
uuggcaccauuaaccgaca

SEQ ID NO: 341258 - RNA, 19 nt, Artificial Sequence
  Description of Artificial Sequence: Synthetic oligonucleotide
uagugucuaccugggacac

SEQ ID NO: 341259 - RNA, 19 nt, Artificial Sequence
  Description of Artificial Sequence: Synthetic oligonucleotide
gcuccauuacaaugcuccg

SEQ ID NO: 341260 - RNA, 19 nt, Artificial Sequence
  Description of Artificial Sequence: Synthetic oligonucleotide
cucuggcaaguauucgcug

SEQ ID NO: 341261 - RNA, 19 nt, Artificial Sequence
  Description of Artificial Sequence: Synthetic oligonucleotide
guauugacauggaucgcca

SEQ ID NO: 341262 - RNA, 19 nt, Artificial Sequence
  Description of Artificial Sequence: Synthetic oligonucleotide
gcggauaccggauggacca

SEQ ID NO: 341263 - RNA, 19 nt, Artificial Sequence
  Description of Artificial Sequence: Synthetic oligonucleotide
gugacagacaccagaccac

SEQ ID NO: 341264 - RNA, 19 nt, Artificial Sequence
  Description of Artificial Sequence: Synthetic oligonucleotide
gagcagcguuguaugagcc

SEQ ID NO: 341265 - RNA, 19 nt, Artificial Sequence
  Description of Artificial Sequence: Synthetic oligonucleotide
auaccggauggaccacuug

SEQ ID NO: 341266 - RNA, 19 nt, Artificial Sequence
  Description of Artificial Sequence: Synthetic oligonucleotide
ggauuucaggcuucccagc

SEQ ID NO: 341267 - RNA, 19 nt, Artificial Sequence
  Description of Artificial Sequence: Synthetic oligonucleotide
ugugcggauaccggaugga

SEQ ID NO: 341268 - RNA, 19 nt, Artificial Sequence
  Description of Artificial Sequence: Synthetic oligonucleotide
acauuuucccucggaguga

SEQ ID NO: 341269 - RNA, 19 nt, Artificial Sequence
  Description of Artificial Sequence: Synthetic oligonucleotide
gaacuagaccagucaucuc

SEQ ID NO: 341270 - RNA, 19 nt, Artificial Sequence
  Description of Artificial Sequence: Synthetic oligonucleotide
ucccucugauuggauaaga

SEQ ID NO: 341271 - RNA, 19 nt, Artificial Sequence
  Description of Artificial Sequence: Synthetic oligonucleotide
ggaacaccgccacaagaac

SEQ ID NO: 341272 - RNA, 19 nt, Artificial Sequence
  Description of Artificial Sequence: Synthetic oligonucleotide
ugagcacggcccaaaucuu

SEQ ID NO: 341273 - RNA, 19 nt, Artificial Sequence
  Description of Artificial Sequence: Synthetic oligonucleotide
gacaauaauuugccccgcu

SEQ ID NO: 341274 - RNA, 19 nt, Artificial Sequence
  Description of Artificial Sequence: Synthetic oligonucleotide
gaucccaugcuggcgcaug

SEQ ID NO: 341275 - RNA, 19 nt, Artificial Sequence
  Description of Artificial Sequence: Synthetic oligonucleotide
aaugcuccggagguugcua

SEQ ID NO: 341276 - RNA, 19 nt, Artificial Sequence
  Description of Artificial Sequence: Synthetic oligonucleotide
guagcgcuggagucgggac

SEQ ID NO: 341277 - RNA, 19 nt, Artificial Sequence
  Description of Artificial Sequence: Synthetic oligonucleotide
aaguauucgcugagcugga

SEQ ID NO: 341278 - RNA, 19 nt, Artificial Sequence
  Description of Artificial Sequence: Synthetic oligonucleotide
cuggguagucauccaccag

SEQ ID NO: 341279 - RNA, 19 nt, Artificial Sequence
  Description of Artificial Sequence: Synthetic oligonucleotide
guugcucagcccaggggcc

SEQ ID NO: 341280 - RNA, 19 nt, Artificial Sequence
  Description of Artificial Sequence: Synthetic oligonucleotide
uaacuucuacagugaccgu

SEQ ID NO: 341281 - RNA, 19 nt, Artificial Sequence
  Description of Artificial Sequence: Synthetic oligonucleotide
gaagcuaaugcagccaguu

SEQ ID NO: 341282 - RNA, 19 nt, Artificial Sequence
  Description of Artificial Sequence: Synthetic oligonucleotide
ugcuugaaguagguccuuc

SEQ ID NO: 341283 - RNA, 19 nt, Artificial Sequence
  Description of Artificial Sequence: Synthetic oligonucleotide
caccaggucaggcagccga

SEQ ID NO: 341284 - RNA, 19 nt, Artificial Sequence
  Description of Artificial Sequence: Synthetic oligonucleotide
cuucgauuggaucaucuuu

SEQ ID NO: 341285 - RNA, 19 nt, Artificial Sequence
  Description of Artificial Sequence: Synthetic oligonucleotide
cacaagcugcuccauuaca

SEQ ID NO: 341286 - RNA, 19 nt, Artificial Sequence
  Description of Artificial Sequence: Synthetic oligonucleotide
ccauacucucauugccucg

SEQ ID NO: 341287 - RNA, 19 nt, Artificial Sequence
  Description of Artificial Sequence: Synthetic oligonucleotide
gcuggucugcuugaaguag

SEQ ID NO: 341288 - RNA, 19 nt, Artificial Sequence
  Description of Artificial Sequence: Synthetic oligonucleotide
gaauaggccaaagacucuu

SEQ ID NO: 341289 - RNA, 19 nt, Artificial Sequence
  Description of Artificial Sequence: Synthetic oligonucleotide
cacaagaaccagcacccaa

SEQ ID NO: 341290 - RNA, 19 nt, Artificial Sequence
  Description of Artificial Sequence: Synthetic oligonucleotide
ggucauguagcgcuggagu

SEQ ID NO: 341291 - RNA, 19 nt, Artificial Sequence
  Description of Artificial Sequence: Synthetic oligonucleotide
cccucugauuggauaagag

SEQ ID NO: 341292 - RNA, 19 nt, Artificial Sequence
  Description of Artificial Sequence: Synthetic oligonucleotide
caccucuggcaaguauucg

SEQ ID NO: 341293 - RNA, 19 nt, Artificial Sequence
  Description of Artificial Sequence: Synthetic oligonucleotide
gucuuuagacacuucgauu

SEQ ID NO: 341294 - RNA, 19 nt, Artificial Sequence
  Description of Artificial Sequence: Synthetic oligonucleotide
cuuugcgaaguaacgaguu

SEQ ID NO: 341295 - RNA, 19 nt, Artificial Sequence
  Description of Artificial Sequence: Synthetic oligonucleotide
cuucuagauugcuguaucu

SEQ ID NO: 341296 - RNA, 19 nt, Artificial Sequence
  Description of Artificial Sequence: Synthetic oligonucleotide
ucgcugagcuggaugccau

SEQ ID NO: 341297 - RNA, 19 nt, Artificial Sequence
  Description of Artificial Sequence: Synthetic oligonucleotide
cuugcagcguguccucuga

SEQ ID NO: 341298 - RNA, 19 nt, Artificial Sequence
  Description of Artificial Sequence: Synthetic oligonucleotide
gggaaacguaacuguccag

SEQ ID NO: 341299 - RNA, 19 nt, Artificial Sequence
  Description of Artificial Sequence: Synthetic oligonucleotide
gcuugaaguagguccuuca

SEQ ID NO: 341300 - RNA, 19 nt, Artificial Sequence
  Description of Artificial Sequence: Synthetic oligonucleotide
guaugagccuuuucuaauu

SEQ ID NO: 341301 - RNA, 19 nt, Artificial Sequence
  Description of Artificial Sequence: Synthetic oligonucleotide
uuggcucgucuguuuuccu

SEQ ID NO: 341302 - RNA, 19 nt, Artificial Sequence
  Description of Artificial Sequence: Synthetic oligonucleotide
ggcaaguauucgcugagcu

SEQ ID NO: 341303 - RNA, 19 nt, Artificial Sequence
  Description of Artificial Sequence: Synthetic oligonucleotide
acacuucgauuggaucauc

SEQ ID NO: 341304 - RNA, 19 nt, Artificial Sequence
  Description of Artificial Sequence: Synthetic oligonucleotide
gguaccaacgaaacagaaa

SEQ ID NO: 341305 - RNA, 19 nt, Artificial Sequence
  Description of Artificial Sequence: Synthetic oligonucleotide
gucuuaucuucaugggcua

SEQ ID NO: 341306 - RNA, 19 nt, Artificial Sequence
  Description of Artificial Sequence: Synthetic oligonucleotide
cugcauucaccaggucagg

SEQ ID NO: 341307 - RNA, 19 nt, Artificial Sequence
  Description of Artificial Sequence: Synthetic oligonucleotide
aggacuguauugacaugga

SEQ ID NO: 341308 - RNA, 19 nt, Artificial Sequence
  Description of Artificial Sequence: Synthetic oligonucleotide
cuauagacuucagcuggga

SEQ ID NO: 341309 - RNA, 19 nt, Artificial Sequence
  Description of Artificial Sequence: Synthetic oligonucleotide
ccacuauccuagagaaaag

SEQ ID NO: 341310 - RNA, 19 nt, Artificial Sequence
  Description of Artificial Sequence: Synthetic oligonucleotide
ucccucggagugacagaca

SEQ ID NO: 341311 - RNA, 19 nt, Artificial Sequence
  Description of Artificial Sequence: Synthetic oligonucleotide
uugaaaaguuuggcaccau

SEQ ID NO: 341312 - RNA, 19 nt, Artificial Sequence
  Description of Artificial Sequence: Synthetic oligonucleotide
gacuucagcugggaaacgu

SEQ ID NO: 341313 - RNA, 19 nt, Artificial Sequence
  Description of Artificial Sequence: Synthetic oligonucleotide
gugaccguaucugacauuu

SEQ ID NO: 341314 - RNA, 19 nt, Artificial Sequence
  Description of Artificial Sequence: Synthetic oligonucleotide
cuccggagguugcuaucag

SEQ ID NO: 341315 - RNA, 19 nt, Artificial Sequence
  Description of Artificial Sequence: Synthetic oligonucleotide
aucugacauuugguuacca

SEQ ID NO: 341316 - RNA, 19 nt, Artificial Sequence
  Description of Artificial Sequence: Synthetic oligonucleotide
cugcuccauuacaaugcuc

SEQ ID NO: 341317 - RNA, 19 nt, Artificial Sequence
  Description of Artificial Sequence: Synthetic oligonucleotide
gcccagacgucuaaacaag

SEQ ID NO: 341318 - RNA, 19 nt, Artificial Sequence
  Description of Artificial Sequence: Synthetic oligonucleotide
agugaccguaucugacauu

SEQ ID NO: 341319 - RNA, 19 nt, Artificial Sequence
  Description of Artificial Sequence: Synthetic oligonucleotide
caccaacugaauaggccaa

SEQ ID NO: 341320 - RNA, 19 nt, Artificial Sequence
  Description of Artificial Sequence: Synthetic oligonucleotide
guacauggagcuucuguuu

SEQ ID NO: 341321 - RNA, 19 nt, Artificial Sequence
  Description of Artificial Sequence: Synthetic oligonucleotide
gcugagaugcucaugggcu

SEQ ID NO: 341322 - RNA, 19 nt, Artificial Sequence
  Description of Artificial Sequence: Synthetic oligonucleotide
ccgacauguaaucaggucu

SEQ ID NO: 341323 - RNA, 19 nt, Artificial Sequence
  Description of Artificial Sequence: Synthetic oligonucleotide
cggauggaccacuuguagc

SEQ ID NO: 341324 - RNA, 19 nt, Artificial Sequence
  Description of Artificial Sequence: Synthetic oligonucleotide
ccggauggaccacuuguag

SEQ ID NO: 341325 - RNA, 19 nt, Artificial Sequence
  Description of Artificial Sequence: Synthetic oligonucleotide
ugcuccggagguugcuauc

SEQ ID NO: 341326 - RNA, 19 nt, Artificial Sequence
  Description of Artificial Sequence: Synthetic oligonucleotide
gugcggauaccggauggac

SEQ ID NO: 341327 - RNA, 19 nt, Artificial Sequence
  Description of Artificial Sequence: Synthetic oligonucleotide
uugcagcguguccucugaa

SEQ ID NO: 341328 - RNA, 19 nt, Artificial Sequence
  Description of Artificial Sequence: Synthetic oligonucleotide
gugucccucugauuggaua

SEQ ID NO: 341329 - RNA, 19 nt, Artificial Sequence
  Description of Artificial Sequence: Synthetic oligonucleotide
cuucccgacuguacaugga

SEQ ID NO: 341330 - RNA, 19 nt, Artificial Sequence
  Description of Artificial Sequence: Synthetic oligonucleotide
cauaucugucccugaacau

SEQ ID NO: 341331 - RNA, 19 nt, Artificial Sequence
  Description of Artificial Sequence: Synthetic oligonucleotide
acacucccucuuguucagg

SEQ ID NO: 341332 - RNA, 19 nt, Artificial Sequence
  Description of Artificial Sequence: Synthetic oligonucleotide
ccauuaaccgacauguaau

SEQ ID NO: 341333 - RNA, 19 nt, Artificial Sequence
  Description of Artificial Sequence: Synthetic oligonucleotide
cacuucgauuggaucaucu

SEQ ID NO: 341334 - RNA, 19 nt, Artificial Sequence
  Description of Artificial Sequence: Synthetic oligonucleotide
gcugugcggauaccggaug

SEQ ID NO: 341335 - RNA, 19 nt, Artificial Sequence
  Description of Artificial Sequence: Synthetic oligonucleotide
auaagagcccagacgucua

SEQ ID NO: 341336 - RNA, 19 nt, Artificial Sequence
  Description of Artificial Sequence: Synthetic oligonucleotide
ccagaccacuauccuagag

SEQ ID NO: 341337 - RNA, 19 nt, Artificial Sequence
  Description of Artificial Sequence: Synthetic oligonucleotide
ccguggagcacacgaagac

SEQ ID NO: 341338 - RNA, 19 nt, Artificial Sequence
  Description of Artificial Sequence: Synthetic oligonucleotide
ccuagagaaaaggaucgga

SEQ ID NO: 341339 - RNA, 19 nt, Artificial Sequence
  Description of Artificial Sequence: Synthetic oligonucleotide
aguucccguggagcacacg

SEQ ID NO: 341340 - RNA, 19 nt, Artificial Sequence
  Description of Artificial Sequence: Synthetic oligonucleotide
caccucagcccacuccuga

SEQ ID NO: 341341 - RNA, 19 nt, Artificial Sequence
  Description of Artificial Sequence: Synthetic oligonucleotide
aguauucgcugagcuggau

SEQ ID NO: 341342 - RNA, 19 nt, Artificial Sequence
  Description of Artificial Sequence: Synthetic oligonucleotide
cuggcgcaugauugcugug

SEQ ID NO: 341343 - RNA, 19 nt, Artificial Sequence
  Description of Artificial Sequence: Synthetic oligonucleotide
ggucaugggugucccucug

SEQ ID NO: 341344 - RNA, 19 nt, Artificial Sequence
  Description of Artificial Sequence: Synthetic oligonucleotide
cguggagcacacgaagacg

SEQ ID NO: 341345 - RNA, 19 nt, Artificial Sequence
  Description of Artificial Sequence: Synthetic oligonucleotide
agguugcuaucagcuugag

SEQ ID NO: 341346 - RNA, 19 nt, Artificial Sequence
  Description of Artificial Sequence: Synthetic oligonucleotide
gcacggcccaaaucuuucc

SEQ ID NO: 341347 - RNA, 19 nt, Artificial Sequence
  Description of Artificial Sequence: Synthetic oligonucleotide
cacaggcauugcacuaaga

SEQ ID NO: 341348 - RNA, 19 nt, Artificial Sequence
  Description of Artificial Sequence: Synthetic oligonucleotide
aguccgaauccaagucagu

SEQ ID NO: 341349 - RNA, 19 nt, Artificial Sequence
  Description of Artificial Sequence: Synthetic oligonucleotide
gcgcaugauugcugugcgg

SEQ ID NO: 341350 - RNA, 19 nt, Artificial Sequence
  Description of Artificial Sequence: Synthetic oligonucleotide
gcacccaaaaugccaucuc

SEQ ID NO: 341351 - RNA, 19 nt, Artificial Sequence
  Description of Artificial Sequence: Synthetic oligonucleotide
gcgauguguugcucagccc

SEQ ID NO: 341352 - RNA, 19 nt, Artificial Sequence
  Description of Artificial Sequence: Synthetic oligonucleotide
agcguuguaugagccuuuu

SEQ ID NO: 341353 - RNA, 19 nt, Artificial Sequence
  Description of Artificial Sequence: Synthetic oligonucleotide
gaagcugcccauggauacu

SEQ ID NO: 341354 - RNA, 19 nt, Artificial Sequence
  Description of Artificial Sequence: Synthetic oligonucleotide
accggauggaccacuugua

SEQ ID NO: 341355 - RNA, 19 nt, Artificial Sequence
  Description of Artificial Sequence: Synthetic oligonucleotide
gccaaaccgagcagcguug

SEQ ID NO: 341356 - RNA, 19 nt, Artificial Sequence
  Description of Artificial Sequence: Synthetic oligonucleotide
ggacaccucuacgaaagaa

SEQ ID NO: 341357 - RNA, 19 nt, Artificial Sequence
  Description of Artificial Sequence: Synthetic oligonucleotide
gcagucggguggucauggg

SEQ ID NO: 341358 - RNA, 19 nt, Artificial Sequence
  Description of Artificial Sequence: Synthetic oligonucleotide
gaccacuauccuagagaaa

SEQ ID NO: 341359 - RNA, 19 nt, Artificial Sequence
  Description of Artificial Sequence: Synthetic oligonucleotide
ccaacuuggugaaggaagu

SEQ ID NO: 341360 - RNA, 19 nt, Artificial Sequence
  Description of Artificial Sequence: Synthetic oligonucleotide
cacacgaagacggcauucu

SEQ ID NO: 341361 - RNA, 19 nt, Artificial Sequence
  Description of Artificial Sequence: Synthetic oligonucleotide
gucgggacugguugucugu

SEQ ID NO: 341362 - RNA, 19 nt, Artificial Sequence
  Description of Artificial Sequence: Synthetic oligonucleotide
ggcauugcacuaagacuca

SEQ ID NO: 341363 - RNA, 19 nt, Artificial Sequence
  Description of Artificial Sequence: Synthetic oligonucleotide
caccaagaggcagugggcu

SEQ ID NO: 341364 - RNA, 19 nt, Artificial Sequence
  Description of Artificial Sequence: Synthetic oligonucleotide
cagugaccguaucugacau

SEQ ID NO: 341365 - RNA, 19 nt, Artificial Sequence
  Description of Artificial Sequence: Synthetic oligonucleotide
cgacuguacauggagcuuc

SEQ ID NO: 341366 - RNA, 19 nt, Artificial Sequence
  Description of Artificial Sequence: Synthetic oligonucleotide
ugaucccaugcuggcgcau

SEQ ID NO: 341367 - RNA, 19 nt, Artificial Sequence
  Description of Artificial Sequence: Synthetic oligonucleotide
caccauuaaccgacaugua

SEQ ID NO: 341368 - RNA, 19 nt, Artificial Sequence
  Description of Artificial Sequence: Synthetic oligonucleotide
gcuggcgcaugauugcugu

SEQ ID NO: 341369 - RNA, 19 nt, Artificial Sequence
  Description of Artificial Sequence: Synthetic oligonucleotide
ccggagguugcuaucagcu

SEQ ID NO: 341370 - RNA, 19 nt, Artificial Sequence
  Description of Artificial Sequence: Synthetic oligonucleotide
gcuccggagguugcuauca

SEQ ID NO: 341371 - RNA, 19 nt, Artificial Sequence
  Description of Artificial Sequence: Synthetic oligonucleotide
gauaccggauggaccacuu

SEQ ID NO: 341372 - RNA, 19 nt, Artificial Sequence
  Description of Artificial Sequence: Synthetic oligonucleotide
ugcccaccgugggucugag

SEQ ID NO: 341373 - RNA, 19 nt, Artificial Sequence
  Description of Artificial Sequence: Synthetic oligonucleotide
agacggcauucuccauaaa

SEQ ID NO: 341374 - RNA, 19 nt, Artificial Sequence
  Description of Artificial Sequence: Synthetic oligonucleotide
gcacacgaagacggcauuc

SEQ ID NO: 341375 - RNA, 19 nt, Artificial Sequence
  Description of Artificial Sequence: Synthetic oligonucleotide
ggggacugauucugcccac

SEQ ID NO: 341376 - RNA, 19 nt, Artificial Sequence
  Description of Artificial Sequence: Synthetic oligonucleotide
ggaucggaacaccgccaca

SEQ ID NO: 341377 - RNA, 19 nt, Artificial Sequence
  Description of Artificial Sequence: Synthetic oligonucleotide
cacggcccaaaucuuuccu

SEQ ID NO: 341378 - RNA, 19 nt, Artificial Sequence
  Description of Artificial Sequence: Synthetic oligonucleotide
cuaaugcagccaguuuacu

SEQ ID NO: 341379 - RNA, 19 nt, Artificial Sequence
  Description of Artificial Sequence: Synthetic oligonucleotide
gcgaaguaacgaguuucca

SEQ ID NO: 341380 - RNA, 19 nt, Artificial Sequence
  Description of Artificial Sequence: Synthetic oligonucleotide
cacucgcagauagugucua

SEQ ID NO: 341381 - RNA, 19 nt, Artificial Sequence
  Description of Artificial Sequence: Synthetic oligonucleotide
cagucggguggucaugggu

SEQ ID NO: 341382 - RNA, 19 nt, Artificial Sequence
  Description of Artificial Sequence: Synthetic oligonucleotide
cccgacuguacauggagcu

SEQ ID NO: 341383 - RNA, 19 nt, Artificial Sequence
  Description of Artificial Sequence: Synthetic oligonucleotide
ggacuguauugacauggau

SEQ ID NO: 341384 - RNA, 19 nt, Artificial Sequence
  Description of Artificial Sequence: Synthetic oligonucleotide
gggacaccucuacgaaaga

SEQ ID NO: 341385 - RNA, 19 nt, Artificial Sequence
  Description of Artificial Sequence: Synthetic oligonucleotide
cccguggagcacacgaaga

SEQ ID NO: 341386 - RNA, 19 nt, Artificial Sequence
  Description of Artificial Sequence: Synthetic oligonucleotide
ccugaacauaauacucaua

SEQ ID NO: 341387 - RNA, 19 nt, Artificial Sequence
  Description of Artificial Sequence: Synthetic oligonucleotide
auguagcgcuggagucggg

SEQ ID NO: 341388 - RNA, 19 nt, Artificial Sequence
  Description of Artificial Sequence: Synthetic oligonucleotide
cgaaguaacgaguuuccau

SEQ ID NO: 341389 - RNA, 19 nt, Artificial Sequence
  Description of Artificial Sequence: Synthetic oligonucleotide
caaaccgagcagcguugua

SEQ ID NO: 341390 - RNA, 19 nt, Artificial Sequence
  Description of Artificial Sequence: Synthetic oligonucleotide
gcguuguaugagccuuuuc

SEQ ID NO: 341391 - RNA, 19 nt, Artificial Sequence
  Description of Artificial Sequence: Synthetic oligonucleotide
auaggucaucuggcuugaa

SEQ ID NO: 341392 - RNA, 19 nt, Artificial Sequence
  Description of Artificial Sequence: Synthetic oligonucleotide
ccguaucugacauuugguu

SEQ ID NO: 341393 - RNA, 19 nt, Artificial Sequence
  Description of Artificial Sequence: Synthetic oligonucleotide
gagcacggcccaaaucuuu

SEQ ID NO: 341394 - RNA, 19 nt, Artificial Sequence
  Description of Artificial Sequence: Synthetic oligonucleotide
cccugaacauaauacucau

SEQ ID NO: 341395 - RNA, 19 nt, Artificial Sequence
  Description of Artificial Sequence: Synthetic oligonucleotide
agcccacuccugagagucu

SEQ ID NO: 341396 - RNA, 19 nt, Artificial Sequence
  Description of Artificial Sequence: Synthetic oligonucleotide
gcagcguuguaugagccuu

SEQ ID NO: 341397 - RNA, 19 nt, Artificial Sequence
  Description of Artificial Sequence: Synthetic oligonucleotide
cgaauccaagucaguuuga

SEQ ID NO: 341398 - RNA, 19 nt, Artificial Sequence
  Description of Artificial Sequence: Synthetic oligonucleotide
caucggcaggagucaggcu

SEQ ID NO: 341399 - RNA, 19 nt, Artificial Sequence
  Description of Artificial Sequence: Synthetic oligonucleotide
ggguuguacugaguaacuu

SEQ ID NO: 341400 - RNA, 19 nt, Artificial Sequence
  Description of Artificial Sequence: Synthetic oligonucleotide
cgucuaaacaagccaacuu

SEQ ID NO: 341401 - RNA, 19 nt, Artificial Sequence
  Description of Artificial Sequence: Synthetic oligonucleotide
gcccaccgugggucugagg

SEQ ID NO: 341402 - RNA, 19 nt, Artificial Sequence
  Description of Artificial Sequence: Synthetic oligonucleotide
gcacucgcagauagugucu

SEQ ID NO: 341403 - RNA, 19 nt, Artificial Sequence
  Description of Artificial Sequence: Synthetic oligonucleotide
ccgccacaagaaccagcac

SEQ ID NO: 341404 - RNA, 19 nt, Artificial Sequence
  Description of Artificial Sequence: Synthetic oligonucleotide
cagcguuguaugagccuuu

SEQ ID NO: 341405 - RNA, 19 nt, Artificial Sequence
  Description of Artificial Sequence: Synthetic oligonucleotide
ggcagugggcuuucaucuu

SEQ ID NO: 341406 - RNA, 19 nt, Artificial Sequence
  Description of Artificial Sequence: Synthetic oligonucleotide
ccacaagaaccagcaccca

SEQ ID NO: 341407 - RNA, 19 nt, Artificial Sequence
  Description of Artificial Sequence: Synthetic oligonucleotide
ggugucccucugauuggau

SEQ ID NO: 341408 - RNA, 19 nt, Artificial Sequence
  Description of Artificial Sequence: Synthetic oligonucleotide
ccgacuguacauggagcuu

SEQ ID NO: 341409 - RNA, 19 nt, Artificial Sequence
  Description of Artificial Sequence: Synthetic oligonucleotide
uauaaggugaaucagagcc

SEQ ID NO: 341410 - RNA, 19 nt, Artificial Sequence
  Description of Artificial Sequence: Synthetic oligonucleotide
aaauugccgagcuucaucc

SEQ ID NO: 341411 - RNA, 19 nt, Artificial Sequence
  Description of Artificial Sequence: Synthetic oligonucleotide
gaagcuuugcuuuauaagg

SEQ ID NO: 341412 - RNA, 19 nt, Artificial Sequence
  Description of Artificial Sequence: Synthetic oligonucleotide
auugcuuguagcuaguacc

SEQ ID NO: 341413 - RNA, 19 nt, Artificial Sequence
  Description of Artificial Sequence: Synthetic oligonucleotide
auuauugucaaauaugcug

SEQ ID NO: 341414 - RNA, 19 nt, Artificial Sequence
  Description of Artificial Sequence: Synthetic oligonucleotide
gaaacguaaacucugaaug

SEQ ID NO: 341415 - RNA, 19 nt, Artificial Sequence
  Description of Artificial Sequence: Synthetic oligonucleotide
uuuaauguggcuaaagaga

SEQ ID NO: 341416 - RNA, 19 nt, Artificial Sequence
  Description of Artificial Sequence: Synthetic oligonucleotide
aaaucaagaacugcgaaac

SEQ ID NO: 341417 - RNA, 19 nt, Artificial Sequence
  Description of Artificial Sequence: Synthetic oligonucleotide
uuuauaaggugaaucagag

SEQ ID NO: 341418 - RNA, 19 nt, Artificial Sequence
  Description of Artificial Sequence: Synthetic oligonucleotide
aaacguaaacucugaaugg

SEQ ID NO: 341419 - RNA, 19 nt, Artificial Sequence
  Description of Artificial Sequence: Synthetic oligonucleotide
ucgguuggcaaucagacag

SEQ ID NO: 341420 - RNA, 19 nt, Artificial Sequence
  Description of Artificial Sequence: Synthetic oligonucleotide
aauugcuuguagcuaguac

SEQ ID NO: 341421 - RNA, 19 nt, Artificial Sequence
  Description of Artificial Sequence: Synthetic oligonucleotide
aaguucacgcccuggauac

SEQ ID NO: 341422 - RNA, 19 nt, Artificial Sequence
  Description of Artificial Sequence: Synthetic oligonucleotide
aauucgugaaacuguguuc

SEQ ID NO: 341423 - RNA, 19 nt, Artificial Sequence
  Description of Artificial Sequence: Synthetic oligonucleotide
agguuguaaacauugauug

SEQ ID NO: 341424 - RNA, 19 nt, Artificial Sequence
  Description of Artificial Sequence: Synthetic oligonucleotide
cugguuauccacaugaccc

SEQ ID NO: 341425 - RNA, 19 nt, Artificial Sequence
  Description of Artificial Sequence: Synthetic oligonucleotide
aaucaguacuugcaugucg

SEQ ID NO: 341426 - RNA, 19 nt, Artificial Sequence
  Description of Artificial Sequence: Synthetic oligonucleotide
aacguaaacucugaauggc

SEQ ID NO: 341427 - RNA, 19 nt, Artificial Sequence
  Description of Artificial Sequence: Synthetic oligonucleotide
uguuaaaagcaucaccuug

SEQ ID NO: 341428 - RNA, 19 nt, Artificial Sequence
  Description of Artificial Sequence: Synthetic oligonucleotide
agaacaguccaguauguac

SEQ ID NO: 341429 - RNA, 19 nt, Artificial Sequence
  Description of Artificial Sequence: Synthetic oligonucleotide
uuauaaacacaccaggguc

SEQ ID NO: 341430 - RNA, 19 nt, Artificial Sequence
  Description of Artificial Sequence: Synthetic oligonucleotide
uguuaauccaccagcaacu

SEQ ID NO: 341431 - RNA, 19 nt, Artificial Sequence
  Description of Artificial Sequence: Synthetic oligonucleotide
agcaacuugaaaugcaauc

SEQ ID NO: 341432 - RNA, 19 nt, Artificial Sequence
  Description of Artificial Sequence: Synthetic oligonucleotide
aguauggaaguaaacaaac

SEQ ID NO: 341433 - RNA, 19 nt, Artificial Sequence
  Description of Artificial Sequence: Synthetic oligonucleotide
aaacucucauauucuuagc

SEQ ID NO: 341434 - RNA, 19 nt, Artificial Sequence
  Description of Artificial Sequence: Synthetic oligonucleotide
guugaagaaacguaaacuc

SEQ ID NO: 341435 - RNA, 19 nt, Artificial Sequence
  Description of Artificial Sequence: Synthetic oligonucleotide
caaagguacucaaauacag

SEQ ID NO: 341436 - RNA, 19 nt, Artificial Sequence
  Description of Artificial Sequence: Synthetic oligonucleotide
agaacugcgaaacuguuga

SEQ ID NO: 341437 - RNA, 19 nt, Artificial Sequence
  Description of Artificial Sequence: Synthetic oligonucleotide
ucgaaugcuuucaucaugc

SEQ ID NO: 341438 - RNA, 19 nt, Artificial Sequence
  Description of Artificial Sequence: Synthetic oligonucleotide
ucuaacaacuuuugaagcu

SEQ ID NO: 341439 - RNA, 19 nt, Artificial Sequence
  Description of Artificial Sequence: Synthetic oligonucleotide
aaucagacccauguucacc

SEQ ID NO: 341440 - RNA, 19 nt, Artificial Sequence
  Description of Artificial Sequence: Synthetic oligonucleotide
auaguauggaaguaaacaa

SEQ ID NO: 341441 - RNA, 19 nt, Artificial Sequence
  Description of Artificial Sequence: Synthetic oligonucleotide
uuaucugggugguugacag

SEQ ID NO: 341442 - RNA, 19 nt, Artificial Sequence
  Description of Artificial Sequence: Synthetic oligonucleotide
gacgaugaccucaugaagg

SEQ ID NO: 341443 - RNA, 19 nt, Artificial Sequence
  Description of Artificial Sequence: Synthetic oligonucleotide
ucuaguaauucuuccuucc

SEQ ID NO: 341444 - RNA, 19 nt, Artificial Sequence
  Description of Artificial Sequence: Synthetic oligonucleotide
uucuaacaacuuuugaagc

SEQ ID NO: 341445 - RNA, 19 nt, Artificial Sequence
  Description of Artificial Sequence: Synthetic oligonucleotide
aaucuuguuacuaaacaga

SEQ ID NO: 341446 - RNA, 19 nt, Artificial Sequence
  Description of Artificial Sequence: Synthetic oligonucleotide
uucaccacguagcugauga

SEQ ID NO: 341447 - RNA, 19 nt, Artificial Sequence
  Description of Artificial Sequence: Synthetic oligonucleotide
agucuuuauaaacagucca

SEQ ID NO: 341448 - RNA, 19 nt, Artificial Sequence
  Description of Artificial Sequence: Synthetic oligonucleotide
agguaaaucaagaacugcg

SEQ ID NO: 341449 - RNA, 19 nt, Artificial Sequence
  Description of Artificial Sequence: Synthetic oligonucleotide
uucauaaggggucaguuua

SEQ ID NO: 341450 - RNA, 19 nt, Artificial Sequence
  Description of Artificial Sequence: Synthetic oligonucleotide
ugucuaauuuuacucauau

SEQ ID NO: 341451 - RNA, 19 nt, Artificial Sequence
  Description of Artificial Sequence: Synthetic oligonucleotide
uuuaggggcauaaucagua

SEQ ID NO: 341452 - RNA, 19 nt, Artificial Sequence
  Description of Artificial Sequence: Synthetic oligonucleotide
uguagcuaguaccuccccg

SEQ ID NO: 341453 - RNA, 19 nt, Artificial Sequence
  Description of Artificial Sequence: Synthetic oligonucleotide
uuccacuaaacucucauau

SEQ ID NO: 341454 - RNA, 19 nt, Artificial Sequence
  Description of Artificial Sequence: Synthetic oligonucleotide
gaacucgacuguuaaaagc

SEQ ID NO: 341455 - RNA, 19 nt, Artificial Sequence
  Description of Artificial Sequence: Synthetic oligonucleotide
ucaguuuaggggcauaauc

SEQ ID NO: 341456 - RNA, 19 nt, Artificial Sequence
  Description of Artificial Sequence: Synthetic oligonucleotide
agagcauauguagaacucc

SEQ ID NO: 341457 - RNA, 19 nt, Artificial Sequence
  Description of Artificial Sequence: Synthetic oligonucleotide
agacugguuauccacauga

SEQ ID NO: 341458 - RNA, 19 nt, Artificial Sequence
  Description of Artificial Sequence: Synthetic oligonucleotide
uaaaucaagaacugcgaaa

SEQ ID NO: 341459 - RNA, 19 nt, Artificial Sequence
  Description of Artificial Sequence: Synthetic oligonucleotide
acauugauugcauugcaga

SEQ ID NO: 341460 - RNA, 19 nt, Artificial Sequence
  Description of Artificial Sequence: Synthetic oligonucleotide
uguaucaggagauccauua

SEQ ID NO: 341461 - RNA, 19 nt, Artificial Sequence
  Description of Artificial Sequence: Synthetic oligonucleotide
ucaucugaaaguucacgcc

SEQ ID NO: 341462 - RNA, 19 nt, Artificial Sequence
  Description of Artificial Sequence: Synthetic oligonucleotide
aauuaccugguuaucuggg

SEQ ID NO: 341463 - RNA, 19 nt, Artificial Sequence
  Description of Artificial Sequence: Synthetic oligonucleotide
acagcucaucucuugcucc

SEQ ID NO: 341464 - RNA, 19 nt, Artificial Sequence
  Description of Artificial Sequence: Synthetic oligonucleotide
aauugccgagcuucauccc

SEQ ID NO: 341465 - RNA, 19 nt, Artificial Sequence
  Description of Artificial Sequence: Synthetic oligonucleotide
auauguagaacuccagcca

SEQ ID NO: 341466 - RNA, 19 nt, Artificial Sequence
  Description of Artificial Sequence: Synthetic oligonucleotide
uuuuguucguucuucucca

SEQ ID NO: 341467 - RNA, 19 nt, Artificial Sequence
  Description of Artificial Sequence: Synthetic oligonucleotide
caauauucuagcaaccuca

SEQ ID NO: 341468 - RNA, 19 nt, Artificial Sequence
  Description of Artificial Sequence: Synthetic oligonucleotide
cacguaagaauccugcggc

SEQ ID NO: 341469 - RNA, 19 nt, Artificial Sequence
  Description of Artificial Sequence: Synthetic oligonucleotide
cauugauugcauugcagag

SEQ ID NO: 341470 - RNA, 19 nt, Artificial Sequence
  Description of Artificial Sequence: Synthetic oligonucleotide
caucugaaaguucacgccc

SEQ ID NO: 341471 - RNA, 19 nt, Artificial Sequence
  Description of Artificial Sequence: Synthetic oligonucleotide
acugcgaaacuguugaaga

SEQ ID NO: 341472 - RNA, 19 nt, Artificial Sequence
  Description of Artificial Sequence: Synthetic oligonucleotide
uugaacucgacuguuaaaa

SEQ ID NO: 341473 - RNA, 19 nt, Artificial Sequence
  Description of Artificial Sequence: Synthetic oligonucleotide
uucuccaauauucuagcaa

SEQ ID NO: 341474 - RNA, 19 nt, Artificial Sequence
  Description of Artificial Sequence: Synthetic oligonucleotide
uguuguaacuagcagcgau

SEQ ID NO: 341475 - RNA, 19 nt, Artificial Sequence
  Description of Artificial Sequence: Synthetic oligonucleotide
acaauuaccugguuaucug

SEQ ID NO: 341476 - RNA, 19 nt, Artificial Sequence
  Description of Artificial Sequence: Synthetic oligonucleotide
cauaguauggaaguaaaca

SEQ ID NO: 341477 - RNA, 19 nt, Artificial Sequence
  Description of Artificial Sequence: Synthetic oligonucleotide
uucgaaugcuuucaucaug

SEQ ID NO: 341478 - RNA, 19 nt, Artificial Sequence
  Description of Artificial Sequence: Synthetic oligonucleotide
cuagcuaugugccggaaug

SEQ ID NO: 341479 - RNA, 19 nt, Artificial Sequence
  Description of Artificial Sequence: Synthetic oligonucleotide
cacagaggaacauaucuac

SEQ ID NO: 341480 - RNA, 19 nt, Artificial Sequence
  Description of Artificial Sequence: Synthetic oligonucleotide
aacucaauuugcaaaauua

SEQ ID NO: 341481 - RNA, 19 nt, Artificial Sequence
  Description of Artificial Sequence: Synthetic oligonucleotide
auaggcagacugguuaucc

SEQ ID NO: 341482 - RNA, 19 nt, Artificial Sequence
  Description of Artificial Sequence: Synthetic oligonucleotide
ucaauugguguaucaggag

SEQ ID NO: 341483 - RNA, 19 nt, Artificial Sequence
  Description of Artificial Sequence: Synthetic oligonucleotide
ugaacucgacuguuaaaag

SEQ ID NO: 341484 - RNA, 19 nt, Artificial Sequence
  Description of Artificial Sequence: Synthetic oligonucleotide
uacauaguauggaaguaaa

SEQ ID NO: 341485 - RNA, 19 nt, Artificial Sequence
  Description of Artificial Sequence: Synthetic oligonucleotide
cuguuaauccaccagcaac

SEQ ID NO: 341486 - RNA, 19 nt, Artificial Sequence
  Description of Artificial Sequence: Synthetic oligonucleotide
cuaugugccggaaugcaag

SEQ ID NO: 341487 - RNA, 19 nt, Artificial Sequence
  Description of Artificial Sequence: Synthetic oligonucleotide
agaaacguaaacucugaau

SEQ ID NO: 341488 - RNA, 19 nt, Artificial Sequence
  Description of Artificial Sequence: Synthetic oligonucleotide
uaaaccgucaauuggugua

SEQ ID NO: 341489 - RNA, 19 nt, Artificial Sequence
  Description of Artificial Sequence: Synthetic oligonucleotide
aagcgaagggaacagcacu

SEQ ID NO: 341490 - RNA, 19 nt, Artificial Sequence
  Description of Artificial Sequence: Synthetic oligonucleotide
uguucaagggcuguuaauc

SEQ ID NO: 341491 - RNA, 19 nt, Artificial Sequence
  Description of Artificial Sequence: Synthetic oligonucleotide
uuauaaggugaaucagagc

SEQ ID NO: 341492 - RNA, 19 nt, Artificial Sequence
  Description of Artificial Sequence: Synthetic oligonucleotide
uacaauuaccugguuaucu

SEQ ID NO: 341493 - RNA, 19 nt, Artificial Sequence
  Description of Artificial Sequence: Synthetic oligonucleotide
ugaaucagagccagaauuu

SEQ ID NO: 341494 - RNA, 19 nt, Artificial Sequence
  Description of Artificial Sequence: Synthetic oligonucleotide
uucuuucguucauaagggg

SEQ ID NO: 341495 - RNA, 19 nt, Artificial Sequence
  Description of Artificial Sequence: Synthetic oligonucleotide
ugaagggcagcugucaacc

SEQ ID NO: 341496 - RNA, 19 nt, Artificial Sequence
  Description of Artificial Sequence: Synthetic oligonucleotide
uguuacuaaacagaacauc

SEQ ID NO: 341497 - RNA, 19 nt, Artificial Sequence
  Description of Artificial Sequence: Synthetic oligonucleotide
aguagagcauauguagaac

SEQ ID NO: 341498 - RNA, 19 nt, Artificial Sequence
  Description of Artificial Sequence: Synthetic oligonucleotide
uuauccacaugacccggag

SEQ ID NO: 341499 - RNA, 19 nt, Artificial Sequence
  Description of Artificial Sequence: Synthetic oligonucleotide
ugggguggcggccagacug

SEQ ID NO: 341500 - RNA, 19 nt, Artificial Sequence
  Description of Artificial Sequence: Synthetic oligonucleotide
uccccguuuuaaauuacag

SEQ ID NO: 341501 - RNA, 19 nt, Artificial Sequence
  Description of Artificial Sequence: Synthetic oligonucleotide
ucauaaggggucaguuuag

SEQ ID NO: 341502 - RNA, 19 nt, Artificial Sequence
  Description of Artificial Sequence: Synthetic oligonucleotide
aacuguugaagaaacguaa

SEQ ID NO: 341503 - RNA, 19 nt, Artificial Sequence
  Description of Artificial Sequence: Synthetic oligonucleotide
uugcuuguagcuaguaccu

SEQ ID NO: 341504 - RNA, 19 nt, Artificial Sequence
  Description of Artificial Sequence: Synthetic oligonucleotide
auucgugaaacuguguuca

SEQ ID NO: 341505 - RNA, 19 nt, Artificial Sequence
  Description of Artificial Sequence: Synthetic oligonucleotide
cugcuauucucucucacag

SEQ ID NO: 341506 - RNA, 19 nt, Artificial Sequence
  Description of Artificial Sequence: Synthetic oligonucleotide
cagggagcuagcuaugugc

SEQ ID NO: 341507 - RNA, 19 nt, Artificial Sequence
  Description of Artificial Sequence: Synthetic oligonucleotide
caugcagucugucaaucag

SEQ ID NO: 341508 - RNA, 19 nt, Artificial Sequence
  Description of Artificial Sequence: Synthetic oligonucleotide
ucuuguuacuaaacagaac

SEQ ID NO: 341509 - RNA, 19 nt, Artificial Sequence
  Description of Artificial Sequence: Synthetic oligonucleotide
agagaacacugcuucuuuc

SEQ ID NO: 341510 - RNA, 19 nt, Artificial Sequence
  Description of Artificial Sequence: Synthetic oligonucleotide
aaucaagaacugcgaaacu

SEQ ID NO: 341511 - RNA, 19 nt, Artificial Sequence
  Description of Artificial Sequence: Synthetic oligonucleotide
agggacaagcccucugccc

SEQ ID NO: 341512 - RNA, 19 nt, Artificial Sequence
  Description of Artificial Sequence: Synthetic oligonucleotide
ucaagggcuguuaauccac

SEQ ID NO: 341513 - RNA, 19 nt, Artificial Sequence
  Description of Artificial Sequence: Synthetic oligonucleotide
ugugccggaaugcaaggga

SEQ ID NO: 341514 - RNA, 19 nt, Artificial Sequence
  Description of Artificial Sequence: Synthetic oligonucleotide
cuggguguaacucuccuug

SEQ ID NO: 341515 - RNA, 19 nt, Artificial Sequence
  Description of Artificial Sequence: Synthetic oligonucleotide
acauaaaccgucaauuggu

SEQ ID NO: 341516 - RNA, 19 nt, Artificial Sequence
  Description of Artificial Sequence: Synthetic oligonucleotide
uggaacauaaaccgucaau

SEQ ID NO: 341517 - RNA, 19 nt, Artificial Sequence
  Description of Artificial Sequence: Synthetic oligonucleotide
ucaggagauccauuaagaa

SEQ ID NO: 341518 - RNA, 19 nt, Artificial Sequence
  Description of Artificial Sequence: Synthetic oligonucleotide
uagagcauauguagaacuc

SEQ ID NO: 341519 - RNA, 19 nt, Artificial Sequence
  Description of Artificial Sequence: Synthetic oligonucleotide
acaauagacugaaaagcag

SEQ ID NO: 341520 - RNA, 19 nt, Artificial Sequence
  Description of Artificial Sequence: Synthetic oligonucleotide
aagcgaucaggacauugca

SEQ ID NO: 341521 - RNA, 19 nt, Artificial Sequence
  Description of Artificial Sequence: Synthetic oligonucleotide
aauacuggaagggcagcug

SEQ ID NO: 341522 - RNA, 19 nt, Artificial Sequence
  Description of Artificial Sequence: Synthetic oligonucleotide
cauaaaccgucaauuggug

SEQ ID NO: 341523 - RNA, 19 nt, Artificial Sequence
  Description of Artificial Sequence: Synthetic oligonucleotide
augaccucaugaaggaggc

SEQ ID NO: 341524 - RNA, 19 nt, Artificial Sequence
  Description of Artificial Sequence: Synthetic oligonucleotide
gaacaguccaguauguaca

SEQ ID NO: 341525 - RNA, 19 nt, Artificial Sequence
  Description of Artificial Sequence: Synthetic oligonucleotide
aauugguguaucaggagau

SEQ ID NO: 341526 - RNA, 19 nt, Artificial Sequence
  Description of Artificial Sequence: Synthetic oligonucleotide
uccaauauucuagcaaccu

SEQ ID NO: 341527 - RNA, 19 nt, Artificial Sequence
  Description of Artificial Sequence: Synthetic oligonucleotide
gauccuggugauuauuguc

SEQ ID NO: 341528 - RNA, 19 nt, Artificial Sequence
  Description of Artificial Sequence: Synthetic oligonucleotide
uccaugugccuucgaaugc

SEQ ID NO: 341529 - RNA, 19 nt, Artificial Sequence
  Description of Artificial Sequence: Synthetic oligonucleotide
aagcuuugcuuuauaaggu

SEQ ID NO: 341530 - RNA, 19 nt, Artificial Sequence
  Description of Artificial Sequence: Synthetic oligonucleotide
cuaaagagauaaacuucug

SEQ ID NO: 341531 - RNA, 19 nt, Artificial Sequence
  Description of Artificial Sequence: Synthetic oligonucleotide
ugguguaucaggagaucca

SEQ ID NO: 341532 - RNA, 19 nt, Artificial Sequence
  Description of Artificial Sequence: Synthetic oligonucleotide
agauaaacuucugaagcga

SEQ ID NO: 341533 - RNA, 19 nt, Artificial Sequence
  Description of Artificial Sequence: Synthetic oligonucleotide
aauccugcggcaugcugca

SEQ ID NO: 341534 - RNA, 19 nt, Artificial Sequence
  Description of Artificial Sequence: Synthetic oligonucleotide
uucugaagguuguuguaac

SEQ ID NO: 341535 - RNA, 19 nt, Artificial Sequence
  Description of Artificial Sequence: Synthetic oligonucleotide
aguugucaauccuucaaaa

SEQ ID NO: 341536 - RNA, 19 nt, Artificial Sequence
  Description of Artificial Sequence: Synthetic oligonucleotide
uguaacuagcagcgauaag

SEQ ID NO: 341537 - RNA, 19 nt, Artificial Sequence
  Description of Artificial Sequence: Synthetic oligonucleotide
cagacuguacaauuaccug

SEQ ID NO: 341538 - RNA, 19 nt, Artificial Sequence
  Description of Artificial Sequence: Synthetic oligonucleotide
auaaaccgucaauuggugu

SEQ ID NO: 341539 - RNA, 19 nt, Artificial Sequence
  Description of Artificial Sequence: Synthetic oligonucleotide
uuucccuuuaauguggcua

SEQ ID NO: 341540 - RNA, 19 nt, Artificial Sequence
  Description of Artificial Sequence: Synthetic oligonucleotide
aggagauuauaaacacacc

SEQ ID NO: 341541 - RNA, 19 nt, Artificial Sequence
  Description of Artificial Sequence: Synthetic oligonucleotide
ugaauguggccaguaaaac

SEQ ID NO: 341542 - RNA, 19 nt, Artificial Sequence
  Description of Artificial Sequence: Synthetic oligonucleotide
acauaguauggaaguaaac

SEQ ID NO: 341543 - RNA, 19 nt, Artificial Sequence
  Description of Artificial Sequence: Synthetic oligonucleotide
agggagcuagcuaugugcc

SEQ ID NO: 341544 - RNA, 19 nt, Artificial Sequence
  Description of Artificial Sequence: Synthetic oligonucleotide
uacgccguugaucuaguaa

SEQ ID NO: 341545 - RNA, 19 nt, Artificial Sequence
  Description of Artificial Sequence: Synthetic oligonucleotide
uaggggcauaaucaguacu

SEQ ID NO: 341546 - RNA, 19 nt, Artificial Sequence
  Description of Artificial Sequence: Synthetic oligonucleotide
cuuaggaggaauucgugaa

SEQ ID NO: 341547 - RNA, 19 nt, Artificial Sequence
  Description of Artificial Sequence: Synthetic oligonucleotide
auaagcgaagggaacagca

SEQ ID NO: 341548 - RNA, 19 nt, Artificial Sequence
  Description of Artificial Sequence: Synthetic oligonucleotide
aacuagcagcgauaagcga

SEQ ID NO: 341549 - RNA, 19 nt, Artificial Sequence
  Description of Artificial Sequence: Synthetic oligonucleotide
caauugguguaucaggaga

SEQ ID NO: 341550 - RNA, 19 nt, Artificial Sequence
  Description of Artificial Sequence: Synthetic oligonucleotide
ugaagcgaucaggacauug

SEQ ID NO: 341551 - RNA, 19 nt, Artificial Sequence
  Description of Artificial Sequence: Synthetic oligonucleotide
guaaaucaagaacugcgaa

SEQ ID NO: 341552 - RNA, 19 nt, Artificial Sequence
  Description of Artificial Sequence: Synthetic oligonucleotide
agccuuauuguuugcccag

SEQ ID NO: 341553 - RNA, 19 nt, Artificial Sequence
  Description of Artificial Sequence: Synthetic oligonucleotide
gucuuuauaaacaguccac

SEQ ID NO: 341554 - RNA, 19 nt, Artificial Sequence
  Description of Artificial Sequence: Synthetic oligonucleotide
ugcgaaacuguugaagaaa

SEQ ID NO: 341555 - RNA, 19 nt, Artificial Sequence
  Description of Artificial Sequence: Synthetic oligonucleotide
acgaugaccucaugaagga

SEQ ID NO: 341556 - RNA, 19 nt, Artificial Sequence
  Description of Artificial Sequence: Synthetic oligonucleotide
uccuacgccguugaucuag

SEQ ID NO: 341557 - RNA, 19 nt, Artificial Sequence
  Description of Artificial Sequence: Synthetic oligonucleotide
uaaacucugaauggcuacu

SEQ ID NO: 341558 - RNA, 19 nt, Artificial Sequence
  Description of Artificial Sequence: Synthetic oligonucleotide
uugcaggugagguuguaaa

SEQ ID NO: 341559 - RNA, 19 nt, Artificial Sequence
  Description of Artificial Sequence: Synthetic oligonucleotide
acguuuuccuuugggauag

SEQ ID NO: 341560 - RNA, 19 nt, Artificial Sequence
  Description of Artificial Sequence: Synthetic oligonucleotide
agaagguaaucuuguuacu

SEQ ID NO: 341561 - RNA, 19 nt, Artificial Sequence
  Description of Artificial Sequence: Synthetic oligonucleotide
uggucgguuggcaaucaga

SEQ ID NO: 341562 - RNA, 19 nt, Artificial Sequence
  Description of Artificial Sequence: Synthetic oligonucleotide
gucaauugguguaucagga

SEQ ID NO: 341563 - RNA, 19 nt, Artificial Sequence
  Description of Artificial Sequence: Synthetic oligonucleotide
acuagcagcgauaagcgaa

SEQ ID NO: 341564 - RNA, 19 nt, Artificial Sequence
  Description of Artificial Sequence: Synthetic oligonucleotide
uuguaacuagcagcgauaa

SEQ ID NO: 341565 - RNA, 19 nt, Artificial Sequence
  Description of Artificial Sequence: Synthetic oligonucleotide
agcgauaagcgaagggaac

SEQ ID NO: 341566 - RNA, 19 nt, Artificial Sequence
  Description of Artificial Sequence: Synthetic oligonucleotide
auaugcuguaggaccuucc

SEQ ID NO: 341567 - RNA, 19 nt, Artificial Sequence
  Description of Artificial Sequence: Synthetic oligonucleotide
gaagaaacguaaacucuga

SEQ ID NO: 341568 - RNA, 19 nt, Artificial Sequence
  Description of Artificial Sequence: Synthetic oligonucleotide
ugcuauucucucucacagc

SEQ ID NO: 341569 - RNA, 19 nt, Artificial Sequence
  Description of Artificial Sequence: Synthetic oligonucleotide
uuaggggcauaaucaguac

SEQ ID NO: 341570 - RNA, 19 nt, Artificial Sequence
  Description of Artificial Sequence: Synthetic oligonucleotide
ucaguacuugcaugucgcc

SEQ ID NO: 341571 - RNA, 19 nt, Artificial Sequence
  Description of Artificial Sequence: Synthetic oligonucleotide
cugaugaggucuugaacuc

SEQ ID NO: 341572 - RNA, 19 nt, Artificial Sequence
  Description of Artificial Sequence: Synthetic oligonucleotide
gaauucgugaaacuguguu

SEQ ID NO: 341573 - RNA, 19 nt, Artificial Sequence
  Description of Artificial Sequence: Synthetic oligonucleotide
ugagcacaucccacguaag

SEQ ID NO: 341574 - RNA, 19 nt, Artificial Sequence
  Description of Artificial Sequence: Synthetic oligonucleotide
aggaauucgugaaacugug

SEQ ID NO: 341575 - RNA, 19 nt, Artificial Sequence
  Description of Artificial Sequence: Synthetic oligonucleotide
auugguguaucaggagauc

SEQ ID NO: 341576 - RNA, 19 nt, Artificial Sequence
  Description of Artificial Sequence: Synthetic oligonucleotide
gcuuguagcuaguaccucc

SEQ ID NO: 341577 - RNA, 19 nt, Artificial Sequence
  Description of Artificial Sequence: Synthetic oligonucleotide
ggaggaauucgugaaacug

SEQ ID NO: 341578 - RNA, 19 nt, Artificial Sequence
  Description of Artificial Sequence: Synthetic oligonucleotide
augaauguggccaguaaaa

SEQ ID NO: 341579 - RNA, 19 nt, Artificial Sequence
  Description of Artificial Sequence: Synthetic oligonucleotide
ugccccuacaauagacuga

SEQ ID NO: 341580 - RNA, 19 nt, Artificial Sequence
  Description of Artificial Sequence: Synthetic oligonucleotide
agacuuaggaggaauucgu

SEQ ID NO: 341581 - RNA, 19 nt, Artificial Sequence
  Description of Artificial Sequence: Synthetic oligonucleotide
guaacucuccuugggacug

SEQ ID NO: 341582 - RNA, 19 nt, Artificial Sequence
  Description of Artificial Sequence: Synthetic oligonucleotide
cucgacuguuaaaagcauc

SEQ ID NO: 341583 - RNA, 19 nt, Artificial Sequence
  Description of Artificial Sequence: Synthetic oligonucleotide
aaaccgucaauugguguau

SEQ ID NO: 341584 - RNA, 19 nt, Artificial Sequence
  Description of Artificial Sequence: Synthetic oligonucleotide
gagcauauguagaacucca

SEQ ID NO: 341585 - RNA, 19 nt, Artificial Sequence
  Description of Artificial Sequence: Synthetic oligonucleotide
uuguagcuaguaccucccc

SEQ ID NO: 341586 - RNA, 19 nt, Artificial Sequence
  Description of Artificial Sequence: Synthetic oligonucleotide
agaauccugcggcaugcug

SEQ ID NO: 341587 - RNA, 19 nt, Artificial Sequence
  Description of Artificial Sequence: Synthetic oligonucleotide
ucauccuacgccguugauc

SEQ ID NO: 341588 - RNA, 19 nt, Artificial Sequence
  Description of Artificial Sequence: Synthetic oligonucleotide
ugcuuaacucagcagccuu

SEQ ID NO: 341589 - RNA, 19 nt, Artificial Sequence
  Description of Artificial Sequence: Synthetic oligonucleotide
ucaccaaggguccgaucca

SEQ ID NO: 341590 - RNA, 19 nt, Artificial Sequence
  Description of Artificial Sequence: Synthetic oligonucleotide
cagacccauguucaccacg

SEQ ID NO: 341591 - RNA, 19 nt, Artificial Sequence
  Description of Artificial Sequence: Synthetic oligonucleotide
ucgugaaacuguguucaug

SEQ ID NO: 341592 - RNA, 19 nt, Artificial Sequence
  Description of Artificial Sequence: Synthetic oligonucleotide
uuguucguucuucuccauc

SEQ ID NO: 341593 - RNA, 19 nt, Artificial Sequence
  Description of Artificial Sequence: Synthetic oligonucleotide
agcacuuugaugagccuug

SEQ ID NO: 341594 - RNA, 19 nt, Artificial Sequence
  Description of Artificial Sequence: Synthetic oligonucleotide
cuaguaauucuuccuucca

SEQ ID NO: 341595 - RNA, 19 nt, Artificial Sequence
  Description of Artificial Sequence: Synthetic oligonucleotide
caagggcuguuaauccacc

SEQ ID NO: 341596 - RNA, 19 nt, Artificial Sequence
  Description of Artificial Sequence: Synthetic oligonucleotide
cuuauuguuugcccaggga

SEQ ID NO: 341597 - RNA, 19 nt, Artificial Sequence
  Description of Artificial Sequence: Synthetic oligonucleotide
auaaggugaaucagagcca

SEQ ID NO: 341598 - RNA, 19 nt, Artificial Sequence
  Description of Artificial Sequence: Synthetic oligonucleotide
uguagcaccgugggguggc

SEQ ID NO: 341599 - RNA, 19 nt, Artificial Sequence
  Description of Artificial Sequence: Synthetic oligonucleotide
ugucaacccugugggaucc

SEQ ID NO: 341600 - RNA, 19 nt, Artificial Sequence
  Description of Artificial Sequence: Synthetic oligonucleotide
gggacaagcccucugcccc

SEQ ID NO: 341601 - RNA, 19 nt, Artificial Sequence
  Description of Artificial Sequence: Synthetic oligonucleotide
gagcacaucccacguaaga

SEQ ID NO: 341602 - RNA, 19 nt, Artificial Sequence
  Description of Artificial Sequence: Synthetic oligonucleotide
gugagcacaucccacguaa

SEQ ID NO: 341603 - RNA, 19 nt, Artificial Sequence
  Description of Artificial Sequence: Synthetic oligonucleotide
uggauacugcuauucucuc

SEQ ID NO: 341604 - RNA, 19 nt, Artificial Sequence
  Description of Artificial Sequence: Synthetic oligonucleotide
gggcuguuaauccaccagc

SEQ ID NO: 341605 - RNA, 19 nt, Artificial Sequence
  Description of Artificial Sequence: Synthetic oligonucleotide
uuaacucagcagccuuuuc

SEQ ID NO: 341606 - RNA, 19 nt, Artificial Sequence
  Description of Artificial Sequence: Synthetic oligonucleotide
caaucagacccauguucac

SEQ ID NO: 341607 - RNA, 19 nt, Artificial Sequence
  Description of Artificial Sequence: Synthetic oligonucleotide
acuaacaaagguacucaaa

SEQ ID NO: 341608 - RNA, 19 nt, Artificial Sequence
  Description of Artificial Sequence: Synthetic oligonucleotide
gguaaaucaagaacugcga

SEQ ID NO: 341609 - RNA, 19 nt, Artificial Sequence
  Description of Artificial Sequence: Synthetic oligonucleotide
accgucaauugguguauca

SEQ ID NO: 341610 - RNA, 19 nt, Artificial Sequence
  Description of Artificial Sequence: Synthetic oligonucleotide
aggacauugcagagagaac

SEQ ID NO: 341611 - RNA, 19 nt, Artificial Sequence
  Description of Artificial Sequence: Synthetic oligonucleotide
acguaagaauccugcggca

SEQ ID NO: 341612 - RNA, 19 nt, Artificial Sequence
  Description of Artificial Sequence: Synthetic oligonucleotide
uagcuaugugccggaaugc

SEQ ID NO: 341613 - RNA, 19 nt, Artificial Sequence
  Description of Artificial Sequence: Synthetic oligonucleotide
uccugcggcaugcugcaaa

SEQ ID NO: 341614 - RNA, 19 nt, Artificial Sequence
  Description of Artificial Sequence: Synthetic oligonucleotide
agcgaucaggacauugcag

SEQ ID NO: 341615 - RNA, 19 nt, Artificial Sequence
  Description of Artificial Sequence: Synthetic oligonucleotide
aaccgucaauugguguauc

SEQ ID NO: 341616 - RNA, 19 nt, Artificial Sequence
  Description of Artificial Sequence: Synthetic oligonucleotide
gcuauucucucucacagcu

SEQ ID NO: 341617 - RNA, 19 nt, Artificial Sequence
  Description of Artificial Sequence: Synthetic oligonucleotide
acuguugaagaaacguaaa

SEQ ID NO: 341618 - RNA, 19 nt, Artificial Sequence
  Description of Artificial Sequence: Synthetic oligonucleotide
gagguuguaaacauugauu

SEQ ID NO: 341619 - RNA, 19 nt, Artificial Sequence
  Description of Artificial Sequence: Synthetic oligonucleotide
accuccccguuuuaaauua

SEQ ID NO: 341620 - RNA, 19 nt, Artificial Sequence
  Description of Artificial Sequence: Synthetic oligonucleotide
acguaaacucugaauggcu

SEQ ID NO: 341621 - RNA, 19 nt, Artificial Sequence
  Description of Artificial Sequence: Synthetic oligonucleotide
gacuguacaauuaccuggu

SEQ ID NO: 341622 - RNA, 19 nt, Artificial Sequence
  Description of Artificial Sequence: Synthetic oligonucleotide
guagcuaguaccuccccgu

SEQ ID NO: 341623 - RNA, 19 nt, Artificial Sequence
  Description of Artificial Sequence: Synthetic oligonucleotide
gaaaucuguuagccagcuc

SEQ ID NO: 341624 - RNA, 19 nt, Artificial Sequence
  Description of Artificial Sequence: Synthetic oligonucleotide
cugucaacccugugggauc

SEQ ID NO: 341625 - RNA, 19 nt, Artificial Sequence
  Description of Artificial Sequence: Synthetic oligonucleotide
acgcccuggauacugcuau

SEQ ID NO: 341626 - RNA, 19 nt, Artificial Sequence
  Description of Artificial Sequence: Synthetic oligonucleotide
uucguucauaaggggucag

SEQ ID NO: 341627 - RNA, 19 nt, Artificial Sequence
  Description of Artificial Sequence: Synthetic oligonucleotide
aaauaugcuguaggaccuu

SEQ ID NO: 341628 - RNA, 19 nt, Artificial Sequence
  Description of Artificial Sequence: Synthetic oligonucleotide
auguuugaggcuggggcca

SEQ ID NO: 341629 - RNA, 19 nt, Artificial Sequence
  Description of Artificial Sequence: Synthetic oligonucleotide
ugucgcccacugcuuaacu

SEQ ID NO: 341630 - RNA, 19 nt, Artificial Sequence
  Description of Artificial Sequence: Synthetic oligonucleotide
ccaauauucuagcaaccuc

SEQ ID NO: 341631 - RNA, 19 nt, Artificial Sequence
  Description of Artificial Sequence: Synthetic oligonucleotide
uccaucauccuacgccguu

SEQ ID NO: 341632 - RNA, 19 nt, Artificial Sequence
  Description of Artificial Sequence: Synthetic oligonucleotide
aguccaguauguacagucu

SEQ ID NO: 341633 - RNA, 19 nt, Artificial Sequence
  Description of Artificial Sequence: Synthetic oligonucleotide
uaacucuccuugggacugg

SEQ ID NO: 341634 - RNA, 19 nt, Artificial Sequence
  Description of Artificial Sequence: Synthetic oligonucleotide
uuccaucauccuacgccgu

SEQ ID NO: 341635 - RNA, 19 nt, Artificial Sequence
  Description of Artificial Sequence: Synthetic oligonucleotide
uagcuggccggcuguuucc

SEQ ID NO: 341636 - RNA, 19 nt, Artificial Sequence
  Description of Artificial Sequence: Synthetic oligonucleotide
ccuuauuguuugcccaggg

SEQ ID NO: 341637 - RNA, 19 nt, Artificial Sequence
  Description of Artificial Sequence: Synthetic oligonucleotide
auagacugaaaagcaggua

SEQ ID NO: 341638 - RNA, 19 nt, Artificial Sequence
  Description of Artificial Sequence: Synthetic oligonucleotide
caguugucaauccuucaaa

SEQ ID NO: 341639 - RNA, 19 nt, Artificial Sequence
  Description of Artificial Sequence: Synthetic oligonucleotide
cagcgauaagcgaagggaa

SEQ ID NO: 341640 - RNA, 19 nt, Artificial Sequence
  Description of Artificial Sequence: Synthetic oligonucleotide
guuguaacuagcagcgaua

SEQ ID NO: 341641 - RNA, 19 nt, Artificial Sequence
  Description of Artificial Sequence: Synthetic oligonucleotide
agguacucaaauacagaau

SEQ ID NO: 341642 - RNA, 19 nt, Artificial Sequence
  Description of Artificial Sequence: Synthetic oligonucleotide
gauaaacuucugaagcgau

SEQ ID NO: 341643 - RNA, 19 nt, Artificial Sequence
  Description of Artificial Sequence: Synthetic oligonucleotide
gggccuugcaccgagagga

SEQ ID NO: 341644 - RNA, 19 nt, Artificial Sequence
  Description of Artificial Sequence: Synthetic oligonucleotide
ucguucauaaggggucagu

SEQ ID NO: 341645 - RNA, 19 nt, Artificial Sequence
  Description of Artificial Sequence: Synthetic oligonucleotide
cacuaacaaagguacucaa

SEQ ID NO: 341646 - RNA, 19 nt, Artificial Sequence
  Description of Artificial Sequence: Synthetic oligonucleotide
ggaacauaaaccgucaauu

SEQ ID NO: 341647 - RNA, 19 nt, Artificial Sequence
  Description of Artificial Sequence: Synthetic oligonucleotide
augucgcccacugcuuaac

SEQ ID NO: 341648 - RNA, 19 nt, Artificial Sequence
  Description of Artificial Sequence: Synthetic oligonucleotide
ccaaggguccgauccaaag

SEQ ID NO: 341649 - RNA, 19 nt, Artificial Sequence
  Description of Artificial Sequence: Synthetic oligonucleotide
gaugagccuugggucacug

SEQ ID NO: 341650 - RNA, 19 nt, Artificial Sequence
  Description of Artificial Sequence: Synthetic oligonucleotide
auugcaggugagguuguaa

SEQ ID NO: 341651 - RNA, 19 nt, Artificial Sequence
  Description of Artificial Sequence: Synthetic oligonucleotide
uucgugaaacuguguucau

SEQ ID NO: 341652 - RNA, 19 nt, Artificial Sequence
  Description of Artificial Sequence: Synthetic oligonucleotide
cccacguaagaauccugcg

SEQ ID NO: 341653 - RNA, 19 nt, Artificial Sequence
  Description of Artificial Sequence: Synthetic oligonucleotide
uccacaugacccggagucu

SEQ ID NO: 341654 - RNA, 19 nt, Artificial Sequence
  Description of Artificial Sequence: Synthetic oligonucleotide
agugagcacaucccacgua

SEQ ID NO: 341655 - RNA, 19 nt, Artificial Sequence
  Description of Artificial Sequence: Synthetic oligonucleotide
guauggaaguaaacaaacu

SEQ ID NO: 341656 - RNA, 19 nt, Artificial Sequence
  Description of Artificial Sequence: Synthetic oligonucleotide
gucgcccacugcuuaacuc

SEQ ID NO: 341657 - RNA, 19 nt, Artificial Sequence
  Description of Artificial Sequence: Synthetic oligonucleotide
cugcgaaacuguugaagaa

SEQ ID NO: 341658 - RNA, 19 nt, Artificial Sequence
  Description of Artificial Sequence: Synthetic oligonucleotide
acaauugcuuguagcuagu

SEQ ID NO: 341659 - RNA, 19 nt, Artificial Sequence
  Description of Artificial Sequence: Synthetic oligonucleotide
cacuacuugaaggaugugu

SEQ ID NO: 341660 - RNA, 19 nt, Artificial Sequence
  Description of Artificial Sequence: Synthetic oligonucleotide
gucgguuggcaaucagaca

SEQ ID NO: 341661 - RNA, 19 nt, Artificial Sequence
  Description of Artificial Sequence: Synthetic oligonucleotide
uccuugggacugguagugc

SEQ ID NO: 341662 - RNA, 19 nt, Artificial Sequence
  Description of Artificial Sequence: Synthetic oligonucleotide
auggugccauggaagagga

SEQ ID NO: 341663 - RNA, 19 nt, Artificial Sequence
  Description of Artificial Sequence: Synthetic oligonucleotide
uagcuaguaccuccccguu

SEQ ID NO: 341664 - RNA, 19 nt, Artificial Sequence
  Description of Artificial Sequence: Synthetic oligonucleotide
uguggccauuuugggauuc

SEQ ID NO: 341665 - RNA, 19 nt, Artificial Sequence
  Description of Artificial Sequence: Synthetic oligonucleotide
uuccaucuggucgguuggc

SEQ ID NO: 341666 - RNA, 19 nt, Artificial Sequence
  Description of Artificial Sequence: Synthetic oligonucleotide
caucauccuacgccguuga

SEQ ID NO: 341667 - RNA, 19 nt, Artificial Sequence
  Description of Artificial Sequence: Synthetic oligonucleotide
agcuaguaccuccccguuu

SEQ ID NO: 341668 - RNA, 19 nt, Artificial Sequence
  Description of Artificial Sequence: Synthetic oligonucleotide
guucauaaggggucaguuu

SEQ ID NO: 341669 - RNA, 19 nt, Artificial Sequence
  Description of Artificial Sequence: Synthetic oligonucleotide
agcagggagcuagcuaugu

SEQ ID NO: 341670 - RNA, 19 nt, Artificial Sequence
  Description of Artificial Sequence: Synthetic oligonucleotide
gaacugcgaaacuguugaa

SEQ ID NO: 341671 - RNA, 19 nt, Artificial Sequence
  Description of Artificial Sequence: Synthetic oligonucleotide
ggaaugcaagggacaagcc

SEQ ID NO: 341672 - RNA, 19 nt, Artificial Sequence
  Description of Artificial Sequence: Synthetic oligonucleotide
uugcaccgagaggaagcag

SEQ ID NO: 341673 - RNA, 19 nt, Artificial Sequence
  Description of Artificial Sequence: Synthetic oligonucleotide
cuaacaacuuuugaagcuu

SEQ ID NO: 341674 - RNA, 19 nt, Artificial Sequence
  Description of Artificial Sequence: Synthetic oligonucleotide
uguuugaggcuggggccac

SEQ ID NO: 341675 - RNA, 19 nt, Artificial Sequence
  Description of Artificial Sequence: Synthetic oligonucleotide
agcgaagggaacagcacuu

SEQ ID NO: 341676 - RNA, 19 nt, Artificial Sequence
  Description of Artificial Sequence: Synthetic oligonucleotide
guuauccacaugacccgga

SEQ ID NO: 341677 - RNA, 19 nt, Artificial Sequence
  Description of Artificial Sequence: Synthetic oligonucleotide
cuggucgguuggcaaucag

SEQ ID NO: 341678 - RNA, 19 nt, Artificial Sequence
  Description of Artificial Sequence: Synthetic oligonucleotide
caaagcacagugagcacau

SEQ ID NO: 341679 - RNA, 19 nt, Artificial Sequence
  Description of Artificial Sequence: Synthetic oligonucleotide
gcgauaagcgaagggaaca

SEQ ID NO: 341680 - RNA, 19 nt, Artificial Sequence
  Description of Artificial Sequence: Synthetic oligonucleotide
cuguaggaccuuccaguga

SEQ ID NO: 341681 - RNA, 19 nt, Artificial Sequence
  Description of Artificial Sequence: Synthetic oligonucleotide
acucgacuguuaaaagcau

SEQ ID NO: 341682 - RNA, 19 nt, Artificial Sequence
  Description of Artificial Sequence: Synthetic oligonucleotide
gcaagggacaagcccucug

SEQ ID NO: 341683 - RNA, 19 nt, Artificial Sequence
  Description of Artificial Sequence: Synthetic oligonucleotide
cuguagcaccguggggugg

SEQ ID NO: 341684 - RNA, 19 nt, Artificial Sequence
  Description of Artificial Sequence: Synthetic oligonucleotide
accugguuaucuggguggu

SEQ ID NO: 341685 - RNA, 19 nt, Artificial Sequence
  Description of Artificial Sequence: Synthetic oligonucleotide
gguugacagugaaguagcc

SEQ ID NO: 341686 - RNA, 19 nt, Artificial Sequence
  Description of Artificial Sequence: Synthetic oligonucleotide
ggcaaucagacagcuaaaa

SEQ ID NO: 341687 - RNA, 19 nt, Artificial Sequence
  Description of Artificial Sequence: Synthetic oligonucleotide
aucccacguaagaauccug

SEQ ID NO: 341688 - RNA, 19 nt, Artificial Sequence
  Description of Artificial Sequence: Synthetic oligonucleotide
cugggugguugacagugaa

SEQ ID NO: 341689 - RNA, 19 nt, Artificial Sequence
  Description of Artificial Sequence: Synthetic oligonucleotide
aucauccuacgccguugau

SEQ ID NO: 341690 - RNA, 19 nt, Artificial Sequence
  Description of Artificial Sequence: Synthetic oligonucleotide
uauugcaggugagguugua

SEQ ID NO: 341691 - RNA, 19 nt, Artificial Sequence
  Description of Artificial Sequence: Synthetic oligonucleotide
caugucgcccacugcuuaa

SEQ ID NO: 341692 - RNA, 19 nt, Artificial Sequence
  Description of Artificial Sequence: Synthetic oligonucleotide
ugaugagccuugggucacu

SEQ ID NO: 341693 - RNA, 19 nt, Artificial Sequence
  Description of Artificial Sequence: Synthetic oligonucleotide
ugaccucaugaaggaggcu

SEQ ID NO: 341694 - RNA, 19 nt, Artificial Sequence
  Description of Artificial Sequence: Synthetic oligonucleotide
cgugaaacuguguucaugu

SEQ ID NO: 341695 - RNA, 19 nt, Artificial Sequence
  Description of Artificial Sequence: Synthetic oligonucleotide
cauauucuuagcccugcuu

SEQ ID NO: 341696 - RNA, 19 nt, Artificial Sequence
  Description of Artificial Sequence: Synthetic oligonucleotide
gccguugaucuaguaauuc

SEQ ID NO: 341697 - RNA, 19 nt, Artificial Sequence
  Description of Artificial Sequence: Synthetic oligonucleotide
gcacuuugaugagccuugg

SEQ ID NO: 341698 - RNA, 19 nt, Artificial Sequence
  Description of Artificial Sequence: Synthetic oligonucleotide
ggcagacugguuauccaca

SEQ ID NO: 341699 - RNA, 19 nt, Artificial Sequence
  Description of Artificial Sequence: Synthetic oligonucleotide
ggagucugugcaaaguccu

SEQ ID NO: 341700 - RNA, 19 nt, Artificial Sequence
  Description of Artificial Sequence: Synthetic oligonucleotide
ggauccuggugauuauugu

SEQ ID NO: 341701 - RNA, 19 nt, Artificial Sequence
  Description of Artificial Sequence: Synthetic oligonucleotide
gccccuacaauagacugaa

SEQ ID NO: 341702 - RNA, 19 nt, Artificial Sequence
  Description of Artificial Sequence: Synthetic oligonucleotide
gagagacuuaggaggaauu

SEQ ID NO: 341703 - RNA, 19 nt, Artificial Sequence
  Description of Artificial Sequence: Synthetic oligonucleotide
guagcaccgugggguggcg

SEQ ID NO: 341704 - RNA, 19 nt, Artificial Sequence
  Description of Artificial Sequence: Synthetic oligonucleotide
guguucaagggcuguuaau

SEQ ID NO: 341705 - RNA, 19 nt, Artificial Sequence
  Description of Artificial Sequence: Synthetic oligonucleotide
ggucaguuuaggggcauaa

SEQ ID NO: 341706 - RNA, 19 nt, Artificial Sequence
  Description of Artificial Sequence: Synthetic oligonucleotide
ggauaggcagacugguuau

SEQ ID NO: 341707 - RNA, 19 nt, Artificial Sequence
  Description of Artificial Sequence: Synthetic oligonucleotide
gccacuacuugaaggaugu

SEQ ID NO: 341708 - RNA, 19 nt, Artificial Sequence
  Description of Artificial Sequence: Synthetic oligonucleotide
aguucacgcccuggauacu

SEQ ID NO: 341709 - RNA, 19 nt, Artificial Sequence
  Description of Artificial Sequence: Synthetic oligonucleotide
ccacaugacccggagucug

SEQ ID NO: 341710 - RNA, 19 nt, Artificial Sequence
  Description of Artificial Sequence: Synthetic oligonucleotide
caauugcuuguagcuagua

SEQ ID NO: 341711 - RNA, 19 nt, Artificial Sequence
  Description of Artificial Sequence: Synthetic oligonucleotide
ggugaaucagagccagaau

SEQ ID NO: 341712 - RNA, 19 nt, Artificial Sequence
  Description of Artificial Sequence: Synthetic oligonucleotide
gguguaucaggagauccau

SEQ ID NO: 341713 - RNA, 19 nt, Artificial Sequence
  Description of Artificial Sequence: Synthetic oligonucleotide
guaggaccuuccagugaca

SEQ ID NO: 341714 - RNA, 19 nt, Artificial Sequence
  Description of Artificial Sequence: Synthetic oligonucleotide
ccguugaucuaguaauucu

SEQ ID NO: 341715 - RNA, 19 nt, Artificial Sequence
  Description of Artificial Sequence: Synthetic oligonucleotide
accucaccaaggguccgau

SEQ ID NO: 341716 - RNA, 19 nt, Artificial Sequence
  Description of Artificial Sequence: Synthetic oligonucleotide
ccuccccguuuuaaauuac

SEQ ID NO: 341717 - RNA, 19 nt, Artificial Sequence
  Description of Artificial Sequence: Synthetic oligonucleotide
gcuaugugccggaaugcaa

SEQ ID NO: 341718 - RNA, 19 nt, Artificial Sequence
  Description of Artificial Sequence: Synthetic oligonucleotide
ccacguagcugaugagguc

SEQ ID NO: 341719 - RNA, 19 nt, Artificial Sequence
  Description of Artificial Sequence: Synthetic oligonucleotide
cuauucucucucacagcuu

SEQ ID NO: 341720 - RNA, 19 nt, Artificial Sequence
  Description of Artificial Sequence: Synthetic oligonucleotide
gccggaaugcaagggacaa

SEQ ID NO: 341721 - RNA, 19 nt, Artificial Sequence
  Description of Artificial Sequence: Synthetic oligonucleotide
accaaggguccgauccaaa

SEQ ID NO: 341722 - RNA, 19 nt, Artificial Sequence
  Description of Artificial Sequence: Synthetic oligonucleotide
agcuagcuaugugccggaa

SEQ ID NO: 341723 - RNA, 19 nt, Artificial Sequence
  Description of Artificial Sequence: Synthetic oligonucleotide
gucaguuuaggggcauaau

SEQ ID NO: 341724 - RNA, 19 nt, Artificial Sequence
  Description of Artificial Sequence: Synthetic oligonucleotide
gcagacugguuauccacau

SEQ ID NO: 341725 - RNA, 19 nt, Artificial Sequence
  Description of Artificial Sequence: Synthetic oligonucleotide
cagagagacuuaggaggaa

SEQ ID NO: 341726 - RNA, 19 nt, Artificial Sequence
  Description of Artificial Sequence: Synthetic oligonucleotide
ccggaaugcaagggacaag

SEQ ID NO: 341727 - RNA, 19 nt, Artificial Sequence
  Description of Artificial Sequence: Synthetic oligonucleotide
gcuagcuaugugccggaau

SEQ ID NO: 341728 - RNA, 19 nt, Artificial Sequence
  Description of Artificial Sequence: Synthetic oligonucleotide
ccucaugaaggaggcuuuc

SEQ ID NO: 341729 - RNA, 19 nt, Artificial Sequence
  Description of Artificial Sequence: Synthetic oligonucleotide
ccacuuucggacaucuuuu

SEQ ID NO: 341730 - RNA, 19 nt, Artificial Sequence
  Description of Artificial Sequence: Synthetic oligonucleotide
caugugccuucgaaugcuu

SEQ ID NO: 341731 - RNA, 19 nt, Artificial Sequence
  Description of Artificial Sequence: Synthetic oligonucleotide
cuacgccguugaucuagua

SEQ ID NO: 341732 - RNA, 19 nt, Artificial Sequence
  Description of Artificial Sequence: Synthetic oligonucleotide
gcggccagacuguacaauu

SEQ ID NO: 341733 - RNA, 19 nt, Artificial Sequence
  Description of Artificial Sequence: Synthetic oligonucleotide
cccuggauacugcuauucu

SEQ ID NO: 341734 - RNA, 19 nt, Artificial Sequence
  Description of Artificial Sequence: Synthetic oligonucleotide
ccaugugccuucgaaugcu

SEQ ID NO: 341735 - RNA, 19 nt, Artificial Sequence
  Description of Artificial Sequence: Synthetic oligonucleotide
gggucccugaagaaacaau

SEQ ID NO: 341736 - RNA, 19 nt, Artificial Sequence
  Description of Artificial Sequence: Synthetic oligonucleotide
ccucugccccuacaauaga

SEQ ID NO: 341737 - RNA, 19 nt, Artificial Sequence
  Description of Artificial Sequence: Synthetic oligonucleotide
ccacuacuugaaggaugug

SEQ ID NO: 341738 - RNA, 19 nt, Artificial Sequence
  Description of Artificial Sequence: Synthetic oligonucleotide
cggccagacuguacaauua

SEQ ID NO: 341739 - RNA, 19 nt, Artificial Sequence
  Description of Artificial Sequence: Synthetic oligonucleotide
ccuacgccguugaucuagu

SEQ ID NO: 341740 - RNA, 19 nt, Artificial Sequence
  Description of Artificial Sequence: Synthetic oligonucleotide
gggccacuacuugaaggau

SEQ ID NO: 341741 - RNA, 19 nt, Artificial Sequence
  Description of Artificial Sequence: Synthetic oligonucleotide
gggucaguuuaggggcaua

SEQ ID NO: 341742 - RNA, 19 nt, Artificial Sequence
  Description of Artificial Sequence: Synthetic oligonucleotide
ggccuugcaccgagaggaa

SEQ ID NO: 341743 - RNA, 19 nt, Artificial Sequence
  Description of Artificial Sequence: Synthetic oligonucleotide
gcgaagggaacagcacuuu

SEQ ID NO: 341744 - RNA, 19 nt, Artificial Sequence
  Description of Artificial Sequence: Synthetic oligonucleotide
cauuuaccuuuagcuucuu

SEQ ID NO: 341745 - RNA, 19 nt, Artificial Sequence
  Description of Artificial Sequence: Synthetic oligonucleotide
ggggucaguuuaggggcau

SEQ ID NO: 341746 - RNA, 19 nt, Artificial Sequence
  Description of Artificial Sequence: Synthetic oligonucleotide
ccccuacaauagacugaaa

SEQ ID NO: 341747 - RNA, 19 nt, Artificial Sequence
  Description of Artificial Sequence: Synthetic oligonucleotide
cugaagcgaucaggacauu

SEQ ID NO: 341748 - RNA, 19 nt, Artificial Sequence
  Description of Artificial Sequence: Synthetic oligonucleotide
uuucuaaucaaacagaagg

SEQ ID NO: 341749 - RNA, 19 nt, Artificial Sequence
  Description of Artificial Sequence: Synthetic oligonucleotide
aaaugaguuaugcugaaac

SEQ ID NO: 341750 - RNA, 19 nt, Artificial Sequence
  Description of Artificial Sequence: Synthetic oligonucleotide
ucugaaaccaccuugauca

SEQ ID NO: 341751 - RNA, 19 nt, Artificial Sequence
  Description of Artificial Sequence: Synthetic oligonucleotide
aaagcuucauauuaggguc

SEQ ID NO: 341752 - RNA, 19 nt, Artificial Sequence
  Description of Artificial Sequence: Synthetic oligonucleotide
aaagguuaacuguuguagc

SEQ ID NO: 341753 - RNA, 19 nt, Artificial Sequence
  Description of Artificial Sequence: Synthetic oligonucleotide
uuauuauuggcccugaggu

SEQ ID NO: 341754 - RNA, 19 nt, Artificial Sequence
  Description of Artificial Sequence: Synthetic oligonucleotide
uuuccaauuaucaauccag

SEQ ID NO: 341755 - RNA, 19 nt, Artificial Sequence
  Description of Artificial Sequence: Synthetic oligonucleotide
agugauagauauuuuguac

SEQ ID NO: 341756 - RNA, 19 nt, Artificial Sequence
  Description of Artificial Sequence: Synthetic oligonucleotide
aaaacacuacuuuaaacca

SEQ ID NO: 341757 - RNA, 19 nt, Artificial Sequence
  Description of Artificial Sequence: Synthetic oligonucleotide
uaugacaaugccaacagca

SEQ ID NO: 341758 - RNA, 19 nt, Artificial Sequence
  Description of Artificial Sequence: Synthetic oligonucleotide
aaagcuuauagauuugugu

SEQ ID NO: 341759 - RNA, 19 nt, Artificial Sequence
  Description of Artificial Sequence: Synthetic oligonucleotide
uguaucuuaauuuaucacu

SEQ ID NO: 341760 - RNA, 19 nt, Artificial Sequence
  Description of Artificial Sequence: Synthetic oligonucleotide
gaaacagccaaauacaaca

SEQ ID NO: 341761 - RNA, 19 nt, Artificial Sequence
  Description of Artificial Sequence: Synthetic oligonucleotide
auauauccaacuuaccgac

SEQ ID NO: 341762 - RNA, 19 nt, Artificial Sequence
  Description of Artificial Sequence: Synthetic oligonucleotide
uacaucuacacuaaggacu

SEQ ID NO: 341763 - RNA, 19 nt, Artificial Sequence
  Description of Artificial Sequence: Synthetic oligonucleotide
acuguauucgaacaccagc

SEQ ID NO: 341764 - RNA, 19 nt, Artificial Sequence
  Description of Artificial Sequence: Synthetic oligonucleotide
aacuuaccgacacaggagg

SEQ ID NO: 341765 - RNA, 19 nt, Artificial Sequence
  Description of Artificial Sequence: Synthetic oligonucleotide
cugucuauaguauucagcc

SEQ ID NO: 341766 - RNA, 19 nt, Artificial Sequence
  Description of Artificial Sequence: Synthetic oligonucleotide
aaaagauccuccaaucuac

SEQ ID NO: 341767 - RNA, 19 nt, Artificial Sequence
  Description of Artificial Sequence: Synthetic oligonucleotide
aauuaaacuccugcagucc

SEQ ID NO: 341768 - RNA, 19 nt, Artificial Sequence
  Description of Artificial Sequence: Synthetic oligonucleotide
uauacuaaagaucacugua

SEQ ID NO: 341769 - RNA, 19 nt, Artificial Sequence
  Description of Artificial Sequence: Synthetic oligonucleotide
aaaggauuuacugggcccc

SEQ ID NO: 341770 - RNA, 19 nt, Artificial Sequence
  Description of Artificial Sequence: Synthetic oligonucleotide
accacuauacuacaagggg

SEQ ID NO: 341771 - RNA, 19 nt, Artificial Sequence
  Description of Artificial Sequence: Synthetic oligonucleotide
aauugggacaucuaucccu

SEQ ID NO: 341772 - RNA, 19 nt, Artificial Sequence
  Description of Artificial Sequence: Synthetic oligonucleotide
aguagugauagauauuuug

SEQ ID NO: 341773 - RNA, 19 nt, Artificial Sequence
  Description of Artificial Sequence: Synthetic oligonucleotide
acuauaaucuggcugacca

SEQ ID NO: 341774 - RNA, 19 nt, Artificial Sequence
  Description of Artificial Sequence: Synthetic oligonucleotide
cacagaaauaguaaccucc

SEQ ID NO: 341775 - RNA, 19 nt, Artificial Sequence
  Description of Artificial Sequence: Synthetic oligonucleotide
acgaauuagcuccaauacc

SEQ ID NO: 341776 - RNA, 19 nt, Artificial Sequence
  Description of Artificial Sequence: Synthetic oligonucleotide
ugcacuauaaucuggcuga

SEQ ID NO: 341777 - RNA, 19 nt, Artificial Sequence
  Description of Artificial Sequence: Synthetic oligonucleotide
auauccaacuuaccgacac

SEQ ID NO: 341778 - RNA, 19 nt, Artificial Sequence
  Description of Artificial Sequence: Synthetic oligonucleotide
aagacaucaggauuacuug

SEQ ID NO: 341779 - RNA, 19 nt, Artificial Sequence
  Description of Artificial Sequence: Synthetic oligonucleotide
ucuacacagaaauaguaac

SEQ ID NO: 341780 - RNA, 19 nt, Artificial Sequence
  Description of Artificial Sequence: Synthetic oligonucleotide
uuaugaauccuuuacccac

SEQ ID NO: 341781 - RNA, 19 nt, Artificial Sequence
  Description of Artificial Sequence: Synthetic oligonucleotide
uugaaccauacucauuccg

SEQ ID NO: 341782 - RNA, 19 nt, Artificial Sequence
  Description of Artificial Sequence: Synthetic oligonucleotide
uccauauauuuaacaaagg

SEQ ID NO: 341783 - RNA, 19 nt, Artificial Sequence
  Description of Artificial Sequence: Synthetic oligonucleotide
uaacugugcuccaaaagag

SEQ ID NO: 341784 - RNA, 19 nt, Artificial Sequence
  Description of Artificial Sequence: Synthetic oligonucleotide
ugaagcucuauucuugcgc

SEQ ID NO: 341785 - RNA, 19 nt, Artificial Sequence
  Description of Artificial Sequence: Synthetic oligonucleotide
uaguauucagcccaugcug

SEQ ID NO: 341786 - RNA, 19 nt, Artificial Sequence
  Description of Artificial Sequence: Synthetic oligonucleotide
aauuuaucacugcuaagaa

SEQ ID NO: 341787 - RNA, 19 nt, Artificial Sequence
  Description of Artificial Sequence: Synthetic oligonucleotide
uacuguauuguccacuucu

SEQ ID NO: 341788 - RNA, 19 nt, Artificial Sequence
  Description of Artificial Sequence: Synthetic oligonucleotide
caguuagcauacaagaccc

SEQ ID NO: 341789 - RNA, 19 nt, Artificial Sequence
  Description of Artificial Sequence: Synthetic oligonucleotide
auaagcauuuccccacccc

SEQ ID NO: 341790 - RNA, 19 nt, Artificial Sequence
  Description of Artificial Sequence: Synthetic oligonucleotide
aacacuacguagaaggucu

SEQ ID NO: 341791 - RNA, 19 nt, Artificial Sequence
  Description of Artificial Sequence: Synthetic oligonucleotide
augaaguauacuaaagauc

SEQ ID NO: 341792 - RNA, 19 nt, Artificial Sequence
  Description of Artificial Sequence: Synthetic oligonucleotide
uguauggucccauuggagu

SEQ ID NO: 341793 - RNA, 19 nt, Artificial Sequence
  Description of Artificial Sequence: Synthetic oligonucleotide
ucuaaucaaacagaaggga

SEQ ID NO: 341794 - RNA, 19 nt, Artificial Sequence
  Description of Artificial Sequence: Synthetic oligonucleotide
ucuggcuuaaacuguauuc

SEQ ID NO: 341795 - RNA, 19 nt, Artificial Sequence
  Description of Artificial Sequence: Synthetic oligonucleotide
acacaugcaguuucuaauc

SEQ ID NO: 341796 - RNA, 19 nt, Artificial Sequence
  Description of Artificial Sequence: Synthetic oligonucleotide
uucacuguuaaugcaauga

SEQ ID NO: 341797 - RNA, 19 nt, Artificial Sequence
  Description of Artificial Sequence: Synthetic oligonucleotide
uguauuguccacuucuuau

SEQ ID NO: 341798 - RNA, 19 nt, Artificial Sequence
  Description of Artificial Sequence: Synthetic oligonucleotide
gaagcucuauucuugcgcc

SEQ ID NO: 341799 - RNA, 19 nt, Artificial Sequence
  Description of Artificial Sequence: Synthetic oligonucleotide
ugugcuauccuaucuggug

SEQ ID NO: 341800 - RNA, 19 nt, Artificial Sequence
  Description of Artificial Sequence: Synthetic oligonucleotide
uccguaguuaccuugccca

SEQ ID NO: 341801 - RNA, 19 nt, Artificial Sequence
  Description of Artificial Sequence: Synthetic oligonucleotide
ggaauugggacaucuaucc

SEQ ID NO: 341802 - RNA, 19 nt, Artificial Sequence
  Description of Artificial Sequence: Synthetic oligonucleotide
uguuaaugcaaugaaguau

SEQ ID NO: 341803 - RNA, 19 nt, Artificial Sequence
  Description of Artificial Sequence: Synthetic oligonucleotide
ucaguagugauagauauuu

SEQ ID NO: 341804 - RNA, 19 nt, Artificial Sequence
  Description of Artificial Sequence: Synthetic oligonucleotide
uauucuugcgccagauugc

SEQ ID NO: 341805 - RNA, 19 nt, Artificial Sequence
  Description of Artificial Sequence: Synthetic oligonucleotide
cuuuguauaaucaaccugu

SEQ ID NO: 341806 - RNA, 19 nt, Artificial Sequence
  Description of Artificial Sequence: Synthetic oligonucleotide
uuccgaacuucucugaaac

SEQ ID NO: 341807 - RNA, 19 nt, Artificial Sequence
  Description of Artificial Sequence: Synthetic oligonucleotide
aguauucagcccaugcugc

SEQ ID NO: 341808 - RNA, 19 nt, Artificial Sequence
  Description of Artificial Sequence: Synthetic oligonucleotide
guaucuuaauuuaucacug

SEQ ID NO: 341809 - RNA, 19 nt, Artificial Sequence
  Description of Artificial Sequence: Synthetic oligonucleotide
cuaaaggauuuacugggcc

SEQ ID NO: 341810 - RNA, 19 nt, Artificial Sequence
  Description of Artificial Sequence: Synthetic oligonucleotide
aaagauccuccaaucuacc

SEQ ID NO: 341811 - RNA, 19 nt, Artificial Sequence
  Description of Artificial Sequence: Synthetic oligonucleotide
gucuauaguauucagccca

SEQ ID NO: 341812 - RNA, 19 nt, Artificial Sequence
  Description of Artificial Sequence: Synthetic oligonucleotide
ugauagauauuuuguacau

SEQ ID NO: 341813 - RNA, 19 nt, Artificial Sequence
  Description of Artificial Sequence: Synthetic oligonucleotide
augaugaaagccaggggcc

SEQ ID NO: 341814 - RNA, 19 nt, Artificial Sequence
  Description of Artificial Sequence: Synthetic oligonucleotide
auagugagcauaguaagca

SEQ ID NO: 341815 - RNA, 19 nt, Artificial Sequence
  Description of Artificial Sequence: Synthetic oligonucleotide
aguauacuaaagaucacug

SEQ ID NO: 341816 - RNA, 19 nt, Artificial Sequence
  Description of Artificial Sequence: Synthetic oligonucleotide
gugauagauauuuuguaca

SEQ ID NO: 341817 - RNA, 19 nt, Artificial Sequence
  Description of Artificial Sequence: Synthetic oligonucleotide
aauaacgagucccgccuug

SEQ ID NO: 341818 - RNA, 19 nt, Artificial Sequence
  Description of Artificial Sequence: Synthetic oligonucleotide
auaaucaaccuguccagcu

SEQ ID NO: 341819 - RNA, 19 nt, Artificial Sequence
  Description of Artificial Sequence: Synthetic oligonucleotide
cacgaauuagcuccaauac

SEQ ID NO: 341820 - RNA, 19 nt, Artificial Sequence
  Description of Artificial Sequence: Synthetic oligonucleotide
auaguaugcugcuugcugu

SEQ ID NO: 341821 - RNA, 19 nt, Artificial Sequence
  Description of Artificial Sequence: Synthetic oligonucleotide
ucuacacuaaggacuaaaa

SEQ ID NO: 341822 - RNA, 19 nt, Artificial Sequence
  Description of Artificial Sequence: Synthetic oligonucleotide
cuuaaacuguauucgaaca

SEQ ID NO: 341823 - RNA, 19 nt, Artificial Sequence
  Description of Artificial Sequence: Synthetic oligonucleotide
agugccacgaauuguaaaa

SEQ ID NO: 341824 - RNA, 19 nt, Artificial Sequence
  Description of Artificial Sequence: Synthetic oligonucleotide
gauuacuugugcugaaaca

SEQ ID NO: 341825 - RNA, 19 nt, Artificial Sequence
  Description of Artificial Sequence: Synthetic oligonucleotide
gcuugcugaacuuuguacg

SEQ ID NO: 341826 - RNA, 19 nt, Artificial Sequence
  Description of Artificial Sequence: Synthetic oligonucleotide
uucuaugaguugccgagca

SEQ ID NO: 341827 - RNA, 19 nt, Artificial Sequence
  Description of Artificial Sequence: Synthetic oligonucleotide
uuguauggucccauuggag

SEQ ID NO: 341828 - RNA, 19 nt, Artificial Sequence
  Description of Artificial Sequence: Synthetic oligonucleotide
aaugccaacagcaaaucuu

SEQ ID NO: 341829 - RNA, 19 nt, Artificial Sequence
  Description of Artificial Sequence: Synthetic oligonucleotide
ucggagguaacugugcucc

SEQ ID NO: 341830 - RNA, 19 nt, Artificial Sequence
  Description of Artificial Sequence: Synthetic oligonucleotide
cauaguaugcugcuugcug

SEQ ID NO: 341831 - RNA, 19 nt, Artificial Sequence
  Description of Artificial Sequence: Synthetic oligonucleotide
cuccaaucuaccacuauac

SEQ ID NO: 341832 - RNA, 19 nt, Artificial Sequence
  Description of Artificial Sequence: Synthetic oligonucleotide
cauaguaagcagcccacgc

SEQ ID NO: 341833 - RNA, 19 nt, Artificial Sequence
  Description of Artificial Sequence: Synthetic oligonucleotide
uuuugaggagcaaacuuuu

SEQ ID NO: 341834 - RNA, 19 nt, Artificial Sequence
  Description of Artificial Sequence: Synthetic oligonucleotide
ucacgaauuagcuccaaua

SEQ ID NO: 341835 - RNA, 19 nt, Artificial Sequence
  Description of Artificial Sequence: Synthetic oligonucleotide
gguuguauggucccauugg

SEQ ID NO: 341836 - RNA, 19 nt, Artificial Sequence
  Description of Artificial Sequence: Synthetic oligonucleotide
acgagucccgccuugcugg

SEQ ID NO: 341837 - RNA, 19 nt, Artificial Sequence
  Description of Artificial Sequence: Synthetic oligonucleotide
ugcuugacccauuuucuug

SEQ ID NO: 341838 - RNA, 19 nt, Artificial Sequence
  Description of Artificial Sequence: Synthetic oligonucleotide
uacuaaagaucacuguaua

SEQ ID NO: 341839 - RNA, 19 nt, Artificial Sequence
  Description of Artificial Sequence: Synthetic oligonucleotide
ugucuauaguauucagccc

SEQ ID NO: 341840 - RNA, 19 nt, Artificial Sequence
  Description of Artificial Sequence: Synthetic oligonucleotide
auccuuuacccacauauau

SEQ ID NO: 341841 - RNA, 19 nt, Artificial Sequence
  Description of Artificial Sequence: Synthetic oligonucleotide
uggaauugggacaucuauc

SEQ ID NO: 341842 - RNA, 19 nt, Artificial Sequence
  Description of Artificial Sequence: Synthetic oligonucleotide
caacuuaccgacacaggag

SEQ ID NO: 341843 - RNA, 19 nt, Artificial Sequence
  Description of Artificial Sequence: Synthetic oligonucleotide
uccuaugacaaugccaaca

SEQ ID NO: 341844 - RNA, 19 nt, Artificial Sequence
  Description of Artificial Sequence: Synthetic oligonucleotide
uuuguacgggucaccagug

SEQ ID NO: 341845 - RNA, 19 nt, Artificial Sequence
  Description of Artificial Sequence: Synthetic oligonucleotide
aauuaucaauccaguuuuc

SEQ ID NO: 341846 - RNA, 19 nt, Artificial Sequence
  Description of Artificial Sequence: Synthetic oligonucleotide
gaugcaucggagguaacug

SEQ ID NO: 341847 - RNA, 19 nt, Artificial Sequence
  Description of Artificial Sequence: Synthetic oligonucleotide
ccaguuagcauacaagacc

SEQ ID NO: 341848 - RNA, 19 nt, Artificial Sequence
  Description of Artificial Sequence: Synthetic oligonucleotide
aauuagcuccaauaccauu

SEQ ID NO: 341849 - RNA, 19 nt, Artificial Sequence
  Description of Artificial Sequence: Synthetic oligonucleotide
uagugauagauauuuugua

SEQ ID NO: 341850 - RNA, 19 nt, Artificial Sequence
  Description of Artificial Sequence: Synthetic oligonucleotide
cccuaaaggauuuacuggg

SEQ ID NO: 341851 - RNA, 19 nt, Artificial Sequence
  Description of Artificial Sequence: Synthetic oligonucleotide
uucauauuagggucugcgu

SEQ ID NO: 341852 - RNA, 19 nt, Artificial Sequence
  Description of Artificial Sequence: Synthetic oligonucleotide
cagucuuggaaauaaguga

SEQ ID NO: 341853 - RNA, 19 nt, Artificial Sequence
  Description of Artificial Sequence: Synthetic oligonucleotide
uauaaucaaccuguccagc

SEQ ID NO: 341854 - RNA, 19 nt, Artificial Sequence
  Description of Artificial Sequence: Synthetic oligonucleotide
uccuuuacccacauauauc

SEQ ID NO: 341855 - RNA, 19 nt, Artificial Sequence
  Description of Artificial Sequence: Synthetic oligonucleotide
uagugagcauaguaagcag

SEQ ID NO: 341856 - RNA, 19 nt, Artificial Sequence
  Description of Artificial Sequence: Synthetic oligonucleotide
ugaacacuacguagaaggu

SEQ ID NO: 341857 - RNA, 19 nt, Artificial Sequence
  Description of Artificial Sequence: Synthetic oligonucleotide
uucuaagggucucuuuugu

SEQ ID NO: 341858 - RNA, 19 nt, Artificial Sequence
  Description of Artificial Sequence: Synthetic oligonucleotide
accccuggggagcauaugg

SEQ ID NO: 341859 - RNA, 19 nt, Artificial Sequence
  Description of Artificial Sequence: Synthetic oligonucleotide
uuagggucugcguuaggug

SEQ ID NO: 341860 - RNA, 19 nt, Artificial Sequence
  Description of Artificial Sequence: Synthetic oligonucleotide
ugaugaaagccaggggccg

SEQ ID NO: 341861 - RNA, 19 nt, Artificial Sequence
  Description of Artificial Sequence: Synthetic oligonucleotide
aacgagucccgccuugcug

SEQ ID NO: 341862 - RNA, 19 nt, Artificial Sequence
  Description of Artificial Sequence: Synthetic oligonucleotide
agaaauuaugaauccuuua

SEQ ID NO: 341863 - RNA, 19 nt, Artificial Sequence
  Description of Artificial Sequence: Synthetic oligonucleotide
uagcauacaagacccugcu

SEQ ID NO: 341864 - RNA, 19 nt, Artificial Sequence
  Description of Artificial Sequence: Synthetic oligonucleotide
cucauuccgaacuucucug

SEQ ID NO: 341865 - RNA, 19 nt, Artificial Sequence
  Description of Artificial Sequence: Synthetic oligonucleotide
agcauuuccccaccccugg

SEQ ID NO: 341866 - RNA, 19 nt, Artificial Sequence
  Description of Artificial Sequence: Synthetic oligonucleotide
aacacuacuuuaaaccaaa

SEQ ID NO: 341867 - RNA, 19 nt, Artificial Sequence
  Description of Artificial Sequence: Synthetic oligonucleotide
ucagguguuccaguuagca

SEQ ID NO: 341868 - RNA, 19 nt, Artificial Sequence
  Description of Artificial Sequence: Synthetic oligonucleotide
uccaaucuaccacuauacu

SEQ ID NO: 341869 - RNA, 19 nt, Artificial Sequence
  Description of Artificial Sequence: Synthetic oligonucleotide
uacgggucaccagugaucc

SEQ ID NO: 341870 - RNA, 19 nt, Artificial Sequence
  Description of Artificial Sequence: Synthetic oligonucleotide
uugguuuggguuguaguug

SEQ ID NO: 341871 - RNA, 19 nt, Artificial Sequence
  Description of Artificial Sequence: Synthetic oligonucleotide
ggucccauauuccaguugc

SEQ ID NO: 341872 - RNA, 19 nt, Artificial Sequence
  Description of Artificial Sequence: Synthetic oligonucleotide
aaaacaugccaguguuuaa

SEQ ID NO: 341873 - RNA, 19 nt, Artificial Sequence
  Description of Artificial Sequence: Synthetic oligonucleotide
aagaaauuaugaauccuuu

SEQ ID NO: 341874 - RNA, 19 nt, Artificial Sequence
  Description of Artificial Sequence: Synthetic oligonucleotide
agcuuauagauuuguguau

SEQ ID NO: 341875 - RNA, 19 nt, Artificial Sequence
  Description of Artificial Sequence: Synthetic oligonucleotide
auccaacuuaccgacacag

SEQ ID NO: 341876 - RNA, 19 nt, Artificial Sequence
  Description of Artificial Sequence: Synthetic oligonucleotide
guacaucuacacuaaggac

SEQ ID NO: 341877 - RNA, 19 nt, Artificial Sequence
  Description of Artificial Sequence: Synthetic oligonucleotide
uuauaucacaaagcauuga

SEQ ID NO: 341878 - RNA, 19 nt, Artificial Sequence
  Description of Artificial Sequence: Synthetic oligonucleotide
ucgccaugaugaaagccag

SEQ ID NO: 341879 - RNA, 19 nt, Artificial Sequence
  Description of Artificial Sequence: Synthetic oligonucleotide
cugcacuauaaucuggcug

SEQ ID NO: 341880 - RNA, 19 nt, Artificial Sequence
  Description of Artificial Sequence: Synthetic oligonucleotide
uuucacuguuaaugcaaug

SEQ ID NO: 341881 - RNA, 19 nt, Artificial Sequence
  Description of Artificial Sequence: Synthetic oligonucleotide
gaucuccguaguuaccuug

SEQ ID NO: 341882 - RNA, 19 nt, Artificial Sequence
  Description of Artificial Sequence: Synthetic oligonucleotide
guuagcauacaagacccug

SEQ ID NO: 341883 - RNA, 19 nt, Artificial Sequence
  Description of Artificial Sequence: Synthetic oligonucleotide
gaaucaugauuuccugaac

SEQ ID NO: 341884 - RNA, 19 nt, Artificial Sequence
  Description of Artificial Sequence: Synthetic oligonucleotide
guuucuaaucaaacagaag

SEQ ID NO: 341885 - RNA, 19 nt, Artificial Sequence
  Description of Artificial Sequence: Synthetic oligonucleotide
aggaaucaugauuuccuga

SEQ ID NO: 341886 - RNA, 19 nt, Artificial Sequence
  Description of Artificial Sequence: Synthetic oligonucleotide
gucauuuugaggagcaaac

SEQ ID NO: 341887 - RNA, 19 nt, Artificial Sequence
  Description of Artificial Sequence: Synthetic oligonucleotide
auuucuacacagaaauagu

SEQ ID NO: 341888 - RNA, 19 nt, Artificial Sequence
  Description of Artificial Sequence: Synthetic oligonucleotide
auuagggucugcguuaggu

SEQ ID NO: 341889 - RNA, 19 nt, Artificial Sequence
  Description of Artificial Sequence: Synthetic oligonucleotide
uaaucuccgcagcaugcug

SEQ ID NO: 341890 - RNA, 19 nt, Artificial Sequence
  Description of Artificial Sequence: Synthetic oligonucleotide
aggccuuuguauaaucaac

SEQ ID NO: 341891 - RNA, 19 nt, Artificial Sequence
  Description of Artificial Sequence: Synthetic oligonucleotide
ucuauaguauucagcccau

SEQ ID NO: 341892 - RNA, 19 nt, Artificial Sequence
  Description of Artificial Sequence: Synthetic oligonucleotide
accagugauccuaagaggu

SEQ ID NO: 341893 - RNA, 19 nt, Artificial Sequence
  Description of Artificial Sequence: Synthetic oligonucleotide
ucaaaugaguuaugcugaa

SEQ ID NO: 341894 - RNA, 19 nt, Artificial Sequence
  Description of Artificial Sequence: Synthetic oligonucleotide
gugagcauaguaagcagcc

SEQ ID NO: 341895 - RNA, 19 nt, Artificial Sequence
  Description of Artificial Sequence: Synthetic oligonucleotide
ugcugaucuccguaguuac

SEQ ID NO: 341896 - RNA, 19 nt, Artificial Sequence
  Description of Artificial Sequence: Synthetic oligonucleotide
cuggauuguaaggugcagg

SEQ ID NO: 341897 - RNA, 19 nt, Artificial Sequence
  Description of Artificial Sequence: Synthetic oligonucleotide
gcauacaagacccugcuga

SEQ ID NO: 341898 - RNA, 19 nt, Artificial Sequence
  Description of Artificial Sequence: Synthetic oligonucleotide
aucuccguaguuaccuugc

SEQ ID NO: 341899 - RNA, 19 nt, Artificial Sequence
  Description of Artificial Sequence: Synthetic oligonucleotide
cagccugaacacuacguag

SEQ ID NO: 341900 - RNA, 19 nt, Artificial Sequence
  Description of Artificial Sequence: Synthetic oligonucleotide
auaacgagucccgccuugc

SEQ ID NO: 341901 - RNA, 19 nt, Artificial Sequence
  Description of Artificial Sequence: Synthetic oligonucleotide
gcuuaaacuguauucgaac

SEQ ID NO: 341902 - RNA, 19 nt, Artificial Sequence
  Description of Artificial Sequence: Synthetic oligonucleotide
ugccaacagcaaaucuugg

SEQ ID NO: 341903 - RNA, 19 nt, Artificial Sequence
  Description of Artificial Sequence: Synthetic oligonucleotide
uccuggauuguaaggugca

SEQ ID NO: 341904 - RNA, 19 nt, Artificial Sequence
  Description of Artificial Sequence: Synthetic oligonucleotide
aguuaccuugcccauuggu

SEQ ID NO: 341905 - RNA, 19 nt, Artificial Sequence
  Description of Artificial Sequence: Synthetic oligonucleotide
acaaugccaacagcaaauc

SEQ ID NO: 341906 - RNA, 19 nt, Artificial Sequence
  Description of Artificial Sequence: Synthetic oligonucleotide
aucgccaugaugaaagcca

SEQ ID NO: 341907 - RNA, 19 nt, Artificial Sequence
  Description of Artificial Sequence: Synthetic oligonucleotide
caaccuguccagcuggagc

SEQ ID NO: 341908 - RNA, 19 nt, Artificial Sequence
  Description of Artificial Sequence: Synthetic oligonucleotide
guggauaagcauuucccca

SEQ ID NO: 341909 - RNA, 19 nt, Artificial Sequence
  Description of Artificial Sequence: Synthetic oligonucleotide
ggcccuaaaggauuuacug

SEQ ID NO: 341910 - RNA, 19 nt, Artificial Sequence
  Description of Artificial Sequence: Synthetic oligonucleotide
gaguuaugcugaaacaguc

SEQ ID NO: 341911 - RNA, 19 nt, Artificial Sequence
  Description of Artificial Sequence: Synthetic oligonucleotide
aaacacuacuuuaaaccaa

SEQ ID NO: 341912 - RNA, 19 nt, Artificial Sequence
  Description of Artificial Sequence: Synthetic oligonucleotide
gcccuaaaggauuuacugg

SEQ ID NO: 341913 - RNA, 19 nt, Artificial Sequence
  Description of Artificial Sequence: Synthetic oligonucleotide
uguacgggucaccagugau

SEQ ID NO: 341914 - RNA, 19 nt, Artificial Sequence
  Description of Artificial Sequence: Synthetic oligonucleotide
uuaacuccagcacguuccu

SEQ ID NO: 341915 - RNA, 19 nt, Artificial Sequence
  Description of Artificial Sequence: Synthetic oligonucleotide
ugguccuggauuguaaggu

SEQ ID NO: 341916 - RNA, 19 nt, Artificial Sequence
  Description of Artificial Sequence: Synthetic oligonucleotide
auaaccauuuuaacuccag

SEQ ID NO: 341917 - RNA, 19 nt, Artificial Sequence
  Description of Artificial Sequence: Synthetic oligonucleotide
ucccauauuccaguugccc

SEQ ID NO: 341918 - RNA, 19 nt, Artificial Sequence
  Description of Artificial Sequence: Synthetic oligonucleotide
cauagucuaucugcugugg

SEQ ID NO: 341919 - RNA, 19 nt, Artificial Sequence
  Description of Artificial Sequence: Synthetic oligonucleotide
auccguuccugccuuagcu

SEQ ID NO: 341920 - RNA, 19 nt, Artificial Sequence
  Description of Artificial Sequence: Synthetic oligonucleotide
uuuuguccccauaaccaua

SEQ ID NO: 341921 - RNA, 19 nt, Artificial Sequence
  Description of Artificial Sequence: Synthetic oligonucleotide
ugaugcaucggagguaacu

SEQ ID NO: 341922 - RNA, 19 nt, Artificial Sequence
  Description of Artificial Sequence: Synthetic oligonucleotide
guuguauggucccauugga

SEQ ID NO: 341923 - RNA, 19 nt, Artificial Sequence
  Description of Artificial Sequence: Synthetic oligonucleotide
caguacuucauggggaaag

SEQ ID NO: 341924 - RNA, 19 nt, Artificial Sequence
  Description of Artificial Sequence: Synthetic oligonucleotide
agcaaaucuuggaauuggg

SEQ ID NO: 341925 - RNA, 19 nt, Artificial Sequence
  Description of Artificial Sequence: Synthetic oligonucleotide
guauucgaacaccagcauc

SEQ ID NO: 341926 - RNA, 19 nt, Artificial Sequence
  Description of Artificial Sequence: Synthetic oligonucleotide
uaaacuccugcaguccacc

SEQ ID NO: 341927 - RNA, 19 nt, Artificial Sequence
  Description of Artificial Sequence: Synthetic oligonucleotide
acuacguagaaggucugug

SEQ ID NO: 341928 - RNA, 19 nt, Artificial Sequence
  Description of Artificial Sequence: Synthetic oligonucleotide
uaccagccugaacacuacg

SEQ ID NO: 341929 - RNA, 19 nt, Artificial Sequence
  Description of Artificial Sequence: Synthetic oligonucleotide
auacuaaagaucacuguau

SEQ ID NO: 341930 - RNA, 19 nt, Artificial Sequence
  Description of Artificial Sequence: Synthetic oligonucleotide
ucauuccgaacuucucuga

SEQ ID NO: 341931 - RNA, 19 nt, Artificial Sequence
  Description of Artificial Sequence: Synthetic oligonucleotide
uugcccauugguuuggguu

SEQ ID NO: 341932 - RNA, 19 nt, Artificial Sequence
  Description of Artificial Sequence: Synthetic oligonucleotide
aucggagguaacugugcuc

SEQ ID NO: 341933 - RNA, 19 nt, Artificial Sequence
  Description of Artificial Sequence: Synthetic oligonucleotide
ugaucacgaauuagcucca

SEQ ID NO: 341934 - RNA, 19 nt, Artificial Sequence
  Description of Artificial Sequence: Synthetic oligonucleotide
acagaaauaguaaccuccu

SEQ ID NO: 341935 - RNA, 19 nt, Artificial Sequence
  Description of Artificial Sequence: Synthetic oligonucleotide
ccgagcauagucuaucugc

SEQ ID NO: 341936 - RNA, 19 nt, Artificial Sequence
  Description of Artificial Sequence: Synthetic oligonucleotide
auagucuaucugcugugga

SEQ ID NO: 341937 - RNA, 19 nt, Artificial Sequence
  Description of Artificial Sequence: Synthetic oligonucleotide
uauccaacuuaccgacaca

SEQ ID NO: 341938 - RNA, 19 nt, Artificial Sequence
  Description of Artificial Sequence: Synthetic oligonucleotide
uccuccuauucuugaacca

SEQ ID NO: 341939 - RNA, 19 nt, Artificial Sequence
  Description of Artificial Sequence: Synthetic oligonucleotide
auauuagggucugcguuag

SEQ ID NO: 341940 - RNA, 19 nt, Artificial Sequence
  Description of Artificial Sequence: Synthetic oligonucleotide
cucugaaaccaccuugauc

SEQ ID NO: 341941 - RNA, 19 nt, Artificial Sequence
  Description of Artificial Sequence: Synthetic oligonucleotide
aaucuccgcagcaugcuga

SEQ ID NO: 341942 - RNA, 19 nt, Artificial Sequence
  Description of Artificial Sequence: Synthetic oligonucleotide
cauggggaaagcuuauaga

SEQ ID NO: 341943 - RNA, 19 nt, Artificial Sequence
  Description of Artificial Sequence: Synthetic oligonucleotide
caauuaucaauccaguuuu

SEQ ID NO: 341944 - RNA, 19 nt, Artificial Sequence
  Description of Artificial Sequence: Synthetic oligonucleotide
guguauauguaucuuaauu

SEQ ID NO: 341945 - RNA, 19 nt, Artificial Sequence
  Description of Artificial Sequence: Synthetic oligonucleotide
guaaccuccuaucaguagu

SEQ ID NO: 341946 - RNA, 19 nt, Artificial Sequence
  Description of Artificial Sequence: Synthetic oligonucleotide
uauuagggucugcguuagg

SEQ ID NO: 341947 - RNA, 19 nt, Artificial Sequence
  Description of Artificial Sequence: Synthetic oligonucleotide
cauauuagggucugcguua

SEQ ID NO: 341948 - RNA, 19 nt, Artificial Sequence
  Description of Artificial Sequence: Synthetic oligonucleotide
ggauuacuugugcugaaac

SEQ ID NO: 341949 - RNA, 19 nt, Artificial Sequence
  Description of Artificial Sequence: Synthetic oligonucleotide
agauucagguguuccaguu

SEQ ID NO: 341950 - RNA, 19 nt, Artificial Sequence
  Description of Artificial Sequence: Synthetic oligonucleotide
cauuugcuggaauguguac

SEQ ID NO: 341951 - RNA, 19 nt, Artificial Sequence
  Description of Artificial Sequence: Synthetic oligonucleotide
ucuccguaguuaccuugcc

SEQ ID NO: 341952 - RNA, 19 nt, Artificial Sequence
  Description of Artificial Sequence: Synthetic oligonucleotide
gaaguauacuaaagaucac

SEQ ID NO: 341953 - RNA, 19 nt, Artificial Sequence
  Description of Artificial Sequence: Synthetic oligonucleotide
ucugguccaguaaucuuuu

SEQ ID NO: 341954 - RNA, 19 nt, Artificial Sequence
  Description of Artificial Sequence: Synthetic oligonucleotide
aguuaugcugaaacagucu

SEQ ID NO: 341955 - RNA, 19 nt, Artificial Sequence
  Description of Artificial Sequence: Synthetic oligonucleotide
uccaguugcccugaccucu

SEQ ID NO: 341956 - RNA, 19 nt, Artificial Sequence
  Description of Artificial Sequence: Synthetic oligonucleotide
uacucauuccgaacuucuc

SEQ ID NO: 341957 - RNA, 19 nt, Artificial Sequence
  Description of Artificial Sequence: Synthetic oligonucleotide
aagcuucauauuagggucu

SEQ ID NO: 341958 - RNA, 19 nt, Artificial Sequence
  Description of Artificial Sequence: Synthetic oligonucleotide
cauuuccggguccaucgcc

SEQ ID NO: 341959 - RNA, 19 nt, Artificial Sequence
  Description of Artificial Sequence: Synthetic oligonucleotide
acgccgccgaguuuggauc

SEQ ID NO: 341960 - RNA, 19 nt, Artificial Sequence
  Description of Artificial Sequence: Synthetic oligonucleotide
guauacuaaagaucacugu

SEQ ID NO: 341961 - RNA, 19 nt, Artificial Sequence
  Description of Artificial Sequence: Synthetic oligonucleotide
uaguuaccuugcccauugg

SEQ ID NO: 341962 - RNA, 19 nt, Artificial Sequence
  Description of Artificial Sequence: Synthetic oligonucleotide
aagcucuauucuugcgcca

SEQ ID NO: 341963 - RNA, 19 nt, Artificial Sequence
  Description of Artificial Sequence: Synthetic oligonucleotide
cuccguaguuaccuugccc

SEQ ID NO: 341964 - RNA, 19 nt, Artificial Sequence
  Description of Artificial Sequence: Synthetic oligonucleotide
gucaccagugauccuaaga

SEQ ID NO: 341965 - RNA, 19 nt, Artificial Sequence
  Description of Artificial Sequence: Synthetic oligonucleotide
uuggcacaaugaaauuaaa

SEQ ID NO: 341966 - RNA, 19 nt, Artificial Sequence
  Description of Artificial Sequence: Synthetic oligonucleotide
uuuugcugacuggacagau

SEQ ID NO: 341967 - RNA, 19 nt, Artificial Sequence
  Description of Artificial Sequence: Synthetic oligonucleotide
auacucauuccgaacuucu

SEQ ID NO: 341968 - RNA, 19 nt, Artificial Sequence
  Description of Artificial Sequence: Synthetic oligonucleotide
cuaucaguagugauagaua

SEQ ID NO: 341969 - RNA, 19 nt, Artificial Sequence
  Description of Artificial Sequence: Synthetic oligonucleotide
ccuuuguauaaucaaccug

SEQ ID NO: 341970 - RNA, 19 nt, Artificial Sequence
  Description of Artificial Sequence: Synthetic oligonucleotide
gcugaaacagccaaauaca

SEQ ID NO: 341971 - RNA, 19 nt, Artificial Sequence
  Description of Artificial Sequence: Synthetic oligonucleotide
uaguaugcugcuugcuguc

SEQ ID NO: 341972 - RNA, 19 nt, Artificial Sequence
  Description of Artificial Sequence: Synthetic oligonucleotide
cugguugaucuccaucuuc

SEQ ID NO: 341973 - RNA, 19 nt, Artificial Sequence
  Description of Artificial Sequence: Synthetic oligonucleotide
uccugccuuagcuggguca

SEQ ID NO: 341974 - RNA, 19 nt, Artificial Sequence
  Description of Artificial Sequence: Synthetic oligonucleotide
uccggguccaucgccauga

SEQ ID NO: 341975 - RNA, 19 nt, Artificial Sequence
  Description of Artificial Sequence: Synthetic oligonucleotide
auaaucuccgcagcaugcu

SEQ ID NO: 341976 - RNA, 19 nt, Artificial Sequence
  Description of Artificial Sequence: Synthetic oligonucleotide
uuguacgggucaccaguga

SEQ ID NO: 341977 - RNA, 19 nt, Artificial Sequence
  Description of Artificial Sequence: Synthetic oligonucleotide
augcaucggagguaacugu

SEQ ID NO: 341978 - RNA, 19 nt, Artificial Sequence
  Description of Artificial Sequence: Synthetic oligonucleotide
gggcauaguaugcugcuug

SEQ ID NO: 341979 - RNA, 19 nt, Artificial Sequence
  Description of Artificial Sequence: Synthetic oligonucleotide
ucgucugcauccauauauu

SEQ ID NO: 341980 - RNA, 19 nt, Artificial Sequence
  Description of Artificial Sequence: Synthetic oligonucleotide
auucuugcgccagauugcu

SEQ ID NO: 341981 - RNA, 19 nt, Artificial Sequence
  Description of Artificial Sequence: Synthetic oligonucleotide
cuuuguacgggucaccagu

SEQ ID NO: 341982 - RNA, 19 nt, Artificial Sequence
  Description of Artificial Sequence: Synthetic oligonucleotide
gacuugucugggcauagua

SEQ ID NO: 341983 - RNA, 19 nt, Artificial Sequence
  Description of Artificial Sequence: Synthetic oligonucleotide
gagccuguugcugccaaug

SEQ ID NO: 341984 - RNA, 19 nt, Artificial Sequence
  Description of Artificial Sequence: Synthetic oligonucleotide
uauccuaucugguguuguu

SEQ ID NO: 341985 - RNA, 19 nt, Artificial Sequence
  Description of Artificial Sequence: Synthetic oligonucleotide
aucuacacuaaggacuaaa

SEQ ID NO: 341986 - RNA, 19 nt, Artificial Sequence
  Description of Artificial Sequence: Synthetic oligonucleotide
ucaauccaguuuucccagu

SEQ ID NO: 341987 - RNA, 19 nt, Artificial Sequence
  Description of Artificial Sequence: Synthetic oligonucleotide
uucuuauuauuggcccuga

SEQ ID NO: 341988 - RNA, 19 nt, Artificial Sequence
  Description of Artificial Sequence: Synthetic oligonucleotide
ccuaaaggauuuacugggc

SEQ ID NO: 341989 - RNA, 19 nt, Artificial Sequence
  Description of Artificial Sequence: Synthetic oligonucleotide
aucacgaauuagcuccaau

SEQ ID NO: 341990 - RNA, 19 nt, Artificial Sequence
  Description of Artificial Sequence: Synthetic oligonucleotide
uuaccgacacaggagguuu

SEQ ID NO: 341991 - RNA, 19 nt, Artificial Sequence
  Description of Artificial Sequence: Synthetic oligonucleotide
gcugucuauaguauucagc

SEQ ID NO: 341992 - RNA, 19 nt, Artificial Sequence
  Description of Artificial Sequence: Synthetic oligonucleotide
ugauccuaagagguuuguc

SEQ ID NO: 341993 - RNA, 19 nt, Artificial Sequence
  Description of Artificial Sequence: Synthetic oligonucleotide
auuucacuguuaaugcaau

SEQ ID NO: 341994 - RNA, 19 nt, Artificial Sequence
  Description of Artificial Sequence: Synthetic oligonucleotide
cuggcaggaaucaugauuu

SEQ ID NO: 341995 - RNA, 19 nt, Artificial Sequence
  Description of Artificial Sequence: Synthetic oligonucleotide
ucugcguuagguggagggu

SEQ ID NO: 341996 - RNA, 19 nt, Artificial Sequence
  Description of Artificial Sequence: Synthetic oligonucleotide
aguugccgagcauagucua

SEQ ID NO: 341997 - RNA, 19 nt, Artificial Sequence
  Description of Artificial Sequence: Synthetic oligonucleotide
aucuggcuuaaacuguauu

SEQ ID NO: 341998 - RNA, 19 nt, Artificial Sequence
  Description of Artificial Sequence: Synthetic oligonucleotide
agccugaacacuacguaga

SEQ ID NO: 341999 - RNA, 19 nt, Artificial Sequence
  Description of Artificial Sequence: Synthetic oligonucleotide
gagguaacugugcuccaaa

SEQ ID NO: 342000 - RNA, 19 nt, Artificial Sequence
  Description of Artificial Sequence: Synthetic oligonucleotide
uaacgagucccgccuugcu

SEQ ID NO: 342001 - RNA, 19 nt, Artificial Sequence
  Description of Artificial Sequence: Synthetic oligonucleotide
guugcccugaccucuaccu

SEQ ID NO: 342002 - RNA, 19 nt, Artificial Sequence
  Description of Artificial Sequence: Synthetic oligonucleotide
ccaacuuaccgacacagga

SEQ ID NO: 342003 - RNA, 19 nt, Artificial Sequence
  Description of Artificial Sequence: Synthetic oligonucleotide
augggguacagguggcccu

SEQ ID NO: 342004 - RNA, 19 nt, Artificial Sequence
  Description of Artificial Sequence: Synthetic oligonucleotide
guauucagcccaugcugca

SEQ ID NO: 342005 - RNA, 19 nt, Artificial Sequence
  Description of Artificial Sequence: Synthetic oligonucleotide
agcuucauauuagggucug

SEQ ID NO: 342006 - RNA, 19 nt, Artificial Sequence
  Description of Artificial Sequence: Synthetic oligonucleotide
uggcuugcugaacuuugua

SEQ ID NO: 342007 - RNA, 19 nt, Artificial Sequence
  Description of Artificial Sequence: Synthetic oligonucleotide
ggggaaagcuuauagauuu

SEQ ID NO: 342008 - RNA, 19 nt, Artificial Sequence
  Description of Artificial Sequence: Synthetic oligonucleotide
ugcguuagguggaggguuu

SEQ ID NO: 342009 - RNA, 19 nt, Artificial Sequence
  Description of Artificial Sequence: Synthetic oligonucleotide
acauuugcuggaaugugua

SEQ ID NO: 342010 - RNA, 19 nt, Artificial Sequence
  Description of Artificial Sequence: Synthetic oligonucleotide
acguagaaggucugugaua

SEQ ID NO: 342011 - RNA, 19 nt, Artificial Sequence
  Description of Artificial Sequence: Synthetic oligonucleotide
uucuugcgccagauugcug

SEQ ID NO: 342012 - RNA, 19 nt, Artificial Sequence
  Description of Artificial Sequence: Synthetic oligonucleotide
ugcgccagauugcuggcuu

SEQ ID NO: 342013 - RNA, 19 nt, Artificial Sequence
  Description of Artificial Sequence: Synthetic oligonucleotide
agccuguugcugccaaugu

SEQ ID NO: 342014 - RNA, 19 nt, Artificial Sequence
  Description of Artificial Sequence: Synthetic oligonucleotide
auuuccggguccaucgcca

SEQ ID NO: 342015 - RNA, 19 nt, Artificial Sequence
  Description of Artificial Sequence: Synthetic oligonucleotide
caggauuaccagccugaac

SEQ ID NO: 342016 - RNA, 19 nt, Artificial Sequence
  Description of Artificial Sequence: Synthetic oligonucleotide
ucaagucgucugcauccau

SEQ ID NO: 342017 - RNA, 19 nt, Artificial Sequence
  Description of Artificial Sequence: Synthetic oligonucleotide
uucgaacaccagcaucauu

SEQ ID NO: 342018 - RNA, 19 nt, Artificial Sequence
  Description of Artificial Sequence: Synthetic oligonucleotide
aguaugcugcuugcugucu

SEQ ID NO: 342019 - RNA, 19 nt, Artificial Sequence
  Description of Artificial Sequence: Synthetic oligonucleotide
gcaccaguauuuugaggcc

SEQ ID NO: 342020 - RNA, 19 nt, Artificial Sequence
  Description of Artificial Sequence: Synthetic oligonucleotide
uuccaguugcccugaccuc

SEQ ID NO: 342021 - RNA, 19 nt, Artificial Sequence
  Description of Artificial Sequence: Synthetic oligonucleotide
ugaucuccguaguuaccuu

SEQ ID NO: 342022 - RNA, 19 nt, Artificial Sequence
  Description of Artificial Sequence: Synthetic oligonucleotide
uccuaucaguagugauaga

SEQ ID NO: 342023 - RNA, 19 nt, Artificial Sequence
  Description of Artificial Sequence: Synthetic oligonucleotide
gcauaguaagcagcccacg

SEQ ID NO: 342024 - RNA, 19 nt, Artificial Sequence
  Description of Artificial Sequence: Synthetic oligonucleotide
guuaucugugcuauccuau

SEQ ID NO: 342025 - RNA, 19 nt, Artificial Sequence
  Description of Artificial Sequence: Synthetic oligonucleotide
acuguauuguccacuucuu

SEQ ID NO: 342026 - RNA, 19 nt, Artificial Sequence
  Description of Artificial Sequence: Synthetic oligonucleotide
ucaguacuucauggggaaa

SEQ ID NO: 342027 - RNA, 19 nt, Artificial Sequence
  Description of Artificial Sequence: Synthetic oligonucleotide
guacgggucaccagugauc

SEQ ID NO: 342028 - RNA, 19 nt, Artificial Sequence
  Description of Artificial Sequence: Synthetic oligonucleotide
uggcaggaaucaugauuuc

SEQ ID NO: 342029 - RNA, 19 nt, Artificial Sequence
  Description of Artificial Sequence: Synthetic oligonucleotide
cugaucuccguaguuaccu

SEQ ID NO: 342030 - RNA, 19 nt, Artificial Sequence
  Description of Artificial Sequence: Synthetic oligonucleotide
cauauuccaguugcccuga

SEQ ID NO: 342031 - RNA, 19 nt, Artificial Sequence
  Description of Artificial Sequence: Synthetic oligonucleotide
uuuccggguccaucgccau

SEQ ID NO: 342032 - RNA, 19 nt, Artificial Sequence
  Description of Artificial Sequence: Synthetic oligonucleotide
guuaccuugcccauugguu

SEQ ID NO: 342033 - RNA, 19 nt, Artificial Sequence
  Description of Artificial Sequence: Synthetic oligonucleotide
acuuaccgacacaggaggu

SEQ ID NO: 342034 - RNA, 19 nt, Artificial Sequence
  Description of Artificial Sequence: Synthetic oligonucleotide
cuaccucguccucuaccac

SEQ ID NO: 342035 - RNA, 19 nt, Artificial Sequence
  Description of Artificial Sequence: Synthetic oligonucleotide
uggacagauucagguguuc

SEQ ID NO: 342036 - RNA, 19 nt, Artificial Sequence
  Description of Artificial Sequence: Synthetic oligonucleotide
gcuuauagauuuguguaua

SEQ ID NO: 342037 - RNA, 19 nt, Artificial Sequence
  Description of Artificial Sequence: Synthetic oligonucleotide
caauguggauaagcauuuc

SEQ ID NO: 342038 - RNA, 19 nt, Artificial Sequence
  Description of Artificial Sequence: Synthetic oligonucleotide
cuguauuguccacuucuua

SEQ ID NO: 342039 - RNA, 19 nt, Artificial Sequence
  Description of Artificial Sequence: Synthetic oligonucleotide
cauggggcccaugggguac

SEQ ID NO: 342040 - RNA, 19 nt, Artificial Sequence
  Description of Artificial Sequence: Synthetic oligonucleotide
uguaaggugcaggguugua

SEQ ID NO: 342041 - RNA, 19 nt, Artificial Sequence
  Description of Artificial Sequence: Synthetic oligonucleotide
guaugcugcuugcugucua

SEQ ID NO: 342042 - RNA, 19 nt, Artificial Sequence
  Description of Artificial Sequence: Synthetic oligonucleotide
cauacaagacccugcugau

SEQ ID NO: 342043 - RNA, 19 nt, Artificial Sequence
  Description of Artificial Sequence: Synthetic oligonucleotide
ggaaagcuuauagauuugu

SEQ ID NO: 342044 - RNA, 19 nt, Artificial Sequence
  Description of Artificial Sequence: Synthetic oligonucleotide
guuugucagcaccaguauu

SEQ ID NO: 342045 - RNA, 19 nt, Artificial Sequence
  Description of Artificial Sequence: Synthetic oligonucleotide
ggcuuaaacuguauucgaa

SEQ ID NO: 342046 - RNA, 19 nt, Artificial Sequence
  Description of Artificial Sequence: Synthetic oligonucleotide
ggagguccuguuaucugug

SEQ ID NO: 342047 - RNA, 19 nt, Artificial Sequence
  Description of Artificial Sequence: Synthetic oligonucleotide
augaguugccgagcauagu

SEQ ID NO: 342048 - RNA, 19 nt, Artificial Sequence
  Description of Artificial Sequence: Synthetic oligonucleotide
gggaaagcuuauagauuug

SEQ ID NO: 342049 - RNA, 19 nt, Artificial Sequence
  Description of Artificial Sequence: Synthetic oligonucleotide
gcuggauucugcugaucuc

SEQ ID NO: 342050 - RNA, 19 nt, Artificial Sequence
  Description of Artificial Sequence: Synthetic oligonucleotide
guaaggugcaggguuguau

SEQ ID NO: 342051 - RNA, 19 nt, Artificial Sequence
  Description of Artificial Sequence: Synthetic oligonucleotide
agggucugcguuaggugga

SEQ ID NO: 342052 - RNA, 19 nt, Artificial Sequence
  Description of Artificial Sequence: Synthetic oligonucleotide
cuggaaccccauggggccc

SEQ ID NO: 342053 - RNA, 19 nt, Artificial Sequence
  Description of Artificial Sequence: Synthetic oligonucleotide
caucggagguaacugugcu

SEQ ID NO: 342054 - RNA, 19 nt, Artificial Sequence
  Description of Artificial Sequence: Synthetic oligonucleotide
acacuacguagaaggucug

SEQ ID NO: 342055 - RNA, 19 nt, Artificial Sequence
  Description of Artificial Sequence: Synthetic oligonucleotide
caggauuacuugugcugaa

SEQ ID NO: 342056 - RNA, 19 nt, Artificial Sequence
  Description of Artificial Sequence: Synthetic oligonucleotide
ccugccuuagcugggucag

SEQ ID NO: 342057 - RNA, 19 nt, Artificial Sequence
  Description of Artificial Sequence: Synthetic oligonucleotide
gccgaguuuggauccguuc

SEQ ID NO: 342058 - RNA, 19 nt, Artificial Sequence
  Description of Artificial Sequence: Synthetic oligonucleotide
gccaauguggauaagcauu

SEQ ID NO: 342059 - RNA, 19 nt, Artificial Sequence
  Description of Artificial Sequence: Synthetic oligonucleotide
ccaauaacgagucccgccu

SEQ ID NO: 342060 - RNA, 19 nt, Artificial Sequence
  Description of Artificial Sequence: Synthetic oligonucleotide
ccuaucaguagugauagau

SEQ ID NO: 342061 - RNA, 19 nt, Artificial Sequence
  Description of Artificial Sequence: Synthetic oligonucleotide
ugggguacagguggcccua

SEQ ID NO: 342062 - RNA, 19 nt, Artificial Sequence
  Description of Artificial Sequence: Synthetic oligonucleotide
cugaugcaucggagguaac

SEQ ID NO: 342063 - RNA, 19 nt, Artificial Sequence
  Description of Artificial Sequence: Synthetic oligonucleotide
gcugaucuccguaguuacc

SEQ ID NO: 342064 - RNA, 19 nt, Artificial Sequence
  Description of Artificial Sequence: Synthetic oligonucleotide
gcuauccuaucugguguug

SEQ ID NO: 342065 - RNA, 19 nt, Artificial Sequence
  Description of Artificial Sequence: Synthetic oligonucleotide
gaucacgaauuagcuccaa

SEQ ID NO: 342066 - RNA, 19 nt, Artificial Sequence
  Description of Artificial Sequence: Synthetic oligonucleotide
ggguuguaguuggugcccc

SEQ ID NO: 342067 - RNA, 19 nt, Artificial Sequence
  Description of Artificial Sequence: Synthetic oligonucleotide
cugugcuauccuaucuggu

SEQ ID NO: 342068 - RNA, 19 nt, Artificial Sequence
  Description of Artificial Sequence: Synthetic oligonucleotide
ggucaccagugauccuaag

SEQ ID NO: 342069 - RNA, 19 nt, Artificial Sequence
  Description of Artificial Sequence: Synthetic oligonucleotide
cugaaacagugcucauaua

SEQ ID NO: 342070 - RNA, 19 nt, Artificial Sequence
  Description of Artificial Sequence: Synthetic oligonucleotide
ugcugccaauguggauaag

SEQ ID NO: 342071 - RNA, 19 nt, Artificial Sequence
  Description of Artificial Sequence: Synthetic oligonucleotide
ggcccaucuugaaucauaa

SEQ ID NO: 342072 - RNA, 19 nt, Artificial Sequence
  Description of Artificial Sequence: Synthetic oligonucleotide
cagguguuccaguuagcau

SEQ ID NO: 342073 - RNA, 19 nt, Artificial Sequence
  Description of Artificial Sequence: Synthetic oligonucleotide
cuuaccgacacaggagguu

SEQ ID NO: 342074 - RNA, 19 nt, Artificial Sequence
  Description of Artificial Sequence: Synthetic oligonucleotide
ggucugcguuagguggagg

SEQ ID NO: 342075 - RNA, 19 nt, Artificial Sequence
  Description of Artificial Sequence: Synthetic oligonucleotide
ggagguaacugugcuccaa

SEQ ID NO: 342076 - RNA, 19 nt, Artificial Sequence
  Description of Artificial Sequence: Synthetic oligonucleotide
gggucugcguuagguggag

SEQ ID NO: 342077 - RNA, 19 nt, Artificial Sequence
  Description of Artificial Sequence: Synthetic oligonucleotide
gcacuauaaucuggcugac

SEQ ID NO: 342078 - RNA, 19 nt, Artificial Sequence
  Description of Artificial Sequence: Synthetic oligonucleotide
ccagccugaacacuacgua

SEQ ID NO: 342079 - RNA, 19 nt, Artificial Sequence
  Description of Artificial Sequence: Synthetic oligonucleotide
cugcuugacccauuuucuu

SEQ ID NO: 342080 - RNA, 19 nt, Artificial Sequence
  Description of Artificial Sequence: Synthetic oligonucleotide
gaacugcuugacccauuuu

SEQ ID NO: 342081 - RNA, 19 nt, Artificial Sequence
  Description of Artificial Sequence: Synthetic oligonucleotide
gugauccuaagagguuugu

SEQ ID NO: 342082 - RNA, 19 nt, Artificial Sequence
  Description of Artificial Sequence: Synthetic oligonucleotide
ggacaucuaucccuucauu

SEQ ID NO: 342083 - RNA, 19 nt, Artificial Sequence
  Description of Artificial Sequence: Synthetic oligonucleotide
guugccgagcauagucuau

SEQ ID NO: 342084 - RNA, 19 nt, Artificial Sequence
  Description of Artificial Sequence: Synthetic oligonucleotide
gaaccccauggggcccaug

SEQ ID NO: 342085 - RNA, 19 nt, Artificial Sequence
  Description of Artificial Sequence: Synthetic oligonucleotide
cacuacguagaaggucugu

SEQ ID NO: 342086 - RNA, 19 nt, Artificial Sequence
  Description of Artificial Sequence: Synthetic oligonucleotide
caauaacgagucccgccuu

SEQ ID NO: 342087 - RNA, 19 nt, Artificial Sequence
  Description of Artificial Sequence: Synthetic oligonucleotide
gccggucuucccuuuucaa

SEQ ID NO: 342088 - RNA, 19 nt, Artificial Sequence
  Description of Artificial Sequence: Synthetic oligonucleotide
cgccgccgaguuuggaucc

SEQ ID NO: 342089 - RNA, 19 nt, Artificial Sequence
  Description of Artificial Sequence: Synthetic oligonucleotide
cugcguuagguggaggguu

SEQ ID NO: 342090 - RNA, 19 nt, Artificial Sequence
  Description of Artificial Sequence: Synthetic oligonucleotide
ccuauucuugaaccauacu

SEQ ID NO: 342091 - RNA, 19 nt, Artificial Sequence
  Description of Artificial Sequence: Synthetic oligonucleotide
ccuugcccauugguuuggg

SEQ ID NO: 342092 - RNA, 19 nt, Artificial Sequence
  Description of Artificial Sequence: Synthetic oligonucleotide
gccgccgaguuuggauccg

SEQ ID NO: 342093 - RNA, 19 nt, Artificial Sequence
  Description of Artificial Sequence: Synthetic oligonucleotide
gcauaguaugcugcuugcu

SEQ ID NO: 342094 - RNA, 19 nt, Artificial Sequence
  Description of Artificial Sequence: Synthetic oligonucleotide
cccacgccgccgaguuugg

SEQ ID NO: 342095 - RNA, 19 nt, Artificial Sequence
  Description of Artificial Sequence: Synthetic oligonucleotide
gaggcccaucuugaaucau

SEQ ID NO: 342096 - RNA, 19 nt, Artificial Sequence
  Description of Artificial Sequence: Synthetic oligonucleotide
ggucugaaacagugcucau

SEQ ID NO: 342097 - RNA, 19 nt, Artificial Sequence
  Description of Artificial Sequence: Synthetic oligonucleotide
cgagucccgccuugcuggc

SEQ ID NO: 342098 - RNA, 19 nt, Artificial Sequence
  Description of Artificial Sequence: Synthetic oligonucleotide
cacguuccugaaguuguuu

SEQ ID NO: 342099 - RNA, 19 nt, Artificial Sequence
  Description of Artificial Sequence: Synthetic oligonucleotide
gcguuagguggaggguuuc

SEQ ID NO: 342100 - RNA, 19 nt, Artificial Sequence
  Description of Artificial Sequence: Synthetic oligonucleotide
ccaggauuaccagccugaa

SEQ ID NO: 342101 - RNA, 19 nt, Artificial Sequence
  Description of Artificial Sequence: Synthetic oligonucleotide
gcgccagauugcuggcuua

SEQ ID NO: 342102 - RNA, 19 nt, Artificial Sequence
  Description of Artificial Sequence: Synthetic oligonucleotide
cggguccaucgccaugaug

SEQ ID NO: 342103 - RNA, 19 nt, Artificial Sequence
  Description of Artificial Sequence: Synthetic oligonucleotide
ccaguugcccugaccucua

SEQ ID NO: 342104 - RNA, 19 nt, Artificial Sequence
  Description of Artificial Sequence: Synthetic oligonucleotide
ggagccuguugcugccaau

SEQ ID NO: 342105 - RNA, 19 nt, Artificial Sequence
  Description of Artificial Sequence: Synthetic oligonucleotide
cgucugcauccauauauuu

SEQ ID NO: 342106 - RNA, 19 nt, Artificial Sequence
  Description of Artificial Sequence: Synthetic oligonucleotide
ccccauaaccauagucauu

SEQ ID NO: 342107 - RNA, 19 nt, Artificial Sequence
  Description of Artificial Sequence: Synthetic oligonucleotide
cggagguaacugugcucca

SEQ ID NO: 342108 - RNA, 19 nt, Artificial Sequence
  Description of Artificial Sequence: Synthetic oligonucleotide
gggguacagguggcccuaa

SEQ ID NO: 342109 - RNA, 19 nt, Artificial Sequence
  Description of Artificial Sequence: Synthetic oligonucleotide
gcacguuccugaaguuguu

SEQ ID NO: 342110 - RNA, 19 nt, Artificial Sequence
  Description of Artificial Sequence: Synthetic oligonucleotide
ggggccggucuucccuuuu

SEQ ID NO: 342111 - RNA, 19 nt, Artificial Sequence
  Description of Artificial Sequence: Synthetic oligonucleotide
cgccagauugcuggcuuau

SEQ ID NO: 342112 - RNA, 19 nt, Artificial Sequence
  Description of Artificial Sequence: Synthetic oligonucleotide
ggaaccccauggggcccau

SEQ ID NO: 342113 - RNA, 19 nt, Artificial Sequence
  Description of Artificial Sequence: Synthetic oligonucleotide
ccgccgaguuuggauccgu

SEQ ID NO: 342114 - RNA, 19 nt, Artificial Sequence
  Description of Artificial Sequence: Synthetic oligonucleotide
cgccgaguuuggauccguu

SEQ ID NO: 342115 - RNA, 19 nt, Artificial Sequence
  Description of Artificial Sequence: Synthetic oligonucleotide
ccggguccaucgccaugau

SEQ ID NO: 342116 - RNA, 19 nt, Artificial Sequence
  Description of Artificial Sequence: Synthetic oligonucleotide
ucuacugaaaauuagaagg

SEQ ID NO: 342117 - RNA, 19 nt, Artificial Sequence
  Description of Artificial Sequence: Synthetic oligonucleotide
uaauauauuauauauauau

SEQ ID NO: 342118 - RNA, 19 nt, Artificial Sequence
  Description of Artificial Sequence: Synthetic oligonucleotide
auaacuuacaucuuuggac

SEQ ID NO: 342119 - RNA, 19 nt, Artificial Sequence
  Description of Artificial Sequence: Synthetic oligonucleotide
agcuaguucaaccaaaagc

SEQ ID NO: 342120 - RNA, 19 nt, Artificial Sequence
  Description of Artificial Sequence: Synthetic oligonucleotide
uaaucauacacaaauuuag

SEQ ID NO: 342121 - RNA, 19 nt, Artificial Sequence
  Description of Artificial Sequence: Synthetic oligonucleotide
uauauauauauauauauau

SEQ ID NO: 342122 - RNA, 19 nt, Artificial Sequence
  Description of Artificial Sequence: Synthetic oligonucleotide
uuagguguaauuuuguucc

SEQ ID NO: 342123 - RNA, 19 nt, Artificial Sequence
  Description of Artificial Sequence: Synthetic oligonucleotide
aauuaggccauucuaaucu

SEQ ID NO: 342124 - RNA, 19 nt, Artificial Sequence
  Description of Artificial Sequence: Synthetic oligonucleotide
uauauauauauauauuuca

SEQ ID NO: 342125 - RNA, 19 nt, Artificial Sequence
  Description of Artificial Sequence: Synthetic oligonucleotide
auuauauauauauauauau

SEQ ID NO: 342126 - RNA, 19 nt, Artificial Sequence
  Description of Artificial Sequence: Synthetic oligonucleotide
acuaauauauuauauauau

SEQ ID NO: 342127 - RNA, 19 nt, Artificial Sequence
  Description of Artificial Sequence: Synthetic oligonucleotide
ucaauaucuaaucauacac

SEQ ID NO: 342128 - RNA, 19 nt, Artificial Sequence
  Description of Artificial Sequence: Synthetic oligonucleotide
aagauuuuaagagacgacg

SEQ ID NO: 342129 - RNA, 19 nt, Artificial Sequence
  Description of Artificial Sequence: Synthetic oligonucleotide
ucaguuaacagguuguagg

SEQ ID NO: 342130 - RNA, 19 nt, Artificial Sequence
  Description of Artificial Sequence: Synthetic oligonucleotide
aaaauaagacaucuuacgu

SEQ ID NO: 342131 - RNA, 19 nt, Artificial Sequence
  Description of Artificial Sequence: Synthetic oligonucleotide
uauauauauauauauauuu

SEQ ID NO: 342132 - RNA, 19 nt, Artificial Sequence
  Description of Artificial Sequence: Synthetic oligonucleotide
auauauuauauauauauau

SEQ ID NO: 342133 - RNA, 19 nt, Artificial Sequence
  Description of Artificial Sequence: Synthetic oligonucleotide
aauaaagcaggaaaugugg

SEQ ID NO: 342134 - RNA, 19 nt, Artificial Sequence
  Description of Artificial Sequence: Synthetic oligonucleotide
uaucuaaucauacacaaau

SEQ ID NO: 342135 - RNA, 19 nt, Artificial Sequence
  Description of Artificial Sequence: Synthetic oligonucleotide
uuagccuaaauuuuaauac

SEQ ID NO: 342136 - RNA, 19 nt, Artificial Sequence
  Description of Artificial Sequence: Synthetic oligonucleotide
  modified_base (2)..(2): a, c, u, g, unknown or other
anauuuuccaucuuuggaa

SEQ ID NO: 342137 - RNA, 19 nt, Artificial Sequence
  Description of Artificial Sequence: Synthetic oligonucleotide
aauaucuaaucauacacaa

SEQ ID NO: 342138 - RNA, 19 nt, Artificial Sequence
  Description of Artificial Sequence: Synthetic oligonucleotide
  modified_base (3)..(3): a, c, u, g, unknown or other
aanauuuuccaucuuugga

SEQ ID NO: 342139 - RNA, 19 nt, Artificial Sequence
  Description of Artificial Sequence: Synthetic oligonucleotide
aaauauugggaucuuauau

SEQ ID NO: 342140 - RNA, 19 nt, Artificial Sequence
  Description of Artificial Sequence: Synthetic oligonucleotide
auauuauauauauauauau

SEQ ID NO: 342141 - RNA, 19 nt, Artificial Sequence
  Description of Artificial Sequence: Synthetic oligonucleotide
gaaaaguugcuacaauugg

SEQ ID NO: 342142 - RNA, 19 nt, Artificial Sequence
  Description of Artificial Sequence: Synthetic oligonucleotide
auuacuguuaccaucaguc

SEQ ID NO: 342143 - RNA, 19 nt, Artificial Sequence
  Description of Artificial Sequence: Synthetic oligonucleotide
aagaccaugaguugaugac

SEQ ID NO: 342144 - RNA, 19 nt, Artificial Sequence
  Description of Artificial Sequence: Synthetic oligonucleotide
uuuuaagagacgacgacgc

SEQ ID NO: 342145 - RNA, 19 nt, Artificial Sequence
  Description of Artificial Sequence: Synthetic oligonucleotide
  modified_base (4)..(4): a, c, u, g, unknown or other
gaanauuuuccaucuuugg

SEQ ID NO: 342146 - RNA, 19 nt, Artificial Sequence
  Description of Artificial Sequence: Synthetic oligonucleotide
uaguuaaggacuuaggugu

SEQ ID NO: 342147 - RNA, 19 nt, Artificial Sequence
  Description of Artificial Sequence: Synthetic oligonucleotide
uuaguuaaggacuuaggug

SEQ ID NO: 342148 - RNA, 19 nt, Artificial Sequence
  Description of Artificial Sequence: Synthetic oligonucleotide
caguauagaaguaauuugg

SEQ ID NO: 342149 - RNA, 19 nt, Artificial Sequence
  Description of Artificial Sequence: Synthetic oligonucleotide
agcagauuuaaaauuaggc

SEQ ID NO: 342150 - RNA, 19 nt, Artificial Sequence
  Description of Artificial Sequence: Synthetic oligonucleotide
uuuaacagcuaguucaacc

SEQ ID NO: 342151 - RNA, 19 nt, Artificial Sequence
  Description of Artificial Sequence: Synthetic oligonucleotide
auauauauauauuucagua

SEQ ID NO: 342152 - RNA, 19 nt, Artificial Sequence
  Description of Artificial Sequence: Synthetic oligonucleotide
uauauauauauauuucagu

SEQ ID NO: 342153 - RNA, 19 nt, Artificial Sequence
  Description of Artificial Sequence: Synthetic oligonucleotide
uuaucccuuguccacaugg

SEQ ID NO: 342154 - RNA, 19 nt, Artificial Sequence
  Description of Artificial Sequence: Synthetic oligonucleotide
ucuaaaagucuguacuugg

SEQ ID NO: 342155 - RNA, 19 nt, Artificial Sequence
  Description of Artificial Sequence: Synthetic oligonucleotide
aaauuaggccauucuaauc

SEQ ID NO: 342156 - RNA, 19 nt, Artificial Sequence
  Description of Artificial Sequence: Synthetic oligonucleotide
uauauuauauauauauaua

SEQ ID NO: 342157 - RNA, 19 nt, Artificial Sequence
  Description of Artificial Sequence: Synthetic oligonucleotide
aauuagaaggcauucuuaa

SEQ ID NO: 342158 - RNA, 19 nt, Artificial Sequence
  Description of Artificial Sequence: Synthetic oligonucleotide
uccucuaauuaaaacacag

SEQ ID NO: 342159 - RNA, 19 nt, Artificial Sequence
  Description of Artificial Sequence: Synthetic oligonucleotide
aacugguucuccccaagcc

SEQ ID NO: 342160 - RNA, 19 nt, Artificial Sequence
  Description of Artificial Sequence: Synthetic oligonucleotide
ucauacacaaauuuagccu

SEQ ID NO: 342161 - RNA, 19 nt, Artificial Sequence
  Description of Artificial Sequence: Synthetic oligonucleotide
aguccagucaguuaacagg

SEQ ID NO: 342162 - RNA, 19 nt, Artificial Sequence
  Description of Artificial Sequence: Synthetic oligonucleotide
ucuuaauucuccaaacugu

SEQ ID NO: 342163 - RNA, 19 nt, Artificial Sequence
  Description of Artificial Sequence: Synthetic oligonucleotide
auauauauauauauauuuc

SEQ ID NO: 342164 - RNA, 19 nt, Artificial Sequence
  Description of Artificial Sequence: Synthetic oligonucleotide
ucuucauacuuaauuacug

SEQ ID NO: 342165 - RNA, 19 nt, Artificial Sequence
  Description of Artificial Sequence: Synthetic oligonucleotide
ucaguauagaaguaauuug

SEQ ID NO: 342166 - RNA, 19 nt, Artificial Sequence
  Description of Artificial Sequence: Synthetic oligonucleotide
aaacaacuguuguugauug

SEQ ID NO: 342167 - RNA, 19 nt, Artificial Sequence
  Description of Artificial Sequence: Synthetic oligonucleotide
aaaauuagaaggcauucuu

SEQ ID NO: 342168 - RNA, 19 nt, Artificial Sequence
  Description of Artificial Sequence: Synthetic oligonucleotide
uccaccgacacccuuaucc

SEQ ID NO: 342169 - RNA, 19 nt, Artificial Sequence
  Description of Artificial Sequence: Synthetic oligonucleotide
uucaagugaugaaauauug

SEQ ID NO: 342170 - RNA, 19 nt, Artificial Sequence
  Description of Artificial Sequence: Synthetic oligonucleotide
uauuauauauauauauaua

SEQ ID NO: 342171 - RNA, 19 nt, Artificial Sequence
  Description of Artificial Sequence: Synthetic oligonucleotide
uuuaaguaacauuauugac

SEQ ID NO: 342172 - RNA, 19 nt, Artificial Sequence
  Description of Artificial Sequence: Synthetic oligonucleotide
uuauauauauauauauaua

SEQ ID NO: 342173 - RNA, 19 nt, Artificial Sequence
  Description of Artificial Sequence: Synthetic oligonucleotide
uaacaaguagugaacagga

SEQ ID NO: 342174 - RNA, 19 nt, Artificial Sequence
  Description of Artificial Sequence: Synthetic oligonucleotide
ucaaaucauauuaucuagc

SEQ ID NO: 342175 - RNA, 19 nt, Artificial Sequence
  Description of Artificial Sequence: Synthetic oligonucleotide
uuaacagcuaguucaacca

SEQ ID NO: 342176 - RNA, 19 nt, Artificial Sequence
  Description of Artificial Sequence: Synthetic oligonucleotide
aguguaaucaguauagaag

SEQ ID NO: 342177 - RNA, 19 nt, Artificial Sequence
  Description of Artificial Sequence: Synthetic oligonucleotide
aaaauuaggccauucuaau

SEQ ID NO: 342178 - RNA, 19 nt, Artificial Sequence
  Description of Artificial Sequence: Synthetic oligonucleotide
uucuacugaaaauuagaag

SEQ ID NO: 342179 - RNA, 19 nt, Artificial Sequence
  Description of Artificial Sequence: Synthetic oligonucleotide
  modified_base (6)..(6): a, c, u, g, unknown or other
aagaanauuuuccaucuuu

SEQ ID NO: 342180 - RNA, 19 nt, Artificial Sequence
  Description of Artificial Sequence: Synthetic oligonucleotide
aaagauuuuaagagacgac

SEQ ID NO: 342181 - RNA, 19 nt, Artificial Sequence
  Description of Artificial Sequence: Synthetic oligonucleotide
gauauacugaaaaccagag

SEQ ID NO: 342182 - RNA, 19 nt, Artificial Sequence
  Description of Artificial Sequence: Synthetic oligonucleotide
uuuagccuaaauuuuaaua

SEQ ID NO: 342183 - RNA, 19 nt, Artificial Sequence
  Description of Artificial Sequence: Synthetic oligonucleotide
auauauauauauauuucag

SEQ ID NO: 342184 - RNA, 19 nt, Artificial Sequence
  Description of Artificial Sequence: Synthetic oligonucleotide
uuaagauucccucccaccu

SEQ ID NO: 342185 - RNA, 19 nt, Artificial Sequence
  Description of Artificial Sequence: Synthetic oligonucleotide
aauuaacaaguagugaaca

SEQ ID NO: 342186 - RNA, 19 nt, Artificial Sequence
  Description of Artificial Sequence: Synthetic oligonucleotide
ugaacaaggggacacauuu

SEQ ID NO: 342187 - RNA, 19 nt, Artificial Sequence
  Description of Artificial Sequence: Synthetic oligonucleotide
uguugauugagaaacccaa

SEQ ID NO: 342188 - RNA, 19 nt, Artificial Sequence
  Description of Artificial Sequence: Synthetic oligonucleotide
uguacaacucggaacuucc

SEQ ID NO: 342189 - RNA, 19 nt, Artificial Sequence
  Description of Artificial Sequence: Synthetic oligonucleotide
uggacaauaaacaguauuu

SEQ ID NO: 342190 - RNA, 19 nt, Artificial Sequence
  Description of Artificial Sequence: Synthetic oligonucleotide
acaaguagugaacaggaca

SEQ ID NO: 342191 - RNA, 19 nt, Artificial Sequence
  Description of Artificial Sequence: Synthetic oligonucleotide
gaaccgaugucauccaagg

SEQ ID NO: 342192 - RNA, 19 nt, Artificial Sequence
  Description of Artificial Sequence: Synthetic oligonucleotide
uucaauaucuaaucauaca

SEQ ID NO: 342193 - RNA, 19 nt, Artificial Sequence
  Description of Artificial Sequence: Synthetic oligonucleotide
uuuucauaucuccauuucu

SEQ ID NO: 342194 - RNA, 19 nt, Artificial Sequence
  Description of Artificial Sequence: Synthetic oligonucleotide
uuucauucacuuuucacaa

SEQ ID NO: 342195 - RNA, 19 nt, Artificial Sequence
  Description of Artificial Sequence: Synthetic oligonucleotide
uccaauuugcaccuuguac

SEQ ID NO: 342196 - RNA, 19 nt, Artificial Sequence
  Description of Artificial Sequence: Synthetic oligonucleotide
agauaacuuacaucuuugg

SEQ ID NO: 342197 - RNA, 19 nt, Artificial Sequence
  Description of Artificial Sequence: Synthetic oligonucleotide
uuauacuaccuuuuaaaau

SEQ ID NO: 342198 - RNA, 19 nt, Artificial Sequence
  Description of Artificial Sequence: Synthetic oligonucleotide
aaguguaaucaguauagaa

SEQ ID NO: 342199 - RNA, 19 nt, Artificial Sequence
  Description of Artificial Sequence: Synthetic oligonucleotide
uuuacauguuuucauucac

SEQ ID NO: 342200 - RNA, 19 nt, Artificial Sequence
  Description of Artificial Sequence: Synthetic oligonucleotide
uguaggaaaagauucguuu

SEQ ID NO: 342201 - RNA, 19 nt, Artificial Sequence
  Description of Artificial Sequence: Synthetic oligonucleotide
agcucuuaauucuccaaac

SEQ ID NO: 342202 - RNA, 19 nt, Artificial Sequence
  Description of Artificial Sequence: Synthetic oligonucleotide
ggcacuaaaauccaugcag

SEQ ID NO: 342203 - RNA, 19 nt, Artificial Sequence
  Description of Artificial Sequence: Synthetic oligonucleotide
uuuacuacacacugaaaua

SEQ ID NO: 342204 - RNA, 19 nt, Artificial Sequence
  Description of Artificial Sequence: Synthetic oligonucleotide
guuggaaccgaugucaucc

SEQ ID NO: 342205 - RNA, 19 nt, Artificial Sequence
  Description of Artificial Sequence: Synthetic oligonucleotide
aguggauaacuuuacaaaa

SEQ ID NO: 342206 - RNA, 19 nt, Artificial Sequence
  Description of Artificial Sequence: Synthetic oligonucleotide
aguauagaaguaauuuggg

SEQ ID NO: 342207 - RNA, 19 nt, Artificial Sequence
  Description of Artificial Sequence: Synthetic oligonucleotide
uauugucaaccucugaaaa

SEQ ID NO: 342208 - RNA, 19 nt, Artificial Sequence
  Description of Artificial Sequence: Synthetic oligonucleotide
acaggccaaauuaagauuc

SEQ ID NO: 342209 - RNA, 19 nt, Artificial Sequence
  Description of Artificial Sequence: Synthetic oligonucleotide
uuacguguaagauaacuua

SEQ ID NO: 342210 - RNA, 19 nt, Artificial Sequence
  Description of Artificial Sequence: Synthetic oligonucleotide
uacccauucaugcucaagu

SEQ ID NO: 342211 - RNA, 19 nt, Artificial Sequence
  Description of Artificial Sequence: Synthetic oligonucleotide
uacaauuggaauuccaauu

SEQ ID NO: 342212 - RNA, 19 nt, Artificial Sequence
  Description of Artificial Sequence: Synthetic oligonucleotide
uuucaguaggcacuaaaau

SEQ ID NO: 342213 - RNA, 19 nt, Artificial Sequence
  Description of Artificial Sequence: Synthetic oligonucleotide
aauauauuauauauauaua

SEQ ID NO: 342214 - RNA, 19 nt, Artificial Sequence
  Description of Artificial Sequence: Synthetic oligonucleotide
aaaucugauggguauguua

SEQ ID NO: 342215 - RNA, 19 nt, Artificial Sequence
  Description of Artificial Sequence: Synthetic oligonucleotide
aaauuaacuuagucucaug

SEQ ID NO: 342216 - RNA, 19 nt, Artificial Sequence
  Description of Artificial Sequence: Synthetic oligonucleotide
aaccgaugucauccaaggc

SEQ ID NO: 342217 - RNA, 19 nt, Artificial Sequence
  Description of Artificial Sequence: Synthetic oligonucleotide
auaaagcaggaaauguggc

SEQ ID NO: 342218 - RNA, 19 nt, Artificial Sequence
  Description of Artificial Sequence: Synthetic oligonucleotide
auuagaaggcauucuuaag

SEQ ID NO: 342219 - RNA, 19 nt, Artificial Sequence
  Description of Artificial Sequence: Synthetic oligonucleotide
aguuaguugugcaagaaca

SEQ ID NO: 342220 - RNA, 19 nt, Artificial Sequence
  Description of Artificial Sequence: Synthetic oligonucleotide
agguccuaaauacaugcag

SEQ ID NO: 342221 - RNA, 19 nt, Artificial Sequence
  Description of Artificial Sequence: Synthetic oligonucleotide
uaaucaguauagaaguaau

SEQ ID NO: 342222 - RNA, 19 nt, Artificial Sequence
  Description of Artificial Sequence: Synthetic oligonucleotide
uuuugacuaauauauuaua

SEQ ID NO: 342223 - RNA, 19 nt, Artificial Sequence
  Description of Artificial Sequence: Synthetic oligonucleotide
ucaagcauuccagagaauc

SEQ ID NO: 342224 - RNA, 19 nt, Artificial Sequence
  Description of Artificial Sequence: Synthetic oligonucleotide
uuggcuacuacccauucau

SEQ ID NO: 342225 - RNA, 19 nt, Artificial Sequence
  Description of Artificial Sequence: Synthetic oligonucleotide
uagccuaaauuuuaauaca

SEQ ID NO: 342226 - RNA, 19 nt, Artificial Sequence
  Description of Artificial Sequence: Synthetic oligonucleotide
gauuuagacaaguggacaa

SEQ ID NO: 342227 - RNA, 19 nt, Artificial Sequence
  Description of Artificial Sequence: Synthetic oligonucleotide
uauugaccagcacaagucu

SEQ ID NO: 342228 - RNA, 19 nt, Artificial Sequence
  Description of Artificial Sequence: Synthetic oligonucleotide
uacaguaaaaugugcuuac

SEQ ID NO: 342229 - RNA, 19 nt, Artificial Sequence
  Description of Artificial Sequence: Synthetic oligonucleotide
uuguugauugagaaaccca

SEQ ID NO: 342230 - RNA, 19 nt, Artificial Sequence
  Description of Artificial Sequence: Synthetic oligonucleotide
aguugugagaguuuggcua

SEQ ID NO: 342231 - RNA, 19 nt, Artificial Sequence
  Description of Artificial Sequence: Synthetic oligonucleotide
aaacaagaccaugaguuga

SEQ ID NO: 342232 - RNA, 19 nt, Artificial Sequence
  Description of Artificial Sequence: Synthetic oligonucleotide
ucuauuucaagccccugau

SEQ ID NO: 342233 - RNA, 19 nt, Artificial Sequence
  Description of Artificial Sequence: Synthetic oligonucleotide
gacaaguggacaauaaaca

SEQ ID NO: 342234 - RNA, 19 nt, Artificial Sequence
  Description of Artificial Sequence: Synthetic oligonucleotide
acaauuggaauuccaauuu

SEQ ID NO: 342235 - RNA, 19 nt, Artificial Sequence
  Description of Artificial Sequence: Synthetic oligonucleotide
ucaaauacuuauugucaac

SEQ ID NO: 342236 - RNA, 19 nt, Artificial Sequence
  Description of Artificial Sequence: Synthetic oligonucleotide
aagcuuacugcuuccagaa

SEQ ID NO: 342237 - RNA, 19 nt, Artificial Sequence
  Description of Artificial Sequence: Synthetic oligonucleotide
  modified_base (5)..(5): a, c, u, g, unknown or other
agaanauuuuccaucuuug

SEQ ID NO: 342238 - RNA, 19 nt, Artificial Sequence
  Description of Artificial Sequence: Synthetic oligonucleotide
uuuugaccgacauggcucc

SEQ ID NO: 342239 - RNA, 19 nt, Artificial Sequence
  Description of Artificial Sequence: Synthetic oligonucleotide
cacgcaacucugaacaagg

SEQ ID NO: 342240 - RNA, 19 nt, Artificial Sequence
  Description of Artificial Sequence: Synthetic oligonucleotide
acaacuguuguugauugag

SEQ ID NO: 342241 - RNA, 19 nt, Artificial Sequence
  Description of Artificial Sequence: Synthetic oligonucleotide
aucauuaaguggccagaac

SEQ ID NO: 342242 - RNA, 19 nt, Artificial Sequence
  Description of Artificial Sequence: Synthetic oligonucleotide
uuaaucauucuuccucuaa

SEQ ID NO: 342243 - RNA, 19 nt, Artificial Sequence
  Description of Artificial Sequence: Synthetic oligonucleotide
acaauuacuguuaccauca

SEQ ID NO: 342244 - RNA, 19 nt, Artificial Sequence
  Description of Artificial Sequence: Synthetic oligonucleotide
aagacaucuuacguguaag

SEQ ID NO: 342245 - RNA, 19 nt, Artificial Sequence
  Description of Artificial Sequence: Synthetic oligonucleotide
uauuucaguaggcacuaaa

SEQ ID NO: 342246 - RNA, 19 nt, Artificial Sequence
  Description of Artificial Sequence: Synthetic oligonucleotide
aaguggacaauaaacagua

SEQ ID NO: 342247 - RNA, 19 nt, Artificial Sequence
  Description of Artificial Sequence: Synthetic oligonucleotide
ucaagcuuacugcuuccag

SEQ ID NO: 342248 - RNA, 19 nt, Artificial Sequence
  Description of Artificial Sequence: Synthetic oligonucleotide
ugcaagaacaagauuccau

SEQ ID NO: 342249 - RNA, 19 nt, Artificial Sequence
  Description of Artificial Sequence: Synthetic oligonucleotide
aagugaugaaauauuggga

SEQ ID NO: 342250 - RNA, 19 nt, Artificial Sequence
  Description of Artificial Sequence: Synthetic oligonucleotide
ucaagugcaguggauaacu

SEQ ID NO: 342251 - RNA, 19 nt, Artificial Sequence
  Description of Artificial Sequence: Synthetic oligonucleotide
aucaguauagaaguaauuu

SEQ ID NO: 342252 - RNA, 19 nt, Artificial Sequence
  Description of Artificial Sequence: Synthetic oligonucleotide
ccugauagguccuaaauac

SEQ ID NO: 342253 - RNA, 19 nt, Artificial Sequence
  Description of Artificial Sequence: Synthetic oligonucleotide
ucaagccccugauaggucc

SEQ ID NO: 342254 - RNA, 19 nt, Artificial Sequence
  Description of Artificial Sequence: Synthetic oligonucleotide
cacaauuacuguuaccauc

SEQ ID NO: 342255 - RNA, 19 nt, Artificial Sequence
  Description of Artificial Sequence: Synthetic oligonucleotide
aagagcuagguacacgcaa

SEQ ID NO: 342256 - RNA, 19 nt, Artificial Sequence
  Description of Artificial Sequence: Synthetic oligonucleotide
uucuuauacuaccuuuuaa

SEQ ID NO: 342257 - RNA, 19 nt, Artificial Sequence
  Description of Artificial Sequence: Synthetic oligonucleotide
uuaagagacgacgacgccu

SEQ ID NO: 342258 - RNA, 19 nt, Artificial Sequence
  Description of Artificial Sequence: Synthetic oligonucleotide
uuuaagagacgacgacgcc

SEQ ID NO: 342259 - RNA, 19 nt, Artificial Sequence
  Description of Artificial Sequence: Synthetic oligonucleotide
augacauucuaaaagucug

SEQ ID NO: 342260 - RNA, 19 nt, Artificial Sequence
  Description of Artificial Sequence: Synthetic oligonucleotide
cuagguacacgcaacucug

SEQ ID NO: 342261 - RNA, 19 nt, Artificial Sequence
  Description of Artificial Sequence: Synthetic oligonucleotide
uuggacugcuggaaaauac

SEQ ID NO: 342262 - RNA, 19 nt, Artificial Sequence
  Description of Artificial Sequence: Synthetic oligonucleotide
ugaagagcgagguggucag

SEQ ID NO: 342263 - RNA, 19 nt, Artificial Sequence
  Description of Artificial Sequence: Synthetic oligonucleotide
guguaaucaguauagaagu

SEQ ID NO: 342264 - RNA, 19 nt, Artificial Sequence
  Description of Artificial Sequence: Synthetic oligonucleotide
uggcauucauguuuugcag

SEQ ID NO: 342265 - RNA, 19 nt, Artificial Sequence
  Description of Artificial Sequence: Synthetic oligonucleotide
uuucaagccccugauaggu

SEQ ID NO: 342266 - RNA, 19 nt, Artificial Sequence
  Description of Artificial Sequence: Synthetic oligonucleotide
caauaucuaaucauacaca

SEQ ID NO: 342267 - RNA, 19 nt, Artificial Sequence
  Description of Artificial Sequence: Synthetic oligonucleotide
ugacauucuaaaagucugu

SEQ ID NO: 342268 - RNA, 19 nt, Artificial Sequence
  Description of Artificial Sequence: Synthetic oligonucleotide
aucuuauauagauuguauu

SEQ ID NO: 342269 - RNA, 19 nt, Artificial Sequence
  Description of Artificial Sequence: Synthetic oligonucleotide
uagacaaguggacaauaaa

SEQ ID NO: 342270 - RNA, 19 nt, Artificial Sequence
  Description of Artificial Sequence: Synthetic oligonucleotide
caguaaaaugugcuuacac

SEQ ID NO: 342271 - RNA, 19 nt, Artificial Sequence
  Description of Artificial Sequence: Synthetic oligonucleotide
auauacugaaaaccagaga

SEQ ID NO: 342272 - RNA, 19 nt, Artificial Sequence
  Description of Artificial Sequence: Synthetic oligonucleotide
gagacgacgacgccuuccg

SEQ ID NO: 342273 - RNA, 19 nt, Artificial Sequence
  Description of Artificial Sequence: Synthetic oligonucleotide
aaggacuuagguguaauuu

SEQ ID NO: 342274 - RNA, 19 nt, Artificial Sequence
  Description of Artificial Sequence: Synthetic oligonucleotide
uggacugcuggaaaauacu

SEQ ID NO: 342275 - RNA, 19 nt, Artificial Sequence
  Description of Artificial Sequence: Synthetic oligonucleotide
ugauggguauguuaacuuc

SEQ ID NO: 342276 - RNA, 19 nt, Artificial Sequence
  Description of Artificial Sequence: Synthetic oligonucleotide
uagaaggcauucuuaagua

SEQ ID NO: 342277 - RNA, 19 nt, Artificial Sequence
  Description of Artificial Sequence: Synthetic oligonucleotide
auauauauauauauauaua

SEQ ID NO: 342278 - RNA, 19 nt, Artificial Sequence
  Description of Artificial Sequence: Synthetic oligonucleotide
uguaaucaguauagaagua

SEQ ID NO: 342279 - RNA, 19 nt, Artificial Sequence
  Description of Artificial Sequence: Synthetic oligonucleotide
auauauauauauauauauu

SEQ ID NO: 342280 - RNA, 19 nt, Artificial Sequence
  Description of Artificial Sequence: Synthetic oligonucleotide
uaacuuagucucauggauu

SEQ ID NO: 342281 - RNA, 19 nt, Artificial Sequence
  Description of Artificial Sequence: Synthetic oligonucleotide
gcuuacugcuuccagaacc

SEQ ID NO: 342282 - RNA, 19 nt, Artificial Sequence
  Description of Artificial Sequence: Synthetic oligonucleotide
ggacacauuuaacagcuag

SEQ ID NO: 342283 - RNA, 19 nt, Artificial Sequence
  Description of Artificial Sequence: Synthetic oligonucleotide
auacuuaauuacugugcug

SEQ ID NO: 342284 - RNA, 19 nt, Artificial Sequence
  Description of Artificial Sequence: Synthetic oligonucleotide
cuuuucauaucuccauuuc

SEQ ID NO: 342285 - RNA, 19 nt, Artificial Sequence
  Description of Artificial Sequence: Synthetic oligonucleotide
acaucuuacguguaagaua

SEQ ID NO: 342286 - RNA, 19 nt, Artificial Sequence
  Description of Artificial Sequence: Synthetic oligonucleotide
uuccucuaauuaaaacaca

SEQ ID NO: 342287 - RNA, 19 nt, Artificial Sequence
  Description of Artificial Sequence: Synthetic oligonucleotide
uugggaacuuggaaauggc

SEQ ID NO: 342288 - RNA, 19 nt, Artificial Sequence
  Description of Artificial Sequence: Synthetic oligonucleotide
uaaacaacuguuguugauu

SEQ ID NO: 342289 - RNA, 19 nt, Artificial Sequence
  Description of Artificial Sequence: Synthetic oligonucleotide
guugugagaguuuggcuac

SEQ ID NO: 342290 - RNA, 19 nt, Artificial Sequence
  Description of Artificial Sequence: Synthetic oligonucleotide
acccuuaucccuuguccac

SEQ ID NO: 342291 - RNA, 19 nt, Artificial Sequence
  Description of Artificial Sequence: Synthetic oligonucleotide
caauuggaauuccaauuug

SEQ ID NO: 342292 - RNA, 19 nt, Artificial Sequence
  Description of Artificial Sequence: Synthetic oligonucleotide
agauuuuaagagacgacga

SEQ ID NO: 342293 - RNA, 19 nt, Artificial Sequence
  Description of Artificial Sequence: Synthetic oligonucleotide
agguccaucacuccaaguu

SEQ ID NO: 342294 - RNA, 19 nt, Artificial Sequence
  Description of Artificial Sequence: Synthetic oligonucleotide
ucacuccaaguugugagag

SEQ ID NO: 342295 - RNA, 19 nt, Artificial Sequence
  Description of Artificial Sequence: Synthetic oligonucleotide
  modified_base (9)..(9): a, c, u, g, unknown or other
gggaagaanauuuuccauc

SEQ ID NO: 342296 - RNA, 19 nt, Artificial Sequence
  Description of Artificial Sequence: Synthetic oligonucleotide
ugagaaacccaaacauuua

SEQ ID NO: 342297 - RNA, 19 nt, Artificial Sequence
  Description of Artificial Sequence: Synthetic oligonucleotide
caaaauuaacuuagucuca

SEQ ID NO: 342298 - RNA, 19 nt, Artificial Sequence
  Description of Artificial Sequence: Synthetic oligonucleotide
agucucauggauuucuauu

SEQ ID NO: 342299 - RNA, 19 nt, Artificial Sequence
  Description of Artificial Sequence: Synthetic oligonucleotide
gaagcccugauauuaccuc

SEQ ID NO: 342300 - RNA, 19 nt, Artificial Sequence
  Description of Artificial Sequence: Synthetic oligonucleotide
gugauauacugaaaaccag

SEQ ID NO: 342301 - RNA, 19 nt, Artificial Sequence
  Description of Artificial Sequence: Synthetic oligonucleotide
ugcaguggauaacuuuaca

SEQ ID NO: 342302 - RNA, 19 nt, Artificial Sequence
  Description of Artificial Sequence: Synthetic oligonucleotide
aauauuccauggaaauggu

SEQ ID NO: 342303 - RNA, 19 nt, Artificial Sequence
  Description of Artificial Sequence: Synthetic oligonucleotide
ucuuuggacugcuggaaaa

SEQ ID NO: 342304 - RNA, 19 nt, Artificial Sequence
  Description of Artificial Sequence: Synthetic oligonucleotide
uacaacucggaacuuccau

SEQ ID NO: 342305 - RNA, 19 nt, Artificial Sequence
  Description of Artificial Sequence: Synthetic oligonucleotide
aauuacugugcugguccuc

SEQ ID NO: 342306 - RNA, 19 nt, Artificial Sequence
  Description of Artificial Sequence: Synthetic oligonucleotide
uuaccucuuuuccuuauuu

SEQ ID NO: 342307 - RNA, 19 nt, Artificial Sequence
  Description of Artificial Sequence: Synthetic oligonucleotide
acagcccguagguagcgac

SEQ ID NO: 342308 - RNA, 19 nt, Artificial Sequence
  Description of Artificial Sequence: Synthetic oligonucleotide
acugucaagagcucuuaau

SEQ ID NO: 342309 - RNA, 19 nt, Artificial Sequence
  Description of Artificial Sequence: Synthetic oligonucleotide
uacuacccauucaugcuca

SEQ ID NO: 342310 - RNA, 19 nt, Artificial Sequence
  Description of Artificial Sequence: Synthetic oligonucleotide
agagcuagguacacgcaac

SEQ ID NO: 342311 - RNA, 19 nt, Artificial Sequence
  Description of Artificial Sequence: Synthetic oligonucleotide
aggacuuagguguaauuuu

SEQ ID NO: 342312 - RNA, 19 nt, Artificial Sequence
  Description of Artificial Sequence: Synthetic oligonucleotide
ucggaacuuccauucaacu

SEQ ID NO: 342313 - RNA, 19 nt, Artificial Sequence
  Description of Artificial Sequence: Synthetic oligonucleotide
ggcuacuacccauucaugc

SEQ ID NO: 342314 - RNA, 19 nt, Artificial Sequence
  Description of Artificial Sequence: Synthetic oligonucleotide
uaucucuauuagcagguuu

SEQ ID NO: 342315 - RNA, 19 nt, Artificial Sequence
  Description of Artificial Sequence: Synthetic oligonucleotide
agaaaucugauggguaugu

SEQ ID NO: 342316 - RNA, 19 nt, Artificial Sequence
  Description of Artificial Sequence: Synthetic oligonucleotide
uaacauuauugaccagcac

SEQ ID NO: 342317 - RNA, 19 nt, Artificial Sequence
  Description of Artificial Sequence: Synthetic oligonucleotide
cuuauauagauuguauuua

SEQ ID NO: 342318 - RNA, 19 nt, Artificial Sequence
  Description of Artificial Sequence: Synthetic oligonucleotide
agacaucuuacguguaaga

SEQ ID NO: 342319 - RNA, 19 nt, Artificial Sequence
  Description of Artificial Sequence: Synthetic oligonucleotide
auuuaacagcuaguucaac

SEQ ID NO: 342320 - RNA, 19 nt, Artificial Sequence
  Description of Artificial Sequence: Synthetic oligonucleotide
agagacgacgacgccuucc

SEQ ID NO: 342321 - RNA, 19 nt, Artificial Sequence
  Description of Artificial Sequence: Synthetic oligonucleotide
ggacacuuuaagaauacug

SEQ ID NO: 342322 - RNA, 19 nt, Artificial Sequence
  Description of Artificial Sequence: Synthetic oligonucleotide
uaucccuuguccacaugga

SEQ ID NO: 342323 - RNA, 19 nt, Artificial Sequence
  Description of Artificial Sequence: Synthetic oligonucleotide
uuuagacaaguggacaaua

SEQ ID NO: 342324 - RNA, 19 nt, Artificial Sequence
  Description of Artificial Sequence: Synthetic oligonucleotide
cuacuacccauucaugcuc

SEQ ID NO: 342325 - RNA, 19 nt, Artificial Sequence
  Description of Artificial Sequence: Synthetic oligonucleotide
caguggauaacuuuacaaa

SEQ ID NO: 342326 - RNA, 19 nt, Artificial Sequence
  Description of Artificial Sequence: Synthetic oligonucleotide
uuguaggaaaagauucguu

SEQ ID NO: 342327 - RNA, 19 nt, Artificial Sequence
  Description of Artificial Sequence: Synthetic oligonucleotide
ucauaucauuaaguggcca

SEQ ID NO: 342328 - RNA, 19 nt, Artificial Sequence
  Description of Artificial Sequence: Synthetic oligonucleotide
acuuaauuacugugcuggu

SEQ ID NO: 342329 - RNA, 19 nt, Artificial Sequence
  Description of Artificial Sequence: Synthetic oligonucleotide
aucacuccaaguugugaga

SEQ ID NO: 342330 - RNA, 19 nt, Artificial Sequence
  Description of Artificial Sequence: Synthetic oligonucleotide
cuaauauauuauauauaua

SEQ ID NO: 342331 - RNA, 19 nt, Artificial Sequence
  Description of Artificial Sequence: Synthetic oligonucleotide
auuucaguaggcacuaaaa

SEQ ID NO: 342332 - RNA, 19 nt, Artificial Sequence
  Description of Artificial Sequence: Synthetic oligonucleotide
aaucaguauagaaguaauu

SEQ ID NO: 342333 - RNA, 19 nt, Artificial Sequence
  Description of Artificial Sequence: Synthetic oligonucleotide
cucggaacuuccauucaac

SEQ ID NO: 342334 - RNA, 19 nt, Artificial Sequence
  Description of Artificial Sequence: Synthetic oligonucleotide
uaucauuaaguggccagaa

SEQ ID NO: 342335 - RNA, 19 nt, Artificial Sequence
  Description of Artificial Sequence: Synthetic oligonucleotide
auuacugugcugguccuca

SEQ ID NO: 342336 - RNA, 19 nt, Artificial Sequence
  Description of Artificial Sequence: Synthetic oligonucleotide
uguuuacuacacacugaaa

SEQ ID NO: 342337 - RNA, 19 nt, Artificial Sequence
  Description of Artificial Sequence: Synthetic oligonucleotide
ggcguagucauggucaccg

SEQ ID NO: 342338 - RNA, 19 nt, Artificial Sequence
  Description of Artificial Sequence: Synthetic oligonucleotide
caguuaacagguuguagga

SEQ ID NO: 342339 - RNA, 19 nt, Artificial Sequence
  Description of Artificial Sequence: Synthetic oligonucleotide
caguuaguugugcaagaac

SEQ ID NO: 342340 - RNA, 19 nt, Artificial Sequence
  Description of Artificial Sequence: Synthetic oligonucleotide
cuuuugacuaauauauuau

SEQ ID NO: 342341 - RNA, 19 nt, Artificial Sequence
  Description of Artificial Sequence: Synthetic oligonucleotide
cauacuuaauuacugugcu

SEQ ID NO: 342342 - RNA, 19 nt, Artificial Sequence
  Description of Artificial Sequence: Synthetic oligonucleotide
uaccucuuuuccuuauuuc

SEQ ID NO: 342343 - RNA, 19 nt, Artificial Sequence
  Description of Artificial Sequence: Synthetic oligonucleotide
gagcucuuaauucuccaaa

SEQ ID NO: 342344 - RNA, 19 nt, Artificial Sequence
  Description of Artificial Sequence: Synthetic oligonucleotide
  modified_base (8)..(8): a, c, u, g, unknown or other
ggaagaanauuuuccaucu

SEQ ID NO: 342345 - RNA, 19 nt, Artificial Sequence
  Description of Artificial Sequence: Synthetic oligonucleotide
gccauucuaaucuugccac

SEQ ID NO: 342346 - RNA, 19 nt, Artificial Sequence
  Description of Artificial Sequence: Synthetic oligonucleotide
agagacuaauuuaggucuc

SEQ ID NO: 342347 - RNA, 19 nt, Artificial Sequence
  Description of Artificial Sequence: Synthetic oligonucleotide
agggcguagucauggucac

SEQ ID NO: 342348 - RNA, 19 nt, Artificial Sequence
  Description of Artificial Sequence: Synthetic oligonucleotide
acaacucggaacuuccauu

SEQ ID NO: 342349 - RNA, 19 nt, Artificial Sequence
  Description of Artificial Sequence: Synthetic oligonucleotide
ccagagacuaauuuagguc

SEQ ID NO: 342350 - RNA, 19 nt, Artificial Sequence
  Description of Artificial Sequence: Synthetic oligonucleotide
uuugcaccuuguacaacuc

SEQ ID NO: 342351 - RNA, 19 nt, Artificial Sequence
  Description of Artificial Sequence: Synthetic oligonucleotide
aacaagaccaugaguugau

SEQ ID NO: 342352 - RNA, 19 nt, Artificial Sequence
  Description of Artificial Sequence: Synthetic oligonucleotide
agcagaagcccugauauua

SEQ ID NO: 342353 - RNA, 19 nt, Artificial Sequence
  Description of Artificial Sequence: Synthetic oligonucleotide
caagcuuacugcuuccaga

SEQ ID NO: 342354 - RNA, 19 nt, Artificial Sequence
  Description of Artificial Sequence: Synthetic oligonucleotide
cauuuacaguuaguugugc

SEQ ID NO: 342355 - RNA, 19 nt, Artificial Sequence
  Description of Artificial Sequence: Synthetic oligonucleotide
uauuaccucuuuuccuuau

SEQ ID NO: 342356 - RNA, 19 nt, Artificial Sequence
  Description of Artificial Sequence: Synthetic oligonucleotide
auuaaguggccagaacuau

SEQ ID NO: 342357 - RNA, 19 nt, Artificial Sequence
  Description of Artificial Sequence: Synthetic oligonucleotide
cauuaaucauucuuccucu

SEQ ID NO: 342358 - RNA, 19 nt, Artificial Sequence
  Description of Artificial Sequence: Synthetic oligonucleotide
uccgagcgcacgccgagcc

SEQ ID NO: 342359 - RNA, 19 nt, Artificial Sequence
  Description of Artificial Sequence: Synthetic oligonucleotide
guguaauuuuguuccaaaa

SEQ ID NO: 342360 - RNA, 19 nt, Artificial Sequence
  Description of Artificial Sequence: Synthetic oligonucleotide
uaagauucccucccaccuu

SEQ ID NO: 342361 - RNA, 19 nt, Artificial Sequence
  Description of Artificial Sequence: Synthetic oligonucleotide
uucccucccaccuuucaaa

SEQ ID NO: 342362 - RNA, 19 nt, Artificial Sequence
  Description of Artificial Sequence: Synthetic oligonucleotide
uagguguaauuuuguucca

SEQ ID NO: 342363 - RNA, 19 nt, Artificial Sequence
  Description of Artificial Sequence: Synthetic oligonucleotide
cacaaauuuagccuaaauu

SEQ ID NO: 342364 - RNA, 19 nt, Artificial Sequence
  Description of Artificial Sequence: Synthetic oligonucleotide
acacgcaacucugaacaag

SEQ ID NO: 342365 - RNA, 19 nt, Artificial Sequence
  Description of Artificial Sequence: Synthetic oligonucleotide
ugcagguacugcuaagcuu

SEQ ID NO: 342366 - RNA, 19 nt, Artificial Sequence
  Description of Artificial Sequence: Synthetic oligonucleotide
cagggcguagucaugguca

SEQ ID NO: 342367 - RNA, 19 nt, Artificial Sequence
  Description of Artificial Sequence: Synthetic oligonucleotide
gucaaccucugaaaaguug

SEQ ID NO: 342368 - RNA, 19 nt, Artificial Sequence
  Description of Artificial Sequence: Synthetic oligonucleotide
uuuggaaaucaagcuuacu

SEQ ID NO: 342369 - RNA, 19 nt, Artificial Sequence
  Description of Artificial Sequence: Synthetic oligonucleotide
auuuagacaaguggacaau

SEQ ID NO: 342370 - RNA, 19 nt, Artificial Sequence
  Description of Artificial Sequence: Synthetic oligonucleotide
ggucucaaaucauauuauc

SEQ ID NO: 342371 - RNA, 19 nt, Artificial Sequence
  Description of Artificial Sequence: Synthetic oligonucleotide
auuaaucauucuuccucua

SEQ ID NO: 342372 - RNA, 19 nt, Artificial Sequence
  Description of Artificial Sequence: Synthetic oligonucleotide
cugauagguccuaaauaca

SEQ ID NO: 342373 - RNA, 19 nt, Artificial Sequence
  Description of Artificial Sequence: Synthetic oligonucleotide
uggcuacuacccauucaug

SEQ ID NO: 342374 - RNA, 19 nt, Artificial Sequence
  Description of Artificial Sequence: Synthetic oligonucleotide
ugcuugcacgcguuugccc

SEQ ID NO: 342375 - RNA, 19 nt, Artificial Sequence
  Description of Artificial Sequence: Synthetic oligonucleotide
aaacagccucagucauauc

SEQ ID NO: 342376 - RNA, 19 nt, Artificial Sequence
  Description of Artificial Sequence: Synthetic oligonucleotide
auacuuaauuaugaacauu

SEQ ID NO: 342377 - RNA, 19 nt, Artificial Sequence
  Description of Artificial Sequence: Synthetic oligonucleotide
agcuagguacacgcaacuc

SEQ ID NO: 342378 - RNA, 19 nt, Artificial Sequence
  Description of Artificial Sequence: Synthetic oligonucleotide
aagagacgacgacgccuuc

SEQ ID NO: 342379 - RNA, 19 nt, Artificial Sequence
  Description of Artificial Sequence: Synthetic oligonucleotide
uggccagaacuauuuaauu

SEQ ID NO: 342380 - RNA, 19 nt, Artificial Sequence
  Description of Artificial Sequence: Synthetic oligonucleotide
auuaggccauucuaaucuu

SEQ ID NO: 342381 - RNA, 19 nt, Artificial Sequence
  Description of Artificial Sequence: Synthetic oligonucleotide
uuggaaccgaugucaucca

SEQ ID NO: 342382 - RNA, 19 nt, Artificial Sequence
  Description of Artificial Sequence: Synthetic oligonucleotide
gcauucauguuuugcagca

SEQ ID NO: 342383 - RNA, 19 nt, Artificial Sequence
  Description of Artificial Sequence: Synthetic oligonucleotide
ggacuuagguguaauuuug

SEQ ID NO: 342384 - RNA, 19 nt, Artificial Sequence
  Description of Artificial Sequence: Synthetic oligonucleotide
gcacuaaaauccaugcagc

SEQ ID NO: 342385 - RNA, 19 nt, Artificial Sequence
  Description of Artificial Sequence: Synthetic oligonucleotide
gcaguggauaacuuuacaa

SEQ ID NO: 342386 - RNA, 19 nt, Artificial Sequence
  Description of Artificial Sequence: Synthetic oligonucleotide
gguacugcuaagcuuuuaa

SEQ ID NO: 342387 - RNA, 19 nt, Artificial Sequence
  Description of Artificial Sequence: Synthetic oligonucleotide
ugaccgacauggcucccac

SEQ ID NO: 342388 - RNA, 19 nt, Artificial Sequence
  Description of Artificial Sequence: Synthetic oligonucleotide
gacgccuuccgagcgcacg

SEQ ID NO: 342389 - RNA, 19 nt, Artificial Sequence
  Description of Artificial Sequence: Synthetic oligonucleotide
agguacacgcaacucugaa

SEQ ID NO: 342390 - RNA, 19 nt, Artificial Sequence
  Description of Artificial Sequence: Synthetic oligonucleotide
ccuuuugacuaauauauua

SEQ ID NO: 342391 - RNA, 19 nt, Artificial Sequence
  Description of Artificial Sequence: Synthetic oligonucleotide
gguacacgcaacucugaac

SEQ ID NO: 342392 - RNA, 19 nt, Artificial Sequence
  Description of Artificial Sequence: Synthetic oligonucleotide
auaucuaaucauacacaaa

SEQ ID NO: 342393 - RNA, 19 nt, Artificial Sequence
  Description of Artificial Sequence: Synthetic oligonucleotide
guggacaauaaacaguauu

SEQ ID NO: 342394 - RNA, 19 nt, Artificial Sequence
  Description of Artificial Sequence: Synthetic oligonucleotide
aaguggccagaacuauuua

SEQ ID NO: 342395 - RNA, 19 nt, Artificial Sequence
  Description of Artificial Sequence: Synthetic oligonucleotide
caacuguuguugauugaga

SEQ ID NO: 342396 - RNA, 19 nt, Artificial Sequence
  Description of Artificial Sequence: Synthetic oligonucleotide
gacacccuuaucccuuguc

SEQ ID NO: 342397 - RNA, 19 nt, Artificial Sequence
  Description of Artificial Sequence: Synthetic oligonucleotide
cacuuuaagaauacuguuu

SEQ ID NO: 342398 - RNA, 19 nt, Artificial Sequence
  Description of Artificial Sequence: Synthetic oligonucleotide
agcccguagguagcgacuc

SEQ ID NO: 342399 - RNA, 19 nt, Artificial Sequence
  Description of Artificial Sequence: Synthetic oligonucleotide
gguguaauuuuguuccaaa

SEQ ID NO: 342400 - RNA, 19 nt, Artificial Sequence
  Description of Artificial Sequence: Synthetic oligonucleotide
guuuggcuacuacccauuc

SEQ ID NO: 342401 - RNA, 19 nt, Artificial Sequence
  Description of Artificial Sequence: Synthetic oligonucleotide
gacacauuuaacagcuagu

SEQ ID NO: 342402 - RNA, 19 nt, Artificial Sequence
  Description of Artificial Sequence: Synthetic oligonucleotide
ggaauuccaauuugcaccu

SEQ ID NO: 342403 - RNA, 19 nt, Artificial Sequence
  Description of Artificial Sequence: Synthetic oligonucleotide
ggaaccgaugucauccaag

SEQ ID NO: 342404 - RNA, 19 nt, Artificial Sequence
  Description of Artificial Sequence: Synthetic oligonucleotide
gacaucuuacguguaagau

SEQ ID NO: 342405 - RNA, 19 nt, Artificial Sequence
  Description of Artificial Sequence: Synthetic oligonucleotide
uguuaccaucaguccaguc

SEQ ID NO: 342406 - RNA, 19 nt, Artificial Sequence
  Description of Artificial Sequence: Synthetic oligonucleotide
uggaaccgaugucauccaa

SEQ ID NO: 342407 - RNA, 19 nt, Artificial Sequence
  Description of Artificial Sequence: Synthetic oligonucleotide
cugaaaauuagaaggcauu

SEQ ID NO: 342408 - RNA, 19 nt, Artificial Sequence
  Description of Artificial Sequence: Synthetic oligonucleotide
cucaagugcaguggauaac

SEQ ID NO: 342409 - RNA, 19 nt, Artificial Sequence
  Description of Artificial Sequence: Synthetic oligonucleotide
aggucucaaaucauauuau

SEQ ID NO: 342410 - RNA, 19 nt, Artificial Sequence
  Description of Artificial Sequence: Synthetic oligonucleotide
uugcuacaauuggaauucc

SEQ ID NO: 342411 - RNA, 19 nt, Artificial Sequence
  Description of Artificial Sequence: Synthetic oligonucleotide
ccuucaauaucuaaucaua

SEQ ID NO: 342412 - RNA, 19 nt, Artificial Sequence
  Description of Artificial Sequence: Synthetic oligonucleotide
  modified_base (7)..(7): a, c, u, g, unknown or other
gaagaanauuuuccaucuu

SEQ ID NO: 342413 - RNA, 19 nt, Artificial Sequence
  Description of Artificial Sequence: Synthetic oligonucleotide
uugaccgacauggcuccca

SEQ ID NO: 342414 - RNA, 19 nt, Artificial Sequence
  Description of Artificial Sequence: Synthetic oligonucleotide
gacgacgccuuccgagcgc

SEQ ID NO: 342415 - RNA, 19 nt, Artificial Sequence
  Description of Artificial Sequence: Synthetic oligonucleotide
guugauugagaaacccaaa

SEQ ID NO: 342416 - RNA, 19 nt, Artificial Sequence
  Description of Artificial Sequence: Synthetic oligonucleotide
cacuaaaauccaugcagcu

SEQ ID NO: 342417 - RNA, 19 nt, Artificial Sequence
  Description of Artificial Sequence: Synthetic oligonucleotide
gaagagcuagguacacgca

SEQ ID NO: 342418 - RNA, 19 nt, Artificial Sequence
  Description of Artificial Sequence: Synthetic oligonucleotide
augaaauauugggaucuua

SEQ ID NO: 342419 - RNA, 19 nt, Artificial Sequence
  Description of Artificial Sequence: Synthetic oligonucleotide
gcuacaauuggaauuccaa

SEQ ID NO: 342420 - RNA, 19 nt, Artificial Sequence
  Description of Artificial Sequence: Synthetic oligonucleotide
ccuuguacaacucggaacu

SEQ ID NO: 342421 - RNA, 19 nt, Artificial Sequence
  Description of Artificial Sequence: Synthetic oligonucleotide
acgcaacucugaacaaggg

SEQ ID NO: 342422 - RNA, 19 nt, Artificial Sequence
  Description of Artificial Sequence: Synthetic oligonucleotide
ugcagugcuugcacgcguu

SEQ ID NO: 342423 - RNA, 19 nt, Artificial Sequence
  Description of Artificial Sequence: Synthetic oligonucleotide
cacgccgagccagaacucc

SEQ ID NO: 342424 - RNA, 19 nt, Artificial Sequence
  Description of Artificial Sequence: Synthetic oligonucleotide
gccuaaauuuuaauacaac

SEQ ID NO: 342425 - RNA, 19 nt, Artificial Sequence
  Description of Artificial Sequence: Synthetic oligonucleotide
ugcaugccucaaauacuua

SEQ ID NO: 342426 - RNA, 19 nt, Artificial Sequence
  Description of Artificial Sequence: Synthetic oligonucleotide
acgcguuugcccagcuccc

SEQ ID NO: 342427 - RNA, 19 nt, Artificial Sequence
  Description of Artificial Sequence: Synthetic oligonucleotide
auggucaccggcgggcgag

SEQ ID NO: 342428 - RNA, 19 nt, Artificial Sequence
  Description of Artificial Sequence: Synthetic oligonucleotide
gaguuuggcuacuacccau

SEQ ID NO: 342429 - RNA, 19 nt, Artificial Sequence
  Description of Artificial Sequence: Synthetic oligonucleotide
gcuagguacacgcaacucu

SEQ ID NO: 342430 - RNA, 19 nt, Artificial Sequence
  Description of Artificial Sequence: Synthetic oligonucleotide
auacacaaauuuagccuaa

SEQ ID NO: 342431 - RNA, 19 nt, Artificial Sequence
  Description of Artificial Sequence: Synthetic oligonucleotide
cagucaguuaacagguugu

SEQ ID NO: 342432 - RNA, 19 nt, Artificial Sequence
  Description of Artificial Sequence: Synthetic oligonucleotide
agguguaauuuuguuccaa

SEQ ID NO: 342433 - RNA, 19 nt, Artificial Sequence
  Description of Artificial Sequence: Synthetic oligonucleotide
aggguggacaggccaaauu

SEQ ID NO: 342434 - RNA, 19 nt, Artificial Sequence
  Description of Artificial Sequence: Synthetic oligonucleotide
agucaguuaacagguugua

SEQ ID NO: 342435 - RNA, 19 nt, Artificial Sequence
  Description of Artificial Sequence: Synthetic oligonucleotide
guggauaacuuuacaaaau

SEQ ID NO: 342436 - RNA, 19 nt, Artificial Sequence
  Description of Artificial Sequence: Synthetic oligonucleotide
ugugagaguuuggcuacua

SEQ ID NO: 342437 - RNA, 19 nt, Artificial Sequence
  Description of Artificial Sequence: Synthetic oligonucleotide
ccucacuuuacauguuuuc

SEQ ID NO: 342438 - RNA, 19 nt, Artificial Sequence
  Description of Artificial Sequence: Synthetic oligonucleotide
ccucuaauuaaaacacaga

SEQ ID NO: 342439 - RNA, 19 nt, Artificial Sequence
  Description of Artificial Sequence: Synthetic oligonucleotide
ccaccgacacccuuauccc

SEQ ID NO: 342440 - RNA, 19 nt, Artificial Sequence
  Description of Artificial Sequence: Synthetic oligonucleotide
cuuaucccuuguccacaug

SEQ ID NO: 342441 - RNA, 19 nt, Artificial Sequence
  Description of Artificial Sequence: Synthetic oligonucleotide
gacuuagguguaauuuugu

SEQ ID NO: 342442 - RNA, 19 nt, Artificial Sequence
  Description of Artificial Sequence: Synthetic oligonucleotide
cagguuguaggaaaagauu

SEQ ID NO: 342443 - RNA, 19 nt, Artificial Sequence
  Description of Artificial Sequence: Synthetic oligonucleotide
gaaaucaagcuuacugcuu

SEQ ID NO: 342444 - RNA, 19 nt, Artificial Sequence
  Description of Artificial Sequence: Synthetic oligonucleotide
gagcuagguacacgcaacu

SEQ ID NO: 342445 - RNA, 19 nt, Artificial Sequence
  Description of Artificial Sequence: Synthetic oligonucleotide
gcuacuacccauucaugcu

SEQ ID NO: 342446 - RNA, 19 nt, Artificial Sequence
  Description of Artificial Sequence: Synthetic oligonucleotide
aucuuacguguaagauaac

SEQ ID NO: 342447 - RNA, 19 nt, Artificial Sequence
  Description of Artificial Sequence: Synthetic oligonucleotide
aguguacaguuggaaccga

SEQ ID NO: 342448 - RNA, 19 nt, Artificial Sequence
  Description of Artificial Sequence: Synthetic oligonucleotide
guuaaggacuuagguguaa

SEQ ID NO: 342449 - RNA, 19 nt, Artificial Sequence
  Description of Artificial Sequence: Synthetic oligonucleotide
aguuaaggacuuaggugua

SEQ ID NO: 342450 - RNA, 19 nt, Artificial Sequence
  Description of Artificial Sequence: Synthetic oligonucleotide
aguuuggcuacuacccauu

SEQ ID NO: 342451 - RNA, 19 nt, Artificial Sequence
  Description of Artificial Sequence: Synthetic oligonucleotide
uuugaccgacauggcuccc

SEQ ID NO: 342452 - RNA, 19 nt, Artificial Sequence
  Description of Artificial Sequence: Synthetic oligonucleotide
acaucccaauccagaaacu

SEQ ID NO: 342453 - RNA, 19 nt, Artificial Sequence
  Description of Artificial Sequence: Synthetic oligonucleotide
ucucguuggccaggacagc

SEQ ID NO: 342454 - RNA, 19 nt, Artificial Sequence
  Description of Artificial Sequence: Synthetic oligonucleotide
ggacucgacucuccagccc

SEQ ID NO: 342455 - RNA, 19 nt, Artificial Sequence
  Description of Artificial Sequence: Synthetic oligonucleotide
ugcacgcguuugcccagcu

SEQ ID NO: 342456 - RNA, 19 nt, Artificial Sequence
  Description of Artificial Sequence: Synthetic oligonucleotide
gucccgucucguuggccag

SEQ ID NO: 342457 - RNA, 19 nt, Artificial Sequence
  Description of Artificial Sequence: Synthetic oligonucleotide
cuuacaucuuuggacugcu

SEQ ID NO: 342458 - RNA, 19 nt, Artificial Sequence
  Description of Artificial Sequence: Synthetic oligonucleotide
agccgcagucccacgccgc

SEQ ID NO: 342459 - RNA, 19 nt, Artificial Sequence
  Description of Artificial Sequence: Synthetic oligonucleotide
gaagagcgagguggucagc

SEQ ID NO: 342460 - RNA, 19 nt, Artificial Sequence
  Description of Artificial Sequence: Synthetic oligonucleotide
gcgggcgagucucugaaga

SEQ ID NO: 342461 - RNA, 19 nt, Artificial Sequence
  Description of Artificial Sequence: Synthetic oligonucleotide
agacgacgacgccuuccga

SEQ ID NO: 342462 - RNA, 19 nt, Artificial Sequence
  Description of Artificial Sequence: Synthetic oligonucleotide
guccaucacuccaaguugu

SEQ ID NO: 342463 - RNA, 19 nt, Artificial Sequence
  Description of Artificial Sequence: Synthetic oligonucleotide
uugcacgcguuugcccagc

SEQ ID NO: 342464 - RNA, 19 nt, Artificial Sequence
  Description of Artificial Sequence: Synthetic oligonucleotide
gucccacgccgcucagccg

SEQ ID NO: 342465 - RNA, 19 nt, Artificial Sequence
  Description of Artificial Sequence: Synthetic oligonucleotide
gcucccgauucucggcccg

SEQ ID NO: 342466 - RNA, 19 nt, Artificial Sequence
  Description of Artificial Sequence: Synthetic oligonucleotide
auauuucaguaggcacuaa

SEQ ID NO: 342467 - RNA, 19 nt, Artificial Sequence
  Description of Artificial Sequence: Synthetic oligonucleotide
cauucaacuucaccuguuu

SEQ ID NO: 342468 - RNA, 19 nt, Artificial Sequence
  Description of Artificial Sequence: Synthetic oligonucleotide
cuuuggacugcuggaaaau

SEQ ID NO: 342469 - RNA, 19 nt, Artificial Sequence
  Description of Artificial Sequence: Synthetic oligonucleotide
agcccugauauuaccucuu

SEQ ID NO: 342470 - RNA, 19 nt, Artificial Sequence
  Description of Artificial Sequence: Synthetic oligonucleotide
ccagaacuccaccgacacc

SEQ ID NO: 342471 - RNA, 19 nt, Artificial Sequence
  Description of Artificial Sequence: Synthetic oligonucleotide
cucccgauucucggcccgc

SEQ ID NO: 342472 - RNA, 19 nt, Artificial Sequence
  Description of Artificial Sequence: Synthetic oligonucleotide
acgccgagccagaacucca

SEQ ID NO: 342473 - RNA, 19 nt, Artificial Sequence
  Description of Artificial Sequence: Synthetic oligonucleotide
cggacucgacucuccagcc

SEQ ID NO: 342474 - RNA, 19 nt, Artificial Sequence
  Description of Artificial Sequence: Synthetic oligonucleotide
agguacugcuaagcuuuua

SEQ ID NO: 342475 - RNA, 19 nt, Artificial Sequence
  Description of Artificial Sequence: Synthetic oligonucleotide
cugaacaaggggacacauu

SEQ ID NO: 342476 - RNA, 19 nt, Artificial Sequence
  Description of Artificial Sequence: Synthetic oligonucleotide
acucgacucuccagcccca

SEQ ID NO: 342477 - RNA, 19 nt, Artificial Sequence
  Description of Artificial Sequence: Synthetic oligonucleotide
cgacgacgccuuccgagcg

SEQ ID NO: 342478 - RNA, 19 nt, Artificial Sequence
  Description of Artificial Sequence: Synthetic oligonucleotide
caagccccugauagguccu

SEQ ID NO: 342479 - RNA, 19 nt, Artificial Sequence
  Description of Artificial Sequence: Synthetic oligonucleotide
uggucaccggcgggcgagu

SEQ ID NO: 342480 - RNA, 19 nt, Artificial Sequence
  Description of Artificial Sequence: Synthetic oligonucleotide
guguacaguuggaaccgau

SEQ ID NO: 342481 - RNA, 19 nt, Artificial Sequence
  Description of Artificial Sequence: Synthetic oligonucleotide
ggcgagccagucccgucuc

SEQ ID NO: 342482 - RNA, 19 nt, Artificial Sequence
  Description of Artificial Sequence: Synthetic oligonucleotide
cugcauuguggggacuugu

SEQ ID NO: 342483 - RNA, 19 nt, Artificial Sequence
  Description of Artificial Sequence: Synthetic oligonucleotide
cagcccguagguagcgacu

SEQ ID NO: 342484 - RNA, 19 nt, Artificial Sequence
  Description of Artificial Sequence: Synthetic oligonucleotide
guaucucuauuagcagguu

SEQ ID NO: 342485 - RNA, 19 nt, Artificial Sequence
  Description of Artificial Sequence: Synthetic oligonucleotide
gucaccggcgggcgagucu

SEQ ID NO: 342486 - RNA, 19 nt, Artificial Sequence
  Description of Artificial Sequence: Synthetic oligonucleotide
gccgcgucguccucuucca

SEQ ID NO: 342487 - RNA, 19 nt, Artificial Sequence
  Description of Artificial Sequence: Synthetic oligonucleotide
cuccaccgacacccuuauc

SEQ ID NO: 342488 - RNA, 19 nt, Artificial Sequence
  Description of Artificial Sequence: Synthetic oligonucleotide
agcgcacgccgagccagaa

SEQ ID NO: 342489 - RNA, 19 nt, Artificial Sequence
  Description of Artificial Sequence: Synthetic oligonucleotide
ccuuccgagcgcacgccga

SEQ ID NO: 342490 - RNA, 19 nt, Artificial Sequence
  Description of Artificial Sequence: Synthetic oligonucleotide
cccuuaucccuuguccaca

SEQ ID NO: 342491 - RNA, 19 nt, Artificial Sequence
  Description of Artificial Sequence: Synthetic oligonucleotide
cgcacgccgagccagaacu

SEQ ID NO: 342492 - RNA, 19 nt, Artificial Sequence
  Description of Artificial Sequence: Synthetic oligonucleotide
gccccugauagguccuaaa

SEQ ID NO: 342493 - RNA, 19 nt, Artificial Sequence
  Description of Artificial Sequence: Synthetic oligonucleotide
cuguuaccaucaguccagu

SEQ ID NO: 342494 - RNA, 19 nt, Artificial Sequence
  Description of Artificial Sequence: Synthetic oligonucleotide
cgccgagccagaacuccac

SEQ ID NO: 342495 - RNA, 19 nt, Artificial Sequence
  Description of Artificial Sequence: Synthetic oligonucleotide
cgcguuugcccagcucccg

SEQ ID NO: 342496 - RNA, 19 nt, Artificial Sequence
  Description of Artificial Sequence: Synthetic oligonucleotide
gcgagucucugaagagcga

SEQ ID NO: 342497 - RNA, 19 nt, Artificial Sequence
  Description of Artificial Sequence: Synthetic oligonucleotide
cgauucucggcccgcagcu

SEQ ID NO: 342498 - RNA, 19 nt, Artificial Sequence
  Description of Artificial Sequence: Synthetic oligonucleotide
gggacacauuuaacagcua

SEQ ID NO: 342499 - RNA, 19 nt, Artificial Sequence
  Description of Artificial Sequence: Synthetic oligonucleotide
gcccugauauuaccucuuu

SEQ ID NO: 342500 - RNA, 19 nt, Artificial Sequence
  Description of Artificial Sequence: Synthetic oligonucleotide
gcacgccgagccagaacuc

SEQ ID NO: 342501 - RNA, 19 nt, Artificial Sequence
  Description of Artificial Sequence: Synthetic oligonucleotide
cggccaguccccggacucg

SEQ ID NO: 342502 - RNA, 19 nt, Artificial Sequence
  Description of Artificial Sequence: Synthetic oligonucleotide
ggucaccggcgggcgaguc

SEQ ID NO: 342503 - RNA, 19 nt, Artificial Sequence
  Description of Artificial Sequence: Synthetic oligonucleotide
gccgcagucccacgccgcu

SEQ ID NO: 342504 - RNA, 19 nt, Artificial Sequence
  Description of Artificial Sequence: Synthetic oligonucleotide
gcagugcuugcacgcguuu

SEQ ID NO: 342505 - RNA, 19 nt, Artificial Sequence
  Description of Artificial Sequence: Synthetic oligonucleotide
cgccuuccgagcgcacgcc

SEQ ID NO: 342506 - RNA, 19 nt, Artificial Sequence
  Description of Artificial Sequence: Synthetic oligonucleotide
gcccguagguagcgacucu

SEQ ID NO: 342507 - RNA, 19 nt, Artificial Sequence
  Description of Artificial Sequence: Synthetic oligonucleotide
cucgacucuccagccccau

SEQ ID NO: 342508 - RNA, 19 nt, Artificial Sequence
  Description of Artificial Sequence: Synthetic oligonucleotide
ccucccgccgcgucguccu

SEQ ID NO: 342509 - RNA, 19 nt, Artificial Sequence
  Description of Artificial Sequence: Synthetic oligonucleotide
ccgagcgcacgccgagcca

SEQ ID NO: 342510 - RNA, 19 nt, Artificial Sequence
  Description of Artificial Sequence: Synthetic oligonucleotide
cggcgggcgagucucugaa

SEQ ID NO: 342511 - RNA, 19 nt, Artificial Sequence
  Description of Artificial Sequence: Synthetic oligonucleotide
cgacgccuuccgagcgcac

SEQ ID NO: 342512 - RNA, 19 nt, Artificial Sequence
  Description of Artificial Sequence: Synthetic oligonucleotide
cgagguggucagccgcagu

SEQ ID NO: 342513 - RNA, 19 nt, Artificial Sequence
  Description of Artificial Sequence: Synthetic oligonucleotide
ccccaccggcagggcguag

SEQ ID NO: 342514 - RNA, 19 nt, Artificial Sequence
  Description of Artificial Sequence: Synthetic oligonucleotide
cgacacccuuaucccuugu

SEQ ID NO: 342515 - RNA, 19 nt, Artificial Sequence
  Description of Artificial Sequence: Synthetic oligonucleotide
aacacuagggccuuuaggc

SEQ ID NO: 342516 - RNA, 19 nt, Artificial Sequence
  Description of Artificial Sequence: Synthetic oligonucleotide
aauagcaguccucaaaguc

SEQ ID NO: 342517 - RNA, 19 nt, Artificial Sequence
  Description of Artificial Sequence: Synthetic oligonucleotide
aaagguccgggccacagcg

SEQ ID NO: 342518 - RNA, 19 nt, Artificial Sequence
  Description of Artificial Sequence: Synthetic oligonucleotide
ucauauuuguacucgcagg

SEQ ID NO: 342519 - RNA, 19 nt, Artificial Sequence
  Description of Artificial Sequence: Synthetic oligonucleotide
uuccagaacaugaaucugg

SEQ ID NO: 342520 - RNA, 19 nt, Artificial Sequence
  Description of Artificial Sequence: Synthetic oligonucleotide
ucuccguugagguagauga

SEQ ID NO: 342521 - RNA, 19 nt, Artificial Sequence
  Description of Artificial Sequence: Synthetic oligonucleotide
gaugauucgguccagguca

SEQ ID NO: 342522 - RNA, 19 nt, Artificial Sequence
  Description of Artificial Sequence: Synthetic oligonucleotide
uuaaucuuggggaugcggc

SEQ ID NO: 342523 - RNA, 19 nt, Artificial Sequence
  Description of Artificial Sequence: Synthetic oligonucleotide
auacagacacaccugcacc

SEQ ID NO: 342524 - RNA, 19 nt, Artificial Sequence
  Description of Artificial Sequence: Synthetic oligonucleotide
aguuuaaucuuggggaugc

SEQ ID NO: 342525 - RNA, 19 nt, Artificial Sequence
  Description of Artificial Sequence: Synthetic oligonucleotide
gacacgaaugaaccgaggg

SEQ ID NO: 342526 - RNA, 19 nt, Artificial Sequence
  Description of Artificial Sequence: Synthetic oligonucleotide
uuuggagucugacacagac

SEQ ID NO: 342527 - RNA, 19 nt, Artificial Sequence
  Description of Artificial Sequence: Synthetic oligonucleotide
gauacuuuucugcauggug

SEQ ID NO: 342528 - RNA, 19 nt, Artificial Sequence
  Description of Artificial Sequence: Synthetic oligonucleotide
aaagucggaguccaagucu

SEQ ID NO: 342529 - RNA, 19 nt, Artificial Sequence
  Description of Artificial Sequence: Synthetic oligonucleotide
ucgauccucacauaggggc

SEQ ID NO: 342530 - RNA, 19 nt, Artificial Sequence
  Description of Artificial Sequence: Synthetic oligonucleotide
auacuuuucugcauggugg

SEQ ID NO: 342531 - RNA, 19 nt, Artificial Sequence
  Description of Artificial Sequence: Synthetic oligonucleotide
ucuccaaccccuauguccc

SEQ ID NO: 342532 - RNA, 19 nt, Artificial Sequence
  Description of Artificial Sequence: Synthetic oligonucleotide
aaugaaccgggcuuccgag

SEQ ID NO: 342533 - RNA, 19 nt, Artificial Sequence
  Description of Artificial Sequence: Synthetic oligonucleotide
gaauuugguaaagaccccg

SEQ ID NO: 342534 - RNA, 19 nt, Artificial Sequence
  Description of Artificial Sequence: Synthetic oligonucleotide
acaggaguccuucacggac

SEQ ID NO: 342535 - RNA, 19 nt, Artificial Sequence
  Description of Artificial Sequence: Synthetic oligonucleotide
uauuuguacucgcagguaa

SEQ ID NO: 342536 - RNA, 19 nt, Artificial Sequence
  Description of Artificial Sequence: Synthetic oligonucleotide
uuuaaucuuggggaugcgg

SEQ ID NO: 342537 - RNA, 19 nt, Artificial Sequence
  Description of Artificial Sequence: Synthetic oligonucleotide
uuaagagggaccccugggc

SEQ ID NO: 342538 - RNA, 19 nt, Artificial Sequence
  Description of Artificial Sequence: Synthetic oligonucleotide
caucgauccucacauaggg

SEQ ID NO: 342539 - RNA, 19 nt, Artificial Sequence
  Description of Artificial Sequence: Synthetic oligonucleotide
ucuuuguccaccaggcccc

SEQ ID NO: 342540 - RNA, 19 nt, Artificial Sequence
  Description of Artificial Sequence: Synthetic oligonucleotide
ucccauacgaccuuugggu

SEQ ID NO: 342541 - RNA, 19 nt, Artificial Sequence
  Description of Artificial Sequence: Synthetic oligonucleotide
aauuugguaaagaccccgg

SEQ ID NO: 342542 - RNA, 19 nt, Artificial Sequence
  Description of Artificial Sequence: Synthetic oligonucleotide
uuuacccucuuucaugggu

SEQ ID NO: 342543 - RNA, 19 nt, Artificial Sequence
  Description of Artificial Sequence: Synthetic oligonucleotide
aaugaaccgagggaaacga

SEQ ID NO: 342544 - RNA, 19 nt, Artificial Sequence
  Description of Artificial Sequence: Synthetic oligonucleotide
acgaccuuuggguccagcc

SEQ ID NO: 342545 - RNA, 19 nt, Artificial Sequence
  Description of Artificial Sequence: Synthetic oligonucleotide
aaccccuauguccccacac

SEQ ID NO: 342546 - RNA, 19 nt, Artificial Sequence
  Description of Artificial Sequence: Synthetic oligonucleotide
gucuccaaccccuaugucc

SEQ ID NO: 342547 - RNA, 19 nt, Artificial Sequence
  Description of Artificial Sequence: Synthetic oligonucleotide
auggacuccagcugacggc

SEQ ID NO: 342548 - RNA, 19 nt, Artificial Sequence
  Description of Artificial Sequence: Synthetic oligonucleotide
accgaggggaguuuaaucu

SEQ ID NO: 342549 - RNA, 19 nt, Artificial Sequence
  Description of Artificial Sequence: Synthetic oligonucleotide
uuagcuugagccaguugug

SEQ ID NO: 342550 - RNA, 19 nt, Artificial Sequence
  Description of Artificial Sequence: Synthetic oligonucleotide
guucccucaaccuccaccc

SEQ ID NO: 342551 - RNA, 19 nt, Artificial Sequence
  Description of Artificial Sequence: Synthetic oligonucleotide
cuucacuggagaaucacuc

SEQ ID NO: 342552 - RNA, 19 nt, Artificial Sequence
  Description of Artificial Sequence: Synthetic oligonucleotide
gacggcaggcaacaaacag

SEQ ID NO: 342553 - RNA, 19 nt, Artificial Sequence
  Description of Artificial Sequence: Synthetic oligonucleotide
ugcuucaagaucaugccuu

SEQ ID NO: 342554 - RNA, 19 nt, Artificial Sequence
  Description of Artificial Sequence: Synthetic oligonucleotide
uggggcaacugccccaucg

SEQ ID NO: 342555 - RNA, 19 nt, Artificial Sequence
  Description of Artificial Sequence: Synthetic oligonucleotide
gggaguuuaaucuugggga

SEQ ID NO: 342556 - RNA, 19 nt, Artificial Sequence
  Description of Artificial Sequence: Synthetic oligonucleotide
ucuuuucccggucccaggc

SEQ ID NO: 342557 - RNA, 19 nt, Artificial Sequence
  Description of Artificial Sequence: Synthetic oligonucleotide
ugaaccgggcuuccgagug

SEQ ID NO: 342558 - RNA, 19 nt, Artificial Sequence
  Description of Artificial Sequence: Synthetic oligonucleotide
cuuaaggaggacaccauca

SEQ ID NO: 342559 - RNA, 19 nt, Artificial Sequence
  Description of Artificial Sequence: Synthetic oligonucleotide
agacggacugcucagccag

SEQ ID NO: 342560 - RNA, 19 nt, Artificial Sequence
  Description of Artificial Sequence: Synthetic oligonucleotide
ucuucacggacacgaauga

SEQ ID NO: 342561 - RNA, 19 nt, Artificial Sequence
  Description of Artificial Sequence: Synthetic oligonucleotide
cucgcugacaccccgagug

SEQ ID NO: 342562 - RNA, 19 nt, Artificial Sequence
  Description of Artificial Sequence: Synthetic oligonucleotide
uccgguacaaacaggccac

SEQ ID NO: 342563 - RNA, 19 nt, Artificial Sequence
  Description of Artificial Sequence: Synthetic oligonucleotide
gaagcacugccagugagcc

SEQ ID NO: 342564 - RNA, 19 nt, Artificial Sequence
  Description of Artificial Sequence: Synthetic oligonucleotide
agugcugcggcuguucucg

SEQ ID NO: 342565 - RNA, 19 nt, Artificial Sequence
  Description of Artificial Sequence: Synthetic oligonucleotide
ugguuccuacugaagaucu

SEQ ID NO: 342566 - RNA, 19 nt, Artificial Sequence
  Description of Artificial Sequence: Synthetic oligonucleotide
ugucacagaauuugguaaa

SEQ ID NO: 342567 - RNA, 19 nt, Artificial Sequence
  Description of Artificial Sequence: Synthetic oligonucleotide
uguaggcacuuaauaguca

SEQ ID NO: 342568 - RNA, 19 nt, Artificial Sequence
  Description of Artificial Sequence: Synthetic oligonucleotide
ugguaaagaccccggaggu

SEQ ID NO: 342569 - RNA, 19 nt, Artificial Sequence
  Description of Artificial Sequence: Synthetic oligonucleotide
uuuguacucgcagguaaag

SEQ ID NO: 342570 - RNA, 19 nt, Artificial Sequence
  Description of Artificial Sequence: Synthetic oligonucleotide
ggcgaagacaaacucaccc

SEQ ID NO: 342571 - RNA, 19 nt, Artificial Sequence
  Description of Artificial Sequence: Synthetic oligonucleotide
uggaagcacugccagugag

SEQ ID NO: 342572 - RNA, 19 nt, Artificial Sequence
  Description of Artificial Sequence: Synthetic oligonucleotide
agcgagaaaagggacuuuc

SEQ ID NO: 342573 - RNA, 19 nt, Artificial Sequence
  Description of Artificial Sequence: Synthetic oligonucleotide
aaucagggacucuccguug

SEQ ID NO: 342574 - RNA, 19 nt, Artificial Sequence
  Description of Artificial Sequence: Synthetic oligonucleotide
uccacuuagggaccuggca

SEQ ID NO: 342575 - RNA, 19 nt, Artificial Sequence
  Description of Artificial Sequence: Synthetic oligonucleotide
caacacuagggccuuuagg

SEQ ID NO: 342576 - RNA, 19 nt, Artificial Sequence
  Description of Artificial Sequence: Synthetic oligonucleotide
acacgaaugaaccgaggga

SEQ ID NO: 342577 - RNA, 19 nt, Artificial Sequence
  Description of Artificial Sequence: Synthetic oligonucleotide
ucaagguaguccuucuuua

SEQ ID NO: 342578 - RNA, 19 nt, Artificial Sequence
  Description of Artificial Sequence: Synthetic oligonucleotide
agaaaccuccucaaucuuc

SEQ ID NO: 342579 - RNA, 19 nt, Artificial Sequence
  Description of Artificial Sequence: Synthetic oligonucleotide
uggacuuagggugcugggg

SEQ ID NO: 342580 - RNA, 19 nt, Artificial Sequence
  Description of Artificial Sequence: Synthetic oligonucleotide
cucaggacaugcgucaggg

SEQ ID NO: 342581 - RNA, 19 nt, Artificial Sequence
  Description of Artificial Sequence: Synthetic oligonucleotide
uaaucuuggggaugcggcu

SEQ ID NO: 342582 - RNA, 19 nt, Artificial Sequence
  Description of Artificial Sequence: Synthetic oligonucleotide
cucccauacgaccuuuggg

SEQ ID NO: 342583 - RNA, 19 nt, Artificial Sequence
  Description of Artificial Sequence: Synthetic oligonucleotide
gaacaugaaucugggcccg

SEQ ID NO: 342584 - RNA, 19 nt, Artificial Sequence
  Description of Artificial Sequence: Synthetic oligonucleotide
uugugagaccucuuggcaa

SEQ ID NO: 342585 - RNA, 19 nt, Artificial Sequence
  Description of Artificial Sequence: Synthetic oligonucleotide
uucacggacugcuccaaga

SEQ ID NO: 342586 - RNA, 19 nt, Artificial Sequence
  Description of Artificial Sequence: Synthetic oligonucleotide
ugguuuaagagggaccccu

SEQ ID NO: 342587 - RNA, 19 nt, Artificial Sequence
  Description of Artificial Sequence: Synthetic oligonucleotide
uguccggguacuuuccugu

SEQ ID NO: 342588 - RNA, 19 nt, Artificial Sequence
  Description of Artificial Sequence: Synthetic oligonucleotide
aagucggaguccaagucug

SEQ ID NO: 342589 - RNA, 19 nt, Artificial Sequence
  Description of Artificial Sequence: Synthetic oligonucleotide
gagauccgcacacuucacc

SEQ ID NO: 342590 - RNA, 19 nt, Artificial Sequence
  Description of Artificial Sequence: Synthetic oligonucleotide
ugugagaccucuuggcaau

SEQ ID NO: 342591 - RNA, 19 nt, Artificial Sequence
  Description of Artificial Sequence: Synthetic oligonucleotide
accgagcgcagcaaguugc

SEQ ID NO: 342592 - RNA, 19 nt, Artificial Sequence
  Description of Artificial Sequence: Synthetic oligonucleotide
cuagucccugcugaggugg

SEQ ID NO: 342593 - RNA, 19 nt, Artificial Sequence
  Description of Artificial Sequence: Synthetic oligonucleotide
accuguaucuccgaggcgu

SEQ ID NO: 342594 - RNA, 19 nt, Artificial Sequence
  Description of Artificial Sequence: Synthetic oligonucleotide
caugcgucagggcugggag

SEQ ID NO: 342595 - RNA, 19 nt, Artificial Sequence
  Description of Artificial Sequence: Synthetic oligonucleotide
gucuucacggacacgaaug

SEQ ID NO: 342596 - RNA, 19 nt, Artificial Sequence
  Description of Artificial Sequence: Synthetic oligonucleotide
guaaaguccaccuccucaa

SEQ ID NO: 342597 - RNA, 19 nt, Artificial Sequence
  Description of Artificial Sequence: Synthetic oligonucleotide
aacaugaaucugggcccgc

SEQ ID NO: 342598 - RNA, 19 nt, Artificial Sequence
  Description of Artificial Sequence: Synthetic oligonucleotide
gagaucaaaggcauacaga

SEQ ID NO: 342599 - RNA, 19 nt, Artificial Sequence
  Description of Artificial Sequence: Synthetic oligonucleotide
agggacucuccguugaggu

SEQ ID NO: 342600 - RNA, 19 nt, Artificial Sequence
  Description of Artificial Sequence: Synthetic oligonucleotide
guaggcgccaaucaccaca

SEQ ID NO: 342601 - RNA, 19 nt, Artificial Sequence
  Description of Artificial Sequence: Synthetic oligonucleotide
ugcuuccgguacaaacagg

SEQ ID NO: 342602 - RNA, 19 nt, Artificial Sequence
  Description of Artificial Sequence: Synthetic oligonucleotide
ggguagauaggggacaggg

SEQ ID NO: 342603 - RNA, 19 nt, Artificial Sequence
  Description of Artificial Sequence: Synthetic oligonucleotide
ucgcagguaaaguccaccu

SEQ ID NO: 342604 - RNA, 19 nt, Artificial Sequence
  Description of Artificial Sequence: Synthetic oligonucleotide
ggcaacugccuuaaggagg

SEQ ID NO: 342605 - RNA, 19 nt, Artificial Sequence
  Description of Artificial Sequence: Synthetic oligonucleotide
caaagucggaguccaaguc

SEQ ID NO: 342606 - RNA, 19 nt, Artificial Sequence
  Description of Artificial Sequence: Synthetic oligonucleotide
guggcgaagacaaacucac

SEQ ID NO: 342607 - RNA, 19 nt, Artificial Sequence
  Description of Artificial Sequence: Synthetic oligonucleotide
uccccuucgcugcuuagga

SEQ ID NO: 342608 - RNA, 19 nt, Artificial Sequence
  Description of Artificial Sequence: Synthetic oligonucleotide
caguaccucgcugacaccc

SEQ ID NO: 342609 - RNA, 19 nt, Artificial Sequence
  Description of Artificial Sequence: Synthetic oligonucleotide
uuacccucuuucauggguu

SEQ ID NO: 342610 - RNA, 19 nt, Artificial Sequence
  Description of Artificial Sequence: Synthetic oligonucleotide
aggggaguuuaaucuuggg

SEQ ID NO: 342611 - RNA, 19 nt, Artificial Sequence
  Description of Artificial Sequence: Synthetic oligonucleotide
uggaauggcuggaucugcu

SEQ ID NO: 342612 - RNA, 19 nt, Artificial Sequence
  Description of Artificial Sequence: Synthetic oligonucleotide
aaccgggcuuccgagugac

SEQ ID NO: 342613 - RNA, 19 nt, Artificial Sequence
  Description of Artificial Sequence: Synthetic oligonucleotide
cuuccgguacaaacaggcc

SEQ ID NO: 342614 - RNA, 19 nt, Artificial Sequence
  Description of Artificial Sequence: Synthetic oligonucleotide
cuccgaggcgucaaccucc

SEQ ID NO: 342615 - RNA, 19 nt, Artificial Sequence
  Description of Artificial Sequence: Synthetic oligonucleotide
ugcgcuugcguguggugag

SEQ ID NO: 342616 - RNA, 19 nt, Artificial Sequence
  Description of Artificial Sequence: Synthetic oligonucleotide
cacggacacgaaugaaccg

SEQ ID NO: 342617 - RNA, 19 nt, Artificial Sequence
  Description of Artificial Sequence: Synthetic oligonucleotide
gugacggcaggcaacaaac

SEQ ID NO: 342618 - RNA, 19 nt, Artificial Sequence
  Description of Artificial Sequence: Synthetic oligonucleotide
acuguucucaggacaugcg

SEQ ID NO: 342619 - RNA, 19 nt, Artificial Sequence
  Description of Artificial Sequence: Synthetic oligonucleotide
gucgcccacaccgucaagg

SEQ ID NO: 342620 - RNA, 19 nt, Artificial Sequence
  Description of Artificial Sequence: Synthetic oligonucleotide
guuccuacugaagaucuuc

SEQ ID NO: 342621 - RNA, 19 nt, Artificial Sequence
  Description of Artificial Sequence: Synthetic oligonucleotide
acggacacgaaugaaccga

SEQ ID NO: 342622 - RNA, 19 nt, Artificial Sequence
  Description of Artificial Sequence: Synthetic oligonucleotide
agugacggcaggcaacaaa

SEQ ID NO: 342623 - RNA, 19 nt, Artificial Sequence
  Description of Artificial Sequence: Synthetic oligonucleotide
acccgguucccucaaccuc

SEQ ID NO: 342624 - RNA, 19 nt, Artificial Sequence
  Description of Artificial Sequence: Synthetic oligonucleotide
cucacauaggggcgugggg

SEQ ID NO: 342625 - RNA, 19 nt, Artificial Sequence
  Description of Artificial Sequence: Synthetic oligonucleotide
ucggaguccaagucugagu

SEQ ID NO: 342626 - RNA, 19 nt, Artificial Sequence
  Description of Artificial Sequence: Synthetic oligonucleotide
uggggucggcaacacuagg

SEQ ID NO: 342627 - RNA, 19 nt, Artificial Sequence
  Description of Artificial Sequence: Synthetic oligonucleotide
agggagaucccuuucucuu

SEQ ID NO: 342628 - RNA, 19 nt, Artificial Sequence
  Description of Artificial Sequence: Synthetic oligonucleotide
gggaaacgaagggagaucc

SEQ ID NO: 342629 - RNA, 19 nt, Artificial Sequence
  Description of Artificial Sequence: Synthetic oligonucleotide
cuggacuuagggugcuggg

SEQ ID NO: 342630 - RNA, 19 nt, Artificial Sequence
  Description of Artificial Sequence: Synthetic oligonucleotide
uucuuuagcuugagccagu

SEQ ID NO: 342631 - RNA, 19 nt, Artificial Sequence
  Description of Artificial Sequence: Synthetic oligonucleotide
gcuuccgguacaaacaggc

SEQ ID NO: 342632 - RNA, 19 nt, Artificial Sequence
  Description of Artificial Sequence: Synthetic oligonucleotide
agggaaacgaagggagauc

SEQ ID NO: 342633 - RNA, 19 nt, Artificial Sequence
  Description of Artificial Sequence: Synthetic oligonucleotide
gcaccuguaucuccgaggc

SEQ ID NO: 342634 - RNA, 19 nt, Artificial Sequence
  Description of Artificial Sequence: Synthetic oligonucleotide
caggcccuugaugacaucc

SEQ ID NO: 342635 - RNA, 19 nt, Artificial Sequence
  Description of Artificial Sequence: Synthetic oligonucleotide
cugacucugcuuccgguac

SEQ ID NO: 342636 - RNA, 19 nt, Artificial Sequence
  Description of Artificial Sequence: Synthetic oligonucleotide
agcguuucaguaccucgcu

SEQ ID NO: 342637 - RNA, 19 nt, Artificial Sequence
  Description of Artificial Sequence: Synthetic oligonucleotide
uuccaaccaugucuuucug

SEQ ID NO: 342638 - RNA, 19 nt, Artificial Sequence
  Description of Artificial Sequence: Synthetic oligonucleotide
aucuccgaggcgucaaccu

SEQ ID NO: 342639 - RNA, 19 nt, Artificial Sequence
  Description of Artificial Sequence: Synthetic oligonucleotide
aguaccucgcugacacccc

SEQ ID NO: 342640 - RNA, 19 nt, Artificial Sequence
  Description of Artificial Sequence: Synthetic oligonucleotide
uuguacucgcagguaaagu

SEQ ID NO: 342641 - RNA, 19 nt, Artificial Sequence
  Description of Artificial Sequence: Synthetic oligonucleotide
gaccgaggggaguuuaauc

SEQ ID NO: 342642 - RNA, 19 nt, Artificial Sequence
  Description of Artificial Sequence: Synthetic oligonucleotide
ggaccuggcaaugaaccgg

SEQ ID NO: 342643 - RNA, 19 nt, Artificial Sequence
  Description of Artificial Sequence: Synthetic oligonucleotide
ucuccgaggcgucaaccuc

SEQ ID NO: 342644 - RNA, 19 nt, Artificial Sequence
  Description of Artificial Sequence: Synthetic oligonucleotide
uacccucuuucauggguug

SEQ ID NO: 342645 - RNA, 19 nt, Artificial Sequence
  Description of Artificial Sequence: Synthetic oligonucleotide
gcugccgacgucgagacag

SEQ ID NO: 342646 - RNA, 19 nt, Artificial Sequence
  Description of Artificial Sequence: Synthetic oligonucleotide
uaucuccgaggcgucaacc

SEQ ID NO: 342647 - RNA, 19 nt, Artificial Sequence
  Description of Artificial Sequence: Synthetic oligonucleotide
cacgaaugaaccgagggaa

SEQ ID NO: 342648 - RNA, 19 nt, Artificial Sequence
  Description of Artificial Sequence: Synthetic oligonucleotide
uugagccgagcagaaaccu

SEQ ID NO: 342649 - RNA, 19 nt, Artificial Sequence
  Description of Artificial Sequence: Synthetic oligonucleotide
accaggcaaacaguacccg

SEQ ID NO: 342650 - RNA, 19 nt, Artificial Sequence
  Description of Artificial Sequence: Synthetic oligonucleotide
cuauguccccacacacacc

SEQ ID NO: 342651 - RNA, 19 nt, Artificial Sequence
  Description of Artificial Sequence: Synthetic oligonucleotide
caccgggaugauucggucc

SEQ ID NO: 342652 - RNA, 19 nt, Artificial Sequence
  Description of Artificial Sequence: Synthetic oligonucleotide
aguacccgguucccucaac

SEQ ID NO: 342653 - RNA, 19 nt, Artificial Sequence
  Description of Artificial Sequence: Synthetic oligonucleotide
aucgauccucacauagggg

SEQ ID NO: 342654 - RNA, 19 nt, Artificial Sequence
  Description of Artificial Sequence: Synthetic oligonucleotide
cuuucuggccucugugguc

SEQ ID NO: 342655 - RNA, 19 nt, Artificial Sequence
  Description of Artificial Sequence: Synthetic oligonucleotide
uggcgaagacaaacucacc

SEQ ID NO: 342656 - RNA, 19 nt, Artificial Sequence
  Description of Artificial Sequence: Synthetic oligonucleotide
ccgacgucgagacaggggc

SEQ ID NO: 342657 - RNA, 19 nt, Artificial Sequence
  Description of Artificial Sequence: Synthetic oligonucleotide
uagcuugagccaguuguga

SEQ ID NO: 342658 - RNA, 19 nt, Artificial Sequence
  Description of Artificial Sequence: Synthetic oligonucleotide
uuucaguaccucgcugaca

SEQ ID NO: 342659 - RNA, 19 nt, Artificial Sequence
  Description of Artificial Sequence: Synthetic oligonucleotide
ggccuuuaggcucugguga

SEQ ID NO: 342660 - RNA, 19 nt, Artificial Sequence
  Description of Artificial Sequence: Synthetic oligonucleotide
acaguacccgguucccuca

SEQ ID NO: 342661 - RNA, 19 nt, Artificial Sequence
  Description of Artificial Sequence: Synthetic oligonucleotide
uacccgguucccucaaccu

SEQ ID NO: 342662 - RNA, 19 nt, Artificial Sequence
  Description of Artificial Sequence: Synthetic oligonucleotide
cuuuucccggucccaggcc

SEQ ID NO: 342663 - RNA, 19 nt, Artificial Sequence
  Description of Artificial Sequence: Synthetic oligonucleotide
cccaucgauccucacauag

SEQ ID NO: 342664 - RNA, 19 nt, Artificial Sequence
  Description of Artificial Sequence: Synthetic oligonucleotide
agucccacgucacccuucu

SEQ ID NO: 342665 - RNA, 19 nt, Artificial Sequence
  Description of Artificial Sequence: Synthetic oligonucleotide
accccggagguggugagcg

SEQ ID NO: 342666 - RNA, 19 nt, Artificial Sequence
  Description of Artificial Sequence: Synthetic oligonucleotide
uggcgaaucagggacucuc

SEQ ID NO: 342667 - RNA, 19 nt, Artificial Sequence
  Description of Artificial Sequence: Synthetic oligonucleotide
gacgucgagacaggggcug

SEQ ID NO: 342668 - RNA, 19 nt, Artificial Sequence
  Description of Artificial Sequence: Synthetic oligonucleotide
ggucagguaccucacagaa

SEQ ID NO: 342669 - RNA, 19 nt, Artificial Sequence
  Description of Artificial Sequence: Synthetic oligonucleotide
gaaucagggacucuccguu

SEQ ID NO: 342670 - RNA, 19 nt, Artificial Sequence
  Description of Artificial Sequence: Synthetic oligonucleotide
gggaccuggcaaugaaccg

SEQ ID NO: 342671 - RNA, 19 nt, Artificial Sequence
  Description of Artificial Sequence: Synthetic oligonucleotide
gaagcaggucuggagguga

SEQ ID NO: 342672 - RNA, 19 nt, Artificial Sequence
  Description of Artificial Sequence: Synthetic oligonucleotide
cugguuccuacugaagauc

SEQ ID NO: 342673 - RNA, 19 nt, Artificial Sequence
  Description of Artificial Sequence: Synthetic oligonucleotide
agaaucacucucaggcacu

SEQ ID NO: 342674 - RNA, 19 nt, Artificial Sequence
  Description of Artificial Sequence: Synthetic oligonucleotide
ccaucgauccucacauagg

SEQ ID NO: 342675 - RNA, 19 nt, Artificial Sequence
  Description of Artificial Sequence: Synthetic oligonucleotide
gggucggcaacacuagggc

SEQ ID NO: 342676 - RNA, 19 nt, Artificial Sequence
  Description of Artificial Sequence: Synthetic oligonucleotide
caaugaaccgggcuuccga

SEQ ID NO: 342677 - RNA, 19 nt, Artificial Sequence
  Description of Artificial Sequence: Synthetic oligonucleotide
uuuaggcucuggugaugcu

SEQ ID NO: 342678 - RNA, 19 nt, Artificial Sequence
  Description of Artificial Sequence: Synthetic oligonucleotide
gagaccucuuggcaaucuc

SEQ ID NO: 342679 - RNA, 19 nt, Artificial Sequence
  Description of Artificial Sequence: Synthetic oligonucleotide
cugagguaaagaacaggaa

SEQ ID NO: 342680 - RNA, 19 nt, Artificial Sequence
  Description of Artificial Sequence: Synthetic oligonucleotide
ggcgcaggcguccacuuag

SEQ ID NO: 342681 - RNA, 19 nt, Artificial Sequence
  Description of Artificial Sequence: Synthetic oligonucleotide
gggcaacugccuuaaggag

SEQ ID NO: 342682 - RNA, 19 nt, Artificial Sequence
  Description of Artificial Sequence: Synthetic oligonucleotide
gcuguuagcugucuccuuc

SEQ ID NO: 342683 - RNA, 19 nt, Artificial Sequence
  Description of Artificial Sequence: Synthetic oligonucleotide
agaccucuuggcaaucuca

SEQ ID NO: 342684 - RNA, 19 nt, Artificial Sequence
  Description of Artificial Sequence: Synthetic oligonucleotide
cuuccgagugacggcaggc

SEQ ID NO: 342685 - RNA, 19 nt, Artificial Sequence
  Description of Artificial Sequence: Synthetic oligonucleotide
agguccagagugucgccca

SEQ ID NO: 342686 - RNA, 19 nt, Artificial Sequence
  Description of Artificial Sequence: Synthetic oligonucleotide
agagauccgcacacuucac

SEQ ID NO: 342687 - RNA, 19 nt, Artificial Sequence
  Description of Artificial Sequence: Synthetic oligonucleotide
accucgcugacaccccgag

SEQ ID NO: 342688 - RNA, 19 nt, Artificial Sequence
  Description of Artificial Sequence: Synthetic oligonucleotide
ggguuaauagcaguccuca

SEQ ID NO: 342689 - RNA, 19 nt, Artificial Sequence
  Description of Artificial Sequence: Synthetic oligonucleotide
augaaccgggcuuccgagu

SEQ ID NO: 342690 - RNA, 19 nt, Artificial Sequence
  Description of Artificial Sequence: Synthetic oligonucleotide
ggcgucaaccuccuugcgc

SEQ ID NO: 342691 - RNA, 19 nt, Artificial Sequence
  Description of Artificial Sequence: Synthetic oligonucleotide
acuuagggaccuggcaaug

SEQ ID NO: 342692 - RNA, 19 nt, Artificial Sequence
  Description of Artificial Sequence: Synthetic oligonucleotide
auaccggccggcacgcuuc

SEQ ID NO: 342693 - RNA, 19 nt, Artificial Sequence
  Description of Artificial Sequence: Synthetic oligonucleotide
ggggucggcaacacuaggg

SEQ ID NO: 342694 - RNA, 19 nt, Artificial Sequence
  Description of Artificial Sequence: Synthetic oligonucleotide
ccaguugugagaccucuug

SEQ ID NO: 342695 - RNA, 19 nt, Artificial Sequence
  Description of Artificial Sequence: Synthetic oligonucleotide
ucgcccacaccgucaaggu

SEQ ID NO: 342696 - RNA, 19 nt, Artificial Sequence
  Description of Artificial Sequence: Synthetic oligonucleotide
ugcuuaggaccugggcugc

SEQ ID NO: 342697 - RNA, 19 nt, Artificial Sequence
  Description of Artificial Sequence: Synthetic oligonucleotide
caugagucucugagugcug

SEQ ID NO: 342698 - RNA, 19 nt, Artificial Sequence
  Description of Artificial Sequence: Synthetic oligonucleotide
ggucggcaacacuagggcc

SEQ ID NO: 342699 - RNA, 19 nt, Artificial Sequence
  Description of Artificial Sequence: Synthetic oligonucleotide
ggauaaaggaggugaccga

SEQ ID NO: 342700 - RNA, 19 nt, Artificial Sequence
  Description of Artificial Sequence: Synthetic oligonucleotide
auucgguccaggucaggua

SEQ ID NO: 342701 - RNA, 19 nt, Artificial Sequence
  Description of Artificial Sequence: Synthetic oligonucleotide
guaccucacagaaggucug

SEQ ID NO: 342702 - RNA, 19 nt, Artificial Sequence
  Description of Artificial Sequence: Synthetic oligonucleotide
cagcugccgacgucgagac

SEQ ID NO: 342703 - RNA, 19 nt, Artificial Sequence
  Description of Artificial Sequence: Synthetic oligonucleotide
gccaagacggacugcucag

SEQ ID NO: 342704 - RNA, 19 nt, Artificial Sequence
  Description of Artificial Sequence: Synthetic oligonucleotide
cccgucauauuuguacucg

SEQ ID NO: 342705 - RNA, 19 nt, Artificial Sequence
  Description of Artificial Sequence: Synthetic oligonucleotide
ggggaugcggcugaugaug

SEQ ID NO: 342706 - RNA, 19 nt, Artificial Sequence
  Description of Artificial Sequence: Synthetic oligonucleotide
uccgaggcgucaaccuccu

SEQ ID NO: 342707 - RNA, 19 nt, Artificial Sequence
  Description of Artificial Sequence: Synthetic oligonucleotide
acccucuuucauggguugg

SEQ ID NO: 342708 - RNA, 19 nt, Artificial Sequence
  Description of Artificial Sequence: Synthetic oligonucleotide
ucuuuagcuugagccaguu

SEQ ID NO: 342709 - RNA, 19 nt, Artificial Sequence
  Description of Artificial Sequence: Synthetic oligonucleotide
uuucccggucccaggccac

SEQ ID NO: 342710 - RNA, 19 nt, Artificial Sequence
  Description of Artificial Sequence: Synthetic oligonucleotide
gauucgguccaggucaggu

SEQ ID NO: 342711 - RNA, 19 nt, Artificial Sequence
  Description of Artificial Sequence: Synthetic oligonucleotide
agccaguugugagaccucu

SEQ ID NO: 342712 - RNA, 19 nt, Artificial Sequence
  Description of Artificial Sequence: Synthetic oligonucleotide
uccucacauaggggcgugg

SEQ ID NO: 342713 - RNA, 19 nt, Artificial Sequence
  Description of Artificial Sequence: Synthetic oligonucleotide
agacaggggcuggcgaauc

SEQ ID NO: 342714 - RNA, 19 nt, Artificial Sequence
  Description of Artificial Sequence: Synthetic oligonucleotide
uaccucagcccggauggac

SEQ ID NO: 342715 - RNA, 19 nt, Artificial Sequence
  Description of Artificial Sequence: Synthetic oligonucleotide
guaucuccgaggcgucaac

SEQ ID NO: 342716 - RNA, 19 nt, Artificial Sequence
  Description of Artificial Sequence: Synthetic oligonucleotide
uaccucgcugacaccccga

SEQ ID NO: 342717 - RNA, 19 nt, Artificial Sequence
  Description of Artificial Sequence: Synthetic oligonucleotide
gcaacugccuuaaggagga

SEQ ID NO: 342718 - RNA, 19 nt, Artificial Sequence
  Description of Artificial Sequence: Synthetic oligonucleotide
gcguguggugagcacuugg

SEQ ID NO: 342719 - RNA, 19 nt, Artificial Sequence
  Description of Artificial Sequence: Synthetic oligonucleotide
ugaccgaggggaguuuaau

SEQ ID NO: 342720 - RNA, 19 nt, Artificial Sequence
  Description of Artificial Sequence: Synthetic oligonucleotide
acaugaaucugggcccgcu

SEQ ID NO: 342721 - RNA, 19 nt, Artificial Sequence
  Description of Artificial Sequence: Synthetic oligonucleotide
gccacagcgagaaaaggga

SEQ ID NO: 342722 - RNA, 19 nt, Artificial Sequence
  Description of Artificial Sequence: Synthetic oligonucleotide
caccuguaucuccgaggcg

SEQ ID NO: 342723 - RNA, 19 nt, Artificial Sequence
  Description of Artificial Sequence: Synthetic oligonucleotide
caccgagcgcagcaaguug

SEQ ID NO: 342724 - RNA, 19 nt, Artificial Sequence
  Description of Artificial Sequence: Synthetic oligonucleotide
agcaccgggaugauucggu

SEQ ID NO: 342725 - RNA, 19 nt, Artificial Sequence
  Description of Artificial Sequence: Synthetic oligonucleotide
ggaguccaagucugaguug

SEQ ID NO: 342726 - RNA, 19 nt, Artificial Sequence
  Description of Artificial Sequence: Synthetic oligonucleotide
gucaaccuccuugcgcuug

SEQ ID NO: 342727 - RNA, 19 nt, Artificial Sequence
  Description of Artificial Sequence: Synthetic oligonucleotide
gagugucgcccacaccguc

SEQ ID NO: 342728 - RNA, 19 nt, Artificial Sequence
  Description of Artificial Sequence: Synthetic oligonucleotide
gguaaagaccccggaggug

SEQ ID NO: 342729 - RNA, 19 nt, Artificial Sequence
  Description of Artificial Sequence: Synthetic oligonucleotide
acucgcagguaaaguccac

SEQ ID NO: 342730 - RNA, 19 nt, Artificial Sequence
  Description of Artificial Sequence: Synthetic oligonucleotide
cugccgacgucgagacagg

SEQ ID NO: 342731 - RNA, 19 nt, Artificial Sequence
  Description of Artificial Sequence: Synthetic oligonucleotide
agugucgcccacaccguca

SEQ ID NO: 342732 - RNA, 19 nt, Artificial Sequence
  Description of Artificial Sequence: Synthetic oligonucleotide
acaugcgucagggcuggga

SEQ ID NO: 342733 - RNA, 19 nt, Artificial Sequence
  Description of Artificial Sequence: Synthetic oligonucleotide
ggacaugcgucagggcugg

SEQ ID NO: 342734 - RNA, 19 nt, Artificial Sequence
  Description of Artificial Sequence: Synthetic oligonucleotide
cgauccucacauaggggcg

SEQ ID NO: 342735 - RNA, 19 nt, Artificial Sequence
  Description of Artificial Sequence: Synthetic oligonucleotide
ggaguuuaaucuuggggau

SEQ ID NO: 342736 - RNA, 19 nt, Artificial Sequence
  Description of Artificial Sequence: Synthetic oligonucleotide
gguaccucacagaaggucu

SEQ ID NO: 342737 - RNA, 19 nt, Artificial Sequence
  Description of Artificial Sequence: Synthetic oligonucleotide
ccucccauacgaccuuugg

SEQ ID NO: 342738 - RNA, 19 nt, Artificial Sequence
  Description of Artificial Sequence: Synthetic oligonucleotide
cuuagggaccuggcaauga

SEQ ID NO: 342739 - RNA, 19 nt, Artificial Sequence
  Description of Artificial Sequence: Synthetic oligonucleotide
gacuuagggugcuggggcu

SEQ ID NO: 342740 - RNA, 19 nt, Artificial Sequence
  Description of Artificial Sequence: Synthetic oligonucleotide
gucggcaacacuagggccu

SEQ ID NO: 342741 - RNA, 19 nt, Artificial Sequence
  Description of Artificial Sequence: Synthetic oligonucleotide
cgaagacaaacucacccuc

SEQ ID NO: 342742 - RNA, 19 nt, Artificial Sequence
  Description of Artificial Sequence: Synthetic oligonucleotide
cuguggucuugcccuuccc

SEQ ID NO: 342743 - RNA, 19 nt, Artificial Sequence
  Description of Artificial Sequence: Synthetic oligonucleotide
gguuuaagagggaccccug

SEQ ID NO: 342744 - RNA, 19 nt, Artificial Sequence
  Description of Artificial Sequence: Synthetic oligonucleotide
ugucgcccacaccgucaag

SEQ ID NO: 342745 - RNA, 19 nt, Artificial Sequence
  Description of Artificial Sequence: Synthetic oligonucleotide
gaaccgggcuuccgaguga

SEQ ID NO: 342746 - RNA, 19 nt, Artificial Sequence
  Description of Artificial Sequence: Synthetic oligonucleotide
gagguggcgaagacaaacu

SEQ ID NO: 342747 - RNA, 19 nt, Artificial Sequence
  Description of Artificial Sequence: Synthetic oligonucleotide
cgaggcgucaaccuccuug

SEQ ID NO: 342748 - RNA, 19 nt, Artificial Sequence
  Description of Artificial Sequence: Synthetic oligonucleotide
ccacagcgagaaaagggac

SEQ ID NO: 342749 - RNA, 19 nt, Artificial Sequence
  Description of Artificial Sequence: Synthetic oligonucleotide
ccagucuccaaccccuaug

SEQ ID NO: 342750 - RNA, 19 nt, Artificial Sequence
  Description of Artificial Sequence: Synthetic oligonucleotide
acgaaugaaccgagggaaa

SEQ ID NO: 342751 - RNA, 19 nt, Artificial Sequence
  Description of Artificial Sequence: Synthetic oligonucleotide
acgucgagacaggggcugg

SEQ ID NO: 342752 - RNA, 19 nt, Artificial Sequence
  Description of Artificial Sequence: Synthetic oligonucleotide
ggagagauccgcacacuuc

SEQ ID NO: 342753 - RNA, 19 nt, Artificial Sequence
  Description of Artificial Sequence: Synthetic oligonucleotide
cuccaaccccuaugucccc

SEQ ID NO: 342754 - RNA, 19 nt, Artificial Sequence
  Description of Artificial Sequence: Synthetic oligonucleotide
ggacacgaaugaaccgagg

SEQ ID NO: 342755 - RNA, 19 nt, Artificial Sequence
  Description of Artificial Sequence: Synthetic oligonucleotide
ggaaacgaagggagauccc

SEQ ID NO: 342756 - RNA, 19 nt, Artificial Sequence
  Description of Artificial Sequence: Synthetic oligonucleotide
guccacuuagggaccuggc

SEQ ID NO: 342757 - RNA, 19 nt, Artificial Sequence
  Description of Artificial Sequence: Synthetic oligonucleotide
cugacggccuguggccugg

SEQ ID NO: 342758 - RNA, 19 nt, Artificial Sequence
  Description of Artificial Sequence: Synthetic oligonucleotide
gguuaauagcaguccucaa

SEQ ID NO: 342759 - RNA, 19 nt, Artificial Sequence
  Description of Artificial Sequence: Synthetic oligonucleotide
ccccauaccggccggcacg

SEQ ID NO: 342760 - RNA, 19 nt, Artificial Sequence
  Description of Artificial Sequence: Synthetic oligonucleotide
cguuucaguaccucgcuga

SEQ ID NO: 342761 - RNA, 19 nt, Artificial Sequence
  Description of Artificial Sequence: Synthetic oligonucleotide
ccgggcuuccgagugacgg

SEQ ID NO: 342762 - RNA, 19 nt, Artificial Sequence
  Description of Artificial Sequence: Synthetic oligonucleotide
cccauacgaccuuuggguc

SEQ ID NO: 342763 - RNA, 19 nt, Artificial Sequence
  Description of Artificial Sequence: Synthetic oligonucleotide
gcgguugaggcugagguaa

SEQ ID NO: 342764 - RNA, 19 nt, Artificial Sequence
  Description of Artificial Sequence: Synthetic oligonucleotide
ccgagcagaaaccuccuca

SEQ ID NO: 342765 - RNA, 19 nt, Artificial Sequence
  Description of Artificial Sequence: Synthetic oligonucleotide
agagugucgcccacaccgu

SEQ ID NO: 342766 - RNA, 19 nt, Artificial Sequence
  Description of Artificial Sequence: Synthetic oligonucleotide
uuagggugcuggggcuuca

SEQ ID NO: 342767 - RNA, 19 nt, Artificial Sequence
  Description of Artificial Sequence: Synthetic oligonucleotide
uaccggccggcacgcuucc

SEQ ID NO: 342768 - RNA, 19 nt, Artificial Sequence
  Description of Artificial Sequence: Synthetic oligonucleotide
ugcguguggugagcacuug

SEQ ID NO: 342769 - RNA, 19 nt, Artificial Sequence
  Description of Artificial Sequence: Synthetic oligonucleotide
ggcgaaucagggacucucc

SEQ ID NO: 342770 - RNA, 19 nt, Artificial Sequence
  Description of Artificial Sequence: Synthetic oligonucleotide
gauccucacauaggggcgu

SEQ ID NO: 342771 - RNA, 19 nt, Artificial Sequence
  Description of Artificial Sequence: Synthetic oligonucleotide
ccucacauaggggcguggg

SEQ ID NO: 342772 - RNA, 19 nt, Artificial Sequence
  Description of Artificial Sequence: Synthetic oligonucleotide
gggguuaauagcaguccuc

SEQ ID NO: 342773 - RNA, 19 nt, Artificial Sequence
  Description of Artificial Sequence: Synthetic oligonucleotide
cuugcguguggugagcacu

SEQ ID NO: 342774 - RNA, 19 nt, Artificial Sequence
  Description of Artificial Sequence: Synthetic oligonucleotide
gacggacugcucagccagc

SEQ ID NO: 342775 - RNA, 19 nt, Artificial Sequence
  Description of Artificial Sequence: Synthetic oligonucleotide
cagucccacgucacccuuc

SEQ ID NO: 342776 - RNA, 19 nt, Artificial Sequence
  Description of Artificial Sequence: Synthetic oligonucleotide
gcguuucaguaccucgcug

SEQ ID NO: 342777 - RNA, 19 nt, Artificial Sequence
  Description of Artificial Sequence: Synthetic oligonucleotide
cgaaugaaccgagggaaac

SEQ ID NO: 342778 - RNA, 19 nt, Artificial Sequence
  Description of Artificial Sequence: Synthetic oligonucleotide
gcaugagucucugagugcu

SEQ ID NO: 342779 - RNA, 19 nt, Artificial Sequence
  Description of Artificial Sequence: Synthetic oligonucleotide
ccgagugacggcaggcaac

SEQ ID NO: 342780 - RNA, 19 nt, Artificial Sequence
  Description of Artificial Sequence: Synthetic oligonucleotide
ucggcaacacuagggccuu

SEQ ID NO: 342781 - RNA, 19 nt, Artificial Sequence
  Description of Artificial Sequence: Synthetic oligonucleotide
augaaccgagggaaacgaa

SEQ ID NO: 342782 - RNA, 19 nt, Artificial Sequence
  Description of Artificial Sequence: Synthetic oligonucleotide
cggacacgaaugaaccgag

SEQ ID NO: 342783 - RNA, 19 nt, Artificial Sequence
  Description of Artificial Sequence: Synthetic oligonucleotide
caccccgagugggaugagc

SEQ ID NO: 342784 - RNA, 19 nt, Artificial Sequence
  Description of Artificial Sequence: Synthetic oligonucleotide
gcagcugccgacgucgaga

SEQ ID NO: 342785 - RNA, 19 nt, Artificial Sequence
  Description of Artificial Sequence: Synthetic oligonucleotide
cuucacggacacgaaugaa

SEQ ID NO: 342786 - RNA, 19 nt, Artificial Sequence
  Description of Artificial Sequence: Synthetic oligonucleotide
acgucacccuucucagcua

SEQ ID NO: 342787 - RNA, 19 nt, Artificial Sequence
  Description of Artificial Sequence: Synthetic oligonucleotide
ggguccagccaguggucug

SEQ ID NO: 342788 - RNA, 19 nt, Artificial Sequence
  Description of Artificial Sequence: Synthetic oligonucleotide
gaagcacuccagccccagu

SEQ ID NO: 342789 - RNA, 19 nt, Artificial Sequence
  Description of Artificial Sequence: Synthetic oligonucleotide
ccaagaacucagcgaucug

SEQ ID NO: 342790 - RNA, 19 nt, Artificial Sequence
  Description of Artificial Sequence: Synthetic oligonucleotide
ggacuguucucaggacaug

SEQ ID NO: 342791 - RNA, 19 nt, Artificial Sequence
  Description of Artificial Sequence: Synthetic oligonucleotide
gaggugaccgaggggaguu

SEQ ID NO: 342792 - RNA, 19 nt, Artificial Sequence
  Description of Artificial Sequence: Synthetic oligonucleotide
cccuauguccccacacaca

SEQ ID NO: 342793 - RNA, 19 nt, Artificial Sequence
  Description of Artificial Sequence: Synthetic oligonucleotide
ugacggccuguggccuggg

SEQ ID NO: 342794 - RNA, 19 nt, Artificial Sequence
  Description of Artificial Sequence: Synthetic oligonucleotide
cuucgcugcuuaggaccug

SEQ ID NO: 342795 - RNA, 19 nt, Artificial Sequence
  Description of Artificial Sequence: Synthetic oligonucleotide
gacaugcgucagggcuggg

SEQ ID NO: 342796 - RNA, 19 nt, Artificial Sequence
  Description of Artificial Sequence: Synthetic oligonucleotide
gugagaccucuuggcaauc

SEQ ID NO: 342797 - RNA, 19 nt, Artificial Sequence
  Description of Artificial Sequence: Synthetic oligonucleotide
gcaccgggaugauucgguc

SEQ ID NO: 342798 - RNA, 19 nt, Artificial Sequence
  Description of Artificial Sequence: Synthetic oligonucleotide
gggcuuccgagugacggca

SEQ ID NO: 342799 - RNA, 19 nt, Artificial Sequence
  Description of Artificial Sequence: Synthetic oligonucleotide
caaccccuauguccccaca

SEQ ID NO: 342800 - RNA, 19 nt, Artificial Sequence
  Description of Artificial Sequence: Synthetic oligonucleotide
agcugccgacgucgagaca

SEQ ID NO: 342801 - RNA, 19 nt, Artificial Sequence
  Description of Artificial Sequence: Synthetic oligonucleotide
cgagcagaaaccuccucaa

SEQ ID NO: 342802 - RNA, 19 nt, Artificial Sequence
  Description of Artificial Sequence: Synthetic oligonucleotide
caaggcgguugaggcugag

SEQ ID NO: 342803 - RNA, 19 nt, Artificial Sequence
  Description of Artificial Sequence: Synthetic oligonucleotide
uagggugcuggggcuucau

SEQ ID NO: 342804 - RNA, 19 nt, Artificial Sequence
  Description of Artificial Sequence: Synthetic oligonucleotide
gcacugcucgauuccucuc

SEQ ID NO: 342805 - RNA, 19 nt, Artificial Sequence
  Description of Artificial Sequence: Synthetic oligonucleotide
cagcccggauggacuccag

SEQ ID NO: 342806 - RNA, 19 nt, Artificial Sequence
  Description of Artificial Sequence: Synthetic oligonucleotide
agcaguccucaaagucgga

SEQ ID NO: 342807 - RNA, 19 nt, Artificial Sequence
  Description of Artificial Sequence: Synthetic oligonucleotide
gugaccgaggggaguuuaa

SEQ ID NO: 342808 - RNA, 19 nt, Artificial Sequence
  Description of Artificial Sequence: Synthetic oligonucleotide
gagacaggggcuggcgaau

SEQ ID NO: 342809 - RNA, 19 nt, Artificial Sequence
  Description of Artificial Sequence: Synthetic oligonucleotide
accggccggcacgcuuccc

SEQ ID NO: 342810 - RNA, 19 nt, Artificial Sequence
  Description of Artificial Sequence: Synthetic oligonucleotide
guggcccaaggcgguugag

SEQ ID NO: 342811 - RNA, 19 nt, Artificial Sequence
  Description of Artificial Sequence: Synthetic oligonucleotide
accgggcuuccgagugacg

SEQ ID NO: 342812 - RNA, 19 nt, Artificial Sequence
  Description of Artificial Sequence: Synthetic oligonucleotide
gcugacaccccgaguggga

SEQ ID NO: 342813 - RNA, 19 nt, Artificial Sequence
  Description of Artificial Sequence: Synthetic oligonucleotide
auacgaccuuuggguccag

SEQ ID NO: 342814 - RNA, 19 nt, Artificial Sequence
  Description of Artificial Sequence: Synthetic oligonucleotide
cccauaccggccggcacgc

SEQ ID NO: 342815 - RNA, 19 nt, Artificial Sequence
  Description of Artificial Sequence: Synthetic oligonucleotide
cagcccgaggcgcaggcgu

SEQ ID NO: 342816 - RNA, 19 nt, Artificial Sequence
  Description of Artificial Sequence: Synthetic oligonucleotide
cauauggccugcagcucuu

SEQ ID NO: 342817 - RNA, 19 nt, Artificial Sequence
  Description of Artificial Sequence: Synthetic oligonucleotide
cgggcuuccgagugacggc

SEQ ID NO: 342818 - RNA, 19 nt, Artificial Sequence
  Description of Artificial Sequence: Synthetic oligonucleotide
gcgcaggcguccacuuagg

SEQ ID NO: 342819 - RNA, 19 nt, Artificial Sequence
  Description of Artificial Sequence: Synthetic oligonucleotide
cauaccggccggcacgcuu

SEQ ID NO: 342820 - RNA, 19 nt, Artificial Sequence
  Description of Artificial Sequence: Synthetic oligonucleotide
ccguugagguagaugagau

SEQ ID NO: 342821 - RNA, 19 nt, Artificial Sequence
  Description of Artificial Sequence: Synthetic oligonucleotide
cgcugacaccccgaguggg

SEQ ID NO: 342822 - RNA, 19 nt, Artificial Sequence
  Description of Artificial Sequence: Synthetic oligonucleotide
gcuuaggaccugggcugcc

SEQ ID NO: 342823 - RNA, 19 nt, Artificial Sequence
  Description of Artificial Sequence: Synthetic oligonucleotide
caguacccgguucccucaa

SEQ ID NO: 342824 - RNA, 19 nt, Artificial Sequence
  Description of Artificial Sequence: Synthetic oligonucleotide
ggugaccgaggggaguuua

SEQ ID NO: 342825 - RNA, 19 nt, Artificial Sequence
  Description of Artificial Sequence: Synthetic oligonucleotide
cuaccucagcccggaugga

SEQ ID NO: 342826 - RNA, 19 nt, Artificial Sequence
  Description of Artificial Sequence: Synthetic oligonucleotide
cgagugacggcaggcaaca

SEQ ID NO: 342827 - RNA, 19 nt, Artificial Sequence
  Description of Artificial Sequence: Synthetic oligonucleotide
aggugaccgaggggaguuu

SEQ ID NO: 342828 - RNA, 19 nt, Artificial Sequence
  Description of Artificial Sequence: Synthetic oligonucleotide
cgaaucagggacucuccgu

SEQ ID NO: 342829 - RNA, 19 nt, Artificial Sequence
  Description of Artificial Sequence: Synthetic oligonucleotide
cuggggcaacugccccauc

SEQ ID NO: 342830 - RNA, 19 nt, Artificial Sequence
  Description of Artificial Sequence: Synthetic oligonucleotide
ccccggagguggugagcgg

SEQ ID NO: 342831 - RNA, 19 nt, Artificial Sequence
  Description of Artificial Sequence: Synthetic oligonucleotide
gcgcuugcguguggugagc

SEQ ID NO: 342832 - RNA, 19 nt, Artificial Sequence
  Description of Artificial Sequence: Synthetic oligonucleotide
gggcguggggucggcaaca

SEQ ID NO: 342833 - RNA, 19 nt, Artificial Sequence
  Description of Artificial Sequence: Synthetic oligonucleotide
gggcaacugccccaucgau

SEQ ID NO: 342834 - RNA, 19 nt, Artificial Sequence
  Description of Artificial Sequence: Synthetic oligonucleotide
ccagcccgaggcgcaggcg

SEQ ID NO: 342835 - RNA, 19 nt, Artificial Sequence
  Description of Artificial Sequence: Synthetic oligonucleotide
cugggcccgcugcccguca

SEQ ID NO: 342836 - RNA, 19 nt, Artificial Sequence
  Description of Artificial Sequence: Synthetic oligonucleotide
gguccgggccacagcgaga

SEQ ID NO: 342837 - RNA, 19 nt, Artificial Sequence
  Description of Artificial Sequence: Synthetic oligonucleotide
ccgggaugauucgguccag

SEQ ID NO: 342838 - RNA, 19 nt, Artificial Sequence
  Description of Artificial Sequence: Synthetic oligonucleotide
ccgaggggaguuuaaucuu

SEQ ID NO: 342839 - RNA, 19 nt, Artificial Sequence
  Description of Artificial Sequence: Synthetic oligonucleotide
gccuuaaggaggacaccau

SEQ ID NO: 342840 - RNA, 19 nt, Artificial Sequence
  Description of Artificial Sequence: Synthetic oligonucleotide
cuggcgaaucagggacucu

SEQ ID NO: 342841 - RNA, 19 nt, Artificial Sequence
  Description of Artificial Sequence: Synthetic oligonucleotide
gguuccuacugaagaucuu

SEQ ID NO: 342842 - RNA, 19 nt, Artificial Sequence
  Description of Artificial Sequence: Synthetic oligonucleotide
ccgagcgcagcaaguugcu

SEQ ID NO: 342843 - RNA, 19 nt, Artificial Sequence
  Description of Artificial Sequence: Synthetic oligonucleotide
caccgucaagguaguccuu

SEQ ID NO: 342844 - RNA, 19 nt, Artificial Sequence
  Description of Artificial Sequence: Synthetic oligonucleotide
ccgaggcgcaggcguccac

SEQ ID NO: 342845 - RNA, 19 nt, Artificial Sequence
  Description of Artificial Sequence: Synthetic oligonucleotide
ccacaccgucaagguaguc

SEQ ID NO: 342846 - RNA, 19 nt, Artificial Sequence
  Description of Artificial Sequence: Synthetic oligonucleotide
gggcccgcugcccgucaua

SEQ ID NO: 342847 - RNA, 19 nt, Artificial Sequence
  Description of Artificial Sequence: Synthetic oligonucleotide
ccccaucgauccucacaua

SEQ ID NO: 342848 - RNA, 19 nt, Artificial Sequence
  Description of Artificial Sequence: Synthetic oligonucleotide
cccagucuccaaccccuau

SEQ ID NO: 342849 - RNA, 19 nt, Artificial Sequence
  Description of Artificial Sequence: Synthetic oligonucleotide
ccgcgcagcaggguagaua

SEQ ID NO: 342850 - RNA, 19 nt, Artificial Sequence
  Description of Artificial Sequence: Synthetic oligonucleotide
ccucgcugacaccccgagu

SEQ ID NO: 342851 - RNA, 19 nt, Artificial Sequence
  Description of Artificial Sequence: Synthetic oligonucleotide
cgcccacaccgucaaggua

SEQ ID NO: 342852 - RNA, 19 nt, Artificial Sequence
  Description of Artificial Sequence: Synthetic oligonucleotide
ccccgcgcagcaggguaga

SEQ ID NO: 342853 - RNA, 19 nt, Artificial Sequence
  Description of Artificial Sequence: Synthetic oligonucleotide
gcgcagcaaguugcucagu

SEQ ID NO: 342854 - RNA, 19 nt, Artificial Sequence
  Description of Artificial Sequence: Synthetic oligonucleotide
ccgaggcgucaaccuccuu

SEQ ID NO: 342855 - RNA, 19 nt, Artificial Sequence
  Description of Artificial Sequence: Synthetic oligonucleotide
uacuuagacacauaauugg

SEQ ID NO: 342856 - RNA, 19 nt, Artificial Sequence
  Description of Artificial Sequence: Synthetic oligonucleotide
aggaauacaggcuacuggc

SEQ ID NO: 342857 - RNA, 19 nt, Artificial Sequence
  Description of Artificial Sequence: Synthetic oligonucleotide
aagagauggcuacuuagac

SEQ ID NO: 342858 - RNA, 19 nt, Artificial Sequence
  Description of Artificial Sequence: Synthetic oligonucleotide
aauugguuucuggugaacc

SEQ ID NO: 342859 - RNA, 19 nt, Artificial Sequence
  Description of Artificial Sequence: Synthetic oligonucleotide
uguauguugacuucugucu

SEQ ID NO: 342860 - RNA, 19 nt, Artificial Sequence
  Description of Artificial Sequence: Synthetic oligonucleotide
uugacaaagguggugaccg

SEQ ID NO: 342861 - RNA, 19 nt, Artificial Sequence
  Description of Artificial Sequence: Synthetic oligonucleotide
uacauguaggcacugacca

SEQ ID NO: 342862 - RNA, 19 nt, Artificial Sequence
  Description of Artificial Sequence: Synthetic oligonucleotide
ugcgauguaggccugcugg

SEQ ID NO: 342863 - RNA, 19 nt, Artificial Sequence
  Description of Artificial Sequence: Synthetic oligonucleotide
gacuauagggcaguaaugg

SEQ ID NO: 342864 - RNA, 19 nt, Artificial Sequence
  Description of Artificial Sequence: Synthetic oligonucleotide
ucauaguacaaccugcgcu

SEQ ID NO: 342865 - RNA, 19 nt, Artificial Sequence
  Description of Artificial Sequence: Synthetic oligonucleotide
ucgggcaucacguaucugg

SEQ ID NO: 342866 - RNA, 19 nt, Artificial Sequence
  Description of Artificial Sequence: Synthetic oligonucleotide
guaguguuacucuggaugg

SEQ ID NO: 342867 - RNA, 19 nt, Artificial Sequence
  Description of Artificial Sequence: Synthetic oligonucleotide
aacccauggacauuggcug

SEQ ID NO: 342868 - RNA, 19 nt, Artificial Sequence
  Description of Artificial Sequence: Synthetic oligonucleotide
aaugagaugagcugggcuu

SEQ ID NO: 342869 - RNA, 19 nt, Artificial Sequence
  Description of Artificial Sequence: Synthetic oligonucleotide
uguuucaucccgcuuuggg

SEQ ID NO: 342870 - RNA, 19 nt, Artificial Sequence
  Description of Artificial Sequence: Synthetic oligonucleotide
auacacaccaugcaucggg

SEQ ID NO: 342871 - RNA, 19 nt, Artificial Sequence
  Description of Artificial Sequence: Synthetic oligonucleotide
ucggcauccacccagucag

SEQ ID NO: 342872 - RNA, 19 nt, Artificial Sequence
  Description of Artificial Sequence: Synthetic oligonucleotide
acaguucuuuaccacagac

SEQ ID NO: 342873 - RNA, 19 nt, Artificial Sequence
  Description of Artificial Sequence: Synthetic oligonucleotide
gaggaauacaggcuacugg

SEQ ID NO: 342874 - RNA, 19 nt, Artificial Sequence
  Description of Artificial Sequence: Synthetic oligonucleotide
auggacauuggcuggcucc

SEQ ID NO: 342875 - RNA, 19 nt, Artificial Sequence
  Description of Artificial Sequence: Synthetic oligonucleotide
cuacuuagacacauaauug

SEQ ID NO: 342876 - RNA, 19 nt, Artificial Sequence
  Description of Artificial Sequence: Synthetic oligonucleotide
uuucuggugaaccguagug

SEQ ID NO: 342877 - RNA, 19 nt, Artificial Sequence
  Description of Artificial Sequence: Synthetic oligonucleotide
ucucgcagggcacuuagag

SEQ ID NO: 342878 - RNA, 19 nt, Artificial Sequence
  Description of Artificial Sequence: Synthetic oligonucleotide
cuagacucaaggucagucg

SEQ ID NO: 342879 - RNA, 19 nt, Artificial Sequence
  Description of Artificial Sequence: Synthetic oligonucleotide
gaugaguucacaggugagg

SEQ ID NO: 342880 - RNA, 19 nt, Artificial Sequence
  Description of Artificial Sequence: Synthetic oligonucleotide
guuccgaacauuaacuucc

SEQ ID NO: 342881 - RNA, 19 nt, Artificial Sequence
  Description of Artificial Sequence: Synthetic oligonucleotide
guaccgagcaagcucaggg

SEQ ID NO: 342882 - RNA, 19 nt, Artificial Sequence
  Description of Artificial Sequence: Synthetic oligonucleotide
cauaguacaaccugcgcuc

SEQ ID NO: 342883 - RNA, 19 nt, Artificial Sequence
  Description of Artificial Sequence: Synthetic oligonucleotide
ucgaaugagaugagcuggg

SEQ ID NO: 342884 - RNA, 19 nt, Artificial Sequence
  Description of Artificial Sequence: Synthetic oligonucleotide
uauggugcuggucugugga

SEQ ID NO: 342885 - RNA, 19 nt, Artificial Sequence
  Description of Artificial Sequence: Synthetic oligonucleotide
aucgcuuuccuugaauucg

SEQ ID NO: 342886 - RNA, 19 nt, Artificial Sequence
  Description of Artificial Sequence: Synthetic oligonucleotide
aaggguggucaugagacuc

SEQ ID NO: 342887 - RNA, 19 nt, Artificial Sequence
  Description of Artificial Sequence: Synthetic oligonucleotide
acaaccugcgcucauccag

SEQ ID NO: 342888 - RNA, 19 nt, Artificial Sequence
  Description of Artificial Sequence: Synthetic oligonucleotide
uguuguacggcugguaacc

SEQ ID NO: 342889 - RNA, 19 nt, Artificial Sequence
  Description of Artificial Sequence: Synthetic oligonucleotide
gacucugcauguuguacgg

SEQ ID NO: 342890 - RNA, 19 nt, Artificial Sequence
  Description of Artificial Sequence: Synthetic oligonucleotide
ugaaccguaguguuacucu

SEQ ID NO: 342891 - RNA, 19 nt, Artificial Sequence
  Description of Artificial Sequence: Synthetic oligonucleotide
gucgaaugagaugagcugg

SEQ ID NO: 342892 - RNA, 19 nt, Artificial Sequence
  Description of Artificial Sequence: Synthetic oligonucleotide
uuacucuggauggugagug

SEQ ID NO: 342893 - RNA, 19 nt, Artificial Sequence
  Description of Artificial Sequence: Synthetic oligonucleotide
accuguuggguacauguag

SEQ ID NO: 342894 - RNA, 19 nt, Artificial Sequence
  Description of Artificial Sequence: Synthetic oligonucleotide
agugcuagacucaagguca

SEQ ID NO: 342895 - RNA, 19 nt, Artificial Sequence
  Description of Artificial Sequence: Synthetic oligonucleotide
ugguggaguacuuggaaga

SEQ ID NO: 342896 - RNA, 19 nt, Artificial Sequence
  Description of Artificial Sequence: Synthetic oligonucleotide
gaucaaagcagggaaccag

SEQ ID NO: 342897 - RNA, 19 nt, Artificial Sequence
  Description of Artificial Sequence: Synthetic oligonucleotide
gaaggcgggcaucugggcg

SEQ ID NO: 342898 - RNA, 19 nt, Artificial Sequence
  Description of Artificial Sequence: Synthetic oligonucleotide
gagaagguccuacuugccc

SEQ ID NO: 342899 - RNA, 19 nt, Artificial Sequence
  Description of Artificial Sequence: Synthetic oligonucleotide
gaugcuucggccccgcaug

SEQ ID NO: 342900 - RNA, 19 nt, Artificial Sequence
  Description of Artificial Sequence: Synthetic oligonucleotide
guuggagugggcugguagg

SEQ ID NO: 342901 - RNA, 19 nt, Artificial Sequence
  Description of Artificial Sequence: Synthetic oligonucleotide
ggaaaagucagacugcauc

SEQ ID NO: 342902 - RNA, 19 nt, Artificial Sequence
  Description of Artificial Sequence: Synthetic oligonucleotide
uccuuuuaguuccuccaug

SEQ ID NO: 342903 - RNA, 19 nt, Artificial Sequence
  Description of Artificial Sequence: Synthetic oligonucleotide
agaagguccuacuugcccu

SEQ ID NO: 342904 - RNA, 19 nt, Artificial Sequence
  Description of Artificial Sequence: Synthetic oligonucleotide
guguuugcgggucaccacg

SEQ ID NO: 342905 - RNA, 19 nt, Artificial Sequence
  Description of Artificial Sequence: Synthetic oligonucleotide
auguuguacggcugguaac

SEQ ID NO: 342906 - RNA, 19 nt, Artificial Sequence
  Description of Artificial Sequence: Synthetic oligonucleotide
uguuccgaacauuaacuuc

SEQ ID NO: 342907 - RNA, 19 nt, Artificial Sequence
  Description of Artificial Sequence: Synthetic oligonucleotide
acauuaacuuccacuugcc

SEQ ID NO: 342908 - RNA, 19 nt, Artificial Sequence
  Description of Artificial Sequence: Synthetic oligonucleotide
uuccgguugagguaccgag

SEQ ID NO: 342909 - RNA, 19 nt, Artificial Sequence
  Description of Artificial Sequence: Synthetic oligonucleotide
uggcuacuuagacacauaa

SEQ ID NO: 342910 - RNA, 19 nt, Artificial Sequence
  Description of Artificial Sequence: Synthetic oligonucleotide
aggagaauggagacuauag

SEQ ID NO: 342911 - RNA, 19 nt, Artificial Sequence
  Description of Artificial Sequence: Synthetic oligonucleotide
ggucaugagacucugcaug

SEQ ID NO: 342912 - RNA, 19 nt, Artificial Sequence
  Description of Artificial Sequence: Synthetic oligonucleotide
uacggcugguaacccaugg

SEQ ID NO: 342913 - RNA, 19 nt, Artificial Sequence
  Description of Artificial Sequence: Synthetic oligonucleotide
uucugcgcuagcuggaucu

SEQ ID NO: 342914 - RNA, 19 nt, Artificial Sequence
  Description of Artificial Sequence: Synthetic oligonucleotide
gaaccguaguguuacucug

SEQ ID NO: 342915 - RNA, 19 nt, Artificial Sequence
  Description of Artificial Sequence: Synthetic oligonucleotide
acuuagagcuccucgggca

SEQ ID NO: 342916 - RNA, 19 nt, Artificial Sequence
  Description of Artificial Sequence: Synthetic oligonucleotide
cuggaucugacgcuggcgc

SEQ ID NO: 342917 - RNA, 19 nt, Artificial Sequence
  Description of Artificial Sequence: Synthetic oligonucleotide
guaggcacugaccaugcug

SEQ ID NO: 342918 - RNA, 19 nt, Artificial Sequence
  Description of Artificial Sequence: Synthetic oligonucleotide
ugcccugcgauguaggccu

SEQ ID NO: 342919 - RNA, 19 nt, Artificial Sequence
  Description of Artificial Sequence: Synthetic oligonucleotide
agaucugcccacaugcccg

SEQ ID NO: 342920 - RNA, 19 nt, Artificial Sequence
  Description of Artificial Sequence: Synthetic oligonucleotide
uuggugaugcuucggcccc

SEQ ID NO: 342921 - RNA, 19 nt, Artificial Sequence
  Description of Artificial Sequence: Synthetic oligonucleotide
uuguguauguugacuucug

SEQ ID NO: 342922 - RNA, 19 nt, Artificial Sequence
  Description of Artificial Sequence: Synthetic oligonucleotide
uagcacggcucacacaccc

SEQ ID NO: 342923 - RNA, 19 nt, Artificial Sequence
  Description of Artificial Sequence: Synthetic oligonucleotide
uggauagccaacugccucu

SEQ ID NO: 342924 - RNA, 19 nt, Artificial Sequence
  Description of Artificial Sequence: Synthetic oligonucleotide
cauuggugaugcuucggcc

SEQ ID NO: 342925 - RNA, 19 nt, Artificial Sequence
  Description of Artificial Sequence: Synthetic oligonucleotide
uuugggugcguuguguaug

SEQ ID NO: 342926 - RNA, 19 nt, Artificial Sequence
  Description of Artificial Sequence: Synthetic oligonucleotide
gcuuggaucagguacagga

SEQ ID NO: 342927 - RNA, 19 nt, Artificial Sequence
  Description of Artificial Sequence: Synthetic oligonucleotide
ugcucacaggagaauggag

SEQ ID NO: 342928 - RNA, 19 nt, Artificial Sequence
  Description of Artificial Sequence: Synthetic oligonucleotide
ugagugcuagacucaaggu

SEQ ID NO: 342929 - RNA, 19 nt, Artificial Sequence
  Description of Artificial Sequence: Synthetic oligonucleotide
ugugguagaagcagcuuuu

SEQ ID NO: 342930 - RNA, 19 nt, Artificial Sequence
  Description of Artificial Sequence: Synthetic oligonucleotide
agagaugcauccuggccug

SEQ ID NO: 342931 - RNA, 19 nt, Artificial Sequence
  Description of Artificial Sequence: Synthetic oligonucleotide
ucaugcgguugacaaaggu

SEQ ID NO: 342932 - RNA, 19 nt, Artificial Sequence
  Description of Artificial Sequence: Synthetic oligonucleotide
acaccaugcaucggggagc

SEQ ID NO: 342933 - RNA, 19 nt, Artificial Sequence
  Description of Artificial Sequence: Synthetic oligonucleotide
uuggguacauguaggcacu

SEQ ID NO: 342934 - RNA, 19 nt, Artificial Sequence
  Description of Artificial Sequence: Synthetic oligonucleotide
aauucggggaagacauguc

SEQ ID NO: 342935 - RNA, 19 nt, Artificial Sequence
  Description of Artificial Sequence: Synthetic oligonucleotide
acuuagacacauaauuggu

SEQ ID NO: 342936 - RNA, 19 nt, Artificial Sequence
  Description of Artificial Sequence: Synthetic oligonucleotide
uggugaaccguaguguuac

SEQ ID NO: 342937 - RNA, 19 nt, Artificial Sequence
  Description of Artificial Sequence: Synthetic oligonucleotide
cugaaggcccucauaguac

SEQ ID NO: 342938 - RNA, 19 nt, Artificial Sequence
  Description of Artificial Sequence: Synthetic oligonucleotide
ugggcgcgcaucuggaccg

SEQ ID NO: 342939 - RNA, 19 nt, Artificial Sequence
  Description of Artificial Sequence: Synthetic oligonucleotide
guguauguugacuucuguc

SEQ ID NO: 342940 - RNA, 19 nt, Artificial Sequence
  Description of Artificial Sequence: Synthetic oligonucleotide
gggagguacggacugagag

SEQ ID NO: 342941 - RNA, 19 nt, Artificial Sequence
  Description of Artificial Sequence: Synthetic oligonucleotide
gagguacggacugagaguc

SEQ ID NO: 342942 - RNA, 19 nt, Artificial Sequence
  Description of Artificial Sequence: Synthetic oligonucleotide
ggucagucgaaugagauga

SEQ ID NO: 342943 - RNA, 19 nt, Artificial Sequence
  Description of Artificial Sequence: Synthetic oligonucleotide
gagucugucucuggaagag

SEQ ID NO: 342944 - RNA, 19 nt, Artificial Sequence
  Description of Artificial Sequence: Synthetic oligonucleotide
gugaccgcauucugcaggg

SEQ ID NO: 342945 - RNA, 19 nt, Artificial Sequence
  Description of Artificial Sequence: Synthetic oligonucleotide
ucuggugaaccguaguguu

SEQ ID NO: 342946 - RNA, 19 nt, Artificial Sequence
  Description of Artificial Sequence: Synthetic oligonucleotide
uguuugcgggucaccacgc

SEQ ID NO: 342947 - RNA, 19 nt, Artificial Sequence
  Description of Artificial Sequence: Synthetic oligonucleotide
guacaaccugcgcucaucc

SEQ ID NO: 342948 - RNA, 19 nt, Artificial Sequence
  Description of Artificial Sequence: Synthetic oligonucleotide
ggugaccgcauucugcagg

SEQ ID NO: 342949 - RNA, 19 nt, Artificial Sequence
  Description of Artificial Sequence: Synthetic oligonucleotide
guaguuccgguugagguac

SEQ ID NO: 342950 - RNA, 19 nt, Artificial Sequence
  Description of Artificial Sequence: Synthetic oligonucleotide
aaggucagucgaaugagau

SEQ ID NO: 342951 - RNA, 19 nt, Artificial Sequence
  Description of Artificial Sequence: Synthetic oligonucleotide
uuguuccgaacauuaacuu

SEQ ID NO: 342952 - RNA, 19 nt, Artificial Sequence
  Description of Artificial Sequence: Synthetic oligonucleotide
aguaguuccgguugaggua

SEQ ID NO: 342953 - RNA, 19 nt, Artificial Sequence
  Description of Artificial Sequence: Synthetic oligonucleotide
cugcauguuguacggcugg

SEQ ID NO: 342954 - RNA, 19 nt, Artificial Sequence
  Description of Artificial Sequence: Synthetic oligonucleotide
aggucagucgaaugagaug

SEQ ID NO: 342955 - RNA, 19 nt, Artificial Sequence
  Description of Artificial Sequence: Synthetic oligonucleotide
ucucccgguguuccucucg

SEQ ID NO: 342956 - RNA, 19 nt, Artificial Sequence
  Description of Artificial Sequence: Synthetic oligonucleotide
uguuggccacuucaucgug

SEQ ID NO: 342957 - RNA, 19 nt, Artificial Sequence
  Description of Artificial Sequence: Synthetic oligonucleotide
guacauguaggcacugacc

SEQ ID NO: 342958 - RNA, 19 nt, Artificial Sequence
  Description of Artificial Sequence: Synthetic oligonucleotide
gagggucaagggugaaggg

SEQ ID NO: 342959 - RNA, 19 nt, Artificial Sequence
  Description of Artificial Sequence: Synthetic oligonucleotide
guaacccauggacauuggc

SEQ ID NO: 342960 - RNA, 19 nt, Artificial Sequence
  Description of Artificial Sequence: Synthetic oligonucleotide
ggcucauauacacaccaug

SEQ ID NO: 342961 - RNA, 19 nt, Artificial Sequence
  Description of Artificial Sequence: Synthetic oligonucleotide
gaagguccuacuugcccug

SEQ ID NO: 342962 - RNA, 19 nt, Artificial Sequence
  Description of Artificial Sequence: Synthetic oligonucleotide
gaucugcccacaugcccgg

SEQ ID NO: 342963 - RNA, 19 nt, Artificial Sequence
  Description of Artificial Sequence: Synthetic oligonucleotide
ugcguuguguauguugacu

SEQ ID NO: 342964 - RNA, 19 nt, Artificial Sequence
  Description of Artificial Sequence: Synthetic oligonucleotide
cucuacugagccugcuggg

SEQ ID NO: 342965 - RNA, 19 nt, Artificial Sequence
  Description of Artificial Sequence: Synthetic oligonucleotide
acggcucacacacccgcac

SEQ ID NO: 342966 - RNA, 19 nt, Artificial Sequence
  Description of Artificial Sequence: Synthetic oligonucleotide
gguacauguaggcacugac

SEQ ID NO: 342967 - RNA, 19 nt, Artificial Sequence
  Description of Artificial Sequence: Synthetic oligonucleotide
uugguuucuggugaaccgu

SEQ ID NO: 342968 - RNA, 19 nt, Artificial Sequence
  Description of Artificial Sequence: Synthetic oligonucleotide
cugguacugcucacuaaag

SEQ ID NO: 342969 - RNA, 19 nt, Artificial Sequence
  Description of Artificial Sequence: Synthetic oligonucleotide
cucccaguaguuccgguug

SEQ ID NO: 342970 - RNA, 19 nt, Artificial Sequence
  Description of Artificial Sequence: Synthetic oligonucleotide
ugcgcuagcuggaucugac

SEQ ID NO: 342971 - RNA, 19 nt, Artificial Sequence
  Description of Artificial Sequence: Synthetic oligonucleotide
cuguguaggugguggcugg

SEQ ID NO: 342972 - RNA, 19 nt, Artificial Sequence
  Description of Artificial Sequence: Synthetic oligonucleotide
ccuguuggguacauguagg

SEQ ID NO: 342973 - RNA, 19 nt, Artificial Sequence
  Description of Artificial Sequence: Synthetic oligonucleotide
agcacggcugagucauugg

SEQ ID NO: 342974 - RNA, 19 nt, Artificial Sequence
  Description of Artificial Sequence: Synthetic oligonucleotide
ugccgcagaagaucugccc

SEQ ID NO: 342975 - RNA, 19 nt, Artificial Sequence
  Description of Artificial Sequence: Synthetic oligonucleotide
cucacuaaaggggccacug

SEQ ID NO: 342976 - RNA, 19 nt, Artificial Sequence
  Description of Artificial Sequence: Synthetic oligonucleotide
gagcccucuacugagccug

SEQ ID NO: 342977 - RNA, 19 nt, Artificial Sequence
  Description of Artificial Sequence: Synthetic oligonucleotide
cuugggcucguuccggaag

SEQ ID NO: 342978 - RNA, 19 nt, Artificial Sequence
  Description of Artificial Sequence: Synthetic oligonucleotide
gguugagguaccgagcaag

SEQ ID NO: 342979 - RNA, 19 nt, Artificial Sequence
  Description of Artificial Sequence: Synthetic oligonucleotide
accguaguguuacucugga

SEQ ID NO: 342980 - RNA, 19 nt, Artificial Sequence
  Description of Artificial Sequence: Synthetic oligonucleotide
ggcuggcucauauacacac

SEQ ID NO: 342981 - RNA, 19 nt, Artificial Sequence
  Description of Artificial Sequence: Synthetic oligonucleotide
uugggugcguuguguaugu

SEQ ID NO: 342982 - RNA, 19 nt, Artificial Sequence
  Description of Artificial Sequence: Synthetic oligonucleotide
aggaucuuguuccgaacau

SEQ ID NO: 342983 - RNA, 19 nt, Artificial Sequence
  Description of Artificial Sequence: Synthetic oligonucleotide
gaucugacgcuggcgcucg

SEQ ID NO: 342984 - RNA, 19 nt, Artificial Sequence
  Description of Artificial Sequence: Synthetic oligonucleotide
agacuauagggcaguaaug

SEQ ID NO: 342985 - RNA, 19 nt, Artificial Sequence
  Description of Artificial Sequence: Synthetic oligonucleotide
cauguuguacggcugguaa

SEQ ID NO: 342986 - RNA, 19 nt, Artificial Sequence
  Description of Artificial Sequence: Synthetic oligonucleotide
caggaaccagaccacugag

SEQ ID NO: 342987 - RNA, 19 nt, Artificial Sequence
  Description of Artificial Sequence: Synthetic oligonucleotide
gguuggagugggcugguag

SEQ ID NO: 342988 - RNA, 19 nt, Artificial Sequence
  Description of Artificial Sequence: Synthetic oligonucleotide
gucccuguguagguggugg

SEQ ID NO: 342989 - RNA, 19 nt, Artificial Sequence
  Description of Artificial Sequence: Synthetic oligonucleotide
ugaugcuucggccccgcau

SEQ ID NO: 342990 - RNA, 19 nt, Artificial Sequence
  Description of Artificial Sequence: Synthetic oligonucleotide
uuguacggcugguaaccca

SEQ ID NO: 342991 - RNA, 19 nt, Artificial Sequence
  Description of Artificial Sequence: Synthetic oligonucleotide
aacugcucguggcucuccu

SEQ ID NO: 342992 - RNA, 19 nt, Artificial Sequence
  Description of Artificial Sequence: Synthetic oligonucleotide
uaccgagcaagcucagggu

SEQ ID NO: 342993 - RNA, 19 nt, Artificial Sequence
  Description of Artificial Sequence: Synthetic oligonucleotide
agugguguuugcgggucac

SEQ ID NO: 342994 - RNA, 19 nt, Artificial Sequence
  Description of Artificial Sequence: Synthetic oligonucleotide
cacggcugagucauuggug

SEQ ID NO: 342995 - RNA, 19 nt, Artificial Sequence
  Description of Artificial Sequence: Synthetic oligonucleotide
gaauucggggaagacaugu

SEQ ID NO: 342996 - RNA, 19 nt, Artificial Sequence
  Description of Artificial Sequence: Synthetic oligonucleotide
uacguguccuggaccaccu

SEQ ID NO: 342997 - RNA, 19 nt, Artificial Sequence
  Description of Artificial Sequence: Synthetic oligonucleotide
guugagguaccgagcaagc

SEQ ID NO: 342998 - RNA, 19 nt, Artificial Sequence
  Description of Artificial Sequence: Synthetic oligonucleotide
cacuaaaggggccacugga

SEQ ID NO: 342999 - RNA, 19 nt, Artificial Sequence
  Description of Artificial Sequence: Synthetic oligonucleotide
ugcuguuggggcgguaugc

SEQ ID NO: 343000 - RNA, 19 nt, Artificial Sequence
  Description of Artificial Sequence: Synthetic oligonucleotide
aucggggagcccucuacug

SEQ ID NO: 343001 - RNA, 19 nt, Artificial Sequence
  Description of Artificial Sequence: Synthetic oligonucleotide
uacucuggauggugagugc

SEQ ID NO: 343002 - RNA, 19 nt, Artificial Sequence
  Description of Artificial Sequence: Synthetic oligonucleotide
ucacguaucugggccagcu

SEQ ID NO: 343003 - RNA, 19 nt, Artificial Sequence
  Description of Artificial Sequence: Synthetic oligonucleotide
ccucuacugagccugcugg

SEQ ID NO: 343004 - RNA, 19 nt, Artificial Sequence
  Description of Artificial Sequence: Synthetic oligonucleotide
uguguaggugguggcuggg

SEQ ID NO: 343005 - RNA, 19 nt, Artificial Sequence
  Description of Artificial Sequence: Synthetic oligonucleotide
cugggcgcgcaucuggacc

SEQ ID NO: 343006 - RNA, 19 nt, Artificial Sequence
  Description of Artificial Sequence: Synthetic oligonucleotide
ugcgguugacaaagguggu

SEQ ID NO: 343007 - RNA, 19 nt, Artificial Sequence
  Description of Artificial Sequence: Synthetic oligonucleotide
cuucacugcccggugcugg

SEQ ID NO: 343008 - RNA, 19 nt, Artificial Sequence
  Description of Artificial Sequence: Synthetic oligonucleotide
agucugucucuggaagagg

SEQ ID NO: 343009 - RNA, 19 nt, Artificial Sequence
  Description of Artificial Sequence: Synthetic oligonucleotide
ucccaguaguuccgguuga

SEQ ID NO: 343010 - RNA, 19 nt, Artificial Sequence
  Description of Artificial Sequence: Synthetic oligonucleotide
acgccaaacugcacucugc

SEQ ID NO: 343011 - RNA, 19 nt, Artificial Sequence
  Description of Artificial Sequence: Synthetic oligonucleotide
uucacugcccggugcuggc

SEQ ID NO: 343012 - RNA, 19 nt, Artificial Sequence
  Description of Artificial Sequence: Synthetic oligonucleotide
ugcgggugcaugguguuga

SEQ ID NO: 343013 - RNA, 19 nt, Artificial Sequence
  Description of Artificial Sequence: Synthetic oligonucleotide
gacugagagucugucucug

SEQ ID NO: 343014 - RNA, 19 nt, Artificial Sequence
  Description of Artificial Sequence: Synthetic oligonucleotide
uuccggaaggcgugugccc

SEQ ID NO: 343015 - RNA, 19 nt, Artificial Sequence
  Description of Artificial Sequence: Synthetic oligonucleotide
uggacugucuggccacagu

SEQ ID NO: 343016 - RNA, 19 nt, Artificial Sequence
  Description of Artificial Sequence: Synthetic oligonucleotide
aaccugcgcucauccagcu

SEQ ID NO: 343017 - RNA, 19 nt, Artificial Sequence
  Description of Artificial Sequence: Synthetic oligonucleotide
uacaaccugcgcucaucca

SEQ ID NO: 343018 - RNA, 19 nt, Artificial Sequence
  Description of Artificial Sequence: Synthetic oligonucleotide
cagucgaaugagaugagcu

SEQ ID NO: 343019 - RNA, 19 nt, Artificial Sequence
  Description of Artificial Sequence: Synthetic oligonucleotide
augaucugguacguguccu

SEQ ID NO: 343020 - RNA, 19 nt, Artificial Sequence
  Description of Artificial Sequence: Synthetic oligonucleotide
aaacugcacucugcaccgg

SEQ ID NO: 343021 - RNA, 19 nt, Artificial Sequence
  Description of Artificial Sequence: Synthetic oligonucleotide
gauagccaacugccucugc

SEQ ID NO: 343022 - RNA, 19 nt, Artificial Sequence
  Description of Artificial Sequence: Synthetic oligonucleotide
uacuugggcucguuccgga

SEQ ID NO: 343023 - RNA, 19 nt, Artificial Sequence
  Description of Artificial Sequence: Synthetic oligonucleotide
gucaccacgccaaacugca

SEQ ID NO: 343024 - RNA, 19 nt, Artificial Sequence
  Description of Artificial Sequence: Synthetic oligonucleotide
cugacgcuggcgcucggcc

SEQ ID NO: 343025 - RNA, 19 nt, Artificial Sequence
  Description of Artificial Sequence: Synthetic oligonucleotide
cacgccaaacugcacucug

SEQ ID NO: 343026 - RNA, 19 nt, Artificial Sequence
  Description of Artificial Sequence: Synthetic oligonucleotide
gcuucggccccgcaugugg

SEQ ID NO: 343027 - RNA, 19 nt, Artificial Sequence
  Description of Artificial Sequence: Synthetic oligonucleotide
ugcaccgguggcauuccuc

SEQ ID NO: 343028 - RNA, 19 nt, Artificial Sequence
  Description of Artificial Sequence: Synthetic oligonucleotide
guacuuggaagagcacuug

SEQ ID NO: 343029 - RNA, 19 nt, Artificial Sequence
  Description of Artificial Sequence: Synthetic oligonucleotide
uggcucauauacacaccau

SEQ ID NO: 343030 - RNA, 19 nt, Artificial Sequence
  Description of Artificial Sequence: Synthetic oligonucleotide
acggacugagagucugucu

SEQ ID NO: 343031 - RNA, 19 nt, Artificial Sequence
  Description of Artificial Sequence: Synthetic oligonucleotide
uguaggcacugaccaugcu

SEQ ID NO: 343032 - RNA, 19 nt, Artificial Sequence
  Description of Artificial Sequence: Synthetic oligonucleotide
auagcacggcucacacacc

SEQ ID NO: 343033 - RNA, 19 nt, Artificial Sequence
  Description of Artificial Sequence: Synthetic oligonucleotide
ucaagggugaagggccacu

SEQ ID NO: 343034 - RNA, 19 nt, Artificial Sequence
  Description of Artificial Sequence: Synthetic oligonucleotide
agccgcccggcguagcuuc

SEQ ID NO: 343035 - RNA, 19 nt, Artificial Sequence
  Description of Artificial Sequence: Synthetic oligonucleotide
ggugcguuguguauguuga

SEQ ID NO: 343036 - RNA, 19 nt, Artificial Sequence
  Description of Artificial Sequence: Synthetic oligonucleotide
auaguacaaccugcgcuca

SEQ ID NO: 343037 - RNA, 19 nt, Artificial Sequence
  Description of Artificial Sequence: Synthetic oligonucleotide
gggugcguuguguauguug

SEQ ID NO: 343038 - RNA, 19 nt, Artificial Sequence
  Description of Artificial Sequence: Synthetic oligonucleotide
gguaugccccucuccaggc

SEQ ID NO: 343039 - RNA, 19 nt, Artificial Sequence
  Description of Artificial Sequence: Synthetic oligonucleotide
gauggcuacuuagacacau

SEQ ID NO: 343040 - RNA, 19 nt, Artificial Sequence
  Description of Artificial Sequence: Synthetic oligonucleotide
guacguguccuggaccacc

SEQ ID NO: 343041 - RNA, 19 nt, Artificial Sequence
  Description of Artificial Sequence: Synthetic oligonucleotide
gguacggacugagagucug

SEQ ID NO: 343042 - RNA, 19 nt, Artificial Sequence
  Description of Artificial Sequence: Synthetic oligonucleotide
guuguacggcugguaaccc

SEQ ID NO: 343043 - RNA, 19 nt, Artificial Sequence
  Description of Artificial Sequence: Synthetic oligonucleotide
gaguucacaggugaggaau

SEQ ID NO: 343044 - RNA, 19 nt, Artificial Sequence
  Description of Artificial Sequence: Synthetic oligonucleotide
guuguguauguugacuucu

SEQ ID NO: 343045 - RNA, 19 nt, Artificial Sequence
  Description of Artificial Sequence: Synthetic oligonucleotide
acacaccaugcaucgggga

SEQ ID NO: 343046 - RNA, 19 nt, Artificial Sequence
  Description of Artificial Sequence: Synthetic oligonucleotide
acggcugguaacccaugga

SEQ ID NO: 343047 - RNA, 19 nt, Artificial Sequence
  Description of Artificial Sequence: Synthetic oligonucleotide
agagcacuugccgcagaag

SEQ ID NO: 343048 - RNA, 19 nt, Artificial Sequence
  Description of Artificial Sequence: Synthetic oligonucleotide
uacggacugagagucuguc

SEQ ID NO: 343049 - RNA, 19 nt, Artificial Sequence
  Description of Artificial Sequence: Synthetic oligonucleotide
caucacguaucugggccag

SEQ ID NO: 343050 - RNA, 19 nt, Artificial Sequence
  Description of Artificial Sequence: Synthetic oligonucleotide
gcgauguaggccugcuggg

SEQ ID NO: 343051 - RNA, 19 nt, Artificial Sequence
  Description of Artificial Sequence: Synthetic oligonucleotide
ccgagcaagcucagggucg

SEQ ID NO: 343052 - RNA, 19 nt, Artificial Sequence
  Description of Artificial Sequence: Synthetic oligonucleotide
uggugagugcuagacucaa

SEQ ID NO: 343053 - RNA, 19 nt, Artificial Sequence
  Description of Artificial Sequence: Synthetic oligonucleotide
gcuguuucaucccgcuuug

SEQ ID NO: 343054 - RNA, 19 nt, Artificial Sequence
  Description of Artificial Sequence: Synthetic oligonucleotide
gacgcuggcgcucggccuc

SEQ ID NO: 343055 - RNA, 19 nt, Artificial Sequence
  Description of Artificial Sequence: Synthetic oligonucleotide
gugaaccguaguguuacuc

SEQ ID NO: 343056 - RNA, 19 nt, Artificial Sequence
  Description of Artificial Sequence: Synthetic oligonucleotide
gcuagacucaaggucaguc

SEQ ID NO: 343057 - RNA, 19 nt, Artificial Sequence
  Description of Artificial Sequence: Synthetic oligonucleotide
guuugcgggucaccacgcc

SEQ ID NO: 343058 - RNA, 19 nt, Artificial Sequence
  Description of Artificial Sequence: Synthetic oligonucleotide
caccaugcaucggggagcc

SEQ ID NO: 343059 - RNA, 19 nt, Artificial Sequence
  Description of Artificial Sequence: Synthetic oligonucleotide
aucacguaucugggccagc

SEQ ID NO: 343060 - RNA, 19 nt, Artificial Sequence
  Description of Artificial Sequence: Synthetic oligonucleotide
ugcauguuguacggcuggu

SEQ ID NO: 343061 - RNA, 19 nt, Artificial Sequence
  Description of Artificial Sequence: Synthetic oligonucleotide
ugacgcuggcgcucggccu

SEQ ID NO: 343062 - RNA, 19 nt, Artificial Sequence
  Description of Artificial Sequence: Synthetic oligonucleotide
cugcccugcgauguaggcc

SEQ ID NO: 343063 - RNA, 19 nt, Artificial Sequence
  Description of Artificial Sequence: Synthetic oligonucleotide
cugcggagccugagaagcc

SEQ ID NO: 343064 - RNA, 19 nt, Artificial Sequence
  Description of Artificial Sequence: Synthetic oligonucleotide
gggacagcacggcugaguc

SEQ ID NO: 343065 - RNA, 19 nt, Artificial Sequence
  Description of Artificial Sequence: Synthetic oligonucleotide
uguagccuauggugcuggu

SEQ ID NO: 343066 - RNA, 19 nt, Artificial Sequence
  Description of Artificial Sequence: Synthetic oligonucleotide
uucucccaguaguuccggu

SEQ ID NO: 343067 - RNA, 19 nt, Artificial Sequence
  Description of Artificial Sequence: Synthetic oligonucleotide
guccuacuugcccugcaga

SEQ ID NO: 343068 - RNA, 19 nt, Artificial Sequence
  Description of Artificial Sequence: Synthetic oligonucleotide
ucugacgcuggcgcucggc

SEQ ID NO: 343069 - RNA, 19 nt, Artificial Sequence
  Description of Artificial Sequence: Synthetic oligonucleotide
caugcaucggggagcccuc

SEQ ID NO: 343070 - RNA, 19 nt, Artificial Sequence
  Description of Artificial Sequence: Synthetic oligonucleotide
acaugcccggcaguggugu

SEQ ID NO: 343071 - RNA, 19 nt, Artificial Sequence
  Description of Artificial Sequence: Synthetic oligonucleotide
ucugcaccgguggcauucc

SEQ ID NO: 343072 - RNA, 19 nt, Artificial Sequence
  Description of Artificial Sequence: Synthetic oligonucleotide
ggucaccacgccaaacugc

SEQ ID NO: 343073 - RNA, 19 nt, Artificial Sequence
  Description of Artificial Sequence: Synthetic oligonucleotide
agucccagccuugggaaaa

SEQ ID NO: 343074 - RNA, 19 nt, Artificial Sequence
  Description of Artificial Sequence: Synthetic oligonucleotide
gugcuagacucaaggucag

SEQ ID NO: 343075 - RNA, 19 nt, Artificial Sequence
  Description of Artificial Sequence: Synthetic oligonucleotide
ucggccccgcaugugguug

SEQ ID NO: 343076 - RNA, 19 nt, Artificial Sequence
  Description of Artificial Sequence: Synthetic oligonucleotide
cuguuucaucccgcuuugg

SEQ ID NO: 343077 - RNA, 19 nt, Artificial Sequence
  Description of Artificial Sequence: Synthetic oligonucleotide
gccgcagaagaucugccca

SEQ ID NO: 343078 - RNA, 19 nt, Artificial Sequence
  Description of Artificial Sequence: Synthetic oligonucleotide
gacaugggagagggucaag

SEQ ID NO: 343079 - RNA, 19 nt, Artificial Sequence
  Description of Artificial Sequence: Synthetic oligonucleotide
gcgcuggauagccaacugc

SEQ ID NO: 343080 - RNA, 19 nt, Artificial Sequence
  Description of Artificial Sequence: Synthetic oligonucleotide
caucaccuccagagcguac

SEQ ID NO: 343081 - RNA, 19 nt, Artificial Sequence
  Description of Artificial Sequence: Synthetic oligonucleotide
gaaggguggucaugagacu

SEQ ID NO: 343082 - RNA, 19 nt, Artificial Sequence
  Description of Artificial Sequence: Synthetic oligonucleotide
caggaacugcucguggcuc

SEQ ID NO: 343083 - RNA, 19 nt, Artificial Sequence
  Description of Artificial Sequence: Synthetic oligonucleotide
acuugggcucguuccggaa

SEQ ID NO: 343084 - RNA, 19 nt, Artificial Sequence
  Description of Artificial Sequence: Synthetic oligonucleotide
gguggcauuccucggcauc

SEQ ID NO: 343085 - RNA, 19 nt, Artificial Sequence
  Description of Artificial Sequence: Synthetic oligonucleotide
cugggaggcucugcggagc

SEQ ID NO: 343086 - RNA, 19 nt, Artificial Sequence
  Description of Artificial Sequence: Synthetic oligonucleotide
ccgaacauuaacuuccacu

SEQ ID NO: 343087 - RNA, 19 nt, Artificial Sequence
  Description of Artificial Sequence: Synthetic oligonucleotide
gcacggcucacacacccgc

SEQ ID NO: 343088 - RNA, 19 nt, Artificial Sequence
  Description of Artificial Sequence: Synthetic oligonucleotide
caccgguggcauuccucgg

SEQ ID NO: 343089 - RNA, 19 nt, Artificial Sequence
  Description of Artificial Sequence: Synthetic oligonucleotide
cacaugcccggcaguggug

SEQ ID NO: 343090 - RNA, 19 nt, Artificial Sequence
  Description of Artificial Sequence: Synthetic oligonucleotide
gaacugcucguggcucucc

SEQ ID NO: 343091 - RNA, 19 nt, Artificial Sequence
  Description of Artificial Sequence: Synthetic oligonucleotide
aggguggucaugagacucu

SEQ ID NO: 343092 - RNA, 19 nt, Artificial Sequence
  Description of Artificial Sequence: Synthetic oligonucleotide
gguaccgagcaagcucagg

SEQ ID NO: 343093 - RNA, 19 nt, Artificial Sequence
  Description of Artificial Sequence: Synthetic oligonucleotide
ggaagagcacuugccgcag

SEQ ID NO: 343094 - RNA, 19 nt, Artificial Sequence
  Description of Artificial Sequence: Synthetic oligonucleotide
gugcguuguguauguugac

SEQ ID NO: 343095 - RNA, 19 nt, Artificial Sequence
  Description of Artificial Sequence: Synthetic oligonucleotide
agcacggcucacacacccg

SEQ ID NO: 343096 - RNA, 19 nt, Artificial Sequence
  Description of Artificial Sequence: Synthetic oligonucleotide
cagcacggcugagucauug

SEQ ID NO: 343097 - RNA, 19 nt, Artificial Sequence
  Description of Artificial Sequence: Synthetic oligonucleotide
agguccuacuugcccugca

SEQ ID NO: 343098 - RNA, 19 nt, Artificial Sequence
  Description of Artificial Sequence: Synthetic oligonucleotide
cuucugcgcuagcuggauc

SEQ ID NO: 343099 - RNA, 19 nt, Artificial Sequence
  Description of Artificial Sequence: Synthetic oligonucleotide
guagccuauggugcugguc

SEQ ID NO: 343100 - RNA, 19 nt, Artificial Sequence
  Description of Artificial Sequence: Synthetic oligonucleotide
cacuugccgcagaagaucu

SEQ ID NO: 343101 - RNA, 19 nt, Artificial Sequence
  Description of Artificial Sequence: Synthetic oligonucleotide
ugcucauagcacggcucac

SEQ ID NO: 343102 - RNA, 19 nt, Artificial Sequence
  Description of Artificial Sequence: Synthetic oligonucleotide
ggcucugccuuugggugcg

SEQ ID NO: 343103 - RNA, 19 nt, Artificial Sequence
  Description of Artificial Sequence: Synthetic oligonucleotide
ggagguacggacugagagu

SEQ ID NO: 343104 - RNA, 19 nt, Artificial Sequence
  Description of Artificial Sequence: Synthetic oligonucleotide
ugcuagacucaaggucagu

SEQ ID NO: 343105 - RNA, 19 nt, Artificial Sequence
  Description of Artificial Sequence: Synthetic oligonucleotide
agacucaaggucagucgaa

SEQ ID NO: 343106 - RNA, 19 nt, Artificial Sequence
  Description of Artificial Sequence: Synthetic oligonucleotide
ugcccacaugcccggcagu

SEQ ID NO: 343107 - RNA, 19 nt, Artificial Sequence
  Description of Artificial Sequence: Synthetic oligonucleotide
gcgcuagcuggaucugacg

SEQ ID NO: 343108 - RNA, 19 nt, Artificial Sequence
  Description of Artificial Sequence: Synthetic oligonucleotide
cuggugaaccguaguguua

SEQ ID NO: 343109 - RNA, 19 nt, Artificial Sequence
  Description of Artificial Sequence: Synthetic oligonucleotide
agcaaacauggcaucgcuu

SEQ ID NO: 343110 - RNA, 19 nt, Artificial Sequence
  Description of Artificial Sequence: Synthetic oligonucleotide
cccggcguagcuucucccg

SEQ ID NO: 343111 - RNA, 19 nt, Artificial Sequence
  Description of Artificial Sequence: Synthetic oligonucleotide
cugcgauguaggccugcug

SEQ ID NO: 343112 - RNA, 19 nt, Artificial Sequence
  Description of Artificial Sequence: Synthetic oligonucleotide
ugcuggcggucccugugua

SEQ ID NO: 343113 - RNA, 19 nt, Artificial Sequence
  Description of Artificial Sequence: Synthetic oligonucleotide
guuacucuggauggugagu

SEQ ID NO: 343114 - RNA, 19 nt, Artificial Sequence
  Description of Artificial Sequence: Synthetic oligonucleotide
cgaacauuaacuuccacuu

SEQ ID NO: 343115 - RNA, 19 nt, Artificial Sequence
  Description of Artificial Sequence: Synthetic oligonucleotide
ccugaaggcccucauagua

SEQ ID NO: 343116 - RNA, 19 nt, Artificial Sequence
  Description of Artificial Sequence: Synthetic oligonucleotide
ugcgggucaccacgccaaa

SEQ ID NO: 343117 - RNA, 19 nt, Artificial Sequence
  Description of Artificial Sequence: Synthetic oligonucleotide
ggaucaaagcagggaacca

SEQ ID NO: 343118 - RNA, 19 nt, Artificial Sequence
  Description of Artificial Sequence: Synthetic oligonucleotide
gacucaaggucagucgaau

SEQ ID NO: 343119 - RNA, 19 nt, Artificial Sequence
  Description of Artificial Sequence: Synthetic oligonucleotide
ucccgguguuccucucgca

SEQ ID NO: 343120 - RNA, 19 nt, Artificial Sequence
  Description of Artificial Sequence: Synthetic oligonucleotide
cgggcaucacguaucuggg

SEQ ID NO: 343121 - RNA, 19 nt, Artificial Sequence
  Description of Artificial Sequence: Synthetic oligonucleotide
guacaugggcugcugcccu

SEQ ID NO: 343122 - RNA, 19 nt, Artificial Sequence
  Description of Artificial Sequence: Synthetic oligonucleotide
cccgguguuccucucgcag

SEQ ID NO: 343123 - RNA, 19 nt, Artificial Sequence
  Description of Artificial Sequence: Synthetic oligonucleotide
gccacuggagggagguacg

SEQ ID NO: 343124 - RNA, 19 nt, Artificial Sequence
  Description of Artificial Sequence: Synthetic oligonucleotide
ucguuccggaaggcgugug

SEQ ID NO: 343125 - RNA, 19 nt, Artificial Sequence
  Description of Artificial Sequence: Synthetic oligonucleotide
aucugacgcuggcgcucgg

SEQ ID NO: 343126 - RNA, 19 nt, Artificial Sequence
  Description of Artificial Sequence: Synthetic oligonucleotide
acugcccggugcuggcggu

SEQ ID NO: 343127 - RNA, 19 nt, Artificial Sequence
  Description of Artificial Sequence: Synthetic oligonucleotide
ugaccgcauucugcagggc

SEQ ID NO: 343128 - RNA, 19 nt, Artificial Sequence
  Description of Artificial Sequence: Synthetic oligonucleotide
ccgguugagguaccgagca

SEQ ID NO: 343129 - RNA, 19 nt, Artificial Sequence
  Description of Artificial Sequence: Synthetic oligonucleotide
gcgguugacaaagguggug

SEQ ID NO: 343130 - RNA, 19 nt, Artificial Sequence
  Description of Artificial Sequence: Synthetic oligonucleotide
ugcuucggccccgcaugug

SEQ ID NO: 343131 - RNA, 19 nt, Artificial Sequence
  Description of Artificial Sequence: Synthetic oligonucleotide
caggagaauggagacuaua

SEQ ID NO: 343132 - RNA, 19 nt, Artificial Sequence
  Description of Artificial Sequence: Synthetic oligonucleotide
aucugggcgcgcaucugga

SEQ ID NO: 343133 - RNA, 19 nt, Artificial Sequence
  Description of Artificial Sequence: Synthetic oligonucleotide
cuuugggugcguuguguau

SEQ ID NO: 343134 - RNA, 19 nt, Artificial Sequence
  Description of Artificial Sequence: Synthetic oligonucleotide
cuuagagcuccucgggcau

SEQ ID NO: 343135 - RNA, 19 nt, Artificial Sequence
  Description of Artificial Sequence: Synthetic oligonucleotide
gcuggcggucccuguguag

SEQ ID NO: 343136 - RNA, 19 nt, Artificial Sequence
  Description of Artificial Sequence: Synthetic oligonucleotide
gggcauaaggcaaggggaa

SEQ ID NO: 343137 - RNA, 19 nt, Artificial Sequence
  Description of Artificial Sequence: Synthetic oligonucleotide
ggaucugacgcuggcgcuc

SEQ ID NO: 343138 - RNA, 19 nt, Artificial Sequence
  Description of Artificial Sequence: Synthetic oligonucleotide
ccggcguagcuucucccgg

SEQ ID NO: 343139 - RNA, 19 nt, Artificial Sequence
  Description of Artificial Sequence: Synthetic oligonucleotide
gcuggucuguggaggcugg

SEQ ID NO: 343140 - RNA, 19 nt, Artificial Sequence
  Description of Artificial Sequence: Synthetic oligonucleotide
uucggccccgcaugugguu

SEQ ID NO: 343141 - RNA, 19 nt, Artificial Sequence
  Description of Artificial Sequence: Synthetic oligonucleotide
cguggggcucuuccgagcc

SEQ ID NO: 343142 - RNA, 19 nt, Artificial Sequence
  Description of Artificial Sequence: Synthetic oligonucleotide
gggcucguuccggaaggcg

SEQ ID NO: 343143 - RNA, 19 nt, Artificial Sequence
  Description of Artificial Sequence: Synthetic oligonucleotide
caaugccgaacuuggggau

SEQ ID NO: 343144 - RNA, 19 nt, Artificial Sequence
  Description of Artificial Sequence: Synthetic oligonucleotide
cacggcucacacacccgca

SEQ ID NO: 343145 - RNA, 19 nt, Artificial Sequence
  Description of Artificial Sequence: Synthetic oligonucleotide
caggcgcaucugccguucc

SEQ ID NO: 343146 - RNA, 19 nt, Artificial Sequence
  Description of Artificial Sequence: Synthetic oligonucleotide
auggcuacuuagacacaua

SEQ ID NO: 343147 - RNA, 19 nt, Artificial Sequence
  Description of Artificial Sequence: Synthetic oligonucleotide
ggacugucuggccacaguu

SEQ ID NO: 343148 - RNA, 19 nt, Artificial Sequence
  Description of Artificial Sequence: Synthetic oligonucleotide
ggagacuauagggcaguaa

SEQ ID NO: 343149 - RNA, 19 nt, Artificial Sequence
  Description of Artificial Sequence: Synthetic oligonucleotide
ggaauacaggcuacuggcu

SEQ ID NO: 343150 - RNA, 19 nt, Artificial Sequence
  Description of Artificial Sequence: Synthetic oligonucleotide
gggcgguaugccccucucc

SEQ ID NO: 343151 - RNA, 19 nt, Artificial Sequence
  Description of Artificial Sequence: Synthetic oligonucleotide
cccucuacugagccugcug

SEQ ID NO: 343152 - RNA, 19 nt, Artificial Sequence
  Description of Artificial Sequence: Synthetic oligonucleotide
agguaccgagcaagcucag

SEQ ID NO: 343153 - RNA, 19 nt, Artificial Sequence
  Description of Artificial Sequence: Synthetic oligonucleotide
cucucgcagggcacuuaga

SEQ ID NO: 343154 - RNA, 19 nt, Artificial Sequence
  Description of Artificial Sequence: Synthetic oligonucleotide
cccggcagugguguuugcg

SEQ ID NO: 343155 - RNA, 19 nt, Artificial Sequence
  Description of Artificial Sequence: Synthetic oligonucleotide
cugcgggugcaugguguug

SEQ ID NO: 343156 - RNA, 19 nt, Artificial Sequence
  Description of Artificial Sequence: Synthetic oligonucleotide
ggcaaggggaaggcgggca

SEQ ID NO: 343157 - RNA, 19 nt, Artificial Sequence
  Description of Artificial Sequence: Synthetic oligonucleotide
agguacggacugagagucu

SEQ ID NO: 343158 - RNA, 19 nt, Artificial Sequence
  Description of Artificial Sequence: Synthetic oligonucleotide
cgaaugagaugagcugggc

SEQ ID NO: 343159 - RNA, 19 nt, Artificial Sequence
  Description of Artificial Sequence: Synthetic oligonucleotide
caucggggagcccucuacu

SEQ ID NO: 343160 - RNA, 19 nt, Artificial Sequence
  Description of Artificial Sequence: Synthetic oligonucleotide
gguguuccucucgcagggc

SEQ ID NO: 343161 - RNA, 19 nt, Artificial Sequence
  Description of Artificial Sequence: Synthetic oligonucleotide
gcuggcuggcucauauaca

SEQ ID NO: 343162 - RNA, 19 nt, Artificial Sequence
  Description of Artificial Sequence: Synthetic oligonucleotide
uccucucgcagggcacuua

SEQ ID NO: 343163 - RNA, 19 nt, Artificial Sequence
  Description of Artificial Sequence: Synthetic oligonucleotide
cguuccggaaggcgugugc

SEQ ID NO: 343164 - RNA, 19 nt, Artificial Sequence
  Description of Artificial Sequence: Synthetic oligonucleotide
ggguacauguaggcacuga

SEQ ID NO: 343165 - RNA, 19 nt, Artificial Sequence
  Description of Artificial Sequence: Synthetic oligonucleotide
augcaucggggagcccucu

SEQ ID NO: 343166 - RNA, 19 nt, Artificial Sequence
  Description of Artificial Sequence: Synthetic oligonucleotide
ggacaugggagagggucaa

SEQ ID NO: 343167 - RNA, 19 nt, Artificial Sequence
  Description of Artificial Sequence: Synthetic oligonucleotide
gguacguguccuggaccac

SEQ ID NO: 343168 - RNA, 19 nt, Artificial Sequence
  Description of Artificial Sequence: Synthetic oligonucleotide
cugggcuucacugcccggu

SEQ ID NO: 343169 - RNA, 19 nt, Artificial Sequence
  Description of Artificial Sequence: Synthetic oligonucleotide
accaugcuguuggggcggu

SEQ ID NO: 343170 - RNA, 19 nt, Artificial Sequence
  Description of Artificial Sequence: Synthetic oligonucleotide
gcacggcugagucauuggu

SEQ ID NO: 343171 - RNA, 19 nt, Artificial Sequence
  Description of Artificial Sequence: Synthetic oligonucleotide
gcgcaucugccguuccuuc

SEQ ID NO: 343172 - RNA, 19 nt, Artificial Sequence
  Description of Artificial Sequence: Synthetic oligonucleotide
cugcgcuagcuggaucuga

SEQ ID NO: 343173 - RNA, 19 nt, Artificial Sequence
  Description of Artificial Sequence: Synthetic oligonucleotide
augcccggcagugguguuu

SEQ ID NO: 343174 - RNA, 19 nt, Artificial Sequence
  Description of Artificial Sequence: Synthetic oligonucleotide
cuucggccccgcauguggu

SEQ ID NO: 343175 - RNA, 19 nt, Artificial Sequence
  Description of Artificial Sequence: Synthetic oligonucleotide
ccccgccugggccuguggg

SEQ ID NO: 343176 - RNA, 19 nt, Artificial Sequence
  Description of Artificial Sequence: Synthetic oligonucleotide
ggggagcccucuacugagc

SEQ ID NO: 343177 - RNA, 19 nt, Artificial Sequence
  Description of Artificial Sequence: Synthetic oligonucleotide
ggcuacuuagacacauaau

SEQ ID NO: 343178 - RNA, 19 nt, Artificial Sequence
  Description of Artificial Sequence: Synthetic oligonucleotide
guacggacugagagucugu

SEQ ID NO: 343179 - RNA, 19 nt, Artificial Sequence
  Description of Artificial Sequence: Synthetic oligonucleotide
ggaucuuguuccgaacauu

SEQ ID NO: 343180 - RNA, 19 nt, Artificial Sequence
  Description of Artificial Sequence: Synthetic oligonucleotide
ggggcgguaugccccucuc

SEQ ID NO: 343181 - RNA, 19 nt, Artificial Sequence
  Description of Artificial Sequence: Synthetic oligonucleotide
gcauguuguacggcuggua

SEQ ID NO: 343182 - RNA, 19 nt, Artificial Sequence
  Description of Artificial Sequence: Synthetic oligonucleotide
ugggugcguuguguauguu

SEQ ID NO: 343183 - RNA, 19 nt, Artificial Sequence
  Description of Artificial Sequence: Synthetic oligonucleotide
cgcgcaucuggaccgucug

SEQ ID NO: 343184 - RNA, 19 nt, Artificial Sequence
  Description of Artificial Sequence: Synthetic oligonucleotide
ggugaaccguaguguuacu

SEQ ID NO: 343185 - RNA, 19 nt, Artificial Sequence
  Description of Artificial Sequence: Synthetic oligonucleotide
ccgguggcauuccucggca

SEQ ID NO: 343186 - RNA, 19 nt, Artificial Sequence
  Description of Artificial Sequence: Synthetic oligonucleotide
gcaaggggaaggcgggcau

SEQ ID NO: 343187 - RNA, 19 nt, Artificial Sequence
  Description of Artificial Sequence: Synthetic oligonucleotide
cugcccggugcuggcgguc

SEQ ID NO: 343188 - RNA, 19 nt, Artificial Sequence
  Description of Artificial Sequence: Synthetic oligonucleotide
gcgggucaccacgccaaac

SEQ ID NO: 343189 - RNA, 19 nt, Artificial Sequence
  Description of Artificial Sequence: Synthetic oligonucleotide
cucguuccggaaggcgugu

SEQ ID NO: 343190 - RNA, 19 nt, Artificial Sequence
  Description of Artificial Sequence: Synthetic oligonucleotide
gcagauggcguggggcucu

SEQ ID NO: 343191 - RNA, 19 nt, Artificial Sequence
  Description of Artificial Sequence: Synthetic oligonucleotide
cacguaucugggccagcuu

SEQ ID NO: 343192 - RNA, 19 nt, Artificial Sequence
  Description of Artificial Sequence: Synthetic oligonucleotide
gcaugugguugcucuucau

SEQ ID NO: 343193 - RNA, 19 nt, Artificial Sequence
  Description of Artificial Sequence: Synthetic oligonucleotide
cggaaggcgugugcccagg

SEQ ID NO: 343194 - RNA, 19 nt, Artificial Sequence
  Description of Artificial Sequence: Synthetic oligonucleotide
cccugcgauguaggccugc

SEQ ID NO: 343195 - RNA, 19 nt, Artificial Sequence
  Description of Artificial Sequence: Synthetic oligonucleotide
cgcccggcguagcuucucc

SEQ ID NO: 343196 - RNA, 19 nt, Artificial Sequence
  Description of Artificial Sequence: Synthetic oligonucleotide
gcguagcuucucccggugu

SEQ ID NO: 343197 - RNA, 19 nt, Artificial Sequence
  Description of Artificial Sequence: Synthetic oligonucleotide
gcucacuaaaggggccacu

SEQ ID NO: 343198 - RNA, 19 nt, Artificial Sequence
  Description of Artificial Sequence: Synthetic oligonucleotide
gcgcaucuggaccgucugu

SEQ ID NO: 343199 - RNA, 19 nt, Artificial Sequence
  Description of Artificial Sequence: Synthetic oligonucleotide
ggcgcaucugccguuccuu

SEQ ID NO: 343200 - RNA, 19 nt, Artificial Sequence
  Description of Artificial Sequence: Synthetic oligonucleotide
gccuauggugcuggucugu

SEQ ID NO: 343201 - RNA, 19 nt, Artificial Sequence
  Description of Artificial Sequence: Synthetic oligonucleotide
cugcaccgguggcauuccu

SEQ ID NO: 343202 - RNA, 19 nt, Artificial Sequence
  Description of Artificial Sequence: Synthetic oligonucleotide
cgggugcaugguguugaug

SEQ ID NO: 343203 - RNA, 19 nt, Artificial Sequence
  Description of Artificial Sequence: Synthetic oligonucleotide
caugcccggcagugguguu

SEQ ID NO: 343204 - RNA, 19 nt, Artificial Sequence
  Description of Artificial Sequence: Synthetic oligonucleotide
ggcgcgcaucuggaccguc

SEQ ID NO: 343205 - RNA, 19 nt, Artificial Sequence
  Description of Artificial Sequence: Synthetic oligonucleotide
ccguaguguuacucuggau

SEQ ID NO: 343206 - RNA, 19 nt, Artificial Sequence
  Description of Artificial Sequence: Synthetic oligonucleotide
gcgcgcaucuggaccgucu

SEQ ID NO: 343207 - RNA, 19 nt, Artificial Sequence
  Description of Artificial Sequence: Synthetic oligonucleotide
ggguuggagugggcuggua

SEQ ID NO: 343208 - RNA, 19 nt, Artificial Sequence
  Description of Artificial Sequence: Synthetic oligonucleotide
ggcgggcaucugggcgcgc

SEQ ID NO: 343209 - RNA, 19 nt, Artificial Sequence
  Description of Artificial Sequence: Synthetic oligonucleotide
cggcguagcuucucccggu

SEQ ID NO: 343210 - RNA, 19 nt, Artificial Sequence
  Description of Artificial Sequence: Synthetic oligonucleotide
ggccccgcaugugguugcu

SEQ ID NO: 343211 - RNA, 19 nt, Artificial Sequence
  Description of Artificial Sequence: Synthetic oligonucleotide
cagccgcccggcguagcuu

SEQ ID NO: 343212 - RNA, 19 nt, Artificial Sequence
  Description of Artificial Sequence: Synthetic oligonucleotide
ccgcauucugcagggccuu

SEQ ID NO: 343213 - RNA, 19 nt, Artificial Sequence
  Description of Artificial Sequence: Synthetic oligonucleotide
ccaugcuguuggggcggua

SEQ ID NO: 343214 - RNA, 19 nt, Artificial Sequence
  Description of Artificial Sequence: Synthetic oligonucleotide
gccgcccggcguagcuucu

SEQ ID NO: 343215 - RNA, 19 nt, Artificial Sequence
  Description of Artificial Sequence: Synthetic oligonucleotide
aauacuucauacuguaucc

SEQ ID NO: 343216 - RNA, 19 nt, Artificial Sequence
  Description of Artificial Sequence: Synthetic oligonucleotide
aaaacagagacacuccaag

SEQ ID NO: 343217 - RNA, 19 nt, Artificial Sequence
  Description of Artificial Sequence: Synthetic oligonucleotide
aauacuaauacuggcauug

SEQ ID NO: 343218 - RNA, 19 nt, Artificial Sequence
  Description of Artificial Sequence: Synthetic oligonucleotide
auaaauaccauuugguuca

SEQ ID NO: 343219 - RNA, 19 nt, Artificial Sequence
  Description of Artificial Sequence: Synthetic oligonucleotide
uucuccacuacucagaacu

SEQ ID NO: 343220 - RNA, 19 nt, Artificial Sequence
  Description of Artificial Sequence: Synthetic oligonucleotide
cuugauguguuucugaccc

SEQ ID NO: 343221 - RNA, 19 nt, Artificial Sequence
  Description of Artificial Sequence: Synthetic oligonucleotide
aaucugacccaagugauac

SEQ ID NO: 343222 - RNA, 19 nt, Artificial Sequence
  Description of Artificial Sequence: Synthetic oligonucleotide
ucuauuuucaggcuccggc

SEQ ID NO: 343223 - RNA, 19 nt, Artificial Sequence
  Description of Artificial Sequence: Synthetic oligonucleotide
uucaacaacaaaucaaugu

SEQ ID NO: 343224 - RNA, 19 nt, Artificial Sequence
  Description of Artificial Sequence: Synthetic oligonucleotide
uauuaggcgaucaggagcc

SEQ ID NO: 343225 - RNA, 19 nt, Artificial Sequence
  Description of Artificial Sequence: Synthetic oligonucleotide
agugauaccagggauaauc

SEQ ID NO: 343226 - RNA, 19 nt, Artificial Sequence
  Description of Artificial Sequence: Synthetic oligonucleotide
aagaauacggaaggaaaac

SEQ ID NO: 343227 - RNA, 19 nt, Artificial Sequence
  Description of Artificial Sequence: Synthetic oligonucleotide
ucaaaucacuuucacaaca

SEQ ID NO: 343228 - RNA, 19 nt, Artificial Sequence
  Description of Artificial Sequence: Synthetic oligonucleotide
aaagaucuaguagaaguuc

SEQ ID NO: 343229 - RNA, 19 nt, Artificial Sequence
  Description of Artificial Sequence: Synthetic oligonucleotide
auuaugaccuucuuuguug

SEQ ID NO: 343230 - RNA, 19 nt, Artificial Sequence
  Description of Artificial Sequence: Synthetic oligonucleotide
aaagauuucaguaaagauu

SEQ ID NO: 343231 - RNA, 19 nt, Artificial Sequence
  Description of Artificial Sequence: Synthetic oligonucleotide
aaagguacuguccugcccu

SEQ ID NO: 343232 - RNA, 19 nt, Artificial Sequence
  Description of Artificial Sequence: Synthetic oligonucleotide
cacuucaauacuaauacug

SEQ ID NO: 343233 - RNA, 19 nt, Artificial Sequence
  Description of Artificial Sequence: Synthetic oligonucleotide
uguagaugcgaauaggggu

SEQ ID NO: 343234 - RNA, 19 nt, Artificial Sequence
  Description of Artificial Sequence: Synthetic oligonucleotide
ucguuuauguuaaaugcug

SEQ ID NO: 343235 - RNA, 19 nt, Artificial Sequence
  Description of Artificial Sequence: Synthetic oligonucleotide
uguaauguucgcaaagggu

SEQ ID NO: 343236 - RNA, 19 nt, Artificial Sequence
  Description of Artificial Sequence: Synthetic oligonucleotide
uuauugacugccagcaaag

SEQ ID NO: 343237 - RNA, 19 nt, Artificial Sequence
  Description of Artificial Sequence: Synthetic oligonucleotide
uuaaaaucugucagcacac

SEQ ID NO: 343238 - RNA, 19 nt, Artificial Sequence
  Description of Artificial Sequence: Synthetic oligonucleotide
acuacuuaaggcuauacua

SEQ ID NO: 343239 - RNA, 19 nt, Artificial Sequence
  Description of Artificial Sequence: Synthetic oligonucleotide
ugcagcaguaguuuagagg

SEQ ID NO: 343240 - RNA, 19 nt, Artificial Sequence
  Description of Artificial Sequence: Synthetic oligonucleotide
guucgcaaaggguacaugg

SEQ ID NO: 343241 - RNA, 19 nt, Artificial Sequence
  Description of Artificial Sequence: Synthetic oligonucleotide
uuugcuaccggcaggcucc

SEQ ID NO: 343242 - RNA, 19 nt, Artificial Sequence
  Description of Artificial Sequence: Synthetic oligonucleotide
aaggucuaggguucuguac

SEQ ID NO: 343243 - RNA, 19 nt, Artificial Sequence
  Description of Artificial Sequence: Synthetic oligonucleotide
agaauacggaaggaaaacc

SEQ ID NO: 343244 - RNA, 19 nt, Artificial Sequence
  Description of Artificial Sequence: Synthetic oligonucleotide
uguuaaggucuccaggaag

SEQ ID NO: 343245 - RNA, 19 nt, Artificial Sequence
  Description of Artificial Sequence: Synthetic oligonucleotide
aucuaguagaaguucaucu

SEQ ID NO: 343246 - RNA, 19 nt, Artificial Sequence
  Description of Artificial Sequence: Synthetic oligonucleotide
ucaauacuaauacuggcau

SEQ ID NO: 343247 - RNA, 19 nt, Artificial Sequence
  Description of Artificial Sequence: Synthetic oligonucleotide
ucauacuguauccacuuca

SEQ ID NO: 343248 - RNA, 19 nt, Artificial Sequence
  Description of Artificial Sequence: Synthetic oligonucleotide
aaugugugggaagaauacg

SEQ ID NO: 343249 - RNA, 19 nt, Artificial Sequence
  Description of Artificial Sequence: Synthetic oligonucleotide
auuacucaggcuuccacag

SEQ ID NO: 343250 - RNA, 19 nt, Artificial Sequence
  Description of Artificial Sequence: Synthetic oligonucleotide
cuacuuaaggcuauacuac

SEQ ID NO: 343251 - RNA, 19 nt, Artificial Sequence
  Description of Artificial Sequence: Synthetic oligonucleotide
auaccauuugguucauccc

SEQ ID NO: 343252 - RNA, 19 nt, Artificial Sequence
  Description of Artificial Sequence: Synthetic oligonucleotide
uguguaucggggcugaccu

SEQ ID NO: 343253 - RNA, 19 nt, Artificial Sequence
  Description of Artificial Sequence: Synthetic oligonucleotide
aguaaagauucucaaggca

SEQ ID NO: 343254 - RNA, 19 nt, Artificial Sequence
  Description of Artificial Sequence: Synthetic oligonucleotide
aguucuauguguaucgggg

SEQ ID NO: 343255 - RNA, 19 nt, Artificial Sequence
  Description of Artificial Sequence: Synthetic oligonucleotide
aagggaaucucucaguaua

SEQ ID NO: 343256 - RNA, 19 nt, Artificial Sequence
  Description of Artificial Sequence: Synthetic oligonucleotide
gcuacaaacaggaagaggc

SEQ ID NO: 343257 - RNA, 19 nt, Artificial Sequence
  Description of Artificial Sequence: Synthetic oligonucleotide
uguauuaggcgaucaggag

SEQ ID NO: 343258 - RNA, 19 nt, Artificial Sequence
  Description of Artificial Sequence: Synthetic oligonucleotide
auaucaccaguccagaggu

SEQ ID NO: 343259 - RNA, 19 nt, Artificial Sequence
  Description of Artificial Sequence: Synthetic oligonucleotide
acuucaauacuaauacugg

SEQ ID NO: 343260 - RNA, 19 nt, Artificial Sequence
  Description of Artificial Sequence: Synthetic oligonucleotide
agaguauuuaaaaucuguc

SEQ ID NO: 343261 - RNA, 19 nt, Artificial Sequence
  Description of Artificial Sequence: Synthetic oligonucleotide
agcaagaguuguuugagca

SEQ ID NO: 343262 - RNA, 19 nt, Artificial Sequence
  Description of Artificial Sequence: Synthetic oligonucleotide
aagaauguaguuucugguu

SEQ ID NO: 343263 - RNA, 19 nt, Artificial Sequence
  Description of Artificial Sequence: Synthetic oligonucleotide
aguuuugcuaccggcaggc

SEQ ID NO: 343264 - RNA, 19 nt, Artificial Sequence
  Description of Artificial Sequence: Synthetic oligonucleotide
aauuaugaccuucuuuguu

SEQ ID NO: 343265 - RNA, 19 nt, Artificial Sequence
  Description of Artificial Sequence: Synthetic oligonucleotide
uauacuacacuacgggauc

SEQ ID NO: 343266 - RNA, 19 nt, Artificial Sequence
  Description of Artificial Sequence: Synthetic oligonucleotide
ucuaagaugaagccucaaa

SEQ ID NO: 343267 - RNA, 19 nt, Artificial Sequence
  Description of Artificial Sequence: Synthetic oligonucleotide
aguauagggaguggagucc

SEQ ID NO: 343268 - RNA, 19 nt, Artificial Sequence
  Description of Artificial Sequence: Synthetic oligonucleotide
uucuaaugcugcaauuaug

SEQ ID NO: 343269 - RNA, 19 nt, Artificial Sequence
  Description of Artificial Sequence: Synthetic oligonucleotide
agauuuucccucuacuacu

SEQ ID NO: 343270 - RNA, 19 nt, Artificial Sequence
  Description of Artificial Sequence: Synthetic oligonucleotide
auugucacccaugagaggu

SEQ ID NO: 343271 - RNA, 19 nt, Artificial Sequence
  Description of Artificial Sequence: Synthetic oligonucleotide
aaucagguucagaggaagc

SEQ ID NO: 343272 - RNA, 19 nt, Artificial Sequence
  Description of Artificial Sequence: Synthetic oligonucleotide
ugauaccagggauaaucgg

SEQ ID NO: 343273 - RNA, 19 nt, Artificial Sequence
  Description of Artificial Sequence: Synthetic oligonucleotide
ucaaugugugggaagaaua

SEQ ID NO: 343274 - RNA, 19 nt, Artificial Sequence
  Description of Artificial Sequence: Synthetic oligonucleotide
cuauuuucaggcuccggcc

SEQ ID NO: 343275 - RNA, 19 nt, Artificial Sequence
  Description of Artificial Sequence: Synthetic oligonucleotide
uaguucuauguguaucggg

SEQ ID NO: 343276 - RNA, 19 nt, Artificial Sequence
  Description of Artificial Sequence: Synthetic oligonucleotide
uaguuuagaggagaaagcu

SEQ ID NO: 343277 - RNA, 19 nt, Artificial Sequence
  Description of Artificial Sequence: Synthetic oligonucleotide
cuguagaugcgaauagggg

SEQ ID NO: 343278 - RNA, 19 nt, Artificial Sequence
  Description of Artificial Sequence: Synthetic oligonucleotide
uacuacuuaaggcuauacu

SEQ ID NO: 343279 - RNA, 19 nt, Artificial Sequence
  Description of Artificial Sequence: Synthetic oligonucleotide
  modified_base (6)..(6): a, c, u, g, unknown or other
accuunuccggcugauucc

SEQ ID NO: 343280 - RNA, 19 nt, Artificial Sequence
  Description of Artificial Sequence: Synthetic oligonucleotide
augaaaguaaguuuccaua

SEQ ID NO: 343281 - RNA, 19 nt, Artificial Sequence
  Description of Artificial Sequence: Synthetic oligonucleotide
  modified_base (7)..(7): a, c, u, g, unknown or other
gaccuunuccggcugauuc

SEQ ID NO: 343282 - RNA, 19 nt, Artificial Sequence
  Description of Artificial Sequence: Synthetic oligonucleotide
uacacuacgggauccuacc

SEQ ID NO: 343283 - RNA, 19 nt, Artificial Sequence
  Description of Artificial Sequence: Synthetic oligonucleotide
uacuaauacuggcauuggc

SEQ ID NO: 343284 - RNA, 19 nt, Artificial Sequence
  Description of Artificial Sequence: Synthetic oligonucleotide
ucgcaaaggguacauggcc

SEQ ID NO: 343285 - RNA, 19 nt, Artificial Sequence
  Description of Artificial Sequence: Synthetic oligonucleotide
auagggguccuguauuagg

SEQ ID NO: 343286 - RNA, 19 nt, Artificial Sequence
  Description of Artificial Sequence: Synthetic oligonucleotide
ggaaucucucaguauaggg

SEQ ID NO: 343287 - RNA, 19 nt, Artificial Sequence
  Description of Artificial Sequence: Synthetic oligonucleotide
gaggugauccaacacaaga

SEQ ID NO: 343288 - RNA, 19 nt, Artificial Sequence
  Description of Artificial Sequence: Synthetic oligonucleotide
uaauguucgcaaaggguac

SEQ ID NO: 343289 - RNA, 19 nt, Artificial Sequence
  Description of Artificial Sequence: Synthetic oligonucleotide
ggcuauacuacacuacggg

SEQ ID NO: 343290 - RNA, 19 nt, Artificial Sequence
  Description of Artificial Sequence: Synthetic oligonucleotide
aggaagagacauuucuaag

SEQ ID NO: 343291 - RNA, 19 nt, Artificial Sequence
  Description of Artificial Sequence: Synthetic oligonucleotide
uuaaggcuauacuacacua

SEQ ID NO: 343292 - RNA, 19 nt, Artificial Sequence
  Description of Artificial Sequence: Synthetic oligonucleotide
caaugugugggaagaauac

SEQ ID NO: 343293 - RNA, 19 nt, Artificial Sequence
  Description of Artificial Sequence: Synthetic oligonucleotide
guuuagaggagaaagcuga

SEQ ID NO: 343294 - RNA, 19 nt, Artificial Sequence
  Description of Artificial Sequence: Synthetic oligonucleotide
augagaggugauccaacac

SEQ ID NO: 343295 - RNA, 19 nt, Artificial Sequence
  Description of Artificial Sequence: Synthetic oligonucleotide
ggauaaucggccaagaaac

SEQ ID NO: 343296 - RNA, 19 nt, Artificial Sequence
  Description of Artificial Sequence: Synthetic oligonucleotide
cacugaugcaaacacggcc

SEQ ID NO: 343297 - RNA, 19 nt, Artificial Sequence
  Description of Artificial Sequence: Synthetic oligonucleotide
gagagaggauuacucaggc

SEQ ID NO: 343298 - RNA, 19 nt, Artificial Sequence
  Description of Artificial Sequence: Synthetic oligonucleotide
uucgcaaaggguacauggc

SEQ ID NO: 343299 - RNA, 19 nt, Artificial Sequence
  Description of Artificial Sequence: Synthetic oligonucleotide
ugugugggaagaauacgga

SEQ ID NO: 343300 - RNA, 19 nt, Artificial Sequence
  Description of Artificial Sequence: Synthetic oligonucleotide
uucuauguguaucggggcu

SEQ ID NO: 343301 - RNA, 19 nt, Artificial Sequence
  Description of Artificial Sequence: Synthetic oligonucleotide
ucuaguagaaguucaucuu

SEQ ID NO: 343302 - RNA, 19 nt, Artificial Sequence
  Description of Artificial Sequence: Synthetic oligonucleotide
aagguaugcugccuuacau

SEQ ID NO: 343303 - RNA, 19 nt, Artificial Sequence
  Description of Artificial Sequence: Synthetic oligonucleotide
  modified_base (3)..(3): a, c, u, g, unknown or other
uunuccggcugauuccuag

SEQ ID NO: 343304 - RNA, 19 nt, Artificial Sequence
  Description of Artificial Sequence: Synthetic oligonucleotide
agaauguaguuucugguua

SEQ ID NO: 343305 - RNA, 19 nt, Artificial Sequence
  Description of Artificial Sequence: Synthetic oligonucleotide
aagaucuaguagaaguuca

SEQ ID NO: 343306 - RNA, 19 nt, Artificial Sequence
  Description of Artificial Sequence: Synthetic oligonucleotide
uuaugaccuucuuuguuga

SEQ ID NO: 343307 - RNA, 19 nt, Artificial Sequence
  Description of Artificial Sequence: Synthetic oligonucleotide
gaauacggaaggaaaacca

SEQ ID NO: 343308 - RNA, 19 nt, Artificial Sequence
  Description of Artificial Sequence: Synthetic oligonucleotide
ucuaggguucuguacauua

SEQ ID NO: 343309 - RNA, 19 nt, Artificial Sequence
  Description of Artificial Sequence: Synthetic oligonucleotide
ccaaucaaagaccagaguc

SEQ ID NO: 343310 - RNA, 19 nt, Artificial Sequence
  Description of Artificial Sequence: Synthetic oligonucleotide
aggugauccaacacaagac

SEQ ID NO: 343311 - RNA, 19 nt, Artificial Sequence
  Description of Artificial Sequence: Synthetic oligonucleotide
aggucuaggguucuguaca

SEQ ID NO: 343312 - RNA, 19 nt, Artificial Sequence
  Description of Artificial Sequence: Synthetic oligonucleotide
uacuugccauuauugacug

SEQ ID NO: 343313 - RNA, 19 nt, Artificial Sequence
  Description of Artificial Sequence: Synthetic oligonucleotide
aggaugguaguucuaugug

SEQ ID NO: 343314 - RNA, 19 nt, Artificial Sequence
  Description of Artificial Sequence: Synthetic oligonucleotide
guaguuuagaggagaaagc

SEQ ID NO: 343315 - RNA, 19 nt, Artificial Sequence
  Description of Artificial Sequence: Synthetic oligonucleotide
gaaucucucaguauaggga

SEQ ID NO: 343316 - RNA, 19 nt, Artificial Sequence
  Description of Artificial Sequence: Synthetic oligonucleotide
  modified_base (14)..(14): a, c, u, g, unknown or other
gugggaugaccuunuccgg

SEQ ID NO: 343317 - RNA, 19 nt, Artificial Sequence
  Description of Artificial Sequence: Synthetic oligonucleotide
uccuguauuaggcgaucag

SEQ ID NO: 343318 - RNA, 19 nt, Artificial Sequence
  Description of Artificial Sequence: Synthetic oligonucleotide
cagagacacuccaagggcc

SEQ ID NO: 343319 - RNA, 19 nt, Artificial Sequence
  Description of Artificial Sequence: Synthetic oligonucleotide
aguucugagagaggauuac

SEQ ID NO: 343320 - RNA, 19 nt, Artificial Sequence
  Description of Artificial Sequence: Synthetic oligonucleotide
cauuaugcagagcuguauc

SEQ ID NO: 343321 - RNA, 19 nt, Artificial Sequence
  Description of Artificial Sequence: Synthetic oligonucleotide
caaccacugaugcaaacac

SEQ ID NO: 343322 - RNA, 19 nt, Artificial Sequence
  Description of Artificial Sequence: Synthetic oligonucleotide
uuugcaaacuggacacacu

SEQ ID NO: 343323 - RNA, 19 nt, Artificial Sequence
  Description of Artificial Sequence: Synthetic oligonucleotide
aaucggccaagaaaccagg

SEQ ID NO: 343324 - RNA, 19 nt, Artificial Sequence
  Description of Artificial Sequence: Synthetic oligonucleotide
uuuugcuaccggcaggcuc

SEQ ID NO: 343325 - RNA, 19 nt, Artificial Sequence
  Description of Artificial Sequence: Synthetic oligonucleotide
auugacugccagcaaagau

SEQ ID NO: 343326 - RNA, 19 nt, Artificial Sequence
  Description of Artificial Sequence: Synthetic oligonucleotide
uuccuagcuuugcaaacug

SEQ ID NO: 343327 - RNA, 19 nt, Artificial Sequence
  Description of Artificial Sequence: Synthetic oligonucleotide
gugauaccagggauaaucg

SEQ ID NO: 343328 - RNA, 19 nt, Artificial Sequence
  Description of Artificial Sequence: Synthetic oligonucleotide
guagaugguucaaaugcag

SEQ ID NO: 343329 - RNA, 19 nt, Artificial Sequence
  Description of Artificial Sequence: Synthetic oligonucleotide
uacgggauccuaccaauuc

SEQ ID NO: 343330 - RNA, 19 nt, Artificial Sequence
  Description of Artificial Sequence: Synthetic oligonucleotide
auguguaucggggcugacc

SEQ ID NO: 343331 - RNA, 19 nt, Artificial Sequence
  Description of Artificial Sequence: Synthetic oligonucleotide
gauaaucggccaagaaacc

SEQ ID NO: 343332 - RNA, 19 nt, Artificial Sequence
  Description of Artificial Sequence: Synthetic oligonucleotide
ucuuaccagcuguauuugc

SEQ ID NO: 343333 - RNA, 19 nt, Artificial Sequence
  Description of Artificial Sequence: Synthetic oligonucleotide
uccuacucaauacuucaua

SEQ ID NO: 343334 - RNA, 19 nt, Artificial Sequence
  Description of Artificial Sequence: Synthetic oligonucleotide
ucgagggccccuuacuugc

SEQ ID NO: 343335 - RNA, 19 nt, Artificial Sequence
  Description of Artificial Sequence: Synthetic oligonucleotide
guucuauguguaucggggc

SEQ ID NO: 343336 - RNA, 19 nt, Artificial Sequence
  Description of Artificial Sequence: Synthetic oligonucleotide
agagacacuccaagggccc

SEQ ID NO: 343337 - RNA, 19 nt, Artificial Sequence
  Description of Artificial Sequence: Synthetic oligonucleotide
ucuguuagguucuggucuc

SEQ ID NO: 343338 - RNA, 19 nt, Artificial Sequence
  Description of Artificial Sequence: Synthetic oligonucleotide
uguaucggggcugaccuga

SEQ ID NO: 343339 - RNA, 19 nt, Artificial Sequence
  Description of Artificial Sequence: Synthetic oligonucleotide
acugaugcaaacacggcca

SEQ ID NO: 343340 - RNA, 19 nt, Artificial Sequence
  Description of Artificial Sequence: Synthetic oligonucleotide
auaaucggccaagaaacca

SEQ ID NO: 343341 - RNA, 19 nt, Artificial Sequence
  Description of Artificial Sequence: Synthetic oligonucleotide
uuguuugagcaggugaacu

SEQ ID NO: 343342 - RNA, 19 nt, Artificial Sequence
  Description of Artificial Sequence: Synthetic oligonucleotide
ucuauguguaucggggcug

SEQ ID NO: 343343 - RNA, 19 nt, Artificial Sequence
  Description of Artificial Sequence: Synthetic oligonucleotide
gauccuaccaauucucccu

SEQ ID NO: 343344 - RNA, 19 nt, Artificial Sequence
  Description of Artificial Sequence: Synthetic oligonucleotide
aguuuagaggagaaagcug

SEQ ID NO: 343345 - RNA, 19 nt, Artificial Sequence
  Description of Artificial Sequence: Synthetic oligonucleotide
ugaggaugguaguucuaug

SEQ ID NO: 343346 - RNA, 19 nt, Artificial Sequence
  Description of Artificial Sequence: Synthetic oligonucleotide
aagguacuguccugcccuc

SEQ ID NO: 343347 - RNA, 19 nt, Artificial Sequence
  Description of Artificial Sequence: Synthetic oligonucleotide
gugaaaaucagugcugguc

SEQ ID NO: 343348 - RNA, 19 nt, Artificial Sequence
  Description of Artificial Sequence: Synthetic oligonucleotide
aauguucgcaaaggguaca

SEQ ID NO: 343349 - RNA, 19 nt, Artificial Sequence
  Description of Artificial Sequence: Synthetic oligonucleotide
aacuggggacuccuugaug

SEQ ID NO: 343350 - RNA, 19 nt, Artificial Sequence
  Description of Artificial Sequence: Synthetic oligonucleotide
auacuaauacuggcauugg

SEQ ID NO: 343351 - RNA, 19 nt, Artificial Sequence
  Description of Artificial Sequence: Synthetic oligonucleotide
agguguguagcccuguaau

SEQ ID NO: 343352 - RNA, 19 nt, Artificial Sequence
  Description of Artificial Sequence: Synthetic oligonucleotide
  modified_base (10)..(10): a, c, u, g, unknown or other
gaugaccuunuccggcuga

SEQ ID NO: 343353 - RNA, 19 nt, Artificial Sequence
  Description of Artificial Sequence: Synthetic oligonucleotide
uccucaaggucuaggguuc

SEQ ID NO: 343354 - RNA, 19 nt, Artificial Sequence
  Description of Artificial Sequence: Synthetic oligonucleotide
guagaugcgaauagggguc

SEQ ID NO: 343355 - RNA, 19 nt, Artificial Sequence
  Description of Artificial Sequence: Synthetic oligonucleotide
agggguccuguauuaggcg

SEQ ID NO: 343356 - RNA, 19 nt, Artificial Sequence
  Description of Artificial Sequence: Synthetic oligonucleotide
uggaaaugcuccgauucca

SEQ ID NO: 343357 - RNA, 19 nt, Artificial Sequence
  Description of Artificial Sequence: Synthetic oligonucleotide
agaggauuacucaggcuuc

SEQ ID NO: 343358 - RNA, 19 nt, Artificial Sequence
  Description of Artificial Sequence: Synthetic oligonucleotide
ggaaaaccacacuucauca

SEQ ID NO: 343359 - RNA, 19 nt, Artificial Sequence
  Description of Artificial Sequence: Synthetic oligonucleotide
cugucuuagcugcuggcag

SEQ ID NO: 343360 - RNA, 19 nt, Artificial Sequence
  Description of Artificial Sequence: Synthetic oligonucleotide
accgucuccaaauccaaau

SEQ ID NO: 343361 - RNA, 19 nt, Artificial Sequence
  Description of Artificial Sequence: Synthetic oligonucleotide
guaguucuauguguaucgg

SEQ ID NO: 343362 - RNA, 19 nt, Artificial Sequence
  Description of Artificial Sequence: Synthetic oligonucleotide
cucaauacuucauacugua

SEQ ID NO: 343363 - RNA, 19 nt, Artificial Sequence
  Description of Artificial Sequence: Synthetic oligonucleotide
ugcugccccugccauagag

SEQ ID NO: 343364 - RNA, 19 nt, Artificial Sequence
  Description of Artificial Sequence: Synthetic oligonucleotide
uuacucaggcuuccacagc

SEQ ID NO: 343365 - RNA, 19 nt, Artificial Sequence
  Description of Artificial Sequence: Synthetic oligonucleotide
cuacacuacgggauccuac

SEQ ID NO: 343366 - RNA, 19 nt, Artificial Sequence
  Description of Artificial Sequence: Synthetic oligonucleotide
ccuacucaauacuucauac

SEQ ID NO: 343367 - RNA, 19 nt, Artificial Sequence
  Description of Artificial Sequence: Synthetic oligonucleotide
uacauuaugcagagcugua

SEQ ID NO: 343368 - RNA, 19 nt, Artificial Sequence
  Description of Artificial Sequence: Synthetic oligonucleotide
gaggaugguaguucuaugu

SEQ ID NO: 343369 - RNA, 19 nt, Artificial Sequence
  Description of Artificial Sequence: Synthetic oligonucleotide
ggcucauuccauuucacca

SEQ ID NO: 343370 - RNA, 19 nt, Artificial Sequence
  Description of Artificial Sequence: Synthetic oligonucleotide
acgggauccuaccaauucu

SEQ ID NO: 343371 - RNA, 19 nt, Artificial Sequence
  Description of Artificial Sequence: Synthetic oligonucleotide
acuacgggauccuaccaau

SEQ ID NO: 343372 - RNA, 19 nt, Artificial Sequence
  Description of Artificial Sequence: Synthetic oligonucleotide
gcuaaggguccuaaguugg

SEQ ID NO: 343373 - RNA, 19 nt, Artificial Sequence
  Description of Artificial Sequence: Synthetic oligonucleotide
ugaggcuaaggguccuaag

SEQ ID NO: 343374 - RNA, 19 nt, Artificial Sequence
  Description of Artificial Sequence: Synthetic oligonucleotide
cauugucacccaugagagg

SEQ ID NO: 343375 - RNA, 19 nt, Artificial Sequence
  Description of Artificial Sequence: Synthetic oligonucleotide
gaaucuggaagggaaucuc

SEQ ID NO: 343376 - RNA, 19 nt, Artificial Sequence
  Description of Artificial Sequence: Synthetic oligonucleotide
  modified_base (2)..(2): a, c, u, g, unknown or other
unuccggcugauuccuagc

SEQ ID NO: 343377 - RNA, 19 nt, Artificial Sequence
  Description of Artificial Sequence: Synthetic oligonucleotide
uucuuaccagcuguauuug

SEQ ID NO: 343378 - RNA, 19 nt, Artificial Sequence
  Description of Artificial Sequence: Synthetic oligonucleotide
agcccuguaauguucgcaa

SEQ ID NO: 343379 - RNA, 19 nt, Artificial Sequence
  Description of Artificial Sequence: Synthetic oligonucleotide
  modified_base (18)..(18): a, c, u, g, unknown or other
uagagugggaugaccuunu

SEQ ID NO: 343380 - RNA, 19 nt, Artificial Sequence
  Description of Artificial Sequence: Synthetic oligonucleotide
gucuguuagguucuggucu

SEQ ID NO: 343381 - RNA, 19 nt, Artificial Sequence
  Description of Artificial Sequence: Synthetic oligonucleotide
aaauaccauuugguucauc

SEQ ID NO: 343382 - RNA, 19 nt, Artificial Sequence
  Description of Artificial Sequence: Synthetic oligonucleotide
aagcucugaagcagaguag

SEQ ID NO: 343383 - RNA, 19 nt, Artificial Sequence
  Description of Artificial Sequence: Synthetic oligonucleotide
gggauaaucggccaagaaa

SEQ ID NO: 343384 - RNA, 19 nt, Artificial Sequence
  Description of Artificial Sequence: Synthetic oligonucleotide
caugagaggugauccaaca

SEQ ID NO: 343385 - RNA, 19 nt, Artificial Sequence
  Description of Artificial Sequence: Synthetic oligonucleotide
cugaccugagaaagccucc

SEQ ID NO: 343386 - RNA, 19 nt, Artificial Sequence
  Description of Artificial Sequence: Synthetic oligonucleotide
acuacucagaacucuucuu

SEQ ID NO: 343387 - RNA, 19 nt, Artificial Sequence
  Description of Artificial Sequence: Synthetic oligonucleotide
agugaaacuggggacuccu

SEQ ID NO: 343388 - RNA, 19 nt, Artificial Sequence
  Description of Artificial Sequence: Synthetic oligonucleotide
aggcuaaggguccuaaguu

SEQ ID NO: 343389 - RNA, 19 nt, Artificial Sequence
  Description of Artificial Sequence: Synthetic oligonucleotide
acccaagugauaccaggga

SEQ ID NO: 343390 - RNA, 19 nt, Artificial Sequence
  Description of Artificial Sequence: Synthetic oligonucleotide
auacggaaggaaaaccaca

SEQ ID NO: 343391 - RNA, 19 nt, Artificial Sequence
  Description of Artificial Sequence: Synthetic oligonucleotide
augcagcaguaguuuagag

SEQ ID NO: 343392 - RNA, 19 nt, Artificial Sequence
  Description of Artificial Sequence: Synthetic oligonucleotide
ggcuaaggguccuaaguug

SEQ ID NO: 343393 - RNA, 19 nt, Artificial Sequence
  Description of Artificial Sequence: Synthetic oligonucleotide
cuauacuacacuacgggau

SEQ ID NO: 343394 - RNA, 19 nt, Artificial Sequence
  Description of Artificial Sequence: Synthetic oligonucleotide
acuuaccaaggguauuuaa

SEQ ID NO: 343395 - RNA, 19 nt, Artificial Sequence
  Description of Artificial Sequence: Synthetic oligonucleotide
ggaccgugcagugaggagg

SEQ ID NO: 343396 - RNA, 19 nt, Artificial Sequence
  Description of Artificial Sequence: Synthetic oligonucleotide
gaaaaucagugcuggucaa

SEQ ID NO: 343397 - RNA, 19 nt, Artificial Sequence
  Description of Artificial Sequence: Synthetic oligonucleotide
gcaaacacggccaacagaa

SEQ ID NO: 343398 - RNA, 19 nt, Artificial Sequence
  Description of Artificial Sequence: Synthetic oligonucleotide
uugucacccaugagaggug

SEQ ID NO: 343399 - RNA, 19 nt, Artificial Sequence
  Description of Artificial Sequence: Synthetic oligonucleotide
gaggauuacucaggcuucc

SEQ ID NO: 343400 - RNA, 19 nt, Artificial Sequence
  Description of Artificial Sequence: Synthetic oligonucleotide
uggggauuuccaugugaca

SEQ ID NO: 343401 - RNA, 19 nt, Artificial Sequence
  Description of Artificial Sequence: Synthetic oligonucleotide
ucaagguaugcugccuuac

SEQ ID NO: 343402 - RNA, 19 nt, Artificial Sequence
  Description of Artificial Sequence: Synthetic oligonucleotide
uagaugcgaauaggggucc

SEQ ID NO: 343403 - RNA, 19 nt, Artificial Sequence
  Description of Artificial Sequence: Synthetic oligonucleotide
ugccccugccauagagugg

SEQ ID NO: 343404 - RNA, 19 nt, Artificial Sequence
  Description of Artificial Sequence: Synthetic oligonucleotide
  modified_base (17)..(17): a, c, u, g, unknown or other
agagugggaugaccuunuc

SEQ ID NO: 343405 - RNA, 19 nt, Artificial Sequence
  Description of Artificial Sequence: Synthetic oligonucleotide
gguguguagcccuguaaug

SEQ ID NO: 343406 - RNA, 19 nt, Artificial Sequence
  Description of Artificial Sequence: Synthetic oligonucleotide
gguuauagaggguguuuac

SEQ ID NO: 343407 - RNA, 19 nt, Artificial Sequence
  Description of Artificial Sequence: Synthetic oligonucleotide
agggaaucucucaguauag

SEQ ID NO: 343408 - RNA, 19 nt, Artificial Sequence
  Description of Artificial Sequence: Synthetic oligonucleotide
acggaaggaaaaccacacu

SEQ ID NO: 343409 - RNA, 19 nt, Artificial Sequence
  Description of Artificial Sequence: Synthetic oligonucleotide
cuuaaggcuauacuacacu

SEQ ID NO: 343410 - RNA, 19 nt, Artificial Sequence
  Description of Artificial Sequence: Synthetic oligonucleotide
gcuauacuacacuacggga

SEQ ID NO: 343411 - RNA, 19 nt, Artificial Sequence
  Description of Artificial Sequence: Synthetic oligonucleotide
cuacuacuuaaggcuauac

SEQ ID NO: 343412 - RNA, 19 nt, Artificial Sequence
  Description of Artificial Sequence: Synthetic oligonucleotide
gauguguuucugacccuug

SEQ ID NO: 343413 - RNA, 19 nt, Artificial Sequence
  Description of Artificial Sequence: Synthetic oligonucleotide
aaaucugacccaagugaua

SEQ ID NO: 343414 - RNA, 19 nt, Artificial Sequence
  Description of Artificial Sequence: Synthetic oligonucleotide
acauuaugcagagcuguau

SEQ ID NO: 343415 - RNA, 19 nt, Artificial Sequence
  Description of Artificial Sequence: Synthetic oligonucleotide
agggauaaucggccaagaa

SEQ ID NO: 343416 - RNA, 19 nt, Artificial Sequence
  Description of Artificial Sequence: Synthetic oligonucleotide
augaucaccagggcuacaa

SEQ ID NO: 343417 - RNA, 19 nt, Artificial Sequence
  Description of Artificial Sequence: Synthetic oligonucleotide
uucucugggcaaguucuga

SEQ ID NO: 343418 - RNA, 19 nt, Artificial Sequence
  Description of Artificial Sequence: Synthetic oligonucleotide
uguucgcaaaggguacaug

SEQ ID NO: 343419 - RNA, 19 nt, Artificial Sequence
  Description of Artificial Sequence: Synthetic oligonucleotide
ugcugcaauuaugaccuuc

SEQ ID NO: 343420 - RNA, 19 nt, Artificial Sequence
  Description of Artificial Sequence: Synthetic oligonucleotide
gaggacggcucucuugcca

SEQ ID NO: 343421 - RNA, 19 nt, Artificial Sequence
  Description of Artificial Sequence: Synthetic oligonucleotide
guauuugccaaaccacccu

SEQ ID NO: 343422 - RNA, 19 nt, Artificial Sequence
  Description of Artificial Sequence: Synthetic oligonucleotide
gaugcgaauagggguccug

SEQ ID NO: 343423 - RNA, 19 nt, Artificial Sequence
  Description of Artificial Sequence: Synthetic oligonucleotide
cuugcugcccuguuaaggu

SEQ ID NO: 343424 - RNA, 19 nt, Artificial Sequence
  Description of Artificial Sequence: Synthetic oligonucleotide
ggcuacaaacaggaagagg

SEQ ID NO: 343425 - RNA, 19 nt, Artificial Sequence
  Description of Artificial Sequence: Synthetic oligonucleotide
cccucuauuuucaggcucc

SEQ ID NO: 343426 - RNA, 19 nt, Artificial Sequence
  Description of Artificial Sequence: Synthetic oligonucleotide
gacccuugauuccaggggu

SEQ ID NO: 343427 - RNA, 19 nt, Artificial Sequence
  Description of Artificial Sequence: Synthetic oligonucleotide
ucugaggaugguaguucua

SEQ ID NO: 343428 - RNA, 19 nt, Artificial Sequence
  Description of Artificial Sequence: Synthetic oligonucleotide
agguuauagaggguguuua

SEQ ID NO: 343429 - RNA, 19 nt, Artificial Sequence
  Description of Artificial Sequence: Synthetic oligonucleotide
acacuacgggauccuacca

SEQ ID NO: 343430 - RNA, 19 nt, Artificial Sequence
  Description of Artificial Sequence: Synthetic oligonucleotide
gugugggaagaauacggaa

SEQ ID NO: 343431 - RNA, 19 nt, Artificial Sequence
  Description of Artificial Sequence: Synthetic oligonucleotide
ucuacuacuuaaggcuaua

SEQ ID NO: 343432 - RNA, 19 nt, Artificial Sequence
  Description of Artificial Sequence: Synthetic oligonucleotide
ugagguuauagaggguguu

SEQ ID NO: 343433 - RNA, 19 nt, Artificial Sequence
  Description of Artificial Sequence: Synthetic oligonucleotide
uagcccuguaauguucgca

SEQ ID NO: 343434 - RNA, 19 nt, Artificial Sequence
  Description of Artificial Sequence: Synthetic oligonucleotide
ucccuaaaacagagacacu

SEQ ID NO: 343435 - RNA, 19 nt, Artificial Sequence
  Description of Artificial Sequence: Synthetic oligonucleotide
gaggcgagacaggaacugc

SEQ ID NO: 343436 - RNA, 19 nt, Artificial Sequence
  Description of Artificial Sequence: Synthetic oligonucleotide
gacagaguagaaguggaau

SEQ ID NO: 343437 - RNA, 19 nt, Artificial Sequence
  Description of Artificial Sequence: Synthetic oligonucleotide
gacggcucucuugccaucc

SEQ ID NO: 343438 - RNA, 19 nt, Artificial Sequence
  Description of Artificial Sequence: Synthetic oligonucleotide
agggcuacuugccccgcug

SEQ ID NO: 343439 - RNA, 19 nt, Artificial Sequence
  Description of Artificial Sequence: Synthetic oligonucleotide
ggauuacucaggcuuccac

SEQ ID NO: 343440 - RNA, 19 nt, Artificial Sequence
  Description of Artificial Sequence: Synthetic oligonucleotide
caccacaguuuugcuaccg

SEQ ID NO: 343441 - RNA, 19 nt, Artificial Sequence
  Description of Artificial Sequence: Synthetic oligonucleotide
agguacuguccugcccucc

SEQ ID NO: 343442 - RNA, 19 nt, Artificial Sequence
  Description of Artificial Sequence: Synthetic oligonucleotide
agaucuaguagaaguucau

SEQ ID NO: 343443 - RNA, 19 nt, Artificial Sequence
  Description of Artificial Sequence: Synthetic oligonucleotide
uacuacacuacgggauccu

SEQ ID NO: 343444 - RNA, 19 nt, Artificial Sequence
  Description of Artificial Sequence: Synthetic oligonucleotide
guauagggaguggagucca

SEQ ID NO: 343445 - RNA, 19 nt, Artificial Sequence
  Description of Artificial Sequence: Synthetic oligonucleotide
ggggauuuccaugugacaa

SEQ ID NO: 343446 - RNA, 19 nt, Artificial Sequence
  Description of Artificial Sequence: Synthetic oligonucleotide
aggacggcucucuugccau

SEQ ID NO: 343447 - RNA, 19 nt, Artificial Sequence
  Description of Artificial Sequence: Synthetic oligonucleotide
gcagagcaagaguuguuug

SEQ ID NO: 343448 - RNA, 19 nt, Artificial Sequence
  Description of Artificial Sequence: Synthetic oligonucleotide
accagggauaaucggccaa

SEQ ID NO: 343449 - RNA, 19 nt, Artificial Sequence
  Description of Artificial Sequence: Synthetic oligonucleotide
caagggccccugcaacugg

SEQ ID NO: 343450 - RNA, 19 nt, Artificial Sequence
  Description of Artificial Sequence: Synthetic oligonucleotide
cauuucuaagaugaagccu

SEQ ID NO: 343451 - RNA, 19 nt, Artificial Sequence
  Description of Artificial Sequence: Synthetic oligonucleotide
cuccaagggccccugcaac

SEQ ID NO: 343452 - RNA, 19 nt, Artificial Sequence
  Description of Artificial Sequence: Synthetic oligonucleotide
caagguaugcugccuuaca

SEQ ID NO: 343453 - RNA, 19 nt, Artificial Sequence
  Description of Artificial Sequence: Synthetic oligonucleotide
acccaugagaggugaucca

SEQ ID NO: 343454 - RNA, 19 nt, Artificial Sequence
  Description of Artificial Sequence: Synthetic oligonucleotide
uagugaaacuggggacucc

SEQ ID NO: 343455 - RNA, 19 nt, Artificial Sequence
  Description of Artificial Sequence: Synthetic oligonucleotide
uaaggguccuaaguugguu

SEQ ID NO: 343456 - RNA, 19 nt, Artificial Sequence
  Description of Artificial Sequence: Synthetic oligonucleotide
ccuagcuuugcaaacugga

SEQ ID NO: 343457 - RNA, 19 nt, Artificial Sequence
  Description of Artificial Sequence: Synthetic oligonucleotide
ggcaagaauguaguuucug

SEQ ID NO: 343458 - RNA, 19 nt, Artificial Sequence
  Description of Artificial Sequence: Synthetic oligonucleotide
cuucauacuguauccacuu

SEQ ID NO: 343459 - RNA, 19 nt, Artificial Sequence
  Description of Artificial Sequence: Synthetic oligonucleotide
uggggaccgugcagugagg

SEQ ID NO: 343460 - RNA, 19 nt, Artificial Sequence
  Description of Artificial Sequence: Synthetic oligonucleotide
aggucgagggccccuuacu

SEQ ID NO: 343461 - RNA, 19 nt, Artificial Sequence
  Description of Artificial Sequence: Synthetic oligonucleotide
guagcccuguaauguucgc

SEQ ID NO: 343462 - RNA, 19 nt, Artificial Sequence
  Description of Artificial Sequence: Synthetic oligonucleotide
gaggucgagggccccuuac

SEQ ID NO: 343463 - RNA, 19 nt, Artificial Sequence
  Description of Artificial Sequence: Synthetic oligonucleotide
ugcgaauagggguccugua

SEQ ID NO: 343464 - RNA, 19 nt, Artificial Sequence
  Description of Artificial Sequence: Synthetic oligonucleotide
ccuuacuugccauuauuga

SEQ ID NO: 343465 - RNA, 19 nt, Artificial Sequence
  Description of Artificial Sequence: Synthetic oligonucleotide
augcgaauagggguccugu

SEQ ID NO: 343466 - RNA, 19 nt, Artificial Sequence
  Description of Artificial Sequence: Synthetic oligonucleotide
cauuggcagguggggaccg

SEQ ID NO: 343467 - RNA, 19 nt, Artificial Sequence
  Description of Artificial Sequence: Synthetic oligonucleotide
acggccaacagaagaggug

SEQ ID NO: 343468 - RNA, 19 nt, Artificial Sequence
  Description of Artificial Sequence: Synthetic oligonucleotide
cagcuguauuugccaaacc

SEQ ID NO: 343469 - RNA, 19 nt, Artificial Sequence
  Description of Artificial Sequence: Synthetic oligonucleotide
ggcaaauaucccaaaugga

SEQ ID NO: 343470 - RNA, 19 nt, Artificial Sequence
  Description of Artificial Sequence: Synthetic oligonucleotide
aggccguccaucguuuaug

SEQ ID NO: 343471 - RNA, 19 nt, Artificial Sequence
  Description of Artificial Sequence: Synthetic oligonucleotide
gaggcccagagccaaucaa

SEQ ID NO: 343472 - RNA, 19 nt, Artificial Sequence
  Description of Artificial Sequence: Synthetic oligonucleotide
ggaugguaguucuaugugu

SEQ ID NO: 343473 - RNA, 19 nt, Artificial Sequence
  Description of Artificial Sequence: Synthetic oligonucleotide
acguacuggggugucccag

SEQ ID NO: 343474 - RNA, 19 nt, Artificial Sequence
  Description of Artificial Sequence: Synthetic oligonucleotide
cagaguagaugguucaaau

SEQ ID NO: 343475 - RNA, 19 nt, Artificial Sequence
  Description of Artificial Sequence: Synthetic oligonucleotide
cuggggacuccuugaugug

SEQ ID NO: 343476 - RNA, 19 nt, Artificial Sequence
  Description of Artificial Sequence: Synthetic oligonucleotide
ccaggcauauguugcacuc

SEQ ID NO: 343477 - RNA, 19 nt, Artificial Sequence
  Description of Artificial Sequence: Synthetic oligonucleotide
cccucuacuacuuaaggcu

SEQ ID NO: 343478 - RNA, 19 nt, Artificial Sequence
  Description of Artificial Sequence: Synthetic oligonucleotide
ccuccuacucaauacuuca

SEQ ID NO: 343479 - RNA, 19 nt, Artificial Sequence
  Description of Artificial Sequence: Synthetic oligonucleotide
gaccgugcagugaggagga

SEQ ID NO: 343480 - RNA, 19 nt, Artificial Sequence
  Description of Artificial Sequence: Synthetic oligonucleotide
agauuucaguaaagauucu

SEQ ID NO: 343481 - RNA, 19 nt, Artificial Sequence
  Description of Artificial Sequence: Synthetic oligonucleotide
agaaacugacagaggccca

SEQ ID NO: 343482 - RNA, 19 nt, Artificial Sequence
  Description of Artificial Sequence: Synthetic oligonucleotide
gacaucugaaagccaccgu

SEQ ID NO: 343483 - RNA, 19 nt, Artificial Sequence
  Description of Artificial Sequence: Synthetic oligonucleotide
uccuaccaauucucccuaa

SEQ ID NO: 343484 - RNA, 19 nt, Artificial Sequence
  Description of Artificial Sequence: Synthetic oligonucleotide
agugggugcuagagaagug

SEQ ID NO: 343485 - RNA, 19 nt, Artificial Sequence
  Description of Artificial Sequence: Synthetic oligonucleotide
ugguuauugcuggggcagu

SEQ ID NO: 343486 - RNA, 19 nt, Artificial Sequence
  Description of Artificial Sequence: Synthetic oligonucleotide
ccaagaaaccaggagguca

SEQ ID NO: 343487 - RNA, 19 nt, Artificial Sequence
  Description of Artificial Sequence: Synthetic oligonucleotide
cacuacucagaacucuucu

SEQ ID NO: 343488 - RNA, 19 nt, Artificial Sequence
  Description of Artificial Sequence: Synthetic oligonucleotide
aggcgagacaggaacugcu

SEQ ID NO: 343489 - RNA, 19 nt, Artificial Sequence
  Description of Artificial Sequence: Synthetic oligonucleotide
cuguuaaggucuccaggaa

SEQ ID NO: 343490 - RNA, 19 nt, Artificial Sequence
  Description of Artificial Sequence: Synthetic oligonucleotide
gggguccuguauuaggcga

SEQ ID NO: 343491 - RNA, 19 nt, Artificial Sequence
  Description of Artificial Sequence: Synthetic oligonucleotide
cacuacgggauccuaccaa

SEQ ID NO: 343492 - RNA, 19 nt, Artificial Sequence
  Description of Artificial Sequence: Synthetic oligonucleotide
auguucgcaaaggguacau

SEQ ID NO: 343493 - RNA, 19 nt, Artificial Sequence
  Description of Artificial Sequence: Synthetic oligonucleotide
gggauuuccaugugacaaa

SEQ ID NO: 343494 - RNA, 19 nt, Artificial Sequence
  Description of Artificial Sequence: Synthetic oligonucleotide
ccguccaucguuuauguua

SEQ ID NO: 343495 - RNA, 19 nt, Artificial Sequence
  Description of Artificial Sequence: Synthetic oligonucleotide
ccccauguagagcugggac

SEQ ID NO: 343496 - RNA, 19 nt, Artificial Sequence
  Description of Artificial Sequence: Synthetic oligonucleotide
ccaugagaggugauccaac

SEQ ID NO: 343497 - RNA, 19 nt, Artificial Sequence
  Description of Artificial Sequence: Synthetic oligonucleotide
gucaagguaugcugccuua

SEQ ID NO: 343498 - RNA, 19 nt, Artificial Sequence
  Description of Artificial Sequence: Synthetic oligonucleotide
gguacuguccugcccucca

SEQ ID NO: 343499 - RNA, 19 nt, Artificial Sequence
  Description of Artificial Sequence: Synthetic oligonucleotide
uaccggcaggcuccuggga

SEQ ID NO: 343500 - RNA, 19 nt, Artificial Sequence
  Description of Artificial Sequence: Synthetic oligonucleotide
guguaucggggcugaccug

SEQ ID NO: 343501 - RNA, 19 nt, Artificial Sequence
  Description of Artificial Sequence: Synthetic oligonucleotide
  modified_base (9)..(9): a, c, u, g, unknown or other
augaccuunuccggcugau

SEQ ID NO: 343502 - RNA, 19 nt, Artificial Sequence
  Description of Artificial Sequence: Synthetic oligonucleotide
gugaacuauucuccugccu

SEQ ID NO: 343503 - RNA, 19 nt, Artificial Sequence
  Description of Artificial Sequence: Synthetic oligonucleotide
gauuuucccucuacuacuu

SEQ ID NO: 343504 - RNA, 19 nt, Artificial Sequence
  Description of Artificial Sequence: Synthetic oligonucleotide
cugucccugcaucaaagcu

SEQ ID NO: 343505 - RNA, 19 nt, Artificial Sequence
  Description of Artificial Sequence: Synthetic oligonucleotide
ccuaaguugguucuccugu

SEQ ID NO: 343506 - RNA, 19 nt, Artificial Sequence
  Description of Artificial Sequence: Synthetic oligonucleotide
cacacuaaaguugguggcu

SEQ ID NO: 343507 - RNA, 19 nt, Artificial Sequence
  Description of Artificial Sequence: Synthetic oligonucleotide
uauguguaucggggcugac

SEQ ID NO: 343508 - RNA, 19 nt, Artificial Sequence
  Description of Artificial Sequence: Synthetic oligonucleotide
ccagggauaaucggccaag

SEQ ID NO: 343509 - RNA, 19 nt, Artificial Sequence
  Description of Artificial Sequence: Synthetic oligonucleotide
acuacacuacgggauccua

SEQ ID NO: 343510 - RNA, 19 nt, Artificial Sequence
  Description of Artificial Sequence: Synthetic oligonucleotide
aucggccaagaaaccagga

SEQ ID NO: 343511 - RNA, 19 nt, Artificial Sequence
  Description of Artificial Sequence: Synthetic oligonucleotide
cugaugcaaacacggccaa

SEQ ID NO: 343512 - RNA, 19 nt, Artificial Sequence
  Description of Artificial Sequence: Synthetic oligonucleotide
gggaccgugcagugaggag

SEQ ID NO: 343513 - RNA, 19 nt, Artificial Sequence
  Description of Artificial Sequence: Synthetic oligonucleotide
cuguauccacuucaauacu

SEQ ID NO: 343514 - RNA, 19 nt, Artificial Sequence
  Description of Artificial Sequence: Synthetic oligonucleotide
cugccuuacauguucccau

SEQ ID NO: 343515 - RNA, 19 nt, Artificial Sequence
  Description of Artificial Sequence: Synthetic oligonucleotide
aggcaagaauguaguuucu

SEQ ID NO: 343516 - RNA, 19 nt, Artificial Sequence
  Description of Artificial Sequence: Synthetic oligonucleotide
guccuguauuaggcgauca

SEQ ID NO: 343517 - RNA, 19 nt, Artificial Sequence
  Description of Artificial Sequence: Synthetic oligonucleotide
ccacuacucagaacucuuc

SEQ ID NO: 343518 - RNA, 19 nt, Artificial Sequence
  Description of Artificial Sequence: Synthetic oligonucleotide
cacuaaaguugguggcuua

SEQ ID NO: 343519 - RNA, 19 nt, Artificial Sequence
  Description of Artificial Sequence: Synthetic oligonucleotide
gagguuauagaggguguuu

SEQ ID NO: 343520 - RNA, 19 nt, Artificial Sequence
  Description of Artificial Sequence: Synthetic oligonucleotide
guaucggggcugaccugag

SEQ ID NO: 343521 - RNA, 19 nt, Artificial Sequence
  Description of Artificial Sequence: Synthetic oligonucleotide
cugaggaugguaguucuau

SEQ ID NO: 343522 - RNA, 19 nt, Artificial Sequence
  Description of Artificial Sequence: Synthetic oligonucleotide
agaugcgaauagggguccu

SEQ ID NO: 343523 - RNA, 19 nt, Artificial Sequence
  Description of Artificial Sequence: Synthetic oligonucleotide
ggaaaugcuccgauuccaa

SEQ ID NO: 343524 - RNA, 19 nt, Artificial Sequence
  Description of Artificial Sequence: Synthetic oligonucleotide
acacaagaccugagguuau

SEQ ID NO: 343525 - RNA, 19 nt, Artificial Sequence
  Description of Artificial Sequence: Synthetic oligonucleotide
gcugccuuacauguuccca

SEQ ID NO: 343526 - RNA, 19 nt, Artificial Sequence
  Description of Artificial Sequence: Synthetic oligonucleotide
cucuacuacuuaaggcuau

SEQ ID NO: 343527 - RNA, 19 nt, Artificial Sequence
  Description of Artificial Sequence: Synthetic oligonucleotide
caguaguuuagaggagaaa

SEQ ID NO: 343528 - RNA, 19 nt, Artificial Sequence
  Description of Artificial Sequence: Synthetic oligonucleotide
gcagaaaggugaggcuaag

SEQ ID NO: 343529 - RNA, 19 nt, Artificial Sequence
  Description of Artificial Sequence: Synthetic oligonucleotide
  modified_base (8)..(8): a, c, u, g, unknown or other
ugaccuunuccggcugauu

SEQ ID NO: 343530 - RNA, 19 nt, Artificial Sequence
  Description of Artificial Sequence: Synthetic oligonucleotide
aggcgaucaggagccagaa

SEQ ID NO: 343531 - RNA, 19 nt, Artificial Sequence
  Description of Artificial Sequence: Synthetic oligonucleotide
  modified_base (12)..(12): a, c, u, g, unknown or other
gggaugaccuunuccggcu

SEQ ID NO: 343532 - RNA, 19 nt, Artificial Sequence
  Description of Artificial Sequence: Synthetic oligonucleotide
ccacguacugggguguccc

SEQ ID NO: 343533 - RNA, 19 nt, Artificial Sequence
  Description of Artificial Sequence: Synthetic oligonucleotide
cacccuccuacucaauacu

SEQ ID NO: 343534 - RNA, 19 nt, Artificial Sequence
  Description of Artificial Sequence: Synthetic oligonucleotide
  modified_base (4)..(4): a, c, u, g, unknown or other
cuunuccggcugauuccua

SEQ ID NO: 343535 - RNA, 19 nt, Artificial Sequence
  Description of Artificial Sequence: Synthetic oligonucleotide
gcaguaguuuagaggagaa

SEQ ID NO: 343536 - RNA, 19 nt, Artificial Sequence
  Description of Artificial Sequence: Synthetic oligonucleotide
ggaggacggcucucuugcc

SEQ ID NO: 343537 - RNA, 19 nt, Artificial Sequence
  Description of Artificial Sequence: Synthetic oligonucleotide
gcagaguagaugguucaaa

SEQ ID NO: 343538 - RNA, 19 nt, Artificial Sequence
  Description of Artificial Sequence: Synthetic oligonucleotide
cuguugcccggugcugccc

SEQ ID NO: 343539 - RNA, 19 nt, Artificial Sequence
  Description of Artificial Sequence: Synthetic oligonucleotide
gugaggcuaaggguccuaa

SEQ ID NO: 343540 - RNA, 19 nt, Artificial Sequence
  Description of Artificial Sequence: Synthetic oligonucleotide
ccucuacuacuuaaggcua

SEQ ID NO: 343541 - RNA, 19 nt, Artificial Sequence
  Description of Artificial Sequence: Synthetic oligonucleotide
cagccuaggggcagggcua

SEQ ID NO: 343542 - RNA, 19 nt, Artificial Sequence
  Description of Artificial Sequence: Synthetic oligonucleotide
uagaggucgagggccccuu

SEQ ID NO: 343543 - RNA, 19 nt, Artificial Sequence
  Description of Artificial Sequence: Synthetic oligonucleotide
cguccaucguuuauguuaa

SEQ ID NO: 343544 - RNA, 19 nt, Artificial Sequence
  Description of Artificial Sequence: Synthetic oligonucleotide
gcgaauagggguccuguau

SEQ ID NO: 343545 - RNA, 19 nt, Artificial Sequence
  Description of Artificial Sequence: Synthetic oligonucleotide
cuccuacucaauacuucau

SEQ ID NO: 343546 - RNA, 19 nt, Artificial Sequence
  Description of Artificial Sequence: Synthetic oligonucleotide
ggcuacuugccccgcuguc

SEQ ID NO: 343547 - RNA, 19 nt, Artificial Sequence
  Description of Artificial Sequence: Synthetic oligonucleotide
gaggccguccaucguuuau

SEQ ID NO: 343548 - RNA, 19 nt, Artificial Sequence
  Description of Artificial Sequence: Synthetic oligonucleotide
agaggucgagggccccuua

SEQ ID NO: 343549 - RNA, 19 nt, Artificial Sequence
  Description of Artificial Sequence: Synthetic oligonucleotide
cacguacugggguguccca

SEQ ID NO: 343550 - RNA, 19 nt, Artificial Sequence
  Description of Artificial Sequence: Synthetic oligonucleotide
ccugucuuagcugcuggca

SEQ ID NO: 343551 - RNA, 19 nt, Artificial Sequence
  Description of Artificial Sequence: Synthetic oligonucleotide
gugcuggucaagguaugcu

SEQ ID NO: 343552 - RNA, 19 nt, Artificial Sequence
  Description of Artificial Sequence: Synthetic oligonucleotide
ccaccacaguuuugcuacc

SEQ ID NO: 343553 - RNA, 19 nt, Artificial Sequence
  Description of Artificial Sequence: Synthetic oligonucleotide
gguccuguauuaggcgauc

SEQ ID NO: 343554 - RNA, 19 nt, Artificial Sequence
  Description of Artificial Sequence: Synthetic oligonucleotide
ccaagggccccugcaacug

SEQ ID NO: 343555 - RNA, 19 nt, Artificial Sequence
  Description of Artificial Sequence: Synthetic oligonucleotide
gacugccagcaaagauuuc

SEQ ID NO: 343556 - RNA, 19 nt, Artificial Sequence
  Description of Artificial Sequence: Synthetic oligonucleotide
cacuuaccaaggguauuua

SEQ ID NO: 343557 - RNA, 19 nt, Artificial Sequence
  Description of Artificial Sequence: Synthetic oligonucleotide
guccacuuaccaaggguau

SEQ ID NO: 343558 - RNA, 19 nt, Artificial Sequence
  Description of Artificial Sequence: Synthetic oligonucleotide
aggaggccguccaucguuu

SEQ ID NO: 343559 - RNA, 19 nt, Artificial Sequence
  Description of Artificial Sequence: Synthetic oligonucleotide
acccuugauuccagggguu

SEQ ID NO: 343560 - RNA, 19 nt, Artificial Sequence
  Description of Artificial Sequence: Synthetic oligonucleotide
ggggaccgugcagugagga

SEQ ID NO: 343561 - RNA, 19 nt, Artificial Sequence
  Description of Artificial Sequence: Synthetic oligonucleotide
ggucuaggguucuguacau

SEQ ID NO: 343562 - RNA, 19 nt, Artificial Sequence
  Description of Artificial Sequence: Synthetic oligonucleotide
caugaucaccagggcuaca

SEQ ID NO: 343563 - RNA, 19 nt, Artificial Sequence
  Description of Artificial Sequence: Synthetic oligonucleotide
cacaagaccugagguuaua

SEQ ID NO: 343564 - RNA, 19 nt, Artificial Sequence
  Description of Artificial Sequence: Synthetic oligonucleotide
cuacgggauccuaccaauu

SEQ ID NO: 343565 - RNA, 19 nt, Artificial Sequence
  Description of Artificial Sequence: Synthetic oligonucleotide
ggccguccaucguuuaugu

SEQ ID NO: 343566 - RNA, 19 nt, Artificial Sequence
  Description of Artificial Sequence: Synthetic oligonucleotide
guccaucguuuauguuaaa

SEQ ID NO: 343567 - RNA, 19 nt, Artificial Sequence
  Description of Artificial Sequence: Synthetic oligonucleotide
gcccuguaauguucgcaaa

SEQ ID NO: 343568 - RNA, 19 nt, Artificial Sequence
  Description of Artificial Sequence: Synthetic oligonucleotide
cccaagugauaccagggau

SEQ ID NO: 343569 - RNA, 19 nt, Artificial Sequence
  Description of Artificial Sequence: Synthetic oligonucleotide
guagaggucgagggccccu

SEQ ID NO: 343570 - RNA, 19 nt, Artificial Sequence
  Description of Artificial Sequence: Synthetic oligonucleotide
cauccacguacuggggugu

SEQ ID NO: 343571 - RNA, 19 nt, Artificial Sequence
  Description of Artificial Sequence: Synthetic oligonucleotide
cccaugagaggugauccaa

SEQ ID NO: 343572 - RNA, 19 nt, Artificial Sequence
  Description of Artificial Sequence: Synthetic oligonucleotide
ggcauauguugcacucaaa

SEQ ID NO: 343573 - RNA, 19 nt, Artificial Sequence
  Description of Artificial Sequence: Synthetic oligonucleotide
ggacggcucucuugccauc

SEQ ID NO: 343574 - RNA, 19 nt, Artificial Sequence
  Description of Artificial Sequence: Synthetic oligonucleotide
gcaaggcaagaauguaguu

SEQ ID NO: 343575 - RNA, 19 nt, Artificial Sequence
  Description of Artificial Sequence: Synthetic oligonucleotide
guuuugcuaccggcaggcu

SEQ ID NO: 343576 - RNA, 19 nt, Artificial Sequence
  Description of Artificial Sequence: Synthetic oligonucleotide
  modified_base (5)..(5): a, c, u, g, unknown or other
ccuunuccggcugauuccu

SEQ ID NO: 343577 - RNA, 19 nt, Artificial Sequence
  Description of Artificial Sequence: Synthetic oligonucleotide
ugcuaccggcaggcuccug

SEQ ID NO: 343578 - RNA, 19 nt, Artificial Sequence
  Description of Artificial Sequence: Synthetic oligonucleotide
ccuuacauguucccauuuu

SEQ ID NO: 343579 - RNA, 19 nt, Artificial Sequence
  Description of Artificial Sequence: Synthetic oligonucleotide
gccccgcugucccugcauc

SEQ ID NO: 343580 - RNA, 19 nt, Artificial Sequence
  Description of Artificial Sequence: Synthetic oligonucleotide
ccggcugauuccuagcuuu

SEQ ID NO: 343581 - RNA, 19 nt, Artificial Sequence
  Description of Artificial Sequence: Synthetic oligonucleotide
ccugcugagaaggcugcaa

SEQ ID NO: 343582 - RNA, 19 nt, Artificial Sequence
  Description of Artificial Sequence: Synthetic oligonucleotide
ggacgaggaggagucuucu

SEQ ID NO: 343583 - RNA, 19 nt, Artificial Sequence
  Description of Artificial Sequence: Synthetic oligonucleotide
cgagggccccuuacuugcc

SEQ ID NO: 343584 - RNA, 19 nt, Artificial Sequence
  Description of Artificial Sequence: Synthetic oligonucleotide
gggcuacuugccccgcugu

SEQ ID NO: 343585 - RNA, 19 nt, Artificial Sequence
  Description of Artificial Sequence: Synthetic oligonucleotide
ggaggccguccaucguuua

SEQ ID NO: 343586 - RNA, 19 nt, Artificial Sequence
  Description of Artificial Sequence: Synthetic oligonucleotide
ccacuuaccaaggguauuu

SEQ ID NO: 343587 - RNA, 19 nt, Artificial Sequence
  Description of Artificial Sequence: Synthetic oligonucleotide
gcagggcuacuugccccgc

SEQ ID NO: 343588 - RNA, 19 nt, Artificial Sequence
  Description of Artificial Sequence: Synthetic oligonucleotide
cagggcuacuugccccgcu

SEQ ID NO: 343589 - RNA, 19 nt, Artificial Sequence
  Description of Artificial Sequence: Synthetic oligonucleotide
aaauagaauuuauuguggc

SEQ ID NO: 343590 - RNA, 19 nt, Artificial Sequence
  Description of Artificial Sequence: Synthetic oligonucleotide
aaugagucuagacucuugc

SEQ ID NO: 343591 - RNA, 19 nt, Artificial Sequence
  Description of Artificial Sequence: Synthetic oligonucleotide
aauaaauacauccgccagg

SEQ ID NO: 343592 - RNA, 19 nt, Artificial Sequence
  Description of Artificial Sequence: Synthetic oligonucleotide
uuuauuguggcucugauua

SEQ ID NO: 343593 - RNA, 19 nt, Artificial Sequence
  Description of Artificial Sequence: Synthetic oligonucleotide
auuauugugaaugagguug

SEQ ID NO: 343594 - RNA, 19 nt, Artificial Sequence
  Description of Artificial Sequence: Synthetic oligonucleotide
gaugagaacaucuuuacca

SEQ ID NO: 343595 - RNA, 19 nt, Artificial Sequence
  Description of Artificial Sequence: Synthetic oligonucleotide
aguacuagcacugagguag

SEQ ID NO: 343596 - RNA, 19 nt, Artificial Sequence
  Description of Artificial Sequence: Synthetic oligonucleotide
aaauacauccgccaggccu

SEQ ID NO: 343597 - RNA, 19 nt, Artificial Sequence
  Description of Artificial Sequence: Synthetic oligonucleotide
ucuaguacuagcacugagg

SEQ ID NO: 343598 - RNA, 19 nt, Artificial Sequence
  Description of Artificial Sequence: Synthetic oligonucleotide
uacaauaaauacauccgcc

SEQ ID NO: 343599 - RNA, 19 nt, Artificial Sequence
  Description of Artificial Sequence: Synthetic oligonucleotide
agcauugccaaacucaaag

SEQ ID NO: 343600 - RNA, 19 nt, Artificial Sequence
  Description of Artificial Sequence: Synthetic oligonucleotide
ucagggauacccuugcugg

SEQ ID NO: 343601 - RNA, 19 nt, Artificial Sequence
  Description of Artificial Sequence: Synthetic oligonucleotide
caacccaucaauauaggcc

SEQ ID NO: 343602 - RNA, 19 nt, Artificial Sequence
  Description of Artificial Sequence: Synthetic oligonucleotide
ugagguauguucccagugg

SEQ ID NO: 343603 - RNA, 19 nt, Artificial Sequence
  Description of Artificial Sequence: Synthetic oligonucleotide
ugauaccccagucacagcc

SEQ ID NO: 343604 - RNA, 19 nt, Artificial Sequence
  Description of Artificial Sequence: Synthetic oligonucleotide
aaugauuggaagugcccag

SEQ ID NO: 343605 - RNA, 19 nt, Artificial Sequence
  Description of Artificial Sequence: Synthetic oligonucleotide
gaugauaccccagucacag

SEQ ID NO: 343606 - RNA, 19 nt, Artificial Sequence
  Description of Artificial Sequence: Synthetic oligonucleotide
guugacuguaggcucaucg

SEQ ID NO: 343607 - RNA, 19 nt, Artificial Sequence
  Description of Artificial Sequence: Synthetic oligonucleotide
uuaucagccaacuccggag

SEQ ID NO: 343608 - RNA, 19 nt, Artificial Sequence
  Description of Artificial Sequence: Synthetic oligonucleotide
uucggauggucuuaaaggc

SEQ ID NO: 343609 - RNA, 19 nt, Artificial Sequence
  Description of Artificial Sequence: Synthetic oligonucleotide
auuuugcccaagcagacug

SEQ ID NO: 343610 - RNA, 19 nt, Artificial Sequence
  Description of Artificial Sequence: Synthetic oligonucleotide
ugcaaagugcuucaucagc

SEQ ID NO: 343611 - RNA, 19 nt, Artificial Sequence
  Description of Artificial Sequence: Synthetic oligonucleotide
guuauauucgcuugcuagc

SEQ ID NO: 343612 - RNA, 19 nt, Artificial Sequence
  Description of Artificial Sequence: Synthetic oligonucleotide
uauggaggcacuuuucugu

SEQ ID NO: 343613 - RNA, 19 nt, Artificial Sequence
  Description of Artificial Sequence: Synthetic oligonucleotide
uugugaaugagguugcagu

SEQ ID NO: 343614 - RNA, 19 nt, Artificial Sequence
  Description of Artificial Sequence: Synthetic oligonucleotide
guaggagccaauuuugccc

SEQ ID NO: 343615 - RNA, 19 nt, Artificial Sequence
  Description of Artificial Sequence: Synthetic oligonucleotide
guauuggauaaacugcucc

SEQ ID NO: 343616 - RNA, 19 nt, Artificial Sequence
  Description of Artificial Sequence: Synthetic oligonucleotide
aucgaguagagauugugug

SEQ ID NO: 343617 - RNA, 19 nt, Artificial Sequence
  Description of Artificial Sequence: Synthetic oligonucleotide
uuauugugaaugagguugc

SEQ ID NO: 343618 - RNA, 19 nt, Artificial Sequence
  Description of Artificial Sequence: Synthetic oligonucleotide
auauucgcuugcuagccgg

SEQ ID NO: 343619 - RNA, 19 nt, Artificial Sequence
  Description of Artificial Sequence: Synthetic oligonucleotide
uauauucgcuugcuagccg

SEQ ID NO: 343620 - RNA, 19 nt, Artificial Sequence
  Description of Artificial Sequence: Synthetic oligonucleotide
cuugccuugagguauguuc

SEQ ID NO: 343621 - RNA, 19 nt, Artificial Sequence
  Description of Artificial Sequence: Synthetic oligonucleotide
ucguugaccaggaagcuga

SEQ ID NO: 343622 - RNA, 19 nt, Artificial Sequence
  Description of Artificial Sequence: Synthetic oligonucleotide
ugacuguaggcucaucgag

SEQ ID NO: 343623 - RNA, 19 nt, Artificial Sequence
  Description of Artificial Sequence: Synthetic oligonucleotide
aggaucauacugcuccagc

SEQ ID NO: 343624 - RNA, 19 nt, Artificial Sequence
  Description of Artificial Sequence: Synthetic oligonucleotide
guugggacguacuuugggg

SEQ ID NO: 343625 - RNA, 19 nt, Artificial Sequence
  Description of Artificial Sequence: Synthetic oligonucleotide
ugauuggaagugcccaggg

SEQ ID NO: 343626 - RNA, 19 nt, Artificial Sequence
  Description of Artificial Sequence: Synthetic oligonucleotide
gagguauguucccaguggg

SEQ ID NO: 343627 - RNA, 19 nt, Artificial Sequence
  Description of Artificial Sequence: Synthetic oligonucleotide
ucaucgucccaucugucag

SEQ ID NO: 343628 - RNA, 19 nt, Artificial Sequence
  Description of Artificial Sequence: Synthetic oligonucleotide
aauuuauuguggcucugau

SEQ ID NO: 343629 - RNA, 19 nt, Artificial Sequence
  Description of Artificial Sequence: Synthetic oligonucleotide
aguagagauuguguguggc

SEQ ID NO: 343630 - RNA, 19 nt, Artificial Sequence
  Description of Artificial Sequence: Synthetic oligonucleotide
aagcgagccggguugggac

SEQ ID NO: 343631 - RNA, 19 nt, Artificial Sequence
  Description of Artificial Sequence: Synthetic oligonucleotide
agccauguacaacaugggg

SEQ ID NO: 343632 - RNA, 19 nt, Artificial Sequence
  Description of Artificial Sequence: Synthetic oligonucleotide
agcgguugcucaugaagcc

SEQ ID NO: 343633 - RNA, 19 nt, Artificial Sequence
  Description of Artificial Sequence: Synthetic oligonucleotide
ucucggaugucguaggugu

SEQ ID NO: 343634 - RNA, 19 nt, Artificial Sequence
  Description of Artificial Sequence: Synthetic oligonucleotide
uagaauuuauuguggcucu

SEQ ID NO: 343635 - RNA, 19 nt, Artificial Sequence
  Description of Artificial Sequence: Synthetic oligonucleotide
aaagguuuguggucugggu

SEQ ID NO: 343636 - RNA, 19 nt, Artificial Sequence
  Description of Artificial Sequence: Synthetic oligonucleotide
gcacggauaagcuuggagg

SEQ ID NO: 343637 - RNA, 19 nt, Artificial Sequence
  Description of Artificial Sequence: Synthetic oligonucleotide
ugcacggauaagcuuggag

SEQ ID NO: 343638 - RNA, 19 nt, Artificial Sequence
  Description of Artificial Sequence: Synthetic oligonucleotide
aggauccuccgacacagac

SEQ ID NO: 343639 - RNA, 19 nt, Artificial Sequence
  Description of Artificial Sequence: Synthetic oligonucleotide
ucaucgagguauuggauaa

SEQ ID NO: 343640 - RNA, 19 nt, Artificial Sequence
  Description of Artificial Sequence: Synthetic oligonucleotide
acuccggaggaucauacug

SEQ ID NO: 343641 - RNA, 19 nt, Artificial Sequence
  Description of Artificial Sequence: Synthetic oligonucleotide
agaacaucuuuaccaccac

SEQ ID NO: 343642 - RNA, 19 nt, Artificial Sequence
  Description of Artificial Sequence: Synthetic oligonucleotide
agcucagggauacccuugc

SEQ ID NO: 343643 - RNA, 19 nt, Artificial Sequence
  Description of Artificial Sequence: Synthetic oligonucleotide
aucgagguauuggauaaac

SEQ ID NO: 343644 - RNA, 19 nt, Artificial Sequence
  Description of Artificial Sequence: Synthetic oligonucleotide
ugugcacggauaagcuugg

SEQ ID NO: 343645 - RNA, 19 nt, Artificial Sequence
  Description of Artificial Sequence: Synthetic oligonucleotide
uccaacccaucaauauagg

SEQ ID NO: 343646 - RNA, 19 nt, Artificial Sequence
  Description of Artificial Sequence: Synthetic oligonucleotide
uccguggaugagaacaucu

SEQ ID NO: 343647 - RNA, 19 nt, Artificial Sequence
  Description of Artificial Sequence: Synthetic oligonucleotide
gucuuaaaggccugguccc

SEQ ID NO: 343648 - RNA, 19 nt, Artificial Sequence
  Description of Artificial Sequence: Synthetic oligonucleotide
uguaggcucaucgagguau

SEQ ID NO: 343649 - RNA, 19 nt, Artificial Sequence
  Description of Artificial Sequence: Synthetic oligonucleotide
gacuguaggcucaucgagg

SEQ ID NO: 343650 - RNA, 19 nt, Artificial Sequence
  Description of Artificial Sequence: Synthetic oligonucleotide
ucgaguagagauugugugu

SEQ ID NO: 343651 - RNA, 19 nt, Artificial Sequence
  Description of Artificial Sequence: Synthetic oligonucleotide
auauggaggcacuuuucug

SEQ ID NO: 343652 - RNA, 19 nt, Artificial Sequence
  Description of Artificial Sequence: Synthetic oligonucleotide
gguuucacaucauacacga

SEQ ID NO: 343653 - RNA, 19 nt, Artificial Sequence
  Description of Artificial Sequence: Synthetic oligonucleotide
aacuucccagaugaggcag

SEQ ID NO: 343654 - RNA, 19 nt, Artificial Sequence
  Description of Artificial Sequence: Synthetic oligonucleotide
caauuuugcccaagcagac

SEQ ID NO: 343655 - RNA, 19 nt, Artificial Sequence
  Description of Artificial Sequence: Synthetic oligonucleotide
uccucaucgucccaucugu

SEQ ID NO: 343656 - RNA, 19 nt, Artificial Sequence
  Description of Artificial Sequence: Synthetic oligonucleotide
uauuguggcucugauuaug

SEQ ID NO: 343657 - RNA, 19 nt, Artificial Sequence
  Description of Artificial Sequence: Synthetic oligonucleotide
uauucgcuugcuagccggg

SEQ ID NO: 343658 - RNA, 19 nt, Artificial Sequence
  Description of Artificial Sequence: Synthetic oligonucleotide
gaguagagauugugugugg

SEQ ID NO: 343659 - RNA, 19 nt, Artificial Sequence
  Description of Artificial Sequence: Synthetic oligonucleotide
ucuccaacccaucaauaua

SEQ ID NO: 343660 - RNA, 19 nt, Artificial Sequence
  Description of Artificial Sequence: Synthetic oligonucleotide
ucuucaccccagaagucug

SEQ ID NO: 343661 - RNA, 19 nt, Artificial Sequence
  Description of Artificial Sequence: Synthetic oligonucleotide
cuaugucuaguacuagcac

SEQ ID NO: 343662 - RNA, 19 nt, Artificial Sequence
  Description of Artificial Sequence: Synthetic oligonucleotide
ucuuaaaggccuggucccg

SEQ ID NO: 343663 - RNA, 19 nt, Artificial Sequence
  Description of Artificial Sequence: Synthetic oligonucleotide
cuccggaggaucauacugc

SEQ ID NO: 343664 - RNA, 19 nt, Artificial Sequence
  Description of Artificial Sequence: Synthetic oligonucleotide
uggguguugacuguaggcu

SEQ ID NO: 343665 - RNA, 19 nt, Artificial Sequence
  Description of Artificial Sequence: Synthetic oligonucleotide
cuugugccgacagaagucc

SEQ ID NO: 343666 - RNA, 19 nt, Artificial Sequence
  Description of Artificial Sequence: Synthetic oligonucleotide
accagcucgcaguaauggg

SEQ ID NO: 343667 - RNA, 19 nt, Artificial Sequence
  Description of Artificial Sequence: Synthetic oligonucleotide
agucuagacucuugcuuag

SEQ ID NO: 343668 - RNA, 19 nt, Artificial Sequence
  Description of Artificial Sequence: Synthetic oligonucleotide
uugggacguacuuuggggu

SEQ ID NO: 343669 - RNA, 19 nt, Artificial Sequence
  Description of Artificial Sequence: Synthetic oligonucleotide
ucggaugucguaggugugg

SEQ ID NO: 343670 - RNA, 19 nt, Artificial Sequence
  Description of Artificial Sequence: Synthetic oligonucleotide
acccauugaaaacuuccca

SEQ ID NO: 343671 - RNA, 19 nt, Artificial Sequence
  Description of Artificial Sequence: Synthetic oligonucleotide
aauuuugcccaagcagacu

SEQ ID NO: 343672 - RNA, 19 nt, Artificial Sequence
  Description of Artificial Sequence: Synthetic oligonucleotide
ugaugauaccccagucaca

SEQ ID NO: 343673 - RNA, 19 nt, Artificial Sequence
  Description of Artificial Sequence: Synthetic oligonucleotide
agaaggcggaugcgcaugg

SEQ ID NO: 343674 - RNA, 19 nt, Artificial Sequence
  Description of Artificial Sequence: Synthetic oligonucleotide
gacccauugaaaacuuccc

SEQ ID NO: 343675 - RNA, 19 nt, Artificial Sequence
  Description of Artificial Sequence: Synthetic oligonucleotide
gagucuagacucuugcuua

SEQ ID NO: 343676 - RNA, 19 nt, Artificial Sequence
  Description of Artificial Sequence: Synthetic oligonucleotide
aaagccaaggacacccgca

SEQ ID NO: 343677 - RNA, 19 nt, Artificial Sequence
  Description of Artificial Sequence: Synthetic oligonucleotide
augauuggaagugcccagg

SEQ ID NO: 343678 - RNA, 19 nt, Artificial Sequence
  Description of Artificial Sequence: Synthetic oligonucleotide
gaagaggggcgugaggacc

SEQ ID NO: 343679 - RNA, 19 nt, Artificial Sequence
  Description of Artificial Sequence: Synthetic oligonucleotide
ugcuacuguuaucagccaa

SEQ ID NO: 343680 - RNA, 19 nt, Artificial Sequence
  Description of Artificial Sequence: Synthetic oligonucleotide
auccaucgaguagagauug

SEQ ID NO: 343681 - RNA, 19 nt, Artificial Sequence
  Description of Artificial Sequence: Synthetic oligonucleotide
gagccaauuuugcccaagc

SEQ ID NO: 343682 - RNA, 19 nt, Artificial Sequence
  Description of Artificial Sequence: Synthetic oligonucleotide
gcagucguugaccaggaag

SEQ ID NO: 343683 - RNA, 19 nt, Artificial Sequence
  Description of Artificial Sequence: Synthetic oligonucleotide
gucuaguacuagcacugag

SEQ ID NO: 343684 - RNA, 19 nt, Artificial Sequence
  Description of Artificial Sequence: Synthetic oligonucleotide
ugcucucagccuccaagcc

SEQ ID NO: 343685 - RNA, 19 nt, Artificial Sequence
  Description of Artificial Sequence: Synthetic oligonucleotide
ucgcuugcuagccgggugc

SEQ ID NO: 343686 - RNA, 19 nt, Artificial Sequence
  Description of Artificial Sequence: Synthetic oligonucleotide
gguaggagccaauuuugcc

SEQ ID NO: 343687 - RNA, 19 nt, Artificial Sequence
  Description of Artificial Sequence: Synthetic oligonucleotide
gacuugacugucugcuccc

SEQ ID NO: 343688 - RNA, 19 nt, Artificial Sequence
  Description of Artificial Sequence: Synthetic oligonucleotide
ggauggugcaaaugggucc

SEQ ID NO: 343689 - RNA, 19 nt, Artificial Sequence
  Description of Artificial Sequence: Synthetic oligonucleotide
cccauugaaaacuucccag

SEQ ID NO: 343690 - RNA, 19 nt, Artificial Sequence
  Description of Artificial Sequence: Synthetic oligonucleotide
guugcagcggaugggaccc

SEQ ID NO: 343691 - RNA, 19 nt, Artificial Sequence
  Description of Artificial Sequence: Synthetic oligonucleotide
guuaucagccaacuccgga

SEQ ID NO: 343692 - RNA, 19 nt, Artificial Sequence
  Description of Artificial Sequence: Synthetic oligonucleotide
uucgcuugcuagccgggug

SEQ ID NO: 343693 - RNA, 19 nt, Artificial Sequence
  Description of Artificial Sequence: Synthetic oligonucleotide
augauaccccagucacagc

SEQ ID NO: 343694 - RNA, 19 nt, Artificial Sequence
  Description of Artificial Sequence: Synthetic oligonucleotide
cuagaugugccuggccugg

SEQ ID NO: 343695 - RNA, 19 nt, Artificial Sequence
  Description of Artificial Sequence: Synthetic oligonucleotide
gagaguuuugaggcguuug

SEQ ID NO: 343696 - RNA, 19 nt, Artificial Sequence
  Description of Artificial Sequence: Synthetic oligonucleotide
uucaccugucugcucucag

SEQ ID NO: 343697 - RNA, 19 nt, Artificial Sequence
  Description of Artificial Sequence: Synthetic oligonucleotide
augagucuagacucuugcu

SEQ ID NO: 343698 - RNA, 19 nt, Artificial Sequence
  Description of Artificial Sequence: Synthetic oligonucleotide
ggacuugacugucugcucc

SEQ ID NO: 343699 - RNA, 19 nt, Artificial Sequence
  Description of Artificial Sequence: Synthetic oligonucleotide
gguugggacguacuuuggg

SEQ ID NO: 343700 - RNA, 19 nt, Artificial Sequence
  Description of Artificial Sequence: Synthetic oligonucleotide
acgauauggaggcacuuuu

SEQ ID NO: 343701 - RNA, 19 nt, Artificial Sequence
  Description of Artificial Sequence: Synthetic oligonucleotide
aacuccggaggaucauacu

SEQ ID NO: 343702 - RNA, 19 nt, Artificial Sequence
  Description of Artificial Sequence: Synthetic oligonucleotide
ggaugcugcauggacaucc

SEQ ID NO: 343703 - RNA, 19 nt, Artificial Sequence
  Description of Artificial Sequence: Synthetic oligonucleotide
cuaguacuagcacugaggu

SEQ ID NO: 343704 - RNA, 19 nt, Artificial Sequence
  Description of Artificial Sequence: Synthetic oligonucleotide
guagagauuguguguggca

SEQ ID NO: 343705 - RNA, 19 nt, Artificial Sequence
  Description of Artificial Sequence: Synthetic oligonucleotide
agccaauuuugcccaagca

SEQ ID NO: 343706 - RNA, 19 nt, Artificial Sequence
  Description of Artificial Sequence: Synthetic oligonucleotide
uguuggggugucaggggca

SEQ ID NO: 343707 - RNA, 19 nt, Artificial Sequence
  Description of Artificial Sequence: Synthetic oligonucleotide
uccggaggaucauacugcu

SEQ ID NO: 343708 - RNA, 19 nt, Artificial Sequence
  Description of Artificial Sequence: Synthetic oligonucleotide
uuucgaagggcagcugccc

SEQ ID NO: 343709 - RNA, 19 nt, Artificial Sequence
  Description of Artificial Sequence: Synthetic oligonucleotide
gcaguaaugggucaccaga

SEQ ID NO: 343710 - RNA, 19 nt, Artificial Sequence
  Description of Artificial Sequence: Synthetic oligonucleotide
caacuccggaggaucauac

SEQ ID NO: 343711 - RNA, 19 nt, Artificial Sequence
  Description of Artificial Sequence: Synthetic oligonucleotide
acacccgcaacccgggaug

SEQ ID NO: 343712 - RNA, 19 nt, Artificial Sequence
  Description of Artificial Sequence: Synthetic oligonucleotide
cucaugaagccaccaggug

SEQ ID NO: 343713 - RNA, 19 nt, Artificial Sequence
  Description of Artificial Sequence: Synthetic oligonucleotide
ugccuugagguauguuccc

SEQ ID NO: 343714 - RNA, 19 nt, Artificial Sequence
  Description of Artificial Sequence: Synthetic oligonucleotide
cagggauacccuugcuggg

SEQ ID NO: 343715 - RNA, 19 nt, Artificial Sequence
  Description of Artificial Sequence: Synthetic oligonucleotide
auuguggcucugauuaugu

SEQ ID NO: 343716 - RNA, 19 nt, Artificial Sequence
  Description of Artificial Sequence: Synthetic oligonucleotide
cucaucgagguauuggaua

SEQ ID NO: 343717 - RNA, 19 nt, Artificial Sequence
  Description of Artificial Sequence: Synthetic oligonucleotide
cuuaaaggccuggucccgc

SEQ ID NO: 343718 - RNA, 19 nt, Artificial Sequence
  Description of Artificial Sequence: Synthetic oligonucleotide
accccaguuauauucgcuu

SEQ ID NO: 343719 - RNA, 19 nt, Artificial Sequence
  Description of Artificial Sequence: Synthetic oligonucleotide
gcucugauuauguacacua

SEQ ID NO: 343720 - RNA, 19 nt, Artificial Sequence
  Description of Artificial Sequence: Synthetic oligonucleotide
agauuucucaggguccaca

SEQ ID NO: 343721 - RNA, 19 nt, Artificial Sequence
  Description of Artificial Sequence: Synthetic oligonucleotide
guaaugggucaccagagau

SEQ ID NO: 343722 - RNA, 19 nt, Artificial Sequence
  Description of Artificial Sequence: Synthetic oligonucleotide
agaauuuauuguggcucug

SEQ ID NO: 343723 - RNA, 19 nt, Artificial Sequence
  Description of Artificial Sequence: Synthetic oligonucleotide
guauguucccagugggguc

SEQ ID NO: 343724 - RNA, 19 nt, Artificial Sequence
  Description of Artificial Sequence: Synthetic oligonucleotide
uggguaggauccuccgaca

SEQ ID NO: 343725 - RNA, 19 nt, Artificial Sequence
  Description of Artificial Sequence: Synthetic oligonucleotide
agccuugcaaagugcuuca

SEQ ID NO: 343726 - RNA, 19 nt, Artificial Sequence
  Description of Artificial Sequence: Synthetic oligonucleotide
gagguuggucucauucagc

SEQ ID NO: 343727 - RNA, 19 nt, Artificial Sequence
  Description of Artificial Sequence: Synthetic oligonucleotide
cagcucgcaguaauggguc

SEQ ID NO: 343728 - RNA, 19 nt, Artificial Sequence
  Description of Artificial Sequence: Synthetic oligonucleotide
cguacuuugggguuggcuc

SEQ ID NO: 343729 - RNA, 19 nt, Artificial Sequence
  Description of Artificial Sequence: Synthetic oligonucleotide
ccuaugucuaguacuagca

SEQ ID NO: 343730 - RNA, 19 nt, Artificial Sequence
  Description of Artificial Sequence: Synthetic oligonucleotide
cagccuugcaaagugcuuc

SEQ ID NO: 343731 - RNA, 19 nt, Artificial Sequence
  Description of Artificial Sequence: Synthetic oligonucleotide
cugauuccaaagguuugug

SEQ ID NO: 343732 - RNA, 19 nt, Artificial Sequence
  Description of Artificial Sequence: Synthetic oligonucleotide
gugagugaugauaccccag

SEQ ID NO: 343733 - RNA, 19 nt, Artificial Sequence
  Description of Artificial Sequence: Synthetic oligonucleotide
aggguuucgaagggcagcu

SEQ ID NO: 343734 - RNA, 19 nt, Artificial Sequence
  Description of Artificial Sequence: Synthetic oligonucleotide
agaugugccuggccuggug

SEQ ID NO: 343735 - RNA, 19 nt, Artificial Sequence
  Description of Artificial Sequence: Synthetic oligonucleotide
ggcucaucgagguauugga

SEQ ID NO: 343736 - RNA, 19 nt, Artificial Sequence
  Description of Artificial Sequence: Synthetic oligonucleotide
uggacuugacugucugcuc

SEQ ID NO: 343737 - RNA, 19 nt, Artificial Sequence
  Description of Artificial Sequence: Synthetic oligonucleotide
uggcucugauuauguacac

SEQ ID NO: 343738 - RNA, 19 nt, Artificial Sequence
  Description of Artificial Sequence: Synthetic oligonucleotide
gccgacagaaguccucagg

SEQ ID NO: 343739 - RNA, 19 nt, Artificial Sequence
  Description of Artificial Sequence: Synthetic oligonucleotide
cacggauaagcuuggaggu

SEQ ID NO: 343740 - RNA, 19 nt, Artificial Sequence
  Description of Artificial Sequence: Synthetic oligonucleotide
uaguacuagcacugaggua

SEQ ID NO: 343741 - RNA, 19 nt, Artificial Sequence
  Description of Artificial Sequence: Synthetic oligonucleotide
gacccuaugucuaguacua

SEQ ID NO: 343742 - RNA, 19 nt, Artificial Sequence
  Description of Artificial Sequence: Synthetic oligonucleotide
cucgcaguaaugggucacc

SEQ ID NO: 343743 - RNA, 19 nt, Artificial Sequence
  Description of Artificial Sequence: Synthetic oligonucleotide
ggcggaugcgcauggcacg

SEQ ID NO: 343744 - RNA, 19 nt, Artificial Sequence
  Description of Artificial Sequence: Synthetic oligonucleotide
uugacacuccagucacccu

SEQ ID NO: 343745 - RNA, 19 nt, Artificial Sequence
  Description of Artificial Sequence: Synthetic oligonucleotide
ugggacguacuuugggguu

SEQ ID NO: 343746 - RNA, 19 nt, Artificial Sequence
  Description of Artificial Sequence: Synthetic oligonucleotide
guacuagcacugagguagg

SEQ ID NO: 343747 - RNA, 19 nt, Artificial Sequence
  Description of Artificial Sequence: Synthetic oligonucleotide
uaaggccgcagagcacagg

SEQ ID NO: 343748 - RNA, 19 nt, Artificial Sequence
  Description of Artificial Sequence: Synthetic oligonucleotide
cccaguuauauucgcuugc

SEQ ID NO: 343749 - RNA, 19 nt, Artificial Sequence
  Description of Artificial Sequence: Synthetic oligonucleotide
acggauaagcuuggaggug

SEQ ID NO: 343750 - RNA, 19 nt, Artificial Sequence
  Description of Artificial Sequence: Synthetic oligonucleotide
guuggguaggauccuccga

SEQ ID NO: 343751 - RNA, 19 nt, Artificial Sequence
  Description of Artificial Sequence: Synthetic oligonucleotide
uggucccgcacagauuucu

SEQ ID NO: 343752 - RNA, 19 nt, Artificial Sequence
  Description of Artificial Sequence: Synthetic oligonucleotide
gucguugaccaggaagcug

SEQ ID NO: 343753 - RNA, 19 nt, Artificial Sequence
  Description of Artificial Sequence: Synthetic oligonucleotide
ucgcaguaaugggucacca

SEQ ID NO: 343754 - RNA, 19 nt, Artificial Sequence
  Description of Artificial Sequence: Synthetic oligonucleotide
ccgcacagauuucucaggg

SEQ ID NO: 343755 - RNA, 19 nt, Artificial Sequence
  Description of Artificial Sequence: Synthetic oligonucleotide
gugcccggcaguucugcag

SEQ ID NO: 343756 - RNA, 19 nt, Artificial Sequence
  Description of Artificial Sequence: Synthetic oligonucleotide
ggauacccuugcugggugg

SEQ ID NO: 343757 - RNA, 19 nt, Artificial Sequence
  Description of Artificial Sequence: Synthetic oligonucleotide
cuuggacaggaagcuucgg

SEQ ID NO: 343758 - RNA, 19 nt, Artificial Sequence
  Description of Artificial Sequence: Synthetic oligonucleotide
aggugcccggcaguucugc

SEQ ID NO: 343759 - RNA, 19 nt, Artificial Sequence
  Description of Artificial Sequence: Synthetic oligonucleotide
ugccgacagaaguccucag

SEQ ID NO: 343760 - RNA, 19 nt, Artificial Sequence
  Description of Artificial Sequence: Synthetic oligonucleotide
aucgucccaucugucagca

SEQ ID NO: 343761 - RNA, 19 nt, Artificial Sequence
  Description of Artificial Sequence: Synthetic oligonucleotide
gucuccaacccaucaauau

SEQ ID NO: 343762 - RNA, 19 nt, Artificial Sequence
  Description of Artificial Sequence: Synthetic oligonucleotide
agcucgcaguaauggguca

SEQ ID NO: 343763 - RNA, 19 nt, Artificial Sequence
  Description of Artificial Sequence: Synthetic oligonucleotide
ccagucacccugcugugcc

SEQ ID NO: 343764 - RNA, 19 nt, Artificial Sequence
  Description of Artificial Sequence: Synthetic oligonucleotide
gaagcuucggauggucuua

SEQ ID NO: 343765 - RNA, 19 nt, Artificial Sequence
  Description of Artificial Sequence: Synthetic oligonucleotide
uaggguugucaguccaguu

SEQ ID NO: 343766 - RNA, 19 nt, Artificial Sequence
  Description of Artificial Sequence: Synthetic oligonucleotide
acguacuuugggguuggcu

SEQ ID NO: 343767 - RNA, 19 nt, Artificial Sequence
  Description of Artificial Sequence: Synthetic oligonucleotide
gucucggaugucguaggug

SEQ ID NO: 343768 - RNA, 19 nt, Artificial Sequence
  Description of Artificial Sequence: Synthetic oligonucleotide
gguaggauccuccgacaca

SEQ ID NO: 343769 - RNA, 19 nt, Artificial Sequence
  Description of Artificial Sequence: Synthetic oligonucleotide
cagcccgguccacaaacac

SEQ ID NO: 343770 - RNA, 19 nt, Artificial Sequence
  Description of Artificial Sequence: Synthetic oligonucleotide
agcugagagcuuucacgau

SEQ ID NO: 343771 - RNA, 19 nt, Artificial Sequence
  Description of Artificial Sequence: Synthetic oligonucleotide
aguggucucggaugucgua

SEQ ID NO: 343772 - RNA, 19 nt, Artificial Sequence
  Description of Artificial Sequence: Synthetic oligonucleotide
gucuagacucuugcuuagc

SEQ ID NO: 343773 - RNA, 19 nt, Artificial Sequence
  Description of Artificial Sequence: Synthetic oligonucleotide
aacccgggauggugcaaau

SEQ ID NO: 343774 - RNA, 19 nt, Artificial Sequence
  Description of Artificial Sequence: Synthetic oligonucleotide
uaggcucaucgagguauug

SEQ ID NO: 343775 - RNA, 19 nt, Artificial Sequence
  Description of Artificial Sequence: Synthetic oligonucleotide
acccuaugucuaguacuag

SEQ ID NO: 343776 - RNA, 19 nt, Artificial Sequence
  Description of Artificial Sequence: Synthetic oligonucleotide
uaggauccuccgacacaga

SEQ ID NO: 343777 - RNA, 19 nt, Artificial Sequence
  Description of Artificial Sequence: Synthetic oligonucleotide
ggacccuaugucuaguacu

SEQ ID NO: 343778 - RNA, 19 nt, Artificial Sequence
  Description of Artificial Sequence: Synthetic oligonucleotide
ggguaggauccuccgacac

SEQ ID NO: 343779 - RNA, 19 nt, Artificial Sequence
  Description of Artificial Sequence: Synthetic oligonucleotide
gguaggguugucaguccag

SEQ ID NO: 343780 - RNA, 19 nt, Artificial Sequence
  Description of Artificial Sequence: Synthetic oligonucleotide
gguauuggauaaacugcuc

SEQ ID NO: 343781 - RNA, 19 nt, Artificial Sequence
  Description of Artificial Sequence: Synthetic oligonucleotide
acgguccguggaugagaac

SEQ ID NO: 343782 - RNA, 19 nt, Artificial Sequence
  Description of Artificial Sequence: Synthetic oligonucleotide
uacuagcacugagguagga

SEQ ID NO: 343783 - RNA, 19 nt, Artificial Sequence
  Description of Artificial Sequence: Synthetic oligonucleotide
ccgacagaaguccucagga

SEQ ID NO: 343784 - RNA, 19 nt, Artificial Sequence
  Description of Artificial Sequence: Synthetic oligonucleotide
cacagucauccaucgagua

SEQ ID NO: 343785 - RNA, 19 nt, Artificial Sequence
  Description of Artificial Sequence: Synthetic oligonucleotide
ccaucgaguagagauugug

SEQ ID NO: 343786 - RNA, 19 nt, Artificial Sequence
  Description of Artificial Sequence: Synthetic oligonucleotide
ccacucgccagcccggucc

SEQ ID NO: 343787 - RNA, 19 nt, Artificial Sequence
  Description of Artificial Sequence: Synthetic oligonucleotide
cucggcuccggguuucaca

SEQ ID NO: 343788 - RNA, 19 nt, Artificial Sequence
  Description of Artificial Sequence: Synthetic oligonucleotide
cagccaacuccggaggauc

SEQ ID NO: 343789 - RNA, 19 nt, Artificial Sequence
  Description of Artificial Sequence: Synthetic oligonucleotide
cugaccugugcagcucggc

SEQ ID NO: 343790 - RNA, 19 nt, Artificial Sequence
  Description of Artificial Sequence: Synthetic oligonucleotide
auucgcuugcuagccgggu

SEQ ID NO: 343791 - RNA, 19 nt, Artificial Sequence
  Description of Artificial Sequence: Synthetic oligonucleotide
ucguagguguggggugugc

SEQ ID NO: 343792 - RNA, 19 nt, Artificial Sequence
  Description of Artificial Sequence: Synthetic oligonucleotide
uugcuagccgggugccuuc

SEQ ID NO: 343793 - RNA, 19 nt, Artificial Sequence
  Description of Artificial Sequence: Synthetic oligonucleotide
ccccaguuauauucgcuug

SEQ ID NO: 343794 - RNA, 19 nt, Artificial Sequence
  Description of Artificial Sequence: Synthetic oligonucleotide
guaaggccgcagagcacag

SEQ ID NO: 343795 - RNA, 19 nt, Artificial Sequence
  Description of Artificial Sequence: Synthetic oligonucleotide
ggacguacuuugggguugg

SEQ ID NO: 343796 - RNA, 19 nt, Artificial Sequence
  Description of Artificial Sequence: Synthetic oligonucleotide
gaaggcggaugcgcauggc

SEQ ID NO: 343797 - RNA, 19 nt, Artificial Sequence
  Description of Artificial Sequence: Synthetic oligonucleotide
agcccgguccacaaacaca

SEQ ID NO: 343798 - RNA, 19 nt, Artificial Sequence
  Description of Artificial Sequence: Synthetic oligonucleotide
ugcagucguugaccaggaa

SEQ ID NO: 343799 - RNA, 19 nt, Artificial Sequence
  Description of Artificial Sequence: Synthetic oligonucleotide
caguccaguuuccgggcuc

SEQ ID NO: 343800 - RNA, 19 nt, Artificial Sequence
  Description of Artificial Sequence: Synthetic oligonucleotide
cacgguccguggaugagaa

SEQ ID NO: 343801 - RNA, 19 nt, Artificial Sequence
  Description of Artificial Sequence: Synthetic oligonucleotide
cggguugggacguacuuug

SEQ ID NO: 343802 - RNA, 19 nt, Artificial Sequence
  Description of Artificial Sequence: Synthetic oligonucleotide
ugcagcggaugggacccug

SEQ ID NO: 343803 - RNA, 19 nt, Artificial Sequence
  Description of Artificial Sequence: Synthetic oligonucleotide
ggagccaauuuugcccaag

SEQ ID NO: 343804 - RNA, 19 nt, Artificial Sequence
  Description of Artificial Sequence: Synthetic oligonucleotide
ucgucccaucugucagcag

SEQ ID NO: 343805 - RNA, 19 nt, Artificial Sequence
  Description of Artificial Sequence: Synthetic oligonucleotide
gggacguacuuugggguug

SEQ ID NO: 343806 - RNA, 19 nt, Artificial Sequence
  Description of Artificial Sequence: Synthetic oligonucleotide
uucccagaugaggcagcca

SEQ ID NO: 343807 - RNA, 19 nt, Artificial Sequence
  Description of Artificial Sequence: Synthetic oligonucleotide
ucgccagcccgguccacaa

SEQ ID NO: 343808 - RNA, 19 nt, Artificial Sequence
  Description of Artificial Sequence: Synthetic oligonucleotide
agaggggcgugaggaccac

SEQ ID NO: 343809 - RNA, 19 nt, Artificial Sequence
  Description of Artificial Sequence: Synthetic oligonucleotide
gguugucaguccaguuucc

SEQ ID NO: 343810 - RNA, 19 nt, Artificial Sequence
  Description of Artificial Sequence: Synthetic oligonucleotide
caguuauauucgcuugcua

SEQ ID NO: 343811 - RNA, 19 nt, Artificial Sequence
  Description of Artificial Sequence: Synthetic oligonucleotide
gauacccuugcuggguggu

SEQ ID NO: 343812 - RNA, 19 nt, Artificial Sequence
  Description of Artificial Sequence: Synthetic oligonucleotide
cacccgcaacccgggaugg

SEQ ID NO: 343813 - RNA, 19 nt, Artificial Sequence
  Description of Artificial Sequence: Synthetic oligonucleotide
gcuggagaaggcggaugcg

SEQ ID NO: 343814 - RNA, 19 nt, Artificial Sequence
  Description of Artificial Sequence: Synthetic oligonucleotide
gaggcguuugaaggcagcu

SEQ ID NO: 343815 - RNA, 19 nt, Artificial Sequence
  Description of Artificial Sequence: Synthetic oligonucleotide
ggaaaugagucuagacucu

SEQ ID NO: 343816 - RNA, 19 nt, Artificial Sequence
  Description of Artificial Sequence: Synthetic oligonucleotide
agcggccaugcagacauua

SEQ ID NO: 343817 - RNA, 19 nt, Artificial Sequence
  Description of Artificial Sequence: Synthetic oligonucleotide
cugcuacuguuaucagcca

SEQ ID NO: 343818 - RNA, 19 nt, Artificial Sequence
  Description of Artificial Sequence: Synthetic oligonucleotide
uccacucgccagcccgguc

SEQ ID NO: 343819 - RNA, 19 nt, Artificial Sequence
  Description of Artificial Sequence: Synthetic oligonucleotide
gcggaugcgcauggcacgg

SEQ ID NO: 343820 - RNA, 19 nt, Artificial Sequence
  Description of Artificial Sequence: Synthetic oligonucleotide
uguugacuguaggcucauc

SEQ ID NO: 343821 - RNA, 19 nt, Artificial Sequence
  Description of Artificial Sequence: Synthetic oligonucleotide
ccaccccaguuauauucgc

SEQ ID NO: 343822 - RNA, 19 nt, Artificial Sequence
  Description of Artificial Sequence: Synthetic oligonucleotide
cgguugcucaugaagccac

SEQ ID NO: 343823 - RNA, 19 nt, Artificial Sequence
  Description of Artificial Sequence: Synthetic oligonucleotide
caaagcgguugcucaugaa

SEQ ID NO: 343824 - RNA, 19 nt, Artificial Sequence
  Description of Artificial Sequence: Synthetic oligonucleotide
gguugcucaugaagccacc

SEQ ID NO: 343825 - RNA, 19 nt, Artificial Sequence
  Description of Artificial Sequence: Synthetic oligonucleotide
acccgggauggugcaaaug

SEQ ID NO: 343826 - RNA, 19 nt, Artificial Sequence
  Description of Artificial Sequence: Synthetic oligonucleotide
ccuugacacuccagucacc

SEQ ID NO: 343827 - RNA, 19 nt, Artificial Sequence
  Description of Artificial Sequence: Synthetic oligonucleotide
agcuucggauggucuuaaa

SEQ ID NO: 343828 - RNA, 19 nt, Artificial Sequence
  Description of Artificial Sequence: Synthetic oligonucleotide
ggguugggacguacuuugg

SEQ ID NO: 343829 - RNA, 19 nt, Artificial Sequence
  Description of Artificial Sequence: Synthetic oligonucleotide
ccaaggcgccacaugucug

SEQ ID NO: 343830 - RNA, 19 nt, Artificial Sequence
  Description of Artificial Sequence: Synthetic oligonucleotide
agggacccauugaaaacuu

SEQ ID NO: 343831 - RNA, 19 nt, Artificial Sequence
  Description of Artificial Sequence: Synthetic oligonucleotide
ccgcaacccgggauggugc

SEQ ID NO: 343832 - RNA, 19 nt, Artificial Sequence
  Description of Artificial Sequence: Synthetic oligonucleotide
ggucguccuuggcuugcag

SEQ ID NO: 343833 - RNA, 19 nt, Artificial Sequence
  Description of Artificial Sequence: Synthetic oligonucleotide
cuuugacugcucugcuacu

SEQ ID NO: 343834 - RNA, 19 nt, Artificial Sequence
  Description of Artificial Sequence: Synthetic oligonucleotide
gacguacuuugggguuggc

SEQ ID NO: 343835 - RNA, 19 nt, Artificial Sequence
  Description of Artificial Sequence: Synthetic oligonucleotide
gcucaugaagccaccaggu

SEQ ID NO: 343836 - RNA, 19 nt, Artificial Sequence
  Description of Artificial Sequence: Synthetic oligonucleotide
cuggucccgcacagauuuc

SEQ ID NO: 343837 - RNA, 19 nt, Artificial Sequence
  Description of Artificial Sequence: Synthetic oligonucleotide
ugcgcauggcacgguccgu

SEQ ID NO: 343838 - RNA, 19 nt, Artificial Sequence
  Description of Artificial Sequence: Synthetic oligonucleotide
ggaagcuucggauggucuu

SEQ ID NO: 343839 - RNA, 19 nt, Artificial Sequence
  Description of Artificial Sequence: Synthetic oligonucleotide
accguugcccugggcugag

SEQ ID NO: 343840 - RNA, 19 nt, Artificial Sequence
  Description of Artificial Sequence: Synthetic oligonucleotide
caccccaguuauauucgcu

SEQ ID NO: 343841 - RNA, 19 nt, Artificial Sequence
  Description of Artificial Sequence: Synthetic oligonucleotide
gucauccaucgaguagaga

SEQ ID NO: 343842 - RNA, 19 nt, Artificial Sequence
  Description of Artificial Sequence: Synthetic oligonucleotide
caacccgggauggugcaaa

SEQ ID NO: 343843 - RNA, 19 nt, Artificial Sequence
  Description of Artificial Sequence: Synthetic oligonucleotide
cgguccguggaugagaaca

SEQ ID NO: 343844 - RNA, 19 nt, Artificial Sequence
  Description of Artificial Sequence: Synthetic oligonucleotide
gagccggguugggacguac

SEQ ID NO: 343845 - RNA, 19 nt, Artificial Sequence
  Description of Artificial Sequence: Synthetic oligonucleotide
gcucgcaguaaugggucac

SEQ ID NO: 343846 - RNA, 19 nt, Artificial Sequence
  Description of Artificial Sequence: Synthetic oligonucleotide
cauggcacgguccguggau

SEQ ID NO: 343847 - RNA, 19 nt, Artificial Sequence
  Description of Artificial Sequence: Synthetic oligonucleotide
gcagcggaugggacccugg

SEQ ID NO: 343848 - RNA, 19 nt, Artificial Sequence
  Description of Artificial Sequence: Synthetic oligonucleotide
gcugaccugugcagcucgg

SEQ ID NO: 343849 - RNA, 19 nt, Artificial Sequence
  Description of Artificial Sequence: Synthetic oligonucleotide
cccaguugucuucacccca

SEQ ID NO: 343850 - RNA, 19 nt, Artificial Sequence
  Description of Artificial Sequence: Synthetic oligonucleotide
cauccgccaggccugcucu

SEQ ID NO: 343851 - RNA, 19 nt, Artificial Sequence
  Description of Artificial Sequence: Synthetic oligonucleotide
ggcacgguccguggaugag

SEQ ID NO: 343852 - RNA, 19 nt, Artificial Sequence
  Description of Artificial Sequence: Synthetic oligonucleotide
gcgguugcucaugaagcca

SEQ ID NO: 343853 - RNA, 19 nt, Artificial Sequence
  Description of Artificial Sequence: Synthetic oligonucleotide
caucgagguauuggauaaa

SEQ ID NO: 343854 - RNA, 19 nt, Artificial Sequence
  Description of Artificial Sequence: Synthetic oligonucleotide
ggauccuccgacacagacu

SEQ ID NO: 343855 - RNA, 19 nt, Artificial Sequence
  Description of Artificial Sequence: Synthetic oligonucleotide
acucgccagcccgguccac

SEQ ID NO: 343856 - RNA, 19 nt, Artificial Sequence
  Description of Artificial Sequence: Synthetic oligonucleotide
ggguccuuaguggcccggc

SEQ ID NO: 343857 - RNA, 19 nt, Artificial Sequence
  Description of Artificial Sequence: Synthetic oligonucleotide
gcgcauggcacgguccgug

SEQ ID NO: 343858 - RNA, 19 nt, Artificial Sequence
  Description of Artificial Sequence: Synthetic oligonucleotide
cacucgccagcccggucca

SEQ ID NO: 343859 - RNA, 19 nt, Artificial Sequence
  Description of Artificial Sequence: Synthetic oligonucleotide
cucgccagcccgguccaca

SEQ ID NO: 343860 - RNA, 19 nt, Artificial Sequence
  Description of Artificial Sequence: Synthetic oligonucleotide
gugaccaggcucacauggu

SEQ ID NO: 343861 - RNA, 19 nt, Artificial Sequence
  Description of Artificial Sequence: Synthetic oligonucleotide
cccgcaacccgggauggug

SEQ ID NO: 343862 - RNA, 19 nt, Artificial Sequence
  Description of Artificial Sequence: Synthetic oligonucleotide
agccggguugggacguacu

SEQ ID NO: 343863 - RNA, 19 nt, Artificial Sequence
  Description of Artificial Sequence: Synthetic oligonucleotide
cacgauauggaggcacuuu

SEQ ID NO: 343864 - RNA, 19 nt, Artificial Sequence
  Description of Artificial Sequence: Synthetic oligonucleotide
cuugcuagccgggugccuu

SEQ ID NO: 343865 - RNA, 19 nt, Artificial Sequence
  Description of Artificial Sequence: Synthetic oligonucleotide
ggugcccggcaguucugca

SEQ ID NO: 343866 - RNA, 19 nt, Artificial Sequence
  Description of Artificial Sequence: Synthetic oligonucleotide
cuguaggcucaucgaggua

SEQ ID NO: 343867 - RNA, 19 nt, Artificial Sequence
  Description of Artificial Sequence: Synthetic oligonucleotide
gggugugcacggauaagcu

SEQ ID NO: 343868 - RNA, 19 nt, Artificial Sequence
  Description of Artificial Sequence: Synthetic oligonucleotide
uugcagcggaugggacccu

SEQ ID NO: 343869 - RNA, 19 nt, Artificial Sequence
  Description of Artificial Sequence: Synthetic oligonucleotide
gcacagucauccaucgagu

SEQ ID NO: 343870 - RNA, 19 nt, Artificial Sequence
  Description of Artificial Sequence: Synthetic oligonucleotide
ggucccgcacagauuucuc

SEQ ID NO: 343871 - RNA, 19 nt, Artificial Sequence
  Description of Artificial Sequence: Synthetic oligonucleotide
gaggggcgugaggaccaca

SEQ ID NO: 343872 - RNA, 19 nt, Artificial Sequence
  Description of Artificial Sequence: Synthetic oligonucleotide
ccggaggaucauacugcuc

SEQ ID NO: 343873 - RNA, 19 nt, Artificial Sequence
  Description of Artificial Sequence: Synthetic oligonucleotide
ggcucugauuauguacacu

SEQ ID NO: 343874 - RNA, 19 nt, Artificial Sequence
  Description of Artificial Sequence: Synthetic oligonucleotide
ccaagccuucccaguuguc

SEQ ID NO: 343875 - RNA, 19 nt, Artificial Sequence
  Description of Artificial Sequence: Synthetic oligonucleotide
ccaguuauauucgcuugcu

SEQ ID NO: 343876 - RNA, 19 nt, Artificial Sequence
  Description of Artificial Sequence: Synthetic oligonucleotide
cgucccaucugucagcagu

SEQ ID NO: 343877 - RNA, 19 nt, Artificial Sequence
  Description of Artificial Sequence: Synthetic oligonucleotide
cugucacgauauggaggca

SEQ ID NO: 343878 - RNA, 19 nt, Artificial Sequence
  Description of Artificial Sequence: Synthetic oligonucleotide
cccaagcagacuguggugu

SEQ ID NO: 343879 - RNA, 19 nt, Artificial Sequence
  Description of Artificial Sequence: Synthetic oligonucleotide
guuuccgggcucccagcuu

SEQ ID NO: 343880 - RNA, 19 nt, Artificial Sequence
  Description of Artificial Sequence: Synthetic oligonucleotide
gcccgcuuggcuuccauuu

SEQ ID NO: 343881 - RNA, 19 nt, Artificial Sequence
  Description of Artificial Sequence: Synthetic oligonucleotide
cagcggaugggacccuggu

SEQ ID NO: 343882 - RNA, 19 nt, Artificial Sequence
  Description of Artificial Sequence: Synthetic oligonucleotide
ccagcccgguccacaaaca

SEQ ID NO: 343883 - RNA, 19 nt, Artificial Sequence
  Description of Artificial Sequence: Synthetic oligonucleotide
gggugccggagaguuuuga

SEQ ID NO: 343884 - RNA, 19 nt, Artificial Sequence
  Description of Artificial Sequence: Synthetic oligonucleotide
gcucaucgagguauuggau

SEQ ID NO: 343885 - RNA, 19 nt, Artificial Sequence
  Description of Artificial Sequence: Synthetic oligonucleotide
cguggaugagaacaucuuu

SEQ ID NO: 343886 - RNA, 19 nt, Artificial Sequence
  Description of Artificial Sequence: Synthetic oligonucleotide
ggggugccggagaguuuug

SEQ ID NO: 343887 - RNA, 19 nt, Artificial Sequence
  Description of Artificial Sequence: Synthetic oligonucleotide
ccaacuccggaggaucaua

SEQ ID NO: 343888 - RNA, 19 nt, Artificial Sequence
  Description of Artificial Sequence: Synthetic oligonucleotide
cgcuugcuagccgggugcc

SEQ ID NO: 343889 - RNA, 19 nt, Artificial Sequence
  Description of Artificial Sequence: Synthetic oligonucleotide
ccggagaguuuugaggcgu

SEQ ID NO: 343890 - RNA, 19 nt, Artificial Sequence
  Description of Artificial Sequence: Synthetic oligonucleotide
ccguggaugagaacaucuu

SEQ ID NO: 343891 - RNA, 19 nt, Artificial Sequence
  Description of Artificial Sequence: Synthetic oligonucleotide
gccggguugggacguacuu

SEQ ID NO: 343892 - RNA, 19 nt, Artificial Sequence
  Description of Artificial Sequence: Synthetic oligonucleotide
cccuugcuggguggucccc

SEQ ID NO: 343893 - RNA, 19 nt, Artificial Sequence
  Description of Artificial Sequence: Synthetic oligonucleotide
gguccacaguaaggccgca

SEQ ID NO: 343894 - RNA, 19 nt, Artificial Sequence
  Description of Artificial Sequence: Synthetic oligonucleotide
cgcaacccgggauggugca

SEQ ID NO: 343895 - RNA, 19 nt, Artificial Sequence
  Description of Artificial Sequence: Synthetic oligonucleotide
gcaacccgggauggugcaa

SEQ ID NO: 343896 - RNA, 19 nt, Artificial Sequence
  Description of Artificial Sequence: Synthetic oligonucleotide
gcggaggugaggacccuau

SEQ ID NO: 343897 - RNA, 19 nt, Artificial Sequence
  Description of Artificial Sequence: Synthetic oligonucleotide
ccuuaguggcccggcugaa

SEQ ID NO: 343898 - RNA, 19 nt, Artificial Sequence
  Description of Artificial Sequence: Synthetic oligonucleotide
ccccaccguugcccugggc

SEQ ID NO: 343899 - RNA, 19 nt, Artificial Sequence
  Description of Artificial Sequence: Synthetic oligonucleotide
gccaacuccggaggaucau

SEQ ID NO: 343900 - RNA, 19 nt, Artificial Sequence
  Description of Artificial Sequence: Synthetic oligonucleotide
gcuugcuagccgggugccu

SEQ ID NO: 343901 - RNA, 19 nt, Artificial Sequence
  Description of Artificial Sequence: Synthetic oligonucleotide
ccggguugggacguacuuu

SEQ ID NO: 343902 - RNA, 19 nt, Artificial Sequence
  Description of Artificial Sequence: Synthetic oligonucleotide
gcuccggguuucacaucau

SEQ ID NO: 343903 - RNA, 19 nt, Artificial Sequence
  Description of Artificial Sequence: Synthetic oligonucleotide
gccuggucccgcacagauu

SEQ ID NO: 343904 - RNA, 19 nt, Artificial Sequence
  Description of Artificial Sequence: Synthetic oligonucleotide
cggaugcgcauggcacggu

SEQ ID NO: 343905 - RNA, 19 nt, Artificial Sequence
  Description of Artificial Sequence: Synthetic oligonucleotide
cgagccggguugggacgua

SEQ ID NO: 343906 - RNA, 19 nt, Artificial Sequence
  Description of Artificial Sequence: Synthetic oligonucleotide
uuuccggucauuuagaagc

SEQ ID NO: 343907 - RNA, 19 nt, Artificial Sequence
  Description of Artificial Sequence: Synthetic oligonucleotide
gaacguaucauacagugcc

SEQ ID NO: 343908 - RNA, 19 nt, Artificial Sequence
  Description of Artificial Sequence: Synthetic oligonucleotide
aaaucuguuuaccauugag

SEQ ID NO: 343909 - RNA, 19 nt, Artificial Sequence
  Description of Artificial Sequence: Synthetic oligonucleotide
aagcaugugaaguaguucu

SEQ ID NO: 343910 - RNA, 19 nt, Artificial Sequence
  Description of Artificial Sequence: Synthetic oligonucleotide
auuugcucgguacauaagg

SEQ ID NO: 343911 - RNA, 19 nt, Artificial Sequence
  Description of Artificial Sequence: Synthetic oligonucleotide
aauuacguuuccuugcuca

SEQ ID NO: 343912 - RNA, 19 nt, Artificial Sequence
  Description of Artificial Sequence: Synthetic oligonucleotide
gaggauaguaugcagcacg

SEQ ID NO: 343913 - RNA, 19 nt, Artificial Sequence
  Description of Artificial Sequence: Synthetic oligonucleotide
gagaacguaucauacagug

SEQ ID NO: 343914 - RNA, 19 nt, Artificial Sequence
  Description of Artificial Sequence: Synthetic oligonucleotide
gcuaaagcuacauagagug

SEQ ID NO: 343915 - RNA, 19 nt, Artificial Sequence
  Description of Artificial Sequence: Synthetic oligonucleotide
gauuguaccaaauggagaa

SEQ ID NO: 343916 - RNA, 19 nt, Artificial Sequence
  Description of Artificial Sequence: Synthetic oligonucleotide
ucggucauuacuuucacac

SEQ ID NO: 343917 - RNA, 19 nt, Artificial Sequence
  Description of Artificial Sequence: Synthetic oligonucleotide
ggcauuaagauguugcugg

SEQ ID NO: 343918 - RNA, 19 nt, Artificial Sequence
  Description of Artificial Sequence: Synthetic oligonucleotide
uuugcgcugagcuaaagcu

SEQ ID NO: 343919 - RNA, 19 nt, Artificial Sequence
  Description of Artificial Sequence: Synthetic oligonucleotide
auaaccuuugcacugguga

SEQ ID NO: 343920 - RNA, 19 nt, Artificial Sequence
  Description of Artificial Sequence: Synthetic oligonucleotide
uguugcaugguaacuugcg

SEQ ID NO: 343921 - RNA, 19 nt, Artificial Sequence
  Description of Artificial Sequence: Synthetic oligonucleotide
gagacguucaucaucaaug

SEQ ID NO: 343922 - RNA, 19 nt, Artificial Sequence
  Description of Artificial Sequence: Synthetic oligonucleotide
ccuuucgagacuuaaaucg

SEQ ID NO: 343923 - RNA, 19 nt, Artificial Sequence
  Description of Artificial Sequence: Synthetic oligonucleotide
uuagcaacacgcugugucg

SEQ ID NO: 343924 - RNA, 19 nt, Artificial Sequence
  Description of Artificial Sequence: Synthetic oligonucleotide
uuugcugcgaccacccucc

SEQ ID NO: 343925 - RNA, 19 nt, Artificial Sequence
  Description of Artificial Sequence: Synthetic oligonucleotide
cagagaacguaucauacag

SEQ ID NO: 343926 - RNA, 19 nt, Artificial Sequence
  Description of Artificial Sequence: Synthetic oligonucleotide
ugagcaauuuggcuaggag

SEQ ID NO: 343927 - RNA, 19 nt, Artificial Sequence
  Description of Artificial Sequence: Synthetic oligonucleotide
uuucugcgcaucuucaugc

SEQ ID NO: 343928 - RNA, 19 nt, Artificial Sequence
  Description of Artificial Sequence: Synthetic oligonucleotide
uuaacacccugguaucugg

SEQ ID NO: 343929 - RNA, 19 nt, Artificial Sequence
  Description of Artificial Sequence: Synthetic oligonucleotide
agaagcaucccauucauuu

SEQ ID NO: 343930 - RNA, 19 nt, Artificial Sequence
  Description of Artificial Sequence: Synthetic oligonucleotide
uucgagacuuaaaucgucc

SEQ ID NO: 343931 - RNA, 19 nt, Artificial Sequence
  Description of Artificial Sequence: Synthetic oligonucleotide
ugggauagcugccaugaag

SEQ ID NO: 343932 - RNA, 19 nt, Artificial Sequence
  Description of Artificial Sequence: Synthetic oligonucleotide
cuugauguaaacguuggug

SEQ ID NO: 343933 - RNA, 19 nt, Artificial Sequence
  Description of Artificial Sequence: Synthetic oligonucleotide
acacuuuccggucauuuag

SEQ ID NO: 343934 - RNA, 19 nt, Artificial Sequence
  Description of Artificial Sequence: Synthetic oligonucleotide
ucaucggucauuacuuuca

SEQ ID NO: 343935 - RNA, 19 nt, Artificial Sequence
  Description of Artificial Sequence: Synthetic oligonucleotide
ugugucgacaugacgcggg

SEQ ID NO: 343936 - RNA, 19 nt, Artificial Sequence
  Description of Artificial Sequence: Synthetic oligonucleotide
aagcacgaguuucuuuucg

SEQ ID NO: 343937 - RNA, 19 nt, Artificial Sequence
  Description of Artificial Sequence: Synthetic oligonucleotide
aauuuggcuaggaggauag

SEQ ID NO: 343938 - RNA, 19 nt, Artificial Sequence
  Description of Artificial Sequence: Synthetic oligonucleotide
uugaauaagagggaacaac

SEQ ID NO: 343939 - RNA, 19 nt, Artificial Sequence
  Description of Artificial Sequence: Synthetic oligonucleotide
uuccuuucgagacuuaaau

SEQ ID NO: 343940 - RNA, 19 nt, Artificial Sequence
  Description of Artificial Sequence: Synthetic oligonucleotide
aggacguggacccaugguc

SEQ ID NO: 343941 - RNA, 19 nt, Artificial Sequence
  Description of Artificial Sequence: Synthetic oligonucleotide
aaauuacguuuccuugcuc

SEQ ID NO: 343942 - RNA, 19 nt, Artificial Sequence
  Description of Artificial Sequence: Synthetic oligonucleotide
ucuucggugaagcacgagu

SEQ ID NO: 343943 - RNA, 19 nt, Artificial Sequence
  Description of Artificial Sequence: Synthetic oligonucleotide
acgguucugagucuguggg

SEQ ID NO: 343944 - RNA, 19 nt, Artificial Sequence
  Description of Artificial Sequence: Synthetic oligonucleotide
aguucugaguuaucaaucu

SEQ ID NO: 343945 - RNA, 19 nt, Artificial Sequence
  Description of Artificial Sequence: Synthetic oligonucleotide
uucacguacgcguagccca

SEQ ID NO: 343946 - RNA, 19 nt, Artificial Sequence
  Description of Artificial Sequence: Synthetic oligonucleotide
guuagcaacacgcuguguc

SEQ ID NO: 343947 - RNA, 19 nt, Artificial Sequence
  Description of Artificial Sequence: Synthetic oligonucleotide
ucacgcugagaccacauga

SEQ ID NO: 343948 - RNA, 19 nt, Artificial Sequence
  Description of Artificial Sequence: Synthetic oligonucleotide
ggauggaucacgcugagac

SEQ ID NO: 343949 - RNA, 19 nt, Artificial Sequence
  Description of Artificial Sequence: Synthetic oligonucleotide
cacgaguuucuuuucgugg

SEQ ID NO: 343950 - RNA, 19 nt, Artificial Sequence
  Description of Artificial Sequence: Synthetic oligonucleotide
ucaucaaccuuugagcgga

SEQ ID NO: 343951 - RNA, 19 nt, Artificial Sequence
  Description of Artificial Sequence: Synthetic oligonucleotide
aaguucacguacgcguagc

SEQ ID NO: 343952 - RNA, 19 nt, Artificial Sequence
  Description of Artificial Sequence: Synthetic oligonucleotide
uacagugccuuauugucga

SEQ ID NO: 343953 - RNA, 19 nt, Artificial Sequence
  Description of Artificial Sequence: Synthetic oligonucleotide
aguucacguacgcguagcc

SEQ ID NO: 343954 - RNA, 19 nt, Artificial Sequence
  Description of Artificial Sequence: Synthetic oligonucleotide
ugcuggaaguucacguacg

SEQ ID NO: 343955 - RNA, 19 nt, Artificial Sequence
  Description of Artificial Sequence: Synthetic oligonucleotide
aaccaccuuacaugagagg

SEQ ID NO: 343956 - RNA, 19 nt, Artificial Sequence
  Description of Artificial Sequence: Synthetic oligonucleotide
agcaauuuggcuaggagga

SEQ ID NO: 343957 - RNA, 19 nt, Artificial Sequence
  Description of Artificial Sequence: Synthetic oligonucleotide
agcguauuuguacugggga

SEQ ID NO: 343958 - RNA, 19 nt, Artificial Sequence
  Description of Artificial Sequence: Synthetic oligonucleotide
ugagaccacaugaugcgca

SEQ ID NO: 343959 - RNA, 19 nt, Artificial Sequence
  Description of Artificial Sequence: Synthetic oligonucleotide
aaaccaccuuacaugagag

SEQ ID NO: 343960 - RNA, 19 nt, Artificial Sequence
  Description of Artificial Sequence: Synthetic oligonucleotide
gagacuuaaaucguccaac

SEQ ID NO: 343961 - RNA, 19 nt, Artificial Sequence
  Description of Artificial Sequence: Synthetic oligonucleotide
agacuuaaaucguccaaca

SEQ ID NO: 343962 - RNA, 19 nt, Artificial Sequence
  Description of Artificial Sequence: Synthetic oligonucleotide
acuuggucuuaguugagca

SEQ ID NO: 343963 - RNA, 19 nt, Artificial Sequence
  Description of Artificial Sequence: Synthetic oligonucleotide
cugagcucgaccaacauaa

SEQ ID NO: 343964 - RNA, 19 nt, Artificial Sequence
  Description of Artificial Sequence: Synthetic oligonucleotide
aguaaucuaggacuagcau

SEQ ID NO: 343965 - RNA, 19 nt, Artificial Sequence
  Description of Artificial Sequence: Synthetic oligonucleotide
uacgcguagcccaacgagc

SEQ ID NO: 343966 - RNA, 19 nt, Artificial Sequence
  Description of Artificial Sequence: Synthetic oligonucleotide
augcccgugauuuuaccag

SEQ ID NO: 343967 - RNA, 19 nt, Artificial Sequence
  Description of Artificial Sequence: Synthetic oligonucleotide
uuuugcgaagggauggauc

SEQ ID NO: 343968 - RNA, 19 nt, Artificial Sequence
  Description of Artificial Sequence: Synthetic oligonucleotide
agaacguaucauacagugc

SEQ ID NO: 343969 - RNA, 19 nt, Artificial Sequence
  Description of Artificial Sequence: Synthetic oligonucleotide
aguguuagcaacacgcugu

SEQ ID NO: 343970 - RNA, 19 nt, Artificial Sequence
  Description of Artificial Sequence: Synthetic oligonucleotide
gguacuaaaggguggccgg

SEQ ID NO: 343971 - RNA, 19 nt, Artificial Sequence
  Description of Artificial Sequence: Synthetic oligonucleotide
aaguaaucuaggacuagca

SEQ ID NO: 343972 - RNA, 19 nt, Artificial Sequence
  Description of Artificial Sequence: Synthetic oligonucleotide
guccaaagcacgcuccgcg

SEQ ID NO: 343973 - RNA, 19 nt, Artificial Sequence
  Description of Artificial Sequence: Synthetic oligonucleotide
accaccuuacaugagagga

SEQ ID NO: 343974 - RNA, 19 nt, Artificial Sequence
  Description of Artificial Sequence: Synthetic oligonucleotide
aucccaagcuauuccacag

SEQ ID NO: 343975 - RNA, 19 nt, Artificial Sequence
  Description of Artificial Sequence: Synthetic oligonucleotide
uuucgagacuuaaaucguc

SEQ ID NO: 343976 - RNA, 19 nt, Artificial Sequence
  Description of Artificial Sequence: Synthetic oligonucleotide
uucccagggucuauaaaac

SEQ ID NO: 343977 - RNA, 19 nt, Artificial Sequence
  Description of Artificial Sequence: Synthetic oligonucleotide
uguuugcuagaccuggcau

SEQ ID NO: 343978 - RNA, 19 nt, Artificial Sequence
  Description of Artificial Sequence: Synthetic oligonucleotide
aaucguccaacaaacacuu

SEQ ID NO: 343979 - RNA, 19 nt, Artificial Sequence
  Description of Artificial Sequence: Synthetic oligonucleotide
acuagcauuguuugcuaga

SEQ ID NO: 343980 - RNA, 19 nt, Artificial Sequence
  Description of Artificial Sequence: Synthetic oligonucleotide
acgaguuucuuuucguggu

SEQ ID NO: 343981 - RNA, 19 nt, Artificial Sequence
  Description of Artificial Sequence: Synthetic oligonucleotide
uuugagcggagagacucgg

SEQ ID NO: 343982 - RNA, 19 nt, Artificial Sequence
  Description of Artificial Sequence: Synthetic oligonucleotide
ugcgaagggauggaucacg

SEQ ID NO: 343983 - RNA, 19 nt, Artificial Sequence
  Description of Artificial Sequence: Synthetic oligonucleotide
cuuugcgcugagcuaaagc

SEQ ID NO: 343984 - RNA, 19 nt, Artificial Sequence
  Description of Artificial Sequence: Synthetic oligonucleotide
auacagugccuuauugucg

SEQ ID NO: 343985 - RNA, 19 nt, Artificial Sequence
  Description of Artificial Sequence: Synthetic oligonucleotide
gaaguucacguacgcguag

SEQ ID NO: 343986 - RNA, 19 nt, Artificial Sequence
  Description of Artificial Sequence: Synthetic oligonucleotide
gugauuuuaccagccagag

SEQ ID NO: 343987 - RNA, 19 nt, Artificial Sequence
  Description of Artificial Sequence: Synthetic oligonucleotide
aagagggaacaaccguuca

SEQ ID NO: 343988 - RNA, 19 nt, Artificial Sequence
  Description of Artificial Sequence: Synthetic oligonucleotide
uccuguguuucaaagugua

SEQ ID NO: 343989 - RNA, 19 nt, Artificial Sequence
  Description of Artificial Sequence: Synthetic oligonucleotide
cacaaaccaccuuacauga

SEQ ID NO: 343990 - RNA, 19 nt, Artificial Sequence
  Description of Artificial Sequence: Synthetic oligonucleotide
ccaaauuacguuuccuugc

SEQ ID NO: 343991 - RNA, 19 nt, Artificial Sequence
  Description of Artificial Sequence: Synthetic oligonucleotide
gucuuaguugagcaauuug

SEQ ID NO: 343992 - RNA, 19 nt, Artificial Sequence
  Description of Artificial Sequence: Synthetic oligonucleotide
cuuuccggucauuuagaag

SEQ ID NO: 343993 - RNA, 19 nt, Artificial Sequence
  Description of Artificial Sequence: Synthetic oligonucleotide
aguugaaacagaacugaca

SEQ ID NO: 343994 - RNA, 19 nt, Artificial Sequence
  Description of Artificial Sequence: Synthetic oligonucleotide
auauguugcccacuccacu

SEQ ID NO: 343995 - RNA, 19 nt, Artificial Sequence
  Description of Artificial Sequence: Synthetic oligonucleotide
gacaucccaagcuauucca

SEQ ID NO: 343996 - RNA, 19 nt, Artificial Sequence
  Description of Artificial Sequence: Synthetic oligonucleotide
acuccagcggcacuguuca

SEQ ID NO: 343997 - RNA, 19 nt, Artificial Sequence
  Description of Artificial Sequence: Synthetic oligonucleotide
ucgagacuuaaaucgucca

SEQ ID NO: 343998 - RNA, 19 nt, Artificial Sequence
  Description of Artificial Sequence: Synthetic oligonucleotide
gcugccaugaaguaaccug

SEQ ID NO: 343999 - RNA, 19 nt, Artificial Sequence
  Description of Artificial Sequence: Synthetic oligonucleotide
uccuuucgagacuuaaauc

SEQ ID NO: 344000 - RNA, 19 nt, Artificial Sequence
  Description of Artificial Sequence: Synthetic oligonucleotide
uaguaaggugagccuggcg

SEQ ID NO: 344001 - RNA, 19 nt, Artificial Sequence
  Description of Artificial Sequence: Synthetic oligonucleotide
cagauggaacuccagcggc

SEQ ID NO: 344002 - RNA, 19 nt, Artificial Sequence
  Description of Artificial Sequence: Synthetic oligonucleotide
ugauuuuaccagccagagu

SEQ ID NO: 344003 - RNA, 19 nt, Artificial Sequence
  Description of Artificial Sequence: Synthetic oligonucleotide
guacgcguagcccaacgag

SEQ ID NO: 344004 - RNA, 19 nt, Artificial Sequence
  Description of Artificial Sequence: Synthetic oligonucleotide
cuuugagcggagagacucg

SEQ ID NO: 344005 - RNA, 19 nt, Artificial Sequence
  Description of Artificial Sequence: Synthetic oligonucleotide
cauuaagauguugcugggg

SEQ ID NO: 344006 - RNA, 19 nt, Artificial Sequence
  Description of Artificial Sequence: Synthetic oligonucleotide
uauguugcccacuccacuu

SEQ ID NO: 344007 - RNA, 19 nt, Artificial Sequence
  Description of Artificial Sequence: Synthetic oligonucleotide
caugaugcgcacuggcuug

SEQ ID NO: 344008 - RNA, 19 nt, Artificial Sequence
  Description of Artificial Sequence: Synthetic oligonucleotide
uucaucggucauuacuuuc

SEQ ID NO: 344009 - RNA, 19 nt, Artificial Sequence
  Description of Artificial Sequence: Synthetic oligonucleotide
ucaugccucucaaagcuua

SEQ ID NO: 344010 - RNA, 19 nt, Artificial Sequence
  Description of Artificial Sequence: Synthetic oligonucleotide
uuuggcuaggaggauagua

SEQ ID NO: 344011 - RNA, 19 nt, Artificial Sequence
  Description of Artificial Sequence: Synthetic oligonucleotide
aggauaguaugcagcacgg

SEQ ID NO: 344012 - RNA, 19 nt, Artificial Sequence
  Description of Artificial Sequence: Synthetic oligonucleotide
aaccguucacccaacauuu

SEQ ID NO: 344013 - RNA, 19 nt, Artificial Sequence
  Description of Artificial Sequence: Synthetic oligonucleotide
uucgauguuuagauauuuu

SEQ ID NO: 344014 - RNA, 19 nt, Artificial Sequence
  Description of Artificial Sequence: Synthetic oligonucleotide
uucguggucccugauaaau

SEQ ID NO: 344015 - RNA, 19 nt, Artificial Sequence
  Description of Artificial Sequence: Synthetic oligonucleotide
aacaaccguucacccaaca

SEQ ID NO: 344016 - RNA, 19 nt, Artificial Sequence
  Description of Artificial Sequence: Synthetic oligonucleotide
uuccggucauuuagaagca

SEQ ID NO: 344017 - RNA, 19 nt, Artificial Sequence
  Description of Artificial Sequence: Synthetic oligonucleotide
auaagagggaacaaccguu

SEQ ID NO: 344018 - RNA, 19 nt, Artificial Sequence
  Description of Artificial Sequence: Synthetic oligonucleotide
agcacgaguuucuuuucgu

SEQ ID NO: 344019 - RNA, 19 nt, Artificial Sequence
  Description of Artificial Sequence: Synthetic oligonucleotide
cauuugcucgguacauaag

SEQ ID NO: 344020 - RNA, 19 nt, Artificial Sequence
  Description of Artificial Sequence: Synthetic oligonucleotide
ucucguuccuuucgagacu

SEQ ID NO: 344021 - RNA, 19 nt, Artificial Sequence
  Description of Artificial Sequence: Synthetic oligonucleotide
uuucgauguuuagauauuu

SEQ ID NO: 344022 - RNA, 19 nt, Artificial Sequence
  Description of Artificial Sequence: Synthetic oligonucleotide
ggaacaaccguucacccaa

SEQ ID NO: 344023 - RNA, 19 nt, Artificial Sequence
  Description of Artificial Sequence: Synthetic oligonucleotide
cgguacauaagguucaaag

SEQ ID NO: 344024 - RNA, 19 nt, Artificial Sequence
  Description of Artificial Sequence: Synthetic oligonucleotide
uggccucaugguacuaaag

SEQ ID NO: 344025 - RNA, 19 nt, Artificial Sequence
  Description of Artificial Sequence: Synthetic oligonucleotide
cugcuggaaguucacguac

SEQ ID NO: 344026 - RNA, 19 nt, Artificial Sequence
  Description of Artificial Sequence: Synthetic oligonucleotide
cugccaugaaguaaccuga

SEQ ID NO: 344027 - RNA, 19 nt, Artificial Sequence
  Description of Artificial Sequence: Synthetic oligonucleotide
aagagauccuuaaggcgcu

SEQ ID NO: 344028 - RNA, 19 nt, Artificial Sequence
  Description of Artificial Sequence: Synthetic oligonucleotide
acucccgcagcguauuugu

SEQ ID NO: 344029 - RNA, 19 nt, Artificial Sequence
  Description of Artificial Sequence: Synthetic oligonucleotide
guuaacacccugguaucug

SEQ ID NO: 344030 - RNA, 19 nt, Artificial Sequence
  Description of Artificial Sequence: Synthetic oligonucleotide
uucugcgcaucuucaugcc

SEQ ID NO: 344031 - RNA, 19 nt, Artificial Sequence
  Description of Artificial Sequence: Synthetic oligonucleotide
ugguaucuggugauccuau

SEQ ID NO: 344032 - RNA, 19 nt, Artificial Sequence
  Description of Artificial Sequence: Synthetic oligonucleotide
acaaccguucacccaacau

SEQ ID NO: 344033 - RNA, 19 nt, Artificial Sequence
  Description of Artificial Sequence: Synthetic oligonucleotide
acuuuccggucauuuagaa

SEQ ID NO: 344034 - RNA, 19 nt, Artificial Sequence
  Description of Artificial Sequence: Synthetic oligonucleotide
cuggaaguucacguacgcg

SEQ ID NO: 344035 - RNA, 19 nt, Artificial Sequence
  Description of Artificial Sequence: Synthetic oligonucleotide
acguacgcguagcccaacg

SEQ ID NO: 344036 - RNA, 19 nt, Artificial Sequence
  Description of Artificial Sequence: Synthetic oligonucleotide
uuucuucggugaagcacga

SEQ ID NO: 344037 - RNA, 19 nt, Artificial Sequence
  Description of Artificial Sequence: Synthetic oligonucleotide
aacguaucauacagugccu

SEQ ID NO: 344038 - RNA, 19 nt, Artificial Sequence
  Description of Artificial Sequence: Synthetic oligonucleotide
gaagcacgaguuucuuuuc

SEQ ID NO: 344039 - RNA, 19 nt, Artificial Sequence
  Description of Artificial Sequence: Synthetic oligonucleotide
uugcgcugagcuaaagcua

SEQ ID NO: 344040 - RNA, 19 nt, Artificial Sequence
  Description of Artificial Sequence: Synthetic oligonucleotide
agggguugaucacaggguu

SEQ ID NO: 344041 - RNA, 19 nt, Artificial Sequence
  Description of Artificial Sequence: Synthetic oligonucleotide
acgcguagcccaacgagcg

SEQ ID NO: 344042 - RNA, 19 nt, Artificial Sequence
  Description of Artificial Sequence: Synthetic oligonucleotide
guacuaaaggguggccggg

SEQ ID NO: 344043 - RNA, 19 nt, Artificial Sequence
  Description of Artificial Sequence: Synthetic oligonucleotide
uuucaucggucauuacuuu

SEQ ID NO: 344044 - RNA, 19 nt, Artificial Sequence
  Description of Artificial Sequence: Synthetic oligonucleotide
ugccaugaaguaaccugaa

SEQ ID NO: 344045 - RNA, 19 nt, Artificial Sequence
  Description of Artificial Sequence: Synthetic oligonucleotide
auagcaccgggcauguucu

SEQ ID NO: 344046 - RNA, 19 nt, Artificial Sequence
  Description of Artificial Sequence: Synthetic oligonucleotide
guaucuggugauccuaucu

SEQ ID NO: 344047 - RNA, 19 nt, Artificial Sequence
  Description of Artificial Sequence: Synthetic oligonucleotide
gcagcguauuuguacuggg

SEQ ID NO: 344048 - RNA, 19 nt, Artificial Sequence
  Description of Artificial Sequence: Synthetic oligonucleotide
gacguggacccauggucug

SEQ ID NO: 344049 - RNA, 19 nt, Artificial Sequence
  Description of Artificial Sequence: Synthetic oligonucleotide
ggacccauggucuguguug

SEQ ID NO: 344050 - RNA, 19 nt, Artificial Sequence
  Description of Artificial Sequence: Synthetic oligonucleotide
caucccaagcuauuccaca

SEQ ID NO: 344051 - RNA, 19 nt, Artificial Sequence
  Description of Artificial Sequence: Synthetic oligonucleotide
cugacaucccaagcuauuc

SEQ ID NO: 344052 - RNA, 19 nt, Artificial Sequence
  Description of Artificial Sequence: Synthetic oligonucleotide
aaucuaggacuagcauugu

SEQ ID NO: 344053 - RNA, 19 nt, Artificial Sequence
  Description of Artificial Sequence: Synthetic oligonucleotide
aucgccuccgucacgucgg

SEQ ID NO: 344054 - RNA, 19 nt, Artificial Sequence
  Description of Artificial Sequence: Synthetic oligonucleotide
uggucuuaguugagcaauu

SEQ ID NO: 344055 - RNA, 19 nt, Artificial Sequence
  Description of Artificial Sequence: Synthetic oligonucleotide
ucgcacacuugccauucuc

SEQ ID NO: 344056 - RNA, 19 nt, Artificial Sequence
  Description of Artificial Sequence: Synthetic oligonucleotide
cuuucgagacuuaaaucgu

SEQ ID NO: 344057 - RNA, 19 nt, Artificial Sequence
  Description of Artificial Sequence: Synthetic oligonucleotide
caucggucauuacuuucac

SEQ ID NO: 344058 - RNA, 19 nt, Artificial Sequence
  Description of Artificial Sequence: Synthetic oligonucleotide
guucacguacgcguagccc

SEQ ID NO: 344059 - RNA, 19 nt, Artificial Sequence
  Description of Artificial Sequence: Synthetic oligonucleotide
agagaacguaucauacagu

SEQ ID NO: 344060 - RNA, 19 nt, Artificial Sequence
  Description of Artificial Sequence: Synthetic oligonucleotide
ucguggucccugauaaauu

SEQ ID NO: 344061 - RNA, 19 nt, Artificial Sequence
  Description of Artificial Sequence: Synthetic oligonucleotide
agcaccgggcauguucugg

SEQ ID NO: 344062 - RNA, 19 nt, Artificial Sequence
  Description of Artificial Sequence: Synthetic oligonucleotide
agcaugcccgugauuuuac

SEQ ID NO: 344063 - RNA, 19 nt, Artificial Sequence
  Description of Artificial Sequence: Synthetic oligonucleotide
uagcaacacgcugugucga

SEQ ID NO: 344064 - RNA, 19 nt, Artificial Sequence
  Description of Artificial Sequence: Synthetic oligonucleotide
caugccucucaaagcuuac

SEQ ID NO: 344065 - RNA, 19 nt, Artificial Sequence
  Description of Artificial Sequence: Synthetic oligonucleotide
caaauuacguuuccuugcu

SEQ ID NO: 344066 - RNA, 19 nt, Artificial Sequence
  Description of Artificial Sequence: Synthetic oligonucleotide
ccguaacugcuuuaguggc

SEQ ID NO: 344067 - RNA, 19 nt, Artificial Sequence
  Description of Artificial Sequence: Synthetic oligonucleotide
ggugcauggcuugaauaag

SEQ ID NO: 344068 - RNA, 19 nt, Artificial Sequence
  Description of Artificial Sequence: Synthetic oligonucleotide
cugagaccacaugaugcgc

SEQ ID NO: 344069 - RNA, 19 nt, Artificial Sequence
  Description of Artificial Sequence: Synthetic oligonucleotide
ucacguacgcguagcccaa

SEQ ID NO: 344070 - RNA, 19 nt, Artificial Sequence
  Description of Artificial Sequence: Synthetic oligonucleotide
gcugcgaccacccuccauc

SEQ ID NO: 344071 - RNA, 19 nt, Artificial Sequence
  Description of Artificial Sequence: Synthetic oligonucleotide
aacgagcggcgggugauca

SEQ ID NO: 344072 - RNA, 19 nt, Artificial Sequence
  Description of Artificial Sequence: Synthetic oligonucleotide
ucuuugcgcugagcuaaag

SEQ ID NO: 344073 - RNA, 19 nt, Artificial Sequence
  Description of Artificial Sequence: Synthetic oligonucleotide
cuuggucuuaguugagcaa

SEQ ID NO: 344074 - RNA, 19 nt, Artificial Sequence
  Description of Artificial Sequence: Synthetic oligonucleotide
agagacucgggagacucaa

SEQ ID NO: 344075 - RNA, 19 nt, Artificial Sequence
  Description of Artificial Sequence: Synthetic oligonucleotide
uccgccggcugcuggaagu

SEQ ID NO: 344076 - RNA, 19 nt, Artificial Sequence
  Description of Artificial Sequence: Synthetic oligonucleotide
augguaacuugcggcuggg

SEQ ID NO: 344077 - RNA, 19 nt, Artificial Sequence
  Description of Artificial Sequence: Synthetic oligonucleotide
acuuuugcgaagggaugga

SEQ ID NO: 344078 - RNA, 19 nt, Artificial Sequence
  Description of Artificial Sequence: Synthetic oligonucleotide
cuuacaugagaggauauuu

SEQ ID NO: 344079 - RNA, 19 nt, Artificial Sequence
  Description of Artificial Sequence: Synthetic oligonucleotide
gcauuugcucgguacauaa

SEQ ID NO: 344080 - RNA, 19 nt, Artificial Sequence
  Description of Artificial Sequence: Synthetic oligonucleotide
uggacccauggucuguguu

SEQ ID NO: 344081 - RNA, 19 nt, Artificial Sequence
  Description of Artificial Sequence: Synthetic oligonucleotide
gcacgaguuucuuuucgug

SEQ ID NO: 344082 - RNA, 19 nt, Artificial Sequence
  Description of Artificial Sequence: Synthetic oligonucleotide
cugugucgacaugacgcgg

SEQ ID NO: 344083 - RNA, 19 nt, Artificial Sequence
  Description of Artificial Sequence: Synthetic oligonucleotide
gacucccgcagcguauuug

SEQ ID NO: 344084 - RNA, 19 nt, Artificial Sequence
  Description of Artificial Sequence: Synthetic oligonucleotide
cuuaagcucugucugucgu

SEQ ID NO: 344085 - RNA, 19 nt, Artificial Sequence
  Description of Artificial Sequence: Synthetic oligonucleotide
ccguucacccaacauuugc

SEQ ID NO: 344086 - RNA, 19 nt, Artificial Sequence
  Description of Artificial Sequence: Synthetic oligonucleotide
cuugccgaagagauccuua

SEQ ID NO: 344087 - RNA, 19 nt, Artificial Sequence
  Description of Artificial Sequence: Synthetic oligonucleotide
uguuagcaacacgcugugu

SEQ ID NO: 344088 - RNA, 19 nt, Artificial Sequence
  Description of Artificial Sequence: Synthetic oligonucleotide
gcggcugggcauuaagaug

SEQ ID NO: 344089 - RNA, 19 nt, Artificial Sequence
  Description of Artificial Sequence: Synthetic oligonucleotide
cuuuucguggucccugaua

SEQ ID NO: 344090 - RNA, 19 nt, Artificial Sequence
  Description of Artificial Sequence: Synthetic oligonucleotide
cucggcacggcugcccgcg

SEQ ID NO: 344091 - RNA, 19 nt, Artificial Sequence
  Description of Artificial Sequence: Synthetic oligonucleotide
agagauccuuaaggcgcuc

SEQ ID NO: 344092 - RNA, 19 nt, Artificial Sequence
  Description of Artificial Sequence: Synthetic oligonucleotide
agggucuauaaaacauuaa

SEQ ID NO: 344093 - RNA, 19 nt, Artificial Sequence
  Description of Artificial Sequence: Synthetic oligonucleotide
acguaucauacagugccuu

SEQ ID NO: 344094 - RNA, 19 nt, Artificial Sequence
  Description of Artificial Sequence: Synthetic oligonucleotide
agcggcgggugaucauguc

SEQ ID NO: 344095 - RNA, 19 nt, Artificial Sequence
  Description of Artificial Sequence: Synthetic oligonucleotide
cacccaacauuugcuuuug

SEQ ID NO: 344096 - RNA, 19 nt, Artificial Sequence
  Description of Artificial Sequence: Synthetic oligonucleotide
ucgccuccgucacgucggg

SEQ ID NO: 344097 - RNA, 19 nt, Artificial Sequence
  Description of Artificial Sequence: Synthetic oligonucleotide
cguauuuguacuggggaac

SEQ ID NO: 344098 - RNA, 19 nt, Artificial Sequence
  Description of Artificial Sequence: Synthetic oligonucleotide
caucaaccuuugagcggag

SEQ ID NO: 344099 - RNA, 19 nt, Artificial Sequence
  Description of Artificial Sequence: Synthetic oligonucleotide
gugcggacagcaggcgugg

SEQ ID NO: 344100 - RNA, 19 nt, Artificial Sequence
  Description of Artificial Sequence: Synthetic oligonucleotide
acugacaucccaagcuauu

SEQ ID NO: 344101 - RNA, 19 nt, Artificial Sequence
  Description of Artificial Sequence: Synthetic oligonucleotide
gcguauuuguacuggggaa

SEQ ID NO: 344102 - RNA, 19 nt, Artificial Sequence
  Description of Artificial Sequence: Synthetic oligonucleotide
gcggcgggugaucaugucc

SEQ ID NO: 344103 - RNA, 19 nt, Artificial Sequence
  Description of Artificial Sequence: Synthetic oligonucleotide
ucgguacauaagguucaaa

SEQ ID NO: 344104 - RNA, 19 nt, Artificial Sequence
  Description of Artificial Sequence: Synthetic oligonucleotide
cuucggugaagcacgaguu

SEQ ID NO: 344105 - RNA, 19 nt, Artificial Sequence
  Description of Artificial Sequence: Synthetic oligonucleotide
ugauccuaucuugcuucau

SEQ ID NO: 344106 - RNA, 19 nt, Artificial Sequence
  Description of Artificial Sequence: Synthetic oligonucleotide
guagcccaacgagcggcgg

SEQ ID NO: 344107 - RNA, 19 nt, Artificial Sequence
  Description of Artificial Sequence: Synthetic oligonucleotide
guucacccaacauuugcuu

SEQ ID NO: 344108 - RNA, 19 nt, Artificial Sequence
  Description of Artificial Sequence: Synthetic oligonucleotide
gcggauagcaccgggcaug

SEQ ID NO: 344109 - RNA, 19 nt, Artificial Sequence
  Description of Artificial Sequence: Synthetic oligonucleotide
uccgucacgucggggugca

SEQ ID NO: 344110 - RNA, 19 nt, Artificial Sequence
  Description of Artificial Sequence: Synthetic oligonucleotide
cuggccucaugguacuaaa

SEQ ID NO: 344111 - RNA, 19 nt, Artificial Sequence
  Description of Artificial Sequence: Synthetic oligonucleotide
uccggucauuuagaagcau

SEQ ID NO: 344112 - RNA, 19 nt, Artificial Sequence
  Description of Artificial Sequence: Synthetic oligonucleotide
uagcaccgggcauguucug

SEQ ID NO: 344113 - RNA, 19 nt, Artificial Sequence
  Description of Artificial Sequence: Synthetic oligonucleotide
auuuggcuaggaggauagu

SEQ ID NO: 344114 - RNA, 19 nt, Artificial Sequence
  Description of Artificial Sequence: Synthetic oligonucleotide
agaccacaugaugcgcacu

SEQ ID NO: 344115 - RNA, 19 nt, Artificial Sequence
  Description of Artificial Sequence: Synthetic oligonucleotide
ugcugcgaccacccuccau

SEQ ID NO: 344116 - RNA, 19 nt, Artificial Sequence
  Description of Artificial Sequence: Synthetic oligonucleotide
gggcggauagcaccgggca

SEQ ID NO: 344117 - RNA, 19 nt, Artificial Sequence
  Description of Artificial Sequence: Synthetic oligonucleotide
accguucacccaacauuug

SEQ ID NO: 344118 - RNA, 19 nt, Artificial Sequence
  Description of Artificial Sequence: Synthetic oligonucleotide
ugcgaccacccuccaucau

SEQ ID NO: 344119 - RNA, 19 nt, Artificial Sequence
  Description of Artificial Sequence: Synthetic oligonucleotide
ggaacggugcggacagcag

SEQ ID NO: 344120 - RNA, 19 nt, Artificial Sequence
  Description of Artificial Sequence: Synthetic oligonucleotide
cugcgaccacccuccauca

SEQ ID NO: 344121 - RNA, 19 nt, Artificial Sequence
  Description of Artificial Sequence: Synthetic oligonucleotide
gcgaagggauggaucacgc

SEQ ID NO: 344122 - RNA, 19 nt, Artificial Sequence
  Description of Artificial Sequence: Synthetic oligonucleotide
acagugccuuauugucgau

SEQ ID NO: 344123 - RNA, 19 nt, Artificial Sequence
  Description of Artificial Sequence: Synthetic oligonucleotide
cugcgaggaggcuggccuc

SEQ ID NO: 344124 - RNA, 19 nt, Artificial Sequence
  Description of Artificial Sequence: Synthetic oligonucleotide
gggaacggugcggacagca

SEQ ID NO: 344125 - RNA, 19 nt, Artificial Sequence
  Description of Artificial Sequence: Synthetic oligonucleotide
ggagacguucaucaucaau

SEQ ID NO: 344126 - RNA, 19 nt, Artificial Sequence
  Description of Artificial Sequence: Synthetic oligonucleotide
gcaugguaacuugcggcug

SEQ ID NO: 344127 - RNA, 19 nt, Artificial Sequence
  Description of Artificial Sequence: Synthetic oligonucleotide
ggaaguucacguacgcgua

SEQ ID NO: 344128 - RNA, 19 nt, Artificial Sequence
  Description of Artificial Sequence: Synthetic oligonucleotide
gggguugcggacucccgca

SEQ ID NO: 344129 - RNA, 19 nt, Artificial Sequence
  Description of Artificial Sequence: Synthetic oligonucleotide
cgcagcguauuuguacugg

SEQ ID NO: 344130 - RNA, 19 nt, Artificial Sequence
  Description of Artificial Sequence: Synthetic oligonucleotide
cguagcccaacgagcggcg

SEQ ID NO: 344131 - RNA, 19 nt, Artificial Sequence
  Description of Artificial Sequence: Synthetic oligonucleotide
acguggacccauggucugu

SEQ ID NO: 344132 - RNA, 19 nt, Artificial Sequence
  Description of Artificial Sequence: Synthetic oligonucleotide
uugcggacucccgcagcgu

SEQ ID NO: 344133 - RNA, 19 nt, Artificial Sequence
  Description of Artificial Sequence: Synthetic oligonucleotide
gcgaccacccuccaucaua

SEQ ID NO: 344134 - RNA, 19 nt, Artificial Sequence
  Description of Artificial Sequence: Synthetic oligonucleotide
aggccgcgaccuuucccgu

SEQ ID NO: 344135 - RNA, 19 nt, Artificial Sequence
  Description of Artificial Sequence: Synthetic oligonucleotide
cccagggucuauaaaacau

SEQ ID NO: 344136 - RNA, 19 nt, Artificial Sequence
  Description of Artificial Sequence: Synthetic oligonucleotide
gccgcgaccuuucccguca

SEQ ID NO: 344137 - RNA, 19 nt, Artificial Sequence
  Description of Artificial Sequence: Synthetic oligonucleotide
gcucgcacacuugccauuc

SEQ ID NO: 344138 - RNA, 19 nt, Artificial Sequence
  Description of Artificial Sequence: Synthetic oligonucleotide
gggguucaucucggcacgg

SEQ ID NO: 344139 - RNA, 19 nt, Artificial Sequence
  Description of Artificial Sequence: Synthetic oligonucleotide
gcacgguucugagucugug

SEQ ID NO: 344140 - RNA, 19 nt, Artificial Sequence
  Description of Artificial Sequence: Synthetic oligonucleotide
ggacguggacccauggucu

SEQ ID NO: 344141 - RNA, 19 nt, Artificial Sequence
  Description of Artificial Sequence: Synthetic oligonucleotide
cucgguacauaagguucaa

SEQ ID NO: 344142 - RNA, 19 nt, Artificial Sequence
  Description of Artificial Sequence: Synthetic oligonucleotide
cgagacuuaaaucguccaa

SEQ ID NO: 344143 - RNA, 19 nt, Artificial Sequence
  Description of Artificial Sequence: Synthetic oligonucleotide
caacgagcggcgggugauc

SEQ ID NO: 344144 - RNA, 19 nt, Artificial Sequence
  Description of Artificial Sequence: Synthetic oligonucleotide
cacguacgcguagcccaac

SEQ ID NO: 344145 - RNA, 19 nt, Artificial Sequence
  Description of Artificial Sequence: Synthetic oligonucleotide
gcaacacgcugugucgaca

SEQ ID NO: 344146 - RNA, 19 nt, Artificial Sequence
  Description of Artificial Sequence: Synthetic oligonucleotide
cuuuugcgaagggauggau

SEQ ID NO: 344147 - RNA, 19 nt, Artificial Sequence
  Description of Artificial Sequence: Synthetic oligonucleotide
ccgcagcguauuuguacug

SEQ ID NO: 344148 - RNA, 19 nt, Artificial Sequence
  Description of Artificial Sequence: Synthetic oligonucleotide
guggcuuuguggccacaau

SEQ ID NO: 344149 - RNA, 19 nt, Artificial Sequence
  Description of Artificial Sequence: Synthetic oligonucleotide
cguucacccaacauuugcu

SEQ ID NO: 344150 - RNA, 19 nt, Artificial Sequence
  Description of Artificial Sequence: Synthetic oligonucleotide
ggugaucaugucccugcau

SEQ ID NO: 344151 - RNA, 19 nt, Artificial Sequence
  Description of Artificial Sequence: Synthetic oligonucleotide
cccgugauuuuaccagcca

SEQ ID NO: 344152 - RNA, 19 nt, Artificial Sequence
  Description of Artificial Sequence: Synthetic oligonucleotide
cccgcagcguauuuguacu

SEQ ID NO: 344153 - RNA, 19 nt, Artificial Sequence
  Description of Artificial Sequence: Synthetic oligonucleotide
aucguccaacaaacacuuu

SEQ ID NO: 344154 - RNA, 19 nt, Artificial Sequence
  Description of Artificial Sequence: Synthetic oligonucleotide
cguaucauacagugccuua

SEQ ID NO: 344155 - RNA, 19 nt, Artificial Sequence
  Description of Artificial Sequence: Synthetic oligonucleotide
cgcguagcccaacgagcgg

SEQ ID NO: 344156 - RNA, 19 nt, Artificial Sequence
  Description of Artificial Sequence: Synthetic oligonucleotide
auacccggauggagaggau

SEQ ID NO: 344157 - RNA, 19 nt, Artificial Sequence
  Description of Artificial Sequence: Synthetic oligonucleotide
cucccgcagcguauuugua

SEQ ID NO: 344158 - RNA, 19 nt, Artificial Sequence
  Description of Artificial Sequence: Synthetic oligonucleotide
ggucuuaguugagcaauuu

SEQ ID NO: 344159 - RNA, 19 nt, Artificial Sequence
  Description of Artificial Sequence: Synthetic oligonucleotide
gggauggaucacgcugaga

SEQ ID NO: 344160 - RNA, 19 nt, Artificial Sequence
  Description of Artificial Sequence: Synthetic oligonucleotide
cguacgcguagcccaacga

SEQ ID NO: 344161 - RNA, 19 nt, Artificial Sequence
  Description of Artificial Sequence: Synthetic oligonucleotide
ggccgcgaccuuucccguc

SEQ ID NO: 344162 - RNA, 19 nt, Artificial Sequence
  Description of Artificial Sequence: Synthetic oligonucleotide
cucgcacacuugccauucu

SEQ ID NO: 344163 - RNA, 19 nt, Artificial Sequence
  Description of Artificial Sequence: Synthetic oligonucleotide
cguuccuuucgagacuuaa

SEQ ID NO: 344164 - RNA, 19 nt, Artificial Sequence
  Description of Artificial Sequence: Synthetic oligonucleotide
cccaacgagcggcggguga

SEQ ID NO: 344165 - RNA, 19 nt, Artificial Sequence
  Description of Artificial Sequence: Synthetic oligonucleotide
ccuuacaugagaggauauu

SEQ ID NO: 344166 - RNA, 19 nt, Artificial Sequence
  Description of Artificial Sequence: Synthetic oligonucleotide
cggucauuacuuucacacu

SEQ ID NO: 344167 - RNA, 19 nt, Artificial Sequence
  Description of Artificial Sequence: Synthetic oligonucleotide
cgaccaacauaaaucuguu

SEQ ID NO: 344168 - RNA, 19 nt, Artificial Sequence
  Description of Artificial Sequence: Synthetic oligonucleotide
gcccaacgagcggcgggug

SEQ ID NO: 344169 - RNA, 19 nt, Artificial Sequence
  Description of Artificial Sequence: Synthetic oligonucleotide
ccgcgaccuuucccgucag

SEQ ID NO: 344170 - RNA, 19 nt, Artificial Sequence
  Description of Artificial Sequence: Synthetic oligonucleotide
gcgcaucuucaugccucuc

SEQ ID NO: 344171 - RNA, 19 nt, Artificial Sequence
  Description of Artificial Sequence: Synthetic oligonucleotide
ccaacgagcggcgggugau

SEQ ID NO: 344172 - RNA, 19 nt, Artificial Sequence
  Description of Artificial Sequence: Synthetic oligonucleotide
ggacucccgcagcguauuu

SEQ ID NO: 344173 - RNA, 19 nt, Artificial Sequence
  Description of Artificial Sequence: Synthetic oligonucleotide
cgcgaccuuucccgucaga

SEQ ID NO: 344174 - RNA, 19 nt, Artificial Sequence
  Description of Artificial Sequence: Synthetic oligonucleotide
ccgucacgucggggugcag

SEQ ID NO: 344175 - RNA, 19 nt, Artificial Sequence
  Description of Artificial Sequence: Synthetic oligonucleotide
ggauagcaccgggcauguu

SEQ ID NO: 344176 - RNA, 19 nt, Artificial Sequence
  Description of Artificial Sequence: Synthetic oligonucleotide
gcgcacuggcuugcccuuu

SEQ ID NO: 344177 - RNA, 19 nt, Artificial Sequence
  Description of Artificial Sequence: Synthetic oligonucleotide
cggacucccgcagcguauu

SEQ ID NO: 344178 - RNA, 19 nt, Artificial Sequence
  Description of Artificial Sequence: Synthetic oligonucleotide
uuagaguugaacaacaucc

SEQ ID NO: 344179 - RNA, 19 nt, Artificial Sequence
  Description of Artificial Sequence: Synthetic oligonucleotide
ugcaccuugaucauaaugg

SEQ ID NO: 344180 - RNA, 19 nt, Artificial Sequence
  Description of Artificial Sequence: Synthetic oligonucleotide
aauaagacauggaagugcc

SEQ ID NO: 344181 - RNA, 19 nt, Artificial Sequence
  Description of Artificial Sequence: Synthetic oligonucleotide
aauuuaagccaaaagcuac

SEQ ID NO: 344182 - RNA, 19 nt, Artificial Sequence
  Description of Artificial Sequence: Synthetic oligonucleotide
aaagcuacuagguacagaa

SEQ ID NO: 344183 - RNA, 19 nt, Artificial Sequence
  Description of Artificial Sequence: Synthetic oligonucleotide
uaagcuauuaaaauuuugu

SEQ ID NO: 344184 - RNA, 19 nt, Artificial Sequence
  Description of Artificial Sequence: Synthetic oligonucleotide
gaugcuaugauaagcgugg

SEQ ID NO: 344185 - RNA, 19 nt, Artificial Sequence
  Description of Artificial Sequence: Synthetic oligonucleotide
acuuguuccagagagggcc

SEQ ID NO: 344186 - RNA, 19 nt, Artificial Sequence
  Description of Artificial Sequence: Synthetic oligonucleotide
aauccugaacucaaguccc

SEQ ID NO: 344187 - RNA, 19 nt, Artificial Sequence
  Description of Artificial Sequence: Synthetic oligonucleotide
auuauccauugccugaagc

SEQ ID NO: 344188 - RNA, 19 nt, Artificial Sequence
  Description of Artificial Sequence: Synthetic oligonucleotide
uguauguacaauguaagcu

SEQ ID NO: 344189 - RNA, 19 nt, Artificial Sequence
  Description of Artificial Sequence: Synthetic oligonucleotide
agaguugaacaacaucccc

SEQ ID NO: 344190 - RNA, 19 nt, Artificial Sequence
  Description of Artificial Sequence: Synthetic oligonucleotide
uauacagccuuauuguccc

SEQ ID NO: 344191 - RNA, 19 nt, Artificial Sequence
  Description of Artificial Sequence: Synthetic oligonucleotide
aagguuagaguugaacaac

SEQ ID NO: 344192 - RNA, 19 nt, Artificial Sequence
  Description of Artificial Sequence: Synthetic oligonucleotide
acauccauacggcaggucg

SEQ ID NO: 344193 - RNA, 19 nt, Artificial Sequence
  Description of Artificial Sequence: Synthetic oligonucleotide
agaauggcguacucaaagc

SEQ ID NO: 344194 - RNA, 19 nt, Artificial Sequence
  Description of Artificial Sequence: Synthetic oligonucleotide
gaagccuguaaacagcucc

SEQ ID NO: 344195 - RNA, 19 nt, Artificial Sequence
  Description of Artificial Sequence: Synthetic oligonucleotide
uuuggcuguauguacaaug

SEQ ID NO: 344196 - RNA, 19 nt, Artificial Sequence
  Description of Artificial Sequence: Synthetic oligonucleotide
caauccugaacucaagucc

SEQ ID NO: 344197 - RNA, 19 nt, Artificial Sequence
  Description of Artificial Sequence: Synthetic oligonucleotide
gaaauugggaggcuguggc

SEQ ID NO: 344198 - RNA, 19 nt, Artificial Sequence
  Description of Artificial Sequence: Synthetic oligonucleotide
ugccaauaagacauggaag

SEQ ID NO: 344199 - RNA, 19 nt, Artificial Sequence
  Description of Artificial Sequence: Synthetic oligonucleotide
caggaugcuaugauaagcg

SEQ ID NO: 344200 - RNA, 19 nt, Artificial Sequence
  Description of Artificial Sequence: Synthetic oligonucleotide
gaagcuaauacuguucggc

SEQ ID NO: 344201 - RNA, 19 nt, Artificial Sequence
  Description of Artificial Sequence: Synthetic oligonucleotide
uuauuuggcuguauguaca

SEQ ID NO: 344202 - RNA, 19 nt, Artificial Sequence
  Description of Artificial Sequence: Synthetic oligonucleotide
ucggggacgaucaacuggg

SEQ ID NO: 344203 - RNA, 19 nt, Artificial Sequence
  Description of Artificial Sequence: Synthetic oligonucleotide
aauacuguucggcacugca

SEQ ID NO: 344204 - RNA, 19 nt, Artificial Sequence
  Description of Artificial Sequence: Synthetic oligonucleotide
uggaaaggggcccauuggg

SEQ ID NO: 344205 - RNA, 19 nt, Artificial Sequence
  Description of Artificial Sequence: Synthetic oligonucleotide
aagcuauuaaaauuuugua

SEQ ID NO: 344206 - RNA, 19 nt, Artificial Sequence
  Description of Artificial Sequence: Synthetic oligonucleotide
ucauuaaauugcaaguuuu

SEQ ID NO: 344207 - RNA, 19 nt, Artificial Sequence
  Description of Artificial Sequence: Synthetic oligonucleotide
uguagagcauguauacagc

SEQ ID NO: 344208 - RNA, 19 nt, Artificial Sequence
  Description of Artificial Sequence: Synthetic oligonucleotide
uagaguugaacaacauccc

SEQ ID NO: 344209 - RNA, 19 nt, Artificial Sequence
  Description of Artificial Sequence: Synthetic oligonucleotide
ucauguugcggauggcucg

SEQ ID NO: 344210 - RNA, 19 nt, Artificial Sequence
  Description of Artificial Sequence: Synthetic oligonucleotide
auagccagguacaugggcc

SEQ ID NO: 344211 - RNA, 19 nt, Artificial Sequence
  Description of Artificial Sequence: Synthetic oligonucleotide
agcuaauacuguucggcac

SEQ ID NO: 344212 - RNA, 19 nt, Artificial Sequence
  Description of Artificial Sequence: Synthetic oligonucleotide
aaagcacaggagaggaggc

SEQ ID NO: 344213 - RNA, 19 nt, Artificial Sequence
  Description of Artificial Sequence: Synthetic oligonucleotide
ugugguugccaauaagaca

SEQ ID NO: 344214 - RNA, 19 nt, Artificial Sequence
  Description of Artificial Sequence: Synthetic oligonucleotide
aagcuaauacuguucggca

SEQ ID NO: 344215 - RNA, 19 nt, Artificial Sequence
  Description of Artificial Sequence: Synthetic oligonucleotide
gccuaauggacaaagagcg

SEQ ID NO: 344216 - RNA, 19 nt, Artificial Sequence
  Description of Artificial Sequence: Synthetic oligonucleotide
aagcguggcugacaaagag

SEQ ID NO: 344217 - RNA, 19 nt, Artificial Sequence
  Description of Artificial Sequence: Synthetic oligonucleotide
aggacauccauacggcagg

SEQ ID NO: 344218 - RNA, 19 nt, Artificial Sequence
  Description of Artificial Sequence: Synthetic oligonucleotide
ucaccauuucuucacggca

SEQ ID NO: 344219 - RNA, 19 nt, Artificial Sequence
  Description of Artificial Sequence: Synthetic oligonucleotide
ugaacucaagucccacagg

SEQ ID NO: 344220 - RNA, 19 nt, Artificial Sequence
  Description of Artificial Sequence: Synthetic oligonucleotide
cuacuagguacagaaauag

SEQ ID NO: 344221 - RNA, 19 nt, Artificial Sequence
  Description of Artificial Sequence: Synthetic oligonucleotide
gacaugauggcaucuguca

SEQ ID NO: 344222 - RNA, 19 nt, Artificial Sequence
  Description of Artificial Sequence: Synthetic oligonucleotide
uggaguugacugaaguagc

SEQ ID NO: 344223 - RNA, 19 nt, Artificial Sequence
  Description of Artificial Sequence: Synthetic oligonucleotide
aaauaguuccaauccugaa

SEQ ID NO: 344224 - RNA, 19 nt, Artificial Sequence
  Description of Artificial Sequence: Synthetic oligonucleotide
ugauaagcguggcugacaa

SEQ ID NO: 344225 - RNA, 19 nt, Artificial Sequence
  Description of Artificial Sequence: Synthetic oligonucleotide
aggacuuugaugaagccug

SEQ ID NO: 344226 - RNA, 19 nt, Artificial Sequence
  Description of Artificial Sequence: Synthetic oligonucleotide
accauggucaucagaaugg

SEQ ID NO: 344227 - RNA, 19 nt, Artificial Sequence
  Description of Artificial Sequence: Synthetic oligonucleotide
ugggaacagaagcuaauac

SEQ ID NO: 344228 - RNA, 19 nt, Artificial Sequence
  Description of Artificial Sequence: Synthetic oligonucleotide
aucggggacgaucaacugg

SEQ ID NO: 344229 - RNA, 19 nt, Artificial Sequence
  Description of Artificial Sequence: Synthetic oligonucleotide
uguacaauguaagcuauua

SEQ ID NO: 344230 - RNA, 19 nt, Artificial Sequence
  Description of Artificial Sequence: Synthetic oligonucleotide
aaggagacugguaccaguc

SEQ ID NO: 344231 - RNA, 19 nt, Artificial Sequence
  Description of Artificial Sequence: Synthetic oligonucleotide
agaaauaguuccaauccug

SEQ ID NO: 344232 - RNA, 19 nt, Artificial Sequence
  Description of Artificial Sequence: Synthetic oligonucleotide
guguauguugcgcagacuc

SEQ ID NO: 344233 - RNA, 19 nt, Artificial Sequence
  Description of Artificial Sequence: Synthetic oligonucleotide
uccaauccugaacucaagu

SEQ ID NO: 344234 - RNA, 19 nt, Artificial Sequence
  Description of Artificial Sequence: Synthetic oligonucleotide
gggucaagcauucaaauca

SEQ ID NO: 344235 - RNA, 19 nt, Artificial Sequence
  Description of Artificial Sequence: Synthetic oligonucleotide
ugggucuccacacuuggga

SEQ ID NO: 344236 - RNA, 19 nt, Artificial Sequence
  Description of Artificial Sequence: Synthetic oligonucleotide
ucaacgccccagcagaaca

SEQ ID NO: 344237 - RNA, 19 nt, Artificial Sequence
  Description of Artificial Sequence: Synthetic oligonucleotide
agaagcuaauacuguucgg

SEQ ID NO: 344238 - RNA, 19 nt, Artificial Sequence
  Description of Artificial Sequence: Synthetic oligonucleotide
guuagaguugaacaacauc

SEQ ID NO: 344239 - RNA, 19 nt, Artificial Sequence
  Description of Artificial Sequence: Synthetic oligonucleotide
guacugguugauuugcagc

SEQ ID NO: 344240 - RNA, 19 nt, Artificial Sequence
  Description of Artificial Sequence: Synthetic oligonucleotide
aggaagguuagaguugaac

SEQ ID NO: 344241 - RNA, 19 nt, Artificial Sequence
  Description of Artificial Sequence: Synthetic oligonucleotide
cuuauugucccacggguuc

SEQ ID NO: 344242 - RNA, 19 nt, Artificial Sequence
  Description of Artificial Sequence: Synthetic oligonucleotide
ggaagguuagaguugaaca

SEQ ID NO: 344243 - RNA, 19 nt, Artificial Sequence
  Description of Artificial Sequence: Synthetic oligonucleotide
agagagggccacucgaaag

SEQ ID NO: 344244 - RNA, 19 nt, Artificial Sequence
  Description of Artificial Sequence: Synthetic oligonucleotide
cuagccucacuccugcucc

SEQ ID NO: 344245 - RNA, 19 nt, Artificial Sequence
  Description of Artificial Sequence: Synthetic oligonucleotide
aguugaacaacauccccau

SEQ ID NO: 344246 - RNA, 19 nt, Artificial Sequence
  Description of Artificial Sequence: Synthetic oligonucleotide
aagccuguaaacagcuccg

SEQ ID NO: 344247 - RNA, 19 nt, Artificial Sequence
  Description of Artificial Sequence: Synthetic oligonucleotide
uaccagucuuggcaggagg

SEQ ID NO: 344248 - RNA, 19 nt, Artificial Sequence
  Description of Artificial Sequence: Synthetic oligonucleotide
gguuacuacucccuggugc

SEQ ID NO: 344249 - RNA, 19 nt, Artificial Sequence
  Description of Artificial Sequence: Synthetic oligonucleotide
uguauguugcgcagacucu

SEQ ID NO: 344250 - RNA, 19 nt, Artificial Sequence
  Description of Artificial Sequence: Synthetic oligonucleotide
aaauugggaggcuguggca

SEQ ID NO: 344251 - RNA, 19 nt, Artificial Sequence
  Description of Artificial Sequence: Synthetic oligonucleotide
uucauguugcggauggcuc

SEQ ID NO: 344252 - RNA, 19 nt, Artificial Sequence
  Description of Artificial Sequence: Synthetic oligonucleotide
agagcauguauacagccuu

SEQ ID NO: 344253 - RNA, 19 nt, Artificial Sequence
  Description of Artificial Sequence: Synthetic oligonucleotide
agcaaagcccgcaggaggc

SEQ ID NO: 344254 - RNA, 19 nt, Artificial Sequence
  Description of Artificial Sequence: Synthetic oligonucleotide
ugacugaaguagcuggccu

SEQ ID NO: 344255 - RNA, 19 nt, Artificial Sequence
  Description of Artificial Sequence: Synthetic oligonucleotide
agccuuauugucccacggg

SEQ ID NO: 344256 - RNA, 19 nt, Artificial Sequence
  Description of Artificial Sequence: Synthetic oligonucleotide
gcuaugauaagcguggcug

SEQ ID NO: 344257 - RNA, 19 nt, Artificial Sequence
  Description of Artificial Sequence: Synthetic oligonucleotide
uguucggcacugcagcaug

SEQ ID NO: 344258 - RNA, 19 nt, Artificial Sequence
  Description of Artificial Sequence: Synthetic oligonucleotide
uccguguagagcauguaua

SEQ ID NO: 344259 - RNA, 19 nt, Artificial Sequence
  Description of Artificial Sequence: Synthetic oligonucleotide
cuuucaacgccccagcaga

SEQ ID NO: 344260 - RNA, 19 nt, Artificial Sequence
  Description of Artificial Sequence: Synthetic oligonucleotide
guaagcuauuaaaauuuug

SEQ ID NO: 344261 - RNA, 19 nt, Artificial Sequence
  Description of Artificial Sequence: Synthetic oligonucleotide
cauccauacggcaggucgg

SEQ ID NO: 344262 - RNA, 19 nt, Artificial Sequence
  Description of Artificial Sequence: Synthetic oligonucleotide
augaugcagacauuaucca

SEQ ID NO: 344263 - RNA, 19 nt, Artificial Sequence
  Description of Artificial Sequence: Synthetic oligonucleotide
caccauuucuucacggcag

SEQ ID NO: 344264 - RNA, 19 nt, Artificial Sequence
  Description of Artificial Sequence: Synthetic oligonucleotide
gaggaaggagacugguacc

SEQ ID NO: 344265 - RNA, 19 nt, Artificial Sequence
  Description of Artificial Sequence: Synthetic oligonucleotide
guuaaggggcagcacacac

SEQ ID NO: 344266 - RNA, 19 nt, Artificial Sequence
  Description of Artificial Sequence: Synthetic oligonucleotide
ggugcugccguucauggcc

SEQ ID NO: 344267 - RNA, 19 nt, Artificial Sequence
  Description of Artificial Sequence: Synthetic oligonucleotide
aacaggggauuccagcuuu

SEQ ID NO: 344268 - RNA, 19 nt, Artificial Sequence
  Description of Artificial Sequence: Synthetic oligonucleotide
uauuuggcuguauguacaa

SEQ ID NO: 344269 - RNA, 19 nt, Artificial Sequence
  Description of Artificial Sequence: Synthetic oligonucleotide
gaaugguaaaggaagguua

SEQ ID NO: 344270 - RNA, 19 nt, Artificial Sequence
  Description of Artificial Sequence: Synthetic oligonucleotide
aaugaugcccgcaggacau

SEQ ID NO: 344271 - RNA, 19 nt, Artificial Sequence
  Description of Artificial Sequence: Synthetic oligonucleotide
ugccucauagccagguaca

SEQ ID NO: 344272 - RNA, 19 nt, Artificial Sequence
  Description of Artificial Sequence: Synthetic oligonucleotide
cauggucaucagaauggcg

SEQ ID NO: 344273 - RNA, 19 nt, Artificial Sequence
  Description of Artificial Sequence: Synthetic oligonucleotide
gaguugaacaacaucccca

SEQ ID NO: 344274 - RNA, 19 nt, Artificial Sequence
  Description of Artificial Sequence: Synthetic oligonucleotide
aaagagcgggaaggugugc

SEQ ID NO: 344275 - RNA, 19 nt, Artificial Sequence
  Description of Artificial Sequence: Synthetic oligonucleotide
uauccauugccugaagcuc

SEQ ID NO: 344276 - RNA, 19 nt, Artificial Sequence
  Description of Artificial Sequence: Synthetic oligonucleotide
uguugcggauggcucgccg

SEQ ID NO: 344277 - RNA, 19 nt, Artificial Sequence
  Description of Artificial Sequence: Synthetic oligonucleotide
auugggguagaggaaggag

SEQ ID NO: 344278 - RNA, 19 nt, Artificial Sequence
  Description of Artificial Sequence: Synthetic oligonucleotide
gggccuaauggacaaagag

SEQ ID NO: 344279 - RNA, 19 nt, Artificial Sequence
  Description of Artificial Sequence: Synthetic oligonucleotide
uuugcaggcgacgccggcg

SEQ ID NO: 344280 - RNA, 19 nt, Artificial Sequence
  Description of Artificial Sequence: Synthetic oligonucleotide
aaaagcuacuagguacaga

SEQ ID NO: 344281 - RNA, 19 nt, Artificial Sequence
  Description of Artificial Sequence: Synthetic oligonucleotide
uggacggaggagcugcggc

SEQ ID NO: 344282 - RNA, 19 nt, Artificial Sequence
  Description of Artificial Sequence: Synthetic oligonucleotide
cucgaaagcagggccaggg

SEQ ID NO: 344283 - RNA, 19 nt, Artificial Sequence
  Description of Artificial Sequence: Synthetic oligonucleotide
uuccaauccugaacucaag

SEQ ID NO: 344284 - RNA, 19 nt, Artificial Sequence
  Description of Artificial Sequence: Synthetic oligonucleotide
gugguuaaggggcagcaca

SEQ ID NO: 344285 - RNA, 19 nt, Artificial Sequence
  Description of Artificial Sequence: Synthetic oligonucleotide
ugcuaugauaagcguggcu

SEQ ID NO: 344286 - RNA, 19 nt, Artificial Sequence
  Description of Artificial Sequence: Synthetic oligonucleotide
gagguacugguugauuugc

SEQ ID NO: 344287 - RNA, 19 nt, Artificial Sequence
  Description of Artificial Sequence: Synthetic oligonucleotide
gggacgaucaacugggaac

SEQ ID NO: 344288 - RNA, 19 nt, Artificial Sequence
  Description of Artificial Sequence: Synthetic oligonucleotide
cagauaccacugcagagac

SEQ ID NO: 344289 - RNA, 19 nt, Artificial Sequence
  Description of Artificial Sequence: Synthetic oligonucleotide
gucucuuagcaccugucac

SEQ ID NO: 344290 - RNA, 19 nt, Artificial Sequence
  Description of Artificial Sequence: Synthetic oligonucleotide
gcuguauguacaauguaag

SEQ ID NO: 344291 - RNA, 19 nt, Artificial Sequence
  Description of Artificial Sequence: Synthetic oligonucleotide
ggcauacccauccaaggag

SEQ ID NO: 344292 - RNA, 19 nt, Artificial Sequence
  Description of Artificial Sequence: Synthetic oligonucleotide
uaagcguggcugacaaaga

SEQ ID NO: 344293 - RNA, 19 nt, Artificial Sequence
  Description of Artificial Sequence: Synthetic oligonucleotide
uucuuucaacgccccagca

SEQ ID NO: 344294 - RNA, 19 nt, Artificial Sequence
  Description of Artificial Sequence: Synthetic oligonucleotide
auuuaagccaaaagcuacu

SEQ ID NO: 344295 - RNA, 19 nt, Artificial Sequence
  Description of Artificial Sequence: Synthetic oligonucleotide
uuuaagccaaaagcuacua

SEQ ID NO: 344296 - RNA, 19 nt, Artificial Sequence
  Description of Artificial Sequence: Synthetic oligonucleotide
uggcaaugaugcccgcagg

SEQ ID NO: 344297 - RNA, 19 nt, Artificial Sequence
  Description of Artificial Sequence: Synthetic oligonucleotide
agaaugguaaaggaagguu

SEQ ID NO: 344298 - RNA, 19 nt, Artificial Sequence
  Description of Artificial Sequence: Synthetic oligonucleotide
caaagagcgggaaggugug

SEQ ID NO: 344299 - RNA, 19 nt, Artificial Sequence
  Description of Artificial Sequence: Synthetic oligonucleotide
ugggaacaugccuggagga

SEQ ID NO: 344300 - RNA, 19 nt, Artificial Sequence
  Description of Artificial Sequence: Synthetic oligonucleotide
acaguguguucauguugcg

SEQ ID NO: 344301 - RNA, 19 nt, Artificial Sequence
  Description of Artificial Sequence: Synthetic oligonucleotide
uaccacugcagagacaguc

SEQ ID NO: 344302 - RNA, 19 nt, Artificial Sequence
  Description of Artificial Sequence: Synthetic oligonucleotide
guauguugcgcagacucug

SEQ ID NO: 344303 - RNA, 19 nt, Artificial Sequence
  Description of Artificial Sequence: Synthetic oligonucleotide
cugccucauagccagguac

SEQ ID NO: 344304 - RNA, 19 nt, Artificial Sequence
  Description of Artificial Sequence: Synthetic oligonucleotide
guaaacagcuccguguaga

SEQ ID NO: 344305 - RNA, 19 nt, Artificial Sequence
  Description of Artificial Sequence: Synthetic oligonucleotide
uuagcaccugucaccauuu

SEQ ID NO: 344306 - RNA, 19 nt, Artificial Sequence
  Description of Artificial Sequence: Synthetic oligonucleotide
uugcggauggcucgccgag

SEQ ID NO: 344307 - RNA, 19 nt, Artificial Sequence
  Description of Artificial Sequence: Synthetic oligonucleotide
caauguaagcuauuaaaau

SEQ ID NO: 344308 - RNA, 19 nt, Artificial Sequence
  Description of Artificial Sequence: Synthetic oligonucleotide
aggaugcuaugauaagcgu

SEQ ID NO: 344309 - RNA, 19 nt, Artificial Sequence
  Description of Artificial Sequence: Synthetic oligonucleotide
augggccuaauggacaaag

SEQ ID NO: 344310 - RNA, 19 nt, Artificial Sequence
  Description of Artificial Sequence: Synthetic oligonucleotide
gugguugccaauaagacau

SEQ ID NO: 344311 - RNA, 19 nt, Artificial Sequence
  Description of Artificial Sequence: Synthetic oligonucleotide
gaguugacugaaguagcug

SEQ ID NO: 344312 - RNA, 19 nt, Artificial Sequence
  Description of Artificial Sequence: Synthetic oligonucleotide
agacugguaccagucuugg

SEQ ID NO: 344313 - RNA, 19 nt, Artificial Sequence
  Description of Artificial Sequence: Synthetic oligonucleotide
uccacugggccgagaaaca

SEQ ID NO: 344314 - RNA, 19 nt, Artificial Sequence
  Description of Artificial Sequence: Synthetic oligonucleotide
ucagaauggcguacucaaa

SEQ ID NO: 344315 - RNA, 19 nt, Artificial Sequence
  Description of Artificial Sequence: Synthetic oligonucleotide
ggccuaauggacaaagagc

SEQ ID NO: 344316 - RNA, 19 nt, Artificial Sequence
  Description of Artificial Sequence: Synthetic oligonucleotide
ggggcauacccauccaagg

SEQ ID NO: 344317 - RNA, 19 nt, Artificial Sequence
  Description of Artificial Sequence: Synthetic oligonucleotide
cuaugauaagcguggcuga

SEQ ID NO: 344318 - RNA, 19 nt, Artificial Sequence
  Description of Artificial Sequence: Synthetic oligonucleotide
ucacggcagaugaugcaga

SEQ ID NO: 344319 - RNA, 19 nt, Artificial Sequence
  Description of Artificial Sequence: Synthetic oligonucleotide
cucgccgagacaugauggc

SEQ ID NO: 344320 - RNA, 19 nt, Artificial Sequence
  Description of Artificial Sequence: Synthetic oligonucleotide
ugguaccagucuuggcagg

SEQ ID NO: 344321 - RNA, 19 nt, Artificial Sequence
  Description of Artificial Sequence: Synthetic oligonucleotide
cugucaccauuucuucacg

SEQ ID NO: 344322 - RNA, 19 nt, Artificial Sequence
  Description of Artificial Sequence: Synthetic oligonucleotide
agcguggcugacaaagagg

SEQ ID NO: 344323 - RNA, 19 nt, Artificial Sequence
  Description of Artificial Sequence: Synthetic oligonucleotide
ugucccacggguucucgcu

SEQ ID NO: 344324 - RNA, 19 nt, Artificial Sequence
  Description of Artificial Sequence: Synthetic oligonucleotide
cuuuugcaggcgacgccgg

SEQ ID NO: 344325 - RNA, 19 nt, Artificial Sequence
  Description of Artificial Sequence: Synthetic oligonucleotide
ucgcucuggagguccacag

SEQ ID NO: 344326 - RNA, 19 nt, Artificial Sequence
  Description of Artificial Sequence: Synthetic oligonucleotide
guacaugggccuaauggac

SEQ ID NO: 344327 - RNA, 19 nt, Artificial Sequence
  Description of Artificial Sequence: Synthetic oligonucleotide
cagccuuauugucccacgg

SEQ ID NO: 344328 - RNA, 19 nt, Artificial Sequence
  Description of Artificial Sequence: Synthetic oligonucleotide
ggacgaucaacugggaacc

SEQ ID NO: 344329 - RNA, 19 nt, Artificial Sequence
  Description of Artificial Sequence: Synthetic oligonucleotide
augcuaugauaagcguggc

SEQ ID NO: 344330 - RNA, 19 nt, Artificial Sequence
  Description of Artificial Sequence: Synthetic oligonucleotide
augaagccuguaaacagcu

SEQ ID NO: 344331 - RNA, 19 nt, Artificial Sequence
  Description of Artificial Sequence: Synthetic oligonucleotide
ggaugcuaugauaagcgug

SEQ ID NO: 344332 - RNA, 19 nt, Artificial Sequence
  Description of Artificial Sequence: Synthetic oligonucleotide
ugggccuaauggacaaaga

SEQ ID NO: 344333 - RNA, 19 nt, Artificial Sequence
  Description of Artificial Sequence: Synthetic oligonucleotide
agguuagaguugaacaaca

SEQ ID NO: 344334 - RNA, 19 nt, Artificial Sequence
  Description of Artificial Sequence: Synthetic oligonucleotide
ggucgggcaagucugcugc

SEQ ID NO: 344335 - RNA, 19 nt, Artificial Sequence
  Description of Artificial Sequence: Synthetic oligonucleotide
acaugggccuaauggacaa

SEQ ID NO: 344336 - RNA, 19 nt, Artificial Sequence
  Description of Artificial Sequence: Synthetic oligonucleotide
acugacucgggagcgggag

SEQ ID NO: 344337 - RNA, 19 nt, Artificial Sequence
  Description of Artificial Sequence: Synthetic oligonucleotide
uuucaacgccccagcagaa

SEQ ID NO: 344338 - RNA, 19 nt, Artificial Sequence
  Description of Artificial Sequence: Synthetic oligonucleotide
aguugugugguugccaaua

SEQ ID NO: 344339 - RNA, 19 nt, Artificial Sequence
  Description of Artificial Sequence: Synthetic oligonucleotide
caaaagcuacuagguacag

SEQ ID NO: 344340 - RNA, 19 nt, Artificial Sequence
  Description of Artificial Sequence: Synthetic oligonucleotide
acuguucggcacugcagca

SEQ ID NO: 344341 - RNA, 19 nt, Artificial Sequence
  Description of Artificial Sequence: Synthetic oligonucleotide
uucagggacugauggggaa

SEQ ID NO: 344342 - RNA, 19 nt, Artificial Sequence
  Description of Artificial Sequence: Synthetic oligonucleotide
ggaaagagccuggggaggg

SEQ ID NO: 344343 - RNA, 19 nt, Artificial Sequence
  Description of Artificial Sequence: Synthetic oligonucleotide
ucgggcaagucugcugccg

SEQ ID NO: 344344 - RNA, 19 nt, Artificial Sequence
  Description of Artificial Sequence: Synthetic oligonucleotide
acacagcagaaugguaaag

SEQ ID NO: 344345 - RNA, 19 nt, Artificial Sequence
  Description of Artificial Sequence: Synthetic oligonucleotide
caccuagccucacuccugc

SEQ ID NO: 344346 - RNA, 19 nt, Artificial Sequence
  Description of Artificial Sequence: Synthetic oligonucleotide
uggcuguauguacaaugua

SEQ ID NO: 344347 - RNA, 19 nt, Artificial Sequence
  Description of Artificial Sequence: Synthetic oligonucleotide
ccaauccugaacucaaguc

SEQ ID NO: 344348 - RNA, 19 nt, Artificial Sequence
  Description of Artificial Sequence: Synthetic oligonucleotide
gccacucgaaagcagggcc

SEQ ID NO: 344349 - RNA, 19 nt, Artificial Sequence
  Description of Artificial Sequence: Synthetic oligonucleotide
ccuaauggacaaagagcgg

SEQ ID NO: 344350 - RNA, 19 nt, Artificial Sequence
  Description of Artificial Sequence: Synthetic oligonucleotide
cuccaccuagccucacucc

SEQ ID NO: 344351 - RNA, 19 nt, Artificial Sequence
  Description of Artificial Sequence: Synthetic oligonucleotide
acggguucucgcucuggag

SEQ ID NO: 344352 - RNA, 19 nt, Artificial Sequence
  Description of Artificial Sequence: Synthetic oligonucleotide
cacggcagaugaugcagac

SEQ ID NO: 344353 - RNA, 19 nt, Artificial Sequence
  Description of Artificial Sequence: Synthetic oligonucleotide
cauguugcggauggcucgc

SEQ ID NO: 344354 - RNA, 19 nt, Artificial Sequence
  Description of Artificial Sequence: Synthetic oligonucleotide
ggcagcguccaguagugug

SEQ ID NO: 344355 - RNA, 19 nt, Artificial Sequence
  Description of Artificial Sequence: Synthetic oligonucleotide
gucccacacucacaagcag

SEQ ID NO: 344356 - RNA, 19 nt, Artificial Sequence
  Description of Artificial Sequence: Synthetic oligonucleotide
caucacaaagggguuucug

SEQ ID NO: 344357 - RNA, 19 nt, Artificial Sequence
  Description of Artificial Sequence: Synthetic oligonucleotide
auguugcgcagacucugca

SEQ ID NO: 344358 - RNA, 19 nt, Artificial Sequence
  Description of Artificial Sequence: Synthetic oligonucleotide
agguacagaaauaguucca

SEQ ID NO: 344359 - RNA, 19 nt, Artificial Sequence
  Description of Artificial Sequence: Synthetic oligonucleotide
uuacuacucccuggugcag

SEQ ID NO: 344360 - RNA, 19 nt, Artificial Sequence
  Description of Artificial Sequence: Synthetic oligonucleotide
cagggcagucucuuagcac

SEQ ID NO: 344361 - RNA, 19 nt, Artificial Sequence
  Description of Artificial Sequence: Synthetic oligonucleotide
cagcuuuugcaggcgacgc

SEQ ID NO: 344362 - RNA, 19 nt, Artificial Sequence
  Description of Artificial Sequence: Synthetic oligonucleotide
cagcagauaccacugcaga

SEQ ID NO: 344363 - RNA, 19 nt, Artificial Sequence
  Description of Artificial Sequence: Synthetic oligonucleotide
uaauacuguucggcacugc

SEQ ID NO: 344364 - RNA, 19 nt, Artificial Sequence
  Description of Artificial Sequence: Synthetic oligonucleotide
ggucaggaugcuaugauaa

SEQ ID NO: 344365 - RNA, 19 nt, Artificial Sequence
  Description of Artificial Sequence: Synthetic oligonucleotide
aacgccccagcagaacaca

SEQ ID NO: 344366 - RNA, 19 nt, Artificial Sequence
  Description of Artificial Sequence: Synthetic oligonucleotide
ggaaggcaaaagguugggg

SEQ ID NO: 344367 - RNA, 19 nt, Artificial Sequence
  Description of Artificial Sequence: Synthetic oligonucleotide
guuccaauccugaacucaa

SEQ ID NO: 344368 - RNA, 19 nt, Artificial Sequence
  Description of Artificial Sequence: Synthetic oligonucleotide
cagaaauaguuccaauccu

SEQ ID NO: 344369 - RNA, 19 nt, Artificial Sequence
  Description of Artificial Sequence: Synthetic oligonucleotide
ccguguagagcauguauac

SEQ ID NO: 344370 - RNA, 19 nt, Artificial Sequence
  Description of Artificial Sequence: Synthetic oligonucleotide
uuccuggggucaagcauuc

SEQ ID NO: 344371 - RNA, 19 nt, Artificial Sequence
  Description of Artificial Sequence: Synthetic oligonucleotide
aggucgggcaagucugcug

SEQ ID NO: 344372 - RNA, 19 nt, Artificial Sequence
  Description of Artificial Sequence: Synthetic oligonucleotide
gguacagaaauaguuccaa

SEQ ID NO: 344373 - RNA, 19 nt, Artificial Sequence
  Description of Artificial Sequence: Synthetic oligonucleotide
auugucccacggguucucg

SEQ ID NO: 344374 - RNA, 19 nt, Artificial Sequence
  Description of Artificial Sequence: Synthetic oligonucleotide
uguucauguugcggauggc

SEQ ID NO: 344375 - RNA, 19 nt, Artificial Sequence
  Description of Artificial Sequence: Synthetic oligonucleotide
caacgccccagcagaacac

SEQ ID NO: 344376 - RNA, 19 nt, Artificial Sequence
  Description of Artificial Sequence: Synthetic oligonucleotide
uccugaacucaagucccac

SEQ ID NO: 344377 - RNA, 19 nt, Artificial Sequence
  Description of Artificial Sequence: Synthetic oligonucleotide
cagcaggacuuugaugaag

SEQ ID NO: 344378 - RNA, 19 nt, Artificial Sequence
  Description of Artificial Sequence: Synthetic oligonucleotide
auggcguacucaaagccaa

SEQ ID NO: 344379 - RNA, 19 nt, Artificial Sequence
  Description of Artificial Sequence: Synthetic oligonucleotide
ucuggggagcagugguuaa

SEQ ID NO: 344380 - RNA, 19 nt, Artificial Sequence
  Description of Artificial Sequence: Synthetic oligonucleotide
cacucgaaagcagggccag

SEQ ID NO: 344381 - RNA, 19 nt, Artificial Sequence
  Description of Artificial Sequence: Synthetic oligonucleotide
ucggguucuggggagcagu

SEQ ID NO: 344382 - RNA, 19 nt, Artificial Sequence
  Description of Artificial Sequence: Synthetic oligonucleotide
ggggucaagcauucaaauc

SEQ ID NO: 344383 - RNA, 19 nt, Artificial Sequence
  Description of Artificial Sequence: Synthetic oligonucleotide
agcauguauacagccuuau

SEQ ID NO: 344384 - RNA, 19 nt, Artificial Sequence
  Description of Artificial Sequence: Synthetic oligonucleotide
guugcggauggcucgccga

SEQ ID NO: 344385 - RNA, 19 nt, Artificial Sequence
  Description of Artificial Sequence: Synthetic oligonucleotide
cuccucguggggucaggcc

SEQ ID NO: 344386 - RNA, 19 nt, Artificial Sequence
  Description of Artificial Sequence: Synthetic oligonucleotide
uucaacgccccagcagaac

SEQ ID NO: 344387 - RNA, 19 nt, Artificial Sequence
  Description of Artificial Sequence: Synthetic oligonucleotide
acgaucaacugggaaccca

SEQ ID NO: 344388 - RNA, 19 nt, Artificial Sequence
  Description of Artificial Sequence: Synthetic oligonucleotide
agagggccacucgaaagca

SEQ ID NO: 344389 - RNA, 19 nt, Artificial Sequence
  Description of Artificial Sequence: Synthetic oligonucleotide
acuugggaacagaagcuaa

SEQ ID NO: 344390 - RNA, 19 nt, Artificial Sequence
  Description of Artificial Sequence: Synthetic oligonucleotide
gcucgccgagacaugaugg

SEQ ID NO: 344391 - RNA, 19 nt, Artificial Sequence
  Description of Artificial Sequence: Synthetic oligonucleotide
acucacaagcagggcuugg

SEQ ID NO: 344392 - RNA, 19 nt, Artificial Sequence
  Description of Artificial Sequence: Synthetic oligonucleotide
gucuccacacuugggaaca

SEQ ID NO: 344393 - RNA, 19 nt, Artificial Sequence
  Description of Artificial Sequence: Synthetic oligonucleotide
gcuaauacuguucggcacu

SEQ ID NO: 344394 - RNA, 19 nt, Artificial Sequence
  Description of Artificial Sequence: Synthetic oligonucleotide
gguugauuugcagcauggc

SEQ ID NO: 344395 - RNA, 19 nt, Artificial Sequence
  Description of Artificial Sequence: Synthetic oligonucleotide
agugggcaacaggggauuc

SEQ ID NO: 344396 - RNA, 19 nt, Artificial Sequence
  Description of Artificial Sequence: Synthetic oligonucleotide
gcaagucugcugccgcugg

SEQ ID NO: 344397 - RNA, 19 nt, Artificial Sequence
  Description of Artificial Sequence: Synthetic oligonucleotide
gggacugauggggaagucc

SEQ ID NO: 344398 - RNA, 19 nt, Artificial Sequence
  Description of Artificial Sequence: Synthetic oligonucleotide
ggcaggucgggcaagucug

SEQ ID NO: 344399 - RNA, 19 nt, Artificial Sequence
  Description of Artificial Sequence: Synthetic oligonucleotide
gacgaucaacugggaaccc

SEQ ID NO: 344400 - RNA, 19 nt, Artificial Sequence
  Description of Artificial Sequence: Synthetic oligonucleotide
auggcucgccgagacauga

SEQ ID NO: 344401 - RNA, 19 nt, Artificial Sequence
  Description of Artificial Sequence: Synthetic oligonucleotide
gcagaugaugcagacauua

SEQ ID NO: 344402 - RNA, 19 nt, Artificial Sequence
  Description of Artificial Sequence: Synthetic oligonucleotide
gacgccggcggaguucugc

SEQ ID NO: 344403 - RNA, 19 nt, Artificial Sequence
  Description of Artificial Sequence: Synthetic oligonucleotide
ccaauaagacauggaagug

SEQ ID NO: 344404 - RNA, 19 nt, Artificial Sequence
  Description of Artificial Sequence: Synthetic oligonucleotide
ucccacggguucucgcucu

SEQ ID NO: 344405 - RNA, 19 nt, Artificial Sequence
  Description of Artificial Sequence: Synthetic oligonucleotide
guucggcacugcagcaugg

SEQ ID NO: 344406 - RNA, 19 nt, Artificial Sequence
  Description of Artificial Sequence: Synthetic oligonucleotide
aaagcccgcaggaggcaca

SEQ ID NO: 344407 - RNA, 19 nt, Artificial Sequence
  Description of Artificial Sequence: Synthetic oligonucleotide
gggcauacccauccaagga

SEQ ID NO: 344408 - RNA, 19 nt, Artificial Sequence
  Description of Artificial Sequence: Synthetic oligonucleotide
aagcuacuagguacagaaa

SEQ ID NO: 344409 - RNA, 19 nt, Artificial Sequence
  Description of Artificial Sequence: Synthetic oligonucleotide
cauacggcaggucgggcaa

SEQ ID NO: 344410 - RNA, 19 nt, Artificial Sequence
  Description of Artificial Sequence: Synthetic oligonucleotide
gggugagauggggaaagag

SEQ ID NO: 344411 - RNA, 19 nt, Artificial Sequence
  Description of Artificial Sequence: Synthetic oligonucleotide
cagacagagagcuggcacu

SEQ ID NO: 344412 - RNA, 19 nt, Artificial Sequence
  Description of Artificial Sequence: Synthetic oligonucleotide
guaccagucuuggcaggag

SEQ ID NO: 344413 - RNA, 19 nt, Artificial Sequence
  Description of Artificial Sequence: Synthetic oligonucleotide
agcuaggucuuggcuccac

SEQ ID NO: 344414 - RNA, 19 nt, Artificial Sequence
  Description of Artificial Sequence: Synthetic oligonucleotide
gauaagcguggcugacaaa

SEQ ID NO: 344415 - RNA, 19 nt, Artificial Sequence
  Description of Artificial Sequence: Synthetic oligonucleotide
gcguggcugacaaagagga

SEQ ID NO: 344416 - RNA, 19 nt, Artificial Sequence
  Description of Artificial Sequence: Synthetic oligonucleotide
uucggcacugcagcauggu

SEQ ID NO: 344417 - RNA, 19 nt, Artificial Sequence
  Description of Artificial Sequence: Synthetic oligonucleotide
cggguucucgcucuggagg

SEQ ID NO: 344418 - RNA, 19 nt, Artificial Sequence
  Description of Artificial Sequence: Synthetic oligonucleotide
gcguacucaaagccaaaca

SEQ ID NO: 344419 - RNA, 19 nt, Artificial Sequence
  Description of Artificial Sequence: Synthetic oligonucleotide
augcccgcaggacauccau

SEQ ID NO: 344420 - RNA, 19 nt, Artificial Sequence
  Description of Artificial Sequence: Synthetic oligonucleotide
acucgaaagcagggccagg

SEQ ID NO: 344421 - RNA, 19 nt, Artificial Sequence
  Description of Artificial Sequence: Synthetic oligonucleotide
ugugcaccuugaucauaau

SEQ ID NO: 344422 - RNA, 19 nt, Artificial Sequence
  Description of Artificial Sequence: Synthetic oligonucleotide
gguccugccacuucuuucu

SEQ ID NO: 344423 - RNA, 19 nt, Artificial Sequence
  Description of Artificial Sequence: Synthetic oligonucleotide
agacagagagcuggcacuu

SEQ ID NO: 344424 - RNA, 19 nt, Artificial Sequence
  Description of Artificial Sequence: Synthetic oligonucleotide
auuuggcuguauguacaau

SEQ ID NO: 344425 - RNA, 19 nt, Artificial Sequence
  Description of Artificial Sequence: Synthetic oligonucleotide
gccuguaaacagcuccgug

SEQ ID NO: 344426 - RNA, 19 nt, Artificial Sequence
  Description of Artificial Sequence: Synthetic oligonucleotide
cuuagcaccugucaccauu

SEQ ID NO: 344427 - RNA, 19 nt, Artificial Sequence
  Description of Artificial Sequence: Synthetic oligonucleotide
gauggcucgccgagacaug

SEQ ID NO: 344428 - RNA, 19 nt, Artificial Sequence
  Description of Artificial Sequence: Synthetic oligonucleotide
caaagcccgcaggaggcac

SEQ ID NO: 344429 - RNA, 19 nt, Artificial Sequence
  Description of Artificial Sequence: Synthetic oligonucleotide
uagcaccugucaccauuuc

SEQ ID NO: 344430 - RNA, 19 nt, Artificial Sequence
  Description of Artificial Sequence: Synthetic oligonucleotide
auacagccuuauuguccca

SEQ ID NO: 344431 - RNA, 19 nt, Artificial Sequence
  Description of Artificial Sequence: Synthetic oligonucleotide
ugccguucauggcccucca

SEQ ID NO: 344432 - RNA, 19 nt, Artificial Sequence
  Description of Artificial Sequence: Synthetic oligonucleotide
cuugggaacagaagcuaau

SEQ ID NO: 344433 - RNA, 19 nt, Artificial Sequence
  Description of Artificial Sequence: Synthetic oligonucleotide
cagguacaugggccuaaug

SEQ ID NO: 344434 - RNA, 19 nt, Artificial Sequence
  Description of Artificial Sequence: Synthetic oligonucleotide
ccuguaaacagcuccgugu

SEQ ID NO: 344435 - RNA, 19 nt, Artificial Sequence
  Description of Artificial Sequence: Synthetic oligonucleotide
ggaaggagacugguaccag

SEQ ID NO: 344436 - RNA, 19 nt, Artificial Sequence
  Description of Artificial Sequence: Synthetic oligonucleotide
gcuaggucuuggcuccacc

SEQ ID NO: 344437 - RNA, 19 nt, Artificial Sequence
  Description of Artificial Sequence: Synthetic oligonucleotide
ucuuagcaccugucaccau

SEQ ID NO: 344438 - RNA, 19 nt, Artificial Sequence
  Description of Artificial Sequence: Synthetic oligonucleotide
agcuccguguagagcaugu

SEQ ID NO: 344439 - RNA, 19 nt, Artificial Sequence
  Description of Artificial Sequence: Synthetic oligonucleotide
guggacggaggagcugcgg

SEQ ID NO: 344440 - RNA, 19 nt, Artificial Sequence
  Description of Artificial Sequence: Synthetic oligonucleotide
agguacugguugauuugca

SEQ ID NO: 344441 - RNA, 19 nt, Artificial Sequence
  Description of Artificial Sequence: Synthetic oligonucleotide
caagucccacagguuggag

SEQ ID NO: 344442 - RNA, 19 nt, Artificial Sequence
  Description of Artificial Sequence: Synthetic oligonucleotide
gcuacuagguacagaaaua

SEQ ID NO: 344443 - RNA, 19 nt, Artificial Sequence
  Description of Artificial Sequence: Synthetic oligonucleotide
agcgcccacugacucggga

SEQ ID NO: 344444 - RNA, 19 nt, Artificial Sequence
  Description of Artificial Sequence: Synthetic oligonucleotide
acggcagaugaugcagaca

SEQ ID NO: 344445 - RNA, 19 nt, Artificial Sequence
  Description of Artificial Sequence: Synthetic oligonucleotide
cagugguuaaggggcagca

SEQ ID NO: 344446 - RNA, 19 nt, Artificial Sequence
  Description of Artificial Sequence: Synthetic oligonucleotide
ugcggccucuccugaacuu

SEQ ID NO: 344447 - RNA, 19 nt, Artificial Sequence
  Description of Artificial Sequence: Synthetic oligonucleotide
ggucccacacucacaagca

SEQ ID NO: 344448 - RNA, 19 nt, Artificial Sequence
  Description of Artificial Sequence: Synthetic oligonucleotide
gccuuauugucccacgggu

SEQ ID NO: 344449 - RNA, 19 nt, Artificial Sequence
  Description of Artificial Sequence: Synthetic oligonucleotide
cugcagcauggucccacac

SEQ ID NO: 344450 - RNA, 19 nt, Artificial Sequence
  Description of Artificial Sequence: Synthetic oligonucleotide
gacauccauacggcagguc

SEQ ID NO: 344451 - RNA, 19 nt, Artificial Sequence
  Description of Artificial Sequence: Synthetic oligonucleotide
cugggaacccagcacuucu

SEQ ID NO: 344452 - RNA, 19 nt, Artificial Sequence
  Description of Artificial Sequence: Synthetic oligonucleotide
cacggguucucgcucugga

SEQ ID NO: 344453 - RNA, 19 nt, Artificial Sequence
  Description of Artificial Sequence: Synthetic oligonucleotide
ugcccgcaggacauccaua

SEQ ID NO: 344454 - RNA, 19 nt, Artificial Sequence
  Description of Artificial Sequence: Synthetic oligonucleotide
gugcugccguucauggccc

SEQ ID NO: 344455 - RNA, 19 nt, Artificial Sequence
  Description of Artificial Sequence: Synthetic oligonucleotide
agcgcccgaagcuccucgu

SEQ ID NO: 344456 - RNA, 19 nt, Artificial Sequence
  Description of Artificial Sequence: Synthetic oligonucleotide
ggaagugccacagggcuua

SEQ ID NO: 344457 - RNA, 19 nt, Artificial Sequence
  Description of Artificial Sequence: Synthetic oligonucleotide
caacauccccauggcugcc

SEQ ID NO: 344458 - RNA, 19 nt, Artificial Sequence
  Description of Artificial Sequence: Synthetic oligonucleotide
cagagagggccacucgaaa

SEQ ID NO: 344459 - RNA, 19 nt, Artificial Sequence
  Description of Artificial Sequence: Synthetic oligonucleotide
cagcguccaguagugugug

SEQ ID NO: 344460 - RNA, 19 nt, Artificial Sequence
  Description of Artificial Sequence: Synthetic oligonucleotide
gguaccagucuuggcagga

SEQ ID NO: 344461 - RNA, 19 nt, Artificial Sequence
  Description of Artificial Sequence: Synthetic oligonucleotide
ggccauguacagcaggacu

SEQ ID NO: 344462 - RNA, 19 nt, Artificial Sequence
  Description of Artificial Sequence: Synthetic oligonucleotide
cuccguguagagcauguau

SEQ ID NO: 344463 - RNA, 19 nt, Artificial Sequence
  Description of Artificial Sequence: Synthetic oligonucleotide
agcguccaguagugugugu

SEQ ID NO: 344464 - RNA, 19 nt, Artificial Sequence
  Description of Artificial Sequence: Synthetic oligonucleotide
auacggcaggucgggcaag

SEQ ID NO: 344465 - RNA, 19 nt, Artificial Sequence
  Description of Artificial Sequence: Synthetic oligonucleotide
cugggccgagaaacagcug

SEQ ID NO: 344466 - RNA, 19 nt, Artificial Sequence
  Description of Artificial Sequence: Synthetic oligonucleotide
uggcucgccgagacaugau

SEQ ID NO: 344467 - RNA, 19 nt, Artificial Sequence
  Description of Artificial Sequence: Synthetic oligonucleotide
gucccacggguucucgcuc

SEQ ID NO: 344468 - RNA, 19 nt, Artificial Sequence
  Description of Artificial Sequence: Synthetic oligonucleotide
ggcaagucugcugccgcug

SEQ ID NO: 344469 - RNA, 19 nt, Artificial Sequence
  Description of Artificial Sequence: Synthetic oligonucleotide
gggucaggaugcuaugaua

SEQ ID NO: 344470 - RNA, 19 nt, Artificial Sequence
  Description of Artificial Sequence: Synthetic oligonucleotide
ggggacgaucaacugggaa

SEQ ID NO: 344471 - RNA, 19 nt, Artificial Sequence
  Description of Artificial Sequence: Synthetic oligonucleotide
gccgagacaugauggcauc

SEQ ID NO: 344472 - RNA, 19 nt, Artificial Sequence
  Description of Artificial Sequence: Synthetic oligonucleotide
ccauacggcaggucgggca

SEQ ID NO: 344473 - RNA, 19 nt, Artificial Sequence
  Description of Artificial Sequence: Synthetic oligonucleotide
ccaccuagccucacuccug

SEQ ID NO: 344474 - RNA, 19 nt, Artificial Sequence
  Description of Artificial Sequence: Synthetic oligonucleotide
ccuggggucaagcauucaa

SEQ ID NO: 344475 - RNA, 19 nt, Artificial Sequence
  Description of Artificial Sequence: Synthetic oligonucleotide
gcagacucugcagccgggc

SEQ ID NO: 344476 - RNA, 19 nt, Artificial Sequence
  Description of Artificial Sequence: Synthetic oligonucleotide
cucggguucuggggagcag

SEQ ID NO: 344477 - RNA, 19 nt, Artificial Sequence
  Description of Artificial Sequence: Synthetic oligonucleotide
ccaucggggacgaucaacu

SEQ ID NO: 344478 - RNA, 19 nt, Artificial Sequence
  Description of Artificial Sequence: Synthetic oligonucleotide
gggccaucggggacgauca

SEQ ID NO: 344479 - RNA, 19 nt, Artificial Sequence
  Description of Artificial Sequence: Synthetic oligonucleotide
cucgcucuggagguccaca

SEQ ID NO: 344480 - RNA, 19 nt, Artificial Sequence
  Description of Artificial Sequence: Synthetic oligonucleotide
gccaucggggacgaucaac

SEQ ID NO: 344481 - RNA, 19 nt, Artificial Sequence
  Description of Artificial Sequence: Synthetic oligonucleotide
ggauggcucgccgagacau

SEQ ID NO: 344482 - RNA, 19 nt, Artificial Sequence
  Description of Artificial Sequence: Synthetic oligonucleotide
ccucauagccagguacaug

SEQ ID NO: 344483 - RNA, 19 nt, Artificial Sequence
  Description of Artificial Sequence: Synthetic oligonucleotide
cccgcaggacauccauacg

SEQ ID NO: 344484 - RNA, 19 nt, Artificial Sequence
  Description of Artificial Sequence: Synthetic oligonucleotide
uggcagcguccaguagugu

SEQ ID NO: 344485 - RNA, 19 nt, Artificial Sequence
  Description of Artificial Sequence: Synthetic oligonucleotide
ccagagagggccacucgaa

SEQ ID NO: 344486 - RNA, 19 nt, Artificial Sequence
  Description of Artificial Sequence: Synthetic oligonucleotide
gcgcaggcagcuggugugg

SEQ ID NO: 344487 - RNA, 19 nt, Artificial Sequence
  Description of Artificial Sequence: Synthetic oligonucleotide
gcguccaguagugugugua

SEQ ID NO: 344488 - RNA, 19 nt, Artificial Sequence
  Description of Artificial Sequence: Synthetic oligonucleotide
acaggggauuccagcuuuu

SEQ ID NO: 344489 - RNA, 19 nt, Artificial Sequence
  Description of Artificial Sequence: Synthetic oligonucleotide
gcuccucguggggucaggc

SEQ ID NO: 344490 - RNA, 19 nt, Artificial Sequence
  Description of Artificial Sequence: Synthetic oligonucleotide
ucgggagcgggaggcuuuu

SEQ ID NO: 344491 - RNA, 19 nt, Artificial Sequence
  Description of Artificial Sequence: Synthetic oligonucleotide
gcaggcgacgccggcggag

SEQ ID NO: 344492 - RNA, 19 nt, Artificial Sequence
  Description of Artificial Sequence: Synthetic oligonucleotide
cagggacugauggggaagu

SEQ ID NO: 344493 - RNA, 19 nt, Artificial Sequence
  Description of Artificial Sequence: Synthetic oligonucleotide
cgggaaggugugcaccuug

SEQ ID NO: 344494 - RNA, 19 nt, Artificial Sequence
  Description of Artificial Sequence: Synthetic oligonucleotide
gcgcccgaagcuccucgug

SEQ ID NO: 344495 - RNA, 19 nt, Artificial Sequence
  Description of Artificial Sequence: Synthetic oligonucleotide
cagucucuucaguggaguu

SEQ ID NO: 344496 - RNA, 19 nt, Artificial Sequence
  Description of Artificial Sequence: Synthetic oligonucleotide
agguggaaaggggcccauu

SEQ ID NO: 344497 - RNA, 19 nt, Artificial Sequence
  Description of Artificial Sequence: Synthetic oligonucleotide
cguguagagcauguauaca

SEQ ID NO: 344498 - RNA, 19 nt, Artificial Sequence
  Description of Artificial Sequence: Synthetic oligonucleotide
caugggccuaauggacaaa

SEQ ID NO: 344499 - RNA, 19 nt, Artificial Sequence
  Description of Artificial Sequence: Synthetic oligonucleotide
gcacuccuuucccugaguu

SEQ ID NO: 344500 - RNA, 19 nt, Artificial Sequence
  Description of Artificial Sequence: Synthetic oligonucleotide
gcaaagcccgcaggaggca

SEQ ID NO: 344501 - RNA, 19 nt, Artificial Sequence
  Description of Artificial Sequence: Synthetic oligonucleotide
ccacggguucucgcucugg

SEQ ID NO: 344502 - RNA, 19 nt, Artificial Sequence
  Description of Artificial Sequence: Synthetic oligonucleotide
cuguucggcacugcagcau

SEQ ID NO: 344503 - RNA, 19 nt, Artificial Sequence
  Description of Artificial Sequence: Synthetic oligonucleotide
gacucgggagcgggaggcu

SEQ ID NO: 344504 - RNA, 19 nt, Artificial Sequence
  Description of Artificial Sequence: Synthetic oligonucleotide
cucgggagcgggaggcuuu

SEQ ID NO: 344505 - RNA, 19 nt, Artificial Sequence
  Description of Artificial Sequence: Synthetic oligonucleotide
gcauccggcucuccauccu

SEQ ID NO: 344506 - RNA, 19 nt, Artificial Sequence
  Description of Artificial Sequence: Synthetic oligonucleotide
ggacauccauacggcaggu

SEQ ID NO: 344507 - RNA, 19 nt, Artificial Sequence
  Description of Artificial Sequence: Synthetic oligonucleotide
ccgggucaggaugcuauga

SEQ ID NO: 344508 - RNA, 19 nt, Artificial Sequence
  Description of Artificial Sequence: Synthetic oligonucleotide
cucagagguccugccacuu

SEQ ID NO: 344509 - RNA, 19 nt, Artificial Sequence
  Description of Artificial Sequence: Synthetic oligonucleotide
caggucgggcaagucugcu

SEQ ID NO: 344510 - RNA, 19 nt, Artificial Sequence
  Description of Artificial Sequence: Synthetic oligonucleotide
cagcuaggucuuggcucca

SEQ ID NO: 344511 - RNA, 19 nt, Artificial Sequence
  Description of Artificial Sequence: Synthetic oligonucleotide
ccgcaggaggcacaggcau

SEQ ID NO: 344512 - RNA, 19 nt, Artificial Sequence
  Description of Artificial Sequence: Synthetic oligonucleotide
gcgacgccggcggaguucu

SEQ ID NO: 344513 - RNA, 19 nt, Artificial Sequence
  Description of Artificial Sequence: Synthetic oligonucleotide
gcuccguguagagcaugua

SEQ ID NO: 344514 - RNA, 19 nt, Artificial Sequence
  Description of Artificial Sequence: Synthetic oligonucleotide
cguggcugacaaagaggaa

SEQ ID NO: 344515 - RNA, 19 nt, Artificial Sequence
  Description of Artificial Sequence: Synthetic oligonucleotide
cgccggcggaguucugcag

SEQ ID NO: 344516 - RNA, 19 nt, Artificial Sequence
  Description of Artificial Sequence: Synthetic oligonucleotide
ggccaucggggacgaucaa

SEQ ID NO: 344517 - RNA, 19 nt, Artificial Sequence
  Description of Artificial Sequence: Synthetic oligonucleotide
ccgagacaugauggcaucu

SEQ ID NO: 344518 - RNA, 19 nt, Artificial Sequence
  Description of Artificial Sequence: Synthetic oligonucleotide
cggauggcucgccgagaca

SEQ ID NO: 344519 - RNA, 19 nt, Artificial Sequence
  Description of Artificial Sequence: Synthetic oligonucleotide
cggggacgaucaacuggga

SEQ ID NO: 344520 - RNA, 19 nt, Artificial Sequence
  Description of Artificial Sequence: Synthetic oligonucleotide
ccagguacaugggccuaau

SEQ ID NO: 344521 - RNA, 19 nt, Artificial Sequence
  Description of Artificial Sequence: Synthetic oligonucleotide
gcgggaaggugugcaccuu

SEQ ID NO: 344522 - RNA, 19 nt, Artificial Sequence
  Description of Artificial Sequence: Synthetic oligonucleotide
cgacgccggcggaguucug

SEQ ID NO: 344523 - RNA, 19 nt, Artificial Sequence
  Description of Artificial Sequence: Synthetic oligonucleotide
cggcggaguucugcagcau

SEQ ID NO: 344524 - RNA, 19 nt, Artificial Sequence
  Description of Artificial Sequence: Synthetic oligonucleotide
uaaguuaaagcaaugaccc

SEQ ID NO: 344525 - RNA, 19 nt, Artificial Sequence
  Description of Artificial Sequence: Synthetic oligonucleotide
auagcuaaacuuuaacccc

SEQ ID NO: 344526 - RNA, 19 nt, Artificial Sequence
  Description of Artificial Sequence: Synthetic oligonucleotide
aauugucuaagucuuguuc

SEQ ID NO: 344527 - RNA, 19 nt, Artificial Sequence
  Description of Artificial Sequence: Synthetic oligonucleotide
agugcuacuaauuaacagg

SEQ ID NO: 344528 - RNA, 19 nt, Artificial Sequence
  Description of Artificial Sequence: Synthetic oligonucleotide
auaaguuaaagcaaugacc

SEQ ID NO: 344529 - RNA, 19 nt, Artificial Sequence
  Description of Artificial Sequence: Synthetic oligonucleotide
aacuaugugauguuuuagg

SEQ ID NO: 344530 - RNA, 19 nt, Artificial Sequence
  Description of Artificial Sequence: Synthetic oligonucleotide
aaucuagugauucuuccgg

SEQ ID NO: 344531 - RNA, 19 nt, Artificial Sequence
  Description of Artificial Sequence: Synthetic oligonucleotide
cauagcuaaacuuuaaccc

SEQ ID NO: 344532 - RNA, 19 nt, Artificial Sequence
  Description of Artificial Sequence: Synthetic oligonucleotide
aaaaugaaccauaugacag

SEQ ID NO: 344533 - RNA, 19 nt, Artificial Sequence
  Description of Artificial Sequence: Synthetic oligonucleotide
aauagugcuacuaauuaac

SEQ ID NO: 344534 - RNA, 19 nt, Artificial Sequence
  Description of Artificial Sequence: Synthetic oligonucleotide
aagcaagaaaucuugguag

SEQ ID NO: 344535 - RNA, 19 nt, Artificial Sequence
  Description of Artificial Sequence: Synthetic oligonucleotide
aaauuauauccuaaacucc

SEQ ID NO: 344536 - RNA, 19 nt, Artificial Sequence
  Description of Artificial Sequence: Synthetic oligonucleotide
auauggagggauuauuucc

SEQ ID NO: 344537 - RNA, 19 nt, Artificial Sequence
  Description of Artificial Sequence: Synthetic oligonucleotide
aauauggagggauuauuuc

SEQ ID NO: 344538 - RNA, 19 nt, Artificial Sequence
  Description of Artificial Sequence: Synthetic oligonucleotide
uaauacaagagguacuggg

SEQ ID NO: 344539 - RNA, 19 nt, Artificial Sequence
  Description of Artificial Sequence: Synthetic oligonucleotide
acuaguaagcuccaaacuc

SEQ ID NO: 344540 - RNA, 19 nt, Artificial Sequence
  Description of Artificial Sequence: Synthetic oligonucleotide
aauucuauuguacguuuuc

SEQ ID NO: 344541 - RNA, 19 nt, Artificial Sequence
  Description of Artificial Sequence: Synthetic oligonucleotide
ucauagaacauucaagcca

SEQ ID NO: 344542 - RNA, 19 nt, Artificial Sequence
  Description of Artificial Sequence: Synthetic oligonucleotide
aaaucuagugauucuuccg

SEQ ID NO: 344543 - RNA, 19 nt, Artificial Sequence
  Description of Artificial Sequence: Synthetic oligonucleotide
uaguuaucgaaucagaaaa

SEQ ID NO: 344544 - RNA, 19 nt, Artificial Sequence
  Description of Artificial Sequence: Synthetic oligonucleotide
uauucuugcacuuugcugu

SEQ ID NO: 344545 - RNA, 19 nt, Artificial Sequence
  Description of Artificial Sequence: Synthetic oligonucleotide
ugcaauaacuauaauacaa

SEQ ID NO: 344546 - RNA, 19 nt, Artificial Sequence
  Description of Artificial Sequence: Synthetic oligonucleotide
auaauuuuggugcacaaga

SEQ ID NO: 344547 - RNA, 19 nt, Artificial Sequence
  Description of Artificial Sequence: Synthetic oligonucleotide
ucuauagacagauauauuu

SEQ ID NO: 344548 - RNA, 19 nt, Artificial Sequence
  Description of Artificial Sequence: Synthetic oligonucleotide
auauccuaaacuccuauuc

SEQ ID NO: 344549 - RNA, 19 nt, Artificial Sequence
  Description of Artificial Sequence: Synthetic oligonucleotide
uguauauauugguuguucg

SEQ ID NO: 344550 - RNA, 19 nt, Artificial Sequence
  Description of Artificial Sequence: Synthetic oligonucleotide
uuuaguaaguuacauucca

SEQ ID NO: 344551 - RNA, 19 nt, Artificial Sequence
  Description of Artificial Sequence: Synthetic oligonucleotide
ucugacgacaacaaaacgu

SEQ ID NO: 344552 - RNA, 19 nt, Artificial Sequence
  Description of Artificial Sequence: Synthetic oligonucleotide
aaaucaugcuuucuaaacu

SEQ ID NO: 344553 - RNA, 19 nt, Artificial Sequence
  Description of Artificial Sequence: Synthetic oligonucleotide
aauccgaauaaauucacaa

SEQ ID NO: 344554 - RNA, 19 nt, Artificial Sequence
  Description of Artificial Sequence: Synthetic oligonucleotide
uggguauucucauagaaca

SEQ ID NO: 344555 - RNA, 19 nt, Artificial Sequence
  Description of Artificial Sequence: Synthetic oligonucleotide
auacaugagguuuaguaag

SEQ ID NO: 344556 - RNA, 19 nt, Artificial Sequence
  Description of Artificial Sequence: Synthetic oligonucleotide
uauaauacaagagguacug

SEQ ID NO: 344557 - RNA, 19 nt, Artificial Sequence
  Description of Artificial Sequence: Synthetic oligonucleotide
uggaacacuaccaaucuug

SEQ ID NO: 344558 - RNA, 19 nt, Artificial Sequence
  Description of Artificial Sequence: Synthetic oligonucleotide
aauuauauccuaaacuccu

SEQ ID NO: 344559 - RNA, 19 nt, Artificial Sequence
  Description of Artificial Sequence: Synthetic oligonucleotide
aaucuugguagguaacauc

SEQ ID NO: 344560 - RNA, 19 nt, Artificial Sequence
  Description of Artificial Sequence: Synthetic oligonucleotide
auugauucgucuuuuccuc

SEQ ID NO: 344561 - RNA, 19 nt, Artificial Sequence
  Description of Artificial Sequence: Synthetic oligonucleotide
cagguuguaauauggaggg

SEQ ID NO: 344562 - RNA, 19 nt, Artificial Sequence
  Description of Artificial Sequence: Synthetic oligonucleotide
ucauuuguggcuaauuccu

SEQ ID NO: 344563 - RNA, 19 nt, Artificial Sequence
  Description of Artificial Sequence: Synthetic oligonucleotide
uuuguccccagcaugagug

SEQ ID NO: 344564 - RNA, 19 nt, Artificial Sequence
  Description of Artificial Sequence: Synthetic oligonucleotide
auuagcuccacaucauaac

SEQ ID NO: 344565 - RNA, 19 nt, Artificial Sequence
  Description of Artificial Sequence: Synthetic oligonucleotide
aaaucaugcacaucacgug

SEQ ID NO: 344566 - RNA, 19 nt, Artificial Sequence
  Description of Artificial Sequence: Synthetic oligonucleotide
aacuccuauucucaguauc

SEQ ID NO: 344567 - RNA, 19 nt, Artificial Sequence
  Description of Artificial Sequence: Synthetic oligonucleotide
uaaacugcugcauaugaga

SEQ ID NO: 344568 - RNA, 19 nt, Artificial Sequence
  Description of Artificial Sequence: Synthetic oligonucleotide
aauucaccaauguucccuc

SEQ ID NO: 344569 - RNA, 19 nt, Artificial Sequence
  Description of Artificial Sequence: Synthetic oligonucleotide
uauauaaguuaaagcaaug

SEQ ID NO: 344570 - RNA, 19 nt, Artificial Sequence
  Description of Artificial Sequence: Synthetic oligonucleotide
uaugugauguuuuaggaua

SEQ ID NO: 344571 - RNA, 19 nt, Artificial Sequence
  Description of Artificial Sequence: Synthetic oligonucleotide
gaccgaaacaccaaaacag

SEQ ID NO: 344572 - RNA, 19 nt, Artificial Sequence
  Description of Artificial Sequence: Synthetic oligonucleotide
aacagauagaauucuuccu

SEQ ID NO: 344573 - RNA, 19 nt, Artificial Sequence
  Description of Artificial Sequence: Synthetic oligonucleotide
uguguuagugcaaauaguu

SEQ ID NO: 344574 - RNA, 19 nt, Artificial Sequence
  Description of Artificial Sequence: Synthetic oligonucleotide
augagguuuaguaaguuac

SEQ ID NO: 344575 - RNA, 19 nt, Artificial Sequence
  Description of Artificial Sequence: Synthetic oligonucleotide
aaaauccgaauaaauucac

SEQ ID NO: 344576 - RNA, 19 nt, Artificial Sequence
  Description of Artificial Sequence: Synthetic oligonucleotide
ucaagacacacugucacgg

SEQ ID NO: 344577 - RNA, 19 nt, Artificial Sequence
  Description of Artificial Sequence: Synthetic oligonucleotide
agacucaagacacacuguc

SEQ ID NO: 344578 - RNA, 19 nt, Artificial Sequence
  Description of Artificial Sequence: Synthetic oligonucleotide
auccgaauaaauucacaac

SEQ ID NO: 344579 - RNA, 19 nt, Artificial Sequence
  Description of Artificial Sequence: Synthetic oligonucleotide
cauaugagaagguaacuug

SEQ ID NO: 344580 - RNA, 19 nt, Artificial Sequence
  Description of Artificial Sequence: Synthetic oligonucleotide
gauugcacugaaauuaugc

SEQ ID NO: 344581 - RNA, 19 nt, Artificial Sequence
  Description of Artificial Sequence: Synthetic oligonucleotide
cuuccuucaauuaaacaug

SEQ ID NO: 344582 - RNA, 19 nt, Artificial Sequence
  Description of Artificial Sequence: Synthetic oligonucleotide
ugugcauggaacacuacca

SEQ ID NO: 344583 - RNA, 19 nt, Artificial Sequence
  Description of Artificial Sequence: Synthetic oligonucleotide
ugauguuuuaggauacuga

SEQ ID NO: 344584 - RNA, 19 nt, Artificial Sequence
  Description of Artificial Sequence: Synthetic oligonucleotide
uaucauuauaacagaauau

SEQ ID NO: 344585 - RNA, 19 nt, Artificial Sequence
  Description of Artificial Sequence: Synthetic oligonucleotide
ugcuuggaggaacagauga

SEQ ID NO: 344586 - RNA, 19 nt, Artificial Sequence
  Description of Artificial Sequence: Synthetic oligonucleotide
guaacaucaguucaccuug

SEQ ID NO: 344587 - RNA, 19 nt, Artificial Sequence
  Description of Artificial Sequence: Synthetic oligonucleotide
aagcaaugacccuacagcu

SEQ ID NO: 344588 - RNA, 19 nt, Artificial Sequence
  Description of Artificial Sequence: Synthetic oligonucleotide
uuuagagaauggcauucag

SEQ ID NO: 344589 - RNA, 19 nt, Artificial Sequence
  Description of Artificial Sequence: Synthetic oligonucleotide
auuccaauucacucaacag

SEQ ID NO: 344590 - RNA, 19 nt, Artificial Sequence
  Description of Artificial Sequence: Synthetic oligonucleotide
aaauaauugucuaagucuu

SEQ ID NO: 344591 - RNA, 19 nt, Artificial Sequence
  Description of Artificial Sequence: Synthetic oligonucleotide
auauauaugugugugugug

SEQ ID NO: 344592 - RNA, 19 nt, Artificial Sequence
  Description of Artificial Sequence: Synthetic oligonucleotide
ugucuuuacacuguuugag

SEQ ID NO: 344593 - RNA, 19 nt, Artificial Sequence
  Description of Artificial Sequence: Synthetic oligonucleotide
aacuuuauauccucucuau

SEQ ID NO: 344594 - RNA, 19 nt, Artificial Sequence
  Description of Artificial Sequence: Synthetic oligonucleotide
ucgguuugaguaguuaucg

SEQ ID NO: 344595 - RNA, 19 nt, Artificial Sequence
  Description of Artificial Sequence: Synthetic oligonucleotide
ugaguaguuaucgaaucag

SEQ ID NO: 344596 - RNA, 19 nt, Artificial Sequence
  Description of Artificial Sequence: Synthetic oligonucleotide
uauccuaaacuccuauucu

SEQ ID NO: 344597 - RNA, 19 nt, Artificial Sequence
  Description of Artificial Sequence: Synthetic oligonucleotide
  modified_base (2)..(2): a, c, u, g, unknown or other
anauuagcauucuguggug

SEQ ID NO: 344598 - RNA, 19 nt, Artificial Sequence
  Description of Artificial Sequence: Synthetic oligonucleotide
gaaaauccgaauaaauuca

SEQ ID NO: 344599 - RNA, 19 nt, Artificial Sequence
  Description of Artificial Sequence: Synthetic oligonucleotide
uggccauaagaauucagag

SEQ ID NO: 344600 - RNA, 19 nt, Artificial Sequence
  Description of Artificial Sequence: Synthetic oligonucleotide
acaagaagccuacuuuagg

SEQ ID NO: 344601 - RNA, 19 nt, Artificial Sequence
  Description of Artificial Sequence: Synthetic oligonucleotide
  modified_base (6)..(6): a, c, u, g, unknown or other
uggcanauuagcauucugu

SEQ ID NO: 344602 - RNA, 19 nt, Artificial Sequence
  Description of Artificial Sequence: Synthetic oligonucleotide
agcacgauggcugucaccg

SEQ ID NO: 344603 - RNA, 19 nt, Artificial Sequence
  Description of Artificial Sequence: Synthetic oligonucleotide
agccaauucaccaauguuc

SEQ ID NO: 344604 - RNA, 19 nt, Artificial Sequence
  Description of Artificial Sequence: Synthetic oligonucleotide
uuacaagucauuuguggcu

SEQ ID NO: 344605 - RNA, 19 nt, Artificial Sequence
  Description of Artificial Sequence: Synthetic oligonucleotide
acagguuguaauauggagg

SEQ ID NO: 344606 - RNA, 19 nt, Artificial Sequence
  Description of Artificial Sequence: Synthetic oligonucleotide
acuaugugauguuuuagga

SEQ ID NO: 344607 - RNA, 19 nt, Artificial Sequence
  Description of Artificial Sequence: Synthetic oligonucleotide
ucaccuuguaaccucguug

SEQ ID NO: 344608 - RNA, 19 nt, Artificial Sequence
  Description of Artificial Sequence: Synthetic oligonucleotide
aacuauguggccauaagaa

SEQ ID NO: 344609 - RNA, 19 nt, Artificial Sequence
  Description of Artificial Sequence: Synthetic oligonucleotide
ugaacuauguggccauaag

SEQ ID NO: 344610 - RNA, 19 nt, Artificial Sequence
  Description of Artificial Sequence: Synthetic oligonucleotide
uuagagaauggcauucagu

SEQ ID NO: 344611 - RNA, 19 nt, Artificial Sequence
  Description of Artificial Sequence: Synthetic oligonucleotide
uucugacgacaacaaaacg

SEQ ID NO: 344612 - RNA, 19 nt, Artificial Sequence
  Description of Artificial Sequence: Synthetic oligonucleotide
uucaccuugaaugugaauu

SEQ ID NO: 344613 - RNA, 19 nt, Artificial Sequence
  Description of Artificial Sequence: Synthetic oligonucleotide
uauguggccauaagaauuc

SEQ ID NO: 344614 - RNA, 19 nt, Artificial Sequence
  Description of Artificial Sequence: Synthetic oligonucleotide
acgacaacaaaacguuuuc

SEQ ID NO: 344615 - RNA, 19 nt, Artificial Sequence
  Description of Artificial Sequence: Synthetic oligonucleotide
aaagcuuaucuaaacagau

SEQ ID NO: 344616 - RNA, 19 nt, Artificial Sequence
  Description of Artificial Sequence: Synthetic oligonucleotide
uauuguacguuuucuuuac

SEQ ID NO: 344617 - RNA, 19 nt, Artificial Sequence
  Description of Artificial Sequence: Synthetic oligonucleotide
aaauaauuuuggugcacaa

SEQ ID NO: 344618 - RNA, 19 nt, Artificial Sequence
  Description of Artificial Sequence: Synthetic oligonucleotide
uaauauggagggauuauuu

SEQ ID NO: 344619 - RNA, 19 nt, Artificial Sequence
  Description of Artificial Sequence: Synthetic oligonucleotide
acuaauuaacaggcugucc

SEQ ID NO: 344620 - RNA, 19 nt, Artificial Sequence
  Description of Artificial Sequence: Synthetic oligonucleotide
auuacaugaaaauccgaau

SEQ ID NO: 344621 - RNA, 19 nt, Artificial Sequence
  Description of Artificial Sequence: Synthetic oligonucleotide
uuaggauacugacaucacu

SEQ ID NO: 344622 - RNA, 19 nt, Artificial Sequence
  Description of Artificial Sequence: Synthetic oligonucleotide
aucuguacuccagaaauuc

SEQ ID NO: 344623 - RNA, 19 nt, Artificial Sequence
  Description of Artificial Sequence: Synthetic oligonucleotide
gaugauuacggcugggaca

SEQ ID NO: 344624 - RNA, 19 nt, Artificial Sequence
  Description of Artificial Sequence: Synthetic oligonucleotide
acugauaggcacugagcac

SEQ ID NO: 344625 - RNA, 19 nt, Artificial Sequence
  Description of Artificial Sequence: Synthetic oligonucleotide
aauacaagagguacugggu

SEQ ID NO: 344626 - RNA, 19 nt, Artificial Sequence
  Description of Artificial Sequence: Synthetic oligonucleotide
ucuauuguacguuuucuuu

SEQ ID NO: 344627 - RNA, 19 nt, Artificial Sequence
  Description of Artificial Sequence: Synthetic oligonucleotide
augauuacggcugggacag

SEQ ID NO: 344628 - RNA, 19 nt, Artificial Sequence
  Description of Artificial Sequence: Synthetic oligonucleotide
uugaaguuauguuugcaau

SEQ ID NO: 344629 - RNA, 19 nt, Artificial Sequence
  Description of Artificial Sequence: Synthetic oligonucleotide
aguuauguuugcaauaacu

SEQ ID NO: 344630 - RNA, 19 nt, Artificial Sequence
  Description of Artificial Sequence: Synthetic oligonucleotide
aucauuauaacagaauauu

SEQ ID NO: 344631 - RNA, 19 nt, Artificial Sequence
  Description of Artificial Sequence: Synthetic oligonucleotide
aaauggcguaaauauguaa

SEQ ID NO: 344632 - RNA, 19 nt, Artificial Sequence
  Description of Artificial Sequence: Synthetic oligonucleotide
uguacguuuucuuuacaaa

SEQ ID NO: 344633 - RNA, 19 nt, Artificial Sequence
  Description of Artificial Sequence: Synthetic oligonucleotide
ugagguuuaguaaguuaca

SEQ ID NO: 344634 - RNA, 19 nt, Artificial Sequence
  Description of Artificial Sequence: Synthetic oligonucleotide
uuauauccuaaacuccuau

SEQ ID NO: 344635 - RNA, 19 nt, Artificial Sequence
  Description of Artificial Sequence: Synthetic oligonucleotide
aauggaccgaaacaccaaa

SEQ ID NO: 344636 - RNA, 19 nt, Artificial Sequence
  Description of Artificial Sequence: Synthetic oligonucleotide
uucacaacuuuauauccuc

SEQ ID NO: 344637 - RNA, 19 nt, Artificial Sequence
  Description of Artificial Sequence: Synthetic oligonucleotide
guugauugcacugaaauua

SEQ ID NO: 344638 - RNA, 19 nt, Artificial Sequence
  Description of Artificial Sequence: Synthetic oligonucleotide
  modified_base (4)..(4): a, c, u, g, unknown or other
gcanauuagcauucugugg

SEQ ID NO: 344639 - RNA, 19 nt, Artificial Sequence
  Description of Artificial Sequence: Synthetic oligonucleotide
uaguaaguuacauuccaau

SEQ ID NO: 344640 - RNA, 19 nt, Artificial Sequence
  Description of Artificial Sequence: Synthetic oligonucleotide
cagaguaaaauaucuauaa

SEQ ID NO: 344641 - RNA, 19 nt, Artificial Sequence
  Description of Artificial Sequence: Synthetic oligonucleotide
uugauucgucuuuuccucg

SEQ ID NO: 344642 - RNA, 19 nt, Artificial Sequence
  Description of Artificial Sequence: Synthetic oligonucleotide
uuaguaaguuacauuccaa

SEQ ID NO: 344643 - RNA, 19 nt, Artificial Sequence
  Description of Artificial Sequence: Synthetic oligonucleotide
auaucaagcagugcuuagg

SEQ ID NO: 344644 - RNA, 19 nt, Artificial Sequence
  Description of Artificial Sequence: Synthetic oligonucleotide
uggaccgaaacaccaaaac

SEQ ID NO: 344645 - RNA, 19 nt, Artificial Sequence
  Description of Artificial Sequence: Synthetic oligonucleotide
uguguguguguguauauau

SEQ ID NO: 344646 - RNA, 19 nt, Artificial Sequence
  Description of Artificial Sequence: Synthetic oligonucleotide
acauguauguauuucccaa

SEQ ID NO: 344647 - RNA, 19 nt, Artificial Sequence
  Description of Artificial Sequence: Synthetic oligonucleotide
cuugaaugugaauuagcuc

SEQ ID NO: 344648 - RNA, 19 nt, Artificial Sequence
  Description of Artificial Sequence: Synthetic oligonucleotide
gcuacuaauuaacaggcug

SEQ ID NO: 344649 - RNA, 19 nt, Artificial Sequence
  Description of Artificial Sequence: Synthetic oligonucleotide
agaguaaaauaucuauaaa

SEQ ID NO: 344650 - RNA, 19 nt, Artificial Sequence
  Description of Artificial Sequence: Synthetic oligonucleotide
gaacuauguggccauaaga

SEQ ID NO: 344651 - RNA, 19 nt, Artificial Sequence
  Description of Artificial Sequence: Synthetic oligonucleotide
  modified_base (3)..(3): a, c, u, g, unknown or other
canauuagcauucuguggu

SEQ ID NO: 344652 - RNA, 19 nt, Artificial Sequence
  Description of Artificial Sequence: Synthetic oligonucleotide
acaucacguguguuagugc

SEQ ID NO: 344653 - RNA, 19 nt, Artificial Sequence
  Description of Artificial Sequence: Synthetic oligonucleotide
cuuguaaccucguugccuc

SEQ ID NO: 344654 - RNA, 19 nt, Artificial Sequence
  Description of Artificial Sequence: Synthetic oligonucleotide
uucacugacugaagaaaac

SEQ ID NO: 344655 - RNA, 19 nt, Artificial Sequence
  Description of Artificial Sequence: Synthetic oligonucleotide
  modified_base (5)..(5): a, c, u, g, unknown or other
ggcanauuagcauucugug

SEQ ID NO: 344656 - RNA, 19 nt, Artificial Sequence
  Description of Artificial Sequence: Synthetic oligonucleotide
ucuagagggaggacggugu

SEQ ID NO: 344657 - RNA, 19 nt, Artificial Sequence
  Description of Artificial Sequence: Synthetic oligonucleotide
auucuuccggcaacaaucc

SEQ ID NO: 344658 - RNA, 19 nt, Artificial Sequence
  Description of Artificial Sequence: Synthetic oligonucleotide
cugugcauggaacacuacc

SEQ ID NO: 344659 - RNA, 19 nt, Artificial Sequence
  Description of Artificial Sequence: Synthetic oligonucleotide
acuccuauucucaguaucg

SEQ ID NO: 344660 - RNA, 19 nt, Artificial Sequence
  Description of Artificial Sequence: Synthetic oligonucleotide
uacaugagguuuaguaagu

SEQ ID NO: 344661 - RNA, 19 nt, Artificial Sequence
  Description of Artificial Sequence: Synthetic oligonucleotide
cauagaacauucaagccaa

SEQ ID NO: 344662 - RNA, 19 nt, Artificial Sequence
  Description of Artificial Sequence: Synthetic oligonucleotide
ucuagugauucuuccggca

SEQ ID NO: 344663 - RNA, 19 nt, Artificial Sequence
  Description of Artificial Sequence: Synthetic oligonucleotide
aaguuaaagcaaugacccu

SEQ ID NO: 344664 - RNA, 19 nt, Artificial Sequence
  Description of Artificial Sequence: Synthetic oligonucleotide
auaauugucuaagucuugu

SEQ ID NO: 344665 - RNA, 19 nt, Artificial Sequence
  Description of Artificial Sequence: Synthetic oligonucleotide
aauaauugucuaagucuug

SEQ ID NO: 344666 - RNA, 19 nt, Artificial Sequence
  Description of Artificial Sequence: Synthetic oligonucleotide
ucuauaaauuuaugguaua

SEQ ID NO: 344667 - RNA, 19 nt, Artificial Sequence
  Description of Artificial Sequence: Synthetic oligonucleotide
auauugguuguucgguuug

SEQ ID NO: 344668 - RNA, 19 nt, Artificial Sequence
  Description of Artificial Sequence: Synthetic oligonucleotide
uauauaugugugugugugu

SEQ ID NO: 344669 - RNA, 19 nt, Artificial Sequence
  Description of Artificial Sequence: Synthetic oligonucleotide
uguuugagcucaucuguga

SEQ ID NO: 344670 - RNA, 19 nt, Artificial Sequence
  Description of Artificial Sequence: Synthetic oligonucleotide
ucaaggaucccacuugguu

SEQ ID NO: 344671 - RNA, 19 nt, Artificial Sequence
  Description of Artificial Sequence: Synthetic oligonucleotide
uguaugcccaagcaagaaa

SEQ ID NO: 344672 - RNA, 19 nt, Artificial Sequence
  Description of Artificial Sequence: Synthetic oligonucleotide
ugguaaaaugaaccauaug

SEQ ID NO: 344673 - RNA, 19 nt, Artificial Sequence
  Description of Artificial Sequence: Synthetic oligonucleotide
ccauagcuaaacuuuaacc

SEQ ID NO: 344674 - RNA, 19 nt, Artificial Sequence
  Description of Artificial Sequence: Synthetic oligonucleotide
ugaauuagcuccacaucau

SEQ ID NO: 344675 - RNA, 19 nt, Artificial Sequence
  Description of Artificial Sequence: Synthetic oligonucleotide
ugacaccuaagcuggaaac

SEQ ID NO: 344676 - RNA, 19 nt, Artificial Sequence
  Description of Artificial Sequence: Synthetic oligonucleotide
gaauagugcuacuaauuaa

SEQ ID NO: 344677 - RNA, 19 nt, Artificial Sequence
  Description of Artificial Sequence: Synthetic oligonucleotide
guaguuaucgaaucagaaa

SEQ ID NO: 344678 - RNA, 19 nt, Artificial Sequence
  Description of Artificial Sequence: Synthetic oligonucleotide
  modified_base (12)..(12): a, c, u, g, unknown or other
uaccacuggcanauuagca

SEQ ID NO: 344679 - RNA, 19 nt, Artificial Sequence
  Description of Artificial Sequence: Synthetic oligonucleotide
agucagcugagucucgaag

SEQ ID NO: 344680 - RNA, 19 nt, Artificial Sequence
  Description of Artificial Sequence: Synthetic oligonucleotide
agauagaauucuuccuuca

SEQ ID NO: 344681 - RNA, 19 nt, Artificial Sequence
  Description of Artificial Sequence: Synthetic oligonucleotide
uguacagacucaagacaca

SEQ ID NO: 344682 - RNA, 19 nt, Artificial Sequence
  Description of Artificial Sequence: Synthetic oligonucleotide
ugcucuuucaaggauccca

SEQ ID NO: 344683 - RNA, 19 nt, Artificial Sequence
  Description of Artificial Sequence: Synthetic oligonucleotide
cccaaauagcuuuaaauac

SEQ ID NO: 344684 - RNA, 19 nt, Artificial Sequence
  Description of Artificial Sequence: Synthetic oligonucleotide
uucgguuugaguaguuauc

SEQ ID NO: 344685 - RNA, 19 nt, Artificial Sequence
  Description of Artificial Sequence: Synthetic oligonucleotide
uuaagucagcugagucucg

SEQ ID NO: 344686 - RNA, 19 nt, Artificial Sequence
  Description of Artificial Sequence: Synthetic oligonucleotide
cuggguauucucauagaac

SEQ ID NO: 344687 - RNA, 19 nt, Artificial Sequence
  Description of Artificial Sequence: Synthetic oligonucleotide
uugauugcacugaaauuau

SEQ ID NO: 344688 - RNA, 19 nt, Artificial Sequence
  Description of Artificial Sequence: Synthetic oligonucleotide
uaccacaauggaccgaaac

SEQ ID NO: 344689 - RNA, 19 nt, Artificial Sequence
  Description of Artificial Sequence: Synthetic oligonucleotide
uccuauucucaguaucggc

SEQ ID NO: 344690 - RNA, 19 nt, Artificial Sequence
  Description of Artificial Sequence: Synthetic oligonucleotide
auaauacaagagguacugg

SEQ ID NO: 344691 - RNA, 19 nt, Artificial Sequence
  Description of Artificial Sequence: Synthetic oligonucleotide
cuuaggugugucacugugc

SEQ ID NO: 344692 - RNA, 19 nt, Artificial Sequence
  Description of Artificial Sequence: Synthetic oligonucleotide
uugucuuuacacuguuuga

SEQ ID NO: 344693 - RNA, 19 nt, Artificial Sequence
  Description of Artificial Sequence: Synthetic oligonucleotide
aaguuacauuccaauucac

SEQ ID NO: 344694 - RNA, 19 nt, Artificial Sequence
  Description of Artificial Sequence: Synthetic oligonucleotide
ugcucccagaaauauuuca

SEQ ID NO: 344695 - RNA, 19 nt, Artificial Sequence
  Description of Artificial Sequence: Synthetic oligonucleotide
agagguacuggguaccacu

SEQ ID NO: 344696 - RNA, 19 nt, Artificial Sequence
  Description of Artificial Sequence: Synthetic oligonucleotide
ugacccuacagcuguauuc

SEQ ID NO: 344697 - RNA, 19 nt, Artificial Sequence
  Description of Artificial Sequence: Synthetic oligonucleotide
gcaauaacuauaauacaag

SEQ ID NO: 344698 - RNA, 19 nt, Artificial Sequence
  Description of Artificial Sequence: Synthetic oligonucleotide
uccggcaacaaucccaaau

SEQ ID NO: 344699 - RNA, 19 nt, Artificial Sequence
  Description of Artificial Sequence: Synthetic oligonucleotide
ugguagguaacaucaguuc

SEQ ID NO: 344700 - RNA, 19 nt, Artificial Sequence
  Description of Artificial Sequence: Synthetic oligonucleotide
accgaaacaccaaaacagg

SEQ ID NO: 344701 - RNA, 19 nt, Artificial Sequence
  Description of Artificial Sequence: Synthetic oligonucleotide
aaucccaaauagcuuuaaa

SEQ ID NO: 344702 - RNA, 19 nt, Artificial Sequence
  Description of Artificial Sequence: Synthetic oligonucleotide
cagucuauuucaaacuuca

SEQ ID NO: 344703 - RNA, 19 nt, Artificial Sequence
  Description of Artificial Sequence: Synthetic oligonucleotide
aaaucuugguagguaacau

SEQ ID NO: 344704 - RNA, 19 nt, Artificial Sequence
  Description of Artificial Sequence: Synthetic oligonucleotide
ugauucgucuuuuccucgc

SEQ ID NO: 344705 - RNA, 19 nt, Artificial Sequence
  Description of Artificial Sequence: Synthetic oligonucleotide
accuugaaugugaauuagc

SEQ ID NO: 344706 - RNA, 19 nt, Artificial Sequence
  Description of Artificial Sequence: Synthetic oligonucleotide
aaauuacaugaaaauccga

SEQ ID NO: 344707 - RNA, 19 nt, Artificial Sequence
  Description of Artificial Sequence: Synthetic oligonucleotide
aguuaaagcaaugacccua

SEQ ID NO: 344708 - RNA, 19 nt, Artificial Sequence
  Description of Artificial Sequence: Synthetic oligonucleotide
agucacauuaaggcugaac

SEQ ID NO: 344709 - RNA, 19 nt, Artificial Sequence
  Description of Artificial Sequence: Synthetic oligonucleotide
aacuauaauacaagaggua

SEQ ID NO: 344710 - RNA, 19 nt, Artificial Sequence
  Description of Artificial Sequence: Synthetic oligonucleotide
aagccaauucaccaauguu

SEQ ID NO: 344711 - RNA, 19 nt, Artificial Sequence
  Description of Artificial Sequence: Synthetic oligonucleotide
uuagcauucugugguggag

SEQ ID NO: 344712 - RNA, 19 nt, Artificial Sequence
  Description of Artificial Sequence: Synthetic oligonucleotide
uggcacauacagcacgaug

SEQ ID NO: 344713 - RNA, 19 nt, Artificial Sequence
  Description of Artificial Sequence: Synthetic oligonucleotide
aaauccgaauaaauucaca

SEQ ID NO: 344714 - RNA, 19 nt, Artificial Sequence
  Description of Artificial Sequence: Synthetic oligonucleotide
gaggacgguguacagacuc

SEQ ID NO: 344715 - RNA, 19 nt, Artificial Sequence
  Description of Artificial Sequence: Synthetic oligonucleotide
uguaauauggagggauuau

SEQ ID NO: 344716 - RNA, 19 nt, Artificial Sequence
  Description of Artificial Sequence: Synthetic oligonucleotide
gcaaauuauauccuaaacu

SEQ ID NO: 344717 - RNA, 19 nt, Artificial Sequence
  Description of Artificial Sequence: Synthetic oligonucleotide
uaggccgaugauuacggcu

SEQ ID NO: 344718 - RNA, 19 nt, Artificial Sequence
  Description of Artificial Sequence: Synthetic oligonucleotide
uguccgaauuaacaauaaa

SEQ ID NO: 344719 - RNA, 19 nt, Artificial Sequence
  Description of Artificial Sequence: Synthetic oligonucleotide
guccgaauuaacaauaaaa

SEQ ID NO: 344720 - RNA, 19 nt, Artificial Sequence
  Description of Artificial Sequence: Synthetic oligonucleotide
uucuauuguacguuuucuu

SEQ ID NO: 344721 - RNA, 19 nt, Artificial Sequence
  Description of Artificial Sequence: Synthetic oligonucleotide
aagguaacuuggcuuuuaa

SEQ ID NO: 344722 - RNA, 19 nt, Artificial Sequence
  Description of Artificial Sequence: Synthetic oligonucleotide
auggcguaaauauguaaaa

SEQ ID NO: 344723 - RNA, 19 nt, Artificial Sequence
  Description of Artificial Sequence: Synthetic oligonucleotide
cagauagaauucuuccuuc

SEQ ID NO: 344724 - RNA, 19 nt, Artificial Sequence
  Description of Artificial Sequence: Synthetic oligonucleotide
cuagaucuggguauucuca

SEQ ID NO: 344725 - RNA, 19 nt, Artificial Sequence
  Description of Artificial Sequence: Synthetic oligonucleotide
uauauccuaaacuccuauu

SEQ ID NO: 344726 - RNA, 19 nt, Artificial Sequence
  Description of Artificial Sequence: Synthetic oligonucleotide
gugguuuuauaacaaguaa

SEQ ID NO: 344727 - RNA, 19 nt, Artificial Sequence
  Description of Artificial Sequence: Synthetic oligonucleotide
acacuaccaaucuugggaa

SEQ ID NO: 344728 - RNA, 19 nt, Artificial Sequence
  Description of Artificial Sequence: Synthetic oligonucleotide
caacaguuugguugauugc

SEQ ID NO: 344729 - RNA, 19 nt, Artificial Sequence
  Description of Artificial Sequence: Synthetic oligonucleotide
aucugugauugauucgucu

SEQ ID NO: 344730 - RNA, 19 nt, Artificial Sequence
  Description of Artificial Sequence: Synthetic oligonucleotide
auucuauuguacguuuucu

SEQ ID NO: 344731 - RNA, 19 nt, Artificial Sequence
  Description of Artificial Sequence: Synthetic oligonucleotide
auauauugguuguucgguu

SEQ ID NO: 344732 - RNA, 19 nt, Artificial Sequence
  Description of Artificial Sequence: Synthetic oligonucleotide
guuugcucaagaaaauaca

SEQ ID NO: 344733 - RNA, 19 nt, Artificial Sequence
  Description of Artificial Sequence: Synthetic oligonucleotide
gguagguaacaucaguuca

SEQ ID NO: 344734 - RNA, 19 nt, Artificial Sequence
  Description of Artificial Sequence: Synthetic oligonucleotide
ugggaauagugcuacuaau

SEQ ID NO: 344735 - RNA, 19 nt, Artificial Sequence
  Description of Artificial Sequence: Synthetic oligonucleotide
aguaguuaucgaaucagaa

SEQ ID NO: 344736 - RNA, 19 nt, Artificial Sequence
  Description of Artificial Sequence: Synthetic oligonucleotide
caucacguguguuagugca

SEQ ID NO: 344737 - RNA, 19 nt, Artificial Sequence
  Description of Artificial Sequence: Synthetic oligonucleotide
caagcaagaaaucuuggua

SEQ ID NO: 344738 - RNA, 19 nt, Artificial Sequence
  Description of Artificial Sequence: Synthetic oligonucleotide
uagugauucuuccggcaac

SEQ ID NO: 344739 - RNA, 19 nt, Artificial Sequence
  Description of Artificial Sequence: Synthetic oligonucleotide
cccauguauauauugguug

SEQ ID NO: 344740 - RNA, 19 nt, Artificial Sequence
  Description of Artificial Sequence: Synthetic oligonucleotide
acaccuaagcuggaaacug

SEQ ID NO: 344741 - RNA, 19 nt, Artificial Sequence
  Description of Artificial Sequence: Synthetic oligonucleotide
cacaucacguguguuagug

SEQ ID NO: 344742 - RNA, 19 nt, Artificial Sequence
  Description of Artificial Sequence: Synthetic oligonucleotide
uacugacaucacuauggug

SEQ ID NO: 344743 - RNA, 19 nt, Artificial Sequence
  Description of Artificial Sequence: Synthetic oligonucleotide
gucaccgcaaccagggccg

SEQ ID NO: 344744 - RNA, 19 nt, Artificial Sequence
  Description of Artificial Sequence: Synthetic oligonucleotide
uggcauucaguuuccaaua

SEQ ID NO: 344745 - RNA, 19 nt, Artificial Sequence
  Description of Artificial Sequence: Synthetic oligonucleotide
ucugagaauugugcaauuc

SEQ ID NO: 344746 - RNA, 19 nt, Artificial Sequence
  Description of Artificial Sequence: Synthetic oligonucleotide
uauguguguguguguauau

SEQ ID NO: 344747 - RNA, 19 nt, Artificial Sequence
  Description of Artificial Sequence: Synthetic oligonucleotide
cuguuugagcucaucugug

SEQ ID NO: 344748 - RNA, 19 nt, Artificial Sequence
  Description of Artificial Sequence: Synthetic oligonucleotide
accaaucuugggaauagug

SEQ ID NO: 344749 - RNA, 19 nt, Artificial Sequence
  Description of Artificial Sequence: Synthetic oligonucleotide
auucacaacuuuauauccu

SEQ ID NO: 344750 - RNA, 19 nt, Artificial Sequence
  Description of Artificial Sequence: Synthetic oligonucleotide
uuaaagcaaugacccuaca

SEQ ID NO: 344751 - RNA, 19 nt, Artificial Sequence
  Description of Artificial Sequence: Synthetic oligonucleotide
uucuagagggaggacggug

SEQ ID NO: 344752 - RNA, 19 nt, Artificial Sequence
  Description of Artificial Sequence: Synthetic oligonucleotide
aaaccauagcuaaacuuua

SEQ ID NO: 344753 - RNA, 19 nt, Artificial Sequence
  Description of Artificial Sequence: Synthetic oligonucleotide
aucaagcagugcuuaggug

SEQ ID NO: 344754 - RNA, 19 nt, Artificial Sequence
  Description of Artificial Sequence: Synthetic oligonucleotide
gugauguuuuaggauacug

SEQ ID NO: 344755 - RNA, 19 nt, Artificial Sequence
  Description of Artificial Sequence: Synthetic oligonucleotide
auauaugugugugugugua

SEQ ID NO: 344756 - RNA, 19 nt, Artificial Sequence
  Description of Artificial Sequence: Synthetic oligonucleotide
uccucgcucagucuauuuc

SEQ ID NO: 344757 - RNA, 19 nt, Artificial Sequence
  Description of Artificial Sequence: Synthetic oligonucleotide
aggaauaggccgaugauua

SEQ ID NO: 344758 - RNA, 19 nt, Artificial Sequence
  Description of Artificial Sequence: Synthetic oligonucleotide
ucuugcacuuugcuguuuu

SEQ ID NO: 344759 - RNA, 19 nt, Artificial Sequence
  Description of Artificial Sequence: Synthetic oligonucleotide
aggauacugacaucacuau

SEQ ID NO: 344760 - RNA, 19 nt, Artificial Sequence
  Description of Artificial Sequence: Synthetic oligonucleotide
cuaguaagcuccaaacucu

SEQ ID NO: 344761 - RNA, 19 nt, Artificial Sequence
  Description of Artificial Sequence: Synthetic oligonucleotide
aaacaugcuuggaggaaca

SEQ ID NO: 344762 - RNA, 19 nt, Artificial Sequence
  Description of Artificial Sequence: Synthetic oligonucleotide
uauauguguguguguguau

SEQ ID NO: 344763 - RNA, 19 nt, Artificial Sequence
  Description of Artificial Sequence: Synthetic oligonucleotide
caggcuguccgaauuaaca

SEQ ID NO: 344764 - RNA, 19 nt, Artificial Sequence
  Description of Artificial Sequence: Synthetic oligonucleotide
aaaauggcguaaauaugua

SEQ ID NO: 344765 - RNA, 19 nt, Artificial Sequence
  Description of Artificial Sequence: Synthetic oligonucleotide
auuaacaggcuguccgaau

SEQ ID NO: 344766 - RNA, 19 nt, Artificial Sequence
  Description of Artificial Sequence: Synthetic oligonucleotide
uuguaauauggagggauua

SEQ ID NO: 344767 - RNA, 19 nt, Artificial Sequence
  Description of Artificial Sequence: Synthetic oligonucleotide
cuacuaauuaacaggcugu

SEQ ID NO: 344768 - RNA, 19 nt, Artificial Sequence
  Description of Artificial Sequence: Synthetic oligonucleotide
  modified_base (7)..(7): a, c, u, g, unknown or other
cuggcanauuagcauucug

SEQ ID NO: 344769 - RNA, 19 nt, Artificial Sequence
  Description of Artificial Sequence: Synthetic oligonucleotide
uguggcuaauuccuccaua

SEQ ID NO: 344770 - RNA, 19 nt, Artificial Sequence
  Description of Artificial Sequence: Synthetic oligonucleotide
cuccuauucucaguaucgg

SEQ ID NO: 344771 - RNA, 19 nt, Artificial Sequence
  Description of Artificial Sequence: Synthetic oligonucleotide
augcccaagcaagaaaucu

SEQ ID NO: 344772 - RNA, 19 nt, Artificial Sequence
  Description of Artificial Sequence: Synthetic oligonucleotide
gggaggacgguguacagac

SEQ ID NO: 344773 - RNA, 19 nt, Artificial Sequence
  Description of Artificial Sequence: Synthetic oligonucleotide
uaauugucuaagucuuguu

SEQ ID NO: 344774 - RNA, 19 nt, Artificial Sequence
  Description of Artificial Sequence: Synthetic oligonucleotide
aacuucaacuucaguucug

SEQ ID NO: 344775 - RNA, 19 nt, Artificial Sequence
  Description of Artificial Sequence: Synthetic oligonucleotide
aguaucggcuagaucuggg

SEQ ID NO: 344776 - RNA, 19 nt, Artificial Sequence
  Description of Artificial Sequence: Synthetic oligonucleotide
acagcacgauggcugucac

SEQ ID NO: 344777 - RNA, 19 nt, Artificial Sequence
  Description of Artificial Sequence: Synthetic oligonucleotide
agugauucuuccggcaaca

SEQ ID NO: 344778 - RNA, 19 nt, Artificial Sequence
  Description of Artificial Sequence: Synthetic oligonucleotide
uacuuuaggccaccauaau

SEQ ID NO: 344779 - RNA, 19 nt, Artificial Sequence
  Description of Artificial Sequence: Synthetic oligonucleotide
ugugauugauucgucuuuu

SEQ ID NO: 344780 - RNA, 19 nt, Artificial Sequence
  Description of Artificial Sequence: Synthetic oligonucleotide
ggaccgaaacaccaaaaca

SEQ ID NO: 344781 - RNA, 19 nt, Artificial Sequence
  Description of Artificial Sequence: Synthetic oligonucleotide
gucacuaguaagcuccaaa

SEQ ID NO: 344782 - RNA, 19 nt, Artificial Sequence
  Description of Artificial Sequence: Synthetic oligonucleotide
cauuuguaugcccaagcaa

SEQ ID NO: 344783 - RNA, 19 nt, Artificial Sequence
  Description of Artificial Sequence: Synthetic oligonucleotide
ggauacugacaucacuaug

SEQ ID NO: 344784 - RNA, 19 nt, Artificial Sequence
  Description of Artificial Sequence: Synthetic oligonucleotide
gaguaguuaucgaaucaga

SEQ ID NO: 344785 - RNA, 19 nt, Artificial Sequence
  Description of Artificial Sequence: Synthetic oligonucleotide
uguuugcaauaacuauaau

SEQ ID NO: 344786 - RNA, 19 nt, Artificial Sequence
  Description of Artificial Sequence: Synthetic oligonucleotide
  modified_base (9)..(9): a, c, u, g, unknown or other
cacuggcanauuagcauuc

SEQ ID NO: 344787 - RNA, 19 nt, Artificial Sequence
  Description of Artificial Sequence: Synthetic oligonucleotide
ggcauucaguuuccaauag

SEQ ID NO: 344788 - RNA, 19 nt, Artificial Sequence
  Description of Artificial Sequence: Synthetic oligonucleotide
uuuaaccccuguguuuuaa

SEQ ID NO: 344789 - RNA, 19 nt, Artificial Sequence
  Description of Artificial Sequence: Synthetic oligonucleotide
agguaacaucaguucaccu

SEQ ID NO: 344790 - RNA, 19 nt, Artificial Sequence
  Description of Artificial Sequence: Synthetic oligonucleotide
uauugguuguucgguuuga

SEQ ID NO: 344791 - RNA, 19 nt, Artificial Sequence
  Description of Artificial Sequence: Synthetic oligonucleotide
gacacacugucacggagaa

SEQ ID NO: 344792 - RNA, 19 nt, Artificial Sequence
  Description of Artificial Sequence: Synthetic oligonucleotide
aggccgaugauuacggcug

SEQ ID NO: 344793 - RNA, 19 nt, Artificial Sequence
  Description of Artificial Sequence: Synthetic oligonucleotide
auauguguguguguguaua

SEQ ID NO: 344794 - RNA, 19 nt, Artificial Sequence
  Description of Artificial Sequence: Synthetic oligonucleotide
agccuuacugagaagaguu

SEQ ID NO: 344795 - RNA, 19 nt, Artificial Sequence
  Description of Artificial Sequence: Synthetic oligonucleotide
ggcuagaccuggcacauac

SEQ ID NO: 344796 - RNA, 19 nt, Artificial Sequence
  Description of Artificial Sequence: Synthetic oligonucleotide
uggcuaauuccuccauaaa

SEQ ID NO: 344797 - RNA, 19 nt, Artificial Sequence
  Description of Artificial Sequence: Synthetic oligonucleotide
aagcuuaucuaaacagaua

SEQ ID NO: 344798 - RNA, 19 nt, Artificial Sequence
  Description of Artificial Sequence: Synthetic oligonucleotide
ggcaacaaucccaaauagc

SEQ ID NO: 344799 - RNA, 19 nt, Artificial Sequence
  Description of Artificial Sequence: Synthetic oligonucleotide
uagcauucugugguggagu

SEQ ID NO: 344800 - RNA, 19 nt, Artificial Sequence
  Description of Artificial Sequence: Synthetic oligonucleotide
ccuaaacuccuauucucag

SEQ ID NO: 344801 - RNA, 19 nt, Artificial Sequence
  Description of Artificial Sequence: Synthetic oligonucleotide
ucacguguguuagugcaaa

SEQ ID NO: 344802 - RNA, 19 nt, Artificial Sequence
  Description of Artificial Sequence: Synthetic oligonucleotide
ugacgacaacaaaacguuu

SEQ ID NO: 344803 - RNA, 19 nt, Artificial Sequence
  Description of Artificial Sequence: Synthetic oligonucleotide
gcuuaggugugucacugug

SEQ ID NO: 344804 - RNA, 19 nt, Artificial Sequence
  Description of Artificial Sequence: Synthetic oligonucleotide
gugcuuaggugugucacug

SEQ ID NO: 344805 - RNA, 19 nt, Artificial Sequence
  Description of Artificial Sequence: Synthetic oligonucleotide
caugagguuuaguaaguua

SEQ ID NO: 344806 - RNA, 19 nt, Artificial Sequence
  Description of Artificial Sequence: Synthetic oligonucleotide
agcaaugacccuacagcug

SEQ ID NO: 344807 - RNA, 19 nt, Artificial Sequence
  Description of Artificial Sequence: Synthetic oligonucleotide
cagugcuuaggugugucac

SEQ ID NO: 344808 - RNA, 19 nt, Artificial Sequence
  Description of Artificial Sequence: Synthetic oligonucleotide
uguaaccucguugccuccu

SEQ ID NO: 344809 - RNA, 19 nt, Artificial Sequence
  Description of Artificial Sequence: Synthetic oligonucleotide
gcacuuugcuguuuuaaga

SEQ ID NO: 344810 - RNA, 19 nt, Artificial Sequence
  Description of Artificial Sequence: Synthetic oligonucleotide
acaugcuuggaggaacaga

SEQ ID NO: 344811 - RNA, 19 nt, Artificial Sequence
  Description of Artificial Sequence: Synthetic oligonucleotide
cuagugauucuuccggcaa

SEQ ID NO: 344812 - RNA, 19 nt, Artificial Sequence
  Description of Artificial Sequence: Synthetic oligonucleotide
acugaacuaugugauguuu

SEQ ID NO: 344813 - RNA, 19 nt, Artificial Sequence
  Description of Artificial Sequence: Synthetic oligonucleotide
uuguaaccucguugccucc

SEQ ID NO: 344814 - RNA, 19 nt, Artificial Sequence
  Description of Artificial Sequence: Synthetic oligonucleotide
cugacgacaacaaaacguu

SEQ ID NO: 344815 - RNA, 19 nt, Artificial Sequence
  Description of Artificial Sequence: Synthetic oligonucleotide
ggagauuaaaaguuauuuu

SEQ ID NO: 344816 - RNA, 19 nt, Artificial Sequence
  Description of Artificial Sequence: Synthetic oligonucleotide
uucucaguaucggcuagau

SEQ ID NO: 344817 - RNA, 19 nt, Artificial Sequence
  Description of Artificial Sequence: Synthetic oligonucleotide
agacacacugucacggaga

SEQ ID NO: 344818 - RNA, 19 nt, Artificial Sequence
  Description of Artificial Sequence: Synthetic oligonucleotide
auuauauccuaaacuccua

SEQ ID NO: 344819 - RNA, 19 nt, Artificial Sequence
  Description of Artificial Sequence: Synthetic oligonucleotide
  modified_base (8)..(8): a, c, u, g, unknown or other
acuggcanauuagcauucu

SEQ ID NO: 344820 - RNA, 19 nt, Artificial Sequence
  Description of Artificial Sequence: Synthetic oligonucleotide
gacgguguacagacucaag

SEQ ID NO: 344821 - RNA, 19 nt, Artificial Sequence
  Description of Artificial Sequence: Synthetic oligonucleotide
ucuugggaauagugcuacu

SEQ ID NO: 344822 - RNA, 19 nt, Artificial Sequence
  Description of Artificial Sequence: Synthetic oligonucleotide
guuugaguaguuaucgaau

SEQ ID NO: 344823 - RNA, 19 nt, Artificial Sequence
  Description of Artificial Sequence: Synthetic oligonucleotide
caccaauguucccucccag

SEQ ID NO: 344824 - RNA, 19 nt, Artificial Sequence
  Description of Artificial Sequence: Synthetic oligonucleotide
gcuagaucuggguauucuc

SEQ ID NO: 344825 - RNA, 19 nt, Artificial Sequence
  Description of Artificial Sequence: Synthetic oligonucleotide
guucgguuugaguaguuau

SEQ ID NO: 344826 - RNA, 19 nt, Artificial Sequence
  Description of Artificial Sequence: Synthetic oligonucleotide
gacccuacagcuguauucu

SEQ ID NO: 344827 - RNA, 19 nt, Artificial Sequence
  Description of Artificial Sequence: Synthetic oligonucleotide
augaacuauguggccauaa

SEQ ID NO: 344828 - RNA, 19 nt, Artificial Sequence
  Description of Artificial Sequence: Synthetic oligonucleotide
caauucaccaauguucccu

SEQ ID NO: 344829 - RNA, 19 nt, Artificial Sequence
  Description of Artificial Sequence: Synthetic oligonucleotide
gacgacaacaaaacguuuu

SEQ ID NO: 344830 - RNA, 19 nt, Artificial Sequence
  Description of Artificial Sequence: Synthetic oligonucleotide
caagaaaucuugguaggua

SEQ ID NO: 344831 - RNA, 19 nt, Artificial Sequence
  Description of Artificial Sequence: Synthetic oligonucleotide
cauaaaucuagugauucuu

SEQ ID NO: 344832 - RNA, 19 nt, Artificial Sequence
  Description of Artificial Sequence: Synthetic oligonucleotide
gccaggaauaggccgauga

SEQ ID NO: 344833 - RNA, 19 nt, Artificial Sequence
  Description of Artificial Sequence: Synthetic oligonucleotide
gacaccuaagcuggaaacu

SEQ ID NO: 344834 - RNA, 19 nt, Artificial Sequence
  Description of Artificial Sequence: Synthetic oligonucleotide
ugagcucaucugugauuga

SEQ ID NO: 344835 - RNA, 19 nt, Artificial Sequence
  Description of Artificial Sequence: Synthetic oligonucleotide
ucgcucagucuauuucaaa

SEQ ID NO: 344836 - RNA, 19 nt, Artificial Sequence
  Description of Artificial Sequence: Synthetic oligonucleotide
auucucaguaucggcuaga

SEQ ID NO: 344837 - RNA, 19 nt, Artificial Sequence
  Description of Artificial Sequence: Synthetic oligonucleotide
ccuugaaugugaauuagcu

SEQ ID NO: 344838 - RNA, 19 nt, Artificial Sequence
  Description of Artificial Sequence: Synthetic oligonucleotide
cuguccgaauuaacaauaa

SEQ ID NO: 344839 - RNA, 19 nt, Artificial Sequence
  Description of Artificial Sequence: Synthetic oligonucleotide
caagacacacugucacgga

SEQ ID NO: 344840 - RNA, 19 nt, Artificial Sequence
  Description of Artificial Sequence: Synthetic oligonucleotide
cacuaguaagcuccaaacu

SEQ ID NO: 344841 - RNA, 19 nt, Artificial Sequence
  Description of Artificial Sequence: Synthetic oligonucleotide
cacuugguucucaagcucu

SEQ ID NO: 344842 - RNA, 19 nt, Artificial Sequence
  Description of Artificial Sequence: Synthetic oligonucleotide
caaacucucauggaaaguu

SEQ ID NO: 344843 - RNA, 19 nt, Artificial Sequence
  Description of Artificial Sequence: Synthetic oligonucleotide
caauggaccgaaacaccaa

SEQ ID NO: 344844 - RNA, 19 nt, Artificial Sequence
  Description of Artificial Sequence: Synthetic oligonucleotide
caagccaauucaccaaugu

SEQ ID NO: 344845 - RNA, 19 nt, Artificial Sequence
  Description of Artificial Sequence: Synthetic oligonucleotide
ggccauaagaauucagagu

SEQ ID NO: 344846 - RNA, 19 nt, Artificial Sequence
  Description of Artificial Sequence: Synthetic oligonucleotide
cacggagaagcucuggcua

SEQ ID NO: 344847 - RNA, 19 nt, Artificial Sequence
  Description of Artificial Sequence: Synthetic oligonucleotide
gauuacggcugggacaggu

SEQ ID NO: 344848 - RNA, 19 nt, Artificial Sequence
  Description of Artificial Sequence: Synthetic oligonucleotide
acaugagguuuaguaaguu

SEQ ID NO: 344849 - RNA, 19 nt, Artificial Sequence
  Description of Artificial Sequence: Synthetic oligonucleotide
ucccaauagcucagugguu

SEQ ID NO: 344850 - RNA, 19 nt, Artificial Sequence
  Description of Artificial Sequence: Synthetic oligonucleotide
cgguguacagacucaagac

SEQ ID NO: 344851 - RNA, 19 nt, Artificial Sequence
  Description of Artificial Sequence: Synthetic oligonucleotide
gauucgucuuuuccucgcu

SEQ ID NO: 344852 - RNA, 19 nt, Artificial Sequence
  Description of Artificial Sequence: Synthetic oligonucleotide
ccuauucucaguaucggcu

SEQ ID NO: 344853 - RNA, 19 nt, Artificial Sequence
  Description of Artificial Sequence: Synthetic oligonucleotide
ccuacuuuaggccaccaua

SEQ ID NO: 344854 - RNA, 19 nt, Artificial Sequence
  Description of Artificial Sequence: Synthetic oligonucleotide
gaagguaacuuggcuuuua

SEQ ID NO: 344855 - RNA, 19 nt, Artificial Sequence
  Description of Artificial Sequence: Synthetic oligonucleotide
guaaccucguugccuccuc

SEQ ID NO: 344856 - RNA, 19 nt, Artificial Sequence
  Description of Artificial Sequence: Synthetic oligonucleotide
gcucuuucaaggaucccac

SEQ ID NO: 344857 - RNA, 19 nt, Artificial Sequence
  Description of Artificial Sequence: Synthetic oligonucleotide
guaauauggagggauuauu

SEQ ID NO: 344858 - RNA, 19 nt, Artificial Sequence
  Description of Artificial Sequence: Synthetic oligonucleotide
auguguguguguguauaua

SEQ ID NO: 344859 - RNA, 19 nt, Artificial Sequence
  Description of Artificial Sequence: Synthetic oligonucleotide
cacagggccucucuuccca

SEQ ID NO: 344860 - RNA, 19 nt, Artificial Sequence
  Description of Artificial Sequence: Synthetic oligonucleotide
cucgcucagucuauuucaa

SEQ ID NO: 344861 - RNA, 19 nt, Artificial Sequence
  Description of Artificial Sequence: Synthetic oligonucleotide
auggaccgaaacaccaaaa

SEQ ID NO: 344862 - RNA, 19 nt, Artificial Sequence
  Description of Artificial Sequence: Synthetic oligonucleotide
cugucaccgcaaccagggc

SEQ ID NO: 344863 - RNA, 19 nt, Artificial Sequence
  Description of Artificial Sequence: Synthetic oligonucleotide
guacuggguaccacuggca

SEQ ID NO: 344864 - RNA, 19 nt, Artificial Sequence
  Description of Artificial Sequence: Synthetic oligonucleotide
ggccgaugauuacggcugg

SEQ ID NO: 344865 - RNA, 19 nt, Artificial Sequence
  Description of Artificial Sequence: Synthetic oligonucleotide
ucggcuagaucuggguauu

SEQ ID NO: 344866 - RNA, 19 nt, Artificial Sequence
  Description of Artificial Sequence: Synthetic oligonucleotide
agcuguauucuugcacuuu

SEQ ID NO: 344867 - RNA, 19 nt, Artificial Sequence
  Description of Artificial Sequence: Synthetic oligonucleotide
ccucgcucagucuauuuca

SEQ ID NO: 344868 - RNA, 19 nt, Artificial Sequence
  Description of Artificial Sequence: Synthetic oligonucleotide
aggacgguguacagacuca

SEQ ID NO: 344869 - RNA, 19 nt, Artificial Sequence
  Description of Artificial Sequence: Synthetic oligonucleotide
cgaugauuacggcugggac

SEQ ID NO: 344870 - RNA, 19 nt, Artificial Sequence
  Description of Artificial Sequence: Synthetic oligonucleotide
guuguucgguuugaguagu

SEQ ID NO: 344871 - RNA, 19 nt, Artificial Sequence
  Description of Artificial Sequence: Synthetic oligonucleotide
agaagguaacuuggcuuuu

SEQ ID NO: 344872 - RNA, 19 nt, Artificial Sequence
  Description of Artificial Sequence: Synthetic oligonucleotide
caagagguacuggguacca

SEQ ID NO: 344873 - RNA, 19 nt, Artificial Sequence
  Description of Artificial Sequence: Synthetic oligonucleotide
cucuauagacagauauauu

SEQ ID NO: 344874 - RNA, 19 nt, Artificial Sequence
  Description of Artificial Sequence: Synthetic oligonucleotide
aucacguguguuagugcaa

SEQ ID NO: 344875 - RNA, 19 nt, Artificial Sequence
  Description of Artificial Sequence: Synthetic oligonucleotide
gagcucaucugugauugau

SEQ ID NO: 344876 - RNA, 19 nt, Artificial Sequence
  Description of Artificial Sequence: Synthetic oligonucleotide
ccacuugguucucaagcuc

SEQ ID NO: 344877 - RNA, 19 nt, Artificial Sequence
  Description of Artificial Sequence: Synthetic oligonucleotide
ggaugcugaggucacuagu

SEQ ID NO: 344878 - RNA, 19 nt, Artificial Sequence
  Description of Artificial Sequence: Synthetic oligonucleotide
cugugauugauucgucuuu

SEQ ID NO: 344879 - RNA, 19 nt, Artificial Sequence
  Description of Artificial Sequence: Synthetic oligonucleotide
cuugcacuuugcuguuuua

SEQ ID NO: 344880 - RNA, 19 nt, Artificial Sequence
  Description of Artificial Sequence: Synthetic oligonucleotide
auuacggcugggacagguu

SEQ ID NO: 344881 - RNA, 19 nt, Artificial Sequence
  Description of Artificial Sequence: Synthetic oligonucleotide
gggaauagugcuacuaauu

SEQ ID NO: 344882 - RNA, 19 nt, Artificial Sequence
  Description of Artificial Sequence: Synthetic oligonucleotide
ccggcaacaaucccaaaua

SEQ ID NO: 344883 - RNA, 19 nt, Artificial Sequence
  Description of Artificial Sequence: Synthetic oligonucleotide
caauagcucagugguuuua

SEQ ID NO: 344884 - RNA, 19 nt, Artificial Sequence
  Description of Artificial Sequence: Synthetic oligonucleotide
gcagugcuuagguguguca

SEQ ID NO: 344885 - RNA, 19 nt, Artificial Sequence
  Description of Artificial Sequence: Synthetic oligonucleotide
caggaauaggccgaugauu

SEQ ID NO: 344886 - RNA, 19 nt, Artificial Sequence
  Description of Artificial Sequence: Synthetic oligonucleotide
ucaccgcaaccagggccgc

SEQ ID NO: 344887 - RNA, 19 nt, Artificial Sequence
  Description of Artificial Sequence: Synthetic oligonucleotide
uuccggcaacaaucccaaa

SEQ ID NO: 344888 - RNA, 19 nt, Artificial Sequence
  Description of Artificial Sequence: Synthetic oligonucleotide
  modified_base (15)..(15): a, c, u, g, unknown or other
ggguaccacuggcanauua

SEQ ID NO: 344889 - RNA, 19 nt, Artificial Sequence
  Description of Artificial Sequence: Synthetic oligonucleotide
gcugcaguucugacgacaa

SEQ ID NO: 344890 - RNA, 19 nt, Artificial Sequence
  Description of Artificial Sequence: Synthetic oligonucleotide
acgauggcugucaccgcaa

SEQ ID NO: 344891 - RNA, 19 nt, Artificial Sequence
  Description of Artificial Sequence: Synthetic oligonucleotide
gccgaugauuacggcuggg

SEQ ID NO: 344892 - RNA, 19 nt, Artificial Sequence
  Description of Artificial Sequence: Synthetic oligonucleotide
guguguguguguauauauu

SEQ ID NO: 344893 - RNA, 19 nt, Artificial Sequence
  Description of Artificial Sequence: Synthetic oligonucleotide
guucaccuugaaugugaau

SEQ ID NO: 344894 - RNA, 19 nt, Artificial Sequence
  Description of Artificial Sequence: Synthetic oligonucleotide
gcuaaacuuuaaccccugu

SEQ ID NO: 344895 - RNA, 19 nt, Artificial Sequence
  Description of Artificial Sequence: Synthetic oligonucleotide
acucaacaguuugguugau

SEQ ID NO: 344896 - RNA, 19 nt, Artificial Sequence
  Description of Artificial Sequence: Synthetic oligonucleotide
ggacgguguacagacucaa

SEQ ID NO: 344897 - RNA, 19 nt, Artificial Sequence
  Description of Artificial Sequence: Synthetic oligonucleotide
cacuauggugcugcacaaa

SEQ ID NO: 344898 - RNA, 19 nt, Artificial Sequence
  Description of Artificial Sequence: Synthetic oligonucleotide
cagccuuacugagaagagu

SEQ ID NO: 344899 - RNA, 19 nt, Artificial Sequence
  Description of Artificial Sequence: Synthetic oligonucleotide
caaugacccuacagcugua

SEQ ID NO: 344900 - RNA, 19 nt, Artificial Sequence
  Description of Artificial Sequence: Synthetic oligonucleotide
cuaccacaauggaccgaaa

SEQ ID NO: 344901 - RNA, 19 nt, Artificial Sequence
  Description of Artificial Sequence: Synthetic oligonucleotide
ggcuagaucuggguauucu

SEQ ID NO: 344902 - RNA, 19 nt, Artificial Sequence
  Description of Artificial Sequence: Synthetic oligonucleotide
ccgaugauuacggcuggga

SEQ ID NO: 344903 - RNA, 19 nt, Artificial Sequence
  Description of Artificial Sequence: Synthetic oligonucleotide
cuggcuagaccuggcacau

SEQ ID NO: 344904 - RNA, 19 nt, Artificial Sequence
  Description of Artificial Sequence: Synthetic oligonucleotide
ggguauucucauagaacau

SEQ ID NO: 344905 - RNA, 19 nt, Artificial Sequence
  Description of Artificial Sequence: Synthetic oligonucleotide
gcuagaccuggcacauaca

SEQ ID NO: 344906 - RNA, 19 nt, Artificial Sequence
  Description of Artificial Sequence: Synthetic oligonucleotide
cagcuguauucuugcacuu

SEQ ID NO: 344907 - RNA, 19 nt, Artificial Sequence
  Description of Artificial Sequence: Synthetic oligonucleotide
uggcuagaccuggcacaua

SEQ ID NO: 344908 - RNA, 19 nt, Artificial Sequence
  Description of Artificial Sequence: Synthetic oligonucleotide
cacguguguuagugcaaau

SEQ ID NO: 344909 - RNA, 19 nt, Artificial Sequence
  Description of Artificial Sequence: Synthetic oligonucleotide
cccaauagcucagugguuu

SEQ ID NO: 344910 - RNA, 19 nt, Artificial Sequence
  Description of Artificial Sequence: Synthetic oligonucleotide
cuucuagagggaggacggu

SEQ ID NO: 344911 - RNA, 19 nt, Artificial Sequence
  Description of Artificial Sequence: Synthetic oligonucleotide
caugcacaucacguguguu

SEQ ID NO: 344912 - RNA, 19 nt, Artificial Sequence
  Description of Artificial Sequence: Synthetic oligonucleotide
ccaggaauaggccgaugau

SEQ ID NO: 344913 - RNA, 19 nt, Artificial Sequence
  Description of Artificial Sequence: Synthetic oligonucleotide
ggugcacaagaagccuacu

SEQ ID NO: 344914 - RNA, 19 nt, Artificial Sequence
  Description of Artificial Sequence: Synthetic oligonucleotide
ccaauagcucagugguuuu

SEQ ID NO: 344915 - RNA, 19 nt, Artificial Sequence
  Description of Artificial Sequence: Synthetic oligonucleotide
ccucguugccuccucucuu

SEQ ID NO: 344916 - RNA, 19 nt, Artificial Sequence
  Description of Artificial Sequence: Synthetic oligonucleotide
ggccgccaacaugggcauc

SEQ ID NO: 344917 - RNA, 19 nt, Artificial Sequence
  Description of Artificial Sequence: Synthetic oligonucleotide
ccgcaaccagggccgccaa

SEQ ID NO: 344918 - RNA, 19 nt, Artificial Sequence
  Description of Artificial Sequence: Synthetic oligonucleotide
aauaagucagcucugaguc

SEQ ID NO: 344919 - RNA, 19 nt, Artificial Sequence
  Description of Artificial Sequence: Synthetic oligonucleotide
aauaacaccccaaacaugc

SEQ ID NO: 344920 - RNA, 19 nt, Artificial Sequence
  Description of Artificial Sequence: Synthetic oligonucleotide
aauuauauguagcacgaac

SEQ ID NO: 344921 - RNA, 19 nt, Artificial Sequence
  Description of Artificial Sequence: Synthetic oligonucleotide
ucuaauaaaggaaaugugc

SEQ ID NO: 344922 - RNA, 19 nt, Artificial Sequence
  Description of Artificial Sequence: Synthetic oligonucleotide
aguaaaacaauuugugagg

SEQ ID NO: 344923 - RNA, 19 nt, Artificial Sequence
  Description of Artificial Sequence: Synthetic oligonucleotide
aaauaaugcacuguguuuc

SEQ ID NO: 344924 - RNA, 19 nt, Artificial Sequence
  Description of Artificial Sequence: Synthetic oligonucleotide
uuuauaaccuucaaaguac

SEQ ID NO: 344925 - RNA, 19 nt, Artificial Sequence
  Description of Artificial Sequence: Synthetic oligonucleotide
uaaaaugaggaguagauaa

SEQ ID NO: 344926 - RNA, 19 nt, Artificial Sequence
  Description of Artificial Sequence: Synthetic oligonucleotide
aguuacacuaguuaguguc

SEQ ID NO: 344927 - RNA, 19 nt, Artificial Sequence
  Description of Artificial Sequence: Synthetic oligonucleotide
uguagcacgaacuuaagca

SEQ ID NO: 344928 - RNA, 19 nt, Artificial Sequence
  Description of Artificial Sequence: Synthetic oligonucleotide
ugcuauuaguuuuaaaucc

SEQ ID NO: 344929 - RNA, 19 nt, Artificial Sequence
  Description of Artificial Sequence: Synthetic oligonucleotide
ucuucuauggcaauaugcc

SEQ ID NO: 344930 - RNA, 19 nt, Artificial Sequence
  Description of Artificial Sequence: Synthetic oligonucleotide
aauaugccaaaccacggag

SEQ ID NO: 344931 - RNA, 19 nt, Artificial Sequence
  Description of Artificial Sequence: Synthetic oligonucleotide
uaaacaguaguuauuuagc

SEQ ID NO: 344932 - RNA, 19 nt, Artificial Sequence
  Description of Artificial Sequence: Synthetic oligonucleotide
aaagcuaaauauacauucc

SEQ ID NO: 344933 - RNA, 19 nt, Artificial Sequence
  Description of Artificial Sequence: Synthetic oligonucleotide
aagcggaucuccuuuaacg

SEQ ID NO: 344934 - RNA, 19 nt, Artificial Sequence
  Description of Artificial Sequence: Synthetic oligonucleotide
ugaugagcagauaauaccc

SEQ ID NO: 344935 - RNA, 19 nt, Artificial Sequence
  Description of Artificial Sequence: Synthetic oligonucleotide
auauucacuugcuugaauc

SEQ ID NO: 344936 - RNA, 19 nt, Artificial Sequence
  Description of Artificial Sequence: Synthetic oligonucleotide
ugucaguuagaaauaacag

SEQ ID NO: 344937 - RNA, 19 nt, Artificial Sequence
  Description of Artificial Sequence: Synthetic oligonucleotide
ucuguguagaacaauguca

SEQ ID NO: 344938 - RNA, 19 nt, Artificial Sequence
  Description of Artificial Sequence: Synthetic oligonucleotide
uccgcaauaaauaaugcac

SEQ ID NO: 344939 - RNA, 19 nt, Artificial Sequence
  Description of Artificial Sequence: Synthetic oligonucleotide
aauaaacuacaggauuucc

SEQ ID NO: 344940 - RNA, 19 nt, Artificial Sequence
  Description of Artificial Sequence: Synthetic oligonucleotide
aguaucuucuaauaaagga

SEQ ID NO: 344941 - RNA, 19 nt, Artificial Sequence
  Description of Artificial Sequence: Synthetic oligonucleotide
uuaucuguguagaacaaug

SEQ ID NO: 344942 - RNA, 19 nt, Artificial Sequence
  Description of Artificial Sequence: Synthetic oligonucleotide
guuugaauggugucuaugg

SEQ ID NO: 344943 - RNA, 19 nt, Artificial Sequence
  Description of Artificial Sequence: Synthetic oligonucleotide
uacgaaauuauauguagca

SEQ ID NO: 344944 - RNA, 19 nt, Artificial Sequence
  Description of Artificial Sequence: Synthetic oligonucleotide
gacaacuucauuugaguag

SEQ ID NO: 344945 - RNA, 19 nt, Artificial Sequence
  Description of Artificial Sequence: Synthetic oligonucleotide
augucacugaaacacacac

SEQ ID NO: 344946 - RNA, 19 nt, Artificial Sequence
  Description of Artificial Sequence: Synthetic oligonucleotide
ucuaaaaugaggaguagau

SEQ ID NO: 344947 - RNA, 19 nt, Artificial Sequence
  Description of Artificial Sequence: Synthetic oligonucleotide
acuaguuagugucugauga

SEQ ID NO: 344948 - RNA, 19 nt, Artificial Sequence
  Description of Artificial Sequence: Synthetic oligonucleotide
gauagcuguaaccuacugg

SEQ ID NO: 344949 - RNA, 19 nt, Artificial Sequence
  Description of Artificial Sequence: Synthetic oligonucleotide
auacucaugauguuuccac

SEQ ID NO: 344950 - RNA, 19 nt, Artificial Sequence
  Description of Artificial Sequence: Synthetic oligonucleotide
uuuauuggugucuaaugug

SEQ ID NO: 344951 - RNA, 19 nt, Artificial Sequence
  Description of Artificial Sequence: Synthetic oligonucleotide
acaaucacuauucacaaau

SEQ ID NO: 344952 - RNA, 19 nt, Artificial Sequence
  Description of Artificial Sequence: Synthetic oligonucleotide
uuauuggugucuaauguga

SEQ ID NO: 344953 - RNA, 19 nt, Artificial Sequence
  Description of Artificial Sequence: Synthetic oligonucleotide
ugcacuaaccaauaguucu

SEQ ID NO: 344954 - RNA, 19 nt, Artificial Sequence
  Description of Artificial Sequence: Synthetic oligonucleotide
uuuaaagacacaguacagc

SEQ ID NO: 344955 - RNA, 19 nt, Artificial Sequence
  Description of Artificial Sequence: Synthetic oligonucleotide
uugugcauacucaugaugu

SEQ ID NO: 344956 - RNA, 19 nt, Artificial Sequence
  Description of Artificial Sequence: Synthetic oligonucleotide
acuuaauacuguuaaauaa

SEQ ID NO: 344957 - RNA, 19 nt, Artificial Sequence
  Description of Artificial Sequence: Synthetic oligonucleotide
cauauaauaaagccacugc

SEQ ID NO: 344958 - RNA, 19 nt, Artificial Sequence
  Description of Artificial Sequence: Synthetic oligonucleotide
guuacaaguuaacuaaaag

SEQ ID NO: 344959 - RNA, 19 nt, Artificial Sequence
  Description of Artificial Sequence: Synthetic oligonucleotide
ugcaagguuacuauauuug

SEQ ID NO: 344960 - RNA, 19 nt, Artificial Sequence
  Description of Artificial Sequence: Synthetic oligonucleotide
aaagauuuaucuguguaga

SEQ ID NO: 344961 - RNA, 19 nt, Artificial Sequence
  Description of Artificial Sequence: Synthetic oligonucleotide
gaggcuacgauuucugagg

SEQ ID NO: 344962 - RNA, 19 nt, Artificial Sequence
  Description of Artificial Sequence: Synthetic oligonucleotide
aauuugugaggagaaacag

SEQ ID NO: 344963 - RNA, 19 nt, Artificial Sequence
  Description of Artificial Sequence: Synthetic oligonucleotide
gauuccgcaauaaauaaug

SEQ ID NO: 344964 - RNA, 19 nt, Artificial Sequence
  Description of Artificial Sequence: Synthetic oligonucleotide
acaauuugugaggagaaac

SEQ ID NO: 344965 - RNA, 19 nt, Artificial Sequence
  Description of Artificial Sequence: Synthetic oligonucleotide
ucuaguuauaggaugcacu

SEQ ID NO: 344966 - RNA, 19 nt, Artificial Sequence
  Description of Artificial Sequence: Synthetic oligonucleotide
ugugacaacuucauuugag

SEQ ID NO: 344967 - RNA, 19 nt, Artificial Sequence
  Description of Artificial Sequence: Synthetic oligonucleotide
uuagcagugagacuucucu

SEQ ID NO: 344968 - RNA, 19 nt, Artificial Sequence
  Description of Artificial Sequence: Synthetic oligonucleotide
aacgccaccaaauucucug

SEQ ID NO: 344969 - RNA, 19 nt, Artificial Sequence
  Description of Artificial Sequence: Synthetic oligonucleotide
uaugguuacaaguuaacua

SEQ ID NO: 344970 - RNA, 19 nt, Artificial Sequence
  Description of Artificial Sequence: Synthetic oligonucleotide
aaugugaaaagcaguagug

SEQ ID NO: 344971 - RNA, 19 nt, Artificial Sequence
  Description of Artificial Sequence: Synthetic oligonucleotide
gaggauuugguacaggaac

SEQ ID NO: 344972 - RNA, 19 nt, Artificial Sequence
  Description of Artificial Sequence: Synthetic oligonucleotide
accgaagugucugugaugc

SEQ ID NO: 344973 - RNA, 19 nt, Artificial Sequence
  Description of Artificial Sequence: Synthetic oligonucleotide
agauuuaucuguguagaac

SEQ ID NO: 344974 - RNA, 19 nt, Artificial Sequence
  Description of Artificial Sequence: Synthetic oligonucleotide
aauauacauuccaggaaac

SEQ ID NO: 344975 - RNA, 19 nt, Artificial Sequence
  Description of Artificial Sequence: Synthetic oligonucleotide
ucacguuuuacuguuaagc

SEQ ID NO: 344976 - RNA, 19 nt, Artificial Sequence
  Description of Artificial Sequence: Synthetic oligonucleotide
ucugaugagcagauaauac

SEQ ID NO: 344977 - RNA, 19 nt, Artificial Sequence
  Description of Artificial Sequence: Synthetic oligonucleotide
aagguuacuauauuugcua

SEQ ID NO: 344978 - RNA, 19 nt, Artificial Sequence
  Description of Artificial Sequence: Synthetic oligonucleotide
ugugaaaagcaguaguggu

SEQ ID NO: 344979 - RNA, 19 nt, Artificial Sequence
  Description of Artificial Sequence: Synthetic oligonucleotide
cauguauuguuucagguuc

SEQ ID NO: 344980 - RNA, 19 nt, Artificial Sequence
  Description of Artificial Sequence: Synthetic oligonucleotide
ucuuacacugcacacuucu

SEQ ID NO: 344981 - RNA, 19 nt, Artificial Sequence
  Description of Artificial Sequence: Synthetic oligonucleotide
acaagaaauaagucagcuc

SEQ ID NO: 344982 - RNA, 19 nt, Artificial Sequence
  Description of Artificial Sequence: Synthetic oligonucleotide
cucuuauagcuguacaggg

SEQ ID NO: 344983 - RNA, 19 nt, Artificial Sequence
  Description of Artificial Sequence: Synthetic oligonucleotide
auggcaauaugccaaacca

SEQ ID NO: 344984 - RNA, 19 nt, Artificial Sequence
  Description of Artificial Sequence: Synthetic oligonucleotide
cuuauagcuguacagggug

SEQ ID NO: 344985 - RNA, 19 nt, Artificial Sequence
  Description of Artificial Sequence: Synthetic oligonucleotide
aggguuuaacauuaaacca

SEQ ID NO: 344986 - RNA, 19 nt, Artificial Sequence
  Description of Artificial Sequence: Synthetic oligonucleotide
agacggagauuccaagucc

SEQ ID NO: 344987 - RNA, 19 nt, Artificial Sequence
  Description of Artificial Sequence: Synthetic oligonucleotide
uguagaacaaugucaugca

SEQ ID NO: 344988 - RNA, 19 nt, Artificial Sequence
  Description of Artificial Sequence: Synthetic oligonucleotide
auguagcacgaacuuaagc

SEQ ID NO: 344989 - RNA, 19 nt, Artificial Sequence
  Description of Artificial Sequence: Synthetic oligonucleotide
uauaggaugcacuaaccaa

SEQ ID NO: 344990 - RNA, 19 nt, Artificial Sequence
  Description of Artificial Sequence: Synthetic oligonucleotide
uaggcuacaggguuuaaca

SEQ ID NO: 344991 - RNA, 19 nt, Artificial Sequence
  Description of Artificial Sequence: Synthetic oligonucleotide
uguuucucaguccugcaca

SEQ ID NO: 344992 - RNA, 19 nt, Artificial Sequence
  Description of Artificial Sequence: Synthetic oligonucleotide
uacuguugcauauguaccc

SEQ ID NO: 344993 - RNA, 19 nt, Artificial Sequence
  Description of Artificial Sequence: Synthetic oligonucleotide
aaccuacuggcucuacugg

SEQ ID NO: 344994 - RNA, 19 nt, Artificial Sequence
  Description of Artificial Sequence: Synthetic oligonucleotide
cuuuugagcacuccacugg

SEQ ID NO: 344995 - RNA, 19 nt, Artificial Sequence
  Description of Artificial Sequence: Synthetic oligonucleotide
guguagaacaaugucaugc

SEQ ID NO: 344996 - RNA, 19 nt, Artificial Sequence
  Description of Artificial Sequence: Synthetic oligonucleotide
acucuauuagccaauguuc

SEQ ID NO: 344997 - RNA, 19 nt, Artificial Sequence
  Description of Artificial Sequence: Synthetic oligonucleotide
uauaacuauuuucaugaua

SEQ ID NO: 344998 - RNA, 19 nt, Artificial Sequence
  Description of Artificial Sequence: Synthetic oligonucleotide
uguguugaguacucugagg

SEQ ID NO: 344999 - RNA, 19 nt, Artificial Sequence
  Description of Artificial Sequence: Synthetic oligonucleotide
aaguaucuucuaauaaagg

SEQ ID NO: 345000 - RNA, 19 nt, Artificial Sequence
  Description of Artificial Sequence: Synthetic oligonucleotide
uuauaaccuucaaaguaca

SEQ ID NO: 345001 - RNA, 19 nt, Artificial Sequence
  Description of Artificial Sequence: Synthetic oligonucleotide
gauggcucacguuuuacug

SEQ ID NO: 345002 - RNA, 19 nt, Artificial Sequence
  Description of Artificial Sequence: Synthetic oligonucleotide
augagcagauaauacccac

SEQ ID NO: 345003 - RNA, 19 nt, Artificial Sequence
  Description of Artificial Sequence: Synthetic oligonucleotide
uuccuacgaaauuauaugu

SEQ ID NO: 345004 - RNA, 19 nt, Artificial Sequence
  Description of Artificial Sequence: Synthetic oligonucleotide
cuacgaaauuauauguagc

SEQ ID NO: 345005 - RNA, 19 nt, Artificial Sequence
  Description of Artificial Sequence: Synthetic oligonucleotide
gaaauuauauguagcacga

SEQ ID NO: 345006 - RNA, 19 nt, Artificial Sequence
  Description of Artificial Sequence: Synthetic oligonucleotide
ugacugcuaagaaaggcug

SEQ ID NO: 345007 - RNA, 19 nt, Artificial Sequence
  Description of Artificial Sequence: Synthetic oligonucleotide
caagaaauaagucagcucu

SEQ ID NO: 345008 - RNA, 19 nt, Artificial Sequence
  Description of Artificial Sequence: Synthetic oligonucleotide
caaguuaacuaaaagcaca

SEQ ID NO: 345009 - RNA, 19 nt, Artificial Sequence
  Description of Artificial Sequence: Synthetic oligonucleotide
uggucgauaccacagugug

SEQ ID NO: 345010 - RNA, 19 nt, Artificial Sequence
  Description of Artificial Sequence: Synthetic oligonucleotide
ugucaauuuacuucuuccu

SEQ ID NO: 345011 - RNA, 19 nt, Artificial Sequence
  Description of Artificial Sequence: Synthetic oligonucleotide
ucacuuaauacuguuaaau

SEQ ID NO: 345012 - RNA, 19 nt, Artificial Sequence
  Description of Artificial Sequence: Synthetic oligonucleotide
auuauauguagcacgaacu

SEQ ID NO: 345013 - RNA, 19 nt, Artificial Sequence
  Description of Artificial Sequence: Synthetic oligonucleotide
uuucugauaaggaggcuac

SEQ ID NO: 345014 - RNA, 19 nt, Artificial Sequence
  Description of Artificial Sequence: Synthetic oligonucleotide
agcuguaaccuacuggcuc

SEQ ID NO: 345015 - RNA, 19 nt, Artificial Sequence
  Description of Artificial Sequence: Synthetic oligonucleotide
aauauaccaauuaggauuu

SEQ ID NO: 345016 - RNA, 19 nt, Artificial Sequence
  Description of Artificial Sequence: Synthetic oligonucleotide
uuauauguagcacgaacuu

SEQ ID NO: 345017 - RNA, 19 nt, Artificial Sequence
  Description of Artificial Sequence: Synthetic oligonucleotide
accaauuaggauuucuagu

SEQ ID NO: 345018 - RNA, 19 nt, Artificial Sequence
  Description of Artificial Sequence: Synthetic oligonucleotide
acucacuuaauacuguuaa

SEQ ID NO: 345019 - RNA, 19 nt, Artificial Sequence
  Description of Artificial Sequence: Synthetic oligonucleotide
uaaccuacuggcucuacug

SEQ ID NO: 345020 - RNA, 19 nt, Artificial Sequence
  Description of Artificial Sequence: Synthetic oligonucleotide
aacaccccaaacaugccac

SEQ ID NO: 345021 - RNA, 19 nt, Artificial Sequence
  Description of Artificial Sequence: Synthetic oligonucleotide
aguuauuuagcagcaauga

SEQ ID NO: 345022 - RNA, 19 nt, Artificial Sequence
  Description of Artificial Sequence: Synthetic oligonucleotide
acgaaauuauauguagcac

SEQ ID NO: 345023 - RNA, 19 nt, Artificial Sequence
  Description of Artificial Sequence: Synthetic oligonucleotide
uauuggugucuaaugugag

SEQ ID NO: 345024 - RNA, 19 nt, Artificial Sequence
  Description of Artificial Sequence: Synthetic oligonucleotide
ucaugcaagguuacuauau

SEQ ID NO: 345025 - RNA, 19 nt, Artificial Sequence
  Description of Artificial Sequence: Synthetic oligonucleotide
gagucaaagauuuaucugu

SEQ ID NO: 345026 - RNA, 19 nt, Artificial Sequence
  Description of Artificial Sequence: Synthetic oligonucleotide
acagcaguuaggcuacagg

SEQ ID NO: 345027 - RNA, 19 nt, Artificial Sequence
  Description of Artificial Sequence: Synthetic oligonucleotide
ugcauauguacccucccca

SEQ ID NO: 345028 - RNA, 19 nt, Artificial Sequence
  Description of Artificial Sequence: Synthetic oligonucleotide
augugaaaagcaguagugg

SEQ ID NO: 345029 - RNA, 19 nt, Artificial Sequence
  Description of Artificial Sequence: Synthetic oligonucleotide
uuaauacauaugucuguca

SEQ ID NO: 345030 - RNA, 19 nt, Artificial Sequence
  Description of Artificial Sequence: Synthetic oligonucleotide
ucaauuuacuucuuccuuu

SEQ ID NO: 345031 - RNA, 19 nt, Artificial Sequence
  Description of Artificial Sequence: Synthetic oligonucleotide
ggaaccaagaagcacauca

SEQ ID NO: 345032 - RNA, 19 nt, Artificial Sequence
  Description of Artificial Sequence: Synthetic oligonucleotide
cugucaguuagaaauaaca

SEQ ID NO: 345033 - RNA, 19 nt, Artificial Sequence
  Description of Artificial Sequence: Synthetic oligonucleotide
uaauauuuauaaccuucaa

SEQ ID NO: 345034 - RNA, 19 nt, Artificial Sequence
  Description of Artificial Sequence: Synthetic oligonucleotide
cgaaauuauauguagcacg

SEQ ID NO: 345035 - RNA, 19 nt, Artificial Sequence
  Description of Artificial Sequence: Synthetic oligonucleotide
ugcauacucaugauguuuc

SEQ ID NO: 345036 - RNA, 19 nt, Artificial Sequence
  Description of Artificial Sequence: Synthetic oligonucleotide
ugggauagcuguaaccuac

SEQ ID NO: 345037 - RNA, 19 nt, Artificial Sequence
  Description of Artificial Sequence: Synthetic oligonucleotide
auaacagcaguuaggcuac

SEQ ID NO: 345038 - RNA, 19 nt, Artificial Sequence
  Description of Artificial Sequence: Synthetic oligonucleotide
aauuugucacacugugaca

SEQ ID NO: 345039 - RNA, 19 nt, Artificial Sequence
  Description of Artificial Sequence: Synthetic oligonucleotide
uccuuuaacgccaccaaau

SEQ ID NO: 345040 - RNA, 19 nt, Artificial Sequence
  Description of Artificial Sequence: Synthetic oligonucleotide
ucuuauagcuguacagggu

SEQ ID NO: 345041 - RNA, 19 nt, Artificial Sequence
  Description of Artificial Sequence: Synthetic oligonucleotide
ggacaguguagacagacgg

SEQ ID NO: 345042 - RNA, 19 nt, Artificial Sequence
  Description of Artificial Sequence: Synthetic oligonucleotide
caugcuaccagacuuaaaa

SEQ ID NO: 345043 - RNA, 19 nt, Artificial Sequence
  Description of Artificial Sequence: Synthetic oligonucleotide
aaaugaggaguagauaaaa

SEQ ID NO: 345044 - RNA, 19 nt, Artificial Sequence
  Description of Artificial Sequence: Synthetic oligonucleotide
aacuacaggauuuccugaa

SEQ ID NO: 345045 - RNA, 19 nt, Artificial Sequence
  Description of Artificial Sequence: Synthetic oligonucleotide
ugucaaucuguguugagua

SEQ ID NO: 345046 - RNA, 19 nt, Artificial Sequence
  Description of Artificial Sequence: Synthetic oligonucleotide
guguugaguacucugagga

SEQ ID NO: 345047 - RNA, 19 nt, Artificial Sequence
  Description of Artificial Sequence: Synthetic oligonucleotide
acuacaggauuuccugaac

SEQ ID NO: 345048 - RNA, 19 nt, Artificial Sequence
  Description of Artificial Sequence: Synthetic oligonucleotide
accuacuggcucuacuggc

SEQ ID NO: 345049 - RNA, 19 nt, Artificial Sequence
  Description of Artificial Sequence: Synthetic oligonucleotide
acugaaacacacacagccc

SEQ ID NO: 345050 - RNA, 19 nt, Artificial Sequence
  Description of Artificial Sequence: Synthetic oligonucleotide
cuaccagacuuaaaagagc

SEQ ID NO: 345051 - RNA, 19 nt, Artificial Sequence
  Description of Artificial Sequence: Synthetic oligonucleotide
uccucaaaaugaaguaucu

SEQ ID NO: 345052 - RNA, 19 nt, Artificial Sequence
  Description of Artificial Sequence: Synthetic oligonucleotide
gacuuaaaagagcaugcuc

SEQ ID NO: 345053 - RNA, 19 nt, Artificial Sequence
  Description of Artificial Sequence: Synthetic oligonucleotide
ugcucaagaagaugcauaa

SEQ ID NO: 345054 - RNA, 19 nt, Artificial Sequence
  Description of Artificial Sequence: Synthetic oligonucleotide
ucuucguguuccaagcgga

SEQ ID NO: 345055 - RNA, 19 nt, Artificial Sequence
  Description of Artificial Sequence: Synthetic oligonucleotide
uucuaaaaugaggaguaga

SEQ ID NO: 345056 - RNA, 19 nt, Artificial Sequence
  Description of Artificial Sequence: Synthetic oligonucleotide
auuuagcagcaaugauucc

SEQ ID NO: 345057 - RNA, 19 nt, Artificial Sequence
  Description of Artificial Sequence: Synthetic oligonucleotide
aggcuacgauuucugaggc

SEQ ID NO: 345058 - RNA, 19 nt, Artificial Sequence
  Description of Artificial Sequence: Synthetic oligonucleotide
uucacuugcuugaaucaac

SEQ ID NO: 345059 - RNA, 19 nt, Artificial Sequence
  Description of Artificial Sequence: Synthetic oligonucleotide
ggcaauaugccaaaccacg

SEQ ID NO: 345060 - RNA, 19 nt, Artificial Sequence
  Description of Artificial Sequence: Synthetic oligonucleotide
acgaacuuaagcauguuca

SEQ ID NO: 345061 - RNA, 19 nt, Artificial Sequence
  Description of Artificial Sequence: Synthetic oligonucleotide
acaguguagacagacggag

SEQ ID NO: 345062 - RNA, 19 nt, Artificial Sequence
  Description of Artificial Sequence: Synthetic oligonucleotide
accauuauacaugaaucug

SEQ ID NO: 345063 - RNA, 19 nt, Artificial Sequence
  Description of Artificial Sequence: Synthetic oligonucleotide
guaucaugaaauauuaaaa

SEQ ID NO: 345064 - RNA, 19 nt, Artificial Sequence
  Description of Artificial Sequence: Synthetic oligonucleotide
ugauuccaagugaauguca

SEQ ID NO: 345065 - RNA, 19 nt, Artificial Sequence
  Description of Artificial Sequence: Synthetic oligonucleotide
gaacuuaagcauguucaag

SEQ ID NO: 345066 - RNA, 19 nt, Artificial Sequence
  Description of Artificial Sequence: Synthetic oligonucleotide
aagcacaucagguggucga

SEQ ID NO: 345067 - RNA, 19 nt, Artificial Sequence
  Description of Artificial Sequence: Synthetic oligonucleotide
uauguagcacgaacuuaag

SEQ ID NO: 345068 - RNA, 19 nt, Artificial Sequence
  Description of Artificial Sequence: Synthetic oligonucleotide
auuugucacacugugacaa

SEQ ID NO: 345069 - RNA, 19 nt, Artificial Sequence
  Description of Artificial Sequence: Synthetic oligonucleotide
ucacacugugacaacaaau

SEQ ID NO: 345070 - RNA, 19 nt, Artificial Sequence
  Description of Artificial Sequence: Synthetic oligonucleotide
augauuccgcaauaaauaa

SEQ ID NO: 345071 - RNA, 19 nt, Artificial Sequence
  Description of Artificial Sequence: Synthetic oligonucleotide
aaauaacaccccaaacaug

SEQ ID NO: 345072 - RNA, 19 nt, Artificial Sequence
  Description of Artificial Sequence: Synthetic oligonucleotide
caagaagaugcauaauuca

SEQ ID NO: 345073 - RNA, 19 nt, Artificial Sequence
  Description of Artificial Sequence: Synthetic oligonucleotide
guuagugucugaugagcag

SEQ ID NO: 345074 - RNA, 19 nt, Artificial Sequence
  Description of Artificial Sequence: Synthetic oligonucleotide
auuaaaccagcugacaaau

SEQ ID NO: 345075 - RNA, 19 nt, Artificial Sequence
  Description of Artificial Sequence: Synthetic oligonucleotide
uuacacugcacacuucuua

SEQ ID NO: 345076 - RNA, 19 nt, Artificial Sequence
  Description of Artificial Sequence: Synthetic oligonucleotide
ggguuuaacauuaaaccag

SEQ ID NO: 345077 - RNA, 19 nt, Artificial Sequence
  Description of Artificial Sequence: Synthetic oligonucleotide
uaguuagugucugaugagc

SEQ ID NO: 345078 - RNA, 19 nt, Artificial Sequence
  Description of Artificial Sequence: Synthetic oligonucleotide
uugcauauguacccucccc

SEQ ID NO: 345079 - RNA, 19 nt, Artificial Sequence
  Description of Artificial Sequence: Synthetic oligonucleotide
cauaccacuaugcaguaga

SEQ ID NO: 345080 - RNA, 19 nt, Artificial Sequence
  Description of Artificial Sequence: Synthetic oligonucleotide
ccuacgaaauuauauguag

SEQ ID NO: 345081 - RNA, 19 nt, Artificial Sequence
  Description of Artificial Sequence: Synthetic oligonucleotide
cuaguuagugucugaugag

SEQ ID NO: 345082 - RNA, 19 nt, Artificial Sequence
  Description of Artificial Sequence: Synthetic oligonucleotide
aacucuuacacugcacacu

SEQ ID NO: 345083 - RNA, 19 nt, Artificial Sequence
  Description of Artificial Sequence: Synthetic oligonucleotide
cugauauucacuugcuuga

SEQ ID NO: 345084 - RNA, 19 nt, Artificial Sequence
  Description of Artificial Sequence: Synthetic oligonucleotide
ugggcuugaaaccaugcua

SEQ ID NO: 345085 - RNA, 19 nt, Artificial Sequence
  Description of Artificial Sequence: Synthetic oligonucleotide
uauaccaauuaggauuucu

SEQ ID NO: 345086 - RNA, 19 nt, Artificial Sequence
  Description of Artificial Sequence: Synthetic oligonucleotide
cuuuaacgccaccaaauuc

SEQ ID NO: 345087 - RNA, 19 nt, Artificial Sequence
  Description of Artificial Sequence: Synthetic oligonucleotide
caguagugguccaauauuc

SEQ ID NO: 345088 - RNA, 19 nt, Artificial Sequence
  Description of Artificial Sequence: Synthetic oligonucleotide
auacauaugucugucaguu

SEQ ID NO: 345089 - RNA, 19 nt, Artificial Sequence
  Description of Artificial Sequence: Synthetic oligonucleotide
aacuauuccucaaaaugaa

SEQ ID NO: 345090 - RNA, 19 nt, Artificial Sequence
  Description of Artificial Sequence: Synthetic oligonucleotide
ugacaacuucauuugagua

SEQ ID NO: 345091 - RNA, 19 nt, Artificial Sequence
  Description of Artificial Sequence: Synthetic oligonucleotide
uccuacgaaauuauaugua

SEQ ID NO: 345092 - RNA, 19 nt, Artificial Sequence
  Description of Artificial Sequence: Synthetic oligonucleotide
auaaacuacaggauuuccu

SEQ ID NO: 345093 - RNA, 19 nt, Artificial Sequence
  Description of Artificial Sequence: Synthetic oligonucleotide
aaguuacacuaguuagugu

SEQ ID NO: 345094 - RNA, 19 nt, Artificial Sequence
  Description of Artificial Sequence: Synthetic oligonucleotide
aaauccuuuagcagugaga

SEQ ID NO: 345095 - RNA, 19 nt, Artificial Sequence
  Description of Artificial Sequence: Synthetic oligonucleotide
ugauaaggaggcuacgauu

SEQ ID NO: 345096 - RNA, 19 nt, Artificial Sequence
  Description of Artificial Sequence: Synthetic oligonucleotide
ugcagcaguaaaacaauuu

SEQ ID NO: 345097 - RNA, 19 nt, Artificial Sequence
  Description of Artificial Sequence: Synthetic oligonucleotide
auauguagcacgaacuuaa

SEQ ID NO: 345098 - RNA, 19 nt, Artificial Sequence
  Description of Artificial Sequence: Synthetic oligonucleotide
ggagcauaccacuaugcag

SEQ ID NO: 345099 - RNA, 19 nt, Artificial Sequence
  Description of Artificial Sequence: Synthetic oligonucleotide
uguuugaauggugucuaug

SEQ ID NO: 345100 - RNA, 19 nt, Artificial Sequence
  Description of Artificial Sequence: Synthetic oligonucleotide
ugucuaaugugagacucca

SEQ ID NO: 345101 - RNA, 19 nt, Artificial Sequence
  Description of Artificial Sequence: Synthetic oligonucleotide
uggcaauaugccaaaccac

SEQ ID NO: 345102 - RNA, 19 nt, Artificial Sequence
  Description of Artificial Sequence: Synthetic oligonucleotide
guugaguacucugaggaac

SEQ ID NO: 345103 - RNA, 19 nt, Artificial Sequence
  Description of Artificial Sequence: Synthetic oligonucleotide
aaaaugaggaguagauaaa

SEQ ID NO: 345104 - RNA, 19 nt, Artificial Sequence
  Description of Artificial Sequence: Synthetic oligonucleotide
auaaggaggcuacgauuuc

SEQ ID NO: 345105 - RNA, 19 nt, Artificial Sequence
  Description of Artificial Sequence: Synthetic oligonucleotide
ugauuccgcaauaaauaau

SEQ ID NO: 345106 - RNA, 19 nt, Artificial Sequence
  Description of Artificial Sequence: Synthetic oligonucleotide
guagugguccaauauucac

SEQ ID NO: 345107 - RNA, 19 nt, Artificial Sequence
  Description of Artificial Sequence: Synthetic oligonucleotide
uauguacccuccccaagcu

SEQ ID NO: 345108 - RNA, 19 nt, Artificial Sequence
  Description of Artificial Sequence: Synthetic oligonucleotide
auuggugucuaaugugaga

SEQ ID NO: 345109 - RNA, 19 nt, Artificial Sequence
  Description of Artificial Sequence: Synthetic oligonucleotide
caaaugugaaaagcaguag

SEQ ID NO: 345110 - RNA, 19 nt, Artificial Sequence
  Description of Artificial Sequence: Synthetic oligonucleotide
cacguuuuacuguuaagca

SEQ ID NO: 345111 - RNA, 19 nt, Artificial Sequence
  Description of Artificial Sequence: Synthetic oligonucleotide
gcaagguuacuauauuugc

SEQ ID NO: 345112 - RNA, 19 nt, Artificial Sequence
  Description of Artificial Sequence: Synthetic oligonucleotide
cuauuccucaaaaugaagu

SEQ ID NO: 345113 - RNA, 19 nt, Artificial Sequence
  Description of Artificial Sequence: Synthetic oligonucleotide
cuacaguuacaugggauag

SEQ ID NO: 345114 - RNA, 19 nt, Artificial Sequence
  Description of Artificial Sequence: Synthetic oligonucleotide
acguuuuacuguuaagcaa

SEQ ID NO: 345115 - RNA, 19 nt, Artificial Sequence
  Description of Artificial Sequence: Synthetic oligonucleotide
acagagauuuaguuauuau

SEQ ID NO: 345116 - RNA, 19 nt, Artificial Sequence
  Description of Artificial Sequence: Synthetic oligonucleotide
guaggucugaaaugaaaga

SEQ ID NO: 345117 - RNA, 19 nt, Artificial Sequence
  Description of Artificial Sequence: Synthetic oligonucleotide
aggagcauaccacuaugca

SEQ ID NO: 345118 - RNA, 19 nt, Artificial Sequence
  Description of Artificial Sequence: Synthetic oligonucleotide
acagacggagauuccaagu

SEQ ID NO: 345119 - RNA, 19 nt, Artificial Sequence
  Description of Artificial Sequence: Synthetic oligonucleotide
cugaaaugaaagacuccac

SEQ ID NO: 345120 - RNA, 19 nt, Artificial Sequence
  Description of Artificial Sequence: Synthetic oligonucleotide
cacaucagguggucgauac

SEQ ID NO: 345121 - RNA, 19 nt, Artificial Sequence
  Description of Artificial Sequence: Synthetic oligonucleotide
agcucugaguccaugacug

SEQ ID NO: 345122 - RNA, 19 nt, Artificial Sequence
  Description of Artificial Sequence: Synthetic oligonucleotide
acucuuacacugcacacuu

SEQ ID NO: 345123 - RNA, 19 nt, Artificial Sequence
  Description of Artificial Sequence: Synthetic oligonucleotide
uguuccaagcggaucuccu

SEQ ID NO: 345124 - RNA, 19 nt, Artificial Sequence
  Description of Artificial Sequence: Synthetic oligonucleotide
uuacacuaguuagugucug

SEQ ID NO: 345125 - RNA, 19 nt, Artificial Sequence
  Description of Artificial Sequence: Synthetic oligonucleotide
gguuuaacauuaaaccagc

SEQ ID NO: 345126 - RNA, 19 nt, Artificial Sequence
  Description of Artificial Sequence: Synthetic oligonucleotide
auaugccaaaccacggagg

SEQ ID NO: 345127 - RNA, 19 nt, Artificial Sequence
  Description of Artificial Sequence: Synthetic oligonucleotide
aucacuauucacaaauaaa

SEQ ID NO: 345128 - RNA, 19 nt, Artificial Sequence
  Description of Artificial Sequence: Synthetic oligonucleotide
ugguuacaaguuaacuaaa

SEQ ID NO: 345129 - RNA, 19 nt, Artificial Sequence
  Description of Artificial Sequence: Synthetic oligonucleotide
gagauuccaaguccagcac

SEQ ID NO: 345130 - RNA, 19 nt, Artificial Sequence
  Description of Artificial Sequence: Synthetic oligonucleotide
gaagcacaucagguggucg

SEQ ID NO: 345131 - RNA, 19 nt, Artificial Sequence
  Description of Artificial Sequence: Synthetic oligonucleotide
gaugcacuaaccaauaguu

SEQ ID NO: 345132 - RNA, 19 nt, Artificial Sequence
  Description of Artificial Sequence: Synthetic oligonucleotide
gcugacaaaugugaaaagc

SEQ ID NO: 345133 - RNA, 19 nt, Artificial Sequence
  Description of Artificial Sequence: Synthetic oligonucleotide
uuucuaguuauaggaugca

SEQ ID NO: 345134 - RNA, 19 nt, Artificial Sequence
  Description of Artificial Sequence: Synthetic oligonucleotide
uucuaguuauaggaugcac

SEQ ID NO: 345135 - RNA, 19 nt, Artificial Sequence
  Description of Artificial Sequence: Synthetic oligonucleotide
gagcauaccacuaugcagu

SEQ ID NO: 345136 - RNA, 19 nt, Artificial Sequence
  Description of Artificial Sequence: Synthetic oligonucleotide
auaacaccccaaacaugcc

SEQ ID NO: 345137 - RNA, 19 nt, Artificial Sequence
  Description of Artificial Sequence: Synthetic oligonucleotide
augaacauaaaugccugaa

SEQ ID NO: 345138 - RNA, 19 nt, Artificial Sequence
  Description of Artificial Sequence: Synthetic oligonucleotide
uacaguuacaugggauagc

SEQ ID NO: 345139 - RNA, 19 nt, Artificial Sequence
  Description of Artificial Sequence: Synthetic oligonucleotide
ucuucccguguccuugcag

SEQ ID NO: 345140 - RNA, 19 nt, Artificial Sequence
  Description of Artificial Sequence: Synthetic oligonucleotide
augucaaucuguguugagu

SEQ ID NO: 345141 - RNA, 19 nt, Artificial Sequence
  Description of Artificial Sequence: Synthetic oligonucleotide
aaauuauauguagcacgaa

SEQ ID NO: 345142 - RNA, 19 nt, Artificial Sequence
  Description of Artificial Sequence: Synthetic oligonucleotide
uaggaugcacuaaccaaua

SEQ ID NO: 345143 - RNA, 19 nt, Artificial Sequence
  Description of Artificial Sequence: Synthetic oligonucleotide
uuaggcuacaggguuuaac

SEQ ID NO: 345144 - RNA, 19 nt, Artificial Sequence
  Description of Artificial Sequence: Synthetic oligonucleotide
acaaaucugcagcuacagu

SEQ ID NO: 345145 - RNA, 19 nt, Artificial Sequence
  Description of Artificial Sequence: Synthetic oligonucleotide
gaggagcauaccacuaugc

SEQ ID NO: 345146 - RNA, 19 nt, Artificial Sequence
  Description of Artificial Sequence: Synthetic oligonucleotide
cacuuaauacuguuaaaua

SEQ ID NO: 345147 - RNA, 19 nt, Artificial Sequence
  Description of Artificial Sequence: Synthetic oligonucleotide
cacgaacuuaagcauguuc

SEQ ID NO: 345148 - RNA, 19 nt, Artificial Sequence
  Description of Artificial Sequence: Synthetic oligonucleotide
cuguguuucucaguccugc

SEQ ID NO: 345149 - RNA, 19 nt, Artificial Sequence
  Description of Artificial Sequence: Synthetic oligonucleotide
cucacguuuuacuguuaag

SEQ ID NO: 345150 - RNA, 19 nt, Artificial Sequence
  Description of Artificial Sequence: Synthetic oligonucleotide
aguuagugucugaugagca

SEQ ID NO: 345151 - RNA, 19 nt, Artificial Sequence
  Description of Artificial Sequence: Synthetic oligonucleotide
uaugucugucaguuagaaa

SEQ ID NO: 345152 - RNA, 19 nt, Artificial Sequence
  Description of Artificial Sequence: Synthetic oligonucleotide
acaugaccauuucaaaaua

SEQ ID NO: 345153 - RNA, 19 nt, Artificial Sequence
  Description of Artificial Sequence: Synthetic oligonucleotide
agaccagagucaaagauuu

SEQ ID NO: 345154 - RNA, 19 nt, Artificial Sequence
  Description of Artificial Sequence: Synthetic oligonucleotide
cacuaguuagugucugaug

SEQ ID NO: 345155 - RNA, 19 nt, Artificial Sequence
  Description of Artificial Sequence: Synthetic oligonucleotide
augcacuaaccaauaguuc

SEQ ID NO: 345156 - RNA, 19 nt, Artificial Sequence
  Description of Artificial Sequence: Synthetic oligonucleotide
cagagucaaagauuuaucu

SEQ ID NO: 345157 - RNA, 19 nt, Artificial Sequence
  Description of Artificial Sequence: Synthetic oligonucleotide
aagaagcacaucagguggu

SEQ ID NO: 345158 - RNA, 19 nt, Artificial Sequence
  Description of Artificial Sequence: Synthetic oligonucleotide
caauaugccaaaccacgga

SEQ ID NO: 345159 - RNA, 19 nt, Artificial Sequence
  Description of Artificial Sequence: Synthetic oligonucleotide
uuaaauccuuuagcaguga

SEQ ID NO: 345160 - RNA, 19 nt, Artificial Sequence
  Description of Artificial Sequence: Synthetic oligonucleotide
aguucaucaaggggaggag

SEQ ID NO: 345161 - RNA, 19 nt, Artificial Sequence
  Description of Artificial Sequence: Synthetic oligonucleotide
aggauuugguacaggaaca

SEQ ID NO: 345162 - RNA, 19 nt, Artificial Sequence
  Description of Artificial Sequence: Synthetic oligonucleotide
uagcuguacagggugcacc

SEQ ID NO: 345163 - RNA, 19 nt, Artificial Sequence
  Description of Artificial Sequence: Synthetic oligonucleotide
auaccacuaugcaguagac

SEQ ID NO: 345164 - RNA, 19 nt, Artificial Sequence
  Description of Artificial Sequence: Synthetic oligonucleotide
acaccgaagugucugugau

SEQ ID NO: 345165 - RNA, 19 nt, Artificial Sequence
  Description of Artificial Sequence: Synthetic oligonucleotide
aaccacggaggauuuggua

SEQ ID NO: 345166 - RNA, 19 nt, Artificial Sequence
  Description of Artificial Sequence: Synthetic oligonucleotide
caguugacccuggaaacag

SEQ ID NO: 345167 - RNA, 19 nt, Artificial Sequence
  Description of Artificial Sequence: Synthetic oligonucleotide
cugauuccaagugaauguc

SEQ ID NO: 345168 - RNA, 19 nt, Artificial Sequence
  Description of Artificial Sequence: Synthetic oligonucleotide
gcaauaugccaaaccacgg

SEQ ID NO: 345169 - RNA, 19 nt, Artificial Sequence
  Description of Artificial Sequence: Synthetic oligonucleotide
caucagguggucgauacca

SEQ ID NO: 345170 - RNA, 19 nt, Artificial Sequence
  Description of Artificial Sequence: Synthetic oligonucleotide
ugugcauacucaugauguu

SEQ ID NO: 345171 - RNA, 19 nt, Artificial Sequence
  Description of Artificial Sequence: Synthetic oligonucleotide
uggugucuaaugugagacu

SEQ ID NO: 345172 - RNA, 19 nt, Artificial Sequence
  Description of Artificial Sequence: Synthetic oligonucleotide
aacucacuuaauacuguua

SEQ ID NO: 345173 - RNA, 19 nt, Artificial Sequence
  Description of Artificial Sequence: Synthetic oligonucleotide
gacggagauuccaagucca

SEQ ID NO: 345174 - RNA, 19 nt, Artificial Sequence
  Description of Artificial Sequence: Synthetic oligonucleotide
ggugucuaugguuacaagu

SEQ ID NO: 345175 - RNA, 19 nt, Artificial Sequence
  Description of Artificial Sequence: Synthetic oligonucleotide
guuauuuagcagcaaugau

SEQ ID NO: 345176 - RNA, 19 nt, Artificial Sequence
  Description of Artificial Sequence: Synthetic oligonucleotide
gguggucgauaccacagug

SEQ ID NO: 345177 - RNA, 19 nt, Artificial Sequence
  Description of Artificial Sequence: Synthetic oligonucleotide
uaguuauaggaugcacuaa

SEQ ID NO: 345178 - RNA, 19 nt, Artificial Sequence
  Description of Artificial Sequence: Synthetic oligonucleotide
auaccaauuaggauuucua

SEQ ID NO: 345179 - RNA, 19 nt, Artificial Sequence
  Description of Artificial Sequence: Synthetic oligonucleotide
ggauuugguacaggaacag

SEQ ID NO: 345180 - RNA, 19 nt, Artificial Sequence
  Description of Artificial Sequence: Synthetic oligonucleotide
caagguuacuauauuugcu

SEQ ID NO: 345181 - RNA, 19 nt, Artificial Sequence
  Description of Artificial Sequence: Synthetic oligonucleotide
cauaugucugucaguuaga

SEQ ID NO: 345182 - RNA, 19 nt, Artificial Sequence
  Description of Artificial Sequence: Synthetic oligonucleotide
ggaggagcauaccacuaug

SEQ ID NO: 345183 - RNA, 19 nt, Artificial Sequence
  Description of Artificial Sequence: Synthetic oligonucleotide
uuacagugaauggcaggac

SEQ ID NO: 345184 - RNA, 19 nt, Artificial Sequence
  Description of Artificial Sequence: Synthetic oligonucleotide
acagugaauggcaggacaa

SEQ ID NO: 345185 - RNA, 19 nt, Artificial Sequence
  Description of Artificial Sequence: Synthetic oligonucleotide
uggcucacguuuuacuguu

SEQ ID NO: 345186 - RNA, 19 nt, Artificial Sequence
  Description of Artificial Sequence: Synthetic oligonucleotide
cuguaggucugaaaugaaa

SEQ ID NO: 345187 - RNA, 19 nt, Artificial Sequence
  Description of Artificial Sequence: Synthetic oligonucleotide
uacauaugucugucaguua

SEQ ID NO: 345188 - RNA, 19 nt, Artificial Sequence
  Description of Artificial Sequence: Synthetic oligonucleotide
acacuaguuagugucugau

SEQ ID NO: 345189 - RNA, 19 nt, Artificial Sequence
  Description of Artificial Sequence: Synthetic oligonucleotide
caagcggaucuccuuuaac

SEQ ID NO: 345190 - RNA, 19 nt, Artificial Sequence
  Description of Artificial Sequence: Synthetic oligonucleotide
guagcacgaacuuaagcau

SEQ ID NO: 345191 - RNA, 19 nt, Artificial Sequence
  Description of Artificial Sequence: Synthetic oligonucleotide
gggcuugaaaccaugcuac

SEQ ID NO: 345192 - RNA, 19 nt, Artificial Sequence
  Description of Artificial Sequence: Synthetic oligonucleotide
caagugaaugucacugaaa

SEQ ID NO: 345193 - RNA, 19 nt, Artificial Sequence
  Description of Artificial Sequence: Synthetic oligonucleotide
acgauuucugaggcaaaca

SEQ ID NO: 345194 - RNA, 19 nt, Artificial Sequence
  Description of Artificial Sequence: Synthetic oligonucleotide
gugucuaaugugagacucc

SEQ ID NO: 345195 - RNA, 19 nt, Artificial Sequence
  Description of Artificial Sequence: Synthetic oligonucleotide
auggugucuaugguuacaa

SEQ ID NO: 345196 - RNA, 19 nt, Artificial Sequence
  Description of Artificial Sequence: Synthetic oligonucleotide
aaaccacggaggauuuggu

SEQ ID NO: 345197 - RNA, 19 nt, Artificial Sequence
  Description of Artificial Sequence: Synthetic oligonucleotide
gcuacaguuacaugggaua

SEQ ID NO: 345198 - RNA, 19 nt, Artificial Sequence
  Description of Artificial Sequence: Synthetic oligonucleotide
cuaaaaugaggaguagaua

SEQ ID NO: 345199 - RNA, 19 nt, Artificial Sequence
  Description of Artificial Sequence: Synthetic oligonucleotide
aggaggcuacgauuucuga

SEQ ID NO: 345200 - RNA, 19 nt, Artificial Sequence
  Description of Artificial Sequence: Synthetic oligonucleotide
gcugauuccaagugaaugu

SEQ ID NO: 345201 - RNA, 19 nt, Artificial Sequence
  Description of Artificial Sequence: Synthetic oligonucleotide
gucguccauguauuguuuc

SEQ ID NO: 345202 - RNA, 19 nt, Artificial Sequence
  Description of Artificial Sequence: Synthetic oligonucleotide
ucccggugcaauaccuuuc

SEQ ID NO: 345203 - RNA, 19 nt, Artificial Sequence
  Description of Artificial Sequence: Synthetic oligonucleotide
cacagucguccauguauug

SEQ ID NO: 345204 - RNA, 19 nt, Artificial Sequence
  Description of Artificial Sequence: Synthetic oligonucleotide
cauuauacaugaaucuguu

SEQ ID NO: 345205 - RNA, 19 nt, Artificial Sequence
  Description of Artificial Sequence: Synthetic oligonucleotide
agguggucgauaccacagu

SEQ ID NO: 345206 - RNA, 19 nt, Artificial Sequence
  Description of Artificial Sequence: Synthetic oligonucleotide
gauauucacuugcuugaau

SEQ ID NO: 345207 - RNA, 19 nt, Artificial Sequence
  Description of Artificial Sequence: Synthetic oligonucleotide
cucacuuaauacuguuaaa

SEQ ID NO: 345208 - RNA, 19 nt, Artificial Sequence
  Description of Artificial Sequence: Synthetic oligonucleotide
auguauuguuucagguucu

SEQ ID NO: 345209 - RNA, 19 nt, Artificial Sequence
  Description of Artificial Sequence: Synthetic oligonucleotide
gcuacgauuucugaggcaa

SEQ ID NO: 345210 - RNA, 19 nt, Artificial Sequence
  Description of Artificial Sequence: Synthetic oligonucleotide
cauacucaugauguuucca

SEQ ID NO: 345211 - RNA, 19 nt, Artificial Sequence
  Description of Artificial Sequence: Synthetic oligonucleotide
ggauagcuguaaccuacug

SEQ ID NO: 345212 - RNA, 19 nt, Artificial Sequence
  Description of Artificial Sequence: Synthetic oligonucleotide
accccaaacaugccacaau

SEQ ID NO: 345213 - RNA, 19 nt, Artificial Sequence
  Description of Artificial Sequence: Synthetic oligonucleotide
caccgaagugucugugaug

SEQ ID NO: 345214 - RNA, 19 nt, Artificial Sequence
  Description of Artificial Sequence: Synthetic oligonucleotide
aguuaggcuacaggguuua

SEQ ID NO: 345215 - RNA, 19 nt, Artificial Sequence
  Description of Artificial Sequence: Synthetic oligonucleotide
gcuacaggguuuaacauua

SEQ ID NO: 345216 - RNA, 19 nt, Artificial Sequence
  Description of Artificial Sequence: Synthetic oligonucleotide
gguuacaaguuaacuaaaa

SEQ ID NO: 345217 - RNA, 19 nt, Artificial Sequence
  Description of Artificial Sequence: Synthetic oligonucleotide
gucaugcaagguuacuaua

SEQ ID NO: 345218 - RNA, 19 nt, Artificial Sequence
  Description of Artificial Sequence: Synthetic oligonucleotide
uguugaccucucagcuacu

SEQ ID NO: 345219 - RNA, 19 nt, Artificial Sequence
  Description of Artificial Sequence: Synthetic oligonucleotide
ggcuugaaaccaugcuacc

SEQ ID NO: 345220 - RNA, 19 nt, Artificial Sequence
  Description of Artificial Sequence: Synthetic oligonucleotide
guuacacuaguuagugucu

SEQ ID NO: 345221 - RNA, 19 nt, Artificial Sequence
  Description of Artificial Sequence: Synthetic oligonucleotide
uguaaccuacuggcucuac

SEQ ID NO: 345222 - RNA, 19 nt, Artificial Sequence
  Description of Artificial Sequence: Synthetic oligonucleotide
gaaaugugcuuaagacaaa

SEQ ID NO: 345223 - RNA, 19 nt, Artificial Sequence
  Description of Artificial Sequence: Synthetic oligonucleotide
guaaccuacuggcucuacu

SEQ ID NO: 345224 - RNA, 19 nt, Artificial Sequence
  Description of Artificial Sequence: Synthetic oligonucleotide
ccauuauacaugaaucugu

SEQ ID NO: 345225 - RNA, 19 nt, Artificial Sequence
  Description of Artificial Sequence: Synthetic oligonucleotide
agaaacagguucacauaua

SEQ ID NO: 345226 - RNA, 19 nt, Artificial Sequence
  Description of Artificial Sequence: Synthetic oligonucleotide
gcuauuaguuuuaaauccu

SEQ ID NO: 345227 - RNA, 19 nt, Artificial Sequence
  Description of Artificial Sequence: Synthetic oligonucleotide
aggaaccaagaagcacauc

SEQ ID NO: 345228 - RNA, 19 nt, Artificial Sequence
  Description of Artificial Sequence: Synthetic oligonucleotide
agacagacggagauuccaa

SEQ ID NO: 345229 - RNA, 19 nt, Artificial Sequence
  Description of Artificial Sequence: Synthetic oligonucleotide
guguuccaagcggaucucc

SEQ ID NO: 345230 - RNA, 19 nt, Artificial Sequence
  Description of Artificial Sequence: Synthetic oligonucleotide
acggagauuccaaguccag

SEQ ID NO: 345231 - RNA, 19 nt, Artificial Sequence
  Description of Artificial Sequence: Synthetic oligonucleotide
gcuugaaaccaugcuacca

SEQ ID NO: 345232 - RNA, 19 nt, Artificial Sequence
  Description of Artificial Sequence: Synthetic oligonucleotide
cacggaggauuugguacag

SEQ ID NO: 345233 - RNA, 19 nt, Artificial Sequence
  Description of Artificial Sequence: Synthetic oligonucleotide
cacaaucacuauucacaaa

SEQ ID NO: 345234 - RNA, 19 nt, Artificial Sequence
  Description of Artificial Sequence: Synthetic oligonucleotide
cacagagauuuaguuauua

SEQ ID NO: 345235 - RNA, 19 nt, Artificial Sequence
  Description of Artificial Sequence: Synthetic oligonucleotide
aggacaaaauuaaguuaua

SEQ ID NO: 345236 - RNA, 19 nt, Artificial Sequence
  Description of Artificial Sequence: Synthetic oligonucleotide
gccagcuuuaguucuccuc

SEQ ID NO: 345237 - RNA, 19 nt, Artificial Sequence
  Description of Artificial Sequence: Synthetic oligonucleotide
cacauauaauaaagccacu

SEQ ID NO: 345238 - RNA, 19 nt, Artificial Sequence
  Description of Artificial Sequence: Synthetic oligonucleotide
auguacccuccccaagcuu

SEQ ID NO: 345239 - RNA, 19 nt, Artificial Sequence
  Description of Artificial Sequence: Synthetic oligonucleotide
gcauauguacccuccccaa

SEQ ID NO: 345240 - RNA, 19 nt, Artificial Sequence
  Description of Artificial Sequence: Synthetic oligonucleotide
cauuucucauggcucauuu

SEQ ID NO: 345241 - RNA, 19 nt, Artificial Sequence
  Description of Artificial Sequence: Synthetic oligonucleotide
gcucacguuuuacuguuaa

SEQ ID NO: 345242 - RNA, 19 nt, Artificial Sequence
  Description of Artificial Sequence: Synthetic oligonucleotide
ucccguguccuugcaguuc

SEQ ID NO: 345243 - RNA, 19 nt, Artificial Sequence
  Description of Artificial Sequence: Synthetic oligonucleotide
accucucagcuacucuauu

SEQ ID NO: 345244 - RNA, 19 nt, Artificial Sequence
  Description of Artificial Sequence: Synthetic oligonucleotide
cuacgauuucugaggcaaa

SEQ ID NO: 345245 - RNA, 19 nt, Artificial Sequence
  Description of Artificial Sequence: Synthetic oligonucleotide
aggucccggugcaauaccu

SEQ ID NO: 345246 - RNA, 19 nt, Artificial Sequence
  Description of Artificial Sequence: Synthetic oligonucleotide
ccuacuggcucuacuggca

SEQ ID NO: 345247 - RNA, 19 nt, Artificial Sequence
  Description of Artificial Sequence: Synthetic oligonucleotide
gcauucaacuguuguguua

SEQ ID NO: 345248 - RNA, 19 nt, Artificial Sequence
  Description of Artificial Sequence: Synthetic oligonucleotide
caugcaagguuacuauauu

SEQ ID NO: 345249 - RNA, 19 nt, Artificial Sequence
  Description of Artificial Sequence: Synthetic oligonucleotide
ccuuuagcagugagacuuc

SEQ ID NO: 345250 - RNA, 19 nt, Artificial Sequence
  Description of Artificial Sequence: Synthetic oligonucleotide
ccgcaauaaauaaugcacu

SEQ ID NO: 345251 - RNA, 19 nt, Artificial Sequence
  Description of Artificial Sequence: Synthetic oligonucleotide
uaacagcaguuaggcuaca

SEQ ID NO: 345252 - RNA, 19 nt, Artificial Sequence
  Description of Artificial Sequence: Synthetic oligonucleotide
gcaguagugguccaauauu

SEQ ID NO: 345253 - RNA, 19 nt, Artificial Sequence
  Description of Artificial Sequence: Synthetic oligonucleotide
cuacaggguuuaacauuaa

SEQ ID NO: 345254 - RNA, 19 nt, Artificial Sequence
  Description of Artificial Sequence: Synthetic oligonucleotide
auguuccuacgaaauuaua

SEQ ID NO: 345255 - RNA, 19 nt, Artificial Sequence
  Description of Artificial Sequence: Synthetic oligonucleotide
ggcuacaggguuuaacauu

SEQ ID NO: 345256 - RNA, 19 nt, Artificial Sequence
  Description of Artificial Sequence: Synthetic oligonucleotide
ccccgaaugaaagaaacua

SEQ ID NO: 345257 - RNA, 19 nt, Artificial Sequence
  Description of Artificial Sequence: Synthetic oligonucleotide
guggucgauaccacagugu

SEQ ID NO: 345258 - RNA, 19 nt, Artificial Sequence
  Description of Artificial Sequence: Synthetic oligonucleotide
gcauaccacuaugcaguag

SEQ ID NO: 345259 - RNA, 19 nt, Artificial Sequence
  Description of Artificial Sequence: Synthetic oligonucleotide
cagugaauggcaggacaaa

SEQ ID NO: 345260 - RNA, 19 nt, Artificial Sequence
  Description of Artificial Sequence: Synthetic oligonucleotide
ccgaaugaaagaaacuauu

SEQ ID NO: 345261 - RNA, 19 nt, Artificial Sequence
  Description of Artificial Sequence: Synthetic oligonucleotide
gccaauguuccuacgaaau

SEQ ID NO: 345262 - RNA, 19 nt, Artificial Sequence
  Description of Artificial Sequence: Synthetic oligonucleotide
acacagagauuuaguuauu

SEQ ID NO: 345263 - RNA, 19 nt, Artificial Sequence
  Description of Artificial Sequence: Synthetic oligonucleotide
ggcuacgauuucugaggca

SEQ ID NO: 345264 - RNA, 19 nt, Artificial Sequence
  Description of Artificial Sequence: Synthetic oligonucleotide
ccaacuccccacaugucaa

SEQ ID NO: 345265 - RNA, 19 nt, Artificial Sequence
  Description of Artificial Sequence: Synthetic oligonucleotide
ggucgauaccacaguguga

SEQ ID NO: 345266 - RNA, 19 nt, Artificial Sequence
  Description of Artificial Sequence: Synthetic oligonucleotide
cggagauuccaaguccagc

SEQ ID NO: 345267 - RNA, 19 nt, Artificial Sequence
  Description of Artificial Sequence: Synthetic oligonucleotide
ccuguuugaauggugucua

SEQ ID NO: 345268 - RNA, 19 nt, Artificial Sequence
  Description of Artificial Sequence: Synthetic oligonucleotide
cccgaaugaaagaaacuau

SEQ ID NO: 345269 - RNA, 19 nt, Artificial Sequence
  Description of Artificial Sequence: Synthetic oligonucleotide
cccguguccuugcaguuca

SEQ ID NO: 345270 - RNA, 19 nt, Artificial Sequence
  Description of Artificial Sequence: Synthetic oligonucleotide
gaccagagucaaagauuua

SEQ ID NO: 345271 - RNA, 19 nt, Artificial Sequence
  Description of Artificial Sequence: Synthetic oligonucleotide
gggaggagcauaccacuau

SEQ ID NO: 345272 - RNA, 19 nt, Artificial Sequence
  Description of Artificial Sequence: Synthetic oligonucleotide
guuaggcuacaggguuuaa

SEQ ID NO: 345273 - RNA, 19 nt, Artificial Sequence
  Description of Artificial Sequence: Synthetic oligonucleotide
ccuuuaacgccaccaaauu

SEQ ID NO: 345274 - RNA, 19 nt, Artificial Sequence
  Description of Artificial Sequence: Synthetic oligonucleotide
caacuccccacaugucaau

SEQ ID NO: 345275 - RNA, 19 nt, Artificial Sequence
  Description of Artificial Sequence: Synthetic oligonucleotide
gcacuaaccaauaguucuu

SEQ ID NO: 345276 - RNA, 19 nt, Artificial Sequence
  Description of Artificial Sequence: Synthetic oligonucleotide
ggggaggagcauaccacua

SEQ ID NO: 345277 - RNA, 19 nt, Artificial Sequence
  Description of Artificial Sequence: Synthetic oligonucleotide
cccggugcaauaccuuucu

SEQ ID NO: 345278 - RNA, 19 nt, Artificial Sequence
  Description of Artificial Sequence: Synthetic oligonucleotide
ccaugcuaccagacuuaaa

SEQ ID NO: 345279 - RNA, 19 nt, Artificial Sequence
  Description of Artificial Sequence: Synthetic oligonucleotide
gcucaagaagaugcauaau

SEQ ID NO: 345280 - RNA, 19 nt, Artificial Sequence
  Description of Artificial Sequence: Synthetic oligonucleotide
ccacuaugcaguagacauu

SEQ ID NO: 345281 - RNA, 19 nt, Artificial Sequence
  Description of Artificial Sequence: Synthetic oligonucleotide
ggcucacguuuuacuguua

SEQ ID NO: 345282 - RNA, 19 nt, Artificial Sequence
  Description of Artificial Sequence: Synthetic oligonucleotide
ccccaagcuuuuccaauuu

SEQ ID NO: 345283 - RNA, 19 nt, Artificial Sequence
  Description of Artificial Sequence: Synthetic oligonucleotide
ccgaagugucugugaugcu

SEQ ID NO: 345284 - RNA, 19 nt, Artificial Sequence
  Description of Artificial Sequence: Synthetic oligonucleotide
cccuggaaacaguggucuu

SEQ ID NO: 345285 - RNA, 19 nt, Artificial Sequence
  Description of Artificial Sequence: Synthetic oligonucleotide
aauuguaacguccaagaac

SEQ ID NO: 345286 - RNA, 19 nt, Artificial Sequence
  Description of Artificial Sequence: Synthetic oligonucleotide
agcaauugcuccuaaaacc

SEQ ID NO: 345287 - RNA, 19 nt, Artificial Sequence
  Description of Artificial Sequence: Synthetic oligonucleotide
auuguaacguccaagaacc

SEQ ID NO: 345288 - RNA, 19 nt, Artificial Sequence
  Description of Artificial Sequence: Synthetic oligonucleotide
aaaaucuuggauuacgcca

SEQ ID NO: 345289 - RNA, 19 nt, Artificial Sequence
  Description of Artificial Sequence: Synthetic oligonucleotide
uguauuagauuaaacacca

SEQ ID NO: 345290 - RNA, 19 nt, Artificial Sequence
  Description of Artificial Sequence: Synthetic oligonucleotide
aaaggagugacucguuggc

SEQ ID NO: 345291 - RNA, 19 nt, Artificial Sequence
  Description of Artificial Sequence: Synthetic oligonucleotide
aucgacuuaauacagugac

SEQ ID NO: 345292 - RNA, 19 nt, Artificial Sequence
  Description of Artificial Sequence: Synthetic oligonucleotide
aaaacaaggccccguaacg

SEQ ID NO: 345293 - RNA, 19 nt, Artificial Sequence
  Description of Artificial Sequence: Synthetic oligonucleotide
uuaacuguuaguuuugugu

SEQ ID NO: 345294 - RNA, 19 nt, Artificial Sequence
  Description of Artificial Sequence: Synthetic oligonucleotide
gauagaacgcacaagagcc

SEQ ID NO: 345295 - RNA, 19 nt, Artificial Sequence
  Description of Artificial Sequence: Synthetic oligonucleotide
aauguuaccucccagcccu

SEQ ID NO: 345296 - RNA, 19 nt, Artificial Sequence
  Description of Artificial Sequence: Synthetic oligonucleotide
aaaccguggccuuaugucc

SEQ ID NO: 345297 - RNA, 19 nt, Artificial Sequence
  Description of Artificial Sequence: Synthetic oligonucleotide
uuuaguuugauacccgacc

SEQ ID NO: 345298 - RNA, 19 nt, Artificial Sequence
  Description of Artificial Sequence: Synthetic oligonucleotide
ucuaauguagcgaaggcac

SEQ ID NO: 345299 - RNA, 19 nt, Artificial Sequence
  Description of Artificial Sequence: Synthetic oligonucleotide
uauaaaaucuuggauuacg

SEQ ID NO: 345300 - RNA, 19 nt, Artificial Sequence
  Description of Artificial Sequence: Synthetic oligonucleotide
ugauauuuccccaauugcc

SEQ ID NO: 345301 - RNA, 19 nt, Artificial Sequence
  Description of Artificial Sequence: Synthetic oligonucleotide
uaaauuguaacguccaaga

SEQ ID NO: 345302 - RNA, 19 nt, Artificial Sequence
  Description of Artificial Sequence: Synthetic oligonucleotide
guuuacacaacgcugauac

SEQ ID NO: 345303 - RNA, 19 nt, Artificial Sequence
  Description of Artificial Sequence: Synthetic oligonucleotide
uaaaggguaacauuuuccc

SEQ ID NO: 345304 - RNA, 19 nt, Artificial Sequence
  Description of Artificial Sequence: Synthetic oligonucleotide
cagauuuccacccacaaag

SEQ ID NO: 345305 - RNA, 19 nt, Artificial Sequence
  Description of Artificial Sequence: Synthetic oligonucleotide
uacgcuucagcccagcagg

SEQ ID NO: 345306 - RNA, 19 nt, Artificial Sequence
  Description of Artificial Sequence: Synthetic oligonucleotide
aaaucuuggauuacgccac

SEQ ID NO: 345307 - RNA, 19 nt, Artificial Sequence
  Description of Artificial Sequence: Synthetic oligonucleotide
aaacuggucagagaaucgc

SEQ ID NO: 345308 - RNA, 19 nt, Artificial Sequence
  Description of Artificial Sequence: Synthetic oligonucleotide
acaaacguaaccaagacga

SEQ ID NO: 345309 - RNA, 19 nt, Artificial Sequence
  Description of Artificial Sequence: Synthetic oligonucleotide
ugauacauuaguguuagga

SEQ ID NO: 345310 - RNA, 19 nt, Artificial Sequence
  Description of Artificial Sequence: Synthetic oligonucleotide
uacauuaguguuaggaugu

SEQ ID NO: 345311 - RNA, 19 nt, Artificial Sequence
  Description of Artificial Sequence: Synthetic oligonucleotide
auacauuaguguuaggaug

SEQ ID NO: 345312 - RNA, 19 nt, Artificial Sequence
  Description of Artificial Sequence: Synthetic oligonucleotide
aacgugggaaauuuuauau

SEQ ID NO: 345313 - RNA, 19 nt, Artificial Sequence
  Description of Artificial Sequence: Synthetic oligonucleotide
uguacuguauucccuacug

SEQ ID NO: 345314 - RNA, 19 nt, Artificial Sequence
  Description of Artificial Sequence: Synthetic oligonucleotide
auucccuacugguuuaccc

SEQ ID NO: 345315 - RNA, 19 nt, Artificial Sequence
  Description of Artificial Sequence: Synthetic oligonucleotide
ugagcgaugaaaccguggc

SEQ ID NO: 345316 - RNA, 19 nt, Artificial Sequence
  Description of Artificial Sequence: Synthetic oligonucleotide
uaaaaucuuggauuacgcc

SEQ ID NO: 345317 - RNA, 19 nt, Artificial Sequence
  Description of Artificial Sequence: Synthetic oligonucleotide
gacaaacguaaccaagacg

SEQ ID NO: 345318 - RNA, 19 nt, Artificial Sequence
  Description of Artificial Sequence: Synthetic oligonucleotide
uauauaagcgagguauggg

SEQ ID NO: 345319 - RNA, 19 nt, Artificial Sequence
  Description of Artificial Sequence: Synthetic oligonucleotide
ucuuggauuacgccacugg

SEQ ID NO: 345320 - RNA, 19 nt, Artificial Sequence
  Description of Artificial Sequence: Synthetic oligonucleotide
gauauuuccccaauugccc

SEQ ID NO: 345321 - RNA, 19 nt, Artificial Sequence
  Description of Artificial Sequence: Synthetic oligonucleotide
auauaagcgagguauggga

SEQ ID NO: 345322 - RNA, 19 nt, Artificial Sequence
  Description of Artificial Sequence: Synthetic oligonucleotide
ugguguaacaccauaggaa

SEQ ID NO: 345323 - RNA, 19 nt, Artificial Sequence
  Description of Artificial Sequence: Synthetic oligonucleotide
uccuugagcgaugaaaccg

SEQ ID NO: 345324 - RNA, 19 nt, Artificial Sequence
  Description of Artificial Sequence: Synthetic oligonucleotide
uggauuuagauuuguuccc

SEQ ID NO: 345325 - RNA, 19 nt, Artificial Sequence
  Description of Artificial Sequence: Synthetic oligonucleotide
uaugcugguauuuacugaa

SEQ ID NO: 345326 - RNA, 19 nt, Artificial Sequence
  Description of Artificial Sequence: Synthetic oligonucleotide
uguuacuucuggcuacuag

SEQ ID NO: 345327 - RNA, 19 nt, Artificial Sequence
  Description of Artificial Sequence: Synthetic oligonucleotide
caagacgcucuuuuaaggg

SEQ ID NO: 345328 - RNA, 19 nt, Artificial Sequence
  Description of Artificial Sequence: Synthetic oligonucleotide
ucgacuuaauacagugacg

SEQ ID NO: 345329 - RNA, 19 nt, Artificial Sequence
  Description of Artificial Sequence: Synthetic oligonucleotide
aacguaaccaagacgacca

SEQ ID NO: 345330 - RNA, 19 nt, Artificial Sequence
  Description of Artificial Sequence: Synthetic oligonucleotide
aaccaagacgaccaauugu

SEQ ID NO: 345331 - RNA, 19 nt, Artificial Sequence
  Description of Artificial Sequence: Synthetic oligonucleotide
uccuacuaacguuuuaaug

SEQ ID NO: 345332 - RNA, 19 nt, Artificial Sequence
  Description of Artificial Sequence: Synthetic oligonucleotide
uguuuagcauagcuugugc

SEQ ID NO: 345333 - RNA, 19 nt, Artificial Sequence
  Description of Artificial Sequence: Synthetic oligonucleotide
cuuggauuacgccacuggg

SEQ ID NO: 345334 - RNA, 19 nt, Artificial Sequence
  Description of Artificial Sequence: Synthetic oligonucleotide
acuuaauacagugacggca

SEQ ID NO: 345335 - RNA, 19 nt, Artificial Sequence
  Description of Artificial Sequence: Synthetic oligonucleotide
cagaucaccuaguaaggcg

SEQ ID NO: 345336 - RNA, 19 nt, Artificial Sequence
  Description of Artificial Sequence: Synthetic oligonucleotide
auaugguucuuguuuaggu

SEQ ID NO: 345337 - RNA, 19 nt, Artificial Sequence
  Description of Artificial Sequence: Synthetic oligonucleotide
uuguuuauaugguucuugu

SEQ ID NO: 345338 - RNA, 19 nt, Artificial Sequence
  Description of Artificial Sequence: Synthetic oligonucleotide
gcaagcuuuagucagauca

SEQ ID NO: 345339 - RNA, 19 nt, Artificial Sequence
  Description of Artificial Sequence: Synthetic oligonucleotide
guacaaaucccacggaaug

SEQ ID NO: 345340 - RNA, 19 nt, Artificial Sequence
  Description of Artificial Sequence: Synthetic oligonucleotide
agcauuguuuagcauagcu

SEQ ID NO: 345341 - RNA, 19 nt, Artificial Sequence
  Description of Artificial Sequence: Synthetic oligonucleotide
uccaugaugcaacagcauc

SEQ ID NO: 345342 - RNA, 19 nt, Artificial Sequence
  Description of Artificial Sequence: Synthetic oligonucleotide
aaauuguaacguccaagaa

SEQ ID NO: 345343 - RNA, 19 nt, Artificial Sequence
  Description of Artificial Sequence: Synthetic oligonucleotide
aagacgcucuuuuaaggga

SEQ ID NO: 345344 - RNA, 19 nt, Artificial Sequence
  Description of Artificial Sequence: Synthetic oligonucleotide
ucacgauaaacauuugcaa

SEQ ID NO: 345345 - RNA, 19 nt, Artificial Sequence
  Description of Artificial Sequence: Synthetic oligonucleotide
ucccuauggcaucauacag

SEQ ID NO: 345346 - RNA, 19 nt, Artificial Sequence
  Description of Artificial Sequence: Synthetic oligonucleotide
cuuauaaacugcuguagca

SEQ ID NO: 345347 - RNA, 19 nt, Artificial Sequence
  Description of Artificial Sequence: Synthetic oligonucleotide
gaaaccguggccuuauguc

SEQ ID NO: 345348 - RNA, 19 nt, Artificial Sequence
  Description of Artificial Sequence: Synthetic oligonucleotide
caucacgauaaacauuugc

SEQ ID NO: 345349 - RNA, 19 nt, Artificial Sequence
  Description of Artificial Sequence: Synthetic oligonucleotide
ugucccuauggcaucauac

SEQ ID NO: 345350 - RNA, 19 nt, Artificial Sequence
  Description of Artificial Sequence: Synthetic oligonucleotide
ugaauugauauuuccccaa

SEQ ID NO: 345351 - RNA, 19 nt, Artificial Sequence
  Description of Artificial Sequence: Synthetic oligonucleotide
uguggcaacggaugagagg

SEQ ID NO: 345352 - RNA, 19 nt, Artificial Sequence
  Description of Artificial Sequence: Synthetic oligonucleotide
uggauuacgccacugggau

SEQ ID NO: 345353 - RNA, 19 nt, Artificial Sequence
  Description of Artificial Sequence: Synthetic oligonucleotide
guggcaacggaugagaggc

SEQ ID NO: 345354 - RNA, 19 nt, Artificial Sequence
  Description of Artificial Sequence: Synthetic oligonucleotide
uuggauuacgccacuggga

SEQ ID NO: 345355 - RNA, 19 nt, Artificial Sequence
  Description of Artificial Sequence: Synthetic oligonucleotide
uaaggcgaaagaacucugc

SEQ ID NO: 345356 - RNA, 19 nt, Artificial Sequence
  Description of Artificial Sequence: Synthetic oligonucleotide
guaacguccaagaaccugc

SEQ ID NO: 345357 - RNA, 19 nt, Artificial Sequence
  Description of Artificial Sequence: Synthetic oligonucleotide
uccaguauauaagcgaggu

SEQ ID NO: 345358 - RNA, 19 nt, Artificial Sequence
  Description of Artificial Sequence: Synthetic oligonucleotide
uugagcgaugaaaccgugg

SEQ ID NO: 345359 - RNA, 19 nt, Artificial Sequence
  Description of Artificial Sequence: Synthetic oligonucleotide
uuaugcugguauuuacuga

SEQ ID NO: 345360 - RNA, 19 nt, Artificial Sequence
  Description of Artificial Sequence: Synthetic oligonucleotide
gauuacgccacugggauuc

SEQ ID NO: 345361 - RNA, 19 nt, Artificial Sequence
  Description of Artificial Sequence: Synthetic oligonucleotide
ucaccuaguaaggcgaaag

SEQ ID NO: 345362 - RNA, 19 nt, Artificial Sequence
  Description of Artificial Sequence: Synthetic oligonucleotide
ucuacuaggggaggcaagc

SEQ ID NO: 345363 - RNA, 19 nt, Artificial Sequence
  Description of Artificial Sequence: Synthetic oligonucleotide
ugaaaccguggccuuaugu

SEQ ID NO: 345364 - RNA, 19 nt, Artificial Sequence
  Description of Artificial Sequence: Synthetic oligonucleotide
cuuaacauguugaaagcaa

SEQ ID NO: 345365 - RNA, 19 nt, Artificial Sequence
  Description of Artificial Sequence: Synthetic oligonucleotide
uuuaagggaagaggaaacu

SEQ ID NO: 345366 - RNA, 19 nt, Artificial Sequence
  Description of Artificial Sequence: Synthetic oligonucleotide
uguaacguccaagaaccug

SEQ ID NO: 345367 - RNA, 19 nt, Artificial Sequence
  Description of Artificial Sequence: Synthetic oligonucleotide
aaaagcugcaagacgcucu

SEQ ID NO: 345368 - RNA, 19 nt, Artificial Sequence
  Description of Artificial Sequence: Synthetic oligonucleotide
uaguuugauacccgacccc

SEQ ID NO: 345369 - RNA, 19 nt, Artificial Sequence
  Description of Artificial Sequence: Synthetic oligonucleotide
cuuaauacagugacggcaa

SEQ ID NO: 345370 - RNA, 19 nt, Artificial Sequence
  Description of Artificial Sequence: Synthetic oligonucleotide
uacaaaucccacggaaugc

SEQ ID NO: 345371 - RNA, 19 nt, Artificial Sequence
  Description of Artificial Sequence: Synthetic oligonucleotide
uguugcuauccaagauacg

SEQ ID NO: 345372 - RNA, 19 nt, Artificial Sequence
  Description of Artificial Sequence: Synthetic oligonucleotide
uguuaggauguuacuucug

SEQ ID NO: 345373 - RNA, 19 nt, Artificial Sequence
  Description of Artificial Sequence: Synthetic oligonucleotide
acugaauaaggugaggaau

SEQ ID NO: 345374 - RNA, 19 nt, Artificial Sequence
  Description of Artificial Sequence: Synthetic oligonucleotide
uaugguucuuguuuaggua

SEQ ID NO: 345375 - RNA, 19 nt, Artificial Sequence
  Description of Artificial Sequence: Synthetic oligonucleotide
auacgcuucagcccagcag

SEQ ID NO: 345376 - RNA, 19 nt, Artificial Sequence
  Description of Artificial Sequence: Synthetic oligonucleotide
auaagcgagguaugggaca

SEQ ID NO: 345377 - RNA, 19 nt, Artificial Sequence
  Description of Artificial Sequence: Synthetic oligonucleotide
agcgagguaugggacaagc

SEQ ID NO: 345378 - RNA, 19 nt, Artificial Sequence
  Description of Artificial Sequence: Synthetic oligonucleotide
guacuguauucccuacugg

SEQ ID NO: 345379 - RNA, 19 nt, Artificial Sequence
  Description of Artificial Sequence: Synthetic oligonucleotide
aguaggguugggauuguac

SEQ ID NO: 345380 - RNA, 19 nt, Artificial Sequence
  Description of Artificial Sequence: Synthetic oligonucleotide
acgaccaauuguuauugcu

SEQ ID NO: 345381 - RNA, 19 nt, Artificial Sequence
  Description of Artificial Sequence: Synthetic oligonucleotide
ugcaucucuauacccauuu

SEQ ID NO: 345382 - RNA, 19 nt, Artificial Sequence
  Description of Artificial Sequence: Synthetic oligonucleotide
caccuuuaguuugauaccc

SEQ ID NO: 345383 - RNA, 19 nt, Artificial Sequence
  Description of Artificial Sequence: Synthetic oligonucleotide
ucucuauacccauuugaau

SEQ ID NO: 345384 - RNA, 19 nt, Artificial Sequence
  Description of Artificial Sequence: Synthetic oligonucleotide
aaacaaggccccguaacgu

SEQ ID NO: 345385 - RNA, 19 nt, Artificial Sequence
  Description of Artificial Sequence: Synthetic oligonucleotide
uuguuuagcauagcuugug

SEQ ID NO: 345386 - RNA, 19 nt, Artificial Sequence
  Description of Artificial Sequence: Synthetic oligonucleotide
agcgaugaaaccguggccu

SEQ ID NO: 345387 - RNA, 19 nt, Artificial Sequence
  Description of Artificial Sequence: Synthetic oligonucleotide
uaacgugggaaauuuuaua

SEQ ID NO: 345388 - RNA, 19 nt, Artificial Sequence
  Description of Artificial Sequence: Synthetic oligonucleotide
uucuacuaggggaggcaag

SEQ ID NO: 345389 - RNA, 19 nt, Artificial Sequence
  Description of Artificial Sequence: Synthetic oligonucleotide
agagaaucgccuccaauuu

SEQ ID NO: 345390 - RNA, 19 nt, Artificial Sequence
  Description of Artificial Sequence: Synthetic oligonucleotide
gcaagacgcucuuuuaagg

SEQ ID NO: 345391 - RNA, 19 nt, Artificial Sequence
  Description of Artificial Sequence: Synthetic oligonucleotide
uuguacuguauucccuacu

SEQ ID NO: 345392 - RNA, 19 nt, Artificial Sequence
  Description of Artificial Sequence: Synthetic oligonucleotide
agacgaccaauuguuauug

SEQ ID NO: 345393 - RNA, 19 nt, Artificial Sequence
  Description of Artificial Sequence: Synthetic oligonucleotide
aguauauaagcgagguaug

SEQ ID NO: 345394 - RNA, 19 nt, Artificial Sequence
  Description of Artificial Sequence: Synthetic oligonucleotide
cuaacagcgucuuuggugu

SEQ ID NO: 345395 - RNA, 19 nt, Artificial Sequence
  Description of Artificial Sequence: Synthetic oligonucleotide
ccaacaucgacuuaauaca

SEQ ID NO: 345396 - RNA, 19 nt, Artificial Sequence
  Description of Artificial Sequence: Synthetic oligonucleotide
aaggcuuaacauguugaaa

SEQ ID NO: 345397 - RNA, 19 nt, Artificial Sequence
  Description of Artificial Sequence: Synthetic oligonucleotide
aaucuuggauuacgccacu

SEQ ID NO: 345398 - RNA, 19 nt, Artificial Sequence
  Description of Artificial Sequence: Synthetic oligonucleotide
cgacuuaauacagugacgg

SEQ ID NO: 345399 - RNA, 19 nt, Artificial Sequence
  Description of Artificial Sequence: Synthetic oligonucleotide
ccuacuaacguuuuaaugu

SEQ ID NO: 345400 - RNA, 19 nt, Artificial Sequence
  Description of Artificial Sequence: Synthetic oligonucleotide
gaccaauuguuauugcugu

SEQ ID NO: 345401 - RNA, 19 nt, Artificial Sequence
  Description of Artificial Sequence: Synthetic oligonucleotide
aaagcaagcuuuagucaga

SEQ ID NO: 345402 - RNA, 19 nt, Artificial Sequence
  Description of Artificial Sequence: Synthetic oligonucleotide
agaucaccuaguaaggcga

SEQ ID NO: 345403 - RNA, 19 nt, Artificial Sequence
  Description of Artificial Sequence: Synthetic oligonucleotide
cucuauacccauuugaauu

SEQ ID NO: 345404 - RNA, 19 nt, Artificial Sequence
  Description of Artificial Sequence: Synthetic oligonucleotide
uguauucccuacugguuua

SEQ ID NO: 345405 - RNA, 19 nt, Artificial Sequence
  Description of Artificial Sequence: Synthetic oligonucleotide
ggcgaaagaacucugccga

SEQ ID NO: 345406 - RNA, 19 nt, Artificial Sequence
  Description of Artificial Sequence: Synthetic oligonucleotide
accaauuguuauugcugug

SEQ ID NO: 345407 - RNA, 19 nt, Artificial Sequence
  Description of Artificial Sequence: Synthetic oligonucleotide
uccccauaauauuccagaa

SEQ ID NO: 345408 - RNA, 19 nt, Artificial Sequence
  Description of Artificial Sequence: Synthetic oligonucleotide
caugaugcaacagcaucac

SEQ ID NO: 345409 - RNA, 19 nt, Artificial Sequence
  Description of Artificial Sequence: Synthetic oligonucleotide
ugcaugcauugauacauua

SEQ ID NO: 345410 - RNA, 19 nt, Artificial Sequence
  Description of Artificial Sequence: Synthetic oligonucleotide
accaagacgaccaauuguu

SEQ ID NO: 345411 - RNA, 19 nt, Artificial Sequence
  Description of Artificial Sequence: Synthetic oligonucleotide
aucucuauacccauuugaa

SEQ ID NO: 345412 - RNA, 19 nt, Artificial Sequence
  Description of Artificial Sequence: Synthetic oligonucleotide
caaacguaaccaagacgac

SEQ ID NO: 345413 - RNA, 19 nt, Artificial Sequence
  Description of Artificial Sequence: Synthetic oligonucleotide
agucaagagccacaaucau

SEQ ID NO: 345414 - RNA, 19 nt, Artificial Sequence
  Description of Artificial Sequence: Synthetic oligonucleotide
cuacuaacguuuuaaugua

SEQ ID NO: 345415 - RNA, 19 nt, Artificial Sequence
  Description of Artificial Sequence: Synthetic oligonucleotide
gagcgaugaaaccguggcc

SEQ ID NO: 345416 - RNA, 19 nt, Artificial Sequence
  Description of Artificial Sequence: Synthetic oligonucleotide
uccugcaugcauugauaca

SEQ ID NO: 345417 - RNA, 19 nt, Artificial Sequence
  Description of Artificial Sequence: Synthetic oligonucleotide
gacgaccaauuguuauugc

SEQ ID NO: 345418 - RNA, 19 nt, Artificial Sequence
  Description of Artificial Sequence: Synthetic oligonucleotide
gaggcucccuuauagucuc

SEQ ID NO: 345419 - RNA, 19 nt, Artificial Sequence
  Description of Artificial Sequence: Synthetic oligonucleotide
uaacguccaagaaccugcu

SEQ ID NO: 345420 - RNA, 19 nt, Artificial Sequence
  Description of Artificial Sequence: Synthetic oligonucleotide
acuaggggaggcaagcuga

SEQ ID NO: 345421 - RNA, 19 nt, Artificial Sequence
  Description of Artificial Sequence: Synthetic oligonucleotide
cucuucuaauguagcgaag

SEQ ID NO: 345422 - RNA, 19 nt, Artificial Sequence
  Description of Artificial Sequence: Synthetic oligonucleotide
guaggguugggauuguacu

SEQ ID NO: 345423 - RNA, 19 nt, Artificial Sequence
  Description of Artificial Sequence: Synthetic oligonucleotide
gucccuauggcaucauaca

SEQ ID NO: 345424 - RNA, 19 nt, Artificial Sequence
  Description of Artificial Sequence: Synthetic oligonucleotide
accuuuaguuugauacccg

SEQ ID NO: 345425 - RNA, 19 nt, Artificial Sequence
  Description of Artificial Sequence: Synthetic oligonucleotide
agcccgcaagguuaaagga

SEQ ID NO: 345426 - RNA, 19 nt, Artificial Sequence
  Description of Artificial Sequence: Synthetic oligonucleotide
uucgggcauuuuauccugc

SEQ ID NO: 345427 - RNA, 19 nt, Artificial Sequence
  Description of Artificial Sequence: Synthetic oligonucleotide
guuauugcuguguucucua

SEQ ID NO: 345428 - RNA, 19 nt, Artificial Sequence
  Description of Artificial Sequence: Synthetic oligonucleotide
uuuauccugcaugcauuga

SEQ ID NO: 345429 - RNA, 19 nt, Artificial Sequence
  Description of Artificial Sequence: Synthetic oligonucleotide
gcaagguuaaaggagugac

SEQ ID NO: 345430 - RNA, 19 nt, Artificial Sequence
  Description of Artificial Sequence: Synthetic oligonucleotide
guccuugagcgaugaaacc

SEQ ID NO: 345431 - RNA, 19 nt, Artificial Sequence
  Description of Artificial Sequence: Synthetic oligonucleotide
auaggaauauaaggcugca

SEQ ID NO: 345432 - RNA, 19 nt, Artificial Sequence
  Description of Artificial Sequence: Synthetic oligonucleotide
aaucugcuagugucccuau

SEQ ID NO: 345433 - RNA, 19 nt, Artificial Sequence
  Description of Artificial Sequence: Synthetic oligonucleotide
auccaguauauaagcgagg

SEQ ID NO: 345434 - RNA, 19 nt, Artificial Sequence
  Description of Artificial Sequence: Synthetic oligonucleotide
ggauguuacuucuggcuac

SEQ ID NO: 345435 - RNA, 19 nt, Artificial Sequence
  Description of Artificial Sequence: Synthetic oligonucleotide
aagcaagcuuuagucagau

SEQ ID NO: 345436 - RNA, 19 nt, Artificial Sequence
  Description of Artificial Sequence: Synthetic oligonucleotide
ucgggcauuuuauccugca

SEQ ID NO: 345437 - RNA, 19 nt, Artificial Sequence
  Description of Artificial Sequence: Synthetic oligonucleotide
caucccuacgcauuguuua

SEQ ID NO: 345438 - RNA, 19 nt, Artificial Sequence
  Description of Artificial Sequence: Synthetic oligonucleotide
accauaggauuuuccuccu

SEQ ID NO: 345439 - RNA, 19 nt, Artificial Sequence
  Description of Artificial Sequence: Synthetic oligonucleotide
caggccacugaguaaguca

SEQ ID NO: 345440 - RNA, 19 nt, Artificial Sequence
  Description of Artificial Sequence: Synthetic oligonucleotide
agcaagcuuuagucagauc

SEQ ID NO: 345441 - RNA, 19 nt, Artificial Sequence
  Description of Artificial Sequence: Synthetic oligonucleotide
ugcuucuacuaggggaggc

SEQ ID NO: 345442 - RNA, 19 nt, Artificial Sequence
  Description of Artificial Sequence: Synthetic oligonucleotide
guucacaauauggaaggaa

SEQ ID NO: 345443 - RNA, 19 nt, Artificial Sequence
  Description of Artificial Sequence: Synthetic oligonucleotide
uuguaacguccaagaaccu

SEQ ID NO: 345444 - RNA, 19 nt, Artificial Sequence
  Description of Artificial Sequence: Synthetic oligonucleotide
ggaccccuaauucugggac

SEQ ID NO: 345445 - RNA, 19 nt, Artificial Sequence
  Description of Artificial Sequence: Synthetic oligonucleotide
uauucccuacugguuuacc

SEQ ID NO: 345446 - RNA, 19 nt, Artificial Sequence
  Description of Artificial Sequence: Synthetic oligonucleotide
gauacgcuucagcccagca

SEQ ID NO: 345447 - RNA, 19 nt, Artificial Sequence
  Description of Artificial Sequence: Synthetic oligonucleotide
caucgacuuaauacaguga

SEQ ID NO: 345448 - RNA, 19 nt, Artificial Sequence
  Description of Artificial Sequence: Synthetic oligonucleotide
acacugaucaugguacaaa

SEQ ID NO: 345449 - RNA, 19 nt, Artificial Sequence
  Description of Artificial Sequence: Synthetic oligonucleotide
ccuuaaauuguaacgucca

SEQ ID NO: 345450 - RNA, 19 nt, Artificial Sequence
  Description of Artificial Sequence: Synthetic oligonucleotide
ggcaacaccucccucccgc

SEQ ID NO: 345451 - RNA, 19 nt, Artificial Sequence
  Description of Artificial Sequence: Synthetic oligonucleotide
ggaccauaggauuuuccuc

SEQ ID NO: 345452 - RNA, 19 nt, Artificial Sequence
  Description of Artificial Sequence: Synthetic oligonucleotide
uuccuccuccuccuccuca

SEQ ID NO: 345453 - RNA, 19 nt, Artificial Sequence
  Description of Artificial Sequence: Synthetic oligonucleotide
gacgcucuuuuaagggaag

SEQ ID NO: 345454 - RNA, 19 nt, Artificial Sequence
  Description of Artificial Sequence: Synthetic oligonucleotide
auguagcgaaggcacugca

SEQ ID NO: 345455 - RNA, 19 nt, Artificial Sequence
  Description of Artificial Sequence: Synthetic oligonucleotide
aucccuacgcauuguuuau

SEQ ID NO: 345456 - RNA, 19 nt, Artificial Sequence
  Description of Artificial Sequence: Synthetic oligonucleotide
accccuaauucugggacug

SEQ ID NO: 345457 - RNA, 19 nt, Artificial Sequence
  Description of Artificial Sequence: Synthetic oligonucleotide
uagcauagcuugugcuaga

SEQ ID NO: 345458 - RNA, 19 nt, Artificial Sequence
  Description of Artificial Sequence: Synthetic oligonucleotide
acgcauuguuuauaugguu

SEQ ID NO: 345459 - RNA, 19 nt, Artificial Sequence
  Description of Artificial Sequence: Synthetic oligonucleotide
auagaacgcacaagagccu

SEQ ID NO: 345460 - RNA, 19 nt, Artificial Sequence
  Description of Artificial Sequence: Synthetic oligonucleotide
uaggaauauaaggcugcau

SEQ ID NO: 345461 - RNA, 19 nt, Artificial Sequence
  Description of Artificial Sequence: Synthetic oligonucleotide
guugggauuguacuguauu

SEQ ID NO: 345462 - RNA, 19 nt, Artificial Sequence
  Description of Artificial Sequence: Synthetic oligonucleotide
caucuagagcagcagcaga

SEQ ID NO: 345463 - RNA, 19 nt, Artificial Sequence
  Description of Artificial Sequence: Synthetic oligonucleotide
guauggaaucaugcccugc

SEQ ID NO: 345464 - RNA, 19 nt, Artificial Sequence
  Description of Artificial Sequence: Synthetic oligonucleotide
gggucuuauaaacugcugu

SEQ ID NO: 345465 - RNA, 19 nt, Artificial Sequence
  Description of Artificial Sequence: Synthetic oligonucleotide
ucgggcagguauggaauca

SEQ ID NO: 345466 - RNA, 19 nt, Artificial Sequence
  Description of Artificial Sequence: Synthetic oligonucleotide
gguauggaaucaugcccug

SEQ ID NO: 345467 - RNA, 19 nt, Artificial Sequence
  Description of Artificial Sequence: Synthetic oligonucleotide
ccaugaugcaacagcauca

SEQ ID NO: 345468 - RNA, 19 nt, Artificial Sequence
  Description of Artificial Sequence: Synthetic oligonucleotide
ggauuuagauuuguuccca

SEQ ID NO: 345469 - RNA, 19 nt, Artificial Sequence
  Description of Artificial Sequence: Synthetic oligonucleotide
agacgcucuuuuaagggaa

SEQ ID NO: 345470 - RNA, 19 nt, Artificial Sequence
  Description of Artificial Sequence: Synthetic oligonucleotide
guaaccaagacgaccaauu

SEQ ID NO: 345471 - RNA, 19 nt, Artificial Sequence
  Description of Artificial Sequence: Synthetic oligonucleotide
gcugauuuuaacuguuagu

SEQ ID NO: 345472 - RNA, 19 nt, Artificial Sequence
  Description of Artificial Sequence: Synthetic oligonucleotide
cagugacggcaacaccucc

SEQ ID NO: 345473 - RNA, 19 nt, Artificial Sequence
  Description of Artificial Sequence: Synthetic oligonucleotide
caccuaguaaggcgaaaga

SEQ ID NO: 345474 - RNA, 19 nt, Artificial Sequence
  Description of Artificial Sequence: Synthetic oligonucleotide
cucuuauguuucucagaga

SEQ ID NO: 345475 - RNA, 19 nt, Artificial Sequence
  Description of Artificial Sequence: Synthetic oligonucleotide
ccagucagaaauuguguca

SEQ ID NO: 345476 - RNA, 19 nt, Artificial Sequence
  Description of Artificial Sequence: Synthetic oligonucleotide
augcaaaacaaggccccgu

SEQ ID NO: 345477 - RNA, 19 nt, Artificial Sequence
  Description of Artificial Sequence: Synthetic oligonucleotide
agggucuuauaaacugcug

SEQ ID NO: 345478 - RNA, 19 nt, Artificial Sequence
  Description of Artificial Sequence: Synthetic oligonucleotide
auauaaggcugcaucucua

SEQ ID NO: 345479 - RNA, 19 nt, Artificial Sequence
  Description of Artificial Sequence: Synthetic oligonucleotide
cuauacccauuugaauuga

SEQ ID NO: 345480 - RNA, 19 nt, Artificial Sequence
  Description of Artificial Sequence: Synthetic oligonucleotide
aguaaagggaagagaucuu

SEQ ID NO: 345481 - RNA, 19 nt, Artificial Sequence
  Description of Artificial Sequence: Synthetic oligonucleotide
cagggucuuauaaacugcu

SEQ ID NO: 345482 - RNA, 19 nt, Artificial Sequence
  Description of Artificial Sequence: Synthetic oligonucleotide
uuuccuccuccuccuccuc

SEQ ID NO: 345483 - RNA, 19 nt, Artificial Sequence
  Description of Artificial Sequence: Synthetic oligonucleotide
cuaauguagcgaaggcacu

SEQ ID NO: 345484 - RNA, 19 nt, Artificial Sequence
  Description of Artificial Sequence: Synthetic oligonucleotide
acgaggguauccaguauau

SEQ ID NO: 345485 - RNA, 19 nt, Artificial Sequence
  Description of Artificial Sequence: Synthetic oligonucleotide
gagcauuguuuagcauagc

SEQ ID NO: 345486 - RNA, 19 nt, Artificial Sequence
  Description of Artificial Sequence: Synthetic oligonucleotide
uccuccuccuccuccucau

SEQ ID NO: 345487 - RNA, 19 nt, Artificial Sequence
  Description of Artificial Sequence: Synthetic oligonucleotide
ggcacucaaguaaagggaa

SEQ ID NO: 345488 - RNA, 19 nt, Artificial Sequence
  Description of Artificial Sequence: Synthetic oligonucleotide
guauucccuacugguuuac

SEQ ID NO: 345489 - RNA, 19 nt, Artificial Sequence
  Description of Artificial Sequence: Synthetic oligonucleotide
gguauuuacugaaggcgaa

SEQ ID NO: 345490 - RNA, 19 nt, Artificial Sequence
  Description of Artificial Sequence: Synthetic oligonucleotide
gugaguagacugaauaguu

SEQ ID NO: 345491 - RNA, 19 nt, Artificial Sequence
  Description of Artificial Sequence: Synthetic oligonucleotide
gcacucaaguaaagggaag

SEQ ID NO: 345492 - RNA, 19 nt, Artificial Sequence
  Description of Artificial Sequence: Synthetic oligonucleotide
acgcucuuuuaagggaaga

SEQ ID NO: 345493 - RNA, 19 nt, Artificial Sequence
  Description of Artificial Sequence: Synthetic oligonucleotide
ggcgaagacgaggguaucc

SEQ ID NO: 345494 - RNA, 19 nt, Artificial Sequence
  Description of Artificial Sequence: Synthetic oligonucleotide
gagaaucgccuccaauuuu

SEQ ID NO: 345495 - RNA, 19 nt, Artificial Sequence
  Description of Artificial Sequence: Synthetic oligonucleotide
ggagugacucguuggcauc

SEQ ID NO: 345496 - RNA, 19 nt, Artificial Sequence
  Description of Artificial Sequence: Synthetic oligonucleotide
gaccccuaauucugggacu

SEQ ID NO: 345497 - RNA, 19 nt, Artificial Sequence
  Description of Artificial Sequence: Synthetic oligonucleotide
cuuguacucucuuguugcu

SEQ ID NO: 345498 - RNA, 19 nt, Artificial Sequence
  Description of Artificial Sequence: Synthetic oligonucleotide
acguaaccaagacgaccaa

SEQ ID NO: 345499 - RNA, 19 nt, Artificial Sequence
  Description of Artificial Sequence: Synthetic oligonucleotide
aucagcuaugcaaggcuua

SEQ ID NO: 345500 - RNA, 19 nt, Artificial Sequence
  Description of Artificial Sequence: Synthetic oligonucleotide
ggcaacggaugagaggcac

SEQ ID NO: 345501 - RNA, 19 nt, Artificial Sequence
  Description of Artificial Sequence: Synthetic oligonucleotide
ccuacgcauuguuuauaug

SEQ ID NO: 345502 - RNA, 19 nt, Artificial Sequence
  Description of Artificial Sequence: Synthetic oligonucleotide
ucccuacgcauuguuuaua

SEQ ID NO: 345503 - RNA, 19 nt, Artificial Sequence
  Description of Artificial Sequence: Synthetic oligonucleotide
acauuaguguuaggauguu

SEQ ID NO: 345504 - RNA, 19 nt, Artificial Sequence
  Description of Artificial Sequence: Synthetic oligonucleotide
acggaaugcugaaucuuuu

SEQ ID NO: 345505 - RNA, 19 nt, Artificial Sequence
  Description of Artificial Sequence: Synthetic oligonucleotide
cguaacgugggaaauuuua

SEQ ID NO: 345506 - RNA, 19 nt, Artificial Sequence
  Description of Artificial Sequence: Synthetic oligonucleotide
gugacggcaacaccucccu

SEQ ID NO: 345507 - RNA, 19 nt, Artificial Sequence
  Description of Artificial Sequence: Synthetic oligonucleotide
cagucagaaauugugucau

SEQ ID NO: 345508 - RNA, 19 nt, Artificial Sequence
  Description of Artificial Sequence: Synthetic oligonucleotide
cacggaaugcugaaucuuu

SEQ ID NO: 345509 - RNA, 19 nt, Artificial Sequence
  Description of Artificial Sequence: Synthetic oligonucleotide
aucaccuaguaaggcgaaa

SEQ ID NO: 345510 - RNA, 19 nt, Artificial Sequence
  Description of Artificial Sequence: Synthetic oligonucleotide
cauuaguguuaggauguua

SEQ ID NO: 345511 - RNA, 19 nt, Artificial Sequence
  Description of Artificial Sequence: Synthetic oligonucleotide
cagcuaugcaaggcuuaac

SEQ ID NO: 345512 - RNA, 19 nt, Artificial Sequence
  Description of Artificial Sequence: Synthetic oligonucleotide
guguaacaccauaggaaua

SEQ ID NO: 345513 - RNA, 19 nt, Artificial Sequence
  Description of Artificial Sequence: Synthetic oligonucleotide
uuacgccacugggauucac

SEQ ID NO: 345514 - RNA, 19 nt, Artificial Sequence
  Description of Artificial Sequence: Synthetic oligonucleotide
gcuucuacuaggggaggca

SEQ ID NO: 345515 - RNA, 19 nt, Artificial Sequence
  Description of Artificial Sequence: Synthetic oligonucleotide
auuacgccacugggauuca

SEQ ID NO: 345516 - RNA, 19 nt, Artificial Sequence
  Description of Artificial Sequence: Synthetic oligonucleotide
agaacgcacaagagccuuu

SEQ ID NO: 345517 - RNA, 19 nt, Artificial Sequence
  Description of Artificial Sequence: Synthetic oligonucleotide
ccaauuguuauugcugugu

SEQ ID NO: 345518 - RNA, 19 nt, Artificial Sequence
  Description of Artificial Sequence: Synthetic oligonucleotide
ugccgaacuucgggcauuu

SEQ ID NO: 345519 - RNA, 19 nt, Artificial Sequence
  Description of Artificial Sequence: Synthetic oligonucleotide
gaacgcacaagagccuuuu

SEQ ID NO: 345520 - RNA, 19 nt, Artificial Sequence
  Description of Artificial Sequence: Synthetic oligonucleotide
ccuugagcgaugaaaccgu

SEQ ID NO: 345521 - RNA, 19 nt, Artificial Sequence
  Description of Artificial Sequence: Synthetic oligonucleotide
ggccccguaacgugggaaa

SEQ ID NO: 345522 - RNA, 19 nt, Artificial Sequence
  Description of Artificial Sequence: Synthetic oligonucleotide
cccgcaagguuaaaggagu

SEQ ID NO: 345523 - RNA, 19 nt, Artificial Sequence
  Description of Artificial Sequence: Synthetic oligonucleotide
gguuuacacaacgcugaua

SEQ ID NO: 345524 - RNA, 19 nt, Artificial Sequence
  Description of Artificial Sequence: Synthetic oligonucleotide
gcaaggcuguggcaacgga

SEQ ID NO: 345525 - RNA, 19 nt, Artificial Sequence
  Description of Artificial Sequence: Synthetic oligonucleotide
caagacugauggaccccua

SEQ ID NO: 345526 - RNA, 19 nt, Artificial Sequence
  Description of Artificial Sequence: Synthetic oligonucleotide
agugucccuauggcaucau

SEQ ID NO: 345527 - RNA, 19 nt, Artificial Sequence
  Description of Artificial Sequence: Synthetic oligonucleotide
aggccccguaacgugggaa

SEQ ID NO: 345528 - RNA, 19 nt, Artificial Sequence
  Description of Artificial Sequence: Synthetic oligonucleotide
cucaucccuacgcauuguu

SEQ ID NO: 345529 - RNA, 19 nt, Artificial Sequence
  Description of Artificial Sequence: Synthetic oligonucleotide
cuacuaggggaggcaagcu

SEQ ID NO: 345530 - RNA, 19 nt, Artificial Sequence
  Description of Artificial Sequence: Synthetic oligonucleotide
ccaagacgaccaauuguua

SEQ ID NO: 345531 - RNA, 19 nt, Artificial Sequence
  Description of Artificial Sequence: Synthetic oligonucleotide
cccuaauucugggacugca

SEQ ID NO: 345532 - RNA, 19 nt, Artificial Sequence
  Description of Artificial Sequence: Synthetic oligonucleotide
cacaaaggcuccagauguu

SEQ ID NO: 345533 - RNA, 19 nt, Artificial Sequence
  Description of Artificial Sequence: Synthetic oligonucleotide
gggguaccuuaaauuguaa

SEQ ID NO: 345534 - RNA, 19 nt, Artificial Sequence
  Description of Artificial Sequence: Synthetic oligonucleotide
cccuguaaaggguaacauu

SEQ ID NO: 345535 - RNA, 19 nt, Artificial Sequence
  Description of Artificial Sequence: Synthetic oligonucleotide
ccccuaauucugggacugc

SEQ ID NO: 345536 - RNA, 19 nt, Artificial Sequence
  Description of Artificial Sequence: Synthetic oligonucleotide
ccaagacugauggaccccu

SEQ ID NO: 345537 - RNA, 19 nt, Artificial Sequence
  Description of Artificial Sequence: Synthetic oligonucleotide
auguuaccucccagcccuu

SEQ ID NO: 345538 - RNA, 19 nt, Artificial Sequence
  Description of Artificial Sequence: Synthetic oligonucleotide
caguaggguugggauugua

SEQ ID NO: 345539 - RNA, 19 nt, Artificial Sequence
  Description of Artificial Sequence: Synthetic oligonucleotide
gcaacggaugagaggcacu

SEQ ID NO: 345540 - RNA, 19 nt, Artificial Sequence
  Description of Artificial Sequence: Synthetic oligonucleotide
gcgaugaaaccguggccuu

SEQ ID NO: 345541 - RNA, 19 nt, Artificial Sequence
  Description of Artificial Sequence: Synthetic oligonucleotide
cccguaacgugggaaauuu

SEQ ID NO: 345542 - RNA, 19 nt, Artificial Sequence
  Description of Artificial Sequence: Synthetic oligonucleotide
cguaaccaagacgaccaau

SEQ ID NO: 345543 - RNA, 19 nt, Artificial Sequence
  Description of Artificial Sequence: Synthetic oligonucleotide
gcccagcccgcaagguuaa

SEQ ID NO: 345544 - RNA, 19 nt, Artificial Sequence
  Description of Artificial Sequence: Synthetic oligonucleotide
gccccguaacgugggaaau

SEQ ID NO: 345545 - RNA, 19 nt, Artificial Sequence
  Description of Artificial Sequence: Synthetic oligonucleotide
ccguaacgugggaaauuuu

SEQ ID NO: 345546 - RNA, 19 nt, Artificial Sequence
  Description of Artificial Sequence: Synthetic oligonucleotide
cgggcauuuuauccugcau

SEQ ID NO: 345547 - RNA, 19 nt, Artificial Sequence
  Description of Artificial Sequence: Synthetic oligonucleotide
ccccguaacgugggaaauu

SEQ ID NO: 345548 - RNA, 19 nt, Artificial Sequence
  Description of Artificial Sequence: Synthetic oligonucleotide
aaagauuguaguuuucacc

SEQ ID NO: 345549 - RNA, 19 nt, Artificial Sequence
  Description of Artificial Sequence: Synthetic oligonucleotide
gauguuauuacauuaccag

SEQ ID NO: 345550 - RNA, 19 nt, Artificial Sequence
  Description of Artificial Sequence: Synthetic oligonucleotide
ugaaguaugacacaacgga

SEQ ID NO: 345551 - RNA, 19 nt, Artificial Sequence
  Description of Artificial Sequence: Synthetic oligonucleotide
uguaagauagccucgagca

SEQ ID NO: 345552 - RNA, 19 nt, Artificial Sequence
  Description of Artificial Sequence: Synthetic oligonucleotide
gagaaagacacauaacggg

SEQ ID NO: 345553 - RNA, 19 nt, Artificial Sequence
  Description of Artificial Sequence: Synthetic oligonucleotide
gauaccugaguucaaaucc

SEQ ID NO: 345554 - RNA, 19 nt, Artificial Sequence
  Description of Artificial Sequence: Synthetic oligonucleotide
uacgcaucaacucaggacc

SEQ ID NO: 345555 - RNA, 19 nt, Artificial Sequence
  Description of Artificial Sequence: Synthetic oligonucleotide
gaugccuaggaaucgaugg

SEQ ID NO: 345556 - RNA, 19 nt, Artificial Sequence
  Description of Artificial Sequence: Synthetic oligonucleotide
uuuagauucacgcgcgagg

SEQ ID NO: 345557 - RNA, 19 nt, Artificial Sequence
  Description of Artificial Sequence: Synthetic oligonucleotide
caaacuacauacuugcccc

SEQ ID NO: 345558 - RNA, 19 nt, Artificial Sequence
  Description of Artificial Sequence: Synthetic oligonucleotide
aaguaagaggguuggcagc

SEQ ID NO: 345559 - RNA, 19 nt, Artificial Sequence
  Description of Artificial Sequence: Synthetic oligonucleotide
aauuucagaccugggauac

SEQ ID NO: 345560 - RNA, 19 nt, Artificial Sequence
  Description of Artificial Sequence: Synthetic oligonucleotide
aacugaaugcacucccggc

SEQ ID NO: 345561 - RNA, 19 nt, Artificial Sequence
  Description of Artificial Sequence: Synthetic oligonucleotide
aucaccuaauucuagauga

SEQ ID NO: 345562 - RNA, 19 nt, Artificial Sequence
  Description of Artificial Sequence: Synthetic oligonucleotide
ucucagaguuaccacaagg

SEQ ID NO: 345563 - RNA, 19 nt, Artificial Sequence
  Description of Artificial Sequence: Synthetic oligonucleotide
agaaagacacauaacgggc

SEQ ID NO: 345564 - RNA, 19 nt, Artificial Sequence
  Description of Artificial Sequence: Synthetic oligonucleotide
ucgauggaagcccugaugc

SEQ ID NO: 345565 - RNA, 19 nt, Artificial Sequence
  Description of Artificial Sequence: Synthetic oligonucleotide
cuucuuuagauucacgcgc

SEQ ID NO: 345566 - RNA, 19 nt, Artificial Sequence
  Description of Artificial Sequence: Synthetic oligonucleotide
agaucugcaaggcaggguc

SEQ ID NO: 345567 - RNA, 19 nt, Artificial Sequence
  Description of Artificial Sequence: Synthetic oligonucleotide
aaguaugacacaacggagg

SEQ ID NO: 345568 - RNA, 19 nt, Artificial Sequence
  Description of Artificial Sequence: Synthetic oligonucleotide
aucccuguaagauagccuc

SEQ ID NO: 345569 - RNA, 19 nt, Artificial Sequence
  Description of Artificial Sequence: Synthetic oligonucleotide
auagaguuaggguuccugg

SEQ ID NO: 345570 - RNA, 19 nt, Artificial Sequence
  Description of Artificial Sequence: Synthetic oligonucleotide
uuagauucugacagggacc

SEQ ID NO: 345571 - RNA, 19 nt, Artificial Sequence
  Description of Artificial Sequence: Synthetic oligonucleotide
ucugauugcugugagaagc

SEQ ID NO: 345572 - RNA, 19 nt, Artificial Sequence
  Description of Artificial Sequence: Synthetic oligonucleotide
ucgagagaaagacacauaa

SEQ ID NO: 345573 - RNA, 19 nt, Artificial Sequence
  Description of Artificial Sequence: Synthetic oligonucleotide
uucuuuagauucacgcgcg

SEQ ID NO: 345574 - RNA, 19 nt, Artificial Sequence
  Description of Artificial Sequence: Synthetic oligonucleotide
uuuuaucaccuaauucuag

SEQ ID NO: 345575 - RNA, 19 nt, Artificial Sequence
  Description of Artificial Sequence: Synthetic oligonucleotide
uuaccagauacaaacuaca

SEQ ID NO: 345576 - RNA, 19 nt, Artificial Sequence
  Description of Artificial Sequence: Synthetic oligonucleotide
aagacagacuuccgugggc

SEQ ID NO: 345577 - RNA, 19 nt, Artificial Sequence
  Description of Artificial Sequence: Synthetic oligonucleotide
caggguacaugccugaucg

SEQ ID NO: 345578 - RNA, 19 nt, Artificial Sequence
  Description of Artificial Sequence: Synthetic oligonucleotide
guuagauucugacagggac

SEQ ID NO: 345579 - RNA, 19 nt, Artificial Sequence
  Description of Artificial Sequence: Synthetic oligonucleotide
ugaauuagcacaccugcaa

SEQ ID NO: 345580 - RNA, 19 nt, Artificial Sequence
  Description of Artificial Sequence: Synthetic oligonucleotide
auuaccagauacaaacuac

SEQ ID NO: 345581 - RNA, 19 nt, Artificial Sequence
  Description of Artificial Sequence: Synthetic oligonucleotide
agagcuggccaacucaugg

SEQ ID NO: 345582 - RNA, 19 nt, Artificial Sequence
  Description of Artificial Sequence: Synthetic oligonucleotide
ucggacaccaccuucaaaa

SEQ ID NO: 345583 - RNA, 19 nt, Artificial Sequence
  Description of Artificial Sequence: Synthetic oligonucleotide
uccauaguuuccaaaagau

SEQ ID NO: 345584 - RNA, 19 nt, Artificial Sequence
  Description of Artificial Sequence: Synthetic oligonucleotide
gauacagauggccuccucc

SEQ ID NO: 345585 - RNA, 19 nt, Artificial Sequence
  Description of Artificial Sequence: Synthetic oligonucleotide
gcagguuagauucugacag

SEQ ID NO: 345586 - RNA, 19 nt, Artificial Sequence
  Description of Artificial Sequence: Synthetic oligonucleotide
accuaggucacccacagcu

SEQ ID NO: 345587 - RNA, 19 nt, Artificial Sequence
  Description of Artificial Sequence: Synthetic oligonucleotide
uaucaccuaauucuagaug

SEQ ID NO: 345588 - RNA, 19 nt, Artificial Sequence
  Description of Artificial Sequence: Synthetic oligonucleotide
ucauccauaguuuccaaaa

SEQ ID NO: 345589 - RNA, 19 nt, Artificial Sequence
  Description of Artificial Sequence: Synthetic oligonucleotide
aagaauggucggcucuggc

SEQ ID NO: 345590 - RNA, 19 nt, Artificial Sequence
  Description of Artificial Sequence: Synthetic oligonucleotide
acuagaugaauuagcacac

SEQ ID NO: 345591 - RNA, 19 nt, Artificial Sequence
  Description of Artificial Sequence: Synthetic oligonucleotide
ucagaguuaccacaaggac

SEQ ID NO: 345592 - RNA, 19 nt, Artificial Sequence
  Description of Artificial Sequence: Synthetic oligonucleotide
gacagcgucgcucucaggc

SEQ ID NO: 345593 - RNA, 19 nt, Artificial Sequence
  Description of Artificial Sequence: Synthetic oligonucleotide
agaauggucggcucuggcg

SEQ ID NO: 345594 - RNA, 19 nt, Artificial Sequence
  Description of Artificial Sequence: Synthetic oligonucleotide
uaagauagccucgagcagc

SEQ ID NO: 345595 - RNA, 19 nt, Artificial Sequence
  Description of Artificial Sequence: Synthetic oligonucleotide
acaagucauagaguaaugg

SEQ ID NO: 345596 - RNA, 19 nt, Artificial Sequence
  Description of Artificial Sequence: Synthetic oligonucleotide
uaugggaugccuaggaauc

SEQ ID NO: 345597 - RNA, 19 nt, Artificial Sequence
  Description of Artificial Sequence: Synthetic oligonucleotide
cuugggaucuagcagggcc

SEQ ID NO: 345598 - RNA, 19 nt, Artificial Sequence
  Description of Artificial Sequence: Synthetic oligonucleotide
ucaaauccuagcucaagcu

SEQ ID NO: 345599 - RNA, 19 nt, Artificial Sequence
  Description of Artificial Sequence: Synthetic oligonucleotide
gaauggucggcucuggcgc

SEQ ID NO: 345600 - RNA, 19 nt, Artificial Sequence
  Description of Artificial Sequence: Synthetic oligonucleotide
acuacauacuugccccugc

SEQ ID NO: 345601 - RNA, 19 nt, Artificial Sequence
  Description of Artificial Sequence: Synthetic oligonucleotide
uguuccagaggcuuuguac

SEQ ID NO: 345602 - RNA, 19 nt, Artificial Sequence
  Description of Artificial Sequence: Synthetic oligonucleotide
ggaagcguaguauaggaag

SEQ ID NO: 345603 - RNA, 19 nt, Artificial Sequence
  Description of Artificial Sequence: Synthetic oligonucleotide
uagaaaucugugaaccgca

SEQ ID NO: 345604 - RNA, 19 nt, Artificial Sequence
  Description of Artificial Sequence: Synthetic oligonucleotide
uuccuuaacucuaucugga

SEQ ID NO: 345605 - RNA, 19 nt, Artificial Sequence
  Description of Artificial Sequence: Synthetic oligonucleotide
ucaucaaggccccuauagc

SEQ ID NO: 345606 - RNA, 19 nt, Artificial Sequence
  Description of Artificial Sequence: Synthetic oligonucleotide
aguaugacacaacggagga

SEQ ID NO: 345607 - RNA, 19 nt, Artificial Sequence
  Description of Artificial Sequence: Synthetic oligonucleotide
aaagaccccauggaccucg

SEQ ID NO: 345608 - RNA, 19 nt, Artificial Sequence
  Description of Artificial Sequence: Synthetic oligonucleotide
gaaguaugacacaacggag

SEQ ID NO: 345609 - RNA, 19 nt, Artificial Sequence
  Description of Artificial Sequence: Synthetic oligonucleotide
cugauguuauuacauuacc

SEQ ID NO: 345610 - RNA, 19 nt, Artificial Sequence
  Description of Artificial Sequence: Synthetic oligonucleotide
accucgucuggauagggcg

SEQ ID NO: 345611 - RNA, 19 nt, Artificial Sequence
  Description of Artificial Sequence: Synthetic oligonucleotide
aguggugucacugugggca

SEQ ID NO: 345612 - RNA, 19 nt, Artificial Sequence
  Description of Artificial Sequence: Synthetic oligonucleotide
uuagcacaccugcaaaucu

SEQ ID NO: 345613 - RNA, 19 nt, Artificial Sequence
  Description of Artificial Sequence: Synthetic oligonucleotide
acgcgcgaggaucugaccc

SEQ ID NO: 345614 - RNA, 19 nt, Artificial Sequence
  Description of Artificial Sequence: Synthetic oligonucleotide
uguauuucccaucccgcac

SEQ ID NO: 345615 - RNA, 19 nt, Artificial Sequence
  Description of Artificial Sequence: Synthetic oligonucleotide
guauaggaagaauggucgg

SEQ ID NO: 345616 - RNA, 19 nt, Artificial Sequence
  Description of Artificial Sequence: Synthetic oligonucleotide
ucuaucuggaaugaacagu

SEQ ID NO: 345617 - RNA, 19 nt, Artificial Sequence
  Description of Artificial Sequence: Synthetic oligonucleotide
uuagccaacugauccaggu

SEQ ID NO: 345618 - RNA, 19 nt, Artificial Sequence
  Description of Artificial Sequence: Synthetic oligonucleotide
agccaugaggucucgagag

SEQ ID NO: 345619 - RNA, 19 nt, Artificial Sequence
  Description of Artificial Sequence: Synthetic oligonucleotide
uauaggaagaauggucggc

SEQ ID NO: 345620 - RNA, 19 nt, Artificial Sequence
  Description of Artificial Sequence: Synthetic oligonucleotide
accuaauucuagaugacag

SEQ ID NO: 345621 - RNA, 19 nt, Artificial Sequence
  Description of Artificial Sequence: Synthetic oligonucleotide
ugagcuuuguauuucccau

SEQ ID NO: 345622 - RNA, 19 nt, Artificial Sequence
  Description of Artificial Sequence: Synthetic oligonucleotide
cauaacgggccucuagucc

SEQ ID NO: 345623 - RNA, 19 nt, Artificial Sequence
  Description of Artificial Sequence: Synthetic oligonucleotide
uuagauucacgcgcgagga

SEQ ID NO: 345624 - RNA, 19 nt, Artificial Sequence
  Description of Artificial Sequence: Synthetic oligonucleotide
auaacgggccucuagucca

SEQ ID NO: 345625 - RNA, 19 nt, Artificial Sequence
  Description of Artificial Sequence: Synthetic oligonucleotide
agccuaaggugcuucagag

SEQ ID NO: 345626 - RNA, 19 nt, Artificial Sequence
  Description of Artificial Sequence: Synthetic oligonucleotide
uaggaaucgauggaagccc

SEQ ID NO: 345627 - RNA, 19 nt, Artificial Sequence
  Description of Artificial Sequence: Synthetic oligonucleotide
ugggaagcguaguauagga

SEQ ID NO: 345628 - RNA, 19 nt, Artificial Sequence
  Description of Artificial Sequence: Synthetic oligonucleotide
cuguaagauagccucgagc

SEQ ID NO: 345629 - RNA, 19 nt, Artificial Sequence
  Description of Artificial Sequence: Synthetic oligonucleotide
aaauccuagcucaagcuau

SEQ ID NO: 345630 - RNA, 19 nt, Artificial Sequence
  Description of Artificial Sequence: Synthetic oligonucleotide
ugaacugaggguagugggu

SEQ ID NO: 345631 - RNA, 19 nt, Artificial Sequence
  Description of Artificial Sequence: Synthetic oligonucleotide
agguuagauucugacaggg

SEQ ID NO: 345632 - RNA, 19 nt, Artificial Sequence
  Description of Artificial Sequence: Synthetic oligonucleotide
uccaugagauuuccccagg

SEQ ID NO: 345633 - RNA, 19 nt, Artificial Sequence
  Description of Artificial Sequence: Synthetic oligonucleotide
cguaguauaggaagaaugg

SEQ ID NO: 345634 - RNA, 19 nt, Artificial Sequence
  Description of Artificial Sequence: Synthetic oligonucleotide
uucuuguaaggaccaaggu

SEQ ID NO: 345635 - RNA, 19 nt, Artificial Sequence
  Description of Artificial Sequence: Synthetic oligonucleotide
ugagauuuccccaggccuc

SEQ ID NO: 345636 - RNA, 19 nt, Artificial Sequence
  Description of Artificial Sequence: Synthetic oligonucleotide
agauucacgcgcgaggauc

SEQ ID NO: 345637 - RNA, 19 nt, Artificial Sequence
  Description of Artificial Sequence: Synthetic oligonucleotide
gacauacgcaucaacucag

SEQ ID NO: 345638 - RNA, 19 nt, Artificial Sequence
  Description of Artificial Sequence: Synthetic oligonucleotide
aagaugccacuugccagcc

SEQ ID NO: 345639 - RNA, 19 nt, Artificial Sequence
  Description of Artificial Sequence: Synthetic oligonucleotide
gaugaccagugucucuccg

SEQ ID NO: 345640 - RNA, 19 nt, Artificial Sequence
  Description of Artificial Sequence: Synthetic oligonucleotide
cucuaucuggaaugaacag

SEQ ID NO: 345641 - RNA, 19 nt, Artificial Sequence
  Description of Artificial Sequence: Synthetic oligonucleotide
agaccuaggucacccacag

SEQ ID NO: 345642 - RNA, 19 nt, Artificial Sequence
  Description of Artificial Sequence: Synthetic oligonucleotide
augagcuuuguauuuccca

SEQ ID NO: 345643 - RNA, 19 nt, Artificial Sequence
  Description of Artificial Sequence: Synthetic oligonucleotide
agaguuaccacaaggacua

SEQ ID NO: 345644 - RNA, 19 nt, Artificial Sequence
  Description of Artificial Sequence: Synthetic oligonucleotide
cucagaguuaccacaagga

SEQ ID NO: 345645 - RNA, 19 nt, Artificial Sequence
  Description of Artificial Sequence: Synthetic oligonucleotide
aaacuacauacuugccccu

SEQ ID NO: 345646 - RNA, 19 nt, Artificial Sequence
  Description of Artificial Sequence: Synthetic oligonucleotide
agacaagucauagaguaau

SEQ ID NO: 345647 - RNA, 19 nt, Artificial Sequence
  Description of Artificial Sequence: Synthetic oligonucleotide
uuaccacaaggacuagaug

SEQ ID NO: 345648 - RNA, 19 nt, Artificial Sequence
  Description of Artificial Sequence: Synthetic oligonucleotide
caacugaaugcacucccgg

SEQ ID NO: 345649 - RNA, 19 nt, Artificial Sequence
  Description of Artificial Sequence: Synthetic oligonucleotide
gacgucacuucucauugac

SEQ ID NO: 345650 - RNA, 19 nt, Artificial Sequence
  Description of Artificial Sequence: Synthetic oligonucleotide
ucucgagagaaagacacau

SEQ ID NO: 345651 - RNA, 19 nt, Artificial Sequence
  Description of Artificial Sequence: Synthetic oligonucleotide
ugugagaagcuuucuccac

SEQ ID NO: 345652 - RNA, 19 nt, Artificial Sequence
  Description of Artificial Sequence: Synthetic oligonucleotide
ucccuguaagauagccucg

SEQ ID NO: 345653 - RNA, 19 nt, Artificial Sequence
  Description of Artificial Sequence: Synthetic oligonucleotide
uuucagaccugggauaccu

SEQ ID NO: 345654 - RNA, 19 nt, Artificial Sequence
  Description of Artificial Sequence: Synthetic oligonucleotide
aacagguccaugagauuuc

SEQ ID NO: 345655 - RNA, 19 nt, Artificial Sequence
  Description of Artificial Sequence: Synthetic oligonucleotide
agcagguuagauucugaca

SEQ ID NO: 345656 - RNA, 19 nt, Artificial Sequence
  Description of Artificial Sequence: Synthetic oligonucleotide
uauuucccaucccgcacag

SEQ ID NO: 345657 - RNA, 19 nt, Artificial Sequence
  Description of Artificial Sequence: Synthetic oligonucleotide
guaagauagccucgagcag

SEQ ID NO: 345658 - RNA, 19 nt, Artificial Sequence
  Description of Artificial Sequence: Synthetic oligonucleotide
acacauaacgggccucuag

SEQ ID NO: 345659 - RNA, 19 nt, Artificial Sequence
  Description of Artificial Sequence: Synthetic oligonucleotide
agcauagaguuaggguucc

SEQ ID NO: 345660 - RNA, 19 nt, Artificial Sequence
  Description of Artificial Sequence: Synthetic oligonucleotide
acucuaucuggaaugaaca

SEQ ID NO: 345661 - RNA, 19 nt, Artificial Sequence
  Description of Artificial Sequence: Synthetic oligonucleotide
ucuaguccagguagccaag

SEQ ID NO: 345662 - RNA, 19 nt, Artificial Sequence
  Description of Artificial Sequence: Synthetic oligonucleotide
ugguagcacaggagaauag

SEQ ID NO: 345663 - RNA, 19 nt, Artificial Sequence
  Description of Artificial Sequence: Synthetic oligonucleotide
uaccagauacaaacuacau

SEQ ID NO: 345664 - RNA, 19 nt, Artificial Sequence
  Description of Artificial Sequence: Synthetic oligonucleotide
cugguaaggugacauuggc

SEQ ID NO: 345665 - RNA, 19 nt, Artificial Sequence
  Description of Artificial Sequence: Synthetic oligonucleotide
ggcgguucaaaacugagga

SEQ ID NO: 345666 - RNA, 19 nt, Artificial Sequence
  Description of Artificial Sequence: Synthetic oligonucleotide
uguaccuuuagggucuccu

SEQ ID NO: 345667 - RNA, 19 nt, Artificial Sequence
  Description of Artificial Sequence: Synthetic oligonucleotide
aggagaauaggcacugauc

SEQ ID NO: 345668 - RNA, 19 nt, Artificial Sequence
  Description of Artificial Sequence: Synthetic oligonucleotide
ucguguuccuucuugggau

SEQ ID NO: 345669 - RNA, 19 nt, Artificial Sequence
  Description of Artificial Sequence: Synthetic oligonucleotide
gguaaggugacauuggccu

SEQ ID NO: 345670 - RNA, 19 nt, Artificial Sequence
  Description of Artificial Sequence: Synthetic oligonucleotide
auaggaagaauggucggcu

SEQ ID NO: 345671 - RNA, 19 nt, Artificial Sequence
  Description of Artificial Sequence: Synthetic oligonucleotide
ggggagaucucauccauag

SEQ ID NO: 345672 - RNA, 19 nt, Artificial Sequence
  Description of Artificial Sequence: Synthetic oligonucleotide
ucaccuaauucuagaugac

SEQ ID NO: 345673 - RNA, 19 nt, Artificial Sequence
  Description of Artificial Sequence: Synthetic oligonucleotide
gccaccauuggacauacgc

SEQ ID NO: 345674 - RNA, 19 nt, Artificial Sequence
  Description of Artificial Sequence: Synthetic oligonucleotide
uuguaaggaccaagguggc

SEQ ID NO: 345675 - RNA, 19 nt, Artificial Sequence
  Description of Artificial Sequence: Synthetic oligonucleotide
agaacucgggagguggugg

SEQ ID NO: 345676 - RNA, 19 nt, Artificial Sequence
  Description of Artificial Sequence: Synthetic oligonucleotide
aguaagaggguuggcagca

SEQ ID NO: 345677 - RNA, 19 nt, Artificial Sequence
  Description of Artificial Sequence: Synthetic oligonucleotide
acucagcauagaguuaggg

SEQ ID NO: 345678 - RNA, 19 nt, Artificial Sequence
  Description of Artificial Sequence: Synthetic oligonucleotide
aggaagaauggucggcucu

SEQ ID NO: 345679 - RNA, 19 nt, Artificial Sequence
  Description of Artificial Sequence: Synthetic oligonucleotide
gaguaugggaugccuagga

SEQ ID NO: 345680 - RNA, 19 nt, Artificial Sequence
  Description of Artificial Sequence: Synthetic oligonucleotide
ugcagugaagaugaccagu

SEQ ID NO: 345681 - RNA, 19 nt, Artificial Sequence
  Description of Artificial Sequence: Synthetic oligonucleotide
gacccuguucacccagugg

SEQ ID NO: 345682 - RNA, 19 nt, Artificial Sequence
  Description of Artificial Sequence: Synthetic oligonucleotide
gaagcguaguauaggaaga

SEQ ID NO: 345683 - RNA, 19 nt, Artificial Sequence
  Description of Artificial Sequence: Synthetic oligonucleotide
cuuuagauucacgcgcgag

SEQ ID NO: 345684 - RNA, 19 nt, Artificial Sequence
  Description of Artificial Sequence: Synthetic oligonucleotide
ucuuuagauucacgcgcga

SEQ ID NO: 345685 - RNA, 19 nt, Artificial Sequence
  Description of Artificial Sequence: Synthetic oligonucleotide
cagcauagaguuaggguuc

SEQ ID NO: 345686 - RNA, 19 nt, Artificial Sequence
  Description of Artificial Sequence: Synthetic oligonucleotide
ugacacaacggaggaaaug

SEQ ID NO: 345687 - RNA, 19 nt, Artificial Sequence
  Description of Artificial Sequence: Synthetic oligonucleotide
gacgagggcgguucaaaac

SEQ ID NO: 345688 - RNA, 19 nt, Artificial Sequence
  Description of Artificial Sequence: Synthetic oligonucleotide
gagaauaggcacugaucuc

SEQ ID NO: 345689 - RNA, 19 nt, Artificial Sequence
  Description of Artificial Sequence: Synthetic oligonucleotide
aaucgauggaagcccugau

SEQ ID NO: 345690 - RNA, 19 nt, Artificial Sequence
  Description of Artificial Sequence: Synthetic oligonucleotide
agcgauguguccauggaca

SEQ ID NO: 345691 - RNA, 19 nt, Artificial Sequence
  Description of Artificial Sequence: Synthetic oligonucleotide
aucccgcacagcaaagacc

SEQ ID NO: 345692 - RNA, 19 nt, Artificial Sequence
  Description of Artificial Sequence: Synthetic oligonucleotide
ggcggguagaagaagacag

SEQ ID NO: 345693 - RNA, 19 nt, Artificial Sequence
  Description of Artificial Sequence: Synthetic oligonucleotide
uggugagccaucacacacu

SEQ ID NO: 345694 - RNA, 19 nt, Artificial Sequence
  Description of Artificial Sequence: Synthetic oligonucleotide
cauagaguuaggguuccug

SEQ ID NO: 345695 - RNA, 19 nt, Artificial Sequence
  Description of Artificial Sequence: Synthetic oligonucleotide
augagaaguaagaggguug

SEQ ID NO: 345696 - RNA, 19 nt, Artificial Sequence
  Description of Artificial Sequence: Synthetic oligonucleotide
gacgccaugggacgagggc

SEQ ID NO: 345697 - RNA, 19 nt, Artificial Sequence
  Description of Artificial Sequence: Synthetic oligonucleotide
gacaagucauagaguaaug

SEQ ID NO: 345698 - RNA, 19 nt, Artificial Sequence
  Description of Artificial Sequence: Synthetic oligonucleotide
gugaauggagaaucuuuca

SEQ ID NO: 345699 - RNA, 19 nt, Artificial Sequence
  Description of Artificial Sequence: Synthetic oligonucleotide
aauggucggcucuggcgcu

SEQ ID NO: 345700 - RNA, 19 nt, Artificial Sequence
  Description of Artificial Sequence: Synthetic oligonucleotide
cugaaguggugucacugug

SEQ ID NO: 345701 - RNA, 19 nt, Artificial Sequence
  Description of Artificial Sequence: Synthetic oligonucleotide
gggaguaugggaugccuag

SEQ ID NO: 345702 - RNA, 19 nt, Artificial Sequence
  Description of Artificial Sequence: Synthetic oligonucleotide
auuucagaccugggauacc

SEQ ID NO: 345703 - RNA, 19 nt, Artificial Sequence
  Description of Artificial Sequence: Synthetic oligonucleotide
guauuucccaucccgcaca

SEQ ID NO: 345704 - RNA, 19 nt, Artificial Sequence
  Description of Artificial Sequence: Synthetic oligonucleotide
ggcaacugaaugcacuccc

SEQ ID NO: 345705 - RNA, 19 nt, Artificial Sequence
  Description of Artificial Sequence: Synthetic oligonucleotide
agauacagauggccuccuc

SEQ ID NO: 345706 - RNA, 19 nt, Artificial Sequence
  Description of Artificial Sequence: Synthetic oligonucleotide
ggacauacgcaucaacuca

SEQ ID NO: 345707 - RNA, 19 nt, Artificial Sequence
  Description of Artificial Sequence: Synthetic oligonucleotide
agagccuuggguaaagaaa

SEQ ID NO: 345708 - RNA, 19 nt, Artificial Sequence
  Description of Artificial Sequence: Synthetic oligonucleotide
gugggaagcguaguauagg

SEQ ID NO: 345709 - RNA, 19 nt, Artificial Sequence
  Description of Artificial Sequence: Synthetic oligonucleotide
aguaugggaugccuaggaa

SEQ ID NO: 345710 - RNA, 19 nt, Artificial Sequence
  Description of Artificial Sequence: Synthetic oligonucleotide
aaaucucagcugauguuau

SEQ ID NO: 345711 - RNA, 19 nt, Artificial Sequence
  Description of Artificial Sequence: Synthetic oligonucleotide
gcacauagaaaucugugaa

SEQ ID NO: 345712 - RNA, 19 nt, Artificial Sequence
  Description of Artificial Sequence: Synthetic oligonucleotide
acgccaugggacgagggcg

SEQ ID NO: 345713 - RNA, 19 nt, Artificial Sequence
  Description of Artificial Sequence: Synthetic oligonucleotide
auagccucgagcagccagg

SEQ ID NO: 345714 - RNA, 19 nt, Artificial Sequence
  Description of Artificial Sequence: Synthetic oligonucleotide
ucgaacugggagccggcca

SEQ ID NO: 345715 - RNA, 19 nt, Artificial Sequence
  Description of Artificial Sequence: Synthetic oligonucleotide
gugcccgacagagauacag

SEQ ID NO: 345716 - RNA, 19 nt, Artificial Sequence
  Description of Artificial Sequence: Synthetic oligonucleotide
cagaguucccaaaggacca

SEQ ID NO: 345717 - RNA, 19 nt, Artificial Sequence
  Description of Artificial Sequence: Synthetic oligonucleotide
uccuuaacucuaucuggaa

SEQ ID NO: 345718 - RNA, 19 nt, Artificial Sequence
  Description of Artificial Sequence: Synthetic oligonucleotide
ucagaacucgggagguggu

SEQ ID NO: 345719 - RNA, 19 nt, Artificial Sequence
  Description of Artificial Sequence: Synthetic oligonucleotide
auucuagaugacagauuuc

SEQ ID NO: 345720 - RNA, 19 nt, Artificial Sequence
  Description of Artificial Sequence: Synthetic oligonucleotide
cucuaguccagguagccaa

SEQ ID NO: 345721 - RNA, 19 nt, Artificial Sequence
  Description of Artificial Sequence: Synthetic oligonucleotide
aagcguaguauaggaagaa

SEQ ID NO: 345722 - RNA, 19 nt, Artificial Sequence
  Description of Artificial Sequence: Synthetic oligonucleotide
ugcccgacagagauacaga

SEQ ID NO: 345723 - RNA, 19 nt, Artificial Sequence
  Description of Artificial Sequence: Synthetic oligonucleotide
caucccgcacagcaaagac

SEQ ID NO: 345724 - RNA, 19 nt, Artificial Sequence
  Description of Artificial Sequence: Synthetic oligonucleotide
auugguagcacaggagaau

SEQ ID NO: 345725 - RNA, 19 nt, Artificial Sequence
  Description of Artificial Sequence: Synthetic oligonucleotide
gaaucgauggaagcccuga

SEQ ID NO: 345726 - RNA, 19 nt, Artificial Sequence
  Description of Artificial Sequence: Synthetic oligonucleotide
cagaguuaccacaaggacu

SEQ ID NO: 345727 - RNA, 19 nt, Artificial Sequence
  Description of Artificial Sequence: Synthetic oligonucleotide
acgucacuucucauugacc

SEQ ID NO: 345728 - RNA, 19 nt, Artificial Sequence
  Description of Artificial Sequence: Synthetic oligonucleotide
ggggcgugcagcuugguug

SEQ ID NO: 345729 - RNA, 19 nt, Artificial Sequence
  Description of Artificial Sequence: Synthetic oligonucleotide
cuaucuggaaugaacaguu

SEQ ID NO: 345730 - RNA, 19 nt, Artificial Sequence
  Description of Artificial Sequence: Synthetic oligonucleotide
auaccugaguucaaauccu

SEQ ID NO: 345731 - RNA, 19 nt, Artificial Sequence
  Description of Artificial Sequence: Synthetic oligonucleotide
ccuaggaaucgauggaagc

SEQ ID NO: 345732 - RNA, 19 nt, Artificial Sequence
  Description of Artificial Sequence: Synthetic oligonucleotide
aggcacauagaaaucugug

SEQ ID NO: 345733 - RNA, 19 nt, Artificial Sequence
  Description of Artificial Sequence: Synthetic oligonucleotide
gcguaguauaggaagaaug

SEQ ID NO: 345734 - RNA, 19 nt, Artificial Sequence
  Description of Artificial Sequence: Synthetic oligonucleotide
augggaugccuaggaaucg

SEQ ID NO: 345735 - RNA, 19 nt, Artificial Sequence
  Description of Artificial Sequence: Synthetic oligonucleotide
ucgcucucaggccgucugg

SEQ ID NO: 345736 - RNA, 19 nt, Artificial Sequence
  Description of Artificial Sequence: Synthetic oligonucleotide
agacagacuuccgugggcu

SEQ ID NO: 345737 - RNA, 19 nt, Artificial Sequence
  Description of Artificial Sequence: Synthetic oligonucleotide
cacuccaagaugccacuug

SEQ ID NO: 345738 - RNA, 19 nt, Artificial Sequence
  Description of Artificial Sequence: Synthetic oligonucleotide
uccaucaaggaguccccaa

SEQ ID NO: 345739 - RNA, 19 nt, Artificial Sequence
  Description of Artificial Sequence: Synthetic oligonucleotide
ggcucaugagaaguaagag

SEQ ID NO: 345740 - RNA, 19 nt, Artificial Sequence
  Description of Artificial Sequence: Synthetic oligonucleotide
ugccuaggaaucgauggaa

SEQ ID NO: 345741 - RNA, 19 nt, Artificial Sequence
  Description of Artificial Sequence: Synthetic oligonucleotide
cuaauucuagaugacagau

SEQ ID NO: 345742 - RNA, 19 nt, Artificial Sequence
  Description of Artificial Sequence: Synthetic oligonucleotide
ugucaacaccauccagagu

SEQ ID NO: 345743 - RNA, 19 nt, Artificial Sequence
  Description of Artificial Sequence: Synthetic oligonucleotide
ggacuagaugaauuagcac

SEQ ID NO: 345744 - RNA, 19 nt, Artificial Sequence
  Description of Artificial Sequence: Synthetic oligonucleotide
acauacgcaucaacucagg

SEQ ID NO: 345745 - RNA, 19 nt, Artificial Sequence
  Description of Artificial Sequence: Synthetic oligonucleotide
ugggauaccugaguucaaa

SEQ ID NO: 345746 - RNA, 19 nt, Artificial Sequence
  Description of Artificial Sequence: Synthetic oligonucleotide
gcucccgcgaaucugucag

SEQ ID NO: 345747 - RNA, 19 nt, Artificial Sequence
  Description of Artificial Sequence: Synthetic oligonucleotide
guacaugccugaucgaacu

SEQ ID NO: 345748 - RNA, 19 nt, Artificial Sequence
  Description of Artificial Sequence: Synthetic oligonucleotide
augaauuagcacaccugca

SEQ ID NO: 345749 - RNA, 19 nt, Artificial Sequence
  Description of Artificial Sequence: Synthetic oligonucleotide
caaauccuagcucaagcua

SEQ ID NO: 345750 - RNA, 19 nt, Artificial Sequence
  Description of Artificial Sequence: Synthetic oligonucleotide
cauugguagcacaggagaa

SEQ ID NO: 345751 - RNA, 19 nt, Artificial Sequence
  Description of Artificial Sequence: Synthetic oligonucleotide
gaccccauggaccucgucu

SEQ ID NO: 345752 - RNA, 19 nt, Artificial Sequence
  Description of Artificial Sequence: Synthetic oligonucleotide
gauagggcggguagaagaa

SEQ ID NO: 345753 - RNA, 19 nt, Artificial Sequence
  Description of Artificial Sequence: Synthetic oligonucleotide
cagcagacuggguggggcg

SEQ ID NO: 345754 - RNA, 19 nt, Artificial Sequence
  Description of Artificial Sequence: Synthetic oligonucleotide
uggaccucgucuggauagg

SEQ ID NO: 345755 - RNA, 19 nt, Artificial Sequence
  Description of Artificial Sequence: Synthetic oligonucleotide
guaugggaugccuaggaau

SEQ ID NO: 345756 - RNA, 19 nt, Artificial Sequence
  Description of Artificial Sequence: Synthetic oligonucleotide
ggugggaagcguaguauag

SEQ ID NO: 345757 - RNA, 19 nt, Artificial Sequence
  Description of Artificial Sequence: Synthetic oligonucleotide
gaugccacuugccagccau

SEQ ID NO: 345758 - RNA, 19 nt, Artificial Sequence
  Description of Artificial Sequence: Synthetic oligonucleotide
ugggcaagcccgugggacu

SEQ ID NO: 345759 - RNA, 19 nt, Artificial Sequence
  Description of Artificial Sequence: Synthetic oligonucleotide
gagaaguaagaggguuggc

SEQ ID NO: 345760 - RNA, 19 nt, Artificial Sequence
  Description of Artificial Sequence: Synthetic oligonucleotide
cauacgcaucaacucagga

SEQ ID NO: 345761 - RNA, 19 nt, Artificial Sequence
  Description of Artificial Sequence: Synthetic oligonucleotide
gcgaaucugucagaacucg

SEQ ID NO: 345762 - RNA, 19 nt, Artificial Sequence
  Description of Artificial Sequence: Synthetic oligonucleotide
cucgucuggauagggcggg

SEQ ID NO: 345763 - RNA, 19 nt, Artificial Sequence
  Description of Artificial Sequence: Synthetic oligonucleotide
cagcgauguguccauggac

SEQ ID NO: 345764 - RNA, 19 nt, Artificial Sequence
  Description of Artificial Sequence: Synthetic oligonucleotide
guaguauaggaagaauggu

SEQ ID NO: 345765 - RNA, 19 nt, Artificial Sequence
  Description of Artificial Sequence: Synthetic oligonucleotide
agggcggguagaagaagac

SEQ ID NO: 345766 - RNA, 19 nt, Artificial Sequence
  Description of Artificial Sequence: Synthetic oligonucleotide
ugggaugccuaggaaucga

SEQ ID NO: 345767 - RNA, 19 nt, Artificial Sequence
  Description of Artificial Sequence: Synthetic oligonucleotide
caacggaggaaauggcaga

SEQ ID NO: 345768 - RNA, 19 nt, Artificial Sequence
  Description of Artificial Sequence: Synthetic oligonucleotide
aggcccacuuucugaagcu

SEQ ID NO: 345769 - RNA, 19 nt, Artificial Sequence
  Description of Artificial Sequence: Synthetic oligonucleotide
ggccccuauagcugcaucc

SEQ ID NO: 345770 - RNA, 19 nt, Artificial Sequence
  Description of Artificial Sequence: Synthetic oligonucleotide
cugcucguguuccuucuug

SEQ ID NO: 345771 - RNA, 19 nt, Artificial Sequence
  Description of Artificial Sequence: Synthetic oligonucleotide
caggccgucugggauacgc

SEQ ID NO: 345772 - RNA, 19 nt, Artificial Sequence
  Description of Artificial Sequence: Synthetic oligonucleotide
caugggacgagggcgguuc

SEQ ID NO: 345773 - RNA, 19 nt, Artificial Sequence
  Description of Artificial Sequence: Synthetic oligonucleotide
caucaacucaggaccauua

SEQ ID NO: 345774 - RNA, 19 nt, Artificial Sequence
  Description of Artificial Sequence: Synthetic oligonucleotide
caaggaguccccaaauggu

SEQ ID NO: 345775 - RNA, 19 nt, Artificial Sequence
  Description of Artificial Sequence: Synthetic oligonucleotide
aaugcacucccggcuucug

SEQ ID NO: 345776 - RNA, 19 nt, Artificial Sequence
  Description of Artificial Sequence: Synthetic oligonucleotide
aauccuagcucaagcuauu

SEQ ID NO: 345777 - RNA, 19 nt, Artificial Sequence
  Description of Artificial Sequence: Synthetic oligonucleotide
cccuauagcugcauccagc

SEQ ID NO: 345778 - RNA, 19 nt, Artificial Sequence
  Description of Artificial Sequence: Synthetic oligonucleotide
ggaucugacccuguucacc

SEQ ID NO: 345779 - RNA, 19 nt, Artificial Sequence
  Description of Artificial Sequence: Synthetic oligonucleotide
uagauucacgcgcgaggau

SEQ ID NO: 345780 - RNA, 19 nt, Artificial Sequence
  Description of Artificial Sequence: Synthetic oligonucleotide
uggguuacaccaggaguaa

SEQ ID NO: 345781 - RNA, 19 nt, Artificial Sequence
  Description of Artificial Sequence: Synthetic oligonucleotide
ugucagaacucgggaggug

SEQ ID NO: 345782 - RNA, 19 nt, Artificial Sequence
  Description of Artificial Sequence: Synthetic oligonucleotide
ccugaucgaacugggagcc

SEQ ID NO: 345783 - RNA, 19 nt, Artificial Sequence
  Description of Artificial Sequence: Synthetic oligonucleotide
ggaagaauggucggcucug

SEQ ID NO: 345784 - RNA, 19 nt, Artificial Sequence
  Description of Artificial Sequence: Synthetic oligonucleotide
gaccucgucuggauagggc

SEQ ID NO: 345785 - RNA, 19 nt, Artificial Sequence
  Description of Artificial Sequence: Synthetic oligonucleotide
cucauccauaguuuccaaa

SEQ ID NO: 345786 - RNA, 19 nt, Artificial Sequence
  Description of Artificial Sequence: Synthetic oligonucleotide
ggaguaugggaugccuagg

SEQ ID NO: 345787 - RNA, 19 nt, Artificial Sequence
  Description of Artificial Sequence: Synthetic oligonucleotide
caccuaauucuagaugaca

SEQ ID NO: 345788 - RNA, 19 nt, Artificial Sequence
  Description of Artificial Sequence: Synthetic oligonucleotide
caugggaguaugggaugcc

SEQ ID NO: 345789 - RNA, 19 nt, Artificial Sequence
  Description of Artificial Sequence: Synthetic oligonucleotide
ucccggcuucugugaaugg

SEQ ID NO: 345790 - RNA, 19 nt, Artificial Sequence
  Description of Artificial Sequence: Synthetic oligonucleotide
agcguaguauaggaagaau

SEQ ID NO: 345791 - RNA, 19 nt, Artificial Sequence
  Description of Artificial Sequence: Synthetic oligonucleotide
uaauguggccuggccagaa

SEQ ID NO: 345792 - RNA, 19 nt, Artificial Sequence
  Description of Artificial Sequence: Synthetic oligonucleotide
ggacacaugcagaucacca

SEQ ID NO: 345793 - RNA, 19 nt, Artificial Sequence
  Description of Artificial Sequence: Synthetic oligonucleotide
augggaguaugggaugccu

SEQ ID NO: 345794 - RNA, 19 nt, Artificial Sequence
  Description of Artificial Sequence: Synthetic oligonucleotide
gguacaugccugaucgaac

SEQ ID NO: 345795 - RNA, 19 nt, Artificial Sequence
  Description of Artificial Sequence: Synthetic oligonucleotide
ucuugggaucuagcagggc

SEQ ID NO: 345796 - RNA, 19 nt, Artificial Sequence
  Description of Artificial Sequence: Synthetic oligonucleotide
gcgguucaaaacugaggag

SEQ ID NO: 345797 - RNA, 19 nt, Artificial Sequence
  Description of Artificial Sequence: Synthetic oligonucleotide
cagacaagucauagaguaa

SEQ ID NO: 345798 - RNA, 19 nt, Artificial Sequence
  Description of Artificial Sequence: Synthetic oligonucleotide
cagaccuaggucacccaca

SEQ ID NO: 345799 - RNA, 19 nt, Artificial Sequence
  Description of Artificial Sequence: Synthetic oligonucleotide
uucacgcgcgaggaucuga

SEQ ID NO: 345800 - RNA, 19 nt, Artificial Sequence
  Description of Artificial Sequence: Synthetic oligonucleotide
gggcgguucaaaacugagg

SEQ ID NO: 345801 - RNA, 19 nt, Artificial Sequence
  Description of Artificial Sequence: Synthetic oligonucleotide
aacuggucauagacagcgu

SEQ ID NO: 345802 - RNA, 19 nt, Artificial Sequence
  Description of Artificial Sequence: Synthetic oligonucleotide
caggaguaauguggccugg

SEQ ID NO: 345803 - RNA, 19 nt, Artificial Sequence
  Description of Artificial Sequence: Synthetic oligonucleotide
augcacucccggcuucugu

SEQ ID NO: 345804 - RNA, 19 nt, Artificial Sequence
  Description of Artificial Sequence: Synthetic oligonucleotide
cuuuagggucuccuggaua

SEQ ID NO: 345805 - RNA, 19 nt, Artificial Sequence
  Description of Artificial Sequence: Synthetic oligonucleotide
ucccgcgaaucugucagaa

SEQ ID NO: 345806 - RNA, 19 nt, Artificial Sequence
  Description of Artificial Sequence: Synthetic oligonucleotide
gauuucuuguaaggaccaa

SEQ ID NO: 345807 - RNA, 19 nt, Artificial Sequence
  Description of Artificial Sequence: Synthetic oligonucleotide
aggccucauugguagcaca

SEQ ID NO: 345808 - RNA, 19 nt, Artificial Sequence
  Description of Artificial Sequence: Synthetic oligonucleotide
gccaacugauccagguugg

SEQ ID NO: 345809 - RNA, 19 nt, Artificial Sequence
  Description of Artificial Sequence: Synthetic oligonucleotide
cagccuaaggugcuucaga

SEQ ID NO: 345810 - RNA, 19 nt, Artificial Sequence
  Description of Artificial Sequence: Synthetic oligonucleotide
aggaaucgauggaagcccu

SEQ ID NO: 345811 - RNA, 19 nt, Artificial Sequence
  Description of Artificial Sequence: Synthetic oligonucleotide
ugauugcugugagaagcuu

SEQ ID NO: 345812 - RNA, 19 nt, Artificial Sequence
  Description of Artificial Sequence: Synthetic oligonucleotide
gauucacgcgcgaggaucu

SEQ ID NO: 345813 - RNA, 19 nt, Artificial Sequence
  Description of Artificial Sequence: Synthetic oligonucleotide
gaagcucccgcgaaucugu

SEQ ID NO: 345814 - RNA, 19 nt, Artificial Sequence
  Description of Artificial Sequence: Synthetic oligonucleotide
uccgacgccaugggacgag

SEQ ID NO: 345815 - RNA, 19 nt, Artificial Sequence
  Description of Artificial Sequence: Synthetic oligonucleotide
gggaugucuggugggaagc

SEQ ID NO: 345816 - RNA, 19 nt, Artificial Sequence
  Description of Artificial Sequence: Synthetic oligonucleotide
gaccuaggucacccacagc

SEQ ID NO: 345817 - RNA, 19 nt, Artificial Sequence
  Description of Artificial Sequence: Synthetic oligonucleotide
agcucccgcgaaucuguca

SEQ ID NO: 345818 - RNA, 19 nt, Artificial Sequence
  Description of Artificial Sequence: Synthetic oligonucleotide
cuaggucacccacagcugu

SEQ ID NO: 345819 - RNA, 19 nt, Artificial Sequence
  Description of Artificial Sequence: Synthetic oligonucleotide
ccucuaagaaugcuucuca

SEQ ID NO: 345820 - RNA, 19 nt, Artificial Sequence
  Description of Artificial Sequence: Synthetic oligonucleotide
guggccugggguguaacuc

SEQ ID NO: 345821 - RNA, 19 nt, Artificial Sequence
  Description of Artificial Sequence: Synthetic oligonucleotide
ccauuggacauacgcauca

SEQ ID NO: 345822 - RNA, 19 nt, Artificial Sequence
  Description of Artificial Sequence: Synthetic oligonucleotide
ccugggauaccugaguuca

SEQ ID NO: 345823 - RNA, 19 nt, Artificial Sequence
  Description of Artificial Sequence: Synthetic oligonucleotide
cucaggccgucugggauac

SEQ ID NO: 345824 - RNA, 19 nt, Artificial Sequence
  Description of Artificial Sequence: Synthetic oligonucleotide
agaccccauggaccucguc

SEQ ID NO: 345825 - RNA, 19 nt, Artificial Sequence
  Description of Artificial Sequence: Synthetic oligonucleotide
aggguacaugccugaucga

SEQ ID NO: 345826 - RNA, 19 nt, Artificial Sequence
  Description of Artificial Sequence: Synthetic oligonucleotide
cucgagagaaagacacaua

SEQ ID NO: 345827 - RNA, 19 nt, Artificial Sequence
  Description of Artificial Sequence: Synthetic oligonucleotide
uucugucagaaggcccacu

SEQ ID NO: 345828 - RNA, 19 nt, Artificial Sequence
  Description of Artificial Sequence: Synthetic oligonucleotide
cugaucgaacugggagccg

SEQ ID NO: 345829 - RNA, 19 nt, Artificial Sequence
  Description of Artificial Sequence: Synthetic oligonucleotide
gccuaggaaucgauggaag

SEQ ID NO: 345830 - RNA, 19 nt, Artificial Sequence
  Description of Artificial Sequence: Synthetic oligonucleotide
agggcaaauuucagaccug

SEQ ID NO: 345831 - RNA, 19 nt, Artificial Sequence
  Description of Artificial Sequence: Synthetic oligonucleotide
ggcagguucucggacacca

SEQ ID NO: 345832 - RNA, 19 nt, Artificial Sequence
  Description of Artificial Sequence: Synthetic oligonucleotide
ggaugccuaggaaucgaug

SEQ ID NO: 345833 - RNA, 19 nt, Artificial Sequence
  Description of Artificial Sequence: Synthetic oligonucleotide
cagaacucgggagguggug

SEQ ID NO: 345834 - RNA, 19 nt, Artificial Sequence
  Description of Artificial Sequence: Synthetic oligonucleotide
gggcucaugagaaguaaga

SEQ ID NO: 345835 - RNA, 19 nt, Artificial Sequence
  Description of Artificial Sequence: Synthetic oligonucleotide
agcagacgucacuucucau

SEQ ID NO: 345836 - RNA, 19 nt, Artificial Sequence
  Description of Artificial Sequence: Synthetic oligonucleotide
uggggcgugcagcuugguu

SEQ ID NO: 345837 - RNA, 19 nt, Artificial Sequence
  Description of Artificial Sequence: Synthetic oligonucleotide
ggaguccccaaauggucca

SEQ ID NO: 345838 - RNA, 19 nt, Artificial Sequence
  Description of Artificial Sequence: Synthetic oligonucleotide
cccgacagagauacagaug

SEQ ID NO: 345839 - RNA, 19 nt, Artificial Sequence
  Description of Artificial Sequence: Synthetic oligonucleotide
cuucugucagaaggcccac

SEQ ID NO: 345840 - RNA, 19 nt, Artificial Sequence
  Description of Artificial Sequence: Synthetic oligonucleotide
cccgagacccaaacacucc

SEQ ID NO: 345841 - RNA, 19 nt, Artificial Sequence
  Description of Artificial Sequence: Synthetic oligonucleotide
ccugggcuacccuugagga

SEQ ID NO: 345842 - RNA, 19 nt, Artificial Sequence
  Description of Artificial Sequence: Synthetic oligonucleotide
uggucggcucuggcgcugg

SEQ ID NO: 345843 - RNA, 19 nt, Artificial Sequence
  Description of Artificial Sequence: Synthetic oligonucleotide
ggaacuggucauagacagc

SEQ ID NO: 345844 - RNA, 19 nt, Artificial Sequence
  Description of Artificial Sequence: Synthetic oligonucleotide
acgggccucuaguccaggu

SEQ ID NO: 345845 - RNA, 19 nt, Artificial Sequence
  Description of Artificial Sequence: Synthetic oligonucleotide
ccuguaagauagccucgag

SEQ ID NO: 345846 - RNA, 19 nt, Artificial Sequence
  Description of Artificial Sequence: Synthetic oligonucleotide
ggaccucgucuggauaggg

SEQ ID NO: 345847 - RNA, 19 nt, Artificial Sequence
  Description of Artificial Sequence: Synthetic oligonucleotide
cgauggaagcccugaugcg

SEQ ID NO: 345848 - RNA, 19 nt, Artificial Sequence
  Description of Artificial Sequence: Synthetic oligonucleotide
gguuagauucugacaggga

SEQ ID NO: 345849 - RNA, 19 nt, Artificial Sequence
  Description of Artificial Sequence: Synthetic oligonucleotide
acgcaucaacucaggacca

SEQ ID NO: 345850 - RNA, 19 nt, Artificial Sequence
  Description of Artificial Sequence: Synthetic oligonucleotide
aucacacacucagcauaga

SEQ ID NO: 345851 - RNA, 19 nt, Artificial Sequence
  Description of Artificial Sequence: Synthetic oligonucleotide
gcagaaucugaaguggugu

SEQ ID NO: 345852 - RNA, 19 nt, Artificial Sequence
  Description of Artificial Sequence: Synthetic oligonucleotide
uccaggguacaugccugau

SEQ ID NO: 345853 - RNA, 19 nt, Artificial Sequence
  Description of Artificial Sequence: Synthetic oligonucleotide
ccaucacacacucagcaua

SEQ ID NO: 345854 - RNA, 19 nt, Artificial Sequence
  Description of Artificial Sequence: Synthetic oligonucleotide
caggagaauaggcacugau

SEQ ID NO: 345855 - RNA, 19 nt, Artificial Sequence
  Description of Artificial Sequence: Synthetic oligonucleotide
ggguacaugccugaucgaa

SEQ ID NO: 345856 - RNA, 19 nt, Artificial Sequence
  Description of Artificial Sequence: Synthetic oligonucleotide
ccaaaugguccacggucug

SEQ ID NO: 345857 - RNA, 19 nt, Artificial Sequence
  Description of Artificial Sequence: Synthetic oligonucleotide
ccccgagacccaaacacuc

SEQ ID NO: 345858 - RNA, 19 nt, Artificial Sequence
  Description of Artificial Sequence: Synthetic oligonucleotide
cuuucagcgauguguccau

SEQ ID NO: 345859 - RNA, 19 nt, Artificial Sequence
  Description of Artificial Sequence: Synthetic oligonucleotide
caucaaggaguccccaaau

SEQ ID NO: 345860 - RNA, 19 nt, Artificial Sequence
  Description of Artificial Sequence: Synthetic oligonucleotide
augggacgagggcgguuca

SEQ ID NO: 345861 - RNA, 19 nt, Artificial Sequence
  Description of Artificial Sequence: Synthetic oligonucleotide
guaauguggccuggccaga

SEQ ID NO: 345862 - RNA, 19 nt, Artificial Sequence
  Description of Artificial Sequence: Synthetic oligonucleotide
cguuagccaacugauccag

SEQ ID NO: 345863 - RNA, 19 nt, Artificial Sequence
  Description of Artificial Sequence: Synthetic oligonucleotide
ggaccagggcuucuuuaga

SEQ ID NO: 345864 - RNA, 19 nt, Artificial Sequence
  Description of Artificial Sequence: Synthetic oligonucleotide
ggaaucgauggaagcccug

SEQ ID NO: 345865 - RNA, 19 nt, Artificial Sequence
  Description of Artificial Sequence: Synthetic oligonucleotide
gucagaaggcccacuuucu

SEQ ID NO: 345866 - RNA, 19 nt, Artificial Sequence
  Description of Artificial Sequence: Synthetic oligonucleotide
gcagccuaaggugcuucag

SEQ ID NO: 345867 - RNA, 19 nt, Artificial Sequence
  Description of Artificial Sequence: Synthetic oligonucleotide
ccgcgaaucugucagaacu

SEQ ID NO: 345868 - RNA, 19 nt, Artificial Sequence
  Description of Artificial Sequence: Synthetic oligonucleotide
ggaugggaacauagccuug

SEQ ID NO: 345869 - RNA, 19 nt, Artificial Sequence
  Description of Artificial Sequence: Synthetic oligonucleotide
auucacgcgcgaggaucug

SEQ ID NO: 345870 - RNA, 19 nt, Artificial Sequence
  Description of Artificial Sequence: Synthetic oligonucleotide
gggaucaggagcagacguc

SEQ ID NO: 345871 - RNA, 19 nt, Artificial Sequence
  Description of Artificial Sequence: Synthetic oligonucleotide
cauuggacauacgcaucaa

SEQ ID NO: 345872 - RNA, 19 nt, Artificial Sequence
  Description of Artificial Sequence: Synthetic oligonucleotide
ccgagcagaccuaggucac

SEQ ID NO: 345873 - RNA, 19 nt, Artificial Sequence
  Description of Artificial Sequence: Synthetic oligonucleotide
gaaugcacucccggcuucu

SEQ ID NO: 345874 - RNA, 19 nt, Artificial Sequence
  Description of Artificial Sequence: Synthetic oligonucleotide
cgcgaaucugucagaacuc

SEQ ID NO: 345875 - RNA, 19 nt, Artificial Sequence
  Description of Artificial Sequence: Synthetic oligonucleotide
cagcccgagauggugugca

SEQ ID NO: 345876 - RNA, 19 nt, Artificial Sequence
  Description of Artificial Sequence: Synthetic oligonucleotide
aucagccaugaggucucga

SEQ ID NO: 345877 - RNA, 19 nt, Artificial Sequence
  Description of Artificial Sequence: Synthetic oligonucleotide
ggacgagggcgguucaaaa

SEQ ID NO: 345878 - RNA, 19 nt, Artificial Sequence
  Description of Artificial Sequence: Synthetic oligonucleotide
aagaccccauggaccucgu

SEQ ID NO: 345879 - RNA, 19 nt, Artificial Sequence
  Description of Artificial Sequence: Synthetic oligonucleotide
ccccuauagcugcauccag

SEQ ID NO: 345880 - RNA, 19 nt, Artificial Sequence
  Description of Artificial Sequence: Synthetic oligonucleotide
ccagagagcuggccaacuc

SEQ ID NO: 345881 - RNA, 19 nt, Artificial Sequence
  Description of Artificial Sequence: Synthetic oligonucleotide
ccaucaaggaguccccaaa

SEQ ID NO: 345882 - RNA, 19 nt, Artificial Sequence
  Description of Artificial Sequence: Synthetic oligonucleotide
ucgucuggauagggcgggu

SEQ ID NO: 345883 - RNA, 19 nt, Artificial Sequence
  Description of Artificial Sequence: Synthetic oligonucleotide
cugaaugcacucccggcuu

SEQ ID NO: 345884 - RNA, 19 nt, Artificial Sequence
  Description of Artificial Sequence: Synthetic oligonucleotide
ugggacgagggcgguucaa

SEQ ID NO: 345885 - RNA, 19 nt, Artificial Sequence
  Description of Artificial Sequence: Synthetic oligonucleotide
cgccaugggacgagggcgg

SEQ ID NO: 345886 - RNA, 19 nt, Artificial Sequence
  Description of Artificial Sequence: Synthetic oligonucleotide
gagauacagauggccuccu

SEQ ID NO: 345887 - RNA, 19 nt, Artificial Sequence
  Description of Artificial Sequence: Synthetic oligonucleotide
cucggacaccaccuucaaa

SEQ ID NO: 345888 - RNA, 19 nt, Artificial Sequence
  Description of Artificial Sequence: Synthetic oligonucleotide
cccaucccgcacagcaaag

SEQ ID NO: 345889 - RNA, 19 nt, Artificial Sequence
  Description of Artificial Sequence: Synthetic oligonucleotide
cugggauaccugaguucaa

SEQ ID NO: 345890 - RNA, 19 nt, Artificial Sequence
  Description of Artificial Sequence: Synthetic oligonucleotide
ggccucuaguccagguagc

SEQ ID NO: 345891 - RNA, 19 nt, Artificial Sequence
  Description of Artificial Sequence: Synthetic oligonucleotide
gccccuauagcugcaucca

SEQ ID NO: 345892 - RNA, 19 nt, Artificial Sequence
  Description of Artificial Sequence: Synthetic oligonucleotide
gggcggguagaagaagaca

SEQ ID NO: 345893 - RNA, 19 nt, Artificial Sequence
  Description of Artificial Sequence: Synthetic oligonucleotide
gggaagcguaguauaggaa

SEQ ID NO: 345894 - RNA, 19 nt, Artificial Sequence
  Description of Artificial Sequence: Synthetic oligonucleotide
cccaaaugguccacggucu

SEQ ID NO: 345895 - RNA, 19 nt, Artificial Sequence
  Description of Artificial Sequence: Synthetic oligonucleotide
gcggguagaagaagacaga

SEQ ID NO: 345896 - RNA, 19 nt, Artificial Sequence
  Description of Artificial Sequence: Synthetic oligonucleotide
caagcccgugggacuucuc

SEQ ID NO: 345897 - RNA, 19 nt, Artificial Sequence
  Description of Artificial Sequence: Synthetic oligonucleotide
cucaggagcugcucguguu

SEQ ID NO: 345898 - RNA, 19 nt, Artificial Sequence
  Description of Artificial Sequence: Synthetic oligonucleotide
cguguuccuucuugggauc

SEQ ID NO: 345899 - RNA, 19 nt, Artificial Sequence
  Description of Artificial Sequence: Synthetic oligonucleotide
gcccgacagagauacagau

SEQ ID NO: 345900 - RNA, 19 nt, Artificial Sequence
  Description of Artificial Sequence: Synthetic oligonucleotide
cucccgcgaaucugucaga

SEQ ID NO: 345901 - RNA, 19 nt, Artificial Sequence
  Description of Artificial Sequence: Synthetic oligonucleotide
cccgcgaaucugucagaac

SEQ ID NO: 345902 - RNA, 19 nt, Artificial Sequence
  Description of Artificial Sequence: Synthetic oligonucleotide
agcgucgcucucaggccgu

SEQ ID NO: 345903 - RNA, 19 nt, Artificial Sequence
  Description of Artificial Sequence: Synthetic oligonucleotide
ggagccccugucagggcug

SEQ ID NO: 345904 - RNA, 19 nt, Artificial Sequence
  Description of Artificial Sequence: Synthetic oligonucleotide
cccgugggacuucucagga

SEQ ID NO: 345905 - RNA, 19 nt, Artificial Sequence
  Description of Artificial Sequence: Synthetic oligonucleotide
aggugacauuggccuugaa

SEQ ID NO: 345906 - RNA, 19 nt, Artificial Sequence
  Description of Artificial Sequence: Synthetic oligonucleotide
gucucuccgagcagaccua

SEQ ID NO: 345907 - RNA, 19 nt, Artificial Sequence
  Description of Artificial Sequence: Synthetic oligonucleotide
cgacgccaugggacgaggg

SEQ ID NO: 345908 - RNA, 19 nt, Artificial Sequence
  Description of Artificial Sequence: Synthetic oligonucleotide
gggagaucucauccauagu

SEQ ID NO: 345909 - RNA, 19 nt, Artificial Sequence
  Description of Artificial Sequence: Synthetic oligonucleotide
gggacgagggcgguucaaa

SEQ ID NO: 345910 - RNA, 19 nt, Artificial Sequence
  Description of Artificial Sequence: Synthetic oligonucleotide
cuaccacugcaggggaugu

SEQ ID NO: 345911 - RNA, 19 nt, Artificial Sequence
  Description of Artificial Sequence: Synthetic oligonucleotide
cugagccccgagacccaaa

SEQ ID NO: 345912 - RNA, 19 nt, Artificial Sequence
  Description of Artificial Sequence: Synthetic oligonucleotide
cccaauuccuuaacucuau

SEQ ID NO: 345913 - RNA, 19 nt, Artificial Sequence
  Description of Artificial Sequence: Synthetic oligonucleotide
gcagcccgagauggugugc

SEQ ID NO: 345914 - RNA, 19 nt, Artificial Sequence
  Description of Artificial Sequence: Synthetic oligonucleotide
guagagcuucuggggagau

SEQ ID NO: 345915 - RNA, 19 nt, Artificial Sequence
  Description of Artificial Sequence: Synthetic oligonucleotide
ccucuaguccagguagcca

SEQ ID NO: 345916 - RNA, 19 nt, Artificial Sequence
  Description of Artificial Sequence: Synthetic oligonucleotide
cccgcacagcaaagacccc

SEQ ID NO: 345917 - RNA, 19 nt, Artificial Sequence
  Description of Artificial Sequence: Synthetic oligonucleotide
gcgcgaggaucugacccug

SEQ ID NO: 345918 - RNA, 19 nt, Artificial Sequence
  Description of Artificial Sequence: Synthetic oligonucleotide
ccgagacccaaacacuccu

SEQ ID NO: 345919 - RNA, 19 nt, Artificial Sequence
  Description of Artificial Sequence: Synthetic oligonucleotide
cccggcuucugugaaugga

SEQ ID NO: 345920 - RNA, 19 nt, Artificial Sequence
  Description of Artificial Sequence: Synthetic oligonucleotide
ccgacgccaugggacgagg

SEQ ID NO: 345921 - RNA, 19 nt, Artificial Sequence
  Description of Artificial Sequence: Synthetic oligonucleotide
ccaucccgcacagcaaaga

SEQ ID NO: 345922 - RNA, 19 nt, Artificial Sequence
  Description of Artificial Sequence: Synthetic oligonucleotide
ccccugcccuucuggugag

SEQ ID NO: 345923 - RNA, 19 nt, Artificial Sequence
  Description of Artificial Sequence: Synthetic oligonucleotide
ccuccccugagccccgaga

SEQ ID NO: 345924 - RNA, 19 nt, Artificial Sequence
  Description of Artificial Sequence: Synthetic oligonucleotide
gggaugccuaggaaucgau

SEQ ID NO: 345925 - RNA, 19 nt, Artificial Sequence
  Description of Artificial Sequence: Synthetic oligonucleotide
gcgaggaucugacccuguu

SEQ ID NO: 345926 - RNA, 19 nt, Artificial Sequence
  Description of Artificial Sequence: Synthetic oligonucleotide
cgauguguccauggacaca

SEQ ID NO: 345927 - RNA, 19 nt, Artificial Sequence
  Description of Artificial Sequence: Synthetic oligonucleotide
gcuggccaacucauggguu

SEQ ID NO: 345928 - RNA, 19 nt, Artificial Sequence
  Description of Artificial Sequence: Synthetic oligonucleotide
ggugcccgacagagauaca

SEQ ID NO: 345929 - RNA, 19 nt, Artificial Sequence
  Description of Artificial Sequence: Synthetic oligonucleotide
gcaagcccgugggacuucu

SEQ ID NO: 345930 - RNA, 19 nt, Artificial Sequence
  Description of Artificial Sequence: Synthetic oligonucleotide
gcauagaguuaggguuccu

SEQ ID NO: 345931 - RNA, 19 nt, Artificial Sequence
  Description of Artificial Sequence: Synthetic oligonucleotide
cgcgcgaggaucugacccu

SEQ ID NO: 345932 - RNA, 19 nt, Artificial Sequence
  Description of Artificial Sequence: Synthetic oligonucleotide
gggcaagcccgugggacuu

SEQ ID NO: 345933 - RNA, 19 nt, Artificial Sequence
  Description of Artificial Sequence: Synthetic oligonucleotide
gcgucgcucucaggccguc

SEQ ID NO: 345934 - RNA, 19 nt, Artificial Sequence
  Description of Artificial Sequence: Synthetic oligonucleotide
gccaugggacgagggcggu

SEQ ID NO: 345935 - RNA, 19 nt, Artificial Sequence
  Description of Artificial Sequence: Synthetic oligonucleotide
ccaugggacgagggcgguu

SEQ ID NO: 345936 - RNA, 19 nt, Artificial Sequence
  Description of Artificial Sequence: Synthetic oligonucleotide
cgucgcucucaggccgucu

SEQ ID NO: 345937 - RNA, 19 nt, Artificial Sequence
  Description of Artificial Sequence: Synthetic oligonucleotide
uuuuaagauauuaauauga

SEQ ID NO: 345938 - RNA, 19 nt, Artificial Sequence
  Description of Artificial Sequence: Synthetic oligonucleotide
aacauuaagaauuuacgug

SEQ ID NO: 345939 - RNA, 19 nt, Artificial Sequence
  Description of Artificial Sequence: Synthetic oligonucleotide
agcuuaacagcacugaagc

SEQ ID NO: 345940 - RNA, 19 nt, Artificial Sequence
  Description of Artificial Sequence: Synthetic oligonucleotide
uguacaagaaaauauguac

SEQ ID NO: 345941 - RNA, 19 nt, Artificial Sequence
  Description of Artificial Sequence: Synthetic oligonucleotide
aagaucaauucauuuugac

SEQ ID NO: 345942 - RNA, 19 nt, Artificial Sequence
  Description of Artificial Sequence: Synthetic oligonucleotide
aguaauaaggccuucauua

SEQ ID NO: 345943 - RNA, 19 nt, Artificial Sequence
  Description of Artificial Sequence: Synthetic oligonucleotide
ugaauaugcaugauggucu

SEQ ID NO: 345944 - RNA, 19 nt, Artificial Sequence
  Description of Artificial Sequence: Synthetic oligonucleotide
auaggaugauuguagcucc

SEQ ID NO: 345945 - RNA, 19 nt, Artificial Sequence
  Description of Artificial Sequence: Synthetic oligonucleotide
augacaagcacacucuugg

SEQ ID NO: 345946 - RNA, 19 nt, Artificial Sequence
  Description of Artificial Sequence: Synthetic oligonucleotide
aaagcugccaagugacccc

SEQ ID NO: 345947 - RNA, 19 nt, Artificial Sequence
  Description of Artificial Sequence: Synthetic oligonucleotide
caaccuauggcaaagcugc

SEQ ID NO: 345948 - RNA, 19 nt, Artificial Sequence
  Description of Artificial Sequence: Synthetic oligonucleotide
auggguguaaccaugaugg

SEQ ID NO: 345949 - RNA, 19 nt, Artificial Sequence
  Description of Artificial Sequence: Synthetic oligonucleotide
gaagccagaccacauaggg

SEQ ID NO: 345950 - RNA, 19 nt, Artificial Sequence
  Description of Artificial Sequence: Synthetic oligonucleotide
uuuaagauauuaauaugaa

SEQ ID NO: 345951 - RNA, 19 nt, Artificial Sequence
  Description of Artificial Sequence: Synthetic oligonucleotide
uucucaaaguugaaugggg

SEQ ID NO: 345952 - RNA, 19 nt, Artificial Sequence
  Description of Artificial Sequence: Synthetic oligonucleotide
ugacccaugcuccagaccc

SEQ ID NO: 345953 - RNA, 19 nt, Artificial Sequence
  Description of Artificial Sequence: Synthetic oligonucleotide
auaaucuucacggaaagug

SEQ ID NO: 345954 - RNA, 19 nt, Artificial Sequence
  Description of Artificial Sequence: Synthetic oligonucleotide
agaauuuacgugaaaacuc

SEQ ID NO: 345955 - RNA, 19 nt, Artificial Sequence
  Description of Artificial Sequence: Synthetic oligonucleotide
uuuacgugaaaacuccaug

SEQ ID NO: 345956 - RNA, 19 nt, Artificial Sequence
  Description of Artificial Sequence: Synthetic oligonucleotide
uuuaugggaauuccugacc

SEQ ID NO: 345957 - RNA, 19 nt, Artificial Sequence
  Description of Artificial Sequence: Synthetic oligonucleotide
uaaucuucacggaaagugc

SEQ ID NO: 345958 - RNA, 19 nt, Artificial Sequence
  Description of Artificial Sequence: Synthetic oligonucleotide
guugaauggggucaggaag

SEQ ID NO: 345959 - RNA, 19 nt, Artificial Sequence
  Description of Artificial Sequence: Synthetic oligonucleotide
gaauuuacgugaaaacucc

SEQ ID NO: 345960 - RNA, 19 nt, Artificial Sequence
  Description of Artificial Sequence: Synthetic oligonucleotide
uguacauaaucacuucaga

SEQ ID NO: 345961 - RNA, 19 nt, Artificial Sequence
  Description of Artificial Sequence: Synthetic oligonucleotide
ucaaaguugaaugggguca

SEQ ID NO: 345962 - RNA, 19 nt, Artificial Sequence
  Description of Artificial Sequence: Synthetic oligonucleotide
uucgucacucacuauagca

SEQ ID NO: 345963 - RNA, 19 nt, Artificial Sequence
  Description of Artificial Sequence: Synthetic oligonucleotide
ucaaccgcuggcuugcagg

SEQ ID NO: 345964 - RNA, 19 nt, Artificial Sequence
  Description of Artificial Sequence: Synthetic oligonucleotide
uauagcaggguccuccagc

SEQ ID NO: 345965 - RNA, 19 nt, Artificial Sequence
  Description of Artificial Sequence: Synthetic oligonucleotide
ugauaagguguccauccag

SEQ ID NO: 345966 - RNA, 19 nt, Artificial Sequence
  Description of Artificial Sequence: Synthetic oligonucleotide
gacacgaucacuccaucgc

SEQ ID NO: 345967 - RNA, 19 nt, Artificial Sequence
  Description of Artificial Sequence: Synthetic oligonucleotide
ucgucacucacuauagcag

SEQ ID NO: 345968 - RNA, 19 nt, Artificial Sequence
  Description of Artificial Sequence: Synthetic oligonucleotide
aauaguaauaaggccuuca

SEQ ID NO: 345969 - RNA, 19 nt, Artificial Sequence
  Description of Artificial Sequence: Synthetic oligonucleotide
gauaggaugauuguagcuc

SEQ ID NO: 345970 - RNA, 19 nt, Artificial Sequence
  Description of Artificial Sequence: Synthetic oligonucleotide
gauggguguaaccaugaug

SEQ ID NO: 345971 - RNA, 19 nt, Artificial Sequence
  Description of Artificial Sequence: Synthetic oligonucleotide
caacagacugauuuauggg

SEQ ID NO: 345972 - RNA, 19 nt, Artificial Sequence
  Description of Artificial Sequence: Synthetic oligonucleotide
uucgacagguaugaggagg

SEQ ID NO: 345973 - RNA, 19 nt, Artificial Sequence
  Description of Artificial Sequence: Synthetic oligonucleotide
uccuccaaggcauaugaug

SEQ ID NO: 345974 - RNA, 19 nt, Artificial Sequence
  Description of Artificial Sequence: Synthetic oligonucleotide
uacgugaaaacuccaugug

SEQ ID NO: 345975 - RNA, 19 nt, Artificial Sequence
  Description of Artificial Sequence: Synthetic oligonucleotide
gauuuaugggaauuccuga

SEQ ID NO: 345976 - RNA, 19 nt, Artificial Sequence
  Description of Artificial Sequence: Synthetic oligonucleotide
guagacaucaacauucgac

SEQ ID NO: 345977 - RNA, 19 nt, Artificial Sequence
  Description of Artificial Sequence: Synthetic oligonucleotide
acacgaucacuccaucgcc

SEQ ID NO: 345978 - RNA, 19 nt, Artificial Sequence
  Description of Artificial Sequence: Synthetic oligonucleotide
uccggggacagcauaaucu

SEQ ID NO: 345979 - RNA, 19 nt, Artificial Sequence
  Description of Artificial Sequence: Synthetic oligonucleotide
agcuaccacagcuuaacag

SEQ ID NO: 345980 - RNA, 19 nt, Artificial Sequence
  Description of Artificial Sequence: Synthetic oligonucleotide
uuucgaacauuccagugua

SEQ ID NO: 345981 - RNA, 19 nt, Artificial Sequence
  Description of Artificial Sequence: Synthetic oligonucleotide
acgccuuugguccaaaugu

SEQ ID NO: 345982 - RNA, 19 nt, Artificial Sequence
  Description of Artificial Sequence: Synthetic oligonucleotide
gaauagcacagcucuuggg

SEQ ID NO: 345983 - RNA, 19 nt, Artificial Sequence
  Description of Artificial Sequence: Synthetic oligonucleotide
ucuagacuugucaacacuu

SEQ ID NO: 345984 - RNA, 19 nt, Artificial Sequence
  Description of Artificial Sequence: Synthetic oligonucleotide
acauacacgaucauguugu

SEQ ID NO: 345985 - RNA, 19 nt, Artificial Sequence
  Description of Artificial Sequence: Synthetic oligonucleotide
cuuucgucacucacuauag

SEQ ID NO: 345986 - RNA, 19 nt, Artificial Sequence
  Description of Artificial Sequence: Synthetic oligonucleotide
gaaagguacaggcccuggg

SEQ ID NO: 345987 - RNA, 19 nt, Artificial Sequence
  Description of Artificial Sequence: Synthetic oligonucleotide
ucuuucgaacauuccagug

SEQ ID NO: 345988 - RNA, 19 nt, Artificial Sequence
  Description of Artificial Sequence: Synthetic oligonucleotide
agacaucaacauucgacag

SEQ ID NO: 345989 - RNA, 19 nt, Artificial Sequence
  Description of Artificial Sequence: Synthetic oligonucleotide
ugauaggaugauuguagcu

SEQ ID NO: 345990 - RNA, 19 nt, Artificial Sequence
  Description of Artificial Sequence: Synthetic oligonucleotide
gaauaugcaugauggucug

SEQ ID NO: 345991 - RNA, 19 nt, Artificial Sequence
  Description of Artificial Sequence: Synthetic oligonucleotide
guuccauuuccauaguuga

SEQ ID NO: 345992 - RNA, 19 nt, Artificial Sequence
  Description of Artificial Sequence: Synthetic oligonucleotide
cugauaggaugauuguagc

SEQ ID NO: 345993 - RNA, 19 nt, Artificial Sequence
  Description of Artificial Sequence: Synthetic oligonucleotide
cugaauaugcaugaugguc

SEQ ID NO: 345994 - RNA, 19 nt, Artificial Sequence
  Description of Artificial Sequence: Synthetic oligonucleotide
caugugguuugucaaggcc

SEQ ID NO: 345995 - RNA, 19 nt, Artificial Sequence
  Description of Artificial Sequence: Synthetic oligonucleotide
aaauaguaauaaggccuuc

SEQ ID NO: 345996 - RNA, 19 nt, Artificial Sequence
  Description of Artificial Sequence: Synthetic oligonucleotide
uccaucgcccugaacagug

SEQ ID NO: 345997 - RNA, 19 nt, Artificial Sequence
  Description of Artificial Sequence: Synthetic oligonucleotide
uaagcuaccacagcuuaac

SEQ ID NO: 345998 - RNA, 19 nt, Artificial Sequence
  Description of Artificial Sequence: Synthetic oligonucleotide
ggauuggaaguucucaaag

SEQ ID NO: 345999 - RNA, 19 nt, Artificial Sequence
  Description of Artificial Sequence: Synthetic oligonucleotide
gaugauuguagcuccaggu

SEQ ID NO: 346000 - RNA, 19 nt, Artificial Sequence
  Description of Artificial Sequence: Synthetic oligonucleotide
agccaugacacgccuugcc

SEQ ID NO: 346001 - RNA, 19 nt, Artificial Sequence
  Description of Artificial Sequence: Synthetic oligonucleotide
uaugccgugcugcccgucg

SEQ ID NO: 346002 - RNA, 19 nt, Artificial Sequence
  Description of Artificial Sequence: Synthetic oligonucleotide
cagcuuaacagcacugaag

SEQ ID NO: 346003 - RNA, 19 nt, Artificial Sequence
  Description of Artificial Sequence: Synthetic oligonucleotide
aggauaacagcggcauucc

SEQ ID NO: 346004 - RNA, 19 nt, Artificial Sequence
  Description of Artificial Sequence: Synthetic oligonucleotide
acgugaaaacuccaugugu

SEQ ID NO: 346005 - RNA, 19 nt, Artificial Sequence
  Description of Artificial Sequence: Synthetic oligonucleotide
aagcuuucgucacucacua

SEQ ID NO: 346006 - RNA, 19 nt, Artificial Sequence
  Description of Artificial Sequence: Synthetic oligonucleotide
uucuuucgaacauuccagu

SEQ ID NO: 346007 - RNA, 19 nt, Artificial Sequence
  Description of Artificial Sequence: Synthetic oligonucleotide
uuggcccggccucugauag

SEQ ID NO: 346008 - RNA, 19 nt, Artificial Sequence
  Description of Artificial Sequence: Synthetic oligonucleotide
ugagguauaugcagagcuc

SEQ ID NO: 346009 - RNA, 19 nt, Artificial Sequence
  Description of Artificial Sequence: Synthetic oligonucleotide
cucaaaguugaaugggguc

SEQ ID NO: 346010 - RNA, 19 nt, Artificial Sequence
  Description of Artificial Sequence: Synthetic oligonucleotide
uccccucuaaaucuucaca

SEQ ID NO: 346011 - RNA, 19 nt, Artificial Sequence
  Description of Artificial Sequence: Synthetic oligonucleotide
ugccugacagccauguggu

SEQ ID NO: 346012 - RNA, 19 nt, Artificial Sequence
  Description of Artificial Sequence: Synthetic oligonucleotide
auucaagaccugguacugc

SEQ ID NO: 346013 - RNA, 19 nt, Artificial Sequence
  Description of Artificial Sequence: Synthetic oligonucleotide
gacaagcacacucuuggga

SEQ ID NO: 346014 - RNA, 19 nt, Artificial Sequence
  Description of Artificial Sequence: Synthetic oligonucleotide
augucaaccgcuggcuugc

SEQ ID NO: 346015 - RNA, 19 nt, Artificial Sequence
  Description of Artificial Sequence: Synthetic oligonucleotide
gaaagaaucugaaaauagu

SEQ ID NO: 346016 - RNA, 19 nt, Artificial Sequence
  Description of Artificial Sequence: Synthetic oligonucleotide
uucacaaggcguguacaag

SEQ ID NO: 346017 - RNA, 19 nt, Artificial Sequence
  Description of Artificial Sequence: Synthetic oligonucleotide
caaggcguguacaagaaaa

SEQ ID NO: 346018 - RNA, 19 nt, Artificial Sequence
  Description of Artificial Sequence: Synthetic oligonucleotide
ucgaacauuccaguguaga

SEQ ID NO: 346019 - RNA, 19 nt, Artificial Sequence
  Description of Artificial Sequence: Synthetic oligonucleotide
aaguugaauggggucagga

SEQ ID NO: 346020 - RNA, 19 nt, Artificial Sequence
  Description of Artificial Sequence: Synthetic oligonucleotide
ugcccugcuaugaggaaug

SEQ ID NO: 346021 - RNA, 19 nt, Artificial Sequence
  Description of Artificial Sequence: Synthetic oligonucleotide
acggaaagugcagaauuuc

SEQ ID NO: 346022 - RNA, 19 nt, Artificial Sequence
  Description of Artificial Sequence: Synthetic oligonucleotide
gaugacaagcacacucuug

SEQ ID NO: 346023 - RNA, 19 nt, Artificial Sequence
  Description of Artificial Sequence: Synthetic oligonucleotide
agcacgcacgccuuugguc

SEQ ID NO: 346024 - RNA, 19 nt, Artificial Sequence
  Description of Artificial Sequence: Synthetic oligonucleotide
ugggauuggaaguucucaa

SEQ ID NO: 346025 - RNA, 19 nt, Artificial Sequence
  Description of Artificial Sequence: Synthetic oligonucleotide
guauuuccugccucuuccg

SEQ ID NO: 346026 - RNA, 19 nt, Artificial Sequence
  Description of Artificial Sequence: Synthetic oligonucleotide
auggcguauuuccugccuc

SEQ ID NO: 346027 - RNA, 19 nt, Artificial Sequence
  Description of Artificial Sequence: Synthetic oligonucleotide
aauuuacgugaaaacucca

SEQ ID NO: 346028 - RNA, 19 nt, Artificial Sequence
  Description of Artificial Sequence: Synthetic oligonucleotide
cacuauagcaggguccucc

SEQ ID NO: 346029 - RNA, 19 nt, Artificial Sequence
  Description of Artificial Sequence: Synthetic oligonucleotide
ugcuucuagacuugucaac

SEQ ID NO: 346030 - RNA, 19 nt, Artificial Sequence
  Description of Artificial Sequence: Synthetic oligonucleotide
uccguccaucaaaagacac

SEQ ID NO: 346031 - RNA, 19 nt, Artificial Sequence
  Description of Artificial Sequence: Synthetic oligonucleotide
ugggagacuuguuccaugu

SEQ ID NO: 346032 - RNA, 19 nt, Artificial Sequence
  Description of Artificial Sequence: Synthetic oligonucleotide
acgaucauguuguucuccu

SEQ ID NO: 346033 - RNA, 19 nt, Artificial Sequence
  Description of Artificial Sequence: Synthetic oligonucleotide
acaguggugauaagguguc

SEQ ID NO: 346034 - RNA, 19 nt, Artificial Sequence
  Description of Artificial Sequence: Synthetic oligonucleotide
aaaguugaauggggucagg

SEQ ID NO: 346035 - RNA, 19 nt, Artificial Sequence
  Description of Artificial Sequence: Synthetic oligonucleotide
aguugaauggggucaggaa

SEQ ID NO: 346036 - RNA, 19 nt, Artificial Sequence
  Description of Artificial Sequence: Synthetic oligonucleotide
gguucuguagcacgcacgc

SEQ ID NO: 346037 - RNA, 19 nt, Artificial Sequence
  Description of Artificial Sequence: Synthetic oligonucleotide
agcggcauuccccucuauc

SEQ ID NO: 346038 - RNA, 19 nt, Artificial Sequence
  Description of Artificial Sequence: Synthetic oligonucleotide
guaauaaggccuucauuaa

SEQ ID NO: 346039 - RNA, 19 nt, Artificial Sequence
  Description of Artificial Sequence: Synthetic oligonucleotide
gacagguaugaggaggggc

SEQ ID NO: 346040 - RNA, 19 nt, Artificial Sequence
  Description of Artificial Sequence: Synthetic oligonucleotide
gauuggaaguucucaaagu

SEQ ID NO: 346041 - RNA, 19 nt, Artificial Sequence
  Description of Artificial Sequence: Synthetic oligonucleotide
aucucuuucaccacccuga

SEQ ID NO: 346042 - RNA, 19 nt, Artificial Sequence
  Description of Artificial Sequence: Synthetic oligonucleotide
caggauaacagcggcauuc

SEQ ID NO: 346043 - RNA, 19 nt, Artificial Sequence
  Description of Artificial Sequence: Synthetic oligonucleotide
uucgaacauuccaguguag

SEQ ID NO: 346044 - RNA, 19 nt, Artificial Sequence
  Description of Artificial Sequence: Synthetic oligonucleotide
acgccuugccaaccuaugg

SEQ ID NO: 346045 - RNA, 19 nt, Artificial Sequence
  Description of Artificial Sequence: Synthetic oligonucleotide
augggccggaaugacagcg

SEQ ID NO: 346046 - RNA, 19 nt, Artificial Sequence
  Description of Artificial Sequence: Synthetic oligonucleotide
gcauaugccgugcugcccg

SEQ ID NO: 346047 - RNA, 19 nt, Artificial Sequence
  Description of Artificial Sequence: Synthetic oligonucleotide
ucgucauaaucuucacgga

SEQ ID NO: 346048 - RNA, 19 nt, Artificial Sequence
  Description of Artificial Sequence: Synthetic oligonucleotide
caauaucaaaaggaagauc

SEQ ID NO: 346049 - RNA, 19 nt, Artificial Sequence
  Description of Artificial Sequence: Synthetic oligonucleotide
ucuucacggaaagugcaga

SEQ ID NO: 346050 - RNA, 19 nt, Artificial Sequence
  Description of Artificial Sequence: Synthetic oligonucleotide
augacaggaggcacacugc

SEQ ID NO: 346051 - RNA, 19 nt, Artificial Sequence
  Description of Artificial Sequence: Synthetic oligonucleotide
aagcuaccacagcuuaaca

SEQ ID NO: 346052 - RNA, 19 nt, Artificial Sequence
  Description of Artificial Sequence: Synthetic oligonucleotide
caaauguggucacugggca

SEQ ID NO: 346053 - RNA, 19 nt, Artificial Sequence
  Description of Artificial Sequence: Synthetic oligonucleotide
cugaaucagggcucaacuc

SEQ ID NO: 346054 - RNA, 19 nt, Artificial Sequence
  Description of Artificial Sequence: Synthetic oligonucleotide
auacacgaucauguuguuc

SEQ ID NO: 346055 - RNA, 19 nt, Artificial Sequence
  Description of Artificial Sequence: Synthetic oligonucleotide
uugccaaccuauggcaaag

SEQ ID NO: 346056 - RNA, 19 nt, Artificial Sequence
  Description of Artificial Sequence: Synthetic oligonucleotide
acuauagcaggguccucca

SEQ ID NO: 346057 - RNA, 19 nt, Artificial Sequence
  Description of Artificial Sequence: Synthetic oligonucleotide
uuccauuuccauaguugau

SEQ ID NO: 346058 - RNA, 19 nt, Artificial Sequence
  Description of Artificial Sequence: Synthetic oligonucleotide
uuguuccaugucaaccgcu

SEQ ID NO: 346059 - RNA, 19 nt, Artificial Sequence
  Description of Artificial Sequence: Synthetic oligonucleotide
caugacacgccuugccaac

SEQ ID NO: 346060 - RNA, 19 nt, Artificial Sequence
  Description of Artificial Sequence: Synthetic oligonucleotide
uugggagacuuguuccaug

SEQ ID NO: 346061 - RNA, 19 nt, Artificial Sequence
  Description of Artificial Sequence: Synthetic oligonucleotide
aggcauaugaugaagucua

SEQ ID NO: 346062 - RNA, 19 nt, Artificial Sequence
  Description of Artificial Sequence: Synthetic oligonucleotide
cauucaagaccugguacug

SEQ ID NO: 346063 - RNA, 19 nt, Artificial Sequence
  Description of Artificial Sequence: Synthetic oligonucleotide
gaaugugauguugccgaug

SEQ ID NO: 346064 - RNA, 19 nt, Artificial Sequence
  Description of Artificial Sequence: Synthetic oligonucleotide
cuuggggauaagcuaccac

SEQ ID NO: 346065 - RNA, 19 nt, Artificial Sequence
  Description of Artificial Sequence: Synthetic oligonucleotide
ggcugagacauuuauucca

SEQ ID NO: 346066 - RNA, 19 nt, Artificial Sequence
  Description of Artificial Sequence: Synthetic oligonucleotide
guagcacgcacgccuuugg

SEQ ID NO: 346067 - RNA, 19 nt, Artificial Sequence
  Description of Artificial Sequence: Synthetic oligonucleotide
ggacacgaucacuccaucg

SEQ ID NO: 346068 - RNA, 19 nt, Artificial Sequence
  Description of Artificial Sequence: Synthetic oligonucleotide
augacacgccuugccaacc

SEQ ID NO: 346069 - RNA, 19 nt, Artificial Sequence
  Description of Artificial Sequence: Synthetic oligonucleotide
ggaagugaggccuagcugu

SEQ ID NO: 346070 - RNA, 19 nt, Artificial Sequence
  Description of Artificial Sequence: Synthetic oligonucleotide
uggaccauggaagccccag

SEQ ID NO: 346071 - RNA, 19 nt, Artificial Sequence
  Description of Artificial Sequence: Synthetic oligonucleotide
cugcauaugccgugcugcc

SEQ ID NO: 346072 - RNA, 19 nt, Artificial Sequence
  Description of Artificial Sequence: Synthetic oligonucleotide
caacauucgacagguauga

SEQ ID NO: 346073 - RNA, 19 nt, Artificial Sequence
  Description of Artificial Sequence: Synthetic oligonucleotide
agcuugcuucuuucgaaca

SEQ ID NO: 346074 - RNA, 19 nt, Artificial Sequence
  Description of Artificial Sequence: Synthetic oligonucleotide
gaaaugucgucauaaucuu

SEQ ID NO: 346075 - RNA, 19 nt, Artificial Sequence
  Description of Artificial Sequence: Synthetic oligonucleotide
ucgcccugaacagugguga

SEQ ID NO: 346076 - RNA, 19 nt, Artificial Sequence
  Description of Artificial Sequence: Synthetic oligonucleotide
cucuuggggauaagcuacc

SEQ ID NO: 346077 - RNA, 19 nt, Artificial Sequence
  Description of Artificial Sequence: Synthetic oligonucleotide
cagcccaguucuuauuuug

SEQ ID NO: 346078 - RNA, 19 nt, Artificial Sequence
  Description of Artificial Sequence: Synthetic oligonucleotide
uguagcacgcacgccuuug

SEQ ID NO: 346079 - RNA, 19 nt, Artificial Sequence
  Description of Artificial Sequence: Synthetic oligonucleotide
cuuucgaacauuccagugu

SEQ ID NO: 346080 - RNA, 19 nt, Artificial Sequence
  Description of Artificial Sequence: Synthetic oligonucleotide
cacgccuuugguccaaaug

SEQ ID NO: 346081 - RNA, 19 nt, Artificial Sequence
  Description of Artificial Sequence: Synthetic oligonucleotide
guaaccaugauggccggca

SEQ ID NO: 346082 - RNA, 19 nt, Artificial Sequence
  Description of Artificial Sequence: Synthetic oligonucleotide
auuuacgugaaaacuccau

SEQ ID NO: 346083 - RNA, 19 nt, Artificial Sequence
  Description of Artificial Sequence: Synthetic oligonucleotide
cagucugguagcagcuugc

SEQ ID NO: 346084 - RNA, 19 nt, Artificial Sequence
  Description of Artificial Sequence: Synthetic oligonucleotide
cugcuuuccgcccucugug

SEQ ID NO: 346085 - RNA, 19 nt, Artificial Sequence
  Description of Artificial Sequence: Synthetic oligonucleotide
cucacaaucacagaugaau

SEQ ID NO: 346086 - RNA, 19 nt, Artificial Sequence
  Description of Artificial Sequence: Synthetic oligonucleotide
gauggcuaucuucuugucu

SEQ ID NO: 346087 - RNA, 19 nt, Artificial Sequence
  Description of Artificial Sequence: Synthetic oligonucleotide
gccucugauaggaugauug

SEQ ID NO: 346088 - RNA, 19 nt, Artificial Sequence
  Description of Artificial Sequence: Synthetic oligonucleotide
cccuggaaaagugaggagg

SEQ ID NO: 346089 - RNA, 19 nt, Artificial Sequence
  Description of Artificial Sequence: Synthetic oligonucleotide
ggcuccgagacuuggcccg

SEQ ID NO: 346090 - RNA, 19 nt, Artificial Sequence
  Description of Artificial Sequence: Synthetic oligonucleotide
aaggcguguacaagaaaau

SEQ ID NO: 346091 - RNA, 19 nt, Artificial Sequence
  Description of Artificial Sequence: Synthetic oligonucleotide
aggccuacugugcucacaa

SEQ ID NO: 346092 - RNA, 19 nt, Artificial Sequence
  Description of Artificial Sequence: Synthetic oligonucleotide
aguaggcuggcaucucgga

SEQ ID NO: 346093 - RNA, 19 nt, Artificial Sequence
  Description of Artificial Sequence: Synthetic oligonucleotide
acggcccauggagagagcg

SEQ ID NO: 346094 - RNA, 19 nt, Artificial Sequence
  Description of Artificial Sequence: Synthetic oligonucleotide
cacagauagagggcagcgg

SEQ ID NO: 346095 - RNA, 19 nt, Artificial Sequence
  Description of Artificial Sequence: Synthetic oligonucleotide
gcguguacaagaaaauaug

SEQ ID NO: 346096 - RNA, 19 nt, Artificial Sequence
  Description of Artificial Sequence: Synthetic oligonucleotide
uggcguauuuccugccucu

SEQ ID NO: 346097 - RNA, 19 nt, Artificial Sequence
  Description of Artificial Sequence: Synthetic oligonucleotide
uggguguaaccaugauggc

SEQ ID NO: 346098 - RNA, 19 nt, Artificial Sequence
  Description of Artificial Sequence: Synthetic oligonucleotide
aggaugauuguagcuccag

SEQ ID NO: 346099 - RNA, 19 nt, Artificial Sequence
  Description of Artificial Sequence: Synthetic oligonucleotide
gagagagcggguccuccug

SEQ ID NO: 346100 - RNA, 19 nt, Artificial Sequence
  Description of Artificial Sequence: Synthetic oligonucleotide
ugacacgccuugccaaccu

SEQ ID NO: 346101 - RNA, 19 nt, Artificial Sequence
  Description of Artificial Sequence: Synthetic oligonucleotide
gccggaaugacagcgagug

SEQ ID NO: 346102 - RNA, 19 nt, Artificial Sequence
  Description of Artificial Sequence: Synthetic oligonucleotide
cugguuggaaaugucguca

SEQ ID NO: 346103 - RNA, 19 nt, Artificial Sequence
  Description of Artificial Sequence: Synthetic oligonucleotide
ccaaccuauggcaaagcug

SEQ ID NO: 346104 - RNA, 19 nt, Artificial Sequence
  Description of Artificial Sequence: Synthetic oligonucleotide
caggccguuuucacugagg

SEQ ID NO: 346105 - RNA, 19 nt, Artificial Sequence
  Description of Artificial Sequence: Synthetic oligonucleotide
gucacucacagggucacac

SEQ ID NO: 346106 - RNA, 19 nt, Artificial Sequence
  Description of Artificial Sequence: Synthetic oligonucleotide
cacucacuauagcaggguc

SEQ ID NO: 346107 - RNA, 19 nt, Artificial Sequence
  Description of Artificial Sequence: Synthetic oligonucleotide
ggguguaaccaugauggcc

SEQ ID NO: 346108 - RNA, 19 nt, Artificial Sequence
  Description of Artificial Sequence: Synthetic oligonucleotide
uucacggaaagugcagaau

SEQ ID NO: 346109 - RNA, 19 nt, Artificial Sequence
  Description of Artificial Sequence: Synthetic oligonucleotide
ggcauuccccucuaucacc

SEQ ID NO: 346110 - RNA, 19 nt, Artificial Sequence
  Description of Artificial Sequence: Synthetic oligonucleotide
uugguccaaauguggucac

SEQ ID NO: 346111 - RNA, 19 nt, Artificial Sequence
  Description of Artificial Sequence: Synthetic oligonucleotide
gcaguaggcuggcaucucg

SEQ ID NO: 346112 - RNA, 19 nt, Artificial Sequence
  Description of Artificial Sequence: Synthetic oligonucleotide
aggccaugacaggaggcac

SEQ ID NO: 346113 - RNA, 19 nt, Artificial Sequence
  Description of Artificial Sequence: Synthetic oligonucleotide
ucuuggggauaagcuacca

SEQ ID NO: 346114 - RNA, 19 nt, Artificial Sequence
  Description of Artificial Sequence: Synthetic oligonucleotide
uuccggggacagcauaauc

SEQ ID NO: 346115 - RNA, 19 nt, Artificial Sequence
  Description of Artificial Sequence: Synthetic oligonucleotide
uguugccgauggcugugca

SEQ ID NO: 346116 - RNA, 19 nt, Artificial Sequence
  Description of Artificial Sequence: Synthetic oligonucleotide
gcuuucgucacucacuaua

SEQ ID NO: 346117 - RNA, 19 nt, Artificial Sequence
  Description of Artificial Sequence: Synthetic oligonucleotide
gcuuaacagcacugaagcc

SEQ ID NO: 346118 - RNA, 19 nt, Artificial Sequence
  Description of Artificial Sequence: Synthetic oligonucleotide
gucgggguggacacgauca

SEQ ID NO: 346119 - RNA, 19 nt, Artificial Sequence
  Description of Artificial Sequence: Synthetic oligonucleotide
agagagcggguccuccuga

SEQ ID NO: 346120 - RNA, 19 nt, Artificial Sequence
  Description of Artificial Sequence: Synthetic oligonucleotide
gaugggccggaaugacagc

SEQ ID NO: 346121 - RNA, 19 nt, Artificial Sequence
  Description of Artificial Sequence: Synthetic oligonucleotide
gacuugucaacacuugcuu

SEQ ID NO: 346122 - RNA, 19 nt, Artificial Sequence
  Description of Artificial Sequence: Synthetic oligonucleotide
uauggauggcuaucuucuu

SEQ ID NO: 346123 - RNA, 19 nt, Artificial Sequence
  Description of Artificial Sequence: Synthetic oligonucleotide
uggcuaucuucuugucucu

SEQ ID NO: 346124 - RNA, 19 nt, Artificial Sequence
  Description of Artificial Sequence: Synthetic oligonucleotide
gugauaagguguccaucca

SEQ ID NO: 346125 - RNA, 19 nt, Artificial Sequence
  Description of Artificial Sequence: Synthetic oligonucleotide
cgucacucacuauagcagg

SEQ ID NO: 346126 - RNA, 19 nt, Artificial Sequence
  Description of Artificial Sequence: Synthetic oligonucleotide
cugauuuaugggaauuccu

SEQ ID NO: 346127 - RNA, 19 nt, Artificial Sequence
  Description of Artificial Sequence: Synthetic oligonucleotide
cuauagcaggguccuccag

SEQ ID NO: 346128 - RNA, 19 nt, Artificial Sequence
  Description of Artificial Sequence: Synthetic oligonucleotide
acaaggcguguacaagaaa

SEQ ID NO: 346129 - RNA, 19 nt, Artificial Sequence
  Description of Artificial Sequence: Synthetic oligonucleotide
ugcuuuccgcccucugugu

SEQ ID NO: 346130 - RNA, 19 nt, Artificial Sequence
  Description of Artificial Sequence: Synthetic oligonucleotide
cuugccaaccuauggcaaa

SEQ ID NO: 346131 - RNA, 19 nt, Artificial Sequence
  Description of Artificial Sequence: Synthetic oligonucleotide
ugggccggaaugacagcga

SEQ ID NO: 346132 - RNA, 19 nt, Artificial Sequence
  Description of Artificial Sequence: Synthetic oligonucleotide
gggaagugaggccuagcug

SEQ ID NO: 346133 - RNA, 19 nt, Artificial Sequence
  Description of Artificial Sequence: Synthetic oligonucleotide
uguaaccaugauggccggc

SEQ ID NO: 346134 - RNA, 19 nt, Artificial Sequence
  Description of Artificial Sequence: Synthetic oligonucleotide
uagcacgcacgccuuuggu

SEQ ID NO: 346135 - RNA, 19 nt, Artificial Sequence
  Description of Artificial Sequence: Synthetic oligonucleotide
gugaccccaagaguugcag

SEQ ID NO: 346136 - RNA, 19 nt, Artificial Sequence
  Description of Artificial Sequence: Synthetic oligonucleotide
ggcccauggagagagcggg

SEQ ID NO: 346137 - RNA, 19 nt, Artificial Sequence
  Description of Artificial Sequence: Synthetic oligonucleotide
cccucuaaaucuucacaag

SEQ ID NO: 346138 - RNA, 19 nt, Artificial Sequence
  Description of Artificial Sequence: Synthetic oligonucleotide
cuucacggaaagugcagaa

SEQ ID NO: 346139 - RNA, 19 nt, Artificial Sequence
  Description of Artificial Sequence: Synthetic oligonucleotide
ggcaccuagccaugacacg

SEQ ID NO: 346140 - RNA, 19 nt, Artificial Sequence
  Description of Artificial Sequence: Synthetic oligonucleotide
gccuacugugcucacaauc

SEQ ID NO: 346141 - RNA, 19 nt, Artificial Sequence
  Description of Artificial Sequence: Synthetic oligonucleotide
gcuugcaggguccugaaua

SEQ ID NO: 346142 - RNA, 19 nt, Artificial Sequence
  Description of Artificial Sequence: Synthetic oligonucleotide
cacgccuugccaaccuaug

SEQ ID NO: 346143 - RNA, 19 nt, Artificial Sequence
  Description of Artificial Sequence: Synthetic oligonucleotide
cgaugggccggaaugacag

SEQ ID NO: 346144 - RNA, 19 nt, Artificial Sequence
  Description of Artificial Sequence: Synthetic oligonucleotide
aguguacacaggauuuaaa

SEQ ID NO: 346145 - RNA, 19 nt, Artificial Sequence
  Description of Artificial Sequence: Synthetic oligonucleotide
ggggauaagcuaccacagc

SEQ ID NO: 346146 - RNA, 19 nt, Artificial Sequence
  Description of Artificial Sequence: Synthetic oligonucleotide
augccgugcugcccgucgg

SEQ ID NO: 346147 - RNA, 19 nt, Artificial Sequence
  Description of Artificial Sequence: Synthetic oligonucleotide
gcggcauuccccucuauca

SEQ ID NO: 346148 - RNA, 19 nt, Artificial Sequence
  Description of Artificial Sequence: Synthetic oligonucleotide
gggcaaggcucucaaacca

SEQ ID NO: 346149 - RNA, 19 nt, Artificial Sequence
  Description of Artificial Sequence: Synthetic oligonucleotide
aggcguguacaagaaaaua

SEQ ID NO: 346150 - RNA, 19 nt, Artificial Sequence
  Description of Artificial Sequence: Synthetic oligonucleotide
ggaaagguacaggcccugg

SEQ ID NO: 346151 - RNA, 19 nt, Artificial Sequence
  Description of Artificial Sequence: Synthetic oligonucleotide
cuagaucagucugguagca

SEQ ID NO: 346152 - RNA, 19 nt, Artificial Sequence
  Description of Artificial Sequence: Synthetic oligonucleotide
gguuugucaaggccagguc

SEQ ID NO: 346153 - RNA, 19 nt, Artificial Sequence
  Description of Artificial Sequence: Synthetic oligonucleotide
gcagauggguguaaccaug

SEQ ID NO: 346154 - RNA, 19 nt, Artificial Sequence
  Description of Artificial Sequence: Synthetic oligonucleotide
gaggcugaaucagggcuca

SEQ ID NO: 346155 - RNA, 19 nt, Artificial Sequence
  Description of Artificial Sequence: Synthetic oligonucleotide
gaagucuaucugguuggaa

SEQ ID NO: 346156 - RNA, 19 nt, Artificial Sequence
  Description of Artificial Sequence: Synthetic oligonucleotide
ccccaugacaugcugagca

SEQ ID NO: 346157 - RNA, 19 nt, Artificial Sequence
  Description of Artificial Sequence: Synthetic oligonucleotide
cugccaagugaccccaaga

SEQ ID NO: 346158 - RNA, 19 nt, Artificial Sequence
  Description of Artificial Sequence: Synthetic oligonucleotide
gggauuggaaguucucaaa

SEQ ID NO: 346159 - RNA, 19 nt, Artificial Sequence
  Description of Artificial Sequence: Synthetic oligonucleotide
cucugauaggaugauugua

SEQ ID NO: 346160 - RNA, 19 nt, Artificial Sequence
  Description of Artificial Sequence: Synthetic oligonucleotide
ucgaccccugcagggacca

SEQ ID NO: 346161 - RNA, 19 nt, Artificial Sequence
  Description of Artificial Sequence: Synthetic oligonucleotide
uagccaugacacgccuugc

SEQ ID NO: 346162 - RNA, 19 nt, Artificial Sequence
  Description of Artificial Sequence: Synthetic oligonucleotide
cuugcaggguccugaauau

SEQ ID NO: 346163 - RNA, 19 nt, Artificial Sequence
  Description of Artificial Sequence: Synthetic oligonucleotide
gggaauuccugaccuggga

SEQ ID NO: 346164 - RNA, 19 nt, Artificial Sequence
  Description of Artificial Sequence: Synthetic oligonucleotide
ggucucauccccaugacau

SEQ ID NO: 346165 - RNA, 19 nt, Artificial Sequence
  Description of Artificial Sequence: Synthetic oligonucleotide
gggguggacacgaucacuc

SEQ ID NO: 346166 - RNA, 19 nt, Artificial Sequence
  Description of Artificial Sequence: Synthetic oligonucleotide
aggaggcauagaguagggu

SEQ ID NO: 346167 - RNA, 19 nt, Artificial Sequence
  Description of Artificial Sequence: Synthetic oligonucleotide
gggccggaaugacagcgag

SEQ ID NO: 346168 - RNA, 19 nt, Artificial Sequence
  Description of Artificial Sequence: Synthetic oligonucleotide
guugccgauggcugugcaa

SEQ ID NO: 346169 - RNA, 19 nt, Artificial Sequence
  Description of Artificial Sequence: Synthetic oligonucleotide
ggcguguacaagaaaauau

SEQ ID NO: 346170 - RNA, 19 nt, Artificial Sequence
  Description of Artificial Sequence: Synthetic oligonucleotide
gcauaugaugaagucuauc

SEQ ID NO: 346171 - RNA, 19 nt, Artificial Sequence
  Description of Artificial Sequence: Synthetic oligonucleotide
gcuugagggcucagguugg

SEQ ID NO: 346172 - RNA, 19 nt, Artificial Sequence
  Description of Artificial Sequence: Synthetic oligonucleotide
gccaugacacgccuugcca

SEQ ID NO: 346173 - RNA, 19 nt, Artificial Sequence
  Description of Artificial Sequence: Synthetic oligonucleotide
gugcaaaguguugccucug

SEQ ID NO: 346174 - RNA, 19 nt, Artificial Sequence
  Description of Artificial Sequence: Synthetic oligonucleotide
agggaccacgaugggccgg

SEQ ID NO: 346175 - RNA, 19 nt, Artificial Sequence
  Description of Artificial Sequence: Synthetic oligonucleotide
cacagaugccugacagcca

SEQ ID NO: 346176 - RNA, 19 nt, Artificial Sequence
  Description of Artificial Sequence: Synthetic oligonucleotide
gccauuauggauggcuauc

SEQ ID NO: 346177 - RNA, 19 nt, Artificial Sequence
  Description of Artificial Sequence: Synthetic oligonucleotide
uccccucuaucaccugauu

SEQ ID NO: 346178 - RNA, 19 nt, Artificial Sequence
  Description of Artificial Sequence: Synthetic oligonucleotide
ccccucuaucaccugauuc

SEQ ID NO: 346179 - RNA, 19 nt, Artificial Sequence
  Description of Artificial Sequence: Synthetic oligonucleotide
agcucgaccccugcaggga

SEQ ID NO: 346180 - RNA, 19 nt, Artificial Sequence
  Description of Artificial Sequence: Synthetic oligonucleotide
cuggaaaagugaggaggca

SEQ ID NO: 346181 - RNA, 19 nt, Artificial Sequence
  Description of Artificial Sequence: Synthetic oligonucleotide
acgaugggccggaaugaca

SEQ ID NO: 346182 - RNA, 19 nt, Artificial Sequence
  Description of Artificial Sequence: Synthetic oligonucleotide
auaugccgugcugcccguc

SEQ ID NO: 346183 - RNA, 19 nt, Artificial Sequence
  Description of Artificial Sequence: Synthetic oligonucleotide
ugcaguaggcuggcaucuc

SEQ ID NO: 346184 - RNA, 19 nt, Artificial Sequence
  Description of Artificial Sequence: Synthetic oligonucleotide
agcuuucgucacucacuau

SEQ ID NO: 346185 - RNA, 19 nt, Artificial Sequence
  Description of Artificial Sequence: Synthetic oligonucleotide
aggccauuauggauggcua

SEQ ID NO: 346186 - RNA, 19 nt, Artificial Sequence
  Description of Artificial Sequence: Synthetic oligonucleotide
ggcugaaucagggcucaac

SEQ ID NO: 346187 - RNA, 19 nt, Artificial Sequence
  Description of Artificial Sequence: Synthetic oligonucleotide
aaccgcuggcuugcagggu

SEQ ID NO: 346188 - RNA, 19 nt, Artificial Sequence
  Description of Artificial Sequence: Synthetic oligonucleotide
cguguacaagaaaauaugu

SEQ ID NO: 346189 - RNA, 19 nt, Artificial Sequence
  Description of Artificial Sequence: Synthetic oligonucleotide
acacgccuugccaaccuau

SEQ ID NO: 346190 - RNA, 19 nt, Artificial Sequence
  Description of Artificial Sequence: Synthetic oligonucleotide
cacggaaagugcagaauuu

SEQ ID NO: 346191 - RNA, 19 nt, Artificial Sequence
  Description of Artificial Sequence: Synthetic oligonucleotide
gaggccuacugugcucaca

SEQ ID NO: 346192 - RNA, 19 nt, Artificial Sequence
  Description of Artificial Sequence: Synthetic oligonucleotide
gacacgccuugccaaccua

SEQ ID NO: 346193 - RNA, 19 nt, Artificial Sequence
  Description of Artificial Sequence: Synthetic oligonucleotide
cagauagagggcagcgggu

SEQ ID NO: 346194 - RNA, 19 nt, Artificial Sequence
  Description of Artificial Sequence: Synthetic oligonucleotide
gcguauuuccugccucuuc

SEQ ID NO: 346195 - RNA, 19 nt, Artificial Sequence
  Description of Artificial Sequence: Synthetic oligonucleotide
ccaucgcccugaacagugg

SEQ ID NO: 346196 - RNA, 19 nt, Artificial Sequence
  Description of Artificial Sequence: Synthetic oligonucleotide
gcuuuccgcccucuguguc

SEQ ID NO: 346197 - RNA, 19 nt, Artificial Sequence
  Description of Artificial Sequence: Synthetic oligonucleotide
ccggccucugauaggauga

SEQ ID NO: 346198 - RNA, 19 nt, Artificial Sequence
  Description of Artificial Sequence: Synthetic oligonucleotide
agggcucagguuggaggcu

SEQ ID NO: 346199 - RNA, 19 nt, Artificial Sequence
  Description of Artificial Sequence: Synthetic oligonucleotide
ccggaaugacagcgagugg

SEQ ID NO: 346200 - RNA, 19 nt, Artificial Sequence
  Description of Artificial Sequence: Synthetic oligonucleotide
gccaaccuauggcaaagcu

SEQ ID NO: 346201 - RNA, 19 nt, Artificial Sequence
  Description of Artificial Sequence: Synthetic oligonucleotide
ccaugacacgccuugccaa

SEQ ID NO: 346202 - RNA, 19 nt, Artificial Sequence
  Description of Artificial Sequence: Synthetic oligonucleotide
gggagagauguaggacacc

SEQ ID NO: 346203 - RNA, 19 nt, Artificial Sequence
  Description of Artificial Sequence: Synthetic oligonucleotide
cuuggcccggccucugaua

SEQ ID NO: 346204 - RNA, 19 nt, Artificial Sequence
  Description of Artificial Sequence: Synthetic oligonucleotide
ggcagauggguguaaccau

SEQ ID NO: 346205 - RNA, 19 nt, Artificial Sequence
  Description of Artificial Sequence: Synthetic oligonucleotide
ccucaggauaacagcggca

SEQ ID NO: 346206 - RNA, 19 nt, Artificial Sequence
  Description of Artificial Sequence: Synthetic oligonucleotide
cacgcacgccuuuggucca

SEQ ID NO: 346207 - RNA, 19 nt, Artificial Sequence
  Description of Artificial Sequence: Synthetic oligonucleotide
cauuauggauggcuaucuu

SEQ ID NO: 346208 - RNA, 19 nt, Artificial Sequence
  Description of Artificial Sequence: Synthetic oligonucleotide
cacugaagccagaccacau

SEQ ID NO: 346209 - RNA, 19 nt, Artificial Sequence
  Description of Artificial Sequence: Synthetic oligonucleotide
cuugagggcucagguugga

SEQ ID NO: 346210 - RNA, 19 nt, Artificial Sequence
  Description of Artificial Sequence: Synthetic oligonucleotide
cgugaaaacuccauguguu

SEQ ID NO: 346211 - RNA, 19 nt, Artificial Sequence
  Description of Artificial Sequence: Synthetic oligonucleotide
ggcccggccucugauagga

SEQ ID NO: 346212 - RNA, 19 nt, Artificial Sequence
  Description of Artificial Sequence: Synthetic oligonucleotide
cacggcccauggagagagc

SEQ ID NO: 346213 - RNA, 19 nt, Artificial Sequence
  Description of Artificial Sequence: Synthetic oligonucleotide
caucgcccugaacaguggu

SEQ ID NO: 346214 - RNA, 19 nt, Artificial Sequence
  Description of Artificial Sequence: Synthetic oligonucleotide
cggcauuccccucuaucac

SEQ ID NO: 346215 - RNA, 19 nt, Artificial Sequence
  Description of Artificial Sequence: Synthetic oligonucleotide
gaauuucaacagacugauu

SEQ ID NO: 346216 - RNA, 19 nt, Artificial Sequence
  Description of Artificial Sequence: Synthetic oligonucleotide
gcuuccggggacagcauaa

SEQ ID NO: 346217 - RNA, 19 nt, Artificial Sequence
  Description of Artificial Sequence: Synthetic oligonucleotide
ccugaauaugcaugauggu

SEQ ID NO: 346218 - RNA, 19 nt, Artificial Sequence
  Description of Artificial Sequence: Synthetic oligonucleotide
ccaggccguuuucacugag

SEQ ID NO: 346219 - RNA, 19 nt, Artificial Sequence
  Description of Artificial Sequence: Synthetic oligonucleotide
cagaggcaccuagccauga

SEQ ID NO: 346220 - RNA, 19 nt, Artificial Sequence
  Description of Artificial Sequence: Synthetic oligonucleotide
ggccauuauggauggcuau

SEQ ID NO: 346221 - RNA, 19 nt, Artificial Sequence
  Description of Artificial Sequence: Synthetic oligonucleotide
ccagcgggagagcaagaga

SEQ ID NO: 346222 - RNA, 19 nt, Artificial Sequence
  Description of Artificial Sequence: Synthetic oligonucleotide
ccauuauggauggcuaucu

SEQ ID NO: 346223 - RNA, 19 nt, Artificial Sequence
  Description of Artificial Sequence: Synthetic oligonucleotide
gcuccgagacuuggcccgg

SEQ ID NO: 346224 - RNA, 19 nt, Artificial Sequence
  Description of Artificial Sequence: Synthetic oligonucleotide
cauacacgaucauguuguu

SEQ ID NO: 346225 - RNA, 19 nt, Artificial Sequence
  Description of Artificial Sequence: Synthetic oligonucleotide
ugguagcagcuugcuucua

SEQ ID NO: 346226 - RNA, 19 nt, Artificial Sequence
  Description of Artificial Sequence: Synthetic oligonucleotide
cccugcuaugaggaaugug

SEQ ID NO: 346227 - RNA, 19 nt, Artificial Sequence
  Description of Artificial Sequence: Synthetic oligonucleotide
gggaccacgaugggccgga

SEQ ID NO: 346228 - RNA, 19 nt, Artificial Sequence
  Description of Artificial Sequence: Synthetic oligonucleotide
cauaugccgugcugcccgu

SEQ ID NO: 346229 - RNA, 19 nt, Artificial Sequence
  Description of Artificial Sequence: Synthetic oligonucleotide
ggccggcacguuggggugg

SEQ ID NO: 346230 - RNA, 19 nt, Artificial Sequence
  Description of Artificial Sequence: Synthetic oligonucleotide
gacccaugcuccagacccu

SEQ ID NO: 346231 - RNA, 19 nt, Artificial Sequence
  Description of Artificial Sequence: Synthetic oligonucleotide
cuuucaccacccugaccuu

SEQ ID NO: 346232 - RNA, 19 nt, Artificial Sequence
  Description of Artificial Sequence: Synthetic oligonucleotide
gcucacaaucacagaugaa

SEQ ID NO: 346233 - RNA, 19 nt, Artificial Sequence
  Description of Artificial Sequence: Synthetic oligonucleotide
guggaccauggaagcccca

SEQ ID NO: 346234 - RNA, 19 nt, Artificial Sequence
  Description of Artificial Sequence: Synthetic oligonucleotide
ggcacggcccauggagaga

SEQ ID NO: 346235 - RNA, 19 nt, Artificial Sequence
  Description of Artificial Sequence: Synthetic oligonucleotide
cuuccggggacagcauaau

SEQ ID NO: 346236 - RNA, 19 nt, Artificial Sequence
  Description of Artificial Sequence: Synthetic oligonucleotide
gcacacucuugggagacuu

SEQ ID NO: 346237 - RNA, 19 nt, Artificial Sequence
  Description of Artificial Sequence: Synthetic oligonucleotide
gguccugaauaugcaugau

SEQ ID NO: 346238 - RNA, 19 nt, Artificial Sequence
  Description of Artificial Sequence: Synthetic oligonucleotide
gcagugguaugaggcugaa

SEQ ID NO: 346239 - RNA, 19 nt, Artificial Sequence
  Description of Artificial Sequence: Synthetic oligonucleotide
ccggcuccucaggauaaca

SEQ ID NO: 346240 - RNA, 19 nt, Artificial Sequence
  Description of Artificial Sequence: Synthetic oligonucleotide
gccggcuccucaggauaac

SEQ ID NO: 346241 - RNA, 19 nt, Artificial Sequence
  Description of Artificial Sequence: Synthetic oligonucleotide
gacacccagcccaguucuu

SEQ ID NO: 346242 - RNA, 19 nt, Artificial Sequence
  Description of Artificial Sequence: Synthetic oligonucleotide
cuguagcacgcacgccuuu

SEQ ID NO: 346243 - RNA, 19 nt, Artificial Sequence
  Description of Artificial Sequence: Synthetic oligonucleotide
gcaguccccucuaaaucuu

SEQ ID NO: 346244 - RNA, 19 nt, Artificial Sequence
  Description of Artificial Sequence: Synthetic oligonucleotide
gcccgucgggguggacacg

SEQ ID NO: 346245 - RNA, 19 nt, Artificial Sequence
  Description of Artificial Sequence: Synthetic oligonucleotide
ggccggaaugacagcgagu

SEQ ID NO: 346246 - RNA, 19 nt, Artificial Sequence
  Description of Artificial Sequence: Synthetic oligonucleotide
cagugguaugaggcugaau

SEQ ID NO: 346247 - RNA, 19 nt, Artificial Sequence
  Description of Artificial Sequence: Synthetic oligonucleotide
gccggcacguuggggugga

SEQ ID NO: 346248 - RNA, 19 nt, Artificial Sequence
  Description of Artificial Sequence: Synthetic oligonucleotide
gcacgccuuugguccaaau

SEQ ID NO: 346249 - RNA, 19 nt, Artificial Sequence
  Description of Artificial Sequence: Synthetic oligonucleotide
gcccauggagagagcgggu

SEQ ID NO: 346250 - RNA, 19 nt, Artificial Sequence
  Description of Artificial Sequence: Synthetic oligonucleotide
gcccugcuaugaggaaugu

SEQ ID NO: 346251 - RNA, 19 nt, Artificial Sequence
  Description of Artificial Sequence: Synthetic oligonucleotide
ggaccacgaugggccggaa

SEQ ID NO: 346252 - RNA, 19 nt, Artificial Sequence
  Description of Artificial Sequence: Synthetic oligonucleotide
cgggguggacacgaucacu

SEQ ID NO: 346253 - RNA, 19 nt, Artificial Sequence
  Description of Artificial Sequence: Synthetic oligonucleotide
cgcccugaacaguggugau

SEQ ID NO: 346254 - RNA, 19 nt, Artificial Sequence
  Description of Artificial Sequence: Synthetic oligonucleotide
ccggcacguugggguggac

SEQ ID NO: 346255 - RNA, 19 nt, Artificial Sequence
  Description of Artificial Sequence: Synthetic oligonucleotide
cgaccccugcagggaccac

SEQ ID NO: 346256 - RNA, 19 nt, Artificial Sequence
  Description of Artificial Sequence: Synthetic oligonucleotide
ccgucgggguggacacgau

SEQ ID NO: 346257 - RNA, 19 nt, Artificial Sequence
  Description of Artificial Sequence: Synthetic oligonucleotide
aaagaagucccucucgggc

SEQ ID NO: 346258 - RNA, 19 nt, Artificial Sequence
  Description of Artificial Sequence: Synthetic oligonucleotide
uauguagagugucugagag

SEQ ID NO: 346259 - RNA, 19 nt, Artificial Sequence
  Description of Artificial Sequence: Synthetic oligonucleotide
aauagacuucuccagaugu

SEQ ID NO: 346260 - RNA, 19 nt, Artificial Sequence
  Description of Artificial Sequence: Synthetic oligonucleotide
aucucaaccacgcaauacc

SEQ ID NO: 346261 - RNA, 19 nt, Artificial Sequence
  Description of Artificial Sequence: Synthetic oligonucleotide
aaccaaaccucacuccugc

SEQ ID NO: 346262 - RNA, 19 nt, Artificial Sequence
  Description of Artificial Sequence: Synthetic oligonucleotide
ugucaguuuucucacagag

SEQ ID NO: 346263 - RNA, 19 nt, Artificial Sequence
  Description of Artificial Sequence: Synthetic oligonucleotide
acucgcauucaucucaacc

SEQ ID NO: 346264 - RNA, 19 nt, Artificial Sequence
  Description of Artificial Sequence: Synthetic oligonucleotide
aaugcguguacggaaggcc

SEQ ID NO: 346265 - RNA, 19 nt, Artificial Sequence
  Description of Artificial Sequence: Synthetic oligonucleotide
ugccauacagagaacagcc

SEQ ID NO: 346266 - RNA, 19 nt, Artificial Sequence
  Description of Artificial Sequence: Synthetic oligonucleotide
agugauacguggcacgugg

SEQ ID NO: 346267 - RNA, 19 nt, Artificial Sequence
  Description of Artificial Sequence: Synthetic oligonucleotide
gauaugguaaaagcgcugg

SEQ ID NO: 346268 - RNA, 19 nt, Artificial Sequence
  Description of Artificial Sequence: Synthetic oligonucleotide
uguagagugucugagagcu

SEQ ID NO: 346269 - RNA, 19 nt, Artificial Sequence
  Description of Artificial Sequence: Synthetic oligonucleotide
auagagaaacuguagggug

SEQ ID NO: 346270 - RNA, 19 nt, Artificial Sequence
  Description of Artificial Sequence: Synthetic oligonucleotide
uaagaucaggucuuggccc

SEQ ID NO: 346271 - RNA, 19 nt, Artificial Sequence
  Description of Artificial Sequence: Synthetic oligonucleotide
ugacuuuuccacuugccag

SEQ ID NO: 346272 - RNA, 19 nt, Artificial Sequence
  Description of Artificial Sequence: Synthetic oligonucleotide
ucgcauauugucaaccugc

SEQ ID NO: 346273 - RNA, 19 nt, Artificial Sequence
  Description of Artificial Sequence: Synthetic oligonucleotide
uggggaaagugauacgugg

SEQ ID NO: 346274 - RNA, 19 nt, Artificial Sequence
  Description of Artificial Sequence: Synthetic oligonucleotide
ucuagccaaggccaaagcc

SEQ ID NO: 346275 - RNA, 19 nt, Artificial Sequence
  Description of Artificial Sequence: Synthetic oligonucleotide
uccacauucggcuccagcc

SEQ ID NO: 346276 - RNA, 19 nt, Artificial Sequence
  Description of Artificial Sequence: Synthetic oligonucleotide
caauaagcugcuuagccug

SEQ ID NO: 346277 - RNA, 19 nt, Artificial Sequence
  Description of Artificial Sequence: Synthetic oligonucleotide
guaagaucaggucuuggcc

SEQ ID NO: 346278 - RNA, 19 nt, Artificial Sequence
  Description of Artificial Sequence: Synthetic oligonucleotide
ucuauacugggccuggccu

SEQ ID NO: 346279 - RNA, 19 nt, Artificial Sequence
  Description of Artificial Sequence: Synthetic oligonucleotide
aaggugugacuuuauaaau

SEQ ID NO: 346280 - RNA, 19 nt, Artificial Sequence
  Description of Artificial Sequence: Synthetic oligonucleotide
ugugaucugauguccuagg

SEQ ID NO: 346281 - RNA, 19 nt, Artificial Sequence
  Description of Artificial Sequence: Synthetic oligonucleotide
uugaaccggaaccaaaccu

SEQ ID NO: 346282 - RNA, 19 nt, Artificial Sequence
  Description of Artificial Sequence: Synthetic oligonucleotide
aggacuacggucaucacuc

SEQ ID NO: 346283 - RNA, 19 nt, Artificial Sequence
  Description of Artificial Sequence: Synthetic oligonucleotide
ucuccugaugaccacacgu

SEQ ID NO: 346284 - RNA, 19 nt, Artificial Sequence
  Description of Artificial Sequence: Synthetic oligonucleotide
uaaauagacuucuccagau

SEQ ID NO: 346285 - RNA, 19 nt, Artificial Sequence
  Description of Artificial Sequence: Synthetic oligonucleotide
ugguaaaagcgcugggagg

SEQ ID NO: 346286 - RNA, 19 nt, Artificial Sequence
  Description of Artificial Sequence: Synthetic oligonucleotide
uguugauacaggcacggau

SEQ ID NO: 346287 - RNA, 19 nt, Artificial Sequence
  Description of Artificial Sequence: Synthetic oligonucleotide
agagcguccacccuuucag

SEQ ID NO: 346288 - RNA, 19 nt, Artificial Sequence
  Description of Artificial Sequence: Synthetic oligonucleotide
aguuuucucacagagggca

SEQ ID NO: 346289 - RNA, 19 nt, Artificial Sequence
  Description of Artificial Sequence: Synthetic oligonucleotide
uuuuguguaaggugugacu

SEQ ID NO: 346290 - RNA, 19 nt, Artificial Sequence
  Description of Artificial Sequence: Synthetic oligonucleotide
ugcuuuuguacauucccug

SEQ ID NO: 346291 - RNA, 19 nt, Artificial Sequence
  Description of Artificial Sequence: Synthetic oligonucleotide
cacgcaauacccugcaugc

SEQ ID NO: 346292 - RNA, 19 nt, Artificial Sequence
  Description of Artificial Sequence: Synthetic oligonucleotide
agaacauugauggcugccg

SEQ ID NO: 346293 - RNA, 19 nt, Artificial Sequence
  Description of Artificial Sequence: Synthetic oligonucleotide
uguggucuugccuaguccu

SEQ ID NO: 346294 - RNA, 19 nt, Artificial Sequence
  Description of Artificial Sequence: Synthetic oligonucleotide
uuagccugguaggugaggg

SEQ ID NO: 346295 - RNA, 19 nt, Artificial Sequence
  Description of Artificial Sequence: Synthetic oligonucleotide
aaccacgugugccagugug

SEQ ID NO: 346296 - RNA, 19 nt, Artificial Sequence
  Description of Artificial Sequence: Synthetic oligonucleotide
ugcuucaaugcguguacgg

SEQ ID NO: 346297 - RNA, 19 nt, Artificial Sequence
  Description of Artificial Sequence: Synthetic oligonucleotide
ugcguagcugcuucaaugc

SEQ ID NO: 346298 - RNA, 19 nt, Artificial Sequence
  Description of Artificial Sequence: Synthetic oligonucleotide
gacacucaagagaacauug

SEQ ID NO: 346299 - RNA, 19 nt, Artificial Sequence
  Description of Artificial Sequence: Synthetic oligonucleotide
uugcguagcugcuucaaug

SEQ ID NO: 346300 - RNA, 19 nt, Artificial Sequence
  Description of Artificial Sequence: Synthetic oligonucleotide
acccuugcgauucaggaca

SEQ ID NO: 346301 - RNA, 19 nt, Artificial Sequence
  Description of Artificial Sequence: Synthetic oligonucleotide
uccugaugaccacacgucc

SEQ ID NO: 346302 - RNA, 19 nt, Artificial Sequence
  Description of Artificial Sequence: Synthetic oligonucleotide
cacacguccaaagaagucc

SEQ ID NO: 346303 - RNA, 19 nt, Artificial Sequence
  Description of Artificial Sequence: Synthetic oligonucleotide
aacacccucguugaaccgg

SEQ ID NO: 346304 - RNA, 19 nt, Artificial Sequence
  Description of Artificial Sequence: Synthetic oligonucleotide
uuuguguaaggugugacuu

SEQ ID NO: 346305 - RNA, 19 nt, Artificial Sequence
  Description of Artificial Sequence: Synthetic oligonucleotide
guuagugaagucaucgcug

SEQ ID NO: 346306 - RNA, 19 nt, Artificial Sequence
  Description of Artificial Sequence: Synthetic oligonucleotide
cucgcauucaucucaacca

SEQ ID NO: 346307 - RNA, 19 nt, Artificial Sequence
  Description of Artificial Sequence: Synthetic oligonucleotide
gguaagaucaggucuuggc

SEQ ID NO: 346308 - RNA, 19 nt, Artificial Sequence
  Description of Artificial Sequence: Synthetic oligonucleotide
gaguuggcggaacauggag

SEQ ID NO: 346309 - RNA, 19 nt, Artificial Sequence
  Description of Artificial Sequence: Synthetic oligonucleotide
ugaguagugugcuggccag

SEQ ID NO: 346310 - RNA, 19 nt, Artificial Sequence
  Description of Artificial Sequence: Synthetic oligonucleotide
ugggccuuuugucacggag

SEQ ID NO: 346311 - RNA, 19 nt, Artificial Sequence
  Description of Artificial Sequence: Synthetic oligonucleotide
cucccgggcaauaagcugc

SEQ ID NO: 346312 - RNA, 19 nt, Artificial Sequence
  Description of Artificial Sequence: Synthetic oligonucleotide
aaagugauacguggcacgu

SEQ ID NO: 346313 - RNA, 19 nt, Artificial Sequence
  Description of Artificial Sequence: Synthetic oligonucleotide
guaggguguugauacaggc

SEQ ID NO: 346314 - RNA, 19 nt, Artificial Sequence
  Description of Artificial Sequence: Synthetic oligonucleotide
accgacuccauuugcguag

SEQ ID NO: 346315 - RNA, 19 nt, Artificial Sequence
  Description of Artificial Sequence: Synthetic oligonucleotide
ugcuuagccugguagguga

SEQ ID NO: 346316 - RNA, 19 nt, Artificial Sequence
  Description of Artificial Sequence: Synthetic oligonucleotide
uugagcaagagagcauggg

SEQ ID NO: 346317 - RNA, 19 nt, Artificial Sequence
  Description of Artificial Sequence: Synthetic oligonucleotide
aguguggucuugccuaguc

SEQ ID NO: 346318 - RNA, 19 nt, Artificial Sequence
  Description of Artificial Sequence: Synthetic oligonucleotide
agcguccacccuuucagac

SEQ ID NO: 346319 - RNA, 19 nt, Artificial Sequence
  Description of Artificial Sequence: Synthetic oligonucleotide
aguuggcggaacauggagc

SEQ ID NO: 346320 - RNA, 19 nt, Artificial Sequence
  Description of Artificial Sequence: Synthetic oligonucleotide
aaaccucacuccugcccac

SEQ ID NO: 346321 - RNA, 19 nt, Artificial Sequence
  Description of Artificial Sequence: Synthetic oligonucleotide
uguaaggugugacuuuaua

SEQ ID NO: 346322 - RNA, 19 nt, Artificial Sequence
  Description of Artificial Sequence: Synthetic oligonucleotide
cauugagcaagagagcaug

SEQ ID NO: 346323 - RNA, 19 nt, Artificial Sequence
  Description of Artificial Sequence: Synthetic oligonucleotide
uacaaguacugcccaucag

SEQ ID NO: 346324 - RNA, 19 nt, Artificial Sequence
  Description of Artificial Sequence: Synthetic oligonucleotide
gguuacguggagcagguug

SEQ ID NO: 346325 - RNA, 19 nt, Artificial Sequence
  Description of Artificial Sequence: Synthetic oligonucleotide
agcuagugcaccuggguca

SEQ ID NO: 346326 - RNA, 19 nt, Artificial Sequence
  Description of Artificial Sequence: Synthetic oligonucleotide
agcauuggaaacacccucg

SEQ ID NO: 346327 - RNA, 19 nt, Artificial Sequence
  Description of Artificial Sequence: Synthetic oligonucleotide
ucgcauucaucucaaccac

SEQ ID NO: 346328 - RNA, 19 nt, Artificial Sequence
  Description of Artificial Sequence: Synthetic oligonucleotide
guugaaccggaaccaaacc

SEQ ID NO: 346329 - RNA, 19 nt, Artificial Sequence
  Description of Artificial Sequence: Synthetic oligonucleotide
ucacacguaggauauggua

SEQ ID NO: 346330 - RNA, 19 nt, Artificial Sequence
  Description of Artificial Sequence: Synthetic oligonucleotide
ugauacguggcacguggcu

SEQ ID NO: 346331 - RNA, 19 nt, Artificial Sequence
  Description of Artificial Sequence: Synthetic oligonucleotide
guuggcggaacauggagca

SEQ ID NO: 346332 - RNA, 19 nt, Artificial Sequence
  Description of Artificial Sequence: Synthetic oligonucleotide
uguaggcaagcaugguacc

SEQ ID NO: 346333 - RNA, 19 nt, Artificial Sequence
  Description of Artificial Sequence: Synthetic oligonucleotide
ucccauagcuccacuugag

SEQ ID NO: 346334 - RNA, 19 nt, Artificial Sequence
  Description of Artificial Sequence: Synthetic oligonucleotide
aacaccacaaggucccaua

SEQ ID NO: 346335 - RNA, 19 nt, Artificial Sequence
  Description of Artificial Sequence: Synthetic oligonucleotide
aagagcguccacccuuuca

SEQ ID NO: 346336 - RNA, 19 nt, Artificial Sequence
  Description of Artificial Sequence: Synthetic oligonucleotide
guuacguggagcagguugc

SEQ ID NO: 346337 - RNA, 19 nt, Artificial Sequence
  Description of Artificial Sequence: Synthetic oligonucleotide
uugcgauucaggacacuca

SEQ ID NO: 346338 - RNA, 19 nt, Artificial Sequence
  Description of Artificial Sequence: Synthetic oligonucleotide
ucuugcacgacugcuuucu

SEQ ID NO: 346339 - RNA, 19 nt, Artificial Sequence
  Description of Artificial Sequence: Synthetic oligonucleotide
gauacguggcacguggcug

SEQ ID NO: 346340 - RNA, 19 nt, Artificial Sequence
  Description of Artificial Sequence: Synthetic oligonucleotide
cccauagagaaacuguagg

SEQ ID NO: 346341 - RNA, 19 nt, Artificial Sequence
  Description of Artificial Sequence: Synthetic oligonucleotide
gaccugagacuauguagag

SEQ ID NO: 346342 - RNA, 19 nt, Artificial Sequence
  Description of Artificial Sequence: Synthetic oligonucleotide
cacacggugccuaggcugg

SEQ ID NO: 346343 - RNA, 19 nt, Artificial Sequence
  Description of Artificial Sequence: Synthetic oligonucleotide
cguaggauaugguaaaagc

SEQ ID NO: 346344 - RNA, 19 nt, Artificial Sequence
  Description of Artificial Sequence: Synthetic oligonucleotide
aaguugucaaacaggcccu

SEQ ID NO: 346345 - RNA, 19 nt, Artificial Sequence
  Description of Artificial Sequence: Synthetic oligonucleotide
cacacguaggauaugguaa

SEQ ID NO: 346346 - RNA, 19 nt, Artificial Sequence
  Description of Artificial Sequence: Synthetic oligonucleotide
augccgugcaaccacgugu

SEQ ID NO: 346347 - RNA, 19 nt, Artificial Sequence
  Description of Artificial Sequence: Synthetic oligonucleotide
caagcaguugcugccgucg

SEQ ID NO: 346348 - RNA, 19 nt, Artificial Sequence
  Description of Artificial Sequence: Synthetic oligonucleotide
guaggugagacuguaggca

SEQ ID NO: 346349 - RNA, 19 nt, Artificial Sequence
  Description of Artificial Sequence: Synthetic oligonucleotide
accaaaccucacuccugcc

SEQ ID NO: 346350 - RNA, 19 nt, Artificial Sequence
  Description of Artificial Sequence: Synthetic oligonucleotide
ggucacacguaggauaugg

SEQ ID NO: 346351 - RNA, 19 nt, Artificial Sequence
  Description of Artificial Sequence: Synthetic oligonucleotide
agcauggguugguaagauc

SEQ ID NO: 346352 - RNA, 19 nt, Artificial Sequence
  Description of Artificial Sequence: Synthetic oligonucleotide
ugccauaccugacaccaau

SEQ ID NO: 346353 - RNA, 19 nt, Artificial Sequence
  Description of Artificial Sequence: Synthetic oligonucleotide
acguaggauaugguaaaag

SEQ ID NO: 346354 - RNA, 19 nt, Artificial Sequence
  Description of Artificial Sequence: Synthetic oligonucleotide
acagggcgcagcuugggug

SEQ ID NO: 346355 - RNA, 19 nt, Artificial Sequence
  Description of Artificial Sequence: Synthetic oligonucleotide
cagagguggucacacguag

SEQ ID NO: 346356 - RNA, 19 nt, Artificial Sequence
  Description of Artificial Sequence: Synthetic oligonucleotide
aucaauaaccaggcaguug

SEQ ID NO: 346357 - RNA, 19 nt, Artificial Sequence
  Description of Artificial Sequence: Synthetic oligonucleotide
cuugcgauucaggacacuc

SEQ ID NO: 346358 - RNA, 19 nt, Artificial Sequence
  Description of Artificial Sequence: Synthetic oligonucleotide
cucuauacugggccuggcc

SEQ ID NO: 346359 - RNA, 19 nt, Artificial Sequence
  Description of Artificial Sequence: Synthetic oligonucleotide
guagaguuggcggaacaug

SEQ ID NO: 346360 - RNA, 19 nt, Artificial Sequence
  Description of Artificial Sequence: Synthetic oligonucleotide
agccacucuccugaugacc

SEQ ID NO: 346361 - RNA, 19 nt, Artificial Sequence
  Description of Artificial Sequence: Synthetic oligonucleotide
uucucaugcucgccugcag

SEQ ID NO: 346362 - RNA, 19 nt, Artificial Sequence
  Description of Artificial Sequence: Synthetic oligonucleotide
aggauaugguaaaagcgcu

SEQ ID NO: 346363 - RNA, 19 nt, Artificial Sequence
  Description of Artificial Sequence: Synthetic oligonucleotide
auugagcaagagagcaugg

SEQ ID NO: 346364 - RNA, 19 nt, Artificial Sequence
  Description of Artificial Sequence: Synthetic oligonucleotide
guagcugcuucaaugcgug

SEQ ID NO: 346365 - RNA, 19 nt, Artificial Sequence
  Description of Artificial Sequence: Synthetic oligonucleotide
gaugggccuuuugucacgg

SEQ ID NO: 346366 - RNA, 19 nt, Artificial Sequence
  Description of Artificial Sequence: Synthetic oligonucleotide
gacuacggucaucacucgc

SEQ ID NO: 346367 - RNA, 19 nt, Artificial Sequence
  Description of Artificial Sequence: Synthetic oligonucleotide
gucgcauauugucaaccug

SEQ ID NO: 346368 - RNA, 19 nt, Artificial Sequence
  Description of Artificial Sequence: Synthetic oligonucleotide
acccucguugaaccggaac

SEQ ID NO: 346369 - RNA, 19 nt, Artificial Sequence
  Description of Artificial Sequence: Synthetic oligonucleotide
ugcucaugguuacguggag

SEQ ID NO: 346370 - RNA, 19 nt, Artificial Sequence
  Description of Artificial Sequence: Synthetic oligonucleotide
agcaccgacuccauuugcg

SEQ ID NO: 346371 - RNA, 19 nt, Artificial Sequence
  Description of Artificial Sequence: Synthetic oligonucleotide
gcgguuagugaagucaucg

SEQ ID NO: 346372 - RNA, 19 nt, Artificial Sequence
  Description of Artificial Sequence: Synthetic oligonucleotide
gacccuugcgauucaggac

SEQ ID NO: 346373 - RNA, 19 nt, Artificial Sequence
  Description of Artificial Sequence: Synthetic oligonucleotide
acuacggucaucacucgca

SEQ ID NO: 346374 - RNA, 19 nt, Artificial Sequence
  Description of Artificial Sequence: Synthetic oligonucleotide
ugguaagaucaggucuugg

SEQ ID NO: 346375 - RNA, 19 nt, Artificial Sequence
  Description of Artificial Sequence: Synthetic oligonucleotide
ucccaauccggguuggcuc

SEQ ID NO: 346376 - RNA, 19 nt, Artificial Sequence
  Description of Artificial Sequence: Synthetic oligonucleotide
agaccgcaugccaugcugc

SEQ ID NO: 346377 - RNA, 19 nt, Artificial Sequence
  Description of Artificial Sequence: Synthetic oligonucleotide
uuggcucuauacugggccu

SEQ ID NO: 346378 - RNA, 19 nt, Artificial Sequence
  Description of Artificial Sequence: Synthetic oligonucleotide
cucgggcugcucuugcacg

SEQ ID NO: 346379 - RNA, 19 nt, Artificial Sequence
  Description of Artificial Sequence: Synthetic oligonucleotide
cuauguagagugucugaga

SEQ ID NO: 346380 - RNA, 19 nt, Artificial Sequence
  Description of Artificial Sequence: Synthetic oligonucleotide
ugcauccacccagaggcag

SEQ ID NO: 346381 - RNA, 19 nt, Artificial Sequence
  Description of Artificial Sequence: Synthetic oligonucleotide
ucagcgcgaagcaccaaaa

SEQ ID NO: 346382 - RNA, 19 nt, Artificial Sequence
  Description of Artificial Sequence: Synthetic oligonucleotide
guacaaguacugcccauca

SEQ ID NO: 346383 - RNA, 19 nt, Artificial Sequence
  Description of Artificial Sequence: Synthetic oligonucleotide
ggaugugguucuuugucug

SEQ ID NO: 346384 - RNA, 19 nt, Artificial Sequence
  Description of Artificial Sequence: Synthetic oligonucleotide
ucgcacagcauuggaaaca

SEQ ID NO: 346385 - RNA, 19 nt, Artificial Sequence
  Description of Artificial Sequence: Synthetic oligonucleotide
uggagucgcugcaccagcc

SEQ ID NO: 346386 - RNA, 19 nt, Artificial Sequence
  Description of Artificial Sequence: Synthetic oligonucleotide
gaagguguagaaaguuguc

SEQ ID NO: 346387 - RNA, 19 nt, Artificial Sequence
  Description of Artificial Sequence: Synthetic oligonucleotide
caaaccucacuccugccca

SEQ ID NO: 346388 - RNA, 19 nt, Artificial Sequence
  Description of Artificial Sequence: Synthetic oligonucleotide
ggugccauaccugacacca

SEQ ID NO: 346389 - RNA, 19 nt, Artificial Sequence
  Description of Artificial Sequence: Synthetic oligonucleotide
gaaccaaaccucacuccug

SEQ ID NO: 346390 - RNA, 19 nt, Artificial Sequence
  Description of Artificial Sequence: Synthetic oligonucleotide
caucucaaccacgcaauac

SEQ ID NO: 346391 - RNA, 19 nt, Artificial Sequence
  Description of Artificial Sequence: Synthetic oligonucleotide
acguccaaagaagucccuc

SEQ ID NO: 346392 - RNA, 19 nt, Artificial Sequence
  Description of Artificial Sequence: Synthetic oligonucleotide
uccguguagugcuggggug

SEQ ID NO: 346393 - RNA, 19 nt, Artificial Sequence
  Description of Artificial Sequence: Synthetic oligonucleotide
ugcugaguagugugcuggc

SEQ ID NO: 346394 - RNA, 19 nt, Artificial Sequence
  Description of Artificial Sequence: Synthetic oligonucleotide
caccccuuuauccccacug

SEQ ID NO: 346395 - RNA, 19 nt, Artificial Sequence
  Description of Artificial Sequence: Synthetic oligonucleotide
aaccggaaccaaaccucac

SEQ ID NO: 346396 - RNA, 19 nt, Artificial Sequence
  Description of Artificial Sequence: Synthetic oligonucleotide
accaaugucuggauguggu

SEQ ID NO: 346397 - RNA, 19 nt, Artificial Sequence
  Description of Artificial Sequence: Synthetic oligonucleotide
cugaguagugugcuggcca

SEQ ID NO: 346398 - RNA, 19 nt, Artificial Sequence
  Description of Artificial Sequence: Synthetic oligonucleotide
uggcggaacauggagcaga

SEQ ID NO: 346399 - RNA, 19 nt, Artificial Sequence
  Description of Artificial Sequence: Synthetic oligonucleotide
gucaagggcacagcacacg

SEQ ID NO: 346400 - RNA, 19 nt, Artificial Sequence
  Description of Artificial Sequence: Synthetic oligonucleotide
gguugguaagaucaggucu

SEQ ID NO: 346401 - RNA, 19 nt, Artificial Sequence
  Description of Artificial Sequence: Synthetic oligonucleotide
guaggcaagcaugguaccc

SEQ ID NO: 346402 - RNA, 19 nt, Artificial Sequence
  Description of Artificial Sequence: Synthetic oligonucleotide
cagggcgcagcuugggugc

SEQ ID NO: 346403 - RNA, 19 nt, Artificial Sequence
  Description of Artificial Sequence: Synthetic oligonucleotide
agucaagggcacagcacac

SEQ ID NO: 346404 - RNA, 19 nt, Artificial Sequence
  Description of Artificial Sequence: Synthetic oligonucleotide
ugccuaguccuggaggggc

SEQ ID NO: 346405 - RNA, 19 nt, Artificial Sequence
  Description of Artificial Sequence: Synthetic oligonucleotide
ggcacuguacagcugugug

SEQ ID NO: 346406 - RNA, 19 nt, Artificial Sequence
  Description of Artificial Sequence: Synthetic oligonucleotide
ggccuuuugucacggaggc

SEQ ID NO: 346407 - RNA, 19 nt, Artificial Sequence
  Description of Artificial Sequence: Synthetic oligonucleotide
cucuagccaaggccaaagc

SEQ ID NO: 346408 - RNA, 19 nt, Artificial Sequence
  Description of Artificial Sequence: Synthetic oligonucleotide
guguggucuugccuagucc

SEQ ID NO: 346409 - RNA, 19 nt, Artificial Sequence
  Description of Artificial Sequence: Synthetic oligonucleotide
uuguguaaggugugacuuu

SEQ ID NO: 346410 - RNA, 19 nt, Artificial Sequence
  Description of Artificial Sequence: Synthetic oligonucleotide
ugcgucgcacagcauugga

SEQ ID NO: 346411 - RNA, 19 nt, Artificial Sequence
  Description of Artificial Sequence: Synthetic oligonucleotide
acgcaauacccugcaugcc

SEQ ID NO: 346412 - RNA, 19 nt, Artificial Sequence
  Description of Artificial Sequence: Synthetic oligonucleotide
aggucuuggcccacaacuc

SEQ ID NO: 346413 - RNA, 19 nt, Artificial Sequence
  Description of Artificial Sequence: Synthetic oligonucleotide
ugccgucgcauauugucaa

SEQ ID NO: 346414 - RNA, 19 nt, Artificial Sequence
  Description of Artificial Sequence: Synthetic oligonucleotide
acccaugcgccacucgucu

SEQ ID NO: 346415 - RNA, 19 nt, Artificial Sequence
  Description of Artificial Sequence: Synthetic oligonucleotide
caaugcguguacggaaggc

SEQ ID NO: 346416 - RNA, 19 nt, Artificial Sequence
  Description of Artificial Sequence: Synthetic oligonucleotide
acagcauuggaaacacccu

SEQ ID NO: 346417 - RNA, 19 nt, Artificial Sequence
  Description of Artificial Sequence: Synthetic oligonucleotide
gaaccggaaccaaaccuca

SEQ ID NO: 346418 - RNA, 19 nt, Artificial Sequence
  Description of Artificial Sequence: Synthetic oligonucleotide
aagugauacguggcacgug

SEQ ID NO: 346419 - RNA, 19 nt, Artificial Sequence
  Description of Artificial Sequence: Synthetic oligonucleotide
acacucaagagaacauuga

SEQ ID NO: 346420 - RNA, 19 nt, Artificial Sequence
  Description of Artificial Sequence: Synthetic oligonucleotide
guagugugcuggccagggg

SEQ ID NO: 346421 - RNA, 19 nt, Artificial Sequence
  Description of Artificial Sequence: Synthetic oligonucleotide
agcgaaggggacacccagc

SEQ ID NO: 346422 - RNA, 19 nt, Artificial Sequence
  Description of Artificial Sequence: Synthetic oligonucleotide
cagcuagugcaccuggguc

SEQ ID NO: 346423 - RNA, 19 nt, Artificial Sequence
  Description of Artificial Sequence: Synthetic oligonucleotide
cugcucaugguuacgugga

SEQ ID NO: 346424 - RNA, 19 nt, Artificial Sequence
  Description of Artificial Sequence: Synthetic oligonucleotide
uucccaauccggguuggcu

SEQ ID NO: 346425 - RNA, 19 nt, Artificial Sequence
  Description of Artificial Sequence: Synthetic oligonucleotide
accccuuuauccccacugu

SEQ ID NO: 346426 - RNA, 19 nt, Artificial Sequence
  Description of Artificial Sequence: Synthetic oligonucleotide
cucgccuuugagccuuggg

SEQ ID NO: 346427 - RNA, 19 nt, Artificial Sequence
  Description of Artificial Sequence: Synthetic oligonucleotide
ggccccgucgauuucauca

SEQ ID NO: 346428 - RNA, 19 nt, Artificial Sequence
  Description of Artificial Sequence: Synthetic oligonucleotide
acaacucgccuuugagccu

SEQ ID NO: 346429 - RNA, 19 nt, Artificial Sequence
  Description of Artificial Sequence: Synthetic oligonucleotide
caggucuuggcccacaacu

SEQ ID NO: 346430 - RNA, 19 nt, Artificial Sequence
  Description of Artificial Sequence: Synthetic oligonucleotide
acugugaucugauguccua

SEQ ID NO: 346431 - RNA, 19 nt, Artificial Sequence
  Description of Artificial Sequence: Synthetic oligonucleotide
cuggagucgcugcaccagc

SEQ ID NO: 346432 - RNA, 19 nt, Artificial Sequence
  Description of Artificial Sequence: Synthetic oligonucleotide
uugccuaguccuggagggg

SEQ ID NO: 346433 - RNA, 19 nt, Artificial Sequence
  Description of Artificial Sequence: Synthetic oligonucleotide
gcugccgucgcauauuguc

SEQ ID NO: 346434 - RNA, 19 nt, Artificial Sequence
  Description of Artificial Sequence: Synthetic oligonucleotide
cugcaugccgugcaaccac

SEQ ID NO: 346435 - RNA, 19 nt, Artificial Sequence
  Description of Artificial Sequence: Synthetic oligonucleotide
gguuagugaagucaucgcu

SEQ ID NO: 346436 - RNA, 19 nt, Artificial Sequence
  Description of Artificial Sequence: Synthetic oligonucleotide
uacauucccugugggaguc

SEQ ID NO: 346437 - RNA, 19 nt, Artificial Sequence
  Description of Artificial Sequence: Synthetic oligonucleotide
ccacaacucgccuuugagc

SEQ ID NO: 346438 - RNA, 19 nt, Artificial Sequence
  Description of Artificial Sequence: Synthetic oligonucleotide
cgcaauacccugcaugccg

SEQ ID NO: 346439 - RNA, 19 nt, Artificial Sequence
  Description of Artificial Sequence: Synthetic oligonucleotide
cuguggacccuugcgauuc

SEQ ID NO: 346440 - RNA, 19 nt, Artificial Sequence
  Description of Artificial Sequence: Synthetic oligonucleotide
caucacucgcauucaucuc

SEQ ID NO: 346441 - RNA, 19 nt, Artificial Sequence
  Description of Artificial Sequence: Synthetic oligonucleotide
aggugugacuuuauaaaua

SEQ ID NO: 346442 - RNA, 19 nt, Artificial Sequence
  Description of Artificial Sequence: Synthetic oligonucleotide
caccaaugucuggaugugg

SEQ ID NO: 346443 - RNA, 19 nt, Artificial Sequence
  Description of Artificial Sequence: Synthetic oligonucleotide
ucaagcaguugcugccguc

SEQ ID NO: 346444 - RNA, 19 nt, Artificial Sequence
  Description of Artificial Sequence: Synthetic oligonucleotide
ugggcaacuggaagaccuc

SEQ ID NO: 346445 - RNA, 19 nt, Artificial Sequence
  Description of Artificial Sequence: Synthetic oligonucleotide
acauggaaggcagcaggca

SEQ ID NO: 346446 - RNA, 19 nt, Artificial Sequence
  Description of Artificial Sequence: Synthetic oligonucleotide
gaacauugauggcugccgu

SEQ ID NO: 346447 - RNA, 19 nt, Artificial Sequence
  Description of Artificial Sequence: Synthetic oligonucleotide
cacccuuucagaccugaga

SEQ ID NO: 346448 - RNA, 19 nt, Artificial Sequence
  Description of Artificial Sequence: Synthetic oligonucleotide
cacuccugcccacugccac

SEQ ID NO: 346449 - RNA, 19 nt, Artificial Sequence
  Description of Artificial Sequence: Synthetic oligonucleotide
uggaaacacccucguugaa

SEQ ID NO: 346450 - RNA, 19 nt, Artificial Sequence
  Description of Artificial Sequence: Synthetic oligonucleotide
gucuugccuaguccuggag

SEQ ID NO: 346451 - RNA, 19 nt, Artificial Sequence
  Description of Artificial Sequence: Synthetic oligonucleotide
gggccuuuugucacggagg

SEQ ID NO: 346452 - RNA, 19 nt, Artificial Sequence
  Description of Artificial Sequence: Synthetic oligonucleotide
gcagaccuccuccacauuc

SEQ ID NO: 346453 - RNA, 19 nt, Artificial Sequence
  Description of Artificial Sequence: Synthetic oligonucleotide
ugaggucagcgcgaagcac

SEQ ID NO: 346454 - RNA, 19 nt, Artificial Sequence
  Description of Artificial Sequence: Synthetic oligonucleotide
uccacccuuucagaccuga

SEQ ID NO: 346455 - RNA, 19 nt, Artificial Sequence
  Description of Artificial Sequence: Synthetic oligonucleotide
ggauaugguaaaagcgcug

SEQ ID NO: 346456 - RNA, 19 nt, Artificial Sequence
  Description of Artificial Sequence: Synthetic oligonucleotide
guaaaagcgcugggaggcc

SEQ ID NO: 346457 - RNA, 19 nt, Artificial Sequence
  Description of Artificial Sequence: Synthetic oligonucleotide
caugccgugcaaccacgug

SEQ ID NO: 346458 - RNA, 19 nt, Artificial Sequence
  Description of Artificial Sequence: Synthetic oligonucleotide
aguugucaaacaggcccug

SEQ ID NO: 346459 - RNA, 19 nt, Artificial Sequence
  Description of Artificial Sequence: Synthetic oligonucleotide
cguugaaccggaaccaaac

SEQ ID NO: 346460 - RNA, 19 nt, Artificial Sequence
  Description of Artificial Sequence: Synthetic oligonucleotide
aucugauguccuagggcag

SEQ ID NO: 346461 - RNA, 19 nt, Artificial Sequence
  Description of Artificial Sequence: Synthetic oligonucleotide
gucagcgcgaagcaccaaa

SEQ ID NO: 346462 - RNA, 19 nt, Artificial Sequence
  Description of Artificial Sequence: Synthetic oligonucleotide
augguuacguggagcaggu

SEQ ID NO: 346463 - RNA, 19 nt, Artificial Sequence
  Description of Artificial Sequence: Synthetic oligonucleotide
ggucagaccgcaugccaug

SEQ ID NO: 346464 - RNA, 19 nt, Artificial Sequence
  Description of Artificial Sequence: Synthetic oligonucleotide
accugagacuauguagagu

SEQ ID NO: 346465 - RNA, 19 nt, Artificial Sequence
  Description of Artificial Sequence: Synthetic oligonucleotide
augcguguacggaaggccu

SEQ ID NO: 346466 - RNA, 19 nt, Artificial Sequence
  Description of Artificial Sequence: Synthetic oligonucleotide
aagagagcauggguuggua

SEQ ID NO: 346467 - RNA, 19 nt, Artificial Sequence
  Description of Artificial Sequence: Synthetic oligonucleotide
gcguagcugcuucaaugcg

SEQ ID NO: 346468 - RNA, 19 nt, Artificial Sequence
  Description of Artificial Sequence: Synthetic oligonucleotide
ccggguuggcucuauacug

SEQ ID NO: 346469 - RNA, 19 nt, Artificial Sequence
  Description of Artificial Sequence: Synthetic oligonucleotide
cugccgucgcauauuguca

SEQ ID NO: 346470 - RNA, 19 nt, Artificial Sequence
  Description of Artificial Sequence: Synthetic oligonucleotide
cuugggcaacuggaagacc

SEQ ID NO: 346471 - RNA, 19 nt, Artificial Sequence
  Description of Artificial Sequence: Synthetic oligonucleotide
ggguugguaagaucagguc

SEQ ID NO: 346472 - RNA, 19 nt, Artificial Sequence
  Description of Artificial Sequence: Synthetic oligonucleotide
caaccuucucaugcucgcc

SEQ ID NO: 346473 - RNA, 19 nt, Artificial Sequence
  Description of Artificial Sequence: Synthetic oligonucleotide
gaccgcaugccaugcugca

SEQ ID NO: 346474 - RNA, 19 nt, Artificial Sequence
  Description of Artificial Sequence: Synthetic oligonucleotide
uccauuugcguagcugcuu

SEQ ID NO: 346475 - RNA, 19 nt, Artificial Sequence
  Description of Artificial Sequence: Synthetic oligonucleotide
uuggcggaacauggagcag

SEQ ID NO: 346476 - RNA, 19 nt, Artificial Sequence
  Description of Artificial Sequence: Synthetic oligonucleotide
gcgaagguguagaaaguug

SEQ ID NO: 346477 - RNA, 19 nt, Artificial Sequence
  Description of Artificial Sequence: Synthetic oligonucleotide
acggugccuaggcuggagu

SEQ ID NO: 346478 - RNA, 19 nt, Artificial Sequence
  Description of Artificial Sequence: Synthetic oligonucleotide
gguggauggugccauaccu

SEQ ID NO: 346479 - RNA, 19 nt, Artificial Sequence
  Description of Artificial Sequence: Synthetic oligonucleotide
gucagaccgcaugccaugc

SEQ ID NO: 346480 - RNA, 19 nt, Artificial Sequence
  Description of Artificial Sequence: Synthetic oligonucleotide
ucuagccgcugcucauggu

SEQ ID NO: 346481 - RNA, 19 nt, Artificial Sequence
  Description of Artificial Sequence: Synthetic oligonucleotide
agcgguuagugaagucauc

SEQ ID NO: 346482 - RNA, 19 nt, Artificial Sequence
  Description of Artificial Sequence: Synthetic oligonucleotide
cauucccugugggagucac

SEQ ID NO: 346483 - RNA, 19 nt, Artificial Sequence
  Description of Artificial Sequence: Synthetic oligonucleotide
ggacuacggucaucacucg

SEQ ID NO: 346484 - RNA, 19 nt, Artificial Sequence
  Description of Artificial Sequence: Synthetic oligonucleotide
uacccugcaugccgugcaa

SEQ ID NO: 346485 - RNA, 19 nt, Artificial Sequence
  Description of Artificial Sequence: Synthetic oligonucleotide
guacaggcugcgucgcaca

SEQ ID NO: 346486 - RNA, 19 nt, Artificial Sequence
  Description of Artificial Sequence: Synthetic oligonucleotide
ucaccccuuuauccccacu

SEQ ID NO: 346487 - RNA, 19 nt, Artificial Sequence
  Description of Artificial Sequence: Synthetic oligonucleotide
cucuugcacgacugcuuuc

SEQ ID NO: 346488 - RNA, 19 nt, Artificial Sequence
  Description of Artificial Sequence: Synthetic oligonucleotide
cauuugcguagcugcuuca

SEQ ID NO: 346489 - RNA, 19 nt, Artificial Sequence
  Description of Artificial Sequence: Synthetic oligonucleotide
ccaccucuagccaaggcca

SEQ ID NO: 346490 - RNA, 19 nt, Artificial Sequence
  Description of Artificial Sequence: Synthetic oligonucleotide
gagcguccacccuuucaga

SEQ ID NO: 346491 - RNA, 19 nt, Artificial Sequence
  Description of Artificial Sequence: Synthetic oligonucleotide
ucugcaccccagugccugu

SEQ ID NO: 346492 - RNA, 19 nt, Artificial Sequence
  Description of Artificial Sequence: Synthetic oligonucleotide
ccauuugcguagcugcuuc

SEQ ID NO: 346493 - RNA, 19 nt, Artificial Sequence
  Description of Artificial Sequence: Synthetic oligonucleotide
acccugcaugccgugcaac

SEQ ID NO: 346494 - RNA, 19 nt, Artificial Sequence
  Description of Artificial Sequence: Synthetic oligonucleotide
gccccucccauagagaaac

SEQ ID NO: 346495 - RNA, 19 nt, Artificial Sequence
  Description of Artificial Sequence: Synthetic oligonucleotide
caggacuacggucaucacu

SEQ ID NO: 346496 - RNA, 19 nt, Artificial Sequence
  Description of Artificial Sequence: Synthetic oligonucleotide
ggcagcucggggaagcggc

SEQ ID NO: 346497 - RNA, 19 nt, Artificial Sequence
  Description of Artificial Sequence: Synthetic oligonucleotide
gugauacguggcacguggc

SEQ ID NO: 346498 - RNA, 19 nt, Artificial Sequence
  Description of Artificial Sequence: Synthetic oligonucleotide
caugcucgccugcagaggu

SEQ ID NO: 346499 - RNA, 19 nt, Artificial Sequence
  Description of Artificial Sequence: Synthetic oligonucleotide
accgcaugccaugcugcag

SEQ ID NO: 346500 - RNA, 19 nt, Artificial Sequence
  Description of Artificial Sequence: Synthetic oligonucleotide
aggcagcucggggaagcgg

SEQ ID NO: 346501 - RNA, 19 nt, Artificial Sequence
  Description of Artificial Sequence: Synthetic oligonucleotide
cucggaggcgaagguguag

SEQ ID NO: 346502 - RNA, 19 nt, Artificial Sequence
  Description of Artificial Sequence: Synthetic oligonucleotide
gccaacauggguggucugc

SEQ ID NO: 346503 - RNA, 19 nt, Artificial Sequence
  Description of Artificial Sequence: Synthetic oligonucleotide
ugcugccgucgcauauugu

SEQ ID NO: 346504 - RNA, 19 nt, Artificial Sequence
  Description of Artificial Sequence: Synthetic oligonucleotide
cugcgucgcacagcauugg

SEQ ID NO: 346505 - RNA, 19 nt, Artificial Sequence
  Description of Artificial Sequence: Synthetic oligonucleotide
gaagagcguccacccuuuc

SEQ ID NO: 346506 - RNA, 19 nt, Artificial Sequence
  Description of Artificial Sequence: Synthetic oligonucleotide
caagggccugagguguggc

SEQ ID NO: 346507 - RNA, 19 nt, Artificial Sequence
  Description of Artificial Sequence: Synthetic oligonucleotide
cgguuagugaagucaucgc

SEQ ID NO: 346508 - RNA, 19 nt, Artificial Sequence
  Description of Artificial Sequence: Synthetic oligonucleotide
cguggcacguggcuggagg

SEQ ID NO: 346509 - RNA, 19 nt, Artificial Sequence
  Description of Artificial Sequence: Synthetic oligonucleotide
gccguggacggccccgucg

SEQ ID NO: 346510 - RNA, 19 nt, Artificial Sequence
  Description of Artificial Sequence: Synthetic oligonucleotide
acacccucguugaaccgga

SEQ ID NO: 346511 - RNA, 19 nt, Artificial Sequence
  Description of Artificial Sequence: Synthetic oligonucleotide
gcugcgucgcacagcauug

SEQ ID NO: 346512 - RNA, 19 nt, Artificial Sequence
  Description of Artificial Sequence: Synthetic oligonucleotide
ccugaugaccacacgucca

SEQ ID NO: 346513 - RNA, 19 nt, Artificial Sequence
  Description of Artificial Sequence: Synthetic oligonucleotide
gcauauugucaaccugcuc

SEQ ID NO: 346514 - RNA, 19 nt, Artificial Sequence
  Description of Artificial Sequence: Synthetic oligonucleotide
ccucaagcaguugcugccg

SEQ ID NO: 346515 - RNA, 19 nt, Artificial Sequence
  Description of Artificial Sequence: Synthetic oligonucleotide
ugccucagggaagguguaa

SEQ ID NO: 346516 - RNA, 19 nt, Artificial Sequence
  Description of Artificial Sequence: Synthetic oligonucleotide
cacucgcauucaucucaac

SEQ ID NO: 346517 - RNA, 19 nt, Artificial Sequence
  Description of Artificial Sequence: Synthetic oligonucleotide
gcugaguagugugcuggcc

SEQ ID NO: 346518 - RNA, 19 nt, Artificial Sequence
  Description of Artificial Sequence: Synthetic oligonucleotide
ccgucgcauauugucaacc

SEQ ID NO: 346519 - RNA, 19 nt, Artificial Sequence
  Description of Artificial Sequence: Synthetic oligonucleotide
gguuggcucuauacugggc

SEQ ID NO: 346520 - RNA, 19 nt, Artificial Sequence
  Description of Artificial Sequence: Synthetic oligonucleotide
uacaggcacggaugucauu

SEQ ID NO: 346521 - RNA, 19 nt, Artificial Sequence
  Description of Artificial Sequence: Synthetic oligonucleotide
ucauccgggucugggccuc

SEQ ID NO: 346522 - RNA, 19 nt, Artificial Sequence
  Description of Artificial Sequence: Synthetic oligonucleotide
caugcgccacucgucugug

SEQ ID NO: 346523 - RNA, 19 nt, Artificial Sequence
  Description of Artificial Sequence: Synthetic oligonucleotide
accacgcaauacccugcau

SEQ ID NO: 346524 - RNA, 19 nt, Artificial Sequence
  Description of Artificial Sequence: Synthetic oligonucleotide
ggacaacugcugcuucuca

SEQ ID NO: 346525 - RNA, 19 nt, Artificial Sequence
  Description of Artificial Sequence: Synthetic oligonucleotide
gcuccguguagugcugggg

SEQ ID NO: 346526 - RNA, 19 nt, Artificial Sequence
  Description of Artificial Sequence: Synthetic oligonucleotide
cacgugugccagugugguc

SEQ ID NO: 346527 - RNA, 19 nt, Artificial Sequence
  Description of Artificial Sequence: Synthetic oligonucleotide
cacucuccugaugaccaca

SEQ ID NO: 346528 - RNA, 19 nt, Artificial Sequence
  Description of Artificial Sequence: Synthetic oligonucleotide
ccgugcaaccacgugugcc

SEQ ID NO: 346529 - RNA, 19 nt, Artificial Sequence
  Description of Artificial Sequence: Synthetic oligonucleotide
acucgccuuugagccuugg

SEQ ID NO: 346530 - RNA, 19 nt, Artificial Sequence
  Description of Artificial Sequence: Synthetic oligonucleotide
acggaaggccucaggacua

SEQ ID NO: 346531 - RNA, 19 nt, Artificial Sequence
  Description of Artificial Sequence: Synthetic oligonucleotide
caccgacuccauuugcgua

SEQ ID NO: 346532 - RNA, 19 nt, Artificial Sequence
  Description of Artificial Sequence: Synthetic oligonucleotide
cugugaggucagcgcgaag

SEQ ID NO: 346533 - RNA, 19 nt, Artificial Sequence
  Description of Artificial Sequence: Synthetic oligonucleotide
cacggugccuaggcuggag

SEQ ID NO: 346534 - RNA, 19 nt, Artificial Sequence
  Description of Artificial Sequence: Synthetic oligonucleotide
guguugauacaggcacgga

SEQ ID NO: 346535 - RNA, 19 nt, Artificial Sequence
  Description of Artificial Sequence: Synthetic oligonucleotide
ccguguagugcuggggugc

SEQ ID NO: 346536 - RNA, 19 nt, Artificial Sequence
  Description of Artificial Sequence: Synthetic oligonucleotide
cagcgguuagugaagucau

SEQ ID NO: 346537 - RNA, 19 nt, Artificial Sequence
  Description of Artificial Sequence: Synthetic oligonucleotide
ugagagcucuuggggccuc

SEQ ID NO: 346538 - RNA, 19 nt, Artificial Sequence
  Description of Artificial Sequence: Synthetic oligonucleotide
gguggucugcacaucccuc

SEQ ID NO: 346539 - RNA, 19 nt, Artificial Sequence
  Description of Artificial Sequence: Synthetic oligonucleotide
agagcucuuggggccuccu

SEQ ID NO: 346540 - RNA, 19 nt, Artificial Sequence
  Description of Artificial Sequence: Synthetic oligonucleotide
cgucgcacagcauuggaaa

SEQ ID NO: 346541 - RNA, 19 nt, Artificial Sequence
  Description of Artificial Sequence: Synthetic oligonucleotide
aacucgccuuugagccuug

SEQ ID NO: 346542 - RNA, 19 nt, Artificial Sequence
  Description of Artificial Sequence: Synthetic oligonucleotide
augcgccacucgucugugu

SEQ ID NO: 346543 - RNA, 19 nt, Artificial Sequence
  Description of Artificial Sequence: Synthetic oligonucleotide
cagcucggggaagcggcag

SEQ ID NO: 346544 - RNA, 19 nt, Artificial Sequence
  Description of Artificial Sequence: Synthetic oligonucleotide
guagagugucugagagcuc

SEQ ID NO: 346545 - RNA, 19 nt, Artificial Sequence
  Description of Artificial Sequence: Synthetic oligonucleotide
ccauaccugacaccaaugu

SEQ ID NO: 346546 - RNA, 19 nt, Artificial Sequence
  Description of Artificial Sequence: Synthetic oligonucleotide
gcauuggaaacacccucgu

SEQ ID NO: 346547 - RNA, 19 nt, Artificial Sequence
  Description of Artificial Sequence: Synthetic oligonucleotide
cuguacaaguacugcccau

SEQ ID NO: 346548 - RNA, 19 nt, Artificial Sequence
  Description of Artificial Sequence: Synthetic oligonucleotide
cuacggucaucacucgcau

SEQ ID NO: 346549 - RNA, 19 nt, Artificial Sequence
  Description of Artificial Sequence: Synthetic oligonucleotide
cacaucccucacgcucagc

SEQ ID NO: 346550 - RNA, 19 nt, Artificial Sequence
  Description of Artificial Sequence: Synthetic oligonucleotide
gucacacguaggauauggu

SEQ ID NO: 346551 - RNA, 19 nt, Artificial Sequence
  Description of Artificial Sequence: Synthetic oligonucleotide
gucgcugcaccagccugga

SEQ ID NO: 346552 - RNA, 19 nt, Artificial Sequence
  Description of Artificial Sequence: Synthetic oligonucleotide
gccgucgcauauugucaac

SEQ ID NO: 346553 - RNA, 19 nt, Artificial Sequence
  Description of Artificial Sequence: Synthetic oligonucleotide
ggcugcgucgcacagcauu

SEQ ID NO: 346554 - RNA, 19 nt, Artificial Sequence
  Description of Artificial Sequence: Synthetic oligonucleotide
cuuggcccacaacucgccu

SEQ ID NO: 346555 - RNA, 19 nt, Artificial Sequence
  Description of Artificial Sequence: Synthetic oligonucleotide
ggguggucugcacaucccu

SEQ ID NO: 346556 - RNA, 19 nt, Artificial Sequence
  Description of Artificial Sequence: Synthetic oligonucleotide
ccaaagccucugcccgccg

SEQ ID NO: 346557 - RNA, 19 nt, Artificial Sequence
  Description of Artificial Sequence: Synthetic oligonucleotide
ggacacucaagagaacauu

SEQ ID NO: 346558 - RNA, 19 nt, Artificial Sequence
  Description of Artificial Sequence: Synthetic oligonucleotide
acguggcacguggcuggag

SEQ ID NO: 346559 - RNA, 19 nt, Artificial Sequence
  Description of Artificial Sequence: Synthetic oligonucleotide
ccgacuccauuugcguagc

SEQ ID NO: 346560 - RNA, 19 nt, Artificial Sequence
  Description of Artificial Sequence: Synthetic oligonucleotide
guugcugccgucgcauauu

SEQ ID NO: 346561 - RNA, 19 nt, Artificial Sequence
  Description of Artificial Sequence: Synthetic oligonucleotide
ggugccuaggcuggagucu

SEQ ID NO: 346562 - RNA, 19 nt, Artificial Sequence
  Description of Artificial Sequence: Synthetic oligonucleotide
gcucuauacugggccuggc

SEQ ID NO: 346563 - RNA, 19 nt, Artificial Sequence
  Description of Artificial Sequence: Synthetic oligonucleotide
cacguccaaagaagucccu

SEQ ID NO: 346564 - RNA, 19 nt, Artificial Sequence
  Description of Artificial Sequence: Synthetic oligonucleotide
ggcgaagguguagaaaguu

SEQ ID NO: 346565 - RNA, 19 nt, Artificial Sequence
  Description of Artificial Sequence: Synthetic oligonucleotide
gcucuugcacgacugcuuu

SEQ ID NO: 346566 - RNA, 19 nt, Artificial Sequence
  Description of Artificial Sequence: Synthetic oligonucleotide
ccgccggccccucccauag

SEQ ID NO: 346567 - RNA, 19 nt, Artificial Sequence
  Description of Artificial Sequence: Synthetic oligonucleotide
ggcacguggcuggaggcaa

SEQ ID NO: 346568 - RNA, 19 nt, Artificial Sequence
  Description of Artificial Sequence: Synthetic oligonucleotide
cacggaugucauugucagu

SEQ ID NO: 346569 - RNA, 19 nt, Artificial Sequence
  Description of Artificial Sequence: Synthetic oligonucleotide
cacagggcgcagcuugggu

SEQ ID NO: 346570 - RNA, 19 nt, Artificial Sequence
  Description of Artificial Sequence: Synthetic oligonucleotide
cguagcugcuucaaugcgu

SEQ ID NO: 346571 - RNA, 19 nt, Artificial Sequence
  Description of Artificial Sequence: Synthetic oligonucleotide
ugguuacguggagcagguu

SEQ ID NO: 346572 - RNA, 19 nt, Artificial Sequence
  Description of Artificial Sequence: Synthetic oligonucleotide
gcagagguggucacacgua

SEQ ID NO: 346573 - RNA, 19 nt, Artificial Sequence
  Description of Artificial Sequence: Synthetic oligonucleotide
caacucgccuuugagccuu

SEQ ID NO: 346574 - RNA, 19 nt, Artificial Sequence
  Description of Artificial Sequence: Synthetic oligonucleotide
ccucaccccuuuaucccca

SEQ ID NO: 346575 - RNA, 19 nt, Artificial Sequence
  Description of Artificial Sequence: Synthetic oligonucleotide
gcgucgcacagcauuggaa

SEQ ID NO: 346576 - RNA, 19 nt, Artificial Sequence
  Description of Artificial Sequence: Synthetic oligonucleotide
cgcauauugucaaccugcu

SEQ ID NO: 346577 - RNA, 19 nt, Artificial Sequence
  Description of Artificial Sequence: Synthetic oligonucleotide
cagguugccucaccccuuu

SEQ ID NO: 346578 - RNA, 19 nt, Artificial Sequence
  Description of Artificial Sequence: Synthetic oligonucleotide
cccaauccggguuggcucu

SEQ ID NO: 346579 - RNA, 19 nt, Artificial Sequence
  Description of Artificial Sequence: Synthetic oligonucleotide
ggugugcgcuccugguggu

SEQ ID NO: 346580 - RNA, 19 nt, Artificial Sequence
  Description of Artificial Sequence: Synthetic oligonucleotide
cgucgcauauugucaaccu

SEQ ID NO: 346581 - RNA, 19 nt, Artificial Sequence
  Description of Artificial Sequence: Synthetic oligonucleotide
cggccccucccauagagaa

SEQ ID NO: 346582 - RNA, 19 nt, Artificial Sequence
  Description of Artificial Sequence: Synthetic oligonucleotide
cuugcacgacugcuuucuu

SEQ ID NO: 346583 - RNA, 19 nt, Artificial Sequence
  Description of Artificial Sequence: Synthetic oligonucleotide
ccaugcgccacucgucugu

SEQ ID NO: 346584 - RNA, 19 nt, Artificial Sequence
  Description of Artificial Sequence: Synthetic oligonucleotide
cacccucguugaaccggaa

SEQ ID NO: 346585 - RNA, 19 nt, Artificial Sequence
  Description of Artificial Sequence: Synthetic oligonucleotide
caaccacgugugccagugu

SEQ ID NO: 346586 - RNA, 19 nt, Artificial Sequence
  Description of Artificial Sequence: Synthetic oligonucleotide
ccugugaggucagcgcgaa

SEQ ID NO: 346587 - RNA, 19 nt, Artificial Sequence
  Description of Artificial Sequence: Synthetic oligonucleotide
cacuguccgucugcagacu

SEQ ID NO: 346588 - RNA, 19 nt, Artificial Sequence
  Description of Artificial Sequence: Synthetic oligonucleotide
ggcuuucgggcaggcagcu

SEQ ID NO: 346589 - RNA, 19 nt, Artificial Sequence
  Description of Artificial Sequence: Synthetic oligonucleotide
gcuuucgggcaggcagcuc

SEQ ID NO: 346590 - RNA, 19 nt, Artificial Sequence
  Description of Artificial Sequence: Synthetic oligonucleotide
ggucagcgcgaagcaccaa

SEQ ID NO: 346591 - RNA, 19 nt, Artificial Sequence
  Description of Artificial Sequence: Synthetic oligonucleotide
gcacguggcuggaggcaaa

SEQ ID NO: 346592 - RNA, 19 nt, Artificial Sequence
  Description of Artificial Sequence: Synthetic oligonucleotide
gcggguggauggugccaua

SEQ ID NO: 346593 - RNA, 19 nt, Artificial Sequence
  Description of Artificial Sequence: Synthetic oligonucleotide
caccugggucagaccgcau

SEQ ID NO: 346594 - RNA, 19 nt, Artificial Sequence
  Description of Artificial Sequence: Synthetic oligonucleotide
cgccacucgucuguguccu

SEQ ID NO: 346595 - RNA, 19 nt, Artificial Sequence
  Description of Artificial Sequence: Synthetic oligonucleotide
cggccccgucgauuucauc

SEQ ID NO: 346596 - RNA, 19 nt, Artificial Sequence
  Description of Artificial Sequence: Synthetic oligonucleotide
gccccuugcgcugguccuu

SEQ ID NO: 346597 - RNA, 19 nt, Artificial Sequence
  Description of Artificial Sequence: Synthetic oligonucleotide
cgacuccauuugcguagcu

SEQ ID NO: 346598 - RNA, 19 nt, Artificial Sequence
  Description of Artificial Sequence: Synthetic oligonucleotide
cgccggccccucccauaga

SEQ ID NO: 346599 - RNA, 19 nt, Artificial Sequence
  Description of Artificial Sequence: Synthetic oligonucleotide
aaauaauaaaugcucaggg

SEQ ID NO: 346600 - RNA, 19 nt, Artificial Sequence
  Description of Artificial Sequence: Synthetic oligonucleotide
uaugaugugacuuuuaccc

SEQ ID NO: 346601 - RNA, 19 nt, Artificial Sequence
  Description of Artificial Sequence: Synthetic oligonucleotide
aagaauccgaaccagucgc

SEQ ID NO: 346602 - RNA, 19 nt, Artificial Sequence
  Description of Artificial Sequence: Synthetic oligonucleotide
aaguauagacggcugauac

SEQ ID NO: 346603 - RNA, 19 nt, Artificial Sequence
  Description of Artificial Sequence: Synthetic oligonucleotide
aaucgcuuugcacauuugc

SEQ ID NO: 346604 - RNA, 19 nt, Artificial Sequence
  Description of Artificial Sequence: Synthetic oligonucleotide
uccuuuaucacauaugaug

SEQ ID NO: 346605 - RNA, 19 nt, Artificial Sequence
  Description of Artificial Sequence: Synthetic oligonucleotide
aacuuuaucgacgucgggc

SEQ ID NO: 346606 - RNA, 19 nt, Artificial Sequence
  Description of Artificial Sequence: Synthetic oligonucleotide
aauaauaaaugcucaggga

SEQ ID NO: 346607 - RNA, 19 nt, Artificial Sequence
  Description of Artificial Sequence: Synthetic oligonucleotide
cacaguaaucucuacaucg

SEQ ID NO: 346608 - RNA, 19 nt, Artificial Sequence
  Description of Artificial Sequence: Synthetic oligonucleotide
ugauuucccaggaagaacc

SEQ ID NO: 346609 - RNA, 19 nt, Artificial Sequence
  Description of Artificial Sequence: Synthetic oligonucleotide
auaauaaaugcucagggaa

SEQ ID NO: 346610 - RNA, 19 nt, Artificial Sequence
  Description of Artificial Sequence: Synthetic oligonucleotide
uacaucguauuuuacauca

SEQ ID NO: 346611 - RNA, 19 nt, Artificial Sequence
  Description of Artificial Sequence: Synthetic oligonucleotide
uuagcaaugagcccggcca

SEQ ID NO: 346612 - RNA, 19 nt, Artificial Sequence
  Description of Artificial Sequence: Synthetic oligonucleotide
uguaguuucagcccacugc

SEQ ID NO: 346613 - RNA, 19 nt, Artificial Sequence
  Description of Artificial Sequence: Synthetic oligonucleotide
ugaguucaaugauacaggg

SEQ ID NO: 346614 - RNA, 19 nt, Artificial Sequence
  Description of Artificial Sequence: Synthetic oligonucleotide
aaugugagauugcagcgag

SEQ ID NO: 346615 - RNA, 19 nt, Artificial Sequence
  Description of Artificial Sequence: Synthetic oligonucleotide
aaagcaacggaacaaggau

SEQ ID NO: 346616 - RNA, 19 nt, Artificial Sequence
  Description of Artificial Sequence: Synthetic oligonucleotide
aaggccgugaucugcgacc

SEQ ID NO: 346617 - RNA, 19 nt, Artificial Sequence
  Description of Artificial Sequence: Synthetic oligonucleotide
ucgaaguuagcaaauuccc

SEQ ID NO: 346618 - RNA, 19 nt, Artificial Sequence
  Description of Artificial Sequence: Synthetic oligonucleotide
gaagaauccgaaccagucg

SEQ ID NO: 346619 - RNA, 19 nt, Artificial Sequence
  Description of Artificial Sequence: Synthetic oligonucleotide
aauagcacuaucucuucga

SEQ ID NO: 346620 - RNA, 19 nt, Artificial Sequence
  Description of Artificial Sequence: Synthetic oligonucleotide
uuaguuucgauuugugucu

SEQ ID NO: 346621 - RNA, 19 nt, Artificial Sequence
  Description of Artificial Sequence: Synthetic oligonucleotide
aguauagacggcugauacc

SEQ ID NO: 346622 - RNA, 19 nt, Artificial Sequence
  Description of Artificial Sequence: Synthetic oligonucleotide
aacggaacaaggaugcugg

SEQ ID NO: 346623 - RNA, 19 nt, Artificial Sequence
  Description of Artificial Sequence: Synthetic oligonucleotide
aauccgaaccagucgcagc

SEQ ID NO: 346624 - RNA, 19 nt, Artificial Sequence
  Description of Artificial Sequence: Synthetic oligonucleotide
ucaaaaucgaaguuagcaa

SEQ ID NO: 346625 - RNA, 19 nt, Artificial Sequence
  Description of Artificial Sequence: Synthetic oligonucleotide
ucuacaucguauuuuacau

SEQ ID NO: 346626 - RNA, 19 nt, Artificial Sequence
  Description of Artificial Sequence: Synthetic oligonucleotide
uuaaaguauagacggcuga

SEQ ID NO: 346627 - RNA, 19 nt, Artificial Sequence
  Description of Artificial Sequence: Synthetic oligonucleotide
uauaugaaugcguuuugca

SEQ ID NO: 346628 - RNA, 19 nt, Artificial Sequence
  Description of Artificial Sequence: Synthetic oligonucleotide
acagugacugacuuuagug

SEQ ID NO: 346629 - RNA, 19 nt, Artificial Sequence
  Description of Artificial Sequence: Synthetic oligonucleotide
cuuaccuguagguacagug

SEQ ID NO: 346630 - RNA, 19 nt, Artificial Sequence
  Description of Artificial Sequence: Synthetic oligonucleotide
gauacaagccugauguagg

SEQ ID NO: 346631 - RNA, 19 nt, Artificial Sequence
  Description of Artificial Sequence: Synthetic oligonucleotide
acuugucuaauuugcuggc

SEQ ID NO: 346632 - RNA, 19 nt, Artificial Sequence
  Description of Artificial Sequence: Synthetic oligonucleotide
uaugaaugcguuuugcauc

SEQ ID NO: 346633 - RNA, 19 nt, Artificial Sequence
  Description of Artificial Sequence: Synthetic oligonucleotide
uagacuuaccuguagguac

SEQ ID NO: 346634 - RNA, 19 nt, Artificial Sequence
  Description of Artificial Sequence: Synthetic oligonucleotide
aacaauuccugcuuagcaa

SEQ ID NO: 346635 - RNA, 19 nt, Artificial Sequence
  Description of Artificial Sequence: Synthetic oligonucleotide
augaugugacuuuuacccc

SEQ ID NO: 346636 - RNA, 19 nt, Artificial Sequence
  Description of Artificial Sequence: Synthetic oligonucleotide
ugugcuggcagcaaccggc

SEQ ID NO: 346637 - RNA, 19 nt, Artificial Sequence
  Description of Artificial Sequence: Synthetic oligonucleotide
uuagcuacuugccucguga

SEQ ID NO: 346638 - RNA, 19 nt, Artificial Sequence
  Description of Artificial Sequence: Synthetic oligonucleotide
ugcaucacauucuuaaagu

SEQ ID NO: 346639 - RNA, 19 nt, Artificial Sequence
  Description of Artificial Sequence: Synthetic oligonucleotide
guauagacggcugauaccc

SEQ ID NO: 346640 - RNA, 19 nt, Artificial Sequence
  Description of Artificial Sequence: Synthetic oligonucleotide
uuuuacgccagacaucaaa

SEQ ID NO: 346641 - RNA, 19 nt, Artificial Sequence
  Description of Artificial Sequence: Synthetic oligonucleotide
cauuuagcuacuugccucg

SEQ ID NO: 346642 - RNA, 19 nt, Artificial Sequence
  Description of Artificial Sequence: Synthetic oligonucleotide
ucacguuuauaugaaugcg

SEQ ID NO: 346643 - RNA, 19 nt, Artificial Sequence
  Description of Artificial Sequence: Synthetic oligonucleotide
agugacugacuuuagugug

SEQ ID NO: 346644 - RNA, 19 nt, Artificial Sequence
  Description of Artificial Sequence: Synthetic oligonucleotide
uuacaguuaaagacaauua

SEQ ID NO: 346645 - RNA, 19 nt, Artificial Sequence
  Description of Artificial Sequence: Synthetic oligonucleotide
aagcaaagcgaaccucacg

SEQ ID NO: 346646 - RNA, 19 nt, Artificial Sequence
  Description of Artificial Sequence: Synthetic oligonucleotide
cuagauuuacaguuaaaga

SEQ ID NO: 346647 - RNA, 19 nt, Artificial Sequence
  Description of Artificial Sequence: Synthetic oligonucleotide
uguggccuacaccugacag

SEQ ID NO: 346648 - RNA, 19 nt, Artificial Sequence
  Description of Artificial Sequence: Synthetic oligonucleotide
uuuacgccagacaucaaaa

SEQ ID NO: 346649 - RNA, 19 nt, Artificial Sequence
  Description of Artificial Sequence: Synthetic oligonucleotide
acgccagacaucaaaaucg

SEQ ID NO: 346650 - RNA, 19 nt, Artificial Sequence
  Description of Artificial Sequence: Synthetic oligonucleotide
ugaugugacuuuuacccca

SEQ ID NO: 346651 - RNA, 19 nt, Artificial Sequence
  Description of Artificial Sequence: Synthetic oligonucleotide
uugcaagcgaaauugcugu

SEQ ID NO: 346652 - RNA, 19 nt, Artificial Sequence
  Description of Artificial Sequence: Synthetic oligonucleotide
cuuaaaguauagacggcug

SEQ ID NO: 346653 - RNA, 19 nt, Artificial Sequence
  Description of Artificial Sequence: Synthetic oligonucleotide
auaugaaugcguuuugcau

SEQ ID NO: 346654 - RNA, 19 nt, Artificial Sequence
  Description of Artificial Sequence: Synthetic oligonucleotide
caugagguaucccuuaaug

SEQ ID NO: 346655 - RNA, 19 nt, Artificial Sequence
  Description of Artificial Sequence: Synthetic oligonucleotide
uuuaguguguggccuacac

SEQ ID NO: 346656 - RNA, 19 nt, Artificial Sequence
  Description of Artificial Sequence: Synthetic oligonucleotide
acuuuaucgacgucgggcu

SEQ ID NO: 346657 - RNA, 19 nt, Artificial Sequence
  Description of Artificial Sequence: Synthetic oligonucleotide
uuauaugaaugcguuuugc

SEQ ID NO: 346658 - RNA, 19 nt, Artificial Sequence
  Description of Artificial Sequence: Synthetic oligonucleotide
gagauugcagcgaggaagg

SEQ ID NO: 346659 - RNA, 19 nt, Artificial Sequence
  Description of Artificial Sequence: Synthetic oligonucleotide
auugcagcgaggaaggcuc

SEQ ID NO: 346660 - RNA, 19 nt, Artificial Sequence
  Description of Artificial Sequence: Synthetic oligonucleotide
cuggucgggaacuuggagg

SEQ ID NO: 346661 - RNA, 19 nt, Artificial Sequence
  Description of Artificial Sequence: Synthetic oligonucleotide
gaaccaucacgguacuccg

SEQ ID NO: 346662 - RNA, 19 nt, Artificial Sequence
  Description of Artificial Sequence: Synthetic oligonucleotide
augaaugcguuuugcauca

SEQ ID NO: 346663 - RNA, 19 nt, Artificial Sequence
  Description of Artificial Sequence: Synthetic oligonucleotide
uucuuaaaguauagacggc

SEQ ID NO: 346664 - RNA, 19 nt, Artificial Sequence
  Description of Artificial Sequence: Synthetic oligonucleotide
aacccugggauucuuaguu

SEQ ID NO: 346665 - RNA, 19 nt, Artificial Sequence
  Description of Artificial Sequence: Synthetic oligonucleotide
acacgaaccaucacgguac

SEQ ID NO: 346666 - RNA, 19 nt, Artificial Sequence
  Description of Artificial Sequence: Synthetic oligonucleotide
guaacuuuaucgacgucgg

SEQ ID NO: 346667 - RNA, 19 nt, Artificial Sequence
  Description of Artificial Sequence: Synthetic oligonucleotide
cuuugccugacagauaccc

SEQ ID NO: 346668 - RNA, 19 nt, Artificial Sequence
  Description of Artificial Sequence: Synthetic oligonucleotide
aaccagucgcagcugcugg

SEQ ID NO: 346669 - RNA, 19 nt, Artificial Sequence
  Description of Artificial Sequence: Synthetic oligonucleotide
accgauuuguucaacuugg

SEQ ID NO: 346670 - RNA, 19 nt, Artificial Sequence
  Description of Artificial Sequence: Synthetic oligonucleotide
gauucuuaguuucgauuug

SEQ ID NO: 346671 - RNA, 19 nt, Artificial Sequence
  Description of Artificial Sequence: Synthetic oligonucleotide
uguauuuguugucaccgau

SEQ ID NO: 346672 - RNA, 19 nt, Artificial Sequence
  Description of Artificial Sequence: Synthetic oligonucleotide
uacgccagacaucaaaauc

SEQ ID NO: 346673 - RNA, 19 nt, Artificial Sequence
  Description of Artificial Sequence: Synthetic oligonucleotide
auuggcguucccuugggug

SEQ ID NO: 346674 - RNA, 19 nt, Artificial Sequence
  Description of Artificial Sequence: Synthetic oligonucleotide
uugccugacagauacccug

SEQ ID NO: 346675 - RNA, 19 nt, Artificial Sequence
  Description of Artificial Sequence: Synthetic oligonucleotide
uuaguguguggccuacacc

SEQ ID NO: 346676 - RNA, 19 nt, Artificial Sequence
  Description of Artificial Sequence: Synthetic oligonucleotide
uccggauggauacaagccu

SEQ ID NO: 346677 - RNA, 19 nt, Artificial Sequence
  Description of Artificial Sequence: Synthetic oligonucleotide
gaagucgaagcuugcuucc

SEQ ID NO: 346678 - RNA, 19 nt, Artificial Sequence
  Description of Artificial Sequence: Synthetic oligonucleotide
uggauacagaaguggaucu

SEQ ID NO: 346679 - RNA, 19 nt, Artificial Sequence
  Description of Artificial Sequence: Synthetic oligonucleotide
cuauguagugcugugguug

SEQ ID NO: 346680 - RNA, 19 nt, Artificial Sequence
  Description of Artificial Sequence: Synthetic oligonucleotide
uguuuggauguagagcugc

SEQ ID NO: 346681 - RNA, 19 nt, Artificial Sequence
  Description of Artificial Sequence: Synthetic oligonucleotide
aaugauacaggggcugcug

SEQ ID NO: 346682 - RNA, 19 nt, Artificial Sequence
  Description of Artificial Sequence: Synthetic oligonucleotide
gugucugcgguccggaugg

SEQ ID NO: 346683 - RNA, 19 nt, Artificial Sequence
  Description of Artificial Sequence: Synthetic oligonucleotide
guaguuucagcccacugca

SEQ ID NO: 346684 - RNA, 19 nt, Artificial Sequence
  Description of Artificial Sequence: Synthetic oligonucleotide
uguugguccuuccuuuagc

SEQ ID NO: 346685 - RNA, 19 nt, Artificial Sequence
  Description of Artificial Sequence: Synthetic oligonucleotide
acaauuccugcuuagcaau

SEQ ID NO: 346686 - RNA, 19 nt, Artificial Sequence
  Description of Artificial Sequence: Synthetic oligonucleotide
uucaaugauacaggggcug

SEQ ID NO: 346687 - RNA, 19 nt, Artificial Sequence
  Description of Artificial Sequence: Synthetic oligonucleotide
ucgaagacuugucuaauuu

SEQ ID NO: 346688 - RNA, 19 nt, Artificial Sequence
  Description of Artificial Sequence: Synthetic oligonucleotide
caaaaucgaaguuagcaaa

SEQ ID NO: 346689 - RNA, 19 nt, Artificial Sequence
  Description of Artificial Sequence: Synthetic oligonucleotide
guugguccuuccuuuagcc

SEQ ID NO: 346690 - RNA, 19 nt, Artificial Sequence
  Description of Artificial Sequence: Synthetic oligonucleotide
aagucgaagcuugcuuccc

SEQ ID NO: 346691 - RNA, 19 nt, Artificial Sequence
  Description of Artificial Sequence: Synthetic oligonucleotide
aaugcguuuugcaucacau

SEQ ID NO: 346692 - RNA, 19 nt, Artificial Sequence
  Description of Artificial Sequence: Synthetic oligonucleotide
ugccugacagauacccugg

SEQ ID NO: 346693 - RNA, 19 nt, Artificial Sequence
  Description of Artificial Sequence: Synthetic oligonucleotide
ucguugagcuuucuccucc

SEQ ID NO: 346694 - RNA, 19 nt, Artificial Sequence
  Description of Artificial Sequence: Synthetic oligonucleotide
agcuauguagugcuguggu

SEQ ID NO: 346695 - RNA, 19 nt, Artificial Sequence
  Description of Artificial Sequence: Synthetic oligonucleotide
auagacggcugauacccag

SEQ ID NO: 346696 - RNA, 19 nt, Artificial Sequence
  Description of Artificial Sequence: Synthetic oligonucleotide
agagaggauguagacuuac

SEQ ID NO: 346697 - RNA, 19 nt, Artificial Sequence
  Description of Artificial Sequence: Synthetic oligonucleotide
guuucgauuugugucugcg

SEQ ID NO: 346698 - RNA, 19 nt, Artificial Sequence
  Description of Artificial Sequence: Synthetic oligonucleotide
cacgguacuccgaagaauc

SEQ ID NO: 346699 - RNA, 19 nt, Artificial Sequence
  Description of Artificial Sequence: Synthetic oligonucleotide
uaucacauaugaugugacu

SEQ ID NO: 346700 - RNA, 19 nt, Artificial Sequence
  Description of Artificial Sequence: Synthetic oligonucleotide
gacugguaccgucugcuag

SEQ ID NO: 346701 - RNA, 19 nt, Artificial Sequence
  Description of Artificial Sequence: Synthetic oligonucleotide
uggucgggaacuuggagga

SEQ ID NO: 346702 - RNA, 19 nt, Artificial Sequence
  Description of Artificial Sequence: Synthetic oligonucleotide
ucagcuauguagugcugug

SEQ ID NO: 346703 - RNA, 19 nt, Artificial Sequence
  Description of Artificial Sequence: Synthetic oligonucleotide
cucuacaucguauuuuaca

SEQ ID NO: 346704 - RNA, 19 nt, Artificial Sequence
  Description of Artificial Sequence: Synthetic oligonucleotide
gucuugguaacuuuaucga

SEQ ID NO: 346705 - RNA, 19 nt, Artificial Sequence
  Description of Artificial Sequence: Synthetic oligonucleotide
ugcuuagcaaugagcccgg

SEQ ID NO: 346706 - RNA, 19 nt, Artificial Sequence
  Description of Artificial Sequence: Synthetic oligonucleotide
aagcaacggaacaaggaug

SEQ ID NO: 346707 - RNA, 19 nt, Artificial Sequence
  Description of Artificial Sequence: Synthetic oligonucleotide
uacagugacugacuuuagu

SEQ ID NO: 346708 - RNA, 19 nt, Artificial Sequence
  Description of Artificial Sequence: Synthetic oligonucleotide
gaagugacaugagguaucc

SEQ ID NO: 346709 - RNA, 19 nt, Artificial Sequence
  Description of Artificial Sequence: Synthetic oligonucleotide
caauagcacuaucucuucg

SEQ ID NO: 346710 - RNA, 19 nt, Artificial Sequence
  Description of Artificial Sequence: Synthetic oligonucleotide
cugugauggguuuguaagc

SEQ ID NO: 346711 - RNA, 19 nt, Artificial Sequence
  Description of Artificial Sequence: Synthetic oligonucleotide
ucacauaugaugugacuuu

SEQ ID NO: 346712 - RNA, 19 nt, Artificial Sequence
  Description of Artificial Sequence: Synthetic oligonucleotide
ugacgagugaucuucccau

SEQ ID NO: 346713 - RNA, 19 nt, Artificial Sequence
  Description of Artificial Sequence: Synthetic oligonucleotide
cucuuauaggucuugguaa

SEQ ID NO: 346714 - RNA, 19 nt, Artificial Sequence
  Description of Artificial Sequence: Synthetic oligonucleotide
uuugcucaccagcagguua

SEQ ID NO: 346715 - RNA, 19 nt, Artificial Sequence
  Description of Artificial Sequence: Synthetic oligonucleotide
ucacucgagauuucuuaug

SEQ ID NO: 346716 - RNA, 19 nt, Artificial Sequence
  Description of Artificial Sequence: Synthetic oligonucleotide
agcgaaauugcuguuacaa

SEQ ID NO: 346717 - RNA, 19 nt, Artificial Sequence
  Description of Artificial Sequence: Synthetic oligonucleotide
uagacggcugauacccagg

SEQ ID NO: 346718 - RNA, 19 nt, Artificial Sequence
  Description of Artificial Sequence: Synthetic oligonucleotide
ucuaauuugcuggcaggug

SEQ ID NO: 346719 - RNA, 19 nt, Artificial Sequence
  Description of Artificial Sequence: Synthetic oligonucleotide
agacggcugauacccaggg

SEQ ID NO: 346720 - RNA, 19 nt, Artificial Sequence
  Description of Artificial Sequence: Synthetic oligonucleotide
gagccaauagcacuaucuc

SEQ ID NO: 346721 - RNA, 19 nt, Artificial Sequence
  Description of Artificial Sequence: Synthetic oligonucleotide
uaaaguauagacggcugau

SEQ ID NO: 346722 - RNA, 19 nt, Artificial Sequence
  Description of Artificial Sequence: Synthetic oligonucleotide
cuuagcaaugagcccggcc

SEQ ID NO: 346723 - RNA, 19 nt, Artificial Sequence
  Description of Artificial Sequence: Synthetic oligonucleotide
ugacuuuaguguguggccu

SEQ ID NO: 346724 - RNA, 19 nt, Artificial Sequence
  Description of Artificial Sequence: Synthetic oligonucleotide
uaaauuccugacgagugau

SEQ ID NO: 346725 - RNA, 19 nt, Artificial Sequence
  Description of Artificial Sequence: Synthetic oligonucleotide
gagguaucccuuaauguca

SEQ ID NO: 346726 - RNA, 19 nt, Artificial Sequence
  Description of Artificial Sequence: Synthetic oligonucleotide
cacccaagcaaagcgaacc

SEQ ID NO: 346727 - RNA, 19 nt, Artificial Sequence
  Description of Artificial Sequence: Synthetic oligonucleotide
uaagcaucuuuguuuggau

SEQ ID NO: 346728 - RNA, 19 nt, Artificial Sequence
  Description of Artificial Sequence: Synthetic oligonucleotide
aggaaagaauuccaucaau

SEQ ID NO: 346729 - RNA, 19 nt, Artificial Sequence
  Description of Artificial Sequence: Synthetic oligonucleotide
ggauacaagccugauguag

SEQ ID NO: 346730 - RNA, 19 nt, Artificial Sequence
  Description of Artificial Sequence: Synthetic oligonucleotide
uuggcguucccuugggugu

SEQ ID NO: 346731 - RNA, 19 nt, Artificial Sequence
  Description of Artificial Sequence: Synthetic oligonucleotide
auacccagggcacgucugg

SEQ ID NO: 346732 - RNA, 19 nt, Artificial Sequence
  Description of Artificial Sequence: Synthetic oligonucleotide
cuuaugauucauccaccuc

SEQ ID NO: 346733 - RNA, 19 nt, Artificial Sequence
  Description of Artificial Sequence: Synthetic oligonucleotide
cauggggauuuuagaaggc

SEQ ID NO: 346734 - RNA, 19 nt, Artificial Sequence
  Description of Artificial Sequence: Synthetic oligonucleotide
aaacucgccgccugcaaua

SEQ ID NO: 346735 - RNA, 19 nt, Artificial Sequence
  Description of Artificial Sequence: Synthetic oligonucleotide
uuugccugacagauacccu

SEQ ID NO: 346736 - RNA, 19 nt, Artificial Sequence
  Description of Artificial Sequence: Synthetic oligonucleotide
aagugacaugagguauccc

SEQ ID NO: 346737 - RNA, 19 nt, Artificial Sequence
  Description of Artificial Sequence: Synthetic oligonucleotide
ugauacccagggcacgucu

SEQ ID NO: 346738 - RNA, 19 nt, Artificial Sequence
  Description of Artificial Sequence: Synthetic oligonucleotide
caacaauuccugcuuagca

SEQ ID NO: 346739 - RNA, 19 nt, Artificial Sequence
  Description of Artificial Sequence: Synthetic oligonucleotide
uuuaucgacgucgggcugu

SEQ ID NO: 346740 - RNA, 19 nt, Artificial Sequence
  Description of Artificial Sequence: Synthetic oligonucleotide
aaaguauagacggcugaua

SEQ ID NO: 346741 - RNA, 19 nt, Artificial Sequence
  Description of Artificial Sequence: Synthetic oligonucleotide
uguugucaccgauuuguuc

SEQ ID NO: 346742 - RNA, 19 nt, Artificial Sequence
  Description of Artificial Sequence: Synthetic oligonucleotide
cuacaucguauuuuacauc

SEQ ID NO: 346743 - RNA, 19 nt, Artificial Sequence
  Description of Artificial Sequence: Synthetic oligonucleotide
auucuuaguuucgauuugu

SEQ ID NO: 346744 - RNA, 19 nt, Artificial Sequence
  Description of Artificial Sequence: Synthetic oligonucleotide
cacaccaugguacccgcag

SEQ ID NO: 346745 - RNA, 19 nt, Artificial Sequence
  Description of Artificial Sequence: Synthetic oligonucleotide
aguaaucucuacaucguau

SEQ ID NO: 346746 - RNA, 19 nt, Artificial Sequence
  Description of Artificial Sequence: Synthetic oligonucleotide
uuggaaucgcuuugcacau

SEQ ID NO: 346747 - RNA, 19 nt, Artificial Sequence
  Description of Artificial Sequence: Synthetic oligonucleotide
cugauucucuguugguuac

SEQ ID NO: 346748 - RNA, 19 nt, Artificial Sequence
  Description of Artificial Sequence: Synthetic oligonucleotide
ucccuuaaugucagcuaug

SEQ ID NO: 346749 - RNA, 19 nt, Artificial Sequence
  Description of Artificial Sequence: Synthetic oligonucleotide
gacacgaaccaucacggua

SEQ ID NO: 346750 - RNA, 19 nt, Artificial Sequence
  Description of Artificial Sequence: Synthetic oligonucleotide
uauaggucuugguaacuuu

SEQ ID NO: 346751 - RNA, 19 nt, Artificial Sequence
  Description of Artificial Sequence: Synthetic oligonucleotide
gagauuucccugcuauguc

SEQ ID NO: 346752 - RNA, 19 nt, Artificial Sequence
  Description of Artificial Sequence: Synthetic oligonucleotide
uugcuucccuggauuggcg

SEQ ID NO: 346753 - RNA, 19 nt, Artificial Sequence
  Description of Artificial Sequence: Synthetic oligonucleotide
uuccuuuaucacauaugau

SEQ ID NO: 346754 - RNA, 19 nt, Artificial Sequence
  Description of Artificial Sequence: Synthetic oligonucleotide
gaauccgaaccagucgcag

SEQ ID NO: 346755 - RNA, 19 nt, Artificial Sequence
  Description of Artificial Sequence: Synthetic oligonucleotide
aggaugaacuucucacgca

SEQ ID NO: 346756 - RNA, 19 nt, Artificial Sequence
  Description of Artificial Sequence: Synthetic oligonucleotide
uuuggauguagagcugcca

SEQ ID NO: 346757 - RNA, 19 nt, Artificial Sequence
  Description of Artificial Sequence: Synthetic oligonucleotide
aucuaaagcaacggaacaa

SEQ ID NO: 346758 - RNA, 19 nt, Artificial Sequence
  Description of Artificial Sequence: Synthetic oligonucleotide
agauguccgccacagcacu

SEQ ID NO: 346759 - RNA, 19 nt, Artificial Sequence
  Description of Artificial Sequence: Synthetic oligonucleotide
uugccucgugaccucaucu

SEQ ID NO: 346760 - RNA, 19 nt, Artificial Sequence
  Description of Artificial Sequence: Synthetic oligonucleotide
gaaugugagauugcagcga

SEQ ID NO: 346761 - RNA, 19 nt, Artificial Sequence
  Description of Artificial Sequence: Synthetic oligonucleotide
uuauaggucuugguaacuu

SEQ ID NO: 346762 - RNA, 19 nt, Artificial Sequence
  Description of Artificial Sequence: Synthetic oligonucleotide
caagcaaagcgaaccucac

SEQ ID NO: 346763 - RNA, 19 nt, Artificial Sequence
  Description of Artificial Sequence: Synthetic oligonucleotide
ggcugaaucuaaagcaacg

SEQ ID NO: 346764 - RNA, 19 nt, Artificial Sequence
  Description of Artificial Sequence: Synthetic oligonucleotide
caggugacuuccucugggg

SEQ ID NO: 346765 - RNA, 19 nt, Artificial Sequence
  Description of Artificial Sequence: Synthetic oligonucleotide
agcaaccggcaccuguggg

SEQ ID NO: 346766 - RNA, 19 nt, Artificial Sequence
  Description of Artificial Sequence: Synthetic oligonucleotide
acuaucucuucgaagacuu

SEQ ID NO: 346767 - RNA, 19 nt, Artificial Sequence
  Description of Artificial Sequence: Synthetic oligonucleotide
uuacgccagacaucaaaau

SEQ ID NO: 346768 - RNA, 19 nt, Artificial Sequence
  Description of Artificial Sequence: Synthetic oligonucleotide
aaagcgaaccucacguuua

SEQ ID NO: 346769 - RNA, 19 nt, Artificial Sequence
  Description of Artificial Sequence: Synthetic oligonucleotide
gccuuugccugacagauac

SEQ ID NO: 346770 - RNA, 19 nt, Artificial Sequence
  Description of Artificial Sequence: Synthetic oligonucleotide
ggaagucgaagcuugcuuc

SEQ ID NO: 346771 - RNA, 19 nt, Artificial Sequence
  Description of Artificial Sequence: Synthetic oligonucleotide
ugauguagggaagcgcuuc

SEQ ID NO: 346772 - RNA, 19 nt, Artificial Sequence
  Description of Artificial Sequence: Synthetic oligonucleotide
acaguaaucucuacaucgu

SEQ ID NO: 346773 - RNA, 19 nt, Artificial Sequence
  Description of Artificial Sequence: Synthetic oligonucleotide
gaaugcguuuugcaucaca

SEQ ID NO: 346774 - RNA, 19 nt, Artificial Sequence
  Description of Artificial Sequence: Synthetic oligonucleotide
cuugucgauucuccugaag

SEQ ID NO: 346775 - RNA, 19 nt, Artificial Sequence
  Description of Artificial Sequence: Synthetic oligonucleotide
uacuccgaagaauccgaac

SEQ ID NO: 346776 - RNA, 19 nt, Artificial Sequence
  Description of Artificial Sequence: Synthetic oligonucleotide
agacuggauuucugaaaug

SEQ ID NO: 346777 - RNA, 19 nt, Artificial Sequence
  Description of Artificial Sequence: Synthetic oligonucleotide
gcgucguugagcuuucucc

SEQ ID NO: 346778 - RNA, 19 nt, Artificial Sequence
  Description of Artificial Sequence: Synthetic oligonucleotide
cuguuacaaaaugaguuca

SEQ ID NO: 346779 - RNA, 19 nt, Artificial Sequence
  Description of Artificial Sequence: Synthetic oligonucleotide
ugcugggagucuccaaacu

SEQ ID NO: 346780 - RNA, 19 nt, Artificial Sequence
  Description of Artificial Sequence: Synthetic oligonucleotide
ccucacguuuauaugaaug

SEQ ID NO: 346781 - RNA, 19 nt, Artificial Sequence
  Description of Artificial Sequence: Synthetic oligonucleotide
caacggaacaaggaugcug

SEQ ID NO: 346782 - RNA, 19 nt, Artificial Sequence
  Description of Artificial Sequence: Synthetic oligonucleotide
gcauuuagcuacuugccuc

SEQ ID NO: 346783 - RNA, 19 nt, Artificial Sequence
  Description of Artificial Sequence: Synthetic oligonucleotide
acugauuucccaggaagaa

SEQ ID NO: 346784 - RNA, 19 nt, Artificial Sequence
  Description of Artificial Sequence: Synthetic oligonucleotide
ccgacacgaaccaucacgg

SEQ ID NO: 346785 - RNA, 19 nt, Artificial Sequence
  Description of Artificial Sequence: Synthetic oligonucleotide
uucgaagacuugucuaauu

SEQ ID NO: 346786 - RNA, 19 nt, Artificial Sequence
  Description of Artificial Sequence: Synthetic oligonucleotide
uguagggaagcgcuuccuu

SEQ ID NO: 346787 - RNA, 19 nt, Artificial Sequence
  Description of Artificial Sequence: Synthetic oligonucleotide
acuguguguuaauuguguu

SEQ ID NO: 346788 - RNA, 19 nt, Artificial Sequence
  Description of Artificial Sequence: Synthetic oligonucleotide
acgguacuccgaagaaucc

SEQ ID NO: 346789 - RNA, 19 nt, Artificial Sequence
  Description of Artificial Sequence: Synthetic oligonucleotide
caucacgguacuccgaaga

SEQ ID NO: 346790 - RNA, 19 nt, Artificial Sequence
  Description of Artificial Sequence: Synthetic oligonucleotide
aauuugcuggcaggugacu

SEQ ID NO: 346791 - RNA, 19 nt, Artificial Sequence
  Description of Artificial Sequence: Synthetic oligonucleotide
aucacgguacuccgaagaa

SEQ ID NO: 346792 - RNA, 19 nt, Artificial Sequence
  Description of Artificial Sequence: Synthetic oligonucleotide
uccugacgagugaucuucc

SEQ ID NO: 346793 - RNA, 19 nt, Artificial Sequence
  Description of Artificial Sequence: Synthetic oligonucleotide
gaaggcucagcugcccucc

SEQ ID NO: 346794 - RNA, 19 nt, Artificial Sequence
  Description of Artificial Sequence: Synthetic oligonucleotide
aucugcgaccccguggccg

SEQ ID NO: 346795 - RNA, 19 nt, Artificial Sequence
  Description of Artificial Sequence: Synthetic oligonucleotide
ugggagucuccaaacugau

SEQ ID NO: 346796 - RNA, 19 nt, Artificial Sequence
  Description of Artificial Sequence: Synthetic oligonucleotide
ugcacaccaugguacccgc

SEQ ID NO: 346797 - RNA, 19 nt, Artificial Sequence
  Description of Artificial Sequence: Synthetic oligonucleotide
gcaaccggcaccugugggg

SEQ ID NO: 346798 - RNA, 19 nt, Artificial Sequence
  Description of Artificial Sequence: Synthetic oligonucleotide
aagcgaaccucacguuuau

SEQ ID NO: 346799 - RNA, 19 nt, Artificial Sequence
  Description of Artificial Sequence: Synthetic oligonucleotide
ugggauucuuaguuucgau

SEQ ID NO: 346800 - RNA, 19 nt, Artificial Sequence
  Description of Artificial Sequence: Synthetic oligonucleotide
aggccgugaucugcgaccc

SEQ ID NO: 346801 - RNA, 19 nt, Artificial Sequence
  Description of Artificial Sequence: Synthetic oligonucleotide
acccaagcaaagcgaaccu

SEQ ID NO: 346802 - RNA, 19 nt, Artificial Sequence
  Description of Artificial Sequence: Synthetic oligonucleotide
caucacucgagauuucuua

SEQ ID NO: 346803 - RNA, 19 nt, Artificial Sequence
  Description of Artificial Sequence: Synthetic oligonucleotide
uuucucacuuaguguaguu

SEQ ID NO: 346804 - RNA, 19 nt, Artificial Sequence
  Description of Artificial Sequence: Synthetic oligonucleotide
aggucugguguucugcaau

SEQ ID NO: 346805 - RNA, 19 nt, Artificial Sequence
  Description of Artificial Sequence: Synthetic oligonucleotide
acguuuauaugaaugcguu

SEQ ID NO: 346806 - RNA, 19 nt, Artificial Sequence
  Description of Artificial Sequence: Synthetic oligonucleotide
uguucggacucuggcagcu

SEQ ID NO: 346807 - RNA, 19 nt, Artificial Sequence
  Description of Artificial Sequence: Synthetic oligonucleotide
uaguuucgauuugugucug

SEQ ID NO: 346808 - RNA, 19 nt, Artificial Sequence
  Description of Artificial Sequence: Synthetic oligonucleotide
caaugaggguuuucacuuc

SEQ ID NO: 346809 - RNA, 19 nt, Artificial Sequence
  Description of Artificial Sequence: Synthetic oligonucleotide
cacguuuauaugaaugcgu

SEQ ID NO: 346810 - RNA, 19 nt, Artificial Sequence
  Description of Artificial Sequence: Synthetic oligonucleotide
cuccagccgguccaaggcg

SEQ ID NO: 346811 - RNA, 19 nt, Artificial Sequence
  Description of Artificial Sequence: Synthetic oligonucleotide
agauugcagcgaggaaggc

SEQ ID NO: 346812 - RNA, 19 nt, Artificial Sequence
  Description of Artificial Sequence: Synthetic oligonucleotide
guguaguuucagcccacug

SEQ ID NO: 346813 - RNA, 19 nt, Artificial Sequence
  Description of Artificial Sequence: Synthetic oligonucleotide
ucccuuguccaagacugga

SEQ ID NO: 346814 - RNA, 19 nt, Artificial Sequence
  Description of Artificial Sequence: Synthetic oligonucleotide
agguaucccuuaaugucag

SEQ ID NO: 346815 - RNA, 19 nt, Artificial Sequence
  Description of Artificial Sequence: Synthetic oligonucleotide
gacaugagguaucccuuaa

SEQ ID NO: 346816 - RNA, 19 nt, Artificial Sequence
  Description of Artificial Sequence: Synthetic oligonucleotide
ccuguagguacagugacug

SEQ ID NO: 346817 - RNA, 19 nt, Artificial Sequence
  Description of Artificial Sequence: Synthetic oligonucleotide
agacuuaccuguagguaca

SEQ ID NO: 346818 - RNA, 19 nt, Artificial Sequence
  Description of Artificial Sequence: Synthetic oligonucleotide
cuaucucuucgaagacuug

SEQ ID NO: 346819 - RNA, 19 nt, Artificial Sequence
  Description of Artificial Sequence: Synthetic oligonucleotide
acaugagguaucccuuaau

SEQ ID NO: 346820 - RNA, 19 nt, Artificial Sequence
  Description of Artificial Sequence: Synthetic oligonucleotide
cuuuaucgacgucgggcug

SEQ ID NO: 346821 - RNA, 19 nt, Artificial Sequence
  Description of Artificial Sequence: Synthetic oligonucleotide
agccugauguagggaagcg

SEQ ID NO: 346822 - RNA, 19 nt, Artificial Sequence
  Description of Artificial Sequence: Synthetic oligonucleotide
guuuggauguagagcugcc

SEQ ID NO: 346823 - RNA, 19 nt, Artificial Sequence
  Description of Artificial Sequence: Synthetic oligonucleotide
cagcuauguagugcugugg

SEQ ID NO: 346824 - RNA, 19 nt, Artificial Sequence
  Description of Artificial Sequence: Synthetic oligonucleotide
guaccgucugcuaggauga

SEQ ID NO: 346825 - RNA, 19 nt, Artificial Sequence
  Description of Artificial Sequence: Synthetic oligonucleotide
cuguguucggacucuggca

SEQ ID NO: 346826 - RNA, 19 nt, Artificial Sequence
  Description of Artificial Sequence: Synthetic oligonucleotide
gacgagugaucuucccauc

SEQ ID NO: 346827 - RNA, 19 nt, Artificial Sequence
  Description of Artificial Sequence: Synthetic oligonucleotide
cagcaagcuguguucggac

SEQ ID NO: 346828 - RNA, 19 nt, Artificial Sequence
  Description of Artificial Sequence: Synthetic oligonucleotide
auacaggggcugcugucca

SEQ ID NO: 346829 - RNA, 19 nt, Artificial Sequence
  Description of Artificial Sequence: Synthetic oligonucleotide
gucugugcgucugugggac

SEQ ID NO: 346830 - RNA, 19 nt, Artificial Sequence
  Description of Artificial Sequence: Synthetic oligonucleotide
gacuuaccuguagguacag

SEQ ID NO: 346831 - RNA, 19 nt, Artificial Sequence
  Description of Artificial Sequence: Synthetic oligonucleotide
cagugacugacuuuagugu

SEQ ID NO: 346832 - RNA, 19 nt, Artificial Sequence
  Description of Artificial Sequence: Synthetic oligonucleotide
ucggacucuggcagcugca

SEQ ID NO: 346833 - RNA, 19 nt, Artificial Sequence
  Description of Artificial Sequence: Synthetic oligonucleotide
guaucccuuaaugucagcu

SEQ ID NO: 346834 - RNA, 19 nt, Artificial Sequence
  Description of Artificial Sequence: Synthetic oligonucleotide
guagacuuaccuguaggua

SEQ ID NO: 346835 - RNA, 19 nt, Artificial Sequence
  Description of Artificial Sequence: Synthetic oligonucleotide
ucacgguacuccgaagaau

SEQ ID NO: 346836 - RNA, 19 nt, Artificial Sequence
  Description of Artificial Sequence: Synthetic oligonucleotide
gacgucgggcuguuuccug

SEQ ID NO: 346837 - RNA, 19 nt, Artificial Sequence
  Description of Artificial Sequence: Synthetic oligonucleotide
uggauacaagccugaugua

SEQ ID NO: 346838 - RNA, 19 nt, Artificial Sequence
  Description of Artificial Sequence: Synthetic oligonucleotide
cugugcgucugugggacag

SEQ ID NO: 346839 - RNA, 19 nt, Artificial Sequence
  Description of Artificial Sequence: Synthetic oligonucleotide
gauugcagcgaggaaggcu

SEQ ID NO: 346840 - RNA, 19 nt, Artificial Sequence
  Description of Artificial Sequence: Synthetic oligonucleotide
uagugcugugguugucaga

SEQ ID NO: 346841 - RNA, 19 nt, Artificial Sequence
  Description of Artificial Sequence: Synthetic oligonucleotide
ugucagcuguugagaauuu

SEQ ID NO: 346842 - RNA, 19 nt, Artificial Sequence
  Description of Artificial Sequence: Synthetic oligonucleotide
caggcgacuggucgggaac

SEQ ID NO: 346843 - RNA, 19 nt, Artificial Sequence
  Description of Artificial Sequence: Synthetic oligonucleotide
ggauuggcguucccuuggg

SEQ ID NO: 346844 - RNA, 19 nt, Artificial Sequence
  Description of Artificial Sequence: Synthetic oligonucleotide
ugccucgugaccucaucuu

SEQ ID NO: 346845 - RNA, 19 nt, Artificial Sequence
  Description of Artificial Sequence: Synthetic oligonucleotide
gucguugagcuuucuccuc

SEQ ID NO: 346846 - RNA, 19 nt, Artificial Sequence
  Description of Artificial Sequence: Synthetic oligonucleotide
cagcaaccggcaccugugg

SEQ ID NO: 346847 - RNA, 19 nt, Artificial Sequence
  Description of Artificial Sequence: Synthetic oligonucleotide
gucaccgauuuguucaacu

SEQ ID NO: 346848 - RNA, 19 nt, Artificial Sequence
  Description of Artificial Sequence: Synthetic oligonucleotide
ccgagaaccugcucggggc

SEQ ID NO: 346849 - RNA, 19 nt, Artificial Sequence
  Description of Artificial Sequence: Synthetic oligonucleotide
cagugcaggaacauuaguu

SEQ ID NO: 346850 - RNA, 19 nt, Artificial Sequence
  Description of Artificial Sequence: Synthetic oligonucleotide
uggagccaauagcacuauc

SEQ ID NO: 346851 - RNA, 19 nt, Artificial Sequence
  Description of Artificial Sequence: Synthetic oligonucleotide
ugcaagcgaaauugcuguu

SEQ ID NO: 346852 - RNA, 19 nt, Artificial Sequence
  Description of Artificial Sequence: Synthetic oligonucleotide
gguacuccgaagaauccga

SEQ ID NO: 346853 - RNA, 19 nt, Artificial Sequence
  Description of Artificial Sequence: Synthetic oligonucleotide
ggauacagaaguggaucug

SEQ ID NO: 346854 - RNA, 19 nt, Artificial Sequence
  Description of Artificial Sequence: Synthetic oligonucleotide
gggaacuuggaggaaagaa

SEQ ID NO: 346855 - RNA, 19 nt, Artificial Sequence
  Description of Artificial Sequence: Synthetic oligonucleotide
guguucggacucuggcagc

SEQ ID NO: 346856 - RNA, 19 nt, Artificial Sequence
  Description of Artificial Sequence: Synthetic oligonucleotide
agguacagugacugacuuu

SEQ ID NO: 346857 - RNA, 19 nt, Artificial Sequence
  Description of Artificial Sequence: Synthetic oligonucleotide
accggcaccuguggggagg

SEQ ID NO: 346858 - RNA, 19 nt, Artificial Sequence
  Description of Artificial Sequence: Synthetic oligonucleotide
augugagauugcagcgagg

SEQ ID NO: 346859 - RNA, 19 nt, Artificial Sequence
  Description of Artificial Sequence: Synthetic oligonucleotide
cuucccuggauuggcguuc

SEQ ID NO: 346860 - RNA, 19 nt, Artificial Sequence
  Description of Artificial Sequence: Synthetic oligonucleotide
agaauccgaaccagucgca

SEQ ID NO: 346861 - RNA, 19 nt, Artificial Sequence
  Description of Artificial Sequence: Synthetic oligonucleotide
uucccuggauuggcguucc

SEQ ID NO: 346862 - RNA, 19 nt, Artificial Sequence
  Description of Artificial Sequence: Synthetic oligonucleotide
gccgugaucugcgaccccg

SEQ ID NO: 346863 - RNA, 19 nt, Artificial Sequence
  Description of Artificial Sequence: Synthetic oligonucleotide
guacagugacugacuuuag

SEQ ID NO: 346864 - RNA, 19 nt, Artificial Sequence
  Description of Artificial Sequence: Synthetic oligonucleotide
ugacugguaccgucugcua

SEQ ID NO: 346865 - RNA, 19 nt, Artificial Sequence
  Description of Artificial Sequence: Synthetic oligonucleotide
gucuaauuugcuggcaggu

SEQ ID NO: 346866 - RNA, 19 nt, Artificial Sequence
  Description of Artificial Sequence: Synthetic oligonucleotide
ccaauagcacuaucucuuc

SEQ ID NO: 346867 - RNA, 19 nt, Artificial Sequence
  Description of Artificial Sequence: Synthetic oligonucleotide
gaaccugcucggggcacag

SEQ ID NO: 346868 - RNA, 19 nt, Artificial Sequence
  Description of Artificial Sequence: Synthetic oligonucleotide
aacucgccgccugcaauau

SEQ ID NO: 346869 - RNA, 19 nt, Artificial Sequence
  Description of Artificial Sequence: Synthetic oligonucleotide
auuuagcuacuugccucgu

SEQ ID NO: 346870 - RNA, 19 nt, Artificial Sequence
  Description of Artificial Sequence: Synthetic oligonucleotide
gaucugcgaccccguggcc

SEQ ID NO: 346871 - RNA, 19 nt, Artificial Sequence
  Description of Artificial Sequence: Synthetic oligonucleotide
gucccuuguccaagacugg

SEQ ID NO: 346872 - RNA, 19 nt, Artificial Sequence
  Description of Artificial Sequence: Synthetic oligonucleotide
guagguacagugacugacu

SEQ ID NO: 346873 - RNA, 19 nt, Artificial Sequence
  Description of Artificial Sequence: Synthetic oligonucleotide
auguagggaagcgcuuccu

SEQ ID NO: 346874 - RNA, 19 nt, Artificial Sequence
  Description of Artificial Sequence: Synthetic oligonucleotide
ccucuuauaggucuuggua

SEQ ID NO: 346875 - RNA, 19 nt, Artificial Sequence
  Description of Artificial Sequence: Synthetic oligonucleotide
ugucaccgauuuguucaac

SEQ ID NO: 346876 - RNA, 19 nt, Artificial Sequence
  Description of Artificial Sequence: Synthetic oligonucleotide
accuguagguacagugacu

SEQ ID NO: 346877 - RNA, 19 nt, Artificial Sequence
  Description of Artificial Sequence: Synthetic oligonucleotide
acgaaccaucacgguacuc

SEQ ID NO: 346878 - RNA, 19 nt, Artificial Sequence
  Description of Artificial Sequence: Synthetic oligonucleotide
aaccugcucggggcacagg

SEQ ID NO: 346879 - RNA, 19 nt, Artificial Sequence
  Description of Artificial Sequence: Synthetic oligonucleotide
ccugauguagggaagcgcu

SEQ ID NO: 346880 - RNA, 19 nt, Artificial Sequence
  Description of Artificial Sequence: Synthetic oligonucleotide
cucgggaugaaggccguga

SEQ ID NO: 346881 - RNA, 19 nt, Artificial Sequence
  Description of Artificial Sequence: Synthetic oligonucleotide
cucgucccuuguccaagac

SEQ ID NO: 346882 - RNA, 19 nt, Artificial Sequence
  Description of Artificial Sequence: Synthetic oligonucleotide
ccugacgagugaucuuccc

SEQ ID NO: 346883 - RNA, 19 nt, Artificial Sequence
  Description of Artificial Sequence: Synthetic oligonucleotide
gcgaaccucacguuuauau

SEQ ID NO: 346884 - RNA, 19 nt, Artificial Sequence
  Description of Artificial Sequence: Synthetic oligonucleotide
gguaucccuuaaugucagc

SEQ ID NO: 346885 - RNA, 19 nt, Artificial Sequence
  Description of Artificial Sequence: Synthetic oligonucleotide
gggcacgucuggcugaauc

SEQ ID NO: 346886 - RNA, 19 nt, Artificial Sequence
  Description of Artificial Sequence: Synthetic oligonucleotide
gauguccgccacagcacuc

SEQ ID NO: 346887 - RNA, 19 nt, Artificial Sequence
  Description of Artificial Sequence: Synthetic oligonucleotide
ccaaacugauuucccagga

SEQ ID NO: 346888 - RNA, 19 nt, Artificial Sequence
  Description of Artificial Sequence: Synthetic oligonucleotide
agguuaacccugggauucu

SEQ ID NO: 346889 - RNA, 19 nt, Artificial Sequence
  Description of Artificial Sequence: Synthetic oligonucleotide
gacuggucgggaacuugga

SEQ ID NO: 346890 - RNA, 19 nt, Artificial Sequence
  Description of Artificial Sequence: Synthetic oligonucleotide
cacgucuggcugaaucuaa

SEQ ID NO: 346891 - RNA, 19 nt, Artificial Sequence
  Description of Artificial Sequence: Synthetic oligonucleotide
ccuacaccugacagugcag

SEQ ID NO: 346892 - RNA, 19 nt, Artificial Sequence
  Description of Artificial Sequence: Synthetic oligonucleotide
uuccggcucgucccuuguc

SEQ ID NO: 346893 - RNA, 19 nt, Artificial Sequence
  Description of Artificial Sequence: Synthetic oligonucleotide
gccgccugcaauauuucac

SEQ ID NO: 346894 - RNA, 19 nt, Artificial Sequence
  Description of Artificial Sequence: Synthetic oligonucleotide
cucgccgccugcaauauuu

SEQ ID NO: 346895 - RNA, 19 nt, Artificial Sequence
  Description of Artificial Sequence: Synthetic oligonucleotide
cugcuaggaugaacuucuc

SEQ ID NO: 346896 - RNA, 19 nt, Artificial Sequence
  Description of Artificial Sequence: Synthetic oligonucleotide
gcuguuaucaaggcucugu

SEQ ID NO: 346897 - RNA, 19 nt, Artificial Sequence
  Description of Artificial Sequence: Synthetic oligonucleotide
guauuuguugucaccgauu

SEQ ID NO: 346898 - RNA, 19 nt, Artificial Sequence
  Description of Artificial Sequence: Synthetic oligonucleotide
cgucuggcugaaucuaaag

SEQ ID NO: 346899 - RNA, 19 nt, Artificial Sequence
  Description of Artificial Sequence: Synthetic oligonucleotide
uuaucgacgucgggcuguu

SEQ ID NO: 346900 - RNA, 19 nt, Artificial Sequence
  Description of Artificial Sequence: Synthetic oligonucleotide
aggcgacuggucgggaacu

SEQ ID NO: 346901 - RNA, 19 nt, Artificial Sequence
  Description of Artificial Sequence: Synthetic oligonucleotide
gauuggcguucccuugggu

SEQ ID NO: 346902 - RNA, 19 nt, Artificial Sequence
  Description of Artificial Sequence: Synthetic oligonucleotide
gccauccccugacugguac

SEQ ID NO: 346903 - RNA, 19 nt, Artificial Sequence
  Description of Artificial Sequence: Synthetic oligonucleotide
ggaaucgcuuugcacauuu

SEQ ID NO: 346904 - RNA, 19 nt, Artificial Sequence
  Description of Artificial Sequence: Synthetic oligonucleotide
ggcacgucuggcugaaucu

SEQ ID NO: 346905 - RNA, 19 nt, Artificial Sequence
  Description of Artificial Sequence: Synthetic oligonucleotide
guguggccuacaccugaca

SEQ ID NO: 346906 - RNA, 19 nt, Artificial Sequence
  Description of Artificial Sequence: Synthetic oligonucleotide
ugcgguccggauggauaca

SEQ ID NO: 346907 - RNA, 19 nt, Artificial Sequence
  Description of Artificial Sequence: Synthetic oligonucleotide
ccgccugcaauauuucaca

SEQ ID NO: 346908 - RNA, 19 nt, Artificial Sequence
  Description of Artificial Sequence: Synthetic oligonucleotide
cacuaucucuucgaagacu

SEQ ID NO: 346909 - RNA, 19 nt, Artificial Sequence
  Description of Artificial Sequence: Synthetic oligonucleotide
ggcucgucccuuguccaag

SEQ ID NO: 346910 - RNA, 19 nt, Artificial Sequence
  Description of Artificial Sequence: Synthetic oligonucleotide
acgucuggcugaaucuaaa

SEQ ID NO: 346911 - RNA, 19 nt, Artificial Sequence
  Description of Artificial Sequence: Synthetic oligonucleotide
cgguacuccgaagaauccg

SEQ ID NO: 346912 - RNA, 19 nt, Artificial Sequence
  Description of Artificial Sequence: Synthetic oligonucleotide
ccuccgacacgaaccauca

SEQ ID NO: 346913 - RNA, 19 nt, Artificial Sequence
  Description of Artificial Sequence: Synthetic oligonucleotide
guacuccgaagaauccgaa

SEQ ID NO: 346914 - RNA, 19 nt, Artificial Sequence
  Description of Artificial Sequence: Synthetic oligonucleotide
ccgucugcuaggaugaacu

SEQ ID NO: 346915 - RNA, 19 nt, Artificial Sequence
  Description of Artificial Sequence: Synthetic oligonucleotide
ccaggaagaaccuguauuu

SEQ ID NO: 346916 - RNA, 19 nt, Artificial Sequence
  Description of Artificial Sequence: Synthetic oligonucleotide
ggcgucguugagcuuucuc

SEQ ID NO: 346917 - RNA, 19 nt, Artificial Sequence
  Description of Artificial Sequence: Synthetic oligonucleotide
gugauggguuuguaagcau

SEQ ID NO: 346918 - RNA, 19 nt, Artificial Sequence
  Description of Artificial Sequence: Synthetic oligonucleotide
ccauccccugacugguacc

SEQ ID NO: 346919 - RNA, 19 nt, Artificial Sequence
  Description of Artificial Sequence: Synthetic oligonucleotide
cagcgaggaaggcucagcu

SEQ ID NO: 346920 - RNA, 19 nt, Artificial Sequence
  Description of Artificial Sequence: Synthetic oligonucleotide
gcaagcgaaauugcuguua

SEQ ID NO: 346921 - RNA, 19 nt, Artificial Sequence
  Description of Artificial Sequence: Synthetic oligonucleotide
ccaucacgguacuccgaag

SEQ ID NO: 346922 - RNA, 19 nt, Artificial Sequence
  Description of Artificial Sequence: Synthetic oligonucleotide
uggaaucgcuuugcacauu

SEQ ID NO: 346923 - RNA, 19 nt, Artificial Sequence
  Description of Artificial Sequence: Synthetic oligonucleotide
ggauguagacuuaccugua

SEQ ID NO: 346924 - RNA, 19 nt, Artificial Sequence
  Description of Artificial Sequence: Synthetic oligonucleotide
caaugauacaggggcugcu

SEQ ID NO: 346925 - RNA, 19 nt, Artificial Sequence
  Description of Artificial Sequence: Synthetic oligonucleotide
cuuuagccccugcauggau

SEQ ID NO: 346926 - RNA, 19 nt, Artificial Sequence
  Description of Artificial Sequence: Synthetic oligonucleotide
cccaagcaaagcgaaccuc

SEQ ID NO: 346927 - RNA, 19 nt, Artificial Sequence
  Description of Artificial Sequence: Synthetic oligonucleotide
cuucgaagacuugucuaau

SEQ ID NO: 346928 - RNA, 19 nt, Artificial Sequence
  Description of Artificial Sequence: Synthetic oligonucleotide
gcguuuugcaucacauucu

SEQ ID NO: 346929 - RNA, 19 nt, Artificial Sequence
  Description of Artificial Sequence: Synthetic oligonucleotide
guacccgcagcugcuugaa

SEQ ID NO: 346930 - RNA, 19 nt, Artificial Sequence
  Description of Artificial Sequence: Synthetic oligonucleotide
cugauguagggaagcgcuu

SEQ ID NO: 346931 - RNA, 19 nt, Artificial Sequence
  Description of Artificial Sequence: Synthetic oligonucleotide
agcgaaccucacguuuaua

SEQ ID NO: 346932 - RNA, 19 nt, Artificial Sequence
  Description of Artificial Sequence: Synthetic oligonucleotide
uaccgucugcuaggaugaa

SEQ ID NO: 346933 - RNA, 19 nt, Artificial Sequence
  Description of Artificial Sequence: Synthetic oligonucleotide
acucgccgccugcaauauu

SEQ ID NO: 346934 - RNA, 19 nt, Artificial Sequence
  Description of Artificial Sequence: Synthetic oligonucleotide
gcgacuggucgggaacuug

SEQ ID NO: 346935 - RNA, 19 nt, Artificial Sequence
  Description of Artificial Sequence: Synthetic oligonucleotide
ccacgucugagcacacaga

SEQ ID NO: 346936 - RNA, 19 nt, Artificial Sequence
  Description of Artificial Sequence: Synthetic oligonucleotide
gcugauacccagggcacgu

SEQ ID NO: 346937 - RNA, 19 nt, Artificial Sequence
  Description of Artificial Sequence: Synthetic oligonucleotide
cacgaaccaucacgguacu

SEQ ID NO: 346938 - RNA, 19 nt, Artificial Sequence
  Description of Artificial Sequence: Synthetic oligonucleotide
ccagaccugcugccauuug

SEQ ID NO: 346939 - RNA, 19 nt, Artificial Sequence
  Description of Artificial Sequence: Synthetic oligonucleotide
gcuuagcaaugagcccggc

SEQ ID NO: 346940 - RNA, 19 nt, Artificial Sequence
  Description of Artificial Sequence: Synthetic oligonucleotide
ggccaucugcagaauuaaa

SEQ ID NO: 346941 - RNA, 19 nt, Artificial Sequence
  Description of Artificial Sequence: Synthetic oligonucleotide
gcacgucuggcugaaucua

SEQ ID NO: 346942 - RNA, 19 nt, Artificial Sequence
  Description of Artificial Sequence: Synthetic oligonucleotide
cgucguugagcuuucuccu

SEQ ID NO: 346943 - RNA, 19 nt, Artificial Sequence
  Description of Artificial Sequence: Synthetic oligonucleotide
gggagucuuccuggauuca

SEQ ID NO: 346944 - RNA, 19 nt, Artificial Sequence
  Description of Artificial Sequence: Synthetic oligonucleotide
cuuccggcucgucccuugu

SEQ ID NO: 346945 - RNA, 19 nt, Artificial Sequence
  Description of Artificial Sequence: Synthetic oligonucleotide
ggccgugaucugcgacccc

SEQ ID NO: 346946 - RNA, 19 nt, Artificial Sequence
  Description of Artificial Sequence: Synthetic oligonucleotide
uagccccugcauggaucau

SEQ ID NO: 346947 - RNA, 19 nt, Artificial Sequence
  Description of Artificial Sequence: Synthetic oligonucleotide
gcgguccggauggauacaa

SEQ ID NO: 346948 - RNA, 19 nt, Artificial Sequence
  Description of Artificial Sequence: Synthetic oligonucleotide
cagggcacgucuggcugaa

SEQ ID NO: 346949 - RNA, 19 nt, Artificial Sequence
  Description of Artificial Sequence: Synthetic oligonucleotide
ggcacaggucugugcgucu

SEQ ID NO: 346950 - RNA, 19 nt, Artificial Sequence
  Description of Artificial Sequence: Synthetic oligonucleotide
uaucgacgucgggcuguuu

SEQ ID NO: 346951 - RNA, 19 nt, Artificial Sequence
  Description of Artificial Sequence: Synthetic oligonucleotide
ccggcucgucccuugucca

SEQ ID NO: 346952 - RNA, 19 nt, Artificial Sequence
  Description of Artificial Sequence: Synthetic oligonucleotide
ccucggcggcugcuggccc

SEQ ID NO: 346953 - RNA, 19 nt, Artificial Sequence
  Description of Artificial Sequence: Synthetic oligonucleotide
cacucaucuccaggcgacu

SEQ ID NO: 346954 - RNA, 19 nt, Artificial Sequence
  Description of Artificial Sequence: Synthetic oligonucleotide
ccuugucgauucuccugaa

SEQ ID NO: 346955 - RNA, 19 nt, Artificial Sequence
  Description of Artificial Sequence: Synthetic oligonucleotide
aggcgucguugagcuuucu

SEQ ID NO: 346956 - RNA, 19 nt, Artificial Sequence
  Description of Artificial Sequence: Synthetic oligonucleotide
ccaggcgacuggucgggaa

SEQ ID NO: 346957 - RNA, 19 nt, Artificial Sequence
  Description of Artificial Sequence: Synthetic oligonucleotide
ccggcaccuguggggaggc

SEQ ID NO: 346958 - RNA, 19 nt, Artificial Sequence
  Description of Artificial Sequence: Synthetic oligonucleotide
caucacugccucggcggcu

SEQ ID NO: 346959 - RNA, 19 nt, Artificial Sequence
  Description of Artificial Sequence: Synthetic oligonucleotide
cuggagccaauagcacuau

SEQ ID NO: 346960 - RNA, 19 nt, Artificial Sequence
  Description of Artificial Sequence: Synthetic oligonucleotide
cuggggcauggggauuuua

SEQ ID NO: 346961 - RNA, 19 nt, Artificial Sequence
  Description of Artificial Sequence: Synthetic oligonucleotide
gcaacggaacaaggaugcu

SEQ ID NO: 346962 - RNA, 19 nt, Artificial Sequence
  Description of Artificial Sequence: Synthetic oligonucleotide
gcacaccaugguacccgca

SEQ ID NO: 346963 - RNA, 19 nt, Artificial Sequence
  Description of Artificial Sequence: Synthetic oligonucleotide
ccucgggaugaaggccgug

SEQ ID NO: 346964 - RNA, 19 nt, Artificial Sequence
  Description of Artificial Sequence: Synthetic oligonucleotide
gggagucuccaaacugauu

SEQ ID NO: 346965 - RNA, 19 nt, Artificial Sequence
  Description of Artificial Sequence: Synthetic oligonucleotide
cccuggauuggcguucccu

SEQ ID NO: 346966 - RNA, 19 nt, Artificial Sequence
  Description of Artificial Sequence: Synthetic oligonucleotide
cgggaacuuggaggaaaga

SEQ ID NO: 346967 - RNA, 19 nt, Artificial Sequence
  Description of Artificial Sequence: Synthetic oligonucleotide
ccgugaucugcgaccccgu

SEQ ID NO: 346968 - RNA, 19 nt, Artificial Sequence
  Description of Artificial Sequence: Synthetic oligonucleotide
cgucugcuaggaugaacuu

SEQ ID NO: 346969 - RNA, 19 nt, Artificial Sequence
  Description of Artificial Sequence: Synthetic oligonucleotide
ggcgacuggucgggaacuu

SEQ ID NO: 346970 - RNA, 19 nt, Artificial Sequence
  Description of Artificial Sequence: Synthetic oligonucleotide
cggcucgucccuuguccaa

SEQ ID NO: 346971 - RNA, 19 nt, Artificial Sequence
  Description of Artificial Sequence: Synthetic oligonucleotide
gcguucccuugggugugcu

SEQ ID NO: 346972 - RNA, 19 nt, Artificial Sequence
  Description of Artificial Sequence: Synthetic oligonucleotide
gccgguccaaggcgucguu

SEQ ID NO: 346973 - RNA, 19 nt, Artificial Sequence
  Description of Artificial Sequence: Synthetic oligonucleotide
cgacgucgggcuguuuccu

SEQ ID NO: 346974 - RNA, 19 nt, Artificial Sequence
  Description of Artificial Sequence: Synthetic oligonucleotide
ccaaggcgucguugagcuu

SEQ ID NO: 346975 - RNA, 19 nt, Artificial Sequence
  Description of Artificial Sequence: Synthetic oligonucleotide
ccccugcauggaucauuuu

SEQ ID NO: 346976 - RNA, 19 nt, Artificial Sequence
  Description of Artificial Sequence: Synthetic oligonucleotide
uguaguuuaagcaacagcg

SEQ ID NO: 346977 - RNA, 19 nt, Artificial Sequence
  Description of Artificial Sequence: Synthetic oligonucleotide
aguaaaugcaguuaugacc

SEQ ID NO: 346978 - RNA, 19 nt, Artificial Sequence
  Description of Artificial Sequence: Synthetic oligonucleotide
aauaugauaauucaucgca

SEQ ID NO: 346979 - RNA, 19 nt, Artificial Sequence
  Description of Artificial Sequence: Synthetic oligonucleotide
aaauaugauaauucaucgc

SEQ ID NO: 346980 - RNA, 19 nt, Artificial Sequence
  Description of Artificial Sequence: Synthetic oligonucleotide
uauuucacuaguuugaaag

SEQ ID NO: 346981 - RNA, 19 nt, Artificial Sequence
  Description of Artificial Sequence: Synthetic oligonucleotide
acuaagauaauucauaaca

SEQ ID NO: 346982 - RNA, 19 nt, Artificial Sequence
  Description of Artificial Sequence: Synthetic oligonucleotide
auacauaaggcuaugaugc

SEQ ID NO: 346983 - RNA, 19 nt, Artificial Sequence
  Description of Artificial Sequence: Synthetic oligonucleotide
aacuaguuacuucagagag

SEQ ID NO: 346984 - RNA, 19 nt, Artificial Sequence
  Description of Artificial Sequence: Synthetic oligonucleotide
uacuaaauaaccaacacaa

SEQ ID NO: 346985 - RNA, 19 nt, Artificial Sequence
  Description of Artificial Sequence: Synthetic oligonucleotide
ugaccuauuaaacuuuugg

SEQ ID NO: 346986 - RNA, 19 nt, Artificial Sequence
  Description of Artificial Sequence: Synthetic oligonucleotide
uaaggauagaguaagggca

SEQ ID NO: 346987 - RNA, 19 nt, Artificial Sequence
  Description of Artificial Sequence: Synthetic oligonucleotide
uucuauuagauuucaagag

SEQ ID NO: 346988 - RNA, 19 nt, Artificial Sequence
  Description of Artificial Sequence: Synthetic oligonucleotide
aagaccaaaacuaaauggg

SEQ ID NO: 346989 - RNA, 19 nt, Artificial Sequence
  Description of Artificial Sequence: Synthetic oligonucleotide
aguaagggcacacauuagc

SEQ ID NO: 346990 - RNA, 19 nt, Artificial Sequence
  Description of Artificial Sequence: Synthetic oligonucleotide
aacuaagauaauucauaac

SEQ ID NO: 346991 - RNA, 19 nt, Artificial Sequence
  Description of Artificial Sequence: Synthetic oligonucleotide
aauucauaacaaauggcac

SEQ ID NO: 346992 - RNA, 19 nt, Artificial Sequence
  Description of Artificial Sequence: Synthetic oligonucleotide
uaauucaucgcaaguaagc

SEQ ID NO: 346993 - RNA, 19 nt, Artificial Sequence
  Description of Artificial Sequence: Synthetic oligonucleotide
uuaaugugaaucaccacug

SEQ ID NO: 346994 - RNA, 19 nt, Artificial Sequence
  Description of Artificial Sequence: Synthetic oligonucleotide
uaagcuacaauguaccugu

SEQ ID NO: 346995 - RNA, 19 nt, Artificial Sequence
  Description of Artificial Sequence: Synthetic oligonucleotide
guuaguaaaaguuuugaga

SEQ ID NO: 346996 - RNA, 19 nt, Artificial Sequence
  Description of Artificial Sequence: Synthetic oligonucleotide
gguuugacaacuuagcuag

SEQ ID NO: 346997 - RNA, 19 nt, Artificial Sequence
  Description of Artificial Sequence: Synthetic oligonucleotide
uguuaguaaaaguuuugag

SEQ ID NO: 346998 - RNA, 19 nt, Artificial Sequence
  Description of Artificial Sequence: Synthetic oligonucleotide
ucuguugcaaccuaugccu

SEQ ID NO: 346999 - RNA, 19 nt, Artificial Sequence
  Description of Artificial Sequence: Synthetic oligonucleotide
aaggaacuaagauaauuca

SEQ ID NO: 347000 - RNA, 19 nt, Artificial Sequence
  Description of Artificial Sequence: Synthetic oligonucleotide
uucaucgcaaguaagcuac

SEQ ID NO: 347001 - RNA, 19 nt, Artificial Sequence
  Description of Artificial Sequence: Synthetic oligonucleotide
uucaaccuaagaaaggcug

SEQ ID NO: 347002 - RNA, 19 nt, Artificial Sequence
  Description of Artificial Sequence: Synthetic oligonucleotide
gauuugaagaaaaccaacc

SEQ ID NO: 347003 - RNA, 19 nt, Artificial Sequence
  Description of Artificial Sequence: Synthetic oligonucleotide
ucaaccuaagaaaggcugg

SEQ ID NO: 347004 - RNA, 19 nt, Artificial Sequence
  Description of Artificial Sequence: Synthetic oligonucleotide
guaaggauagaguaagggc

SEQ ID NO: 347005 - RNA, 19 nt, Artificial Sequence
  Description of Artificial Sequence: Synthetic oligonucleotide
caugggguaagacaaaggc

SEQ ID NO: 347006 - RNA, 19 nt, Artificial Sequence
  Description of Artificial Sequence: Synthetic oligonucleotide
auagagucccagcagguac

SEQ ID NO: 347007 - RNA, 19 nt, Artificial Sequence
  Description of Artificial Sequence: Synthetic oligonucleotide
auaaggcagaucuauagca

SEQ ID NO: 347008 - RNA, 19 nt, Artificial Sequence
  Description of Artificial Sequence: Synthetic oligonucleotide
ucaagcucuacuuauugga

SEQ ID NO: 347009 - RNA, 19 nt, Artificial Sequence
  Description of Artificial Sequence: Synthetic oligonucleotide
auuugagcauacauaaggc

SEQ ID NO: 347010 - RNA, 19 nt, Artificial Sequence
  Description of Artificial Sequence: Synthetic oligonucleotide
ugguaugaacauuuaaggc

SEQ ID NO: 347011 - RNA, 19 nt, Artificial Sequence
  Description of Artificial Sequence: Synthetic oligonucleotide
cacgauauggauuagauua

SEQ ID NO: 347012 - RNA, 19 nt, Artificial Sequence
  Description of Artificial Sequence: Synthetic oligonucleotide
aaagcucacaugcaagaca

SEQ ID NO: 347013 - RNA, 19 nt, Artificial Sequence
  Description of Artificial Sequence: Synthetic oligonucleotide
cuauacgugaggaagggac

SEQ ID NO: 347014 - RNA, 19 nt, Artificial Sequence
  Description of Artificial Sequence: Synthetic oligonucleotide
agaucuauagcagacggag

SEQ ID NO: 347015 - RNA, 19 nt, Artificial Sequence
  Description of Artificial Sequence: Synthetic oligonucleotide
uugcauggcauuuagaaua

SEQ ID NO: 347016 - RNA, 19 nt, Artificial Sequence
  Description of Artificial Sequence: Synthetic oligonucleotide
aggguuuuagaacagauuu

SEQ ID NO: 347017 - RNA, 19 nt, Artificial Sequence
  Description of Artificial Sequence: Synthetic oligonucleotide
uaugcuucccuaaacugca

SEQ ID NO: 347018 - RNA, 19 nt, Artificial Sequence
  Description of Artificial Sequence: Synthetic oligonucleotide
cuacaauguaccuguaagg

SEQ ID NO: 347019 - RNA, 19 nt, Artificial Sequence
  Description of Artificial Sequence: Synthetic oligonucleotide
accaacacccaucaaaucu

SEQ ID NO: 347020 - RNA, 19 nt, Artificial Sequence
  Description of Artificial Sequence: Synthetic oligonucleotide
ugagaauucccucuaaguu

SEQ ID NO: 347021 - RNA, 19 nt, Artificial Sequence
  Description of Artificial Sequence: Synthetic oligonucleotide
uucaagaguccccaaaagu

SEQ ID NO: 347022 - RNA, 19 nt, Artificial Sequence
  Description of Artificial Sequence: Synthetic oligonucleotide
agaagcucgauaaagacca

SEQ ID NO: 347023 - RNA, 19 nt, Artificial Sequence
  Description of Artificial Sequence: Synthetic oligonucleotide
ucuacuuauuggaaauaug

SEQ ID NO: 347024 - RNA, 19 nt, Artificial Sequence
  Description of Artificial Sequence: Synthetic oligonucleotide
agaaagcacauuaagcuuc

SEQ ID NO: 347025 - RNA, 19 nt, Artificial Sequence
  Description of Artificial Sequence: Synthetic oligonucleotide
accccaucaagguaaauag

SEQ ID NO: 347026 - RNA, 19 nt, Artificial Sequence
  Description of Artificial Sequence: Synthetic oligonucleotide
aucuauagcagacggagga

SEQ ID NO: 347027 - RNA, 19 nt, Artificial Sequence
  Description of Artificial Sequence: Synthetic oligonucleotide
uaauacuuuacugucggga

SEQ ID NO: 347028 - RNA, 19 nt, Artificial Sequence
  Description of Artificial Sequence: Synthetic oligonucleotide
agguucagaugauacaauc

SEQ ID NO: 347029 - RNA, 19 nt, Artificial Sequence
  Description of Artificial Sequence: Synthetic oligonucleotide
uacaauguaccuguaagga

SEQ ID NO: 347030 - RNA, 19 nt, Artificial Sequence
  Description of Artificial Sequence: Synthetic oligonucleotide
aauucaucgcaaguaagcu

SEQ ID NO: 347031 - RNA, 19 nt, Artificial Sequence
  Description of Artificial Sequence: Synthetic oligonucleotide
uugagcauacauaaggcua

SEQ ID NO: 347032 - RNA, 19 nt, Artificial Sequence
  Description of Artificial Sequence: Synthetic oligonucleotide
ugacaacuuagcuagcaug

SEQ ID NO: 347033 - RNA, 19 nt, Artificial Sequence
  Description of Artificial Sequence: Synthetic oligonucleotide
gauauggauuagauuaugc

SEQ ID NO: 347034 - RNA, 19 nt, Artificial Sequence
  Description of Artificial Sequence: Synthetic oligonucleotide
guaugaacauuuaaggcug

SEQ ID NO: 347035 - RNA, 19 nt, Artificial Sequence
  Description of Artificial Sequence: Synthetic oligonucleotide
ugucauagagucccagcag

SEQ ID NO: 347036 - RNA, 19 nt, Artificial Sequence
  Description of Artificial Sequence: Synthetic oligonucleotide
caguagaccauccacuacc

SEQ ID NO: 347037 - RNA, 19 nt, Artificial Sequence
  Description of Artificial Sequence: Synthetic oligonucleotide
aucaagguaaauagaguac

SEQ ID NO: 347038 - RNA, 19 nt, Artificial Sequence
  Description of Artificial Sequence: Synthetic oligonucleotide
acaucuagauuugugacug

SEQ ID NO: 347039 - RNA, 19 nt, Artificial Sequence
  Description of Artificial Sequence: Synthetic oligonucleotide
aguuacagaaaucccauuu

SEQ ID NO: 347040 - RNA, 19 nt, Artificial Sequence
  Description of Artificial Sequence: Synthetic oligonucleotide
cucuuaacaagcaauggga

SEQ ID NO: 347041 - RNA, 19 nt, Artificial Sequence
  Description of Artificial Sequence: Synthetic oligonucleotide
gcuacaauguaccuguaag

SEQ ID NO: 347042 - RNA, 19 nt, Artificial Sequence
  Description of Artificial Sequence: Synthetic oligonucleotide
ucuacaguugcuggaagcc

SEQ ID NO: 347043 - RNA, 19 nt, Artificial Sequence
  Description of Artificial Sequence: Synthetic oligonucleotide
agguaaauagaguaccuaa

SEQ ID NO: 347044 - RNA, 19 nt, Artificial Sequence
  Description of Artificial Sequence: Synthetic oligonucleotide
uauacgugaggaagggaca

SEQ ID NO: 347045 - RNA, 19 nt, Artificial Sequence
  Description of Artificial Sequence: Synthetic oligonucleotide
cuuaaugugaaucaccacu

SEQ ID NO: 347046 - RNA, 19 nt, Artificial Sequence
  Description of Artificial Sequence: Synthetic oligonucleotide
uauuccuuaaguuccggua

SEQ ID NO: 347047 - RNA, 19 nt, Artificial Sequence
  Description of Artificial Sequence: Synthetic oligonucleotide
uuucaaccuaagaaaggcu

SEQ ID NO: 347048 - RNA, 19 nt, Artificial Sequence
  Description of Artificial Sequence: Synthetic oligonucleotide
uuuggggaacaucaaacua

SEQ ID NO: 347049 - RNA, 19 nt, Artificial Sequence
  Description of Artificial Sequence: Synthetic oligonucleotide
gacccuauacgugaggaag

SEQ ID NO: 347050 - RNA, 19 nt, Artificial Sequence
  Description of Artificial Sequence: Synthetic oligonucleotide
uauagcagacggaggaaga

SEQ ID NO: 347051 - RNA, 19 nt, Artificial Sequence
  Description of Artificial Sequence: Synthetic oligonucleotide
cauguuaacucauuauaca

SEQ ID NO: 347052 - RNA, 19 nt, Artificial Sequence
  Description of Artificial Sequence: Synthetic oligonucleotide
ucgaguguucuauauacau

SEQ ID NO: 347053 - RNA, 19 nt, Artificial Sequence
  Description of Artificial Sequence: Synthetic oligonucleotide
auagaguaagggcacacau

SEQ ID NO: 347054 - RNA, 19 nt, Artificial Sequence
  Description of Artificial Sequence: Synthetic oligonucleotide
caguuaugaccuauuaaac

SEQ ID NO: 347055 - RNA, 19 nt, Artificial Sequence
  Description of Artificial Sequence: Synthetic oligonucleotide
uaccuguaaggauagagua

SEQ ID NO: 347056 - RNA, 19 nt, Artificial Sequence
  Description of Artificial Sequence: Synthetic oligonucleotide
cucaagcucuacuuauugg

SEQ ID NO: 347057 - RNA, 19 nt, Artificial Sequence
  Description of Artificial Sequence: Synthetic oligonucleotide
acuaguuacuucagagagc

SEQ ID NO: 347058 - RNA, 19 nt, Artificial Sequence
  Description of Artificial Sequence: Synthetic oligonucleotide
ugcaguuaugaccuauuaa

SEQ ID NO: 347059 - RNA, 19 nt, Artificial Sequence
  Description of Artificial Sequence: Synthetic oligonucleotide
uaugacccuauacgugagg

SEQ ID NO: 347060 - RNA, 19 nt, Artificial Sequence
  Description of Artificial Sequence: Synthetic oligonucleotide
uaaaggaacuaagauaauu

SEQ ID NO: 347061 - RNA, 19 nt, Artificial Sequence
  Description of Artificial Sequence: Synthetic oligonucleotide
gagagcuuaaacugaguuc

SEQ ID NO: 347062 - RNA, 19 nt, Artificial Sequence
  Description of Artificial Sequence: Synthetic oligonucleotide
ugaagauaugcuucugaaa

SEQ ID NO: 347063 - RNA, 19 nt, Artificial Sequence
  Description of Artificial Sequence: Synthetic oligonucleotide
aauuguaguuuaagcaaca

SEQ ID NO: 347064 - RNA, 19 nt, Artificial Sequence
  Description of Artificial Sequence: Synthetic oligonucleotide
uuaugaccuauuaaacuuu

SEQ ID NO: 347065 - RNA, 19 nt, Artificial Sequence
  Description of Artificial Sequence: Synthetic oligonucleotide
aacacgauauggauuagau

SEQ ID NO: 347066 - RNA, 19 nt, Artificial Sequence
  Description of Artificial Sequence: Synthetic oligonucleotide
agcuucacuauagaaagcu

SEQ ID NO: 347067 - RNA, 19 nt, Artificial Sequence
  Description of Artificial Sequence: Synthetic oligonucleotide
gcagaucuauagcagacgg

SEQ ID NO: 347068 - RNA, 19 nt, Artificial Sequence
  Description of Artificial Sequence: Synthetic oligonucleotide
guaccuaaggcaccucagg

SEQ ID NO: 347069 - RNA, 19 nt, Artificial Sequence
  Description of Artificial Sequence: Synthetic oligonucleotide
gcaguuaugaccuauuaaa

SEQ ID NO: 347070 - RNA, 19 nt, Artificial Sequence
  Description of Artificial Sequence: Synthetic oligonucleotide
aaggcuggcaacacgauau

SEQ ID NO: 347071 - RNA, 19 nt, Artificial Sequence
  Description of Artificial Sequence: Synthetic oligonucleotide
gaugcuuaaugugaaucac

SEQ ID NO: 347072 - RNA, 19 nt, Artificial Sequence
  Description of Artificial Sequence: Synthetic oligonucleotide
acuuagcuagcauguuaac

SEQ ID NO: 347073 - RNA, 19 nt, Artificial Sequence
  Description of Artificial Sequence: Synthetic oligonucleotide
auuuaugacccuauacgug

SEQ ID NO: 347074 - RNA, 19 nt, Artificial Sequence
  Description of Artificial Sequence: Synthetic oligonucleotide
auagaguaccuaaggcacc

SEQ ID NO: 347075 - RNA, 19 nt, Artificial Sequence
  Description of Artificial Sequence: Synthetic oligonucleotide
guaagcuacaauguaccug

SEQ ID NO: 347076 - RNA, 19 nt, Artificial Sequence
  Description of Artificial Sequence: Synthetic oligonucleotide
gaagauaacagaagcucga

SEQ ID NO: 347077 - RNA, 19 nt, Artificial Sequence
  Description of Artificial Sequence: Synthetic oligonucleotide
aagcuucacuauagaaagc

SEQ ID NO: 347078 - RNA, 19 nt, Artificial Sequence
  Description of Artificial Sequence: Synthetic oligonucleotide
auaauucaucgcaaguaag

SEQ ID NO: 347079 - RNA, 19 nt, Artificial Sequence
  Description of Artificial Sequence: Synthetic oligonucleotide
aacuaaaucuacaguugcu

SEQ ID NO: 347080 - RNA, 19 nt, Artificial Sequence
  Description of Artificial Sequence: Synthetic oligonucleotide
aagcuucuaacaaacacua

SEQ ID NO: 347081 - RNA, 19 nt, Artificial Sequence
  Description of Artificial Sequence: Synthetic oligonucleotide
auacgugaggaagggacac

SEQ ID NO: 347082 - RNA, 19 nt, Artificial Sequence
  Description of Artificial Sequence: Synthetic oligonucleotide
agcucuacuuauuggaaau

SEQ ID NO: 347083 - RNA, 19 nt, Artificial Sequence
  Description of Artificial Sequence: Synthetic oligonucleotide
aguaagcuacaauguaccu

SEQ ID NO: 347084 - RNA, 19 nt, Artificial Sequence
  Description of Artificial Sequence: Synthetic oligonucleotide
uagcuagcauguuaacuca

SEQ ID NO: 347085 - RNA, 19 nt, Artificial Sequence
  Description of Artificial Sequence: Synthetic oligonucleotide
ucauaucauggguuugaca

SEQ ID NO: 347086 - RNA, 19 nt, Artificial Sequence
  Description of Artificial Sequence: Synthetic oligonucleotide
acaauguaccuguaaggau

SEQ ID NO: 347087 - RNA, 19 nt, Artificial Sequence
  Description of Artificial Sequence: Synthetic oligonucleotide
uuaaguuccgguacccauu

SEQ ID NO: 347088 - RNA, 19 nt, Artificial Sequence
  Description of Artificial Sequence: Synthetic oligonucleotide
uuagaauaaggcagaucua

SEQ ID NO: 347089 - RNA, 19 nt, Artificial Sequence
  Description of Artificial Sequence: Synthetic oligonucleotide
caauguaccuguaaggaua

SEQ ID NO: 347090 - RNA, 19 nt, Artificial Sequence
  Description of Artificial Sequence: Synthetic oligonucleotide
aagauaucccauguccccu

SEQ ID NO: 347091 - RNA, 19 nt, Artificial Sequence
  Description of Artificial Sequence: Synthetic oligonucleotide
cagacggaggaagaaagcc

SEQ ID NO: 347092 - RNA, 19 nt, Artificial Sequence
  Description of Artificial Sequence: Synthetic oligonucleotide
caagacuuacuucauuuga

SEQ ID NO: 347093 - RNA, 19 nt, Artificial Sequence
  Description of Artificial Sequence: Synthetic oligonucleotide
ucuagauuugugacuggua

SEQ ID NO: 347094 - RNA, 19 nt, Artificial Sequence
  Description of Artificial Sequence: Synthetic oligonucleotide
ccagcugugucauagaguc

SEQ ID NO: 347095 - RNA, 19 nt, Artificial Sequence
  Description of Artificial Sequence: Synthetic oligonucleotide
auauuccuuaaguuccggu

SEQ ID NO: 347096 - RNA, 19 nt, Artificial Sequence
  Description of Artificial Sequence: Synthetic oligonucleotide
uuucacuaguuugaaaguu

SEQ ID NO: 347097 - RNA, 19 nt, Artificial Sequence
  Description of Artificial Sequence: Synthetic oligonucleotide
uagaguucgaguguucuau

SEQ ID NO: 347098 - RNA, 19 nt, Artificial Sequence
  Description of Artificial Sequence: Synthetic oligonucleotide
ugcguaguggucgaagaca

SEQ ID NO: 347099 - RNA, 19 nt, Artificial Sequence
  Description of Artificial Sequence: Synthetic oligonucleotide
cuauagcagacggaggaag

SEQ ID NO: 347100 - RNA, 19 nt, Artificial Sequence
  Description of Artificial Sequence: Synthetic oligonucleotide
caguacaucuagauuugug

SEQ ID NO: 347101 - RNA, 19 nt, Artificial Sequence
  Description of Artificial Sequence: Synthetic oligonucleotide
agcagacggaggaagaaag

SEQ ID NO: 347102 - RNA, 19 nt, Artificial Sequence
  Description of Artificial Sequence: Synthetic oligonucleotide
uucuauauacaugguuccu

SEQ ID NO: 347103 - RNA, 19 nt, Artificial Sequence
  Description of Artificial Sequence: Synthetic oligonucleotide
aagauaacagaagcucgau

SEQ ID NO: 347104 - RNA, 19 nt, Artificial Sequence
  Description of Artificial Sequence: Synthetic oligonucleotide
ugucgggauuccuucauau

SEQ ID NO: 347105 - RNA, 19 nt, Artificial Sequence
  Description of Artificial Sequence: Synthetic oligonucleotide
acugcguaguggucgaaga

SEQ ID NO: 347106 - RNA, 19 nt, Artificial Sequence
  Description of Artificial Sequence: Synthetic oligonucleotide
agauuagucugaauuucug

SEQ ID NO: 347107 - RNA, 19 nt, Artificial Sequence
  Description of Artificial Sequence: Synthetic oligonucleotide
uagaguaagggcacacauu

SEQ ID NO: 347108 - RNA, 19 nt, Artificial Sequence
  Description of Artificial Sequence: Synthetic oligonucleotide
auucaucgcaaguaagcua

SEQ ID NO: 347109 - RNA, 19 nt, Artificial Sequence
  Description of Artificial Sequence: Synthetic oligonucleotide
gagaaggacaccacguguc

SEQ ID NO: 347110 - RNA, 19 nt, Artificial Sequence
  Description of Artificial Sequence: Synthetic oligonucleotide
gucaugggguaagacaaag

SEQ ID NO: 347111 - RNA, 19 nt, Artificial Sequence
  Description of Artificial Sequence: Synthetic oligonucleotide
ggcaacacgauauggauua

SEQ ID NO: 347112 - RNA, 19 nt, Artificial Sequence
  Description of Artificial Sequence: Synthetic oligonucleotide
uuagaguucgaguguucua

SEQ ID NO: 347113 - RNA, 19 nt, Artificial Sequence
  Description of Artificial Sequence: Synthetic oligonucleotide
gauagaguaagggcacaca

SEQ ID NO: 347114 - RNA, 19 nt, Artificial Sequence
  Description of Artificial Sequence: Synthetic oligonucleotide
agauaacagaagcucgaua

SEQ ID NO: 347115 - RNA, 19 nt, Artificial Sequence
  Description of Artificial Sequence: Synthetic oligonucleotide
aguucgaguguucuauaua

SEQ ID NO: 347116 - RNA, 19 nt, Artificial Sequence
  Description of Artificial Sequence: Synthetic oligonucleotide
uagcaaaguaaguucuauu

SEQ ID NO: 347117 - RNA, 19 nt, Artificial Sequence
  Description of Artificial Sequence: Synthetic oligonucleotide
gcauguuaacucauuauac

SEQ ID NO: 347118 - RNA, 19 nt, Artificial Sequence
  Description of Artificial Sequence: Synthetic oligonucleotide
cuucccuaaacugcaugag

SEQ ID NO: 347119 - RNA, 19 nt, Artificial Sequence
  Description of Artificial Sequence: Synthetic oligonucleotide
aguaccuaaggcaccucag

SEQ ID NO: 347120 - RNA, 19 nt, Artificial Sequence
  Description of Artificial Sequence: Synthetic oligonucleotide
ggaacuaagauaauucaua

SEQ ID NO: 347121 - RNA, 19 nt, Artificial Sequence
  Description of Artificial Sequence: Synthetic oligonucleotide
aaaugguaccagccaguua

SEQ ID NO: 347122 - RNA, 19 nt, Artificial Sequence
  Description of Artificial Sequence: Synthetic oligonucleotide
uccuuaaguuccgguaccc

SEQ ID NO: 347123 - RNA, 19 nt, Artificial Sequence
  Description of Artificial Sequence: Synthetic oligonucleotide
augacccuauacgugagga

SEQ ID NO: 347124 - RNA, 19 nt, Artificial Sequence
  Description of Artificial Sequence: Synthetic oligonucleotide
ucaugcaauuuggggaaca

SEQ ID NO: 347125 - RNA, 19 nt, Artificial Sequence
  Description of Artificial Sequence: Synthetic oligonucleotide
acccuauacgugaggaagg

SEQ ID NO: 347126 - RNA, 19 nt, Artificial Sequence
  Description of Artificial Sequence: Synthetic oligonucleotide
aaggguuuuagaacagauu

SEQ ID NO: 347127 - RNA, 19 nt, Artificial Sequence
  Description of Artificial Sequence: Synthetic oligonucleotide
ccuaaacugcaugagcugg

SEQ ID NO: 347128 - RNA, 19 nt, Artificial Sequence
  Description of Artificial Sequence: Synthetic oligonucleotide
aggguauucacuggcacaa

SEQ ID NO: 347129 - RNA, 19 nt, Artificial Sequence
  Description of Artificial Sequence: Synthetic oligonucleotide
caucuagauuugugacugg

SEQ ID NO: 347130 - RNA, 19 nt, Artificial Sequence
  Description of Artificial Sequence: Synthetic oligonucleotide
ugcaaacccugaucaguga

SEQ ID NO: 347131 - RNA, 19 nt, Artificial Sequence
  Description of Artificial Sequence: Synthetic oligonucleotide
ucuauagcagacggaggaa

SEQ ID NO: 347132 - RNA, 19 nt, Artificial Sequence
  Description of Artificial Sequence: Synthetic oligonucleotide
agcuacaauguaccuguaa

SEQ ID NO: 347133 - RNA, 19 nt, Artificial Sequence
  Description of Artificial Sequence: Synthetic oligonucleotide
acgcugacugcguaguggu

SEQ ID NO: 347134 - RNA, 19 nt, Artificial Sequence
  Description of Artificial Sequence: Synthetic oligonucleotide
auacuuuacugucgggauu

SEQ ID NO: 347135 - RNA, 19 nt, Artificial Sequence
  Description of Artificial Sequence: Synthetic oligonucleotide
cgaauuucaaccuaagaaa

SEQ ID NO: 347136 - RNA, 19 nt, Artificial Sequence
  Description of Artificial Sequence: Synthetic oligonucleotide
uguuugaagcaggguauuc

SEQ ID NO: 347137 - RNA, 19 nt, Artificial Sequence
  Description of Artificial Sequence: Synthetic oligonucleotide
gcaugagcugguucgaaug

SEQ ID NO: 347138 - RNA, 19 nt, Artificial Sequence
  Description of Artificial Sequence: Synthetic oligonucleotide
cuucauaucauggguuuga

SEQ ID NO: 347139 - RNA, 19 nt, Artificial Sequence
  Description of Artificial Sequence: Synthetic oligonucleotide
cuauaaucugcucaugaau

SEQ ID NO: 347140 - RNA, 19 nt, Artificial Sequence
  Description of Artificial Sequence: Synthetic oligonucleotide
gacggaggaagaaagccaa

SEQ ID NO: 347141 - RNA, 19 nt, Artificial Sequence
  Description of Artificial Sequence: Synthetic oligonucleotide
gacugcguaguggucgaag

SEQ ID NO: 347142 - RNA, 19 nt, Artificial Sequence
  Description of Artificial Sequence: Synthetic oligonucleotide
aaggcaacuuggaaaugaa

SEQ ID NO: 347143 - RNA, 19 nt, Artificial Sequence
  Description of Artificial Sequence: Synthetic oligonucleotide
cagcgaauuucaaccuaag

SEQ ID NO: 347144 - RNA, 19 nt, Artificial Sequence
  Description of Artificial Sequence: Synthetic oligonucleotide
agggacauuuggugcauau

SEQ ID NO: 347145 - RNA, 19 nt, Artificial Sequence
  Description of Artificial Sequence: Synthetic oligonucleotide
uacugucgggauuccuuca

SEQ ID NO: 347146 - RNA, 19 nt, Artificial Sequence
  Description of Artificial Sequence: Synthetic oligonucleotide
ggcaacuuggaaaugaaua

SEQ ID NO: 347147 - RNA, 19 nt, Artificial Sequence
  Description of Artificial Sequence: Synthetic oligonucleotide
ucaucgcaaguaagcuaca

SEQ ID NO: 347148 - RNA, 19 nt, Artificial Sequence
  Description of Artificial Sequence: Synthetic oligonucleotide
accuaaggcaccucagguu

SEQ ID NO: 347149 - RNA, 19 nt, Artificial Sequence
  Description of Artificial Sequence: Synthetic oligonucleotide
ugacccuauacgugaggaa

SEQ ID NO: 347150 - RNA, 19 nt, Artificial Sequence
  Description of Artificial Sequence: Synthetic oligonucleotide
uguugcaaccuaugccuuu

SEQ ID NO: 347151 - RNA, 19 nt, Artificial Sequence
  Description of Artificial Sequence: Synthetic oligonucleotide
augcaguuaugaccuauua

SEQ ID NO: 347152 - RNA, 19 nt, Artificial Sequence
  Description of Artificial Sequence: Synthetic oligonucleotide
ggcagaucuauagcagacg

SEQ ID NO: 347153 - RNA, 19 nt, Artificial Sequence
  Description of Artificial Sequence: Synthetic oligonucleotide
aggguuagaaauggcucca

SEQ ID NO: 347154 - RNA, 19 nt, Artificial Sequence
  Description of Artificial Sequence: Synthetic oligonucleotide
ugcuuagaguucgaguguu

SEQ ID NO: 347155 - RNA, 19 nt, Artificial Sequence
  Description of Artificial Sequence: Synthetic oligonucleotide
ggugacgcugacugcguag

SEQ ID NO: 347156 - RNA, 19 nt, Artificial Sequence
  Description of Artificial Sequence: Synthetic oligonucleotide
cugcguaguggucgaagac

SEQ ID NO: 347157 - RNA, 19 nt, Artificial Sequence
  Description of Artificial Sequence: Synthetic oligonucleotide
aacucaagcucuacuuauu

SEQ ID NO: 347158 - RNA, 19 nt, Artificial Sequence
  Description of Artificial Sequence: Synthetic oligonucleotide
auagcagacggaggaagaa

SEQ ID NO: 347159 - RNA, 19 nt, Artificial Sequence
  Description of Artificial Sequence: Synthetic oligonucleotide
ggguuugacaacuuagcua

SEQ ID NO: 347160 - RNA, 19 nt, Artificial Sequence
  Description of Artificial Sequence: Synthetic oligonucleotide
agauaucccauguccccuu

SEQ ID NO: 347161 - RNA, 19 nt, Artificial Sequence
  Description of Artificial Sequence: Synthetic oligonucleotide
acgauauggauuagauuau

SEQ ID NO: 347162 - RNA, 19 nt, Artificial Sequence
  Description of Artificial Sequence: Synthetic oligonucleotide
aguguucuauauacauggu

SEQ ID NO: 347163 - RNA, 19 nt, Artificial Sequence
  Description of Artificial Sequence: Synthetic oligonucleotide
cagaucuauagcagacgga

SEQ ID NO: 347164 - RNA, 19 nt, Artificial Sequence
  Description of Artificial Sequence: Synthetic oligonucleotide
augaccuauuaaacuuuug

SEQ ID NO: 347165 - RNA, 19 nt, Artificial Sequence
  Description of Artificial Sequence: Synthetic oligonucleotide
uggcacaauucauguuagu

SEQ ID NO: 347166 - RNA, 19 nt, Artificial Sequence
  Description of Artificial Sequence: Synthetic oligonucleotide
accuguaaggauagaguaa

SEQ ID NO: 347167 - RNA, 19 nt, Artificial Sequence
  Description of Artificial Sequence: Synthetic oligonucleotide
uuguuugaagcaggguauu

SEQ ID NO: 347168 - RNA, 19 nt, Artificial Sequence
  Description of Artificial Sequence: Synthetic oligonucleotide
uucaugcaauuuggggaac

SEQ ID NO: 347169 - RNA, 19 nt, Artificial Sequence
  Description of Artificial Sequence: Synthetic oligonucleotide
uugcaaccuaugccuuuaa

SEQ ID NO: 347170 - RNA, 19 nt, Artificial Sequence
  Description of Artificial Sequence: Synthetic oligonucleotide
gaguucgaguguucuauau

SEQ ID NO: 347171 - RNA, 19 nt, Artificial Sequence
  Description of Artificial Sequence: Synthetic oligonucleotide
ggcacaauucauguuagua

SEQ ID NO: 347172 - RNA, 19 nt, Artificial Sequence
  Description of Artificial Sequence: Synthetic oligonucleotide
cuuagaguucgaguguucu

SEQ ID NO: 347173 - RNA, 19 nt, Artificial Sequence
  Description of Artificial Sequence: Synthetic oligonucleotide
agaguaccuaaggcaccuc

SEQ ID NO: 347174 - RNA, 19 nt, Artificial Sequence
  Description of Artificial Sequence: Synthetic oligonucleotide
cgaguguucuauauacaug

SEQ ID NO: 347175 - RNA, 19 nt, Artificial Sequence
  Description of Artificial Sequence: Synthetic oligonucleotide
uacgugaggaagggacacu

SEQ ID NO: 347176 - RNA, 19 nt, Artificial Sequence
  Description of Artificial Sequence: Synthetic oligonucleotide
guacaugaccuuguuugaa

SEQ ID NO: 347177 - RNA, 19 nt, Artificial Sequence
  Description of Artificial Sequence: Synthetic oligonucleotide
ggauagaguaagggcacac

SEQ ID NO: 347178 - RNA, 19 nt, Artificial Sequence
  Description of Artificial Sequence: Synthetic oligonucleotide
caacacgauauggauuaga

SEQ ID NO: 347179 - RNA, 19 nt, Artificial Sequence
  Description of Artificial Sequence: Synthetic oligonucleotide
cuugagcaucagcgcgccg

SEQ ID NO: 347180 - RNA, 19 nt, Artificial Sequence
  Description of Artificial Sequence: Synthetic oligonucleotide
aucccauguccccuuccaa

SEQ ID NO: 347181 - RNA, 19 nt, Artificial Sequence
  Description of Artificial Sequence: Synthetic oligonucleotide
gcucaugaauagaaaacaa

SEQ ID NO: 347182 - RNA, 19 nt, Artificial Sequence
  Description of Artificial Sequence: Synthetic oligonucleotide
cccuauacgugaggaaggg

SEQ ID NO: 347183 - RNA, 19 nt, Artificial Sequence
  Description of Artificial Sequence: Synthetic oligonucleotide
caacagcgaauuucaaccu

SEQ ID NO: 347184 - RNA, 19 nt, Artificial Sequence
  Description of Artificial Sequence: Synthetic oligonucleotide
gcucacaugcaagacagua

SEQ ID NO: 347185 - RNA, 19 nt, Artificial Sequence
  Description of Artificial Sequence: Synthetic oligonucleotide
gguacccauuccucuuuca

SEQ ID NO: 347186 - RNA, 19 nt, Artificial Sequence
  Description of Artificial Sequence: Synthetic oligonucleotide
ggguuagaaauggcuccag

SEQ ID NO: 347187 - RNA, 19 nt, Artificial Sequence
  Description of Artificial Sequence: Synthetic oligonucleotide
agucaugggguaagacaaa

SEQ ID NO: 347188 - RNA, 19 nt, Artificial Sequence
  Description of Artificial Sequence: Synthetic oligonucleotide
cauagagucccagcaggua

SEQ ID NO: 347189 - RNA, 19 nt, Artificial Sequence
  Description of Artificial Sequence: Synthetic oligonucleotide
gcaucagcgcgccgggccc

SEQ ID NO: 347190 - RNA, 19 nt, Artificial Sequence
  Description of Artificial Sequence: Synthetic oligonucleotide
aagggacauuuggugcaua

SEQ ID NO: 347191 - RNA, 19 nt, Artificial Sequence
  Description of Artificial Sequence: Synthetic oligonucleotide
caccgccccgucuccgacc

SEQ ID NO: 347192 - RNA, 19 nt, Artificial Sequence
  Description of Artificial Sequence: Synthetic oligonucleotide
caucagcgcgccgggcccg

SEQ ID NO: 347193 - RNA, 19 nt, Artificial Sequence
  Description of Artificial Sequence: Synthetic oligonucleotide
gaagcucgauaaagaccaa

SEQ ID NO: 347194 - RNA, 19 nt, Artificial Sequence
  Description of Artificial Sequence: Synthetic oligonucleotide
cuggaagccucauuaccuu

SEQ ID NO: 347195 - RNA, 19 nt, Artificial Sequence
  Description of Artificial Sequence: Synthetic oligonucleotide
gcaacacgauauggauuag

SEQ ID NO: 347196 - RNA, 19 nt, Artificial Sequence
  Description of Artificial Sequence: Synthetic oligonucleotide
auguaccuguaaggauaga

SEQ ID NO: 347197 - RNA, 19 nt, Artificial Sequence
  Description of Artificial Sequence: Synthetic oligonucleotide
aagcuacaauguaccugua

SEQ ID NO: 347198 - RNA, 19 nt, Artificial Sequence
  Description of Artificial Sequence: Synthetic oligonucleotide
acggugacgcugacugcgu

SEQ ID NO: 347199 - RNA, 19 nt, Artificial Sequence
  Description of Artificial Sequence: Synthetic oligonucleotide
gcuuagaguucgaguguuc

SEQ ID NO: 347200 - RNA, 19 nt, Artificial Sequence
  Description of Artificial Sequence: Synthetic oligonucleotide
gcagugucuaaaggaacua

SEQ ID NO: 347201 - RNA, 19 nt, Artificial Sequence
  Description of Artificial Sequence: Synthetic oligonucleotide
gcucuacuuauuggaaaua

SEQ ID NO: 347202 - RNA, 19 nt, Artificial Sequence
  Description of Artificial Sequence: Synthetic oligonucleotide
cuguugcaaccuaugccuu

SEQ ID NO: 347203 - RNA, 19 nt, Artificial Sequence
  Description of Artificial Sequence: Synthetic oligonucleotide
ccgugacgccauacugcgg

SEQ ID NO: 347204 - RNA, 19 nt, Artificial Sequence
  Description of Artificial Sequence: Synthetic oligonucleotide
ccuauacgugaggaaggga

SEQ ID NO: 347205 - RNA, 19 nt, Artificial Sequence
  Description of Artificial Sequence: Synthetic oligonucleotide
gcuagcauguuaacucauu

SEQ ID NO: 347206 - RNA, 19 nt, Artificial Sequence
  Description of Artificial Sequence: Synthetic oligonucleotide
gggcccgugacgccauacu

SEQ ID NO: 347207 - RNA, 19 nt, Artificial Sequence
  Description of Artificial Sequence: Synthetic oligonucleotide
cgggauuccuucauaucau

SEQ ID NO: 347208 - RNA, 19 nt, Artificial Sequence
  Description of Artificial Sequence: Synthetic oligonucleotide
gggaaacuccaaaccccau

SEQ ID NO: 347209 - RNA, 19 nt, Artificial Sequence
  Description of Artificial Sequence: Synthetic oligonucleotide
ggccucagacggucauagu

SEQ ID NO: 347210 - RNA, 19 nt, Artificial Sequence
  Description of Artificial Sequence: Synthetic oligonucleotide
ggggaguguggugcuuaua

SEQ ID NO: 347211 - RNA, 19 nt, Artificial Sequence
  Description of Artificial Sequence: Synthetic oligonucleotide
cgggcccgugacgccauac

SEQ ID NO: 347212 - RNA, 19 nt, Artificial Sequence
  Description of Artificial Sequence: Synthetic oligonucleotide
ccccgacggugacgcugac

SEQ ID NO: 347213 - RNA, 19 nt, Artificial Sequence
  Description of Artificial Sequence: Synthetic oligonucleotide
cggugacgcugacugcgua

SEQ ID NO: 347214 - RNA, 19 nt, Artificial Sequence
  Description of Artificial Sequence: Synthetic oligonucleotide
aaauugcaaaauucuaucc

SEQ ID NO: 347215 - RNA, 19 nt, Artificial Sequence
  Description of Artificial Sequence: Synthetic oligonucleotide
aaccauaaagcucacuggc

SEQ ID NO: 347216 - RNA, 19 nt, Artificial Sequence
  Description of Artificial Sequence: Synthetic oligonucleotide
aaguaguaaauguucagac

SEQ ID NO: 347217 - RNA, 19 nt, Artificial Sequence
  Description of Artificial Sequence: Synthetic oligonucleotide
aaauuaacagcugauuggc

SEQ ID NO: 347218 - RNA, 19 nt, Artificial Sequence
  Description of Artificial Sequence: Synthetic oligonucleotide
ucagcgauugucaagaucc

SEQ ID NO: 347219 - RNA, 19 nt, Artificial Sequence
  Description of Artificial Sequence: Synthetic oligonucleotide
aauaggucgaacaucauuc

SEQ ID NO: 347220 - RNA, 19 nt, Artificial Sequence
  Description of Artificial Sequence: Synthetic oligonucleotide
auuuauuacagguacaaca

SEQ ID NO: 347221 - RNA, 19 nt, Artificial Sequence
  Description of Artificial Sequence: Synthetic oligonucleotide
uuaaugacuacgaauaggu

SEQ ID NO: 347222 - RNA, 19 nt, Artificial Sequence
  Description of Artificial Sequence: Synthetic oligonucleotide
uguuaaagccacaacauug

SEQ ID NO: 347223 - RNA, 19 nt, Artificial Sequence
  Description of Artificial Sequence: Synthetic oligonucleotide
aaaguuaugagguuacgga

SEQ ID NO: 347224 - RNA, 19 nt, Artificial Sequence
  Description of Artificial Sequence: Synthetic oligonucleotide
aaagccacaacauugcaca

SEQ ID NO: 347225 - RNA, 19 nt, Artificial Sequence
  Description of Artificial Sequence: Synthetic oligonucleotide
uuuaauuugguggaugacg

SEQ ID NO: 347226 - RNA, 19 nt, Artificial Sequence
  Description of Artificial Sequence: Synthetic oligonucleotide
uaguaaguaaguuuuaaug

SEQ ID NO: 347227 - RNA, 19 nt, Artificial Sequence
  Description of Artificial Sequence: Synthetic oligonucleotide
aacguguaaacauguaagg

SEQ ID NO: 347228 - RNA, 19 nt, Artificial Sequence
  Description of Artificial Sequence: Synthetic oligonucleotide
uaacguguaaacauguaag

SEQ ID NO: 347229 - RNA, 19 nt, Artificial Sequence
  Description of Artificial Sequence: Synthetic oligonucleotide
ugaauaauagcauaauaaa

SEQ ID NO: 347230 - RNA, 19 nt, Artificial Sequence
  Description of Artificial Sequence: Synthetic oligonucleotide
aaguuauucauggucaggg

SEQ ID NO: 347231 - RNA, 19 nt, Artificial Sequence
  Description of Artificial Sequence: Synthetic oligonucleotide
agaaccauaaagcucacug

SEQ ID NO: 347232 - RNA, 19 nt, Artificial Sequence
  Description of Artificial Sequence: Synthetic oligonucleotide
uuaauuggcuuucuuacca

SEQ ID NO: 347233 - RNA, 19 nt, Artificial Sequence
  Description of Artificial Sequence: Synthetic oligonucleotide
aguuuauggcucaagaccc

SEQ ID NO: 347234 - RNA, 19 nt, Artificial Sequence
  Description of Artificial Sequence: Synthetic oligonucleotide
uuuaaugacuacgaauagg

SEQ ID NO: 347235 - RNA, 19 nt, Artificial Sequence
  Description of Artificial Sequence: Synthetic oligonucleotide
uaaauaguugcagaaaaug

SEQ ID NO: 347236 - RNA, 19 nt, Artificial Sequence
  Description of Artificial Sequence: Synthetic oligonucleotide
aauuucacacgaugaacag

SEQ ID NO: 347237 - RNA, 19 nt, Artificial Sequence
  Description of Artificial Sequence: Synthetic oligonucleotide
uuuuaugcaaaagacugag

SEQ ID NO: 347238 - RNA, 19 nt, Artificial Sequence
  Description of Artificial Sequence: Synthetic oligonucleotide
agguuacggauacacaucc

SEQ ID NO: 347239 - RNA, 19 nt, Artificial Sequence
  Description of Artificial Sequence: Synthetic oligonucleotide
ugguggaugacgucgaacg

SEQ ID NO: 347240 - RNA, 19 nt, Artificial Sequence
  Description of Artificial Sequence: Synthetic oligonucleotide
aacauuacccuauuaucca

SEQ ID NO: 347241 - RNA, 19 nt, Artificial Sequence
  Description of Artificial Sequence: Synthetic oligonucleotide
aaauaauacuuuggcauuc

SEQ ID NO: 347242 - RNA, 19 nt, Artificial Sequence
  Description of Artificial Sequence: Synthetic oligonucleotide
uuuuaaugacuacgaauag

SEQ ID NO: 347243 - RNA, 19 nt, Artificial Sequence
  Description of Artificial Sequence: Synthetic oligonucleotide
ugaacguacauuucagaag

SEQ ID NO: 347244 - RNA, 19 nt, Artificial Sequence
  Description of Artificial Sequence: Synthetic oligonucleotide
aguauuuucaucugacugu

SEQ ID NO: 347245 - RNA, 19 nt, Artificial Sequence
  Description of Artificial Sequence: Synthetic oligonucleotide
ucuagacgugucaaggacg

SEQ ID NO: 347246 - RNA, 19 nt, Artificial Sequence
  Description of Artificial Sequence: Synthetic oligonucleotide
augauaugaaauaaaauca

SEQ ID NO: 347247 - RNA, 19 nt, Artificial Sequence
  Description of Artificial Sequence: Synthetic oligonucleotide
aagcacacgaacuccuugg

SEQ ID NO: 347248 - RNA, 19 nt, Artificial Sequence
  Description of Artificial Sequence: Synthetic oligonucleotide
uuucaagcgugccagaaac

SEQ ID NO: 347249 - RNA, 19 nt, Artificial Sequence
  Description of Artificial Sequence: Synthetic oligonucleotide
aacaauuugauugacgguu

SEQ ID NO: 347250 - RNA, 19 nt, Artificial Sequence
  Description of Artificial Sequence: Synthetic oligonucleotide
gaaccauaaagcucacugg

SEQ ID NO: 347251 - RNA, 19 nt, Artificial Sequence
  Description of Artificial Sequence: Synthetic oligonucleotide
aaaugagugcauuuacagu

SEQ ID NO: 347252 - RNA, 19 nt, Artificial Sequence
  Description of Artificial Sequence: Synthetic oligonucleotide
aguuuuaaugacuacgaau

SEQ ID NO: 347253 - RNA, 19 nt, Artificial Sequence
  Description of Artificial Sequence: Synthetic oligonucleotide
uauaccguucaacaauuug

SEQ ID NO: 347254 - RNA, 19 nt, Artificial Sequence
  Description of Artificial Sequence: Synthetic oligonucleotide
cugaauaauagcauaauaa

SEQ ID NO: 347255 - RNA, 19 nt, Artificial Sequence
  Description of Artificial Sequence: Synthetic oligonucleotide
uucacggagaguuaagugu

SEQ ID NO: 347256 - RNA, 19 nt, Artificial Sequence
  Description of Artificial Sequence: Synthetic oligonucleotide
aagacguacgcagaugagg

SEQ ID NO: 347257 - RNA, 19 nt, Artificial Sequence
  Description of Artificial Sequence: Synthetic oligonucleotide
acuacgaauaggucgaaca

SEQ ID NO: 347258 - RNA, 19 nt, Artificial Sequence
  Description of Artificial Sequence: Synthetic oligonucleotide
agcgaugcgaucucugccc

SEQ ID NO: 347259 - RNA, 19 nt, Artificial Sequence
  Description of Artificial Sequence: Synthetic oligonucleotide
ugagguugaacguacauuu

SEQ ID NO: 347260 - RNA, 19 nt, Artificial Sequence
  Description of Artificial Sequence: Synthetic oligonucleotide
uacccuauuauccaguuuu

SEQ ID NO: 347261 - RNA, 19 nt, Artificial Sequence
  Description of Artificial Sequence: Synthetic oligonucleotide
auauauacauguaaggccu

SEQ ID NO: 347262 - RNA, 19 nt, Artificial Sequence
  Description of Artificial Sequence: Synthetic oligonucleotide
aaggccuacaauucaucag

SEQ ID NO: 347263 - RNA, 19 nt, Artificial Sequence
  Description of Artificial Sequence: Synthetic oligonucleotide
ugagguuacggauacacau

SEQ ID NO: 347264 - RNA, 19 nt, Artificial Sequence
  Description of Artificial Sequence: Synthetic oligonucleotide
auuugauugacgguuuggg

SEQ ID NO: 347265 - RNA, 19 nt, Artificial Sequence
  Description of Artificial Sequence: Synthetic oligonucleotide
uguuuuguguaacaccagu

SEQ ID NO: 347266 - RNA, 19 nt, Artificial Sequence
  Description of Artificial Sequence: Synthetic oligonucleotide
uucagacugauuuugggaa

SEQ ID NO: 347267 - RNA, 19 nt, Artificial Sequence
  Description of Artificial Sequence: Synthetic oligonucleotide
uugaacguacauuucagaa

SEQ ID NO: 347268 - RNA, 19 nt, Artificial Sequence
  Description of Artificial Sequence: Synthetic oligonucleotide
guuacggauacacauccag

SEQ ID NO: 347269 - RNA, 19 nt, Artificial Sequence
  Description of Artificial Sequence: Synthetic oligonucleotide
aaguuaugagguuacggau

SEQ ID NO: 347270 - RNA, 19 nt, Artificial Sequence
  Description of Artificial Sequence: Synthetic oligonucleotide
agaguguaacugaaggucc

SEQ ID NO: 347271 - RNA, 19 nt, Artificial Sequence
  Description of Artificial Sequence: Synthetic oligonucleotide
uuauccaguuuuauuuuca

SEQ ID NO: 347272 - RNA, 19 nt, Artificial Sequence
  Description of Artificial Sequence: Synthetic oligonucleotide
ugaaacagcgaugcgaucu

SEQ ID NO: 347273 - RNA, 19 nt, Artificial Sequence
  Description of Artificial Sequence: Synthetic oligonucleotide
ucauaacguguaaacaugu

SEQ ID NO: 347274 - RNA, 19 nt, Artificial Sequence
  Description of Artificial Sequence: Synthetic oligonucleotide
ucgaacgucaaguuauuca

SEQ ID NO: 347275 - RNA, 19 nt, Artificial Sequence
  Description of Artificial Sequence: Synthetic oligonucleotide
uugauugacgguuugggau

SEQ ID NO: 347276 - RNA, 19 nt, Artificial Sequence
  Description of Artificial Sequence: Synthetic oligonucleotide
uaugagguuacggauacac

SEQ ID NO: 347277 - RNA, 19 nt, Artificial Sequence
  Description of Artificial Sequence: Synthetic oligonucleotide
uacugugaaacagcgaugc

SEQ ID NO: 347278 - RNA, 19 nt, Artificial Sequence
  Description of Artificial Sequence: Synthetic oligonucleotide
gacuguauaccguucaaca

SEQ ID NO: 347279 - RNA, 19 nt, Artificial Sequence
  Description of Artificial Sequence: Synthetic oligonucleotide
ugugucaagucauucauuu

SEQ ID NO: 347280 - RNA, 19 nt, Artificial Sequence
  Description of Artificial Sequence: Synthetic oligonucleotide
guuuuaaugacuacgaaua

SEQ ID NO: 347281 - RNA, 19 nt, Artificial Sequence
  Description of Artificial Sequence: Synthetic oligonucleotide
aauaguugcagaaaauguu

SEQ ID NO: 347282 - RNA, 19 nt, Artificial Sequence
  Description of Artificial Sequence: Synthetic oligonucleotide
auaggcauguguuuccuug

SEQ ID NO: 347283 - RNA, 19 nt, Artificial Sequence
  Description of Artificial Sequence: Synthetic oligonucleotide
aaacugcaaagcuuaauuu

SEQ ID NO: 347284 - RNA, 19 nt, Artificial Sequence
  Description of Artificial Sequence: Synthetic oligonucleotide
ucaaguuauucauggucag

SEQ ID NO: 347285 - RNA, 19 nt, Artificial Sequence
  Description of Artificial Sequence: Synthetic oligonucleotide
agacguacgcagaugaggc

SEQ ID NO: 347286 - RNA, 19 nt, Artificial Sequence
  Description of Artificial Sequence: Synthetic oligonucleotide
ugauugacgguuugggaug

SEQ ID NO: 347287 - RNA, 19 nt, Artificial Sequence
  Description of Artificial Sequence: Synthetic oligonucleotide
ugcaauuucacacgaugaa

SEQ ID NO: 347288 - RNA, 19 nt, Artificial Sequence
  Description of Artificial Sequence: Synthetic oligonucleotide
aaggacuucccacgccagc

SEQ ID NO: 347289 - RNA, 19 nt, Artificial Sequence
  Description of Artificial Sequence: Synthetic oligonucleotide
uaaaaccccaaaugagugc

SEQ ID NO: 347290 - RNA, 19 nt, Artificial Sequence
  Description of Artificial Sequence: Synthetic oligonucleotide
uuauuacagguacaacaga

SEQ ID NO: 347291 - RNA, 19 nt, Artificial Sequence
  Description of Artificial Sequence: Synthetic oligonucleotide
cuagacgugucaaggacgc

SEQ ID NO: 347292 - RNA, 19 nt, Artificial Sequence
  Description of Artificial Sequence: Synthetic oligonucleotide
uucauucuauuuuaugcaa

SEQ ID NO: 347293 - RNA, 19 nt, Artificial Sequence
  Description of Artificial Sequence: Synthetic oligonucleotide
uccgaggucagggagacag

SEQ ID NO: 347294 - RNA, 19 nt, Artificial Sequence
  Description of Artificial Sequence: Synthetic oligonucleotide
uggcaggugaaagagaaug

SEQ ID NO: 347295 - RNA, 19 nt, Artificial Sequence
  Description of Artificial Sequence: Synthetic oligonucleotide
acuucaagauaggucaaac

SEQ ID NO: 347296 - RNA, 19 nt, Artificial Sequence
  Description of Artificial Sequence: Synthetic oligonucleotide
uaaggccuacaauucauca

SEQ ID NO: 347297 - RNA, 19 nt, Artificial Sequence
  Description of Artificial Sequence: Synthetic oligonucleotide
ucaagcgugccagaaaccc

SEQ ID NO: 347298 - RNA, 19 nt, Artificial Sequence
  Description of Artificial Sequence: Synthetic oligonucleotide
guuaugagguuacggauac

SEQ ID NO: 347299 - RNA, 19 nt, Artificial Sequence
  Description of Artificial Sequence: Synthetic oligonucleotide
ccguucaacaauuugauug

SEQ ID NO: 347300 - RNA, 19 nt, Artificial Sequence
  Description of Artificial Sequence: Synthetic oligonucleotide
cauguaaggccuacaauuc

SEQ ID NO: 347301 - RNA, 19 nt, Artificial Sequence
  Description of Artificial Sequence: Synthetic oligonucleotide
uguauaccguucaacaauu

SEQ ID NO: 347302 - RNA, 19 nt, Artificial Sequence
  Description of Artificial Sequence: Synthetic oligonucleotide
cagccggucacuuaguuug

SEQ ID NO: 347303 - RNA, 19 nt, Artificial Sequence
  Description of Artificial Sequence: Synthetic oligonucleotide
uuauucauggucagggcuu

SEQ ID NO: 347304 - RNA, 19 nt, Artificial Sequence
  Description of Artificial Sequence: Synthetic oligonucleotide
aggccuacaauucaucaga

SEQ ID NO: 347305 - RNA, 19 nt, Artificial Sequence
  Description of Artificial Sequence: Synthetic oligonucleotide
aggucgaacaucauucugg

SEQ ID NO: 347306 - RNA, 19 nt, Artificial Sequence
  Description of Artificial Sequence: Synthetic oligonucleotide
guagcuccgagcccaagcg

SEQ ID NO: 347307 - RNA, 19 nt, Artificial Sequence
  Description of Artificial Sequence: Synthetic oligonucleotide
agcgcuacugagcacagcu

SEQ ID NO: 347308 - RNA, 19 nt, Artificial Sequence
  Description of Artificial Sequence: Synthetic oligonucleotide
aggcaggucucuuccacgc

SEQ ID NO: 347309 - RNA, 19 nt, Artificial Sequence
  Description of Artificial Sequence: Synthetic oligonucleotide
aacauguaaggucucugua

SEQ ID NO: 347310 - RNA, 19 nt, Artificial Sequence
  Description of Artificial Sequence: Synthetic oligonucleotide
ucacggagaguuaaguguc

SEQ ID NO: 347311 - RNA, 19 nt, Artificial Sequence
  Description of Artificial Sequence: Synthetic oligonucleotide
acuccaacacuccaugugu

SEQ ID NO: 347312 - RNA, 19 nt, Artificial Sequence
  Description of Artificial Sequence: Synthetic oligonucleotide
ucacuuggaaugcaauuuc

SEQ ID NO: 347313 - RNA, 19 nt, Artificial Sequence
  Description of Artificial Sequence: Synthetic oligonucleotide
cagcuuguagcuccgagcc

SEQ ID NO: 347314 - RNA, 19 nt, Artificial Sequence
  Description of Artificial Sequence: Synthetic oligonucleotide
ugcucuaguaaguaaguuu

SEQ ID NO: 347315 - RNA, 19 nt, Artificial Sequence
  Description of Artificial Sequence: Synthetic oligonucleotide
uuacggauacacauccagu

SEQ ID NO: 347316 - RNA, 19 nt, Artificial Sequence
  Description of Artificial Sequence: Synthetic oligonucleotide
ugcacaugauaugaaauaa

SEQ ID NO: 347317 - RNA, 19 nt, Artificial Sequence
  Description of Artificial Sequence: Synthetic oligonucleotide
uugcacaugauaugaaaua

SEQ ID NO: 347318 - RNA, 19 nt, Artificial Sequence
  Description of Artificial Sequence: Synthetic oligonucleotide
uuugcgccgcucaaugaag

SEQ ID NO: 347319 - RNA, 19 nt, Artificial Sequence
  Description of Artificial Sequence: Synthetic oligonucleotide
auaccguucaacaauuuga

SEQ ID NO: 347320 - RNA, 19 nt, Artificial Sequence
  Description of Artificial Sequence: Synthetic oligonucleotide
gaguuaaguguccuugaac

SEQ ID NO: 347321 - RNA, 19 nt, Artificial Sequence
  Description of Artificial Sequence: Synthetic oligonucleotide
agguccuccaccccagcgc

SEQ ID NO: 347322 - RNA, 19 nt, Artificial Sequence
  Description of Artificial Sequence: Synthetic oligonucleotide
ugcucagcgauugucaaga

SEQ ID NO: 347323 - RNA, 19 nt, Artificial Sequence
  Description of Artificial Sequence: Synthetic oligonucleotide
ucagucuagacgugucaag

SEQ ID NO: 347324 - RNA, 19 nt, Artificial Sequence
  Description of Artificial Sequence: Synthetic oligonucleotide
gaugacgucgaacgucaag

SEQ ID NO: 347325 - RNA, 19 nt, Artificial Sequence
  Description of Artificial Sequence: Synthetic oligonucleotide
auaggugagcacuccaaca

SEQ ID NO: 347326 - RNA, 19 nt, Artificial Sequence
  Description of Artificial Sequence: Synthetic oligonucleotide
agccggcaaauguucaggc

SEQ ID NO: 347327 - RNA, 19 nt, Artificial Sequence
  Description of Artificial Sequence: Synthetic oligonucleotide
aacguacauuucagaagcc

SEQ ID NO: 347328 - RNA, 19 nt, Artificial Sequence
  Description of Artificial Sequence: Synthetic oligonucleotide
cuuggaaugcaauuucaca

SEQ ID NO: 347329 - RNA, 19 nt, Artificial Sequence
  Description of Artificial Sequence: Synthetic oligonucleotide
gauccuacugugucaaguc

SEQ ID NO: 347330 - RNA, 19 nt, Artificial Sequence
  Description of Artificial Sequence: Synthetic oligonucleotide
uugguuuccucuucaaaau

SEQ ID NO: 347331 - RNA, 19 nt, Artificial Sequence
  Description of Artificial Sequence: Synthetic oligonucleotide
uaccguucaacaauuugau

SEQ ID NO: 347332 - RNA, 19 nt, Artificial Sequence
  Description of Artificial Sequence: Synthetic oligonucleotide
cagaguguaacugaagguc

SEQ ID NO: 347333 - RNA, 19 nt, Artificial Sequence
  Description of Artificial Sequence: Synthetic oligonucleotide
uacggauacacauccaguu

SEQ ID NO: 347334 - RNA, 19 nt, Artificial Sequence
  Description of Artificial Sequence: Synthetic oligonucleotide
uuguuuuguguaacaccag

SEQ ID NO: 347335 - RNA, 19 nt, Artificial Sequence
  Description of Artificial Sequence: Synthetic oligonucleotide
aucauaacguguaaacaug

SEQ ID NO: 347336 - RNA, 19 nt, Artificial Sequence
  Description of Artificial Sequence: Synthetic oligonucleotide
aauuucacggagaguuaag

SEQ ID NO: 347337 - RNA, 19 nt, Artificial Sequence
  Description of Artificial Sequence: Synthetic oligonucleotide
uaggucgaacaucauucug

SEQ ID NO: 347338 - RNA, 19 nt, Artificial Sequence
  Description of Artificial Sequence: Synthetic oligonucleotide
uuguguugaaggacuuccc

SEQ ID NO: 347339 - RNA, 19 nt, Artificial Sequence
  Description of Artificial Sequence: Synthetic oligonucleotide
cucaagacccagaugucug

SEQ ID NO: 347340 - RNA, 19 nt, Artificial Sequence
  Description of Artificial Sequence: Synthetic oligonucleotide
acuguauaccguucaacaa

SEQ ID NO: 347341 - RNA, 19 nt, Artificial Sequence
  Description of Artificial Sequence: Synthetic oligonucleotide
aauuucaagcgugccagaa

SEQ ID NO: 347342 - RNA, 19 nt, Artificial Sequence
  Description of Artificial Sequence: Synthetic oligonucleotide
cauguguccgaggucaggg

SEQ ID NO: 347343 - RNA, 19 nt, Artificial Sequence
  Description of Artificial Sequence: Synthetic oligonucleotide
guuuuguguaacaccagug

SEQ ID NO: 347344 - RNA, 19 nt, Artificial Sequence
  Description of Artificial Sequence: Synthetic oligonucleotide
ugggaaagcucugugccag

SEQ ID NO: 347345 - RNA, 19 nt, Artificial Sequence
  Description of Artificial Sequence: Synthetic oligonucleotide
cauguaaggucucuguaca

SEQ ID NO: 347346 - RNA, 19 nt, Artificial Sequence
  Description of Artificial Sequence: Synthetic oligonucleotide
aaauuucaagcgugccaga

SEQ ID NO: 347347 - RNA, 19 nt, Artificial Sequence
  Description of Artificial Sequence: Synthetic oligonucleotide
augacuacgaauaggucga

SEQ ID NO: 347348 - RNA, 19 nt, Artificial Sequence
  Description of Artificial Sequence: Synthetic oligonucleotide
ucucugcccuugcagagug

SEQ ID NO: 347349 - RNA, 19 nt, Artificial Sequence
  Description of Artificial Sequence: Synthetic oligonucleotide
uaaugacuacgaauagguc

SEQ ID NO: 347350 - RNA, 19 nt, Artificial Sequence
  Description of Artificial Sequence: Synthetic oligonucleotide
auguaaggccuacaauuca

SEQ ID NO: 347351 - RNA, 19 nt, Artificial Sequence
  Description of Artificial Sequence: Synthetic oligonucleotide
gauugacgguuugggaugg

SEQ ID NO: 347352 - RNA, 19 nt, Artificial Sequence
  Description of Artificial Sequence: Synthetic oligonucleotide
uucaagcgugccagaaacc

SEQ ID NO: 347353 - RNA, 19 nt, Artificial Sequence
  Description of Artificial Sequence: Synthetic oligonucleotide
agacccagaugucuggcug

SEQ ID NO: 347354 - RNA, 19 nt, Artificial Sequence
  Description of Artificial Sequence: Synthetic oligonucleotide
accauaaagcucacuggcg

SEQ ID NO: 347355 - RNA, 19 nt, Artificial Sequence
  Description of Artificial Sequence: Synthetic oligonucleotide
gucuagacgugucaaggac

SEQ ID NO: 347356 - RNA, 19 nt, Artificial Sequence
  Description of Artificial Sequence: Synthetic oligonucleotide
gagcccaagcgcuacugag

SEQ ID NO: 347357 - RNA, 19 nt, Artificial Sequence
  Description of Artificial Sequence: Synthetic oligonucleotide
gauggcacagggcuacaac

SEQ ID NO: 347358 - RNA, 19 nt, Artificial Sequence
  Description of Artificial Sequence: Synthetic oligonucleotide
auaguugcagaaaauguua

SEQ ID NO: 347359 - RNA, 19 nt, Artificial Sequence
  Description of Artificial Sequence: Synthetic oligonucleotide
cauaggugagcacuccaac

SEQ ID NO: 347360 - RNA, 19 nt, Artificial Sequence
  Description of Artificial Sequence: Synthetic oligonucleotide
ugacgguuugggauggggu

SEQ ID NO: 347361 - RNA, 19 nt, Artificial Sequence
  Description of Artificial Sequence: Synthetic oligonucleotide
auuuuaugcaaaagacuga

SEQ ID NO: 347362 - RNA, 19 nt, Artificial Sequence
  Description of Artificial Sequence: Synthetic oligonucleotide
ucuggcuaacuccuuuaaa

SEQ ID NO: 347363 - RNA, 19 nt, Artificial Sequence
  Description of Artificial Sequence: Synthetic oligonucleotide
acguguaaacauguaaggu

SEQ ID NO: 347364 - RNA, 19 nt, Artificial Sequence
  Description of Artificial Sequence: Synthetic oligonucleotide
aggacuucccacgccagcg

SEQ ID NO: 347365 - RNA, 19 nt, Artificial Sequence
  Description of Artificial Sequence: Synthetic oligonucleotide
gaugcgaucucugcccuug

SEQ ID NO: 347366 - RNA, 19 nt, Artificial Sequence
  Description of Artificial Sequence: Synthetic oligonucleotide
uucugaauaauagcauaau

SEQ ID NO: 347367 - RNA, 19 nt, Artificial Sequence
  Description of Artificial Sequence: Synthetic oligonucleotide
uacgaauaggucgaacauc

SEQ ID NO: 347368 - RNA, 19 nt, Artificial Sequence
  Description of Artificial Sequence: Synthetic oligonucleotide
agacugagguugaacguac

SEQ ID NO: 347369 - RNA, 19 nt, Artificial Sequence
  Description of Artificial Sequence: Synthetic oligonucleotide
gagaguuaaguguccuuga

SEQ ID NO: 347370 - RNA, 19 nt, Artificial Sequence
  Description of Artificial Sequence: Synthetic oligonucleotide
caguacacaaauaaaaguu

SEQ ID NO: 347371 - RNA, 19 nt, Artificial Sequence
  Description of Artificial Sequence: Synthetic oligonucleotide
gacgugucaaggacgcccg

SEQ ID NO: 347372 - RNA, 19 nt, Artificial Sequence
  Description of Artificial Sequence: Synthetic oligonucleotide
guugaacguacauuucaga

SEQ ID NO: 347373 - RNA, 19 nt, Artificial Sequence
  Description of Artificial Sequence: Synthetic oligonucleotide
cacuccaacacuccaugug

SEQ ID NO: 347374 - RNA, 19 nt, Artificial Sequence
  Description of Artificial Sequence: Synthetic oligonucleotide
uauauacauguaaggccua

SEQ ID NO: 347375 - RNA, 19 nt, Artificial Sequence
  Description of Artificial Sequence: Synthetic oligonucleotide
acguacgcagaugaggcag

SEQ ID NO: 347376 - RNA, 19 nt, Artificial Sequence
  Description of Artificial Sequence: Synthetic oligonucleotide
uuauggcucaagacccaga

SEQ ID NO: 347377 - RNA, 19 nt, Artificial Sequence
  Description of Artificial Sequence: Synthetic oligonucleotide
auuacccuauuauccaguu

SEQ ID NO: 347378 - RNA, 19 nt, Artificial Sequence
  Description of Artificial Sequence: Synthetic oligonucleotide
ggagaguuaaguguccuug

SEQ ID NO: 347379 - RNA, 19 nt, Artificial Sequence
  Description of Artificial Sequence: Synthetic oligonucleotide
guuaccugccugcagccac

SEQ ID NO: 347380 - RNA, 19 nt, Artificial Sequence
  Description of Artificial Sequence: Synthetic oligonucleotide
caucacaucauaacgugua

SEQ ID NO: 347381 - RNA, 19 nt, Artificial Sequence
  Description of Artificial Sequence: Synthetic oligonucleotide
agauccuacugugucaagu

SEQ ID NO: 347382 - RNA, 19 nt, Artificial Sequence
  Description of Artificial Sequence: Synthetic oligonucleotide
ugucaaggacgcccgugcc

SEQ ID NO: 347383 - RNA, 19 nt, Artificial Sequence
  Description of Artificial Sequence: Synthetic oligonucleotide
uaggcauguguuuccuuga

SEQ ID NO: 347384 - RNA, 19 nt, Artificial Sequence
  Description of Artificial Sequence: Synthetic oligonucleotide
uguucaggcaggucucuuc

SEQ ID NO: 347385 - RNA, 19 nt, Artificial Sequence
  Description of Artificial Sequence: Synthetic oligonucleotide
guguuugcgccgcucaaug

SEQ ID NO: 347386 - RNA, 19 nt, Artificial Sequence
  Description of Artificial Sequence: Synthetic oligonucleotide
acucuaggcagaagccugc

SEQ ID NO: 347387 - RNA, 19 nt, Artificial Sequence
  Description of Artificial Sequence: Synthetic oligonucleotide
acugagguugaacguacau

SEQ ID NO: 347388 - RNA, 19 nt, Artificial Sequence
  Description of Artificial Sequence: Synthetic oligonucleotide
cuugggaagcaaucugauc

SEQ ID NO: 347389 - RNA, 19 nt, Artificial Sequence
  Description of Artificial Sequence: Synthetic oligonucleotide
aguguaacugaagguccuc

SEQ ID NO: 347390 - RNA, 19 nt, Artificial Sequence
  Description of Artificial Sequence: Synthetic oligonucleotide
agcccaagcgcuacugagc

SEQ ID NO: 347391 - RNA, 19 nt, Artificial Sequence
  Description of Artificial Sequence: Synthetic oligonucleotide
augcaauuucacacgauga

SEQ ID NO: 347392 - RNA, 19 nt, Artificial Sequence
  Description of Artificial Sequence: Synthetic oligonucleotide
caagacguacgcagaugag

SEQ ID NO: 347393 - RNA, 19 nt, Artificial Sequence
  Description of Artificial Sequence: Synthetic oligonucleotide
uguuugcgccgcucaauga

SEQ ID NO: 347394 - RNA, 19 nt, Artificial Sequence
  Description of Artificial Sequence: Synthetic oligonucleotide
acgucgaacgucaaguuau

SEQ ID NO: 347395 - RNA, 19 nt, Artificial Sequence
  Description of Artificial Sequence: Synthetic oligonucleotide
aguacuuaauuggcuuucu

SEQ ID NO: 347396 - RNA, 19 nt, Artificial Sequence
  Description of Artificial Sequence: Synthetic oligonucleotide
guuuaauuugguggaugac

SEQ ID NO: 347397 - RNA, 19 nt, Artificial Sequence
  Description of Artificial Sequence: Synthetic oligonucleotide
aguuaugagguuacggaua

SEQ ID NO: 347398 - RNA, 19 nt, Artificial Sequence
  Description of Artificial Sequence: Synthetic oligonucleotide
gagguuacggauacacauc

SEQ ID NO: 347399 - RNA, 19 nt, Artificial Sequence
  Description of Artificial Sequence: Synthetic oligonucleotide
gaauaggucgaacaucauu

SEQ ID NO: 347400 - RNA, 19 nt, Artificial Sequence
  Description of Artificial Sequence: Synthetic oligonucleotide
cuggacccagcccaaaguc

SEQ ID NO: 347401 - RNA, 19 nt, Artificial Sequence
  Description of Artificial Sequence: Synthetic oligonucleotide
aacagcgaugcgaucucug

SEQ ID NO: 347402 - RNA, 19 nt, Artificial Sequence
  Description of Artificial Sequence: Synthetic oligonucleotide
cagaugucuggcuggcuug

SEQ ID NO: 347403 - RNA, 19 nt, Artificial Sequence
  Description of Artificial Sequence: Synthetic oligonucleotide
gcaagacguacgcagauga

SEQ ID NO: 347404 - RNA, 19 nt, Artificial Sequence
  Description of Artificial Sequence: Synthetic oligonucleotide
agaugucuggcuggcuugg

SEQ ID NO: 347405 - RNA, 19 nt, Artificial Sequence
  Description of Artificial Sequence: Synthetic oligonucleotide
caccuggcgagucuuuccc

SEQ ID NO: 347406 - RNA, 19 nt, Artificial Sequence
  Description of Artificial Sequence: Synthetic oligonucleotide
ccggcaaauguucaggcag

SEQ ID NO: 347407 - RNA, 19 nt, Artificial Sequence
  Description of Artificial Sequence: Synthetic oligonucleotide
guuugcgccgcucaaugaa

SEQ ID NO: 347408 - RNA, 19 nt, Artificial Sequence
  Description of Artificial Sequence: Synthetic oligonucleotide
gcugauuggcaggugaaag

SEQ ID NO: 347409 - RNA, 19 nt, Artificial Sequence
  Description of Artificial Sequence: Synthetic oligonucleotide
ggacacaccgcugagcagc

SEQ ID NO: 347410 - RNA, 19 nt, Artificial Sequence
  Description of Artificial Sequence: Synthetic oligonucleotide
aaagcucacuggcgaagua

SEQ ID NO: 347411 - RNA, 19 nt, Artificial Sequence
  Description of Artificial Sequence: Synthetic oligonucleotide
uaacuccuuuaaaguaguc

SEQ ID NO: 347412 - RNA, 19 nt, Artificial Sequence
  Description of Artificial Sequence: Synthetic oligonucleotide
acggauacacauccaguuu

SEQ ID NO: 347413 - RNA, 19 nt, Artificial Sequence
  Description of Artificial Sequence: Synthetic oligonucleotide
uggcaagacguacgcagau

SEQ ID NO: 347414 - RNA, 19 nt, Artificial Sequence
  Description of Artificial Sequence: Synthetic oligonucleotide
uuaccugccugcagccacu

SEQ ID NO: 347415 - RNA, 19 nt, Artificial Sequence
  Description of Artificial Sequence: Synthetic oligonucleotide
aagcgcuacugagcacagc

SEQ ID NO: 347416 - RNA, 19 nt, Artificial Sequence
  Description of Artificial Sequence: Synthetic oligonucleotide
uagcuccgagcccaagcgc

SEQ ID NO: 347417 - RNA, 19 nt, Artificial Sequence
  Description of Artificial Sequence: Synthetic oligonucleotide
uuacccuauuauccaguuu

SEQ ID NO: 347418 - RNA, 19 nt, Artificial Sequence
  Description of Artificial Sequence: Synthetic oligonucleotide
gacgcccgugccuuugcag

SEQ ID NO: 347419 - RNA, 19 nt, Artificial Sequence
  Description of Artificial Sequence: Synthetic oligonucleotide
acgucaaguuauucauggu

SEQ ID NO: 347420 - RNA, 19 nt, Artificial Sequence
  Description of Artificial Sequence: Synthetic oligonucleotide
uuugguggaugacgucgaa

SEQ ID NO: 347421 - RNA, 19 nt, Artificial Sequence
  Description of Artificial Sequence: Synthetic oligonucleotide
auacugugaaacagcgaug

SEQ ID NO: 347422 - RNA, 19 nt, Artificial Sequence
  Description of Artificial Sequence: Synthetic oligonucleotide
caguacuuaauuggcuuuc

SEQ ID NO: 347423 - RNA, 19 nt, Artificial Sequence
  Description of Artificial Sequence: Synthetic oligonucleotide
gagacaggguucccaagaa

SEQ ID NO: 347424 - RNA, 19 nt, Artificial Sequence
  Description of Artificial Sequence: Synthetic oligonucleotide
gacgucgaacgucaaguua

SEQ ID NO: 347425 - RNA, 19 nt, Artificial Sequence
  Description of Artificial Sequence: Synthetic oligonucleotide
gacucgggcacuggguacc

SEQ ID NO: 347426 - RNA, 19 nt, Artificial Sequence
  Description of Artificial Sequence: Synthetic oligonucleotide
acaucacaucauaacgugu

SEQ ID NO: 347427 - RNA, 19 nt, Artificial Sequence
  Description of Artificial Sequence: Synthetic oligonucleotide
ucaaggacgcccgugccuu

SEQ ID NO: 347428 - RNA, 19 nt, Artificial Sequence
  Description of Artificial Sequence: Synthetic oligonucleotide
gccguuaccugccugcagc

SEQ ID NO: 347429 - RNA, 19 nt, Artificial Sequence
  Description of Artificial Sequence: Synthetic oligonucleotide
gugccuggcaagacguacg

SEQ ID NO: 347430 - RNA, 19 nt, Artificial Sequence
  Description of Artificial Sequence: Synthetic oligonucleotide
ugccguuaccugccugcag

SEQ ID NO: 347431 - RNA, 19 nt, Artificial Sequence
  Description of Artificial Sequence: Synthetic oligonucleotide
auuugguggaugacgucga

SEQ ID NO: 347432 - RNA, 19 nt, Artificial Sequence
  Description of Artificial Sequence: Synthetic oligonucleotide
agacaggguucccaagaau

SEQ ID NO: 347433 - RNA, 19 nt, Artificial Sequence
  Description of Artificial Sequence: Synthetic oligonucleotide
caagcgcuacugagcacag

SEQ ID NO: 347434 - RNA, 19 nt, Artificial Sequence
  Description of Artificial Sequence: Synthetic oligonucleotide
ugaaguccagccggcaaau

SEQ ID NO: 347435 - RNA, 19 nt, Artificial Sequence
  Description of Artificial Sequence: Synthetic oligonucleotide
ugacgucgaacgucaaguu

SEQ ID NO: 347436 - RNA, 19 nt, Artificial Sequence
  Description of Artificial Sequence: Synthetic oligonucleotide
cuacugugucaagucauuc

SEQ ID NO: 347437 - RNA, 19 nt, Artificial Sequence
  Description of Artificial Sequence: Synthetic oligonucleotide
ugccaguuuauggcucaag

SEQ ID NO: 347438 - RNA, 19 nt, Artificial Sequence
  Description of Artificial Sequence: Synthetic oligonucleotide
ugcgccgcucaaugaagga

SEQ ID NO: 347439 - RNA, 19 nt, Artificial Sequence
  Description of Artificial Sequence: Synthetic oligonucleotide
cauaacguguaaacaugua

SEQ ID NO: 347440 - RNA, 19 nt, Artificial Sequence
  Description of Artificial Sequence: Synthetic oligonucleotide
gcugccguuaccugccugc

SEQ ID NO: 347441 - RNA, 19 nt, Artificial Sequence
  Description of Artificial Sequence: Synthetic oligonucleotide
aggucagucuagacguguc

SEQ ID NO: 347442 - RNA, 19 nt, Artificial Sequence
  Description of Artificial Sequence: Synthetic oligonucleotide
gccaguuuauggcucaaga

SEQ ID NO: 347443 - RNA, 19 nt, Artificial Sequence
  Description of Artificial Sequence: Synthetic oligonucleotide
ggcuaacuccuuuaaagua

SEQ ID NO: 347444 - RNA, 19 nt, Artificial Sequence
  Description of Artificial Sequence: Synthetic oligonucleotide
gcuacaacccauccccaac

SEQ ID NO: 347445 - RNA, 19 nt, Artificial Sequence
  Description of Artificial Sequence: Synthetic oligonucleotide
uauucauggucagggcuuu

SEQ ID NO: 347446 - RNA, 19 nt, Artificial Sequence
  Description of Artificial Sequence: Synthetic oligonucleotide
gacuacgaauaggucgaac

SEQ ID NO: 347447 - RNA, 19 nt, Artificial Sequence
  Description of Artificial Sequence: Synthetic oligonucleotide
agagucauauauacaugua

SEQ ID NO: 347448 - RNA, 19 nt, Artificial Sequence
  Description of Artificial Sequence: Synthetic oligonucleotide
gagguugaacguacauuuc

SEQ ID NO: 347449 - RNA, 19 nt, Artificial Sequence
  Description of Artificial Sequence: Synthetic oligonucleotide
acacuccauguguccgagg

SEQ ID NO: 347450 - RNA, 19 nt, Artificial Sequence
  Description of Artificial Sequence: Synthetic oligonucleotide
caacagaagucuucauaaa

SEQ ID NO: 347451 - RNA, 19 nt, Artificial Sequence
  Description of Artificial Sequence: Synthetic oligonucleotide
uugucugcguggugcugca

SEQ ID NO: 347452 - RNA, 19 nt, Artificial Sequence
  Description of Artificial Sequence: Synthetic oligonucleotide
auguguccgaggucaggga

SEQ ID NO: 347453 - RNA, 19 nt, Artificial Sequence
  Description of Artificial Sequence: Synthetic oligonucleotide
acauaggugagcacuccaa

SEQ ID NO: 347454 - RNA, 19 nt, Artificial Sequence
  Description of Artificial Sequence: Synthetic oligonucleotide
ugguguuugcgccgcucaa

SEQ ID NO: 347455 - RNA, 19 nt, Artificial Sequence
  Description of Artificial Sequence: Synthetic oligonucleotide
accguucaacaauuugauu

SEQ ID NO: 347456 - RNA, 19 nt, Artificial Sequence
  Description of Artificial Sequence: Synthetic oligonucleotide
cugcguggugcugcaagcg

SEQ ID NO: 347457 - RNA, 19 nt, Artificial Sequence
  Description of Artificial Sequence: Synthetic oligonucleotide
agugacucgggcacugggu

SEQ ID NO: 347458 - RNA, 19 nt, Artificial Sequence
  Description of Artificial Sequence: Synthetic oligonucleotide
guguaacaccagugguuug

SEQ ID NO: 347459 - RNA, 19 nt, Artificial Sequence
  Description of Artificial Sequence: Synthetic oligonucleotide
caaauuucacggagaguua

SEQ ID NO: 347460 - RNA, 19 nt, Artificial Sequence
  Description of Artificial Sequence: Synthetic oligonucleotide
ccauaaagcucacuggcga

SEQ ID NO: 347461 - RNA, 19 nt, Artificial Sequence
  Description of Artificial Sequence: Synthetic oligonucleotide
uuaugagguuacggauaca

SEQ ID NO: 347462 - RNA, 19 nt, Artificial Sequence
  Description of Artificial Sequence: Synthetic oligonucleotide
aggcauguguuuccuugaa

SEQ ID NO: 347463 - RNA, 19 nt, Artificial Sequence
  Description of Artificial Sequence: Synthetic oligonucleotide
guuuauggcucaagaccca

SEQ ID NO: 347464 - RNA, 19 nt, Artificial Sequence
  Description of Artificial Sequence: Synthetic oligonucleotide
agggacgcuuggccggguc

SEQ ID NO: 347465 - RNA, 19 nt, Artificial Sequence
  Description of Artificial Sequence: Synthetic oligonucleotide
cuacgaauaggucgaacau

SEQ ID NO: 347466 - RNA, 19 nt, Artificial Sequence
  Description of Artificial Sequence: Synthetic oligonucleotide
gucagucuagacgugucaa

SEQ ID NO: 347467 - RNA, 19 nt, Artificial Sequence
  Description of Artificial Sequence: Synthetic oligonucleotide
gaacuucaagauaggucaa

SEQ ID NO: 347468 - RNA, 19 nt, Artificial Sequence
  Description of Artificial Sequence: Synthetic oligonucleotide
cacgccagcgccagcucug

SEQ ID NO: 347469 - RNA, 19 nt, Artificial Sequence
  Description of Artificial Sequence: Synthetic oligonucleotide
ggugagcacuccaacacuc

SEQ ID NO: 347470 - RNA, 19 nt, Artificial Sequence
  Description of Artificial Sequence: Synthetic oligonucleotide
cccaacauacacagaacca

SEQ ID NO: 347471 - RNA, 19 nt, Artificial Sequence
  Description of Artificial Sequence: Synthetic oligonucleotide
gaaguccagccggcaaaug

SEQ ID NO: 347472 - RNA, 19 nt, Artificial Sequence
  Description of Artificial Sequence: Synthetic oligonucleotide
uacgcagaugaggcagcug

SEQ ID NO: 347473 - RNA, 19 nt, Artificial Sequence
  Description of Artificial Sequence: Synthetic oligonucleotide
cugguguuugcgccgcuca

SEQ ID NO: 347474 - RNA, 19 nt, Artificial Sequence
  Description of Artificial Sequence: Synthetic oligonucleotide
ggucagucuagacguguca

SEQ ID NO: 347475 - RNA, 19 nt, Artificial Sequence
  Description of Artificial Sequence: Synthetic oligonucleotide
gaguguaacugaagguccu

SEQ ID NO: 347476 - RNA, 19 nt, Artificial Sequence
  Description of Artificial Sequence: Synthetic oligonucleotide
uccgagcccaagcgcuacu

SEQ ID NO: 347477 - RNA, 19 nt, Artificial Sequence
  Description of Artificial Sequence: Synthetic oligonucleotide
ccuugcagaguguaacuga

SEQ ID NO: 347478 - RNA, 19 nt, Artificial Sequence
  Description of Artificial Sequence: Synthetic oligonucleotide
gcccaagcgcuacugagca

SEQ ID NO: 347479 - RNA, 19 nt, Artificial Sequence
  Description of Artificial Sequence: Synthetic oligonucleotide
cucacuuggaaugcaauuu

SEQ ID NO: 347480 - RNA, 19 nt, Artificial Sequence
  Description of Artificial Sequence: Synthetic oligonucleotide
gugaaacagcgaugcgauc

SEQ ID NO: 347481 - RNA, 19 nt, Artificial Sequence
  Description of Artificial Sequence: Synthetic oligonucleotide
gucgaacgucaaguuauuc

SEQ ID NO: 347482 - RNA, 19 nt, Artificial Sequence
  Description of Artificial Sequence: Synthetic oligonucleotide
ggucgaacaucauucuggu

SEQ ID NO: 347483 - RNA, 19 nt, Artificial Sequence
  Description of Artificial Sequence: Synthetic oligonucleotide
acgccagcgccagcucugc

SEQ ID NO: 347484 - RNA, 19 nt, Artificial Sequence
  Description of Artificial Sequence: Synthetic oligonucleotide
agccggucacuuaguuugg

SEQ ID NO: 347485 - RNA, 19 nt, Artificial Sequence
  Description of Artificial Sequence: Synthetic oligonucleotide
agcgauugucaagauccua

SEQ ID NO: 347486 - RNA, 19 nt, Artificial Sequence
  Description of Artificial Sequence: Synthetic oligonucleotide
gacugagguugaacguaca

SEQ ID NO: 347487 - RNA, 19 nt, Artificial Sequence
  Description of Artificial Sequence: Synthetic oligonucleotide
ggacuucccacgccagcgc

SEQ ID NO: 347488 - RNA, 19 nt, Artificial Sequence
  Description of Artificial Sequence: Synthetic oligonucleotide
agcgugccagaaacccaac

SEQ ID NO: 347489 - RNA, 19 nt, Artificial Sequence
  Description of Artificial Sequence: Synthetic oligonucleotide
gaggucagucuagacgugu

SEQ ID NO: 347490 - RNA, 19 nt, Artificial Sequence
  Description of Artificial Sequence: Synthetic oligonucleotide
guccagccggcaaauguuc

SEQ ID NO: 347491 - RNA, 19 nt, Artificial Sequence
  Description of Artificial Sequence: Synthetic oligonucleotide
ugacuacgaauaggucgaa

SEQ ID NO: 347492 - RNA, 19 nt, Artificial Sequence
  Description of Artificial Sequence: Synthetic oligonucleotide
ccaagcgcuacugagcaca

SEQ ID NO: 347493 - RNA, 19 nt, Artificial Sequence
  Description of Artificial Sequence: Synthetic oligonucleotide
gaugaacagcaggcagcca

SEQ ID NO: 347494 - RNA, 19 nt, Artificial Sequence
  Description of Artificial Sequence: Synthetic oligonucleotide
gucaaggacgcccgugccu

SEQ ID NO: 347495 - RNA, 19 nt, Artificial Sequence
  Description of Artificial Sequence: Synthetic oligonucleotide
gggacgcuuggccgggucc

SEQ ID NO: 347496 - RNA, 19 nt, Artificial Sequence
  Description of Artificial Sequence: Synthetic oligonucleotide
ccaccuggcgagucuuucc

SEQ ID NO: 347497 - RNA, 19 nt, Artificial Sequence
  Description of Artificial Sequence: Synthetic oligonucleotide
gaaugcaauuucacacgau

SEQ ID NO: 347498 - RNA, 19 nt, Artificial Sequence
  Description of Artificial Sequence: Synthetic oligonucleotide
ccguuaccugccugcagcc

SEQ ID NO: 347499 - RNA, 19 nt, Artificial Sequence
  Description of Artificial Sequence: Synthetic oligonucleotide
ccuauuauccaguuuuauu

SEQ ID NO: 347500 - RNA, 19 nt, Artificial Sequence
  Description of Artificial Sequence: Synthetic oligonucleotide
gcgccgcucaaugaaggag

SEQ ID NO: 347501 - RNA, 19 nt, Artificial Sequence
  Description of Artificial Sequence: Synthetic oligonucleotide
ccccagcgcagcuuguagc

SEQ ID NO: 347502 - RNA, 19 nt, Artificial Sequence
  Description of Artificial Sequence: Synthetic oligonucleotide
gcuacugagcacagcucac

SEQ ID NO: 347503 - RNA, 19 nt, Artificial Sequence
  Description of Artificial Sequence: Synthetic oligonucleotide
acgugucaaggacgcccgu

SEQ ID NO: 347504 - RNA, 19 nt, Artificial Sequence
  Description of Artificial Sequence: Synthetic oligonucleotide
cguacgcagaugaggcagc

SEQ ID NO: 347505 - RNA, 19 nt, Artificial Sequence
  Description of Artificial Sequence: Synthetic oligonucleotide
cccuugcagaguguaacug

SEQ ID NO: 347506 - RNA, 19 nt, Artificial Sequence
  Description of Artificial Sequence: Synthetic oligonucleotide
cugagguugaacguacauu

SEQ ID NO: 347507 - RNA, 19 nt, Artificial Sequence
  Description of Artificial Sequence: Synthetic oligonucleotide
cuccgagcccaagcgcuac

SEQ ID NO: 347508 - RNA, 19 nt, Artificial Sequence
  Description of Artificial Sequence: Synthetic oligonucleotide
ggucaaacucuaggcagaa

SEQ ID NO: 347509 - RNA, 19 nt, Artificial Sequence
  Description of Artificial Sequence: Synthetic oligonucleotide
cgaacgucaaguuauucau

SEQ ID NO: 347510 - RNA, 19 nt, Artificial Sequence
  Description of Artificial Sequence: Synthetic oligonucleotide
gguuacggauacacaucca

SEQ ID NO: 347511 - RNA, 19 nt, Artificial Sequence
  Description of Artificial Sequence: Synthetic oligonucleotide
ccgaggucagggagacagg

SEQ ID NO: 347512 - RNA, 19 nt, Artificial Sequence
  Description of Artificial Sequence: Synthetic oligonucleotide
gcuuugucugcguggugcu

SEQ ID NO: 347513 - RNA, 19 nt, Artificial Sequence
  Description of Artificial Sequence: Synthetic oligonucleotide
cagcgauugucaagauccu

SEQ ID NO: 347514 - RNA, 19 nt, Artificial Sequence
  Description of Artificial Sequence: Synthetic oligonucleotide
ugucugcguggugcugcaa

SEQ ID NO: 347515 - RNA, 19 nt, Artificial Sequence
  Description of Artificial Sequence: Synthetic oligonucleotide
gacgcuuggccggguccuc

SEQ ID NO: 347516 - RNA, 19 nt, Artificial Sequence
  Description of Artificial Sequence: Synthetic oligonucleotide
guacgcagaugaggcagcu

SEQ ID NO: 347517 - RNA, 19 nt, Artificial Sequence
  Description of Artificial Sequence: Synthetic oligonucleotide
caggguucccaagaaugau

SEQ ID NO: 347518 - RNA, 19 nt, Artificial Sequence
  Description of Artificial Sequence: Synthetic oligonucleotide
ggccaguacuuaauuggcu

SEQ ID NO: 347519 - RNA, 19 nt, Artificial Sequence
  Description of Artificial Sequence: Synthetic oligonucleotide
gcccuugcagaguguaacu

SEQ ID NO: 347520 - RNA, 19 nt, Artificial Sequence
  Description of Artificial Sequence: Synthetic oligonucleotide
cgugucaaggacgcccgug

SEQ ID NO: 347521 - RNA, 19 nt, Artificial Sequence
  Description of Artificial Sequence: Synthetic oligonucleotide
cgauugucaagauccuacu

SEQ ID NO: 347522 - RNA, 19 nt, Artificial Sequence
  Description of Artificial Sequence: Synthetic oligonucleotide
ggacgcccgugccuuugca

SEQ ID NO: 347523 - RNA, 19 nt, Artificial Sequence
  Description of Artificial Sequence: Synthetic oligonucleotide
gguguuugcgccgcucaau

SEQ ID NO: 347524 - RNA, 19 nt, Artificial Sequence
  Description of Artificial Sequence: Synthetic oligonucleotide
gcgcuacugagcacagcuc

SEQ ID NO: 347525 - RNA, 19 nt, Artificial Sequence
  Description of Artificial Sequence: Synthetic oligonucleotide
gggcuacaacccaucccca

SEQ ID NO: 347526 - RNA, 19 nt, Artificial Sequence
  Description of Artificial Sequence: Synthetic oligonucleotide
gcgaugcgaucucugcccu

SEQ ID NO: 347527 - RNA, 19 nt, Artificial Sequence
  Description of Artificial Sequence: Synthetic oligonucleotide
gcguggugcugcaagcgcu

SEQ ID NO: 347528 - RNA, 19 nt, Artificial Sequence
  Description of Artificial Sequence: Synthetic oligonucleotide
ggacgcuuggccggguccu

SEQ ID NO: 347529 - RNA, 19 nt, Artificial Sequence
  Description of Artificial Sequence: Synthetic oligonucleotide
gccuggcaagacguacgca

SEQ ID NO: 347530 - RNA, 19 nt, Artificial Sequence
  Description of Artificial Sequence: Synthetic oligonucleotide
gccgcucaaugaaggaggu

SEQ ID NO: 347531 - RNA, 19 nt, Artificial Sequence
  Description of Artificial Sequence: Synthetic oligonucleotide
cucugcccuugcagagugu

SEQ ID NO: 347532 - RNA, 19 nt, Artificial Sequence
  Description of Artificial Sequence: Synthetic oligonucleotide
ggaugacgucgaacgucaa

SEQ ID NO: 347533 - RNA, 19 nt, Artificial Sequence
  Description of Artificial Sequence: Synthetic oligonucleotide
ccagccggucacuuaguuu

SEQ ID NO: 347534 - RNA, 19 nt, Artificial Sequence
  Description of Artificial Sequence: Synthetic oligonucleotide
caccgcugagcagcacaua

SEQ ID NO: 347535 - RNA, 19 nt, Artificial Sequence
  Description of Artificial Sequence: Synthetic oligonucleotide
gcuccgagcccaagcgcua

SEQ ID NO: 347536 - RNA, 19 nt, Artificial Sequence
  Description of Artificial Sequence: Synthetic oligonucleotide
ccggucacuuaguuugguu

SEQ ID NO: 347537 - RNA, 19 nt, Artificial Sequence
  Description of Artificial Sequence: Synthetic oligonucleotide
gccggucacuuaguuuggu

SEQ ID NO: 347538 - RNA, 19 nt, Artificial Sequence
  Description of Artificial Sequence: Synthetic oligonucleotide
cagcugccguuaccugccu

SEQ ID NO: 347539 - RNA, 19 nt, Artificial Sequence
  Description of Artificial Sequence: Synthetic oligonucleotide
ccacgccagcgccagcucu

SEQ ID NO: 347540 - RNA, 19 nt, Artificial Sequence
  Description of Artificial Sequence: Synthetic oligonucleotide
cgucgaacgucaaguuauu

SEQ ID NO: 347541 - RNA, 19 nt, Artificial Sequence
  Description of Artificial Sequence: Synthetic oligonucleotide
aguuuuaaggaguaaaucg

SEQ ID NO: 347542 - RNA, 19 nt, Artificial Sequence
  Description of Artificial Sequence: Synthetic oligonucleotide
augacaaagacgcaacucc

SEQ ID NO: 347543 - RNA, 19 nt, Artificial Sequence
  Description of Artificial Sequence: Synthetic oligonucleotide
aagauagccacugaguaac

SEQ ID NO: 347544 - RNA, 19 nt, Artificial Sequence
  Description of Artificial Sequence: Synthetic oligonucleotide
ugaugagugaagcuguucg

SEQ ID NO: 347545 - RNA, 19 nt, Artificial Sequence
  Description of Artificial Sequence: Synthetic oligonucleotide
uuuaccauggugaacuugc

SEQ ID NO: 347546 - RNA, 19 nt, Artificial Sequence
  Description of Artificial Sequence: Synthetic oligonucleotide
uuauagaauauuugauacg

SEQ ID NO: 347547 - RNA, 19 nt, Artificial Sequence
  Description of Artificial Sequence: Synthetic oligonucleotide
uguguuugcaccauuuagc

SEQ ID NO: 347548 - RNA, 19 nt, Artificial Sequence
  Description of Artificial Sequence: Synthetic oligonucleotide
uagaauauuugauacggug

SEQ ID NO: 347549 - RNA, 19 nt, Artificial Sequence
  Description of Artificial Sequence: Synthetic oligonucleotide
aguauggacagacacuuuc

SEQ ID NO: 347550 - RNA, 19 nt, Artificial Sequence
  Description of Artificial Sequence: Synthetic oligonucleotide
ucaacuaaguaacgguagg

SEQ ID NO: 347551 - RNA, 19 nt, Artificial Sequence
  Description of Artificial Sequence: Synthetic oligonucleotide
gaauauuugauacggugug

SEQ ID NO: 347552 - RNA, 19 nt, Artificial Sequence
  Description of Artificial Sequence: Synthetic oligonucleotide
gaugauccaagacuuaggc

SEQ ID NO: 347553 - RNA, 19 nt, Artificial Sequence
  Description of Artificial Sequence: Synthetic oligonucleotide
uuaucggaaacgaagggcu

SEQ ID NO: 347554 - RNA, 19 nt, Artificial Sequence
  Description of Artificial Sequence: Synthetic oligonucleotide
uuaagauagccacugagua

SEQ ID NO: 347555 - RNA, 19 nt, Artificial Sequence
  Description of Artificial Sequence: Synthetic oligonucleotide
uuauugauuacuguagucu

SEQ ID NO: 347556 - RNA, 19 nt, Artificial Sequence
  Description of Artificial Sequence: Synthetic oligonucleotide
aacuauaccagcaauugca

SEQ ID NO: 347557 - RNA, 19 nt, Artificial Sequence
  Description of Artificial Sequence: Synthetic oligonucleotide
ugcaauaaaccucaaacuu

SEQ ID NO: 347558 - RNA, 19 nt, Artificial Sequence
  Description of Artificial Sequence: Synthetic oligonucleotide
aaggagauaaccauguacu

SEQ ID NO: 347559 - RNA, 19 nt, Artificial Sequence
  Description of Artificial Sequence: Synthetic oligonucleotide
gagaccgccucuuaaaucc

SEQ ID NO: 347560 - RNA, 19 nt, Artificial Sequence
  Description of Artificial Sequence: Synthetic oligonucleotide
acaaagauugacauccggc

SEQ ID NO: 347561 - RNA, 19 nt, Artificial Sequence
  Description of Artificial Sequence: Synthetic oligonucleotide
uggaaaaugacucgaggac

SEQ ID NO: 347562 - RNA, 19 nt, Artificial Sequence
  Description of Artificial Sequence: Synthetic oligonucleotide
gaugcuuacgacaaagagc

SEQ ID NO: 347563 - RNA, 19 nt, Artificial Sequence
  Description of Artificial Sequence: Synthetic oligonucleotide
uucacugaugcuuacgaca

SEQ ID NO: 347564 - RNA, 19 nt, Artificial Sequence
  Description of Artificial Sequence: Synthetic oligonucleotide
aaagacgcaacuccaggug

SEQ ID NO: 347565 - RNA, 19 nt, Artificial Sequence
  Description of Artificial Sequence: Synthetic oligonucleotide
ucaacuauaccagcaauug

SEQ ID NO: 347566 - RNA, 19 nt, Artificial Sequence
  Description of Artificial Sequence: Synthetic oligonucleotide
uggcuuauagaauauuuga

SEQ ID NO: 347567 - RNA, 19 nt, Artificial Sequence
  Description of Artificial Sequence: Synthetic oligonucleotide
uuuaucggaaacgaagggc

SEQ ID NO: 347568 - RNA, 19 nt, Artificial Sequence
  Description of Artificial Sequence: Synthetic oligonucleotide
uguuauugauuacuguagu

SEQ ID NO: 347569 - RNA, 19 nt, Artificial Sequence
  Description of Artificial Sequence: Synthetic oligonucleotide
ugaugauccaagacuuagg

SEQ ID NO: 347570 - RNA, 19 nt, Artificial Sequence
  Description of Artificial Sequence: Synthetic oligonucleotide
gauagggaaggccuguugc

SEQ ID NO: 347571 - RNA, 19 nt, Artificial Sequence
  Description of Artificial Sequence: Synthetic oligonucleotide
ucuucacugaugcuuacga

SEQ ID NO: 347572 - RNA, 19 nt, Artificial Sequence
  Description of Artificial Sequence: Synthetic oligonucleotide
augcuuacgacaaagagca

SEQ ID NO: 347573 - RNA, 19 nt, Artificial Sequence
  Description of Artificial Sequence: Synthetic oligonucleotide
uugcaauaaaccucaaacu

SEQ ID NO: 347574 - RNA, 19 nt, Artificial Sequence
  Description of Artificial Sequence: Synthetic oligonucleotide
ugaggcuaguuuuaaggag

SEQ ID NO: 347575 - RNA, 19 nt, Artificial Sequence
  Description of Artificial Sequence: Synthetic oligonucleotide
auaaaccucaaacuuggga

SEQ ID NO: 347576 - RNA, 19 nt, Artificial Sequence
  Description of Artificial Sequence: Synthetic oligonucleotide
aguggacggaccuugauga

SEQ ID NO: 347577 - RNA, 19 nt, Artificial Sequence
  Description of Artificial Sequence: Synthetic oligonucleotide
uuguuguucaggacgauuc

SEQ ID NO: 347578 - RNA, 19 nt, Artificial Sequence
  Description of Artificial Sequence: Synthetic oligonucleotide
gagccuguuaaacuguugc

SEQ ID NO: 347579 - RNA, 19 nt, Artificial Sequence
  Description of Artificial Sequence: Synthetic oligonucleotide
ugcacagucgaucucugug

SEQ ID NO: 347580 - RNA, 19 nt, Artificial Sequence
  Description of Artificial Sequence: Synthetic oligonucleotide
gauuccuuuccccacgccc

SEQ ID NO: 347581 - RNA, 19 nt, Artificial Sequence
  Description of Artificial Sequence: Synthetic oligonucleotide
cacaaucuggguaguaugg

SEQ ID NO: 347582 - RNA, 19 nt, Artificial Sequence
  Description of Artificial Sequence: Synthetic oligonucleotide
auguacucuaguucagacg

SEQ ID NO: 347583 - RNA, 19 nt, Artificial Sequence
  Description of Artificial Sequence: Synthetic oligonucleotide
uacgguguguuauugauua

SEQ ID NO: 347584 - RNA, 19 nt, Artificial Sequence
  Description of Artificial Sequence: Synthetic oligonucleotide
caaaccgcagcacuguucc

SEQ ID NO: 347585 - RNA, 19 nt, Artificial Sequence
  Description of Artificial Sequence: Synthetic oligonucleotide
aaagauugacauccggcaa

SEQ ID NO: 347586 - RNA, 19 nt, Artificial Sequence
  Description of Artificial Sequence: Synthetic oligonucleotide
ugaacugaacucuccggag

SEQ ID NO: 347587 - RNA, 19 nt, Artificial Sequence
  Description of Artificial Sequence: Synthetic oligonucleotide
gauuacuguagucuuaucu

SEQ ID NO: 347588 - RNA, 19 nt, Artificial Sequence
  Description of Artificial Sequence: Synthetic oligonucleotide
auugcaccugaccaguguc

SEQ ID NO: 347589 - RNA, 19 nt, Artificial Sequence
  Description of Artificial Sequence: Synthetic oligonucleotide
cagucgaucucugugauag

SEQ ID NO: 347590 - RNA, 19 nt, Artificial Sequence
  Description of Artificial Sequence: Synthetic oligonucleotide
ugggucaacuaaguaacgg

SEQ ID NO: 347591 - RNA, 19 nt, Artificial Sequence
  Description of Artificial Sequence: Synthetic oligonucleotide
ugacaaagacgcaacucca

SEQ ID NO: 347592 - RNA, 19 nt, Artificial Sequence
  Description of Artificial Sequence: Synthetic oligonucleotide
uuaacaguggccggcgggg

SEQ ID NO: 347593 - RNA, 19 nt, Artificial Sequence
  Description of Artificial Sequence: Synthetic oligonucleotide
aggagauaaccauguacuc

SEQ ID NO: 347594 - RNA, 19 nt, Artificial Sequence
  Description of Artificial Sequence: Synthetic oligonucleotide
aauugcaccugaccagugu

SEQ ID NO: 347595 - RNA, 19 nt, Artificial Sequence
  Description of Artificial Sequence: Synthetic oligonucleotide
caaagauugacauccggca

SEQ ID NO: 347596 - RNA, 19 nt, Artificial Sequence
  Description of Artificial Sequence: Synthetic oligonucleotide
agaauauuugauacggugu

SEQ ID NO: 347597 - RNA, 19 nt, Artificial Sequence
  Description of Artificial Sequence: Synthetic oligonucleotide
uaaggaguaaaucgcuuau

SEQ ID NO: 347598 - RNA, 19 nt, Artificial Sequence
  Description of Artificial Sequence: Synthetic oligonucleotide
acugaugcuuacgacaaag

SEQ ID NO: 347599 - RNA, 19 nt, Artificial Sequence
  Description of Artificial Sequence: Synthetic oligonucleotide
gagauaaccauguacucua

SEQ ID NO: 347600 - RNA, 19 nt, Artificial Sequence
  Description of Artificial Sequence: Synthetic oligonucleotide
aauauuugauacggugugu

SEQ ID NO: 347601 - RNA, 19 nt, Artificial Sequence
  Description of Artificial Sequence: Synthetic oligonucleotide
cucuaguucagacggcacg

SEQ ID NO: 347602 - RNA, 19 nt, Artificial Sequence
  Description of Artificial Sequence: Synthetic oligonucleotide
cugaccguaguagagaaug

SEQ ID NO: 347603 - RNA, 19 nt, Artificial Sequence
  Description of Artificial Sequence: Synthetic oligonucleotide
ugaccguaguagagaaugg

SEQ ID NO: 347604 - RNA, 19 nt, Artificial Sequence
  Description of Artificial Sequence: Synthetic oligonucleotide
uuuuaacaguggccggcgg

SEQ ID NO: 347605 - RNA, 19 nt, Artificial Sequence
  Description of Artificial Sequence: Synthetic oligonucleotide
uaagauagccacugaguaa

SEQ ID NO: 347606 - RNA, 19 nt, Artificial Sequence
  Description of Artificial Sequence: Synthetic oligonucleotide
ucgcuuaugcugaggauga

SEQ ID NO: 347607 - RNA, 19 nt, Artificial Sequence
  Description of Artificial Sequence: Synthetic oligonucleotide
guuauugauuacuguaguc

SEQ ID NO: 347608 - RNA, 19 nt, Artificial Sequence
  Description of Artificial Sequence: Synthetic oligonucleotide
uugacgagcaucgcuacug

SEQ ID NO: 347609 - RNA, 19 nt, Artificial Sequence
  Description of Artificial Sequence: Synthetic oligonucleotide
aucgcuuaugcugaggaug

SEQ ID NO: 347610 - RNA, 19 nt, Artificial Sequence
  Description of Artificial Sequence: Synthetic oligonucleotide
augggauugcagcuugggg

SEQ ID NO: 347611 - RNA, 19 nt, Artificial Sequence
  Description of Artificial Sequence: Synthetic oligonucleotide
ugacgagcaucgcuacugg

SEQ ID NO: 347612 - RNA, 19 nt, Artificial Sequence
  Description of Artificial Sequence: Synthetic oligonucleotide
acgagcaucgcuacugggc

SEQ ID NO: 347613 - RNA, 19 nt, Artificial Sequence
  Description of Artificial Sequence: Synthetic oligonucleotide
gugaugauccaagacuuag

SEQ ID NO: 347614 - RNA, 19 nt, Artificial Sequence
  Description of Artificial Sequence: Synthetic oligonucleotide
aacuaaguaacgguagguu

SEQ ID NO: 347615 - RNA, 19 nt, Artificial Sequence
  Description of Artificial Sequence: Synthetic oligonucleotide
cugaggaugagugaugauc

SEQ ID NO: 347616 - RNA, 19 nt, Artificial Sequence
  Description of Artificial Sequence: Synthetic oligonucleotide
gaguggacggaccuugaug

SEQ ID NO: 347617 - RNA, 19 nt, Artificial Sequence
  Description of Artificial Sequence: Synthetic oligonucleotide
acucgugguugcuugagcu

SEQ ID NO: 347618 - RNA, 19 nt, Artificial Sequence
  Description of Artificial Sequence: Synthetic oligonucleotide
ucuaguucagacggcacgu

SEQ ID NO: 347619 - RNA, 19 nt, Artificial Sequence
  Description of Artificial Sequence: Synthetic oligonucleotide
caaucuggguaguauggac

SEQ ID NO: 347620 - RNA, 19 nt, Artificial Sequence
  Description of Artificial Sequence: Synthetic oligonucleotide
guuuuaacaguggccggcg

SEQ ID NO: 347621 - RNA, 19 nt, Artificial Sequence
  Description of Artificial Sequence: Synthetic oligonucleotide
agucgacucgggugcaagc

SEQ ID NO: 347622 - RNA, 19 nt, Artificial Sequence
  Description of Artificial Sequence: Synthetic oligonucleotide
cuggcgacagacaacugug

SEQ ID NO: 347623 - RNA, 19 nt, Artificial Sequence
  Description of Artificial Sequence: Synthetic oligonucleotide
auuugauacgguguguuau

SEQ ID NO: 347624 - RNA, 19 nt, Artificial Sequence
  Description of Artificial Sequence: Synthetic oligonucleotide
cuguaugccgugcugcacc

SEQ ID NO: 347625 - RNA, 19 nt, Artificial Sequence
  Description of Artificial Sequence: Synthetic oligonucleotide
aacaggagucgacucgggu

SEQ ID NO: 347626 - RNA, 19 nt, Artificial Sequence
  Description of Artificial Sequence: Synthetic oligonucleotide
uggggcaguuuccauggag

SEQ ID NO: 347627 - RNA, 19 nt, Artificial Sequence
  Description of Artificial Sequence: Synthetic oligonucleotide
caggagucgacucgggugc

SEQ ID NO: 347628 - RNA, 19 nt, Artificial Sequence
  Description of Artificial Sequence: Synthetic oligonucleotide
ggugaacugaacucuccgg

SEQ ID NO: 347629 - RNA, 19 nt, Artificial Sequence
  Description of Artificial Sequence: Synthetic oligonucleotide
cugaauaucuguaugccgu

SEQ ID NO: 347630 - RNA, 19 nt, Artificial Sequence
  Description of Artificial Sequence: Synthetic oligonucleotide
uaugccgagggacgggaca

SEQ ID NO: 347631 - RNA, 19 nt, Artificial Sequence
  Description of Artificial Sequence: Synthetic oligonucleotide
ugaacucuccggaggaauc

SEQ ID NO: 347632 - RNA, 19 nt, Artificial Sequence
  Description of Artificial Sequence: Synthetic oligonucleotide
gcaauaaaccucaaacuug

SEQ ID NO: 347633 - RNA, 19 nt, Artificial Sequence
  Description of Artificial Sequence: Synthetic oligonucleotide
gugaacugaacucuccgga

SEQ ID NO: 347634 - RNA, 19 nt, Artificial Sequence
  Description of Artificial Sequence: Synthetic oligonucleotide
aucgcuacugggcaccugu

SEQ ID NO: 347635 - RNA, 19 nt, Artificial Sequence
  Description of Artificial Sequence: Synthetic oligonucleotide
acccauaaucuggugguac

SEQ ID NO: 347636 - RNA, 19 nt, Artificial Sequence
  Description of Artificial Sequence: Synthetic oligonucleotide
aaaaugacucgaggacuug

SEQ ID NO: 347637 - RNA, 19 nt, Artificial Sequence
  Description of Artificial Sequence: Synthetic oligonucleotide
guauccaccuggccaaacc

SEQ ID NO: 347638 - RNA, 19 nt, Artificial Sequence
  Description of Artificial Sequence: Synthetic oligonucleotide
uauuugauacgguguguua

SEQ ID NO: 347639 - RNA, 19 nt, Artificial Sequence
  Description of Artificial Sequence: Synthetic oligonucleotide
ucgugguugcuugagcugc

SEQ ID NO: 347640 - RNA, 19 nt, Artificial Sequence
  Description of Artificial Sequence: Synthetic oligonucleotide
agcugucggcaccuggcgc

SEQ ID NO: 347641 - RNA, 19 nt, Artificial Sequence
  Description of Artificial Sequence: Synthetic oligonucleotide
uugacacuaaggcuuccau

SEQ ID NO: 347642 - RNA, 19 nt, Artificial Sequence
  Description of Artificial Sequence: Synthetic oligonucleotide
auggugaacugaacucucc

SEQ ID NO: 347643 - RNA, 19 nt, Artificial Sequence
  Description of Artificial Sequence: Synthetic oligonucleotide
cuggcgcaggagaaaagcc

SEQ ID NO: 347644 - RNA, 19 nt, Artificial Sequence
  Description of Artificial Sequence: Synthetic oligonucleotide
uuuagcuuccaggcugacc

SEQ ID NO: 347645 - RNA, 19 nt, Artificial Sequence
  Description of Artificial Sequence: Synthetic oligonucleotide
cuucaauacagauguguaa

SEQ ID NO: 347646 - RNA, 19 nt, Artificial Sequence
  Description of Artificial Sequence: Synthetic oligonucleotide
gacgagcaucgcuacuggg

SEQ ID NO: 347647 - RNA, 19 nt, Artificial Sequence
  Description of Artificial Sequence: Synthetic oligonucleotide
cacuaaggcuuccaucgag

SEQ ID NO: 347648 - RNA, 19 nt, Artificial Sequence
  Description of Artificial Sequence: Synthetic oligonucleotide
cuucacugaugcuuacgac

SEQ ID NO: 347649 - RNA, 19 nt, Artificial Sequence
  Description of Artificial Sequence: Synthetic oligonucleotide
auauuugauacgguguguu

SEQ ID NO: 347650 - RNA, 19 nt, Artificial Sequence
  Description of Artificial Sequence: Synthetic oligonucleotide
uacucgugguugcuugagc

SEQ ID NO: 347651 - RNA, 19 nt, Artificial Sequence
  Description of Artificial Sequence: Synthetic oligonucleotide
agccuguuaaacuguugcu

SEQ ID NO: 347652 - RNA, 19 nt, Artificial Sequence
  Description of Artificial Sequence: Synthetic oligonucleotide
uggagacucgccagcagaa

SEQ ID NO: 347653 - RNA, 19 nt, Artificial Sequence
  Description of Artificial Sequence: Synthetic oligonucleotide
ggauuucauagcaggaugc

SEQ ID NO: 347654 - RNA, 19 nt, Artificial Sequence
  Description of Artificial Sequence: Synthetic oligonucleotide
uguaugccgugcugcacca

SEQ ID NO: 347655 - RNA, 19 nt, Artificial Sequence
  Description of Artificial Sequence: Synthetic oligonucleotide
gucacucacaaagauugac

SEQ ID NO: 347656 - RNA, 19 nt, Artificial Sequence
  Description of Artificial Sequence: Synthetic oligonucleotide
guggggauuugugggagcg

SEQ ID NO: 347657 - RNA, 19 nt, Artificial Sequence
  Description of Artificial Sequence: Synthetic oligonucleotide
gguguguuauugauuacug

SEQ ID NO: 347658 - RNA, 19 nt, Artificial Sequence
  Description of Artificial Sequence: Synthetic oligonucleotide
uuaccauggugaacuugcu

SEQ ID NO: 347659 - RNA, 19 nt, Artificial Sequence
  Description of Artificial Sequence: Synthetic oligonucleotide
cuuugaaggagauaaccau

SEQ ID NO: 347660 - RNA, 19 nt, Artificial Sequence
  Description of Artificial Sequence: Synthetic oligonucleotide
uccgcugaguggacggacc

SEQ ID NO: 347661 - RNA, 19 nt, Artificial Sequence
  Description of Artificial Sequence: Synthetic oligonucleotide
gguuguuuugcuugguguc

SEQ ID NO: 347662 - RNA, 19 nt, Artificial Sequence
  Description of Artificial Sequence: Synthetic oligonucleotide
uggacggaccuugaugaug

SEQ ID NO: 347663 - RNA, 19 nt, Artificial Sequence
  Description of Artificial Sequence: Synthetic oligonucleotide
cagacuuugcuuuccgaca

SEQ ID NO: 347664 - RNA, 19 nt, Artificial Sequence
  Description of Artificial Sequence: Synthetic oligonucleotide
acgguguguuauugauuac

SEQ ID NO: 347665 - RNA, 19 nt, Artificial Sequence
  Description of Artificial Sequence: Synthetic oligonucleotide
agugaagcuguucgacccu

SEQ ID NO: 347666 - RNA, 19 nt, Artificial Sequence
  Description of Artificial Sequence: Synthetic oligonucleotide
uggguaguauggacagaca

SEQ ID NO: 347667 - RNA, 19 nt, Artificial Sequence
  Description of Artificial Sequence: Synthetic oligonucleotide
auagaauauuugauacggu

SEQ ID NO: 347668 - RNA, 19 nt, Artificial Sequence
  Description of Artificial Sequence: Synthetic oligonucleotide
ugacgcuaacacacacggc

SEQ ID NO: 347669 - RNA, 19 nt, Artificial Sequence
  Description of Artificial Sequence: Synthetic oligonucleotide
ugggucucagauguuuucu

SEQ ID NO: 347670 - RNA, 19 nt, Artificial Sequence
  Description of Artificial Sequence: Synthetic oligonucleotide
ugccgagcugguccaaaug

SEQ ID NO: 347671 - RNA, 19 nt, Artificial Sequence
  Description of Artificial Sequence: Synthetic oligonucleotide
uaaggcuuccaucgagguu

SEQ ID NO: 347672 - RNA, 19 nt, Artificial Sequence
  Description of Artificial Sequence: Synthetic oligonucleotide
gaggcuaguuuuaaggagu

SEQ ID NO: 347673 - RNA, 19 nt, Artificial Sequence
  Description of Artificial Sequence: Synthetic oligonucleotide
agucgaucucugugauagg

SEQ ID NO: 347674 - RNA, 19 nt, Artificial Sequence
  Description of Artificial Sequence: Synthetic oligonucleotide
cuuuaccauggugaacuug

SEQ ID NO: 347675 - RNA, 19 nt, Artificial Sequence
  Description of Artificial Sequence: Synthetic oligonucleotide
caucgcuccauuccacgac

SEQ ID NO: 347676 - RNA, 19 nt, Artificial Sequence
  Description of Artificial Sequence: Synthetic oligonucleotide
aggagaccgccucuuaaau

SEQ ID NO: 347677 - RNA, 19 nt, Artificial Sequence
  Description of Artificial Sequence: Synthetic oligonucleotide
agguuugacagugacgcua

SEQ ID NO: 347678 - RNA, 19 nt, Artificial Sequence
  Description of Artificial Sequence: Synthetic oligonucleotide
cucgugguugcuugagcug

SEQ ID NO: 347679 - RNA, 19 nt, Artificial Sequence
  Description of Artificial Sequence: Synthetic oligonucleotide
ggcaccgucugggacaugg

SEQ ID NO: 347680 - RNA, 19 nt, Artificial Sequence
  Description of Artificial Sequence: Synthetic oligonucleotide
cuaaguaacgguagguuuu

SEQ ID NO: 347681 - RNA, 19 nt, Artificial Sequence
  Description of Artificial Sequence: Synthetic oligonucleotide
gagacucgccagcagaaua

SEQ ID NO: 347682 - RNA, 19 nt, Artificial Sequence
  Description of Artificial Sequence: Synthetic oligonucleotide
gcuaguuuuaaggaguaaa

SEQ ID NO: 347683 - RNA, 19 nt, Artificial Sequence
  Description of Artificial Sequence: Synthetic oligonucleotide
ugaguggacggaccuugau

SEQ ID NO: 347684 - RNA, 19 nt, Artificial Sequence
  Description of Artificial Sequence: Synthetic oligonucleotide
gauaaccauguacucuagu

SEQ ID NO: 347685 - RNA, 19 nt, Artificial Sequence
  Description of Artificial Sequence: Synthetic oligonucleotide
ugagcgaaaggugggucaa

SEQ ID NO: 347686 - RNA, 19 nt, Artificial Sequence
  Description of Artificial Sequence: Synthetic oligonucleotide
aucggaaacgaagggcugu

SEQ ID NO: 347687 - RNA, 19 nt, Artificial Sequence
  Description of Artificial Sequence: Synthetic oligonucleotide
aaugaagaccugagcgaaa

SEQ ID NO: 347688 - RNA, 19 nt, Artificial Sequence
  Description of Artificial Sequence: Synthetic oligonucleotide
cagugacgcuaacacacac

SEQ ID NO: 347689 - RNA, 19 nt, Artificial Sequence
  Description of Artificial Sequence: Synthetic oligonucleotide
cugagcgaaagguggguca

SEQ ID NO: 347690 - RNA, 19 nt, Artificial Sequence
  Description of Artificial Sequence: Synthetic oligonucleotide
gucgacucgggugcaagcc

SEQ ID NO: 347691 - RNA, 19 nt, Artificial Sequence
  Description of Artificial Sequence: Synthetic oligonucleotide
cucgcaggugcuuugggaa

SEQ ID NO: 347692 - RNA, 19 nt, Artificial Sequence
  Description of Artificial Sequence: Synthetic oligonucleotide
ggacgggacaaaccagggg

SEQ ID NO: 347693 - RNA, 19 nt, Artificial Sequence
  Description of Artificial Sequence: Synthetic oligonucleotide
agauaaccauguacucuag

SEQ ID NO: 347694 - RNA, 19 nt, Artificial Sequence
  Description of Artificial Sequence: Synthetic oligonucleotide
cuuacgacaaagagcacuu

SEQ ID NO: 347695 - RNA, 19 nt, Artificial Sequence
  Description of Artificial Sequence: Synthetic oligonucleotide
cacucacaaagauugacau

SEQ ID NO: 347696 - RNA, 19 nt, Artificial Sequence
  Description of Artificial Sequence: Synthetic oligonucleotide
agcucauggugaacugaac

SEQ ID NO: 347697 - RNA, 19 nt, Artificial Sequence
  Description of Artificial Sequence: Synthetic oligonucleotide
gaaaaugacucgaggacuu

SEQ ID NO: 347698 - RNA, 19 nt, Artificial Sequence
  Description of Artificial Sequence: Synthetic oligonucleotide
aaaccgcagcacuguucca

SEQ ID NO: 347699 - RNA, 19 nt, Artificial Sequence
  Description of Artificial Sequence: Synthetic oligonucleotide
auuuagcuuccaggcugac

SEQ ID NO: 347700 - RNA, 19 nt, Artificial Sequence
  Description of Artificial Sequence: Synthetic oligonucleotide
gagucgacucgggugcaag

SEQ ID NO: 347701 - RNA, 19 nt, Artificial Sequence
  Description of Artificial Sequence: Synthetic oligonucleotide
ccgccucuuaaauccaugg

SEQ ID NO: 347702 - RNA, 19 nt, Artificial Sequence
  Description of Artificial Sequence: Synthetic oligonucleotide
caaagacgcaacuccaggu

SEQ ID NO: 347703 - RNA, 19 nt, Artificial Sequence
  Description of Artificial Sequence: Synthetic oligonucleotide
cuacucgugguugcuugag

SEQ ID NO: 347704 - RNA, 19 nt, Artificial Sequence
  Description of Artificial Sequence: Synthetic oligonucleotide
cacgcccgagaugacaccc

SEQ ID NO: 347705 - RNA, 19 nt, Artificial Sequence
  Description of Artificial Sequence: Synthetic oligonucleotide
gguaacccauaaucuggug

SEQ ID NO: 347706 - RNA, 19 nt, Artificial Sequence
  Description of Artificial Sequence: Synthetic oligonucleotide
aguucagacggcacguuuu

SEQ ID NO: 347707 - RNA, 19 nt, Artificial Sequence
  Description of Artificial Sequence: Synthetic oligonucleotide
ggcgaagauacagguuugg

SEQ ID NO: 347708 - RNA, 19 nt, Artificial Sequence
  Description of Artificial Sequence: Synthetic oligonucleotide
agacucgccagcagaauau

SEQ ID NO: 347709 - RNA, 19 nt, Artificial Sequence
  Description of Artificial Sequence: Synthetic oligonucleotide
agcaagcauccuucaugcu

SEQ ID NO: 347710 - RNA, 19 nt, Artificial Sequence
  Description of Artificial Sequence: Synthetic oligonucleotide
ggaaaaugacucgaggacu

SEQ ID NO: 347711 - RNA, 19 nt, Artificial Sequence
  Description of Artificial Sequence: Synthetic oligonucleotide
ggaguaaaucgcuuaugcu

SEQ ID NO: 347712 - RNA, 19 nt, Artificial Sequence
  Description of Artificial Sequence: Synthetic oligonucleotide
gcacagucgaucucuguga

SEQ ID NO: 347713 - RNA, 19 nt, Artificial Sequence
  Description of Artificial Sequence: Synthetic oligonucleotide
ggacggaccuugaugauga

SEQ ID NO: 347714 - RNA, 19 nt, Artificial Sequence
  Description of Artificial Sequence: Synthetic oligonucleotide
auaugccgagggacgggac

SEQ ID NO: 347715 - RNA, 19 nt, Artificial Sequence
  Description of Artificial Sequence: Synthetic oligonucleotide
gggucaacuaaguaacggu

SEQ ID NO: 347716 - RNA, 19 nt, Artificial Sequence
  Description of Artificial Sequence: Synthetic oligonucleotide
ggagaccgccucuuaaauc

SEQ ID NO: 347717 - RNA, 19 nt, Artificial Sequence
  Description of Artificial Sequence: Synthetic oligonucleotide
acagugacgcuaacacaca

SEQ ID NO: 347718 - RNA, 19 nt, Artificial Sequence
  Description of Artificial Sequence: Synthetic oligonucleotide
ggagauaaccauguacucu

SEQ ID NO: 347719 - RNA, 19 nt, Artificial Sequence
  Description of Artificial Sequence: Synthetic oligonucleotide
gccgucucuauccucaaaa

SEQ ID NO: 347720 - RNA, 19 nt, Artificial Sequence
  Description of Artificial Sequence: Synthetic oligonucleotide
guacucuaguucagacggc

SEQ ID NO: 347721 - RNA, 19 nt, Artificial Sequence
  Description of Artificial Sequence: Synthetic oligonucleotide
acggaccuugaugaugagu

SEQ ID NO: 347722 - RNA, 19 nt, Artificial Sequence
  Description of Artificial Sequence: Synthetic oligonucleotide
ccuggcgcaggagaaaagc

SEQ ID NO: 347723 - RNA, 19 nt, Artificial Sequence
  Description of Artificial Sequence: Synthetic oligonucleotide
ggucaacuaaguaacggua

SEQ ID NO: 347724 - RNA, 19 nt, Artificial Sequence
  Description of Artificial Sequence: Synthetic oligonucleotide
gaccguaguagagaauggu

SEQ ID NO: 347725 - RNA, 19 nt, Artificial Sequence
  Description of Artificial Sequence: Synthetic oligonucleotide
aaguaacgguagguuuuaa

SEQ ID NO: 347726 - RNA, 19 nt, Artificial Sequence
  Description of Artificial Sequence: Synthetic oligonucleotide
ucggaaacgaagggcugua

SEQ ID NO: 347727 - RNA, 19 nt, Artificial Sequence
  Description of Artificial Sequence: Synthetic oligonucleotide
cguugauucaggagcuggc

SEQ ID NO: 347728 - RNA, 19 nt, Artificial Sequence
  Description of Artificial Sequence: Synthetic oligonucleotide
acgcccgagaugacacccc

SEQ ID NO: 347729 - RNA, 19 nt, Artificial Sequence
  Description of Artificial Sequence: Synthetic oligonucleotide
cuugggaauuucucucaua

SEQ ID NO: 347730 - RNA, 19 nt, Artificial Sequence
  Description of Artificial Sequence: Synthetic oligonucleotide
gcgaagauacagguuuggc

SEQ ID NO: 347731 - RNA, 19 nt, Artificial Sequence
  Description of Artificial Sequence: Synthetic oligonucleotide
guccugugcacagucgauc

SEQ ID NO: 347732 - RNA, 19 nt, Artificial Sequence
  Description of Artificial Sequence: Synthetic oligonucleotide
gcuuacgacaaagagcacu

SEQ ID NO: 347733 - RNA, 19 nt, Artificial Sequence
  Description of Artificial Sequence: Synthetic oligonucleotide
ggugaaacaggagucgacu

SEQ ID NO: 347734 - RNA, 19 nt, Artificial Sequence
  Description of Artificial Sequence: Synthetic oligonucleotide
agcacacuggaaggauaug

SEQ ID NO: 347735 - RNA, 19 nt, Artificial Sequence
  Description of Artificial Sequence: Synthetic oligonucleotide
gaacucuccggaggaaucu

SEQ ID NO: 347736 - RNA, 19 nt, Artificial Sequence
  Description of Artificial Sequence: Synthetic oligonucleotide
agacuuaggccaggcacuu

SEQ ID NO: 347737 - RNA, 19 nt, Artificial Sequence
  Description of Artificial Sequence: Synthetic oligonucleotide
acggauggccccacaucag

SEQ ID NO: 347738 - RNA, 19 nt, Artificial Sequence
  Description of Artificial Sequence: Synthetic oligonucleotide
gacucgggugcaagccgcc

SEQ ID NO: 347739 - RNA, 19 nt, Artificial Sequence
  Description of Artificial Sequence: Synthetic oligonucleotide
gguuugacagugacgcuaa

SEQ ID NO: 347740 - RNA, 19 nt, Artificial Sequence
  Description of Artificial Sequence: Synthetic oligonucleotide
guucgacccuuguacugaa

SEQ ID NO: 347741 - RNA, 19 nt, Artificial Sequence
  Description of Artificial Sequence: Synthetic oligonucleotide
cgagcugguccaaaugaug

SEQ ID NO: 347742 - RNA, 19 nt, Artificial Sequence
  Description of Artificial Sequence: Synthetic oligonucleotide
gcuggcgacagacaacugu

SEQ ID NO: 347743 - RNA, 19 nt, Artificial Sequence
  Description of Artificial Sequence: Synthetic oligonucleotide
aggcuaguuuuaaggagua

SEQ ID NO: 347744 - RNA, 19 nt, Artificial Sequence
  Description of Artificial Sequence: Synthetic oligonucleotide
gagguuugacagugacgcu

SEQ ID NO: 347745 - RNA, 19 nt, Artificial Sequence
  Description of Artificial Sequence: Synthetic oligonucleotide
gcaucgcuccauuccacga

SEQ ID NO: 347746 - RNA, 19 nt, Artificial Sequence
  Description of Artificial Sequence: Synthetic oligonucleotide
cugaguggacggaccuuga

SEQ ID NO: 347747 - RNA, 19 nt, Artificial Sequence
  Description of Artificial Sequence: Synthetic oligonucleotide
acacggcuugugaggaugu

SEQ ID NO: 347748 - RNA, 19 nt, Artificial Sequence
  Description of Artificial Sequence: Synthetic oligonucleotide
gacaccccuuggccuuaug

SEQ ID NO: 347749 - RNA, 19 nt, Artificial Sequence
  Description of Artificial Sequence: Synthetic oligonucleotide
ucgcuacugggcaccuguu

SEQ ID NO: 347750 - RNA, 19 nt, Artificial Sequence
  Description of Artificial Sequence: Synthetic oligonucleotide
agaccgccucuuaaaucca

SEQ ID NO: 347751 - RNA, 19 nt, Artificial Sequence
  Description of Artificial Sequence: Synthetic oligonucleotide
cagaucugacgacaccagu

SEQ ID NO: 347752 - RNA, 19 nt, Artificial Sequence
  Description of Artificial Sequence: Synthetic oligonucleotide
gcuacucgugguugcuuga

SEQ ID NO: 347753 - RNA, 19 nt, Artificial Sequence
  Description of Artificial Sequence: Synthetic oligonucleotide
gcuguucgacccuuguacu

SEQ ID NO: 347754 - RNA, 19 nt, Artificial Sequence
  Description of Artificial Sequence: Synthetic oligonucleotide
cuugacgagcaucgcuacu

SEQ ID NO: 347755 - RNA, 19 nt, Artificial Sequence
  Description of Artificial Sequence: Synthetic oligonucleotide
ccaggcugaccguaguaga

SEQ ID NO: 347756 - RNA, 19 nt, Artificial Sequence
  Description of Artificial Sequence: Synthetic oligonucleotide
cucucccgccgucucuauc

SEQ ID NO: 347757 - RNA, 19 nt, Artificial Sequence
  Description of Artificial Sequence: Synthetic oligonucleotide
acgagccuguuaaacuguu

SEQ ID NO: 347758 - RNA, 19 nt, Artificial Sequence
  Description of Artificial Sequence: Synthetic oligonucleotide
cacggcuugugaggaugug

SEQ ID NO: 347759 - RNA, 19 nt, Artificial Sequence
  Description of Artificial Sequence: Synthetic oligonucleotide
acucuccggaggaaucuuu

SEQ ID NO: 347760 - RNA, 19 nt, Artificial Sequence
  Description of Artificial Sequence: Synthetic oligonucleotide
cccgccgucucuauccuca

SEQ ID NO: 347761 - RNA, 19 nt, Artificial Sequence
  Description of Artificial Sequence: Synthetic oligonucleotide
gcuuaugcugaggaugagu

SEQ ID NO: 347762 - RNA, 19 nt, Artificial Sequence
  Description of Artificial Sequence: Synthetic oligonucleotide
aggagucgacucgggugca

SEQ ID NO: 347763 - RNA, 19 nt, Artificial Sequence
  Description of Artificial Sequence: Synthetic oligonucleotide
gcugaaaguggcaccgucu

SEQ ID NO: 347764 - RNA, 19 nt, Artificial Sequence
  Description of Artificial Sequence: Synthetic oligonucleotide
gauuguuguucaggacgau

SEQ ID NO: 347765 - RNA, 19 nt, Artificial Sequence
  Description of Artificial Sequence: Synthetic oligonucleotide
gcgcugcuuugacacuaag

SEQ ID NO: 347766 - RNA, 19 nt, Artificial Sequence
  Description of Artificial Sequence: Synthetic oligonucleotide
ggguaacccauaaucuggu

SEQ ID NO: 347767 - RNA, 19 nt, Artificial Sequence
  Description of Artificial Sequence: Synthetic oligonucleotide
cucuccggaggaaucuuuu

SEQ ID NO: 347768 - RNA, 19 nt, Artificial Sequence
  Description of Artificial Sequence: Synthetic oligonucleotide
caucgcuacugggcaccug

SEQ ID NO: 347769 - RNA, 19 nt, Artificial Sequence
  Description of Artificial Sequence: Synthetic oligonucleotide
gauacagguuuggcucuuu

SEQ ID NO: 347770 - RNA, 19 nt, Artificial Sequence
  Description of Artificial Sequence: Synthetic oligonucleotide
ccacgcccgagaugacacc

SEQ ID NO: 347771 - RNA, 19 nt, Artificial Sequence
  Description of Artificial Sequence: Synthetic oligonucleotide
ggcuaguuuuaaggaguaa

SEQ ID NO: 347772 - RNA, 19 nt, Artificial Sequence
  Description of Artificial Sequence: Synthetic oligonucleotide
gacucgccagcagaauauu

SEQ ID NO: 347773 - RNA, 19 nt, Artificial Sequence
  Description of Artificial Sequence: Synthetic oligonucleotide
ugacaccccuuggccuuau

SEQ ID NO: 347774 - RNA, 19 nt, Artificial Sequence
  Description of Artificial Sequence: Synthetic oligonucleotide
guggacggaccuugaugau

SEQ ID NO: 347775 - RNA, 19 nt, Artificial Sequence
  Description of Artificial Sequence: Synthetic oligonucleotide
ccgcagcacuguuccacug

SEQ ID NO: 347776 - RNA, 19 nt, Artificial Sequence
  Description of Artificial Sequence: Synthetic oligonucleotide
gcuuuccgacaggcugggg

SEQ ID NO: 347777 - RNA, 19 nt, Artificial Sequence
  Description of Artificial Sequence: Synthetic oligonucleotide
gugaagcuguucgacccuu

SEQ ID NO: 347778 - RNA, 19 nt, Artificial Sequence
  Description of Artificial Sequence: Synthetic oligonucleotide
ccauggugaacuugcuaau

SEQ ID NO: 347779 - RNA, 19 nt, Artificial Sequence
  Description of Artificial Sequence: Synthetic oligonucleotide
cggaaacgaagggcuguag

SEQ ID NO: 347780 - RNA, 19 nt, Artificial Sequence
  Description of Artificial Sequence: Synthetic oligonucleotide
cuaguucagacggcacguu

SEQ ID NO: 347781 - RNA, 19 nt, Artificial Sequence
  Description of Artificial Sequence: Synthetic oligonucleotide
cucuauccucugugucccu

SEQ ID NO: 347782 - RNA, 19 nt, Artificial Sequence
  Description of Artificial Sequence: Synthetic oligonucleotide
caggcuacucgugguugcu

SEQ ID NO: 347783 - RNA, 19 nt, Artificial Sequence
  Description of Artificial Sequence: Synthetic oligonucleotide
cgguguguuauugauuacu

SEQ ID NO: 347784 - RNA, 19 nt, Artificial Sequence
  Description of Artificial Sequence: Synthetic oligonucleotide
gcagucuggguaacccaua

SEQ ID NO: 347785 - RNA, 19 nt, Artificial Sequence
  Description of Artificial Sequence: Synthetic oligonucleotide
gcugaggaugagugaugau

SEQ ID NO: 347786 - RNA, 19 nt, Artificial Sequence
  Description of Artificial Sequence: Synthetic oligonucleotide
ccgagcugguccaaaugau

SEQ ID NO: 347787 - RNA, 19 nt, Artificial Sequence
  Description of Artificial Sequence: Synthetic oligonucleotide
ggagucgacucgggugcaa

SEQ ID NO: 347788 - RNA, 19 nt, Artificial Sequence
  Description of Artificial Sequence: Synthetic oligonucleotide
gccaagcaauucaaauguu

SEQ ID NO: 347789 - RNA, 19 nt, Artificial Sequence
  Description of Artificial Sequence: Synthetic oligonucleotide
ggcaccuguuguggaaaau

SEQ ID NO: 347790 - RNA, 19 nt, Artificial Sequence
  Description of Artificial Sequence: Synthetic oligonucleotide
gcugaccguaguagagaau

SEQ ID NO: 347791 - RNA, 19 nt, Artificial Sequence
  Description of Artificial Sequence: Synthetic oligonucleotide
ccgcugaguggacggaccu

SEQ ID NO: 347792 - RNA, 19 nt, Artificial Sequence
  Description of Artificial Sequence: Synthetic oligonucleotide
cgccgucucuauccucaaa

SEQ ID NO: 347793 - RNA, 19 nt, Artificial Sequence
  Description of Artificial Sequence: Synthetic oligonucleotide
aguuaaauuggucacaucc

SEQ ID NO: 347794 - RNA, 19 nt, Artificial Sequence
  Description of Artificial Sequence: Synthetic oligonucleotide
uuaaauuggucacaucccg

SEQ ID NO: 347795 - RNA, 19 nt, Artificial Sequence
  Description of Artificial Sequence: Synthetic oligonucleotide
aaauuggucacaucccggg

SEQ ID NO: 347796 - RNA, 19 nt, Artificial Sequence
  Description of Artificial Sequence: Synthetic oligonucleotide
gaugucuagaguaucaggg

SEQ ID NO: 347797 - RNA, 19 nt, Artificial Sequence
  Description of Artificial Sequence: Synthetic oligonucleotide
ucaauacucagcaggaccc

SEQ ID NO: 347798 - RNA, 19 nt, Artificial Sequence
  Description of Artificial Sequence: Synthetic oligonucleotide
ucgugcuucggcauaaugg

SEQ ID NO: 347799 - RNA, 19 nt, Artificial Sequence
  Description of Artificial Sequence: Synthetic oligonucleotide
gauaucagugguuacccag

SEQ ID NO: 347800 - RNA, 19 nt, Artificial Sequence
  Description of Artificial Sequence: Synthetic oligonucleotide
ucucuuuauugaaagaccu

SEQ ID NO: 347801 - RNA, 19 nt, Artificial Sequence
  Description of Artificial Sequence: Synthetic oligonucleotide
uauugaaagaccugaacau

SEQ ID NO: 347802 - RNA, 19 nt, Artificial Sequence
  Description of Artificial Sequence: Synthetic oligonucleotide
uaaauuggucacaucccgg

SEQ ID NO: 347803 - RNA, 19 nt, Artificial Sequence
  Description of Artificial Sequence: Synthetic oligonucleotide
cauaauggugauuuuguug

SEQ ID NO: 347804 - RNA, 19 nt, Artificial Sequence
  Description of Artificial Sequence: Synthetic oligonucleotide
ucagugguuacccagucac

SEQ ID NO: 347805 - RNA, 19 nt, Artificial Sequence
  Description of Artificial Sequence: Synthetic oligonucleotide
aaccauaauguggagugcg

SEQ ID NO: 347806 - RNA, 19 nt, Artificial Sequence
  Description of Artificial Sequence: Synthetic oligonucleotide
uucaacucaugcaugguga

SEQ ID NO: 347807 - RNA, 19 nt, Artificial Sequence
  Description of Artificial Sequence: Synthetic oligonucleotide
ucuaccgaugucuagagua

SEQ ID NO: 347808 - RNA, 19 nt, Artificial Sequence
  Description of Artificial Sequence: Synthetic oligonucleotide
accuuucucagacucuacc

SEQ ID NO: 347809 - RNA, 19 nt, Artificial Sequence
  Description of Artificial Sequence: Synthetic oligonucleotide
ugguccguguuguacaugg

SEQ ID NO: 347810 - RNA, 19 nt, Artificial Sequence
  Description of Artificial Sequence: Synthetic oligonucleotide
gagaaugacaaaguucucc

SEQ ID NO: 347811 - RNA, 19 nt, Artificial Sequence
  Description of Artificial Sequence: Synthetic oligonucleotide
aauuggucacaucccgggg

SEQ ID NO: 347812 - RNA, 19 nt, Artificial Sequence
  Description of Artificial Sequence: Synthetic oligonucleotide
caauguagccuuuguaggg

SEQ ID NO: 347813 - RNA, 19 nt, Artificial Sequence
  Description of Artificial Sequence: Synthetic oligonucleotide
gccaccaacaguuaaauug

SEQ ID NO: 347814 - RNA, 19 nt, Artificial Sequence
  Description of Artificial Sequence: Synthetic oligonucleotide
auaggugucucgcaccuuc

SEQ ID NO: 347815 - RNA, 19 nt, Artificial Sequence
  Description of Artificial Sequence: Synthetic oligonucleotide
uggagugcggcuaccaucc

SEQ ID NO: 347816 - RNA, 19 nt, Artificial Sequence
  Description of Artificial Sequence: Synthetic oligonucleotide
aaccauacauggguguucg

SEQ ID NO: 347817 - RNA, 19 nt, Artificial Sequence
  Description of Artificial Sequence: Synthetic oligonucleotide
uguacuguggauugaccug

SEQ ID NO: 347818 - RNA, 19 nt, Artificial Sequence
  Description of Artificial Sequence: Synthetic oligonucleotide
ugagcucauuaucucuucg

SEQ ID NO: 347819 - RNA, 19 nt, Artificial Sequence
  Description of Artificial Sequence: Synthetic oligonucleotide
gacaaaguucuccucgacc

SEQ ID NO: 347820 - RNA, 19 nt, Artificial Sequence
  Description of Artificial Sequence: Synthetic oligonucleotide
gaaagaccugaacaugaag

SEQ ID NO: 347821 - RNA, 19 nt, Artificial Sequence
  Description of Artificial Sequence: Synthetic oligonucleotide
uuguacuguggauugaccu

SEQ ID NO: 347822 - RNA, 19 nt, Artificial Sequence
  Description of Artificial Sequence: Synthetic oligonucleotide
agugccgugccuugcaaac

SEQ ID NO: 347823 - RNA, 19 nt, Artificial Sequence
  Description of Artificial Sequence: Synthetic oligonucleotide
aaggcauacucguauuccu

SEQ ID NO: 347824 - RNA, 19 nt, Artificial Sequence
  Description of Artificial Sequence: Synthetic oligonucleotide
ucuagccgcacgaugacac

SEQ ID NO: 347825 - RNA, 19 nt, Artificial Sequence
  Description of Artificial Sequence: Synthetic oligonucleotide
ugcucaugccaccaccugg

SEQ ID NO: 347826 - RNA, 19 nt, Artificial Sequence
  Description of Artificial Sequence: Synthetic oligonucleotide
uccguguuguacauggcug

SEQ ID NO: 347827 - RNA, 19 nt, Artificial Sequence
  Description of Artificial Sequence: Synthetic oligonucleotide
guuaaauuggucacauccc

SEQ ID NO: 347828 - RNA, 19 nt, Artificial Sequence
  Description of Artificial Sequence: Synthetic oligonucleotide
ucgucaaaggcauacucgu

SEQ ID NO: 347829 - RNA, 19 nt, Artificial Sequence
  Description of Artificial Sequence: Synthetic oligonucleotide
acacggagcacaugccucc

SEQ ID NO: 347830 - RNA, 19 nt, Artificial Sequence
  Description of Artificial Sequence: Synthetic oligonucleotide
ucgacccgcacaaugagac

SEQ ID NO: 347831 - RNA, 19 nt, Artificial Sequence
  Description of Artificial Sequence: Synthetic oligonucleotide
uggguuguagccuccagga

SEQ ID NO: 347832 - RNA, 19 nt, Artificial Sequence
  Description of Artificial Sequence: Synthetic oligonucleotide
uugcaaguugaugagcucc

SEQ ID NO: 347833 - RNA, 19 nt, Artificial Sequence
  Description of Artificial Sequence: Synthetic oligonucleotide
gaagcggagguucaggauc

SEQ ID NO: 347834 - RNA, 19 nt, Artificial Sequence
  Description of Artificial Sequence: Synthetic oligonucleotide
aggucaugccaccuggacg

SEQ ID NO: 347835 - RNA, 19 nt, Artificial Sequence
  Description of Artificial Sequence: Synthetic oligonucleotide
cauacauggguguccgucc

SEQ ID NO: 347836 - RNA, 19 nt, Artificial Sequence
  Description of Artificial Sequence: Synthetic oligonucleotide
aguugaugagcuccccuuc

SEQ ID NO: 347837 - RNA, 19 nt, Artificial Sequence
  Description of Artificial Sequence: Synthetic oligonucleotide
auagguggaggucaugcca

SEQ ID NO: 347838 - RNA, 19 nt, Artificial Sequence
  Description of Artificial Sequence: Synthetic oligonucleotide
uucggcauaauggugauuu

SEQ ID NO: 347839 - RNA, 19 nt, Artificial Sequence
  Description of Artificial Sequence: Synthetic oligonucleotide
aaauuaugcucccguuccu

SEQ ID NO: 347840 - RNA, 19 nt, Artificial Sequence
  Description of Artificial Sequence: Synthetic oligonucleotide
aucucuucgcccucgaccu

SEQ ID NO: 347841 - RNA, 19 nt, Artificial Sequence
  Description of Artificial Sequence: Synthetic oligonucleotide
caugggugaagguguaggg

SEQ ID NO: 347842 - RNA, 19 nt, Artificial Sequence
  Description of Artificial Sequence: Synthetic oligonucleotide
uaugagcucauuaucucuu

SEQ ID NO: 347843 - RNA, 19 nt, Artificial Sequence
  Description of Artificial Sequence: Synthetic oligonucleotide
ugcggcuaccaucaugcag

SEQ ID NO: 347844 - RNA, 19 nt, Artificial Sequence
  Description of Artificial Sequence: Synthetic oligonucleotide
cuucaacucaugcauggug

SEQ ID NO: 347845 - RNA, 19 nt, Artificial Sequence
  Description of Artificial Sequence: Synthetic oligonucleotide
ggucaugccaccuggacgc

SEQ ID NO: 347846 - RNA, 19 nt, Artificial Sequence
  Description of Artificial Sequence: Synthetic oligonucleotide
aacaaacaucccgccauuc

SEQ ID NO: 347847 - RNA, 19 nt, Artificial Sequence
  Description of Artificial Sequence: Synthetic oligonucleotide
ugauccgagggcucauagg

SEQ ID NO: 347848 - RNA, 19 nt, Artificial Sequence
  Description of Artificial Sequence: Synthetic oligonucleotide
gaaguacuuccgaaguucc

SEQ ID NO: 347849 - RNA, 19 nt, Artificial Sequence
  Description of Artificial Sequence: Synthetic oligonucleotide
ucacccucgaaucggccag

SEQ ID NO: 347850 - RNA, 19 nt, Artificial Sequence
  Description of Artificial Sequence: Synthetic oligonucleotide
gaguccaccguggugagcc

SEQ ID NO: 347851 - RNA, 19 nt, Artificial Sequence
  Description of Artificial Sequence: Synthetic oligonucleotide
gugggaaccuuucucagac

SEQ ID NO: 347852 - RNA, 19 nt, Artificial Sequence
  Description of Artificial Sequence: Synthetic oligonucleotide
cuaccaucaugcaggggcg

SEQ ID NO: 347853 - RNA, 19 nt, Artificial Sequence
  Description of Artificial Sequence: Synthetic oligonucleotide
aauguggagugcggcuacc

SEQ ID NO: 347854 - RNA, 19 nt, Artificial Sequence
  Description of Artificial Sequence: Synthetic oligonucleotide
agugguuacccagucacug

SEQ ID NO: 347855 - RNA, 19 nt, Artificial Sequence
  Description of Artificial Sequence: Synthetic oligonucleotide
acaaacaucccgccauucu

SEQ ID NO: 347856 - RNA, 19 nt, Artificial Sequence
  Description of Artificial Sequence: Synthetic oligonucleotide
uccguggcauccuucacca

SEQ ID NO: 347857 - RNA, 19 nt, Artificial Sequence
  Description of Artificial Sequence: Synthetic oligonucleotide
caaagcuccgauacagaug

SEQ ID NO: 347858 - RNA, 19 nt, Artificial Sequence
  Description of Artificial Sequence: Synthetic oligonucleotide
agcuccgauacagauggcg

SEQ ID NO: 347859 - RNA, 19 nt, Artificial Sequence
  Description of Artificial Sequence: Synthetic oligonucleotide
caucccgccauucucuacc

SEQ ID NO: 347860 - RNA, 19 nt, Artificial Sequence
  Description of Artificial Sequence: Synthetic oligonucleotide
agauaggugucucgcaccu

SEQ ID NO: 347861 - RNA, 19 nt, Artificial Sequence
  Description of Artificial Sequence: Synthetic oligonucleotide
uuacccagucacuggagcu

SEQ ID NO: 347862 - RNA, 19 nt, Artificial Sequence
  Description of Artificial Sequence: Synthetic oligonucleotide
ucugcggguuguacugugg

SEQ ID NO: 347863 - RNA, 19 nt, Artificial Sequence
  Description of Artificial Sequence: Synthetic oligonucleotide
uuucucagacucuaccgau

SEQ ID NO: 347864 - RNA, 19 nt, Artificial Sequence
  Description of Artificial Sequence: Synthetic oligonucleotide
uccucgacccgcacaauga

SEQ ID NO: 347865 - RNA, 19 nt, Artificial Sequence
  Description of Artificial Sequence: Synthetic oligonucleotide
gagauccgagaagagaaug

SEQ ID NO: 347866 - RNA, 19 nt, Artificial Sequence
  Description of Artificial Sequence: Synthetic oligonucleotide
gaugcccucaggcugaucu

SEQ ID NO: 347867 - RNA, 19 nt, Artificial Sequence
  Description of Artificial Sequence: Synthetic oligonucleotide
agcguagggagagaacugg

SEQ ID NO: 347868 - RNA, 19 nt, Artificial Sequence
  Description of Artificial Sequence: Synthetic oligonucleotide
uggccuaugagcucauuau

SEQ ID NO: 347869 - RNA, 19 nt, Artificial Sequence
  Description of Artificial Sequence: Synthetic oligonucleotide
aaacaucccgccauucucu

SEQ ID NO: 347870 - RNA, 19 nt, Artificial Sequence
  Description of Artificial Sequence: Synthetic oligonucleotide
cuccagaaucaucaccccg

SEQ ID NO: 347871 - RNA, 19 nt, Artificial Sequence
  Description of Artificial Sequence: Synthetic oligonucleotide
agagugcaguuccacucgg

SEQ ID NO: 347872 - RNA, 19 nt, Artificial Sequence
  Description of Artificial Sequence: Synthetic oligonucleotide
caaaguucuccucgacccg

SEQ ID NO: 347873 - RNA, 19 nt, Artificial Sequence
  Description of Artificial Sequence: Synthetic oligonucleotide
gugguuacccagucacugg

SEQ ID NO: 347874 - RNA, 19 nt, Artificial Sequence
  Description of Artificial Sequence: Synthetic oligonucleotide
uccgagggcucauaggagu

SEQ ID NO: 347875 - RNA, 19 nt, Artificial Sequence
  Description of Artificial Sequence: Synthetic oligonucleotide
gauacgcacagucuggccu

SEQ ID NO: 347876 - RNA, 19 nt, Artificial Sequence
  Description of Artificial Sequence: Synthetic oligonucleotide
uaauguggagugcggcuac

SEQ ID NO: 347877 - RNA, 19 nt, Artificial Sequence
  Description of Artificial Sequence: Synthetic oligonucleotide
ggcguguucggguuguugg

SEQ ID NO: 347878 - RNA, 19 nt, Artificial Sequence
  Description of Artificial Sequence: Synthetic oligonucleotide
cagauaggugucucgcacc

SEQ ID NO: 347879 - RNA, 19 nt, Artificial Sequence
  Description of Artificial Sequence: Synthetic oligonucleotide
cucgaaucggccagcaauc

SEQ ID NO: 347880 - RNA, 19 nt, Artificial Sequence
  Description of Artificial Sequence: Synthetic oligonucleotide
acaguuaaauuggucacau

SEQ ID NO: 347881 - RNA, 19 nt, Artificial Sequence
  Description of Artificial Sequence: Synthetic oligonucleotide
gcggaucucaccuucgcgg

SEQ ID NO: 347882 - RNA, 19 nt, Artificial Sequence
  Description of Artificial Sequence: Synthetic oligonucleotide
agagccauacauggguguc

SEQ ID NO: 347883 - RNA, 19 nt, Artificial Sequence
  Description of Artificial Sequence: Synthetic oligonucleotide
ugggcucgucgucaaaggc

SEQ ID NO: 347884 - RNA, 19 nt, Artificial Sequence
  Description of Artificial Sequence: Synthetic oligonucleotide
gauggcggaucucaccuuc

SEQ ID NO: 347885 - RNA, 19 nt, Artificial Sequence
  Description of Artificial Sequence: Synthetic oligonucleotide
uccucacccagaaucacuu

SEQ ID NO: 347886 - RNA, 19 nt, Artificial Sequence
  Description of Artificial Sequence: Synthetic oligonucleotide
uguuuggggauucgggguu

SEQ ID NO: 347887 - RNA, 19 nt, Artificial Sequence
  Description of Artificial Sequence: Synthetic oligonucleotide
ugccugacggucaccaccu

SEQ ID NO: 347888 - RNA, 19 nt, Artificial Sequence
  Description of Artificial Sequence: Synthetic oligonucleotide
uacuguggauugaccuggg

SEQ ID NO: 347889 - RNA, 19 nt, Artificial Sequence
  Description of Artificial Sequence: Synthetic oligonucleotide
accuucgcggccugagugg

SEQ ID NO: 347890 - RNA, 19 nt, Artificial Sequence
  Description of Artificial Sequence: Synthetic oligonucleotide
uccucaccaucaauacuca

SEQ ID NO: 347891 - RNA, 19 nt, Artificial Sequence
  Description of Artificial Sequence: Synthetic oligonucleotide
gugucugcggguuguacug

SEQ ID NO: 347892 - RNA, 19 nt, Artificial Sequence
  Description of Artificial Sequence: Synthetic oligonucleotide
ggcauacucguauuccucc

SEQ ID NO: 347893 - RNA, 19 nt, Artificial Sequence
  Description of Artificial Sequence: Synthetic oligonucleotide
uccagauaggugucucgca

SEQ ID NO: 347894 - RNA, 19 nt, Artificial Sequence
  Description of Artificial Sequence: Synthetic oligonucleotide
caugccgggccaagcaagg

SEQ ID NO: 347895 - RNA, 19 nt, Artificial Sequence
  Description of Artificial Sequence: Synthetic oligonucleotide
cucauuaucucuucgcccu

SEQ ID NO: 347896 - RNA, 19 nt, Artificial Sequence
  Description of Artificial Sequence: Synthetic oligonucleotide
cuccguggcauccuucacc

SEQ ID NO: 347897 - RNA, 19 nt, Artificial Sequence
  Description of Artificial Sequence: Synthetic oligonucleotide
uguucgggagccagagcca

SEQ ID NO: 347898 - RNA, 19 nt, Artificial Sequence
  Description of Artificial Sequence: Synthetic oligonucleotide
gagauacgcacagucuggc

SEQ ID NO: 347899 - RNA, 19 nt, Artificial Sequence
  Description of Artificial Sequence: Synthetic oligonucleotide
aagccaccaacaguuaaau

SEQ ID NO: 347900 - RNA, 19 nt, Artificial Sequence
  Description of Artificial Sequence: Synthetic oligonucleotide
uggguagccggguguuugg

SEQ ID NO: 347901 - RNA, 19 nt, Artificial Sequence
  Description of Artificial Sequence: Synthetic oligonucleotide
acucaugcauggugagauc

SEQ ID NO: 347902 - RNA, 19 nt, Artificial Sequence
  Description of Artificial Sequence: Synthetic oligonucleotide
cacagugcggggauccagc

SEQ ID NO: 347903 - RNA, 19 nt, Artificial Sequence
  Description of Artificial Sequence: Synthetic oligonucleotide
gguguccguccauaggugg

SEQ ID NO: 347904 - RNA, 19 nt, Artificial Sequence
  Description of Artificial Sequence: Synthetic oligonucleotide
gaggucaugccaccuggac

SEQ ID NO: 347905 - RNA, 19 nt, Artificial Sequence
  Description of Artificial Sequence: Synthetic oligonucleotide
cucgucgucaaaggcauac

SEQ ID NO: 347906 - RNA, 19 nt, Artificial Sequence
  Description of Artificial Sequence: Synthetic oligonucleotide
auaggagugaagccaccaa

SEQ ID NO: 347907 - RNA, 19 nt, Artificial Sequence
  Description of Artificial Sequence: Synthetic oligonucleotide
uggaaauuaugcucccguu

SEQ ID NO: 347908 - RNA, 19 nt, Artificial Sequence
  Description of Artificial Sequence: Synthetic oligonucleotide
accauaauguggagugcgg

SEQ ID NO: 347909 - RNA, 19 nt, Artificial Sequence
  Description of Artificial Sequence: Synthetic oligonucleotide
uguccguccauagguggag

SEQ ID NO: 347910 - RNA, 19 nt, Artificial Sequence
  Description of Artificial Sequence: Synthetic oligonucleotide
gcucauuaucucuucgccc

SEQ ID NO: 347911 - RNA, 19 nt, Artificial Sequence
  Description of Artificial Sequence: Synthetic oligonucleotide
uucgcccucgaccucugcu

SEQ ID NO: 347912 - RNA, 19 nt, Artificial Sequence
  Description of Artificial Sequence: Synthetic oligonucleotide
gaaccauaauguggagugc

SEQ ID NO: 347913 - RNA, 19 nt, Artificial Sequence
  Description of Artificial Sequence: Synthetic oligonucleotide
auacauggguguccgucca

SEQ ID NO: 347914 - RNA, 19 nt, Artificial Sequence
  Description of Artificial Sequence: Synthetic oligonucleotide
guuguucugaucugagucu

SEQ ID NO: 347915 - RNA, 19 nt, Artificial Sequence
  Description of Artificial Sequence: Synthetic oligonucleotide
aggagugcggcuaccauca

SEQ ID NO: 347916 - RNA, 19 nt, Artificial Sequence
  Description of Artificial Sequence: Synthetic oligonucleotide
gacuccguggcauccuuca

SEQ ID NO: 347917 - RNA, 19 nt, Artificial Sequence
  Description of Artificial Sequence: Synthetic oligonucleotide
aggagugaagccaccaaca

SEQ ID NO: 347918 - RNA, 19 nt, Artificial Sequence
  Description of Artificial Sequence: Synthetic oligonucleotide
ggagauacgcacagucugg

SEQ ID NO: 347919 - RNA, 19 nt, Artificial Sequence
  Description of Artificial Sequence: Synthetic oligonucleotide
agucuagggccacagcgaa

SEQ ID NO: 347920 - RNA, 19 nt, Artificial Sequence
  Description of Artificial Sequence: Synthetic oligonucleotide
auaucagugguuacccagu

SEQ ID NO: 347921 - RNA, 19 nt, Artificial Sequence
  Description of Artificial Sequence: Synthetic oligonucleotide
cugauccgagggcucauag

SEQ ID NO: 347922 - RNA, 19 nt, Artificial Sequence
  Description of Artificial Sequence: Synthetic oligonucleotide
aucaugcaggggcgucugc

SEQ ID NO: 347923 - RNA, 19 nt, Artificial Sequence
  Description of Artificial Sequence: Synthetic oligonucleotide
ucccgugacacugcggaug

SEQ ID NO: 347924 - RNA, 19 nt, Artificial Sequence
  Description of Artificial Sequence: Synthetic oligonucleotide
ugcgaaccauaauguggag

SEQ ID NO: 347925 - RNA, 19 nt, Artificial Sequence
  Description of Artificial Sequence: Synthetic oligonucleotide
gagugcggcuaccaucaug

SEQ ID NO: 347926 - RNA, 19 nt, Artificial Sequence
  Description of Artificial Sequence: Synthetic oligonucleotide
ugucacccucgaaucggcc

SEQ ID NO: 347927 - RNA, 19 nt, Artificial Sequence
  Description of Artificial Sequence: Synthetic oligonucleotide
auaauguggagugcggcua

SEQ ID NO: 347928 - RNA, 19 nt, Artificial Sequence
  Description of Artificial Sequence: Synthetic oligonucleotide
gaaucggccagcaaucacu

SEQ ID NO: 347929 - RNA, 19 nt, Artificial Sequence
  Description of Artificial Sequence: Synthetic oligonucleotide
gucauuggacuguagccaa

SEQ ID NO: 347930 - RNA, 19 nt, Artificial Sequence
  Description of Artificial Sequence: Synthetic oligonucleotide
ucgcucuagccgcacgaug

SEQ ID NO: 347931 - RNA, 19 nt, Artificial Sequence
  Description of Artificial Sequence: Synthetic oligonucleotide
guccagauaggugucucgc

SEQ ID NO: 347932 - RNA, 19 nt, Artificial Sequence
  Description of Artificial Sequence: Synthetic oligonucleotide
ggucgaugcccucaggcug

SEQ ID NO: 347933 - RNA, 19 nt, Artificial Sequence
  Description of Artificial Sequence: Synthetic oligonucleotide
aacaucccgccauucucua

SEQ ID NO: 347934 - RNA, 19 nt, Artificial Sequence
  Description of Artificial Sequence: Synthetic oligonucleotide
uagccgcacgaugacaccc

SEQ ID NO: 347935 - RNA, 19 nt, Artificial Sequence
  Description of Artificial Sequence: Synthetic oligonucleotide
acuccguggcauccuucac

SEQ ID NO: 347936 - RNA, 19 nt, Artificial Sequence
  Description of Artificial Sequence: Synthetic oligonucleotide
ucgggagccagagccauac

SEQ ID NO: 347937 - RNA, 19 nt, Artificial Sequence
  Description of Artificial Sequence: Synthetic oligonucleotide
ccauacauggguguucggg

SEQ ID NO: 347938 - RNA, 19 nt, Artificial Sequence
  Description of Artificial Sequence: Synthetic oligonucleotide
uccaugccgggccaagcaa

SEQ ID NO: 347939 - RNA, 19 nt, Artificial Sequence
  Description of Artificial Sequence: Synthetic oligonucleotide
uggcggaucucaccuucgc

SEQ ID NO: 347940 - RNA, 19 nt, Artificial Sequence
  Description of Artificial Sequence: Synthetic oligonucleotide
ugacggucaccaccuuccc

SEQ ID NO: 347941 - RNA, 19 nt, Artificial Sequence
  Description of Artificial Sequence: Synthetic oligonucleotide
caauacucagcaggacccc

SEQ ID NO: 347942 - RNA, 19 nt, Artificial Sequence
  Description of Artificial Sequence: Synthetic oligonucleotide
uaggugucucgcaccuuca

SEQ ID NO: 347943 - RNA, 19 nt, Artificial Sequence
  Description of Artificial Sequence: Synthetic oligonucleotide
guagccuuuguaggguccc

SEQ ID NO: 347944 - RNA, 19 nt, Artificial Sequence
  Description of Artificial Sequence: Synthetic oligonucleotide
guggagugcggcuaccauc

SEQ ID NO: 347945 - RNA, 19 nt, Artificial Sequence
  Description of Artificial Sequence: Synthetic oligonucleotide
uuguagggucccugggaga

SEQ ID NO: 347946 - RNA, 19 nt, Artificial Sequence
  Description of Artificial Sequence: Synthetic oligonucleotide
ugagacccgugucacccuc

SEQ ID NO: 347947 - RNA, 19 nt, Artificial Sequence
  Description of Artificial Sequence: Synthetic oligonucleotide
cauaauguggagugcggcu

SEQ ID NO: 347948 - RNA, 19 nt, Artificial Sequence
  Description of Artificial Sequence: Synthetic oligonucleotide
ccgacauccacaccugagg

SEQ ID NO: 347949 - RNA, 19 nt, Artificial Sequence
  Description of Artificial Sequence: Synthetic oligonucleotide
gcuccgauacagauggcgg

SEQ ID NO: 347950 - RNA, 19 nt, Artificial Sequence
  Description of Artificial Sequence: Synthetic oligonucleotide
cuagccgcacgaugacacc

SEQ ID NO: 347951 - RNA, 19 nt, Artificial Sequence
  Description of Artificial Sequence: Synthetic oligonucleotide
caucaauacucagcaggac

SEQ ID NO: 347952 - RNA, 19 nt, Artificial Sequence
  Description of Artificial Sequence: Synthetic oligonucleotide
accgaugucuagaguauca

SEQ ID NO: 347953 - RNA, 19 nt, Artificial Sequence
  Description of Artificial Sequence: Synthetic oligonucleotide
ucgaaucggccagcaauca

SEQ ID NO: 347954 - RNA, 19 nt, Artificial Sequence
  Description of Artificial Sequence: Synthetic oligonucleotide
gcucauaggagugaagcca

SEQ ID NO: 347955 - RNA, 19 nt, Artificial Sequence
  Description of Artificial Sequence: Synthetic oligonucleotide
auacgcacagucuggccua

SEQ ID NO: 347956 - RNA, 19 nt, Artificial Sequence
  Description of Artificial Sequence: Synthetic oligonucleotide
ggucauuggacuguagcca

SEQ ID NO: 347957 - RNA, 19 nt, Artificial Sequence
  Description of Artificial Sequence: Synthetic oligonucleotide
gugcucacuggaaaugcug

SEQ ID NO: 347958 - RNA, 19 nt, Artificial Sequence
  Description of Artificial Sequence: Synthetic oligonucleotide
accuggauaucagugguua

SEQ ID NO: 347959 - RNA, 19 nt, Artificial Sequence
  Description of Artificial Sequence: Synthetic oligonucleotide
gguagccggguguuugggg

SEQ ID NO: 347960 - RNA, 19 nt, Artificial Sequence
  Description of Artificial Sequence: Synthetic oligonucleotide
aaucggccagcaaucacuu

SEQ ID NO: 347961 - RNA, 19 nt, Artificial Sequence
  Description of Artificial Sequence: Synthetic oligonucleotide
ccguguuguacauggcugg

SEQ ID NO: 347962 - RNA, 19 nt, Artificial Sequence
  Description of Artificial Sequence: Synthetic oligonucleotide
gucacccucgaaucggcca

SEQ ID NO: 347963 - RNA, 19 nt, Artificial Sequence
  Description of Artificial Sequence: Synthetic oligonucleotide
auggggugggcucgucguc

SEQ ID NO: 347964 - RNA, 19 nt, Artificial Sequence
  Description of Artificial Sequence: Synthetic oligonucleotide
ucgggcuguggacuccgug

SEQ ID NO: 347965 - RNA, 19 nt, Artificial Sequence
  Description of Artificial Sequence: Synthetic oligonucleotide
uggaaggcguguucggguu

SEQ ID NO: 347966 - RNA, 19 nt, Artificial Sequence
  Description of Artificial Sequence: Synthetic oligonucleotide
accaucaugcaggggcguc

SEQ ID NO: 347967 - RNA, 19 nt, Artificial Sequence
  Description of Artificial Sequence: Synthetic oligonucleotide
cuggaaauuaugcucccgu

SEQ ID NO: 347968 - RNA, 19 nt, Artificial Sequence
  Description of Artificial Sequence: Synthetic oligonucleotide
ccagauaggugucucgcac

SEQ ID NO: 347969 - RNA, 19 nt, Artificial Sequence
  Description of Artificial Sequence: Synthetic oligonucleotide
uggcguguguggguuguag

SEQ ID NO: 347970 - RNA, 19 nt, Artificial Sequence
  Description of Artificial Sequence: Synthetic oligonucleotide
cucgugcuucggcauaaug

SEQ ID NO: 347971 - RNA, 19 nt, Artificial Sequence
  Description of Artificial Sequence: Synthetic oligonucleotide
acggagcacaugccucccg

SEQ ID NO: 347972 - RNA, 19 nt, Artificial Sequence
  Description of Artificial Sequence: Synthetic oligonucleotide
acugguccguguuguacau

SEQ ID NO: 347973 - RNA, 19 nt, Artificial Sequence
  Description of Artificial Sequence: Synthetic oligonucleotide
ggcggaucucaccuucgcg

SEQ ID NO: 347974 - RNA, 19 nt, Artificial Sequence
  Description of Artificial Sequence: Synthetic oligonucleotide
agaaaaggugggaaccuuu

SEQ ID NO: 347975 - RNA, 19 nt, Artificial Sequence
  Description of Artificial Sequence: Synthetic oligonucleotide
cuccgauacagauggcgga

SEQ ID NO: 347976 - RNA, 19 nt, Artificial Sequence
  Description of Artificial Sequence: Synthetic oligonucleotide
gugguaacuuuggggacug

SEQ ID NO: 347977 - RNA, 19 nt, Artificial Sequence
  Description of Artificial Sequence: Synthetic oligonucleotide
ucccggggaagcaccuuca

SEQ ID NO: 347978 - RNA, 19 nt, Artificial Sequence
  Description of Artificial Sequence: Synthetic oligonucleotide
cacaccaauguagccuuug

SEQ ID NO: 347979 - RNA, 19 nt, Artificial Sequence
  Description of Artificial Sequence: Synthetic oligonucleotide
cgaugucuagaguaucagg

SEQ ID NO: 347980 - RNA, 19 nt, Artificial Sequence
  Description of Artificial Sequence: Synthetic oligonucleotide
uggaagguuucucgcucua

SEQ ID NO: 347981 - RNA, 19 nt, Artificial Sequence
  Description of Artificial Sequence: Synthetic oligonucleotide
ccaucaauacucagcagga

SEQ ID NO: 347982 - RNA, 19 nt, Artificial Sequence
  Description of Artificial Sequence: Synthetic oligonucleotide
cauuggacuguagccaaca

SEQ ID NO: 347983 - RNA, 19 nt, Artificial Sequence
  Description of Artificial Sequence: Synthetic oligonucleotide
ggacgcugggaguccaccg

SEQ ID NO: 347984 - RNA, 19 nt, Artificial Sequence
  Description of Artificial Sequence: Synthetic oligonucleotide
ugcggcuaccauccugcaa

SEQ ID NO: 347985 - RNA, 19 nt, Artificial Sequence
  Description of Artificial Sequence: Synthetic oligonucleotide
cccgccauucucuaccagc

SEQ ID NO: 347986 - RNA, 19 nt, Artificial Sequence
  Description of Artificial Sequence: Synthetic oligonucleotide
ugaugccguccucaccauc

SEQ ID NO: 347987 - RNA, 19 nt, Artificial Sequence
  Description of Artificial Sequence: Synthetic oligonucleotide
caacaccaagugccgugcc

SEQ ID NO: 347988 - RNA, 19 nt, Artificial Sequence
  Description of Artificial Sequence: Synthetic oligonucleotide
agugcucacuggaaaugcu

SEQ ID NO: 347989 - RNA, 19 nt, Artificial Sequence
  Description of Artificial Sequence: Synthetic oligonucleotide
gagacccgugucacccucg

SEQ ID NO: 347990 - RNA, 19 nt, Artificial Sequence
  Description of Artificial Sequence: Synthetic oligonucleotide
cuggguagccggguguuug

SEQ ID NO: 347991 - RNA, 19 nt, Artificial Sequence
  Description of Artificial Sequence: Synthetic oligonucleotide
augccgggccaagcaaggc

SEQ ID NO: 347992 - RNA, 19 nt, Artificial Sequence
  Description of Artificial Sequence: Synthetic oligonucleotide
ggcuuggugccacuuggug

SEQ ID NO: 347993 - RNA, 19 nt, Artificial Sequence
  Description of Artificial Sequence: Synthetic oligonucleotide
cucaccuucgcggccugag

SEQ ID NO: 347994 - RNA, 19 nt, Artificial Sequence
  Description of Artificial Sequence: Synthetic oligonucleotide
ucccgguccucacccagaa

SEQ ID NO: 347995 - RNA, 19 nt, Artificial Sequence
  Description of Artificial Sequence: Synthetic oligonucleotide
gcguguucggguuguuggg

SEQ ID NO: 347996 - RNA, 19 nt, Artificial Sequence
  Description of Artificial Sequence: Synthetic oligonucleotide
uggggugggcucgucguca

SEQ ID NO: 347997 - RNA, 19 nt, Artificial Sequence
  Description of Artificial Sequence: Synthetic oligonucleotide
ggccuaugagcucauuauc

SEQ ID NO: 347998 - RNA, 19 nt, Artificial Sequence
  Description of Artificial Sequence: Synthetic oligonucleotide
gcuggaaauuaugcucccg

SEQ ID NO: 347999 - RNA, 19 nt, Artificial Sequence
  Description of Artificial Sequence: Synthetic oligonucleotide
uaccgaugucuagaguauc

SEQ ID NO: 348000 - RNA, 19 nt, Artificial Sequence
  Description of Artificial Sequence: Synthetic oligonucleotide
guccguguuguacauggcu

SEQ ID NO: 348001 - RNA, 19 nt, Artificial Sequence
  Description of Artificial Sequence: Synthetic oligonucleotide
ucccgccauucucuaccag

SEQ ID NO: 348002 - RNA, 19 nt, Artificial Sequence
  Description of Artificial Sequence: Synthetic oligonucleotide
agggagagaacugguccgu

SEQ ID NO: 348003 - RNA, 19 nt, Artificial Sequence
  Description of Artificial Sequence: Synthetic oligonucleotide
ccauaauguggagugcggc

SEQ ID NO: 348004 - RNA, 19 nt, Artificial Sequence
  Description of Artificial Sequence: Synthetic oligonucleotide
cacaucccggggcuuugag

SEQ ID NO: 348005 - RNA, 19 nt, Artificial Sequence
  Description of Artificial Sequence: Synthetic oligonucleotide
gcggaugacgccugucugc

SEQ ID NO: 348006 - RNA, 19 nt, Artificial Sequence
  Description of Artificial Sequence: Synthetic oligonucleotide
augagacccgugucacccu

SEQ ID NO: 348007 - RNA, 19 nt, Artificial Sequence
  Description of Artificial Sequence: Synthetic oligonucleotide
agacccgugucacccucga

SEQ ID NO: 348008 - RNA, 19 nt, Artificial Sequence
  Description of Artificial Sequence: Synthetic oligonucleotide
auggcggaucucaccuucg

SEQ ID NO: 348009 - RNA, 19 nt, Artificial Sequence
  Description of Artificial Sequence: Synthetic oligonucleotide
ggcguguguggguuguagc

SEQ ID NO: 348010 - RNA, 19 nt, Artificial Sequence
  Description of Artificial Sequence: Synthetic oligonucleotide
aucccgccauucucuacca

SEQ ID NO: 348011 - RNA, 19 nt, Artificial Sequence
  Description of Artificial Sequence: Synthetic oligonucleotide
ggcauaauggugauuuugu

SEQ ID NO: 348012 - RNA, 19 nt, Artificial Sequence
  Description of Artificial Sequence: Synthetic oligonucleotide
ggugggaaccuuucucaga

SEQ ID NO: 348013 - RNA, 19 nt, Artificial Sequence
  Description of Artificial Sequence: Synthetic oligonucleotide
cucgacccgcacaaugaga

SEQ ID NO: 348014 - RNA, 19 nt, Artificial Sequence
  Description of Artificial Sequence: Synthetic oligonucleotide
agcuuccccaggaagcgga

SEQ ID NO: 348015 - RNA, 19 nt, Artificial Sequence
  Description of Artificial Sequence: Synthetic oligonucleotide
agcgaagcgguuguccuuu

SEQ ID NO: 348016 - RNA, 19 nt, Artificial Sequence
  Description of Artificial Sequence: Synthetic oligonucleotide
gcggucuacagaaaugguc

SEQ ID NO: 348017 - RNA, 19 nt, Artificial Sequence
  Description of Artificial Sequence: Synthetic oligonucleotide
agcaggagugcggcuacca

SEQ ID NO: 348018 - RNA, 19 nt, Artificial Sequence
  Description of Artificial Sequence: Synthetic oligonucleotide
cuucgcggccugagugggg

SEQ ID NO: 348019 - RNA, 19 nt, Artificial Sequence
  Description of Artificial Sequence: Synthetic oligonucleotide
gugcuucggcauaauggug

SEQ ID NO: 348020 - RNA, 19 nt, Artificial Sequence
  Description of Artificial Sequence: Synthetic oligonucleotide
ucggcauaauggugauuuu

SEQ ID NO: 348021 - RNA, 19 nt, Artificial Sequence
  Description of Artificial Sequence: Synthetic oligonucleotide
uuccgcacaccuccacauu

SEQ ID NO: 348022 - RNA, 19 nt, Artificial Sequence
  Description of Artificial Sequence: Synthetic oligonucleotide
ccgugccuugcaaacaaac

SEQ ID NO: 348023 - RNA, 19 nt, Artificial Sequence
  Description of Artificial Sequence: Synthetic oligonucleotide
gccaucgaugaccuugaca

SEQ ID NO: 348024 - RNA, 19 nt, Artificial Sequence
  Description of Artificial Sequence: Synthetic oligonucleotide
gggaagcaccuucaacuca

SEQ ID NO: 348025 - RNA, 19 nt, Artificial Sequence
  Description of Artificial Sequence: Synthetic oligonucleotide
gguuacccagucacuggag

SEQ ID NO: 348026 - RNA, 19 nt, Artificial Sequence
  Description of Artificial Sequence: Synthetic oligonucleotide
cccgacauccacaccugag

SEQ ID NO: 348027 - RNA, 19 nt, Artificial Sequence
  Description of Artificial Sequence: Synthetic oligonucleotide
ccguccucaccaucaauac

SEQ ID NO: 348028 - RNA, 19 nt, Artificial Sequence
  Description of Artificial Sequence: Synthetic oligonucleotide
uagccggguguuuggggau

SEQ ID NO: 348029 - RNA, 19 nt, Artificial Sequence
  Description of Artificial Sequence: Synthetic oligonucleotide
gacgcugggaguccaccgu

SEQ ID NO: 348030 - RNA, 19 nt, Artificial Sequence
  Description of Artificial Sequence: Synthetic oligonucleotide
ccaugccgggccaagcaag

SEQ ID NO: 348031 - RNA, 19 nt, Artificial Sequence
  Description of Artificial Sequence: Synthetic oligonucleotide
cugaccaccuucucacugu

SEQ ID NO: 348032 - RNA, 19 nt, Artificial Sequence
  Description of Artificial Sequence: Synthetic oligonucleotide
gugcaugggacugcugauc

SEQ ID NO: 348033 - RNA, 19 nt, Artificial Sequence
  Description of Artificial Sequence: Synthetic oligonucleotide
cuaccgaugucuagaguau

SEQ ID NO: 348034 - RNA, 19 nt, Artificial Sequence
  Description of Artificial Sequence: Synthetic oligonucleotide
acuggccugauaggccaug

SEQ ID NO: 348035 - RNA, 19 nt, Artificial Sequence
  Description of Artificial Sequence: Synthetic oligonucleotide
uaccaucaugcaggggcgu

SEQ ID NO: 348036 - RNA, 19 nt, Artificial Sequence
  Description of Artificial Sequence: Synthetic oligonucleotide
cccgugucacccucgaauc

SEQ ID NO: 348037 - RNA, 19 nt, Artificial Sequence
  Description of Artificial Sequence: Synthetic oligonucleotide
cggguuguacuguggauug

SEQ ID NO: 348038 - RNA, 19 nt, Artificial Sequence
  Description of Artificial Sequence: Synthetic oligonucleotide
cuagaguaucagggaagga

SEQ ID NO: 348039 - RNA, 19 nt, Artificial Sequence
  Description of Artificial Sequence: Synthetic oligonucleotide
cagugcggggauccagcug

SEQ ID NO: 348040 - RNA, 19 nt, Artificial Sequence
  Description of Artificial Sequence: Synthetic oligonucleotide
acaugccucccgugacacu

SEQ ID NO: 348041 - RNA, 19 nt, Artificial Sequence
  Description of Artificial Sequence: Synthetic oligonucleotide
acauggguguccguccaua

SEQ ID NO: 348042 - RNA, 19 nt, Artificial Sequence
  Description of Artificial Sequence: Synthetic oligonucleotide
ccgaugucuagaguaucag

SEQ ID NO: 348043 - RNA, 19 nt, Artificial Sequence
  Description of Artificial Sequence: Synthetic oligonucleotide
gccuaugagcucauuaucu

SEQ ID NO: 348044 - RNA, 19 nt, Artificial Sequence
  Description of Artificial Sequence: Synthetic oligonucleotide
aucucaccuucgcggccug

SEQ ID NO: 348045 - RNA, 19 nt, Artificial Sequence
  Description of Artificial Sequence: Synthetic oligonucleotide
ggccugauaggccaugggu

SEQ ID NO: 348046 - RNA, 19 nt, Artificial Sequence
  Description of Artificial Sequence: Synthetic oligonucleotide
aggcguguucggguuguug

SEQ ID NO: 348047 - RNA, 19 nt, Artificial Sequence
  Description of Artificial Sequence: Synthetic oligonucleotide
cagguagagugcaguucca

SEQ ID NO: 348048 - RNA, 19 nt, Artificial Sequence
  Description of Artificial Sequence: Synthetic oligonucleotide
cacggagcacaugccuccc

SEQ ID NO: 348049 - RNA, 19 nt, Artificial Sequence
  Description of Artificial Sequence: Synthetic oligonucleotide
gcaggggcgucugcgaacc

SEQ ID NO: 348050 - RNA, 19 nt, Artificial Sequence
  Description of Artificial Sequence: Synthetic oligonucleotide
guguccguccauaggugga

SEQ ID NO: 348051 - RNA, 19 nt, Artificial Sequence
  Description of Artificial Sequence: Synthetic oligonucleotide
ggccucccgguccucaccc

SEQ ID NO: 348052 - RNA, 19 nt, Artificial Sequence
  Description of Artificial Sequence: Synthetic oligonucleotide
uucgggagccagagccaua

SEQ ID NO: 348053 - RNA, 19 nt, Artificial Sequence
  Description of Artificial Sequence: Synthetic oligonucleotide
guguucggguuguuggggu

SEQ ID NO: 348054 - RNA, 19 nt, Artificial Sequence
  Description of Artificial Sequence: Synthetic oligonucleotide
gggcucgucgucaaaggca

SEQ ID NO: 348055 - RNA, 19 nt, Artificial Sequence
  Description of Artificial Sequence: Synthetic oligonucleotide
ccucgacccgcacaaugag

SEQ ID NO: 348056 - RNA, 19 nt, Artificial Sequence
  Description of Artificial Sequence: Synthetic oligonucleotide
agccaacaccaagugccgu

SEQ ID NO: 348057 - RNA, 19 nt, Artificial Sequence
  Description of Artificial Sequence: Synthetic oligonucleotide
guguagggugguagcuggc

SEQ ID NO: 348058 - RNA, 19 nt, Artificial Sequence
  Description of Artificial Sequence: Synthetic oligonucleotide
cagagccauacaugggugu

SEQ ID NO: 348059 - RNA, 19 nt, Artificial Sequence
  Description of Artificial Sequence: Synthetic oligonucleotide
ggguagccggguguuuggg

SEQ ID NO: 348060 - RNA, 19 nt, Artificial Sequence
  Description of Artificial Sequence: Synthetic oligonucleotide
guccaccguggugagccgc

SEQ ID NO: 348061 - RNA, 19 nt, Artificial Sequence
  Description of Artificial Sequence: Synthetic oligonucleotide
aggggcgucugcgaaccau

SEQ ID NO: 348062 - RNA, 19 nt, Artificial Sequence
  Description of Artificial Sequence: Synthetic oligonucleotide
agccgcacgaugacaccca

SEQ ID NO: 348063 - RNA, 19 nt, Artificial Sequence
  Description of Artificial Sequence: Synthetic oligonucleotide
gggucuggguagccgggug

SEQ ID NO: 348064 - RNA, 19 nt, Artificial Sequence
  Description of Artificial Sequence: Synthetic oligonucleotide
gucacggccuggugccuga

SEQ ID NO: 348065 - RNA, 19 nt, Artificial Sequence
  Description of Artificial Sequence: Synthetic oligonucleotide
cccacgccugcacugcacc

SEQ ID NO: 348066 - RNA, 19 nt, Artificial Sequence
  Description of Artificial Sequence: Synthetic oligonucleotide
cguguucggguuguugggg

SEQ ID NO: 348067 - RNA, 19 nt, Artificial Sequence
  Description of Artificial Sequence: Synthetic oligonucleotide
cuucgcccucgaccucugc

SEQ ID NO: 348068 - RNA, 19 nt, Artificial Sequence
  Description of Artificial Sequence: Synthetic oligonucleotide
cucuagccgcacgaugaca

SEQ ID NO: 348069 - RNA, 19 nt, Artificial Sequence
  Description of Artificial Sequence: Synthetic oligonucleotide
cugguccguguuguacaug

SEQ ID NO: 348070 - RNA, 19 nt, Artificial Sequence
  Description of Artificial Sequence: Synthetic oligonucleotide
ggguguccguccauaggug

SEQ ID NO: 348071 - RNA, 19 nt, Artificial Sequence
  Description of Artificial Sequence: Synthetic oligonucleotide
cgugcuucggcauaauggu

SEQ ID NO: 348072 - RNA, 19 nt, Artificial Sequence
  Description of Artificial Sequence: Synthetic oligonucleotide
ugcugauccgagggcucau

SEQ ID NO: 348073 - RNA, 19 nt, Artificial Sequence
  Description of Artificial Sequence: Synthetic oligonucleotide
uacgcacagucuggccuau

SEQ ID NO: 348074 - RNA, 19 nt, Artificial Sequence
  Description of Artificial Sequence: Synthetic oligonucleotide
aucggccagcaaucacuuu

SEQ ID NO: 348075 - RNA, 19 nt, Artificial Sequence
  Description of Artificial Sequence: Synthetic oligonucleotide
cacccucgaaucggccagc

SEQ ID NO: 348076 - RNA, 19 nt, Artificial Sequence
  Description of Artificial Sequence: Synthetic oligonucleotide
acccucgaaucggccagca

SEQ ID NO: 348077 - RNA, 19 nt, Artificial Sequence
  Description of Artificial Sequence: Synthetic oligonucleotide
ccggggaagcaccuucaac

SEQ ID NO: 348078 - RNA, 19 nt, Artificial Sequence
  Description of Artificial Sequence: Synthetic oligonucleotide
gcauaauggugauuuuguu

SEQ ID NO: 348079 - RNA, 19 nt, Artificial Sequence
  Description of Artificial Sequence: Synthetic oligonucleotide
ccucgaaucggccagcaau

SEQ ID NO: 348080 - RNA, 19 nt, Artificial Sequence
  Description of Artificial Sequence: Synthetic oligonucleotide
ggugccugacggucaccac

SEQ ID NO: 348081 - RNA, 19 nt, Artificial Sequence
  Description of Artificial Sequence: Synthetic oligonucleotide
ugcggggauccagcugcac

SEQ ID NO: 348082 - RNA, 19 nt, Artificial Sequence
  Description of Artificial Sequence: Synthetic oligonucleotide
gugccgugccuugcaaaca

SEQ ID NO: 348083 - RNA, 19 nt, Artificial Sequence
  Description of Artificial Sequence: Synthetic oligonucleotide
cggaugacgccugucugcc

SEQ ID NO: 348084 - RNA, 19 nt, Artificial Sequence
  Description of Artificial Sequence: Synthetic oligonucleotide
cgaaucggccagcaaucac

SEQ ID NO: 348085 - RNA, 19 nt, Artificial Sequence
  Description of Artificial Sequence: Synthetic oligonucleotide
agccuggcguguguggguu

SEQ ID NO: 348086 - RNA, 19 nt, Artificial Sequence
  Description of Artificial Sequence: Synthetic oligonucleotide
ccacgccugcacugcaccc

SEQ ID NO: 348087 - RNA, 19 nt, Artificial Sequence
  Description of Artificial Sequence: Synthetic oligonucleotide
guacauggcuggugucccu

SEQ ID NO: 348088 - RNA, 19 nt, Artificial Sequence
  Description of Artificial Sequence: Synthetic oligonucleotide
gacggcccgccccacgccu

SEQ ID NO: 348089 - RNA, 19 nt, Artificial Sequence
  Description of Artificial Sequence: Synthetic oligonucleotide
gugcggcuaccaucaugca

SEQ ID NO: 348090 - RNA, 19 nt, Artificial Sequence
  Description of Artificial Sequence: Synthetic oligonucleotide
cguccauagguggagguca

SEQ ID NO: 348091 - RNA, 19 nt, Artificial Sequence
  Description of Artificial Sequence: Synthetic oligonucleotide
ccgcuggcggucuacagaa

SEQ ID NO: 348092 - RNA, 19 nt, Artificial Sequence
  Description of Artificial Sequence: Synthetic oligonucleotide
ggcagcguagggagagaac

SEQ ID NO: 348093 - RNA, 19 nt, Artificial Sequence
  Description of Artificial Sequence: Synthetic oligonucleotide
ucggguuguugggguccca

SEQ ID NO: 348094 - RNA, 19 nt, Artificial Sequence
  Description of Artificial Sequence: Synthetic oligonucleotide
ccuuccgcacaccuccaca

SEQ ID NO: 348095 - RNA, 19 nt, Artificial Sequence
  Description of Artificial Sequence: Synthetic oligonucleotide
ccgagaagagaaugacaaa

SEQ ID NO: 348096 - RNA, 19 nt, Artificial Sequence
  Description of Artificial Sequence: Synthetic oligonucleotide
cccgugacacugcggauga

SEQ ID NO: 348097 - RNA, 19 nt, Artificial Sequence
  Description of Artificial Sequence: Synthetic oligonucleotide
gugcggcuaccauccugca

SEQ ID NO: 348098 - RNA, 19 nt, Artificial Sequence
  Description of Artificial Sequence: Synthetic oligonucleotide
cucuaccgaugucuagagu

SEQ ID NO: 348099 - RNA, 19 nt, Artificial Sequence
  Description of Artificial Sequence: Synthetic oligonucleotide
ccaggucgaugcccucagg

SEQ ID NO: 348100 - RNA, 19 nt, Artificial Sequence
  Description of Artificial Sequence: Synthetic oligonucleotide
ggcucgucgucaaaggcau

SEQ ID NO: 348101 - RNA, 19 nt, Artificial Sequence
  Description of Artificial Sequence: Synthetic oligonucleotide
aaggcguguucggguuguu

SEQ ID NO: 348102 - RNA, 19 nt, Artificial Sequence
  Description of Artificial Sequence: Synthetic oligonucleotide
gucccuggugucugcgggu

SEQ ID NO: 348103 - RNA, 19 nt, Artificial Sequence
  Description of Artificial Sequence: Synthetic oligonucleotide
ggaggucaugccaccugga

SEQ ID NO: 348104 - RNA, 19 nt, Artificial Sequence
  Description of Artificial Sequence: Synthetic oligonucleotide
ccgcacaaugagacccgug

SEQ ID NO: 348105 - RNA, 19 nt, Artificial Sequence
  Description of Artificial Sequence: Synthetic oligonucleotide
gccgcacgaugacacccac

SEQ ID NO: 348106 - RNA, 19 nt, Artificial Sequence
  Description of Artificial Sequence: Synthetic oligonucleotide
cgcacagucuggccuauga

SEQ ID NO: 348107 - RNA, 19 nt, Artificial Sequence
  Description of Artificial Sequence: Synthetic oligonucleotide
cgucugcgaaccauaaugu

SEQ ID NO: 348108 - RNA, 19 nt, Artificial Sequence
  Description of Artificial Sequence: Synthetic oligonucleotide
ccguccauagguggagguc

SEQ ID NO: 348109 - RNA, 19 nt, Artificial Sequence
  Description of Artificial Sequence: Synthetic oligonucleotide
ggacggcccgccccacgcc

SEQ ID NO: 348110 - RNA, 19 nt, Artificial Sequence
  Description of Artificial Sequence: Synthetic oligonucleotide
acgcacagucuggccuaug

SEQ ID NO: 348111 - RNA, 19 nt, Artificial Sequence
  Description of Artificial Sequence: Synthetic oligonucleotide
cguauuccuccucagcccu

SEQ ID NO: 348112 - RNA, 19 nt, Artificial Sequence
  Description of Artificial Sequence: Synthetic oligonucleotide
gggcagcguagggagagaa

SEQ ID NO: 348113 - RNA, 19 nt, Artificial Sequence
  Description of Artificial Sequence: Synthetic oligonucleotide
gcggguuguacuguggauu

SEQ ID NO: 348114 - RNA, 19 nt, Artificial Sequence
  Description of Artificial Sequence: Synthetic oligonucleotide
caggggucauuggacugua

SEQ ID NO: 348115 - RNA, 19 nt, Artificial Sequence
  Description of Artificial Sequence: Synthetic oligonucleotide
cacccacagugcggggauc

SEQ ID NO: 348116 - RNA, 19 nt, Artificial Sequence
  Description of Artificial Sequence: Synthetic oligonucleotide
cccucgaccucugcucaug

SEQ ID NO: 348117 - RNA, 19 nt, Artificial Sequence
  Description of Artificial Sequence: Synthetic oligonucleotide
cauuguccccaggcuggaa

SEQ ID NO: 348118 - RNA, 19 nt, Artificial Sequence
  Description of Artificial Sequence: Synthetic oligonucleotide
ggacuccguggcauccuuc

SEQ ID NO: 348119 - RNA, 19 nt, Artificial Sequence
  Description of Artificial Sequence: Synthetic oligonucleotide
cccuuccgcacaccuccac

SEQ ID NO: 348120 - RNA, 19 nt, Artificial Sequence
  Description of Artificial Sequence: Synthetic oligonucleotide
ccggguguuuggggauucg

SEQ ID NO: 348121 - RNA, 19 nt, Artificial Sequence
  Description of Artificial Sequence: Synthetic oligonucleotide
guagggucccugggagaua

SEQ ID NO: 348122 - RNA, 19 nt, Artificial Sequence
  Description of Artificial Sequence: Synthetic oligonucleotide
ggggcgucugcgaaccaua

SEQ ID NO: 348123 - RNA, 19 nt, Artificial Sequence
  Description of Artificial Sequence: Synthetic oligonucleotide
ggggugggcucgucgucaa

SEQ ID NO: 348124 - RNA, 19 nt, Artificial Sequence
  Description of Artificial Sequence: Synthetic oligonucleotide
ggcggucuacagaaauggu

SEQ ID NO: 348125 - RNA, 19 nt, Artificial Sequence
  Description of Artificial Sequence: Synthetic oligonucleotide
cagcgaagcgguuguccuu

SEQ ID NO: 348126 - RNA, 19 nt, Artificial Sequence
  Description of Artificial Sequence: Synthetic oligonucleotide
gacuggccugauaggccau

SEQ ID NO: 348127 - RNA, 19 nt, Artificial Sequence
  Description of Artificial Sequence: Synthetic oligonucleotide
gcguagggagagaacuggu

SEQ ID NO: 348128 - RNA, 19 nt, Artificial Sequence
  Description of Artificial Sequence: Synthetic oligonucleotide
cucgcucuagccgcacgau

SEQ ID NO: 348129 - RNA, 19 nt, Artificial Sequence
  Description of Artificial Sequence: Synthetic oligonucleotide
cucccgugacacugcggau

SEQ ID NO: 348130 - RNA, 19 nt, Artificial Sequence
  Description of Artificial Sequence: Synthetic oligonucleotide
gccggguguuuggggauuc

SEQ ID NO: 348131 - RNA, 19 nt, Artificial Sequence
  Description of Artificial Sequence: Synthetic oligonucleotide
ccgcacgaugacacccaca

SEQ ID NO: 348132 - RNA, 19 nt, Artificial Sequence
  Description of Artificial Sequence: Synthetic oligonucleotide
ccguggcauccuucaccac

SEQ ID NO: 348133 - RNA, 19 nt, Artificial Sequence
  Description of Artificial Sequence: Synthetic oligonucleotide
cucgcaccuucaccuggau

SEQ ID NO: 348134 - RNA, 19 nt, Artificial Sequence
  Description of Artificial Sequence: Synthetic oligonucleotide
cuggugucugcggguugua

SEQ ID NO: 348135 - RNA, 19 nt, Artificial Sequence
  Description of Artificial Sequence: Synthetic oligonucleotide
caggggcgucugcgaacca

SEQ ID NO: 348136 - RNA, 19 nt, Artificial Sequence
  Description of Artificial Sequence: Synthetic oligonucleotide
ggucacaucccggggcuuu

SEQ ID NO: 348137 - RNA, 19 nt, Artificial Sequence
  Description of Artificial Sequence: Synthetic oligonucleotide
gccccacgccugcacugca

SEQ ID NO: 348138 - RNA, 19 nt, Artificial Sequence
  Description of Artificial Sequence: Synthetic oligonucleotide
ccucagcccuggaaggcgu

SEQ ID NO: 348139 - RNA, 19 nt, Artificial Sequence
  Description of Artificial Sequence: Synthetic oligonucleotide
ggccggggaauggguguuc

SEQ ID NO: 348140 - RNA, 19 nt, Artificial Sequence
  Description of Artificial Sequence: Synthetic oligonucleotide
ccuggacgcugggagucca

SEQ ID NO: 348141 - RNA, 19 nt, Artificial Sequence
  Description of Artificial Sequence: Synthetic oligonucleotide
cgccccacgccugcacugc

SEQ ID NO: 348142 - RNA, 19 nt, Artificial Sequence
  Description of Artificial Sequence: Synthetic oligonucleotide
gggugggcucgucgucaaa

SEQ ID NO: 348143 - RNA, 19 nt, Artificial Sequence
  Description of Artificial Sequence: Synthetic oligonucleotide
cccggggaagcaccuucaa

SEQ ID NO: 348144 - RNA, 19 nt, Artificial Sequence
  Description of Artificial Sequence: Synthetic oligonucleotide
cuggcguguguggguugua

SEQ ID NO: 348145 - RNA, 19 nt, Artificial Sequence
  Description of Artificial Sequence: Synthetic oligonucleotide
ccccuuccgcacaccucca

SEQ ID NO: 348146 - RNA, 19 nt, Artificial Sequence
  Description of Artificial Sequence: Synthetic oligonucleotide
cguguuguacauggcuggu

SEQ ID NO: 348147 - RNA, 19 nt, Artificial Sequence
  Description of Artificial Sequence: Synthetic oligonucleotide
ccgugacacugcggaugac

SEQ ID NO: 348148 - RNA, 19 nt, Artificial Sequence
  Description of Artificial Sequence: Synthetic oligonucleotide
cggcccgccccacgccugc

SEQ ID NO: 348149 - RNA, 19 nt, Artificial Sequence
  Description of Artificial Sequence: Synthetic oligonucleotide
ccguuccuucccugugccu

SEQ ID NO: 348150 - RNA, 19 nt, Artificial Sequence
  Description of Artificial Sequence: Synthetic oligonucleotide
gcgaagcgguuguccuuuu

SEQ ID NO: 348151 - RNA, 19 nt, Artificial Sequence
  Description of Artificial Sequence: Synthetic oligonucleotide
cccgcacaaugagacccgu

SEQ ID NO: 348152 - RNA, 19 nt, Artificial Sequence
  Description of Artificial Sequence: Synthetic oligonucleotide
cccgguccucacccagaau

SEQ ID NO: 348153 - RNA, 19 nt, Artificial Sequence
  Description of Artificial Sequence: Synthetic oligonucleotide
uauuaaaccagacauauug

SEQ ID NO: 348154 - RNA, 19 nt, Artificial Sequence
  Description of Artificial Sequence: Synthetic oligonucleotide
aaagaacccauauuuacac

SEQ ID NO: 348155 - RNA, 19 nt, Artificial Sequence
  Description of Artificial Sequence: Synthetic oligonucleotide
aaccauaucauucuuaucu

SEQ ID NO: 348156 - RNA, 19 nt, Artificial Sequence
  Description of Artificial Sequence: Synthetic oligonucleotide
aaaagcgauaaugaguacc

SEQ ID NO: 348157 - RNA, 19 nt, Artificial Sequence
  Description of Artificial Sequence: Synthetic oligonucleotide
gaacuuugaagauugaugc

SEQ ID NO: 348158 - RNA, 19 nt, Artificial Sequence
  Description of Artificial Sequence: Synthetic oligonucleotide
uaugguauagaguagaaaa

SEQ ID NO: 348159 - RNA, 19 nt, Artificial Sequence
  Description of Artificial Sequence: Synthetic oligonucleotide
uuugcuugaaucaaaauau

SEQ ID NO: 348160 - RNA, 19 nt, Artificial Sequence
  Description of Artificial Sequence: Synthetic oligonucleotide
ugaacuuugaagauugaug

SEQ ID NO: 348161 - RNA, 19 nt, Artificial Sequence
  Description of Artificial Sequence: Synthetic oligonucleotide
aaaacgcuuguugacaacc

SEQ ID NO: 348162 - RNA, 19 nt, Artificial Sequence
  Description of Artificial Sequence: Synthetic oligonucleotide
aagcgaaguguccucaucc

SEQ ID NO: 348163 - RNA, 19 nt, Artificial Sequence
  Description of Artificial Sequence: Synthetic oligonucleotide
aaccauuccauuaaaacag

SEQ ID NO: 348164 - RNA, 19 nt, Artificial Sequence
  Description of Artificial Sequence: Synthetic oligonucleotide
uaauagagcaaccuucucc

SEQ ID NO: 348165 - RNA, 19 nt, Artificial Sequence
  Description of Artificial Sequence: Synthetic oligonucleotide
aucaauagacuccaacccc

SEQ ID NO: 348166 - RNA, 19 nt, Artificial Sequence
  Description of Artificial Sequence: Synthetic oligonucleotide
agucacacgaacaaaacgc

SEQ ID NO: 348167 - RNA, 19 nt, Artificial Sequence
  Description of Artificial Sequence: Synthetic oligonucleotide
aagucacacgaacaaaacg

SEQ ID NO: 348168 - RNA, 19 nt, Artificial Sequence
  Description of Artificial Sequence: Synthetic oligonucleotide
aaagcgauaaugaguaccg

SEQ ID NO: 348169 - RNA, 19 nt, Artificial Sequence
  Description of Artificial Sequence: Synthetic oligonucleotide
uuaaaccagacauauugcc

SEQ ID NO: 348170 - RNA, 19 nt, Artificial Sequence
  Description of Artificial Sequence: Synthetic oligonucleotide
ucuucuaccauguaauaga

SEQ ID NO: 348171 - RNA, 19 nt, Artificial Sequence
  Description of Artificial Sequence: Synthetic oligonucleotide
uaauguagaccacagguac

SEQ ID NO: 348172 - RNA, 19 nt, Artificial Sequence
  Description of Artificial Sequence: Synthetic oligonucleotide
uauagaguagaaaagcgau

SEQ ID NO: 348173 - RNA, 19 nt, Artificial Sequence
  Description of Artificial Sequence: Synthetic oligonucleotide
uagaaaagcgauaaugagu

SEQ ID NO: 348174 - RNA, 19 nt, Artificial Sequence
  Description of Artificial Sequence: Synthetic oligonucleotide
aaauauguuacaguucucu

SEQ ID NO: 348175 - RNA, 19 nt, Artificial Sequence
  Description of Artificial Sequence: Synthetic oligonucleotide
uagaaagauaguuauuuac

SEQ ID NO: 348176 - RNA, 19 nt, Artificial Sequence
  Description of Artificial Sequence: Synthetic oligonucleotide
uaaagaacccauauuuaca

SEQ ID NO: 348177 - RNA, 19 nt, Artificial Sequence
  Description of Artificial Sequence: Synthetic oligonucleotide
ugugauuucucucccaaga

SEQ ID NO: 348178 - RNA, 19 nt, Artificial Sequence
  Description of Artificial Sequence: Synthetic oligonucleotide
uguaaggcuucucuaauac

SEQ ID NO: 348179 - RNA, 19 nt, Artificial Sequence
  Description of Artificial Sequence: Synthetic oligonucleotide
acugucuaguuucaacggc

SEQ ID NO: 348180 - RNA, 19 nt, Artificial Sequence
  Description of Artificial Sequence: Synthetic oligonucleotide
uggugugaaagucacacga

SEQ ID NO: 348181 - RNA, 19 nt, Artificial Sequence
  Description of Artificial Sequence: Synthetic oligonucleotide
acuuucaguaauguagacc

SEQ ID NO: 348182 - RNA, 19 nt, Artificial Sequence
  Description of Artificial Sequence: Synthetic oligonucleotide
auuccauuaaaacagcaau

SEQ ID NO: 348183 - RNA, 19 nt, Artificial Sequence
  Description of Artificial Sequence: Synthetic oligonucleotide
acauauugcccaucaaccg

SEQ ID NO: 348184 - RNA, 19 nt, Artificial Sequence
  Description of Artificial Sequence: Synthetic oligonucleotide
guaaagaacccauauuuac

SEQ ID NO: 348185 - RNA, 19 nt, Artificial Sequence
  Description of Artificial Sequence: Synthetic oligonucleotide
gacauauugcccaucaacc

SEQ ID NO: 348186 - RNA, 19 nt, Artificial Sequence
  Description of Artificial Sequence: Synthetic oligonucleotide
aauggcaucugaaaggugu

SEQ ID NO: 348187 - RNA, 19 nt, Artificial Sequence
  Description of Artificial Sequence: Synthetic oligonucleotide
agguaaagcggcuuccagc

SEQ ID NO: 348188 - RNA, 19 nt, Artificial Sequence
  Description of Artificial Sequence: Synthetic oligonucleotide
uguagagauaucagaggag

SEQ ID NO: 348189 - RNA, 19 nt, Artificial Sequence
  Description of Artificial Sequence: Synthetic oligonucleotide
ucugauguaaagaacccau

SEQ ID NO: 348190 - RNA, 19 nt, Artificial Sequence
  Description of Artificial Sequence: Synthetic oligonucleotide
ucaauagacuccaacccca

SEQ ID NO: 348191 - RNA, 19 nt, Artificial Sequence
  Description of Artificial Sequence: Synthetic oligonucleotide
uuauaggcaucauuaauaa

SEQ ID NO: 348192 - RNA, 19 nt, Artificial Sequence
  Description of Artificial Sequence: Synthetic oligonucleotide
aauaagugaucugaauuca

SEQ ID NO: 348193 - RNA, 19 nt, Artificial Sequence
  Description of Artificial Sequence: Synthetic oligonucleotide
uugugauucuuccaaagaa

SEQ ID NO: 348194 - RNA, 19 nt, Artificial Sequence
  Description of Artificial Sequence: Synthetic oligonucleotide
uuaccacgagggaugaugg

SEQ ID NO: 348195 - RNA, 19 nt, Artificial Sequence
  Description of Artificial Sequence: Synthetic oligonucleotide
agaaauucagauccgcuga

SEQ ID NO: 348196 - RNA, 19 nt, Artificial Sequence
  Description of Artificial Sequence: Synthetic oligonucleotide
cauauugcccaucaaccgg

SEQ ID NO: 348197 - RNA, 19 nt, Artificial Sequence
  Description of Artificial Sequence: Synthetic oligonucleotide
acgaacaaaacgcuuguug

SEQ ID NO: 348198 - RNA, 19 nt, Artificial Sequence
  Description of Artificial Sequence: Synthetic oligonucleotide
auaguuauuuacaaagucu

SEQ ID NO: 348199 - RNA, 19 nt, Artificial Sequence
  Description of Artificial Sequence: Synthetic oligonucleotide
auaagucucgaacccuggc

SEQ ID NO: 348200 - RNA, 19 nt, Artificial Sequence
  Description of Artificial Sequence: Synthetic oligonucleotide
ugucuaguuucaacggccg

SEQ ID NO: 348201 - RNA, 19 nt, Artificial Sequence
  Description of Artificial Sequence: Synthetic oligonucleotide
aguaaaucaauagacucca

SEQ ID NO: 348202 - RNA, 19 nt, Artificial Sequence
  Description of Artificial Sequence: Synthetic oligonucleotide
uccgaaguugccucgaccc

SEQ ID NO: 348203 - RNA, 19 nt, Artificial Sequence
  Description of Artificial Sequence: Synthetic oligonucleotide
ugcuugaaucaaaauauuc

SEQ ID NO: 348204 - RNA, 19 nt, Artificial Sequence
  Description of Artificial Sequence: Synthetic oligonucleotide
augcaaggggcauucuucc

SEQ ID NO: 348205 - RNA, 19 nt, Artificial Sequence
  Description of Artificial Sequence: Synthetic oligonucleotide
ucuuaugguauagaguaga

SEQ ID NO: 348206 - RNA, 19 nt, Artificial Sequence
  Description of Artificial Sequence: Synthetic oligonucleotide
uagaguagaaaagcgauaa

SEQ ID NO: 348207 - RNA, 19 nt, Artificial Sequence
  Description of Artificial Sequence: Synthetic oligonucleotide
aacaaaacgcuuguugaca

SEQ ID NO: 348208 - RNA, 19 nt, Artificial Sequence
  Description of Artificial Sequence: Synthetic oligonucleotide
uuuaagacuuuggcggugg

SEQ ID NO: 348209 - RNA, 19 nt, Artificial Sequence
  Description of Artificial Sequence: Synthetic oligonucleotide
aauauguuacaguucucua

SEQ ID NO: 348210 - RNA, 19 nt, Artificial Sequence
  Description of Artificial Sequence: Synthetic oligonucleotide
agaaagauaguuauuuaca

SEQ ID NO: 348211 - RNA, 19 nt, Artificial Sequence
  Description of Artificial Sequence: Synthetic oligonucleotide
agaaaagcgauaaugagua

SEQ ID NO: 348212 - RNA, 19 nt, Artificial Sequence
  Description of Artificial Sequence: Synthetic oligonucleotide
gauaaugaguaccgugggc

SEQ ID NO: 348213 - RNA, 19 nt, Artificial Sequence
  Description of Artificial Sequence: Synthetic oligonucleotide
aacgagaucugccccaccu

SEQ ID NO: 348214 - RNA, 19 nt, Artificial Sequence
  Description of Artificial Sequence: Synthetic oligonucleotide
auaaugaguaccgugggca

SEQ ID NO: 348215 - RNA, 19 nt, Artificial Sequence
  Description of Artificial Sequence: Synthetic oligonucleotide
aaauaagucucgaacccug

SEQ ID NO: 348216 - RNA, 19 nt, Artificial Sequence
  Description of Artificial Sequence: Synthetic oligonucleotide
ggcaaauaagucucgaacc

SEQ ID NO: 348217 - RNA, 19 nt, Artificial Sequence
  Description of Artificial Sequence: Synthetic oligonucleotide
caagccuccaaucacucgc

SEQ ID NO: 348218 - RNA, 19 nt, Artificial Sequence
  Description of Artificial Sequence: Synthetic oligonucleotide
cuuuguguacagauacugc

SEQ ID NO: 348219 - RNA, 19 nt, Artificial Sequence
  Description of Artificial Sequence: Synthetic oligonucleotide
cuauccaccacuccuuuag

SEQ ID NO: 348220 - RNA, 19 nt, Artificial Sequence
  Description of Artificial Sequence: Synthetic oligonucleotide
guuccaauccugcaggccc

SEQ ID NO: 348221 - RNA, 19 nt, Artificial Sequence
  Description of Artificial Sequence: Synthetic oligonucleotide
cagaaauucagauccgcug

SEQ ID NO: 348222 - RNA, 19 nt, Artificial Sequence
  Description of Artificial Sequence: Synthetic oligonucleotide
cacacgaacaaaacgcuug

SEQ ID NO: 348223 - RNA, 19 nt, Artificial Sequence
  Description of Artificial Sequence: Synthetic oligonucleotide
agccacaguucuuuuauag

SEQ ID NO: 348224 - RNA, 19 nt, Artificial Sequence
  Description of Artificial Sequence: Synthetic oligonucleotide
gguauagaguagaaaagcg

SEQ ID NO: 348225 - RNA, 19 nt, Artificial Sequence
  Description of Artificial Sequence: Synthetic oligonucleotide
ucucccaagaacuuuugaa

SEQ ID NO: 348226 - RNA, 19 nt, Artificial Sequence
  Description of Artificial Sequence: Synthetic oligonucleotide
cauguaauagauuccacaa

SEQ ID NO: 348227 - RNA, 19 nt, Artificial Sequence
  Description of Artificial Sequence: Synthetic oligonucleotide
aaguacaauguccaccuuu

SEQ ID NO: 348228 - RNA, 19 nt, Artificial Sequence
  Description of Artificial Sequence: Synthetic oligonucleotide
cugucuaguuucaacggcc

SEQ ID NO: 348229 - RNA, 19 nt, Artificial Sequence
  Description of Artificial Sequence: Synthetic oligonucleotide
agcgauaaugaguaccgug

SEQ ID NO: 348230 - RNA, 19 nt, Artificial Sequence
  Description of Artificial Sequence: Synthetic oligonucleotide
agugaucugaauucaaauu

SEQ ID NO: 348231 - RNA, 19 nt, Artificial Sequence
  Description of Artificial Sequence: Synthetic oligonucleotide
uaagucucgaacccuggcu

SEQ ID NO: 348232 - RNA, 19 nt, Artificial Sequence
  Description of Artificial Sequence: Synthetic oligonucleotide
auaguaauagagcaaccuu

SEQ ID NO: 348233 - RNA, 19 nt, Artificial Sequence
  Description of Artificial Sequence: Synthetic oligonucleotide
aauaagucucgaacccugg

SEQ ID NO: 348234 - RNA, 19 nt, Artificial Sequence
  Description of Artificial Sequence: Synthetic oligonucleotide
uucuuaugguauagaguag

SEQ ID NO: 348235 - RNA, 19 nt, Artificial Sequence
  Description of Artificial Sequence: Synthetic oligonucleotide
uuaaggaugccaguuuucu

SEQ ID NO: 348236 - RNA, 19 nt, Artificial Sequence
  Description of Artificial Sequence: Synthetic oligonucleotide
uccgcugacagugaugaag

SEQ ID NO: 348237 - RNA, 19 nt, Artificial Sequence
  Description of Artificial Sequence: Synthetic oligonucleotide
aaugaguaccgugggcaac

SEQ ID NO: 348238 - RNA, 19 nt, Artificial Sequence
  Description of Artificial Sequence: Synthetic oligonucleotide
gcaaguacugagcauagcc

SEQ ID NO: 348239 - RNA, 19 nt, Artificial Sequence
  Description of Artificial Sequence: Synthetic oligonucleotide
ugaaauccuugucauccca

SEQ ID NO: 348240 - RNA, 19 nt, Artificial Sequence
  Description of Artificial Sequence: Synthetic oligonucleotide
acuagguaaagcggcuucc

SEQ ID NO: 348241 - RNA, 19 nt, Artificial Sequence
  Description of Artificial Sequence: Synthetic oligonucleotide
ucaugguaagcuacugucu

SEQ ID NO: 348242 - RNA, 19 nt, Artificial Sequence
  Description of Artificial Sequence: Synthetic oligonucleotide
ucucuaauaccaugucccc

SEQ ID NO: 348243 - RNA, 19 nt, Artificial Sequence
  Description of Artificial Sequence: Synthetic oligonucleotide
guuucaacggccgaaggug

SEQ ID NO: 348244 - RNA, 19 nt, Artificial Sequence
  Description of Artificial Sequence: Synthetic oligonucleotide
gcacugucuaguuucaacg

SEQ ID NO: 348245 - RNA, 19 nt, Artificial Sequence
  Description of Artificial Sequence: Synthetic oligonucleotide
uccccaacacugaagaguc

SEQ ID NO: 348246 - RNA, 19 nt, Artificial Sequence
  Description of Artificial Sequence: Synthetic oligonucleotide
gcaaauaagucucgaaccc

SEQ ID NO: 348247 - RNA, 19 nt, Artificial Sequence
  Description of Artificial Sequence: Synthetic oligonucleotide
aagaguccacccauucccc

SEQ ID NO: 348248 - RNA, 19 nt, Artificial Sequence
  Description of Artificial Sequence: Synthetic oligonucleotide
aguuucaacggccgaaggu

SEQ ID NO: 348249 - RNA, 19 nt, Artificial Sequence
  Description of Artificial Sequence: Synthetic oligonucleotide
gaggacuagguaaagcggc

SEQ ID NO: 348250 - RNA, 19 nt, Artificial Sequence
  Description of Artificial Sequence: Synthetic oligonucleotide
aggucaaacgagaucugcc

SEQ ID NO: 348251 - RNA, 19 nt, Artificial Sequence
  Description of Artificial Sequence: Synthetic oligonucleotide
cuuaccacgagggaugaug

SEQ ID NO: 348252 - RNA, 19 nt, Artificial Sequence
  Description of Artificial Sequence: Synthetic oligonucleotide
gaagccguccaucuccacc

SEQ ID NO: 348253 - RNA, 19 nt, Artificial Sequence
  Description of Artificial Sequence: Synthetic oligonucleotide
uuauuucuagcuuggccuc

SEQ ID NO: 348254 - RNA, 19 nt, Artificial Sequence
  Description of Artificial Sequence: Synthetic oligonucleotide
cuguagagauaucagagga

SEQ ID NO: 348255 - RNA, 19 nt, Artificial Sequence
  Description of Artificial Sequence: Synthetic oligonucleotide
ugaugcucguccuuuuaug

SEQ ID NO: 348256 - RNA, 19 nt, Artificial Sequence
  Description of Artificial Sequence: Synthetic oligonucleotide
aguaauagagcaaccuucu

SEQ ID NO: 348257 - RNA, 19 nt, Artificial Sequence
  Description of Artificial Sequence: Synthetic oligonucleotide
acugagcauagcccagccc

SEQ ID NO: 348258 - RNA, 19 nt, Artificial Sequence
  Description of Artificial Sequence: Synthetic oligonucleotide
aaacgagaucugccccacc

SEQ ID NO: 348259 - RNA, 19 nt, Artificial Sequence
  Description of Artificial Sequence: Synthetic oligonucleotide
uagguaaagcggcuuccag

SEQ ID NO: 348260 - RNA, 19 nt, Artificial Sequence
  Description of Artificial Sequence: Synthetic oligonucleotide
aguuuucuagccaauuucu

SEQ ID NO: 348261 - RNA, 19 nt, Artificial Sequence
  Description of Artificial Sequence: Synthetic oligonucleotide
auguuacaguucucuauag

SEQ ID NO: 348262 - RNA, 19 nt, Artificial Sequence
  Description of Artificial Sequence: Synthetic oligonucleotide
uuugaacaggaaguaaauc

SEQ ID NO: 348263 - RNA, 19 nt, Artificial Sequence
  Description of Artificial Sequence: Synthetic oligonucleotide
uuucaacggccgaagguga

SEQ ID NO: 348264 - RNA, 19 nt, Artificial Sequence
  Description of Artificial Sequence: Synthetic oligonucleotide
augguaagcuacugucuuc

SEQ ID NO: 348265 - RNA, 19 nt, Artificial Sequence
  Description of Artificial Sequence: Synthetic oligonucleotide
uccuaggucuugauacugc

SEQ ID NO: 348266 - RNA, 19 nt, Artificial Sequence
  Description of Artificial Sequence: Synthetic oligonucleotide
agaggacuagguaaagcgg

SEQ ID NO: 348267 - RNA, 19 nt, Artificial Sequence
  Description of Artificial Sequence: Synthetic oligonucleotide
ugccgaacugaacaaucug

SEQ ID NO: 348268 - RNA, 19 nt, Artificial Sequence
  Description of Artificial Sequence: Synthetic oligonucleotide
guugacaaccucuagucua

SEQ ID NO: 348269 - RNA, 19 nt, Artificial Sequence
  Description of Artificial Sequence: Synthetic oligonucleotide
gcgauaaugaguaccgugg

SEQ ID NO: 348270 - RNA, 19 nt, Artificial Sequence
  Description of Artificial Sequence: Synthetic oligonucleotide
guauagaguagaaaagcga

SEQ ID NO: 348271 - RNA, 19 nt, Artificial Sequence
  Description of Artificial Sequence: Synthetic oligonucleotide
cagagaaaguacaaucuga

SEQ ID NO: 348272 - RNA, 19 nt, Artificial Sequence
  Description of Artificial Sequence: Synthetic oligonucleotide
caccuucucguucaugccg

SEQ ID NO: 348273 - RNA, 19 nt, Artificial Sequence
  Description of Artificial Sequence: Synthetic oligonucleotide
ucuaguuucaacggccgaa

SEQ ID NO: 348274 - RNA, 19 nt, Artificial Sequence
  Description of Artificial Sequence: Synthetic oligonucleotide
uuggcaaguacugagcaua

SEQ ID NO: 348275 - RNA, 19 nt, Artificial Sequence
  Description of Artificial Sequence: Synthetic oligonucleotide
augcucguccuuuuauguc

SEQ ID NO: 348276 - RNA, 19 nt, Artificial Sequence
  Description of Artificial Sequence: Synthetic oligonucleotide
uaaagaucugccugucgaa

SEQ ID NO: 348277 - RNA, 19 nt, Artificial Sequence
  Description of Artificial Sequence: Synthetic oligonucleotide
gugugaaagucacacgaac

SEQ ID NO: 348278 - RNA, 19 nt, Artificial Sequence
  Description of Artificial Sequence: Synthetic oligonucleotide
gucaaacgagaucugcccc

SEQ ID NO: 348279 - RNA, 19 nt, Artificial Sequence
  Description of Artificial Sequence: Synthetic oligonucleotide
agauaguuauuuacaaagu

SEQ ID NO: 348280 - RNA, 19 nt, Artificial Sequence
  Description of Artificial Sequence: Synthetic oligonucleotide
caugccgaacugaacaauc

SEQ ID NO: 348281 - RNA, 19 nt, Artificial Sequence
  Description of Artificial Sequence: Synthetic oligonucleotide
aauguagaccacagguacu

SEQ ID NO: 348282 - RNA, 19 nt, Artificial Sequence
  Description of Artificial Sequence: Synthetic oligonucleotide
agucucgaacccuggcugg

SEQ ID NO: 348283 - RNA, 19 nt, Artificial Sequence
  Description of Artificial Sequence: Synthetic oligonucleotide
guaauagauuccacaagac

SEQ ID NO: 348284 - RNA, 19 nt, Artificial Sequence
  Description of Artificial Sequence: Synthetic oligonucleotide
uaaauauguuacaguucuc

SEQ ID NO: 348285 - RNA, 19 nt, Artificial Sequence
  Description of Artificial Sequence: Synthetic oligonucleotide
ucgcucaauugcuuguuca

SEQ ID NO: 348286 - RNA, 19 nt, Artificial Sequence
  Description of Artificial Sequence: Synthetic oligonucleotide
uuaugguauagaguagaaa

SEQ ID NO: 348287 - RNA, 19 nt, Artificial Sequence
  Description of Artificial Sequence: Synthetic oligonucleotide
ugguaagcuacugucuucu

SEQ ID NO: 348288 - RNA, 19 nt, Artificial Sequence
  Description of Artificial Sequence: Synthetic oligonucleotide
ucacucgcucaauugcuug

SEQ ID NO: 348289 - RNA, 19 nt, Artificial Sequence
  Description of Artificial Sequence: Synthetic oligonucleotide
agagaaaguacaaucugaa

SEQ ID NO: 348290 - RNA, 19 nt, Artificial Sequence
  Description of Artificial Sequence: Synthetic oligonucleotide
ugcaaggggcauucuuccg

SEQ ID NO: 348291 - RNA, 19 nt, Artificial Sequence
  Description of Artificial Sequence: Synthetic oligonucleotide
gggcaaauaagucucgaac

SEQ ID NO: 348292 - RNA, 19 nt, Artificial Sequence
  Description of Artificial Sequence: Synthetic oligonucleotide
cuaguuucaacggccgaag

SEQ ID NO: 348293 - RNA, 19 nt, Artificial Sequence
  Description of Artificial Sequence: Synthetic oligonucleotide
uucaugccgaacugaacaa

SEQ ID NO: 348294 - RNA, 19 nt, Artificial Sequence
  Description of Artificial Sequence: Synthetic oligonucleotide
caagggcaaauaagucucg

SEQ ID NO: 348295 - RNA, 19 nt, Artificial Sequence
  Description of Artificial Sequence: Synthetic oligonucleotide
guacaaucugaaauccuug

SEQ ID NO: 348296 - RNA, 19 nt, Artificial Sequence
  Description of Artificial Sequence: Synthetic oligonucleotide
acuuuggcggugguuuccc

SEQ ID NO: 348297 - RNA, 19 nt, Artificial Sequence
  Description of Artificial Sequence: Synthetic oligonucleotide
uauucuuaucgggacucca

SEQ ID NO: 348298 - RNA, 19 nt, Artificial Sequence
  Description of Artificial Sequence: Synthetic oligonucleotide
uaaugaguaccgugggcaa

SEQ ID NO: 348299 - RNA, 19 nt, Artificial Sequence
  Description of Artificial Sequence: Synthetic oligonucleotide
uguagaccacagguacucg

SEQ ID NO: 348300 - RNA, 19 nt, Artificial Sequence
  Description of Artificial Sequence: Synthetic oligonucleotide
gacuagguaaagcggcuuc

SEQ ID NO: 348301 - RNA, 19 nt, Artificial Sequence
  Description of Artificial Sequence: Synthetic oligonucleotide
uccuuuguguacagauacu

SEQ ID NO: 348302 - RNA, 19 nt, Artificial Sequence
  Description of Artificial Sequence: Synthetic oligonucleotide
aagauugaugcucguccuu

SEQ ID NO: 348303 - RNA, 19 nt, Artificial Sequence
  Description of Artificial Sequence: Synthetic oligonucleotide
aagagaaugcaaggggcau

SEQ ID NO: 348304 - RNA, 19 nt, Artificial Sequence
  Description of Artificial Sequence: Synthetic oligonucleotide
auucuuaucgggacuccag

SEQ ID NO: 348305 - RNA, 19 nt, Artificial Sequence
  Description of Artificial Sequence: Synthetic oligonucleotide
uccgagcaagggcaaauaa

SEQ ID NO: 348306 - RNA, 19 nt, Artificial Sequence
  Description of Artificial Sequence: Synthetic oligonucleotide
gaaaagcgauaaugaguac

SEQ ID NO: 348307 - RNA, 19 nt, Artificial Sequence
  Description of Artificial Sequence: Synthetic oligonucleotide
caucaucuaucauccucgc

SEQ ID NO: 348308 - RNA, 19 nt, Artificial Sequence
  Description of Artificial Sequence: Synthetic oligonucleotide
acgaauuccauuauuucua

SEQ ID NO: 348309 - RNA, 19 nt, Artificial Sequence
  Description of Artificial Sequence: Synthetic oligonucleotide
uguuccaauccugcaggcc

SEQ ID NO: 348310 - RNA, 19 nt, Artificial Sequence
  Description of Artificial Sequence: Synthetic oligonucleotide
gguccgaccaaugccagcg

SEQ ID NO: 348311 - RNA, 19 nt, Artificial Sequence
  Description of Artificial Sequence: Synthetic oligonucleotide
ugcaugcuccagauaccag

SEQ ID NO: 348312 - RNA, 19 nt, Artificial Sequence
  Description of Artificial Sequence: Synthetic oligonucleotide
agcaaccuucuccacguca

SEQ ID NO: 348313 - RNA, 19 nt, Artificial Sequence
  Description of Artificial Sequence: Synthetic oligonucleotide
cuaauacuuccuuuucuaa

SEQ ID NO: 348314 - RNA, 19 nt, Artificial Sequence
  Description of Artificial Sequence: Synthetic oligonucleotide
uauuucuagcuuggccucc

SEQ ID NO: 348315 - RNA, 19 nt, Artificial Sequence
  Description of Artificial Sequence: Synthetic oligonucleotide
uuaugucugggguccaaua

SEQ ID NO: 348316 - RNA, 19 nt, Artificial Sequence
  Description of Artificial Sequence: Synthetic oligonucleotide
gaugcucguccuuuuaugu

SEQ ID NO: 348317 - RNA, 19 nt, Artificial Sequence
  Description of Artificial Sequence: Synthetic oligonucleotide
uccagauaccagccggcga

SEQ ID NO: 348318 - RNA, 19 nt, Artificial Sequence
  Description of Artificial Sequence: Synthetic oligonucleotide
agcacuccuguagagauau

SEQ ID NO: 348319 - RNA, 19 nt, Artificial Sequence
  Description of Artificial Sequence: Synthetic oligonucleotide
uagcugacagccuucucau

SEQ ID NO: 348320 - RNA, 19 nt, Artificial Sequence
  Description of Artificial Sequence: Synthetic oligonucleotide
ucacacgaacaaaacgcuu

SEQ ID NO: 348321 - RNA, 19 nt, Artificial Sequence
  Description of Artificial Sequence: Synthetic oligonucleotide
gaagauugaugcucguccu

SEQ ID NO: 348322 - RNA, 19 nt, Artificial Sequence
  Description of Artificial Sequence: Synthetic oligonucleotide
cugaagaguccacccauuc

SEQ ID NO: 348323 - RNA, 19 nt, Artificial Sequence
  Description of Artificial Sequence: Synthetic oligonucleotide
auucacgaauuccauuauu

SEQ ID NO: 348324 - RNA, 19 nt, Artificial Sequence
  Description of Artificial Sequence: Synthetic oligonucleotide
cuuaugguauagaguagaa

SEQ ID NO: 348325 - RNA, 19 nt, Artificial Sequence
  Description of Artificial Sequence: Synthetic oligonucleotide
agaguagaaaagcgauaau

SEQ ID NO: 348326 - RNA, 19 nt, Artificial Sequence
  Description of Artificial Sequence: Synthetic oligonucleotide
aggucuugauacugcuuug

SEQ ID NO: 348327 - RNA, 19 nt, Artificial Sequence
  Description of Artificial Sequence: Synthetic oligonucleotide
ucgaacccuggcuggacca

SEQ ID NO: 348328 - RNA, 19 nt, Artificial Sequence
  Description of Artificial Sequence: Synthetic oligonucleotide
cagguacucgauucucccc

SEQ ID NO: 348329 - RNA, 19 nt, Artificial Sequence
  Description of Artificial Sequence: Synthetic oligonucleotide
cacuuucaguaauguagac

SEQ ID NO: 348330 - RNA, 19 nt, Artificial Sequence
  Description of Artificial Sequence: Synthetic oligonucleotide
uaaggaugccaguuuucua

SEQ ID NO: 348331 - RNA, 19 nt, Artificial Sequence
  Description of Artificial Sequence: Synthetic oligonucleotide
guagaccacagguacucga

SEQ ID NO: 348332 - RNA, 19 nt, Artificial Sequence
  Description of Artificial Sequence: Synthetic oligonucleotide
guaauagagcaaccuucuc

SEQ ID NO: 348333 - RNA, 19 nt, Artificial Sequence
  Description of Artificial Sequence: Synthetic oligonucleotide
augaguaccgugggcaaca

SEQ ID NO: 348334 - RNA, 19 nt, Artificial Sequence
  Description of Artificial Sequence: Synthetic oligonucleotide
ccgcugacagugaugaagg

SEQ ID NO: 348335 - RNA, 19 nt, Artificial Sequence
  Description of Artificial Sequence: Synthetic oligonucleotide
cuuuaagacuuuggcggug

SEQ ID NO: 348336 - RNA, 19 nt, Artificial Sequence
  Description of Artificial Sequence: Synthetic oligonucleotide
cauaucauucuuaucuaau

SEQ ID NO: 348337 - RNA, 19 nt, Artificial Sequence
  Description of Artificial Sequence: Synthetic oligonucleotide
cacuguaaggcuucucuaa

SEQ ID NO: 348338 - RNA, 19 nt, Artificial Sequence
  Description of Artificial Sequence: Synthetic oligonucleotide
cacgagggaugauggacac

SEQ ID NO: 348339 - RNA, 19 nt, Artificial Sequence
  Description of Artificial Sequence: Synthetic oligonucleotide
ugggguuaaggaugccagu

SEQ ID NO: 348340 - RNA, 19 nt, Artificial Sequence
  Description of Artificial Sequence: Synthetic oligonucleotide
caaccauaucauucuuauc

SEQ ID NO: 348341 - RNA, 19 nt, Artificial Sequence
  Description of Artificial Sequence: Synthetic oligonucleotide
uucaacggccgaaggugaa

SEQ ID NO: 348342 - RNA, 19 nt, Artificial Sequence
  Description of Artificial Sequence: Synthetic oligonucleotide
ccuuuguguacagauacug

SEQ ID NO: 348343 - RNA, 19 nt, Artificial Sequence
  Description of Artificial Sequence: Synthetic oligonucleotide
cucgaacccuggcuggacc

SEQ ID NO: 348344 - RNA, 19 nt, Artificial Sequence
  Description of Artificial Sequence: Synthetic oligonucleotide
ggcacugucuaguuucaac

SEQ ID NO: 348345 - RNA, 19 nt, Artificial Sequence
  Description of Artificial Sequence: Synthetic oligonucleotide
auaagugaucugaauucaa

SEQ ID NO: 348346 - RNA, 19 nt, Artificial Sequence
  Description of Artificial Sequence: Synthetic oligonucleotide
agauugaugcucguccuuu

SEQ ID NO: 348347 - RNA, 19 nt, Artificial Sequence
  Description of Artificial Sequence: Synthetic oligonucleotide
ccgagcaagggcaaauaag

SEQ ID NO: 348348 - RNA, 19 nt, Artificial Sequence
  Description of Artificial Sequence: Synthetic oligonucleotide
gacuuuggcggugguuucc

SEQ ID NO: 348349 - RNA, 19 nt, Artificial Sequence
  Description of Artificial Sequence: Synthetic oligonucleotide
uuggcggugguuuccccaa

SEQ ID NO: 348350 - RNA, 19 nt, Artificial Sequence
  Description of Artificial Sequence: Synthetic oligonucleotide
auagaguagaaaagcgaua

SEQ ID NO: 348351 - RNA, 19 nt, Artificial Sequence
  Description of Artificial Sequence: Synthetic oligonucleotide
ugccugucgaagcggccug

SEQ ID NO: 348352 - RNA, 19 nt, Artificial Sequence
  Description of Artificial Sequence: Synthetic oligonucleotide
aagcgauaaugaguaccgu

SEQ ID NO: 348353 - RNA, 19 nt, Artificial Sequence
  Description of Artificial Sequence: Synthetic oligonucleotide
agggucaugcacauccugu

SEQ ID NO: 348354 - RNA, 19 nt, Artificial Sequence
  Description of Artificial Sequence: Synthetic oligonucleotide
cuccagauaccagccggcg

SEQ ID NO: 348355 - RNA, 19 nt, Artificial Sequence
  Description of Artificial Sequence: Synthetic oligonucleotide
augccagcgggcccucuuc

SEQ ID NO: 348356 - RNA, 19 nt, Artificial Sequence
  Description of Artificial Sequence: Synthetic oligonucleotide
ucuauccaccacuccuuua

SEQ ID NO: 348357 - RNA, 19 nt, Artificial Sequence
  Description of Artificial Sequence: Synthetic oligonucleotide
uaucauccucgcaguggcu

SEQ ID NO: 348358 - RNA, 19 nt, Artificial Sequence
  Description of Artificial Sequence: Synthetic oligonucleotide
cuacacugccaauauuaaa

SEQ ID NO: 348359 - RNA, 19 nt, Artificial Sequence
  Description of Artificial Sequence: Synthetic oligonucleotide
guaaagcggcuuccagccc

SEQ ID NO: 348360 - RNA, 19 nt, Artificial Sequence
  Description of Artificial Sequence: Synthetic oligonucleotide
ucaugccgaacugaacaau

SEQ ID NO: 348361 - RNA, 19 nt, Artificial Sequence
  Description of Artificial Sequence: Synthetic oligonucleotide
ucaacggccgaaggugaac

SEQ ID NO: 348362 - RNA, 19 nt, Artificial Sequence
  Description of Artificial Sequence: Synthetic oligonucleotide
cgaacaaaacgcuuguuga

SEQ ID NO: 348363 - RNA, 19 nt, Artificial Sequence
  Description of Artificial Sequence: Synthetic oligonucleotide
agcggccuggcccucaaaa

SEQ ID NO: 348364 - RNA, 19 nt, Artificial Sequence
  Description of Artificial Sequence: Synthetic oligonucleotide
gaauggagagugggugaug

SEQ ID NO: 348365 - RNA, 19 nt, Artificial Sequence
  Description of Artificial Sequence: Synthetic oligonucleotide
cucaaaagggcugggucca

SEQ ID NO: 348366 - RNA, 19 nt, Artificial Sequence
  Description of Artificial Sequence: Synthetic oligonucleotide
uaccacgagggaugaugga

SEQ ID NO: 348367 - RNA, 19 nt, Artificial Sequence
  Description of Artificial Sequence: Synthetic oligonucleotide
aagccuccaaucacucgcu

SEQ ID NO: 348368 - RNA, 19 nt, Artificial Sequence
  Description of Artificial Sequence: Synthetic oligonucleotide
cgauaaugaguaccguggg

SEQ ID NO: 348369 - RNA, 19 nt, Artificial Sequence
  Description of Artificial Sequence: Synthetic oligonucleotide
cugauguaaagaacccaua

SEQ ID NO: 348370 - RNA, 19 nt, Artificial Sequence
  Description of Artificial Sequence: Synthetic oligonucleotide
aggacuagguaaagcggcu

SEQ ID NO: 348371 - RNA, 19 nt, Artificial Sequence
  Description of Artificial Sequence: Synthetic oligonucleotide
aacggccgaaggugaacuu

SEQ ID NO: 348372 - RNA, 19 nt, Artificial Sequence
  Description of Artificial Sequence: Synthetic oligonucleotide
ucuggccgauuugugccug

SEQ ID NO: 348373 - RNA, 19 nt, Artificial Sequence
  Description of Artificial Sequence: Synthetic oligonucleotide
cugucgaagcggccuggcc

SEQ ID NO: 348374 - RNA, 19 nt, Artificial Sequence
  Description of Artificial Sequence: Synthetic oligonucleotide
aucauccucgcaguggcuu

SEQ ID NO: 348375 - RNA, 19 nt, Artificial Sequence
  Description of Artificial Sequence: Synthetic oligonucleotide
agccggcgacugcauggcc

SEQ ID NO: 348376 - RNA, 19 nt, Artificial Sequence
  Description of Artificial Sequence: Synthetic oligonucleotide
agucuauccaccacuccuu

SEQ ID NO: 348377 - RNA, 19 nt, Artificial Sequence
  Description of Artificial Sequence: Synthetic oligonucleotide
ugccaguuuucuagccaau

SEQ ID NO: 348378 - RNA, 19 nt, Artificial Sequence
  Description of Artificial Sequence: Synthetic oligonucleotide
gguuuccccaacacugaag

SEQ ID NO: 348379 - RNA, 19 nt, Artificial Sequence
  Description of Artificial Sequence: Synthetic oligonucleotide
caccacuccuuuagaaaga

SEQ ID NO: 348380 - RNA, 19 nt, Artificial Sequence
  Description of Artificial Sequence: Synthetic oligonucleotide
ggcgugggaggucaaacga

SEQ ID NO: 348381 - RNA, 19 nt, Artificial Sequence
  Description of Artificial Sequence: Synthetic oligonucleotide
gcaaggggcauucuuccga

SEQ ID NO: 348382 - RNA, 19 nt, Artificial Sequence
  Description of Artificial Sequence: Synthetic oligonucleotide
cagcaauaagugaucugaa

SEQ ID NO: 348383 - RNA, 19 nt, Artificial Sequence
  Description of Artificial Sequence: Synthetic oligonucleotide
cuagguaaagcggcuucca

SEQ ID NO: 348384 - RNA, 19 nt, Artificial Sequence
  Description of Artificial Sequence: Synthetic oligonucleotide
agagaaugcaaggggcauu

SEQ ID NO: 348385 - RNA, 19 nt, Artificial Sequence
  Description of Artificial Sequence: Synthetic oligonucleotide
cugcaugcuccagauacca

SEQ ID NO: 348386 - RNA, 19 nt, Artificial Sequence
  Description of Artificial Sequence: Synthetic oligonucleotide
caauagacuccaaccccaa

SEQ ID NO: 348387 - RNA, 19 nt, Artificial Sequence
  Description of Artificial Sequence: Synthetic oligonucleotide
caaauaagucucgaacccu

SEQ ID NO: 348388 - RNA, 19 nt, Artificial Sequence
  Description of Artificial Sequence: Synthetic oligonucleotide
agauccgcugacagugaug

SEQ ID NO: 348389 - RNA, 19 nt, Artificial Sequence
  Description of Artificial Sequence: Synthetic oligonucleotide
gucacacgaacaaaacgcu

SEQ ID NO: 348390 - RNA, 19 nt, Artificial Sequence
  Description of Artificial Sequence: Synthetic oligonucleotide
ccaauaaagaucugccugu

SEQ ID NO: 348391 - RNA, 19 nt, Artificial Sequence
  Description of Artificial Sequence: Synthetic oligonucleotide
ggugucuugcagcaaucaa

SEQ ID NO: 348392 - RNA, 19 nt, Artificial Sequence
  Description of Artificial Sequence: Synthetic oligonucleotide
ccccuuaccacgagggaug

SEQ ID NO: 348393 - RNA, 19 nt, Artificial Sequence
  Description of Artificial Sequence: Synthetic oligonucleotide
ccagacauauugcccauca

SEQ ID NO: 348394 - RNA, 19 nt, Artificial Sequence
  Description of Artificial Sequence: Synthetic oligonucleotide
ugcccaucaaccggaguuu

SEQ ID NO: 348395 - RNA, 19 nt, Artificial Sequence
  Description of Artificial Sequence: Synthetic oligonucleotide
caguugugauucuuccaaa

SEQ ID NO: 348396 - RNA, 19 nt, Artificial Sequence
  Description of Artificial Sequence: Synthetic oligonucleotide
agccccuuaccacgaggga

SEQ ID NO: 348397 - RNA, 19 nt, Artificial Sequence
  Description of Artificial Sequence: Synthetic oligonucleotide
cucgcaguggcuucacugu

SEQ ID NO: 348398 - RNA, 19 nt, Artificial Sequence
  Description of Artificial Sequence: Synthetic oligonucleotide
acgagaucugccccaccuu

SEQ ID NO: 348399 - RNA, 19 nt, Artificial Sequence
  Description of Artificial Sequence: Synthetic oligonucleotide
cuuagcuagcaguguuuua

SEQ ID NO: 348400 - RNA, 19 nt, Artificial Sequence
  Description of Artificial Sequence: Synthetic oligonucleotide
cuggccgauuugugccugc

SEQ ID NO: 348401 - RNA, 19 nt, Artificial Sequence
  Description of Artificial Sequence: Synthetic oligonucleotide
ccaaccccaaaagaaagca

SEQ ID NO: 348402 - RNA, 19 nt, Artificial Sequence
  Description of Artificial Sequence: Synthetic oligonucleotide
caccuuuaagagugggucu

SEQ ID NO: 348403 - RNA, 19 nt, Artificial Sequence
  Description of Artificial Sequence: Synthetic oligonucleotide
agacucggccacccagggu

SEQ ID NO: 348404 - RNA, 19 nt, Artificial Sequence
  Description of Artificial Sequence: Synthetic oligonucleotide
cagaaugucuggccgauuu

SEQ ID NO: 348405 - RNA, 19 nt, Artificial Sequence
  Description of Artificial Sequence: Synthetic oligonucleotide
uccucgcaguggcuucacu

SEQ ID NO: 348406 - RNA, 19 nt, Artificial Sequence
  Description of Artificial Sequence: Synthetic oligonucleotide
gggccggugagaauggcac

SEQ ID NO: 348407 - RNA, 19 nt, Artificial Sequence
  Description of Artificial Sequence: Synthetic oligonucleotide
cgagcaagggcaaauaagu

SEQ ID NO: 348408 - RNA, 19 nt, Artificial Sequence
  Description of Artificial Sequence: Synthetic oligonucleotide
aguugccucgaccccucuu

SEQ ID NO: 348409 - RNA, 19 nt, Artificial Sequence
  Description of Artificial Sequence: Synthetic oligonucleotide
ccauaucauucuuaucuaa

SEQ ID NO: 348410 - RNA, 19 nt, Artificial Sequence
  Description of Artificial Sequence: Synthetic oligonucleotide
gggacuccagcugaauuuc

SEQ ID NO: 348411 - RNA, 19 nt, Artificial Sequence
  Description of Artificial Sequence: Synthetic oligonucleotide
guaaaucaauagacuccaa

SEQ ID NO: 348412 - RNA, 19 nt, Artificial Sequence
  Description of Artificial Sequence: Synthetic oligonucleotide
guacaauguccaccuuuua

SEQ ID NO: 348413 - RNA, 19 nt, Artificial Sequence
  Description of Artificial Sequence: Synthetic oligonucleotide
auccucgcaguggcuucac

SEQ ID NO: 348414 - RNA, 19 nt, Artificial Sequence
  Description of Artificial Sequence: Synthetic oligonucleotide
aucacucgcucaauugcuu

SEQ ID NO: 348415 - RNA, 19 nt, Artificial Sequence
  Description of Artificial Sequence: Synthetic oligonucleotide
ggugugaaagucacacgaa

SEQ ID NO: 348416 - RNA, 19 nt, Artificial Sequence
  Description of Artificial Sequence: Synthetic oligonucleotide
gcgugggaggucaaacgag

SEQ ID NO: 348417 - RNA, 19 nt, Artificial Sequence
  Description of Artificial Sequence: Synthetic oligonucleotide
uggcggugguuuccccaac

SEQ ID NO: 348418 - RNA, 19 nt, Artificial Sequence
  Description of Artificial Sequence: Synthetic oligonucleotide
ugaguaccgugggcaacau

SEQ ID NO: 348419 - RNA, 19 nt, Artificial Sequence
  Description of Artificial Sequence: Synthetic oligonucleotide
ggagggccggugagaaugg

SEQ ID NO: 348420 - RNA, 19 nt, Artificial Sequence
  Description of Artificial Sequence: Synthetic oligonucleotide
ccgaaguugccucgacccc

SEQ ID NO: 348421 - RNA, 19 nt, Artificial Sequence
  Description of Artificial Sequence: Synthetic oligonucleotide
gccacccagggucaugcac

SEQ ID NO: 348422 - RNA, 19 nt, Artificial Sequence
  Description of Artificial Sequence: Synthetic oligonucleotide
ccagccccuuaccacgagg

SEQ ID NO: 348423 - RNA, 19 nt, Artificial Sequence
  Description of Artificial Sequence: Synthetic oligonucleotide
ggcaaguacugagcauagc

SEQ ID NO: 348424 - RNA, 19 nt, Artificial Sequence
  Description of Artificial Sequence: Synthetic oligonucleotide
gaagagccacaguucuuuu

SEQ ID NO: 348425 - RNA, 19 nt, Artificial Sequence
  Description of Artificial Sequence: Synthetic oligonucleotide
gagcaaccuucuccacguc

SEQ ID NO: 348426 - RNA, 19 nt, Artificial Sequence
  Description of Artificial Sequence: Synthetic oligonucleotide
cuagccaauuucuccuuuu

SEQ ID NO: 348427 - RNA, 19 nt, Artificial Sequence
  Description of Artificial Sequence: Synthetic oligonucleotide
agauuccacaagacagcuu

SEQ ID NO: 348428 - RNA, 19 nt, Artificial Sequence
  Description of Artificial Sequence: Synthetic oligonucleotide
gagggccggugagaauggc

SEQ ID NO: 348429 - RNA, 19 nt, Artificial Sequence
  Description of Artificial Sequence: Synthetic oligonucleotide
gccgguccgaccaaugcca

SEQ ID NO: 348430 - RNA, 19 nt, Artificial Sequence
  Description of Artificial Sequence: Synthetic oligonucleotide
ccgugggcaacaugcucag

SEQ ID NO: 348431 - RNA, 19 nt, Artificial Sequence
  Description of Artificial Sequence: Synthetic oligonucleotide
ucggccacccagggucaug

SEQ ID NO: 348432 - RNA, 19 nt, Artificial Sequence
  Description of Artificial Sequence: Synthetic oligonucleotide
gcgaaguguccucauccaa

SEQ ID NO: 348433 - RNA, 19 nt, Artificial Sequence
  Description of Artificial Sequence: Synthetic oligonucleotide
gcccuccgaaguugccucg

SEQ ID NO: 348434 - RNA, 19 nt, Artificial Sequence
  Description of Artificial Sequence: Synthetic oligonucleotide
ccgcuccuuguuccaaucc

SEQ ID NO: 348435 - RNA, 19 nt, Artificial Sequence
  Description of Artificial Sequence: Synthetic oligonucleotide
cgugggaggucaaacgaga

SEQ ID NO: 348436 - RNA, 19 nt, Artificial Sequence
  Description of Artificial Sequence: Synthetic oligonucleotide
cauccucgcaguggcuuca

SEQ ID NO: 348437 - RNA, 19 nt, Artificial Sequence
  Description of Artificial Sequence: Synthetic oligonucleotide
gccgaaggugaacuuugaa

SEQ ID NO: 348438 - RNA, 19 nt, Artificial Sequence
  Description of Artificial Sequence: Synthetic oligonucleotide
aagcggccuggcccucaaa

SEQ ID NO: 348439 - RNA, 19 nt, Artificial Sequence
  Description of Artificial Sequence: Synthetic oligonucleotide
ccauuccccggccgguccg

SEQ ID NO: 348440 - RNA, 19 nt, Artificial Sequence
  Description of Artificial Sequence: Synthetic oligonucleotide
ccggcgacugcauggccug

SEQ ID NO: 348441 - RNA, 19 nt, Artificial Sequence
  Description of Artificial Sequence: Synthetic oligonucleotide
caacggccgaaggugaacu

SEQ ID NO: 348442 - RNA, 19 nt, Artificial Sequence
  Description of Artificial Sequence: Synthetic oligonucleotide
auccgcugacagugaugaa

SEQ ID NO: 348443 - RNA, 19 nt, Artificial Sequence
  Description of Artificial Sequence: Synthetic oligonucleotide
ccuaggucuugauacugcu

SEQ ID NO: 348444 - RNA, 19 nt, Artificial Sequence
  Description of Artificial Sequence: Synthetic oligonucleotide
ccugaaaacccugggguua

SEQ ID NO: 348445 - RNA, 19 nt, Artificial Sequence
  Description of Artificial Sequence: Synthetic oligonucleotide
gggguuaaggaugccaguu

SEQ ID NO: 348446 - RNA, 19 nt, Artificial Sequence
  Description of Artificial Sequence: Synthetic oligonucleotide
cagcacuccuguagagaua

SEQ ID NO: 348447 - RNA, 19 nt, Artificial Sequence
  Description of Artificial Sequence: Synthetic oligonucleotide
ccgguccgaccaaugccag

SEQ ID NO: 348448 - RNA, 19 nt, Artificial Sequence
  Description of Artificial Sequence: Synthetic oligonucleotide
guaccgugggcaacaugcu

SEQ ID NO: 348449 - RNA, 19 nt, Artificial Sequence
  Description of Artificial Sequence: Synthetic oligonucleotide
cugccugucgaagcggccu

SEQ ID NO: 348450 - RNA, 19 nt, Artificial Sequence
  Description of Artificial Sequence: Synthetic oligonucleotide
cccgcuccuuguuccaauc

SEQ ID NO: 348451 - RNA, 19 nt, Artificial Sequence
  Description of Artificial Sequence: Synthetic oligonucleotide
ccaguuuucuagccaauuu

SEQ ID NO: 348452 - RNA, 19 nt, Artificial Sequence
  Description of Artificial Sequence: Synthetic oligonucleotide
gcaaucaaagcagcuucau

SEQ ID NO: 348453 - RNA, 19 nt, Artificial Sequence
  Description of Artificial Sequence: Synthetic oligonucleotide
cagauccgcugacagugau

SEQ ID NO: 348454 - RNA, 19 nt, Artificial Sequence
  Description of Artificial Sequence: Synthetic oligonucleotide
cacucugcccuccgaaguu

SEQ ID NO: 348455 - RNA, 19 nt, Artificial Sequence
  Description of Artificial Sequence: Synthetic oligonucleotide
ccuagcugacagccuucuc

SEQ ID NO: 348456 - RNA, 19 nt, Artificial Sequence
  Description of Artificial Sequence: Synthetic oligonucleotide
gggccuagcugacagccuu

SEQ ID NO: 348457 - RNA, 19 nt, Artificial Sequence
  Description of Artificial Sequence: Synthetic oligonucleotide
ggccgaaggugaacuuuga

SEQ ID NO: 348458 - RNA, 19 nt, Artificial Sequence
  Description of Artificial Sequence: Synthetic oligonucleotide
cggccgguccgaccaaugc

SEQ ID NO: 348459 - RNA, 19 nt, Artificial Sequence
  Description of Artificial Sequence: Synthetic oligonucleotide
ucgaagcggccuggcccuc

SEQ ID NO: 348460 - RNA, 19 nt, Artificial Sequence
  Description of Artificial Sequence: Synthetic oligonucleotide
cauuccccggccgguccga

SEQ ID NO: 348461 - RNA, 19 nt, Artificial Sequence
  Description of Artificial Sequence: Synthetic oligonucleotide
ggccuagcugacagccuuc

SEQ ID NO: 348462 - RNA, 19 nt, Artificial Sequence
  Description of Artificial Sequence: Synthetic oligonucleotide
ccgcucaaaggugucuaca

SEQ ID NO: 348463 - RNA, 19 nt, Artificial Sequence
  Description of Artificial Sequence: Synthetic oligonucleotide
gccccuuaccacgagggau

SEQ ID NO: 348464 - RNA, 19 nt, Artificial Sequence
  Description of Artificial Sequence: Synthetic oligonucleotide
cgguccgaccaaugccagc

SEQ ID NO: 348465 - RNA, 19 nt, Artificial Sequence
  Description of Artificial Sequence: Synthetic oligonucleotide
ccggccgguccgaccaaug

SEQ ID NO: 348466 - RNA, 19 nt, Artificial Sequence
  Description of Artificial Sequence: Synthetic oligonucleotide
gccaguuuucuagccaauu

SEQ ID NO: 348467 - RNA, 19 nt, Artificial Sequence
  Description of Artificial Sequence: Synthetic oligonucleotide
cccagccccuuaccacgag

SEQ ID NO: 348468 - RNA, 19 nt, Artificial Sequence
  Description of Artificial Sequence: Synthetic oligonucleotide
gccucgaccccucuuccuu

SEQ ID NO: 348469 - RNA, 19 nt, Artificial Sequence
  Description of Artificial Sequence: Synthetic oligonucleotide
ggacuagguaaagcggcuu

SEQ ID NO: 348470 - RNA, 19 nt, Artificial Sequence
  Description of Artificial Sequence: Synthetic oligonucleotide
gccuagcugacagccuucu

SEQ ID NO: 348471 - RNA, 19 nt, Artificial Sequence
  Description of Artificial Sequence: Synthetic oligonucleotide
cccuuaccacgagggauga

SEQ ID NO: 348472 - RNA, 19 nt, Artificial Sequence
  Description of Artificial Sequence: Synthetic oligonucleotide
ccuucucguucaugccgaa

SEQ ID NO: 348473 - RNA, 19 nt, Artificial Sequence
  Description of Artificial Sequence: Synthetic oligonucleotide
cgugggcaacaugcucagc

SEQ ID NO: 348474 - RNA, 19 nt, Artificial Sequence
  Description of Artificial Sequence: Synthetic oligonucleotide
gcacuccuguagagauauc

SEQ ID NO: 348475 - RNA, 19 nt, Artificial Sequence
  Description of Artificial Sequence: Synthetic oligonucleotide
cccuccgaaguugccucga

SEQ ID NO: 348476 - RNA, 19 nt, Artificial Sequence
  Description of Artificial Sequence: Synthetic oligonucleotide
ccaaugccagcgggcccuc

SEQ ID NO: 348477 - RNA, 19 nt, Artificial Sequence
  Description of Artificial Sequence: Synthetic oligonucleotide
ggggcucgucuuucucuuu

SEQ ID NO: 348478 - RNA, 19 nt, Artificial Sequence
  Description of Artificial Sequence: Synthetic oligonucleotide
gcccaucaaccggaguuuu

SEQ ID NO: 348479 - RNA, 19 nt, Artificial Sequence
  Description of Artificial Sequence: Synthetic oligonucleotide
cggcgacugcauggccugc

SEQ ID NO: 348480 - RNA, 19 nt, Artificial Sequence
  Description of Artificial Sequence: Synthetic oligonucleotide
cgaagcggccuggcccuca

SEQ ID NO: 348481 - RNA, 19 nt, Artificial Sequence
  Description of Artificial Sequence: Synthetic oligonucleotide
cggugagaauggcacccuu

SEQ ID NO: 348482 - RNA, 19 nt, Artificial Sequence
  Description of Artificial Sequence: Synthetic oligonucleotide
ccagaaugucuggccgauu

SEQ ID NO: 348483 - RNA, 19 nt, Artificial Sequence
  Description of Artificial Sequence: Synthetic oligonucleotide
cccuggcgugggaggucaa

SEQ ID NO: 348484 - RNA, 19 nt, Artificial Sequence
  Description of Artificial Sequence: Synthetic oligonucleotide
ccuuaccacgagggaugau

SEQ ID NO: 348485 - RNA, 19 nt, Artificial Sequence
  Description of Artificial Sequence: Synthetic oligonucleotide
ucuacuagcagcuucacgc

SEQ ID NO: 348486 - RNA, 19 nt, Artificial Sequence
  Description of Artificial Sequence: Synthetic oligonucleotide
uuaucugcgaucaugacca

SEQ ID NO: 348487 - RNA, 19 nt, Artificial Sequence
  Description of Artificial Sequence: Synthetic oligonucleotide
uaggcuaacaguaacagca

SEQ ID NO: 348488 - RNA, 19 nt, Artificial Sequence
  Description of Artificial Sequence: Synthetic oligonucleotide
cuugucauaaccaaggaug

SEQ ID NO: 348489 - RNA, 19 nt, Artificial Sequence
  Description of Artificial Sequence: Synthetic oligonucleotide
ugaacuuucgggaaagggg

SEQ ID NO: 348490 - RNA, 19 nt, Artificial Sequence
  Description of Artificial Sequence: Synthetic oligonucleotide
uagugaagcauccagaaug

SEQ ID NO: 348491 - RNA, 19 nt, Artificial Sequence
  Description of Artificial Sequence: Synthetic oligonucleotide
uagaacguaggugagaagg

SEQ ID NO: 348492 - RNA, 19 nt, Artificial Sequence
  Description of Artificial Sequence: Synthetic oligonucleotide
aacuugaagagcucuagug

SEQ ID NO: 348493 - RNA, 19 nt, Artificial Sequence
  Description of Artificial Sequence: Synthetic oligonucleotide
ugauacucggacaggaccg

SEQ ID NO: 348494 - RNA, 19 nt, Artificial Sequence
  Description of Artificial Sequence: Synthetic oligonucleotide
gaugugaacauuugcuccg

SEQ ID NO: 348495 - RNA, 19 nt, Artificial Sequence
  Description of Artificial Sequence: Synthetic oligonucleotide
ucugcgaucaugaccagag

SEQ ID NO: 348496 - RNA, 19 nt, Artificial Sequence
  Description of Artificial Sequence: Synthetic oligonucleotide
uacagugauacucggacag

SEQ ID NO: 348497 - RNA, 19 nt, Artificial Sequence
  Description of Artificial Sequence: Synthetic oligonucleotide
caguaauagguaaauaccc

SEQ ID NO: 348498 - RNA, 19 nt, Artificial Sequence
  Description of Artificial Sequence: Synthetic oligonucleotide
uucucuauggcaauaugca

SEQ ID NO: 348499 - RNA, 19 nt, Artificial Sequence
  Description of Artificial Sequence: Synthetic oligonucleotide
cauucagucuccaugaaac

SEQ ID NO: 348500 - RNA, 19 nt, Artificial Sequence
  Description of Artificial Sequence: Synthetic oligonucleotide
aguuucaggggugugaggc

SEQ ID NO: 348501 - RNA, 19 nt, Artificial Sequence
  Description of Artificial Sequence: Synthetic oligonucleotide
agcaguagaacguagguga

SEQ ID NO: 348502 - RNA, 19 nt, Artificial Sequence
  Description of Artificial Sequence: Synthetic oligonucleotide
uccuaagagaggccgaugg

SEQ ID NO: 348503 - RNA, 19 nt, Artificial Sequence
  Description of Artificial Sequence: Synthetic oligonucleotide
aguaauagguaaauacccc

SEQ ID NO: 348504 - RNA, 19 nt, Artificial Sequence
  Description of Artificial Sequence: Synthetic oligonucleotide
uguacgcagagucagugag

SEQ ID NO: 348505 - RNA, 19 nt, Artificial Sequence
  Description of Artificial Sequence: Synthetic oligonucleotide
uguucugucacuguggugu

SEQ ID NO: 348506 - RNA, 19 nt, Artificial Sequence
  Description of Artificial Sequence: Synthetic oligonucleotide
agcagauucaaccagccca

SEQ ID NO: 348507 - RNA, 19 nt, Artificial Sequence
  Description of Artificial Sequence: Synthetic oligonucleotide
aguaaagcagauucaacca

SEQ ID NO: 348508 - RNA, 19 nt, Artificial Sequence
  Description of Artificial Sequence: Synthetic oligonucleotide
uuggugguaggcaacaaug

SEQ ID NO: 348509 - RNA, 19 nt, Artificial Sequence
  Description of Artificial Sequence: Synthetic oligonucleotide
uaacaggcgaaguugaaga

SEQ ID NO: 348510 - RNA, 19 nt, Artificial Sequence
  Description of Artificial Sequence: Synthetic oligonucleotide
guuaucugcgaucaugacc

SEQ ID NO: 348511 - RNA, 19 nt, Artificial Sequence
  Description of Artificial Sequence: Synthetic oligonucleotide
ucugaggggacgaaauucc

SEQ ID NO: 348512 - RNA, 19 nt, Artificial Sequence
  Description of Artificial Sequence: Synthetic oligonucleotide
acuguagaugccugugugc

SEQ ID NO: 348513 - RNA, 19 nt, Artificial Sequence
  Description of Artificial Sequence: Synthetic oligonucleotide
ucggaugugaacauuugcu

SEQ ID NO: 348514 - RNA, 19 nt, Artificial Sequence
  Description of Artificial Sequence: Synthetic oligonucleotide
ucccuuucgauucacuuug

SEQ ID NO: 348515 - RNA, 19 nt, Artificial Sequence
  Description of Artificial Sequence: Synthetic oligonucleotide
ucacccauaccaaugguga

SEQ ID NO: 348516 - RNA, 19 nt, Artificial Sequence
  Description of Artificial Sequence: Synthetic oligonucleotide
ugacgucauccuaagagag

SEQ ID NO: 348517 - RNA, 19 nt, Artificial Sequence
  Description of Artificial Sequence: Synthetic oligonucleotide
ugcgaucaugaccagagca

SEQ ID NO: 348518 - RNA, 19 nt, Artificial Sequence
  Description of Artificial Sequence: Synthetic oligonucleotide
ugaaaggcgaugauuucca

SEQ ID NO: 348519 - RNA, 19 nt, Artificial Sequence
  Description of Artificial Sequence: Synthetic oligonucleotide
aaggacguaggcuaacagu

SEQ ID NO: 348520 - RNA, 19 nt, Artificial Sequence
  Description of Artificial Sequence: Synthetic oligonucleotide
agcaccgaauucuuuuccc

SEQ ID NO: 348521 - RNA, 19 nt, Artificial Sequence
  Description of Artificial Sequence: Synthetic oligonucleotide
aaacgcagcaccugggaca

SEQ ID NO: 348522 - RNA, 19 nt, Artificial Sequence
  Description of Artificial Sequence: Synthetic oligonucleotide
uucagcggcucuaaaacca

SEQ ID NO: 348523 - RNA, 19 nt, Artificial Sequence
  Description of Artificial Sequence: Synthetic oligonucleotide
gaacuuucgggaaaggggc

SEQ ID NO: 348524 - RNA, 19 nt, Artificial Sequence
  Description of Artificial Sequence: Synthetic oligonucleotide
auacauguggaucaccagu

SEQ ID NO: 348525 - RNA, 19 nt, Artificial Sequence
  Description of Artificial Sequence: Synthetic oligonucleotide
agugaagcauccagaaugc

SEQ ID NO: 348526 - RNA, 19 nt, Artificial Sequence
  Description of Artificial Sequence: Synthetic oligonucleotide
gaaauuccgguccucgccc

SEQ ID NO: 348527 - RNA, 19 nt, Artificial Sequence
  Description of Artificial Sequence: Synthetic oligonucleotide
aacguaggugagaaggacg

SEQ ID NO: 348528 - RNA, 19 nt, Artificial Sequence
  Description of Artificial Sequence: Synthetic oligonucleotide
ugagcaguagaacguaggu

SEQ ID NO: 348529 - RNA, 19 nt, Artificial Sequence
  Description of Artificial Sequence: Synthetic oligonucleotide
uggauccucagacaaggug

SEQ ID NO: 348530 - RNA, 19 nt, Artificial Sequence
  Description of Artificial Sequence: Synthetic oligonucleotide
auugacgaggggcugagga

SEQ ID NO: 348531 - RNA, 19 nt, Artificial Sequence
  Description of Artificial Sequence: Synthetic oligonucleotide
guaccauucagucuccaug

SEQ ID NO: 348532 - RNA, 19 nt, Artificial Sequence
  Description of Artificial Sequence: Synthetic oligonucleotide
agguagcucaccaaaauag

SEQ ID NO: 348533 - RNA, 19 nt, Artificial Sequence
  Description of Artificial Sequence: Synthetic oligonucleotide
ccaguaauagguaaauacc

SEQ ID NO: 348534 - RNA, 19 nt, Artificial Sequence
  Description of Artificial Sequence: Synthetic oligonucleotide
auucucgcaguccagccag

SEQ ID NO: 348535 - RNA, 19 nt, Artificial Sequence
  Description of Artificial Sequence: Synthetic oligonucleotide
cuuucgauucacuuugauc

SEQ ID NO: 348536 - RNA, 19 nt, Artificial Sequence
  Description of Artificial Sequence: Synthetic oligonucleotide
acagucucgcucaugaggg

SEQ ID NO: 348537 - RNA, 19 nt, Artificial Sequence
  Description of Artificial Sequence: Synthetic oligonucleotide
accucgucccuuucgauuc

SEQ ID NO: 348538 - RNA, 19 nt, Artificial Sequence
  Description of Artificial Sequence: Synthetic oligonucleotide
uaaguagaccagcaggaau

SEQ ID NO: 348539 - RNA, 19 nt, Artificial Sequence
  Description of Artificial Sequence: Synthetic oligonucleotide
gaagacuaaguagaccagc

SEQ ID NO: 348540 - RNA, 19 nt, Artificial Sequence
  Description of Artificial Sequence: Synthetic oligonucleotide
cagugcacuguucucaggg

SEQ ID NO: 348541 - RNA, 19 nt, Artificial Sequence
  Description of Artificial Sequence: Synthetic oligonucleotide
gucauccuaagagaggccg

SEQ ID NO: 348542 - RNA, 19 nt, Artificial Sequence
  Description of Artificial Sequence: Synthetic oligonucleotide
gcucacuagggcuacagcg

SEQ ID NO: 348543 - RNA, 19 nt, Artificial Sequence
  Description of Artificial Sequence: Synthetic oligonucleotide
gguauggcuggaaagaucc

SEQ ID NO: 348544 - RNA, 19 nt, Artificial Sequence
  Description of Artificial Sequence: Synthetic oligonucleotide
ugugaggccuugauuguug

SEQ ID NO: 348545 - RNA, 19 nt, Artificial Sequence
  Description of Artificial Sequence: Synthetic oligonucleotide
acgaaauuccgguccucgc

SEQ ID NO: 348546 - RNA, 19 nt, Artificial Sequence
  Description of Artificial Sequence: Synthetic oligonucleotide
aguuaucugcgaucaugac

SEQ ID NO: 348547 - RNA, 19 nt, Artificial Sequence
  Description of Artificial Sequence: Synthetic oligonucleotide
aagacuaaguagaccagca

SEQ ID NO: 348548 - RNA, 19 nt, Artificial Sequence
  Description of Artificial Sequence: Synthetic oligonucleotide
uauggcuggaaagaucccc

SEQ ID NO: 348549 - RNA, 19 nt, Artificial Sequence
  Description of Artificial Sequence: Synthetic oligonucleotide
aucugaggggacgaaauuc

SEQ ID NO: 348550 - RNA, 19 nt, Artificial Sequence
  Description of Artificial Sequence: Synthetic oligonucleotide
gguguuguuaucagcaggg

SEQ ID NO: 348551 - RNA, 19 nt, Artificial Sequence
  Description of Artificial Sequence: Synthetic oligonucleotide
guaggugagaaggacguag

SEQ ID NO: 348552 - RNA, 19 nt, Artificial Sequence
  Description of Artificial Sequence: Synthetic oligonucleotide
aacgcuguugacagucucg

SEQ ID NO: 348553 - RNA, 19 nt, Artificial Sequence
  Description of Artificial Sequence: Synthetic oligonucleotide
ggaugugaacauuugcucc

SEQ ID NO: 348554 - RNA, 19 nt, Artificial Sequence
  Description of Artificial Sequence: Synthetic oligonucleotide
uggagaaucccaucauaca

SEQ ID NO: 348555 - RNA, 19 nt, Artificial Sequence
  Description of Artificial Sequence: Synthetic oligonucleotide
ugaucugaggggacgaaau

SEQ ID NO: 348556 - RNA, 19 nt, Artificial Sequence
  Description of Artificial Sequence: Synthetic oligonucleotide
gaugauuuccagcaccgaa

SEQ ID NO: 348557 - RNA, 19 nt, Artificial Sequence
  Description of Artificial Sequence: Synthetic oligonucleotide
acuaaguagaccagcagga

SEQ ID NO: 348558 - RNA, 19 nt, Artificial Sequence
  Description of Artificial Sequence: Synthetic oligonucleotide
cagggaugacacaagcagg

SEQ ID NO: 348559 - RNA, 19 nt, Artificial Sequence
  Description of Artificial Sequence: Synthetic oligonucleotide
accagcgcucaucaggcac

SEQ ID NO: 348560 - RNA, 19 nt, Artificial Sequence
  Description of Artificial Sequence: Synthetic oligonucleotide
cauaccaauggugaacuug

SEQ ID NO: 348561 - RNA, 19 nt, Artificial Sequence
  Description of Artificial Sequence: Synthetic oligonucleotide
ucuccaagacagauauggc

SEQ ID NO: 348562 - RNA, 19 nt, Artificial Sequence
  Description of Artificial Sequence: Synthetic oligonucleotide
agaaccuggggaugagccg

SEQ ID NO: 348563 - RNA, 19 nt, Artificial Sequence
  Description of Artificial Sequence: Synthetic oligonucleotide
ugcgggguucuccaagagg

SEQ ID NO: 348564 - RNA, 19 nt, Artificial Sequence
  Description of Artificial Sequence: Synthetic oligonucleotide
agacuaaguagaccagcag

SEQ ID NO: 348565 - RNA, 19 nt, Artificial Sequence
  Description of Artificial Sequence: Synthetic oligonucleotide
caauaugcagcgcacugug

SEQ ID NO: 348566 - RNA, 19 nt, Artificial Sequence
  Description of Artificial Sequence: Synthetic oligonucleotide
uauucucgcaguccagcca

SEQ ID NO: 348567 - RNA, 19 nt, Artificial Sequence
  Description of Artificial Sequence: Synthetic oligonucleotide
acguguauaguaaagcaga

SEQ ID NO: 348568 - RNA, 19 nt, Artificial Sequence
  Description of Artificial Sequence: Synthetic oligonucleotide
ugguacaguccugagaacu

SEQ ID NO: 348569 - RNA, 19 nt, Artificial Sequence
  Description of Artificial Sequence: Synthetic oligonucleotide
ggcucuaaaaccaccaugc

SEQ ID NO: 348570 - RNA, 19 nt, Artificial Sequence
  Description of Artificial Sequence: Synthetic oligonucleotide
uguguacgcagagucagug

SEQ ID NO: 348571 - RNA, 19 nt, Artificial Sequence
  Description of Artificial Sequence: Synthetic oligonucleotide
aguagaacguaggugagaa

SEQ ID NO: 348572 - RNA, 19 nt, Artificial Sequence
  Description of Artificial Sequence: Synthetic oligonucleotide
auguggaucaccagugcac

SEQ ID NO: 348573 - RNA, 19 nt, Artificial Sequence
  Description of Artificial Sequence: Synthetic oligonucleotide
agggguagguaccauucag

SEQ ID NO: 348574 - RNA, 19 nt, Artificial Sequence
  Description of Artificial Sequence: Synthetic oligonucleotide
aauaugcagcgcacugugg

SEQ ID NO: 348575 - RNA, 19 nt, Artificial Sequence
  Description of Artificial Sequence: Synthetic oligonucleotide
uaggucaccacaucccacu

SEQ ID NO: 348576 - RNA, 19 nt, Artificial Sequence
  Description of Artificial Sequence: Synthetic oligonucleotide
gacguaggcuaacaguaac

SEQ ID NO: 348577 - RNA, 19 nt, Artificial Sequence
  Description of Artificial Sequence: Synthetic oligonucleotide
cucacccauaccaauggug

SEQ ID NO: 348578 - RNA, 19 nt, Artificial Sequence
  Description of Artificial Sequence: Synthetic oligonucleotide
cauacauguggaucaccag

SEQ ID NO: 348579 - RNA, 19 nt, Artificial Sequence
  Description of Artificial Sequence: Synthetic oligonucleotide
ucccgcugcagaaugugcc

SEQ ID NO: 348580 - RNA, 19 nt, Artificial Sequence
  Description of Artificial Sequence: Synthetic oligonucleotide
auaccaauggugaacuuga

SEQ ID NO: 348581 - RNA, 19 nt, Artificial Sequence
  Description of Artificial Sequence: Synthetic oligonucleotide
gcuccuuacagcuuggaac

SEQ ID NO: 348582 - RNA, 19 nt, Artificial Sequence
  Description of Artificial Sequence: Synthetic oligonucleotide
cuaguuucaggggugugag

SEQ ID NO: 348583 - RNA, 19 nt, Artificial Sequence
  Description of Artificial Sequence: Synthetic oligonucleotide
cagccuaaaagcuggagga

SEQ ID NO: 348584 - RNA, 19 nt, Artificial Sequence
  Description of Artificial Sequence: Synthetic oligonucleotide
uacgcagagucagugaggu

SEQ ID NO: 348585 - RNA, 19 nt, Artificial Sequence
  Description of Artificial Sequence: Synthetic oligonucleotide
agagaaagagguagcucac

SEQ ID NO: 348586 - RNA, 19 nt, Artificial Sequence
  Description of Artificial Sequence: Synthetic oligonucleotide
gccucgguagaacucaucg

SEQ ID NO: 348587 - RNA, 19 nt, Artificial Sequence
  Description of Artificial Sequence: Synthetic oligonucleotide
guaggcuaacaguaacagc

SEQ ID NO: 348588 - RNA, 19 nt, Artificial Sequence
  Description of Artificial Sequence: Synthetic oligonucleotide
acaggcucggaugugaaca

SEQ ID NO: 348589 - RNA, 19 nt, Artificial Sequence
  Description of Artificial Sequence: Synthetic oligonucleotide
aguagcuguccaugaauga

SEQ ID NO: 348590 - RNA, 19 nt, Artificial Sequence
  Description of Artificial Sequence: Synthetic oligonucleotide
ugcuccguucucuacuagc

SEQ ID NO: 348591 - RNA, 19 nt, Artificial Sequence
  Description of Artificial Sequence: Synthetic oligonucleotide
guauucucgcaguccagcc

SEQ ID NO: 348592 - RNA, 19 nt, Artificial Sequence
  Description of Artificial Sequence: Synthetic oligonucleotide
gacgucauccuaagagagg

SEQ ID NO: 348593 - RNA, 19 nt, Artificial Sequence
  Description of Artificial Sequence: Synthetic oligonucleotide
ugaggauugccagaauccu

SEQ ID NO: 348594 - RNA, 19 nt, Artificial Sequence
  Description of Artificial Sequence: Synthetic oligonucleotide
guucagcggcucuaaaacc

SEQ ID NO: 348595 - RNA, 19 nt, Artificial Sequence
  Description of Artificial Sequence: Synthetic oligonucleotide
ccaccaguaaccauucucc

SEQ ID NO: 348596 - RNA, 19 nt, Artificial Sequence
  Description of Artificial Sequence: Synthetic oligonucleotide
cauguaggccaaguaacag

SEQ ID NO: 348597 - RNA, 19 nt, Artificial Sequence
  Description of Artificial Sequence: Synthetic oligonucleotide
gagucggucacggucaaac

SEQ ID NO: 348598 - RNA, 19 nt, Artificial Sequence
  Description of Artificial Sequence: Synthetic oligonucleotide
gaagagucggucacgguca

SEQ ID NO: 348599 - RNA, 19 nt, Artificial Sequence
  Description of Artificial Sequence: Synthetic oligonucleotide
ucauccuaagagaggccga

SEQ ID NO: 348600 - RNA, 19 nt, Artificial Sequence
  Description of Artificial Sequence: Synthetic oligonucleotide
ugcaguagccucagagcca

SEQ ID NO: 348601 - RNA, 19 nt, Artificial Sequence
  Description of Artificial Sequence: Synthetic oligonucleotide
uuuccaccaaaaugcagua

SEQ ID NO: 348602 - RNA, 19 nt, Artificial Sequence
  Description of Artificial Sequence: Synthetic oligonucleotide
acaggcgaaguugaagaag

SEQ ID NO: 348603 - RNA, 19 nt, Artificial Sequence
  Description of Artificial Sequence: Synthetic oligonucleotide
uguggaucaccagugcacu

SEQ ID NO: 348604 - RNA, 19 nt, Artificial Sequence
  Description of Artificial Sequence: Synthetic oligonucleotide
gaacucccgcugcagaaug

SEQ ID NO: 348605 - RNA, 19 nt, Artificial Sequence
  Description of Artificial Sequence: Synthetic oligonucleotide
ucacuagggcuacagcgaa

SEQ ID NO: 348606 - RNA, 19 nt, Artificial Sequence
  Description of Artificial Sequence: Synthetic oligonucleotide
aaucggagcaggucucgaa

SEQ ID NO: 348607 - RNA, 19 nt, Artificial Sequence
  Description of Artificial Sequence: Synthetic oligonucleotide
agugauacucggacaggac

SEQ ID NO: 348608 - RNA, 19 nt, Artificial Sequence
  Description of Artificial Sequence: Synthetic oligonucleotide
cucuacuagcagcuucacg

SEQ ID NO: 348609 - RNA, 19 nt, Artificial Sequence
  Description of Artificial Sequence: Synthetic oligonucleotide
aaauuccgguccucgcccu

SEQ ID NO: 348610 - RNA, 19 nt, Artificial Sequence
  Description of Artificial Sequence: Synthetic oligonucleotide
ccagccuaaaagcuggagg

SEQ ID NO: 348611 - RNA, 19 nt, Artificial Sequence
  Description of Artificial Sequence: Synthetic oligonucleotide
ggaguuaucugcgaucaug

SEQ ID NO: 348612 - RNA, 19 nt, Artificial Sequence
  Description of Artificial Sequence: Synthetic oligonucleotide
uuugcuccguucucuacua

SEQ ID NO: 348613 - RNA, 19 nt, Artificial Sequence
  Description of Artificial Sequence: Synthetic oligonucleotide
ugcacugggcauugacgag

SEQ ID NO: 348614 - RNA, 19 nt, Artificial Sequence
  Description of Artificial Sequence: Synthetic oligonucleotide
gaacguaggugagaaggac

SEQ ID NO: 348615 - RNA, 19 nt, Artificial Sequence
  Description of Artificial Sequence: Synthetic oligonucleotide
agcuuggaacuucugugga

SEQ ID NO: 348616 - RNA, 19 nt, Artificial Sequence
  Description of Artificial Sequence: Synthetic oligonucleotide
ucggagcaggucucgaaga

SEQ ID NO: 348617 - RNA, 19 nt, Artificial Sequence
  Description of Artificial Sequence: Synthetic oligonucleotide
gaagccacguguauaguaa

SEQ ID NO: 348618 - RNA, 19 nt, Artificial Sequence
  Description of Artificial Sequence: Synthetic oligonucleotide
uggaucaccagugcacugu

SEQ ID NO: 348619 - RNA, 19 nt, Artificial Sequence
  Description of Artificial Sequence: Synthetic oligonucleotide
gagaaagagguagcucacc

SEQ ID NO: 348620 - RNA, 19 nt, Artificial Sequence
  Description of Artificial Sequence: Synthetic oligonucleotide
aagccacguguauaguaaa

SEQ ID NO: 348621 - RNA, 19 nt, Artificial Sequence
  Description of Artificial Sequence: Synthetic oligonucleotide
guauaguaaagcagauuca

SEQ ID NO: 348622 - RNA, 19 nt, Artificial Sequence
  Description of Artificial Sequence: Synthetic oligonucleotide
cugugguguuguuaucagc

SEQ ID NO: 348623 - RNA, 19 nt, Artificial Sequence
  Description of Artificial Sequence: Synthetic oligonucleotide
cugauggauccucagacaa

SEQ ID NO: 348624 - RNA, 19 nt, Artificial Sequence
  Description of Artificial Sequence: Synthetic oligonucleotide
gaugaacaggcgacggcgc

SEQ ID NO: 348625 - RNA, 19 nt, Artificial Sequence
  Description of Artificial Sequence: Synthetic oligonucleotide
aggacguaggcuaacagua

SEQ ID NO: 348626 - RNA, 19 nt, Artificial Sequence
  Description of Artificial Sequence: Synthetic oligonucleotide
acagugauacucggacagg

SEQ ID NO: 348627 - RNA, 19 nt, Artificial Sequence
  Description of Artificial Sequence: Synthetic oligonucleotide
auguugagcaguagaacgu

SEQ ID NO: 348628 - RNA, 19 nt, Artificial Sequence
  Description of Artificial Sequence: Synthetic oligonucleotide
gaagcggccacaggcucgg

SEQ ID NO: 348629 - RNA, 19 nt, Artificial Sequence
  Description of Artificial Sequence: Synthetic oligonucleotide
ucgcucaugagggcaauga

SEQ ID NO: 348630 - RNA, 19 nt, Artificial Sequence
  Description of Artificial Sequence: Synthetic oligonucleotide
accguagcaccacucggug

SEQ ID NO: 348631 - RNA, 19 nt, Artificial Sequence
  Description of Artificial Sequence: Synthetic oligonucleotide
ggagucaguggccuccagg

SEQ ID NO: 348632 - RNA, 19 nt, Artificial Sequence
  Description of Artificial Sequence: Synthetic oligonucleotide
caguuguccacagaggaca

SEQ ID NO: 348633 - RNA, 19 nt, Artificial Sequence
  Description of Artificial Sequence: Synthetic oligonucleotide
gauugccagaauccuuguc

SEQ ID NO: 348634 - RNA, 19 nt, Artificial Sequence
  Description of Artificial Sequence: Synthetic oligonucleotide
cuuucgggaaaggggcugg

SEQ ID NO: 348635 - RNA, 19 nt, Artificial Sequence
  Description of Artificial Sequence: Synthetic oligonucleotide
cuccuuacagcuuggaacu

SEQ ID NO: 348636 - RNA, 19 nt, Artificial Sequence
  Description of Artificial Sequence: Synthetic oligonucleotide
ccgacuuucagcagccucc

SEQ ID NO: 348637 - RNA, 19 nt, Artificial Sequence
  Description of Artificial Sequence: Synthetic oligonucleotide
acguaggugagaaggacgu

SEQ ID NO: 348638 - RNA, 19 nt, Artificial Sequence
  Description of Artificial Sequence: Synthetic oligonucleotide
aagagguagcucaccaaaa

SEQ ID NO: 348639 - RNA, 19 nt, Artificial Sequence
  Description of Artificial Sequence: Synthetic oligonucleotide
guagaacguaggugagaag

SEQ ID NO: 348640 - RNA, 19 nt, Artificial Sequence
  Description of Artificial Sequence: Synthetic oligonucleotide
augaaacgcagcaccuggg

SEQ ID NO: 348641 - RNA, 19 nt, Artificial Sequence
  Description of Artificial Sequence: Synthetic oligonucleotide
cagcaccgaauucuuuucc

SEQ ID NO: 348642 - RNA, 19 nt, Artificial Sequence
  Description of Artificial Sequence: Synthetic oligonucleotide
ucaggggaguuaucugcga

SEQ ID NO: 348643 - RNA, 19 nt, Artificial Sequence
  Description of Artificial Sequence: Synthetic oligonucleotide
guguuguuaucagcagggg

SEQ ID NO: 348644 - RNA, 19 nt, Artificial Sequence
  Description of Artificial Sequence: Synthetic oligonucleotide
agaacguaggugagaagga

SEQ ID NO: 348645 - RNA, 19 nt, Artificial Sequence
  Description of Artificial Sequence: Synthetic oligonucleotide
caccaccccacgaaagcgc

SEQ ID NO: 348646 - RNA, 19 nt, Artificial Sequence
  Description of Artificial Sequence: Synthetic oligonucleotide
guagcucaccaaaauagaa

SEQ ID NO: 348647 - RNA, 19 nt, Artificial Sequence
  Description of Artificial Sequence: Synthetic oligonucleotide
gucaguggcaacgcuguug

SEQ ID NO: 348648 - RNA, 19 nt, Artificial Sequence
  Description of Artificial Sequence: Synthetic oligonucleotide
agccuggacaaggaacagg

SEQ ID NO: 348649 - RNA, 19 nt, Artificial Sequence
  Description of Artificial Sequence: Synthetic oligonucleotide
cgagagaccacacugaaga

SEQ ID NO: 348650 - RNA, 19 nt, Artificial Sequence
  Description of Artificial Sequence: Synthetic oligonucleotide
caggcgacggcgccaaaag

SEQ ID NO: 348651 - RNA, 19 nt, Artificial Sequence
  Description of Artificial Sequence: Synthetic oligonucleotide
uccugcaaugaaaggcgau

SEQ ID NO: 348652 - RNA, 19 nt, Artificial Sequence
  Description of Artificial Sequence: Synthetic oligonucleotide
ggcucaagcucacuagggc

SEQ ID NO: 348653 - RNA, 19 nt, Artificial Sequence
  Description of Artificial Sequence: Synthetic oligonucleotide
gauuuagaagcuggguucu

SEQ ID NO: 348654 - RNA, 19 nt, Artificial Sequence
  Description of Artificial Sequence: Synthetic oligonucleotide
guacgcagagucagugagg

SEQ ID NO: 348655 - RNA, 19 nt, Artificial Sequence
  Description of Artificial Sequence: Synthetic oligonucleotide
gugaggccuugauuguugc

SEQ ID NO: 348656 - RNA, 19 nt, Artificial Sequence
  Description of Artificial Sequence: Synthetic oligonucleotide
ucaagcucacuagggcuac

SEQ ID NO: 348657 - RNA, 19 nt, Artificial Sequence
  Description of Artificial Sequence: Synthetic oligonucleotide
acuuucgggaaaggggcug

SEQ ID NO: 348658 - RNA, 19 nt, Artificial Sequence
  Description of Artificial Sequence: Synthetic oligonucleotide
cucaucggugcacugggca

SEQ ID NO: 348659 - RNA, 19 nt, Artificial Sequence
  Description of Artificial Sequence: Synthetic oligonucleotide
ggcuaacaguaacagcagc

SEQ ID NO: 348660 - RNA, 19 nt, Artificial Sequence
  Description of Artificial Sequence: Synthetic oligonucleotide
uugcuccguucucuacuag

SEQ ID NO: 348661 - RNA, 19 nt, Artificial Sequence
  Description of Artificial Sequence: Synthetic oligonucleotide
ccacccugaagcaccagcg

SEQ ID NO: 348662 - RNA, 19 nt, Artificial Sequence
  Description of Artificial Sequence: Synthetic oligonucleotide
gacggcgccaaaaguacca

SEQ ID NO: 348663 - RNA, 19 nt, Artificial Sequence
  Description of Artificial Sequence: Synthetic oligonucleotide
agucucgcucaugagggca

SEQ ID NO: 348664 - RNA, 19 nt, Artificial Sequence
  Description of Artificial Sequence: Synthetic oligonucleotide
cacccugaagcaccagcgc

SEQ ID NO: 348665 - RNA, 19 nt, Artificial Sequence
  Description of Artificial Sequence: Synthetic oligonucleotide
gccacguguauaguaaagc

SEQ ID NO: 348666 - RNA, 19 nt, Artificial Sequence
  Description of Artificial Sequence: Synthetic oligonucleotide
agccacguguauaguaaag

SEQ ID NO: 348667 - RNA, 19 nt, Artificial Sequence
  Description of Artificial Sequence: Synthetic oligonucleotide
acguaggcuaacaguaaca

SEQ ID NO: 348668 - RNA, 19 nt, Artificial Sequence
  Description of Artificial Sequence: Synthetic oligonucleotide
auuccgguccucgcccugg

SEQ ID NO: 348669 - RNA, 19 nt, Artificial Sequence
  Description of Artificial Sequence: Synthetic oligonucleotide
cucaagcucacuagggcua

SEQ ID NO: 348670 - RNA, 19 nt, Artificial Sequence
  Description of Artificial Sequence: Synthetic oligonucleotide
uccucgcccuggaauggug

SEQ ID NO: 348671 - RNA, 19 nt, Artificial Sequence
  Description of Artificial Sequence: Synthetic oligonucleotide
ccucagacaagguggggag

SEQ ID NO: 348672 - RNA, 19 nt, Artificial Sequence
  Description of Artificial Sequence: Synthetic oligonucleotide
gaccccguccugaagguuc

SEQ ID NO: 348673 - RNA, 19 nt, Artificial Sequence
  Description of Artificial Sequence: Synthetic oligonucleotide
gacgaggggcugaggauug

SEQ ID NO: 348674 - RNA, 19 nt, Artificial Sequence
  Description of Artificial Sequence: Synthetic oligonucleotide
agcggcucuaaaaccacca

SEQ ID NO: 348675 - RNA, 19 nt, Artificial Sequence
  Description of Artificial Sequence: Synthetic oligonucleotide
uaucugcgaucaugaccag

SEQ ID NO: 348676 - RNA, 19 nt, Artificial Sequence
  Description of Artificial Sequence: Synthetic oligonucleotide
cacgaaagcgcagcuguuc

SEQ ID NO: 348677 - RNA, 19 nt, Artificial Sequence
  Description of Artificial Sequence: Synthetic oligonucleotide
gagguacuugcugguccgg

SEQ ID NO: 348678 - RNA, 19 nt, Artificial Sequence
  Description of Artificial Sequence: Synthetic oligonucleotide
caccccacgaaagcgcagc

SEQ ID NO: 348679 - RNA, 19 nt, Artificial Sequence
  Description of Artificial Sequence: Synthetic oligonucleotide
acuugcugguccggcacag

SEQ ID NO: 348680 - RNA, 19 nt, Artificial Sequence
  Description of Artificial Sequence: Synthetic oligonucleotide
gcaguagccucagagccag

SEQ ID NO: 348681 - RNA, 19 nt, Artificial Sequence
  Description of Artificial Sequence: Synthetic oligonucleotide
cagcggcucuaaaaccacc

SEQ ID NO: 348682 - RNA, 19 nt, Artificial Sequence
  Description of Artificial Sequence: Synthetic oligonucleotide
acggcgccaaaaguaccac

SEQ ID NO: 348683 - RNA, 19 nt, Artificial Sequence
  Description of Artificial Sequence: Synthetic oligonucleotide
ugguccggcacagguauuc

SEQ ID NO: 348684 - RNA, 19 nt, Artificial Sequence
  Description of Artificial Sequence: Synthetic oligonucleotide
gacggugcgggcuccugca

SEQ ID NO: 348685 - RNA, 19 nt, Artificial Sequence
  Description of Artificial Sequence: Synthetic oligonucleotide
ggcgaaguugaagaagaac

SEQ ID NO: 348686 - RNA, 19 nt, Artificial Sequence
  Description of Artificial Sequence: Synthetic oligonucleotide
guggaucaccagugcacug

SEQ ID NO: 348687 - RNA, 19 nt, Artificial Sequence
  Description of Artificial Sequence: Synthetic oligonucleotide
cauauggugcugccuccuc

SEQ ID NO: 348688 - RNA, 19 nt, Artificial Sequence
  Description of Artificial Sequence: Synthetic oligonucleotide
caacgcuguugacagucuc

SEQ ID NO: 348689 - RNA, 19 nt, Artificial Sequence
  Description of Artificial Sequence: Synthetic oligonucleotide
cgaaauuccgguccucgcc

SEQ ID NO: 348690 - RNA, 19 nt, Artificial Sequence
  Description of Artificial Sequence: Synthetic oligonucleotide
gguagcucaccaaaauaga

SEQ ID NO: 348691 - RNA, 19 nt, Artificial Sequence
  Description of Artificial Sequence: Synthetic oligonucleotide
acaggaccguagcaccacu

SEQ ID NO: 348692 - RNA, 19 nt, Artificial Sequence
  Description of Artificial Sequence: Synthetic oligonucleotide
ggccgauggcuccuuacag

SEQ ID NO: 348693 - RNA, 19 nt, Artificial Sequence
  Description of Artificial Sequence: Synthetic oligonucleotide
cagugauacucggacagga

SEQ ID NO: 348694 - RNA, 19 nt, Artificial Sequence
  Description of Artificial Sequence: Synthetic oligonucleotide
caccaguaaccauucucca

SEQ ID NO: 348695 - RNA, 19 nt, Artificial Sequence
  Description of Artificial Sequence: Synthetic oligonucleotide
guguacgcagagucaguga

SEQ ID NO: 348696 - RNA, 19 nt, Artificial Sequence
  Description of Artificial Sequence: Synthetic oligonucleotide
aggggugugaggccuugau

SEQ ID NO: 348697 - RNA, 19 nt, Artificial Sequence
  Description of Artificial Sequence: Synthetic oligonucleotide
cugcgaucaugaccagagc

SEQ ID NO: 348698 - RNA, 19 nt, Artificial Sequence
  Description of Artificial Sequence: Synthetic oligonucleotide
ggcaacgcuguugacaguc

SEQ ID NO: 348699 - RNA, 19 nt, Artificial Sequence
  Description of Artificial Sequence: Synthetic oligonucleotide
uucucgcaguccagccagc

SEQ ID NO: 348700 - RNA, 19 nt, Artificial Sequence
  Description of Artificial Sequence: Synthetic oligonucleotide
gagaaggacguaggcuaac

SEQ ID NO: 348701 - RNA, 19 nt, Artificial Sequence
  Description of Artificial Sequence: Synthetic oligonucleotide
gccgauggcuccuuacagc

SEQ ID NO: 348702 - RNA, 19 nt, Artificial Sequence
  Description of Artificial Sequence: Synthetic oligonucleotide
ucgucccuuucgauucacu

SEQ ID NO: 348703 - RNA, 19 nt, Artificial Sequence
  Description of Artificial Sequence: Synthetic oligonucleotide
cguaggcuaacaguaacag

SEQ ID NO: 348704 - RNA, 19 nt, Artificial Sequence
  Description of Artificial Sequence: Synthetic oligonucleotide
gcugucaguggcaacgcug

SEQ ID NO: 348705 - RNA, 19 nt, Artificial Sequence
  Description of Artificial Sequence: Synthetic oligonucleotide
accaugcggugacggugcg

SEQ ID NO: 348706 - RNA, 19 nt, Artificial Sequence
  Description of Artificial Sequence: Synthetic oligonucleotide
ggaaucggagcaggucucg

SEQ ID NO: 348707 - RNA, 19 nt, Artificial Sequence
  Description of Artificial Sequence: Synthetic oligonucleotide
cacaggcucggaugugaac

SEQ ID NO: 348708 - RNA, 19 nt, Artificial Sequence
  Description of Artificial Sequence: Synthetic oligonucleotide
caucuccaagacagauaug

SEQ ID NO: 348709 - RNA, 19 nt, Artificial Sequence
  Description of Artificial Sequence: Synthetic oligonucleotide
gaugagcauguaggccaag

SEQ ID NO: 348710 - RNA, 19 nt, Artificial Sequence
  Description of Artificial Sequence: Synthetic oligonucleotide
accauucagucuccaugaa

SEQ ID NO: 348711 - RNA, 19 nt, Artificial Sequence
  Description of Artificial Sequence: Synthetic oligonucleotide
cagucucgcucaugagggc

SEQ ID NO: 348712 - RNA, 19 nt, Artificial Sequence
  Description of Artificial Sequence: Synthetic oligonucleotide
ggugcgggcuccugcaaug

SEQ ID NO: 348713 - RNA, 19 nt, Artificial Sequence
  Description of Artificial Sequence: Synthetic oligonucleotide
ucucgcaguccagccagcu

SEQ ID NO: 348714 - RNA, 19 nt, Artificial Sequence
  Description of Artificial Sequence: Synthetic oligonucleotide
caggcauugaccccguccu

SEQ ID NO: 348715 - RNA, 19 nt, Artificial Sequence
  Description of Artificial Sequence: Synthetic oligonucleotide
ggugaacuuucgggaaagg

SEQ ID NO: 348716 - RNA, 19 nt, Artificial Sequence
  Description of Artificial Sequence: Synthetic oligonucleotide
cugucaguggcaacgcugu

SEQ ID NO: 348717 - RNA, 19 nt, Artificial Sequence
  Description of Artificial Sequence: Synthetic oligonucleotide
gguacuugcugguccggca

SEQ ID NO: 348718 - RNA, 19 nt, Artificial Sequence
  Description of Artificial Sequence: Synthetic oligonucleotide
ggcagauggucuuccucug

SEQ ID NO: 348719 - RNA, 19 nt, Artificial Sequence
  Description of Artificial Sequence: Synthetic oligonucleotide
ccaguuguccacagaggac

SEQ ID NO: 348720 - RNA, 19 nt, Artificial Sequence
  Description of Artificial Sequence: Synthetic oligonucleotide
gguacaguccugagaacuc

SEQ ID NO: 348721 - RNA, 19 nt, Artificial Sequence
  Description of Artificial Sequence: Synthetic oligonucleotide
caggaccguagcaccacuc

SEQ ID NO: 348722 - RNA, 19 nt, Artificial Sequence
  Description of Artificial Sequence: Synthetic oligonucleotide
guauggcuggaaagauccc

SEQ ID NO: 348723 - RNA, 19 nt, Artificial Sequence
  Description of Artificial Sequence: Synthetic oligonucleotide
aguaacaggcgaaguugaa

SEQ ID NO: 348724 - RNA, 19 nt, Artificial Sequence
  Description of Artificial Sequence: Synthetic oligonucleotide
gcaccaccccacgaaagcg

SEQ ID NO: 348725 - RNA, 19 nt, Artificial Sequence
  Description of Artificial Sequence: Synthetic oligonucleotide
ccggcucaagcucacuagg

SEQ ID NO: 348726 - RNA, 19 nt, Artificial Sequence
  Description of Artificial Sequence: Synthetic oligonucleotide
gcuaguuucagggguguga

SEQ ID NO: 348727 - RNA, 19 nt, Artificial Sequence
  Description of Artificial Sequence: Synthetic oligonucleotide
cggaugugaacauuugcuc

SEQ ID NO: 348728 - RNA, 19 nt, Artificial Sequence
  Description of Artificial Sequence: Synthetic oligonucleotide
auccuaagagaggccgaug

SEQ ID NO: 348729 - RNA, 19 nt, Artificial Sequence
  Description of Artificial Sequence: Synthetic oligonucleotide
gaugagccguugccauuuc

SEQ ID NO: 348730 - RNA, 19 nt, Artificial Sequence
  Description of Artificial Sequence: Synthetic oligonucleotide
cuuugggccucccggcuca

SEQ ID NO: 348731 - RNA, 19 nt, Artificial Sequence
  Description of Artificial Sequence: Synthetic oligonucleotide
aacucccgcugcagaaugu

SEQ ID NO: 348732 - RNA, 19 nt, Artificial Sequence
  Description of Artificial Sequence: Synthetic oligonucleotide
ggccaaguaacaggcgaag

SEQ ID NO: 348733 - RNA, 19 nt, Artificial Sequence
  Description of Artificial Sequence: Synthetic oligonucleotide
caccgugagcagagccugg

SEQ ID NO: 348734 - RNA, 19 nt, Artificial Sequence
  Description of Artificial Sequence: Synthetic oligonucleotide
aggcgacggcgccaaaagu

SEQ ID NO: 348735 - RNA, 19 nt, Artificial Sequence
  Description of Artificial Sequence: Synthetic oligonucleotide
ugcgggcuccugcaaugaa

SEQ ID NO: 348736 - RNA, 19 nt, Artificial Sequence
  Description of Artificial Sequence: Synthetic oligonucleotide
gucacggucaaaccuguuu

SEQ ID NO: 348737 - RNA, 19 nt, Artificial Sequence
  Description of Artificial Sequence: Synthetic oligonucleotide
aucugcgaucaugaccaga

SEQ ID NO: 348738 - RNA, 19 nt, Artificial Sequence
  Description of Artificial Sequence: Synthetic oligonucleotide
cuccugcaaugaaaggcga

SEQ ID NO: 348739 - RNA, 19 nt, Artificial Sequence
  Description of Artificial Sequence: Synthetic oligonucleotide
gugcgggguucuccaagag

SEQ ID NO: 348740 - RNA, 19 nt, Artificial Sequence
  Description of Artificial Sequence: Synthetic oligonucleotide
cuugcugguccggcacagg

SEQ ID NO: 348741 - RNA, 19 nt, Artificial Sequence
  Description of Artificial Sequence: Synthetic oligonucleotide
ggcagcuaguuucaggggu

SEQ ID NO: 348742 - RNA, 19 nt, Artificial Sequence
  Description of Artificial Sequence: Synthetic oligonucleotide
cagcaugggcuguucuguc

SEQ ID NO: 348743 - RNA, 19 nt, Artificial Sequence
  Description of Artificial Sequence: Synthetic oligonucleotide
acgaggggcugaggauugc

SEQ ID NO: 348744 - RNA, 19 nt, Artificial Sequence
  Description of Artificial Sequence: Synthetic oligonucleotide
gaaucggagcaggucucga

SEQ ID NO: 348745 - RNA, 19 nt, Artificial Sequence
  Description of Artificial Sequence: Synthetic oligonucleotide
gcagcuaguuucaggggug

SEQ ID NO: 348746 - RNA, 19 nt, Artificial Sequence
  Description of Artificial Sequence: Synthetic oligonucleotide
ucccaccuggugccgacuu

SEQ ID NO: 348747 - RNA, 19 nt, Artificial Sequence
  Description of Artificial Sequence: Synthetic oligonucleotide
uuucgggaaaggggcuggu

SEQ ID NO: 348748 - RNA, 19 nt, Artificial Sequence
  Description of Artificial Sequence: Synthetic oligonucleotide
accccacgaaagcgcagcu

SEQ ID NO: 348749 - RNA, 19 nt, Artificial Sequence
  Description of Artificial Sequence: Synthetic oligonucleotide
cucgcaguccagccagcuc

SEQ ID NO: 348750 - RNA, 19 nt, Artificial Sequence
  Description of Artificial Sequence: Synthetic oligonucleotide
uuccgguccucgcccugga

SEQ ID NO: 348751 - RNA, 19 nt, Artificial Sequence
  Description of Artificial Sequence: Synthetic oligonucleotide
cauugacgaggggcugagg

SEQ ID NO: 348752 - RNA, 19 nt, Artificial Sequence
  Description of Artificial Sequence: Synthetic oligonucleotide
gaccguagcaccacucggu

SEQ ID NO: 348753 - RNA, 19 nt, Artificial Sequence
  Description of Artificial Sequence: Synthetic oligonucleotide
gcagggguagguaccauuc

SEQ ID NO: 348754 - RNA, 19 nt, Artificial Sequence
  Description of Artificial Sequence: Synthetic oligonucleotide
accaccccacgaaagcgca

SEQ ID NO: 348755 - RNA, 19 nt, Artificial Sequence
  Description of Artificial Sequence: Synthetic oligonucleotide
ugcagcgcacuguggccuc

SEQ ID NO: 348756 - RNA, 19 nt, Artificial Sequence
  Description of Artificial Sequence: Synthetic oligonucleotide
cccggcucaagcucacuag

SEQ ID NO: 348757 - RNA, 19 nt, Artificial Sequence
  Description of Artificial Sequence: Synthetic oligonucleotide
ccugagcgaugcuuccucc

SEQ ID NO: 348758 - RNA, 19 nt, Artificial Sequence
  Description of Artificial Sequence: Synthetic oligonucleotide
gcgccaaaaguaccacagc

SEQ ID NO: 348759 - RNA, 19 nt, Artificial Sequence
  Description of Artificial Sequence: Synthetic oligonucleotide
cagggguagguaccauuca

SEQ ID NO: 348760 - RNA, 19 nt, Artificial Sequence
  Description of Artificial Sequence: Synthetic oligonucleotide
ccgagagaccacacugaag

SEQ ID NO: 348761 - RNA, 19 nt, Artificial Sequence
  Description of Artificial Sequence: Synthetic oligonucleotide
agcgcucaucaggcacacc

SEQ ID NO: 348762 - RNA, 19 nt, Artificial Sequence
  Description of Artificial Sequence: Synthetic oligonucleotide
gguccucgcccuggaaugg

SEQ ID NO: 348763 - RNA, 19 nt, Artificial Sequence
  Description of Artificial Sequence: Synthetic oligonucleotide
cacccauaccaauggugaa

SEQ ID NO: 348764 - RNA, 19 nt, Artificial Sequence
  Description of Artificial Sequence: Synthetic oligonucleotide
auggauccucagacaaggu

SEQ ID NO: 348765 - RNA, 19 nt, Artificial Sequence
  Description of Artificial Sequence: Synthetic oligonucleotide
cagauucaaccagcccaac

SEQ ID NO: 348766 - RNA, 19 nt, Artificial Sequence
  Description of Artificial Sequence: Synthetic oligonucleotide
gccgacuuucagcagccuc

SEQ ID NO: 348767 - RNA, 19 nt, Artificial Sequence
  Description of Artificial Sequence: Synthetic oligonucleotide
gcauugacgaggggcugag

SEQ ID NO: 348768 - RNA, 19 nt, Artificial Sequence
  Description of Artificial Sequence: Synthetic oligonucleotide
ggaucaugacacuguagau

SEQ ID NO: 348769 - RNA, 19 nt, Artificial Sequence
  Description of Artificial Sequence: Synthetic oligonucleotide
gcgacggcgccaaaaguac

SEQ ID NO: 348770 - RNA, 19 nt, Artificial Sequence
  Description of Artificial Sequence: Synthetic oligonucleotide
caccaaaaugcaguagccu

SEQ ID NO: 348771 - RNA, 19 nt, Artificial Sequence
  Description of Artificial Sequence: Synthetic oligonucleotide
uguccacuuucagcacuau

SEQ ID NO: 348772 - RNA, 19 nt, Artificial Sequence
  Description of Artificial Sequence: Synthetic oligonucleotide
ggcgacggcgccaaaagua

SEQ ID NO: 348773 - RNA, 19 nt, Artificial Sequence
  Description of Artificial Sequence: Synthetic oligonucleotide
cucgcucaugagggcaaug

SEQ ID NO: 348774 - RNA, 19 nt, Artificial Sequence
  Description of Artificial Sequence: Synthetic oligonucleotide
cucgucccuuucgauucac

SEQ ID NO: 348775 - RNA, 19 nt, Artificial Sequence
  Description of Artificial Sequence: Synthetic oligonucleotide
gcgggguucuccaagaggu

SEQ ID NO: 348776 - RNA, 19 nt, Artificial Sequence
  Description of Artificial Sequence: Synthetic oligonucleotide
ggcuccuuacagcuuggaa

SEQ ID NO: 348777 - RNA, 19 nt, Artificial Sequence
  Description of Artificial Sequence: Synthetic oligonucleotide
uccuuacagcuuggaacuu

SEQ ID NO: 348778 - RNA, 19 nt, Artificial Sequence
  Description of Artificial Sequence: Synthetic oligonucleotide
uggcaacgcuguugacagu

SEQ ID NO: 348779 - RNA, 19 nt, Artificial Sequence
  Description of Artificial Sequence: Synthetic oligonucleotide
ucucgcucaugagggcaau

SEQ ID NO: 348780 - RNA, 19 nt, Artificial Sequence
  Description of Artificial Sequence: Synthetic oligonucleotide
ccuggggaugagccguugc

SEQ ID NO: 348781 - RNA, 19 nt, Artificial Sequence
  Description of Artificial Sequence: Synthetic oligonucleotide
ggugugaggccuugauugu

SEQ ID NO: 348782 - RNA, 19 nt, Artificial Sequence
  Description of Artificial Sequence: Synthetic oligonucleotide
gcugguccggcacagguau

SEQ ID NO: 348783 - RNA, 19 nt, Artificial Sequence
  Description of Artificial Sequence: Synthetic oligonucleotide
gcaaugaaaggcgaugauu

SEQ ID NO: 348784 - RNA, 19 nt, Artificial Sequence
  Description of Artificial Sequence: Synthetic oligonucleotide
cguagcaccacucggugaa

SEQ ID NO: 348785 - RNA, 19 nt, Artificial Sequence
  Description of Artificial Sequence: Synthetic oligonucleotide
agcgcacuguggccucggu

SEQ ID NO: 348786 - RNA, 19 nt, Artificial Sequence
  Description of Artificial Sequence: Synthetic oligonucleotide
ccacacugaagagucgguc

SEQ ID NO: 348787 - RNA, 19 nt, Artificial Sequence
  Description of Artificial Sequence: Synthetic oligonucleotide
ggcauugacgaggggcuga

SEQ ID NO: 348788 - RNA, 19 nt, Artificial Sequence
  Description of Artificial Sequence: Synthetic oligonucleotide
gggcugguacaguccugag

SEQ ID NO: 348789 - RNA, 19 nt, Artificial Sequence
  Description of Artificial Sequence: Synthetic oligonucleotide
gucucgcucaugagggcaa

SEQ ID NO: 348790 - RNA, 19 nt, Artificial Sequence
  Description of Artificial Sequence: Synthetic oligonucleotide
gcaauaugcagcgcacugu

SEQ ID NO: 348791 - RNA, 19 nt, Artificial Sequence
  Description of Artificial Sequence: Synthetic oligonucleotide
ggagggugacgucauccua

SEQ ID NO: 348792 - RNA, 19 nt, Artificial Sequence
  Description of Artificial Sequence: Synthetic oligonucleotide
ucgcccuggaauggugauu

SEQ ID NO: 348793 - RNA, 19 nt, Artificial Sequence
  Description of Artificial Sequence: Synthetic oligonucleotide
gguaccauucagucuccau

SEQ ID NO: 348794 - RNA, 19 nt, Artificial Sequence
  Description of Artificial Sequence: Synthetic oligonucleotide
gggacgaaauuccgguccu

SEQ ID NO: 348795 - RNA, 19 nt, Artificial Sequence
  Description of Artificial Sequence: Synthetic oligonucleotide
cccacgaaagcgcagcugu

SEQ ID NO: 348796 - RNA, 19 nt, Artificial Sequence
  Description of Artificial Sequence: Synthetic oligonucleotide
caguagccucagagccagc

SEQ ID NO: 348797 - RNA, 19 nt, Artificial Sequence
  Description of Artificial Sequence: Synthetic oligonucleotide
ccagcgcucaucaggcaca

SEQ ID NO: 348798 - RNA, 19 nt, Artificial Sequence
  Description of Artificial Sequence: Synthetic oligonucleotide
auacucggacaggaccgua

SEQ ID NO: 348799 - RNA, 19 nt, Artificial Sequence
  Description of Artificial Sequence: Synthetic oligonucleotide
accccguccugaagguuca

SEQ ID NO: 348800 - RNA, 19 nt, Artificial Sequence
  Description of Artificial Sequence: Synthetic oligonucleotide
cccugagcgaugcuuccuc

SEQ ID NO: 348801 - RNA, 19 nt, Artificial Sequence
  Description of Artificial Sequence: Synthetic oligonucleotide
gcuggaagccacguguaua

SEQ ID NO: 348802 - RNA, 19 nt, Artificial Sequence
  Description of Artificial Sequence: Synthetic oligonucleotide
ccguugccauuucuccugc

SEQ ID NO: 348803 - RNA, 19 nt, Artificial Sequence
  Description of Artificial Sequence: Synthetic oligonucleotide
aaccuggggaugagccguu

SEQ ID NO: 348804 - RNA, 19 nt, Artificial Sequence
  Description of Artificial Sequence: Synthetic oligonucleotide
ggacguaggcuaacaguaa

SEQ ID NO: 348805 - RNA, 19 nt, Artificial Sequence
  Description of Artificial Sequence: Synthetic oligonucleotide
cagcgcacuguggccucgg

SEQ ID NO: 348806 - RNA, 19 nt, Artificial Sequence
  Description of Artificial Sequence: Synthetic oligonucleotide
cauccuaagagaggccgau

SEQ ID NO: 348807 - RNA, 19 nt, Artificial Sequence
  Description of Artificial Sequence: Synthetic oligonucleotide
cgcccuggaauggugauuc

SEQ ID NO: 348808 - RNA, 19 nt, Artificial Sequence
  Description of Artificial Sequence: Synthetic oligonucleotide
ugccgacuuucagcagccu

SEQ ID NO: 348809 - RNA, 19 nt, Artificial Sequence
  Description of Artificial Sequence: Synthetic oligonucleotide
acggugcgggcuccugcaa

SEQ ID NO: 348810 - RNA, 19 nt, Artificial Sequence
  Description of Artificial Sequence: Synthetic oligonucleotide
cuguguacgcagagucagu

SEQ ID NO: 348811 - RNA, 19 nt, Artificial Sequence
  Description of Artificial Sequence: Synthetic oligonucleotide
gcacagguauucucgcagu

SEQ ID NO: 348812 - RNA, 19 nt, Artificial Sequence
  Description of Artificial Sequence: Synthetic oligonucleotide
caccucgucccuuucgauu

SEQ ID NO: 348813 - RNA, 19 nt, Artificial Sequence
  Description of Artificial Sequence: Synthetic oligonucleotide
acgcagagucagugaggua

SEQ ID NO: 348814 - RNA, 19 nt, Artificial Sequence
  Description of Artificial Sequence: Synthetic oligonucleotide
gggguagguaccauucagu

SEQ ID NO: 348815 - RNA, 19 nt, Artificial Sequence
  Description of Artificial Sequence: Synthetic oligonucleotide
ggggaugagccguugccau

SEQ ID NO: 348816 - RNA, 19 nt, Artificial Sequence
  Description of Artificial Sequence: Synthetic oligonucleotide
ggauugccagaauccuugu

SEQ ID NO: 348817 - RNA, 19 nt, Artificial Sequence
  Description of Artificial Sequence: Synthetic oligonucleotide
cgacggcgccaaaaguacc

SEQ ID NO: 348818 - RNA, 19 nt, Artificial Sequence
  Description of Artificial Sequence: Synthetic oligonucleotide
aucccaccuggugccgacu

SEQ ID NO: 348819 - RNA, 19 nt, Artificial Sequence
  Description of Artificial Sequence: Synthetic oligonucleotide
gugcgggcuccugcaauga

SEQ ID NO: 348820 - RNA, 19 nt, Artificial Sequence
  Description of Artificial Sequence: Synthetic oligonucleotide
caggcucggaugugaacau

SEQ ID NO: 348821 - RNA, 19 nt, Artificial Sequence
  Description of Artificial Sequence: Synthetic oligonucleotide
ccccgagagaccacacuga

SEQ ID NO: 348822 - RNA, 19 nt, Artificial Sequence
  Description of Artificial Sequence: Synthetic oligonucleotide
ucggugcacugggcauuga

SEQ ID NO: 348823 - RNA, 19 nt, Artificial Sequence
  Description of Artificial Sequence: Synthetic oligonucleotide
gcggugacggugcgggcuc

SEQ ID NO: 348824 - RNA, 19 nt, Artificial Sequence
  Description of Artificial Sequence: Synthetic oligonucleotide
agagucggucacggucaaa

SEQ ID NO: 348825 - RNA, 19 nt, Artificial Sequence
  Description of Artificial Sequence: Synthetic oligonucleotide
cccgagagaccacacugaa

SEQ ID NO: 348826 - RNA, 19 nt, Artificial Sequence
  Description of Artificial Sequence: Synthetic oligonucleotide
ggacgaaauuccgguccuc

SEQ ID NO: 348827 - RNA, 19 nt, Artificial Sequence
  Description of Artificial Sequence: Synthetic oligonucleotide
ccgugagcagagccuggac

SEQ ID NO: 348828 - RNA, 19 nt, Artificial Sequence
  Description of Artificial Sequence: Synthetic oligonucleotide
gccaaguaacaggcgaagu

SEQ ID NO: 348829 - RNA, 19 nt, Artificial Sequence
  Description of Artificial Sequence: Synthetic oligonucleotide
gcagcgcacuguggccucg

SEQ ID NO: 348830 - RNA, 19 nt, Artificial Sequence
  Description of Artificial Sequence: Synthetic oligonucleotide
gcgggcuccugcaaugaaa

SEQ ID NO: 348831 - RNA, 19 nt, Artificial Sequence
  Description of Artificial Sequence: Synthetic oligonucleotide
cguguauaguaaagcagau

SEQ ID NO: 348832 - RNA, 19 nt, Artificial Sequence
  Description of Artificial Sequence: Synthetic oligonucleotide
cagcuaguuucaggggugu

SEQ ID NO: 348833 - RNA, 19 nt, Artificial Sequence
  Description of Artificial Sequence: Synthetic oligonucleotide
gugugaggccuugauuguu

SEQ ID NO: 348834 - RNA, 19 nt, Artificial Sequence
  Description of Artificial Sequence: Synthetic oligonucleotide
ccguagcaccacucgguga

SEQ ID NO: 348835 - RNA, 19 nt, Artificial Sequence
  Description of Artificial Sequence: Synthetic oligonucleotide
gcccaguaauagguaaaua

SEQ ID NO: 348836 - RNA, 19 nt, Artificial Sequence
  Description of Artificial Sequence: Synthetic oligonucleotide
ccccacgaaagcgcagcug

SEQ ID NO: 348837 - RNA, 19 nt, Artificial Sequence
  Description of Artificial Sequence: Synthetic oligonucleotide
cccuuucgauucacuuuga

SEQ ID NO: 348838 - RNA, 19 nt, Artificial Sequence
  Description of Artificial Sequence: Synthetic oligonucleotide
gcuucacgcacugcaggcu

SEQ ID NO: 348839 - RNA, 19 nt, Artificial Sequence
  Description of Artificial Sequence: Synthetic oligonucleotide
caucggugcacugggcauu

SEQ ID NO: 348840 - RNA, 19 nt, Artificial Sequence
  Description of Artificial Sequence: Synthetic oligonucleotide
gcggcucuaaaaccaccau

SEQ ID NO: 348841 - RNA, 19 nt, Artificial Sequence
  Description of Artificial Sequence: Synthetic oligonucleotide
caggggugugaggccuuga

SEQ ID NO: 348842 - RNA, 19 nt, Artificial Sequence
  Description of Artificial Sequence: Synthetic oligonucleotide
guccucgcccuggaauggu

SEQ ID NO: 348843 - RNA, 19 nt, Artificial Sequence
  Description of Artificial Sequence: Synthetic oligonucleotide
cccgcugcagaaugugccu

SEQ ID NO: 348844 - RNA, 19 nt, Artificial Sequence
  Description of Artificial Sequence: Synthetic oligonucleotide
gcaacgcuguugacagucu

SEQ ID NO: 348845 - RNA, 19 nt, Artificial Sequence
  Description of Artificial Sequence: Synthetic oligonucleotide
ccucgucccuuucgauuca

SEQ ID NO: 348846 - RNA, 19 nt, Artificial Sequence
  Description of Artificial Sequence: Synthetic oligonucleotide
ggacaccccgagagaccac

SEQ ID NO: 348847 - RNA, 19 nt, Artificial Sequence
  Description of Artificial Sequence: Synthetic oligonucleotide
gguccggcacagguauucu

SEQ ID NO: 348848 - RNA, 19 nt, Artificial Sequence
  Description of Artificial Sequence: Synthetic oligonucleotide
cgaugauuuccagcaccga

SEQ ID NO: 348849 - RNA, 19 nt, Artificial Sequence
  Description of Artificial Sequence: Synthetic oligonucleotide
cggcgccaaaaguaccaca

SEQ ID NO: 348850 - RNA, 19 nt, Artificial Sequence
  Description of Artificial Sequence: Synthetic oligonucleotide
guaccacagcuggcccagu

SEQ ID NO: 348851 - RNA, 19 nt, Artificial Sequence
  Description of Artificial Sequence: Synthetic oligonucleotide
cggucacggucaaaccugu

SEQ ID NO: 348852 - RNA, 19 nt, Artificial Sequence
  Description of Artificial Sequence: Synthetic oligonucleotide
ccauaccaauggugaacuu

SEQ ID NO: 348853 - RNA, 19 nt, Artificial Sequence
  Description of Artificial Sequence: Synthetic oligonucleotide
ccccguccugaagguucag

SEQ ID NO: 348854 - RNA, 19 nt, Artificial Sequence
  Description of Artificial Sequence: Synthetic oligonucleotide
ccacgaaagcgcagcuguu

SEQ ID NO: 348855 - RNA, 19 nt, Artificial Sequence
  Description of Artificial Sequence: Synthetic oligonucleotide
cggugcgggcuccugcaau

SEQ ID NO: 348856 - RNA, 19 nt, Artificial Sequence
  Description of Artificial Sequence: Synthetic oligonucleotide
uguauauuaacaaauggca

SEQ ID NO: 348857 - RNA, 19 nt, Artificial Sequence
  Description of Artificial Sequence: Synthetic oligonucleotide
uuuaggaccacacucacag

SEQ ID NO: 348858 - RNA, 19 nt, Artificial Sequence
  Description of Artificial Sequence: Synthetic oligonucleotide
uuguauauuaacaaauggc

SEQ ID NO: 348859 - RNA, 19 nt, Artificial Sequence
  Description of Artificial Sequence: Synthetic oligonucleotide
auagaggacauccuguucc

SEQ ID NO: 348860 - RNA, 19 nt, Artificial Sequence
  Description of Artificial Sequence: Synthetic oligonucleotide
aagaaagugccaucgauag

SEQ ID NO: 348861 - RNA, 19 nt, Artificial Sequence
  Description of Artificial Sequence: Synthetic oligonucleotide
uguacacacacacacacag

SEQ ID NO: 348862 - RNA, 19 nt, Artificial Sequence
  Description of Artificial Sequence: Synthetic oligonucleotide
gaaagugccaucgauaggg

SEQ ID NO: 348863 - RNA, 19 nt, Artificial Sequence
  Description of Artificial Sequence: Synthetic oligonucleotide
uuaaggguugcgaacaagg

SEQ ID NO: 348864 - RNA, 19 nt, Artificial Sequence
  Description of Artificial Sequence: Synthetic oligonucleotide
aaugagaagacguccuccg

SEQ ID NO: 348865 - RNA, 19 nt, Artificial Sequence
  Description of Artificial Sequence: Synthetic oligonucleotide
ugugacauucauaucaccc

SEQ ID NO: 348866 - RNA, 19 nt, Artificial Sequence
  Description of Artificial Sequence: Synthetic oligonucleotide
gaaacuaugcagcagcagc

SEQ ID NO: 348867 - RNA, 19 nt, Artificial Sequence
  Description of Artificial Sequence: Synthetic oligonucleotide
gcuucuuagacauagaccc

SEQ ID NO: 348868 - RNA, 19 nt, Artificial Sequence
  Description of Artificial Sequence: Synthetic oligonucleotide
aaaaccacgacagaguggu

SEQ ID NO: 348869 - RNA, 19 nt, Artificial Sequence
  Description of Artificial Sequence: Synthetic oligonucleotide
uaggaccacacucacagcg

SEQ ID NO: 348870 - RNA, 19 nt, Artificial Sequence
  Description of Artificial Sequence: Synthetic oligonucleotide
aagugugcauccucgaggg

SEQ ID NO: 348871 - RNA, 19 nt, Artificial Sequence
  Description of Artificial Sequence: Synthetic oligonucleotide
uucuauugcucguuaaggg

SEQ ID NO: 348872 - RNA, 19 nt, Artificial Sequence
  Description of Artificial Sequence: Synthetic oligonucleotide
cuuuagaaacccuagcaag

SEQ ID NO: 348873 - RNA, 19 nt, Artificial Sequence
  Description of Artificial Sequence: Synthetic oligonucleotide
uuauuaacugaauuugcca

SEQ ID NO: 348874 - RNA, 19 nt, Artificial Sequence
  Description of Artificial Sequence: Synthetic oligonucleotide
agcuauugaagaaagugcc

SEQ ID NO: 348875 - RNA, 19 nt, Artificial Sequence
  Description of Artificial Sequence: Synthetic oligonucleotide
agaaauaggucuuugcggu

SEQ ID NO: 348876 - RNA, 19 nt, Artificial Sequence
  Description of Artificial Sequence: Synthetic oligonucleotide
accguaaaccaacagcagc

SEQ ID NO: 348877 - RNA, 19 nt, Artificial Sequence
  Description of Artificial Sequence: Synthetic oligonucleotide
gaucuguacacacacacac

SEQ ID NO: 348878 - RNA, 19 nt, Artificial Sequence
  Description of Artificial Sequence: Synthetic oligonucleotide
ucuguacacacacacacac

SEQ ID NO: 348879 - RNA, 19 nt, Artificial Sequence
  Description of Artificial Sequence: Synthetic oligonucleotide
uauuaacugaauuugccaa

SEQ ID NO: 348880 - RNA, 19 nt, Artificial Sequence
  Description of Artificial Sequence: Synthetic oligonucleotide
ucuuuguuguaucugugug

SEQ ID NO: 348881 - RNA, 19 nt, Artificial Sequence
  Description of Artificial Sequence: Synthetic oligonucleotide
uacuacagagaucacacgu

SEQ ID NO: 348882 - RNA, 19 nt, Artificial Sequence
  Description of Artificial Sequence: Synthetic oligonucleotide
aagucggaagccaugaggg

SEQ ID NO: 348883 - RNA, 19 nt, Artificial Sequence
  Description of Artificial Sequence: Synthetic oligonucleotide
ucgauagggaacgaggugg

SEQ ID NO: 348884 - RNA, 19 nt, Artificial Sequence
  Description of Artificial Sequence: Synthetic oligonucleotide
cauuccuggagaaucaggc

SEQ ID NO: 348885 - RNA, 19 nt, Artificial Sequence
  Description of Artificial Sequence: Synthetic oligonucleotide
agauggugugccuucgucc

SEQ ID NO: 348886 - RNA, 19 nt, Artificial Sequence
  Description of Artificial Sequence: Synthetic oligonucleotide
ucuuuagaaacccuagcaa

SEQ ID NO: 348887 - RNA, 19 nt, Artificial Sequence
  Description of Artificial Sequence: Synthetic oligonucleotide
uguucaaagaccacucacu

SEQ ID NO: 348888 - RNA, 19 nt, Artificial Sequence
  Description of Artificial Sequence: Synthetic oligonucleotide
aaugaggggucccucauga

SEQ ID NO: 348889 - RNA, 19 nt, Artificial Sequence
  Description of Artificial Sequence: Synthetic oligonucleotide
uacacacacacacacaguc

SEQ ID NO: 348890 - RNA, 19 nt, Artificial Sequence
  Description of Artificial Sequence: Synthetic oligonucleotide
acacguuaugugcacagcg

SEQ ID NO: 348891 - RNA, 19 nt, Artificial Sequence
  Description of Artificial Sequence: Synthetic oligonucleotide
uuccgacugaccuugaucu

SEQ ID NO: 348892 - RNA, 19 nt, Artificial Sequence
  Description of Artificial Sequence: Synthetic oligonucleotide
uaccuugauaguuuuggag

SEQ ID NO: 348893 - RNA, 19 nt, Artificial Sequence
  Description of Artificial Sequence: Synthetic oligonucleotide
auucuauugcucguuaagg

SEQ ID NO: 348894 - RNA, 19 nt, Artificial Sequence
  Description of Artificial Sequence: Synthetic oligonucleotide
uaaaaccacgacagagugg

SEQ ID NO: 348895 - RNA, 19 nt, Artificial Sequence
  Description of Artificial Sequence: Synthetic oligonucleotide
ugagcaaacccuaagucua

SEQ ID NO: 348896 - RNA, 19 nt, Artificial Sequence
  Description of Artificial Sequence: Synthetic oligonucleotide
ucgacacagaucuugcucc

SEQ ID NO: 348897 - RNA, 19 nt, Artificial Sequence
  Description of Artificial Sequence: Synthetic oligonucleotide
ucuauugcucguuaagggu

SEQ ID NO: 348898 - RNA, 19 nt, Artificial Sequence
  Description of Artificial Sequence: Synthetic oligonucleotide
aaccacgacagaguggugg

SEQ ID NO: 348899 - RNA, 19 nt, Artificial Sequence
  Description of Artificial Sequence: Synthetic oligonucleotide
ugauuuugcucaaacucac

SEQ ID NO: 348900 - RNA, 19 nt, Artificial Sequence
  Description of Artificial Sequence: Synthetic oligonucleotide
aggcucucgacacagaucu

SEQ ID NO: 348901 - RNA, 19 nt, Artificial Sequence
  Description of Artificial Sequence: Synthetic oligonucleotide
aguuuaggaccacacucac

SEQ ID NO: 348902 - RNA, 19 nt, Artificial Sequence
  Description of Artificial Sequence: Synthetic oligonucleotide
cuaagucuaaccuguuacc

SEQ ID NO: 348903 - RNA, 19 nt, Artificial Sequence
  Description of Artificial Sequence: Synthetic oligonucleotide
ugaccggacauucuauugc

SEQ ID NO: 348904 - RNA, 19 nt, Artificial Sequence
  Description of Artificial Sequence: Synthetic oligonucleotide
uuuguuguaucuguguggu

SEQ ID NO: 348905 - RNA, 19 nt, Artificial Sequence
  Description of Artificial Sequence: Synthetic oligonucleotide
cacugucguaccuugauag

SEQ ID NO: 348906 - RNA, 19 nt, Artificial Sequence
  Description of Artificial Sequence: Synthetic oligonucleotide
cuacagagaucacacgugg

SEQ ID NO: 348907 - RNA, 19 nt, Artificial Sequence
  Description of Artificial Sequence: Synthetic oligonucleotide
caagugugcauccucgagg

SEQ ID NO: 348908 - RNA, 19 nt, Artificial Sequence
  Description of Artificial Sequence: Synthetic oligonucleotide
guugcgaacaaggacaaug

SEQ ID NO: 348909 - RNA, 19 nt, Artificial Sequence
  Description of Artificial Sequence: Synthetic oligonucleotide
aauggcaguugugauuggg

SEQ ID NO: 348910 - RNA, 19 nt, Artificial Sequence
  Description of Artificial Sequence: Synthetic oligonucleotide
gaaggcggcaggaagagcc

SEQ ID NO: 348911 - RNA, 19 nt, Artificial Sequence
  Description of Artificial Sequence: Synthetic oligonucleotide
cuguuaccaacauuccugg

SEQ ID NO: 348912 - RNA, 19 nt, Artificial Sequence
  Description of Artificial Sequence: Synthetic oligonucleotide
gucucaaggaccuuacuac

SEQ ID NO: 348913 - RNA, 19 nt, Artificial Sequence
  Description of Artificial Sequence: Synthetic oligonucleotide
agugccaucgauagggaac

SEQ ID NO: 348914 - RNA, 19 nt, Artificial Sequence
  Description of Artificial Sequence: Synthetic oligonucleotide
uaagucuaaccuguuacca

SEQ ID NO: 348915 - RNA, 19 nt, Artificial Sequence
  Description of Artificial Sequence: Synthetic oligonucleotide
ucaaggaccuuacuacaga

SEQ ID NO: 348916 - RNA, 19 nt, Artificial Sequence
  Description of Artificial Sequence: Synthetic oligonucleotide
uuacuacagagaucacacg

SEQ ID NO: 348917 - RNA, 19 nt, Artificial Sequence
  Description of Artificial Sequence: Synthetic oligonucleotide
aguuaggaggccaguaccc

SEQ ID NO: 348918 - RNA, 19 nt, Artificial Sequence
  Description of Artificial Sequence: Synthetic oligonucleotide
acuuggacauucaagucgg

SEQ ID NO: 348919 - RNA, 19 nt, Artificial Sequence
  Description of Artificial Sequence: Synthetic oligonucleotide
auauguggcaauggugagc

SEQ ID NO: 348920 - RNA, 19 nt, Artificial Sequence
  Description of Artificial Sequence: Synthetic oligonucleotide
uauugcucguuaaggguug

SEQ ID NO: 348921 - RNA, 19 nt, Artificial Sequence
  Description of Artificial Sequence: Synthetic oligonucleotide
auacacacguuaugugcac

SEQ ID NO: 348922 - RNA, 19 nt, Artificial Sequence
  Description of Artificial Sequence: Synthetic oligonucleotide
ugcagcagcagcagcagca

SEQ ID NO: 348923 - RNA, 19 nt, Artificial Sequence
  Description of Artificial Sequence: Synthetic oligonucleotide
uucuuagacauagacccug

SEQ ID NO: 348924 - RNA, 19 nt, Artificial Sequence
  Description of Artificial Sequence: Synthetic oligonucleotide
uugcgaacaaggacaaugu

SEQ ID NO: 348925 - RNA, 19 nt, Artificial Sequence
  Description of Artificial Sequence: Synthetic oligonucleotide
ucucggccacagcagaugg

SEQ ID NO: 348926 - RNA, 19 nt, Artificial Sequence
  Description of Artificial Sequence: Synthetic oligonucleotide
ucaaacucacugucguacc

SEQ ID NO: 348927 - RNA, 19 nt, Artificial Sequence
  Description of Artificial Sequence: Synthetic oligonucleotide
gagaguugucucaaggacc

SEQ ID NO: 348928 - RNA, 19 nt, Artificial Sequence
  Description of Artificial Sequence: Synthetic oligonucleotide
agaccuagcacccggagau

SEQ ID NO: 348929 - RNA, 19 nt, Artificial Sequence
  Description of Artificial Sequence: Synthetic oligonucleotide
aagucuaaccuguuaccaa

SEQ ID NO: 348930 - RNA, 19 nt, Artificial Sequence
  Description of Artificial Sequence: Synthetic oligonucleotide
aaccuguuaccaacauucc

SEQ ID NO: 348931 - RNA, 19 nt, Artificial Sequence
  Description of Artificial Sequence: Synthetic oligonucleotide
auauuaacaaauggcacau

SEQ ID NO: 348932 - RNA, 19 nt, Artificial Sequence
  Description of Artificial Sequence: Synthetic oligonucleotide
ucucaaggaccuuacuaca

SEQ ID NO: 348933 - RNA, 19 nt, Artificial Sequence
  Description of Artificial Sequence: Synthetic oligonucleotide
ugugcauccucgagggaag

SEQ ID NO: 348934 - RNA, 19 nt, Artificial Sequence
  Description of Artificial Sequence: Synthetic oligonucleotide
aaacuaugcagcagcagca

SEQ ID NO: 348935 - RNA, 19 nt, Artificial Sequence
  Description of Artificial Sequence: Synthetic oligonucleotide
uguagcacagguuccuaac

SEQ ID NO: 348936 - RNA, 19 nt, Artificial Sequence
  Description of Artificial Sequence: Synthetic oligonucleotide
ugugccaaccagcuauuga

SEQ ID NO: 348937 - RNA, 19 nt, Artificial Sequence
  Description of Artificial Sequence: Synthetic oligonucleotide
uuuccgacugaccuugauc

SEQ ID NO: 348938 - RNA, 19 nt, Artificial Sequence
  Description of Artificial Sequence: Synthetic oligonucleotide
agaaagugccaucgauagg

SEQ ID NO: 348939 - RNA, 19 nt, Artificial Sequence
  Description of Artificial Sequence: Synthetic oligonucleotide
ugaucucucgggguggccg

SEQ ID NO: 348940 - RNA, 19 nt, Artificial Sequence
  Description of Artificial Sequence: Synthetic oligonucleotide
aguaacgucuccucauccu

SEQ ID NO: 348941 - RNA, 19 nt, Artificial Sequence
  Description of Artificial Sequence: Synthetic oligonucleotide
augauuuggauggagcaca

SEQ ID NO: 348942 - RNA, 19 nt, Artificial Sequence
  Description of Artificial Sequence: Synthetic oligonucleotide
gcauacacacguuaugugc

SEQ ID NO: 348943 - RNA, 19 nt, Artificial Sequence
  Description of Artificial Sequence: Synthetic oligonucleotide
  modified_base (2)..(2): a, c, u, g, unknown or other
gngccuugucaccauguag

SEQ ID NO: 348944 - RNA, 19 nt, Artificial Sequence
  Description of Artificial Sequence: Synthetic oligonucleotide
cauacacacguuaugugca

SEQ ID NO: 348945 - RNA, 19 nt, Artificial Sequence
  Description of Artificial Sequence: Synthetic oligonucleotide
aacucucuauauauuaaaa

SEQ ID NO: 348946 - RNA, 19 nt, Artificial Sequence
  Description of Artificial Sequence: Synthetic oligonucleotide
ucguuaaggguugcgaaca

SEQ ID NO: 348947 - RNA, 19 nt, Artificial Sequence
  Description of Artificial Sequence: Synthetic oligonucleotide
accacgacagagugguggg

SEQ ID NO: 348948 - RNA, 19 nt, Artificial Sequence
  Description of Artificial Sequence: Synthetic oligonucleotide
agcugaguaacgucuccuc

SEQ ID NO: 348949 - RNA, 19 nt, Artificial Sequence
  Description of Artificial Sequence: Synthetic oligonucleotide
caugcauacacacguuaug

SEQ ID NO: 348950 - RNA, 19 nt, Artificial Sequence
  Description of Artificial Sequence: Synthetic oligonucleotide
agauuuccgacugaccuug

SEQ ID NO: 348951 - RNA, 19 nt, Artificial Sequence
  Description of Artificial Sequence: Synthetic oligonucleotide
cuucaggcggcgauagagg

SEQ ID NO: 348952 - RNA, 19 nt, Artificial Sequence
  Description of Artificial Sequence: Synthetic oligonucleotide
guggauucuuuagaaaccc

SEQ ID NO: 348953 - RNA, 19 nt, Artificial Sequence
  Description of Artificial Sequence: Synthetic oligonucleotide
auggugagcaaacccuaag

SEQ ID NO: 348954 - RNA, 19 nt, Artificial Sequence
  Description of Artificial Sequence: Synthetic oligonucleotide
acaggggcggaaacuaugc

SEQ ID NO: 348955 - RNA, 19 nt, Artificial Sequence
  Description of Artificial Sequence: Synthetic oligonucleotide
ugaguaacgucuccucauc

SEQ ID NO: 348956 - RNA, 19 nt, Artificial Sequence
  Description of Artificial Sequence: Synthetic oligonucleotide
gagugguccgugcacuggg

SEQ ID NO: 348957 - RNA, 19 nt, Artificial Sequence
  Description of Artificial Sequence: Synthetic oligonucleotide
gaguaacgucuccucaucc

SEQ ID NO: 348958 - RNA, 19 nt, Artificial Sequence
  Description of Artificial Sequence: Synthetic oligonucleotide
cauauguggcaauggugag

SEQ ID NO: 348959 - RNA, 19 nt, Artificial Sequence
  Description of Artificial Sequence: Synthetic oligonucleotide
cucguuaaggguugcgaac

SEQ ID NO: 348960 - RNA, 19 nt, Artificial Sequence
  Description of Artificial Sequence: Synthetic oligonucleotide
acacacacacacacagucc

SEQ ID NO: 348961 - RNA, 19 nt, Artificial Sequence
  Description of Artificial Sequence: Synthetic oligonucleotide
uucaggcggcgauagagga

SEQ ID NO: 348962 - RNA, 19 nt, Artificial Sequence
  Description of Artificial Sequence: Synthetic oligonucleotide
aucgauagggaacgaggug

SEQ ID NO: 348963 - RNA, 19 nt, Artificial Sequence
  Description of Artificial Sequence: Synthetic oligonucleotide
acagagaucacacgugguu

SEQ ID NO: 348964 - RNA, 19 nt, Artificial Sequence
  Description of Artificial Sequence: Synthetic oligonucleotide
guagcacagguuccuaacc

SEQ ID NO: 348965 - RNA, 19 nt, Artificial Sequence
  Description of Artificial Sequence: Synthetic oligonucleotide
uugauaguuuuggagucga

SEQ ID NO: 348966 - RNA, 19 nt, Artificial Sequence
  Description of Artificial Sequence: Synthetic oligonucleotide
ccuaagucuaaccuguuac

SEQ ID NO: 348967 - RNA, 19 nt, Artificial Sequence
  Description of Artificial Sequence: Synthetic oligonucleotide
agaagccccagugagugag

SEQ ID NO: 348968 - RNA, 19 nt, Artificial Sequence
  Description of Artificial Sequence: Synthetic oligonucleotide
uggcaguugugauugggcu

SEQ ID NO: 348969 - RNA, 19 nt, Artificial Sequence
  Description of Artificial Sequence: Synthetic oligonucleotide
  modified_base (16)..(16): a, c, u, g, unknown or other
cuucguccccucucgngcc

SEQ ID NO: 348970 - RNA, 19 nt, Artificial Sequence
  Description of Artificial Sequence: Synthetic oligonucleotide
uucauaucacccuccccac

SEQ ID NO: 348971 - RNA, 19 nt, Artificial Sequence
  Description of Artificial Sequence: Synthetic oligonucleotide
ucuaaccuguuaccaacau

SEQ ID NO: 348972 - RNA, 19 nt, Artificial Sequence
  Description of Artificial Sequence: Synthetic oligonucleotide
cucgacacagaucuugcuc

SEQ ID NO: 348973 - RNA, 19 nt, Artificial Sequence
  Description of Artificial Sequence: Synthetic oligonucleotide
acggcaaaugagaagacgu

SEQ ID NO: 348974 - RNA, 19 nt, Artificial Sequence
  Description of Artificial Sequence: Synthetic oligonucleotide
gggaccguaaaccaacagc

SEQ ID NO: 348975 - RNA, 19 nt, Artificial Sequence
  Description of Artificial Sequence: Synthetic oligonucleotide
gauagaggacauccuguuc

SEQ ID NO: 348976 - RNA, 19 nt, Artificial Sequence
  Description of Artificial Sequence: Synthetic oligonucleotide
ugcccuugggacccucucg

SEQ ID NO: 348977 - RNA, 19 nt, Artificial Sequence
  Description of Artificial Sequence: Synthetic oligonucleotide
acagcagaccuggagcugg

SEQ ID NO: 348978 - RNA, 19 nt, Artificial Sequence
  Description of Artificial Sequence: Synthetic oligonucleotide
ugucguaccuugauaguuu

SEQ ID NO: 348979 - RNA, 19 nt, Artificial Sequence
  Description of Artificial Sequence: Synthetic oligonucleotide
acccgguacuauuugucuc

SEQ ID NO: 348980 - RNA, 19 nt, Artificial Sequence
  Description of Artificial Sequence: Synthetic oligonucleotide
uaaugaggggucccucaug

SEQ ID NO: 348981 - RNA, 19 nt, Artificial Sequence
  Description of Artificial Sequence: Synthetic oligonucleotide
agucgagguggguggaagg

SEQ ID NO: 348982 - RNA, 19 nt, Artificial Sequence
  Description of Artificial Sequence: Synthetic oligonucleotide
acuacagagaucacacgug

SEQ ID NO: 348983 - RNA, 19 nt, Artificial Sequence
  Description of Artificial Sequence: Synthetic oligonucleotide
gccuuaaagaacaaccaag

SEQ ID NO: 348984 - RNA, 19 nt, Artificial Sequence
  Description of Artificial Sequence: Synthetic oligonucleotide
ccaucgauagggaacgagg

SEQ ID NO: 348985 - RNA, 19 nt, Artificial Sequence
  Description of Artificial Sequence: Synthetic oligonucleotide
auuccuggagaaucaggca

SEQ ID NO: 348986 - RNA, 19 nt, Artificial Sequence
  Description of Artificial Sequence: Synthetic oligonucleotide
aucacacgugguuccacag

SEQ ID NO: 348987 - RNA, 19 nt, Artificial Sequence
  Description of Artificial Sequence: Synthetic oligonucleotide
uguaucugugugguggcga

SEQ ID NO: 348988 - RNA, 19 nt, Artificial Sequence
  Description of Artificial Sequence: Synthetic oligonucleotide
aaggcucucgacacagauc

SEQ ID NO: 348989 - RNA, 19 nt, Artificial Sequence
  Description of Artificial Sequence: Synthetic oligonucleotide
gaucucucgggguggccgg

SEQ ID NO: 348990 - RNA, 19 nt, Artificial Sequence
  Description of Artificial Sequence: Synthetic oligonucleotide
uacccgguacuauuugucu

SEQ ID NO: 348991 - RNA, 19 nt, Artificial Sequence
  Description of Artificial Sequence: Synthetic oligonucleotide
gaagacguccuccguggug

SEQ ID NO: 348992 - RNA, 19 nt, Artificial Sequence
  Description of Artificial Sequence: Synthetic oligonucleotide
agcgucagaccuagcaccc

SEQ ID NO: 348993 - RNA, 19 nt, Artificial Sequence
  Description of Artificial Sequence: Synthetic oligonucleotide
uacccuggugaguuaggag

SEQ ID NO: 348994 - RNA, 19 nt, Artificial Sequence
  Description of Artificial Sequence: Synthetic oligonucleotide
acaaucaugcagggcacag

SEQ ID NO: 348995 - RNA, 19 nt, Artificial Sequence
  Description of Artificial Sequence: Synthetic oligonucleotide
aagcccguuguacuccacu

SEQ ID NO: 348996 - RNA, 19 nt, Artificial Sequence
  Description of Artificial Sequence: Synthetic oligonucleotide
agcacagguuccuaacccu

SEQ ID NO: 348997 - RNA, 19 nt, Artificial Sequence
  Description of Artificial Sequence: Synthetic oligonucleotide
cacacacacacacagucca

SEQ ID NO: 348998 - RNA, 19 nt, Artificial Sequence
  Description of Artificial Sequence: Synthetic oligonucleotide
gugaccggacauucuauug

SEQ ID NO: 348999 - RNA, 19 nt, Artificial Sequence
  Description of Artificial Sequence: Synthetic oligonucleotide
caaaugagaagacguccuc

SEQ ID NO: 349000 - RNA, 19 nt, Artificial Sequence
  Description of Artificial Sequence: Synthetic oligonucleotide
ugugaucugcacugacugu

SEQ ID NO: 349001 - RNA, 19 nt, Artificial Sequence
  Description of Artificial Sequence: Synthetic oligonucleotide
gugccaaccagcuauugaa

SEQ ID NO: 349002 - RNA, 19 nt, Artificial Sequence
  Description of Artificial Sequence: Synthetic oligonucleotide
gcggaaacuaugcagcagc

SEQ ID NO: 349003 - RNA, 19 nt, Artificial Sequence
  Description of Artificial Sequence: Synthetic oligonucleotide
  modified_base (4)..(4): a, c, u, g, unknown or other
ucgngccuugucaccaugu

SEQ ID NO: 349004 - RNA, 19 nt, Artificial Sequence
  Description of Artificial Sequence: Synthetic oligonucleotide
acguuaugugcacagcgau

SEQ ID NO: 349005 - RNA, 19 nt, Artificial Sequence
  Description of Artificial Sequence: Synthetic oligonucleotide
cagcgaucuguacacacac

SEQ ID NO: 349006 - RNA, 19 nt, Artificial Sequence
  Description of Artificial Sequence: Synthetic oligonucleotide
ggcaaaugagaagacgucc

SEQ ID NO: 349007 - RNA, 19 nt, Artificial Sequence
  Description of Artificial Sequence: Synthetic oligonucleotide
gaucacacgugguuccaca

SEQ ID NO: 349008 - RNA, 19 nt, Artificial Sequence
  Description of Artificial Sequence: Synthetic oligonucleotide
ccggacauucuauugcucg

SEQ ID NO: 349009 - RNA, 19 nt, Artificial Sequence
  Description of Artificial Sequence: Synthetic oligonucleotide
ggagauuuccgacugaccu

SEQ ID NO: 349010 - RNA, 19 nt, Artificial Sequence
  Description of Artificial Sequence: Synthetic oligonucleotide
gugagcaaacccuaagucu

SEQ ID NO: 349011 - RNA, 19 nt, Artificial Sequence
  Description of Artificial Sequence: Synthetic oligonucleotide
augcagcagcagcagcagc

SEQ ID NO: 349012 - RNA, 19 nt, Artificial Sequence
  Description of Artificial Sequence: Synthetic oligonucleotide
ugcucguuaaggguugcga

SEQ ID NO: 349013 - RNA, 19 nt, Artificial Sequence
  Description of Artificial Sequence: Synthetic oligonucleotide
aggucuuugcgguaaugaa

SEQ ID NO: 349014 - RNA, 19 nt, Artificial Sequence
  Description of Artificial Sequence: Synthetic oligonucleotide
gcgaucuguacacacacac

SEQ ID NO: 349015 - RNA, 19 nt, Artificial Sequence
  Description of Artificial Sequence: Synthetic oligonucleotide
cucagcgucagaccuagca

SEQ ID NO: 349016 - RNA, 19 nt, Artificial Sequence
  Description of Artificial Sequence: Synthetic oligonucleotide
aggucguaaugaggggucc

SEQ ID NO: 349017 - RNA, 19 nt, Artificial Sequence
  Description of Artificial Sequence: Synthetic oligonucleotide
acugucguaccuugauagu

SEQ ID NO: 349018 - RNA, 19 nt, Artificial Sequence
  Description of Artificial Sequence: Synthetic oligonucleotide
gugaaaagcuucaggcggc

SEQ ID NO: 349019 - RNA, 19 nt, Artificial Sequence
  Description of Artificial Sequence: Synthetic oligonucleotide
acauucuauugcucguuaa

SEQ ID NO: 349020 - RNA, 19 nt, Artificial Sequence
  Description of Artificial Sequence: Synthetic oligonucleotide
guuaaggguugcgaacaag

SEQ ID NO: 349021 - RNA, 19 nt, Artificial Sequence
  Description of Artificial Sequence: Synthetic oligonucleotide
ggcgauagaggacauccug

SEQ ID NO: 349022 - RNA, 19 nt, Artificial Sequence
  Description of Artificial Sequence: Synthetic oligonucleotide
auugcucguuaaggguugc

SEQ ID NO: 349023 - RNA, 19 nt, Artificial Sequence
  Description of Artificial Sequence: Synthetic oligonucleotide
agcccguuguacuccacug

SEQ ID NO: 349024 - RNA, 19 nt, Artificial Sequence
  Description of Artificial Sequence: Synthetic oligonucleotide
gaccguaaaccaacagcag

SEQ ID NO: 349025 - RNA, 19 nt, Artificial Sequence
  Description of Artificial Sequence: Synthetic oligonucleotide
uagcacccggagauuuccg

SEQ ID NO: 349026 - RNA, 19 nt, Artificial Sequence
  Description of Artificial Sequence: Synthetic oligonucleotide
cuccgugguggcuuccugg

SEQ ID NO: 349027 - RNA, 19 nt, Artificial Sequence
  Description of Artificial Sequence: Synthetic oligonucleotide
cagaaggcucucgacacag

SEQ ID NO: 349028 - RNA, 19 nt, Artificial Sequence
  Description of Artificial Sequence: Synthetic oligonucleotide
agcaaacccuaagucuaac

SEQ ID NO: 349029 - RNA, 19 nt, Artificial Sequence
  Description of Artificial Sequence: Synthetic oligonucleotide
ucacugucguaccuugaua

SEQ ID NO: 349030 - RNA, 19 nt, Artificial Sequence
  Description of Artificial Sequence: Synthetic oligonucleotide
aaggaccuuacuacagaga

SEQ ID NO: 349031 - RNA, 19 nt, Artificial Sequence
  Description of Artificial Sequence: Synthetic oligonucleotide
cguaccuugauaguuuugg

SEQ ID NO: 349032 - RNA, 19 nt, Artificial Sequence
  Description of Artificial Sequence: Synthetic oligonucleotide
ugcgaacaaggacaaugua

SEQ ID NO: 349033 - RNA, 19 nt, Artificial Sequence
  Description of Artificial Sequence: Synthetic oligonucleotide
ucguaccuugauaguuuug

SEQ ID NO: 349034 - RNA, 19 nt, Artificial Sequence
  Description of Artificial Sequence: Synthetic oligonucleotide
ggcuucuuagacauagacc

SEQ ID NO: 349035 - RNA, 19 nt, Artificial Sequence
  Description of Artificial Sequence: Synthetic oligonucleotide
gcgaacaaggacaauguac

SEQ ID NO: 349036 - RNA, 19 nt, Artificial Sequence
  Description of Artificial Sequence: Synthetic oligonucleotide
aaagugcaggcugaccuuu

SEQ ID NO: 349037 - RNA, 19 nt, Artificial Sequence
  Description of Artificial Sequence: Synthetic oligonucleotide
gugcacagcgaucuguaca

SEQ ID NO: 349038 - RNA, 19 nt, Artificial Sequence
  Description of Artificial Sequence: Synthetic oligonucleotide
ucucgacacagaucuugcu

SEQ ID NO: 349039 - RNA, 19 nt, Artificial Sequence
  Description of Artificial Sequence: Synthetic oligonucleotide
cauaggguguccaugcaua

SEQ ID NO: 349040 - RNA, 19 nt, Artificial Sequence
  Description of Artificial Sequence: Synthetic oligonucleotide
gacaggggcggaaacuaug

SEQ ID NO: 349041 - RNA, 19 nt, Artificial Sequence
  Description of Artificial Sequence: Synthetic oligonucleotide
auggcagucccugucucag

SEQ ID NO: 349042 - RNA, 19 nt, Artificial Sequence
  Description of Artificial Sequence: Synthetic oligonucleotide
caggucguaaugagggguc

SEQ ID NO: 349043 - RNA, 19 nt, Artificial Sequence
  Description of Artificial Sequence: Synthetic oligonucleotide
acccggagauuuccgacug

SEQ ID NO: 349044 - RNA, 19 nt, Artificial Sequence
  Description of Artificial Sequence: Synthetic oligonucleotide
gcaaacccuaagucuaacc

SEQ ID NO: 349045 - RNA, 19 nt, Artificial Sequence
  Description of Artificial Sequence: Synthetic oligonucleotide
cacguuaugugcacagcga

SEQ ID NO: 349046 - RNA, 19 nt, Artificial Sequence
  Description of Artificial Sequence: Synthetic oligonucleotide
guaccuugauaguuuugga

SEQ ID NO: 349047 - RNA, 19 nt, Artificial Sequence
  Description of Artificial Sequence: Synthetic oligonucleotide
augagaagacguccuccgu

SEQ ID NO: 349048 - RNA, 19 nt, Artificial Sequence
  Description of Artificial Sequence: Synthetic oligonucleotide
gcuucaggcggcgauagag

SEQ ID NO: 349049 - RNA, 19 nt, Artificial Sequence
  Description of Artificial Sequence: Synthetic oligonucleotide
gccucuaugucagagucgc

SEQ ID NO: 349050 - RNA, 19 nt, Artificial Sequence
  Description of Artificial Sequence: Synthetic oligonucleotide
uaccaacauuccuggagaa

SEQ ID NO: 349051 - RNA, 19 nt, Artificial Sequence
  Description of Artificial Sequence: Synthetic oligonucleotide
agcagcagcagcagcagca

SEQ ID NO: 349052 - RNA, 19 nt, Artificial Sequence
  Description of Artificial Sequence: Synthetic oligonucleotide
gaggaguccucaaaguuua

SEQ ID NO: 349053 - RNA, 19 nt, Artificial Sequence
  Description of Artificial Sequence: Synthetic oligonucleotide
agguacccgguacuauuug

SEQ ID NO: 349054 - RNA, 19 nt, Artificial Sequence
  Description of Artificial Sequence: Synthetic oligonucleotide
ugcgaaccaccuccucugc

SEQ ID NO: 349055 - RNA, 19 nt, Artificial Sequence
  Description of Artificial Sequence: Synthetic oligonucleotide
acgacagaguggugggucu

SEQ ID NO: 349056 - RNA, 19 nt, Artificial Sequence
  Description of Artificial Sequence: Synthetic oligonucleotide
uuguuguaucuguguggug

SEQ ID NO: 349057 - RNA, 19 nt, Artificial Sequence
  Description of Artificial Sequence: Synthetic oligonucleotide
aaagugccaucgauaggga

SEQ ID NO: 349058 - RNA, 19 nt, Artificial Sequence
  Description of Artificial Sequence: Synthetic oligonucleotide
gcacaagugugcauccucg

SEQ ID NO: 349059 - RNA, 19 nt, Artificial Sequence
  Description of Artificial Sequence: Synthetic oligonucleotide
ccucaucagagaaguagcc

SEQ ID NO: 349060 - RNA, 19 nt, Artificial Sequence
  Description of Artificial Sequence: Synthetic oligonucleotide
gcggcgauagaggacaucc

SEQ ID NO: 349061 - RNA, 19 nt, Artificial Sequence
  Description of Artificial Sequence: Synthetic oligonucleotide
uacacacguuaugugcaca

SEQ ID NO: 349062 - RNA, 19 nt, Artificial Sequence
  Description of Artificial Sequence: Synthetic oligonucleotide
gucgcucaucuccucauca

SEQ ID NO: 349063 - RNA, 19 nt, Artificial Sequence
  Description of Artificial Sequence: Synthetic oligonucleotide
agcacccggagauuuccga

SEQ ID NO: 349064 - RNA, 19 nt, Artificial Sequence
  Description of Artificial Sequence: Synthetic oligonucleotide
uugcucguuaaggguugcg

SEQ ID NO: 349065 - RNA, 19 nt, Artificial Sequence
  Description of Artificial Sequence: Synthetic oligonucleotide
ugggcuucuuagacauaga

SEQ ID NO: 349066 - RNA, 19 nt, Artificial Sequence
  Description of Artificial Sequence: Synthetic oligonucleotide
cacgcuggacucauaguca

SEQ ID NO: 349067 - RNA, 19 nt, Artificial Sequence
  Description of Artificial Sequence: Synthetic oligonucleotide
ggggcggaaacuaugcagc

SEQ ID NO: 349068 - RNA, 19 nt, Artificial Sequence
  Description of Artificial Sequence: Synthetic oligonucleotide
cagauggugugccuucguc

SEQ ID NO: 349069 - RNA, 19 nt, Artificial Sequence
  Description of Artificial Sequence: Synthetic oligonucleotide
cacagaucuugcuccauaa

SEQ ID NO: 349070 - RNA, 19 nt, Artificial Sequence
  Description of Artificial Sequence: Synthetic oligonucleotide
acacgugguuccacagagc

SEQ ID NO: 349071 - RNA, 19 nt, Artificial Sequence
  Description of Artificial Sequence: Synthetic oligonucleotide
aaacccuagcaagucccau

SEQ ID NO: 349072 - RNA, 19 nt, Artificial Sequence
  Description of Artificial Sequence: Synthetic oligonucleotide
uccuugcacgcgcuugccu

SEQ ID NO: 349073 - RNA, 19 nt, Artificial Sequence
  Description of Artificial Sequence: Synthetic oligonucleotide
caucgauagggaacgaggu

SEQ ID NO: 349074 - RNA, 19 nt, Artificial Sequence
  Description of Artificial Sequence: Synthetic oligonucleotide
ugguccuugcacgcgcuug

SEQ ID NO: 349075 - RNA, 19 nt, Artificial Sequence
  Description of Artificial Sequence: Synthetic oligonucleotide
aaggcgagugcggccucgg

SEQ ID NO: 349076 - RNA, 19 nt, Artificial Sequence
  Description of Artificial Sequence: Synthetic oligonucleotide
gaagguacccgguacuauu

SEQ ID NO: 349077 - RNA, 19 nt, Artificial Sequence
  Description of Artificial Sequence: Synthetic oligonucleotide
ggaaacuaugcagcagcag

SEQ ID NO: 349078 - RNA, 19 nt, Artificial Sequence
  Description of Artificial Sequence: Synthetic oligonucleotide
acagcgaucuguacacaca

SEQ ID NO: 349079 - RNA, 19 nt, Artificial Sequence
  Description of Artificial Sequence: Synthetic oligonucleotide
gaccggacauucuauugcu

SEQ ID NO: 349080 - RNA, 19 nt, Artificial Sequence
  Description of Artificial Sequence: Synthetic oligonucleotide
auuuccgacugaccuugau

SEQ ID NO: 349081 - RNA, 19 nt, Artificial Sequence
  Description of Artificial Sequence: Synthetic oligonucleotide
gagaaguagccaucagccu

SEQ ID NO: 349082 - RNA, 19 nt, Artificial Sequence
  Description of Artificial Sequence: Synthetic oligonucleotide
ccguaaaccaacagcagca

SEQ ID NO: 349083 - RNA, 19 nt, Artificial Sequence
  Description of Artificial Sequence: Synthetic oligonucleotide
cuauugaagaaagugccau

SEQ ID NO: 349084 - RNA, 19 nt, Artificial Sequence
  Description of Artificial Sequence: Synthetic oligonucleotide
ccacgcuggacucauaguc

SEQ ID NO: 349085 - RNA, 19 nt, Artificial Sequence
  Description of Artificial Sequence: Synthetic oligonucleotide
cacacguuaugugcacagc

SEQ ID NO: 349086 - RNA, 19 nt, Artificial Sequence
  Description of Artificial Sequence: Synthetic oligonucleotide
cacaguccaauccaccaaa

SEQ ID NO: 349087 - RNA, 19 nt, Artificial Sequence
  Description of Artificial Sequence: Synthetic oligonucleotide
ggcucucgggccaaugugg

SEQ ID NO: 349088 - RNA, 19 nt, Artificial Sequence
  Description of Artificial Sequence: Synthetic oligonucleotide
aucuguacacacacacaca

SEQ ID NO: 349089 - RNA, 19 nt, Artificial Sequence
  Description of Artificial Sequence: Synthetic oligonucleotide
auccucgagggaaggcggc

SEQ ID NO: 349090 - RNA, 19 nt, Artificial Sequence
  Description of Artificial Sequence: Synthetic oligonucleotide
cucuggcgcagccuucacc

SEQ ID NO: 349091 - RNA, 19 nt, Artificial Sequence
  Description of Artificial Sequence: Synthetic oligonucleotide
ugcauccucgagggaaggc

SEQ ID NO: 349092 - RNA, 19 nt, Artificial Sequence
  Description of Artificial Sequence: Synthetic oligonucleotide
gaaacccuagcaaguccca

SEQ ID NO: 349093 - RNA, 19 nt, Artificial Sequence
  Description of Artificial Sequence: Synthetic oligonucleotide
cuguacacacacacacaca

SEQ ID NO: 349094 - RNA, 19 nt, Artificial Sequence
  Description of Artificial Sequence: Synthetic oligonucleotide
aggggucccucaugaagcu

SEQ ID NO: 349095 - RNA, 19 nt, Artificial Sequence
  Description of Artificial Sequence: Synthetic oligonucleotide
cacgacagagugguggguc

SEQ ID NO: 349096 - RNA, 19 nt, Artificial Sequence
  Description of Artificial Sequence: Synthetic oligonucleotide
cacgugguuccacagagcu

SEQ ID NO: 349097 - RNA, 19 nt, Artificial Sequence
  Description of Artificial Sequence: Synthetic oligonucleotide
guacccgguacuauuuguc

SEQ ID NO: 349098 - RNA, 19 nt, Artificial Sequence
  Description of Artificial Sequence: Synthetic oligonucleotide
  modified_base (7)..(7): a, c, u, g, unknown or other
cucucgngccuugucacca

SEQ ID NO: 349099 - RNA, 19 nt, Artificial Sequence
  Description of Artificial Sequence: Synthetic oligonucleotide
ccaaaugauuuggauggag

SEQ ID NO: 349100 - RNA, 19 nt, Artificial Sequence
  Description of Artificial Sequence: Synthetic oligonucleotide
acucuggcgcagccuucac

SEQ ID NO: 349101 - RNA, 19 nt, Artificial Sequence
  Description of Artificial Sequence: Synthetic oligonucleotide
gcgagugcggccucgggcc

SEQ ID NO: 349102 - RNA, 19 nt, Artificial Sequence
  Description of Artificial Sequence: Synthetic oligonucleotide
uggaagguacccgguacua

SEQ ID NO: 349103 - RNA, 19 nt, Artificial Sequence
  Description of Artificial Sequence: Synthetic oligonucleotide
caggcggcgauagaggaca

SEQ ID NO: 349104 - RNA, 19 nt, Artificial Sequence
  Description of Artificial Sequence: Synthetic oligonucleotide
ggcuacugcccuugggacc

SEQ ID NO: 349105 - RNA, 19 nt, Artificial Sequence
  Description of Artificial Sequence: Synthetic oligonucleotide
uaucugugugguggcgaug

SEQ ID NO: 349106 - RNA, 19 nt, Artificial Sequence
  Description of Artificial Sequence: Synthetic oligonucleotide
cagggcuacugcccuuggg

SEQ ID NO: 349107 - RNA, 19 nt, Artificial Sequence
  Description of Artificial Sequence: Synthetic oligonucleotide
cucggccacagcagauggc

SEQ ID NO: 349108 - RNA, 19 nt, Artificial Sequence
  Description of Artificial Sequence: Synthetic oligonucleotide
cuuuggucuccucccagaa

SEQ ID NO: 349109 - RNA, 19 nt, Artificial Sequence
  Description of Artificial Sequence: Synthetic oligonucleotide
caugcgaaccaccuccucu

SEQ ID NO: 349110 - RNA, 19 nt, Artificial Sequence
  Description of Artificial Sequence: Synthetic oligonucleotide
gagugcaaugggcuucuua

SEQ ID NO: 349111 - RNA, 19 nt, Artificial Sequence
  Description of Artificial Sequence: Synthetic oligonucleotide
uccgacugaccuugaucuc

SEQ ID NO: 349112 - RNA, 19 nt, Artificial Sequence
  Description of Artificial Sequence: Synthetic oligonucleotide
  modified_base (15)..(15): a, c, u, g, unknown or other
uucguccccucucgngccu

SEQ ID NO: 349113 - RNA, 19 nt, Artificial Sequence
  Description of Artificial Sequence: Synthetic oligonucleotide
gggaacgagguggacagac

SEQ ID NO: 349114 - RNA, 19 nt, Artificial Sequence
  Description of Artificial Sequence: Synthetic oligonucleotide
caguuggaaauggcaguug

SEQ ID NO: 349115 - RNA, 19 nt, Artificial Sequence
  Description of Artificial Sequence: Synthetic oligonucleotide
guuuaggaccacacucaca

SEQ ID NO: 349116 - RNA, 19 nt, Artificial Sequence
  Description of Artificial Sequence: Synthetic oligonucleotide
gagauuuccgacugaccuu

SEQ ID NO: 349117 - RNA, 19 nt, Artificial Sequence
  Description of Artificial Sequence: Synthetic oligonucleotide
acgcgcuugccucugccau

SEQ ID NO: 349118 - RNA, 19 nt, Artificial Sequence
  Description of Artificial Sequence: Synthetic oligonucleotide
gcuauugaagaaagugcca

SEQ ID NO: 349119 - RNA, 19 nt, Artificial Sequence
  Description of Artificial Sequence: Synthetic oligonucleotide
  modified_base (5)..(5): a, c, u, g, unknown or other
cucgngccuugucaccaug

SEQ ID NO: 349120 - RNA, 19 nt, Artificial Sequence
  Description of Artificial Sequence: Synthetic oligonucleotide
accaacauuccuggagaau

SEQ ID NO: 349121 - RNA, 19 nt, Artificial Sequence
  Description of Artificial Sequence: Synthetic oligonucleotide
aaggcggcaggaagagccu

SEQ ID NO: 349122 - RNA, 19 nt, Artificial Sequence
  Description of Artificial Sequence: Synthetic oligonucleotide
ucguaaugaggggucccuc

SEQ ID NO: 349123 - RNA, 19 nt, Artificial Sequence
  Description of Artificial Sequence: Synthetic oligonucleotide
gauuuugcucaaacucacu

SEQ ID NO: 349124 - RNA, 19 nt, Artificial Sequence
  Description of Artificial Sequence: Synthetic oligonucleotide
cugaguaacgucuccucau

SEQ ID NO: 349125 - RNA, 19 nt, Artificial Sequence
  Description of Artificial Sequence: Synthetic oligonucleotide
agcagugaauugacaggcu

SEQ ID NO: 349126 - RNA, 19 nt, Artificial Sequence
  Description of Artificial Sequence: Synthetic oligonucleotide
ccuugggacccucucggcc

SEQ ID NO: 349127 - RNA, 19 nt, Artificial Sequence
  Description of Artificial Sequence: Synthetic oligonucleotide
  modified_base (6)..(6): a, c, u, g, unknown or other
ucucgngccuugucaccau

SEQ ID NO: 349128 - RNA, 19 nt, Artificial Sequence
  Description of Artificial Sequence: Synthetic oligonucleotide
ccuuacuacagagaucaca

SEQ ID NO: 349129 - RNA, 19 nt, Artificial Sequence
  Description of Artificial Sequence: Synthetic oligonucleotide
ggcuggacggcaaaugaga

SEQ ID NO: 349130 - RNA, 19 nt, Artificial Sequence
  Description of Artificial Sequence: Synthetic oligonucleotide
gcucguuaaggguugcgaa

SEQ ID NO: 349131 - RNA, 19 nt, Artificial Sequence
  Description of Artificial Sequence: Synthetic oligonucleotide
ugucucguccaggguuuca

SEQ ID NO: 349132 - RNA, 19 nt, Artificial Sequence
  Description of Artificial Sequence: Synthetic oligonucleotide
cagcagcagcagcagcagc

SEQ ID NO: 349133 - RNA, 19 nt, Artificial Sequence
  Description of Artificial Sequence: Synthetic oligonucleotide
guaaugaggggucccucau

SEQ ID NO: 349134 - RNA, 19 nt, Artificial Sequence
  Description of Artificial Sequence: Synthetic oligonucleotide
caaacucacugucguaccu

SEQ ID NO: 349135 - RNA, 19 nt, Artificial Sequence
  Description of Artificial Sequence: Synthetic oligonucleotide
gagcaaacccuaagucuaa

SEQ ID NO: 349136 - RNA, 19 nt, Artificial Sequence
  Description of Artificial Sequence: Synthetic oligonucleotide
cucgggccuuccuggcagg

SEQ ID NO: 349137 - RNA, 19 nt, Artificial Sequence
  Description of Artificial Sequence: Synthetic oligonucleotide
ggucugggacacucagcag

SEQ ID NO: 349138 - RNA, 19 nt, Artificial Sequence
  Description of Artificial Sequence: Synthetic oligonucleotide
gccaucgauagggaacgag

SEQ ID NO: 349139 - RNA, 19 nt, Artificial Sequence
  Description of Artificial Sequence: Synthetic oligonucleotide
accuagcacccggagauuu

SEQ ID NO: 349140 - RNA, 19 nt, Artificial Sequence
  Description of Artificial Sequence: Synthetic oligonucleotide
guggaagguacccgguacu

SEQ ID NO: 349141 - RNA, 19 nt, Artificial Sequence
  Description of Artificial Sequence: Synthetic oligonucleotide
  modified_base (18)..(18): a, c, u, g, unknown or other
gccuucguccccucucgng

SEQ ID NO: 349142 - RNA, 19 nt, Artificial Sequence
  Description of Artificial Sequence: Synthetic oligonucleotide
ggaacgagguggacagacc

SEQ ID NO: 349143 - RNA, 19 nt, Artificial Sequence
  Description of Artificial Sequence: Synthetic oligonucleotide
  modified_base (9)..(9): a, c, u, g, unknown or other
cccucucgngccuugucac

SEQ ID NO: 349144 - RNA, 19 nt, Artificial Sequence
  Description of Artificial Sequence: Synthetic oligonucleotide
aaaccacgacagaguggug

SEQ ID NO: 349145 - RNA, 19 nt, Artificial Sequence
  Description of Artificial Sequence: Synthetic oligonucleotide
ucucucgggguggccggag

SEQ ID NO: 349146 - RNA, 19 nt, Artificial Sequence
  Description of Artificial Sequence: Synthetic oligonucleotide
caggggccaaaauccagaa

SEQ ID NO: 349147 - RNA, 19 nt, Artificial Sequence
  Description of Artificial Sequence: Synthetic oligonucleotide
gcaaaugagaagacguccu

SEQ ID NO: 349148 - RNA, 19 nt, Artificial Sequence
  Description of Artificial Sequence: Synthetic oligonucleotide
agcgaucuguacacacaca

SEQ ID NO: 349149 - RNA, 19 nt, Artificial Sequence
  Description of Artificial Sequence: Synthetic oligonucleotide
gugaguuaggaggccagua

SEQ ID NO: 349150 - RNA, 19 nt, Artificial Sequence
  Description of Artificial Sequence: Synthetic oligonucleotide
gacccucucggccuuuccu

SEQ ID NO: 349151 - RNA, 19 nt, Artificial Sequence
  Description of Artificial Sequence: Synthetic oligonucleotide
gcuugccucugccauccug

SEQ ID NO: 349152 - RNA, 19 nt, Artificial Sequence
  Description of Artificial Sequence: Synthetic oligonucleotide
ggguccccgacuccaacac

SEQ ID NO: 349153 - RNA, 19 nt, Artificial Sequence
  Description of Artificial Sequence: Synthetic oligonucleotide
guaucugugugguggcgau

SEQ ID NO: 349154 - RNA, 19 nt, Artificial Sequence
  Description of Artificial Sequence: Synthetic oligonucleotide
ggucguaaugagggguccc

SEQ ID NO: 349155 - RNA, 19 nt, Artificial Sequence
  Description of Artificial Sequence: Synthetic oligonucleotide
gcacccggagauuuccgac

SEQ ID NO: 349156 - RNA, 19 nt, Artificial Sequence
  Description of Artificial Sequence: Synthetic oligonucleotide
gggcuggacggcaaaugag

SEQ ID NO: 349157 - RNA, 19 nt, Artificial Sequence
  Description of Artificial Sequence: Synthetic oligonucleotide
cagggaccguaaaccaaca

SEQ ID NO: 349158 - RNA, 19 nt, Artificial Sequence
  Description of Artificial Sequence: Synthetic oligonucleotide
cuuggacauucaagucgga

SEQ ID NO: 349159 - RNA, 19 nt, Artificial Sequence
  Description of Artificial Sequence: Synthetic oligonucleotide
cagcagcagcagcagcaac

SEQ ID NO: 349160 - RNA, 19 nt, Artificial Sequence
  Description of Artificial Sequence: Synthetic oligonucleotide
aggaguccucaaaguuuag

SEQ ID NO: 349161 - RNA, 19 nt, Artificial Sequence
  Description of Artificial Sequence: Synthetic oligonucleotide
cguuaugugcacagcgauc

SEQ ID NO: 349162 - RNA, 19 nt, Artificial Sequence
  Description of Artificial Sequence: Synthetic oligonucleotide
cacagguuccuaacccucu

SEQ ID NO: 349163 - RNA, 19 nt, Artificial Sequence
  Description of Artificial Sequence: Synthetic oligonucleotide
uugggacccucucggccuu

SEQ ID NO: 349164 - RNA, 19 nt, Artificial Sequence
  Description of Artificial Sequence: Synthetic oligonucleotide
gcagcagcagcagcagcag

SEQ ID NO: 349165 - RNA, 19 nt, Artificial Sequence
  Description of Artificial Sequence: Synthetic oligonucleotide
aaugggcuucuuagacaua

SEQ ID NO: 349166 - RNA, 19 nt, Artificial Sequence
  Description of Artificial Sequence: Synthetic oligonucleotide
gguacccgguacuauuugu

SEQ ID NO: 349167 - RNA, 19 nt, Artificial Sequence
  Description of Artificial Sequence: Synthetic oligonucleotide
guccccgacuccaacaccu

SEQ ID NO: 349168 - RNA, 19 nt, Artificial Sequence
  Description of Artificial Sequence: Synthetic oligonucleotide
gcaggggccaaaauccaga

SEQ ID NO: 349169 - RNA, 19 nt, Artificial Sequence
  Description of Artificial Sequence: Synthetic oligonucleotide
ggggugaccggacauucua

SEQ ID NO: 349170 - RNA, 19 nt, Artificial Sequence
  Description of Artificial Sequence: Synthetic oligonucleotide
  modified_base (8)..(8): a, c, u, g, unknown or other
ccucucgngccuugucacc

SEQ ID NO: 349171 - RNA, 19 nt, Artificial Sequence
  Description of Artificial Sequence: Synthetic oligonucleotide
uugcacgcgcuugccucug

SEQ ID NO: 349172 - RNA, 19 nt, Artificial Sequence
  Description of Artificial Sequence: Synthetic oligonucleotide
ccggagauuuccgacugac

SEQ ID NO: 349173 - RNA, 19 nt, Artificial Sequence
  Description of Artificial Sequence: Synthetic oligonucleotide
gguccccgacuccaacacc

SEQ ID NO: 349174 - RNA, 19 nt, Artificial Sequence
  Description of Artificial Sequence: Synthetic oligonucleotide
caggggcggaaacuaugca

SEQ ID NO: 349175 - RNA, 19 nt, Artificial Sequence
  Description of Artificial Sequence: Synthetic oligonucleotide
acacacacacacaguccaa

SEQ ID NO: 349176 - RNA, 19 nt, Artificial Sequence
  Description of Artificial Sequence: Synthetic oligonucleotide
gucguaccuugauaguuuu

SEQ ID NO: 349177 - RNA, 19 nt, Artificial Sequence
  Description of Artificial Sequence: Synthetic oligonucleotide
gauuuccgacugaccuuga

SEQ ID NO: 349178 - RNA, 19 nt, Artificial Sequence
  Description of Artificial Sequence: Synthetic oligonucleotide
ggggaaccacgcuggacuc

SEQ ID NO: 349179 - RNA, 19 nt, Artificial Sequence
  Description of Artificial Sequence: Synthetic oligonucleotide
gucguaaugaggggucccu

SEQ ID NO: 349180 - RNA, 19 nt, Artificial Sequence
  Description of Artificial Sequence: Synthetic oligonucleotide
cggagauuuccgacugacc

SEQ ID NO: 349181 - RNA, 19 nt, Artificial Sequence
  Description of Artificial Sequence: Synthetic oligonucleotide
cggcaaaugagaagacguc

SEQ ID NO: 349182 - RNA, 19 nt, Artificial Sequence
  Description of Artificial Sequence: Synthetic oligonucleotide
cacccggagauuuccgacu

SEQ ID NO: 349183 - RNA, 19 nt, Artificial Sequence
  Description of Artificial Sequence: Synthetic oligonucleotide
cguaaugaggggucccuca

SEQ ID NO: 349184 - RNA, 19 nt, Artificial Sequence
  Description of Artificial Sequence: Synthetic oligonucleotide
guacacacacacacacagu

SEQ ID NO: 349185 - RNA, 19 nt, Artificial Sequence
  Description of Artificial Sequence: Synthetic oligonucleotide
cugucguaccuugauaguu

SEQ ID NO: 349186 - RNA, 19 nt, Artificial Sequence
  Description of Artificial Sequence: Synthetic oligonucleotide
ccuagcacccggagauuuc

SEQ ID NO: 349187 - RNA, 19 nt, Artificial Sequence
  Description of Artificial Sequence: Synthetic oligonucleotide
  modified_base (10)..(10): a, c, u, g, unknown or other
ccccucucgngccuuguca

SEQ ID NO: 349188 - RNA, 19 nt, Artificial Sequence
  Description of Artificial Sequence: Synthetic oligonucleotide
gucgagguggguggaaggu

SEQ ID NO: 349189 - RNA, 19 nt, Artificial Sequence
  Description of Artificial Sequence: Synthetic oligonucleotide
gggacacucagcaguugga

SEQ ID NO: 349190 - RNA, 19 nt, Artificial Sequence
  Description of Artificial Sequence: Synthetic oligonucleotide
cuggcucucgggccaaugu

SEQ ID NO: 349191 - RNA, 19 nt, Artificial Sequence
  Description of Artificial Sequence: Synthetic oligonucleotide
cauguagcacagguuccua

SEQ ID NO: 349192 - RNA, 19 nt, Artificial Sequence
  Description of Artificial Sequence: Synthetic oligonucleotide
cccuagcaagucccauagg

SEQ ID NO: 349193 - RNA, 19 nt, Artificial Sequence
  Description of Artificial Sequence: Synthetic oligonucleotide
ccggagccugcccaagggc

SEQ ID NO: 349194 - RNA, 19 nt, Artificial Sequence
  Description of Artificial Sequence: Synthetic oligonucleotide
gcgauagaggacauccugu

SEQ ID NO: 349195 - RNA, 19 nt, Artificial Sequence
  Description of Artificial Sequence: Synthetic oligonucleotide
cgaucuguacacacacaca

SEQ ID NO: 349196 - RNA, 19 nt, Artificial Sequence
  Description of Artificial Sequence: Synthetic oligonucleotide
cuaugucagagucgcucau

SEQ ID NO: 349197 - RNA, 19 nt, Artificial Sequence
  Description of Artificial Sequence: Synthetic oligonucleotide
ggugaccggacauucuauu

SEQ ID NO: 349198 - RNA, 19 nt, Artificial Sequence
  Description of Artificial Sequence: Synthetic oligonucleotide
cacacacacacaguccaau

SEQ ID NO: 349199 - RNA, 19 nt, Artificial Sequence
  Description of Artificial Sequence: Synthetic oligonucleotide
gcgucagaccuagcacccg

SEQ ID NO: 349200 - RNA, 19 nt, Artificial Sequence
  Description of Artificial Sequence: Synthetic oligonucleotide
cccgguacuauuugucucu

SEQ ID NO: 349201 - RNA, 19 nt, Artificial Sequence
  Description of Artificial Sequence: Synthetic oligonucleotide
guggccggagccugcccaa

SEQ ID NO: 349202 - RNA, 19 nt, Artificial Sequence
  Description of Artificial Sequence: Synthetic oligonucleotide
aucucucgggguggccgga

SEQ ID NO: 349203 - RNA, 19 nt, Artificial Sequence
  Description of Artificial Sequence: Synthetic oligonucleotide
cccuugggacccucucggc

SEQ ID NO: 349204 - RNA, 19 nt, Artificial Sequence
  Description of Artificial Sequence: Synthetic oligonucleotide
cgauagggaacgaggugga

SEQ ID NO: 349205 - RNA, 19 nt, Artificial Sequence
  Description of Artificial Sequence: Synthetic oligonucleotide
gcaguuggaaauggcaguu

SEQ ID NO: 349206 - RNA, 19 nt, Artificial Sequence
  Description of Artificial Sequence: Synthetic oligonucleotide
gugauugggcugaggcccu

SEQ ID NO: 349207 - RNA, 19 nt, Artificial Sequence
  Description of Artificial Sequence: Synthetic oligonucleotide
cccuaagucuaaccuguua

SEQ ID NO: 349208 - RNA, 19 nt, Artificial Sequence
  Description of Artificial Sequence: Synthetic oligonucleotide
cggugcccacuguucaaag

SEQ ID NO: 349209 - RNA, 19 nt, Artificial Sequence
  Description of Artificial Sequence: Synthetic oligonucleotide
ccucaaaguuuaggaccac

SEQ ID NO: 349210 - RNA, 19 nt, Artificial Sequence
  Description of Artificial Sequence: Synthetic oligonucleotide
gcagcagcagcagcagcaa

SEQ ID NO: 349211 - RNA, 19 nt, Artificial Sequence
  Description of Artificial Sequence: Synthetic oligonucleotide
ggacauucuauugcucguu

SEQ ID NO: 349212 - RNA, 19 nt, Artificial Sequence
  Description of Artificial Sequence: Synthetic oligonucleotide
ggaagguacccgguacuau

SEQ ID NO: 349213 - RNA, 19 nt, Artificial Sequence
  Description of Artificial Sequence: Synthetic oligonucleotide
cccauaggguguccaugca

SEQ ID NO: 349214 - RNA, 19 nt, Artificial Sequence
  Description of Artificial Sequence: Synthetic oligonucleotide
ccgacugaccuugaucucu

SEQ ID NO: 349215 - RNA, 19 nt, Artificial Sequence
  Description of Artificial Sequence: Synthetic oligonucleotide
cccaaaugauuuggaugga

SEQ ID NO: 349216 - RNA, 19 nt, Artificial Sequence
  Description of Artificial Sequence: Synthetic oligonucleotide
cgauagaggacauccuguu

SEQ ID NO: 349217 - RNA, 19 nt, Artificial Sequence
  Description of Artificial Sequence: Synthetic oligonucleotide
cguuaaggguugcgaacaa

SEQ ID NO: 349218 - RNA, 19 nt, Artificial Sequence
  Description of Artificial Sequence: Synthetic oligonucleotide
uccgugcacugggcccauc

SEQ ID NO: 349219 - RNA, 19 nt, Artificial Sequence
  Description of Artificial Sequence: Synthetic oligonucleotide
cggacauucuauugcucgu

SEQ ID NO: 349220 - RNA, 19 nt, Artificial Sequence
  Description of Artificial Sequence: Synthetic oligonucleotide
gaccuagcacccggagauu

SEQ ID NO: 349221 - RNA, 19 nt, Artificial Sequence
  Description of Artificial Sequence: Synthetic oligonucleotide
aggcggcgauagaggacau

SEQ ID NO: 349222 - RNA, 19 nt, Artificial Sequence
  Description of Artificial Sequence: Synthetic oligonucleotide
gggugaccggacauucuau

SEQ ID NO: 349223 - RNA, 19 nt, Artificial Sequence
  Description of Artificial Sequence: Synthetic oligonucleotide
  modified_base (3)..(3): a, c, u, g, unknown or other
cgngccuugucaccaugua

SEQ ID NO: 349224 - RNA, 19 nt, Artificial Sequence
  Description of Artificial Sequence: Synthetic oligonucleotide
cccggagauuuccgacuga

SEQ ID NO: 349225 - RNA, 19 nt, Artificial Sequence
  Description of Artificial Sequence: Synthetic oligonucleotide
cguccuccgugguggcuuc

SEQ ID NO: 349226 - RNA, 19 nt, Artificial Sequence
  Description of Artificial Sequence: Synthetic oligonucleotide
ccggugcccacuguucaaa

SEQ ID NO: 349227 - RNA, 19 nt, Artificial Sequence
  Description of Artificial Sequence: Synthetic oligonucleotide
gguugcgaacaaggacaau

SEQ ID NO: 349228 - RNA, 19 nt, Artificial Sequence
  Description of Artificial Sequence: Synthetic oligonucleotide
gagugcggccucgggccuu

SEQ ID NO: 349229 - RNA, 19 nt, Artificial Sequence
  Description of Artificial Sequence: Synthetic oligonucleotide
ccucuaugucagagucgcu

SEQ ID NO: 349230 - RNA, 19 nt, Artificial Sequence
  Description of Artificial Sequence: Synthetic oligonucleotide
ccacgacagaguggugggu

SEQ ID NO: 349231 - RNA, 19 nt, Artificial Sequence
  Description of Artificial Sequence: Synthetic oligonucleotide
ccgguacuauuugucucuu

SEQ ID NO: 349232 - RNA, 19 nt, Artificial Sequence
  Description of Artificial Sequence: Synthetic oligonucleotide
ggcucucgacacagaucuu

SEQ ID NO: 349233 - RNA, 19 nt, Artificial Sequence
  Description of Artificial Sequence: Synthetic oligonucleotide
cgguacuauuugucucuuu

SEQ ID NO: 349234 - RNA, 19 nt, Artificial Sequence
  Description of Artificial Sequence: Synthetic oligonucleotide
aguaauuacauauauaaag

SEQ ID NO: 349235 - RNA, 19 nt, Artificial Sequence
  Description of Artificial Sequence: Synthetic oligonucleotide
aaacgaaggucucagaucc

SEQ ID NO: 349236 - RNA, 19 nt, Artificial Sequence
  Description of Artificial Sequence: Synthetic oligonucleotide
uuuaauauaacaauaguau

SEQ ID NO: 349237 - RNA, 19 nt, Artificial Sequence
  Description of Artificial Sequence: Synthetic oligonucleotide
aaaucuaucucacagccuc

SEQ ID NO: 349238 - RNA, 19 nt, Artificial Sequence
  Description of Artificial Sequence: Synthetic oligonucleotide
gaacgaagaauccagaugc

SEQ ID NO: 349239 - RNA, 19 nt, Artificial Sequence
  Description of Artificial Sequence: Synthetic oligonucleotide
aauggaauuccauccgacc

SEQ ID NO: 349240 - RNA, 19 nt, Artificial Sequence
  Description of Artificial Sequence: Synthetic oligonucleotide
uucaaguucguucagacac

SEQ ID NO: 349241 - RNA, 19 nt, Artificial Sequence
  Description of Artificial Sequence: Synthetic oligonucleotide
ucaaaucuaucucacagcc

SEQ ID NO: 349242 - RNA, 19 nt, Artificial Sequence
  Description of Artificial Sequence: Synthetic oligonucleotide
uauaaagucugcaacgccc

SEQ ID NO: 349243 - RNA, 19 nt, Artificial Sequence
  Description of Artificial Sequence: Synthetic oligonucleotide
aggaauaagugcuggaggc

SEQ ID NO: 349244 - RNA, 19 nt, Artificial Sequence
  Description of Artificial Sequence: Synthetic oligonucleotide
ucuaagauggaaacuucgg

SEQ ID NO: 349245 - RNA, 19 nt, Artificial Sequence
  Description of Artificial Sequence: Synthetic oligonucleotide
aauggcuuagaacacguca

SEQ ID NO: 349246 - RNA, 19 nt, Artificial Sequence
  Description of Artificial Sequence: Synthetic oligonucleotide
aaguauucaaguucguuca

SEQ ID NO: 349247 - RNA, 19 nt, Artificial Sequence
  Description of Artificial Sequence: Synthetic oligonucleotide
ugugcauagagguugaacu

SEQ ID NO: 349248 - RNA, 19 nt, Artificial Sequence
  Description of Artificial Sequence: Synthetic oligonucleotide
aaacagaaagacauggcgg

SEQ ID NO: 349249 - RNA, 19 nt, Artificial Sequence
  Description of Artificial Sequence: Synthetic oligonucleotide
aacaauaguauaacaacag

SEQ ID NO: 349250 - RNA, 19 nt, Artificial Sequence
  Description of Artificial Sequence: Synthetic oligonucleotide
cuugcgaaggucaagcagg

SEQ ID NO: 349251 - RNA, 19 nt, Artificial Sequence
  Description of Artificial Sequence: Synthetic oligonucleotide
aaagaugacacggcuacgg

SEQ ID NO: 349252 - RNA, 19 nt, Artificial Sequence
  Description of Artificial Sequence: Synthetic oligonucleotide
cuuagaacacgucaugucc

SEQ ID NO: 349253 - RNA, 19 nt, Artificial Sequence
  Description of Artificial Sequence: Synthetic oligonucleotide
auauaaagucugcaacgcc

SEQ ID NO: 349254 - RNA, 19 nt, Artificial Sequence
  Description of Artificial Sequence: Synthetic oligonucleotide
gaaguauucaaguucguuc

SEQ ID NO: 349255 - RNA, 19 nt, Artificial Sequence
  Description of Artificial Sequence: Synthetic oligonucleotide
uuaguuuggucucugguga

SEQ ID NO: 349256 - RNA, 19 nt, Artificial Sequence
  Description of Artificial Sequence: Synthetic oligonucleotide
ucaagcaggauagugagcc

SEQ ID NO: 349257 - RNA, 19 nt, Artificial Sequence
  Description of Artificial Sequence: Synthetic oligonucleotide
agaaagacauggcggaggc

SEQ ID NO: 349258 - RNA, 19 nt, Artificial Sequence
  Description of Artificial Sequence: Synthetic oligonucleotide
aacaacacauguucucggg

SEQ ID NO: 349259 - RNA, 19 nt, Artificial Sequence
  Description of Artificial Sequence: Synthetic oligonucleotide
agugagaguaaauacauuu

SEQ ID NO: 349260 - RNA, 19 nt, Artificial Sequence
  Description of Artificial Sequence: Synthetic oligonucleotide
uauauaaagucugcaacgc

SEQ ID NO: 349261 - RNA, 19 nt, Artificial Sequence
  Description of Artificial Sequence: Synthetic oligonucleotide
ugcuuguaaacgaaggucu

SEQ ID NO: 349262 - RNA, 19 nt, Artificial Sequence
  Description of Artificial Sequence: Synthetic oligonucleotide
cuaagauggaaacuucggg

SEQ ID NO: 349263 - RNA, 19 nt, Artificial Sequence
  Description of Artificial Sequence: Synthetic oligonucleotide
cuaguuagugguuguaggg

SEQ ID NO: 349264 - RNA, 19 nt, Artificial Sequence
  Description of Artificial Sequence: Synthetic oligonucleotide
ugaucgucagcaaagcucu

SEQ ID NO: 349265 - RNA, 19 nt, Artificial Sequence
  Description of Artificial Sequence: Synthetic oligonucleotide
uccacugcgagcaaauccc

SEQ ID NO: 349266 - RNA, 19 nt, Artificial Sequence
  Description of Artificial Sequence: Synthetic oligonucleotide
aacacguccugucuaccac

SEQ ID NO: 349267 - RNA, 19 nt, Artificial Sequence
  Description of Artificial Sequence: Synthetic oligonucleotide
agacacuagacgcugcugg

SEQ ID NO: 349268 - RNA, 19 nt, Artificial Sequence
  Description of Artificial Sequence: Synthetic oligonucleotide
aaguggguggucuaagaug

SEQ ID NO: 349269 - RNA, 19 nt, Artificial Sequence
  Description of Artificial Sequence: Synthetic oligonucleotide
uuugcgcuccauucgaggg

SEQ ID NO: 349270 - RNA, 19 nt, Artificial Sequence
  Description of Artificial Sequence: Synthetic oligonucleotide
uaguauaacaacaguaauu

SEQ ID NO: 349271 - RNA, 19 nt, Artificial Sequence
  Description of Artificial Sequence: Synthetic oligonucleotide
agaacgaagaauccagaug

SEQ ID NO: 349272 - RNA, 19 nt, Artificial Sequence
  Description of Artificial Sequence: Synthetic oligonucleotide
aaagcucgaaacagagucc

SEQ ID NO: 349273 - RNA, 19 nt, Artificial Sequence
  Description of Artificial Sequence: Synthetic oligonucleotide
caguucagacacuagacgc

SEQ ID NO: 349274 - RNA, 19 nt, Artificial Sequence
  Description of Artificial Sequence: Synthetic oligonucleotide
ucaggagucagcucgggcc

SEQ ID NO: 349275 - RNA, 19 nt, Artificial Sequence
  Description of Artificial Sequence: Synthetic oligonucleotide
uucguuugcgcuccauucg

SEQ ID NO: 349276 - RNA, 19 nt, Artificial Sequence
  Description of Artificial Sequence: Synthetic oligonucleotide
guaccuauuccccagggcc

SEQ ID NO: 349277 - RNA, 19 nt, Artificial Sequence
  Description of Artificial Sequence: Synthetic oligonucleotide
cagagaugaaucuuccagg

SEQ ID NO: 349278 - RNA, 19 nt, Artificial Sequence
  Description of Artificial Sequence: Synthetic oligonucleotide
aaaguguaugcuucucgug

SEQ ID NO: 349279 - RNA, 19 nt, Artificial Sequence
  Description of Artificial Sequence: Synthetic oligonucleotide
cagagcuuagcucaggccc

SEQ ID NO: 349280 - RNA, 19 nt, Artificial Sequence
  Description of Artificial Sequence: Synthetic oligonucleotide
guagagguaacgaagagca

SEQ ID NO: 349281 - RNA, 19 nt, Artificial Sequence
  Description of Artificial Sequence: Synthetic oligonucleotide
aaugacucugucgggagag

SEQ ID NO: 349282 - RNA, 19 nt, Artificial Sequence
  Description of Artificial Sequence: Synthetic oligonucleotide
gaaccaaagcucgaaacag

SEQ ID NO: 349283 - RNA, 19 nt, Artificial Sequence
  Description of Artificial Sequence: Synthetic oligonucleotide
ucuaccacuucuguacugg

SEQ ID NO: 349284 - RNA, 19 nt, Artificial Sequence
  Description of Artificial Sequence: Synthetic oligonucleotide
gacccaacaacacauguuc

SEQ ID NO: 349285 - RNA, 19 nt, Artificial Sequence
  Description of Artificial Sequence: Synthetic oligonucleotide
aacuucgggaguuucucug

SEQ ID NO: 349286 - RNA, 19 nt, Artificial Sequence
  Description of Artificial Sequence: Synthetic oligonucleotide
aauuccauccgaccuggca

SEQ ID NO: 349287 - RNA, 19 nt, Artificial Sequence
  Description of Artificial Sequence: Synthetic oligonucleotide
gaacccuuggccgaggagg

SEQ ID NO: 349288 - RNA, 19 nt, Artificial Sequence
  Description of Artificial Sequence: Synthetic oligonucleotide
ggugagauagcuugcaaag

SEQ ID NO: 349289 - RNA, 19 nt, Artificial Sequence
  Description of Artificial Sequence: Synthetic oligonucleotide
uuuauugccaaugcccaug

SEQ ID NO: 349290 - RNA, 19 nt, Artificial Sequence
  Description of Artificial Sequence: Synthetic oligonucleotide
agagcccuaagaucccucc

SEQ ID NO: 349291 - RNA, 19 nt, Artificial Sequence
  Description of Artificial Sequence: Synthetic oligonucleotide
guacugguaaccuccaggc

SEQ ID NO: 349292 - RNA, 19 nt, Artificial Sequence
  Description of Artificial Sequence: Synthetic oligonucleotide
uugacguccagaucccagg

SEQ ID NO: 349293 - RNA, 19 nt, Artificial Sequence
  Description of Artificial Sequence: Synthetic oligonucleotide
auggaauuccauccgaccu

SEQ ID NO: 349294 - RNA, 19 nt, Artificial Sequence
  Description of Artificial Sequence: Synthetic oligonucleotide
gaagggacgggccagcaug

SEQ ID NO: 349295 - RNA, 19 nt, Artificial Sequence
  Description of Artificial Sequence: Synthetic oligonucleotide
auagcuugcaaaguguaug

SEQ ID NO: 349296 - RNA, 19 nt, Artificial Sequence
  Description of Artificial Sequence: Synthetic oligonucleotide
agcccagguacaccgaagc

SEQ ID NO: 349297 - RNA, 19 nt, Artificial Sequence
  Description of Artificial Sequence: Synthetic oligonucleotide
uggaauuccauccgaccug

SEQ ID NO: 349298 - RNA, 19 nt, Artificial Sequence
  Description of Artificial Sequence: Synthetic oligonucleotide
uuguaaacgaaggucucag

SEQ ID NO: 349299 - RNA, 19 nt, Artificial Sequence
  Description of Artificial Sequence: Synthetic oligonucleotide
ugcgaagucucucucuggc

SEQ ID NO: 349300 - RNA, 19 nt, Artificial Sequence
  Description of Artificial Sequence: Synthetic oligonucleotide
aacacauguucucggggug

SEQ ID NO: 349301 - RNA, 19 nt, Artificial Sequence
  Description of Artificial Sequence: Synthetic oligonucleotide
aacgaagaauccagaugcc

SEQ ID NO: 349302 - RNA, 19 nt, Artificial Sequence
  Description of Artificial Sequence: Synthetic oligonucleotide
uagcuugcaaaguguaugc

SEQ ID NO: 349303 - RNA, 19 nt, Artificial Sequence
  Description of Artificial Sequence: Synthetic oligonucleotide
aguucguucagacaccuua

SEQ ID NO: 349304 - RNA, 19 nt, Artificial Sequence
  Description of Artificial Sequence: Synthetic oligonucleotide
ucaaguucguucagacacc

SEQ ID NO: 349305 - RNA, 19 nt, Artificial Sequence
  Description of Artificial Sequence: Synthetic oligonucleotide
ugggcgaagggcuaugggc

SEQ ID NO: 349306 - RNA, 19 nt, Artificial Sequence
  Description of Artificial Sequence: Synthetic oligonucleotide
uugaaagccugcuuguaaa

SEQ ID NO: 349307 - RNA, 19 nt, Artificial Sequence
  Description of Artificial Sequence: Synthetic oligonucleotide
uccacuuuaguuuggucuc

SEQ ID NO: 349308 - RNA, 19 nt, Artificial Sequence
  Description of Artificial Sequence: Synthetic oligonucleotide
gucagaacgaagaauccag

SEQ ID NO: 349309 - RNA, 19 nt, Artificial Sequence
  Description of Artificial Sequence: Synthetic oligonucleotide
auucgagggguaccuauuc

SEQ ID NO: 349310 - RNA, 19 nt, Artificial Sequence
  Description of Artificial Sequence: Synthetic oligonucleotide
uggagcuagcucaaggccu

SEQ ID NO: 349311 - RNA, 19 nt, Artificial Sequence
  Description of Artificial Sequence: Synthetic oligonucleotide
gacacuagacgcugcuggg

SEQ ID NO: 349312 - RNA, 19 nt, Artificial Sequence
  Description of Artificial Sequence: Synthetic oligonucleotide
agugaguagagguaacgaa

SEQ ID NO: 349313 - RNA, 19 nt, Artificial Sequence
  Description of Artificial Sequence: Synthetic oligonucleotide
gucuaagauggaaacuucg

SEQ ID NO: 349314 - RNA, 19 nt, Artificial Sequence
  Description of Artificial Sequence: Synthetic oligonucleotide
ugguuauguauucuugcuc

SEQ ID NO: 349315 - RNA, 19 nt, Artificial Sequence
  Description of Artificial Sequence: Synthetic oligonucleotide
agagguaacgaagagcagu

SEQ ID NO: 349316 - RNA, 19 nt, Artificial Sequence
  Description of Artificial Sequence: Synthetic oligonucleotide
ucgagggguaccuauuccc

SEQ ID NO: 349317 - RNA, 19 nt, Artificial Sequence
  Description of Artificial Sequence: Synthetic oligonucleotide
ugucccaugauaccccgga

SEQ ID NO: 349318 - RNA, 19 nt, Artificial Sequence
  Description of Artificial Sequence: Synthetic oligonucleotide
uggcgaaggaagcaugccc

SEQ ID NO: 349319 - RNA, 19 nt, Artificial Sequence
  Description of Artificial Sequence: Synthetic oligonucleotide
acgucaugucccaugauac

SEQ ID NO: 349320 - RNA, 19 nt, Artificial Sequence
  Description of Artificial Sequence: Synthetic oligonucleotide
uaacgaagagcaguguuga

SEQ ID NO: 349321 - RNA, 19 nt, Artificial Sequence
  Description of Artificial Sequence: Synthetic oligonucleotide
cucauaugcugggagaagc

SEQ ID NO: 349322 - RNA, 19 nt, Artificial Sequence
  Description of Artificial Sequence: Synthetic oligonucleotide
guaacgaagagcaguguug

SEQ ID NO: 349323 - RNA, 19 nt, Artificial Sequence
  Description of Artificial Sequence: Synthetic oligonucleotide
acuucgggaguuucucugg

SEQ ID NO: 349324 - RNA, 19 nt, Artificial Sequence
  Description of Artificial Sequence: Synthetic oligonucleotide
ggucaagcaggauagugag

SEQ ID NO: 349325 - RNA, 19 nt, Artificial Sequence
  Description of Artificial Sequence: Synthetic oligonucleotide
augacacggcuacggaggc

SEQ ID NO: 349326 - RNA, 19 nt, Artificial Sequence
  Description of Artificial Sequence: Synthetic oligonucleotide
uaccuauuccccagggccc

SEQ ID NO: 349327 - RNA, 19 nt, Artificial Sequence
  Description of Artificial Sequence: Synthetic oligonucleotide
aaacuucgggaguuucucu

SEQ ID NO: 349328 - RNA, 19 nt, Artificial Sequence
  Description of Artificial Sequence: Synthetic oligonucleotide
aagcucgaaacagagucca

SEQ ID NO: 349329 - RNA, 19 nt, Artificial Sequence
  Description of Artificial Sequence: Synthetic oligonucleotide
ugugaucgucagcaaagcu

SEQ ID NO: 349330 - RNA, 19 nt, Artificial Sequence
  Description of Artificial Sequence: Synthetic oligonucleotide
uggucuaagauggaaacuu

SEQ ID NO: 349331 - RNA, 19 nt, Artificial Sequence
  Description of Artificial Sequence: Synthetic oligonucleotide
gagguaacgaagagcagug

SEQ ID NO: 349332 - RNA, 19 nt, Artificial Sequence
  Description of Artificial Sequence: Synthetic oligonucleotide
ucguucagacaccuuaauc

SEQ ID NO: 349333 - RNA, 19 nt, Artificial Sequence
  Description of Artificial Sequence: Synthetic oligonucleotide
gaugcuucguuugcgcucc

SEQ ID NO: 349334 - RNA, 19 nt, Artificial Sequence
  Description of Artificial Sequence: Synthetic oligonucleotide
aucuaucucacagccucgc

SEQ ID NO: 349335 - RNA, 19 nt, Artificial Sequence
  Description of Artificial Sequence: Synthetic oligonucleotide
agacaccuuaauccagagg

SEQ ID NO: 349336 - RNA, 19 nt, Artificial Sequence
  Description of Artificial Sequence: Synthetic oligonucleotide
aaucuaucucacagccucg

SEQ ID NO: 349337 - RNA, 19 nt, Artificial Sequence
  Description of Artificial Sequence: Synthetic oligonucleotide
uugcgcuccauucgagggg

SEQ ID NO: 349338 - RNA, 19 nt, Artificial Sequence
  Description of Artificial Sequence: Synthetic oligonucleotide
cuaucucacagccucgcac

SEQ ID NO: 349339 - RNA, 19 nt, Artificial Sequence
  Description of Artificial Sequence: Synthetic oligonucleotide
cuucguuugcgcuccauuc

SEQ ID NO: 349340 - RNA, 19 nt, Artificial Sequence
  Description of Artificial Sequence: Synthetic oligonucleotide
gcuuuaauguccaggaaag

SEQ ID NO: 349341 - RNA, 19 nt, Artificial Sequence
  Description of Artificial Sequence: Synthetic oligonucleotide
uaguuagugguuguaggga

SEQ ID NO: 349342 - RNA, 19 nt, Artificial Sequence
  Description of Artificial Sequence: Synthetic oligonucleotide
aaugcgcagaggaugggug

SEQ ID NO: 349343 - RNA, 19 nt, Artificial Sequence
  Description of Artificial Sequence: Synthetic oligonucleotide
uccgaccuggcagagauga

SEQ ID NO: 349344 - RNA, 19 nt, Artificial Sequence
  Description of Artificial Sequence: Synthetic oligonucleotide
caacugugcauagagguug

SEQ ID NO: 349345 - RNA, 19 nt, Artificial Sequence
  Description of Artificial Sequence: Synthetic oligonucleotide
ugucgggagagcccuaaga

SEQ ID NO: 349346 - RNA, 19 nt, Artificial Sequence
  Description of Artificial Sequence: Synthetic oligonucleotide
gaacacgucaugucccaug

SEQ ID NO: 349347 - RNA, 19 nt, Artificial Sequence
  Description of Artificial Sequence: Synthetic oligonucleotide
accaaagcucgaaacagag

SEQ ID NO: 349348 - RNA, 19 nt, Artificial Sequence
  Description of Artificial Sequence: Synthetic oligonucleotide
cuugacguccagaucccag

SEQ ID NO: 349349 - RNA, 19 nt, Artificial Sequence
  Description of Artificial Sequence: Synthetic oligonucleotide
uuagugguuguagggaagu

SEQ ID NO: 349350 - RNA, 19 nt, Artificial Sequence
  Description of Artificial Sequence: Synthetic oligonucleotide
ucguuugcgcuccauucga

SEQ ID NO: 349351 - RNA, 19 nt, Artificial Sequence
  Description of Artificial Sequence: Synthetic oligonucleotide
gacacggcuacggaggccc

SEQ ID NO: 349352 - RNA, 19 nt, Artificial Sequence
  Description of Artificial Sequence: Synthetic oligonucleotide
uguaaacgaaggucucaga

SEQ ID NO: 349353 - RNA, 19 nt, Artificial Sequence
  Description of Artificial Sequence: Synthetic oligonucleotide
agccagaccacucuccagu

SEQ ID NO: 349354 - RNA, 19 nt, Artificial Sequence
  Description of Artificial Sequence: Synthetic oligonucleotide
ugacguccagaucccaggc

SEQ ID NO: 349355 - RNA, 19 nt, Artificial Sequence
  Description of Artificial Sequence: Synthetic oligonucleotide
ucgaaacagaguccacugu

SEQ ID NO: 349356 - RNA, 19 nt, Artificial Sequence
  Description of Artificial Sequence: Synthetic oligonucleotide
gguggucuaagauggaaac

SEQ ID NO: 349357 - RNA, 19 nt, Artificial Sequence
  Description of Artificial Sequence: Synthetic oligonucleotide
ugauaccccggaauggaau

SEQ ID NO: 349358 - RNA, 19 nt, Artificial Sequence
  Description of Artificial Sequence: Synthetic oligonucleotide
ccuaguuagugguuguagg

SEQ ID NO: 349359 - RNA, 19 nt, Artificial Sequence
  Description of Artificial Sequence: Synthetic oligonucleotide
ugucuaccacuucuguacu

SEQ ID NO: 349360 - RNA, 19 nt, Artificial Sequence
  Description of Artificial Sequence: Synthetic oligonucleotide
ugccuugcgaaggucaagc

SEQ ID NO: 349361 - RNA, 19 nt, Artificial Sequence
  Description of Artificial Sequence: Synthetic oligonucleotide
cccaauaacugcaaaucag

SEQ ID NO: 349362 - RNA, 19 nt, Artificial Sequence
  Description of Artificial Sequence: Synthetic oligonucleotide
acguccagaucccaggccu

SEQ ID NO: 349363 - RNA, 19 nt, Artificial Sequence
  Description of Artificial Sequence: Synthetic oligonucleotide
augcgcagaggaugggugg

SEQ ID NO: 349364 - RNA, 19 nt, Artificial Sequence
  Description of Artificial Sequence: Synthetic oligonucleotide
gugaucgucagcaaagcuc

SEQ ID NO: 349365 - RNA, 19 nt, Artificial Sequence
  Description of Artificial Sequence: Synthetic oligonucleotide
gaauggaauuccauccgac

SEQ ID NO: 349366 - RNA, 19 nt, Artificial Sequence
  Description of Artificial Sequence: Synthetic oligonucleotide
uagagguaacgaagagcag

SEQ ID NO: 349367 - RNA, 19 nt, Artificial Sequence
  Description of Artificial Sequence: Synthetic oligonucleotide
acacuagacgcugcugggc

SEQ ID NO: 349368 - RNA, 19 nt, Artificial Sequence
  Description of Artificial Sequence: Synthetic oligonucleotide
acuagacgcugcugggcac

SEQ ID NO: 349369 - RNA, 19 nt, Artificial Sequence
  Description of Artificial Sequence: Synthetic oligonucleotide
ugaugcuucguuugcgcuc

SEQ ID NO: 349370 - RNA, 19 nt, Artificial Sequence
  Description of Artificial Sequence: Synthetic oligonucleotide
aaggcauggaggcgguggu

SEQ ID NO: 349371 - RNA, 19 nt, Artificial Sequence
  Description of Artificial Sequence: Synthetic oligonucleotide
ggugugaucgucagcaaag

SEQ ID NO: 349372 - RNA, 19 nt, Artificial Sequence
  Description of Artificial Sequence: Synthetic oligonucleotide
agucagaacgaagaaucca

SEQ ID NO: 349373 - RNA, 19 nt, Artificial Sequence
  Description of Artificial Sequence: Synthetic oligonucleotide
agcaaaucccugccucggg

SEQ ID NO: 349374 - RNA, 19 nt, Artificial Sequence
  Description of Artificial Sequence: Synthetic oligonucleotide
ucgggaguuucucugggau

SEQ ID NO: 349375 - RNA, 19 nt, Artificial Sequence
  Description of Artificial Sequence: Synthetic oligonucleotide
ucggccccauucucgaagg

SEQ ID NO: 349376 - RNA, 19 nt, Artificial Sequence
  Description of Artificial Sequence: Synthetic oligonucleotide
agggguaccuauuccccag

SEQ ID NO: 349377 - RNA, 19 nt, Artificial Sequence
  Description of Artificial Sequence: Synthetic oligonucleotide
guuauguauucuugcucac

SEQ ID NO: 349378 - RNA, 19 nt, Artificial Sequence
  Description of Artificial Sequence: Synthetic oligonucleotide
auggcgaaggaagcaugcc

SEQ ID NO: 349379 - RNA, 19 nt, Artificial Sequence
  Description of Artificial Sequence: Synthetic oligonucleotide
uggugugaucgucagcaaa

SEQ ID NO: 349380 - RNA, 19 nt, Artificial Sequence
  Description of Artificial Sequence: Synthetic oligonucleotide
cauaugcugggagaagcag

SEQ ID NO: 349381 - RNA, 19 nt, Artificial Sequence
  Description of Artificial Sequence: Synthetic oligonucleotide
uugcgaaggucaagcagga

SEQ ID NO: 349382 - RNA, 19 nt, Artificial Sequence
  Description of Artificial Sequence: Synthetic oligonucleotide
ugcuugacguccagauccc

SEQ ID NO: 349383 - RNA, 19 nt, Artificial Sequence
  Description of Artificial Sequence: Synthetic oligonucleotide
uaugcuucucgugcgcgcc

SEQ ID NO: 349384 - RNA, 19 nt, Artificial Sequence
  Description of Artificial Sequence: Synthetic oligonucleotide
aaccaaagcucgaaacaga

SEQ ID NO: 349385 - RNA, 19 nt, Artificial Sequence
  Description of Artificial Sequence: Synthetic oligonucleotide
gaaagugugucccguggaa

SEQ ID NO: 349386 - RNA, 19 nt, Artificial Sequence
  Description of Artificial Sequence: Synthetic oligonucleotide
acaaguggguggucuaaga

SEQ ID NO: 349387 - RNA, 19 nt, Artificial Sequence
  Description of Artificial Sequence: Synthetic oligonucleotide
uuuccgcccacagaugaca

SEQ ID NO: 349388 - RNA, 19 nt, Artificial Sequence
  Description of Artificial Sequence: Synthetic oligonucleotide
cuucgggaguuucucuggg

SEQ ID NO: 349389 - RNA, 19 nt, Artificial Sequence
  Description of Artificial Sequence: Synthetic oligonucleotide
auaaagucugcaacgccca

SEQ ID NO: 349390 - RNA, 19 nt, Artificial Sequence
  Description of Artificial Sequence: Synthetic oligonucleotide
uacaaguggguggucuaag

SEQ ID NO: 349391 - RNA, 19 nt, Artificial Sequence
  Description of Artificial Sequence: Synthetic oligonucleotide
ggcacugaugcuucguuug

SEQ ID NO: 349392 - RNA, 19 nt, Artificial Sequence
  Description of Artificial Sequence: Synthetic oligonucleotide
ccaacaacacauguucucg

SEQ ID NO: 349393 - RNA, 19 nt, Artificial Sequence
  Description of Artificial Sequence: Synthetic oligonucleotide
uuuuccgcccacagaugac

SEQ ID NO: 349394 - RNA, 19 nt, Artificial Sequence
  Description of Artificial Sequence: Synthetic oligonucleotide
ucgggagagcccuaagauc

SEQ ID NO: 349395 - RNA, 19 nt, Artificial Sequence
  Description of Artificial Sequence: Synthetic oligonucleotide
uggcgcucagagcuuagcu

SEQ ID NO: 349396 - RNA, 19 nt, Artificial Sequence
  Description of Artificial Sequence: Synthetic oligonucleotide
acaacaguaauuacauaua

SEQ ID NO: 349397 - RNA, 19 nt, Artificial Sequence
  Description of Artificial Sequence: Synthetic oligonucleotide
gugaacacguccugucuac

SEQ ID NO: 349398 - RNA, 19 nt, Artificial Sequence
  Description of Artificial Sequence: Synthetic oligonucleotide
ucugcaacgcccaccccau

SEQ ID NO: 349399 - RNA, 19 nt, Artificial Sequence
  Description of Artificial Sequence: Synthetic oligonucleotide
aauaagugcuggaggcagu

SEQ ID NO: 349400 - RNA, 19 nt, Artificial Sequence
  Description of Artificial Sequence: Synthetic oligonucleotide
aucaggccugagcagugag

SEQ ID NO: 349401 - RNA, 19 nt, Artificial Sequence
  Description of Artificial Sequence: Synthetic oligonucleotide
ucggcaucggccccauucu

SEQ ID NO: 349402 - RNA, 19 nt, Artificial Sequence
  Description of Artificial Sequence: Synthetic oligonucleotide
uucguucagacaccuuaau

SEQ ID NO: 349403 - RNA, 19 nt, Artificial Sequence
  Description of Artificial Sequence: Synthetic oligonucleotide
aggucaagcaggauaguga

SEQ ID NO: 349404 - RNA, 19 nt, Artificial Sequence
  Description of Artificial Sequence: Synthetic oligonucleotide
ggaauuccauccgaccugg

SEQ ID NO: 349405 - RNA, 19 nt, Artificial Sequence
  Description of Artificial Sequence: Synthetic oligonucleotide
agcaugcucaaaagaugac

SEQ ID NO: 349406 - RNA, 19 nt, Artificial Sequence
  Description of Artificial Sequence: Synthetic oligonucleotide
gacguccagaucccaggcc

SEQ ID NO: 349407 - RNA, 19 nt, Artificial Sequence
  Description of Artificial Sequence: Synthetic oligonucleotide
acgaagaauccagaugcca

SEQ ID NO: 349408 - RNA, 19 nt, Artificial Sequence
  Description of Artificial Sequence: Synthetic oligonucleotide
gguacaccgaagcucagga

SEQ ID NO: 349409 - RNA, 19 nt, Artificial Sequence
  Description of Artificial Sequence: Synthetic oligonucleotide
ucccguggaagcugcgaag

SEQ ID NO: 349410 - RNA, 19 nt, Artificial Sequence
  Description of Artificial Sequence: Synthetic oligonucleotide
gucugcaacgcccacccca

SEQ ID NO: 349411 - RNA, 19 nt, Artificial Sequence
  Description of Artificial Sequence: Synthetic oligonucleotide
agcuagcucaaggccuucc

SEQ ID NO: 349412 - RNA, 19 nt, Artificial Sequence
  Description of Artificial Sequence: Synthetic oligonucleotide
aacugguccccauggcgaa

SEQ ID NO: 349413 - RNA, 19 nt, Artificial Sequence
  Description of Artificial Sequence: Synthetic oligonucleotide
guaugcuucucgugcgcgc

SEQ ID NO: 349414 - RNA, 19 nt, Artificial Sequence
  Description of Artificial Sequence: Synthetic oligonucleotide
ugcgagcaaaucccugccu

SEQ ID NO: 349415 - RNA, 19 nt, Artificial Sequence
  Description of Artificial Sequence: Synthetic oligonucleotide
agguacaccgaagcucagg

SEQ ID NO: 349416 - RNA, 19 nt, Artificial Sequence
  Description of Artificial Sequence: Synthetic oligonucleotide
uaccccggaauggaauucc

SEQ ID NO: 349417 - RNA, 19 nt, Artificial Sequence
  Description of Artificial Sequence: Synthetic oligonucleotide
cucgacgcgggcaggcagg

SEQ ID NO: 349418 - RNA, 19 nt, Artificial Sequence
  Description of Artificial Sequence: Synthetic oligonucleotide
auaccccggaauggaauuc

SEQ ID NO: 349419 - RNA, 19 nt, Artificial Sequence
  Description of Artificial Sequence: Synthetic oligonucleotide
agcuacaaguggguggucu

SEQ ID NO: 349420 - RNA, 19 nt, Artificial Sequence
  Description of Artificial Sequence: Synthetic oligonucleotide
ugaacacguccugucuacc

SEQ ID NO: 349421 - RNA, 19 nt, Artificial Sequence
  Description of Artificial Sequence: Synthetic oligonucleotide
caugauaccccggaaugga

SEQ ID NO: 349422 - RNA, 19 nt, Artificial Sequence
  Description of Artificial Sequence: Synthetic oligonucleotide
caaaguguaugcuucucgu

SEQ ID NO: 349423 - RNA, 19 nt, Artificial Sequence
  Description of Artificial Sequence: Synthetic oligonucleotide
cuuguaaacgaaggucuca

SEQ ID NO: 349424 - RNA, 19 nt, Artificial Sequence
  Description of Artificial Sequence: Synthetic oligonucleotide
uguccauaccgagccagcu

SEQ ID NO: 349425 - RNA, 19 nt, Artificial Sequence
  Description of Artificial Sequence: Synthetic oligonucleotide
cacucaguguccguucccc

SEQ ID NO: 349426 - RNA, 19 nt, Artificial Sequence
  Description of Artificial Sequence: Synthetic oligonucleotide
aggagagucaggggauggg

SEQ ID NO: 349427 - RNA, 19 nt, Artificial Sequence
  Description of Artificial Sequence: Synthetic oligonucleotide
ugcccgucgucgucugugg

SEQ ID NO: 349428 - RNA, 19 nt, Artificial Sequence
  Description of Artificial Sequence: Synthetic oligonucleotide
guccauaccgagccagcug

SEQ ID NO: 349429 - RNA, 19 nt, Artificial Sequence
  Description of Artificial Sequence: Synthetic oligonucleotide
cuguccauaccgagccagc

SEQ ID NO: 349430 - RNA, 19 nt, Artificial Sequence
  Description of Artificial Sequence: Synthetic oligonucleotide
gugguuauguauucuugcu

SEQ ID NO: 349431 - RNA, 19 nt, Artificial Sequence
  Description of Artificial Sequence: Synthetic oligonucleotide
ucggggugaacacguccug

SEQ ID NO: 349432 - RNA, 19 nt, Artificial Sequence
  Description of Artificial Sequence: Synthetic oligonucleotide
agcccgacccaacaacaca

SEQ ID NO: 349433 - RNA, 19 nt, Artificial Sequence
  Description of Artificial Sequence: Synthetic oligonucleotide
gacucugucgggagagccc

SEQ ID NO: 349434 - RNA, 19 nt, Artificial Sequence
  Description of Artificial Sequence: Synthetic oligonucleotide
gcagugaguagagguaacg

SEQ ID NO: 349435 - RNA, 19 nt, Artificial Sequence
  Description of Artificial Sequence: Synthetic oligonucleotide
ggcgaaggaagcaugcccc

SEQ ID NO: 349436 - RNA, 19 nt, Artificial Sequence
  Description of Artificial Sequence: Synthetic oligonucleotide
gguaccuauuccccagggc

SEQ ID NO: 349437 - RNA, 19 nt, Artificial Sequence
  Description of Artificial Sequence: Synthetic oligonucleotide
uauugccaaugcccaugga

SEQ ID NO: 349438 - RNA, 19 nt, Artificial Sequence
  Description of Artificial Sequence: Synthetic oligonucleotide
gucuaccacuucuguacug

SEQ ID NO: 349439 - RNA, 19 nt, Artificial Sequence
  Description of Artificial Sequence: Synthetic oligonucleotide
acucugucgggagagcccu

SEQ ID NO: 349440 - RNA, 19 nt, Artificial Sequence
  Description of Artificial Sequence: Synthetic oligonucleotide
cugggcgaagggcuauggg

SEQ ID NO: 349441 - RNA, 19 nt, Artificial Sequence
  Description of Artificial Sequence: Synthetic oligonucleotide
gugugaucgucagcaaagc

SEQ ID NO: 349442 - RNA, 19 nt, Artificial Sequence
  Description of Artificial Sequence: Synthetic oligonucleotide
agauagcuugcaaagugua

SEQ ID NO: 349443 - RNA, 19 nt, Artificial Sequence
  Description of Artificial Sequence: Synthetic oligonucleotide
gagauagcuugcaaagugu

SEQ ID NO: 349444 - RNA, 19 nt, Artificial Sequence
  Description of Artificial Sequence: Synthetic oligonucleotide
augcuucucgugcgcgccg

SEQ ID NO: 349445 - RNA, 19 nt, Artificial Sequence
  Description of Artificial Sequence: Synthetic oligonucleotide
cccaugauaccccggaaug

SEQ ID NO: 349446 - RNA, 19 nt, Artificial Sequence
  Description of Artificial Sequence: Synthetic oligonucleotide
ugcgcuccauucgaggggu

SEQ ID NO: 349447 - RNA, 19 nt, Artificial Sequence
  Description of Artificial Sequence: Synthetic oligonucleotide
cacgucaugucccaugaua

SEQ ID NO: 349448 - RNA, 19 nt, Artificial Sequence
  Description of Artificial Sequence: Synthetic oligonucleotide
gcuacggaggcccgggugc

SEQ ID NO: 349449 - RNA, 19 nt, Artificial Sequence
  Description of Artificial Sequence: Synthetic oligonucleotide
cuguccccgauguuuucug

SEQ ID NO: 349450 - RNA, 19 nt, Artificial Sequence
  Description of Artificial Sequence: Synthetic oligonucleotide
agagcuuagcucaggccca

SEQ ID NO: 349451 - RNA, 19 nt, Artificial Sequence
  Description of Artificial Sequence: Synthetic oligonucleotide
caauggcuuagaacacguc

SEQ ID NO: 349452 - RNA, 19 nt, Artificial Sequence
  Description of Artificial Sequence: Synthetic oligonucleotide
uguccccgauguuuucugu

SEQ ID NO: 349453 - RNA, 19 nt, Artificial Sequence
  Description of Artificial Sequence: Synthetic oligonucleotide
cacuagacgcugcugggca

SEQ ID NO: 349454 - RNA, 19 nt, Artificial Sequence
  Description of Artificial Sequence: Synthetic oligonucleotide
agccucgcacagcuuccac

SEQ ID NO: 349455 - RNA, 19 nt, Artificial Sequence
  Description of Artificial Sequence: Synthetic oligonucleotide
ccuugcgaaggucaagcag

SEQ ID NO: 349456 - RNA, 19 nt, Artificial Sequence
  Description of Artificial Sequence: Synthetic oligonucleotide
cauggaacccuuggccgag

SEQ ID NO: 349457 - RNA, 19 nt, Artificial Sequence
  Description of Artificial Sequence: Synthetic oligonucleotide
agugagcguccugugguug

SEQ ID NO: 349458 - RNA, 19 nt, Artificial Sequence
  Description of Artificial Sequence: Synthetic oligonucleotide
ggguaccuauuccccaggg

SEQ ID NO: 349459 - RNA, 19 nt, Artificial Sequence
  Description of Artificial Sequence: Synthetic oligonucleotide
ccaucugcugcacucggag

SEQ ID NO: 349460 - RNA, 19 nt, Artificial Sequence
  Description of Artificial Sequence: Synthetic oligonucleotide
gaacaagagcagguccuca

SEQ ID NO: 349461 - RNA, 19 nt, Artificial Sequence
  Description of Artificial Sequence: Synthetic oligonucleotide
gauaccccggaauggaauu

SEQ ID NO: 349462 - RNA, 19 nt, Artificial Sequence
  Description of Artificial Sequence: Synthetic oligonucleotide
acacauguucucgggguga

SEQ ID NO: 349463 - RNA, 19 nt, Artificial Sequence
  Description of Artificial Sequence: Synthetic oligonucleotide
agcguccugugguugugca

SEQ ID NO: 349464 - RNA, 19 nt, Artificial Sequence
  Description of Artificial Sequence: Synthetic oligonucleotide
gcucaaaagaugacacggc

SEQ ID NO: 349465 - RNA, 19 nt, Artificial Sequence
  Description of Artificial Sequence: Synthetic oligonucleotide
cacugcgagcaaaucccug

SEQ ID NO: 349466 - RNA, 19 nt, Artificial Sequence
  Description of Artificial Sequence: Synthetic oligonucleotide
gcgaaggucaagcaggaua

SEQ ID NO: 349467 - RNA, 19 nt, Artificial Sequence
  Description of Artificial Sequence: Synthetic oligonucleotide
acguccugucuaccacuuc

SEQ ID NO: 349468 - RNA, 19 nt, Artificial Sequence
  Description of Artificial Sequence: Synthetic oligonucleotide
agggcucgcaucuccugga

SEQ ID NO: 349469 - RNA, 19 nt, Artificial Sequence
  Description of Artificial Sequence: Synthetic oligonucleotide
agcuugcaaaguguaugcu

SEQ ID NO: 349470 - RNA, 19 nt, Artificial Sequence
  Description of Artificial Sequence: Synthetic oligonucleotide
cagugaguagagguaacga

SEQ ID NO: 349471 - RNA, 19 nt, Artificial Sequence
  Description of Artificial Sequence: Synthetic oligonucleotide
ggcucauucagagugguua

SEQ ID NO: 349472 - RNA, 19 nt, Artificial Sequence
  Description of Artificial Sequence: Synthetic oligonucleotide
ugucccguggaagcugcga

SEQ ID NO: 349473 - RNA, 19 nt, Artificial Sequence
  Description of Artificial Sequence: Synthetic oligonucleotide
ugcugcucccauggugcgg

SEQ ID NO: 349474 - RNA, 19 nt, Artificial Sequence
  Description of Artificial Sequence: Synthetic oligonucleotide
ucucgugcgcgccgccgcc

SEQ ID NO: 349475 - RNA, 19 nt, Artificial Sequence
  Description of Artificial Sequence: Synthetic oligonucleotide
cgaaacagaguccacuguc

SEQ ID NO: 349476 - RNA, 19 nt, Artificial Sequence
  Description of Artificial Sequence: Synthetic oligonucleotide
gucaagcaggauagugagc

SEQ ID NO: 349477 - RNA, 19 nt, Artificial Sequence
  Description of Artificial Sequence: Synthetic oligonucleotide
ugcgcagaggauggguggu

SEQ ID NO: 349478 - RNA, 19 nt, Artificial Sequence
  Description of Artificial Sequence: Synthetic oligonucleotide
cugggcgauagaacuuguc

SEQ ID NO: 349479 - RNA, 19 nt, Artificial Sequence
  Description of Artificial Sequence: Synthetic oligonucleotide
gggaaaucugcuugacguc

SEQ ID NO: 349480 - RNA, 19 nt, Artificial Sequence
  Description of Artificial Sequence: Synthetic oligonucleotide
ccaugauaccccggaaugg

SEQ ID NO: 349481 - RNA, 19 nt, Artificial Sequence
  Description of Artificial Sequence: Synthetic oligonucleotide
gccccaauaacugcaaauc

SEQ ID NO: 349482 - RNA, 19 nt, Artificial Sequence
  Description of Artificial Sequence: Synthetic oligonucleotide
ugagcguccugugguugug

SEQ ID NO: 349483 - RNA, 19 nt, Artificial Sequence
  Description of Artificial Sequence: Synthetic oligonucleotide
agccugcuuguaaacgaag

SEQ ID NO: 349484 - RNA, 19 nt, Artificial Sequence
  Description of Artificial Sequence: Synthetic oligonucleotide
caaagcucucccagucuga

SEQ ID NO: 349485 - RNA, 19 nt, Artificial Sequence
  Description of Artificial Sequence: Synthetic oligonucleotide
cucggaucagcacagccgu

SEQ ID NO: 349486 - RNA, 19 nt, Artificial Sequence
  Description of Artificial Sequence: Synthetic oligonucleotide
cagcccgacccaacaacac

SEQ ID NO: 349487 - RNA, 19 nt, Artificial Sequence
  Description of Artificial Sequence: Synthetic oligonucleotide
acggcuacggaggcccggg

SEQ ID NO: 349488 - RNA, 19 nt, Artificial Sequence
  Description of Artificial Sequence: Synthetic oligonucleotide
aacgaaggucucagauccu

SEQ ID NO: 349489 - RNA, 19 nt, Artificial Sequence
  Description of Artificial Sequence: Synthetic oligonucleotide
agcucgaaacagaguccac

SEQ ID NO: 349490 - RNA, 19 nt, Artificial Sequence
  Description of Artificial Sequence: Synthetic oligonucleotide
uccauccgaccuggcagag

SEQ ID NO: 349491 - RNA, 19 nt, Artificial Sequence
  Description of Artificial Sequence: Synthetic oligonucleotide
ggcgcucagagcuuagcuc

SEQ ID NO: 349492 - RNA, 19 nt, Artificial Sequence
  Description of Artificial Sequence: Synthetic oligonucleotide
gagcuuagcucaggcccag

SEQ ID NO: 349493 - RNA, 19 nt, Artificial Sequence
  Description of Artificial Sequence: Synthetic oligonucleotide
gggccagcaugcucaaaag

SEQ ID NO: 349494 - RNA, 19 nt, Artificial Sequence
  Description of Artificial Sequence: Synthetic oligonucleotide
guucguucagacaccuuaa

SEQ ID NO: 349495 - RNA, 19 nt, Artificial Sequence
  Description of Artificial Sequence: Synthetic oligonucleotide
ccgccggaaccaaagcucg

SEQ ID NO: 349496 - RNA, 19 nt, Artificial Sequence
  Description of Artificial Sequence: Synthetic oligonucleotide
cagaacgaagaauccagau

SEQ ID NO: 349497 - RNA, 19 nt, Artificial Sequence
  Description of Artificial Sequence: Synthetic oligonucleotide
caaaucuaucucacagccu

SEQ ID NO: 349498 - RNA, 19 nt, Artificial Sequence
  Description of Artificial Sequence: Synthetic oligonucleotide
cuacggaggcccgggugcg

SEQ ID NO: 349499 - RNA, 19 nt, Artificial Sequence
  Description of Artificial Sequence: Synthetic oligonucleotide
ggcagcgugcucggcaucg

SEQ ID NO: 349500 - RNA, 19 nt, Artificial Sequence
  Description of Artificial Sequence: Synthetic oligonucleotide
ggucuaagauggaaacuuc

SEQ ID NO: 349501 - RNA, 19 nt, Artificial Sequence
  Description of Artificial Sequence: Synthetic oligonucleotide
cauccgaccuggcagagau

SEQ ID NO: 349502 - RNA, 19 nt, Artificial Sequence
  Description of Artificial Sequence: Synthetic oligonucleotide
gggaaugacucugucggga

SEQ ID NO: 349503 - RNA, 19 nt, Artificial Sequence
  Description of Artificial Sequence: Synthetic oligonucleotide
accuauuccccagggccca

SEQ ID NO: 349504 - RNA, 19 nt, Artificial Sequence
  Description of Artificial Sequence: Synthetic oligonucleotide
ugguaaccuccaggccucg

SEQ ID NO: 349505 - RNA, 19 nt, Artificial Sequence
  Description of Artificial Sequence: Synthetic oligonucleotide
ggggugaacacguccuguc

SEQ ID NO: 349506 - RNA, 19 nt, Artificial Sequence
  Description of Artificial Sequence: Synthetic oligonucleotide
aggcgugguggggucacuc

SEQ ID NO: 349507 - RNA, 19 nt, Artificial Sequence
  Description of Artificial Sequence: Synthetic oligonucleotide
cauaccgagccagcugcuc

SEQ ID NO: 349508 - RNA, 19 nt, Artificial Sequence
  Description of Artificial Sequence: Synthetic oligonucleotide
guuuauugccaaugcccau

SEQ ID NO: 349509 - RNA, 19 nt, Artificial Sequence
  Description of Artificial Sequence: Synthetic oligonucleotide
gggccuggcgcucagagcu

SEQ ID NO: 349510 - RNA, 19 nt, Artificial Sequence
  Description of Artificial Sequence: Synthetic oligonucleotide
ggccugagcagugaguaga

SEQ ID NO: 349511 - RNA, 19 nt, Artificial Sequence
  Description of Artificial Sequence: Synthetic oligonucleotide
uagugguuguagggaagua

SEQ ID NO: 349512 - RNA, 19 nt, Artificial Sequence
  Description of Artificial Sequence: Synthetic oligonucleotide
ggacgggccagcaugcuca

SEQ ID NO: 349513 - RNA, 19 nt, Artificial Sequence
  Description of Artificial Sequence: Synthetic oligonucleotide
augucccaugauaccccgg

SEQ ID NO: 349514 - RNA, 19 nt, Artificial Sequence
  Description of Artificial Sequence: Synthetic oligonucleotide
gagagcccuaagaucccuc

SEQ ID NO: 349515 - RNA, 19 nt, Artificial Sequence
  Description of Artificial Sequence: Synthetic oligonucleotide
cuggcgcucagagcuuagc

SEQ ID NO: 349516 - RNA, 19 nt, Artificial Sequence
  Description of Artificial Sequence: Synthetic oligonucleotide
cgucaugucccaugauacc

SEQ ID NO: 349517 - RNA, 19 nt, Artificial Sequence
  Description of Artificial Sequence: Synthetic oligonucleotide
gcgugguggggucacucag

SEQ ID NO: 349518 - RNA, 19 nt, Artificial Sequence
  Description of Artificial Sequence: Synthetic oligonucleotide
auggaggcgguggugugau

SEQ ID NO: 349519 - RNA, 19 nt, Artificial Sequence
  Description of Artificial Sequence: Synthetic oligonucleotide
cccgaugcaagagcugucc

SEQ ID NO: 349520 - RNA, 19 nt, Artificial Sequence
  Description of Artificial Sequence: Synthetic oligonucleotide
cagcgugcucggcaucggc

SEQ ID NO: 349521 - RNA, 19 nt, Artificial Sequence
  Description of Artificial Sequence: Synthetic oligonucleotide
ccccaauaacugcaaauca

SEQ ID NO: 349522 - RNA, 19 nt, Artificial Sequence
  Description of Artificial Sequence: Synthetic oligonucleotide
ugguccccauggcgaagga

SEQ ID NO: 349523 - RNA, 19 nt, Artificial Sequence
  Description of Artificial Sequence: Synthetic oligonucleotide
cucccggugagaggccggg

SEQ ID NO: 349524 - RNA, 19 nt, Artificial Sequence
  Description of Artificial Sequence: Synthetic oligonucleotide
cccagguacaccgaagcuc

SEQ ID NO: 349525 - RNA, 19 nt, Artificial Sequence
  Description of Artificial Sequence: Synthetic oligonucleotide
augauaccccggaauggaa

SEQ ID NO: 349526 - RNA, 19 nt, Artificial Sequence
  Description of Artificial Sequence: Synthetic oligonucleotide
cugucgggagagcccuaag

SEQ ID NO: 349527 - RNA, 19 nt, Artificial Sequence
  Description of Artificial Sequence: Synthetic oligonucleotide
cagguacaccgaagcucag

SEQ ID NO: 349528 - RNA, 19 nt, Artificial Sequence
  Description of Artificial Sequence: Synthetic oligonucleotide
ggucacucagggcucggga

SEQ ID NO: 349529 - RNA, 19 nt, Artificial Sequence
  Description of Artificial Sequence: Synthetic oligonucleotide
gagcguccugugguugugc

SEQ ID NO: 349530 - RNA, 19 nt, Artificial Sequence
  Description of Artificial Sequence: Synthetic oligonucleotide
agggcccaucugguccucc

SEQ ID NO: 349531 - RNA, 19 nt, Artificial Sequence
  Description of Artificial Sequence: Synthetic oligonucleotide
gcgguggugugaucgucag

SEQ ID NO: 349532 - RNA, 19 nt, Artificial Sequence
  Description of Artificial Sequence: Synthetic oligonucleotide
ggcuacggaggcccgggug

SEQ ID NO: 349533 - RNA, 19 nt, Artificial Sequence
  Description of Artificial Sequence: Synthetic oligonucleotide
gggcggcucuuccagugag

SEQ ID NO: 349534 - RNA, 19 nt, Artificial Sequence
  Description of Artificial Sequence: Synthetic oligonucleotide
acacgucaugucccaugau

SEQ ID NO: 349535 - RNA, 19 nt, Artificial Sequence
  Description of Artificial Sequence: Synthetic oligonucleotide
gggacacaucucccgaaga

SEQ ID NO: 349536 - RNA, 19 nt, Artificial Sequence
  Description of Artificial Sequence: Synthetic oligonucleotide
agaacacgucaugucccau

SEQ ID NO: 349537 - RNA, 19 nt, Artificial Sequence
  Description of Artificial Sequence: Synthetic oligonucleotide
guggucuaagauggaaacu

SEQ ID NO: 349538 - RNA, 19 nt, Artificial Sequence
  Description of Artificial Sequence: Synthetic oligonucleotide
cuacaaguggguggucuaa

SEQ ID NO: 349539 - RNA, 19 nt, Artificial Sequence
  Description of Artificial Sequence: Synthetic oligonucleotide
ucggaucagcacagccguu

SEQ ID NO: 349540 - RNA, 19 nt, Artificial Sequence
  Description of Artificial Sequence: Synthetic oligonucleotide
ccgaugcaagagcuguccc

SEQ ID NO: 349541 - RNA, 19 nt, Artificial Sequence
  Description of Artificial Sequence: Synthetic oligonucleotide
ugcgggcggcucuuccagu

SEQ ID NO: 349542 - RNA, 19 nt, Artificial Sequence
  Description of Artificial Sequence: Synthetic oligonucleotide
caaguucguucagacaccu

SEQ ID NO: 349543 - RNA, 19 nt, Artificial Sequence
  Description of Artificial Sequence: Synthetic oligonucleotide
gguaaccuccaggccucgg

SEQ ID NO: 349544 - RNA, 19 nt, Artificial Sequence
  Description of Artificial Sequence: Synthetic oligonucleotide
cacggcuacggaggcccgg

SEQ ID NO: 349545 - RNA, 19 nt, Artificial Sequence
  Description of Artificial Sequence: Synthetic oligonucleotide
gcacucaguguccguuccc

SEQ ID NO: 349546 - RNA, 19 nt, Artificial Sequence
  Description of Artificial Sequence: Synthetic oligonucleotide
uccauucgagggguaccua

SEQ ID NO: 349547 - RNA, 19 nt, Artificial Sequence
  Description of Artificial Sequence: Synthetic oligonucleotide
ggccccauucucgaaggac

SEQ ID NO: 349548 - RNA, 19 nt, Artificial Sequence
  Description of Artificial Sequence: Synthetic oligonucleotide
aaguucguucagacaccuu

SEQ ID NO: 349549 - RNA, 19 nt, Artificial Sequence
  Description of Artificial Sequence: Synthetic oligonucleotide
gcuacaaguggguggucua

SEQ ID NO: 349550 - RNA, 19 nt, Artificial Sequence
  Description of Artificial Sequence: Synthetic oligonucleotide
ccucauaugcugggagaag

SEQ ID NO: 349551 - RNA, 19 nt, Artificial Sequence
  Description of Artificial Sequence: Synthetic oligonucleotide
gugagcguccugugguugu

SEQ ID NO: 349552 - RNA, 19 nt, Artificial Sequence
  Description of Artificial Sequence: Synthetic oligonucleotide
gggcucgggaaugacucug

SEQ ID NO: 349553 - RNA, 19 nt, Artificial Sequence
  Description of Artificial Sequence: Synthetic oligonucleotide
gccgccggaaccaaagcuc

SEQ ID NO: 349554 - RNA, 19 nt, Artificial Sequence
  Description of Artificial Sequence: Synthetic oligonucleotide
gcgaagucucucucuggca

SEQ ID NO: 349555 - RNA, 19 nt, Artificial Sequence
  Description of Artificial Sequence: Synthetic oligonucleotide
ugcgaaggucaagcaggau

SEQ ID NO: 349556 - RNA, 19 nt, Artificial Sequence
  Description of Artificial Sequence: Synthetic oligonucleotide
gaucgucagcaaagcucuc

SEQ ID NO: 349557 - RNA, 19 nt, Artificial Sequence
  Description of Artificial Sequence: Synthetic oligonucleotide
ggcgaagggcuaugggcuc

SEQ ID NO: 349558 - RNA, 19 nt, Artificial Sequence
  Description of Artificial Sequence: Synthetic oligonucleotide
guggugugaucgucagcaa

SEQ ID NO: 349559 - RNA, 19 nt, Artificial Sequence
  Description of Artificial Sequence: Synthetic oligonucleotide
gcguccugugguugugcag

SEQ ID NO: 349560 - RNA, 19 nt, Artificial Sequence
  Description of Artificial Sequence: Synthetic oligonucleotide
gcgaaggaagcaugcccca

SEQ ID NO: 349561 - RNA, 19 nt, Artificial Sequence
  Description of Artificial Sequence: Synthetic oligonucleotide
ccgaagagucaaguguuuc

SEQ ID NO: 349562 - RNA, 19 nt, Artificial Sequence
  Description of Artificial Sequence: Synthetic oligonucleotide
ggaaguauucaaguucguu

SEQ ID NO: 349563 - RNA, 19 nt, Artificial Sequence
  Description of Artificial Sequence: Synthetic oligonucleotide
gaggcgguggugugaucgu

SEQ ID NO: 349564 - RNA, 19 nt, Artificial Sequence
  Description of Artificial Sequence: Synthetic oligonucleotide
cauucgagggguaccuauu

SEQ ID NO: 349565 - RNA, 19 nt, Artificial Sequence
  Description of Artificial Sequence: Synthetic oligonucleotide
ccggugagaggccgggaag

SEQ ID NO: 349566 - RNA, 19 nt, Artificial Sequence
  Description of Artificial Sequence: Synthetic oligonucleotide
cuauuccccagggcccauc

SEQ ID NO: 349567 - RNA, 19 nt, Artificial Sequence
  Description of Artificial Sequence: Synthetic oligonucleotide
ggaaagguuuauugccaau

SEQ ID NO: 349568 - RNA, 19 nt, Artificial Sequence
  Description of Artificial Sequence: Synthetic oligonucleotide
gcucgaaacagaguccacu

SEQ ID NO: 349569 - RNA, 19 nt, Artificial Sequence
  Description of Artificial Sequence: Synthetic oligonucleotide
cuuagcucaggcccagcuu

SEQ ID NO: 349570 - RNA, 19 nt, Artificial Sequence
  Description of Artificial Sequence: Synthetic oligonucleotide
gaaggucaagcaggauagu

SEQ ID NO: 349571 - RNA, 19 nt, Artificial Sequence
  Description of Artificial Sequence: Synthetic oligonucleotide
gggugccuugcgaagguca

SEQ ID NO: 349572 - RNA, 19 nt, Artificial Sequence
  Description of Artificial Sequence: Synthetic oligonucleotide
accccggaauggaauucca

SEQ ID NO: 349573 - RNA, 19 nt, Artificial Sequence
  Description of Artificial Sequence: Synthetic oligonucleotide
ggcgugguggggucacuca

SEQ ID NO: 349574 - RNA, 19 nt, Artificial Sequence
  Description of Artificial Sequence: Synthetic oligonucleotide
cacauguucucggggugaa

SEQ ID NO: 349575 - RNA, 19 nt, Artificial Sequence
  Description of Artificial Sequence: Synthetic oligonucleotide
caaugcgcagaggaugggu

SEQ ID NO: 349576 - RNA, 19 nt, Artificial Sequence
  Description of Artificial Sequence: Synthetic oligonucleotide
cgggaaugacucugucggg

SEQ ID NO: 349577 - RNA, 19 nt, Artificial Sequence
  Description of Artificial Sequence: Synthetic oligonucleotide
gggacgggccagcaugcuc

SEQ ID NO: 349578 - RNA, 19 nt, Artificial Sequence
  Description of Artificial Sequence: Synthetic oligonucleotide
gacgggccagcaugcucaa

SEQ ID NO: 349579 - RNA, 19 nt, Artificial Sequence
  Description of Artificial Sequence: Synthetic oligonucleotide
ccuuggccgaggaggugag

SEQ ID NO: 349580 - RNA, 19 nt, Artificial Sequence
  Description of Artificial Sequence: Synthetic oligonucleotide
cguuugcgcuccauucgag

SEQ ID NO: 349581 - RNA, 19 nt, Artificial Sequence
  Description of Artificial Sequence: Synthetic oligonucleotide
gugucccguggaagcugcg

SEQ ID NO: 349582 - RNA, 19 nt, Artificial Sequence
  Description of Artificial Sequence: Synthetic oligonucleotide
gccuugcgaaggucaagca

SEQ ID NO: 349583 - RNA, 19 nt, Artificial Sequence
  Description of Artificial Sequence: Synthetic oligonucleotide
acacggcuacggaggcccg

SEQ ID NO: 349584 - RNA, 19 nt, Artificial Sequence
  Description of Artificial Sequence: Synthetic oligonucleotide
cccgacccaacaacacaug

SEQ ID NO: 349585 - RNA, 19 nt, Artificial Sequence
  Description of Artificial Sequence: Synthetic oligonucleotide
cggaucagcacagccguug

SEQ ID NO: 349586 - RNA, 19 nt, Artificial Sequence
  Description of Artificial Sequence: Synthetic oligonucleotide
gcucgggaaugacucuguc

SEQ ID NO: 349587 - RNA, 19 nt, Artificial Sequence
  Description of Artificial Sequence: Synthetic oligonucleotide
ccaaugcgcagaggauggg

SEQ ID NO: 349588 - RNA, 19 nt, Artificial Sequence
  Description of Artificial Sequence: Synthetic oligonucleotide
gagcuagcucaaggccuuc

SEQ ID NO: 349589 - RNA, 19 nt, Artificial Sequence
  Description of Artificial Sequence: Synthetic oligonucleotide
gcagcccagguacaccgaa

SEQ ID NO: 349590 - RNA, 19 nt, Artificial Sequence
  Description of Artificial Sequence: Synthetic oligonucleotide
cuagacgcugcugggcacu

SEQ ID NO: 349591 - RNA, 19 nt, Artificial Sequence
  Description of Artificial Sequence: Synthetic oligonucleotide
gcauagagguugaacuggu

SEQ ID NO: 349592 - RNA, 19 nt, Artificial Sequence
  Description of Artificial Sequence: Synthetic oligonucleotide
ucccggugagaggccggga

SEQ ID NO: 349593 - RNA, 19 nt, Artificial Sequence
  Description of Artificial Sequence: Synthetic oligonucleotide
gccccauucucgaaggacu

SEQ ID NO: 349594 - RNA, 19 nt, Artificial Sequence
  Description of Artificial Sequence: Synthetic oligonucleotide
gggugcgggcggcucuucc

SEQ ID NO: 349595 - RNA, 19 nt, Artificial Sequence
  Description of Artificial Sequence: Synthetic oligonucleotide
cucgcaucuccuggaaagu

SEQ ID NO: 349596 - RNA, 19 nt, Artificial Sequence
  Description of Artificial Sequence: Synthetic oligonucleotide
auccgaccuggcagagaug

SEQ ID NO: 349597 - RNA, 19 nt, Artificial Sequence
  Description of Artificial Sequence: Synthetic oligonucleotide
ucgucgucuguggccucua

SEQ ID NO: 349598 - RNA, 19 nt, Artificial Sequence
  Description of Artificial Sequence: Synthetic oligonucleotide
ccaaagcucgaaacagagu

SEQ ID NO: 349599 - RNA, 19 nt, Artificial Sequence
  Description of Artificial Sequence: Synthetic oligonucleotide
ccuggcgcucagagcuuag

SEQ ID NO: 349600 - RNA, 19 nt, Artificial Sequence
  Description of Artificial Sequence: Synthetic oligonucleotide
caucggccccauucucgaa

SEQ ID NO: 349601 - RNA, 19 nt, Artificial Sequence
  Description of Artificial Sequence: Synthetic oligonucleotide
gcucccggugagaggccgg

SEQ ID NO: 349602 - RNA, 19 nt, Artificial Sequence
  Description of Artificial Sequence: Synthetic oligonucleotide
ccaacugugcauagagguu

SEQ ID NO: 349603 - RNA, 19 nt, Artificial Sequence
  Description of Artificial Sequence: Synthetic oligonucleotide
ccggaaccaaagcucgaaa

SEQ ID NO: 349604 - RNA, 19 nt, Artificial Sequence
  Description of Artificial Sequence: Synthetic oligonucleotide
ccgacccaacaacacaugu

SEQ ID NO: 349605 - RNA, 19 nt, Artificial Sequence
  Description of Artificial Sequence: Synthetic oligonucleotide
gcgcagaggauggguggug

SEQ ID NO: 349606 - RNA, 19 nt, Artificial Sequence
  Description of Artificial Sequence: Synthetic oligonucleotide
gucgucgucuguggccucu

SEQ ID NO: 349607 - RNA, 19 nt, Artificial Sequence
  Description of Artificial Sequence: Synthetic oligonucleotide
ggagcuagcucaaggccuu

SEQ ID NO: 349608 - RNA, 19 nt, Artificial Sequence
  Description of Artificial Sequence: Synthetic oligonucleotide
cgugcucggcaucggcccc

SEQ ID NO: 349609 - RNA, 19 nt, Artificial Sequence
  Description of Artificial Sequence: Synthetic oligonucleotide
cagcugggcgauagaacuu

SEQ ID NO: 349610 - RNA, 19 nt, Artificial Sequence
  Description of Artificial Sequence: Synthetic oligonucleotide
gcccagguacaccgaagcu

SEQ ID NO: 349611 - RNA, 19 nt, Artificial Sequence
  Description of Artificial Sequence: Synthetic oligonucleotide
ccgccgccggaaccaaagc

SEQ ID NO: 349612 - RNA, 19 nt, Artificial Sequence
  Description of Artificial Sequence: Synthetic oligonucleotide
cagugagcguccugugguu

SEQ ID NO: 349613 - RNA, 19 nt, Artificial Sequence
  Description of Artificial Sequence: Synthetic oligonucleotide
gcccgacccaacaacacau

SEQ ID NO: 349614 - RNA, 19 nt, Artificial Sequence
  Description of Artificial Sequence: Synthetic oligonucleotide
cgaugcaagagcugucccu

SEQ ID NO: 349615 - RNA, 19 nt, Artificial Sequence
  Description of Artificial Sequence: Synthetic oligonucleotide
gggcacugaugcuucguuu

SEQ ID NO: 349616 - RNA, 19 nt, Artificial Sequence
  Description of Artificial Sequence: Synthetic oligonucleotide
gggaaguauucaaguucgu

SEQ ID NO: 349617 - RNA, 19 nt, Artificial Sequence
  Description of Artificial Sequence: Synthetic oligonucleotide
cccggugagaggccgggaa

SEQ ID NO: 349618 - RNA, 19 nt, Artificial Sequence
  Description of Artificial Sequence: Synthetic oligonucleotide
cucugucgggagagcccua

SEQ ID NO: 349619 - RNA, 19 nt, Artificial Sequence
  Description of Artificial Sequence: Synthetic oligonucleotide
cgauagaacuuguccacuu

SEQ ID NO: 349620 - RNA, 19 nt, Artificial Sequence
  Description of Artificial Sequence: Synthetic oligonucleotide
ggggucacagaggcguggu

SEQ ID NO: 349621 - RNA, 19 nt, Artificial Sequence
  Description of Artificial Sequence: Synthetic oligonucleotide
ggcucgggaaugacucugu

SEQ ID NO: 349622 - RNA, 19 nt, Artificial Sequence
  Description of Artificial Sequence: Synthetic oligonucleotide
ccacuuuaguuuggucucu

SEQ ID NO: 349623 - RNA, 19 nt, Artificial Sequence
  Description of Artificial Sequence: Synthetic oligonucleotide
gaggcgugguggggucacu

SEQ ID NO: 349624 - RNA, 19 nt, Artificial Sequence
  Description of Artificial Sequence: Synthetic oligonucleotide
gcugggcgauagaacuugu

SEQ ID NO: 349625 - RNA, 19 nt, Artificial Sequence
  Description of Artificial Sequence: Synthetic oligonucleotide
ccauaccgagccagcugcu

SEQ ID NO: 349626 - RNA, 19 nt, Artificial Sequence
  Description of Artificial Sequence: Synthetic oligonucleotide
gccccaugucagcagucuu

SEQ ID NO: 349627 - RNA, 19 nt, Artificial Sequence
  Description of Artificial Sequence: Synthetic oligonucleotide
gccuggcgcucagagcuua

SEQ ID NO: 349628 - RNA, 19 nt, Artificial Sequence
  Description of Artificial Sequence: Synthetic oligonucleotide
ccauccgaccuggcagaga

SEQ ID NO: 349629 - RNA, 19 nt, Artificial Sequence
  Description of Artificial Sequence: Synthetic oligonucleotide
ccgaccuggcagagaugaa

SEQ ID NO: 349630 - RNA, 19 nt, Artificial Sequence
  Description of Artificial Sequence: Synthetic oligonucleotide
cgccgccggaaccaaagcu

SEQ ID NO: 349631 - RNA, 19 nt, Artificial Sequence
  Description of Artificial Sequence: Synthetic oligonucleotide
ccuauuccccagggcccau

SEQ ID NO: 349632 - RNA, 19 nt, Artificial Sequence
  Description of Artificial Sequence: Synthetic oligonucleotide
cggcuacggaggcccgggu

SEQ ID NO: 349633 - RNA, 19 nt, Artificial Sequence
  Description of Artificial Sequence: Synthetic oligonucleotide
ugugacaccacucagcagg

SEQ ID NO: 349634 - RNA, 19 nt, Artificial Sequence
  Description of Artificial Sequence: Synthetic oligonucleotide
aauagaccgacccuucacc

SEQ ID NO: 349635 - RNA, 19 nt, Artificial Sequence
  Description of Artificial Sequence: Synthetic oligonucleotide
agagcuuucguacuggcac

SEQ ID NO: 349636 - RNA, 19 nt, Artificial Sequence
  Description of Artificial Sequence: Synthetic oligonucleotide
auacguuuccgguaggugc

SEQ ID NO: 349637 - RNA, 19 nt, Artificial Sequence
  Description of Artificial Sequence: Synthetic oligonucleotide
aucccuaauagaccgaccc

SEQ ID NO: 349638 - RNA, 19 nt, Artificial Sequence
  Description of Artificial Sequence: Synthetic oligonucleotide
aagauaccaaacugugagc

SEQ ID NO: 349639 - RNA, 19 nt, Artificial Sequence
  Description of Artificial Sequence: Synthetic oligonucleotide
aguuagaagguuaucaugg

SEQ ID NO: 349640 - RNA, 19 nt, Artificial Sequence
  Description of Artificial Sequence: Synthetic oligonucleotide
agcaauaccauagaugcac

SEQ ID NO: 349641 - RNA, 19 nt, Artificial Sequence
  Description of Artificial Sequence: Synthetic oligonucleotide
auaccauagaugcacacag

SEQ ID NO: 349642 - RNA, 19 nt, Artificial Sequence
  Description of Artificial Sequence: Synthetic oligonucleotide
ugugauggacguuugacgc

SEQ ID NO: 349643 - RNA, 19 nt, Artificial Sequence
  Description of Artificial Sequence: Synthetic oligonucleotide
uuaucaugggaacucaugu

SEQ ID NO: 349644 - RNA, 19 nt, Artificial Sequence
  Description of Artificial Sequence: Synthetic oligonucleotide
aagaaagacguauccaacu

SEQ ID NO: 349645 - RNA, 19 nt, Artificial Sequence
  Description of Artificial Sequence: Synthetic oligonucleotide
aauggugaccagugagugc

SEQ ID NO: 349646 - RNA, 19 nt, Artificial Sequence
  Description of Artificial Sequence: Synthetic oligonucleotide
agggugaaaacuuggcacc

SEQ ID NO: 349647 - RNA, 19 nt, Artificial Sequence
  Description of Artificial Sequence: Synthetic oligonucleotide
gaaguggucggucaagggg

SEQ ID NO: 349648 - RNA, 19 nt, Artificial Sequence
  Description of Artificial Sequence: Synthetic oligonucleotide
aguauaaguguccagcagu

SEQ ID NO: 349649 - RNA, 19 nt, Artificial Sequence
  Description of Artificial Sequence: Synthetic oligonucleotide
ucauguaguauaagugucc

SEQ ID NO: 349650 - RNA, 19 nt, Artificial Sequence
  Description of Artificial Sequence: Synthetic oligonucleotide
acucauguaguauaagugu

SEQ ID NO: 349651 - RNA, 19 nt, Artificial Sequence
  Description of Artificial Sequence: Synthetic oligonucleotide
agaagguuaucaugggaac

SEQ ID NO: 349652 - RNA, 19 nt, Artificial Sequence
  Description of Artificial Sequence: Synthetic oligonucleotide
acgaaggugagccaguaag

SEQ ID NO: 349653 - RNA, 19 nt, Artificial Sequence
  Description of Artificial Sequence: Synthetic oligonucleotide
uuuagcuucccauaccgcu

SEQ ID NO: 349654 - RNA, 19 nt, Artificial Sequence
  Description of Artificial Sequence: Synthetic oligonucleotide
aacucauguaguauaagug

SEQ ID NO: 349655 - RNA, 19 nt, Artificial Sequence
  Description of Artificial Sequence: Synthetic oligonucleotide
cauacugccaacguagacg

SEQ ID NO: 349656 - RNA, 19 nt, Artificial Sequence
  Description of Artificial Sequence: Synthetic oligonucleotide
guagacguagaagagaacc

SEQ ID NO: 349657 - RNA, 19 nt, Artificial Sequence
  Description of Artificial Sequence: Synthetic oligonucleotide
agacguauccaacucauca

SEQ ID NO: 349658 - RNA, 19 nt, Artificial Sequence
  Description of Artificial Sequence: Synthetic oligonucleotide
gaaggcucgucacauaccc

SEQ ID NO: 349659 - RNA, 19 nt, Artificial Sequence
  Description of Artificial Sequence: Synthetic oligonucleotide
acggauaccaaacaaugca

SEQ ID NO: 349660 - RNA, 19 nt, Artificial Sequence
  Description of Artificial Sequence: Synthetic oligonucleotide
uacguuuccgguaggugcg

SEQ ID NO: 349661 - RNA, 19 nt, Artificial Sequence
  Description of Artificial Sequence: Synthetic oligonucleotide
gaacuugucggugaagggg

SEQ ID NO: 349662 - RNA, 19 nt, Artificial Sequence
  Description of Artificial Sequence: Synthetic oligonucleotide
aggcguaaagacuucgacg

SEQ ID NO: 349663 - RNA, 19 nt, Artificial Sequence
  Description of Artificial Sequence: Synthetic oligonucleotide
gaaguugucgauccagggc

SEQ ID NO: 349664 - RNA, 19 nt, Artificial Sequence
  Description of Artificial Sequence: Synthetic oligonucleotide
cuuucguacuggcacagcg

SEQ ID NO: 349665 - RNA, 19 nt, Artificial Sequence
  Description of Artificial Sequence: Synthetic oligonucleotide
acguauccaacucaucagg

SEQ ID NO: 349666 - RNA, 19 nt, Artificial Sequence
  Description of Artificial Sequence: Synthetic oligonucleotide
aauaccauagaugcacaca

SEQ ID NO: 349667 - RNA, 19 nt, Artificial Sequence
  Description of Artificial Sequence: Synthetic oligonucleotide
ugagaugugggcgaaguug

SEQ ID NO: 349668 - RNA, 19 nt, Artificial Sequence
  Description of Artificial Sequence: Synthetic oligonucleotide
agggucuaugaucuucugc

SEQ ID NO: 349669 - RNA, 19 nt, Artificial Sequence
  Description of Artificial Sequence: Synthetic oligonucleotide
aacaaccucaucuggguau

SEQ ID NO: 349670 - RNA, 19 nt, Artificial Sequence
  Description of Artificial Sequence: Synthetic oligonucleotide
ggcguaaagacuucgacgc

SEQ ID NO: 349671 - RNA, 19 nt, Artificial Sequence
  Description of Artificial Sequence: Synthetic oligonucleotide
gacguauccaacucaucag

SEQ ID NO: 349672 - RNA, 19 nt, Artificial Sequence
  Description of Artificial Sequence: Synthetic oligonucleotide
agaccgacccuucaccagc

SEQ ID NO: 349673 - RNA, 19 nt, Artificial Sequence
  Description of Artificial Sequence: Synthetic oligonucleotide
ucauugcguacacagcaag

SEQ ID NO: 349674 - RNA, 19 nt, Artificial Sequence
  Description of Artificial Sequence: Synthetic oligonucleotide
uaaguguccagcaguagaa

SEQ ID NO: 349675 - RNA, 19 nt, Artificial Sequence
  Description of Artificial Sequence: Synthetic oligonucleotide
aaaagcaccacggccaaga

SEQ ID NO: 349676 - RNA, 19 nt, Artificial Sequence
  Description of Artificial Sequence: Synthetic oligonucleotide
gaucuggcaacgcuugcgg

SEQ ID NO: 349677 - RNA, 19 nt, Artificial Sequence
  Description of Artificial Sequence: Synthetic oligonucleotide
ugcguacacagcaagcuga

SEQ ID NO: 349678 - RNA, 19 nt, Artificial Sequence
  Description of Artificial Sequence: Synthetic oligonucleotide
gauggggacucaaacaacc

SEQ ID NO: 349679 - RNA, 19 nt, Artificial Sequence
  Description of Artificial Sequence: Synthetic oligonucleotide
aagcagacggauaccaaac

SEQ ID NO: 349680 - RNA, 19 nt, Artificial Sequence
  Description of Artificial Sequence: Synthetic oligonucleotide
agccgcacugacuaccucc

SEQ ID NO: 349681 - RNA, 19 nt, Artificial Sequence
  Description of Artificial Sequence: Synthetic oligonucleotide
acguauuugacauucucau

SEQ ID NO: 349682 - RNA, 19 nt, Artificial Sequence
  Description of Artificial Sequence: Synthetic oligonucleotide
uucguaaagugccaucccu

SEQ ID NO: 349683 - RNA, 19 nt, Artificial Sequence
  Description of Artificial Sequence: Synthetic oligonucleotide
auagacaccacgcuuccga

SEQ ID NO: 349684 - RNA, 19 nt, Artificial Sequence
  Description of Artificial Sequence: Synthetic oligonucleotide
gaagaugaugaucuggcaa

SEQ ID NO: 349685 - RNA, 19 nt, Artificial Sequence
  Description of Artificial Sequence: Synthetic oligonucleotide
guuagugugguucccagca

SEQ ID NO: 349686 - RNA, 19 nt, Artificial Sequence
  Description of Artificial Sequence: Synthetic oligonucleotide
cucauguaguauaaguguc

SEQ ID NO: 349687 - RNA, 19 nt, Artificial Sequence
  Description of Artificial Sequence: Synthetic oligonucleotide
gaagcuggcaggcguaaag

SEQ ID NO: 349688 - RNA, 19 nt, Artificial Sequence
  Description of Artificial Sequence: Synthetic oligonucleotide
agcaccacggccaagagcu

SEQ ID NO: 349689 - RNA, 19 nt, Artificial Sequence
  Description of Artificial Sequence: Synthetic oligonucleotide
aauacguuuccgguaggug

SEQ ID NO: 349690 - RNA, 19 nt, Artificial Sequence
  Description of Artificial Sequence: Synthetic oligonucleotide
aaguaccgaguccacuguc

SEQ ID NO: 349691 - RNA, 19 nt, Artificial Sequence
  Description of Artificial Sequence: Synthetic oligonucleotide
ucugccgcuugacauagcu

SEQ ID NO: 349692 - RNA, 19 nt, Artificial Sequence
  Description of Artificial Sequence: Synthetic oligonucleotide
gcuaaaacgacucccaguc

SEQ ID NO: 349693 - RNA, 19 nt, Artificial Sequence
  Description of Artificial Sequence: Synthetic oligonucleotide
acagcgaugcgcugacccc

SEQ ID NO: 349694 - RNA, 19 nt, Artificial Sequence
  Description of Artificial Sequence: Synthetic oligonucleotide
ugggcgaaguugucgaucc

SEQ ID NO: 349695 - RNA, 19 nt, Artificial Sequence
  Description of Artificial Sequence: Synthetic oligonucleotide
acgucauccaugcagugca

SEQ ID NO: 349696 - RNA, 19 nt, Artificial Sequence
  Description of Artificial Sequence: Synthetic oligonucleotide
gauucacgggcacucagac

SEQ ID NO: 349697 - RNA, 19 nt, Artificial Sequence
  Description of Artificial Sequence: Synthetic oligonucleotide
uggugauaucuucuggcca

SEQ ID NO: 349698 - RNA, 19 nt, Artificial Sequence
  Description of Artificial Sequence: Synthetic oligonucleotide
gaacguauuugacauucuc

SEQ ID NO: 349699 - RNA, 19 nt, Artificial Sequence
  Description of Artificial Sequence: Synthetic oligonucleotide
ucccgggcgaagaaagacg

SEQ ID NO: 349700 - RNA, 19 nt, Artificial Sequence
  Description of Artificial Sequence: Synthetic oligonucleotide
gaacucauguaguauaagu

SEQ ID NO: 349701 - RNA, 19 nt, Artificial Sequence
  Description of Artificial Sequence: Synthetic oligonucleotide
ugacggaugcucuugcgcu

SEQ ID NO: 349702 - RNA, 19 nt, Artificial Sequence
  Description of Artificial Sequence: Synthetic oligonucleotide
uuucguacuggcacagcga

SEQ ID NO: 349703 - RNA, 19 nt, Artificial Sequence
  Description of Artificial Sequence: Synthetic oligonucleotide
uucacccauacugccaacg

SEQ ID NO: 349704 - RNA, 19 nt, Artificial Sequence
  Description of Artificial Sequence: Synthetic oligonucleotide
cugaacguauuugacauuc

SEQ ID NO: 349705 - RNA, 19 nt, Artificial Sequence
  Description of Artificial Sequence: Synthetic oligonucleotide
cucacagcggacuggguag

SEQ ID NO: 349706 - RNA, 19 nt, Artificial Sequence
  Description of Artificial Sequence: Synthetic oligonucleotide
aaagacguauccaacucau

SEQ ID NO: 349707 - RNA, 19 nt, Artificial Sequence
  Description of Artificial Sequence: Synthetic oligonucleotide
gugaaugagggccuccgag

SEQ ID NO: 349708 - RNA, 19 nt, Artificial Sequence
  Description of Artificial Sequence: Synthetic oligonucleotide
aaguucuccugcugaacgu

SEQ ID NO: 349709 - RNA, 19 nt, Artificial Sequence
  Description of Artificial Sequence: Synthetic oligonucleotide
auggcuaugcggugccagc

SEQ ID NO: 349710 - RNA, 19 nt, Artificial Sequence
  Description of Artificial Sequence: Synthetic oligonucleotide
ucaugggaacucauguagu

SEQ ID NO: 349711 - RNA, 19 nt, Artificial Sequence
  Description of Artificial Sequence: Synthetic oligonucleotide
agacggauaccaaacaaug

SEQ ID NO: 349712 - RNA, 19 nt, Artificial Sequence
  Description of Artificial Sequence: Synthetic oligonucleotide
auugcguacacagcaagcu

SEQ ID NO: 349713 - RNA, 19 nt, Artificial Sequence
  Description of Artificial Sequence: Synthetic oligonucleotide
aaccauagggccgcuuuuc

SEQ ID NO: 349714 - RNA, 19 nt, Artificial Sequence
  Description of Artificial Sequence: Synthetic oligonucleotide
cauugcguacacagcaagc

SEQ ID NO: 349715 - RNA, 19 nt, Artificial Sequence
  Description of Artificial Sequence: Synthetic oligonucleotide
gcugucaauacguuuccgg

SEQ ID NO: 349716 - RNA, 19 nt, Artificial Sequence
  Description of Artificial Sequence: Synthetic oligonucleotide
uucgaagucugcacacagc

SEQ ID NO: 349717 - RNA, 19 nt, Artificial Sequence
  Description of Artificial Sequence: Synthetic oligonucleotide
aacuugucggugaagggga

SEQ ID NO: 349718 - RNA, 19 nt, Artificial Sequence
  Description of Artificial Sequence: Synthetic oligonucleotide
uucgacgcuguccccuucg

SEQ ID NO: 349719 - RNA, 19 nt, Artificial Sequence
  Description of Artificial Sequence: Synthetic oligonucleotide
uugcguacacagcaagcug

SEQ ID NO: 349720 - RNA, 19 nt, Artificial Sequence
  Description of Artificial Sequence: Synthetic oligonucleotide
aaguggucggucaagggga

SEQ ID NO: 349721 - RNA, 19 nt, Artificial Sequence
  Description of Artificial Sequence: Synthetic oligonucleotide
cauccccaaaccauagggc

SEQ ID NO: 349722 - RNA, 19 nt, Artificial Sequence
  Description of Artificial Sequence: Synthetic oligonucleotide
agcuaaaacgacucccagu

SEQ ID NO: 349723 - RNA, 19 nt, Artificial Sequence
  Description of Artificial Sequence: Synthetic oligonucleotide
gaagagcuuucguacuggc

SEQ ID NO: 349724 - RNA, 19 nt, Artificial Sequence
  Description of Artificial Sequence: Synthetic oligonucleotide
guuaucaugggaacucaug

SEQ ID NO: 349725 - RNA, 19 nt, Artificial Sequence
  Description of Artificial Sequence: Synthetic oligonucleotide
uugucggugaaggggaugc

SEQ ID NO: 349726 - RNA, 19 nt, Artificial Sequence
  Description of Artificial Sequence: Synthetic oligonucleotide
gagaaacucacaccacuca

SEQ ID NO: 349727 - RNA, 19 nt, Artificial Sequence
  Description of Artificial Sequence: Synthetic oligonucleotide
acccauacugccaacguag

SEQ ID NO: 349728 - RNA, 19 nt, Artificial Sequence
  Description of Artificial Sequence: Synthetic oligonucleotide
aacgcuugcgguacagguc

SEQ ID NO: 349729 - RNA, 19 nt, Artificial Sequence
  Description of Artificial Sequence: Synthetic oligonucleotide
cacagcgaugcgcugaccc

SEQ ID NO: 349730 - RNA, 19 nt, Artificial Sequence
  Description of Artificial Sequence: Synthetic oligonucleotide
ugauggacguuugacgcug

SEQ ID NO: 349731 - RNA, 19 nt, Artificial Sequence
  Description of Artificial Sequence: Synthetic oligonucleotide
gacggauaccaaacaaugc

SEQ ID NO: 349732 - RNA, 19 nt, Artificial Sequence
  Description of Artificial Sequence: Synthetic oligonucleotide
ugcugcgagaagcccacag

SEQ ID NO: 349733 - RNA, 19 nt, Artificial Sequence
  Description of Artificial Sequence: Synthetic oligonucleotide
augaaguggucggucaagg

SEQ ID NO: 349734 - RNA, 19 nt, Artificial Sequence
  Description of Artificial Sequence: Synthetic oligonucleotide
ugucaauacguuuccggua

SEQ ID NO: 349735 - RNA, 19 nt, Artificial Sequence
  Description of Artificial Sequence: Synthetic oligonucleotide
agugacggaugcucuugcg

SEQ ID NO: 349736 - RNA, 19 nt, Artificial Sequence
  Description of Artificial Sequence: Synthetic oligonucleotide
ggugauaucuucuggccac

SEQ ID NO: 349737 - RNA, 19 nt, Artificial Sequence
  Description of Artificial Sequence: Synthetic oligonucleotide
agcgacacguuguccuggc

SEQ ID NO: 349738 - RNA, 19 nt, Artificial Sequence
  Description of Artificial Sequence: Synthetic oligonucleotide
uaucaugggaacucaugua

SEQ ID NO: 349739 - RNA, 19 nt, Artificial Sequence
  Description of Artificial Sequence: Synthetic oligonucleotide
uuuucacgcucccgggcag

SEQ ID NO: 349740 - RNA, 19 nt, Artificial Sequence
  Description of Artificial Sequence: Synthetic oligonucleotide
ugagugcuuuucacgcucc

SEQ ID NO: 349741 - RNA, 19 nt, Artificial Sequence
  Description of Artificial Sequence: Synthetic oligonucleotide
ggauaccaaacaaugcagg

SEQ ID NO: 349742 - RNA, 19 nt, Artificial Sequence
  Description of Artificial Sequence: Synthetic oligonucleotide
gcaggugagaaacucacac

SEQ ID NO: 349743 - RNA, 19 nt, Artificial Sequence
  Description of Artificial Sequence: Synthetic oligonucleotide
gaaugggccacuucaccca

SEQ ID NO: 349744 - RNA, 19 nt, Artificial Sequence
  Description of Artificial Sequence: Synthetic oligonucleotide
ggcaaagaggaaaagcacc

SEQ ID NO: 349745 - RNA, 19 nt, Artificial Sequence
  Description of Artificial Sequence: Synthetic oligonucleotide
ugaacguauuugacauucu

SEQ ID NO: 349746 - RNA, 19 nt, Artificial Sequence
  Description of Artificial Sequence: Synthetic oligonucleotide
aguaagugaagaagggccu

SEQ ID NO: 349747 - RNA, 19 nt, Artificial Sequence
  Description of Artificial Sequence: Synthetic oligonucleotide
ugauggggacucaaacaac

SEQ ID NO: 349748 - RNA, 19 nt, Artificial Sequence
  Description of Artificial Sequence: Synthetic oligonucleotide
ucugugugauggacguuug

SEQ ID NO: 349749 - RNA, 19 nt, Artificial Sequence
  Description of Artificial Sequence: Synthetic oligonucleotide
gacgcuguccccuucguaa

SEQ ID NO: 349750 - RNA, 19 nt, Artificial Sequence
  Description of Artificial Sequence: Synthetic oligonucleotide
cuucguaaagugccauccc

SEQ ID NO: 349751 - RNA, 19 nt, Artificial Sequence
  Description of Artificial Sequence: Synthetic oligonucleotide
aaacaaccucaucugggua

SEQ ID NO: 349752 - RNA, 19 nt, Artificial Sequence
  Description of Artificial Sequence: Synthetic oligonucleotide
ggcgaagaaagacguaucc

SEQ ID NO: 349753 - RNA, 19 nt, Artificial Sequence
  Description of Artificial Sequence: Synthetic oligonucleotide
caauaccauagaugcacac

SEQ ID NO: 349754 - RNA, 19 nt, Artificial Sequence
  Description of Artificial Sequence: Synthetic oligonucleotide
cugauggggacucaaacaa

SEQ ID NO: 349755 - RNA, 19 nt, Artificial Sequence
  Description of Artificial Sequence: Synthetic oligonucleotide
gaccagugagugcacgaag

SEQ ID NO: 349756 - RNA, 19 nt, Artificial Sequence
  Description of Artificial Sequence: Synthetic oligonucleotide
cacugucucaugcugcgag

SEQ ID NO: 349757 - RNA, 19 nt, Artificial Sequence
  Description of Artificial Sequence: Synthetic oligonucleotide
uggggacucaaacaaccuc

SEQ ID NO: 349758 - RNA, 19 nt, Artificial Sequence
  Description of Artificial Sequence: Synthetic oligonucleotide
cauaccgcuggcugcagug

SEQ ID NO: 349759 - RNA, 19 nt, Artificial Sequence
  Description of Artificial Sequence: Synthetic oligonucleotide
ucccgcaggacugucaucu

SEQ ID NO: 349760 - RNA, 19 nt, Artificial Sequence
  Description of Artificial Sequence: Synthetic oligonucleotide
ucguaaagugccaucccua

SEQ ID NO: 349761 - RNA, 19 nt, Artificial Sequence
  Description of Artificial Sequence: Synthetic oligonucleotide
gaagccgcaccuugggcug

SEQ ID NO: 349762 - RNA, 19 nt, Artificial Sequence
  Description of Artificial Sequence: Synthetic oligonucleotide
ucacaccacucacagcgga

SEQ ID NO: 349763 - RNA, 19 nt, Artificial Sequence
  Description of Artificial Sequence: Synthetic oligonucleotide
acaggagcaauaccauaga

SEQ ID NO: 349764 - RNA, 19 nt, Artificial Sequence
  Description of Artificial Sequence: Synthetic oligonucleotide
gugacggaugcucuugcgc

SEQ ID NO: 349765 - RNA, 19 nt, Artificial Sequence
  Description of Artificial Sequence: Synthetic oligonucleotide
ucccuaauagaccgacccu

SEQ ID NO: 349766 - RNA, 19 nt, Artificial Sequence
  Description of Artificial Sequence: Synthetic oligonucleotide
uuagugugguucccagcac

SEQ ID NO: 349767 - RNA, 19 nt, Artificial Sequence
  Description of Artificial Sequence: Synthetic oligonucleotide
gauggcuaugcggugccag

SEQ ID NO: 349768 - RNA, 19 nt, Artificial Sequence
  Description of Artificial Sequence: Synthetic oligonucleotide
caaagcugauguaaggcaa

SEQ ID NO: 349769 - RNA, 19 nt, Artificial Sequence
  Description of Artificial Sequence: Synthetic oligonucleotide
ggcauggccccacauagag

SEQ ID NO: 349770 - RNA, 19 nt, Artificial Sequence
  Description of Artificial Sequence: Synthetic oligonucleotide
agcaguagaagggcucaac

SEQ ID NO: 349771 - RNA, 19 nt, Artificial Sequence
  Description of Artificial Sequence: Synthetic oligonucleotide
ccauccccaaaccauaggg

SEQ ID NO: 349772 - RNA, 19 nt, Artificial Sequence
  Description of Artificial Sequence: Synthetic oligonucleotide
auagggccgcuuuucccgg

SEQ ID NO: 349773 - RNA, 19 nt, Artificial Sequence
  Description of Artificial Sequence: Synthetic oligonucleotide
aagacguauccaacucauc

SEQ ID NO: 349774 - RNA, 19 nt, Artificial Sequence
  Description of Artificial Sequence: Synthetic oligonucleotide
uucagcgcugccucugaug

SEQ ID NO: 349775 - RNA, 19 nt, Artificial Sequence
  Description of Artificial Sequence: Synthetic oligonucleotide
caugcugcgagaagcccac

SEQ ID NO: 349776 - RNA, 19 nt, Artificial Sequence
  Description of Artificial Sequence: Synthetic oligonucleotide
gacgucauccaugcagugc

SEQ ID NO: 349777 - RNA, 19 nt, Artificial Sequence
  Description of Artificial Sequence: Synthetic oligonucleotide
gacgagcacuccuccuucg

SEQ ID NO: 349778 - RNA, 19 nt, Artificial Sequence
  Description of Artificial Sequence: Synthetic oligonucleotide
uagacgagcacuccuccuu

SEQ ID NO: 349779 - RNA, 19 nt, Artificial Sequence
  Description of Artificial Sequence: Synthetic oligonucleotide
caggcguaaagacuucgac

SEQ ID NO: 349780 - RNA, 19 nt, Artificial Sequence
  Description of Artificial Sequence: Synthetic oligonucleotide
ucuggcaacgcuugcggua

SEQ ID NO: 349781 - RNA, 19 nt, Artificial Sequence
  Description of Artificial Sequence: Synthetic oligonucleotide
aaaccauagggccgcuuuu

SEQ ID NO: 349782 - RNA, 19 nt, Artificial Sequence
  Description of Artificial Sequence: Synthetic oligonucleotide
ugcggggcuaaugugcugc

SEQ ID NO: 349783 - RNA, 19 nt, Artificial Sequence
  Description of Artificial Sequence: Synthetic oligonucleotide
acguuugacgcuggaguac

SEQ ID NO: 349784 - RNA, 19 nt, Artificial Sequence
  Description of Artificial Sequence: Synthetic oligonucleotide
agcagacggauaccaaaca

SEQ ID NO: 349785 - RNA, 19 nt, Artificial Sequence
  Description of Artificial Sequence: Synthetic oligonucleotide
auguaaggcaagaaggcaa

SEQ ID NO: 349786 - RNA, 19 nt, Artificial Sequence
  Description of Artificial Sequence: Synthetic oligonucleotide
agccucguuucucccaguc

SEQ ID NO: 349787 - RNA, 19 nt, Artificial Sequence
  Description of Artificial Sequence: Synthetic oligonucleotide
aggcgguagaacuggucag

SEQ ID NO: 349788 - RNA, 19 nt, Artificial Sequence
  Description of Artificial Sequence: Synthetic oligonucleotide
acgcuuccgaaguaccgag

SEQ ID NO: 349789 - RNA, 19 nt, Artificial Sequence
  Description of Artificial Sequence: Synthetic oligonucleotide
uggacguuugacgcuggag

SEQ ID NO: 349790 - RNA, 19 nt, Artificial Sequence
  Description of Artificial Sequence: Synthetic oligonucleotide
ucccgaaugaccugagguu

SEQ ID NO: 349791 - RNA, 19 nt, Artificial Sequence
  Description of Artificial Sequence: Synthetic oligonucleotide
cugauucacgggcacucag

SEQ ID NO: 349792 - RNA, 19 nt, Artificial Sequence
  Description of Artificial Sequence: Synthetic oligonucleotide
agaaggcacgccagggucg

SEQ ID NO: 349793 - RNA, 19 nt, Artificial Sequence
  Description of Artificial Sequence: Synthetic oligonucleotide
cugcugaacguauuugaca

SEQ ID NO: 349794 - RNA, 19 nt, Artificial Sequence
  Description of Artificial Sequence: Synthetic oligonucleotide
agcgugcaggaagagggac

SEQ ID NO: 349795 - RNA, 19 nt, Artificial Sequence
  Description of Artificial Sequence: Synthetic oligonucleotide
guaagugaagaagggccug

SEQ ID NO: 349796 - RNA, 19 nt, Artificial Sequence
  Description of Artificial Sequence: Synthetic oligonucleotide
uggcagcuaaaacgacucc

SEQ ID NO: 349797 - RNA, 19 nt, Artificial Sequence
  Description of Artificial Sequence: Synthetic oligonucleotide
acggaugcucuugcgcugc

SEQ ID NO: 349798 - RNA, 19 nt, Artificial Sequence
  Description of Artificial Sequence: Synthetic oligonucleotide
agcaagcugagugcuuuuc

SEQ ID NO: 349799 - RNA, 19 nt, Artificial Sequence
  Description of Artificial Sequence: Synthetic oligonucleotide
cagcuaaaacgacucccag

SEQ ID NO: 349800 - RNA, 19 nt, Artificial Sequence
  Description of Artificial Sequence: Synthetic oligonucleotide
aagagcuuucguacuggca

SEQ ID NO: 349801 - RNA, 19 nt, Artificial Sequence
  Description of Artificial Sequence: Synthetic oligonucleotide
caucccuaauagaccgacc

SEQ ID NO: 349802 - RNA, 19 nt, Artificial Sequence
  Description of Artificial Sequence: Synthetic oligonucleotide
gacggaugcucuugcgcug

SEQ ID NO: 349803 - RNA, 19 nt, Artificial Sequence
  Description of Artificial Sequence: Synthetic oligonucleotide
gacguuugacgcuggagua

SEQ ID NO: 349804 - RNA, 19 nt, Artificial Sequence
  Description of Artificial Sequence: Synthetic oligonucleotide
cuagguugccugugacacc

SEQ ID NO: 349805 - RNA, 19 nt, Artificial Sequence
  Description of Artificial Sequence: Synthetic oligonucleotide
uacuggcacagcgaugcgc

SEQ ID NO: 349806 - RNA, 19 nt, Artificial Sequence
  Description of Artificial Sequence: Synthetic oligonucleotide
agacuucgacgcugucccc

SEQ ID NO: 349807 - RNA, 19 nt, Artificial Sequence
  Description of Artificial Sequence: Synthetic oligonucleotide
ccggccacgggccagaggg

SEQ ID NO: 349808 - RNA, 19 nt, Artificial Sequence
  Description of Artificial Sequence: Synthetic oligonucleotide
gaaugagggccuccgagcu

SEQ ID NO: 349809 - RNA, 19 nt, Artificial Sequence
  Description of Artificial Sequence: Synthetic oligonucleotide
ucggaggaaggcucgucac

SEQ ID NO: 349810 - RNA, 19 nt, Artificial Sequence
  Description of Artificial Sequence: Synthetic oligonucleotide
cuuuucccgggcgaagagc

SEQ ID NO: 349811 - RNA, 19 nt, Artificial Sequence
  Description of Artificial Sequence: Synthetic oligonucleotide
uucccgggcgaagaaagac

SEQ ID NO: 349812 - RNA, 19 nt, Artificial Sequence
  Description of Artificial Sequence: Synthetic oligonucleotide
acugucucaugcugcgaga

SEQ ID NO: 349813 - RNA, 19 nt, Artificial Sequence
  Description of Artificial Sequence: Synthetic oligonucleotide
ccuucguaaagugccaucc

SEQ ID NO: 349814 - RNA, 19 nt, Artificial Sequence
  Description of Artificial Sequence: Synthetic oligonucleotide
cugcgagaagcccacagga

SEQ ID NO: 349815 - RNA, 19 nt, Artificial Sequence
  Description of Artificial Sequence: Synthetic oligonucleotide
gagcaccgucucuucagcc

SEQ ID NO: 349816 - RNA, 19 nt, Artificial Sequence
  Description of Artificial Sequence: Synthetic oligonucleotide
ucggucaaggggacuaguu

SEQ ID NO: 349817 - RNA, 19 nt, Artificial Sequence
  Description of Artificial Sequence: Synthetic oligonucleotide
acaaccucaucuggguaug

SEQ ID NO: 349818 - RNA, 19 nt, Artificial Sequence
  Description of Artificial Sequence: Synthetic oligonucleotide
gagcuuucguacuggcaca

SEQ ID NO: 349819 - RNA, 19 nt, Artificial Sequence
  Description of Artificial Sequence: Synthetic oligonucleotide
uaccgaguccacugucuca

SEQ ID NO: 349820 - RNA, 19 nt, Artificial Sequence
  Description of Artificial Sequence: Synthetic oligonucleotide
cguacuggcacagcgaugc

SEQ ID NO: 349821 - RNA, 19 nt, Artificial Sequence
  Description of Artificial Sequence: Synthetic oligonucleotide
aggcacgccagggucgagc

SEQ ID NO: 349822 - RNA, 19 nt, Artificial Sequence
  Description of Artificial Sequence: Synthetic oligonucleotide
cuaugcggugccagccugc

SEQ ID NO: 349823 - RNA, 19 nt, Artificial Sequence
  Description of Artificial Sequence: Synthetic oligonucleotide
ucguacuggcacagcgaug

SEQ ID NO: 349824 - RNA, 19 nt, Artificial Sequence
  Description of Artificial Sequence: Synthetic oligonucleotide
cguauccaacucaucaggg

SEQ ID NO: 349825 - RNA, 19 nt, Artificial Sequence
  Description of Artificial Sequence: Synthetic oligonucleotide
uagacaccacgcuuccgaa

SEQ ID NO: 349826 - RNA, 19 nt, Artificial Sequence
  Description of Artificial Sequence: Synthetic oligonucleotide
agcagguaaaugauggcua

SEQ ID NO: 349827 - RNA, 19 nt, Artificial Sequence
  Description of Artificial Sequence: Synthetic oligonucleotide
gggcgaagagcuuucguac

SEQ ID NO: 349828 - RNA, 19 nt, Artificial Sequence
  Description of Artificial Sequence: Synthetic oligonucleotide
aguacucccgggaagugau

SEQ ID NO: 349829 - RNA, 19 nt, Artificial Sequence
  Description of Artificial Sequence: Synthetic oligonucleotide
uccgaaguaccgaguccac

SEQ ID NO: 349830 - RNA, 19 nt, Artificial Sequence
  Description of Artificial Sequence: Synthetic oligonucleotide
gaagguuaucaugggaacu

SEQ ID NO: 349831 - RNA, 19 nt, Artificial Sequence
  Description of Artificial Sequence: Synthetic oligonucleotide
ugaccagugagugcacgaa

SEQ ID NO: 349832 - RNA, 19 nt, Artificial Sequence
  Description of Artificial Sequence: Synthetic oligonucleotide
gugcacgaaggugagccag

SEQ ID NO: 349833 - RNA, 19 nt, Artificial Sequence
  Description of Artificial Sequence: Synthetic oligonucleotide
acagcggacuggguagacg

SEQ ID NO: 349834 - RNA, 19 nt, Artificial Sequence
  Description of Artificial Sequence: Synthetic oligonucleotide
cuggcaacgcuugcgguac

SEQ ID NO: 349835 - RNA, 19 nt, Artificial Sequence
  Description of Artificial Sequence: Synthetic oligonucleotide
agcuuucguacuggcacag

SEQ ID NO: 349836 - RNA, 19 nt, Artificial Sequence
  Description of Artificial Sequence: Synthetic oligonucleotide
gauggacguuugacgcugg

SEQ ID NO: 349837 - RNA, 19 nt, Artificial Sequence
  Description of Artificial Sequence: Synthetic oligonucleotide
agugcacgaaggugagcca

SEQ ID NO: 349838 - RNA, 19 nt, Artificial Sequence
  Description of Artificial Sequence: Synthetic oligonucleotide
uaccgcuggcugcagugac

SEQ ID NO: 349839 - RNA, 19 nt, Artificial Sequence
  Description of Artificial Sequence: Synthetic oligonucleotide
cccgugaugacacagucca

SEQ ID NO: 349840 - RNA, 19 nt, Artificial Sequence
  Description of Artificial Sequence: Synthetic oligonucleotide
cgaaguaccgaguccacug

SEQ ID NO: 349841 - RNA, 19 nt, Artificial Sequence
  Description of Artificial Sequence: Synthetic oligonucleotide
ggggacucaaacaaccuca

SEQ ID NO: 349842 - RNA, 19 nt, Artificial Sequence
  Description of Artificial Sequence: Synthetic oligonucleotide
cacgcucccgggcagcaag

SEQ ID NO: 349843 - RNA, 19 nt, Artificial Sequence
  Description of Artificial Sequence: Synthetic oligonucleotide
agcggugucaucagccaug

SEQ ID NO: 349844 - RNA, 19 nt, Artificial Sequence
  Description of Artificial Sequence: Synthetic oligonucleotide
cagaccaucagcgguguca

SEQ ID NO: 349845 - RNA, 19 nt, Artificial Sequence
  Description of Artificial Sequence: Synthetic oligonucleotide
gguuagugugguucccagc

SEQ ID NO: 349846 - RNA, 19 nt, Artificial Sequence
  Description of Artificial Sequence: Synthetic oligonucleotide
cauagacaccacgcuuccg

SEQ ID NO: 349847 - RNA, 19 nt, Artificial Sequence
  Description of Artificial Sequence: Synthetic oligonucleotide
gaccgacccuucaccagcg

SEQ ID NO: 349848 - RNA, 19 nt, Artificial Sequence
  Description of Artificial Sequence: Synthetic oligonucleotide
guaggugcgguuggugagc

SEQ ID NO: 349849 - RNA, 19 nt, Artificial Sequence
  Description of Artificial Sequence: Synthetic oligonucleotide
ccaaagcugauguaaggca

SEQ ID NO: 349850 - RNA, 19 nt, Artificial Sequence
  Description of Artificial Sequence: Synthetic oligonucleotide
cggauaccaaacaaugcag

SEQ ID NO: 349851 - RNA, 19 nt, Artificial Sequence
  Description of Artificial Sequence: Synthetic oligonucleotide
aguggucggucaaggggac

SEQ ID NO: 349852 - RNA, 19 nt, Artificial Sequence
  Description of Artificial Sequence: Synthetic oligonucleotide
ccuucccgggcgaagaaag

SEQ ID NO: 349853 - RNA, 19 nt, Artificial Sequence
  Description of Artificial Sequence: Synthetic oligonucleotide
ggcgaaguugucgauccag

SEQ ID NO: 349854 - RNA, 19 nt, Artificial Sequence
  Description of Artificial Sequence: Synthetic oligonucleotide
ggacguuugacgcuggagu

SEQ ID NO: 349855 - RNA, 19 nt, Artificial Sequence
  Description of Artificial Sequence: Synthetic oligonucleotide
ggcgaagccgcaccuuggg

SEQ ID NO: 349856 - RNA, 19 nt, Artificial Sequence
  Description of Artificial Sequence: Synthetic oligonucleotide
ccagggucgagccaggauc

SEQ ID NO: 349857 - RNA, 19 nt, Artificial Sequence
  Description of Artificial Sequence: Synthetic oligonucleotide
cuuccgccagccucguuuc

SEQ ID NO: 349858 - RNA, 19 nt, Artificial Sequence
  Description of Artificial Sequence: Synthetic oligonucleotide
acaggcgguagaacugguc

SEQ ID NO: 349859 - RNA, 19 nt, Artificial Sequence
  Description of Artificial Sequence: Synthetic oligonucleotide
uggucggucaaggggacua

SEQ ID NO: 349860 - RNA, 19 nt, Artificial Sequence
  Description of Artificial Sequence: Synthetic oligonucleotide
cuaccuccgcccgguaugg

SEQ ID NO: 349861 - RNA, 19 nt, Artificial Sequence
  Description of Artificial Sequence: Synthetic oligonucleotide
caugaggguccucggagga

SEQ ID NO: 349862 - RNA, 19 nt, Artificial Sequence
  Description of Artificial Sequence: Synthetic oligonucleotide
aggaucccagcgugcagga

SEQ ID NO: 349863 - RNA, 19 nt, Artificial Sequence
  Description of Artificial Sequence: Synthetic oligonucleotide
cugugacaccacucagcag

SEQ ID NO: 349864 - RNA, 19 nt, Artificial Sequence
  Description of Artificial Sequence: Synthetic oligonucleotide
gcacucagaccaucagcgg

SEQ ID NO: 349865 - RNA, 19 nt, Artificial Sequence
  Description of Artificial Sequence: Synthetic oligonucleotide
gcgaaguugucgauccagg

SEQ ID NO: 349866 - RNA, 19 nt, Artificial Sequence
  Description of Artificial Sequence: Synthetic oligonucleotide
augcaggaucccagcgugc

SEQ ID NO: 349867 - RNA, 19 nt, Artificial Sequence
  Description of Artificial Sequence: Synthetic oligonucleotide
ccuaauagaccgacccuuc

SEQ ID NO: 349868 - RNA, 19 nt, Artificial Sequence
  Description of Artificial Sequence: Synthetic oligonucleotide
ggguagacguagaagagaa

SEQ ID NO: 349869 - RNA, 19 nt, Artificial Sequence
  Description of Artificial Sequence: Synthetic oligonucleotide
guacuggcacagcgaugcg

SEQ ID NO: 349870 - RNA, 19 nt, Artificial Sequence
  Description of Artificial Sequence: Synthetic oligonucleotide
cugccgcuugacauagcug

SEQ ID NO: 349871 - RNA, 19 nt, Artificial Sequence
  Description of Artificial Sequence: Synthetic oligonucleotide
acugauucacgggcacuca

SEQ ID NO: 349872 - RNA, 19 nt, Artificial Sequence
  Description of Artificial Sequence: Synthetic oligonucleotide
cugcggauggucuguguga

SEQ ID NO: 349873 - RNA, 19 nt, Artificial Sequence
  Description of Artificial Sequence: Synthetic oligonucleotide
uggcacccaggugaaugag

SEQ ID NO: 349874 - RNA, 19 nt, Artificial Sequence
  Description of Artificial Sequence: Synthetic oligonucleotide
ugagugcacgaaggugagc

SEQ ID NO: 349875 - RNA, 19 nt, Artificial Sequence
  Description of Artificial Sequence: Synthetic oligonucleotide
ggcgcauacagggugaaaa

SEQ ID NO: 349876 - RNA, 19 nt, Artificial Sequence
  Description of Artificial Sequence: Synthetic oligonucleotide
gcagacggauaccaaacaa

SEQ ID NO: 349877 - RNA, 19 nt, Artificial Sequence
  Description of Artificial Sequence: Synthetic oligonucleotide
gcucgucacauacccuggg

SEQ ID NO: 349878 - RNA, 19 nt, Artificial Sequence
  Description of Artificial Sequence: Synthetic oligonucleotide
aguucuccugcugaacgua

SEQ ID NO: 349879 - RNA, 19 nt, Artificial Sequence
  Description of Artificial Sequence: Synthetic oligonucleotide
ucgacgcuguccccuucgu

SEQ ID NO: 349880 - RNA, 19 nt, Artificial Sequence
  Description of Artificial Sequence: Synthetic oligonucleotide
ccacgcuuccgaaguaccg

SEQ ID NO: 349881 - RNA, 19 nt, Artificial Sequence
  Description of Artificial Sequence: Synthetic oligonucleotide
caacgcuugcgguacaggu

SEQ ID NO: 349882 - RNA, 19 nt, Artificial Sequence
  Description of Artificial Sequence: Synthetic oligonucleotide
aaacgacucccaguccauu

SEQ ID NO: 349883 - RNA, 19 nt, Artificial Sequence
  Description of Artificial Sequence: Synthetic oligonucleotide
cacggccaagagcuugaag

SEQ ID NO: 349884 - RNA, 19 nt, Artificial Sequence
  Description of Artificial Sequence: Synthetic oligonucleotide
gcagcuaaaacgacuccca

SEQ ID NO: 349885 - RNA, 19 nt, Artificial Sequence
  Description of Artificial Sequence: Synthetic oligonucleotide
auggacguuugacgcugga

SEQ ID NO: 349886 - RNA, 19 nt, Artificial Sequence
  Description of Artificial Sequence: Synthetic oligonucleotide
gaccggucauugcguacac

SEQ ID NO: 349887 - RNA, 19 nt, Artificial Sequence
  Description of Artificial Sequence: Synthetic oligonucleotide
gcuuuucccgggcgaagag

SEQ ID NO: 349888 - RNA, 19 nt, Artificial Sequence
  Description of Artificial Sequence: Synthetic oligonucleotide
gguauggcaggaagauggc

SEQ ID NO: 349889 - RNA, 19 nt, Artificial Sequence
  Description of Artificial Sequence: Synthetic oligonucleotide
cauagcugucaauacguuu

SEQ ID NO: 349890 - RNA, 19 nt, Artificial Sequence
  Description of Artificial Sequence: Synthetic oligonucleotide
caccacgcuuccgaaguac

SEQ ID NO: 349891 - RNA, 19 nt, Artificial Sequence
  Description of Artificial Sequence: Synthetic oligonucleotide
gaaggcacgccagggucga

SEQ ID NO: 349892 - RNA, 19 nt, Artificial Sequence
  Description of Artificial Sequence: Synthetic oligonucleotide
acuucgacgcuguccccuu

SEQ ID NO: 349893 - RNA, 19 nt, Artificial Sequence
  Description of Artificial Sequence: Synthetic oligonucleotide
aucccagcgugcaggaaga

SEQ ID NO: 349894 - RNA, 19 nt, Artificial Sequence
  Description of Artificial Sequence: Synthetic oligonucleotide
gcuaugcggugccagccug

SEQ ID NO: 349895 - RNA, 19 nt, Artificial Sequence
  Description of Artificial Sequence: Synthetic oligonucleotide
ccuaccuccgcccgguaug

SEQ ID NO: 349896 - RNA, 19 nt, Artificial Sequence
  Description of Artificial Sequence: Synthetic oligonucleotide
acguuuccgguaggugcgg

SEQ ID NO: 349897 - RNA, 19 nt, Artificial Sequence
  Description of Artificial Sequence: Synthetic oligonucleotide
accuaccuccgcccgguau

SEQ ID NO: 349898 - RNA, 19 nt, Artificial Sequence
  Description of Artificial Sequence: Synthetic oligonucleotide
ggaagugaucucacaccug

SEQ ID NO: 349899 - RNA, 19 nt, Artificial Sequence
  Description of Artificial Sequence: Synthetic oligonucleotide
ccggaagcucaucuuggcc

SEQ ID NO: 349900 - RNA, 19 nt, Artificial Sequence
  Description of Artificial Sequence: Synthetic oligonucleotide
cagcggacuggguagacgu

SEQ ID NO: 349901 - RNA, 19 nt, Artificial Sequence
  Description of Artificial Sequence: Synthetic oligonucleotide
gugauggacguuugacgcu

SEQ ID NO: 349902 - RNA, 19 nt, Artificial Sequence
  Description of Artificial Sequence: Synthetic oligonucleotide
ucagaccaucagcgguguc

SEQ ID NO: 349903 - RNA, 19 nt, Artificial Sequence
  Description of Artificial Sequence: Synthetic oligonucleotide
ggcucgucacauacccugg

SEQ ID NO: 349904 - RNA, 19 nt, Artificial Sequence
  Description of Artificial Sequence: Synthetic oligonucleotide
cuccgcccgguauggcagg

SEQ ID NO: 349905 - RNA, 19 nt, Artificial Sequence
  Description of Artificial Sequence: Synthetic oligonucleotide
caaaccauagggccgcuuu

SEQ ID NO: 349906 - RNA, 19 nt, Artificial Sequence
  Description of Artificial Sequence: Synthetic oligonucleotide
cagcgcugccucugauggg

SEQ ID NO: 349907 - RNA, 19 nt, Artificial Sequence
  Description of Artificial Sequence: Synthetic oligonucleotide
ccauacugccaacguagac

SEQ ID NO: 349908 - RNA, 19 nt, Artificial Sequence
  Description of Artificial Sequence: Synthetic oligonucleotide
ugacuaccuccuggcgaag

SEQ ID NO: 349909 - RNA, 19 nt, Artificial Sequence
  Description of Artificial Sequence: Synthetic oligonucleotide
acauagcugucaauacguu

SEQ ID NO: 349910 - RNA, 19 nt, Artificial Sequence
  Description of Artificial Sequence: Synthetic oligonucleotide
gggaccuaccuccgcccgg

SEQ ID NO: 349911 - RNA, 19 nt, Artificial Sequence
  Description of Artificial Sequence: Synthetic oligonucleotide
cucccgggaagugaucuca

SEQ ID NO: 349912 - RNA, 19 nt, Artificial Sequence
  Description of Artificial Sequence: Synthetic oligonucleotide
ucccgggcgaagagcuuuc

SEQ ID NO: 349913 - RNA, 19 nt, Artificial Sequence
  Description of Artificial Sequence: Synthetic oligonucleotide
gccucguuucucccagucc

SEQ ID NO: 349914 - RNA, 19 nt, Artificial Sequence
  Description of Artificial Sequence: Synthetic oligonucleotide
cuucccgggcgaagaaaga

SEQ ID NO: 349915 - RNA, 19 nt, Artificial Sequence
  Description of Artificial Sequence: Synthetic oligonucleotide
guaaagugccaucccuaau

SEQ ID NO: 349916 - RNA, 19 nt, Artificial Sequence
  Description of Artificial Sequence: Synthetic oligonucleotide
guagacgagcacuccuccu

SEQ ID NO: 349917 - RNA, 19 nt, Artificial Sequence
  Description of Artificial Sequence: Synthetic oligonucleotide
ggcuaaugugcugcccucc

SEQ ID NO: 349918 - RNA, 19 nt, Artificial Sequence
  Description of Artificial Sequence: Synthetic oligonucleotide
ccaucccuaauagaccgac

SEQ ID NO: 349919 - RNA, 19 nt, Artificial Sequence
  Description of Artificial Sequence: Synthetic oligonucleotide
ccgcaggacugucaucugg

SEQ ID NO: 349920 - RNA, 19 nt, Artificial Sequence
  Description of Artificial Sequence: Synthetic oligonucleotide
cugugugauggacguuuga

SEQ ID NO: 349921 - RNA, 19 nt, Artificial Sequence
  Description of Artificial Sequence: Synthetic oligonucleotide
agcgaugcgcugaccccuc

SEQ ID NO: 349922 - RNA, 19 nt, Artificial Sequence
  Description of Artificial Sequence: Synthetic oligonucleotide
cguuugacgcuggaguacc

SEQ ID NO: 349923 - RNA, 19 nt, Artificial Sequence
  Description of Artificial Sequence: Synthetic oligonucleotide
gcccggaagcucaucuugg

SEQ ID NO: 349924 - RNA, 19 nt, Artificial Sequence
  Description of Artificial Sequence: Synthetic oligonucleotide
gccacugauucacgggcac

SEQ ID NO: 349925 - RNA, 19 nt, Artificial Sequence
  Description of Artificial Sequence: Synthetic oligonucleotide
gcguacacagcaagcugag

SEQ ID NO: 349926 - RNA, 19 nt, Artificial Sequence
  Description of Artificial Sequence: Synthetic oligonucleotide
gccccacauagaguggagg

SEQ ID NO: 349927 - RNA, 19 nt, Artificial Sequence
  Description of Artificial Sequence: Synthetic oligonucleotide
uggcaacgcuugcgguaca

SEQ ID NO: 349928 - RNA, 19 nt, Artificial Sequence
  Description of Artificial Sequence: Synthetic oligonucleotide
gcaauaccauagaugcaca

SEQ ID NO: 349929 - RNA, 19 nt, Artificial Sequence
  Description of Artificial Sequence: Synthetic oligonucleotide
cacccauacugccaacgua

SEQ ID NO: 349930 - RNA, 19 nt, Artificial Sequence
  Description of Artificial Sequence: Synthetic oligonucleotide
gggaugaaugggccacuuc

SEQ ID NO: 349931 - RNA, 19 nt, Artificial Sequence
  Description of Artificial Sequence: Synthetic oligonucleotide
gggucgagccaggaucugc

SEQ ID NO: 349932 - RNA, 19 nt, Artificial Sequence
  Description of Artificial Sequence: Synthetic oligonucleotide
guuugacgcuggaguacca

SEQ ID NO: 349933 - RNA, 19 nt, Artificial Sequence
  Description of Artificial Sequence: Synthetic oligonucleotide
ggcgaagagcuuucguacu

SEQ ID NO: 349934 - RNA, 19 nt, Artificial Sequence
  Description of Artificial Sequence: Synthetic oligonucleotide
cuucgacgcuguccccuuc

SEQ ID NO: 349935 - RNA, 19 nt, Artificial Sequence
  Description of Artificial Sequence: Synthetic oligonucleotide
aaggcacgccagggucgag

SEQ ID NO: 349936 - RNA, 19 nt, Artificial Sequence
  Description of Artificial Sequence: Synthetic oligonucleotide
gccagcuagcagccccagg

SEQ ID NO: 349937 - RNA, 19 nt, Artificial Sequence
  Description of Artificial Sequence: Synthetic oligonucleotide
cacagcggacuggguagac

SEQ ID NO: 349938 - RNA, 19 nt, Artificial Sequence
  Description of Artificial Sequence: Synthetic oligonucleotide
gcgggaccuaccuccgccc

SEQ ID NO: 349939 - RNA, 19 nt, Artificial Sequence
  Description of Artificial Sequence: Synthetic oligonucleotide
cacgaaggugagccaguaa

SEQ ID NO: 349940 - RNA, 19 nt, Artificial Sequence
  Description of Artificial Sequence: Synthetic oligonucleotide
ggucggucaaggggacuag

SEQ ID NO: 349941 - RNA, 19 nt, Artificial Sequence
  Description of Artificial Sequence: Synthetic oligonucleotide
aguccauaugagggugguu

SEQ ID NO: 349942 - RNA, 19 nt, Artificial Sequence
  Description of Artificial Sequence: Synthetic oligonucleotide
gggcgaagaaagacguauc

SEQ ID NO: 349943 - RNA, 19 nt, Artificial Sequence
  Description of Artificial Sequence: Synthetic oligonucleotide
agguugccugugacaccac

SEQ ID NO: 349944 - RNA, 19 nt, Artificial Sequence
  Description of Artificial Sequence: Synthetic oligonucleotide
acuugucggugaaggggau

SEQ ID NO: 349945 - RNA, 19 nt, Artificial Sequence
  Description of Artificial Sequence: Synthetic oligonucleotide
cugcagugacggaugcucu

SEQ ID NO: 349946 - RNA, 19 nt, Artificial Sequence
  Description of Artificial Sequence: Synthetic oligonucleotide
gcccgugaugacacagucc

SEQ ID NO: 349947 - RNA, 19 nt, Artificial Sequence
  Description of Artificial Sequence: Synthetic oligonucleotide
uggcgcauacagggugaaa

SEQ ID NO: 349948 - RNA, 19 nt, Artificial Sequence
  Description of Artificial Sequence: Synthetic oligonucleotide
gcaggcguaaagacuucga

SEQ ID NO: 349949 - RNA, 19 nt, Artificial Sequence
  Description of Artificial Sequence: Synthetic oligonucleotide
gcuuccgccagccucguuu

SEQ ID NO: 349950 - RNA, 19 nt, Artificial Sequence
  Description of Artificial Sequence: Synthetic oligonucleotide
guccagccgcacugacuac

SEQ ID NO: 349951 - RNA, 19 nt, Artificial Sequence
  Description of Artificial Sequence: Synthetic oligonucleotide
agggucgagccaggaucug

SEQ ID NO: 349952 - RNA, 19 nt, Artificial Sequence
  Description of Artificial Sequence: Synthetic oligonucleotide
gcuuucguacuggcacagc

SEQ ID NO: 349953 - RNA, 19 nt, Artificial Sequence
  Description of Artificial Sequence: Synthetic oligonucleotide
ugaccccuccuggguccag

SEQ ID NO: 349954 - RNA, 19 nt, Artificial Sequence
  Description of Artificial Sequence: Synthetic oligonucleotide
uaccuccgcccgguauggc

SEQ ID NO: 349955 - RNA, 19 nt, Artificial Sequence
  Description of Artificial Sequence: Synthetic oligonucleotide
cacagacgucauccaugca

SEQ ID NO: 349956 - RNA, 19 nt, Artificial Sequence
  Description of Artificial Sequence: Synthetic oligonucleotide
gcgguuggugagccuuccc

SEQ ID NO: 349957 - RNA, 19 nt, Artificial Sequence
  Description of Artificial Sequence: Synthetic oligonucleotide
cccauacugccaacguaga

SEQ ID NO: 349958 - RNA, 19 nt, Artificial Sequence
  Description of Artificial Sequence: Synthetic oligonucleotide
gcggauggucugugugaug

SEQ ID NO: 349959 - RNA, 19 nt, Artificial Sequence
  Description of Artificial Sequence: Synthetic oligonucleotide
gucccgcaggacugucauc

SEQ ID NO: 349960 - RNA, 19 nt, Artificial Sequence
  Description of Artificial Sequence: Synthetic oligonucleotide
cgcccgguauggcaggaag

SEQ ID NO: 349961 - RNA, 19 nt, Artificial Sequence
  Description of Artificial Sequence: Synthetic oligonucleotide
ggccacugauucacgggca

SEQ ID NO: 349962 - RNA, 19 nt, Artificial Sequence
  Description of Artificial Sequence: Synthetic oligonucleotide
ccgguauggcaggaagaug

SEQ ID NO: 349963 - RNA, 19 nt, Artificial Sequence
  Description of Artificial Sequence: Synthetic oligonucleotide
ggcuaugcggugccagccu

SEQ ID NO: 349964 - RNA, 19 nt, Artificial Sequence
  Description of Artificial Sequence: Synthetic oligonucleotide
cccgggcgaagaaagacgu

SEQ ID NO: 349965 - RNA, 19 nt, Artificial Sequence
  Description of Artificial Sequence: Synthetic oligonucleotide
ggugcgguuggugagccuu

SEQ ID NO: 349966 - RNA, 19 nt, Artificial Sequence
  Description of Artificial Sequence: Synthetic oligonucleotide
cgggcgaagagcuuucgua

SEQ ID NO: 349967 - RNA, 19 nt, Artificial Sequence
  Description of Artificial Sequence: Synthetic oligonucleotide
gcguaaagacuucgacgcu

SEQ ID NO: 349968 - RNA, 19 nt, Artificial Sequence
  Description of Artificial Sequence: Synthetic oligonucleotide
cacuggcuagguugccugu

SEQ ID NO: 349969 - RNA, 19 nt, Artificial Sequence
  Description of Artificial Sequence: Synthetic oligonucleotide
cagcgaugcgcugaccccu

SEQ ID NO: 349970 - RNA, 19 nt, Artificial Sequence
  Description of Artificial Sequence: Synthetic oligonucleotide
guggagucucagugcuggu

SEQ ID NO: 349971 - RNA, 19 nt, Artificial Sequence
  Description of Artificial Sequence: Synthetic oligonucleotide
cgggaccuaccuccgcccg

SEQ ID NO: 349972 - RNA, 19 nt, Artificial Sequence
  Description of Artificial Sequence: Synthetic oligonucleotide
cucguuucucccaguccuu

SEQ ID NO: 349973 - RNA, 19 nt, Artificial Sequence
  Description of Artificial Sequence: Synthetic oligonucleotide
agcggacuggguagacgua

SEQ ID NO: 349974 - RNA, 19 nt, Artificial Sequence
  Description of Artificial Sequence: Synthetic oligonucleotide
cacaggcgguagaacuggu

SEQ ID NO: 349975 - RNA, 19 nt, Artificial Sequence
  Description of Artificial Sequence: Synthetic oligonucleotide
gucggucaaggggacuagu

SEQ ID NO: 349976 - RNA, 19 nt, Artificial Sequence
  Description of Artificial Sequence: Synthetic oligonucleotide
gcgaugcgcugaccccucc

SEQ ID NO: 349977 - RNA, 19 nt, Artificial Sequence
  Description of Artificial Sequence: Synthetic oligonucleotide
gcccgguauggcaggaaga

SEQ ID NO: 349978 - RNA, 19 nt, Artificial Sequence
  Description of Artificial Sequence: Synthetic oligonucleotide
cuggcgcauacagggugaa

SEQ ID NO: 349979 - RNA, 19 nt, Artificial Sequence
  Description of Artificial Sequence: Synthetic oligonucleotide
augcugcgagaagcccaca

SEQ ID NO: 349980 - RNA, 19 nt, Artificial Sequence
  Description of Artificial Sequence: Synthetic oligonucleotide
gggcgaaguugucgaucca

SEQ ID NO: 349981 - RNA, 19 nt, Artificial Sequence
  Description of Artificial Sequence: Synthetic oligonucleotide
caccacucagcagguaaau

SEQ ID NO: 349982 - RNA, 19 nt, Artificial Sequence
  Description of Artificial Sequence: Synthetic oligonucleotide
gccaucccuaauagaccga

SEQ ID NO: 349983 - RNA, 19 nt, Artificial Sequence
  Description of Artificial Sequence: Synthetic oligonucleotide
ccgguaggugcgguuggug

SEQ ID NO: 349984 - RNA, 19 nt, Artificial Sequence
  Description of Artificial Sequence: Synthetic oligonucleotide
gcugaacguauuugacauu

SEQ ID NO: 349985 - RNA, 19 nt, Artificial Sequence
  Description of Artificial Sequence: Synthetic oligonucleotide
gccacaugaaguggucggu

SEQ ID NO: 349986 - RNA, 19 nt, Artificial Sequence
  Description of Artificial Sequence: Synthetic oligonucleotide
gaccuaccuccgcccggua

SEQ ID NO: 349987 - RNA, 19 nt, Artificial Sequence
  Description of Artificial Sequence: Synthetic oligonucleotide
cccuaauagaccgacccuu

SEQ ID NO: 349988 - RNA, 19 nt, Artificial Sequence
  Description of Artificial Sequence: Synthetic oligonucleotide
ccccucaugaagucacagu

SEQ ID NO: 349989 - RNA, 19 nt, Artificial Sequence
  Description of Artificial Sequence: Synthetic oligonucleotide
gggccggcccgugaugaca

SEQ ID NO: 349990 - RNA, 19 nt, Artificial Sequence
  Description of Artificial Sequence: Synthetic oligonucleotide
ggaccuaccuccgcccggu

SEQ ID NO: 349991 - RNA, 19 nt, Artificial Sequence
  Description of Artificial Sequence: Synthetic oligonucleotide
ccgcuuuucccgggcgaag

SEQ ID NO: 349992 - RNA, 19 nt, Artificial Sequence
  Description of Artificial Sequence: Synthetic oligonucleotide
gccgcuuuucccgggcgaa

SEQ ID NO: 349993 - RNA, 19 nt, Artificial Sequence
  Description of Artificial Sequence: Synthetic oligonucleotide
cgcugaccccuccuggguc

SEQ ID NO: 349994 - RNA, 19 nt, Artificial Sequence
  Description of Artificial Sequence: Synthetic oligonucleotide
gccagaccggucauugcgu

SEQ ID NO: 349995 - RNA, 19 nt, Artificial Sequence
  Description of Artificial Sequence: Synthetic oligonucleotide
agacggccuggaagaugau

SEQ ID NO: 349996 - RNA, 19 nt, Artificial Sequence
  Description of Artificial Sequence: Synthetic oligonucleotide
cccgaaugaccugagguuu

SEQ ID NO: 349997 - RNA, 19 nt, Artificial Sequence
  Description of Artificial Sequence: Synthetic oligonucleotide
gccaugcggaaggcccggc

SEQ ID NO: 349998 - RNA, 19 nt, Artificial Sequence
  Description of Artificial Sequence: Synthetic oligonucleotide
cuguggguccuggcgcaua

SEQ ID NO: 349999 - RNA, 19 nt, Artificial Sequence
  Description of Artificial Sequence: Synthetic oligonucleotide
cccgguauggcaggaagau

SEQ ID NO: 350000 - RNA, 19 nt, Artificial Sequence
  Description of Artificial Sequence: Synthetic oligonucleotide
cagcccggaagcucaucuu

SEQ ID NO: 350001 - RNA, 19 nt, Artificial Sequence
  Description of Artificial Sequence: Synthetic oligonucleotide
gcacagcgaugcgcugacc

SEQ ID NO: 350002 - RNA, 19 nt, Artificial Sequence
  Description of Artificial Sequence: Synthetic oligonucleotide
guggucggucaaggggacu

SEQ ID NO: 350003 - RNA, 19 nt, Artificial Sequence
  Description of Artificial Sequence: Synthetic oligonucleotide
cccggccacgggccagagg

SEQ ID NO: 350004 - RNA, 19 nt, Artificial Sequence
  Description of Artificial Sequence: Synthetic oligonucleotide
cgggcgaagaaagacguau

SEQ ID NO: 350005 - RNA, 19 nt, Artificial Sequence
  Description of Artificial Sequence: Synthetic oligonucleotide
cggggcuaaugugcugccc

SEQ ID NO: 350006 - RNA, 19 nt, Artificial Sequence
  Description of Artificial Sequence: Synthetic oligonucleotide
ccgacccuucaccagcgcu

SEQ ID NO: 350007 - RNA, 19 nt, Artificial Sequence
  Description of Artificial Sequence: Synthetic oligonucleotide
gccagggucgagccaggau

SEQ ID NO: 350008 - RNA, 19 nt, Artificial Sequence
  Description of Artificial Sequence: Synthetic oligonucleotide
gcgcugaccccuccugggu

SEQ ID NO: 350009 - RNA, 19 nt, Artificial Sequence
  Description of Artificial Sequence: Synthetic oligonucleotide
ccgaaugaccugagguuuu

SEQ ID NO: 350010 - RNA, 19 nt, Artificial Sequence
  Description of Artificial Sequence: Synthetic oligonucleotide
cagccucguuucucccagu

SEQ ID NO: 350011 - RNA, 19 nt, Artificial Sequence
  Description of Artificial Sequence: Synthetic oligonucleotide
ccgaaguaccgaguccacu

SEQ ID NO: 350012 - RNA, 19 nt, Artificial Sequence
  Description of Artificial Sequence: Synthetic oligonucleotide
gcgacacguuguccuggcu

SEQ ID NO: 350013 - RNA, 19 nt, Artificial Sequence
  Description of Artificial Sequence: Synthetic oligonucleotide
ccgggcgaagaaagacgua

SEQ ID NO: 350014 - RNA, 19 nt, Artificial Sequence
  Description of Artificial Sequence: Synthetic oligonucleotide
ccccugcggauggucugug

SEQ ID NO: 350015 - RNA, 19 nt, Artificial Sequence
  Description of Artificial Sequence: Synthetic oligonucleotide
ccacugauucacgggcacu

SEQ ID NO: 350016 - RNA, 19 nt, Artificial Sequence
  Description of Artificial Sequence: Synthetic oligonucleotide
ccauaccgcuggcugcagu

SEQ ID NO: 350017 - RNA, 19 nt, Artificial Sequence
  Description of Artificial Sequence: Synthetic oligonucleotide
ccgggcgaagagcuuucgu

SEQ ID NO: 350018 - RNA, 19 nt, Artificial Sequence
  Description of Artificial Sequence: Synthetic oligonucleotide
cgacucccaguccauuuau

SEQ ID NO: 350019 - RNA, 19 nt, Artificial Sequence
  Description of Artificial Sequence: Synthetic oligonucleotide
ggucugugugauggacguu

SEQ ID NO: 350020 - RNA, 19 nt, Artificial Sequence
  Description of Artificial Sequence: Synthetic oligonucleotide
cgcuuccgaaguaccgagu

SEQ ID NO: 350021 - RNA, 19 nt, Artificial Sequence
  Description of Artificial Sequence: Synthetic oligonucleotide
gcccggccacgggccagag

SEQ ID NO: 350022 - RNA, 19 nt, Artificial Sequence
  Description of Artificial Sequence: Synthetic oligonucleotide
cgacgcuguccccuucgua

SEQ ID NO: 350023 - RNA, 19 nt, Artificial Sequence
  Description of Artificial Sequence: Synthetic oligonucleotide
ccaaaccauagggccgcuu

SEQ ID NO: 350024 - RNA, 19 nt, Artificial Sequence
  Description of Artificial Sequence: Synthetic oligonucleotide
cacgggccagagggucuau

SEQ ID NO: 350025 - RNA, 19 nt, Artificial Sequence
  Description of Artificial Sequence: Synthetic oligonucleotide
ccgcccgguauggcaggaa

SEQ ID NO: 350026 - RNA, 19 nt, Artificial Sequence
  Description of Artificial Sequence: Synthetic oligonucleotide
acuaguauuuaauagagag

SEQ ID NO: 350027 - RNA, 19 nt, Artificial Sequence
  Description of Artificial Sequence: Synthetic oligonucleotide
ugaauagucgccuuucugg

SEQ ID NO: 350028 - RNA, 19 nt, Artificial Sequence
  Description of Artificial Sequence: Synthetic oligonucleotide
uuagacgugacacugcugc

SEQ ID NO: 350029 - RNA, 19 nt, Artificial Sequence
  Description of Artificial Sequence: Synthetic oligonucleotide
ugagaaauuucacaagcgc

SEQ ID NO: 350030 - RNA, 19 nt, Artificial Sequence
  Description of Artificial Sequence: Synthetic oligonucleotide
ucgaaagggucaaugaggg

SEQ ID NO: 350031 - RNA, 19 nt, Artificial Sequence
  Description of Artificial Sequence: Synthetic oligonucleotide
aaggacuguacauaccagg

SEQ ID NO: 350032 - RNA, 19 nt, Artificial Sequence
  Description of Artificial Sequence: Synthetic oligonucleotide
aauuucacaagcgcugagc

SEQ ID NO: 350033 - RNA, 19 nt, Artificial Sequence
  Description of Artificial Sequence: Synthetic oligonucleotide
uuucgugcaaaauaguuga

SEQ ID NO: 350034 - RNA, 19 nt, Artificial Sequence
  Description of Artificial Sequence: Synthetic oligonucleotide
ucagggauuucuaacagca

SEQ ID NO: 350035 - RNA, 19 nt, Artificial Sequence
  Description of Artificial Sequence: Synthetic oligonucleotide
uauuuaauagagagccggg

SEQ ID NO: 350036 - RNA, 19 nt, Artificial Sequence
  Description of Artificial Sequence: Synthetic oligonucleotide
aaauagaacagaaguccgc

SEQ ID NO: 350037 - RNA, 19 nt, Artificial Sequence
  Description of Artificial Sequence: Synthetic oligonucleotide
aauagucgccuuucuggcc

SEQ ID NO: 350038 - RNA, 19 nt, Artificial Sequence
  Description of Artificial Sequence: Synthetic oligonucleotide
uguaccaguaaccaaucca

SEQ ID NO: 350039 - RNA, 19 nt, Artificial Sequence
  Description of Artificial Sequence: Synthetic oligonucleotide
ucugguagaguguagaaaa

SEQ ID NO: 350040 - RNA, 19 nt, Artificial Sequence
  Description of Artificial Sequence: Synthetic oligonucleotide
acacgauuaacuuccuggc

SEQ ID NO: 350041 - RNA, 19 nt, Artificial Sequence
  Description of Artificial Sequence: Synthetic oligonucleotide
guuucaacgccucugcugg

SEQ ID NO: 350042 - RNA, 19 nt, Artificial Sequence
  Description of Artificial Sequence: Synthetic oligonucleotide
uugcuuucgugcaaaauag

SEQ ID NO: 350043 - RNA, 19 nt, Artificial Sequence
  Description of Artificial Sequence: Synthetic oligonucleotide
aaacgagccaaucuggccu

SEQ ID NO: 350044 - RNA, 19 nt, Artificial Sequence
  Description of Artificial Sequence: Synthetic oligonucleotide
uuuaauagagagccgggac

SEQ ID NO: 350045 - RNA, 19 nt, Artificial Sequence
  Description of Artificial Sequence: Synthetic oligonucleotide
uuaauagagagccgggaca

SEQ ID NO: 350046 - RNA, 19 nt, Artificial Sequence
  Description of Artificial Sequence: Synthetic oligonucleotide
aaauaguugaccggaagug

SEQ ID NO: 350047 - RNA, 19 nt, Artificial Sequence
  Description of Artificial Sequence: Synthetic oligonucleotide
aggggaagcaguccaaacc

SEQ ID NO: 350048 - RNA, 19 nt, Artificial Sequence
  Description of Artificial Sequence: Synthetic oligonucleotide
agaggaugggacuauaucu

SEQ ID NO: 350049 - RNA, 19 nt, Artificial Sequence
  Description of Artificial Sequence: Synthetic oligonucleotide
augaguaugggaaaucucg

SEQ ID NO: 350050 - RNA, 19 nt, Artificial Sequence
  Description of Artificial Sequence: Synthetic oligonucleotide
aaaguggacaugcuuauuu

SEQ ID NO: 350051 - RNA, 19 nt, Artificial Sequence
  Description of Artificial Sequence: Synthetic oligonucleotide
guaugggaaaucucgagag

SEQ ID NO: 350052 - RNA, 19 nt, Artificial Sequence
  Description of Artificial Sequence: Synthetic oligonucleotide
uucagcuuagaguccaggg

SEQ ID NO: 350053 - RNA, 19 nt, Artificial Sequence
  Description of Artificial Sequence: Synthetic oligonucleotide
aaaacggugcacuaguauu

SEQ ID NO: 350054 - RNA, 19 nt, Artificial Sequence
  Description of Artificial Sequence: Synthetic oligonucleotide
gauguugagguagcgaagg

SEQ ID NO: 350055 - RNA, 19 nt, Artificial Sequence
  Description of Artificial Sequence: Synthetic oligonucleotide
cuugauacaggccacggac

SEQ ID NO: 350056 - RNA, 19 nt, Artificial Sequence
  Description of Artificial Sequence: Synthetic oligonucleotide
uccaaauagaacagaaguc

SEQ ID NO: 350057 - RNA, 19 nt, Artificial Sequence
  Description of Artificial Sequence: Synthetic oligonucleotide
agagccgggacauuguuuc

SEQ ID NO: 350058 - RNA, 19 nt, Artificial Sequence
  Description of Artificial Sequence: Synthetic oligonucleotide
aaccugaucuggcuggagg

SEQ ID NO: 350059 - RNA, 19 nt, Artificial Sequence
  Description of Artificial Sequence: Synthetic oligonucleotide
ugagagguuuccauggagc

SEQ ID NO: 350060 - RNA, 19 nt, Artificial Sequence
  Description of Artificial Sequence: Synthetic oligonucleotide
aaucucgagaggaugggac

SEQ ID NO: 350061 - RNA, 19 nt, Artificial Sequence
  Description of Artificial Sequence: Synthetic oligonucleotide
ugcuacuuugucauacuag

SEQ ID NO: 350062 - RNA, 19 nt, Artificial Sequence
  Description of Artificial Sequence: Synthetic oligonucleotide
cuuucgugcaaaauaguug

SEQ ID NO: 350063 - RNA, 19 nt, Artificial Sequence
  Description of Artificial Sequence: Synthetic oligonucleotide
ugcaaaauaguugaccgga

SEQ ID NO: 350064 - RNA, 19 nt, Artificial Sequence
  Description of Artificial Sequence: Synthetic oligonucleotide
uguguuucaacgccucugc

SEQ ID NO: 350065 - RNA, 19 nt, Artificial Sequence
  Description of Artificial Sequence: Synthetic oligonucleotide
uaugggaaaucucgagagg

SEQ ID NO: 350066 - RNA, 19 nt, Artificial Sequence
  Description of Artificial Sequence: Synthetic oligonucleotide
caaacugauucucuguacc

SEQ ID NO: 350067 - RNA, 19 nt, Artificial Sequence
  Description of Artificial Sequence: Synthetic oligonucleotide
ugaauaaggaaggcgcagg

SEQ ID NO: 350068 - RNA, 19 nt, Artificial Sequence
  Description of Artificial Sequence: Synthetic oligonucleotide
cugugaguugcucauaggc

SEQ ID NO: 350069 - RNA, 19 nt, Artificial Sequence
  Description of Artificial Sequence: Synthetic oligonucleotide
aaguuucugaauagucgcc

SEQ ID NO: 350070 - RNA, 19 nt, Artificial Sequence
  Description of Artificial Sequence: Synthetic oligonucleotide
auuaugggguuccugggag

SEQ ID NO: 350071 - RNA, 19 nt, Artificial Sequence
  Description of Artificial Sequence: Synthetic oligonucleotide
uuauuugauguggaguugc

SEQ ID NO: 350072 - RNA, 19 nt, Artificial Sequence
  Description of Artificial Sequence: Synthetic oligonucleotide
uggcauaaacugaacagga

SEQ ID NO: 350073 - RNA, 19 nt, Artificial Sequence
  Description of Artificial Sequence: Synthetic oligonucleotide
auauuaugggguuccuggg

SEQ ID NO: 350074 - RNA, 19 nt, Artificial Sequence
  Description of Artificial Sequence: Synthetic oligonucleotide
gaauagucgccuuucuggc

SEQ ID NO: 350075 - RNA, 19 nt, Artificial Sequence
  Description of Artificial Sequence: Synthetic oligonucleotide
aggugagucgucuuccucg

SEQ ID NO: 350076 - RNA, 19 nt, Artificial Sequence
  Description of Artificial Sequence: Synthetic oligonucleotide
uuucuggccaucaggaagu

SEQ ID NO: 350077 - RNA, 19 nt, Artificial Sequence
  Description of Artificial Sequence: Synthetic oligonucleotide
agugaauccacaaaugaga

SEQ ID NO: 350078 - RNA, 19 nt, Artificial Sequence
  Description of Artificial Sequence: Synthetic oligonucleotide
aguaugggaaaucucgaga

SEQ ID NO: 350079 - RNA, 19 nt, Artificial Sequence
  Description of Artificial Sequence: Synthetic oligonucleotide
cuccaagagcauuauagag

SEQ ID NO: 350080 - RNA, 19 nt, Artificial Sequence
  Description of Artificial Sequence: Synthetic oligonucleotide
aguugaaugugcugcuccg

SEQ ID NO: 350081 - RNA, 19 nt, Artificial Sequence
  Description of Artificial Sequence: Synthetic oligonucleotide
gaguacuggauccgggugg

SEQ ID NO: 350082 - RNA, 19 nt, Artificial Sequence
  Description of Artificial Sequence: Synthetic oligonucleotide
uguuggcaaacugagcccg

SEQ ID NO: 350083 - RNA, 19 nt, Artificial Sequence
  Description of Artificial Sequence: Synthetic oligonucleotide
ugggaguugaaugugcugc

SEQ ID NO: 350084 - RNA, 19 nt, Artificial Sequence
  Description of Artificial Sequence: Synthetic oligonucleotide
guagagaagagcaagccac

SEQ ID NO: 350085 - RNA, 19 nt, Artificial Sequence
  Description of Artificial Sequence: Synthetic oligonucleotide
ucuuagacgugacacugcu

SEQ ID NO: 350086 - RNA, 19 nt, Artificial Sequence
  Description of Artificial Sequence: Synthetic oligonucleotide
auacuagagagccaggcaa

SEQ ID NO: 350087 - RNA, 19 nt, Artificial Sequence
  Description of Artificial Sequence: Synthetic oligonucleotide
uauuaugggguuccuggga

SEQ ID NO: 350088 - RNA, 19 nt, Artificial Sequence
  Description of Artificial Sequence: Synthetic oligonucleotide
gugcacuaguauuuaauag

SEQ ID NO: 350089 - RNA, 19 nt, Artificial Sequence
  Description of Artificial Sequence: Synthetic oligonucleotide
aggacgguugaguaggaag

SEQ ID NO: 350090 - RNA, 19 nt, Artificial Sequence
  Description of Artificial Sequence: Synthetic oligonucleotide
cuggcauaaacugaacagg

SEQ ID NO: 350091 - RNA, 19 nt, Artificial Sequence
  Description of Artificial Sequence: Synthetic oligonucleotide
guagcgaaggucauagagg

SEQ ID NO: 350092 - RNA, 19 nt, Artificial Sequence
  Description of Artificial Sequence: Synthetic oligonucleotide
cuauaucuggagcuagagg

SEQ ID NO: 350093 - RNA, 19 nt, Artificial Sequence
  Description of Artificial Sequence: Synthetic oligonucleotide
ugggacuauaucuggagcu

SEQ ID NO: 350094 - RNA, 19 nt, Artificial Sequence
  Description of Artificial Sequence: Synthetic oligonucleotide
ucggggagaacucuccucc

SEQ ID NO: 350095 - RNA, 19 nt, Artificial Sequence
  Description of Artificial Sequence: Synthetic oligonucleotide
aguuguguggccuggagau

SEQ ID NO: 350096 - RNA, 19 nt, Artificial Sequence
  Description of Artificial Sequence: Synthetic oligonucleotide
agcaguuccaccaaacgag

SEQ ID NO: 350097 - RNA, 19 nt, Artificial Sequence
  Description of Artificial Sequence: Synthetic oligonucleotide
gaguugaaugugcugcucc

SEQ ID NO: 350098 - RNA, 19 nt, Artificial Sequence
  Description of Artificial Sequence: Synthetic oligonucleotide
cacaauacacugcuucagg

SEQ ID NO: 350099 - RNA, 19 nt, Artificial Sequence
  Description of Artificial Sequence: Synthetic oligonucleotide
aggaugggacuauaucugg

SEQ ID NO: 350100 - RNA, 19 nt, Artificial Sequence
  Description of Artificial Sequence: Synthetic oligonucleotide
caugaagaggacugcgugc

SEQ ID NO: 350101 - RNA, 19 nt, Artificial Sequence
  Description of Artificial Sequence: Synthetic oligonucleotide
ucaccuuuggcaaggcgug

SEQ ID NO: 350102 - RNA, 19 nt, Artificial Sequence
  Description of Artificial Sequence: Synthetic oligonucleotide
acgauuaacuuccuggcau

SEQ ID NO: 350103 - RNA, 19 nt, Artificial Sequence
  Description of Artificial Sequence: Synthetic oligonucleotide
gagguagcgaaggucauag

SEQ ID NO: 350104 - RNA, 19 nt, Artificial Sequence
  Description of Artificial Sequence: Synthetic oligonucleotide
gucagaacgauguugaggu

SEQ ID NO: 350105 - RNA, 19 nt, Artificial Sequence
  Description of Artificial Sequence: Synthetic oligonucleotide
uccuggcauaaacugaaca

SEQ ID NO: 350106 - RNA, 19 nt, Artificial Sequence
  Description of Artificial Sequence: Synthetic oligonucleotide
ugagcuccagacccgguag

SEQ ID NO: 350107 - RNA, 19 nt, Artificial Sequence
  Description of Artificial Sequence: Synthetic oligonucleotide
uccgaguaucugucgaagg

SEQ ID NO: 350108 - RNA, 19 nt, Artificial Sequence
  Description of Artificial Sequence: Synthetic oligonucleotide
gauggaaguaggccaggag

SEQ ID NO: 350109 - RNA, 19 nt, Artificial Sequence
  Description of Artificial Sequence: Synthetic oligonucleotide
gacccgguaggccaugacg

SEQ ID NO: 350110 - RNA, 19 nt, Artificial Sequence
  Description of Artificial Sequence: Synthetic oligonucleotide
ugggcuugguucagggugg

SEQ ID NO: 350111 - RNA, 19 nt, Artificial Sequence
  Description of Artificial Sequence: Synthetic oligonucleotide
ugguccgacacauucuggc

SEQ ID NO: 350112 - RNA, 19 nt, Artificial Sequence
  Description of Artificial Sequence: Synthetic oligonucleotide
gaaaucucgagaggauggg

SEQ ID NO: 350113 - RNA, 19 nt, Artificial Sequence
  Description of Artificial Sequence: Synthetic oligonucleotide
agaacgauguugagguagc

SEQ ID NO: 350114 - RNA, 19 nt, Artificial Sequence
  Description of Artificial Sequence: Synthetic oligonucleotide
gaugcgucuggucaccuac

SEQ ID NO: 350115 - RNA, 19 nt, Artificial Sequence
  Description of Artificial Sequence: Synthetic oligonucleotide
gcuugaauaaggaaggcgc

SEQ ID NO: 350116 - RNA, 19 nt, Artificial Sequence
  Description of Artificial Sequence: Synthetic oligonucleotide
cuacuuugucauacuagag

SEQ ID NO: 350117 - RNA, 19 nt, Artificial Sequence
  Description of Artificial Sequence: Synthetic oligonucleotide
ugggcuuguguuucaacgc

SEQ ID NO: 350118 - RNA, 19 nt, Artificial Sequence
  Description of Artificial Sequence: Synthetic oligonucleotide
acuauaucuggagcuagag

SEQ ID NO: 350119 - RNA, 19 nt, Artificial Sequence
  Description of Artificial Sequence: Synthetic oligonucleotide
ucugugaguugcucauagg

SEQ ID NO: 350120 - RNA, 19 nt, Artificial Sequence
  Description of Artificial Sequence: Synthetic oligonucleotide
gaggaugggacuauaucug

SEQ ID NO: 350121 - RNA, 19 nt, Artificial Sequence
  Description of Artificial Sequence: Synthetic oligonucleotide
caaacgagccaaucuggcc

SEQ ID NO: 350122 - RNA, 19 nt, Artificial Sequence
  Description of Artificial Sequence: Synthetic oligonucleotide
cugaguccgaagcaugucc

SEQ ID NO: 350123 - RNA, 19 nt, Artificial Sequence
  Description of Artificial Sequence: Synthetic oligonucleotide
ucaaaguggacaugcuuau

SEQ ID NO: 350124 - RNA, 19 nt, Artificial Sequence
  Description of Artificial Sequence: Synthetic oligonucleotide
guacauaccaggacgguug

SEQ ID NO: 350125 - RNA, 19 nt, Artificial Sequence
  Description of Artificial Sequence: Synthetic oligonucleotide
uuaccuguugcuccucugu

SEQ ID NO: 350126 - RNA, 19 nt, Artificial Sequence
  Description of Artificial Sequence: Synthetic oligonucleotide
uuguuuccaugcuacuuug

SEQ ID NO: 350127 - RNA, 19 nt, Artificial Sequence
  Description of Artificial Sequence: Synthetic oligonucleotide
agaaguccgcuguaccagg

SEQ ID NO: 350128 - RNA, 19 nt, Artificial Sequence
  Description of Artificial Sequence: Synthetic oligonucleotide
caccaaacgagccaaucug

SEQ ID NO: 350129 - RNA, 19 nt, Artificial Sequence
  Description of Artificial Sequence: Synthetic oligonucleotide
cagaacgauguugagguag

SEQ ID NO: 350130 - RNA, 19 nt, Artificial Sequence
  Description of Artificial Sequence: Synthetic oligonucleotide
ggaaaucucgagaggaugg

SEQ ID NO: 350131 - RNA, 19 nt, Artificial Sequence
  Description of Artificial Sequence: Synthetic oligonucleotide
aguccgaagcauguccugc

SEQ ID NO: 350132 - RNA, 19 nt, Artificial Sequence
  Description of Artificial Sequence: Synthetic oligonucleotide
aguccgcuguaccaggcgg

SEQ ID NO: 350133 - RNA, 19 nt, Artificial Sequence
  Description of Artificial Sequence: Synthetic oligonucleotide
uugauacaggccacggacu

SEQ ID NO: 350134 - RNA, 19 nt, Artificial Sequence
  Description of Artificial Sequence: Synthetic oligonucleotide
aguuccugggugucugaac

SEQ ID NO: 350135 - RNA, 19 nt, Artificial Sequence
  Description of Artificial Sequence: Synthetic oligonucleotide
aguacuggauccggguggc

SEQ ID NO: 350136 - RNA, 19 nt, Artificial Sequence
  Description of Artificial Sequence: Synthetic oligonucleotide
gaguaucugucgaaggcag

SEQ ID NO: 350137 - RNA, 19 nt, Artificial Sequence
  Description of Artificial Sequence: Synthetic oligonucleotide
guaucugucgaaggcagag

SEQ ID NO: 350138 - RNA, 19 nt, Artificial Sequence
  Description of Artificial Sequence: Synthetic oligonucleotide
augggaaaucucgagagga

SEQ ID NO: 350139 - RNA, 19 nt, Artificial Sequence
  Description of Artificial Sequence: Synthetic oligonucleotide
auagaacagaaguccgcug

SEQ ID NO: 350140 - RNA, 19 nt, Artificial Sequence
  Description of Artificial Sequence: Synthetic oligonucleotide
cuugaugccagcaccguga

SEQ ID NO: 350141 - RNA, 19 nt, Artificial Sequence
  Description of Artificial Sequence: Synthetic oligonucleotide
caggauauuaugggguucc

SEQ ID NO: 350142 - RNA, 19 nt, Artificial Sequence
  Description of Artificial Sequence: Synthetic oligonucleotide
caugacgcucuguuggagc

SEQ ID NO: 350143 - RNA, 19 nt, Artificial Sequence
  Description of Artificial Sequence: Synthetic oligonucleotide
auagagagccgggacauug

SEQ ID NO: 350144 - RNA, 19 nt, Artificial Sequence
  Description of Artificial Sequence: Synthetic oligonucleotide
gaaggcggaucuuagacgu

SEQ ID NO: 350145 - RNA, 19 nt, Artificial Sequence
  Description of Artificial Sequence: Synthetic oligonucleotide
ugacuuggcccauacaguu

SEQ ID NO: 350146 - RNA, 19 nt, Artificial Sequence
  Description of Artificial Sequence: Synthetic oligonucleotide
cacggacugaguccgaagc

SEQ ID NO: 350147 - RNA, 19 nt, Artificial Sequence
  Description of Artificial Sequence: Synthetic oligonucleotide
uaauagagagccgggacau

SEQ ID NO: 350148 - RNA, 19 nt, Artificial Sequence
  Description of Artificial Sequence: Synthetic oligonucleotide
uuguguuucaacgccucug

SEQ ID NO: 350149 - RNA, 19 nt, Artificial Sequence
  Description of Artificial Sequence: Synthetic oligonucleotide
gacgugacacugcugccag

SEQ ID NO: 350150 - RNA, 19 nt, Artificial Sequence
  Description of Artificial Sequence: Synthetic oligonucleotide
cacauacuugauacaggcc

SEQ ID NO: 350151 - RNA, 19 nt, Artificial Sequence
  Description of Artificial Sequence: Synthetic oligonucleotide
gacaugcuuauuugaugug

SEQ ID NO: 350152 - RNA, 19 nt, Artificial Sequence
  Description of Artificial Sequence: Synthetic oligonucleotide
accaauccaaauagaacag

SEQ ID NO: 350153 - RNA, 19 nt, Artificial Sequence
  Description of Artificial Sequence: Synthetic oligonucleotide
uuucucgugcuugccaugc

SEQ ID NO: 350154 - RNA, 19 nt, Artificial Sequence
  Description of Artificial Sequence: Synthetic oligonucleotide
gcacuaguauuuaauagag

SEQ ID NO: 350155 - RNA, 19 nt, Artificial Sequence
  Description of Artificial Sequence: Synthetic oligonucleotide
ggugguagccagcaguucc

SEQ ID NO: 350156 - RNA, 19 nt, Artificial Sequence
  Description of Artificial Sequence: Synthetic oligonucleotide
uugucggggagaacucucc

SEQ ID NO: 350157 - RNA, 19 nt, Artificial Sequence
  Description of Artificial Sequence: Synthetic oligonucleotide
accaaacgagccaaucugg

SEQ ID NO: 350158 - RNA, 19 nt, Artificial Sequence
  Description of Artificial Sequence: Synthetic oligonucleotide
gagucgucuuccucgccgg

SEQ ID NO: 350159 - RNA, 19 nt, Artificial Sequence
  Description of Artificial Sequence: Synthetic oligonucleotide
guucaaaacggugcacuag

SEQ ID NO: 350160 - RNA, 19 nt, Artificial Sequence
  Description of Artificial Sequence: Synthetic oligonucleotide
cugaauagucgccuuucug

SEQ ID NO: 350161 - RNA, 19 nt, Artificial Sequence
  Description of Artificial Sequence: Synthetic oligonucleotide
gagaaauuucacaagcgcu

SEQ ID NO: 350162 - RNA, 19 nt, Artificial Sequence
  Description of Artificial Sequence: Synthetic oligonucleotide
agcauccgaguaucugucg

SEQ ID NO: 350163 - RNA, 19 nt, Artificial Sequence
  Description of Artificial Sequence: Synthetic oligonucleotide
ggacgguugaguaggaagg

SEQ ID NO: 350164 - RNA, 19 nt, Artificial Sequence
  Description of Artificial Sequence: Synthetic oligonucleotide
guugaccggaaguggcugg

SEQ ID NO: 350165 - RNA, 19 nt, Artificial Sequence
  Description of Artificial Sequence: Synthetic oligonucleotide
aaucuggccuugaugccag

SEQ ID NO: 350166 - RNA, 19 nt, Artificial Sequence
  Description of Artificial Sequence: Synthetic oligonucleotide
aaaucucgagaggauggga

SEQ ID NO: 350167 - RNA, 19 nt, Artificial Sequence
  Description of Artificial Sequence: Synthetic oligonucleotide
gaagaggacugcgugcagc

SEQ ID NO: 350168 - RNA, 19 nt, Artificial Sequence
  Description of Artificial Sequence: Synthetic oligonucleotide
aggcagcuaugacuuggcc

SEQ ID NO: 350169 - RNA, 19 nt, Artificial Sequence
  Description of Artificial Sequence: Synthetic oligonucleotide
uaccaggacgguugaguag

SEQ ID NO: 350170 - RNA, 19 nt, Artificial Sequence
  Description of Artificial Sequence: Synthetic oligonucleotide
gagauguggugugaaaaca

SEQ ID NO: 350171 - RNA, 19 nt, Artificial Sequence
  Description of Artificial Sequence: Synthetic oligonucleotide
gauguggugugaaaacauc

SEQ ID NO: 350172 - RNA, 19 nt, Artificial Sequence
  Description of Artificial Sequence: Synthetic oligonucleotide
gagcgcgaguacuggaucc

SEQ ID NO: 350173 - RNA, 19 nt, Artificial Sequence
  Description of Artificial Sequence: Synthetic oligonucleotide
augacgcucuguuggagca

SEQ ID NO: 350174 - RNA, 19 nt, Artificial Sequence
  Description of Artificial Sequence: Synthetic oligonucleotide
aucugucgaaggcagaguu

SEQ ID NO: 350175 - RNA, 19 nt, Artificial Sequence
  Description of Artificial Sequence: Synthetic oligonucleotide
ugagccagcgucacuuaaa

SEQ ID NO: 350176 - RNA, 19 nt, Artificial Sequence
  Description of Artificial Sequence: Synthetic oligonucleotide
ccaagagcauuauagagca

SEQ ID NO: 350177 - RNA, 19 nt, Artificial Sequence
  Description of Artificial Sequence: Synthetic oligonucleotide
uggcccauacaguucuuca

SEQ ID NO: 350178 - RNA, 19 nt, Artificial Sequence
  Description of Artificial Sequence: Synthetic oligonucleotide
uucugguagaguguagaaa

SEQ ID NO: 350179 - RNA, 19 nt, Artificial Sequence
  Description of Artificial Sequence: Synthetic oligonucleotide
agccaaucuggccuugaug

SEQ ID NO: 350180 - RNA, 19 nt, Artificial Sequence
  Description of Artificial Sequence: Synthetic oligonucleotide
aaacgucccuucuuucuuu

SEQ ID NO: 350181 - RNA, 19 nt, Artificial Sequence
  Description of Artificial Sequence: Synthetic oligonucleotide
aggaaggcgcaggugaguc

SEQ ID NO: 350182 - RNA, 19 nt, Artificial Sequence
  Description of Artificial Sequence: Synthetic oligonucleotide
guugaaugugcugcuccgg

SEQ ID NO: 350183 - RNA, 19 nt, Artificial Sequence
  Description of Artificial Sequence: Synthetic oligonucleotide
ucaaaacggugcacuagua

SEQ ID NO: 350184 - RNA, 19 nt, Artificial Sequence
  Description of Artificial Sequence: Synthetic oligonucleotide
ccaaaccugaucuggcugg

SEQ ID NO: 350185 - RNA, 19 nt, Artificial Sequence
  Description of Artificial Sequence: Synthetic oligonucleotide
gacgcucuguuggagcagg

SEQ ID NO: 350186 - RNA, 19 nt, Artificial Sequence
  Description of Artificial Sequence: Synthetic oligonucleotide
uucgugcaaaauaguugac

SEQ ID NO: 350187 - RNA, 19 nt, Artificial Sequence
  Description of Artificial Sequence: Synthetic oligonucleotide
cauacuagagagccaggca

SEQ ID NO: 350188 - RNA, 19 nt, Artificial Sequence
  Description of Artificial Sequence: Synthetic oligonucleotide
ugggaaaucucgagaggau

SEQ ID NO: 350189 - RNA, 19 nt, Artificial Sequence
  Description of Artificial Sequence: Synthetic oligonucleotide
ggacucucggaccagagga

SEQ ID NO: 350190 - RNA, 19 nt, Artificial Sequence
  Description of Artificial Sequence: Synthetic oligonucleotide
ggaugggucuggcagcacg

SEQ ID NO: 350191 - RNA, 19 nt, Artificial Sequence
  Description of Artificial Sequence: Synthetic oligonucleotide
uguacauaccaggacgguu

SEQ ID NO: 350192 - RNA, 19 nt, Artificial Sequence
  Description of Artificial Sequence: Synthetic oligonucleotide
aggauugagccagcgucac

SEQ ID NO: 350193 - RNA, 19 nt, Artificial Sequence
  Description of Artificial Sequence: Synthetic oligonucleotide
aguucuuagccuggugcag

SEQ ID NO: 350194 - RNA, 19 nt, Artificial Sequence
  Description of Artificial Sequence: Synthetic oligonucleotide
aggacuguacauaccagga

SEQ ID NO: 350195 - RNA, 19 nt, Artificial Sequence
  Description of Artificial Sequence: Synthetic oligonucleotide
acgguugaguaggaaggcg

SEQ ID NO: 350196 - RNA, 19 nt, Artificial Sequence
  Description of Artificial Sequence: Synthetic oligonucleotide
gacgguugaguaggaaggc

SEQ ID NO: 350197 - RNA, 19 nt, Artificial Sequence
  Description of Artificial Sequence: Synthetic oligonucleotide
gaacgauguugagguagcg

SEQ ID NO: 350198 - RNA, 19 nt, Artificial Sequence
  Description of Artificial Sequence: Synthetic oligonucleotide
caaggcguggccuccaaca

SEQ ID NO: 350199 - RNA, 19 nt, Artificial Sequence
  Description of Artificial Sequence: Synthetic oligonucleotide
agcaccgugauggggcugg

SEQ ID NO: 350200 - RNA, 19 nt, Artificial Sequence
  Description of Artificial Sequence: Synthetic oligonucleotide
gagaccacuguuggcaaac

SEQ ID NO: 350201 - RNA, 19 nt, Artificial Sequence
  Description of Artificial Sequence: Synthetic oligonucleotide
aguaaccaauccaaauaga

SEQ ID NO: 350202 - RNA, 19 nt, Artificial Sequence
  Description of Artificial Sequence: Synthetic oligonucleotide
guagaguuguguggccugg

SEQ ID NO: 350203 - RNA, 19 nt, Artificial Sequence
  Description of Artificial Sequence: Synthetic oligonucleotide
uagacgugacacugcugcc

SEQ ID NO: 350204 - RNA, 19 nt, Artificial Sequence
  Description of Artificial Sequence: Synthetic oligonucleotide
ccaggauugagccagcguc

SEQ ID NO: 350205 - RNA, 19 nt, Artificial Sequence
  Description of Artificial Sequence: Synthetic oligonucleotide
aggcguggccuccaacacg

SEQ ID NO: 350206 - RNA, 19 nt, Artificial Sequence
  Description of Artificial Sequence: Synthetic oligonucleotide
guaggaaggcggaucuuag

SEQ ID NO: 350207 - RNA, 19 nt, Artificial Sequence
  Description of Artificial Sequence: Synthetic oligonucleotide
gaauaaggaaggcgcaggu

SEQ ID NO: 350208 - RNA, 19 nt, Artificial Sequence
  Description of Artificial Sequence: Synthetic oligonucleotide
uagagagccgggacauugu

SEQ ID NO: 350209 - RNA, 19 nt, Artificial Sequence
  Description of Artificial Sequence: Synthetic oligonucleotide
gauugucuccaggguagag

SEQ ID NO: 350210 - RNA, 19 nt, Artificial Sequence
  Description of Artificial Sequence: Synthetic oligonucleotide
uuaugggguuccugggagu

SEQ ID NO: 350211 - RNA, 19 nt, Artificial Sequence
  Description of Artificial Sequence: Synthetic oligonucleotide
guuagccacgcugacccag

SEQ ID NO: 350212 - RNA, 19 nt, Artificial Sequence
  Description of Artificial Sequence: Synthetic oligonucleotide
aacgagccaaucuggccuu

SEQ ID NO: 350213 - RNA, 19 nt, Artificial Sequence
  Description of Artificial Sequence: Synthetic oligonucleotide
auccgaguaucugucgaag

SEQ ID NO: 350214 - RNA, 19 nt, Artificial Sequence
  Description of Artificial Sequence: Synthetic oligonucleotide
ggacaugcuuauuugaugu

SEQ ID NO: 350215 - RNA, 19 nt, Artificial Sequence
  Description of Artificial Sequence: Synthetic oligonucleotide
ugucggggagaacucuccu

SEQ ID NO: 350216 - RNA, 19 nt, Artificial Sequence
  Description of Artificial Sequence: Synthetic oligonucleotide
cuuagacgugacacugcug

SEQ ID NO: 350217 - RNA, 19 nt, Artificial Sequence
  Description of Artificial Sequence: Synthetic oligonucleotide
uggguugguggugugucgc

SEQ ID NO: 350218 - RNA, 19 nt, Artificial Sequence
  Description of Artificial Sequence: Synthetic oligonucleotide
uugguucagggugguagcc

SEQ ID NO: 350219 - RNA, 19 nt, Artificial Sequence
  Description of Artificial Sequence: Synthetic oligonucleotide
cagcaguuccaccaaacga

SEQ ID NO: 350220 - RNA, 19 nt, Artificial Sequence
  Description of Artificial Sequence: Synthetic oligonucleotide
cuacucuggagagugccug

SEQ ID NO: 350221 - RNA, 19 nt, Artificial Sequence
  Description of Artificial Sequence: Synthetic oligonucleotide
acuuccuggcauaaacuga

SEQ ID NO: 350222 - RNA, 19 nt, Artificial Sequence
  Description of Artificial Sequence: Synthetic oligonucleotide
agauguggugugaaaacau

SEQ ID NO: 350223 - RNA, 19 nt, Artificial Sequence
  Description of Artificial Sequence: Synthetic oligonucleotide
acggacugaguccgaagca

SEQ ID NO: 350224 - RNA, 19 nt, Artificial Sequence
  Description of Artificial Sequence: Synthetic oligonucleotide
auguucugcucaaagugga

SEQ ID NO: 350225 - RNA, 19 nt, Artificial Sequence
  Description of Artificial Sequence: Synthetic oligonucleotide
uugagccagcgucacuuaa

SEQ ID NO: 350226 - RNA, 19 nt, Artificial Sequence
  Description of Artificial Sequence: Synthetic oligonucleotide
aguugaccggaaguggcug

SEQ ID NO: 350227 - RNA, 19 nt, Artificial Sequence
  Description of Artificial Sequence: Synthetic oligonucleotide
ucgugcuugccaugcucag

SEQ ID NO: 350228 - RNA, 19 nt, Artificial Sequence
  Description of Artificial Sequence: Synthetic oligonucleotide
ugggguuccugggaguuga

SEQ ID NO: 350229 - RNA, 19 nt, Artificial Sequence
  Description of Artificial Sequence: Synthetic oligonucleotide
aacgucccuucuuucuuua

SEQ ID NO: 350230 - RNA, 19 nt, Artificial Sequence
  Description of Artificial Sequence: Synthetic oligonucleotide
gcagguagaguuguguggc

SEQ ID NO: 350231 - RNA, 19 nt, Artificial Sequence
  Description of Artificial Sequence: Synthetic oligonucleotide
cacuaguauuuaauagaga

SEQ ID NO: 350232 - RNA, 19 nt, Artificial Sequence
  Description of Artificial Sequence: Synthetic oligonucleotide
acgucccuucuuucuuuac

SEQ ID NO: 350233 - RNA, 19 nt, Artificial Sequence
  Description of Artificial Sequence: Synthetic oligonucleotide
ggugcacuaguauuuaaua

SEQ ID NO: 350234 - RNA, 19 nt, Artificial Sequence
  Description of Artificial Sequence: Synthetic oligonucleotide
ggaugcuggcuugugauug

SEQ ID NO: 350235 - RNA, 19 nt, Artificial Sequence
  Description of Artificial Sequence: Synthetic oligonucleotide
ccgaguaucugucgaaggc

SEQ ID NO: 350236 - RNA, 19 nt, Artificial Sequence
  Description of Artificial Sequence: Synthetic oligonucleotide
gagccagcgucacuuaaaa

SEQ ID NO: 350237 - RNA, 19 nt, Artificial Sequence
  Description of Artificial Sequence: Synthetic oligonucleotide
uucuuagccuggugcagau

SEQ ID NO: 350238 - RNA, 19 nt, Artificial Sequence
  Description of Artificial Sequence: Synthetic oligonucleotide
gguagaguuguguggccug

SEQ ID NO: 350239 - RNA, 19 nt, Artificial Sequence
  Description of Artificial Sequence: Synthetic oligonucleotide
uucuaacagcagcuuuauc

SEQ ID NO: 350240 - RNA, 19 nt, Artificial Sequence
  Description of Artificial Sequence: Synthetic oligonucleotide
cugguccgacacauucugg

SEQ ID NO: 350241 - RNA, 19 nt, Artificial Sequence
  Description of Artificial Sequence: Synthetic oligonucleotide
cucggaugguggcuguggc

SEQ ID NO: 350242 - RNA, 19 nt, Artificial Sequence
  Description of Artificial Sequence: Synthetic oligonucleotide
gggagaacucuccuccaag

SEQ ID NO: 350243 - RNA, 19 nt, Artificial Sequence
  Description of Artificial Sequence: Synthetic oligonucleotide
ggcccauacaguucuucag

SEQ ID NO: 350244 - RNA, 19 nt, Artificial Sequence
  Description of Artificial Sequence: Synthetic oligonucleotide
caggggaagcaguccaaac

SEQ ID NO: 350245 - RNA, 19 nt, Artificial Sequence
  Description of Artificial Sequence: Synthetic oligonucleotide
uuccuggcauaaacugaac

SEQ ID NO: 350246 - RNA, 19 nt, Artificial Sequence
  Description of Artificial Sequence: Synthetic oligonucleotide
gauuaacuuccuggcauaa

SEQ ID NO: 350247 - RNA, 19 nt, Artificial Sequence
  Description of Artificial Sequence: Synthetic oligonucleotide
uugaugccagcaccgugau

SEQ ID NO: 350248 - RNA, 19 nt, Artificial Sequence
  Description of Artificial Sequence: Synthetic oligonucleotide
agcgcgaguacuggauccg

SEQ ID NO: 350249 - RNA, 19 nt, Artificial Sequence
  Description of Artificial Sequence: Synthetic oligonucleotide
cgggacauuguuuccaugc

SEQ ID NO: 350250 - RNA, 19 nt, Artificial Sequence
  Description of Artificial Sequence: Synthetic oligonucleotide
cuuucucgugcuugccaug

SEQ ID NO: 350251 - RNA, 19 nt, Artificial Sequence
  Description of Artificial Sequence: Synthetic oligonucleotide
cagguagaguuguguggcc

SEQ ID NO: 350252 - RNA, 19 nt, Artificial Sequence
  Description of Artificial Sequence: Synthetic oligonucleotide
caggauugagccagcguca

SEQ ID NO: 350253 - RNA, 19 nt, Artificial Sequence
  Description of Artificial Sequence: Synthetic oligonucleotide
ucuggccuugaugccagca

SEQ ID NO: 350254 - RNA, 19 nt, Artificial Sequence
  Description of Artificial Sequence: Synthetic oligonucleotide
agacccgguaggccaugac

SEQ ID NO: 350255 - RNA, 19 nt, Artificial Sequence
  Description of Artificial Sequence: Synthetic oligonucleotide
caagagcauuauagagcag

SEQ ID NO: 350256 - RNA, 19 nt, Artificial Sequence
  Description of Artificial Sequence: Synthetic oligonucleotide
ugggucuggcagcacgccu

SEQ ID NO: 350257 - RNA, 19 nt, Artificial Sequence
  Description of Artificial Sequence: Synthetic oligonucleotide
cucgugcuugccaugcuca

SEQ ID NO: 350258 - RNA, 19 nt, Artificial Sequence
  Description of Artificial Sequence: Synthetic oligonucleotide
gaaguccgcuguaccaggc

SEQ ID NO: 350259 - RNA, 19 nt, Artificial Sequence
  Description of Artificial Sequence: Synthetic oligonucleotide
uugaccggaaguggcuggc

SEQ ID NO: 350260 - RNA, 19 nt, Artificial Sequence
  Description of Artificial Sequence: Synthetic oligonucleotide
gauugagccagcgucacuu

SEQ ID NO: 350261 - RNA, 19 nt, Artificial Sequence
  Description of Artificial Sequence: Synthetic oligonucleotide
ggugagucgucuuccucgc

SEQ ID NO: 350262 - RNA, 19 nt, Artificial Sequence
  Description of Artificial Sequence: Synthetic oligonucleotide
ucucgagaggaugggacua

SEQ ID NO: 350263 - RNA, 19 nt, Artificial Sequence
  Description of Artificial Sequence: Synthetic oligonucleotide
aacggugcacuaguauuua

SEQ ID NO: 350264 - RNA, 19 nt, Artificial Sequence
  Description of Artificial Sequence: Synthetic oligonucleotide
uccgacacauucuggcauu

SEQ ID NO: 350265 - RNA, 19 nt, Artificial Sequence
  Description of Artificial Sequence: Synthetic oligonucleotide
cacgauuaacuuccuggca

SEQ ID NO: 350266 - RNA, 19 nt, Artificial Sequence
  Description of Artificial Sequence: Synthetic oligonucleotide
gucauacuagagagccagg

SEQ ID NO: 350267 - RNA, 19 nt, Artificial Sequence
  Description of Artificial Sequence: Synthetic oligonucleotide
agguagaguuguguggccu

SEQ ID NO: 350268 - RNA, 19 nt, Artificial Sequence
  Description of Artificial Sequence: Synthetic oligonucleotide
gaggcgagcgcgaguacug

SEQ ID NO: 350269 - RNA, 19 nt, Artificial Sequence
  Description of Artificial Sequence: Synthetic oligonucleotide
ggacuguacauaccaggac

SEQ ID NO: 350270 - RNA, 19 nt, Artificial Sequence
  Description of Artificial Sequence: Synthetic oligonucleotide
ccgggaggcaaacugauuc

SEQ ID NO: 350271 - RNA, 19 nt, Artificial Sequence
  Description of Artificial Sequence: Synthetic oligonucleotide
agcgucacuuaaaagcaau

SEQ ID NO: 350272 - RNA, 19 nt, Artificial Sequence
  Description of Artificial Sequence: Synthetic oligonucleotide
aggacugcgugcagcuugg

SEQ ID NO: 350273 - RNA, 19 nt, Artificial Sequence
  Description of Artificial Sequence: Synthetic oligonucleotide
aggcggaucuuagacguga

SEQ ID NO: 350274 - RNA, 19 nt, Artificial Sequence
  Description of Artificial Sequence: Synthetic oligonucleotide
uggugugucgcuggaugga

SEQ ID NO: 350275 - RNA, 19 nt, Artificial Sequence
  Description of Artificial Sequence: Synthetic oligonucleotide
ugauugucuccaggguaga

SEQ ID NO: 350276 - RNA, 19 nt, Artificial Sequence
  Description of Artificial Sequence: Synthetic oligonucleotide
gagagaccacuguuggcaa

SEQ ID NO: 350277 - RNA, 19 nt, Artificial Sequence
  Description of Artificial Sequence: Synthetic oligonucleotide
gcuaugacuuggcccauac

SEQ ID NO: 350278 - RNA, 19 nt, Artificial Sequence
  Description of Artificial Sequence: Synthetic oligonucleotide
ucacaagcgcugagcucca

SEQ ID NO: 350279 - RNA, 19 nt, Artificial Sequence
  Description of Artificial Sequence: Synthetic oligonucleotide
uccaggucgaaagggucaa

SEQ ID NO: 350280 - RNA, 19 nt, Artificial Sequence
  Description of Artificial Sequence: Synthetic oligonucleotide
gaaacgucccuucuuucuu

SEQ ID NO: 350281 - RNA, 19 nt, Artificial Sequence
  Description of Artificial Sequence: Synthetic oligonucleotide
auccaggucgaaaggguca

SEQ ID NO: 350282 - RNA, 19 nt, Artificial Sequence
  Description of Artificial Sequence: Synthetic oligonucleotide
guugcucauaggcagcuau

SEQ ID NO: 350283 - RNA, 19 nt, Artificial Sequence
  Description of Artificial Sequence: Synthetic oligonucleotide
gcagcacgccuucugguag

SEQ ID NO: 350284 - RNA, 19 nt, Artificial Sequence
  Description of Artificial Sequence: Synthetic oligonucleotide
caacgccucugcugguugc

SEQ ID NO: 350285 - RNA, 19 nt, Artificial Sequence
  Description of Artificial Sequence: Synthetic oligonucleotide
ugaugccagcaccgugaug

SEQ ID NO: 350286 - RNA, 19 nt, Artificial Sequence
  Description of Artificial Sequence: Synthetic oligonucleotide
ggaggcagaucgcugggac

SEQ ID NO: 350287 - RNA, 19 nt, Artificial Sequence
  Description of Artificial Sequence: Synthetic oligonucleotide
uucucgugcuugccaugcu

SEQ ID NO: 350288 - RNA, 19 nt, Artificial Sequence
  Description of Artificial Sequence: Synthetic oligonucleotide
ggucaccuuuggcaaggcg

SEQ ID NO: 350289 - RNA, 19 nt, Artificial Sequence
  Description of Artificial Sequence: Synthetic oligonucleotide
gagccgggacauuguuucc

SEQ ID NO: 350290 - RNA, 19 nt, Artificial Sequence
  Description of Artificial Sequence: Synthetic oligonucleotide
uuucaacgccucugcuggu

SEQ ID NO: 350291 - RNA, 19 nt, Artificial Sequence
  Description of Artificial Sequence: Synthetic oligonucleotide
ccaguaaccaauccaaaua

SEQ ID NO: 350292 - RNA, 19 nt, Artificial Sequence
  Description of Artificial Sequence: Synthetic oligonucleotide
uagccacgcugacccaggc

SEQ ID NO: 350293 - RNA, 19 nt, Artificial Sequence
  Description of Artificial Sequence: Synthetic oligonucleotide
ugacgcucuguuggagcag

SEQ ID NO: 350294 - RNA, 19 nt, Artificial Sequence
  Description of Artificial Sequence: Synthetic oligonucleotide
gucggggagaacucuccuc

SEQ ID NO: 350295 - RNA, 19 nt, Artificial Sequence
  Description of Artificial Sequence: Synthetic oligonucleotide
ggcacaauucucccaggga

SEQ ID NO: 350296 - RNA, 19 nt, Artificial Sequence
  Description of Artificial Sequence: Synthetic oligonucleotide
gaggcuaguggcaggauau

SEQ ID NO: 350297 - RNA, 19 nt, Artificial Sequence
  Description of Artificial Sequence: Synthetic oligonucleotide
guugucggggagaacucuc

SEQ ID NO: 350298 - RNA, 19 nt, Artificial Sequence
  Description of Artificial Sequence: Synthetic oligonucleotide
gcugccaccugccggauga

SEQ ID NO: 350299 - RNA, 19 nt, Artificial Sequence
  Description of Artificial Sequence: Synthetic oligonucleotide
aauagagagccgggacauu

SEQ ID NO: 350300 - RNA, 19 nt, Artificial Sequence
  Description of Artificial Sequence: Synthetic oligonucleotide
ucgccggcgagcugucuga

SEQ ID NO: 350301 - RNA, 19 nt, Artificial Sequence
  Description of Artificial Sequence: Synthetic oligonucleotide
cucgccggcgagcugucug

SEQ ID NO: 350302 - RNA, 19 nt, Artificial Sequence
  Description of Artificial Sequence: Synthetic oligonucleotide
auugagccagcgucacuua

SEQ ID NO: 350303 - RNA, 19 nt, Artificial Sequence
  Description of Artificial Sequence: Synthetic oligonucleotide
ggaaacgucccuucuuucu

SEQ ID NO: 350304 - RNA, 19 nt, Artificial Sequence
  Description of Artificial Sequence: Synthetic oligonucleotide
aguaucugucgaaggcaga

SEQ ID NO: 350305 - RNA, 19 nt, Artificial Sequence
  Description of Artificial Sequence: Synthetic oligonucleotide
gcgagcugucugaacaagg

SEQ ID NO: 350306 - RNA, 19 nt, Artificial Sequence
  Description of Artificial Sequence: Synthetic oligonucleotide
cauccgaguaucugucgaa

SEQ ID NO: 350307 - RNA, 19 nt, Artificial Sequence
  Description of Artificial Sequence: Synthetic oligonucleotide
caaaacggugcacuaguau

SEQ ID NO: 350308 - RNA, 19 nt, Artificial Sequence
  Description of Artificial Sequence: Synthetic oligonucleotide
aaggcggaucuuagacgug

SEQ ID NO: 350309 - RNA, 19 nt, Artificial Sequence
  Description of Artificial Sequence: Synthetic oligonucleotide
acggugcacuaguauuuaa

SEQ ID NO: 350310 - RNA, 19 nt, Artificial Sequence
  Description of Artificial Sequence: Synthetic oligonucleotide
uucaacgccucugcugguu

SEQ ID NO: 350311 - RNA, 19 nt, Artificial Sequence
  Description of Artificial Sequence: Synthetic oligonucleotide
gguccgacacauucuggca

SEQ ID NO: 350312 - RNA, 19 nt, Artificial Sequence
  Description of Artificial Sequence: Synthetic oligonucleotide
ggaucuuagacgugacacu

SEQ ID NO: 350313 - RNA, 19 nt, Artificial Sequence
  Description of Artificial Sequence: Synthetic oligonucleotide
caccuacucuggagagugc

SEQ ID NO: 350314 - RNA, 19 nt, Artificial Sequence
  Description of Artificial Sequence: Synthetic oligonucleotide
cuuagaguccagggcagaa

SEQ ID NO: 350315 - RNA, 19 nt, Artificial Sequence
  Description of Artificial Sequence: Synthetic oligonucleotide
cuaugacuuggcccauaca

SEQ ID NO: 350316 - RNA, 19 nt, Artificial Sequence
  Description of Artificial Sequence: Synthetic oligonucleotide
caccuuuggcaaggcgugg

SEQ ID NO: 350317 - RNA, 19 nt, Artificial Sequence
  Description of Artificial Sequence: Synthetic oligonucleotide
uccgggaggcaaacugauu

SEQ ID NO: 350318 - RNA, 19 nt, Artificial Sequence
  Description of Artificial Sequence: Synthetic oligonucleotide
agguagcgaaggucauaga

SEQ ID NO: 350319 - RNA, 19 nt, Artificial Sequence
  Description of Artificial Sequence: Synthetic oligonucleotide
ggaugaguaugggaaaucu

SEQ ID NO: 350320 - RNA, 19 nt, Artificial Sequence
  Description of Artificial Sequence: Synthetic oligonucleotide
ugagcccgguuagccacgc

SEQ ID NO: 350321 - RNA, 19 nt, Artificial Sequence
  Description of Artificial Sequence: Synthetic oligonucleotide
ggacauuguuuccaugcua

SEQ ID NO: 350322 - RNA, 19 nt, Artificial Sequence
  Description of Artificial Sequence: Synthetic oligonucleotide
gugguagccagcaguucca

SEQ ID NO: 350323 - RNA, 19 nt, Artificial Sequence
  Description of Artificial Sequence: Synthetic oligonucleotide
agcacgccuucugguagag

SEQ ID NO: 350324 - RNA, 19 nt, Artificial Sequence
  Description of Artificial Sequence: Synthetic oligonucleotide
gguugaguaggaaggcgga

SEQ ID NO: 350325 - RNA, 19 nt, Artificial Sequence
  Description of Artificial Sequence: Synthetic oligonucleotide
cccacaauacacugcuuca

SEQ ID NO: 350326 - RNA, 19 nt, Artificial Sequence
  Description of Artificial Sequence: Synthetic oligonucleotide
uacaggccacggacugagu

SEQ ID NO: 350327 - RNA, 19 nt, Artificial Sequence
  Description of Artificial Sequence: Synthetic oligonucleotide
guggacaugcuuauuugau

SEQ ID NO: 350328 - RNA, 19 nt, Artificial Sequence
  Description of Artificial Sequence: Synthetic oligonucleotide
agaggaagagagacauguu

SEQ ID NO: 350329 - RNA, 19 nt, Artificial Sequence
  Description of Artificial Sequence: Synthetic oligonucleotide
gcgucacuuaaaagcaaug

SEQ ID NO: 350330 - RNA, 19 nt, Artificial Sequence
  Description of Artificial Sequence: Synthetic oligonucleotide
agggugguagccagcaguu

SEQ ID NO: 350331 - RNA, 19 nt, Artificial Sequence
  Description of Artificial Sequence: Synthetic oligonucleotide
gaagcaguccaaaccugau

SEQ ID NO: 350332 - RNA, 19 nt, Artificial Sequence
  Description of Artificial Sequence: Synthetic oligonucleotide
ggcguggccuccaacacga

SEQ ID NO: 350333 - RNA, 19 nt, Artificial Sequence
  Description of Artificial Sequence: Synthetic oligonucleotide
cugagcuccagacccggua

SEQ ID NO: 350334 - RNA, 19 nt, Artificial Sequence
  Description of Artificial Sequence: Synthetic oligonucleotide
ggaugggacuauaucugga

SEQ ID NO: 350335 - RNA, 19 nt, Artificial Sequence
  Description of Artificial Sequence: Synthetic oligonucleotide
guccgacacauucuggcau

SEQ ID NO: 350336 - RNA, 19 nt, Artificial Sequence
  Description of Artificial Sequence: Synthetic oligonucleotide
ggcauaaacugaacaggaa

SEQ ID NO: 350337 - RNA, 19 nt, Artificial Sequence
  Description of Artificial Sequence: Synthetic oligonucleotide
ucgagaggaugggacuaua

SEQ ID NO: 350338 - RNA, 19 nt, Artificial Sequence
  Description of Artificial Sequence: Synthetic oligonucleotide
ccuugaugccagcaccgug

SEQ ID NO: 350339 - RNA, 19 nt, Artificial Sequence
  Description of Artificial Sequence: Synthetic oligonucleotide
cuuuaccuguugcuccucu

SEQ ID NO: 350340 - RNA, 19 nt, Artificial Sequence
  Description of Artificial Sequence: Synthetic oligonucleotide
aagcaauggcugagugaau

SEQ ID NO: 350341 - RNA, 19 nt, Artificial Sequence
  Description of Artificial Sequence: Synthetic oligonucleotide
cauuguuuccaugcuacuu

SEQ ID NO: 350342 - RNA, 19 nt, Artificial Sequence
  Description of Artificial Sequence: Synthetic oligonucleotide
gucgccuuucuggccauca

SEQ ID NO: 350343 - RNA, 19 nt, Artificial Sequence
  Description of Artificial Sequence: Synthetic oligonucleotide
gggacauuguuuccaugcu

SEQ ID NO: 350344 - RNA, 19 nt, Artificial Sequence
  Description of Artificial Sequence: Synthetic oligonucleotide
ccggcgagcugucugaaca

SEQ ID NO: 350345 - RNA, 19 nt, Artificial Sequence
  Description of Artificial Sequence: Synthetic oligonucleotide
ggaguugaaugugcugcuc

SEQ ID NO: 350346 - RNA, 19 nt, Artificial Sequence
  Description of Artificial Sequence: Synthetic oligonucleotide
cgaguacuggauccgggug

SEQ ID NO: 350347 - RNA, 19 nt, Artificial Sequence
  Description of Artificial Sequence: Synthetic oligonucleotide
acgugacacugcugccaga

SEQ ID NO: 350348 - RNA, 19 nt, Artificial Sequence
  Description of Artificial Sequence: Synthetic oligonucleotide
gcaggauauuaugggguuc

SEQ ID NO: 350349 - RNA, 19 nt, Artificial Sequence
  Description of Artificial Sequence: Synthetic oligonucleotide
agagugccugggagccaac

SEQ ID NO: 350350 - RNA, 19 nt, Artificial Sequence
  Description of Artificial Sequence: Synthetic oligonucleotide
gggacuauaucuggagcua

SEQ ID NO: 350351 - RNA, 19 nt, Artificial Sequence
  Description of Artificial Sequence: Synthetic oligonucleotide
augcgucuggucaccuacu

SEQ ID NO: 350352 - RNA, 19 nt, Artificial Sequence
  Description of Artificial Sequence: Synthetic oligonucleotide
ccacggacugaguccgaag

SEQ ID NO: 350353 - RNA, 19 nt, Artificial Sequence
  Description of Artificial Sequence: Synthetic oligonucleotide
gcggaucuuagacgugaca

SEQ ID NO: 350354 - RNA, 19 nt, Artificial Sequence
  Description of Artificial Sequence: Synthetic oligonucleotide
ggcaggauauuaugggguu

SEQ ID NO: 350355 - RNA, 19 nt, Artificial Sequence
  Description of Artificial Sequence: Synthetic oligonucleotide
ggggagaacucuccuccaa

SEQ ID NO: 350356 - RNA, 19 nt, Artificial Sequence
  Description of Artificial Sequence: Synthetic oligonucleotide
gccggaugaguaugggaaa

SEQ ID NO: 350357 - RNA, 19 nt, Artificial Sequence
  Description of Artificial Sequence: Synthetic oligonucleotide
cucggucacuuucucaauu

SEQ ID NO: 350358 - RNA, 19 nt, Artificial Sequence
  Description of Artificial Sequence: Synthetic oligonucleotide
ccggguggcccgcacggcg

SEQ ID NO: 350359 - RNA, 19 nt, Artificial Sequence
  Description of Artificial Sequence: Synthetic oligonucleotide
gcuaguggcaggauauuau

SEQ ID NO: 350360 - RNA, 19 nt, Artificial Sequence
  Description of Artificial Sequence: Synthetic oligonucleotide
cuaguucaucccaguuggu

SEQ ID NO: 350361 - RNA, 19 nt, Artificial Sequence
  Description of Artificial Sequence: Synthetic oligonucleotide
ggugugucgcuggauggaa

SEQ ID NO: 350362 - RNA, 19 nt, Artificial Sequence
  Description of Artificial Sequence: Synthetic oligonucleotide
acgagccaaucuggccuug

SEQ ID NO: 350363 - RNA, 19 nt, Artificial Sequence
  Description of Artificial Sequence: Synthetic oligonucleotide
ggcuaguggcaggauauua

SEQ ID NO: 350364 - RNA, 19 nt, Artificial Sequence
  Description of Artificial Sequence: Synthetic oligonucleotide
uccucgccggcgagcuguc

SEQ ID NO: 350365 - RNA, 19 nt, Artificial Sequence
  Description of Artificial Sequence: Synthetic oligonucleotide
gcgcgaguacuggauccgg

SEQ ID NO: 350366 - RNA, 19 nt, Artificial Sequence
  Description of Artificial Sequence: Synthetic oligonucleotide
gcgcaggugagucgucuuc

SEQ ID NO: 350367 - RNA, 19 nt, Artificial Sequence
  Description of Artificial Sequence: Synthetic oligonucleotide
ccgguuagccacgcugacc

SEQ ID NO: 350368 - RNA, 19 nt, Artificial Sequence
  Description of Artificial Sequence: Synthetic oligonucleotide
agcuaugacuuggcccaua

SEQ ID NO: 350369 - RNA, 19 nt, Artificial Sequence
  Description of Artificial Sequence: Synthetic oligonucleotide
cuccgggaggcaaacugau

SEQ ID NO: 350370 - RNA, 19 nt, Artificial Sequence
  Description of Artificial Sequence: Synthetic oligonucleotide
ggcgagcgcgaguacugga

SEQ ID NO: 350371 - RNA, 19 nt, Artificial Sequence
  Description of Artificial Sequence: Synthetic oligonucleotide
aggcuaguggcaggauauu

SEQ ID NO: 350372 - RNA, 19 nt, Artificial Sequence
  Description of Artificial Sequence: Synthetic oligonucleotide
gcaaggcguggccuccaac

SEQ ID NO: 350373 - RNA, 19 nt, Artificial Sequence
  Description of Artificial Sequence: Synthetic oligonucleotide
gguuagccacgcugaccca

SEQ ID NO: 350374 - RNA, 19 nt, Artificial Sequence
  Description of Artificial Sequence: Synthetic oligonucleotide
ggcggaucuuagacgugac

SEQ ID NO: 350375 - RNA, 19 nt, Artificial Sequence
  Description of Artificial Sequence: Synthetic oligonucleotide
cuguacauaccaggacggu

SEQ ID NO: 350376 - RNA, 19 nt, Artificial Sequence
  Description of Artificial Sequence: Synthetic oligonucleotide
ggguugucggggagaacuc

SEQ ID NO: 350377 - RNA, 19 nt, Artificial Sequence
  Description of Artificial Sequence: Synthetic oligonucleotide
cgauuaacuuccuggcaua

SEQ ID NO: 350378 - RNA, 19 nt, Artificial Sequence
  Description of Artificial Sequence: Synthetic oligonucleotide
gcugcggggcccgcgggag

SEQ ID NO: 350379 - RNA, 19 nt, Artificial Sequence
  Description of Artificial Sequence: Synthetic oligonucleotide
gcccgguuagccacgcuga

SEQ ID NO: 350380 - RNA, 19 nt, Artificial Sequence
  Description of Artificial Sequence: Synthetic oligonucleotide
cccgugggaugcuggcuug

SEQ ID NO: 350381 - RNA, 19 nt, Artificial Sequence
  Description of Artificial Sequence: Synthetic oligonucleotide
ccuuucucgugcuugccau

SEQ ID NO: 350382 - RNA, 19 nt, Artificial Sequence
  Description of Artificial Sequence: Synthetic oligonucleotide
cucgggugacuucuucaau

SEQ ID NO: 350383 - RNA, 19 nt, Artificial Sequence
  Description of Artificial Sequence: Synthetic oligonucleotide
cccgguuagccacgcugac

SEQ ID NO: 350384 - RNA, 19 nt, Artificial Sequence
  Description of Artificial Sequence: Synthetic oligonucleotide
cgagcgcgaguacuggauc

SEQ ID NO: 350385 - RNA, 19 nt, Artificial Sequence
  Description of Artificial Sequence: Synthetic oligonucleotide
ggaugcgucuggucaccua

SEQ ID NO: 350386 - RNA, 19 nt, Artificial Sequence
  Description of Artificial Sequence: Synthetic oligonucleotide
caggacgguugaguaggaa

SEQ ID NO: 350387 - RNA, 19 nt, Artificial Sequence
  Description of Artificial Sequence: Synthetic oligonucleotide
cggaugaguaugggaaauc

SEQ ID NO: 350388 - RNA, 19 nt, Artificial Sequence
  Description of Artificial Sequence: Synthetic oligonucleotide
acgcucuguuggagcagga

SEQ ID NO: 350389 - RNA, 19 nt, Artificial Sequence
  Description of Artificial Sequence: Synthetic oligonucleotide
ccgguaggccaugacgcuc

SEQ ID NO: 350390 - RNA, 19 nt, Artificial Sequence
  Description of Artificial Sequence: Synthetic oligonucleotide
gggagccaaccugggcuug

SEQ ID NO: 350391 - RNA, 19 nt, Artificial Sequence
  Description of Artificial Sequence: Synthetic oligonucleotide
ggauugagccagcgucacu

SEQ ID NO: 350392 - RNA, 19 nt, Artificial Sequence
  Description of Artificial Sequence: Synthetic oligonucleotide
guccgcuguaccaggcggu

SEQ ID NO: 350393 - RNA, 19 nt, Artificial Sequence
  Description of Artificial Sequence: Synthetic oligonucleotide
acgcugacccaggcagcau

SEQ ID NO: 350394 - RNA, 19 nt, Artificial Sequence
  Description of Artificial Sequence: Synthetic oligonucleotide
cgcuguaccaggcgguuaa

SEQ ID NO: 350395 - RNA, 19 nt, Artificial Sequence
  Description of Artificial Sequence: Synthetic oligonucleotide
gcagaucgcugggacucuc

SEQ ID NO: 350396 - RNA, 19 nt, Artificial Sequence
  Description of Artificial Sequence: Synthetic oligonucleotide
ggagagugccugggagcca

SEQ ID NO: 350397 - RNA, 19 nt, Artificial Sequence
  Description of Artificial Sequence: Synthetic oligonucleotide
ggcaaggcguggccuccaa

SEQ ID NO: 350398 - RNA, 19 nt, Artificial Sequence
  Description of Artificial Sequence: Synthetic oligonucleotide
ggguggcccgcacggcguc

SEQ ID NO: 350399 - RNA, 19 nt, Artificial Sequence
  Description of Artificial Sequence: Synthetic oligonucleotide
cggugcacuaguauuuaau

SEQ ID NO: 350400 - RNA, 19 nt, Artificial Sequence
  Description of Artificial Sequence: Synthetic oligonucleotide
gccggccuggcggaggcga

SEQ ID NO: 350401 - RNA, 19 nt, Artificial Sequence
  Description of Artificial Sequence: Synthetic oligonucleotide
gagcccgguuagccacgcu

SEQ ID NO: 350402 - RNA, 19 nt, Artificial Sequence
  Description of Artificial Sequence: Synthetic oligonucleotide
gggaugggucuggcagcac

SEQ ID NO: 350403 - RNA, 19 nt, Artificial Sequence
  Description of Artificial Sequence: Synthetic oligonucleotide
gcgagcgcgaguacuggau

SEQ ID NO: 350404 - RNA, 19 nt, Artificial Sequence
  Description of Artificial Sequence: Synthetic oligonucleotide
cgagaggaugggacuauau

SEQ ID NO: 350405 - RNA, 19 nt, Artificial Sequence
  Description of Artificial Sequence: Synthetic oligonucleotide
ccggaugaguaugggaaau

SEQ ID NO: 350406 - RNA, 19 nt, Artificial Sequence
  Description of Artificial Sequence: Synthetic oligonucleotide
ggcgcaggugagucgucuu

SEQ ID NO: 350407 - RNA, 19 nt, Artificial Sequence
  Description of Artificial Sequence: Synthetic oligonucleotide
ggcagaucgcugggacucu

SEQ ID NO: 350408 - RNA, 19 nt, Artificial Sequence
  Description of Artificial Sequence: Synthetic oligonucleotide
cccgguaggccaugacgcu

SEQ ID NO: 350409 - RNA, 19 nt, Artificial Sequence
  Description of Artificial Sequence: Synthetic oligonucleotide
cggacugaguccgaagcau

SEQ ID NO: 350410 - RNA, 19 nt, Artificial Sequence
  Description of Artificial Sequence: Synthetic oligonucleotide
cugcuccgggaggcaaacu

SEQ ID NO: 350411 - RNA, 19 nt, Artificial Sequence
  Description of Artificial Sequence: Synthetic oligonucleotide
cgagccaaucuggccuuga

SEQ ID NO: 350412 - RNA, 19 nt, Artificial Sequence
  Description of Artificial Sequence: Synthetic oligonucleotide
cagcuaugacuuggcccau

SEQ ID NO: 350413 - RNA, 19 nt, Artificial Sequence
  Description of Artificial Sequence: Synthetic oligonucleotide
caccgugauggggcugguu

SEQ ID NO: 350414 - RNA, 19 nt, Artificial Sequence
  Description of Artificial Sequence: Synthetic oligonucleotide
gcacgccuucugguagagu

SEQ ID NO: 350415 - RNA, 19 nt, Artificial Sequence
  Description of Artificial Sequence: Synthetic oligonucleotide
ccgcuguaccaggcgguua

SEQ ID NO: 350416 - RNA, 19 nt, Artificial Sequence
  Description of Artificial Sequence: Synthetic oligonucleotide
ccgacacauucuggcauuu

SEQ ID NO: 350417 - RNA, 19 nt, Artificial Sequence
  Description of Artificial Sequence: Synthetic oligonucleotide
ccgugggaugcuggcuugu

SEQ ID NO: 350418 - RNA, 19 nt, Artificial Sequence
  Description of Artificial Sequence: Synthetic oligonucleotide
ccaggucgaaagggucaau

SEQ ID NO: 350419 - RNA, 19 nt, Artificial Sequence
  Description of Artificial Sequence: Synthetic oligonucleotide
gcaccgugauggggcuggu

SEQ ID NO: 350420 - RNA, 19 nt, Artificial Sequence
  Description of Artificial Sequence: Synthetic oligonucleotide
ggcucgguucugggucauu

SEQ ID NO: 350421 - RNA, 19 nt, Artificial Sequence
  Description of Artificial Sequence: Synthetic oligonucleotide
ccucgccggcgagcugucu

SEQ ID NO: 350422 - RNA, 19 nt, Artificial Sequence
  Description of Artificial Sequence: Synthetic oligonucleotide
agauaauugugcuaggagc

SEQ ID NO: 350423 - RNA, 19 nt, Artificial Sequence
  Description of Artificial Sequence: Synthetic oligonucleotide
aacauguugagcugagucc

SEQ ID NO: 350424 - RNA, 19 nt, Artificial Sequence
  Description of Artificial Sequence: Synthetic oligonucleotide
ucaagguuagacuugauga

SEQ ID NO: 350425 - RNA, 19 nt, Artificial Sequence
  Description of Artificial Sequence: Synthetic oligonucleotide
aaaaguguaaccauaucuc

SEQ ID NO: 350426 - RNA, 19 nt, Artificial Sequence
  Description of Artificial Sequence: Synthetic oligonucleotide
aagauaauugugcuaggag

SEQ ID NO: 350427 - RNA, 19 nt, Artificial Sequence
  Description of Artificial Sequence: Synthetic oligonucleotide
cuuaacugcagcuugaguc

SEQ ID NO: 350428 - RNA, 19 nt, Artificial Sequence
  Description of Artificial Sequence: Synthetic oligonucleotide
uggaauagaaggcagacuc

SEQ ID NO: 350429 - RNA, 19 nt, Artificial Sequence
  Description of Artificial Sequence: Synthetic oligonucleotide
auaucucacagccugagag

SEQ ID NO: 350430 - RNA, 19 nt, Artificial Sequence
  Description of Artificial Sequence: Synthetic oligonucleotide
auuugugaaaggacgaucc

SEQ ID NO: 350431 - RNA, 19 nt, Artificial Sequence
  Description of Artificial Sequence: Synthetic oligonucleotide
aagucgaacaaaugucugg

SEQ ID NO: 350432 - RNA, 19 nt, Artificial Sequence
  Description of Artificial Sequence: Synthetic oligonucleotide
aauguaacggcugucaccu

SEQ ID NO: 350433 - RNA, 19 nt, Artificial Sequence
  Description of Artificial Sequence: Synthetic oligonucleotide
agaaugagggcugugaacg

SEQ ID NO: 350434 - RNA, 19 nt, Artificial Sequence
  Description of Artificial Sequence: Synthetic oligonucleotide
gacucuaagcucuacagug

SEQ ID NO: 350435 - RNA, 19 nt, Artificial Sequence
  Description of Artificial Sequence: Synthetic oligonucleotide
ucuucaaccuucuucagga

SEQ ID NO: 350436 - RNA, 19 nt, Artificial Sequence
  Description of Artificial Sequence: Synthetic oligonucleotide
agcaacaagguccucaauc

SEQ ID NO: 350437 - RNA, 19 nt, Artificial Sequence
  Description of Artificial Sequence: Synthetic oligonucleotide
aaggacgauccaaagaggc

SEQ ID NO: 350438 - RNA, 19 nt, Artificial Sequence
  Description of Artificial Sequence: Synthetic oligonucleotide
uugcuaaccaaucauuuca

SEQ ID NO: 350439 - RNA, 19 nt, Artificial Sequence
  Description of Artificial Sequence: Synthetic oligonucleotide
auagucacagcaucuugcc

SEQ ID NO: 350440 - RNA, 19 nt, Artificial Sequence
  Description of Artificial Sequence: Synthetic oligonucleotide
ucgauugccagccagaaau

SEQ ID NO: 350441 - RNA, 19 nt, Artificial Sequence
  Description of Artificial Sequence: Synthetic oligonucleotide
aacaacauuugggauaguc

SEQ ID NO: 350442 - RNA, 19 nt, Artificial Sequence
  Description of Artificial Sequence: Synthetic oligonucleotide
agagaguccacguugcuag

SEQ ID NO: 350443 - RNA, 19 nt, Artificial Sequence
  Description of Artificial Sequence: Synthetic oligonucleotide
acuggaaaguuuaacauuc

SEQ ID NO: 350444 - RNA, 19 nt, Artificial Sequence
  Description of Artificial Sequence: Synthetic oligonucleotide
ugaagucgaacaaaugucu

SEQ ID NO: 350445 - RNA, 19 nt, Artificial Sequence
  Description of Artificial Sequence: Synthetic oligonucleotide
uguuaucuggcucagcaac

SEQ ID NO: 350446 - RNA, 19 nt, Artificial Sequence
  Description of Artificial Sequence: Synthetic oligonucleotide
aaaguagaugaauuacaga

SEQ ID NO: 350447 - RNA, 19 nt, Artificial Sequence
  Description of Artificial Sequence: Synthetic oligonucleotide
aacaaaugucuggugaggg

SEQ ID NO: 350448 - RNA, 19 nt, Artificial Sequence
  Description of Artificial Sequence: Synthetic oligonucleotide
gacauuggcaccaauccgg

SEQ ID NO: 350449 - RNA, 19 nt, Artificial Sequence
  Description of Artificial Sequence: Synthetic oligonucleotide
uuaaguacaguguguaggu

SEQ ID NO: 350450 - RNA, 19 nt, Artificial Sequence
  Description of Artificial Sequence: Synthetic oligonucleotide
ucgaacaaaugucugguga

SEQ ID NO: 350451 - RNA, 19 nt, Artificial Sequence
  Description of Artificial Sequence: Synthetic oligonucleotide
agaucuugacucuaagcuc

SEQ ID NO: 350452 - RNA, 19 nt, Artificial Sequence
  Description of Artificial Sequence: Synthetic oligonucleotide
aagauuguguucauuagcu

SEQ ID NO: 350453 - RNA, 19 nt, Artificial Sequence
  Description of Artificial Sequence: Synthetic oligonucleotide
caacauuugggauagucac

SEQ ID NO: 350454 - RNA, 19 nt, Artificial Sequence
  Description of Artificial Sequence: Synthetic oligonucleotide
aaugaacaacauuugggau

SEQ ID NO: 350455 - RNA, 19 nt, Artificial Sequence
  Description of Artificial Sequence: Synthetic oligonucleotide
ccaaauuugugaaaggacg

SEQ ID NO: 350456 - RNA, 19 nt, Artificial Sequence
  Description of Artificial Sequence: Synthetic oligonucleotide
ugaaaggacgauccaaaga

SEQ ID NO: 350457 - RNA, 19 nt, Artificial Sequence
  Description of Artificial Sequence: Synthetic oligonucleotide
guggcuacgacugucaggg

SEQ ID NO: 350458 - RNA, 19 nt, Artificial Sequence
  Description of Artificial Sequence: Synthetic oligonucleotide
gauagcuugcucgugagug

SEQ ID NO: 350459 - RNA, 19 nt, Artificial Sequence
  Description of Artificial Sequence: Synthetic oligonucleotide
agagaagucauaguaacca

SEQ ID NO: 350460 - RNA, 19 nt, Artificial Sequence
  Description of Artificial Sequence: Synthetic oligonucleotide
cagucuuuugguuaugaag

SEQ ID NO: 350461 - RNA, 19 nt, Artificial Sequence
  Description of Artificial Sequence: Synthetic oligonucleotide
ugugaaaggacgauccaaa

SEQ ID NO: 350462 - RNA, 19 nt, Artificial Sequence
  Description of Artificial Sequence: Synthetic oligonucleotide
gauaauugugcuaggagca

SEQ ID NO: 350463 - RNA, 19 nt, Artificial Sequence
  Description of Artificial Sequence: Synthetic oligonucleotide
aagguuagacuugaugaag

SEQ ID NO: 350464 - RNA, 19 nt, Artificial Sequence
  Description of Artificial Sequence: Synthetic oligonucleotide
ucaaacuuauacacauucu

SEQ ID NO: 350465 - RNA, 19 nt, Artificial Sequence
  Description of Artificial Sequence: Synthetic oligonucleotide
gaacguguuggacaccacg

SEQ ID NO: 350466 - RNA, 19 nt, Artificial Sequence
  Description of Artificial Sequence: Synthetic oligonucleotide
gagaucuugacucuaagcu

SEQ ID NO: 350467 - RNA, 19 nt, Artificial Sequence
  Description of Artificial Sequence: Synthetic oligonucleotide
auagaagagagaguccacg

SEQ ID NO: 350468 - RNA, 19 nt, Artificial Sequence
  Description of Artificial Sequence: Synthetic oligonucleotide
aaacguaucugcucuguaa

SEQ ID NO: 350469 - RNA, 19 nt, Artificial Sequence
  Description of Artificial Sequence: Synthetic oligonucleotide
augaagucgaacaaauguc

SEQ ID NO: 350470 - RNA, 19 nt, Artificial Sequence
  Description of Artificial Sequence: Synthetic oligonucleotide
uuaugaagucgaacaaaug

SEQ ID NO: 350471 - RNA, 19 nt, Artificial Sequence
  Description of Artificial Sequence: Synthetic oligonucleotide
aacguguuggacaccacgg

SEQ ID NO: 350472 - RNA, 19 nt, Artificial Sequence
  Description of Artificial Sequence: Synthetic oligonucleotide
ccaaugauuaaguacagug

SEQ ID NO: 350473 - RNA, 19 nt, Artificial Sequence
  Description of Artificial Sequence: Synthetic oligonucleotide
cauuccuccgagcaggucc

SEQ ID NO: 350474 - RNA, 19 nt, Artificial Sequence
  Description of Artificial Sequence: Synthetic oligonucleotide
ugcuaaccaaucauuucag

SEQ ID NO: 350475 - RNA, 19 nt, Artificial Sequence
  Description of Artificial Sequence: Synthetic oligonucleotide
aaggauagcuugcucguga

SEQ ID NO: 350476 - RNA, 19 nt, Artificial Sequence
  Description of Artificial Sequence: Synthetic oligonucleotide
ucgaucuuccuuucagagg

SEQ ID NO: 350477 - RNA, 19 nt, Artificial Sequence
  Description of Artificial Sequence: Synthetic oligonucleotide
caaaggucagucucggcgg

SEQ ID NO: 350478 - RNA, 19 nt, Artificial Sequence
  Description of Artificial Sequence: Synthetic oligonucleotide
agggcugugaacguguugg

SEQ ID NO: 350479 - RNA, 19 nt, Artificial Sequence
  Description of Artificial Sequence: Synthetic oligonucleotide
ugguucgguccccacaugg

SEQ ID NO: 350480 - RNA, 19 nt, Artificial Sequence
  Description of Artificial Sequence: Synthetic oligonucleotide
uuugggguaaagagguucu

SEQ ID NO: 350481 - RNA, 19 nt, Artificial Sequence
  Description of Artificial Sequence: Synthetic oligonucleotide
uuaggugcaaugcucuggu

SEQ ID NO: 350482 - RNA, 19 nt, Artificial Sequence
  Description of Artificial Sequence: Synthetic oligonucleotide
auaguaaccacuggaaagu

SEQ ID NO: 350483 - RNA, 19 nt, Artificial Sequence
  Description of Artificial Sequence: Synthetic oligonucleotide
acugauuuagcauguucca

SEQ ID NO: 350484 - RNA, 19 nt, Artificial Sequence
  Description of Artificial Sequence: Synthetic oligonucleotide
ugugguagcgauucuggga

SEQ ID NO: 350485 - RNA, 19 nt, Artificial Sequence
  Description of Artificial Sequence: Synthetic oligonucleotide
uguuggacaccacgguggg

SEQ ID NO: 350486 - RNA, 19 nt, Artificial Sequence
  Description of Artificial Sequence: Synthetic oligonucleotide
acgucuggcacuugggcac

SEQ ID NO: 350487 - RNA, 19 nt, Artificial Sequence
  Description of Artificial Sequence: Synthetic oligonucleotide
aaccacuggaaaguuuaac

SEQ ID NO: 350488 - RNA, 19 nt, Artificial Sequence
  Description of Artificial Sequence: Synthetic oligonucleotide
guggguaggugucaaagcc

SEQ ID NO: 350489 - RNA, 19 nt, Artificial Sequence
  Description of Artificial Sequence: Synthetic oligonucleotide
uccaagagcgcgccggagg

SEQ ID NO: 350490 - RNA, 19 nt, Artificial Sequence
  Description of Artificial Sequence: Synthetic oligonucleotide
cuuguuaucuggcucagca

SEQ ID NO: 350491 - RNA, 19 nt, Artificial Sequence
  Description of Artificial Sequence: Synthetic oligonucleotide
gaacaaaugucuggugagg

SEQ ID NO: 350492 - RNA, 19 nt, Artificial Sequence
  Description of Artificial Sequence: Synthetic oligonucleotide
gauggaauagaaggcagac

SEQ ID NO: 350493 - RNA, 19 nt, Artificial Sequence
  Description of Artificial Sequence: Synthetic oligonucleotide
uguaaccauaucucaacuc

SEQ ID NO: 350494 - RNA, 19 nt, Artificial Sequence
  Description of Artificial Sequence: Synthetic oligonucleotide
ucaugggaugccaagggaa

SEQ ID NO: 350495 - RNA, 19 nt, Artificial Sequence
  Description of Artificial Sequence: Synthetic oligonucleotide
acugguaugugguagcgau

SEQ ID NO: 350496 - RNA, 19 nt, Artificial Sequence
  Description of Artificial Sequence: Synthetic oligonucleotide
caauguaacggcugucacc

SEQ ID NO: 350497 - RNA, 19 nt, Artificial Sequence
  Description of Artificial Sequence: Synthetic oligonucleotide
ugcugccagaagcagaucu

SEQ ID NO: 350498 - RNA, 19 nt, Artificial Sequence
  Description of Artificial Sequence: Synthetic oligonucleotide
gucaagguuagacuugaug

SEQ ID NO: 350499 - RNA, 19 nt, Artificial Sequence
  Description of Artificial Sequence: Synthetic oligonucleotide
acuaugaauugucuucacu

SEQ ID NO: 350500 - RNA, 19 nt, Artificial Sequence
  Description of Artificial Sequence: Synthetic oligonucleotide
ucuuuggucucauuugaaa

SEQ ID NO: 350501 - RNA, 19 nt, Artificial Sequence
  Description of Artificial Sequence: Synthetic oligonucleotide
uuugugaaaggacgaucca

SEQ ID NO: 350502 - RNA, 19 nt, Artificial Sequence
  Description of Artificial Sequence: Synthetic oligonucleotide
auacacauucuuguuaucu

SEQ ID NO: 350503 - RNA, 19 nt, Artificial Sequence
  Description of Artificial Sequence: Synthetic oligonucleotide
aacuggagauaaacgcccc

SEQ ID NO: 350504 - RNA, 19 nt, Artificial Sequence
  Description of Artificial Sequence: Synthetic oligonucleotide
ugauuaaguacagugugua

SEQ ID NO: 350505 - RNA, 19 nt, Artificial Sequence
  Description of Artificial Sequence: Synthetic oligonucleotide
cuugcuaaccaaucauuuc

SEQ ID NO: 350506 - RNA, 19 nt, Artificial Sequence
  Description of Artificial Sequence: Synthetic oligonucleotide
caaauuugugaaaggacga

SEQ ID NO: 350507 - RNA, 19 nt, Artificial Sequence
  Description of Artificial Sequence: Synthetic oligonucleotide
uguaacggcugucaccuuc

SEQ ID NO: 350508 - RNA, 19 nt, Artificial Sequence
  Description of Artificial Sequence: Synthetic oligonucleotide
cuaagcucuacagugcuug

SEQ ID NO: 350509 - RNA, 19 nt, Artificial Sequence
  Description of Artificial Sequence: Synthetic oligonucleotide
augaauugucuucacuccu

SEQ ID NO: 350510 - RNA, 19 nt, Artificial Sequence
  Description of Artificial Sequence: Synthetic oligonucleotide
agggacagacaaucugggc

SEQ ID NO: 350511 - RNA, 19 nt, Artificial Sequence
  Description of Artificial Sequence: Synthetic oligonucleotide
guucugauggcuguccgcg

SEQ ID NO: 350512 - RNA, 19 nt, Artificial Sequence
  Description of Artificial Sequence: Synthetic oligonucleotide
uuugguuaugaagucgaac

SEQ ID NO: 350513 - RNA, 19 nt, Artificial Sequence
  Description of Artificial Sequence: Synthetic oligonucleotide
aacuaaugugcuguucucu

SEQ ID NO: 350514 - RNA, 19 nt, Artificial Sequence
  Description of Artificial Sequence: Synthetic oligonucleotide
guaaccauaucucaacucu

SEQ ID NO: 350515 - RNA, 19 nt, Artificial Sequence
  Description of Artificial Sequence: Synthetic oligonucleotide
uugacgucuggcacuuggg

SEQ ID NO: 350516 - RNA, 19 nt, Artificial Sequence
  Description of Artificial Sequence: Synthetic oligonucleotide
agguuagacuugaugaagg

SEQ ID NO: 350517 - RNA, 19 nt, Artificial Sequence
  Description of Artificial Sequence: Synthetic oligonucleotide
uucgguccccacauggucc

SEQ ID NO: 350518 - RNA, 19 nt, Artificial Sequence
  Description of Artificial Sequence: Synthetic oligonucleotide
uagaagagagaguccacgu

SEQ ID NO: 350519 - RNA, 19 nt, Artificial Sequence
  Description of Artificial Sequence: Synthetic oligonucleotide
ugcaauguaacggcuguca

SEQ ID NO: 350520 - RNA, 19 nt, Artificial Sequence
  Description of Artificial Sequence: Synthetic oligonucleotide
acucuaagcucuacagugc

SEQ ID NO: 350521 - RNA, 19 nt, Artificial Sequence
  Description of Artificial Sequence: Synthetic oligonucleotide
aaauuugugaaaggacgau

SEQ ID NO: 350522 - RNA, 19 nt, Artificial Sequence
  Description of Artificial Sequence: Synthetic oligonucleotide
aacagggcgaaguucugau

SEQ ID NO: 350523 - RNA, 19 nt, Artificial Sequence
  Description of Artificial Sequence: Synthetic oligonucleotide
ugguuaugaagucgaacaa

SEQ ID NO: 350524 - RNA, 19 nt, Artificial Sequence
  Description of Artificial Sequence: Synthetic oligonucleotide
gaugaagguacaugcuuuc

SEQ ID NO: 350525 - RNA, 19 nt, Artificial Sequence
  Description of Artificial Sequence: Synthetic oligonucleotide
gaagacagcgcuggaaccc

SEQ ID NO: 350526 - RNA, 19 nt, Artificial Sequence
  Description of Artificial Sequence: Synthetic oligonucleotide
uggagaucuugacucuaag

SEQ ID NO: 350527 - RNA, 19 nt, Artificial Sequence
  Description of Artificial Sequence: Synthetic oligonucleotide
ggcaccgagggcuucaugg

SEQ ID NO: 350528 - RNA, 19 nt, Artificial Sequence
  Description of Artificial Sequence: Synthetic oligonucleotide
cuuaggugcaaugcucugg

SEQ ID NO: 350529 - RNA, 19 nt, Artificial Sequence
  Description of Artificial Sequence: Synthetic oligonucleotide
agauuguguucauuagcug

SEQ ID NO: 350530 - RNA, 19 nt, Artificial Sequence
  Description of Artificial Sequence: Synthetic oligonucleotide
agcgauucugggacaaugc

SEQ ID NO: 350531 - RNA, 19 nt, Artificial Sequence
  Description of Artificial Sequence: Synthetic oligonucleotide
gacuugaugaagguacaug

SEQ ID NO: 350532 - RNA, 19 nt, Artificial Sequence
  Description of Artificial Sequence: Synthetic oligonucleotide
uggaaagguccacauuugu

SEQ ID NO: 350533 - RNA, 19 nt, Artificial Sequence
  Description of Artificial Sequence: Synthetic oligonucleotide
gaagucgaacaaaugucug

SEQ ID NO: 350534 - RNA, 19 nt, Artificial Sequence
  Description of Artificial Sequence: Synthetic oligonucleotide
gugaaaggacgauccaaag

SEQ ID NO: 350535 - RNA, 19 nt, Artificial Sequence
  Description of Artificial Sequence: Synthetic oligonucleotide
augaacguacccuuggcuu

SEQ ID NO: 350536 - RNA, 19 nt, Artificial Sequence
  Description of Artificial Sequence: Synthetic oligonucleotide
uguugggccagcauucgau

SEQ ID NO: 350537 - RNA, 19 nt, Artificial Sequence
  Description of Artificial Sequence: Synthetic oligonucleotide
ugggccagcauucgauugc

SEQ ID NO: 350538 - RNA, 19 nt, Artificial Sequence
  Description of Artificial Sequence: Synthetic oligonucleotide
agacaaaacauugcugacu

SEQ ID NO: 350539 - RNA, 19 nt, Artificial Sequence
  Description of Artificial Sequence: Synthetic oligonucleotide
cauaucucaacucuuuucu

SEQ ID NO: 350540 - RNA, 19 nt, Artificial Sequence
  Description of Artificial Sequence: Synthetic oligonucleotide
agucgaacaaaugucuggu

SEQ ID NO: 350541 - RNA, 19 nt, Artificial Sequence
  Description of Artificial Sequence: Synthetic oligonucleotide
cuguccgcgaugaacguac

SEQ ID NO: 350542 - RNA, 19 nt, Artificial Sequence
  Description of Artificial Sequence: Synthetic oligonucleotide
cuaaugugcuguucucuug

SEQ ID NO: 350543 - RNA, 19 nt, Artificial Sequence
  Description of Artificial Sequence: Synthetic oligonucleotide
aguccacguugcuaggguc

SEQ ID NO: 350544 - RNA, 19 nt, Artificial Sequence
  Description of Artificial Sequence: Synthetic oligonucleotide
ggacagacaaucugggccc

SEQ ID NO: 350545 - RNA, 19 nt, Artificial Sequence
  Description of Artificial Sequence: Synthetic oligonucleotide
cacguugcuagggucaagg

SEQ ID NO: 350546 - RNA, 19 nt, Artificial Sequence
  Description of Artificial Sequence: Synthetic oligonucleotide
agucucggcggucccaccg

SEQ ID NO: 350547 - RNA, 19 nt, Artificial Sequence
  Description of Artificial Sequence: Synthetic oligonucleotide
cagcauucgauugccagcc

SEQ ID NO: 350548 - RNA, 19 nt, Artificial Sequence
  Description of Artificial Sequence: Synthetic oligonucleotide
gaacuaaugugcuguucuc

SEQ ID NO: 350549 - RNA, 19 nt, Artificial Sequence
  Description of Artificial Sequence: Synthetic oligonucleotide
cacgucgucggccaggaug

SEQ ID NO: 350550 - RNA, 19 nt, Artificial Sequence
  Description of Artificial Sequence: Synthetic oligonucleotide
ucuuaggugcaaugcucug

SEQ ID NO: 350551 - RNA, 19 nt, Artificial Sequence
  Description of Artificial Sequence: Synthetic oligonucleotide
ucgugagugucagaagcag

SEQ ID NO: 350552 - RNA, 19 nt, Artificial Sequence
  Description of Artificial Sequence: Synthetic oligonucleotide
uguugagucccacgaugga

SEQ ID NO: 350553 - RNA, 19 nt, Artificial Sequence
  Description of Artificial Sequence: Synthetic oligonucleotide
agaagucauaguaaccacu

SEQ ID NO: 350554 - RNA, 19 nt, Artificial Sequence
  Description of Artificial Sequence: Synthetic oligonucleotide
uccgcgaugaacguacccu

SEQ ID NO: 350555 - RNA, 19 nt, Artificial Sequence
  Description of Artificial Sequence: Synthetic oligonucleotide
aggauagcuugcucgugag

SEQ ID NO: 350556 - RNA, 19 nt, Artificial Sequence
  Description of Artificial Sequence: Synthetic oligonucleotide
guuugcaggggucuucaac

SEQ ID NO: 350557 - RNA, 19 nt, Artificial Sequence
  Description of Artificial Sequence: Synthetic oligonucleotide
gcucgugagugucagaagc

SEQ ID NO: 350558 - RNA, 19 nt, Artificial Sequence
  Description of Artificial Sequence: Synthetic oligonucleotide
cuucagggaacuugaugac

SEQ ID NO: 350559 - RNA, 19 nt, Artificial Sequence
  Description of Artificial Sequence: Synthetic oligonucleotide
auuccuccgagcagguccc

SEQ ID NO: 350560 - RNA, 19 nt, Artificial Sequence
  Description of Artificial Sequence: Synthetic oligonucleotide
cacaugguccaugagcuug

SEQ ID NO: 350561 - RNA, 19 nt, Artificial Sequence
  Description of Artificial Sequence: Synthetic oligonucleotide
ugaacguacccuuggcuuu

SEQ ID NO: 350562 - RNA, 19 nt, Artificial Sequence
  Description of Artificial Sequence: Synthetic oligonucleotide
guaggugccagaggcagag

SEQ ID NO: 350563 - RNA, 19 nt, Artificial Sequence
  Description of Artificial Sequence: Synthetic oligonucleotide
caaugauuaaguacagugu

SEQ ID NO: 350564 - RNA, 19 nt, Artificial Sequence
  Description of Artificial Sequence: Synthetic oligonucleotide
agcucuacagugcuugcaa

SEQ ID NO: 350565 - RNA, 19 nt, Artificial Sequence
  Description of Artificial Sequence: Synthetic oligonucleotide
uugggccagcauucgauug

SEQ ID NO: 350566 - RNA, 19 nt, Artificial Sequence
  Description of Artificial Sequence: Synthetic oligonucleotide
uagucacagcaucuugcca

SEQ ID NO: 350567 - RNA, 19 nt, Artificial Sequence
  Description of Artificial Sequence: Synthetic oligonucleotide
guacaugcuuucuugacgu

SEQ ID NO: 350568 - RNA, 19 nt, Artificial Sequence
  Description of Artificial Sequence: Synthetic oligonucleotide
aggucagucucggcggucc

SEQ ID NO: 350569 - RNA, 19 nt, Artificial Sequence
  Description of Artificial Sequence: Synthetic oligonucleotide
guaaccacuggaaaguuua

SEQ ID NO: 350570 - RNA, 19 nt, Artificial Sequence
  Description of Artificial Sequence: Synthetic oligonucleotide
cuugaaguuuagcucaaaa

SEQ ID NO: 350571 - RNA, 19 nt, Artificial Sequence
  Description of Artificial Sequence: Synthetic oligonucleotide
guggucuuaggugcaaugc

SEQ ID NO: 350572 - RNA, 19 nt, Artificial Sequence
  Description of Artificial Sequence: Synthetic oligonucleotide
uugcaaccgaaggauagcu

SEQ ID NO: 350573 - RNA, 19 nt, Artificial Sequence
  Description of Artificial Sequence: Synthetic oligonucleotide
ugcuugcaauguaacggcu

SEQ ID NO: 350574 - RNA, 19 nt, Artificial Sequence
  Description of Artificial Sequence: Synthetic oligonucleotide
uccaagcgagcaacaaggu

SEQ ID NO: 350575 - RNA, 19 nt, Artificial Sequence
  Description of Artificial Sequence: Synthetic oligonucleotide
ugacaaagggacagacaau

SEQ ID NO: 350576 - RNA, 19 nt, Artificial Sequence
  Description of Artificial Sequence: Synthetic oligonucleotide
cugagagugacucaaaguu

SEQ ID NO: 350577 - RNA, 19 nt, Artificial Sequence
  Description of Artificial Sequence: Synthetic oligonucleotide
cauugcugacuugcaaccg

SEQ ID NO: 350578 - RNA, 19 nt, Artificial Sequence
  Description of Artificial Sequence: Synthetic oligonucleotide
gauaucucacagccugaga

SEQ ID NO: 350579 - RNA, 19 nt, Artificial Sequence
  Description of Artificial Sequence: Synthetic oligonucleotide
uauacacauucuuguuauc

SEQ ID NO: 350580 - RNA, 19 nt, Artificial Sequence
  Description of Artificial Sequence: Synthetic oligonucleotide
acgauggaauagaaggcag

SEQ ID NO: 350581 - RNA, 19 nt, Artificial Sequence
  Description of Artificial Sequence: Synthetic oligonucleotide
agaguccacguugcuaggg

SEQ ID NO: 350582 - RNA, 19 nt, Artificial Sequence
  Description of Artificial Sequence: Synthetic oligonucleotide
aggaacuaaugugcuguuc

SEQ ID NO: 350583 - RNA, 19 nt, Artificial Sequence
  Description of Artificial Sequence: Synthetic oligonucleotide
uccaaugauuaaguacagu

SEQ ID NO: 350584 - RNA, 19 nt, Artificial Sequence
  Description of Artificial Sequence: Synthetic oligonucleotide
aaccauaucucaacucuuu

SEQ ID NO: 350585 - RNA, 19 nt, Artificial Sequence
  Description of Artificial Sequence: Synthetic oligonucleotide
agcccgagcaggcagacuu

SEQ ID NO: 350586 - RNA, 19 nt, Artificial Sequence
  Description of Artificial Sequence: Synthetic oligonucleotide
guuaugaagucgaacaaau

SEQ ID NO: 350587 - RNA, 19 nt, Artificial Sequence
  Description of Artificial Sequence: Synthetic oligonucleotide
cacuccuugcuaaccaauc

SEQ ID NO: 350588 - RNA, 19 nt, Artificial Sequence
  Description of Artificial Sequence: Synthetic oligonucleotide
ugcucgugagugucagaag

SEQ ID NO: 350589 - RNA, 19 nt, Artificial Sequence
  Description of Artificial Sequence: Synthetic oligonucleotide
gucgaacaaaugucuggug

SEQ ID NO: 350590 - RNA, 19 nt, Artificial Sequence
  Description of Artificial Sequence: Synthetic oligonucleotide
aggcacaaccaccacuggu

SEQ ID NO: 350591 - RNA, 19 nt, Artificial Sequence
  Description of Artificial Sequence: Synthetic oligonucleotide
caaacuuauacacauucuu

SEQ ID NO: 350592 - RNA, 19 nt, Artificial Sequence
  Description of Artificial Sequence: Synthetic oligonucleotide
ggcuacgacugucagggcc

SEQ ID NO: 350593 - RNA, 19 nt, Artificial Sequence
  Description of Artificial Sequence: Synthetic oligonucleotide
ggaacuaaugugcuguucu

SEQ ID NO: 350594 - RNA, 19 nt, Artificial Sequence
  Description of Artificial Sequence: Synthetic oligonucleotide
agucccacgauggaauaga

SEQ ID NO: 350595 - RNA, 19 nt, Artificial Sequence
  Description of Artificial Sequence: Synthetic oligonucleotide
ugggcucccggcaaagguc

SEQ ID NO: 350596 - RNA, 19 nt, Artificial Sequence
  Description of Artificial Sequence: Synthetic oligonucleotide
acccggguggucuuaggug

SEQ ID NO: 350597 - RNA, 19 nt, Artificial Sequence
  Description of Artificial Sequence: Synthetic oligonucleotide
accauaucucaacucuuuu

SEQ ID NO: 350598 - RNA, 19 nt, Artificial Sequence
  Description of Artificial Sequence: Synthetic oligonucleotide
uggucucauuugaaacaga

SEQ ID NO: 350599 - RNA, 19 nt, Artificial Sequence
  Description of Artificial Sequence: Synthetic oligonucleotide
gcgaugaacguacccuugg

SEQ ID NO: 350600 - RNA, 19 nt, Artificial Sequence
  Description of Artificial Sequence: Synthetic oligonucleotide
gguggcuacgacugucagg

SEQ ID NO: 350601 - RNA, 19 nt, Artificial Sequence
  Description of Artificial Sequence: Synthetic oligonucleotide
cauucgauugccagccaga

SEQ ID NO: 350602 - RNA, 19 nt, Artificial Sequence
  Description of Artificial Sequence: Synthetic oligonucleotide
gaaggauagcuugcucgug

SEQ ID NO: 350603 - RNA, 19 nt, Artificial Sequence
  Description of Artificial Sequence: Synthetic oligonucleotide
uucgauugccagccagaaa

SEQ ID NO: 350604 - RNA, 19 nt, Artificial Sequence
  Description of Artificial Sequence: Synthetic oligonucleotide
auggaauagaaggcagacu

SEQ ID NO: 350605 - RNA, 19 nt, Artificial Sequence
  Description of Artificial Sequence: Synthetic oligonucleotide
gaugguucgguccccacau

SEQ ID NO: 350606 - RNA, 19 nt, Artificial Sequence
  Description of Artificial Sequence: Synthetic oligonucleotide
caacaaacaaggcuguggu

SEQ ID NO: 350607 - RNA, 19 nt, Artificial Sequence
  Description of Artificial Sequence: Synthetic oligonucleotide
ccacgauggaauagaaggc

SEQ ID NO: 350608 - RNA, 19 nt, Artificial Sequence
  Description of Artificial Sequence: Synthetic oligonucleotide
ucuaagcucuacagugcuu

SEQ ID NO: 350609 - RNA, 19 nt, Artificial Sequence
  Description of Artificial Sequence: Synthetic oligonucleotide
caacaagguccucaaucuc

SEQ ID NO: 350610 - RNA, 19 nt, Artificial Sequence
  Description of Artificial Sequence: Synthetic oligonucleotide
agacauacaugagccccag

SEQ ID NO: 350611 - RNA, 19 nt, Artificial Sequence
  Description of Artificial Sequence: Synthetic oligonucleotide
caacaggaagacagcgcug

SEQ ID NO: 350612 - RNA, 19 nt, Artificial Sequence
  Description of Artificial Sequence: Synthetic oligonucleotide
ggaauagaaggcagacucc

SEQ ID NO: 350613 - RNA, 19 nt, Artificial Sequence
  Description of Artificial Sequence: Synthetic oligonucleotide
ggcagcaacaaacaaggcu

SEQ ID NO: 350614 - RNA, 19 nt, Artificial Sequence
  Description of Artificial Sequence: Synthetic oligonucleotide
ccauaucucaacucuuuuc

SEQ ID NO: 350615 - RNA, 19 nt, Artificial Sequence
  Description of Artificial Sequence: Synthetic oligonucleotide
acguaucugcucuguaaaa

SEQ ID NO: 350616 - RNA, 19 nt, Artificial Sequence
  Description of Artificial Sequence: Synthetic oligonucleotide
gguggucuuaggugcaaug

SEQ ID NO: 350617 - RNA, 19 nt, Artificial Sequence
  Description of Artificial Sequence: Synthetic oligonucleotide
guucgguccccacaugguc

SEQ ID NO: 350618 - RNA, 19 nt, Artificial Sequence
  Description of Artificial Sequence: Synthetic oligonucleotide
gagucccacgauggaauag

SEQ ID NO: 350619 - RNA, 19 nt, Artificial Sequence
  Description of Artificial Sequence: Synthetic oligonucleotide
cucgugagugucagaagca

SEQ ID NO: 350620 - RNA, 19 nt, Artificial Sequence
  Description of Artificial Sequence: Synthetic oligonucleotide
acaaagggacagacaaucu

SEQ ID NO: 350621 - RNA, 19 nt, Artificial Sequence
  Description of Artificial Sequence: Synthetic oligonucleotide
augaagguacaugcuuucu

SEQ ID NO: 350622 - RNA, 19 nt, Artificial Sequence
  Description of Artificial Sequence: Synthetic oligonucleotide
gcauucgauugccagccag

SEQ ID NO: 350623 - RNA, 19 nt, Artificial Sequence
  Description of Artificial Sequence: Synthetic oligonucleotide
ucgguccccacauggucca

SEQ ID NO: 350624 - RNA, 19 nt, Artificial Sequence
  Description of Artificial Sequence: Synthetic oligonucleotide
accaauccggauccacagu

SEQ ID NO: 350625 - RNA, 19 nt, Artificial Sequence
  Description of Artificial Sequence: Synthetic oligonucleotide
ugcaaccgaaggauagcuu

SEQ ID NO: 350626 - RNA, 19 nt, Artificial Sequence
  Description of Artificial Sequence: Synthetic oligonucleotide
ugaacguguuggacaccac

SEQ ID NO: 350627 - RNA, 19 nt, Artificial Sequence
  Description of Artificial Sequence: Synthetic oligonucleotide
guagagccuggaccguugc

SEQ ID NO: 350628 - RNA, 19 nt, Artificial Sequence
  Description of Artificial Sequence: Synthetic oligonucleotide
auucgauugccagccagaa

SEQ ID NO: 350629 - RNA, 19 nt, Artificial Sequence
  Description of Artificial Sequence: Synthetic oligonucleotide
acguacccuuggcuuuggc

SEQ ID NO: 350630 - RNA, 19 nt, Artificial Sequence
  Description of Artificial Sequence: Synthetic oligonucleotide
agacuuccgcugugggaag

SEQ ID NO: 350631 - RNA, 19 nt, Artificial Sequence
  Description of Artificial Sequence: Synthetic oligonucleotide
aacaguggagggagcuucu

SEQ ID NO: 350632 - RNA, 19 nt, Artificial Sequence
  Description of Artificial Sequence: Synthetic oligonucleotide
gcaagggcgagagaaugag

SEQ ID NO: 350633 - RNA, 19 nt, Artificial Sequence
  Description of Artificial Sequence: Synthetic oligonucleotide
ugaccugauccuccuucau

SEQ ID NO: 350634 - RNA, 19 nt, Artificial Sequence
  Description of Artificial Sequence: Synthetic oligonucleotide
ucagucucggcggucccac

SEQ ID NO: 350635 - RNA, 19 nt, Artificial Sequence
  Description of Artificial Sequence: Synthetic oligonucleotide
uguccgcgaugaacguacc

SEQ ID NO: 350636 - RNA, 19 nt, Artificial Sequence
  Description of Artificial Sequence: Synthetic oligonucleotide
cccggguggucuuaggugc

SEQ ID NO: 350637 - RNA, 19 nt, Artificial Sequence
  Description of Artificial Sequence: Synthetic oligonucleotide
gaacagggcgaaguucuga

SEQ ID NO: 350638 - RNA, 19 nt, Artificial Sequence
  Description of Artificial Sequence: Synthetic oligonucleotide
cacaaccaccacugguaug

SEQ ID NO: 350639 - RNA, 19 nt, Artificial Sequence
  Description of Artificial Sequence: Synthetic oligonucleotide
gcaauguaacggcugucac

SEQ ID NO: 350640 - RNA, 19 nt, Artificial Sequence
  Description of Artificial Sequence: Synthetic oligonucleotide
gucucggcggucccaccgg

SEQ ID NO: 350641 - RNA, 19 nt, Artificial Sequence
  Description of Artificial Sequence: Synthetic oligonucleotide
gcaccgagggcuucauggg

SEQ ID NO: 350642 - RNA, 19 nt, Artificial Sequence
  Description of Artificial Sequence: Synthetic oligonucleotide
augagggcugugaacgugu

SEQ ID NO: 350643 - RNA, 19 nt, Artificial Sequence
  Description of Artificial Sequence: Synthetic oligonucleotide
uucuugacgucuggcacuu

SEQ ID NO: 350644 - RNA, 19 nt, Artificial Sequence
  Description of Artificial Sequence: Synthetic oligonucleotide
ugguagcgauucugggaca

SEQ ID NO: 350645 - RNA, 19 nt, Artificial Sequence
  Description of Artificial Sequence: Synthetic oligonucleotide
aggcagacuccaaauuugu

SEQ ID NO: 350646 - RNA, 19 nt, Artificial Sequence
  Description of Artificial Sequence: Synthetic oligonucleotide
cagucguggcgugcgaacc

SEQ ID NO: 350647 - RNA, 19 nt, Artificial Sequence
  Description of Artificial Sequence: Synthetic oligonucleotide
uaguaaccacuggaaaguu

SEQ ID NO: 350648 - RNA, 19 nt, Artificial Sequence
  Description of Artificial Sequence: Synthetic oligonucleotide
cacauuuguaaugccaacu

SEQ ID NO: 350649 - RNA, 19 nt, Artificial Sequence
  Description of Artificial Sequence: Synthetic oligonucleotide
uccccacaugguccaugag

SEQ ID NO: 350650 - RNA, 19 nt, Artificial Sequence
  Description of Artificial Sequence: Synthetic oligonucleotide
guccgcgaugaacguaccc

SEQ ID NO: 350651 - RNA, 19 nt, Artificial Sequence
  Description of Artificial Sequence: Synthetic oligonucleotide
ggguccaagagcgcgccgg

SEQ ID NO: 350652 - RNA, 19 nt, Artificial Sequence
  Description of Artificial Sequence: Synthetic oligonucleotide
ugucuggugaggggugagu

SEQ ID NO: 350653 - RNA, 19 nt, Artificial Sequence
  Description of Artificial Sequence: Synthetic oligonucleotide
uccuccgagcaggucccgg

SEQ ID NO: 350654 - RNA, 19 nt, Artificial Sequence
  Description of Artificial Sequence: Synthetic oligonucleotide
cucuaagcucuacagugcu

SEQ ID NO: 350655 - RNA, 19 nt, Artificial Sequence
  Description of Artificial Sequence: Synthetic oligonucleotide
uugcaauguaacggcuguc

SEQ ID NO: 350656 - RNA, 19 nt, Artificial Sequence
  Description of Artificial Sequence: Synthetic oligonucleotide
agacgggcagugagggcac

SEQ ID NO: 350657 - RNA, 19 nt, Artificial Sequence
  Description of Artificial Sequence: Synthetic oligonucleotide
gaguccacguugcuagggu

SEQ ID NO: 350658 - RNA, 19 nt, Artificial Sequence
  Description of Artificial Sequence: Synthetic oligonucleotide
ggcgaaguucugauggcug

SEQ ID NO: 350659 - RNA, 19 nt, Artificial Sequence
  Description of Artificial Sequence: Synthetic oligonucleotide
gcgauucugggacaaugca

SEQ ID NO: 350660 - RNA, 19 nt, Artificial Sequence
  Description of Artificial Sequence: Synthetic oligonucleotide
ccacauuuguaaugccaac

SEQ ID NO: 350661 - RNA, 19 nt, Artificial Sequence
  Description of Artificial Sequence: Synthetic oligonucleotide
augguucgguccccacaug

SEQ ID NO: 350662 - RNA, 19 nt, Artificial Sequence
  Description of Artificial Sequence: Synthetic oligonucleotide
agcauucgauugccagcca

SEQ ID NO: 350663 - RNA, 19 nt, Artificial Sequence
  Description of Artificial Sequence: Synthetic oligonucleotide
agaacagggcgaaguucug

SEQ ID NO: 350664 - RNA, 19 nt, Artificial Sequence
  Description of Artificial Sequence: Synthetic oligonucleotide
agccacugauuuagcaugu

SEQ ID NO: 350665 - RNA, 19 nt, Artificial Sequence
  Description of Artificial Sequence: Synthetic oligonucleotide
cugugguuuccaguccuuc

SEQ ID NO: 350666 - RNA, 19 nt, Artificial Sequence
  Description of Artificial Sequence: Synthetic oligonucleotide
cuuucagagguguccaguu

SEQ ID NO: 350667 - RNA, 19 nt, Artificial Sequence
  Description of Artificial Sequence: Synthetic oligonucleotide
ggcgagagaaugagggcug

SEQ ID NO: 350668 - RNA, 19 nt, Artificial Sequence
  Description of Artificial Sequence: Synthetic oligonucleotide
gaacccggcggcgccauuc

SEQ ID NO: 350669 - RNA, 19 nt, Artificial Sequence
  Description of Artificial Sequence: Synthetic oligonucleotide
agcgcgccggaggggacgc

SEQ ID NO: 350670 - RNA, 19 nt, Artificial Sequence
  Description of Artificial Sequence: Synthetic oligonucleotide
ggaugguucgguccccaca

SEQ ID NO: 350671 - RNA, 19 nt, Artificial Sequence
  Description of Artificial Sequence: Synthetic oligonucleotide
ggcacaaccaccacuggua

SEQ ID NO: 350672 - RNA, 19 nt, Artificial Sequence
  Description of Artificial Sequence: Synthetic oligonucleotide
ucccggcaaaggucagucu

SEQ ID NO: 350673 - RNA, 19 nt, Artificial Sequence
  Description of Artificial Sequence: Synthetic oligonucleotide
cagggccgaccucugcagc

SEQ ID NO: 350674 - RNA, 19 nt, Artificial Sequence
  Description of Artificial Sequence: Synthetic oligonucleotide
gcuacgacugucagggcca

SEQ ID NO: 350675 - RNA, 19 nt, Artificial Sequence
  Description of Artificial Sequence: Synthetic oligonucleotide
cgagcaggcagacuuccgc

SEQ ID NO: 350676 - RNA, 19 nt, Artificial Sequence
  Description of Artificial Sequence: Synthetic oligonucleotide
caaacguaucugcucugua

SEQ ID NO: 350677 - RNA, 19 nt, Artificial Sequence
  Description of Artificial Sequence: Synthetic oligonucleotide
ggucucauuugaaacagau

SEQ ID NO: 350678 - RNA, 19 nt, Artificial Sequence
  Description of Artificial Sequence: Synthetic oligonucleotide
cugggugguggcuacgacu

SEQ ID NO: 350679 - RNA, 19 nt, Artificial Sequence
  Description of Artificial Sequence: Synthetic oligonucleotide
gacuugcaaccgaaggaua

SEQ ID NO: 350680 - RNA, 19 nt, Artificial Sequence
  Description of Artificial Sequence: Synthetic oligonucleotide
gggaugccaagggaaggcc

SEQ ID NO: 350681 - RNA, 19 nt, Artificial Sequence
  Description of Artificial Sequence: Synthetic oligonucleotide
cucggcggucccaccgggc

SEQ ID NO: 350682 - RNA, 19 nt, Artificial Sequence
  Description of Artificial Sequence: Synthetic oligonucleotide
gucgucggccaggaugggc

SEQ ID NO: 350683 - RNA, 19 nt, Artificial Sequence
  Description of Artificial Sequence: Synthetic oligonucleotide
guggagaucuugacucuaa

SEQ ID NO: 350684 - RNA, 19 nt, Artificial Sequence
  Description of Artificial Sequence: Synthetic oligonucleotide
gcgagcaacaagguccuca

SEQ ID NO: 350685 - RNA, 19 nt, Artificial Sequence
  Description of Artificial Sequence: Synthetic oligonucleotide
caccgagggcuucauggga

SEQ ID NO: 350686 - RNA, 19 nt, Artificial Sequence
  Description of Artificial Sequence: Synthetic oligonucleotide
uggcuacgacugucagggc

SEQ ID NO: 350687 - RNA, 19 nt, Artificial Sequence
  Description of Artificial Sequence: Synthetic oligonucleotide
uuccugcuuugggguaaag

SEQ ID NO: 350688 - RNA, 19 nt, Artificial Sequence
  Description of Artificial Sequence: Synthetic oligonucleotide
cuuauuccuuucacacuau

SEQ ID NO: 350689 - RNA, 19 nt, Artificial Sequence
  Description of Artificial Sequence: Synthetic oligonucleotide
uugcugagacgggcaguga

SEQ ID NO: 350690 - RNA, 19 nt, Artificial Sequence
  Description of Artificial Sequence: Synthetic oligonucleotide
uuccuccgagcaggucccg

SEQ ID NO: 350691 - RNA, 19 nt, Artificial Sequence
  Description of Artificial Sequence: Synthetic oligonucleotide
cuguugggccagcauucga

SEQ ID NO: 350692 - RNA, 19 nt, Artificial Sequence
  Description of Artificial Sequence: Synthetic oligonucleotide
gcaucaugacaaagggaca

SEQ ID NO: 350693 - RNA, 19 nt, Artificial Sequence
  Description of Artificial Sequence: Synthetic oligonucleotide
gguagcgauucugggacaa

SEQ ID NO: 350694 - RNA, 19 nt, Artificial Sequence
  Description of Artificial Sequence: Synthetic oligonucleotide
gggccagcauucgauugcc

SEQ ID NO: 350695 - RNA, 19 nt, Artificial Sequence
  Description of Artificial Sequence: Synthetic oligonucleotide
ccagucguggcgugcgaac

SEQ ID NO: 350696 - RNA, 19 nt, Artificial Sequence
  Description of Artificial Sequence: Synthetic oligonucleotide
ucuugacgucuggcacuug

SEQ ID NO: 350697 - RNA, 19 nt, Artificial Sequence
  Description of Artificial Sequence: Synthetic oligonucleotide
cagucucggcggucccacc

SEQ ID NO: 350698 - RNA, 19 nt, Artificial Sequence
  Description of Artificial Sequence: Synthetic oligonucleotide
ggcggucccaccgggcagg

SEQ ID NO: 350699 - RNA, 19 nt, Artificial Sequence
  Description of Artificial Sequence: Synthetic oligonucleotide
gcaccaauccggauccaca

SEQ ID NO: 350700 - RNA, 19 nt, Artificial Sequence
  Description of Artificial Sequence: Synthetic oligonucleotide
auccggauccacagugcaa

SEQ ID NO: 350701 - RNA, 19 nt, Artificial Sequence
  Description of Artificial Sequence: Synthetic oligonucleotide
gggcgagagaaugagggcu

SEQ ID NO: 350702 - RNA, 19 nt, Artificial Sequence
  Description of Artificial Sequence: Synthetic oligonucleotide
cacacgucgucggccagga

SEQ ID NO: 350703 - RNA, 19 nt, Artificial Sequence
  Description of Artificial Sequence: Synthetic oligonucleotide
cgauugccagccagaaaug

SEQ ID NO: 350704 - RNA, 19 nt, Artificial Sequence
  Description of Artificial Sequence: Synthetic oligonucleotide
cacugguaugugguagcga

SEQ ID NO: 350705 - RNA, 19 nt, Artificial Sequence
  Description of Artificial Sequence: Synthetic oligonucleotide
ugcaagcgugaagggcauc

SEQ ID NO: 350706 - RNA, 19 nt, Artificial Sequence
  Description of Artificial Sequence: Synthetic oligonucleotide
ggucagucucggcgguccc

SEQ ID NO: 350707 - RNA, 19 nt, Artificial Sequence
  Description of Artificial Sequence: Synthetic oligonucleotide
ccgagcaggcagacuuccg

SEQ ID NO: 350708 - RNA, 19 nt, Artificial Sequence
  Description of Artificial Sequence: Synthetic oligonucleotide
caucaugcuuggugaggua

SEQ ID NO: 350709 - RNA, 19 nt, Artificial Sequence
  Description of Artificial Sequence: Synthetic oligonucleotide
gggccgaccucugcagccg

SEQ ID NO: 350710 - RNA, 19 nt, Artificial Sequence
  Description of Artificial Sequence: Synthetic oligonucleotide
agcgagcaacaagguccuc

SEQ ID NO: 350711 - RNA, 19 nt, Artificial Sequence
  Description of Artificial Sequence: Synthetic oligonucleotide
ccuugcuaaccaaucauuu

SEQ ID NO: 350712 - RNA, 19 nt, Artificial Sequence
  Description of Artificial Sequence: Synthetic oligonucleotide
gucagucucggcgguccca

SEQ ID NO: 350713 - RNA, 19 nt, Artificial Sequence
  Description of Artificial Sequence: Synthetic oligonucleotide
gucccacgauggaauagaa

SEQ ID NO: 350714 - RNA, 19 nt, Artificial Sequence
  Description of Artificial Sequence: Synthetic oligonucleotide
auguaacggcugucaccuu

SEQ ID NO: 350715 - RNA, 19 nt, Artificial Sequence
  Description of Artificial Sequence: Synthetic oligonucleotide
uacgacugucagggccaac

SEQ ID NO: 350716 - RNA, 19 nt, Artificial Sequence
  Description of Artificial Sequence: Synthetic oligonucleotide
gggcucccggcaaagguca

SEQ ID NO: 350717 - RNA, 19 nt, Artificial Sequence
  Description of Artificial Sequence: Synthetic oligonucleotide
ggcggcgccauuccuccga

SEQ ID NO: 350718 - RNA, 19 nt, Artificial Sequence
  Description of Artificial Sequence: Synthetic oligonucleotide
cgcgaugaacguacccuug

SEQ ID NO: 350719 - RNA, 19 nt, Artificial Sequence
  Description of Artificial Sequence: Synthetic oligonucleotide
ccgagggcuucaugggaug

SEQ ID NO: 350720 - RNA, 19 nt, Artificial Sequence
  Description of Artificial Sequence: Synthetic oligonucleotide
cgugagugucagaagcaga

SEQ ID NO: 350721 - RNA, 19 nt, Artificial Sequence
  Description of Artificial Sequence: Synthetic oligonucleotide
ggugagguaguggguaggu

SEQ ID NO: 350722 - RNA, 19 nt, Artificial Sequence
  Description of Artificial Sequence: Synthetic oligonucleotide
ccagggacccgcacacguc

SEQ ID NO: 350723 - RNA, 19 nt, Artificial Sequence
  Description of Artificial Sequence: Synthetic oligonucleotide
cgagcaacaagguccucaa

SEQ ID NO: 350724 - RNA, 19 nt, Artificial Sequence
  Description of Artificial Sequence: Synthetic oligonucleotide
gcggcgccauuccuccgag

SEQ ID NO: 350725 - RNA, 19 nt, Artificial Sequence
  Description of Artificial Sequence: Synthetic oligonucleotide
gacuuccgcugugggaagu

SEQ ID NO: 350726 - RNA, 19 nt, Artificial Sequence
  Description of Artificial Sequence: Synthetic oligonucleotide
agggacccgcacacgucgu

SEQ ID NO: 350727 - RNA, 19 nt, Artificial Sequence
  Description of Artificial Sequence: Synthetic oligonucleotide
cgaaggauagcuugcucgu

SEQ ID NO: 350728 - RNA, 19 nt, Artificial Sequence
  Description of Artificial Sequence: Synthetic oligonucleotide
caggaacuaaugugcuguu

SEQ ID NO: 350729 - RNA, 19 nt, Artificial Sequence
  Description of Artificial Sequence: Synthetic oligonucleotide
cugguaugugguagcgauu

SEQ ID NO: 350730 - RNA, 19 nt, Artificial Sequence
  Description of Artificial Sequence: Synthetic oligonucleotide
gggauagucacagcaucuu

SEQ ID NO: 350731 - RNA, 19 nt, Artificial Sequence
  Description of Artificial Sequence: Synthetic oligonucleotide
cugcaagcgugaagggcau

SEQ ID NO: 350732 - RNA, 19 nt, Artificial Sequence
  Description of Artificial Sequence: Synthetic oligonucleotide
gggguccagucguggcgug

SEQ ID NO: 350733 - RNA, 19 nt, Artificial Sequence
  Description of Artificial Sequence: Synthetic oligonucleotide
gguucgguccccacauggu

SEQ ID NO: 350734 - RNA, 19 nt, Artificial Sequence
  Description of Artificial Sequence: Synthetic oligonucleotide
cuacgacugucagggccaa

SEQ ID NO: 350735 - RNA, 19 nt, Artificial Sequence
  Description of Artificial Sequence: Synthetic oligonucleotide
agggcaccgagggcuucau

SEQ ID NO: 350736 - RNA, 19 nt, Artificial Sequence
  Description of Artificial Sequence: Synthetic oligonucleotide
gggcaccgagggcuucaug

SEQ ID NO: 350737 - RNA, 19 nt, Artificial Sequence
  Description of Artificial Sequence: Synthetic oligonucleotide
ccuucauggaugguucggu

SEQ ID NO: 350738 - RNA, 19 nt, Artificial Sequence
  Description of Artificial Sequence: Synthetic oligonucleotide
guagcgauucugggacaau

SEQ ID NO: 350739 - RNA, 19 nt, Artificial Sequence
  Description of Artificial Sequence: Synthetic oligonucleotide
gggcccaaacguaucugcu

SEQ ID NO: 350740 - RNA, 19 nt, Artificial Sequence
  Description of Artificial Sequence: Synthetic oligonucleotide
ccaaacguaucugcucugu

SEQ ID NO: 350741 - RNA, 19 nt, Artificial Sequence
  Description of Artificial Sequence: Synthetic oligonucleotide
gaacaacauuugggauagu

SEQ ID NO: 350742 - RNA, 19 nt, Artificial Sequence
  Description of Artificial Sequence: Synthetic oligonucleotide
caccgggcagggccgaccu

SEQ ID NO: 350743 - RNA, 19 nt, Artificial Sequence
  Description of Artificial Sequence: Synthetic oligonucleotide
gcuguccgcgaugaacgua

SEQ ID NO: 350744 - RNA, 19 nt, Artificial Sequence
  Description of Artificial Sequence: Synthetic oligonucleotide
ggcuguccgcgaugaacgu

SEQ ID NO: 350745 - RNA, 19 nt, Artificial Sequence
  Description of Artificial Sequence: Synthetic oligonucleotide
cccggcggagcccgagcag

SEQ ID NO: 350746 - RNA, 19 nt, Artificial Sequence
  Description of Artificial Sequence: Synthetic oligonucleotide
ccacguugcuagggucaag

SEQ ID NO: 350747 - RNA, 19 nt, Artificial Sequence
  Description of Artificial Sequence: Synthetic oligonucleotide
gcgccggaggggacgccag

SEQ ID NO: 350748 - RNA, 19 nt, Artificial Sequence
  Description of Artificial Sequence: Synthetic oligonucleotide
gcgagagaaugagggcugu

SEQ ID NO: 350749 - RNA, 19 nt, Artificial Sequence
  Description of Artificial Sequence: Synthetic oligonucleotide
gagcccgagcaggcagacu

SEQ ID NO: 350750 - RNA, 19 nt, Artificial Sequence
  Description of Artificial Sequence: Synthetic oligonucleotide
ccgcgaugaacguacccuu

SEQ ID NO: 350751 - RNA, 19 nt, Artificial Sequence
  Description of Artificial Sequence: Synthetic oligonucleotide
cggcggucccaccgggcag

SEQ ID NO: 350752 - RNA, 19 nt, Artificial Sequence
  Description of Artificial Sequence: Synthetic oligonucleotide
gcgcgccggaggggacgcc

SEQ ID NO: 350753 - RNA, 19 nt, Artificial Sequence
  Description of Artificial Sequence: Synthetic oligonucleotide
aagagggucagauagauuc

SEQ ID NO: 350754 - RNA, 19 nt, Artificial Sequence
  Description of Artificial Sequence: Synthetic oligonucleotide
gaagguacuauuuuguggg

SEQ ID NO: 350755 - RNA, 19 nt, Artificial Sequence
  Description of Artificial Sequence: Synthetic oligonucleotide
aaugauccgauauaggugu

SEQ ID NO: 350756 - RNA, 19 nt, Artificial Sequence
  Description of Artificial Sequence: Synthetic oligonucleotide
ucuguagacgaaaagaggc

SEQ ID NO: 350757 - RNA, 19 nt, Artificial Sequence
  Description of Artificial Sequence: Synthetic oligonucleotide
aaacuuacaaguucugcuc

SEQ ID NO: 350758 - RNA, 19 nt, Artificial Sequence
  Description of Artificial Sequence: Synthetic oligonucleotide
aaaccgagccaccacaagc

SEQ ID NO: 350759 - RNA, 19 nt, Artificial Sequence
  Description of Artificial Sequence: Synthetic oligonucleotide
aauauaagguauucagcag

SEQ ID NO: 350760 - RNA, 19 nt, Artificial Sequence
  Description of Artificial Sequence: Synthetic oligonucleotide
uauguuauaaacgaaucug

SEQ ID NO: 350761 - RNA, 19 nt, Artificial Sequence
  Description of Artificial Sequence: Synthetic oligonucleotide
aucauauaaacuuuaggug

SEQ ID NO: 350762 - RNA, 19 nt, Artificial Sequence
  Description of Artificial Sequence: Synthetic oligonucleotide
aaguucagaacucuaaagu

SEQ ID NO: 350763 - RNA, 19 nt, Artificial Sequence
  Description of Artificial Sequence: Synthetic oligonucleotide
ugaaugauccgauauaggu

SEQ ID NO: 350764 - RNA, 19 nt, Artificial Sequence
  Description of Artificial Sequence: Synthetic oligonucleotide
uauacuguugagaugagau

SEQ ID NO: 350765 - RNA, 19 nt, Artificial Sequence
  Description of Artificial Sequence: Synthetic oligonucleotide
gaucgaauggugaagagag

SEQ ID NO: 350766 - RNA, 19 nt, Artificial Sequence
  Description of Artificial Sequence: Synthetic oligonucleotide
uccuuguuaaggcaagugg

SEQ ID NO: 350767 - RNA, 19 nt, Artificial Sequence
  Description of Artificial Sequence: Synthetic oligonucleotide
gaacguauuccccaggucc

SEQ ID NO: 350768 - RNA, 19 nt, Artificial Sequence
  Description of Artificial Sequence: Synthetic oligonucleotide
ugaggcuaggaaaauaaug

SEQ ID NO: 350769 - RNA, 19 nt, Artificial Sequence
  Description of Artificial Sequence: Synthetic oligonucleotide
uauaaacgaaucugaauug

SEQ ID NO: 350770 - RNA, 19 nt, Artificial Sequence
  Description of Artificial Sequence: Synthetic oligonucleotide
ucugauauguuguaaucca

SEQ ID NO: 350771 - RNA, 19 nt, Artificial Sequence
  Description of Artificial Sequence: Synthetic oligonucleotide
aagagucuggccuaagaug

SEQ ID NO: 350772 - RNA, 19 nt, Artificial Sequence
  Description of Artificial Sequence: Synthetic oligonucleotide
aucugauauguuguaaucc

SEQ ID NO: 350773 - RNA, 19 nt, Artificial Sequence
  Description of Artificial Sequence: Synthetic oligonucleotide
ugugugaggaauccaagca

SEQ ID NO: 350774 - RNA, 19 nt, Artificial Sequence
  Description of Artificial Sequence: Synthetic oligonucleotide
uauagguguucugugaagg

SEQ ID NO: 350775 - RNA, 19 nt, Artificial Sequence
  Description of Artificial Sequence: Synthetic oligonucleotide
agaugguaugaucagcaac

SEQ ID NO: 350776 - RNA, 19 nt, Artificial Sequence
  Description of Artificial Sequence: Synthetic oligonucleotide
caucuguagacgaaaagag

SEQ ID NO: 350777 - RNA, 19 nt, Artificial Sequence
  Description of Artificial Sequence: Synthetic oligonucleotide
aggacuauguacccucugc

SEQ ID NO: 350778 - RNA, 19 nt, Artificial Sequence
  Description of Artificial Sequence: Synthetic oligonucleotide
ugguuugcuauugacauag

SEQ ID NO: 350779 - RNA, 19 nt, Artificial Sequence
  Description of Artificial Sequence: Synthetic oligonucleotide
uagaccuuaacgaggcagg

SEQ ID NO: 350780 - RNA, 19 nt, Artificial Sequence
  Description of Artificial Sequence: Synthetic oligonucleotide
uauccugaaucaugcaacg

SEQ ID NO: 350781 - RNA, 19 nt, Artificial Sequence
  Description of Artificial Sequence: Synthetic oligonucleotide
ugauauguuguaauccaga

SEQ ID NO: 350782 - RNA, 19 nt, Artificial Sequence
  Description of Artificial Sequence: Synthetic oligonucleotide
aucgauuggcuguauaguc

SEQ ID NO: 350783 - RNA, 19 nt, Artificial Sequence
  Description of Artificial Sequence: Synthetic oligonucleotide
agaugugacgagcacauug

SEQ ID NO: 350784 - RNA, 19 nt, Artificial Sequence
  Description of Artificial Sequence: Synthetic oligonucleotide
uagauuugaggcuaggaaa

SEQ ID NO: 350785 - RNA, 19 nt, Artificial Sequence
  Description of Artificial Sequence: Synthetic oligonucleotide
agaacucgugcuuuugugg

SEQ ID NO: 350786 - RNA, 19 nt, Artificial Sequence
  Description of Artificial Sequence: Synthetic oligonucleotide
acgugaacauuuuauuuuc

SEQ ID NO: 350787 - RNA, 19 nt, Artificial Sequence
  Description of Artificial Sequence: Synthetic oligonucleotide
uugaaugauccgauauagg

SEQ ID NO: 350788 - RNA, 19 nt, Artificial Sequence
  Description of Artificial Sequence: Synthetic oligonucleotide
accuuaacgaggcaggcag

SEQ ID NO: 350789 - RNA, 19 nt, Artificial Sequence
  Description of Artificial Sequence: Synthetic oligonucleotide
aacuccauaaaaccaguaa

SEQ ID NO: 350790 - RNA, 19 nt, Artificial Sequence
  Description of Artificial Sequence: Synthetic oligonucleotide
uguuauaaacgaaucugaa

SEQ ID NO: 350791 - RNA, 19 nt, Artificial Sequence
  Description of Artificial Sequence: Synthetic oligonucleotide
agagucuggccuaagaugg

SEQ ID NO: 350792 - RNA, 19 nt, Artificial Sequence
  Description of Artificial Sequence: Synthetic oligonucleotide
acgaaucugaauuguacag

SEQ ID NO: 350793 - RNA, 19 nt, Artificial Sequence
  Description of Artificial Sequence: Synthetic oligonucleotide
uuaugaacaccugaggugu

SEQ ID NO: 350794 - RNA, 19 nt, Artificial Sequence
  Description of Artificial Sequence: Synthetic oligonucleotide
gacgaaaagaggcuggaac

SEQ ID NO: 350795 - RNA, 19 nt, Artificial Sequence
  Description of Artificial Sequence: Synthetic oligonucleotide
aaaggauugaugugcugca

SEQ ID NO: 350796 - RNA, 19 nt, Artificial Sequence
  Description of Artificial Sequence: Synthetic oligonucleotide
guugaaugauccgauauag

SEQ ID NO: 350797 - RNA, 19 nt, Artificial Sequence
  Description of Artificial Sequence: Synthetic oligonucleotide
gaugguaugaucagcaaca

SEQ ID NO: 350798 - RNA, 19 nt, Artificial Sequence
  Description of Artificial Sequence: Synthetic oligonucleotide
ggcuguauagucuuugugg

SEQ ID NO: 350799 - RNA, 19 nt, Artificial Sequence
  Description of Artificial Sequence: Synthetic oligonucleotide
aacuccaucuggugguaac

SEQ ID NO: 350800 - RNA, 19 nt, Artificial Sequence
  Description of Artificial Sequence: Synthetic oligonucleotide
auagauuugaggcuaggaa

SEQ ID NO: 350801 - RNA, 19 nt, Artificial Sequence
  Description of Artificial Sequence: Synthetic oligonucleotide
caccguauaacucaagaac

SEQ ID NO: 350802 - RNA, 19 nt, Artificial Sequence
  Description of Artificial Sequence: Synthetic oligonucleotide
caaucgauuggcuguauag

SEQ ID NO: 350803 - RNA, 19 nt, Artificial Sequence
  Description of Artificial Sequence: Synthetic oligonucleotide
agcuaaggacaauuguugg

SEQ ID NO: 350804 - RNA, 19 nt, Artificial Sequence
  Description of Artificial Sequence: Synthetic oligonucleotide
ggucuaguaaugcagacgc

SEQ ID NO: 350805 - RNA, 19 nt, Artificial Sequence
  Description of Artificial Sequence: Synthetic oligonucleotide
ucuaguaaugcagacgccu

SEQ ID NO: 350806 - RNA, 19 nt, Artificial Sequence
  Description of Artificial Sequence: Synthetic oligonucleotide
acuauguacccucugcucu

SEQ ID NO: 350807 - RNA, 19 nt, Artificial Sequence
  Description of Artificial Sequence: Synthetic oligonucleotide
aagcuaaggacaauuguug

SEQ ID NO: 350808 - RNA, 19 nt, Artificial Sequence
  Description of Artificial Sequence: Synthetic oligonucleotide
cuuugaagcaaucccaauc

SEQ ID NO: 350809 - RNA, 19 nt, Artificial Sequence
  Description of Artificial Sequence: Synthetic oligonucleotide
gcuauagcuaaggagaugg

SEQ ID NO: 350810 - RNA, 19 nt, Artificial Sequence
  Description of Artificial Sequence: Synthetic oligonucleotide
caaaggauugaugugcugc

SEQ ID NO: 350811 - RNA, 19 nt, Artificial Sequence
  Description of Artificial Sequence: Synthetic oligonucleotide
auucggaacuuguugagca

SEQ ID NO: 350812 - RNA, 19 nt, Artificial Sequence
  Description of Artificial Sequence: Synthetic oligonucleotide
aauagauuugaggcuagga

SEQ ID NO: 350813 - RNA, 19 nt, Artificial Sequence
  Description of Artificial Sequence: Synthetic oligonucleotide
gauggagcuauagcuaagg

SEQ ID NO: 350814 - RNA, 19 nt, Artificial Sequence
  Description of Artificial Sequence: Synthetic oligonucleotide
ugacccaugaacguauucc

SEQ ID NO: 350815 - RNA, 19 nt, Artificial Sequence
  Description of Artificial Sequence: Synthetic oligonucleotide
gaaugauccgauauaggug

SEQ ID NO: 350816 - RNA, 19 nt, Artificial Sequence
  Description of Artificial Sequence: Synthetic oligonucleotide
uucuauugucaucuguaga

SEQ ID NO: 350817 - RNA, 19 nt, Artificial Sequence
  Description of Artificial Sequence: Synthetic oligonucleotide
ugaccaaucgauuggcugu

SEQ ID NO: 350818 - RNA, 19 nt, Artificial Sequence
  Description of Artificial Sequence: Synthetic oligonucleotide
ucagaugugacgagcacau

SEQ ID NO: 350819 - RNA, 19 nt, Artificial Sequence
  Description of Artificial Sequence: Synthetic oligonucleotide
cagguuaucagguugcuca

SEQ ID NO: 350820 - RNA, 19 nt, Artificial Sequence
  Description of Artificial Sequence: Synthetic oligonucleotide
cuaagauggagcuauagcu

SEQ ID NO: 350821 - RNA, 19 nt, Artificial Sequence
  Description of Artificial Sequence: Synthetic oligonucleotide
uguagacgaaaagaggcug

SEQ ID NO: 350822 - RNA, 19 nt, Artificial Sequence
  Description of Artificial Sequence: Synthetic oligonucleotide
uguugaaugauccgauaua

SEQ ID NO: 350823 - RNA, 19 nt, Artificial Sequence
  Description of Artificial Sequence: Synthetic oligonucleotide
aaauagauuugaggcuagg

SEQ ID NO: 350824 - RNA, 19 nt, Artificial Sequence
  Description of Artificial Sequence: Synthetic oligonucleotide
auagaccuuaacgaggcag

SEQ ID NO: 350825 - RNA, 19 nt, Artificial Sequence
  Description of Artificial Sequence: Synthetic oligonucleotide
ucgaauggugaagagaggu

SEQ ID NO: 350826 - RNA, 19 nt, Artificial Sequence
  Description of Artificial Sequence: Synthetic oligonucleotide
cugaaaugguaguuuguag

SEQ ID NO: 350827 - RNA, 19 nt, Artificial Sequence
  Description of Artificial Sequence: Synthetic oligonucleotide
aaucgauuggcuguauagu

SEQ ID NO: 350828 - RNA, 19 nt, Artificial Sequence
  Description of Artificial Sequence: Synthetic oligonucleotide
aaggacaauuguugguuga

SEQ ID NO: 350829 - RNA, 19 nt, Artificial Sequence
  Description of Artificial Sequence: Synthetic oligonucleotide
gaucuuaucuaccaguuau

SEQ ID NO: 350830 - RNA, 19 nt, Artificial Sequence
  Description of Artificial Sequence: Synthetic oligonucleotide
agucucuuaucugaguguc

SEQ ID NO: 350831 - RNA, 19 nt, Artificial Sequence
  Description of Artificial Sequence: Synthetic oligonucleotide
guugagagaaggcuguuca

SEQ ID NO: 350832 - RNA, 19 nt, Artificial Sequence
  Description of Artificial Sequence: Synthetic oligonucleotide
uggaacacaguagaagucu

SEQ ID NO: 350833 - RNA, 19 nt, Artificial Sequence
  Description of Artificial Sequence: Synthetic oligonucleotide
aaaauagauuugaggcuag

SEQ ID NO: 350834 - RNA, 19 nt, Artificial Sequence
  Description of Artificial Sequence: Synthetic oligonucleotide
ccuuguuaaggcaaguggg

SEQ ID NO: 350835 - RNA, 19 nt, Artificial Sequence
  Description of Artificial Sequence: Synthetic oligonucleotide
ucaagagucuggccuaaga

SEQ ID NO: 350836 - RNA, 19 nt, Artificial Sequence
  Description of Artificial Sequence: Synthetic oligonucleotide
uccgauauagguguucugu

SEQ ID NO: 350837 - RNA, 19 nt, Artificial Sequence
  Description of Artificial Sequence: Synthetic oligonucleotide
ucagaucgaauggugaaga

SEQ ID NO: 350838 - RNA, 19 nt, Artificial Sequence
  Description of Artificial Sequence: Synthetic oligonucleotide
aacucgugcuuuugugguc

SEQ ID NO: 350839 - RNA, 19 nt, Artificial Sequence
  Description of Artificial Sequence: Synthetic oligonucleotide
acuuacaaguucugcucuc

SEQ ID NO: 350840 - RNA, 19 nt, Artificial Sequence
  Description of Artificial Sequence: Synthetic oligonucleotide
agcugguacuucaagaguc

SEQ ID NO: 350841 - RNA, 19 nt, Artificial Sequence
  Description of Artificial Sequence: Synthetic oligonucleotide
ucuggccuaagauggagcu

SEQ ID NO: 350842 - RNA, 19 nt, Artificial Sequence
  Description of Artificial Sequence: Synthetic oligonucleotide
ggagcuauagcuaaggaga

SEQ ID NO: 350843 - RNA, 19 nt, Artificial Sequence
  Description of Artificial Sequence: Synthetic oligonucleotide
acuuuaggugucaccaggc

SEQ ID NO: 350844 - RNA, 19 nt, Artificial Sequence
  Description of Artificial Sequence: Synthetic oligonucleotide
acauugauacugcacggga

SEQ ID NO: 350845 - RNA, 19 nt, Artificial Sequence
  Description of Artificial Sequence: Synthetic oligonucleotide
cugugaagguacuauuuug

SEQ ID NO: 350846 - RNA, 19 nt, Artificial Sequence
  Description of Artificial Sequence: Synthetic oligonucleotide
uucagaucgaauggugaag

SEQ ID NO: 350847 - RNA, 19 nt, Artificial Sequence
  Description of Artificial Sequence: Synthetic oligonucleotide
aagcgcuuugguucuccac

SEQ ID NO: 350848 - RNA, 19 nt, Artificial Sequence
  Description of Artificial Sequence: Synthetic oligonucleotide
auaaacgaaucugaauugu

SEQ ID NO: 350849 - RNA, 19 nt, Artificial Sequence
  Description of Artificial Sequence: Synthetic oligonucleotide
accgcugaccaaucgauug

SEQ ID NO: 350850 - RNA, 19 nt, Artificial Sequence
  Description of Artificial Sequence: Synthetic oligonucleotide
auagcuaaggagaugguau

SEQ ID NO: 350851 - RNA, 19 nt, Artificial Sequence
  Description of Artificial Sequence: Synthetic oligonucleotide
aucuguagacgaaaagagg

SEQ ID NO: 350852 - RNA, 19 nt, Artificial Sequence
  Description of Artificial Sequence: Synthetic oligonucleotide
gacgagcacauugauacug

SEQ ID NO: 350853 - RNA, 19 nt, Artificial Sequence
  Description of Artificial Sequence: Synthetic oligonucleotide
uagcuaaggagaugguaug

SEQ ID NO: 350854 - RNA, 19 nt, Artificial Sequence
  Description of Artificial Sequence: Synthetic oligonucleotide
uuacgcauuuccacaaaau

SEQ ID NO: 350855 - RNA, 19 nt, Artificial Sequence
  Description of Artificial Sequence: Synthetic oligonucleotide
cugaccaaucgauuggcug

SEQ ID NO: 350856 - RNA, 19 nt, Artificial Sequence
  Description of Artificial Sequence: Synthetic oligonucleotide
uucuuugacccaugaacgu

SEQ ID NO: 350857 - RNA, 19 nt, Artificial Sequence
  Description of Artificial Sequence: Synthetic oligonucleotide
caucugauauguuguaauc

SEQ ID NO: 350858 - RNA, 19 nt, Artificial Sequence
  Description of Artificial Sequence: Synthetic oligonucleotide
cuaaggagaugguaugauc

SEQ ID NO: 350859 - RNA, 19 nt, Artificial Sequence
  Description of Artificial Sequence: Synthetic oligonucleotide
acgcauuuccacaaaauca

SEQ ID NO: 350860 - RNA, 19 nt, Artificial Sequence
  Description of Artificial Sequence: Synthetic oligonucleotide
augaacguauuccccaggu

SEQ ID NO: 350861 - RNA, 19 nt, Artificial Sequence
  Description of Artificial Sequence: Synthetic oligonucleotide
aacaaaggauugaugugcu

SEQ ID NO: 350862 - RNA, 19 nt, Artificial Sequence
  Description of Artificial Sequence: Synthetic oligonucleotide
uacuauuuugugggcagcc

SEQ ID NO: 350863 - RNA, 19 nt, Artificial Sequence
  Description of Artificial Sequence: Synthetic oligonucleotide
aaguucagaucgaauggug

SEQ ID NO: 350864 - RNA, 19 nt, Artificial Sequence
  Description of Artificial Sequence: Synthetic oligonucleotide
uggcuguauagucuuugug

SEQ ID NO: 350865 - RNA, 19 nt, Artificial Sequence
  Description of Artificial Sequence: Synthetic oligonucleotide
aagagcgcgugugugagga

SEQ ID NO: 350866 - RNA, 19 nt, Artificial Sequence
  Description of Artificial Sequence: Synthetic oligonucleotide
uauagcuaaggagauggua

SEQ ID NO: 350867 - RNA, 19 nt, Artificial Sequence
  Description of Artificial Sequence: Synthetic oligonucleotide
cuuacaaguucugcucucc

SEQ ID NO: 350868 - RNA, 19 nt, Artificial Sequence
  Description of Artificial Sequence: Synthetic oligonucleotide
caauauguuauaaacgaau

SEQ ID NO: 350869 - RNA, 19 nt, Artificial Sequence
  Description of Artificial Sequence: Synthetic oligonucleotide
uggaggacuauguacccuc

SEQ ID NO: 350870 - RNA, 19 nt, Artificial Sequence
  Description of Artificial Sequence: Synthetic oligonucleotide
cuaguaaugcagacgccuc

SEQ ID NO: 350871 - RNA, 19 nt, Artificial Sequence
  Description of Artificial Sequence: Synthetic oligonucleotide
uucugcuagugguagaguu

SEQ ID NO: 350872 - RNA, 19 nt, Artificial Sequence
  Description of Artificial Sequence: Synthetic oligonucleotide
ggucagauagauucggaac

SEQ ID NO: 350873 - RNA, 19 nt, Artificial Sequence
  Description of Artificial Sequence: Synthetic oligonucleotide
gauucggaacuuguugagc

SEQ ID NO: 350874 - RNA, 19 nt, Artificial Sequence
  Description of Artificial Sequence: Synthetic oligonucleotide
gaugugacgagcacauuga

SEQ ID NO: 350875 - RNA, 19 nt, Artificial Sequence
  Description of Artificial Sequence: Synthetic oligonucleotide
uccauggggucuaguaaug

SEQ ID NO: 350876 - RNA, 19 nt, Artificial Sequence
  Description of Artificial Sequence: Synthetic oligonucleotide
agaccuuaacgaggcaggc

SEQ ID NO: 350877 - RNA, 19 nt, Artificial Sequence
  Description of Artificial Sequence: Synthetic oligonucleotide
gacuauguacccucugcuc

SEQ ID NO: 350878 - RNA, 19 nt, Artificial Sequence
  Description of Artificial Sequence: Synthetic oligonucleotide
cacauugauacugcacggg

SEQ ID NO: 350879 - RNA, 19 nt, Artificial Sequence
  Description of Artificial Sequence: Synthetic oligonucleotide
ucugccgggagcagugacc

SEQ ID NO: 350880 - RNA, 19 nt, Artificial Sequence
  Description of Artificial Sequence: Synthetic oligonucleotide
gaaaccgagccaccacaag

SEQ ID NO: 350881 - RNA, 19 nt, Artificial Sequence
  Description of Artificial Sequence: Synthetic oligonucleotide
acaccguauaacucaagaa

SEQ ID NO: 350882 - RNA, 19 nt, Artificial Sequence
  Description of Artificial Sequence: Synthetic oligonucleotide
gucagauagauucggaacu

SEQ ID NO: 350883 - RNA, 19 nt, Artificial Sequence
  Description of Artificial Sequence: Synthetic oligonucleotide
uuaucagguugcucagcgc

SEQ ID NO: 350884 - RNA, 19 nt, Artificial Sequence
  Description of Artificial Sequence: Synthetic oligonucleotide
acgagcacauugauacugc

SEQ ID NO: 350885 - RNA, 19 nt, Artificial Sequence
  Description of Artificial Sequence: Synthetic oligonucleotide
agaugagaugcaauauaag

SEQ ID NO: 350886 - RNA, 19 nt, Artificial Sequence
  Description of Artificial Sequence: Synthetic oligonucleotide
aaucuacgugaacauuuua

SEQ ID NO: 350887 - RNA, 19 nt, Artificial Sequence
  Description of Artificial Sequence: Synthetic oligonucleotide
uuguacagcauggaggcua

SEQ ID NO: 350888 - RNA, 19 nt, Artificial Sequence
  Description of Artificial Sequence: Synthetic oligonucleotide
agaucgaauggugaagaga

SEQ ID NO: 350889 - RNA, 19 nt, Artificial Sequence
  Description of Artificial Sequence: Synthetic oligonucleotide
guuauaaacgaaucugaau

SEQ ID NO: 350890 - RNA, 19 nt, Artificial Sequence
  Description of Artificial Sequence: Synthetic oligonucleotide
ucagcgcagucacauuaug

SEQ ID NO: 350891 - RNA, 19 nt, Artificial Sequence
  Description of Artificial Sequence: Synthetic oligonucleotide
ccuaagauggagcuauagc

SEQ ID NO: 350892 - RNA, 19 nt, Artificial Sequence
  Description of Artificial Sequence: Synthetic oligonucleotide
uggccuaagauggagcuau

SEQ ID NO: 350893 - RNA, 19 nt, Artificial Sequence
  Description of Artificial Sequence: Synthetic oligonucleotide
uugaggcuaggaaaauaau

SEQ ID NO: 350894 - RNA, 19 nt, Artificial Sequence
  Description of Artificial Sequence: Synthetic oligonucleotide
aucuacgugaacauuuuau

SEQ ID NO: 350895 - RNA, 19 nt, Artificial Sequence
  Description of Artificial Sequence: Synthetic oligonucleotide
aaaucuacgugaacauuuu

SEQ ID NO: 350896 - RNA, 19 nt, Artificial Sequence
  Description of Artificial Sequence: Synthetic oligonucleotide
auguuguaauccagaaauc

SEQ ID NO: 350897 - RNA, 19 nt, Artificial Sequence
  Description of Artificial Sequence: Synthetic oligonucleotide
augaauucuuggcacuaau

SEQ ID NO: 350898 - RNA, 19 nt, Artificial Sequence
  Description of Artificial Sequence: Synthetic oligonucleotide
auauaaacuuuagguguca

SEQ ID NO: 350899 - RNA, 19 nt, Artificial Sequence
  Description of Artificial Sequence: Synthetic oligonucleotide
aguucagaucgaaugguga

SEQ ID NO: 350900 - RNA, 19 nt, Artificial Sequence
  Description of Artificial Sequence: Synthetic oligonucleotide
acaauauguuauaaacgaa

SEQ ID NO: 350901 - RNA, 19 nt, Artificial Sequence
  Description of Artificial Sequence: Synthetic oligonucleotide
auaggaaguugagggacug

SEQ ID NO: 350902 - RNA, 19 nt, Artificial Sequence
  Description of Artificial Sequence: Synthetic oligonucleotide
auggagcuauagcuaagga

SEQ ID NO: 350903 - RNA, 19 nt, Artificial Sequence
  Description of Artificial Sequence: Synthetic oligonucleotide
cugacucgagcuugguuug

SEQ ID NO: 350904 - RNA, 19 nt, Artificial Sequence
  Description of Artificial Sequence: Synthetic oligonucleotide
cagaucgaauggugaagag

SEQ ID NO: 350905 - RNA, 19 nt, Artificial Sequence
  Description of Artificial Sequence: Synthetic oligonucleotide
gagaccgcugaccaaucga

SEQ ID NO: 350906 - RNA, 19 nt, Artificial Sequence
  Description of Artificial Sequence: Synthetic oligonucleotide
gaacucgugcuuuuguggu

SEQ ID NO: 350907 - RNA, 19 nt, Artificial Sequence
  Description of Artificial Sequence: Synthetic oligonucleotide
gugaccgccccucagaugu

SEQ ID NO: 350908 - RNA, 19 nt, Artificial Sequence
  Description of Artificial Sequence: Synthetic oligonucleotide
agaucuuaucuaccaguua

SEQ ID NO: 350909 - RNA, 19 nt, Artificial Sequence
  Description of Artificial Sequence: Synthetic oligonucleotide
cuuguuaaggcaagugggu

SEQ ID NO: 350910 - RNA, 19 nt, Artificial Sequence
  Description of Artificial Sequence: Synthetic oligonucleotide
agucuggccuaagauggag

SEQ ID NO: 350911 - RNA, 19 nt, Artificial Sequence
  Description of Artificial Sequence: Synthetic oligonucleotide
gagcacauugauacugcac

SEQ ID NO: 350912 - RNA, 19 nt, Artificial Sequence
  Description of Artificial Sequence: Synthetic oligonucleotide
uagguguucugugaaggua

SEQ ID NO: 350913 - RNA, 19 nt, Artificial Sequence
  Description of Artificial Sequence: Synthetic oligonucleotide
cauugauacugcacgggaa

SEQ ID NO: 350914 - RNA, 19 nt, Artificial Sequence
  Description of Artificial Sequence: Synthetic oligonucleotide
acucgugcuuuuguggucu

SEQ ID NO: 350915 - RNA, 19 nt, Artificial Sequence
  Description of Artificial Sequence: Synthetic oligonucleotide
auaacuccucuugugccga

SEQ ID NO: 350916 - RNA, 19 nt, Artificial Sequence
  Description of Artificial Sequence: Synthetic oligonucleotide
aacuggacacaaacuuaca

SEQ ID NO: 350917 - RNA, 19 nt, Artificial Sequence
  Description of Artificial Sequence: Synthetic oligonucleotide
ggggcuguaagugaaucug

SEQ ID NO: 350918 - RNA, 19 nt, Artificial Sequence
  Description of Artificial Sequence: Synthetic oligonucleotide
uuaaggcaaguggguaaca

SEQ ID NO: 350919 - RNA, 19 nt, Artificial Sequence
  Description of Artificial Sequence: Synthetic oligonucleotide
aucgaauggugaagagagg

SEQ ID NO: 350920 - RNA, 19 nt, Artificial Sequence
  Description of Artificial Sequence: Synthetic oligonucleotide
ugauccgauauagguguuc

SEQ ID NO: 350921 - RNA, 19 nt, Artificial Sequence
  Description of Artificial Sequence: Synthetic oligonucleotide
agacgccucccuuuccuca

SEQ ID NO: 350922 - RNA, 19 nt, Artificial Sequence
  Description of Artificial Sequence: Synthetic oligonucleotide
auccgauauagguguucug

SEQ ID NO: 350923 - RNA, 19 nt, Artificial Sequence
  Description of Artificial Sequence: Synthetic oligonucleotide
aaggauugaugugcugcaa

SEQ ID NO: 350924 - RNA, 19 nt, Artificial Sequence
  Description of Artificial Sequence: Synthetic oligonucleotide
gauccgauauagguguucu

SEQ ID NO: 350925 - RNA, 19 nt, Artificial Sequence
  Description of Artificial Sequence: Synthetic oligonucleotide
agcccuuacagagaaucau

SEQ ID NO: 350926 - RNA, 19 nt, Artificial Sequence
  Description of Artificial Sequence: Synthetic oligonucleotide
uuugacccaugaacguauu

SEQ ID NO: 350927 - RNA, 19 nt, Artificial Sequence
  Description of Artificial Sequence: Synthetic oligonucleotide
cucagaugugacgagcaca

SEQ ID NO: 350928 - RNA, 19 nt, Artificial Sequence
  Description of Artificial Sequence: Synthetic oligonucleotide
ucgugcuuuuguggucugg

SEQ ID NO: 350929 - RNA, 19 nt, Artificial Sequence
  Description of Artificial Sequence: Synthetic oligonucleotide
ugccgacugggaguauagg

SEQ ID NO: 350930 - RNA, 19 nt, Artificial Sequence
  Description of Artificial Sequence: Synthetic oligonucleotide
ggauccacagacagcacac

SEQ ID NO: 350931 - RNA, 19 nt, Artificial Sequence
  Description of Artificial Sequence: Synthetic oligonucleotide
agugaccgccccucagaug

SEQ ID NO: 350932 - RNA, 19 nt, Artificial Sequence
  Description of Artificial Sequence: Synthetic oligonucleotide
cucagguuaacuguaaauu

SEQ ID NO: 350933 - RNA, 19 nt, Artificial Sequence
  Description of Artificial Sequence: Synthetic oligonucleotide
cagcgcagucacauuauga

SEQ ID NO: 350934 - RNA, 19 nt, Artificial Sequence
  Description of Artificial Sequence: Synthetic oligonucleotide
ggcuauagcuugcccauuc

SEQ ID NO: 350935 - RNA, 19 nt, Artificial Sequence
  Description of Artificial Sequence: Synthetic oligonucleotide
cugguacuucaagagucug

SEQ ID NO: 350936 - RNA, 19 nt, Artificial Sequence
  Description of Artificial Sequence: Synthetic oligonucleotide
agcgcgugugugaggaauc

SEQ ID NO: 350937 - RNA, 19 nt, Artificial Sequence
  Description of Artificial Sequence: Synthetic oligonucleotide
ggauugaugugcugcaacu

SEQ ID NO: 350938 - RNA, 19 nt, Artificial Sequence
  Description of Artificial Sequence: Synthetic oligonucleotide
gucuaguaaugcagacgcc

SEQ ID NO: 350939 - RNA, 19 nt, Artificial Sequence
  Description of Artificial Sequence: Synthetic oligonucleotide
caagagucuggccuaagau

SEQ ID NO: 350940 - RNA, 19 nt, Artificial Sequence
  Description of Artificial Sequence: Synthetic oligonucleotide
gggucagauagauucggaa

SEQ ID NO: 350941 - RNA, 19 nt, Artificial Sequence
  Description of Artificial Sequence: Synthetic oligonucleotide
agaaaccgagccaccacaa

SEQ ID NO: 350942 - RNA, 19 nt, Artificial Sequence
  Description of Artificial Sequence: Synthetic oligonucleotide
ugacucgagcuugguuugc

SEQ ID NO: 350943 - RNA, 19 nt, Artificial Sequence
  Description of Artificial Sequence: Synthetic oligonucleotide
gguccacuggaacacagua

SEQ ID NO: 350944 - RNA, 19 nt, Artificial Sequence
  Description of Artificial Sequence: Synthetic oligonucleotide
ggggucuaguaaugcagac

SEQ ID NO: 350945 - RNA, 19 nt, Artificial Sequence
  Description of Artificial Sequence: Synthetic oligonucleotide
ccugaaucaugcaacgaaa

SEQ ID NO: 350946 - RNA, 19 nt, Artificial Sequence
  Description of Artificial Sequence: Synthetic oligonucleotide
gugccgacugggaguauag

SEQ ID NO: 350947 - RNA, 19 nt, Artificial Sequence
  Description of Artificial Sequence: Synthetic oligonucleotide
agguguccaacugcccuug

SEQ ID NO: 350948 - RNA, 19 nt, Artificial Sequence
  Description of Artificial Sequence: Synthetic oligonucleotide
gccuaagauggagcuauag

SEQ ID NO: 350949 - RNA, 19 nt, Artificial Sequence
  Description of Artificial Sequence: Synthetic oligonucleotide
gcuaaggacaauuguuggu

SEQ ID NO: 350950 - RNA, 19 nt, Artificial Sequence
  Description of Artificial Sequence: Synthetic oligonucleotide
gggacguguuguugggcag

SEQ ID NO: 350951 - RNA, 19 nt, Artificial Sequence
  Description of Artificial Sequence: Synthetic oligonucleotide
ccuuaacgaggcaggcagg

SEQ ID NO: 350952 - RNA, 19 nt, Artificial Sequence
  Description of Artificial Sequence: Synthetic oligonucleotide
cuccauggggucuaguaau

SEQ ID NO: 350953 - RNA, 19 nt, Artificial Sequence
  Description of Artificial Sequence: Synthetic oligonucleotide
ccgcugaccaaucgauugg

SEQ ID NO: 350954 - RNA, 19 nt, Artificial Sequence
  Description of Artificial Sequence: Synthetic oligonucleotide
uacacuccauggggucuag

SEQ ID NO: 350955 - RNA, 19 nt, Artificial Sequence
  Description of Artificial Sequence: Synthetic oligonucleotide
agggucagauagauucgga

SEQ ID NO: 350956 - RNA, 19 nt, Artificial Sequence
  Description of Artificial Sequence: Synthetic oligonucleotide
ugaccgccccucagaugug

SEQ ID NO: 350957 - RNA, 19 nt, Artificial Sequence
  Description of Artificial Sequence: Synthetic oligonucleotide
gcucagcgcagucacauua

SEQ ID NO: 350958 - RNA, 19 nt, Artificial Sequence
  Description of Artificial Sequence: Synthetic oligonucleotide
cagacgccucccuuuccuc

SEQ ID NO: 350959 - RNA, 19 nt, Artificial Sequence
  Description of Artificial Sequence: Synthetic oligonucleotide
cauagaccuuaacgaggca

SEQ ID NO: 350960 - RNA, 19 nt, Artificial Sequence
  Description of Artificial Sequence: Synthetic oligonucleotide
gaccaaucgauuggcugua

SEQ ID NO: 350961 - RNA, 19 nt, Artificial Sequence
  Description of Artificial Sequence: Synthetic oligonucleotide
cucgugcuuuuguggucug

SEQ ID NO: 350962 - RNA, 19 nt, Artificial Sequence
  Description of Artificial Sequence: Synthetic oligonucleotide
ccgacugggaguauaggaa

SEQ ID NO: 350963 - RNA, 19 nt, Artificial Sequence
  Description of Artificial Sequence: Synthetic oligonucleotide
caggcgaagcugguacuuc

SEQ ID NO: 350964 - RNA, 19 nt, Artificial Sequence
  Description of Artificial Sequence: Synthetic oligonucleotide
guaaugcagacgccucccu

SEQ ID NO: 350965 - RNA, 19 nt, Artificial Sequence
  Description of Artificial Sequence: Synthetic oligonucleotide
cuauagcuaaggagauggu

SEQ ID NO: 350966 - RNA, 19 nt, Artificial Sequence
  Description of Artificial Sequence: Synthetic oligonucleotide
ucuaagcgcuuugguucuc

SEQ ID NO: 350967 - RNA, 19 nt, Artificial Sequence
  Description of Artificial Sequence: Synthetic oligonucleotide
gagucuggccuaagaugga

SEQ ID NO: 350968 - RNA, 19 nt, Artificial Sequence
  Description of Artificial Sequence: Synthetic oligonucleotide
ccauggggucuaguaaugc

SEQ ID NO: 350969 - RNA, 19 nt, Artificial Sequence
  Description of Artificial Sequence: Synthetic oligonucleotide
cuaucucccaagagcgcgu

SEQ ID NO: 350970 - RNA, 19 nt, Artificial Sequence
  Description of Artificial Sequence: Synthetic oligonucleotide
gacugacucgagcuugguu

SEQ ID NO: 350971 - RNA, 19 nt, Artificial Sequence
  Description of Artificial Sequence: Synthetic oligonucleotide
caaccgccuugguuauguc

SEQ ID NO: 350972 - RNA, 19 nt, Artificial Sequence
  Description of Artificial Sequence: Synthetic oligonucleotide
cgagcuugguuugcuauug

SEQ ID NO: 350973 - RNA, 19 nt, Artificial Sequence
  Description of Artificial Sequence: Synthetic oligonucleotide
gaccgccccucagauguga

SEQ ID NO: 350974 - RNA, 19 nt, Artificial Sequence
  Description of Artificial Sequence: Synthetic oligonucleotide
gcgugugugaggaauccaa

SEQ ID NO: 350975 - RNA, 19 nt, Artificial Sequence
  Description of Artificial Sequence: Synthetic oligonucleotide
gacgccucccuuuccucau

SEQ ID NO: 350976 - RNA, 19 nt, Artificial Sequence
  Description of Artificial Sequence: Synthetic oligonucleotide
gcugugauacucugaggau

SEQ ID NO: 350977 - RNA, 19 nt, Artificial Sequence
  Description of Artificial Sequence: Synthetic oligonucleotide
agagcgcgugugugaggaa

SEQ ID NO: 350978 - RNA, 19 nt, Artificial Sequence
  Description of Artificial Sequence: Synthetic oligonucleotide
cuucaaccgccuugguuau

SEQ ID NO: 350979 - RNA, 19 nt, Artificial Sequence
  Description of Artificial Sequence: Synthetic oligonucleotide
gagcgcgugugugaggaau

SEQ ID NO: 350980 - RNA, 19 nt, Artificial Sequence
  Description of Artificial Sequence: Synthetic oligonucleotide
accaaucgauuggcuguau

SEQ ID NO: 350981 - RNA, 19 nt, Artificial Sequence
  Description of Artificial Sequence: Synthetic oligonucleotide
cccuuacagagaaucauau

SEQ ID NO: 350982 - RNA, 19 nt, Artificial Sequence
  Description of Artificial Sequence: Synthetic oligonucleotide
gcgcgugugugaggaaucc

SEQ ID NO: 350983 - RNA, 19 nt, Artificial Sequence
  Description of Artificial Sequence: Synthetic oligonucleotide
gcuaaggagaugguaugau

SEQ ID NO: 350984 - RNA, 19 nt, Artificial Sequence
  Description of Artificial Sequence: Synthetic oligonucleotide
aggcuauagcuugcccauu

SEQ ID NO: 350985 - RNA, 19 nt, Artificial Sequence
  Description of Artificial Sequence: Synthetic oligonucleotide
caguaagguaaaagcccuu

SEQ ID NO: 350986 - RNA, 19 nt, Artificial Sequence
  Description of Artificial Sequence: Synthetic oligonucleotide
cuggccuaagauggagcua

SEQ ID NO: 350987 - RNA, 19 nt, Artificial Sequence
  Description of Artificial Sequence: Synthetic oligonucleotide
cagugaccgccccucagau

SEQ ID NO: 350988 - RNA, 19 nt, Artificial Sequence
  Description of Artificial Sequence: Synthetic oligonucleotide
acgccucccuuuccucauu

SEQ ID NO: 350989 - RNA, 19 nt, Artificial Sequence
  Description of Artificial Sequence: Synthetic oligonucleotide
gguguucugugaagguacu

SEQ ID NO: 350990 - RNA, 19 nt, Artificial Sequence
  Description of Artificial Sequence: Synthetic oligonucleotide
cgagcacauugauacugca

SEQ ID NO: 350991 - RNA, 19 nt, Artificial Sequence
  Description of Artificial Sequence: Synthetic oligonucleotide
ccaaucgauuggcuguaua

SEQ ID NO: 350992 - RNA, 19 nt, Artificial Sequence
  Description of Artificial Sequence: Synthetic oligonucleotide
gaccgcugaccaaucgauu

SEQ ID NO: 350993 - RNA, 19 nt, Artificial Sequence
  Description of Artificial Sequence: Synthetic oligonucleotide
gcugaccaaucgauuggcu

SEQ ID NO: 350994 - RNA, 19 nt, Artificial Sequence
  Description of Artificial Sequence: Synthetic oligonucleotide
ggccuaagauggagcuaua

SEQ ID NO: 350995 - RNA, 19 nt, Artificial Sequence
  Description of Artificial Sequence: Synthetic oligonucleotide
cgcgugugugaggaaucca

SEQ ID NO: 350996 - RNA, 19 nt, Artificial Sequence
  Description of Artificial Sequence: Synthetic oligonucleotide
uauuagaucauaauguugu

SEQ ID NO: 350997 - RNA, 19 nt, Artificial Sequence
  Description of Artificial Sequence: Synthetic oligonucleotide
gaaauaaucguaaugacug

SEQ ID NO: 350998 - RNA, 19 nt, Artificial Sequence
  Description of Artificial Sequence: Synthetic oligonucleotide
acuauaguuagccaggcac

SEQ ID NO: 350999 - RNA, 19 nt, Artificial Sequence
  Description of Artificial Sequence: Synthetic oligonucleotide
augaguguagauuugcccc

SEQ ID NO: 351000 - RNA, 19 nt, Artificial Sequence
  Description of Artificial Sequence: Synthetic oligonucleotide
aaacacaaccaccuagagc

SEQ ID NO: 351001 - RNA, 19 nt, Artificial Sequence
  Description of Artificial Sequence: Synthetic oligonucleotide
auaacaacccagcugggcc

SEQ ID NO: 351002 - RNA, 19 nt, Artificial Sequence
  Description of Artificial Sequence: Synthetic oligonucleotide
agccauauguccuaggcgc

SEQ ID NO: 351003 - RNA, 19 nt, Artificial Sequence
  Description of Artificial Sequence: Synthetic oligonucleotide
ucuauaaucuuacauacua

SEQ ID NO: 351004 - RNA, 19 nt, Artificial Sequence
  Description of Artificial Sequence: Synthetic oligonucleotide
uuuagaauagucuucuacu

SEQ ID NO: 351005 - RNA, 19 nt, Artificial Sequence
  Description of Artificial Sequence: Synthetic oligonucleotide
uucuacuaaugaaugauag

SEQ ID NO: 351006 - RNA, 19 nt, Artificial Sequence
  Description of Artificial Sequence: Synthetic oligonucleotide
auuugguccaguaacaagc

SEQ ID NO: 351007 - RNA, 19 nt, Artificial Sequence
  Description of Artificial Sequence: Synthetic oligonucleotide
guaacaacccgccugaggg

SEQ ID NO: 351008 - RNA, 19 nt, Artificial Sequence
  Description of Artificial Sequence: Synthetic oligonucleotide
aaauuguuuaaugucacug

SEQ ID NO: 351009 - RNA, 19 nt, Artificial Sequence
  Description of Artificial Sequence: Synthetic oligonucleotide
uauaaucuuacauacuacu

SEQ ID NO: 351010 - RNA, 19 nt, Artificial Sequence
  Description of Artificial Sequence: Synthetic oligonucleotide
aguaucaagccucucuagc

SEQ ID NO: 351011 - RNA, 19 nt, Artificial Sequence
  Description of Artificial Sequence: Synthetic oligonucleotide
aaacacccuaucuaccggc

SEQ ID NO: 351012 - RNA, 19 nt, Artificial Sequence
  Description of Artificial Sequence: Synthetic oligonucleotide
uuagacuuaaaaucaucag

SEQ ID NO: 351013 - RNA, 19 nt, Artificial Sequence
  Description of Artificial Sequence: Synthetic oligonucleotide
acuaaugaaugauagugug

SEQ ID NO: 351014 - RNA, 19 nt, Artificial Sequence
  Description of Artificial Sequence: Synthetic oligonucleotide
uuauuagaucauaauguug

SEQ ID NO: 351015 - RNA, 19 nt, Artificial Sequence
  Description of Artificial Sequence: Synthetic oligonucleotide
aaaauacccuucuucaaga

SEQ ID NO: 351016 - RNA, 19 nt, Artificial Sequence
  Description of Artificial Sequence: Synthetic oligonucleotide
agaaccauuuguuccauuc

SEQ ID NO: 351017 - RNA, 19 nt, Artificial Sequence
  Description of Artificial Sequence: Synthetic oligonucleotide
aaaguugcaguuccucuuc

SEQ ID NO: 351018 - RNA, 19 nt, Artificial Sequence
  Description of Artificial Sequence: Synthetic oligonucleotide
agcgacacccuccauaagc

SEQ ID NO: 351019 - RNA, 19 nt, Artificial Sequence
  Description of Artificial Sequence: Synthetic oligonucleotide
guaaacacccuaucuaccg

SEQ ID NO: 351020 - RNA, 19 nt, Artificial Sequence
  Description of Artificial Sequence: Synthetic oligonucleotide
uguagaguaacaacccgcc

SEQ ID NO: 351021 - RNA, 19 nt, Artificial Sequence
  Description of Artificial Sequence: Synthetic oligonucleotide
ugaagaucgcaccaggucu

SEQ ID NO: 351022 - RNA, 19 nt, Artificial Sequence
  Description of Artificial Sequence: Synthetic oligonucleotide
uuaagcucuaggaaggggu

SEQ ID NO: 351023 - RNA, 19 nt, Artificial Sequence
  Description of Artificial Sequence: Synthetic oligonucleotide
uagaguaacaacccgccug

SEQ ID NO: 351024 - RNA, 19 nt, Artificial Sequence
  Description of Artificial Sequence: Synthetic oligonucleotide
uaaucguaaugacugauuc

SEQ ID NO: 351025 - RNA, 19 nt, Artificial Sequence
  Description of Artificial Sequence: Synthetic oligonucleotide
aacagaauuacuggccgac

SEQ ID NO: 351026 - RNA, 19 nt, Artificial Sequence
  Description of Artificial Sequence: Synthetic oligonucleotide
ucacuaauagcagaggggc

SEQ ID NO: 351027 - RNA, 19 nt, Artificial Sequence
  Description of Artificial Sequence: Synthetic oligonucleotide
agauuagauaauuucuucu

SEQ ID NO: 351028 - RNA, 19 nt, Artificial Sequence
  Description of Artificial Sequence: Synthetic oligonucleotide
guugucugaauuuaccacc

SEQ ID NO: 351029 - RNA, 19 nt, Artificial Sequence
  Description of Artificial Sequence: Synthetic oligonucleotide
gaugucgugagccuuuaag

SEQ ID NO: 351030 - RNA, 19 nt, Artificial Sequence
  Description of Artificial Sequence: Synthetic oligonucleotide
aagccauauguccuaggcg

SEQ ID NO: 351031 - RNA, 19 nt, Artificial Sequence
  Description of Artificial Sequence: Synthetic oligonucleotide
ucuacagucggccugucac

SEQ ID NO: 351032 - RNA, 19 nt, Artificial Sequence
  Description of Artificial Sequence: Synthetic oligonucleotide
aaguuauagaacagccgcc

SEQ ID NO: 351033 - RNA, 19 nt, Artificial Sequence
  Description of Artificial Sequence: Synthetic oligonucleotide
uguagugaagaucgcacca

SEQ ID NO: 351034 - RNA, 19 nt, Artificial Sequence
  Description of Artificial Sequence: Synthetic oligonucleotide
gguagcaaaauucucuggg

SEQ ID NO: 351035 - RNA, 19 nt, Artificial Sequence
  Description of Artificial Sequence: Synthetic oligonucleotide
acauaggaccaucuccucc

SEQ ID NO: 351036 - RNA, 19 nt, Artificial Sequence
  Description of Artificial Sequence: Synthetic oligonucleotide
uacuaaugaaugauagugu

SEQ ID NO: 351037 - RNA, 19 nt, Artificial Sequence
  Description of Artificial Sequence: Synthetic oligonucleotide
uguugcgugccuaaguaug

SEQ ID NO: 351038 - RNA, 19 nt, Artificial Sequence
  Description of Artificial Sequence: Synthetic oligonucleotide
cucagaucaggaaagcgcc

SEQ ID NO: 351039 - RNA, 19 nt, Artificial Sequence
  Description of Artificial Sequence: Synthetic oligonucleotide
uauggcaaguaucaagccu

SEQ ID NO: 351040 - RNA, 19 nt, Artificial Sequence
  Description of Artificial Sequence: Synthetic oligonucleotide
cauugauagaagcuccugg

SEQ ID NO: 351041 - RNA, 19 nt, Artificial Sequence
  Description of Artificial Sequence: Synthetic oligonucleotide
auaagcucuauaaucuuac

SEQ ID NO: 351042 - RNA, 19 nt, Artificial Sequence
  Description of Artificial Sequence: Synthetic oligonucleotide
uaaacacccuaucuaccgg

SEQ ID NO: 351043 - RNA, 19 nt, Artificial Sequence
  Description of Artificial Sequence: Synthetic oligonucleotide
cucuauagcagacugccag

SEQ ID NO: 351044 - RNA, 19 nt, Artificial Sequence
  Description of Artificial Sequence: Synthetic oligonucleotide
aaucguaaugacugauuca

SEQ ID NO: 351045 - RNA, 19 nt, Artificial Sequence
  Description of Artificial Sequence: Synthetic oligonucleotide
cuggccgacacauaggacc

SEQ ID NO: 351046 - RNA, 19 nt, Artificial Sequence
  Description of Artificial Sequence: Synthetic oligonucleotide
uaaucagagccaaaagccu

SEQ ID NO: 351047 - RNA, 19 nt, Artificial Sequence
  Description of Artificial Sequence: Synthetic oligonucleotide
agagccaaaagccugugga

SEQ ID NO: 351048 - RNA, 19 nt, Artificial Sequence
  Description of Artificial Sequence: Synthetic oligonucleotide
ugaaugauaguguguagaa

SEQ ID NO: 351049 - RNA, 19 nt, Artificial Sequence
  Description of Artificial Sequence: Synthetic oligonucleotide
aaugcacucuauagcagac

SEQ ID NO: 351050 - RNA, 19 nt, Artificial Sequence
  Description of Artificial Sequence: Synthetic oligonucleotide
aaguaucaagccucucuag

SEQ ID NO: 351051 - RNA, 19 nt, Artificial Sequence
  Description of Artificial Sequence: Synthetic oligonucleotide
ucuuuaggaggucugugac

SEQ ID NO: 351052 - RNA, 19 nt, Artificial Sequence
  Description of Artificial Sequence: Synthetic oligonucleotide
uuuugagguuagaaaacac

SEQ ID NO: 351053 - RNA, 19 nt, Artificial Sequence
  Description of Artificial Sequence: Synthetic oligonucleotide
agaauagucuucuacuaau

SEQ ID NO: 351054 - RNA, 19 nt, Artificial Sequence
  Description of Artificial Sequence: Synthetic oligonucleotide
uuagaauagucuucuacua

SEQ ID NO: 351055 - RNA, 19 nt, Artificial Sequence
  Description of Artificial Sequence: Synthetic oligonucleotide
cuauaaucuuacauacuac

SEQ ID NO: 351056 - RNA, 19 nt, Artificial Sequence
  Description of Artificial Sequence: Synthetic oligonucleotide
uuucgcucaacucaacaaa

SEQ ID NO: 351057 - RNA, 19 nt, Artificial Sequence
  Description of Artificial Sequence: Synthetic oligonucleotide
uguacuuucaccugacauu

SEQ ID NO: 351058 - RNA, 19 nt, Artificial Sequence
  Description of Artificial Sequence: Synthetic oligonucleotide
cuguagaguaacaacccgc

SEQ ID NO: 351059 - RNA, 19 nt, Artificial Sequence
  Description of Artificial Sequence: Synthetic oligonucleotide
guacauaacaacccagcug

SEQ ID NO: 351060 - RNA, 19 nt, Artificial Sequence
  Description of Artificial Sequence: Synthetic oligonucleotide
cucaagaucugguagcuuc

SEQ ID NO: 351061 - RNA, 19 nt, Artificial Sequence
  Description of Artificial Sequence: Synthetic oligonucleotide
ugucgugagccuuuaagcu

SEQ ID NO: 351062 - RNA, 19 nt, Artificial Sequence
  Description of Artificial Sequence: Synthetic oligonucleotide
aggucuuacuguugugacc

SEQ ID NO: 351063 - RNA, 19 nt, Artificial Sequence
  Description of Artificial Sequence: Synthetic oligonucleotide
uuuaagcucuaggaagggg

SEQ ID NO: 351064 - RNA, 19 nt, Artificial Sequence
  Description of Artificial Sequence: Synthetic oligonucleotide
agguacauaacaacccagc

SEQ ID NO: 351065 - RNA, 19 nt, Artificial Sequence
  Description of Artificial Sequence: Synthetic oligonucleotide
aauaaucguaaugacugau

SEQ ID NO: 351066 - RNA, 19 nt, Artificial Sequence
  Description of Artificial Sequence: Synthetic oligonucleotide
uuagaucauaauguugucu

SEQ ID NO: 351067 - RNA, 19 nt, Artificial Sequence
  Description of Artificial Sequence: Synthetic oligonucleotide
caucgaaaguugcaguucc

SEQ ID NO: 351068 - RNA, 19 nt, Artificial Sequence
  Description of Artificial Sequence: Synthetic oligonucleotide
uucuuuaggaggucuguga

SEQ ID NO: 351069 - RNA, 19 nt, Artificial Sequence
  Description of Artificial Sequence: Synthetic oligonucleotide
uuugguccaguaacaagca

SEQ ID NO: 351070 - RNA, 19 nt, Artificial Sequence
  Description of Artificial Sequence: Synthetic oligonucleotide
auggcaaguaucaagccuc

SEQ ID NO: 351071 - RNA, 19 nt, Artificial Sequence
  Description of Artificial Sequence: Synthetic oligonucleotide
ucccgaaauaaucguaaug

SEQ ID NO: 351072 - RNA, 19 nt, Artificial Sequence
  Description of Artificial Sequence: Synthetic oligonucleotide
auuauagcccugcugucug

SEQ ID NO: 351073 - RNA, 19 nt, Artificial Sequence
  Description of Artificial Sequence: Synthetic oligonucleotide
caagccauauguccuaggc

SEQ ID NO: 351074 - RNA, 19 nt, Artificial Sequence
  Description of Artificial Sequence: Synthetic oligonucleotide
cuaaacggucacuaauagc

SEQ ID NO: 351075 - RNA, 19 nt, Artificial Sequence
  Description of Artificial Sequence: Synthetic oligonucleotide
aaugcgacugcgcuguuua

SEQ ID NO: 351076 - RNA, 19 nt, Artificial Sequence
  Description of Artificial Sequence: Synthetic oligonucleotide
uguaacgcagggaugucgu

SEQ ID NO: 351077 - RNA, 19 nt, Artificial Sequence
  Description of Artificial Sequence: Synthetic oligonucleotide
ugcaucuagcaccauucgc

SEQ ID NO: 351078 - RNA, 19 nt, Artificial Sequence
  Description of Artificial Sequence: Synthetic oligonucleotide
agaguaacaacccgccuga

SEQ ID NO: 351079 - RNA, 19 nt, Artificial Sequence
  Description of Artificial Sequence: Synthetic oligonucleotide
auguucgacacuuuauggu

SEQ ID NO: 351080 - RNA, 19 nt, Artificial Sequence
  Description of Artificial Sequence: Synthetic oligonucleotide
uugucugaauuuaccaccu

SEQ ID NO: 351081 - RNA, 19 nt, Artificial Sequence
  Description of Artificial Sequence: Synthetic oligonucleotide
aguaugcuagcaguuucgc

SEQ ID NO: 351082 - RNA, 19 nt, Artificial Sequence
  Description of Artificial Sequence: Synthetic oligonucleotide
uauucuaggaggcucuguu

SEQ ID NO: 351083 - RNA, 19 nt, Artificial Sequence
  Description of Artificial Sequence: Synthetic oligonucleotide
gucacuaauagcagagggg

SEQ ID NO: 351084 - RNA, 19 nt, Artificial Sequence
  Description of Artificial Sequence: Synthetic oligonucleotide
ucgugagccuuuaagcucu

SEQ ID NO: 351085 - RNA, 19 nt, Artificial Sequence
  Description of Artificial Sequence: Synthetic oligonucleotide
uguucgacacuuuaugguu

SEQ ID NO: 351086 - RNA, 19 nt, Artificial Sequence
  Description of Artificial Sequence: Synthetic oligonucleotide
cuuagcuuccaauguaguc

SEQ ID NO: 351087 - RNA, 19 nt, Artificial Sequence
  Description of Artificial Sequence: Synthetic oligonucleotide
aucguaaugacugauucau

SEQ ID NO: 351088 - RNA, 19 nt, Artificial Sequence
  Description of Artificial Sequence: Synthetic oligonucleotide
ugucuuaugaguguagauu

SEQ ID NO: 351089 - RNA, 19 nt, Artificial Sequence
  Description of Artificial Sequence: Synthetic oligonucleotide
augauaguguguagaaaac

SEQ ID NO: 351090 - RNA, 19 nt, Artificial Sequence
  Description of Artificial Sequence: Synthetic oligonucleotide
gcucuauaaucuuacauac

SEQ ID NO: 351091 - RNA, 19 nt, Artificial Sequence
  Description of Artificial Sequence: Synthetic oligonucleotide
uuuaggaggucugugacuu

SEQ ID NO: 351092 - RNA, 19 nt, Artificial Sequence
  Description of Artificial Sequence: Synthetic oligonucleotide
cuucaguggagauccaaug

SEQ ID NO: 351093 - RNA, 19 nt, Artificial Sequence
  Description of Artificial Sequence: Synthetic oligonucleotide
uucgcucaacucaacaaaa

SEQ ID NO: 351094 - RNA, 19 nt, Artificial Sequence
  Description of Artificial Sequence: Synthetic oligonucleotide
uugauagaagcuccugguc

SEQ ID NO: 351095 - RNA, 19 nt, Artificial Sequence
  Description of Artificial Sequence: Synthetic oligonucleotide
cuguagugaagaucgcacc

SEQ ID NO: 351096 - RNA, 19 nt, Artificial Sequence
  Description of Artificial Sequence: Synthetic oligonucleotide
agaaguguucucaaagucu

SEQ ID NO: 351097 - RNA, 19 nt, Artificial Sequence
  Description of Artificial Sequence: Synthetic oligonucleotide
uuuaagcaccccaggcagc

SEQ ID NO: 351098 - RNA, 19 nt, Artificial Sequence
  Description of Artificial Sequence: Synthetic oligonucleotide
aaccugguaucagaccuuc

SEQ ID NO: 351099 - RNA, 19 nt, Artificial Sequence
  Description of Artificial Sequence: Synthetic oligonucleotide
cuaucugaggcaccaaguc

SEQ ID NO: 351100 - RNA, 19 nt, Artificial Sequence
  Description of Artificial Sequence: Synthetic oligonucleotide
aguuucgcucaacucaaca

SEQ ID NO: 351101 - RNA, 19 nt, Artificial Sequence
  Description of Artificial Sequence: Synthetic oligonucleotide
caucgguucagcucugcgc

SEQ ID NO: 351102 - RNA, 19 nt, Artificial Sequence
  Description of Artificial Sequence: Synthetic oligonucleotide
agcaccauucgcugacugg

SEQ ID NO: 351103 - RNA, 19 nt, Artificial Sequence
  Description of Artificial Sequence: Synthetic oligonucleotide
ucuaccaugcaagccauau

SEQ ID NO: 351104 - RNA, 19 nt, Artificial Sequence
  Description of Artificial Sequence: Synthetic oligonucleotide
gauagaagcuccuggucaa

SEQ ID NO: 351105 - RNA, 19 nt, Artificial Sequence
  Description of Artificial Sequence: Synthetic oligonucleotide
cagaauuacuggccgacac

SEQ ID NO: 351106 - RNA, 19 nt, Artificial Sequence
  Description of Artificial Sequence: Synthetic oligonucleotide
uaggcgcacagaaacauuu

SEQ ID NO: 351107 - RNA, 19 nt, Artificial Sequence
  Description of Artificial Sequence: Synthetic oligonucleotide
ggucauacuuuuaagcacc

SEQ ID NO: 351108 - RNA, 19 nt, Artificial Sequence
  Description of Artificial Sequence: Synthetic oligonucleotide
aaacggucacuaauagcag

SEQ ID NO: 351109 - RNA, 19 nt, Artificial Sequence
  Description of Artificial Sequence: Synthetic oligonucleotide
cuauaguuagccaggcaca

SEQ ID NO: 351110 - RNA, 19 nt, Artificial Sequence
  Description of Artificial Sequence: Synthetic oligonucleotide
uuaagcaccccaggcagca

SEQ ID NO: 351111 - RNA, 19 nt, Artificial Sequence
  Description of Artificial Sequence: Synthetic oligonucleotide
aacacccuaucuaccggcg

SEQ ID NO: 351112 - RNA, 19 nt, Artificial Sequence
  Description of Artificial Sequence: Synthetic oligonucleotide
cauaacaacccagcugggc

SEQ ID NO: 351113 - RNA, 19 nt, Artificial Sequence
  Description of Artificial Sequence: Synthetic oligonucleotide
gaugaguccugucuuccga

SEQ ID NO: 351114 - RNA, 19 nt, Artificial Sequence
  Description of Artificial Sequence: Synthetic oligonucleotide
agcacuacaccacugccuu

SEQ ID NO: 351115 - RNA, 19 nt, Artificial Sequence
  Description of Artificial Sequence: Synthetic oligonucleotide
uucgcugacuggcuguagu

SEQ ID NO: 351116 - RNA, 19 nt, Artificial Sequence
  Description of Artificial Sequence: Synthetic oligonucleotide
aggccaauagaauccgacu

SEQ ID NO: 351117 - RNA, 19 nt, Artificial Sequence
  Description of Artificial Sequence: Synthetic oligonucleotide
ugacuauaguuagccaggc

SEQ ID NO: 351118 - RNA, 19 nt, Artificial Sequence
  Description of Artificial Sequence: Synthetic oligonucleotide
cauggucaaaagcuguauc

SEQ ID NO: 351119 - RNA, 19 nt, Artificial Sequence
  Description of Artificial Sequence: Synthetic oligonucleotide
gaauccuucuagaguagac

SEQ ID NO: 351120 - RNA, 19 nt, Artificial Sequence
  Description of Artificial Sequence: Synthetic oligonucleotide
caggucuuacuguugugac

SEQ ID NO: 351121 - RNA, 19 nt, Artificial Sequence
  Description of Artificial Sequence: Synthetic oligonucleotide
uucgacacuuuaugguuuc

SEQ ID NO: 351122 - RNA, 19 nt, Artificial Sequence
  Description of Artificial Sequence: Synthetic oligonucleotide
guuucgcucaacucaacaa

SEQ ID NO: 351123 - RNA, 19 nt, Artificial Sequence
  Description of Artificial Sequence: Synthetic oligonucleotide
aucuccaacugguaccggu

SEQ ID NO: 351124 - RNA, 19 nt, Artificial Sequence
  Description of Artificial Sequence: Synthetic oligonucleotide
acauacuacuuugaauccu

SEQ ID NO: 351125 - RNA, 19 nt, Artificial Sequence
  Description of Artificial Sequence: Synthetic oligonucleotide
gccaauagaauccgacucc

SEQ ID NO: 351126 - RNA, 19 nt, Artificial Sequence
  Description of Artificial Sequence: Synthetic oligonucleotide
ugcgcuguuuauccaagua

SEQ ID NO: 351127 - RNA, 19 nt, Artificial Sequence
  Description of Artificial Sequence: Synthetic oligonucleotide
ugcuguugcgugccuaagu

SEQ ID NO: 351128 - RNA, 19 nt, Artificial Sequence
  Description of Artificial Sequence: Synthetic oligonucleotide
uacggguagcaaaauucuc

SEQ ID NO: 351129 - RNA, 19 nt, Artificial Sequence
  Description of Artificial Sequence: Synthetic oligonucleotide
ugaguccugucuuccgagc

SEQ ID NO: 351130 - RNA, 19 nt, Artificial Sequence
  Description of Artificial Sequence: Synthetic oligonucleotide
uccuaggcgcacagaaaca

SEQ ID NO: 351131 - RNA, 19 nt, Artificial Sequence
  Description of Artificial Sequence: Synthetic oligonucleotide
gucgugagccuuuaagcuc

SEQ ID NO: 351132 - RNA, 19 nt, Artificial Sequence
  Description of Artificial Sequence: Synthetic oligonucleotide
ucugcgcucagaucaggaa

SEQ ID NO: 351133 - RNA, 19 nt, Artificial Sequence
  Description of Artificial Sequence: Synthetic oligonucleotide
ucccaucgaaaguugcagu

SEQ ID NO: 351134 - RNA, 19 nt, Artificial Sequence
  Description of Artificial Sequence: Synthetic oligonucleotide
cuuccaauguagucuacaa

SEQ ID NO: 351135 - RNA, 19 nt, Artificial Sequence
  Description of Artificial Sequence: Synthetic oligonucleotide
uaccgguuccuaccaauuc

SEQ ID NO: 351136 - RNA, 19 nt, Artificial Sequence
  Description of Artificial Sequence: Synthetic oligonucleotide
agacaugucccuacguucu

SEQ ID NO: 351137 - RNA, 19 nt, Artificial Sequence
  Description of Artificial Sequence: Synthetic oligonucleotide
ggccaauagaauccgacuc

SEQ ID NO: 351138 - RNA, 19 nt, Artificial Sequence
  Description of Artificial Sequence: Synthetic oligonucleotide
ucguaaugacugauucauc

SEQ ID NO: 351139 - RNA, 19 nt, Artificial Sequence
  Description of Artificial Sequence: Synthetic oligonucleotide
ccaccuagagcagacaggg

SEQ ID NO: 351140 - RNA, 19 nt, Artificial Sequence
  Description of Artificial Sequence: Synthetic oligonucleotide
auauucuuccgggagguua

SEQ ID NO: 351141 - RNA, 19 nt, Artificial Sequence
  Description of Artificial Sequence: Synthetic oligonucleotide
uaucgcugucccaucgaaa

SEQ ID NO: 351142 - RNA, 19 nt, Artificial Sequence
  Description of Artificial Sequence: Synthetic oligonucleotide
guuauagaacagccgccuc

SEQ ID NO: 351143 - RNA, 19 nt, Artificial Sequence
  Description of Artificial Sequence: Synthetic oligonucleotide
acuccgaggucauacuuuu

SEQ ID NO: 351144 - RNA, 19 nt, Artificial Sequence
  Description of Artificial Sequence: Synthetic oligonucleotide
guugcgugccuaaguaugc

SEQ ID NO: 351145 - RNA, 19 nt, Artificial Sequence
  Description of Artificial Sequence: Synthetic oligonucleotide
acaauguucgacacuuuau

SEQ ID NO: 351146 - RNA, 19 nt, Artificial Sequence
  Description of Artificial Sequence: Synthetic oligonucleotide
cuaauagcagaggggcuac

SEQ ID NO: 351147 - RNA, 19 nt, Artificial Sequence
  Description of Artificial Sequence: Synthetic oligonucleotide
gagguuacggguagcaaaa

SEQ ID NO: 351148 - RNA, 19 nt, Artificial Sequence
  Description of Artificial Sequence: Synthetic oligonucleotide
agcacacaauaagcuuugc

SEQ ID NO: 351149 - RNA, 19 nt, Artificial Sequence
  Description of Artificial Sequence: Synthetic oligonucleotide
gggaguauggcaaguauca

SEQ ID NO: 351150 - RNA, 19 nt, Artificial Sequence
  Description of Artificial Sequence: Synthetic oligonucleotide
uucccgaaauaaucguaau

SEQ ID NO: 351151 - RNA, 19 nt, Artificial Sequence
  Description of Artificial Sequence: Synthetic oligonucleotide
cccgaaauaaucguaauga

SEQ ID NO: 351152 - RNA, 19 nt, Artificial Sequence
  Description of Artificial Sequence: Synthetic oligonucleotide
ccucucaagaucugguagc

SEQ ID NO: 351153 - RNA, 19 nt, Artificial Sequence
  Description of Artificial Sequence: Synthetic oligonucleotide
gacuauaguuagccaggca

SEQ ID NO: 351154 - RNA, 19 nt, Artificial Sequence
  Description of Artificial Sequence: Synthetic oligonucleotide
uaacaacccgccugagggu

SEQ ID NO: 351155 - RNA, 19 nt, Artificial Sequence
  Description of Artificial Sequence: Synthetic oligonucleotide
uagcaguuucgcucaacuc

SEQ ID NO: 351156 - RNA, 19 nt, Artificial Sequence
  Description of Artificial Sequence: Synthetic oligonucleotide
auaaucguaaugacugauu

SEQ ID NO: 351157 - RNA, 19 nt, Artificial Sequence
  Description of Artificial Sequence: Synthetic oligonucleotide
cuguuuuagcagccgcuug

SEQ ID NO: 351158 - RNA, 19 nt, Artificial Sequence
  Description of Artificial Sequence: Synthetic oligonucleotide
cuaccaugcaagccauaug

SEQ ID NO: 351159 - RNA, 19 nt, Artificial Sequence
  Description of Artificial Sequence: Synthetic oligonucleotide
gaauuacuggccgacacau

SEQ ID NO: 351160 - RNA, 19 nt, Artificial Sequence
  Description of Artificial Sequence: Synthetic oligonucleotide
acagccuauuagaauguca

SEQ ID NO: 351161 - RNA, 19 nt, Artificial Sequence
  Description of Artificial Sequence: Synthetic oligonucleotide
cacccuaucuaccggcgug

SEQ ID NO: 351162 - RNA, 19 nt, Artificial Sequence
  Description of Artificial Sequence: Synthetic oligonucleotide
ucuaggaggcucuguucau

SEQ ID NO: 351163 - RNA, 19 nt, Artificial Sequence
  Description of Artificial Sequence: Synthetic oligonucleotide
gacugcgcuguuuauccaa

SEQ ID NO: 351164 - RNA, 19 nt, Artificial Sequence
  Description of Artificial Sequence: Synthetic oligonucleotide
agaauccgacuccgagguc

SEQ ID NO: 351165 - RNA, 19 nt, Artificial Sequence
  Description of Artificial Sequence: Synthetic oligonucleotide
gaaguguucucaaagucuu

SEQ ID NO: 351166 - RNA, 19 nt, Artificial Sequence
  Description of Artificial Sequence: Synthetic oligonucleotide
agccaaugcgacugcgcug

SEQ ID NO: 351167 - RNA, 19 nt, Artificial Sequence
  Description of Artificial Sequence: Synthetic oligonucleotide
gcuguagugaagaucgcac

SEQ ID NO: 351168 - RNA, 19 nt, Artificial Sequence
  Description of Artificial Sequence: Synthetic oligonucleotide
accugacauuauccuaucu

SEQ ID NO: 351169 - RNA, 19 nt, Artificial Sequence
  Description of Artificial Sequence: Synthetic oligonucleotide
ucuaccggcgugagccgac

SEQ ID NO: 351170 - RNA, 19 nt, Artificial Sequence
  Description of Artificial Sequence: Synthetic oligonucleotide
uguaucccaucgguucagc

SEQ ID NO: 351171 - RNA, 19 nt, Artificial Sequence
  Description of Artificial Sequence: Synthetic oligonucleotide
ggcuaucgcugucccaucg

SEQ ID NO: 351172 - RNA, 19 nt, Artificial Sequence
  Description of Artificial Sequence: Synthetic oligonucleotide
gccuauuagaaugucauua

SEQ ID NO: 351173 - RNA, 19 nt, Artificial Sequence
  Description of Artificial Sequence: Synthetic oligonucleotide
ccaguaucguuuacagccc

SEQ ID NO: 351174 - RNA, 19 nt, Artificial Sequence
  Description of Artificial Sequence: Synthetic oligonucleotide
acagaauuacuggccgaca

SEQ ID NO: 351175 - RNA, 19 nt, Artificial Sequence
  Description of Artificial Sequence: Synthetic oligonucleotide
cagccuauuagaaugucau

SEQ ID NO: 351176 - RNA, 19 nt, Artificial Sequence
  Description of Artificial Sequence: Synthetic oligonucleotide
ggucuuacuguugugaccu

SEQ ID NO: 351177 - RNA, 19 nt, Artificial Sequence
  Description of Artificial Sequence: Synthetic oligonucleotide
ugcgacugcgcuguuuauc

SEQ ID NO: 351178 - RNA, 19 nt, Artificial Sequence
  Description of Artificial Sequence: Synthetic oligonucleotide
ucgcaccaggucuuacugu

SEQ ID NO: 351179 - RNA, 19 nt, Artificial Sequence
  Description of Artificial Sequence: Synthetic oligonucleotide
gguacauaacaacccagcu

SEQ ID NO: 351180 - RNA, 19 nt, Artificial Sequence
  Description of Artificial Sequence: Synthetic oligonucleotide
ugcgugccuaaguaugcua

SEQ ID NO: 351181 - RNA, 19 nt, Artificial Sequence
  Description of Artificial Sequence: Synthetic oligonucleotide
agccuauuagaaugucauu

SEQ ID NO: 351182 - RNA, 19 nt, Artificial Sequence
  Description of Artificial Sequence: Synthetic oligonucleotide
ccgguuccuaccaauuccc

SEQ ID NO: 351183 - RNA, 19 nt, Artificial Sequence
  Description of Artificial Sequence: Synthetic oligonucleotide
gugccuaaguaugcuagca

SEQ ID NO: 351184 - RNA, 19 nt, Artificial Sequence
  Description of Artificial Sequence: Synthetic oligonucleotide
acacccuaucuaccggcgu

SEQ ID NO: 351185 - RNA, 19 nt, Artificial Sequence
  Description of Artificial Sequence: Synthetic oligonucleotide
uggcuguagugaagaucgc

SEQ ID NO: 351186 - RNA, 19 nt, Artificial Sequence
  Description of Artificial Sequence: Synthetic oligonucleotide
caauagaauccgacuccga

SEQ ID NO: 351187 - RNA, 19 nt, Artificial Sequence
  Description of Artificial Sequence: Synthetic oligonucleotide
cugcgcucagaucaggaaa

SEQ ID NO: 351188 - RNA, 19 nt, Artificial Sequence
  Description of Artificial Sequence: Synthetic oligonucleotide
uugcgugccuaaguaugcu

SEQ ID NO: 351189 - RNA, 19 nt, Artificial Sequence
  Description of Artificial Sequence: Synthetic oligonucleotide
aaagcgcccuucaggacuu

SEQ ID NO: 351190 - RNA, 19 nt, Artificial Sequence
  Description of Artificial Sequence: Synthetic oligonucleotide
uaauagcagaggggcuaca

SEQ ID NO: 351191 - RNA, 19 nt, Artificial Sequence
  Description of Artificial Sequence: Synthetic oligonucleotide
cuuuaggaggucugugacu

SEQ ID NO: 351192 - RNA, 19 nt, Artificial Sequence
  Description of Artificial Sequence: Synthetic oligonucleotide
gcgugccuaaguaugcuag

SEQ ID NO: 351193 - RNA, 19 nt, Artificial Sequence
  Description of Artificial Sequence: Synthetic oligonucleotide
augcacucuauagcagacu

SEQ ID NO: 351194 - RNA, 19 nt, Artificial Sequence
  Description of Artificial Sequence: Synthetic oligonucleotide
aagcuguaucccaucgguu

SEQ ID NO: 351195 - RNA, 19 nt, Artificial Sequence
  Description of Artificial Sequence: Synthetic oligonucleotide
gcuguugcgugccuaagua

SEQ ID NO: 351196 - RNA, 19 nt, Artificial Sequence
  Description of Artificial Sequence: Synthetic oligonucleotide
cucugcgcucagaucagga

SEQ ID NO: 351197 - RNA, 19 nt, Artificial Sequence
  Description of Artificial Sequence: Synthetic oligonucleotide
cuugggagugaugaguccu

SEQ ID NO: 351198 - RNA, 19 nt, Artificial Sequence
  Description of Artificial Sequence: Synthetic oligonucleotide
cugcauugaagccguagcu

SEQ ID NO: 351199 - RNA, 19 nt, Artificial Sequence
  Description of Artificial Sequence: Synthetic oligonucleotide
gccuaaguaugcuagcagu

SEQ ID NO: 351200 - RNA, 19 nt, Artificial Sequence
  Description of Artificial Sequence: Synthetic oligonucleotide
caguuucgcucaacucaac

SEQ ID NO: 351201 - RNA, 19 nt, Artificial Sequence
  Description of Artificial Sequence: Synthetic oligonucleotide
gucacuagccagacaaacu

SEQ ID NO: 351202 - RNA, 19 nt, Artificial Sequence
  Description of Artificial Sequence: Synthetic oligonucleotide
ugguaccgguuccuaccaa

SEQ ID NO: 351203 - RNA, 19 nt, Artificial Sequence
  Description of Artificial Sequence: Synthetic oligonucleotide
acccuaucuaccggcguga

SEQ ID NO: 351204 - RNA, 19 nt, Artificial Sequence
  Description of Artificial Sequence: Synthetic oligonucleotide
cggguagcaaaauucucug

SEQ ID NO: 351205 - RNA, 19 nt, Artificial Sequence
  Description of Artificial Sequence: Synthetic oligonucleotide
cacagccuauuagaauguc

SEQ ID NO: 351206 - RNA, 19 nt, Artificial Sequence
  Description of Artificial Sequence: Synthetic oligonucleotide
cagcuuagcuuccaaugua

SEQ ID NO: 351207 - RNA, 19 nt, Artificial Sequence
  Description of Artificial Sequence: Synthetic oligonucleotide
ggaaggugauagucuccug

SEQ ID NO: 351208 - RNA, 19 nt, Artificial Sequence
  Description of Artificial Sequence: Synthetic oligonucleotide
cuucuagaguagacagaaa

SEQ ID NO: 351209 - RNA, 19 nt, Artificial Sequence
  Description of Artificial Sequence: Synthetic oligonucleotide
caacugcacuggcuaucgc

SEQ ID NO: 351210 - RNA, 19 nt, Artificial Sequence
  Description of Artificial Sequence: Synthetic oligonucleotide
ccaucgguucagcucugcg

SEQ ID NO: 351211 - RNA, 19 nt, Artificial Sequence
  Description of Artificial Sequence: Synthetic oligonucleotide
cagagucccuucaguagaa

SEQ ID NO: 351212 - RNA, 19 nt, Artificial Sequence
  Description of Artificial Sequence: Synthetic oligonucleotide
cuguugugaccuugucaga

SEQ ID NO: 351213 - RNA, 19 nt, Artificial Sequence
  Description of Artificial Sequence: Synthetic oligonucleotide
uggcuaucgcugucccauc

SEQ ID NO: 351214 - RNA, 19 nt, Artificial Sequence
  Description of Artificial Sequence: Synthetic oligonucleotide
aguaucguuuacagcccuu

SEQ ID NO: 351215 - RNA, 19 nt, Artificial Sequence
  Description of Artificial Sequence: Synthetic oligonucleotide
cgugccuaaguaugcuagc

SEQ ID NO: 351216 - RNA, 19 nt, Artificial Sequence
  Description of Artificial Sequence: Synthetic oligonucleotide
ggaucuuacucaguagccu

SEQ ID NO: 351217 - RNA, 19 nt, Artificial Sequence
  Description of Artificial Sequence: Synthetic oligonucleotide
aucuaccggcgugagccga

SEQ ID NO: 351218 - RNA, 19 nt, Artificial Sequence
  Description of Artificial Sequence: Synthetic oligonucleotide
agccugucuuaugagugua

SEQ ID NO: 351219 - RNA, 19 nt, Artificial Sequence
  Description of Artificial Sequence: Synthetic oligonucleotide
gaagaucgcaccaggucuu

SEQ ID NO: 351220 - RNA, 19 nt, Artificial Sequence
  Description of Artificial Sequence: Synthetic oligonucleotide
aggcaccaagucugguaaa

SEQ ID NO: 351221 - RNA, 19 nt, Artificial Sequence
  Description of Artificial Sequence: Synthetic oligonucleotide
accggcgugagccgacauu

SEQ ID NO: 351222 - RNA, 19 nt, Artificial Sequence
  Description of Artificial Sequence: Synthetic oligonucleotide
ccuaucuaccggcgugagc

SEQ ID NO: 351223 - RNA, 19 nt, Artificial Sequence
  Description of Artificial Sequence: Synthetic oligonucleotide
cuacagucggccugucacu

SEQ ID NO: 351224 - RNA, 19 nt, Artificial Sequence
  Description of Artificial Sequence: Synthetic oligonucleotide
cucucaagaucugguagcu

SEQ ID NO: 351225 - RNA, 19 nt, Artificial Sequence
  Description of Artificial Sequence: Synthetic oligonucleotide
ccaggucuuacuguuguga

SEQ ID NO: 351226 - RNA, 19 nt, Artificial Sequence
  Description of Artificial Sequence: Synthetic oligonucleotide
agguuacggguagcaaaau

SEQ ID NO: 351227 - RNA, 19 nt, Artificial Sequence
  Description of Artificial Sequence: Synthetic oligonucleotide
guaucguuuacagcccuuu

SEQ ID NO: 351228 - RNA, 19 nt, Artificial Sequence
  Description of Artificial Sequence: Synthetic oligonucleotide
gacuccgaggucauacuuu

SEQ ID NO: 351229 - RNA, 19 nt, Artificial Sequence
  Description of Artificial Sequence: Synthetic oligonucleotide
ccucgcacucauucucuac

SEQ ID NO: 351230 - RNA, 19 nt, Artificial Sequence
  Description of Artificial Sequence: Synthetic oligonucleotide
agggaugucgugagccuuu

SEQ ID NO: 351231 - RNA, 19 nt, Artificial Sequence
  Description of Artificial Sequence: Synthetic oligonucleotide
gccugucuuaugaguguag

SEQ ID NO: 351232 - RNA, 19 nt, Artificial Sequence
  Description of Artificial Sequence: Synthetic oligonucleotide
gcgcuguuuauccaaguau

SEQ ID NO: 351233 - RNA, 19 nt, Artificial Sequence
  Description of Artificial Sequence: Synthetic oligonucleotide
gguuacggguagcaaaauu

SEQ ID NO: 351234 - RNA, 19 nt, Artificial Sequence
  Description of Artificial Sequence: Synthetic oligonucleotide
gguaccgguuccuaccaau

SEQ ID NO: 351235 - RNA, 19 nt, Artificial Sequence
  Description of Artificial Sequence: Synthetic oligonucleotide
ccggcgugagccgacauuc

SEQ ID NO: 351236 - RNA, 19 nt, Artificial Sequence
  Description of Artificial Sequence: Synthetic oligonucleotide
caguaucguuuacagcccu

SEQ ID NO: 351237 - RNA, 19 nt, Artificial Sequence
  Description of Artificial Sequence: Synthetic oligonucleotide
guucgacacuuuaugguuu

SEQ ID NO: 351238 - RNA, 19 nt, Artificial Sequence
  Description of Artificial Sequence: Synthetic oligonucleotide
ccuaucugaggcaccaagu

SEQ ID NO: 351239 - RNA, 19 nt, Artificial Sequence
  Description of Artificial Sequence: Synthetic oligonucleotide
cuguugcgugccuaaguau

SEQ ID NO: 351240 - RNA, 19 nt, Artificial Sequence
  Description of Artificial Sequence: Synthetic oligonucleotide
gacaugucccuacguucuu

SEQ ID NO: 351241 - RNA, 19 nt, Artificial Sequence
  Description of Artificial Sequence: Synthetic oligonucleotide
aggcgcacagaaacauuuu

SEQ ID NO: 351242 - RNA, 19 nt, Artificial Sequence
  Description of Artificial Sequence: Synthetic oligonucleotide
ccuaaguaugcuagcaguu

SEQ ID NO: 351243 - RNA, 19 nt, Artificial Sequence
  Description of Artificial Sequence: Synthetic oligonucleotide
caaccaccuagagcagaca

SEQ ID NO: 351244 - RNA, 19 nt, Artificial Sequence
  Description of Artificial Sequence: Synthetic oligonucleotide
cauucgcugacuggcugua

SEQ ID NO: 351245 - RNA, 19 nt, Artificial Sequence
  Description of Artificial Sequence: Synthetic oligonucleotide
cuaggcgcacagaaacauu

SEQ ID NO: 351246 - RNA, 19 nt, Artificial Sequence
  Description of Artificial Sequence: Synthetic oligonucleotide
gaaccugguaucagaccuu

SEQ ID NO: 351247 - RNA, 19 nt, Artificial Sequence
  Description of Artificial Sequence: Synthetic oligonucleotide
cuacguucuucagcauuua

SEQ ID NO: 351248 - RNA, 19 nt, Artificial Sequence
  Description of Artificial Sequence: Synthetic oligonucleotide
guaccgguuccuaccaauu

SEQ ID NO: 351249 - RNA, 19 nt, Artificial Sequence
  Description of Artificial Sequence: Synthetic oligonucleotide
cuccgaggucauacuuuua

SEQ ID NO: 351250 - RNA, 19 nt, Artificial Sequence
  Description of Artificial Sequence: Synthetic oligonucleotide
gcacuacaccacugccuuc

SEQ ID NO: 351251 - RNA, 19 nt, Artificial Sequence
  Description of Artificial Sequence: Synthetic oligonucleotide
caacccagcugggccauua

SEQ ID NO: 351252 - RNA, 19 nt, Artificial Sequence
  Description of Artificial Sequence: Synthetic oligonucleotide
caacugguaccgguuccua

SEQ ID NO: 351253 - RNA, 19 nt, Artificial Sequence
  Description of Artificial Sequence: Synthetic oligonucleotide
ggaugucgugagccuuuaa

SEQ ID NO: 351254 - RNA, 19 nt, Artificial Sequence
  Description of Artificial Sequence: Synthetic oligonucleotide
cccuaucuaccggcgugag

SEQ ID NO: 351255 - RNA, 19 nt, Artificial Sequence
  Description of Artificial Sequence: Synthetic oligonucleotide
ccgacacauaggaccaucu

SEQ ID NO: 351256 - RNA, 19 nt, Artificial Sequence
  Description of Artificial Sequence: Synthetic oligonucleotide
ccuaggcgcacagaaacau

SEQ ID NO: 351257 - RNA, 19 nt, Artificial Sequence
  Description of Artificial Sequence: Synthetic oligonucleotide
ggcgugagccgacauucuu

SEQ ID NO: 351258 - RNA, 19 nt, Artificial Sequence
  Description of Artificial Sequence: Synthetic oligonucleotide
gggaugucgugagccuuua

SEQ ID NO: 351259 - RNA, 19 nt, Artificial Sequence
  Description of Artificial Sequence: Synthetic oligonucleotide
caaugcgacugcgcuguuu

SEQ ID NO: 351260 - RNA, 19 nt, Artificial Sequence
  Description of Artificial Sequence: Synthetic oligonucleotide
ccgggagguuacggguagc

SEQ ID NO: 351261 - RNA, 19 nt, Artificial Sequence
  Description of Artificial Sequence: Synthetic oligonucleotide
ccgacuccgaggucauacu

SEQ ID NO: 351262 - RNA, 19 nt, Artificial Sequence
  Description of Artificial Sequence: Synthetic oligonucleotide
ccguagcucuugggacaag

SEQ ID NO: 351263 - RNA, 19 nt, Artificial Sequence
  Description of Artificial Sequence: Synthetic oligonucleotide
gcccgccuugggagugaug

SEQ ID NO: 351264 - RNA, 19 nt, Artificial Sequence
  Description of Artificial Sequence: Synthetic oligonucleotide
cgacuccgaggucauacuu

SEQ ID NO: 351265 - RNA, 19 nt, Artificial Sequence
  Description of Artificial Sequence: Synthetic oligonucleotide
cgugagccuuuaagcucua

SEQ ID NO: 351266 - RNA, 19 nt, Artificial Sequence
  Description of Artificial Sequence: Synthetic oligonucleotide
ggccgacacauaggaccau

SEQ ID NO: 351267 - RNA, 19 nt, Artificial Sequence
  Description of Artificial Sequence: Synthetic oligonucleotide
cggcgugagccgacauucu

SEQ ID NO: 351268 - RNA, 19 nt, Artificial Sequence
  Description of Artificial Sequence: Synthetic oligonucleotide
ccaaugcgacugcgcuguu

SEQ ID NO: 351269 - RNA, 19 nt, Artificial Sequence
  Description of Artificial Sequence: Synthetic oligonucleotide
uguuguagaauacaggagg

SEQ ID NO: 351270 - RNA, 19 nt, Artificial Sequence
  Description of Artificial Sequence: Synthetic oligonucleotide
cuauuaaucaccacccucg

SEQ ID NO: 351271 - RNA, 19 nt, Artificial Sequence
  Description of Artificial Sequence: Synthetic oligonucleotide
uguaaccucauccagggcc

SEQ ID NO: 351272 - RNA, 19 nt, Artificial Sequence
  Description of Artificial Sequence: Synthetic oligonucleotide
auagacuguuccuuuagcc

SEQ ID NO: 351273 - RNA, 19 nt, Artificial Sequence
  Description of Artificial Sequence: Synthetic oligonucleotide
aagccgucuggccagaggc

SEQ ID NO: 351274 - RNA, 19 nt, Artificial Sequence
  Description of Artificial Sequence: Synthetic oligonucleotide
agaucaaugaggcuggcag

SEQ ID NO: 351275 - RNA, 19 nt, Artificial Sequence
  Description of Artificial Sequence: Synthetic oligonucleotide
ucucgaaguggccagaaag

SEQ ID NO: 351276 - RNA, 19 nt, Artificial Sequence
  Description of Artificial Sequence: Synthetic oligonucleotide
acuauuaaucaccacccuc

SEQ ID NO: 351277 - RNA, 19 nt, Artificial Sequence
  Description of Artificial Sequence: Synthetic oligonucleotide
cauaguuaggaccugggag

SEQ ID NO: 351278 - RNA, 19 nt, Artificial Sequence
  Description of Artificial Sequence: Synthetic oligonucleotide
acaguugccacuauuaauc

SEQ ID NO: 351279 - RNA, 19 nt, Artificial Sequence
  Description of Artificial Sequence: Synthetic oligonucleotide
ugagcacauauuuuggcag

SEQ ID NO: 351280 - RNA, 19 nt, Artificial Sequence
  Description of Artificial Sequence: Synthetic oligonucleotide
cauagaucaaugaggcugg

SEQ ID NO: 351281 - RNA, 19 nt, Artificial Sequence
  Description of Artificial Sequence: Synthetic oligonucleotide
ucacaauuacgucaacacc

SEQ ID NO: 351282 - RNA, 19 nt, Artificial Sequence
  Description of Artificial Sequence: Synthetic oligonucleotide
ucucaaucuguucagugac

SEQ ID NO: 351283 - RNA, 19 nt, Artificial Sequence
  Description of Artificial Sequence: Synthetic oligonucleotide
gagacuaagcuacaaucug

SEQ ID NO: 351284 - RNA, 19 nt, Artificial Sequence
  Description of Artificial Sequence: Synthetic oligonucleotide
uggucuaccuccucuagag

SEQ ID NO: 351285 - RNA, 19 nt, Artificial Sequence
  Description of Artificial Sequence: Synthetic oligonucleotide
guguacagaguccagucgg

SEQ ID NO: 351286 - RNA, 19 nt, Artificial Sequence
  Description of Artificial Sequence: Synthetic oligonucleotide
agcggagagacuaagcuac

SEQ ID NO: 351287 - RNA, 19 nt, Artificial Sequence
  Description of Artificial Sequence: Synthetic oligonucleotide
aaagauagacuguuccuuu

SEQ ID NO: 351288 - RNA, 19 nt, Artificial Sequence
  Description of Artificial Sequence: Synthetic oligonucleotide
uccucguauguguacagag

SEQ ID NO: 351289 - RNA, 19 nt, Artificial Sequence
  Description of Artificial Sequence: Synthetic oligonucleotide
uguucaaaccugagccugg

SEQ ID NO: 351290 - RNA, 19 nt, Artificial Sequence
  Description of Artificial Sequence: Synthetic oligonucleotide
ucaucucaacuaccaacgg

SEQ ID NO: 351291 - RNA, 19 nt, Artificial Sequence
  Description of Artificial Sequence: Synthetic oligonucleotide
aucaccuccucguacgccg

SEQ ID NO: 351292 - RNA, 19 nt, Artificial Sequence
  Description of Artificial Sequence: Synthetic oligonucleotide
cacauauuuuggcagggcc

SEQ ID NO: 351293 - RNA, 19 nt, Artificial Sequence
  Description of Artificial Sequence: Synthetic oligonucleotide
uagacuguuccuuuagccu

SEQ ID NO: 351294 - RNA, 19 nt, Artificial Sequence
  Description of Artificial Sequence: Synthetic oligonucleotide
gagcacauauuuuggcagg

SEQ ID NO: 351295 - RNA, 19 nt, Artificial Sequence
  Description of Artificial Sequence: Synthetic oligonucleotide
uaaucaccacccucgaagc

SEQ ID NO: 351296 - RNA, 19 nt, Artificial Sequence
  Description of Artificial Sequence: Synthetic oligonucleotide
agauagacuguuccuuuag

SEQ ID NO: 351297 - RNA, 19 nt, Artificial Sequence
  Description of Artificial Sequence: Synthetic oligonucleotide
gaugucgaucucuggaggc

SEQ ID NO: 351298 - RNA, 19 nt, Artificial Sequence
  Description of Artificial Sequence: Synthetic oligonucleotide
ugauugggcgaacucuucc

SEQ ID NO: 351299 - RNA, 19 nt, Artificial Sequence
  Description of Artificial Sequence: Synthetic oligonucleotide
cucgaaguggccagaaagc

SEQ ID NO: 351300 - RNA, 19 nt, Artificial Sequence
  Description of Artificial Sequence: Synthetic oligonucleotide
caucucaacuaccaacggg

SEQ ID NO: 351301 - RNA, 19 nt, Artificial Sequence
  Description of Artificial Sequence: Synthetic oligonucleotide
uucucauccucccgaagcc

SEQ ID NO: 351302 - RNA, 19 nt, Artificial Sequence
  Description of Artificial Sequence: Synthetic oligonucleotide
auaaaacuaggaaaaguga

SEQ ID NO: 351303 - RNA, 19 nt, Artificial Sequence
  Description of Artificial Sequence: Synthetic oligonucleotide
aguugccacuauuaaucac

SEQ ID NO: 351304 - RNA, 19 nt, Artificial Sequence
  Description of Artificial Sequence: Synthetic oligonucleotide
cuggucaccaaagauagac

SEQ ID NO: 351305 - RNA, 19 nt, Artificial Sequence
  Description of Artificial Sequence: Synthetic oligonucleotide
caggccauagaucaaugag

SEQ ID NO: 351306 - RNA, 19 nt, Artificial Sequence
  Description of Artificial Sequence: Synthetic oligonucleotide
auuacgucaacacccugga

SEQ ID NO: 351307 - RNA, 19 nt, Artificial Sequence
  Description of Artificial Sequence: Synthetic oligonucleotide
uccugaugcugcaagcuug

SEQ ID NO: 351308 - RNA, 19 nt, Artificial Sequence
  Description of Artificial Sequence: Synthetic oligonucleotide
cucguauguguacagaguc

SEQ ID NO: 351309 - RNA, 19 nt, Artificial Sequence
  Description of Artificial Sequence: Synthetic oligonucleotide
ucugcgucccagcagguga

SEQ ID NO: 351310 - RNA, 19 nt, Artificial Sequence
  Description of Artificial Sequence: Synthetic oligonucleotide
ucguauguguacagagucc

SEQ ID NO: 351311 - RNA, 19 nt, Artificial Sequence
  Description of Artificial Sequence: Synthetic oligonucleotide
aggauguaaccucauccag

SEQ ID NO: 351312 - RNA, 19 nt, Artificial Sequence
  Description of Artificial Sequence: Synthetic oligonucleotide
agacuaagcuacaaucugg

SEQ ID NO: 351313 - RNA, 19 nt, Artificial Sequence
  Description of Artificial Sequence: Synthetic oligonucleotide
aaguauccuucacuggccu

SEQ ID NO: 351314 - RNA, 19 nt, Artificial Sequence
  Description of Artificial Sequence: Synthetic oligonucleotide
uugcacacggcucuucuga

SEQ ID NO: 351315 - RNA, 19 nt, Artificial Sequence
  Description of Artificial Sequence: Synthetic oligonucleotide
ucucaacuaccaacgggag

SEQ ID NO: 351316 - RNA, 19 nt, Artificial Sequence
  Description of Artificial Sequence: Synthetic oligonucleotide
aaacugcucgcgguuaauc

SEQ ID NO: 351317 - RNA, 19 nt, Artificial Sequence
  Description of Artificial Sequence: Synthetic oligonucleotide
aucucaacuaccaacggga

SEQ ID NO: 351318 - RNA, 19 nt, Artificial Sequence
  Description of Artificial Sequence: Synthetic oligonucleotide
acuaagcuacaaucugguc

SEQ ID NO: 351319 - RNA, 19 nt, Artificial Sequence
  Description of Artificial Sequence: Synthetic oligonucleotide
ugcaagcuugaggucaucg

SEQ ID NO: 351320 - RNA, 19 nt, Artificial Sequence
  Description of Artificial Sequence: Synthetic oligonucleotide
ggucaccaaagauagacug

SEQ ID NO: 351321 - RNA, 19 nt, Artificial Sequence
  Description of Artificial Sequence: Synthetic oligonucleotide
guauccuucacuggccugg

SEQ ID NO: 351322 - RNA, 19 nt, Artificial Sequence
  Description of Artificial Sequence: Synthetic oligonucleotide
agcauucucauccucccga

SEQ ID NO: 351323 - RNA, 19 nt, Artificial Sequence
  Description of Artificial Sequence: Synthetic oligonucleotide
agagacuaagcuacaaucu

SEQ ID NO: 351324 - RNA, 19 nt, Artificial Sequence
  Description of Artificial Sequence: Synthetic oligonucleotide
ugucaguaguggcagugga

SEQ ID NO: 351325 - RNA, 19 nt, Artificial Sequence
  Description of Artificial Sequence: Synthetic oligonucleotide
aggcacaucuucaccaacc

SEQ ID NO: 351326 - RNA, 19 nt, Artificial Sequence
  Description of Artificial Sequence: Synthetic oligonucleotide
ucggaagaacucccgcggg

SEQ ID NO: 351327 - RNA, 19 nt, Artificial Sequence
  Description of Artificial Sequence: Synthetic oligonucleotide
aacccaguugaugagcaca

SEQ ID NO: 351328 - RNA, 19 nt, Artificial Sequence
  Description of Artificial Sequence: Synthetic oligonucleotide
ccacuauuaaucaccaccc

SEQ ID NO: 351329 - RNA, 19 nt, Artificial Sequence
  Description of Artificial Sequence: Synthetic oligonucleotide
gaaguauccuucacuggcc

SEQ ID NO: 351330 - RNA, 19 nt, Artificial Sequence
  Description of Artificial Sequence: Synthetic oligonucleotide
acgucaacacccuggaaga

SEQ ID NO: 351331 - RNA, 19 nt, Artificial Sequence
  Description of Artificial Sequence: Synthetic oligonucleotide
aauccgccucaucuccacg

SEQ ID NO: 351332 - RNA, 19 nt, Artificial Sequence
  Description of Artificial Sequence: Synthetic oligonucleotide
cacacggcucuucugauug

SEQ ID NO: 351333 - RNA, 19 nt, Artificial Sequence
  Description of Artificial Sequence: Synthetic oligonucleotide
agccauacaucacuuucug

SEQ ID NO: 351334 - RNA, 19 nt, Artificial Sequence
  Description of Artificial Sequence: Synthetic oligonucleotide
cucaacuaccaacgggagg

SEQ ID NO: 351335 - RNA, 19 nt, Artificial Sequence
  Description of Artificial Sequence: Synthetic oligonucleotide
ccauagaucaaugaggcug

SEQ ID NO: 351336 - RNA, 19 nt, Artificial Sequence
  Description of Artificial Sequence: Synthetic oligonucleotide
cagaagccgaugcaacucg

SEQ ID NO: 351337 - RNA, 19 nt, Artificial Sequence
  Description of Artificial Sequence: Synthetic oligonucleotide
ucgcuggucaccaaagaua

SEQ ID NO: 351338 - RNA, 19 nt, Artificial Sequence
  Description of Artificial Sequence: Synthetic oligonucleotide
acuccggggccucuugagc

SEQ ID NO: 351339 - RNA, 19 nt, Artificial Sequence
  Description of Artificial Sequence: Synthetic oligonucleotide
aacaguggugucaguagug

SEQ ID NO: 351340 - RNA, 19 nt, Artificial Sequence
  Description of Artificial Sequence: Synthetic oligonucleotide
uggucggugguugaaaggu

SEQ ID NO: 351341 - RNA, 19 nt, Artificial Sequence
  Description of Artificial Sequence: Synthetic oligonucleotide
cacuuucugguucucgaag

SEQ ID NO: 351342 - RNA, 19 nt, Artificial Sequence
  Description of Artificial Sequence: Synthetic oligonucleotide
aucggagccauccucguau

SEQ ID NO: 351343 - RNA, 19 nt, Artificial Sequence
  Description of Artificial Sequence: Synthetic oligonucleotide
caccuuagccacauggcug

SEQ ID NO: 351344 - RNA, 19 nt, Artificial Sequence
  Description of Artificial Sequence: Synthetic oligonucleotide
ugguucucgaaguggccag

SEQ ID NO: 351345 - RNA, 19 nt, Artificial Sequence
  Description of Artificial Sequence: Synthetic oligonucleotide
agcacauauuuuggcaggg

SEQ ID NO: 351346 - RNA, 19 nt, Artificial Sequence
  Description of Artificial Sequence: Synthetic oligonucleotide
gugauugacugaaguaucc

SEQ ID NO: 351347 - RNA, 19 nt, Artificial Sequence
  Description of Artificial Sequence: Synthetic oligonucleotide
gucaucggagccauccucg

SEQ ID NO: 351348 - RNA, 19 nt, Artificial Sequence
  Description of Artificial Sequence: Synthetic oligonucleotide
cuccgggugggaaugguag

SEQ ID NO: 351349 - RNA, 19 nt, Artificial Sequence
  Description of Artificial Sequence: Synthetic oligonucleotide
cuaaugcaggcgcugcaag

SEQ ID NO: 351350 - RNA, 19 nt, Artificial Sequence
  Description of Artificial Sequence: Synthetic oligonucleotide
agccgugccaguccauugg

SEQ ID NO: 351351 - RNA, 19 nt, Artificial Sequence
  Description of Artificial Sequence: Synthetic oligonucleotide
cucacgccggccaugcugc

SEQ ID NO: 351352 - RNA, 19 nt, Artificial Sequence
  Description of Artificial Sequence: Synthetic oligonucleotide
auggcaccggcaucgaugu

SEQ ID NO: 351353 - RNA, 19 nt, Artificial Sequence
  Description of Artificial Sequence: Synthetic oligonucleotide
ugacugaaguauccuucac

SEQ ID NO: 351354 - RNA, 19 nt, Artificial Sequence
  Description of Artificial Sequence: Synthetic oligonucleotide
agccgaugcaauacugggc

SEQ ID NO: 351355 - RNA, 19 nt, Artificial Sequence
  Description of Artificial Sequence: Synthetic oligonucleotide
cuggugguugacuccgggg

SEQ ID NO: 351356 - RNA, 19 nt, Artificial Sequence
  Description of Artificial Sequence: Synthetic oligonucleotide
cuaccaacgggaggaaacc

SEQ ID NO: 351357 - RNA, 19 nt, Artificial Sequence
  Description of Artificial Sequence: Synthetic oligonucleotide
aguggugucaguaguggca

SEQ ID NO: 351358 - RNA, 19 nt, Artificial Sequence
  Description of Artificial Sequence: Synthetic oligonucleotide
gaggcugcgaggauguaac

SEQ ID NO: 351359 - RNA, 19 nt, Artificial Sequence
  Description of Artificial Sequence: Synthetic oligonucleotide
uuagccuccucuuggccuc

SEQ ID NO: 351360 - RNA, 19 nt, Artificial Sequence
  Description of Artificial Sequence: Synthetic oligonucleotide
cucgguaacgccgcucucg

SEQ ID NO: 351361 - RNA, 19 nt, Artificial Sequence
  Description of Artificial Sequence: Synthetic oligonucleotide
gugguugaaaggugagggc

SEQ ID NO: 351362 - RNA, 19 nt, Artificial Sequence
  Description of Artificial Sequence: Synthetic oligonucleotide
caaaccugagccuggcguc

SEQ ID NO: 351363 - RNA, 19 nt, Artificial Sequence
  Description of Artificial Sequence: Synthetic oligonucleotide
guaaccucauccagggccc

SEQ ID NO: 351364 - RNA, 19 nt, Artificial Sequence
  Description of Artificial Sequence: Synthetic oligonucleotide
ucguacgccgccagcagcu

SEQ ID NO: 351365 - RNA, 19 nt, Artificial Sequence
  Description of Artificial Sequence: Synthetic oligonucleotide
uaguuaggaccugggaggc

SEQ ID NO: 351366 - RNA, 19 nt, Artificial Sequence
  Description of Artificial Sequence: Synthetic oligonucleotide
agcggcaggggugacauug

SEQ ID NO: 351367 - RNA, 19 nt, Artificial Sequence
  Description of Artificial Sequence: Synthetic oligonucleotide
cuggucggugguugaaagg

SEQ ID NO: 351368 - RNA, 19 nt, Artificial Sequence
  Description of Artificial Sequence: Synthetic oligonucleotide
acaauuacgucaacacccu

SEQ ID NO: 351369 - RNA, 19 nt, Artificial Sequence
  Description of Artificial Sequence: Synthetic oligonucleotide
uggaagaauucagccaccu

SEQ ID NO: 351370 - RNA, 19 nt, Artificial Sequence
  Description of Artificial Sequence: Synthetic oligonucleotide
agucagagggacuccgggu

SEQ ID NO: 351371 - RNA, 19 nt, Artificial Sequence
  Description of Artificial Sequence: Synthetic oligonucleotide
gguaacgccgcucucguuc

SEQ ID NO: 351372 - RNA, 19 nt, Artificial Sequence
  Description of Artificial Sequence: Synthetic oligonucleotide
guuaggaccugggaggcac

SEQ ID NO: 351373 - RNA, 19 nt, Artificial Sequence
  Description of Artificial Sequence: Synthetic oligonucleotide
auauuuuggcagggccgcc

SEQ ID NO: 351374 - RNA, 19 nt, Artificial Sequence
  Description of Artificial Sequence: Synthetic oligonucleotide
cugcucgcgguuaauccgc

SEQ ID NO: 351375 - RNA, 19 nt, Artificial Sequence
  Description of Artificial Sequence: Synthetic oligonucleotide
ucucgcuggucaccaaaga

SEQ ID NO: 351376 - RNA, 19 nt, Artificial Sequence
  Description of Artificial Sequence: Synthetic oligonucleotide
gggucugcgucccagcagg

SEQ ID NO: 351377 - RNA, 19 nt, Artificial Sequence
  Description of Artificial Sequence: Synthetic oligonucleotide
gcaucgaugucuuccacac

SEQ ID NO: 351378 - RNA, 19 nt, Artificial Sequence
  Description of Artificial Sequence: Synthetic oligonucleotide
caccaggucccaagcaggg

SEQ ID NO: 351379 - RNA, 19 nt, Artificial Sequence
  Description of Artificial Sequence: Synthetic oligonucleotide
ucuucugauugggcgaacu

SEQ ID NO: 351380 - RNA, 19 nt, Artificial Sequence
  Description of Artificial Sequence: Synthetic oligonucleotide
auagaucaaugaggcuggc

SEQ ID NO: 351381 - RNA, 19 nt, Artificial Sequence
  Description of Artificial Sequence: Synthetic oligonucleotide
cuuggcgaaggcagccggg

SEQ ID NO: 351382 - RNA, 19 nt, Artificial Sequence
  Description of Artificial Sequence: Synthetic oligonucleotide
uaauccgccucaucuccac

SEQ ID NO: 351383 - RNA, 19 nt, Artificial Sequence
  Description of Artificial Sequence: Synthetic oligonucleotide
ucgcgguuaauccgccuca

SEQ ID NO: 351384 - RNA, 19 nt, Artificial Sequence
  Description of Artificial Sequence: Synthetic oligonucleotide
guaacgccgcucucguucc

SEQ ID NO: 351385 - RNA, 19 nt, Artificial Sequence
  Description of Artificial Sequence: Synthetic oligonucleotide
ucgguaacgccgcucucgu

SEQ ID NO: 351386 - RNA, 19 nt, Artificial Sequence
  Description of Artificial Sequence: Synthetic oligonucleotide
cauccucguauguguacag

SEQ ID NO: 351387 - RNA, 19 nt, Artificial Sequence
  Description of Artificial Sequence: Synthetic oligonucleotide
uauuuuggcagggccgccu

SEQ ID NO: 351388 - RNA, 19 nt, Artificial Sequence
  Description of Artificial Sequence: Synthetic oligonucleotide
cuggcgcaagcacacuucc

SEQ ID NO: 351389 - RNA, 19 nt, Artificial Sequence
  Description of Artificial Sequence: Synthetic oligonucleotide
aggcugcgaggauguaacc

SEQ ID NO: 351390 - RNA, 19 nt, Artificial Sequence
  Description of Artificial Sequence: Synthetic oligonucleotide
gacuccggggccucuugag

SEQ ID NO: 351391 - RNA, 19 nt, Artificial Sequence
  Description of Artificial Sequence: Synthetic oligonucleotide
aagcacacuuccgggcauc

SEQ ID NO: 351392 - RNA, 19 nt, Artificial Sequence
  Description of Artificial Sequence: Synthetic oligonucleotide
cugagggcauaguuaggac

SEQ ID NO: 351393 - RNA, 19 nt, Artificial Sequence
  Description of Artificial Sequence: Synthetic oligonucleotide
gaggcuaccgcaggugggc

SEQ ID NO: 351394 - RNA, 19 nt, Artificial Sequence
  Description of Artificial Sequence: Synthetic oligonucleotide
guggagccuuugcacacgg

SEQ ID NO: 351395 - RNA, 19 nt, Artificial Sequence
  Description of Artificial Sequence: Synthetic oligonucleotide
accaacgggaggaaaccag

SEQ ID NO: 351396 - RNA, 19 nt, Artificial Sequence
  Description of Artificial Sequence: Synthetic oligonucleotide
acucccgcggguugucagg

SEQ ID NO: 351397 - RNA, 19 nt, Artificial Sequence
  Description of Artificial Sequence: Synthetic oligonucleotide
gugucaguaguggcagugg

SEQ ID NO: 351398 - RNA, 19 nt, Artificial Sequence
  Description of Artificial Sequence: Synthetic oligonucleotide
gucaguaguggcaguggag

SEQ ID NO: 351399 - RNA, 19 nt, Artificial Sequence
  Description of Artificial Sequence: Synthetic oligonucleotide
gguuaauccgccucaucuc

SEQ ID NO: 351400 - RNA, 19 nt, Artificial Sequence
  Description of Artificial Sequence: Synthetic oligonucleotide
agcuacaaucuggucuggg

SEQ ID NO: 351401 - RNA, 19 nt, Artificial Sequence
  Description of Artificial Sequence: Synthetic oligonucleotide
cugcaagccgucuggccag

SEQ ID NO: 351402 - RNA, 19 nt, Artificial Sequence
  Description of Artificial Sequence: Synthetic oligonucleotide
uccuccugugcucuucaau

SEQ ID NO: 351403 - RNA, 19 nt, Artificial Sequence
  Description of Artificial Sequence: Synthetic oligonucleotide
cauucucauccucccgaag

SEQ ID NO: 351404 - RNA, 19 nt, Artificial Sequence
  Description of Artificial Sequence: Synthetic oligonucleotide
caacgggaggaaaccaguc

SEQ ID NO: 351405 - RNA, 19 nt, Artificial Sequence
  Description of Artificial Sequence: Synthetic oligonucleotide
cauggcuggcgcaagcaca

SEQ ID NO: 351406 - RNA, 19 nt, Artificial Sequence
  Description of Artificial Sequence: Synthetic oligonucleotide
cucgcgguuaauccgccuc

SEQ ID NO: 351407 - RNA, 19 nt, Artificial Sequence
  Description of Artificial Sequence: Synthetic oligonucleotide
uugacuccggggccucuug

SEQ ID NO: 351408 - RNA, 19 nt, Artificial Sequence
  Description of Artificial Sequence: Synthetic oligonucleotide
aagcuacaaucuggucugg

SEQ ID NO: 351409 - RNA, 19 nt, Artificial Sequence
  Description of Artificial Sequence: Synthetic oligonucleotide
ggcugcgucugucuucugg

SEQ ID NO: 351410 - RNA, 19 nt, Artificial Sequence
  Description of Artificial Sequence: Synthetic oligonucleotide
ccaacucccaccagguccc

SEQ ID NO: 351411 - RNA, 19 nt, Artificial Sequence
  Description of Artificial Sequence: Synthetic oligonucleotide
uccgguacugggucugcgu

SEQ ID NO: 351412 - RNA, 19 nt, Artificial Sequence
  Description of Artificial Sequence: Synthetic oligonucleotide
cgcuggucaccaaagauag

SEQ ID NO: 351413 - RNA, 19 nt, Artificial Sequence
  Description of Artificial Sequence: Synthetic oligonucleotide
uacugggucugcgucccag

SEQ ID NO: 351414 - RNA, 19 nt, Artificial Sequence
  Description of Artificial Sequence: Synthetic oligonucleotide
gagcggagagacuaagcua

SEQ ID NO: 351415 - RNA, 19 nt, Artificial Sequence
  Description of Artificial Sequence: Synthetic oligonucleotide
guuguagaauacaggaggu

SEQ ID NO: 351416 - RNA, 19 nt, Artificial Sequence
  Description of Artificial Sequence: Synthetic oligonucleotide
caccaacccaguugaugag

SEQ ID NO: 351417 - RNA, 19 nt, Artificial Sequence
  Description of Artificial Sequence: Synthetic oligonucleotide
gcugcgaggauguaaccuc

SEQ ID NO: 351418 - RNA, 19 nt, Artificial Sequence
  Description of Artificial Sequence: Synthetic oligonucleotide
uaccaacgggaggaaacca

SEQ ID NO: 351419 - RNA, 19 nt, Artificial Sequence
  Description of Artificial Sequence: Synthetic oligonucleotide
caauuacgucaacacccug

SEQ ID NO: 351420 - RNA, 19 nt, Artificial Sequence
  Description of Artificial Sequence: Synthetic oligonucleotide
ccauacaucacuuucuggu

SEQ ID NO: 351421 - RNA, 19 nt, Artificial Sequence
  Description of Artificial Sequence: Synthetic oligonucleotide
uuacgucaacacccuggaa

SEQ ID NO: 351422 - RNA, 19 nt, Artificial Sequence
  Description of Artificial Sequence: Synthetic oligonucleotide
cugauugggcgaacucuuc

SEQ ID NO: 351423 - RNA, 19 nt, Artificial Sequence
  Description of Artificial Sequence: Synthetic oligonucleotide
ggugguugacuccggggcc

SEQ ID NO: 351424 - RNA, 19 nt, Artificial Sequence
  Description of Artificial Sequence: Synthetic oligonucleotide
cugugauugacugaaguau

SEQ ID NO: 351425 - RNA, 19 nt, Artificial Sequence
  Description of Artificial Sequence: Synthetic oligonucleotide
ugcucgcgguuaauccgcc

SEQ ID NO: 351426 - RNA, 19 nt, Artificial Sequence
  Description of Artificial Sequence: Synthetic oligonucleotide
agggcacgucacaacugcc

SEQ ID NO: 351427 - RNA, 19 nt, Artificial Sequence
  Description of Artificial Sequence: Synthetic oligonucleotide
augucgaucucuggaggcu

SEQ ID NO: 351428 - RNA, 19 nt, Artificial Sequence
  Description of Artificial Sequence: Synthetic oligonucleotide
ggggaacauuuucccaccg

SEQ ID NO: 351429 - RNA, 19 nt, Artificial Sequence
  Description of Artificial Sequence: Synthetic oligonucleotide
uuccgguacugggucugcg

SEQ ID NO: 351430 - RNA, 19 nt, Artificial Sequence
  Description of Artificial Sequence: Synthetic oligonucleotide
uugucaggccgcugggcaa

SEQ ID NO: 351431 - RNA, 19 nt, Artificial Sequence
  Description of Artificial Sequence: Synthetic oligonucleotide
gcucccaaacugcucgcgg

SEQ ID NO: 351432 - RNA, 19 nt, Artificial Sequence
  Description of Artificial Sequence: Synthetic oligonucleotide
gucggugguugaaagguga

SEQ ID NO: 351433 - RNA, 19 nt, Artificial Sequence
  Description of Artificial Sequence: Synthetic oligonucleotide
agauccccggccagggccg

SEQ ID NO: 351434 - RNA, 19 nt, Artificial Sequence
  Description of Artificial Sequence: Synthetic oligonucleotide
ugcacacggcucuucugau

SEQ ID NO: 351435 - RNA, 19 nt, Artificial Sequence
  Description of Artificial Sequence: Synthetic oligonucleotide
caucagcuacugaggcggc

SEQ ID NO: 351436 - RNA, 19 nt, Artificial Sequence
  Description of Artificial Sequence: Synthetic oligonucleotide
agucggccgcgcuuuccuc

SEQ ID NO: 351437 - RNA, 19 nt, Artificial Sequence
  Description of Artificial Sequence: Synthetic oligonucleotide
gcugagggcauaguuagga

SEQ ID NO: 351438 - RNA, 19 nt, Artificial Sequence
  Description of Artificial Sequence: Synthetic oligonucleotide
uggugucagccacgugggc

SEQ ID NO: 351439 - RNA, 19 nt, Artificial Sequence
  Description of Artificial Sequence: Synthetic oligonucleotide
gguugaaaggugagggcac

SEQ ID NO: 351440 - RNA, 19 nt, Artificial Sequence
  Description of Artificial Sequence: Synthetic oligonucleotide
gguacugggucugcguccc

SEQ ID NO: 351441 - RNA, 19 nt, Artificial Sequence
  Description of Artificial Sequence: Synthetic oligonucleotide
gcaagcacacuuccgggca

SEQ ID NO: 351442 - RNA, 19 nt, Artificial Sequence
  Description of Artificial Sequence: Synthetic oligonucleotide
gccgaugcaauacugggcu

SEQ ID NO: 351443 - RNA, 19 nt, Artificial Sequence
  Description of Artificial Sequence: Synthetic oligonucleotide
cccgauggcaccggcaucg

SEQ ID NO: 351444 - RNA, 19 nt, Artificial Sequence
  Description of Artificial Sequence: Synthetic oligonucleotide
gcucacgccggccaugcug

SEQ ID NO: 351445 - RNA, 19 nt, Artificial Sequence
  Description of Artificial Sequence: Synthetic oligonucleotide
ggucaucggagccauccuc

SEQ ID NO: 351446 - RNA, 19 nt, Artificial Sequence
  Description of Artificial Sequence: Synthetic oligonucleotide
cauacaucacuuucugguu

SEQ ID NO: 351447 - RNA, 19 nt, Artificial Sequence
  Description of Artificial Sequence: Synthetic oligonucleotide
ggucuaccuccucuagagc

SEQ ID NO: 351448 - RNA, 19 nt, Artificial Sequence
  Description of Artificial Sequence: Synthetic oligonucleotide
guacgccgccagcagcucc

SEQ ID NO: 351449 - RNA, 19 nt, Artificial Sequence
  Description of Artificial Sequence: Synthetic oligonucleotide
cagagggacuccggguggg

SEQ ID NO: 351450 - RNA, 19 nt, Artificial Sequence
  Description of Artificial Sequence: Synthetic oligonucleotide
guugaugagcacauauuuu

SEQ ID NO: 351451 - RNA, 19 nt, Artificial Sequence
  Description of Artificial Sequence: Synthetic oligonucleotide
ggugucagccacgugggca

SEQ ID NO: 351452 - RNA, 19 nt, Artificial Sequence
  Description of Artificial Sequence: Synthetic oligonucleotide
auccucguauguguacaga

SEQ ID NO: 351453 - RNA, 19 nt, Artificial Sequence
  Description of Artificial Sequence: Synthetic oligonucleotide
gguggagccuuugcacacg

SEQ ID NO: 351454 - RNA, 19 nt, Artificial Sequence
  Description of Artificial Sequence: Synthetic oligonucleotide
uguuggcaacagugguguc

SEQ ID NO: 351455 - RNA, 19 nt, Artificial Sequence
  Description of Artificial Sequence: Synthetic oligonucleotide
uugccaggccauagaucaa

SEQ ID NO: 351456 - RNA, 19 nt, Artificial Sequence
  Description of Artificial Sequence: Synthetic oligonucleotide
ucgaucucuggaggcuugu

SEQ ID NO: 351457 - RNA, 19 nt, Artificial Sequence
  Description of Artificial Sequence: Synthetic oligonucleotide
ggagucagagggacuccgg

SEQ ID NO: 351458 - RNA, 19 nt, Artificial Sequence
  Description of Artificial Sequence: Synthetic oligonucleotide
gcagacagauccccggcca

SEQ ID NO: 351459 - RNA, 19 nt, Artificial Sequence
  Description of Artificial Sequence: Synthetic oligonucleotide
ucucgguaacgccgcucuc

SEQ ID NO: 351460 - RNA, 19 nt, Artificial Sequence
  Description of Artificial Sequence: Synthetic oligonucleotide
acgucacaacugccagcag

SEQ ID NO: 351461 - RNA, 19 nt, Artificial Sequence
  Description of Artificial Sequence: Synthetic oligonucleotide
caucucgcuggucaccaaa

SEQ ID NO: 351462 - RNA, 19 nt, Artificial Sequence
  Description of Artificial Sequence: Synthetic oligonucleotide
cggguugucaggccgcugg

SEQ ID NO: 351463 - RNA, 19 nt, Artificial Sequence
  Description of Artificial Sequence: Synthetic oligonucleotide
gggacaguugccacuauua

SEQ ID NO: 351464 - RNA, 19 nt, Artificial Sequence
  Description of Artificial Sequence: Synthetic oligonucleotide
gucggccgagcggagagac

SEQ ID NO: 351465 - RNA, 19 nt, Artificial Sequence
  Description of Artificial Sequence: Synthetic oligonucleotide
cauccuccgguggcugucc

SEQ ID NO: 351466 - RNA, 19 nt, Artificial Sequence
  Description of Artificial Sequence: Synthetic oligonucleotide
acgugggcaucagcuacug

SEQ ID NO: 351467 - RNA, 19 nt, Artificial Sequence
  Description of Artificial Sequence: Synthetic oligonucleotide
aguuaggaccugggaggca

SEQ ID NO: 351468 - RNA, 19 nt, Artificial Sequence
  Description of Artificial Sequence: Synthetic oligonucleotide
ggagagccgugccagucca

SEQ ID NO: 351469 - RNA, 19 nt, Artificial Sequence
  Description of Artificial Sequence: Synthetic oligonucleotide
cacuauuaaucaccacccu

SEQ ID NO: 351470 - RNA, 19 nt, Artificial Sequence
  Description of Artificial Sequence: Synthetic oligonucleotide
cuaccuccucuagagcuga

SEQ ID NO: 351471 - RNA, 19 nt, Artificial Sequence
  Description of Artificial Sequence: Synthetic oligonucleotide
cuuccgguacugggucugc

SEQ ID NO: 351472 - RNA, 19 nt, Artificial Sequence
  Description of Artificial Sequence: Synthetic oligonucleotide
ccggaguccagagugggug

SEQ ID NO: 351473 - RNA, 19 nt, Artificial Sequence
  Description of Artificial Sequence: Synthetic oligonucleotide
uaaccucauccagggcccu

SEQ ID NO: 351474 - RNA, 19 nt, Artificial Sequence
  Description of Artificial Sequence: Synthetic oligonucleotide
ucggccgagcggagagacu

SEQ ID NO: 351475 - RNA, 19 nt, Artificial Sequence
  Description of Artificial Sequence: Synthetic oligonucleotide
ccgagcggagagacuaagc

SEQ ID NO: 351476 - RNA, 19 nt, Artificial Sequence
  Description of Artificial Sequence: Synthetic oligonucleotide
cccgcggguugucaggccg

SEQ ID NO: 351477 - RNA, 19 nt, Artificial Sequence
  Description of Artificial Sequence: Synthetic oligonucleotide
gucugcgucccagcaggug

SEQ ID NO: 351478 - RNA, 19 nt, Artificial Sequence
  Description of Artificial Sequence: Synthetic oligonucleotide
ggcuaccgcaggugggcag

SEQ ID NO: 351479 - RNA, 19 nt, Artificial Sequence
  Description of Artificial Sequence: Synthetic oligonucleotide
ggcguccaaggcuuucuuc

SEQ ID NO: 351480 - RNA, 19 nt, Artificial Sequence
  Description of Artificial Sequence: Synthetic oligonucleotide
ucccgcggguugucaggcc

SEQ ID NO: 351481 - RNA, 19 nt, Artificial Sequence
  Description of Artificial Sequence: Synthetic oligonucleotide
cuaccgcaggugggcagcc

SEQ ID NO: 351482 - RNA, 19 nt, Artificial Sequence
  Description of Artificial Sequence: Synthetic oligonucleotide
accacccucgaagcccucu

SEQ ID NO: 351483 - RNA, 19 nt, Artificial Sequence
  Description of Artificial Sequence: Synthetic oligonucleotide
gguugucaggccgcugggc

SEQ ID NO: 351484 - RNA, 19 nt, Artificial Sequence
  Description of Artificial Sequence: Synthetic oligonucleotide
gcuaccgcaggugggcagc

SEQ ID NO: 351485 - RNA, 19 nt, Artificial Sequence
  Description of Artificial Sequence: Synthetic oligonucleotide
gcgaggauguaaccucauc

SEQ ID NO: 351486 - RNA, 19 nt, Artificial Sequence
  Description of Artificial Sequence: Synthetic oligonucleotide
cugcaacaucaucucaacu

SEQ ID NO: 351487 - RNA, 19 nt, Artificial Sequence
  Description of Artificial Sequence: Synthetic oligonucleotide
ugcaagccgucuggccaga

SEQ ID NO: 351488 - RNA, 19 nt, Artificial Sequence
  Description of Artificial Sequence: Synthetic oligonucleotide
ccggaucaccuccucguac

SEQ ID NO: 351489 - RNA, 19 nt, Artificial Sequence
  Description of Artificial Sequence: Synthetic oligonucleotide
uaccucugccagggaggcc

SEQ ID NO: 351490 - RNA, 19 nt, Artificial Sequence
  Description of Artificial Sequence: Synthetic oligonucleotide
gggcacgucacaacugcca

SEQ ID NO: 351491 - RNA, 19 nt, Artificial Sequence
  Description of Artificial Sequence: Synthetic oligonucleotide
agagggacuccggguggga

SEQ ID NO: 351492 - RNA, 19 nt, Artificial Sequence
  Description of Artificial Sequence: Synthetic oligonucleotide
ccgguacugggucugcguc

SEQ ID NO: 351493 - RNA, 19 nt, Artificial Sequence
  Description of Artificial Sequence: Synthetic oligonucleotide
cgguacugggucugcgucc

SEQ ID NO: 351494 - RNA, 19 nt, Artificial Sequence
  Description of Artificial Sequence: Synthetic oligonucleotide
cagccugcucuggggauuc

SEQ ID NO: 351495 - RNA, 19 nt, Artificial Sequence
  Description of Artificial Sequence: Synthetic oligonucleotide
ugguugacuccggggccuc

SEQ ID NO: 351496 - RNA, 19 nt, Artificial Sequence
  Description of Artificial Sequence: Synthetic oligonucleotide
gcuggcgcaagcacacuuc

SEQ ID NO: 351497 - RNA, 19 nt, Artificial Sequence
  Description of Artificial Sequence: Synthetic oligonucleotide
gccgcuaaugcaggcgcug

SEQ ID NO: 351498 - RNA, 19 nt, Artificial Sequence
  Description of Artificial Sequence: Synthetic oligonucleotide
cgguuaauccgccucaucu

SEQ ID NO: 351499 - RNA, 19 nt, Artificial Sequence
  Description of Artificial Sequence: Synthetic oligonucleotide
gccgaugcaacucguuccu

SEQ ID NO: 351500 - RNA, 19 nt, Artificial Sequence
  Description of Artificial Sequence: Synthetic oligonucleotide
cagcuacugaggcggcaga

SEQ ID NO: 351501 - RNA, 19 nt, Artificial Sequence
  Description of Artificial Sequence: Synthetic oligonucleotide
gccgagcggagagacuaag

SEQ ID NO: 351502 - RNA, 19 nt, Artificial Sequence
  Description of Artificial Sequence: Synthetic oligonucleotide
cacgugggcaucagcuacu

SEQ ID NO: 351503 - RNA, 19 nt, Artificial Sequence
  Description of Artificial Sequence: Synthetic oligonucleotide
caccaggggagguuccugu

SEQ ID NO: 351504 - RNA, 19 nt, Artificial Sequence
  Description of Artificial Sequence: Synthetic oligonucleotide
ccgugccaguccauuggag

SEQ ID NO: 351505 - RNA, 19 nt, Artificial Sequence
  Description of Artificial Sequence: Synthetic oligonucleotide
ccgaugcaauacugggcug

SEQ ID NO: 351506 - RNA, 19 nt, Artificial Sequence
  Description of Artificial Sequence: Synthetic oligonucleotide
aggcuaccgcaggugggca

SEQ ID NO: 351507 - RNA, 19 nt, Artificial Sequence
  Description of Artificial Sequence: Synthetic oligonucleotide
cugcgucugucuucuggua

SEQ ID NO: 351508 - RNA, 19 nt, Artificial Sequence
  Description of Artificial Sequence: Synthetic oligonucleotide
gggccggaguccagagugg

SEQ ID NO: 351509 - RNA, 19 nt, Artificial Sequence
  Description of Artificial Sequence: Synthetic oligonucleotide
gaagccgaugcaacucguu

SEQ ID NO: 351510 - RNA, 19 nt, Artificial Sequence
  Description of Artificial Sequence: Synthetic oligonucleotide
ggcugcgaggauguaaccu

SEQ ID NO: 351511 - RNA, 19 nt, Artificial Sequence
  Description of Artificial Sequence: Synthetic oligonucleotide
gccgugccaguccauugga

SEQ ID NO: 351512 - RNA, 19 nt, Artificial Sequence
  Description of Artificial Sequence: Synthetic oligonucleotide
gcgguuaauccgccucauc

SEQ ID NO: 351513 - RNA, 19 nt, Artificial Sequence
  Description of Artificial Sequence: Synthetic oligonucleotide
caucggagccauccucgua

SEQ ID NO: 351514 - RNA, 19 nt, Artificial Sequence
  Description of Artificial Sequence: Synthetic oligonucleotide
agcucacgccggccaugcu

SEQ ID NO: 351515 - RNA, 19 nt, Artificial Sequence
  Description of Artificial Sequence: Synthetic oligonucleotide
ccaccuuagccacauggcu

SEQ ID NO: 351516 - RNA, 19 nt, Artificial Sequence
  Description of Artificial Sequence: Synthetic oligonucleotide
uaccgcaggugggcagccu

SEQ ID NO: 351517 - RNA, 19 nt, Artificial Sequence
  Description of Artificial Sequence: Synthetic oligonucleotide
ccucguauguguacagagu

SEQ ID NO: 351518 - RNA, 19 nt, Artificial Sequence
  Description of Artificial Sequence: Synthetic oligonucleotide
ccgcuaaugcaggcgcugc

SEQ ID NO: 351519 - RNA, 19 nt, Artificial Sequence
  Description of Artificial Sequence: Synthetic oligonucleotide
gcggggccgccgcuaaugc

SEQ ID NO: 351520 - RNA, 19 nt, Artificial Sequence
  Description of Artificial Sequence: Synthetic oligonucleotide
uggcuggcgcaagcacacu

SEQ ID NO: 351521 - RNA, 19 nt, Artificial Sequence
  Description of Artificial Sequence: Synthetic oligonucleotide
ccaacgggaggaaaccagu

SEQ ID NO: 351522 - RNA, 19 nt, Artificial Sequence
  Description of Artificial Sequence: Synthetic oligonucleotide
uggcaccggcaucgauguc

SEQ ID NO: 351523 - RNA, 19 nt, Artificial Sequence
  Description of Artificial Sequence: Synthetic oligonucleotide
ggaagaauucagccaccuu

SEQ ID NO: 351524 - RNA, 19 nt, Artificial Sequence
  Description of Artificial Sequence: Synthetic oligonucleotide
caucgaugucuuccacacu

SEQ ID NO: 351525 - RNA, 19 nt, Artificial Sequence
  Description of Artificial Sequence: Synthetic oligonucleotide
cugcucccgcucucgguaa

SEQ ID NO: 351526 - RNA, 19 nt, Artificial Sequence
  Description of Artificial Sequence: Synthetic oligonucleotide
ccgucuggccagaggcuac

SEQ ID NO: 351527 - RNA, 19 nt, Artificial Sequence
  Description of Artificial Sequence: Synthetic oligonucleotide
ccgccugggaguccuugac

SEQ ID NO: 351528 - RNA, 19 nt, Artificial Sequence
  Description of Artificial Sequence: Synthetic oligonucleotide
caagcacacuuccgggcau

SEQ ID NO: 351529 - RNA, 19 nt, Artificial Sequence
  Description of Artificial Sequence: Synthetic oligonucleotide
cugcaagcuugaggucauc

SEQ ID NO: 351530 - RNA, 19 nt, Artificial Sequence
  Description of Artificial Sequence: Synthetic oligonucleotide
ccgcggguugucaggccgc

SEQ ID NO: 351531 - RNA, 19 nt, Artificial Sequence
  Description of Artificial Sequence: Synthetic oligonucleotide
caggcucggcaggggcacc

SEQ ID NO: 351532 - RNA, 19 nt, Artificial Sequence
  Description of Artificial Sequence: Synthetic oligonucleotide
cagggcccucucaaucugu

SEQ ID NO: 351533 - RNA, 19 nt, Artificial Sequence
  Description of Artificial Sequence: Synthetic oligonucleotide
cuggucggccgagcggaga

SEQ ID NO: 351534 - RNA, 19 nt, Artificial Sequence
  Description of Artificial Sequence: Synthetic oligonucleotide
cugcgucccagcaggugau

SEQ ID NO: 351535 - RNA, 19 nt, Artificial Sequence
  Description of Artificial Sequence: Synthetic oligonucleotide
cuuggcaccaggggagguu

SEQ ID NO: 351536 - RNA, 19 nt, Artificial Sequence
  Description of Artificial Sequence: Synthetic oligonucleotide
ccuggucggccgagcggag

SEQ ID NO: 351537 - RNA, 19 nt, Artificial Sequence
  Description of Artificial Sequence: Synthetic oligonucleotide
gcuggucaccaaagauaga

SEQ ID NO: 351538 - RNA, 19 nt, Artificial Sequence
  Description of Artificial Sequence: Synthetic oligonucleotide
caaacugcucgcgguuaau

SEQ ID NO: 351539 - RNA, 19 nt, Artificial Sequence
  Description of Artificial Sequence: Synthetic oligonucleotide
ggcuggcgcaagcacacuu

SEQ ID NO: 351540 - RNA, 19 nt, Artificial Sequence
  Description of Artificial Sequence: Synthetic oligonucleotide
cgucuggccagaggcuacc

SEQ ID NO: 351541 - RNA, 19 nt, Artificial Sequence
  Description of Artificial Sequence: Synthetic oligonucleotide
caggccgcugggcaauaau

SEQ ID NO: 351542 - RNA, 19 nt, Artificial Sequence
  Description of Artificial Sequence: Synthetic oligonucleotide
gcgcugcaagccgucuggc

SEQ ID NO: 351543 - RNA, 19 nt, Artificial Sequence
  Description of Artificial Sequence: Synthetic oligonucleotide
ccuggcguccaaggcuuuc

SEQ ID NO: 351544 - RNA, 19 nt, Artificial Sequence
  Description of Artificial Sequence: Synthetic oligonucleotide
gcccgauggcaccggcauc

SEQ ID NO: 351545 - RNA, 19 nt, Artificial Sequence
  Description of Artificial Sequence: Synthetic oligonucleotide
cagggccggaguccagagu

SEQ ID NO: 351546 - RNA, 19 nt, Artificial Sequence
  Description of Artificial Sequence: Synthetic oligonucleotide
gccgcgcuuuccucccgga

SEQ ID NO: 351547 - RNA, 19 nt, Artificial Sequence
  Description of Artificial Sequence: Synthetic oligonucleotide
gcacacggcucuucugauu

SEQ ID NO: 351548 - RNA, 19 nt, Artificial Sequence
  Description of Artificial Sequence: Synthetic oligonucleotide
uccgggcaucaggcacauc

SEQ ID NO: 351549 - RNA, 19 nt, Artificial Sequence
  Description of Artificial Sequence: Synthetic oligonucleotide
gcggguugucaggccgcug

SEQ ID NO: 351550 - RNA, 19 nt, Artificial Sequence
  Description of Artificial Sequence: Synthetic oligonucleotide
gcucgcgguuaauccgccu

SEQ ID NO: 351551 - RNA, 19 nt, Artificial Sequence
  Description of Artificial Sequence: Synthetic oligonucleotide
cgguggccgcugaagcuca

SEQ ID NO: 351552 - RNA, 19 nt, Artificial Sequence
  Description of Artificial Sequence: Synthetic oligonucleotide
gcuuggcaccaggggaggu

SEQ ID NO: 351553 - RNA, 19 nt, Artificial Sequence
  Description of Artificial Sequence: Synthetic oligonucleotide
cgugggcaucagcuacuga

SEQ ID NO: 351554 - RNA, 19 nt, Artificial Sequence
  Description of Artificial Sequence: Synthetic oligonucleotide
ggucugcgucccagcaggu

SEQ ID NO: 351555 - RNA, 19 nt, Artificial Sequence
  Description of Artificial Sequence: Synthetic oligonucleotide
cguacgccgccagcagcuc

SEQ ID NO: 351556 - RNA, 19 nt, Artificial Sequence
  Description of Artificial Sequence: Synthetic oligonucleotide
cugcggcuccugagcugcu

SEQ ID NO: 351557 - RNA, 19 nt, Artificial Sequence
  Description of Artificial Sequence: Synthetic oligonucleotide
ccucggauucugacuucuu

SEQ ID NO: 351558 - RNA, 19 nt, Artificial Sequence
  Description of Artificial Sequence: Synthetic oligonucleotide
ccgauggcaccggcaucga

SEQ ID NO: 351559 - RNA, 19 nt, Artificial Sequence
  Description of Artificial Sequence: Synthetic oligonucleotide
ccaggcggggccgccgcua

SEQ ID NO: 351560 - RNA, 19 nt, Artificial Sequence
  Description of Artificial Sequence: Synthetic oligonucleotide
cgccgcuaaugcaggcgcu

SEQ ID NO: 351561 - RNA, 19 nt, Artificial Sequence
  Description of Artificial Sequence: Synthetic oligonucleotide
gccaggcggggccgccgcu

SEQ ID NO: 351562 - RNA, 19 nt, Artificial Sequence
  Description of Artificial Sequence: Synthetic oligonucleotide
ccgcgcuuuccucccggau

SEQ ID NO: 351563 - RNA, 19 nt, Artificial Sequence
  Description of Artificial Sequence: Synthetic oligonucleotide
cggcugcgucugucuucug

SEQ ID NO: 351564 - RNA, 19 nt, Artificial Sequence
  Description of Artificial Sequence: Synthetic oligonucleotide
cgcgguuaauccgccucau

SEQ ID NO: 351565 - RNA, 19 nt, Artificial Sequence
  Description of Artificial Sequence: Synthetic oligonucleotide
cgcggguugucaggccgcu

SEQ ID NO: 351566 - RNA, 19 nt, Artificial Sequence
  Description of Artificial Sequence: Synthetic oligonucleotide
gccuggcguccaaggcuuu

SEQ ID NO: 351567 - RNA, 19 nt, Artificial Sequence
  Description of Artificial Sequence: Synthetic oligonucleotide
cgguaacgccgcucucguu

SEQ ID NO: 351568 - RNA, 19 nt, Artificial Sequence
  Description of Artificial Sequence: Synthetic oligonucleotide
aauaacaaugggcucaucg

SEQ ID NO: 351569 - RNA, 19 nt, Artificial Sequence
  Description of Artificial Sequence: Synthetic oligonucleotide
aaauacgucaucuggggcg

SEQ ID NO: 351570 - RNA, 19 nt, Artificial Sequence
  Description of Artificial Sequence: Synthetic oligonucleotide
uagacuagagaauagaaga

SEQ ID NO: 351571 - RNA, 19 nt, Artificial Sequence
  Description of Artificial Sequence: Synthetic oligonucleotide
uguuauugcgauuuggucc

SEQ ID NO: 351572 - RNA, 19 nt, Artificial Sequence
  Description of Artificial Sequence: Synthetic oligonucleotide
auaguugggaauauaaacc

SEQ ID NO: 351573 - RNA, 19 nt, Artificial Sequence
  Description of Artificial Sequence: Synthetic oligonucleotide
uauaguugggaauauaaac

SEQ ID NO: 351574 - RNA, 19 nt, Artificial Sequence
  Description of Artificial Sequence: Synthetic oligonucleotide
aguccuguagcacagggcc

SEQ ID NO: 351575 - RNA, 19 nt, Artificial Sequence
  Description of Artificial Sequence: Synthetic oligonucleotide
auuucgacugaucacggcc

SEQ ID NO: 351576 - RNA, 19 nt, Artificial Sequence
  Description of Artificial Sequence: Synthetic oligonucleotide
uaaaauacgucaucugggg

SEQ ID NO: 351577 - RNA, 19 nt, Artificial Sequence
  Description of Artificial Sequence: Synthetic oligonucleotide
aaaccuuagagcccacccc

SEQ ID NO: 351578 - RNA, 19 nt, Artificial Sequence
  Description of Artificial Sequence: Synthetic oligonucleotide
guagugugcagguagaagg

SEQ ID NO: 351579 - RNA, 19 nt, Artificial Sequence
  Description of Artificial Sequence: Synthetic oligonucleotide
auauaaaccugcuuuaacu

SEQ ID NO: 351580 - RNA, 19 nt, Artificial Sequence
  Description of Artificial Sequence: Synthetic oligonucleotide
auuaggcgcacuuuggugg

SEQ ID NO: 351581 - RNA, 19 nt, Artificial Sequence
  Description of Artificial Sequence: Synthetic oligonucleotide
aaccuuagagcccaccccg

SEQ ID NO: 351582 - RNA, 19 nt, Artificial Sequence
  Description of Artificial Sequence: Synthetic oligonucleotide
aauuucgacugaucacggc

SEQ ID NO: 351583 - RNA, 19 nt, Artificial Sequence
  Description of Artificial Sequence: Synthetic oligonucleotide
cuaguccucaauaacaaug

SEQ ID NO: 351584 - RNA, 19 nt, Artificial Sequence
  Description of Artificial Sequence: Synthetic oligonucleotide
uuugccagaccccuacugg

SEQ ID NO: 351585 - RNA, 19 nt, Artificial Sequence
  Description of Artificial Sequence: Synthetic oligonucleotide
guuauugcgauuugguccc

SEQ ID NO: 351586 - RNA, 19 nt, Artificial Sequence
  Description of Artificial Sequence: Synthetic oligonucleotide
ucuuggaauaaguuagacc

SEQ ID NO: 351587 - RNA, 19 nt, Artificial Sequence
  Description of Artificial Sequence: Synthetic oligonucleotide
cacuacaaggaacuggucg

SEQ ID NO: 351588 - RNA, 19 nt, Artificial Sequence
  Description of Artificial Sequence: Synthetic oligonucleotide
agguguaaguuacagagcu

SEQ ID NO: 351589 - RNA, 19 nt, Artificial Sequence
  Description of Artificial Sequence: Synthetic oligonucleotide
uaguugggaauauaaaccu

SEQ ID NO: 351590 - RNA, 19 nt, Artificial Sequence
  Description of Artificial Sequence: Synthetic oligonucleotide
ugggcguaggaucucacgg

SEQ ID NO: 351591 - RNA, 19 nt, Artificial Sequence
  Description of Artificial Sequence: Synthetic oligonucleotide
gaaauccucacgcuccagg

SEQ ID NO: 351592 - RNA, 19 nt, Artificial Sequence
  Description of Artificial Sequence: Synthetic oligonucleotide
ugcuuuaacuugcucuccg

SEQ ID NO: 351593 - RNA, 19 nt, Artificial Sequence
  Description of Artificial Sequence: Synthetic oligonucleotide
uuuccaggggagaaaaucu

SEQ ID NO: 351594 - RNA, 19 nt, Artificial Sequence
  Description of Artificial Sequence: Synthetic oligonucleotide
ucuuccaauauguccagca

SEQ ID NO: 351595 - RNA, 19 nt, Artificial Sequence
  Description of Artificial Sequence: Synthetic oligonucleotide
ggagauuccgacuuggucc

SEQ ID NO: 351596 - RNA, 19 nt, Artificial Sequence
  Description of Artificial Sequence: Synthetic oligonucleotide
ugggucguagacuagagaa

SEQ ID NO: 351597 - RNA, 19 nt, Artificial Sequence
  Description of Artificial Sequence: Synthetic oligonucleotide
auaacaaugggcucaucgu

SEQ ID NO: 351598 - RNA, 19 nt, Artificial Sequence
  Description of Artificial Sequence: Synthetic oligonucleotide
aaguggguuaugcgcuucc

SEQ ID NO: 351599 - RNA, 19 nt, Artificial Sequence
  Description of Artificial Sequence: Synthetic oligonucleotide
gaucucacggcacaagcgc

SEQ ID NO: 351600 - RNA, 19 nt, Artificial Sequence
  Description of Artificial Sequence: Synthetic oligonucleotide
uggauuuggcuuguuauag

SEQ ID NO: 351601 - RNA, 19 nt, Artificial Sequence
  Description of Artificial Sequence: Synthetic oligonucleotide
ugcuggacguaucugucgg

SEQ ID NO: 351602 - RNA, 19 nt, Artificial Sequence
  Description of Artificial Sequence: Synthetic oligonucleotide
uaggacuugagcgacucgg

SEQ ID NO: 351603 - RNA, 19 nt, Artificial Sequence
  Description of Artificial Sequence: Synthetic oligonucleotide
ugagcgauuuccaggggag

SEQ ID NO: 351604 - RNA, 19 nt, Artificial Sequence
  Description of Artificial Sequence: Synthetic oligonucleotide
uuaacuugcucuccgcuuc

SEQ ID NO: 351605 - RNA, 19 nt, Artificial Sequence
  Description of Artificial Sequence: Synthetic oligonucleotide
caauauguccagcaagaag

SEQ ID NO: 351606 - RNA, 19 nt, Artificial Sequence
  Description of Artificial Sequence: Synthetic oligonucleotide
guagacuagagaauagaag

SEQ ID NO: 351607 - RNA, 19 nt, Artificial Sequence
  Description of Artificial Sequence: Synthetic oligonucleotide
ucaguggccauguaaaaua

SEQ ID NO: 351608 - RNA, 19 nt, Artificial Sequence
  Description of Artificial Sequence: Synthetic oligonucleotide
uuaugcgcuucccacaccu

SEQ ID NO: 351609 - RNA, 19 nt, Artificial Sequence
  Description of Artificial Sequence: Synthetic oligonucleotide
ugaaugucugugaaauccu

SEQ ID NO: 351610 - RNA, 19 nt, Artificial Sequence
  Description of Artificial Sequence: Synthetic oligonucleotide
gauuaggcgcacuuuggug

SEQ ID NO: 351611 - RNA, 19 nt, Artificial Sequence
  Description of Artificial Sequence: Synthetic oligonucleotide
caauccaguucauucgccg

SEQ ID NO: 351612 - RNA, 19 nt, Artificial Sequence
  Description of Artificial Sequence: Synthetic oligonucleotide
gaguacagccuccaggggc

SEQ ID NO: 351613 - RNA, 19 nt, Artificial Sequence
  Description of Artificial Sequence: Synthetic oligonucleotide
ugagcagugugacacugca

SEQ ID NO: 351614 - RNA, 19 nt, Artificial Sequence
  Description of Artificial Sequence: Synthetic oligonucleotide
acaaggaacuggucgaucu

SEQ ID NO: 351615 - RNA, 19 nt, Artificial Sequence
  Description of Artificial Sequence: Synthetic oligonucleotide
auugcgauuuggucccggc

SEQ ID NO: 351616 - RNA, 19 nt, Artificial Sequence
  Description of Artificial Sequence: Synthetic oligonucleotide
ucggucgucuuccacaugu

SEQ ID NO: 351617 - RNA, 19 nt, Artificial Sequence
  Description of Artificial Sequence: Synthetic oligonucleotide
acuugagcgacucggucuc

SEQ ID NO: 351618 - RNA, 19 nt, Artificial Sequence
  Description of Artificial Sequence: Synthetic oligonucleotide
ugcgauuuggucccggccu

SEQ ID NO: 351619 - RNA, 19 nt, Artificial Sequence
  Description of Artificial Sequence: Synthetic oligonucleotide
uggaauaaguuagaccaca

SEQ ID NO: 351620 - RNA, 19 nt, Artificial Sequence
  Description of Artificial Sequence: Synthetic oligonucleotide
acuagagaauagaagaaga

SEQ ID NO: 351621 - RNA, 19 nt, Artificial Sequence
  Description of Artificial Sequence: Synthetic oligonucleotide
gauaccggaguacagccuc

SEQ ID NO: 351622 - RNA, 19 nt, Artificial Sequence
  Description of Artificial Sequence: Synthetic oligonucleotide
uugccagaccccuacuggg

SEQ ID NO: 351623 - RNA, 19 nt, Artificial Sequence
  Description of Artificial Sequence: Synthetic oligonucleotide
augccaugggcguaggauc

SEQ ID NO: 351624 - RNA, 19 nt, Artificial Sequence
  Description of Artificial Sequence: Synthetic oligonucleotide
ucucacggcacaagcgccg

SEQ ID NO: 351625 - RNA, 19 nt, Artificial Sequence
  Description of Artificial Sequence: Synthetic oligonucleotide
uuaggcgcacuuugguggg

SEQ ID NO: 351626 - RNA, 19 nt, Artificial Sequence
  Description of Artificial Sequence: Synthetic oligonucleotide
caauuucgacugaucacgg

SEQ ID NO: 351627 - RNA, 19 nt, Artificial Sequence
  Description of Artificial Sequence: Synthetic oligonucleotide
caagauaccggaguacagc

SEQ ID NO: 351628 - RNA, 19 nt, Artificial Sequence
  Description of Artificial Sequence: Synthetic oligonucleotide
ucugggacgcuuccggcag

SEQ ID NO: 351629 - RNA, 19 nt, Artificial Sequence
  Description of Artificial Sequence: Synthetic oligonucleotide
ugugggucguagacuagag

SEQ ID NO: 351630 - RNA, 19 nt, Artificial Sequence
  Description of Artificial Sequence: Synthetic oligonucleotide
caaaggugcccacggagcg

SEQ ID NO: 351631 - RNA, 19 nt, Artificial Sequence
  Description of Artificial Sequence: Synthetic oligonucleotide
ucaucguugacuggugcag

SEQ ID NO: 351632 - RNA, 19 nt, Artificial Sequence
  Description of Artificial Sequence: Synthetic oligonucleotide
ugcgcuucccacaccuugg

SEQ ID NO: 351633 - RNA, 19 nt, Artificial Sequence
  Description of Artificial Sequence: Synthetic oligonucleotide
uuucaagccaccguauuuc

SEQ ID NO: 351634 - RNA, 19 nt, Artificial Sequence
  Description of Artificial Sequence: Synthetic oligonucleotide
agcgacuccaacugccgac

SEQ ID NO: 351635 - RNA, 19 nt, Artificial Sequence
  Description of Artificial Sequence: Synthetic oligonucleotide
guuagaccacacuucuucc

SEQ ID NO: 351636 - RNA, 19 nt, Artificial Sequence
  Description of Artificial Sequence: Synthetic oligonucleotide
uggacguaucugucggucg

SEQ ID NO: 351637 - RNA, 19 nt, Artificial Sequence
  Description of Artificial Sequence: Synthetic oligonucleotide
uggguuaugcgcuucccac

SEQ ID NO: 351638 - RNA, 19 nt, Artificial Sequence
  Description of Artificial Sequence: Synthetic oligonucleotide
uuuaucagccaggaggguc

SEQ ID NO: 351639 - RNA, 19 nt, Artificial Sequence
  Description of Artificial Sequence: Synthetic oligonucleotide
uucccguugagcaggagau

SEQ ID NO: 351640 - RNA, 19 nt, Artificial Sequence
  Description of Artificial Sequence: Synthetic oligonucleotide
aacugccgacuugucagcc

SEQ ID NO: 351641 - RNA, 19 nt, Artificial Sequence
  Description of Artificial Sequence: Synthetic oligonucleotide
aagaggcguuucuucaugu

SEQ ID NO: 351642 - RNA, 19 nt, Artificial Sequence
  Description of Artificial Sequence: Synthetic oligonucleotide
gcacuacggaaacagaggg

SEQ ID NO: 351643 - RNA, 19 nt, Artificial Sequence
  Description of Artificial Sequence: Synthetic oligonucleotide
aauacgucaucuggggcgu

SEQ ID NO: 351644 - RNA, 19 nt, Artificial Sequence
  Description of Artificial Sequence: Synthetic oligonucleotide
guguaaguuacagagcuca

SEQ ID NO: 351645 - RNA, 19 nt, Artificial Sequence
  Description of Artificial Sequence: Synthetic oligonucleotide
ggcacgagggcugaaaugg

SEQ ID NO: 351646 - RNA, 19 nt, Artificial Sequence
  Description of Artificial Sequence: Synthetic oligonucleotide
acaagggaccaaccccgcc

SEQ ID NO: 351647 - RNA, 19 nt, Artificial Sequence
  Description of Artificial Sequence: Synthetic oligonucleotide
cuagagaauagaagaagaa

SEQ ID NO: 351648 - RNA, 19 nt, Artificial Sequence
  Description of Artificial Sequence: Synthetic oligonucleotide
aacuggucgaucugcuuau

SEQ ID NO: 351649 - RNA, 19 nt, Artificial Sequence
  Description of Artificial Sequence: Synthetic oligonucleotide
uuauccacaaguggguuau

SEQ ID NO: 351650 - RNA, 19 nt, Artificial Sequence
  Description of Artificial Sequence: Synthetic oligonucleotide
ucguagacuagagaauaga

SEQ ID NO: 351651 - RNA, 19 nt, Artificial Sequence
  Description of Artificial Sequence: Synthetic oligonucleotide
ggagcgggccacuacaagg

SEQ ID NO: 351652 - RNA, 19 nt, Artificial Sequence
  Description of Artificial Sequence: Synthetic oligonucleotide
gagcgacucggucucauug

SEQ ID NO: 351653 - RNA, 19 nt, Artificial Sequence
  Description of Artificial Sequence: Synthetic oligonucleotide
cacuacggaaacagagggg

SEQ ID NO: 351654 - RNA, 19 nt, Artificial Sequence
  Description of Artificial Sequence: Synthetic oligonucleotide
uggcauuuucaagccaccg

SEQ ID NO: 351655 - RNA, 19 nt, Artificial Sequence
  Description of Artificial Sequence: Synthetic oligonucleotide
ccaauccuaacauuccagg

SEQ ID NO: 351656 - RNA, 19 nt, Artificial Sequence
  Description of Artificial Sequence: Synthetic oligonucleotide
cuuguuauaguugggaaua

SEQ ID NO: 351657 - RNA, 19 nt, Artificial Sequence
  Description of Artificial Sequence: Synthetic oligonucleotide
uuggcgcugaucugguuug

SEQ ID NO: 351658 - RNA, 19 nt, Artificial Sequence
  Description of Artificial Sequence: Synthetic oligonucleotide
ucggugucuuggaauaagu

SEQ ID NO: 351659 - RNA, 19 nt, Artificial Sequence
  Description of Artificial Sequence: Synthetic oligonucleotide
uguaaguuacagagcucaa

SEQ ID NO: 351660 - RNA, 19 nt, Artificial Sequence
  Description of Artificial Sequence: Synthetic oligonucleotide
gaaauaucccgccuucugu

SEQ ID NO: 351661 - RNA, 19 nt, Artificial Sequence
  Description of Artificial Sequence: Synthetic oligonucleotide
caccuaguccucaauaaca

SEQ ID NO: 351662 - RNA, 19 nt, Artificial Sequence
  Description of Artificial Sequence: Synthetic oligonucleotide
augggcguaggaucucacg

SEQ ID NO: 351663 - RNA, 19 nt, Artificial Sequence
  Description of Artificial Sequence: Synthetic oligonucleotide
uugcgauuuggucccggcc

SEQ ID NO: 351664 - RNA, 19 nt, Artificial Sequence
  Description of Artificial Sequence: Synthetic oligonucleotide
guuugccagaccccuacug

SEQ ID NO: 351665 - RNA, 19 nt, Artificial Sequence
  Description of Artificial Sequence: Synthetic oligonucleotide
uggcuuguuauaguuggga

SEQ ID NO: 351666 - RNA, 19 nt, Artificial Sequence
  Description of Artificial Sequence: Synthetic oligonucleotide
agcacgcuugguuucugag

SEQ ID NO: 351667 - RNA, 19 nt, Artificial Sequence
  Description of Artificial Sequence: Synthetic oligonucleotide
uccgaugcagaccacucuu

SEQ ID NO: 351668 - RNA, 19 nt, Artificial Sequence
  Description of Artificial Sequence: Synthetic oligonucleotide
ggaaauaucccgccuucug

SEQ ID NO: 351669 - RNA, 19 nt, Artificial Sequence
  Description of Artificial Sequence: Synthetic oligonucleotide
uggggcgucaauccaguuc

SEQ ID NO: 351670 - RNA, 19 nt, Artificial Sequence
  Description of Artificial Sequence: Synthetic oligonucleotide
aucucacggcacaagcgcc

SEQ ID NO: 351671 - RNA, 19 nt, Artificial Sequence
  Description of Artificial Sequence: Synthetic oligonucleotide
cacgagggcugaaauggcc

SEQ ID NO: 351672 - RNA, 19 nt, Artificial Sequence
  Description of Artificial Sequence: Synthetic oligonucleotide
ccacaaguggguuaugcgc

SEQ ID NO: 351673 - RNA, 19 nt, Artificial Sequence
  Description of Artificial Sequence: Synthetic oligonucleotide
gaugcagaccacucuucca

SEQ ID NO: 351674 - RNA, 19 nt, Artificial Sequence
  Description of Artificial Sequence: Synthetic oligonucleotide
accaauccuaacauuccag

SEQ ID NO: 351675 - RNA, 19 nt, Artificial Sequence
  Description of Artificial Sequence: Synthetic oligonucleotide
ucaagaggcguuucuucau

SEQ ID NO: 351676 - RNA, 19 nt, Artificial Sequence
  Description of Artificial Sequence: Synthetic oligonucleotide
gccauuguugaugacgggg

SEQ ID NO: 351677 - RNA, 19 nt, Artificial Sequence
  Description of Artificial Sequence: Synthetic oligonucleotide
auucacuacacuggccuug

SEQ ID NO: 351678 - RNA, 19 nt, Artificial Sequence
  Description of Artificial Sequence: Synthetic oligonucleotide
cauguuauugcgauuuggu

SEQ ID NO: 351679 - RNA, 19 nt, Artificial Sequence
  Description of Artificial Sequence: Synthetic oligonucleotide
ugcgugucagcuugguagu

SEQ ID NO: 351680 - RNA, 19 nt, Artificial Sequence
  Description of Artificial Sequence: Synthetic oligonucleotide
ucucaagauaccggaguac

SEQ ID NO: 351681 - RNA, 19 nt, Artificial Sequence
  Description of Artificial Sequence: Synthetic oligonucleotide
ucgaucugcuuauccacaa

SEQ ID NO: 351682 - RNA, 19 nt, Artificial Sequence
  Description of Artificial Sequence: Synthetic oligonucleotide
ucuggggcgucaauccagu

SEQ ID NO: 351683 - RNA, 19 nt, Artificial Sequence
  Description of Artificial Sequence: Synthetic oligonucleotide
gguaccgguuuccuacucg

SEQ ID NO: 351684 - RNA, 19 nt, Artificial Sequence
  Description of Artificial Sequence: Synthetic oligonucleotide
uuccgaugcagaccacucu

SEQ ID NO: 351685 - RNA, 19 nt, Artificial Sequence
  Description of Artificial Sequence: Synthetic oligonucleotide
uuuggucccggccucucuc

SEQ ID NO: 351686 - RNA, 19 nt, Artificial Sequence
  Description of Artificial Sequence: Synthetic oligonucleotide
caaugggcuuguagggccg

SEQ ID NO: 351687 - RNA, 19 nt, Artificial Sequence
  Description of Artificial Sequence: Synthetic oligonucleotide
augcgcuucccacaccuug

SEQ ID NO: 351688 - RNA, 19 nt, Artificial Sequence
  Description of Artificial Sequence: Synthetic oligonucleotide
ucaaacguuucugcuggac

SEQ ID NO: 351689 - RNA, 19 nt, Artificial Sequence
  Description of Artificial Sequence: Synthetic oligonucleotide
uaagacugugugguguaac

SEQ ID NO: 351690 - RNA, 19 nt, Artificial Sequence
  Description of Artificial Sequence: Synthetic oligonucleotide
caagaggcguuucuucaug

SEQ ID NO: 351691 - RNA, 19 nt, Artificial Sequence
  Description of Artificial Sequence: Synthetic oligonucleotide
ggcacuacggaaacagagg

SEQ ID NO: 351692 - RNA, 19 nt, Artificial Sequence
  Description of Artificial Sequence: Synthetic oligonucleotide
ugcacucagccuugauugc

SEQ ID NO: 351693 - RNA, 19 nt, Artificial Sequence
  Description of Artificial Sequence: Synthetic oligonucleotide
ccugguaccgguuuccuac

SEQ ID NO: 351694 - RNA, 19 nt, Artificial Sequence
  Description of Artificial Sequence: Synthetic oligonucleotide
agcggcaaggccuggcucu

SEQ ID NO: 351695 - RNA, 19 nt, Artificial Sequence
  Description of Artificial Sequence: Synthetic oligonucleotide
uauugcgauuuggucccgg

SEQ ID NO: 351696 - RNA, 19 nt, Artificial Sequence
  Description of Artificial Sequence: Synthetic oligonucleotide
guucauucgccgccgcuug

SEQ ID NO: 351697 - RNA, 19 nt, Artificial Sequence
  Description of Artificial Sequence: Synthetic oligonucleotide
augccguggggacucaugu

SEQ ID NO: 351698 - RNA, 19 nt, Artificial Sequence
  Description of Artificial Sequence: Synthetic oligonucleotide
ucggucucauugagcagug

SEQ ID NO: 351699 - RNA, 19 nt, Artificial Sequence
  Description of Artificial Sequence: Synthetic oligonucleotide
gcaaugggcuuguagggcc

SEQ ID NO: 351700 - RNA, 19 nt, Artificial Sequence
  Description of Artificial Sequence: Synthetic oligonucleotide
cuaggcugccgcacggagc

SEQ ID NO: 351701 - RNA, 19 nt, Artificial Sequence
  Description of Artificial Sequence: Synthetic oligonucleotide
agcgacucggucucauuga

SEQ ID NO: 351702 - RNA, 19 nt, Artificial Sequence
  Description of Artificial Sequence: Synthetic oligonucleotide
aaccccgccaggcaacuuu

SEQ ID NO: 351703 - RNA, 19 nt, Artificial Sequence
  Description of Artificial Sequence: Synthetic oligonucleotide
ggggcgucaauccaguuca

SEQ ID NO: 351704 - RNA, 19 nt, Artificial Sequence
  Description of Artificial Sequence: Synthetic oligonucleotide
gcgucaauccaguucauuc

SEQ ID NO: 351705 - RNA, 19 nt, Artificial Sequence
  Description of Artificial Sequence: Synthetic oligonucleotide
cugccgacuugucagccag

SEQ ID NO: 351706 - RNA, 19 nt, Artificial Sequence
  Description of Artificial Sequence: Synthetic oligonucleotide
gguuaugcgcuucccacac

SEQ ID NO: 351707 - RNA, 19 nt, Artificial Sequence
  Description of Artificial Sequence: Synthetic oligonucleotide
ugucggucgucuuccacau

SEQ ID NO: 351708 - RNA, 19 nt, Artificial Sequence
  Description of Artificial Sequence: Synthetic oligonucleotide
guggggacucauguuauug

SEQ ID NO: 351709 - RNA, 19 nt, Artificial Sequence
  Description of Artificial Sequence: Synthetic oligonucleotide
auaucccgccuucuguaga

SEQ ID NO: 351710 - RNA, 19 nt, Artificial Sequence
  Description of Artificial Sequence: Synthetic oligonucleotide
agccgugcagugcacucag

SEQ ID NO: 351711 - RNA, 19 nt, Artificial Sequence
  Description of Artificial Sequence: Synthetic oligonucleotide
caaggaacuggucgaucug

SEQ ID NO: 351712 - RNA, 19 nt, Artificial Sequence
  Description of Artificial Sequence: Synthetic oligonucleotide
ggaucucacggcacaagcg

SEQ ID NO: 351713 - RNA, 19 nt, Artificial Sequence
  Description of Artificial Sequence: Synthetic oligonucleotide
gugagcgauuuccagggga

SEQ ID NO: 351714 - RNA, 19 nt, Artificial Sequence
  Description of Artificial Sequence: Synthetic oligonucleotide
ugcggauuuuccuggucuc

SEQ ID NO: 351715 - RNA, 19 nt, Artificial Sequence
  Description of Artificial Sequence: Synthetic oligonucleotide
caaaaccuuagagcccacc

SEQ ID NO: 351716 - RNA, 19 nt, Artificial Sequence
  Description of Artificial Sequence: Synthetic oligonucleotide
guaggacuugagcgacucg

SEQ ID NO: 351717 - RNA, 19 nt, Artificial Sequence
  Description of Artificial Sequence: Synthetic oligonucleotide
cucaucguugacuggugca

SEQ ID NO: 351718 - RNA, 19 nt, Artificial Sequence
  Description of Artificial Sequence: Synthetic oligonucleotide
auaccggaguacagccucc

SEQ ID NO: 351719 - RNA, 19 nt, Artificial Sequence
  Description of Artificial Sequence: Synthetic oligonucleotide
caucguugacuggugcagg

SEQ ID NO: 351720 - RNA, 19 nt, Artificial Sequence
  Description of Artificial Sequence: Synthetic oligonucleotide
cuucccguugagcaggaga

SEQ ID NO: 351721 - RNA, 19 nt, Artificial Sequence
  Description of Artificial Sequence: Synthetic oligonucleotide
aagacuccucggugucuug

SEQ ID NO: 351722 - RNA, 19 nt, Artificial Sequence
  Description of Artificial Sequence: Synthetic oligonucleotide
agcaggagauuccgacuug

SEQ ID NO: 351723 - RNA, 19 nt, Artificial Sequence
  Description of Artificial Sequence: Synthetic oligonucleotide
ccaagaauaccacugguaa

SEQ ID NO: 351724 - RNA, 19 nt, Artificial Sequence
  Description of Artificial Sequence: Synthetic oligonucleotide
ggucgucuuccacauguag

SEQ ID NO: 351725 - RNA, 19 nt, Artificial Sequence
  Description of Artificial Sequence: Synthetic oligonucleotide
cucggugucuuggaauaag

SEQ ID NO: 351726 - RNA, 19 nt, Artificial Sequence
  Description of Artificial Sequence: Synthetic oligonucleotide
gguagugugcagguagaag

SEQ ID NO: 351727 - RNA, 19 nt, Artificial Sequence
  Description of Artificial Sequence: Synthetic oligonucleotide
caacugccgacuugucagc

SEQ ID NO: 351728 - RNA, 19 nt, Artificial Sequence
  Description of Artificial Sequence: Synthetic oligonucleotide
caagggaccaaccccgcca

SEQ ID NO: 351729 - RNA, 19 nt, Artificial Sequence
  Description of Artificial Sequence: Synthetic oligonucleotide
uggucuguccaugguuugc

SEQ ID NO: 351730 - RNA, 19 nt, Artificial Sequence
  Description of Artificial Sequence: Synthetic oligonucleotide
ugggcucaucguugacugg

SEQ ID NO: 351731 - RNA, 19 nt, Artificial Sequence
  Description of Artificial Sequence: Synthetic oligonucleotide
agcgcagaggcgacacugc

SEQ ID NO: 351732 - RNA, 19 nt, Artificial Sequence
  Description of Artificial Sequence: Synthetic oligonucleotide
ccgacuuggucccaugugc

SEQ ID NO: 351733 - RNA, 19 nt, Artificial Sequence
  Description of Artificial Sequence: Synthetic oligonucleotide
cuuauccacaaguggguua

SEQ ID NO: 351734 - RNA, 19 nt, Artificial Sequence
  Description of Artificial Sequence: Synthetic oligonucleotide
accuaguccucaauaacaa

SEQ ID NO: 351735 - RNA, 19 nt, Artificial Sequence
  Description of Artificial Sequence: Synthetic oligonucleotide
gucucaagauaccggagua

SEQ ID NO: 351736 - RNA, 19 nt, Artificial Sequence
  Description of Artificial Sequence: Synthetic oligonucleotide
uucaaacguuucugcugga

SEQ ID NO: 351737 - RNA, 19 nt, Artificial Sequence
  Description of Artificial Sequence: Synthetic oligonucleotide
cacaaguggguuaugcgcu

SEQ ID NO: 351738 - RNA, 19 nt, Artificial Sequence
  Description of Artificial Sequence: Synthetic oligonucleotide
uaccgguuuccuacucgga

SEQ ID NO: 351739 - RNA, 19 nt, Artificial Sequence
  Description of Artificial Sequence: Synthetic oligonucleotide
gggaugggucucaagauac

SEQ ID NO: 351740 - RNA, 19 nt, Artificial Sequence
  Description of Artificial Sequence: Synthetic oligonucleotide
uucgacugaucacggccau

SEQ ID NO: 351741 - RNA, 19 nt, Artificial Sequence
  Description of Artificial Sequence: Synthetic oligonucleotide
uuauugcgauuuggucccg

SEQ ID NO: 351742 - RNA, 19 nt, Artificial Sequence
  Description of Artificial Sequence: Synthetic oligonucleotide
gaugccguggggacucaug

SEQ ID NO: 351743 - RNA, 19 nt, Artificial Sequence
  Description of Artificial Sequence: Synthetic oligonucleotide
aguuggggcacuacggaaa

SEQ ID NO: 351744 - RNA, 19 nt, Artificial Sequence
  Description of Artificial Sequence: Synthetic oligonucleotide
ucacggcacaagcgccggg

SEQ ID NO: 351745 - RNA, 19 nt, Artificial Sequence
  Description of Artificial Sequence: Synthetic oligonucleotide
gacuugucagccagggcga

SEQ ID NO: 351746 - RNA, 19 nt, Artificial Sequence
  Description of Artificial Sequence: Synthetic oligonucleotide
guuaugcgcuucccacacc

SEQ ID NO: 351747 - RNA, 19 nt, Artificial Sequence
  Description of Artificial Sequence: Synthetic oligonucleotide
ucguugacuggugcaggug

SEQ ID NO: 351748 - RNA, 19 nt, Artificial Sequence
  Description of Artificial Sequence: Synthetic oligonucleotide
agcgauuuccaggggagaa

SEQ ID NO: 351749 - RNA, 19 nt, Artificial Sequence
  Description of Artificial Sequence: Synthetic oligonucleotide
cuugccccugaugugggug

SEQ ID NO: 351750 - RNA, 19 nt, Artificial Sequence
  Description of Artificial Sequence: Synthetic oligonucleotide
uacaaggaacuggucgauc

SEQ ID NO: 351751 - RNA, 19 nt, Artificial Sequence
  Description of Artificial Sequence: Synthetic oligonucleotide
aguucauucgccgccgcuu

SEQ ID NO: 351752 - RNA, 19 nt, Artificial Sequence
  Description of Artificial Sequence: Synthetic oligonucleotide
cuggacguaucugucgguc

SEQ ID NO: 351753 - RNA, 19 nt, Artificial Sequence
  Description of Artificial Sequence: Synthetic oligonucleotide
ugucgcgcggcaugccaug

SEQ ID NO: 351754 - RNA, 19 nt, Artificial Sequence
  Description of Artificial Sequence: Synthetic oligonucleotide
gagcgggccacuacaagga

SEQ ID NO: 351755 - RNA, 19 nt, Artificial Sequence
  Description of Artificial Sequence: Synthetic oligonucleotide
guggguuaugcgcuuccca

SEQ ID NO: 351756 - RNA, 19 nt, Artificial Sequence
  Description of Artificial Sequence: Synthetic oligonucleotide
ucauucgccgccgcuugac

SEQ ID NO: 351757 - RNA, 19 nt, Artificial Sequence
  Description of Artificial Sequence: Synthetic oligonucleotide
ugaugcuggugagcgauuu

SEQ ID NO: 351758 - RNA, 19 nt, Artificial Sequence
  Description of Artificial Sequence: Synthetic oligonucleotide
ggcauguaggggugucgcg

SEQ ID NO: 351759 - RNA, 19 nt, Artificial Sequence
  Description of Artificial Sequence: Synthetic oligonucleotide
caucccugcagagcaccgg

SEQ ID NO: 351760 - RNA, 19 nt, Artificial Sequence
  Description of Artificial Sequence: Synthetic oligonucleotide
cacggcacaagcgccgggc

SEQ ID NO: 351761 - RNA, 19 nt, Artificial Sequence
  Description of Artificial Sequence: Synthetic oligonucleotide
auagcuccgcuugcccagg

SEQ ID NO: 351762 - RNA, 19 nt, Artificial Sequence
  Description of Artificial Sequence: Synthetic oligonucleotide
gacaagggaccaaccccgc

SEQ ID NO: 351763 - RNA, 19 nt, Artificial Sequence
  Description of Artificial Sequence: Synthetic oligonucleotide
ggaguuggggcacuacgga

SEQ ID NO: 351764 - RNA, 19 nt, Artificial Sequence
  Description of Artificial Sequence: Synthetic oligonucleotide
cccuacugggcaucaagag

SEQ ID NO: 351765 - RNA, 19 nt, Artificial Sequence
  Description of Artificial Sequence: Synthetic oligonucleotide
ggccgcaccaauccuaaca

SEQ ID NO: 351766 - RNA, 19 nt, Artificial Sequence
  Description of Artificial Sequence: Synthetic oligonucleotide
caugggcguaggaucucac

SEQ ID NO: 351767 - RNA, 19 nt, Artificial Sequence
  Description of Artificial Sequence: Synthetic oligonucleotide
gcaccaauccuaacauucc

SEQ ID NO: 351768 - RNA, 19 nt, Artificial Sequence
  Description of Artificial Sequence: Synthetic oligonucleotide
uccuaacauuccaggugua

SEQ ID NO: 351769 - RNA, 19 nt, Artificial Sequence
  Description of Artificial Sequence: Synthetic oligonucleotide
caccggcccacccugcggc

SEQ ID NO: 351770 - RNA, 19 nt, Artificial Sequence
  Description of Artificial Sequence: Synthetic oligonucleotide
accuuagagcccaccccgg

SEQ ID NO: 351771 - RNA, 19 nt, Artificial Sequence
  Description of Artificial Sequence: Synthetic oligonucleotide
cucacggcacaagcgccgg

SEQ ID NO: 351772 - RNA, 19 nt, Artificial Sequence
  Description of Artificial Sequence: Synthetic oligonucleotide
caugugagggcgggaguug

SEQ ID NO: 351773 - RNA, 19 nt, Artificial Sequence
  Description of Artificial Sequence: Synthetic oligonucleotide
caaacuuggggcucccacu

SEQ ID NO: 351774 - RNA, 19 nt, Artificial Sequence
  Description of Artificial Sequence: Synthetic oligonucleotide
cgcacuaccugcuucagca

SEQ ID NO: 351775 - RNA, 19 nt, Artificial Sequence
  Description of Artificial Sequence: Synthetic oligonucleotide
cacacugcggguggccacc

SEQ ID NO: 351776 - RNA, 19 nt, Artificial Sequence
  Description of Artificial Sequence: Synthetic oligonucleotide
cucugggacgcuuccggca

SEQ ID NO: 351777 - RNA, 19 nt, Artificial Sequence
  Description of Artificial Sequence: Synthetic oligonucleotide
ccaccuaguccucaauaac

SEQ ID NO: 351778 - RNA, 19 nt, Artificial Sequence
  Description of Artificial Sequence: Synthetic oligonucleotide
agauaccggaguacagccu

SEQ ID NO: 351779 - RNA, 19 nt, Artificial Sequence
  Description of Artificial Sequence: Synthetic oligonucleotide
cacccugcggcacgagggc

SEQ ID NO: 351780 - RNA, 19 nt, Artificial Sequence
  Description of Artificial Sequence: Synthetic oligonucleotide
ggcagcgacuccaacugcc

SEQ ID NO: 351781 - RNA, 19 nt, Artificial Sequence
  Description of Artificial Sequence: Synthetic oligonucleotide
gugggucguagacuagaga

SEQ ID NO: 351782 - RNA, 19 nt, Artificial Sequence
  Description of Artificial Sequence: Synthetic oligonucleotide
gccgacuugucagccaggg

SEQ ID NO: 351783 - RNA, 19 nt, Artificial Sequence
  Description of Artificial Sequence: Synthetic oligonucleotide
cacggagcgggccacuaca

SEQ ID NO: 351784 - RNA, 19 nt, Artificial Sequence
  Description of Artificial Sequence: Synthetic oligonucleotide
ggcaacuuugcugcugcug

SEQ ID NO: 351785 - RNA, 19 nt, Artificial Sequence
  Description of Artificial Sequence: Synthetic oligonucleotide
uaccggaguacagccucca

SEQ ID NO: 351786 - RNA, 19 nt, Artificial Sequence
  Description of Artificial Sequence: Synthetic oligonucleotide
gguaggacuugagcgacuc

SEQ ID NO: 351787 - RNA, 19 nt, Artificial Sequence
  Description of Artificial Sequence: Synthetic oligonucleotide
cgacugaucacggccaucc

SEQ ID NO: 351788 - RNA, 19 nt, Artificial Sequence
  Description of Artificial Sequence: Synthetic oligonucleotide
aagcgccgggcaaugcgug

SEQ ID NO: 351789 - RNA, 19 nt, Artificial Sequence
  Description of Artificial Sequence: Synthetic oligonucleotide
guagaaggccugccuuguc

SEQ ID NO: 351790 - RNA, 19 nt, Artificial Sequence
  Description of Artificial Sequence: Synthetic oligonucleotide
uggcgcugaucugguuugg

SEQ ID NO: 351791 - RNA, 19 nt, Artificial Sequence
  Description of Artificial Sequence: Synthetic oligonucleotide
acugggcaucaagaggcgu

SEQ ID NO: 351792 - RNA, 19 nt, Artificial Sequence
  Description of Artificial Sequence: Synthetic oligonucleotide
cucggucucauugagcagu

SEQ ID NO: 351793 - RNA, 19 nt, Artificial Sequence
  Description of Artificial Sequence: Synthetic oligonucleotide
ggguuaugcgcuucccaca

SEQ ID NO: 351794 - RNA, 19 nt, Artificial Sequence
  Description of Artificial Sequence: Synthetic oligonucleotide
caucuggggcgucaaucca

SEQ ID NO: 351795 - RNA, 19 nt, Artificial Sequence
  Description of Artificial Sequence: Synthetic oligonucleotide
ccggguuggcauuuucaag

SEQ ID NO: 351796 - RNA, 19 nt, Artificial Sequence
  Description of Artificial Sequence: Synthetic oligonucleotide
gauuuggucccggccucuc

SEQ ID NO: 351797 - RNA, 19 nt, Artificial Sequence
  Description of Artificial Sequence: Synthetic oligonucleotide
agaggcgacacugcauguu

SEQ ID NO: 351798 - RNA, 19 nt, Artificial Sequence
  Description of Artificial Sequence: Synthetic oligonucleotide
uagccggguuggcauuuuc

SEQ ID NO: 351799 - RNA, 19 nt, Artificial Sequence
  Description of Artificial Sequence: Synthetic oligonucleotide
cguagacuagagaauagaa

SEQ ID NO: 351800 - RNA, 19 nt, Artificial Sequence
  Description of Artificial Sequence: Synthetic oligonucleotide
uggccgcagcggcaaggcc

SEQ ID NO: 351801 - RNA, 19 nt, Artificial Sequence
  Description of Artificial Sequence: Synthetic oligonucleotide
caccccgggugagaagucc

SEQ ID NO: 351802 - RNA, 19 nt, Artificial Sequence
  Description of Artificial Sequence: Synthetic oligonucleotide
ccccgcauguccaccagag

SEQ ID NO: 351803 - RNA, 19 nt, Artificial Sequence
  Description of Artificial Sequence: Synthetic oligonucleotide
ugcggcacgagggcugaaa

SEQ ID NO: 351804 - RNA, 19 nt, Artificial Sequence
  Description of Artificial Sequence: Synthetic oligonucleotide
ggauuaggcgcacuuuggu

SEQ ID NO: 351805 - RNA, 19 nt, Artificial Sequence
  Description of Artificial Sequence: Synthetic oligonucleotide
ggggaccccaagaauacca

SEQ ID NO: 351806 - RNA, 19 nt, Artificial Sequence
  Description of Artificial Sequence: Synthetic oligonucleotide
caucuagccggguuggcau

SEQ ID NO: 351807 - RNA, 19 nt, Artificial Sequence
  Description of Artificial Sequence: Synthetic oligonucleotide
cucucgcaggcccggccag

SEQ ID NO: 351808 - RNA, 19 nt, Artificial Sequence
  Description of Artificial Sequence: Synthetic oligonucleotide
agccggguuggcauuuuca

SEQ ID NO: 351809 - RNA, 19 nt, Artificial Sequence
  Description of Artificial Sequence: Synthetic oligonucleotide
aucuagccggguuggcauu

SEQ ID NO: 351810 - RNA, 19 nt, Artificial Sequence
  Description of Artificial Sequence: Synthetic oligonucleotide
ggaugggucucaagauacc

SEQ ID NO: 351811 - RNA, 19 nt, Artificial Sequence
  Description of Artificial Sequence: Synthetic oligonucleotide
gccgcuugacaggaggcag

SEQ ID NO: 351812 - RNA, 19 nt, Artificial Sequence
  Description of Artificial Sequence: Synthetic oligonucleotide
caugccaugggcguaggau

SEQ ID NO: 351813 - RNA, 19 nt, Artificial Sequence
  Description of Artificial Sequence: Synthetic oligonucleotide
gggguaggacuucccguug

SEQ ID NO: 351814 - RNA, 19 nt, Artificial Sequence
  Description of Artificial Sequence: Synthetic oligonucleotide
gucgcgcggcaugccaugg

SEQ ID NO: 351815 - RNA, 19 nt, Artificial Sequence
  Description of Artificial Sequence: Synthetic oligonucleotide
aggcaacuuugcugcugcu

SEQ ID NO: 351816 - RNA, 19 nt, Artificial Sequence
  Description of Artificial Sequence: Synthetic oligonucleotide
ugccguggggacucauguu

SEQ ID NO: 351817 - RNA, 19 nt, Artificial Sequence
  Description of Artificial Sequence: Synthetic oligonucleotide
gccguggggacucauguua

SEQ ID NO: 351818 - RNA, 19 nt, Artificial Sequence
  Description of Artificial Sequence: Synthetic oligonucleotide
gggacucauguuauugcga

SEQ ID NO: 351819 - RNA, 19 nt, Artificial Sequence
  Description of Artificial Sequence: Synthetic oligonucleotide
ggugucgcgcggcaugcca

SEQ ID NO: 351820 - RNA, 19 nt, Artificial Sequence
  Description of Artificial Sequence: Synthetic oligonucleotide
agagcccaccccgggugag

SEQ ID NO: 351821 - RNA, 19 nt, Artificial Sequence
  Description of Artificial Sequence: Synthetic oligonucleotide
ggguaggacuucccguuga

SEQ ID NO: 351822 - RNA, 19 nt, Artificial Sequence
  Description of Artificial Sequence: Synthetic oligonucleotide
cugggacgcuuccggcagc

SEQ ID NO: 351823 - RNA, 19 nt, Artificial Sequence
  Description of Artificial Sequence: Synthetic oligonucleotide
uggcaaacuuggggcuccc

SEQ ID NO: 351824 - RNA, 19 nt, Artificial Sequence
  Description of Artificial Sequence: Synthetic oligonucleotide
gccggguuggcauuuucaa

SEQ ID NO: 351825 - RNA, 19 nt, Artificial Sequence
  Description of Artificial Sequence: Synthetic oligonucleotide
cacaagcgccgggcaaugc

SEQ ID NO: 351826 - RNA, 19 nt, Artificial Sequence
  Description of Artificial Sequence: Synthetic oligonucleotide
acgcuugguuucugaggau

SEQ ID NO: 351827 - RNA, 19 nt, Artificial Sequence
  Description of Artificial Sequence: Synthetic oligonucleotide
ugccccugauguggguggc

SEQ ID NO: 351828 - RNA, 19 nt, Artificial Sequence
  Description of Artificial Sequence: Synthetic oligonucleotide
cauucgccgccgcuugaca

SEQ ID NO: 351829 - RNA, 19 nt, Artificial Sequence
  Description of Artificial Sequence: Synthetic oligonucleotide
ggcgaugagacugcuggaa

SEQ ID NO: 351830 - RNA, 19 nt, Artificial Sequence
  Description of Artificial Sequence: Synthetic oligonucleotide
gcgaugagacugcuggaaa

SEQ ID NO: 351831 - RNA, 19 nt, Artificial Sequence
  Description of Artificial Sequence: Synthetic oligonucleotide
auacgucaucuggggcguc

SEQ ID NO: 351832 - RNA, 19 nt, Artificial Sequence
  Description of Artificial Sequence: Synthetic oligonucleotide
aggcgcacuuugguggggu

SEQ ID NO: 351833 - RNA, 19 nt, Artificial Sequence
  Description of Artificial Sequence: Synthetic oligonucleotide
ggacguaucugucggucgu

SEQ ID NO: 351834 - RNA, 19 nt, Artificial Sequence
  Description of Artificial Sequence: Synthetic oligonucleotide
caagcgccgggcaaugcgu

SEQ ID NO: 351835 - RNA, 19 nt, Artificial Sequence
  Description of Artificial Sequence: Synthetic oligonucleotide
cuuguagggccggcgggca

SEQ ID NO: 351836 - RNA, 19 nt, Artificial Sequence
  Description of Artificial Sequence: Synthetic oligonucleotide
cagaccccuacugggcauc

SEQ ID NO: 351837 - RNA, 19 nt, Artificial Sequence
  Description of Artificial Sequence: Synthetic oligonucleotide
accccgccaggcaacuuug

SEQ ID NO: 351838 - RNA, 19 nt, Artificial Sequence
  Description of Artificial Sequence: Synthetic oligonucleotide
ggauacucuggggcugaug

SEQ ID NO: 351839 - RNA, 19 nt, Artificial Sequence
  Description of Artificial Sequence: Synthetic oligonucleotide
gcgauuuggucccggccuc

SEQ ID NO: 351840 - RNA, 19 nt, Artificial Sequence
  Description of Artificial Sequence: Synthetic oligonucleotide
cagcgacuccaacugccga

SEQ ID NO: 351841 - RNA, 19 nt, Artificial Sequence
  Description of Artificial Sequence: Synthetic oligonucleotide
gucggucgucuuccacaug

SEQ ID NO: 351842 - RNA, 19 nt, Artificial Sequence
  Description of Artificial Sequence: Synthetic oligonucleotide
ccgaugcagaccacucuuc

SEQ ID NO: 351843 - RNA, 19 nt, Artificial Sequence
  Description of Artificial Sequence: Synthetic oligonucleotide
accccgggugagaaguccu

SEQ ID NO: 351844 - RNA, 19 nt, Artificial Sequence
  Description of Artificial Sequence: Synthetic oligonucleotide
gaagcgcagaggcgacacu

SEQ ID NO: 351845 - RNA, 19 nt, Artificial Sequence
  Description of Artificial Sequence: Synthetic oligonucleotide
gacuucccguugagcagga

SEQ ID NO: 351846 - RNA, 19 nt, Artificial Sequence
  Description of Artificial Sequence: Synthetic oligonucleotide
cgaucugcuuauccacaag

SEQ ID NO: 351847 - RNA, 19 nt, Artificial Sequence
  Description of Artificial Sequence: Synthetic oligonucleotide
cguaggaucucacggcaca

SEQ ID NO: 351848 - RNA, 19 nt, Artificial Sequence
  Description of Artificial Sequence: Synthetic oligonucleotide
aguuggaguuggggcacua

SEQ ID NO: 351849 - RNA, 19 nt, Artificial Sequence
  Description of Artificial Sequence: Synthetic oligonucleotide
gauuccgacuuggucccau

SEQ ID NO: 351850 - RNA, 19 nt, Artificial Sequence
  Description of Artificial Sequence: Synthetic oligonucleotide
gccauguaaaauacgucau

SEQ ID NO: 351851 - RNA, 19 nt, Artificial Sequence
  Description of Artificial Sequence: Synthetic oligonucleotide
agagcagcuugcggauuuu

SEQ ID NO: 351852 - RNA, 19 nt, Artificial Sequence
  Description of Artificial Sequence: Synthetic oligonucleotide
ggaccccaagaauaccacu

SEQ ID NO: 351853 - RNA, 19 nt, Artificial Sequence
  Description of Artificial Sequence: Synthetic oligonucleotide
gccgcaccaauccuaacau

SEQ ID NO: 351854 - RNA, 19 nt, Artificial Sequence
  Description of Artificial Sequence: Synthetic oligonucleotide
ccgccgcuugacaggaggc

SEQ ID NO: 351855 - RNA, 19 nt, Artificial Sequence
  Description of Artificial Sequence: Synthetic oligonucleotide
gcacgagggcugaaauggc

SEQ ID NO: 351856 - RNA, 19 nt, Artificial Sequence
  Description of Artificial Sequence: Synthetic oligonucleotide
ggcggggaugggucucaag

SEQ ID NO: 351857 - RNA, 19 nt, Artificial Sequence
  Description of Artificial Sequence: Synthetic oligonucleotide
ccgugcaaaggugcccacg

SEQ ID NO: 351858 - RNA, 19 nt, Artificial Sequence
  Description of Artificial Sequence: Synthetic oligonucleotide
ccaggcaacuuugcugcug

SEQ ID NO: 351859 - RNA, 19 nt, Artificial Sequence
  Description of Artificial Sequence: Synthetic oligonucleotide
ccaguucauucgccgccgc

SEQ ID NO: 351860 - RNA, 19 nt, Artificial Sequence
  Description of Artificial Sequence: Synthetic oligonucleotide
uggauacucuggggcugau

SEQ ID NO: 351861 - RNA, 19 nt, Artificial Sequence
  Description of Artificial Sequence: Synthetic oligonucleotide
gcgcggcaugccaugggcg

SEQ ID NO: 351862 - RNA, 19 nt, Artificial Sequence
  Description of Artificial Sequence: Synthetic oligonucleotide
agauuccgacuugguccca

SEQ ID NO: 351863 - RNA, 19 nt, Artificial Sequence
  Description of Artificial Sequence: Synthetic oligonucleotide
agcccaccccgggugagaa

SEQ ID NO: 351864 - RNA, 19 nt, Artificial Sequence
  Description of Artificial Sequence: Synthetic oligonucleotide
gcgcagaggcgacacugca

SEQ ID NO: 351865 - RNA, 19 nt, Artificial Sequence
  Description of Artificial Sequence: Synthetic oligonucleotide
gguuggcuuccgaugcaga

SEQ ID NO: 351866 - RNA, 19 nt, Artificial Sequence
  Description of Artificial Sequence: Synthetic oligonucleotide
ccggcagccgugcagugca

SEQ ID NO: 351867 - RNA, 19 nt, Artificial Sequence
  Description of Artificial Sequence: Synthetic oligonucleotide
cuacaaggaacuggucgau

SEQ ID NO: 351868 - RNA, 19 nt, Artificial Sequence
  Description of Artificial Sequence: Synthetic oligonucleotide
augaugcuggugagcgauu

SEQ ID NO: 351869 - RNA, 19 nt, Artificial Sequence
  Description of Artificial Sequence: Synthetic oligonucleotide
ggacgcuuccggcagccgu

SEQ ID NO: 351870 - RNA, 19 nt, Artificial Sequence
  Description of Artificial Sequence: Synthetic oligonucleotide
accgcggauuaggcgcacu

SEQ ID NO: 351871 - RNA, 19 nt, Artificial Sequence
  Description of Artificial Sequence: Synthetic oligonucleotide
gcccgugcaaaggugccca

SEQ ID NO: 351872 - RNA, 19 nt, Artificial Sequence
  Description of Artificial Sequence: Synthetic oligonucleotide
cugccgcggcacucaugug

SEQ ID NO: 351873 - RNA, 19 nt, Artificial Sequence
  Description of Artificial Sequence: Synthetic oligonucleotide
gcacaagcgccgggcaaug

SEQ ID NO: 351874 - RNA, 19 nt, Artificial Sequence
  Description of Artificial Sequence: Synthetic oligonucleotide
gcgauuuccaggggagaaa

SEQ ID NO: 351875 - RNA, 19 nt, Artificial Sequence
  Description of Artificial Sequence: Synthetic oligonucleotide
cagaggcgacacugcaugu

SEQ ID NO: 351876 - RNA, 19 nt, Artificial Sequence
  Description of Artificial Sequence: Synthetic oligonucleotide
guagggccggcgggcagca

SEQ ID NO: 351877 - RNA, 19 nt, Artificial Sequence
  Description of Artificial Sequence: Synthetic oligonucleotide
gcguaggaucucacggcac

SEQ ID NO: 351878 - RNA, 19 nt, Artificial Sequence
  Description of Artificial Sequence: Synthetic oligonucleotide
caguucauucgccgccgcu

SEQ ID NO: 351879 - RNA, 19 nt, Artificial Sequence
  Description of Artificial Sequence: Synthetic oligonucleotide
ggcgggaguuggaguuggg

SEQ ID NO: 351880 - RNA, 19 nt, Artificial Sequence
  Description of Artificial Sequence: Synthetic oligonucleotide
ccccgggugagaaguccug

SEQ ID NO: 351881 - RNA, 19 nt, Artificial Sequence
  Description of Artificial Sequence: Synthetic oligonucleotide
gggcugaaauggccuugga

SEQ ID NO: 351882 - RNA, 19 nt, Artificial Sequence
  Description of Artificial Sequence: Synthetic oligonucleotide
gggucguagacuagagaau

SEQ ID NO: 351883 - RNA, 19 nt, Artificial Sequence
  Description of Artificial Sequence: Synthetic oligonucleotide
ggcgcugaucugguuugga

SEQ ID NO: 351884 - RNA, 19 nt, Artificial Sequence
  Description of Artificial Sequence: Synthetic oligonucleotide
ccuaguccucaauaacaau

SEQ ID NO: 351885 - RNA, 19 nt, Artificial Sequence
  Description of Artificial Sequence: Synthetic oligonucleotide
gcgcugaucugguuuggau

SEQ ID NO: 351886 - RNA, 19 nt, Artificial Sequence
  Description of Artificial Sequence: Synthetic oligonucleotide
ggcacaagcgccgggcaau

SEQ ID NO: 351887 - RNA, 19 nt, Artificial Sequence
  Description of Artificial Sequence: Synthetic oligonucleotide
gcggcaaggccuggcucug

SEQ ID NO: 351888 - RNA, 19 nt, Artificial Sequence
  Description of Artificial Sequence: Synthetic oligonucleotide
gcaugugagggcgggaguu

SEQ ID NO: 351889 - RNA, 19 nt, Artificial Sequence
  Description of Artificial Sequence: Synthetic oligonucleotide
caccgcggauuaggcgcac

SEQ ID NO: 351890 - RNA, 19 nt, Artificial Sequence
  Description of Artificial Sequence: Synthetic oligonucleotide
cccgugcaaaggugcccac

SEQ ID NO: 351891 - RNA, 19 nt, Artificial Sequence
  Description of Artificial Sequence: Synthetic oligonucleotide
ccaccgcggauuaggcgca

SEQ ID NO: 351892 - RNA, 19 nt, Artificial Sequence
  Description of Artificial Sequence: Synthetic oligonucleotide
ccaugggcguaggaucuca

SEQ ID NO: 351893 - RNA, 19 nt, Artificial Sequence
  Description of Artificial Sequence: Synthetic oligonucleotide
cgaugagacugcuggaaau

SEQ ID NO: 351894 - RNA, 19 nt, Artificial Sequence
  Description of Artificial Sequence: Synthetic oligonucleotide
gcgacuccaacugccgacu

SEQ ID NO: 351895 - RNA, 19 nt, Artificial Sequence
  Description of Artificial Sequence: Synthetic oligonucleotide
cggcaugccaugggcguag

SEQ ID NO: 351896 - RNA, 19 nt, Artificial Sequence
  Description of Artificial Sequence: Synthetic oligonucleotide
gcggcacgagggcugaaau

SEQ ID NO: 351897 - RNA, 19 nt, Artificial Sequence
  Description of Artificial Sequence: Synthetic oligonucleotide
cgggcaaugcgugucagcu

SEQ ID NO: 351898 - RNA, 19 nt, Artificial Sequence
  Description of Artificial Sequence: Synthetic oligonucleotide
ggguggccgcagcggcaag

SEQ ID NO: 351899 - RNA, 19 nt, Artificial Sequence
  Description of Artificial Sequence: Synthetic oligonucleotide
ggcgcacuuugguggggua

SEQ ID NO: 351900 - RNA, 19 nt, Artificial Sequence
  Description of Artificial Sequence: Synthetic oligonucleotide
gugucgcgcggcaugccau

SEQ ID NO: 351901 - RNA, 19 nt, Artificial Sequence
  Description of Artificial Sequence: Synthetic oligonucleotide
gcgccgggcaaugcguguc

SEQ ID NO: 351902 - RNA, 19 nt, Artificial Sequence
  Description of Artificial Sequence: Synthetic oligonucleotide
gccgugcagugcacucagc

SEQ ID NO: 351903 - RNA, 19 nt, Artificial Sequence
  Description of Artificial Sequence: Synthetic oligonucleotide
gcgcuucccacaccuuggu

SEQ ID NO: 351904 - RNA, 19 nt, Artificial Sequence
  Description of Artificial Sequence: Synthetic oligonucleotide
ccguggggacucauguuau

SEQ ID NO: 351905 - RNA, 19 nt, Artificial Sequence
  Description of Artificial Sequence: Synthetic oligonucleotide
gccaggcaacuuugcugcu

SEQ ID NO: 351906 - RNA, 19 nt, Artificial Sequence
  Description of Artificial Sequence: Synthetic oligonucleotide
cuggggcgucaauccaguu

SEQ ID NO: 351907 - RNA, 19 nt, Artificial Sequence
  Description of Artificial Sequence: Synthetic oligonucleotide
cgcggcaugccaugggcgu

SEQ ID NO: 351908 - RNA, 19 nt, Artificial Sequence
  Description of Artificial Sequence: Synthetic oligonucleotide
cacugcggguggccaccua

SEQ ID NO: 351909 - RNA, 19 nt, Artificial Sequence
  Description of Artificial Sequence: Synthetic oligonucleotide
gcggcaugccaugggcgua

SEQ ID NO: 351910 - RNA, 19 nt, Artificial Sequence
  Description of Artificial Sequence: Synthetic oligonucleotide
cgccgcuugacaggaggca

SEQ ID NO: 351911 - RNA, 19 nt, Artificial Sequence
  Description of Artificial Sequence: Synthetic oligonucleotide
cccgggugagaaguccugu

SEQ ID NO: 351912 - RNA, 19 nt, Artificial Sequence
  Description of Artificial Sequence: Synthetic oligonucleotide
cggucgucuuccacaugua

SEQ ID NO: 351913 - RNA, 19 nt, Artificial Sequence
  Description of Artificial Sequence: Synthetic oligonucleotide
ccgcaccaauccuaacauu

SEQ ID NO: 351914 - RNA, 19 nt, Artificial Sequence
  Description of Artificial Sequence: Synthetic oligonucleotide
ccgcggauuaggcgcacuu

SEQ ID NO: 351915 - RNA, 19 nt, Artificial Sequence
  Description of Artificial Sequence: Synthetic oligonucleotide
ccaaccccgccaggcaacu

SEQ ID NO: 351916 - RNA, 19 nt, Artificial Sequence
  Description of Artificial Sequence: Synthetic oligonucleotide
ggaugccguggggacucau

SEQ ID NO: 351917 - RNA, 19 nt, Artificial Sequence
  Description of Artificial Sequence: Synthetic oligonucleotide
cugcggcacgagggcugaa

SEQ ID NO: 351918 - RNA, 19 nt, Artificial Sequence
  Description of Artificial Sequence: Synthetic oligonucleotide
ccgcacggagcugcugcaa

SEQ ID NO: 351919 - RNA, 19 nt, Artificial Sequence
  Description of Artificial Sequence: Synthetic oligonucleotide
ccccguugugcugcucaua

SEQ ID NO: 351920 - RNA, 19 nt, Artificial Sequence
  Description of Artificial Sequence: Synthetic oligonucleotide
ccagggcgaugagacugcu

SEQ ID NO: 351921 - RNA, 19 nt, Artificial Sequence
  Description of Artificial Sequence: Synthetic oligonucleotide
caaccccgccaggcaacuu

SEQ ID NO: 351922 - RNA, 19 nt, Artificial Sequence
  Description of Artificial Sequence: Synthetic oligonucleotide
cgcggauuaggcgcacuuu

SEQ ID NO: 351923 - RNA, 19 nt, Artificial Sequence
  Description of Artificial Sequence: Synthetic oligonucleotide
cggcacucaugugcaggcu

SEQ ID NO: 351924 - RNA, 19 nt, Artificial Sequence
  Description of Artificial Sequence: Synthetic oligonucleotide
uauuuuggaauacaaaggg

SEQ ID NO: 351925 - RNA, 19 nt, Artificial Sequence
  Description of Artificial Sequence: Synthetic oligonucleotide
auuacuacagauuuagugg

SEQ ID NO: 351926 - RNA, 19 nt, Artificial Sequence
  Description of Artificial Sequence: Synthetic oligonucleotide
auuaguugaucacucaucc

SEQ ID NO: 351927 - RNA, 19 nt, Artificial Sequence
  Description of Artificial Sequence: Synthetic oligonucleotide
ugugcuagaaaucaaauac

SEQ ID NO: 351928 - RNA, 19 nt, Artificial Sequence
  Description of Artificial Sequence: Synthetic oligonucleotide
uuaaacuccauauacaugu

SEQ ID NO: 351929 - RNA, 19 nt, Artificial Sequence
  Description of Artificial Sequence: Synthetic oligonucleotide
ugcucauuaauguaaaugg

SEQ ID NO: 351930 - RNA, 19 nt, Artificial Sequence
  Description of Artificial Sequence: Synthetic oligonucleotide
uuuauauauauauauauau

SEQ ID NO: 351931 - RNA, 19 nt, Artificial Sequence
  Description of Artificial Sequence: Synthetic oligonucleotide
aauaguuaaagcaggagac

SEQ ID NO: 351932 - RNA, 19 nt, Artificial Sequence
  Description of Artificial Sequence: Synthetic oligonucleotide
uauauauauauauauauau

SEQ ID NO: 351933 - RNA, 19 nt, Artificial Sequence
  Description of Artificial Sequence: Synthetic oligonucleotide
aguuaagucacuucaacac

SEQ ID NO: 351934 - RNA, 19 nt, Artificial Sequence
  Description of Artificial Sequence: Synthetic oligonucleotide
uuaagguagcaucacaugg

SEQ ID NO: 351935 - RNA, 19 nt, Artificial Sequence
  Description of Artificial Sequence: Synthetic oligonucleotide
auauauauauauuucagcu

SEQ ID NO: 351936 - RNA, 19 nt, Artificial Sequence
  Description of Artificial Sequence: Synthetic oligonucleotide
uauauauauauauauuuca

SEQ ID NO: 351937 - RNA, 19 nt, Artificial Sequence
  Description of Artificial Sequence: Synthetic oligonucleotide
ucaauggauagucauaucc

SEQ ID NO: 351938 - RNA, 19 nt, Artificial Sequence
  Description of Artificial Sequence: Synthetic oligonucleotide
uuaacuaauagcuccaagc

SEQ ID NO: 351939 - RNA, 19 nt, Artificial Sequence
  Description of Artificial Sequence: Synthetic oligonucleotide
aaguuuuauauauauauau

SEQ ID NO: 351940 - RNA, 19 nt, Artificial Sequence
  Description of Artificial Sequence: Synthetic oligonucleotide
uguacaaacaaacaaucca

SEQ ID NO: 351941 - RNA, 19 nt, Artificial Sequence
  Description of Artificial Sequence: Synthetic oligonucleotide
ugaucuuagaauaucaaga

SEQ ID NO: 351942 - RNA, 19 nt, Artificial Sequence
  Description of Artificial Sequence: Synthetic oligonucleotide
uauauauauauauauauuu

SEQ ID NO: 351943 - RNA, 19 nt, Artificial Sequence
  Description of Artificial Sequence: Synthetic oligonucleotide
uacugauuaauccaggcag

SEQ ID NO: 351944 - RNA, 19 nt, Artificial Sequence
  Description of Artificial Sequence: Synthetic oligonucleotide
agacuuaagaaauaaagca

SEQ ID NO: 351945 - RNA, 19 nt, Artificial Sequence
  Description of Artificial Sequence: Synthetic oligonucleotide
uauauauauauauuucagc

SEQ ID NO: 351946 - RNA, 19 nt, Artificial Sequence
  Description of Artificial Sequence: Synthetic oligonucleotide
auuaauccguuucagcgcc

SEQ ID NO: 351947 - RNA, 19 nt, Artificial Sequence
  Description of Artificial Sequence: Synthetic oligonucleotide
aagauagauuaacuaauag

SEQ ID NO: 351948 - RNA, 19 nt, Artificial Sequence
  Description of Artificial Sequence: Synthetic oligonucleotide
uaacuaauagcuccaagcc

SEQ ID NO: 351949 - RNA, 19 nt, Artificial Sequence
  Description of Artificial Sequence: Synthetic oligonucleotide
cuaaaagcaguuauugucc

SEQ ID NO: 351950 - RNA, 19 nt, Artificial Sequence
  Description of Artificial Sequence: Synthetic oligonucleotide
uugguuuagucucauaacc

SEQ ID NO: 351951 - RNA, 19 nt, Artificial Sequence
  Description of Artificial Sequence: Synthetic oligonucleotide
uucaauaccaauucuccag

SEQ ID NO: 351952 - RNA, 19 nt, Artificial Sequence
  Description of Artificial Sequence: Synthetic oligonucleotide
aaauuuuaguuagaagggg

SEQ ID NO: 351953 - RNA, 19 nt, Artificial Sequence
  Description of Artificial Sequence: Synthetic oligonucleotide
aaugugucaaccuguaaca

SEQ ID NO: 351954 - RNA, 19 nt, Artificial Sequence
  Description of Artificial Sequence: Synthetic oligonucleotide
uuaagucacuucaacacag

SEQ ID NO: 351955 - RNA, 19 nt, Artificial Sequence
  Description of Artificial Sequence: Synthetic oligonucleotide
uuaggucccauaauugugg

SEQ ID NO: 351956 - RNA, 19 nt, Artificial Sequence
  Description of Artificial Sequence: Synthetic oligonucleotide
gaacaaauccaucucaaug

SEQ ID NO: 351957 - RNA, 19 nt, Artificial Sequence
  Description of Artificial Sequence: Synthetic oligonucleotide
uuucuaacuuuccacaucu

SEQ ID NO: 351958 - RNA, 19 nt, Artificial Sequence
  Description of Artificial Sequence: Synthetic oligonucleotide
auauauauauauauauuuc

SEQ ID NO: 351959 - RNA, 19 nt, Artificial Sequence
  Description of Artificial Sequence: Synthetic oligonucleotide
uuuuauauauauauauaua

SEQ ID NO: 351960 - RNA, 19 nt, Artificial Sequence
  Description of Artificial Sequence: Synthetic oligonucleotide
uuauauauauauauauaua

SEQ ID NO: 351961 - RNA, 19 nt, Artificial Sequence
  Description of Artificial Sequence: Synthetic oligonucleotide
agagcuauuaguugaucac

SEQ ID NO: 351962 - RNA, 19 nt, Artificial Sequence
  Description of Artificial Sequence: Synthetic oligonucleotide
auugguuuagucucauaac

SEQ ID NO: 351963 - RNA, 19 nt, Artificial Sequence
  Description of Artificial Sequence: Synthetic oligonucleotide
uuuaguuagaaggggaugc

SEQ ID NO: 351964 - RNA, 19 nt, Artificial Sequence
  Description of Artificial Sequence: Synthetic oligonucleotide
uaucacaugugcuagaaau

SEQ ID NO: 351965 - RNA, 19 nt, Artificial Sequence
  Description of Artificial Sequence: Synthetic oligonucleotide
aauggauagucauauccca

SEQ ID NO: 351966 - RNA, 19 nt, Artificial Sequence
  Description of Artificial Sequence: Synthetic oligonucleotide
acucgcaucauuuauucag

SEQ ID NO: 351967 - RNA, 19 nt, Artificial Sequence
  Description of Artificial Sequence: Synthetic oligonucleotide
auaccaauucuccagccac

SEQ ID NO: 351968 - RNA, 19 nt, Artificial Sequence
  Description of Artificial Sequence: Synthetic oligonucleotide
gguuauucugacuuuaagg

SEQ ID NO: 351969 - RNA, 19 nt, Artificial Sequence
  Description of Artificial Sequence: Synthetic oligonucleotide
aaucucuaacaguggaagg

SEQ ID NO: 351970 - RNA, 19 nt, Artificial Sequence
  Description of Artificial Sequence: Synthetic oligonucleotide
uaucauguaaccucaaauc

SEQ ID NO: 351971 - RNA, 19 nt, Artificial Sequence
  Description of Artificial Sequence: Synthetic oligonucleotide
uugaauagcuuauaauucu

SEQ ID NO: 351972 - RNA, 19 nt, Artificial Sequence
  Description of Artificial Sequence: Synthetic oligonucleotide
uuacuacagauuuaguggc

SEQ ID NO: 351973 - RNA, 19 nt, Artificial Sequence
  Description of Artificial Sequence: Synthetic oligonucleotide
aaugguaucuguugcauuu

SEQ ID NO: 351974 - RNA, 19 nt, Artificial Sequence
  Description of Artificial Sequence: Synthetic oligonucleotide
aauagcauugacuuuuauu

SEQ ID NO: 351975 - RNA, 19 nt, Artificial Sequence
  Description of Artificial Sequence: Synthetic oligonucleotide
aauggagggagguaaacaa

SEQ ID NO: 351976 - RNA, 19 nt, Artificial Sequence
  Description of Artificial Sequence: Synthetic oligonucleotide
caugugaaugaauggaggg

SEQ ID NO: 351977 - RNA, 19 nt, Artificial Sequence
  Description of Artificial Sequence: Synthetic oligonucleotide
uggaagauagauuaacuaa

SEQ ID NO: 351978 - RNA, 19 nt, Artificial Sequence
  Description of Artificial Sequence: Synthetic oligonucleotide
cagacaaggaauaaauuug

SEQ ID NO: 351979 - RNA, 19 nt, Artificial Sequence
  Description of Artificial Sequence: Synthetic oligonucleotide
ccuauuuuggaauacaaag

SEQ ID NO: 351980 - RNA, 19 nt, Artificial Sequence
  Description of Artificial Sequence: Synthetic oligonucleotide
auauauauauauauuucag

SEQ ID NO: 351981 - RNA, 19 nt, Artificial Sequence
  Description of Artificial Sequence: Synthetic oligonucleotide
aaacaauccaauagcauug

SEQ ID NO: 351982 - RNA, 19 nt, Artificial Sequence
  Description of Artificial Sequence: Synthetic oligonucleotide
aucucuaacaguggaaggc

SEQ ID NO: 351983 - RNA, 19 nt, Artificial Sequence
  Description of Artificial Sequence: Synthetic oligonucleotide
aucauguaaccucaaaucu

SEQ ID NO: 351984 - RNA, 19 nt, Artificial Sequence
  Description of Artificial Sequence: Synthetic oligonucleotide
ugugaaugaauggagggag

SEQ ID NO: 351985 - RNA, 19 nt, Artificial Sequence
  Description of Artificial Sequence: Synthetic oligonucleotide
acuaaguuccuuauuaauc

SEQ ID NO: 351986 - RNA, 19 nt, Artificial Sequence
  Description of Artificial Sequence: Synthetic oligonucleotide
uguggcuugccaaugaaac

SEQ ID NO: 351987 - RNA, 19 nt, Artificial Sequence
  Description of Artificial Sequence: Synthetic oligonucleotide
acaacucccacaccaaaac

SEQ ID NO: 351988 - RNA, 19 nt, Artificial Sequence
  Description of Artificial Sequence: Synthetic oligonucleotide
ucagugcuauauuaaacag

SEQ ID NO: 351989 - RNA, 19 nt, Artificial Sequence
  Description of Artificial Sequence: Synthetic oligonucleotide
uauuaauccguuucagcgc

SEQ ID NO: 351990 - RNA, 19 nt, Artificial Sequence
  Description of Artificial Sequence: Synthetic oligonucleotide
ccauuuaugaacucuaggg

SEQ ID NO: 351991 - RNA, 19 nt, Artificial Sequence
  Description of Artificial Sequence: Synthetic oligonucleotide
agcuacacuauuugaauag

SEQ ID NO: 351992 - RNA, 19 nt, Artificial Sequence
  Description of Artificial Sequence: Synthetic oligonucleotide
uaagguagcaucacauggc

SEQ ID NO: 351993 - RNA, 19 nt, Artificial Sequence
  Description of Artificial Sequence: Synthetic oligonucleotide
ugaauagcuuauaauucug

SEQ ID NO: 351994 - RNA, 19 nt, Artificial Sequence
  Description of Artificial Sequence: Synthetic oligonucleotide
ugaggauugguuuagucuc

SEQ ID NO: 351995 - RNA, 19 nt, Artificial Sequence
  Description of Artificial Sequence: Synthetic oligonucleotide
ucucauaaccaaguuagag

SEQ ID NO: 351996 - RNA, 19 nt, Artificial Sequence
  Description of Artificial Sequence: Synthetic oligonucleotide
ucauuaggucccauaauug

SEQ ID NO: 351997 - RNA, 19 nt, Artificial Sequence
  Description of Artificial Sequence: Synthetic oligonucleotide
caaugugucaaccuguaac

SEQ ID NO: 351998 - RNA, 19 nt, Artificial Sequence
  Description of Artificial Sequence: Synthetic oligonucleotide
auaguuaaagcaggagacc

SEQ ID NO: 351999 - RNA, 19 nt, Artificial Sequence
  Description of Artificial Sequence: Synthetic oligonucleotide
guugagucaccugaaaugg

SEQ ID NO: 352000 - RNA, 19 nt, Artificial Sequence
  Description of Artificial Sequence: Synthetic oligonucleotide
uaguugaucacucauccau

SEQ ID NO: 352001 - RNA, 19 nt, Artificial Sequence
  Description of Artificial Sequence: Synthetic oligonucleotide
uuuaagguagcaucacaug

SEQ ID NO: 352002 - RNA, 19 nt, Artificial Sequence
  Description of Artificial Sequence: Synthetic oligonucleotide
gaauggaugcacuagaaua

SEQ ID NO: 352003 - RNA, 19 nt, Artificial Sequence
  Description of Artificial Sequence: Synthetic oligonucleotide
cuaacuuuccacaucugug

SEQ ID NO: 352004 - RNA, 19 nt, Artificial Sequence
  Description of Artificial Sequence: Synthetic oligonucleotide
auuucuaacuuuccacauc

SEQ ID NO: 352005 - RNA, 19 nt, Artificial Sequence
  Description of Artificial Sequence: Synthetic oligonucleotide
agcaguuauuguccaaagc

SEQ ID NO: 352006 - RNA, 19 nt, Artificial Sequence
  Description of Artificial Sequence: Synthetic oligonucleotide
auuuugacccauuauuacu

SEQ ID NO: 352007 - RNA, 19 nt, Artificial Sequence
  Description of Artificial Sequence: Synthetic oligonucleotide
agucauaucccacaguuaa

SEQ ID NO: 352008 - RNA, 19 nt, Artificial Sequence
  Description of Artificial Sequence: Synthetic oligonucleotide
accaaguuagagugaagac

SEQ ID NO: 352009 - RNA, 19 nt, Artificial Sequence
  Description of Artificial Sequence: Synthetic oligonucleotide
ugacuuuaagguagcauca

SEQ ID NO: 352010 - RNA, 19 nt, Artificial Sequence
  Description of Artificial Sequence: Synthetic oligonucleotide
aaugaauggagggagguaa

SEQ ID NO: 352011 - RNA, 19 nt, Artificial Sequence
  Description of Artificial Sequence: Synthetic oligonucleotide
ugaucacucauccauugac

SEQ ID NO: 352012 - RNA, 19 nt, Artificial Sequence
  Description of Artificial Sequence: Synthetic oligonucleotide
gaucacauagcagugaaca

SEQ ID NO: 352013 - RNA, 19 nt, Artificial Sequence
  Description of Artificial Sequence: Synthetic oligonucleotide
aaccaaguuagagugaaga

SEQ ID NO: 352014 - RNA, 19 nt, Artificial Sequence
  Description of Artificial Sequence: Synthetic oligonucleotide
aguuagaaggggaugcacc

SEQ ID NO: 352015 - RNA, 19 nt, Artificial Sequence
  Description of Artificial Sequence: Synthetic oligonucleotide
uauuaguugaucacucauc

SEQ ID NO: 352016 - RNA, 19 nt, Artificial Sequence
  Description of Artificial Sequence: Synthetic oligonucleotide
aacuuaagucuucucagau

SEQ ID NO: 352017 - RNA, 19 nt, Artificial Sequence
  Description of Artificial Sequence: Synthetic oligonucleotide
guuuuauauauauauauau

SEQ ID NO: 352018 - RNA, 19 nt, Artificial Sequence
  Description of Artificial Sequence: Synthetic oligonucleotide
gaaguggagacauaucaca

SEQ ID NO: 352019 - RNA, 19 nt, Artificial Sequence
  Description of Artificial Sequence: Synthetic oligonucleotide
cagaacauugugcuggagg

SEQ ID NO: 352020 - RNA, 19 nt, Artificial Sequence
  Description of Artificial Sequence: Synthetic oligonucleotide
aucacuaaguuccuuauua

SEQ ID NO: 352021 - RNA, 19 nt, Artificial Sequence
  Description of Artificial Sequence: Synthetic oligonucleotide
ugguuuagucucauaacca

SEQ ID NO: 352022 - RNA, 19 nt, Artificial Sequence
  Description of Artificial Sequence: Synthetic oligonucleotide
ucauguaaccucaaaucuc

SEQ ID NO: 352023 - RNA, 19 nt, Artificial Sequence
  Description of Artificial Sequence: Synthetic oligonucleotide
aaaucacuaaguuccuuau

SEQ ID NO: 352024 - RNA, 19 nt, Artificial Sequence
  Description of Artificial Sequence: Synthetic oligonucleotide
acauguuucaaaccugcug

SEQ ID NO: 352025 - RNA, 19 nt, Artificial Sequence
  Description of Artificial Sequence: Synthetic oligonucleotide
uuuaacugaacauggcaau

SEQ ID NO: 352026 - RNA, 19 nt, Artificial Sequence
  Description of Artificial Sequence: Synthetic oligonucleotide
uuuuguaaauuuugaccca

SEQ ID NO: 352027 - RNA, 19 nt, Artificial Sequence
  Description of Artificial Sequence: Synthetic oligonucleotide
ggccacauaauacacaugc

SEQ ID NO: 352028 - RNA, 19 nt, Artificial Sequence
  Description of Artificial Sequence: Synthetic oligonucleotide
uccuuauuaauccguuuca

SEQ ID NO: 352029 - RNA, 19 nt, Artificial Sequence
  Description of Artificial Sequence: Synthetic oligonucleotide
aaucccaacaguauauaca

SEQ ID NO: 352030 - RNA, 19 nt, Artificial Sequence
  Description of Artificial Sequence: Synthetic oligonucleotide
cugaaaugguaucuguugc

SEQ ID NO: 352031 - RNA, 19 nt, Artificial Sequence
  Description of Artificial Sequence: Synthetic oligonucleotide
caaauguggaaguggagac

SEQ ID NO: 352032 - RNA, 19 nt, Artificial Sequence
  Description of Artificial Sequence: Synthetic oligonucleotide
cuaacucauugguuuaugc

SEQ ID NO: 352033 - RNA, 19 nt, Artificial Sequence
  Description of Artificial Sequence: Synthetic oligonucleotide
ucacaugugcuagaaauca

SEQ ID NO: 352034 - RNA, 19 nt, Artificial Sequence
  Description of Artificial Sequence: Synthetic oligonucleotide
acucccaaguuuuauauau

SEQ ID NO: 352035 - RNA, 19 nt, Artificial Sequence
  Description of Artificial Sequence: Synthetic oligonucleotide
uuggaagauagauuaacua

SEQ ID NO: 352036 - RNA, 19 nt, Artificial Sequence
  Description of Artificial Sequence: Synthetic oligonucleotide
aauggaugcacuagaauaa

SEQ ID NO: 352037 - RNA, 19 nt, Artificial Sequence
  Description of Artificial Sequence: Synthetic oligonucleotide
aagcaguuauuguccaaag

SEQ ID NO: 352038 - RNA, 19 nt, Artificial Sequence
  Description of Artificial Sequence: Synthetic oligonucleotide
agcacauuaaagcuacacu

SEQ ID NO: 352039 - RNA, 19 nt, Artificial Sequence
  Description of Artificial Sequence: Synthetic oligonucleotide
gacauaucacaugugcuag

SEQ ID NO: 352040 - RNA, 19 nt, Artificial Sequence
  Description of Artificial Sequence: Synthetic oligonucleotide
guuagagugaagacauugg

SEQ ID NO: 352041 - RNA, 19 nt, Artificial Sequence
  Description of Artificial Sequence: Synthetic oligonucleotide
uaguuaaagcaggagacca

SEQ ID NO: 352042 - RNA, 19 nt, Artificial Sequence
  Description of Artificial Sequence: Synthetic oligonucleotide
uacuaggagagcuauuagu

SEQ ID NO: 352043 - RNA, 19 nt, Artificial Sequence
  Description of Artificial Sequence: Synthetic oligonucleotide
uccauauacauguuucaaa

SEQ ID NO: 352044 - RNA, 19 nt, Artificial Sequence
  Description of Artificial Sequence: Synthetic oligonucleotide
ugugaucuuagaauaucaa

SEQ ID NO: 352045 - RNA, 19 nt, Artificial Sequence
  Description of Artificial Sequence: Synthetic oligonucleotide
uugacaacucgcaucauuu

SEQ ID NO: 352046 - RNA, 19 nt, Artificial Sequence
  Description of Artificial Sequence: Synthetic oligonucleotide
gaugucaaacaaugaagca

SEQ ID NO: 352047 - RNA, 19 nt, Artificial Sequence
  Description of Artificial Sequence: Synthetic oligonucleotide
uuacuaggagagcuauuag

SEQ ID NO: 352048 - RNA, 19 nt, Artificial Sequence
  Description of Artificial Sequence: Synthetic oligonucleotide
cuugauuaucccagcggcg

SEQ ID NO: 352049 - RNA, 19 nt, Artificial Sequence
  Description of Artificial Sequence: Synthetic oligonucleotide
auacugauuaauccaggca

SEQ ID NO: 352050 - RNA, 19 nt, Artificial Sequence
  Description of Artificial Sequence: Synthetic oligonucleotide
ucauaucccacaguuaagu

SEQ ID NO: 352051 - RNA, 19 nt, Artificial Sequence
  Description of Artificial Sequence: Synthetic oligonucleotide
cucacgacaacucccacac

SEQ ID NO: 352052 - RNA, 19 nt, Artificial Sequence
  Description of Artificial Sequence: Synthetic oligonucleotide
guuucagcgccauagucug

SEQ ID NO: 352053 - RNA, 19 nt, Artificial Sequence
  Description of Artificial Sequence: Synthetic oligonucleotide
acuacagauuuaguggcac

SEQ ID NO: 352054 - RNA, 19 nt, Artificial Sequence
  Description of Artificial Sequence: Synthetic oligonucleotide
gcuauauuaaacaguauug

SEQ ID NO: 352055 - RNA, 19 nt, Artificial Sequence
  Description of Artificial Sequence: Synthetic oligonucleotide
ugacccauuauuacuccca

SEQ ID NO: 352056 - RNA, 19 nt, Artificial Sequence
  Description of Artificial Sequence: Synthetic oligonucleotide
gagagcuauuaguugauca

SEQ ID NO: 352057 - RNA, 19 nt, Artificial Sequence
  Description of Artificial Sequence: Synthetic oligonucleotide
augaagcaaaucccaacag

SEQ ID NO: 352058 - RNA, 19 nt, Artificial Sequence
  Description of Artificial Sequence: Synthetic oligonucleotide
augagcaugugaaugaaug

SEQ ID NO: 352059 - RNA, 19 nt, Artificial Sequence
  Description of Artificial Sequence: Synthetic oligonucleotide
ugugucaaccuguaacaga

SEQ ID NO: 352060 - RNA, 19 nt, Artificial Sequence
  Description of Artificial Sequence: Synthetic oligonucleotide
gucaaccuguaacagacug

SEQ ID NO: 352061 - RNA, 19 nt, Artificial Sequence
  Description of Artificial Sequence: Synthetic oligonucleotide
auucaauaccaauucucca

SEQ ID NO: 352062 - RNA, 19 nt, Artificial Sequence
  Description of Artificial Sequence: Synthetic oligonucleotide
gaauuagggugaagaaugg

SEQ ID NO: 352063 - RNA, 19 nt, Artificial Sequence
  Description of Artificial Sequence: Synthetic oligonucleotide
uguuagagcagugaggauu

SEQ ID NO: 352064 - RNA, 19 nt, Artificial Sequence
  Description of Artificial Sequence: Synthetic oligonucleotide
gacauuggccacauaauac

SEQ ID NO: 352065 - RNA, 19 nt, Artificial Sequence
  Description of Artificial Sequence: Synthetic oligonucleotide
aaggggaugcaccuggaaa

SEQ ID NO: 352066 - RNA, 19 nt, Artificial Sequence
  Description of Artificial Sequence: Synthetic oligonucleotide
gaugugacagcugagcauc

SEQ ID NO: 352067 - RNA, 19 nt, Artificial Sequence
  Description of Artificial Sequence: Synthetic oligonucleotide
uguaaccucaaaucucuaa

SEQ ID NO: 352068 - RNA, 19 nt, Artificial Sequence
  Description of Artificial Sequence: Synthetic oligonucleotide
ucucaauggauagucauau

SEQ ID NO: 352069 - RNA, 19 nt, Artificial Sequence
  Description of Artificial Sequence: Synthetic oligonucleotide
acaagaauggaugcacuag

SEQ ID NO: 352070 - RNA, 19 nt, Artificial Sequence
  Description of Artificial Sequence: Synthetic oligonucleotide
aaguccauuuaugaacucu

SEQ ID NO: 352071 - RNA, 19 nt, Artificial Sequence
  Description of Artificial Sequence: Synthetic oligonucleotide
aguauaucauguaaccuca

SEQ ID NO: 352072 - RNA, 19 nt, Artificial Sequence
  Description of Artificial Sequence: Synthetic oligonucleotide
auaauuguggcuugccaau

SEQ ID NO: 352073 - RNA, 19 nt, Artificial Sequence
  Description of Artificial Sequence: Synthetic oligonucleotide
agguuauucugacuuuaag

SEQ ID NO: 352074 - RNA, 19 nt, Artificial Sequence
  Description of Artificial Sequence: Synthetic oligonucleotide
auagcacuuguacaaacaa

SEQ ID NO: 352075 - RNA, 19 nt, Artificial Sequence
  Description of Artificial Sequence: Synthetic oligonucleotide
cauguuagagcagugagga

SEQ ID NO: 352076 - RNA, 19 nt, Artificial Sequence
  Description of Artificial Sequence: Synthetic oligonucleotide
ugguaaugcccuuauuacu

SEQ ID NO: 352077 - RNA, 19 nt, Artificial Sequence
  Description of Artificial Sequence: Synthetic oligonucleotide
ccauauacauguuucaaac

SEQ ID NO: 352078 - RNA, 19 nt, Artificial Sequence
  Description of Artificial Sequence: Synthetic oligonucleotide
auuacuaggagagcuauua

SEQ ID NO: 352079 - RNA, 19 nt, Artificial Sequence
  Description of Artificial Sequence: Synthetic oligonucleotide
auaauacacaugcuccagu

SEQ ID NO: 352080 - RNA, 19 nt, Artificial Sequence
  Description of Artificial Sequence: Synthetic oligonucleotide
acuaucccgauguguacuc

SEQ ID NO: 352081 - RNA, 19 nt, Artificial Sequence
  Description of Artificial Sequence: Synthetic oligonucleotide
guuaagucacuucaacaca

SEQ ID NO: 352082 - RNA, 19 nt, Artificial Sequence
  Description of Artificial Sequence: Synthetic oligonucleotide
uugauuaucccagcggcga

SEQ ID NO: 352083 - RNA, 19 nt, Artificial Sequence
  Description of Artificial Sequence: Synthetic oligonucleotide
ucaauuacuaggagagcua

SEQ ID NO: 352084 - RNA, 19 nt, Artificial Sequence
  Description of Artificial Sequence: Synthetic oligonucleotide
ugagucaccugaaauggua

SEQ ID NO: 352085 - RNA, 19 nt, Artificial Sequence
  Description of Artificial Sequence: Synthetic oligonucleotide
acaauccaauagcauugac

SEQ ID NO: 352086 - RNA, 19 nt, Artificial Sequence
  Description of Artificial Sequence: Synthetic oligonucleotide
auauauauauauauauauu

SEQ ID NO: 352087 - RNA, 19 nt, Artificial Sequence
  Description of Artificial Sequence: Synthetic oligonucleotide
aagcuacacuauuugaaua

SEQ ID NO: 352088 - RNA, 19 nt, Artificial Sequence
  Description of Artificial Sequence: Synthetic oligonucleotide
uccaucucaauggauaguc

SEQ ID NO: 352089 - RNA, 19 nt, Artificial Sequence
  Description of Artificial Sequence: Synthetic oligonucleotide
agcauugacuuuuauucau

SEQ ID NO: 352090 - RNA, 19 nt, Artificial Sequence
  Description of Artificial Sequence: Synthetic oligonucleotide
uggaugcacuagaauaaug

SEQ ID NO: 352091 - RNA, 19 nt, Artificial Sequence
  Description of Artificial Sequence: Synthetic oligonucleotide
ugagacccuauuuuggaau

SEQ ID NO: 352092 - RNA, 19 nt, Artificial Sequence
  Description of Artificial Sequence: Synthetic oligonucleotide
ucaaccuguaacagacugu

SEQ ID NO: 352093 - RNA, 19 nt, Artificial Sequence
  Description of Artificial Sequence: Synthetic oligonucleotide
uucaaaccugcugaguccc

SEQ ID NO: 352094 - RNA, 19 nt, Artificial Sequence
  Description of Artificial Sequence: Synthetic oligonucleotide
aaaucaaauacaagacuua

SEQ ID NO: 352095 - RNA, 19 nt, Artificial Sequence
  Description of Artificial Sequence: Synthetic oligonucleotide
ggaugcacuagaauaaugc

SEQ ID NO: 352096 - RNA, 19 nt, Artificial Sequence
  Description of Artificial Sequence: Synthetic oligonucleotide
agcuauuaguugaucacuc

SEQ ID NO: 352097 - RNA, 19 nt, Artificial Sequence
  Description of Artificial Sequence: Synthetic oligonucleotide
uuauuccagcuauaaugca

SEQ ID NO: 352098 - RNA, 19 nt, Artificial Sequence
  Description of Artificial Sequence: Synthetic oligonucleotide
uggaucgucucuucucucc

SEQ ID NO: 352099 - RNA, 19 nt, Artificial Sequence
  Description of Artificial Sequence: Synthetic oligonucleotide
gaacuuaagucuucucaga

SEQ ID NO: 352100 - RNA, 19 nt, Artificial Sequence
  Description of Artificial Sequence: Synthetic oligonucleotide
gugucaaccuguaacagac

SEQ ID NO: 352101 - RNA, 19 nt, Artificial Sequence
  Description of Artificial Sequence: Synthetic oligonucleotide
uuaguugaucacucaucca

SEQ ID NO: 352102 - RNA, 19 nt, Artificial Sequence
  Description of Artificial Sequence: Synthetic oligonucleotide
ugauuaucccagcggcgag

SEQ ID NO: 352103 - RNA, 19 nt, Artificial Sequence
  Description of Artificial Sequence: Synthetic oligonucleotide
caacucgcaucauuuauuc

SEQ ID NO: 352104 - RNA, 19 nt, Artificial Sequence
  Description of Artificial Sequence: Synthetic oligonucleotide
uguuaaguguacagaugaa

SEQ ID NO: 352105 - RNA, 19 nt, Artificial Sequence
  Description of Artificial Sequence: Synthetic oligonucleotide
cauaauuguggcuugccaa

SEQ ID NO: 352106 - RNA, 19 nt, Artificial Sequence
  Description of Artificial Sequence: Synthetic oligonucleotide
auuaggucccauaauugug

SEQ ID NO: 352107 - RNA, 19 nt, Artificial Sequence
  Description of Artificial Sequence: Synthetic oligonucleotide
uugaucacucauccauuga

SEQ ID NO: 352108 - RNA, 19 nt, Artificial Sequence
  Description of Artificial Sequence: Synthetic oligonucleotide
aguuaaagcaggagaccac

SEQ ID NO: 352109 - RNA, 19 nt, Artificial Sequence
  Description of Artificial Sequence: Synthetic oligonucleotide
guuuagucucauaaccaag

SEQ ID NO: 352110 - RNA, 19 nt, Artificial Sequence
  Description of Artificial Sequence: Synthetic oligonucleotide
agcaugugaaugaauggag

SEQ ID NO: 352111 - RNA, 19 nt, Artificial Sequence
  Description of Artificial Sequence: Synthetic oligonucleotide
aaauguggaaguggagaca

SEQ ID NO: 352112 - RNA, 19 nt, Artificial Sequence
  Description of Artificial Sequence: Synthetic oligonucleotide
agacauuggccacauaaua

SEQ ID NO: 352113 - RNA, 19 nt, Artificial Sequence
  Description of Artificial Sequence: Synthetic oligonucleotide
aguuuuauauauauauaua

SEQ ID NO: 352114 - RNA, 19 nt, Artificial Sequence
  Description of Artificial Sequence: Synthetic oligonucleotide
auaaaucaggucaagcaau

SEQ ID NO: 352115 - RNA, 19 nt, Artificial Sequence
  Description of Artificial Sequence: Synthetic oligonucleotide
agaauaaugcugcuuccuu

SEQ ID NO: 352116 - RNA, 19 nt, Artificial Sequence
  Description of Artificial Sequence: Synthetic oligonucleotide
gauuguuucccauacugau

SEQ ID NO: 352117 - RNA, 19 nt, Artificial Sequence
  Description of Artificial Sequence: Synthetic oligonucleotide
aacaauccaauagcauuga

SEQ ID NO: 352118 - RNA, 19 nt, Artificial Sequence
  Description of Artificial Sequence: Synthetic oligonucleotide
auggauagucauaucccac

SEQ ID NO: 352119 - RNA, 19 nt, Artificial Sequence
  Description of Artificial Sequence: Synthetic oligonucleotide
auguugagucaccugaaau

SEQ ID NO: 352120 - RNA, 19 nt, Artificial Sequence
  Description of Artificial Sequence: Synthetic oligonucleotide
gauuaucccagcggcgagg

SEQ ID NO: 352121 - RNA, 19 nt, Artificial Sequence
  Description of Artificial Sequence: Synthetic oligonucleotide
aaaggcccggccgaaaacu

SEQ ID NO: 352122 - RNA, 19 nt, Artificial Sequence
  Description of Artificial Sequence: Synthetic oligonucleotide
uugacccauuauuacuccc

SEQ ID NO: 352123 - RNA, 19 nt, Artificial Sequence
  Description of Artificial Sequence: Synthetic oligonucleotide
gauagcacuuguacaaaca

SEQ ID NO: 352124 - RNA, 19 nt, Artificial Sequence
  Description of Artificial Sequence: Synthetic oligonucleotide
uaacagacugugcacuuua

SEQ ID NO: 352125 - RNA, 19 nt, Artificial Sequence
  Description of Artificial Sequence: Synthetic oligonucleotide
aaacaagaauggaugcacu

SEQ ID NO: 352126 - RNA, 19 nt, Artificial Sequence
  Description of Artificial Sequence: Synthetic oligonucleotide
auucauguugagucaccug

SEQ ID NO: 352127 - RNA, 19 nt, Artificial Sequence
  Description of Artificial Sequence: Synthetic oligonucleotide
uaaacaguauuggaagaua

SEQ ID NO: 352128 - RNA, 19 nt, Artificial Sequence
  Description of Artificial Sequence: Synthetic oligonucleotide
agcuuauaauucugcauaa

SEQ ID NO: 352129 - RNA, 19 nt, Artificial Sequence
  Description of Artificial Sequence: Synthetic oligonucleotide
aaguuccuuauuaauccgu

SEQ ID NO: 352130 - RNA, 19 nt, Artificial Sequence
  Description of Artificial Sequence: Synthetic oligonucleotide
agaaugguaaugcccuuau

SEQ ID NO: 352131 - RNA, 19 nt, Artificial Sequence
  Description of Artificial Sequence: Synthetic oligonucleotide
cuauuugaauagcuuauaa

SEQ ID NO: 352132 - RNA, 19 nt, Artificial Sequence
  Description of Artificial Sequence: Synthetic oligonucleotide
uuaguuagaaggggaugca

SEQ ID NO: 352133 - RNA, 19 nt, Artificial Sequence
  Description of Artificial Sequence: Synthetic oligonucleotide
ucagcauguuagagcagug

SEQ ID NO: 352134 - RNA, 19 nt, Artificial Sequence
  Description of Artificial Sequence: Synthetic oligonucleotide
cccaaguccauuuaugaac

SEQ ID NO: 352135 - RNA, 19 nt, Artificial Sequence
  Description of Artificial Sequence: Synthetic oligonucleotide
uguucugcugaugcuauaa

SEQ ID NO: 352136 - RNA, 19 nt, Artificial Sequence
  Description of Artificial Sequence: Synthetic oligonucleotide
augcuauaauucaauacca

SEQ ID NO: 352137 - RNA, 19 nt, Artificial Sequence
  Description of Artificial Sequence: Synthetic oligonucleotide
ugucauuaggucccauaau

SEQ ID NO: 352138 - RNA, 19 nt, Artificial Sequence
  Description of Artificial Sequence: Synthetic oligonucleotide
aacaggucauuccuuuauu

SEQ ID NO: 352139 - RNA, 19 nt, Artificial Sequence
  Description of Artificial Sequence: Synthetic oligonucleotide
acuaggagagcuauuaguu

SEQ ID NO: 352140 - RNA, 19 nt, Artificial Sequence
  Description of Artificial Sequence: Synthetic oligonucleotide
caaguuuuauauauauaua

SEQ ID NO: 352141 - RNA, 19 nt, Artificial Sequence
  Description of Artificial Sequence: Synthetic oligonucleotide
augugcuagaaaucaaaua

SEQ ID NO: 352142 - RNA, 19 nt, Artificial Sequence
  Description of Artificial Sequence: Synthetic oligonucleotide
ucgcaucauuuauucagug

SEQ ID NO: 352143 - RNA, 19 nt, Artificial Sequence
  Description of Artificial Sequence: Synthetic oligonucleotide
ccugaaaugguaucuguug

SEQ ID NO: 352144 - RNA, 19 nt, Artificial Sequence
  Description of Artificial Sequence: Synthetic oligonucleotide
cucauaaccaaguuagagu

SEQ ID NO: 352145 - RNA, 19 nt, Artificial Sequence
  Description of Artificial Sequence: Synthetic oligonucleotide
uccauucucuguagaacaa

SEQ ID NO: 352146 - RNA, 19 nt, Artificial Sequence
  Description of Artificial Sequence: Synthetic oligonucleotide
caaaucacuaaguuccuua

SEQ ID NO: 352147 - RNA, 19 nt, Artificial Sequence
  Description of Artificial Sequence: Synthetic oligonucleotide
uaaugcccuuauuacuaca

SEQ ID NO: 352148 - RNA, 19 nt, Artificial Sequence
  Description of Artificial Sequence: Synthetic oligonucleotide
cauaucccacaguuaaguc

SEQ ID NO: 352149 - RNA, 19 nt, Artificial Sequence
  Description of Artificial Sequence: Synthetic oligonucleotide
agauuaacuaauagcucca

SEQ ID NO: 352150 - RNA, 19 nt, Artificial Sequence
  Description of Artificial Sequence: Synthetic oligonucleotide
gcagugaacaaauggauaa

SEQ ID NO: 352151 - RNA, 19 nt, Artificial Sequence
  Description of Artificial Sequence: Synthetic oligonucleotide
caucacauggcauacuucu

SEQ ID NO: 352152 - RNA, 19 nt, Artificial Sequence
  Description of Artificial Sequence: Synthetic oligonucleotide
gcacauuaaagcuacacua

SEQ ID NO: 352153 - RNA, 19 nt, Artificial Sequence
  Description of Artificial Sequence: Synthetic oligonucleotide
cauccauugacaacucgca

SEQ ID NO: 352154 - RNA, 19 nt, Artificial Sequence
  Description of Artificial Sequence: Synthetic oligonucleotide
uuaacugaacauggcaaua

SEQ ID NO: 352155 - RNA, 19 nt, Artificial Sequence
  Description of Artificial Sequence: Synthetic oligonucleotide
aaguggagacauaucacau

SEQ ID NO: 352156 - RNA, 19 nt, Artificial Sequence
  Description of Artificial Sequence: Synthetic oligonucleotide
ugaggucugauaggggagc

SEQ ID NO: 352157 - RNA, 19 nt, Artificial Sequence
  Description of Artificial Sequence: Synthetic oligonucleotide
cuucaacacagccucacga

SEQ ID NO: 352158 - RNA, 19 nt, Artificial Sequence
  Description of Artificial Sequence: Synthetic oligonucleotide
uaauuguggcuugccaaug

SEQ ID NO: 352159 - RNA, 19 nt, Artificial Sequence
  Description of Artificial Sequence: Synthetic oligonucleotide
guaaugcccuuauuacuac

SEQ ID NO: 352160 - RNA, 19 nt, Artificial Sequence
  Description of Artificial Sequence: Synthetic oligonucleotide
augugaaugaauggaggga

SEQ ID NO: 352161 - RNA, 19 nt, Artificial Sequence
  Description of Artificial Sequence: Synthetic oligonucleotide
cuauaaugcagguuauucu

SEQ ID NO: 352162 - RNA, 19 nt, Artificial Sequence
  Description of Artificial Sequence: Synthetic oligonucleotide
uucuaacuuuccacaucug

SEQ ID NO: 352163 - RNA, 19 nt, Artificial Sequence
  Description of Artificial Sequence: Synthetic oligonucleotide
gauggaucgucucuucucu

SEQ ID NO: 352164 - RNA, 19 nt, Artificial Sequence
  Description of Artificial Sequence: Synthetic oligonucleotide
acaaaggauuguuucccau

SEQ ID NO: 352165 - RNA, 19 nt, Artificial Sequence
  Description of Artificial Sequence: Synthetic oligonucleotide
aggcagcuaacucauuggu

SEQ ID NO: 352166 - RNA, 19 nt, Artificial Sequence
  Description of Artificial Sequence: Synthetic oligonucleotide
uguuucaaaccugcugagu

SEQ ID NO: 352167 - RNA, 19 nt, Artificial Sequence
  Description of Artificial Sequence: Synthetic oligonucleotide
ugaauggagggagguaaac

SEQ ID NO: 352168 - RNA, 19 nt, Artificial Sequence
  Description of Artificial Sequence: Synthetic oligonucleotide
gugaggauugguuuagucu

SEQ ID NO: 352169 - RNA, 19 nt, Artificial Sequence
  Description of Artificial Sequence: Synthetic oligonucleotide
cuuuaagguagcaucacau

SEQ ID NO: 352170 - RNA, 19 nt, Artificial Sequence
  Description of Artificial Sequence: Synthetic oligonucleotide
uccaagccuccuaacaauu

SEQ ID NO: 352171 - RNA, 19 nt, Artificial Sequence
  Description of Artificial Sequence: Synthetic oligonucleotide
acauaucacaugugcuaga

SEQ ID NO: 352172 - RNA, 19 nt, Artificial Sequence
  Description of Artificial Sequence: Synthetic oligonucleotide
gcaugugaaugaauggagg

SEQ ID NO: 352173 - RNA, 19 nt, Artificial Sequence
  Description of Artificial Sequence: Synthetic oligonucleotide
guuagaaggggaugcaccu

SEQ ID NO: 352174 - RNA, 19 nt, Artificial Sequence
  Description of Artificial Sequence: Synthetic oligonucleotide
uuggaucacauagcaguga

SEQ ID NO: 352175 - RNA, 19 nt, Artificial Sequence
  Description of Artificial Sequence: Synthetic oligonucleotide
augugucaaccuguaacag

SEQ ID NO: 352176 - RNA, 19 nt, Artificial Sequence
  Description of Artificial Sequence: Synthetic oligonucleotide
uuagaaggggaugcaccug

SEQ ID NO: 352177 - RNA, 19 nt, Artificial Sequence
  Description of Artificial Sequence: Synthetic oligonucleotide
gucauuaggucccauaauu

SEQ ID NO: 352178 - RNA, 19 nt, Artificial Sequence
  Description of Artificial Sequence: Synthetic oligonucleotide
uaucccgauguguacucaa

SEQ ID NO: 352179 - RNA, 19 nt, Artificial Sequence
  Description of Artificial Sequence: Synthetic oligonucleotide
aggguguuugacuuccaau

SEQ ID NO: 352180 - RNA, 19 nt, Artificial Sequence
  Description of Artificial Sequence: Synthetic oligonucleotide
acccauuauuacucccaag

SEQ ID NO: 352181 - RNA, 19 nt, Artificial Sequence
  Description of Artificial Sequence: Synthetic oligonucleotide
uaguuagaaggggaugcac

SEQ ID NO: 352182 - RNA, 19 nt, Artificial Sequence
  Description of Artificial Sequence: Synthetic oligonucleotide
gguuuagucucauaaccaa

SEQ ID NO: 352183 - RNA, 19 nt, Artificial Sequence
  Description of Artificial Sequence: Synthetic oligonucleotide
cugucauuaggucccauaa

SEQ ID NO: 352184 - RNA, 19 nt, Artificial Sequence
  Description of Artificial Sequence: Synthetic oligonucleotide
uccguuucagcgccauagu

SEQ ID NO: 352185 - RNA, 19 nt, Artificial Sequence
  Description of Artificial Sequence: Synthetic oligonucleotide
aucaucauuugaugucaaa

SEQ ID NO: 352186 - RNA, 19 nt, Artificial Sequence
  Description of Artificial Sequence: Synthetic oligonucleotide
acaucaguuaugagcauaa

SEQ ID NO: 352187 - RNA, 19 nt, Artificial Sequence
  Description of Artificial Sequence: Synthetic oligonucleotide
ccagcuauaaugcagguua

SEQ ID NO: 352188 - RNA, 19 nt, Artificial Sequence
  Description of Artificial Sequence: Synthetic oligonucleotide
ugucaaccuguaacagacu

SEQ ID NO: 352189 - RNA, 19 nt, Artificial Sequence
  Description of Artificial Sequence: Synthetic oligonucleotide
aggauggaucgucucuucu

SEQ ID NO: 352190 - RNA, 19 nt, Artificial Sequence
  Description of Artificial Sequence: Synthetic oligonucleotide
acuauuugaauagcuuaua

SEQ ID NO: 352191 - RNA, 19 nt, Artificial Sequence
  Description of Artificial Sequence: Synthetic oligonucleotide
guccauuuaugaacucuag

SEQ ID NO: 352192 - RNA, 19 nt, Artificial Sequence
  Description of Artificial Sequence: Synthetic oligonucleotide
ugacaacucgcaucauuua

SEQ ID NO: 352193 - RNA, 19 nt, Artificial Sequence
  Description of Artificial Sequence: Synthetic oligonucleotide
ucacgggccaaaucacuaa

SEQ ID NO: 352194 - RNA, 19 nt, Artificial Sequence
  Description of Artificial Sequence: Synthetic oligonucleotide
gacaacucgcaucauuuau

SEQ ID NO: 352195 - RNA, 19 nt, Artificial Sequence
  Description of Artificial Sequence: Synthetic oligonucleotide
uuaauccguuucagcgcca

SEQ ID NO: 352196 - RNA, 19 nt, Artificial Sequence
  Description of Artificial Sequence: Synthetic oligonucleotide
augaggucugauaggggag

SEQ ID NO: 352197 - RNA, 19 nt, Artificial Sequence
  Description of Artificial Sequence: Synthetic oligonucleotide
gucauaucccacaguuaag

SEQ ID NO: 352198 - RNA, 19 nt, Artificial Sequence
  Description of Artificial Sequence: Synthetic oligonucleotide
aaggcccggccgaaaacuc

SEQ ID NO: 352199 - RNA, 19 nt, Artificial Sequence
  Description of Artificial Sequence: Synthetic oligonucleotide
auuaucccagcggcgagga

SEQ ID NO: 352200 - RNA, 19 nt, Artificial Sequence
  Description of Artificial Sequence: Synthetic oligonucleotide
aguccauuuaugaacucua

SEQ ID NO: 352201 - RNA, 19 nt, Artificial Sequence
  Description of Artificial Sequence: Synthetic oligonucleotide
gguaaugcccuuauuacua

SEQ ID NO: 352202 - RNA, 19 nt, Artificial Sequence
  Description of Artificial Sequence: Synthetic oligonucleotide
aagggguagucuguaggaa

SEQ ID NO: 352203 - RNA, 19 nt, Artificial Sequence
  Description of Artificial Sequence: Synthetic oligonucleotide
cucaauggauagucauauc

SEQ ID NO: 352204 - RNA, 19 nt, Artificial Sequence
  Description of Artificial Sequence: Synthetic oligonucleotide
agagcagugaggauugguu

SEQ ID NO: 352205 - RNA, 19 nt, Artificial Sequence
  Description of Artificial Sequence: Synthetic oligonucleotide
gacccauuauuacucccaa

SEQ ID NO: 352206 - RNA, 19 nt, Artificial Sequence
  Description of Artificial Sequence: Synthetic oligonucleotide
gacaacucccacaccaaaa

SEQ ID NO: 352207 - RNA, 19 nt, Artificial Sequence
  Description of Artificial Sequence: Synthetic oligonucleotide
uucgccgggcuccucacua

SEQ ID NO: 352208 - RNA, 19 nt, Artificial Sequence
  Description of Artificial Sequence: Synthetic oligonucleotide
ggucugauaggggagcagc

SEQ ID NO: 352209 - RNA, 19 nt, Artificial Sequence
  Description of Artificial Sequence: Synthetic oligonucleotide
augugacagcugagcaucc

SEQ ID NO: 352210 - RNA, 19 nt, Artificial Sequence
  Description of Artificial Sequence: Synthetic oligonucleotide
acggggcucacgcgcacgg

SEQ ID NO: 352211 - RNA, 19 nt, Artificial Sequence
  Description of Artificial Sequence: Synthetic oligonucleotide
aauuacuaggagagcuauu

SEQ ID NO: 352212 - RNA, 19 nt, Artificial Sequence
  Description of Artificial Sequence: Synthetic oligonucleotide
cacuauuugaauagcuuau

SEQ ID NO: 352213 - RNA, 19 nt, Artificial Sequence
  Description of Artificial Sequence: Synthetic oligonucleotide
cuauuaguugaucacucau

SEQ ID NO: 352214 - RNA, 19 nt, Artificial Sequence
  Description of Artificial Sequence: Synthetic oligonucleotide
ggaaguggagacauaucac

SEQ ID NO: 352215 - RNA, 19 nt, Artificial Sequence
  Description of Artificial Sequence: Synthetic oligonucleotide
gucccauaauuguggcuug

SEQ ID NO: 352216 - RNA, 19 nt, Artificial Sequence
  Description of Artificial Sequence: Synthetic oligonucleotide
gcuauuaguugaucacuca

SEQ ID NO: 352217 - RNA, 19 nt, Artificial Sequence
  Description of Artificial Sequence: Synthetic oligonucleotide
gcuacacuauuugaauagc

SEQ ID NO: 352218 - RNA, 19 nt, Artificial Sequence
  Description of Artificial Sequence: Synthetic oligonucleotide
ggauggaucgucucuucuc

SEQ ID NO: 352219 - RNA, 19 nt, Artificial Sequence
  Description of Artificial Sequence: Synthetic oligonucleotide
gcuauaauucaauaccaau

SEQ ID NO: 352220 - RNA, 19 nt, Artificial Sequence
  Description of Artificial Sequence: Synthetic oligonucleotide
gaggauggaucgucucuuc

SEQ ID NO: 352221 - RNA, 19 nt, Artificial Sequence
  Description of Artificial Sequence: Synthetic oligonucleotide
auuguuucccauacugauu

SEQ ID NO: 352222 - RNA, 19 nt, Artificial Sequence
  Description of Artificial Sequence: Synthetic oligonucleotide
ucccauaauuguggcuugc

SEQ ID NO: 352223 - RNA, 19 nt, Artificial Sequence
  Description of Artificial Sequence: Synthetic oligonucleotide
gagcuauuaguugaucacu

SEQ ID NO: 352224 - RNA, 19 nt, Artificial Sequence
  Description of Artificial Sequence: Synthetic oligonucleotide
cacaguuaagucacuucaa

SEQ ID NO: 352225 - RNA, 19 nt, Artificial Sequence
  Description of Artificial Sequence: Synthetic oligonucleotide
ggucauuccuuuauugaca

SEQ ID NO: 352226 - RNA, 19 nt, Artificial Sequence
  Description of Artificial Sequence: Synthetic oligonucleotide
gucauuccuuuauugacau

SEQ ID NO: 352227 - RNA, 19 nt, Artificial Sequence
  Description of Artificial Sequence: Synthetic oligonucleotide
uuuucgccgggcuccucac

SEQ ID NO: 352228 - RNA, 19 nt, Artificial Sequence
  Description of Artificial Sequence: Synthetic oligonucleotide
aguuccuuauuaauccguu

SEQ ID NO: 352229 - RNA, 19 nt, Artificial Sequence
  Description of Artificial Sequence: Synthetic oligonucleotide
acaacucgcaucauuuauu

SEQ ID NO: 352230 - RNA, 19 nt, Artificial Sequence
  Description of Artificial Sequence: Synthetic oligonucleotide
ggaucgucucuucucuccc

SEQ ID NO: 352231 - RNA, 19 nt, Artificial Sequence
  Description of Artificial Sequence: Synthetic oligonucleotide
ggaagauagauuaacuaau

SEQ ID NO: 352232 - RNA, 19 nt, Artificial Sequence
  Description of Artificial Sequence: Synthetic oligonucleotide
ggcccuacggggcucacgc

SEQ ID NO: 352233 - RNA, 19 nt, Artificial Sequence
  Description of Artificial Sequence: Synthetic oligonucleotide
auggaugcacuagaauaau

SEQ ID NO: 352234 - RNA, 19 nt, Artificial Sequence
  Description of Artificial Sequence: Synthetic oligonucleotide
caaguccauuuaugaacuc

SEQ ID NO: 352235 - RNA, 19 nt, Artificial Sequence
  Description of Artificial Sequence: Synthetic oligonucleotide
gaugcaccuggaaaauaaa

SEQ ID NO: 352236 - RNA, 19 nt, Artificial Sequence
  Description of Artificial Sequence: Synthetic oligonucleotide
aucacauggcauacuucug

SEQ ID NO: 352237 - RNA, 19 nt, Artificial Sequence
  Description of Artificial Sequence: Synthetic oligonucleotide
caugugcuagaaaucaaau

SEQ ID NO: 352238 - RNA, 19 nt, Artificial Sequence
  Description of Artificial Sequence: Synthetic oligonucleotide
cuuuucgccgggcuccuca

SEQ ID NO: 352239 - RNA, 19 nt, Artificial Sequence
  Description of Artificial Sequence: Synthetic oligonucleotide
cagcggcgaggauggaucg

SEQ ID NO: 352240 - RNA, 19 nt, Artificial Sequence
  Description of Artificial Sequence: Synthetic oligonucleotide
auccaauagcauugacuuu

SEQ ID NO: 352241 - RNA, 19 nt, Artificial Sequence
  Description of Artificial Sequence: Synthetic oligonucleotide
aucucaauggauagucaua

SEQ ID NO: 352242 - RNA, 19 nt, Artificial Sequence
  Description of Artificial Sequence: Synthetic oligonucleotide
uuucagcgccauagucugu

SEQ ID NO: 352243 - RNA, 19 nt, Artificial Sequence
  Description of Artificial Sequence: Synthetic oligonucleotide
gcagcuaacucauugguuu

SEQ ID NO: 352244 - RNA, 19 nt, Artificial Sequence
  Description of Artificial Sequence: Synthetic oligonucleotide
cauguugagucaccugaaa

SEQ ID NO: 352245 - RNA, 19 nt, Artificial Sequence
  Description of Artificial Sequence: Synthetic oligonucleotide
uccagcuauaaugcagguu

SEQ ID NO: 352246 - RNA, 19 nt, Artificial Sequence
  Description of Artificial Sequence: Synthetic oligonucleotide
acauagcagugaacaaaug

SEQ ID NO: 352247 - RNA, 19 nt, Artificial Sequence
  Description of Artificial Sequence: Synthetic oligonucleotide
aguugaucacucauccauu

SEQ ID NO: 352248 - RNA, 19 nt, Artificial Sequence
  Description of Artificial Sequence: Synthetic oligonucleotide
cuccauauacauguuucaa

SEQ ID NO: 352249 - RNA, 19 nt, Artificial Sequence
  Description of Artificial Sequence: Synthetic oligonucleotide
cccauuauuacucccaagu

SEQ ID NO: 352250 - RNA, 19 nt, Artificial Sequence
  Description of Artificial Sequence: Synthetic oligonucleotide
auguuagagcagugaggau

SEQ ID NO: 352251 - RNA, 19 nt, Artificial Sequence
  Description of Artificial Sequence: Synthetic oligonucleotide
agcuaacucauugguuuau

SEQ ID NO: 352252 - RNA, 19 nt, Artificial Sequence
  Description of Artificial Sequence: Synthetic oligonucleotide
cucgcaucauuuauucagu

SEQ ID NO: 352253 - RNA, 19 nt, Artificial Sequence
  Description of Artificial Sequence: Synthetic oligonucleotide
uacggggcucacgcgcacg

SEQ ID NO: 352254 - RNA, 19 nt, Artificial Sequence
  Description of Artificial Sequence: Synthetic oligonucleotide
uuucgccgggcuccucacu

SEQ ID NO: 352255 - RNA, 19 nt, Artificial Sequence
  Description of Artificial Sequence: Synthetic oligonucleotide
gcuaacucauugguuuaug

SEQ ID NO: 352256 - RNA, 19 nt, Artificial Sequence
  Description of Artificial Sequence: Synthetic oligonucleotide
caucaucauuugaugucaa

SEQ ID NO: 352257 - RNA, 19 nt, Artificial Sequence
  Description of Artificial Sequence: Synthetic oligonucleotide
agcuauaaugcagguuauu

SEQ ID NO: 352258 - RNA, 19 nt, Artificial Sequence
  Description of Artificial Sequence: Synthetic oligonucleotide
augaauggagggagguaaa

SEQ ID NO: 352259 - RNA, 19 nt, Artificial Sequence
  Description of Artificial Sequence: Synthetic oligonucleotide
cucccaaguuuuauauaua

SEQ ID NO: 352260 - RNA, 19 nt, Artificial Sequence
  Description of Artificial Sequence: Synthetic oligonucleotide
ccaaguccauuuaugaacu

SEQ ID NO: 352261 - RNA, 19 nt, Artificial Sequence
  Description of Artificial Sequence: Synthetic oligonucleotide
cagcauguuagagcaguga

SEQ ID NO: 352262 - RNA, 19 nt, Artificial Sequence
  Description of Artificial Sequence: Synthetic oligonucleotide
agccuccuaacaauuuaaa

SEQ ID NO: 352263 - RNA, 19 nt, Artificial Sequence
  Description of Artificial Sequence: Synthetic oligonucleotide
gucucauaaccaaguuaga

SEQ ID NO: 352264 - RNA, 19 nt, Artificial Sequence
  Description of Artificial Sequence: Synthetic oligonucleotide
caauuacuaggagagcuau

SEQ ID NO: 352265 - RNA, 19 nt, Artificial Sequence
  Description of Artificial Sequence: Synthetic oligonucleotide
cugauuaauccaggcagcu

SEQ ID NO: 352266 - RNA, 19 nt, Artificial Sequence
  Description of Artificial Sequence: Synthetic oligonucleotide
cccuacggggcucacgcgc

SEQ ID NO: 352267 - RNA, 19 nt, Artificial Sequence
  Description of Artificial Sequence: Synthetic oligonucleotide
ccgaaaacucuugauuauc

SEQ ID NO: 352268 - RNA, 19 nt, Artificial Sequence
  Description of Artificial Sequence: Synthetic oligonucleotide
gugaaacuacagguucaga

SEQ ID NO: 352269 - RNA, 19 nt, Artificial Sequence
  Description of Artificial Sequence: Synthetic oligonucleotide
gcggcucugccagacacag

SEQ ID NO: 352270 - RNA, 19 nt, Artificial Sequence
  Description of Artificial Sequence: Synthetic oligonucleotide
cagcuaacucauugguuua

SEQ ID NO: 352271 - RNA, 19 nt, Artificial Sequence
  Description of Artificial Sequence: Synthetic oligonucleotide
gucacgggccaaaucacua

SEQ ID NO: 352272 - RNA, 19 nt, Artificial Sequence
  Description of Artificial Sequence: Synthetic oligonucleotide
uuaucccagcggcgaggau

SEQ ID NO: 352273 - RNA, 19 nt, Artificial Sequence
  Description of Artificial Sequence: Synthetic oligonucleotide
acgacaacucccacaccaa

SEQ ID NO: 352274 - RNA, 19 nt, Artificial Sequence
  Description of Artificial Sequence: Synthetic oligonucleotide
cccuuauuacuacagauuu

SEQ ID NO: 352275 - RNA, 19 nt, Artificial Sequence
  Description of Artificial Sequence: Synthetic oligonucleotide
ggaucacauagcagugaac

SEQ ID NO: 352276 - RNA, 19 nt, Artificial Sequence
  Description of Artificial Sequence: Synthetic oligonucleotide
agcagccggauaagaaaau

SEQ ID NO: 352277 - RNA, 19 nt, Artificial Sequence
  Description of Artificial Sequence: Synthetic oligonucleotide
ccguuucagcgccauaguc

SEQ ID NO: 352278 - RNA, 19 nt, Artificial Sequence
  Description of Artificial Sequence: Synthetic oligonucleotide
aucccgauguguacucaaa

SEQ ID NO: 352279 - RNA, 19 nt, Artificial Sequence
  Description of Artificial Sequence: Synthetic oligonucleotide
ggagagcuauuaguugauc

SEQ ID NO: 352280 - RNA, 19 nt, Artificial Sequence
  Description of Artificial Sequence: Synthetic oligonucleotide
ggcgcagaggggccggggc

SEQ ID NO: 352281 - RNA, 19 nt, Artificial Sequence
  Description of Artificial Sequence: Synthetic oligonucleotide
caaaccugcugagucccaa

SEQ ID NO: 352282 - RNA, 19 nt, Artificial Sequence
  Description of Artificial Sequence: Synthetic oligonucleotide
ggcgaggauggaucgucuc

SEQ ID NO: 352283 - RNA, 19 nt, Artificial Sequence
  Description of Artificial Sequence: Synthetic oligonucleotide
cuacggggcucacgcgcac

SEQ ID NO: 352284 - RNA, 19 nt, Artificial Sequence
  Description of Artificial Sequence: Synthetic oligonucleotide
cacuaucccgauguguacu

SEQ ID NO: 352285 - RNA, 19 nt, Artificial Sequence
  Description of Artificial Sequence: Synthetic oligonucleotide
cuaucccgauguguacuca

SEQ ID NO: 352286 - RNA, 19 nt, Artificial Sequence
  Description of Artificial Sequence: Synthetic oligonucleotide
ccucacgacaacucccaca

SEQ ID NO: 352287 - RNA, 19 nt, Artificial Sequence
  Description of Artificial Sequence: Synthetic oligonucleotide
ccgggcuccucacuauccc

SEQ ID NO: 352288 - RNA, 19 nt, Artificial Sequence
  Description of Artificial Sequence: Synthetic oligonucleotide
auguaaccucaaaucucua

SEQ ID NO: 352289 - RNA, 19 nt, Artificial Sequence
  Description of Artificial Sequence: Synthetic oligonucleotide
gggucacgggccaaaucac

SEQ ID NO: 352290 - RNA, 19 nt, Artificial Sequence
  Description of Artificial Sequence: Synthetic oligonucleotide
agcggcucugccagacaca

SEQ ID NO: 352291 - RNA, 19 nt, Artificial Sequence
  Description of Artificial Sequence: Synthetic oligonucleotide
gccgaaaacucuugauuau

SEQ ID NO: 352292 - RNA, 19 nt, Artificial Sequence
  Description of Artificial Sequence: Synthetic oligonucleotide
guaacagacugugcacuuu

SEQ ID NO: 352293 - RNA, 19 nt, Artificial Sequence
  Description of Artificial Sequence: Synthetic oligonucleotide
cagcuauaaugcagguuau

SEQ ID NO: 352294 - RNA, 19 nt, Artificial Sequence
  Description of Artificial Sequence: Synthetic oligonucleotide
agcggcgaggauggaucgu

SEQ ID NO: 352295 - RNA, 19 nt, Artificial Sequence
  Description of Artificial Sequence: Synthetic oligonucleotide
ggauugguuuagucucaua

SEQ ID NO: 352296 - RNA, 19 nt, Artificial Sequence
  Description of Artificial Sequence: Synthetic oligonucleotide
gccgggcuccucacuaucc

SEQ ID NO: 352297 - RNA, 19 nt, Artificial Sequence
  Description of Artificial Sequence: Synthetic oligonucleotide
gcucacgcgcacggcacag

SEQ ID NO: 352298 - RNA, 19 nt, Artificial Sequence
  Description of Artificial Sequence: Synthetic oligonucleotide
gcggcgaggauggaucguc

SEQ ID NO: 352299 - RNA, 19 nt, Artificial Sequence
  Description of Artificial Sequence: Synthetic oligonucleotide
gcccuacggggcucacgcg

SEQ ID NO: 352300 - RNA, 19 nt, Artificial Sequence
  Description of Artificial Sequence: Synthetic oligonucleotide
ccuacggggcucacgcgca

SEQ ID NO: 352301 - RNA, 19 nt, Artificial Sequence
  Description of Artificial Sequence: Synthetic oligonucleotide
gcccuuauuacuacagauu

SEQ ID NO: 352302 - RNA, 19 nt, Artificial Sequence
  Description of Artificial Sequence: Synthetic oligonucleotide
uccccgcgcggcagcuggu

SEQ ID NO: 352303 - RNA, 19 nt, Artificial Sequence
  Description of Artificial Sequence: Synthetic oligonucleotide
gccucacgacaacucccac

SEQ ID NO: 352304 - RNA, 19 nt, Artificial Sequence
  Description of Artificial Sequence: Synthetic oligonucleotide
gggcucacgcgcacggcac

SEQ ID NO: 352305 - RNA, 19 nt, Artificial Sequence
  Description of Artificial Sequence: Synthetic oligonucleotide
ggcucacgcgcacggcaca

SEQ ID NO: 352306 - RNA, 19 nt, Artificial Sequence
  Description of Artificial Sequence: Synthetic oligonucleotide
ggucacgggccaaaucacu

SEQ ID NO: 352307 - RNA, 19 nt, Artificial Sequence
  Description of Artificial Sequence: Synthetic oligonucleotide
gggaugcaccuggaaaaua

SEQ ID NO: 352308 - RNA, 19 nt, Artificial Sequence
  Description of Artificial Sequence: Synthetic oligonucleotide
ggcagcuaacucauugguu

SEQ ID NO: 352309 - RNA, 19 nt, Artificial Sequence
  Description of Artificial Sequence: Synthetic oligonucleotide
cccgcgcggcagcuggugc

SEQ ID NO: 352310 - RNA, 19 nt, Artificial Sequence
  Description of Artificial Sequence: Synthetic oligonucleotide
cccggccgaaaacucuuga

SEQ ID NO: 352311 - RNA, 19 nt, Artificial Sequence
  Description of Artificial Sequence: Synthetic oligonucleotide
gcgcacggcacagccacaa

SEQ ID NO: 352312 - RNA, 19 nt, Artificial Sequence
  Description of Artificial Sequence: Synthetic oligonucleotide
cauugacaacucgcaucau

SEQ ID NO: 352313 - RNA, 19 nt, Artificial Sequence
  Description of Artificial Sequence: Synthetic oligonucleotide
cgggccaaaucacuaaguu

SEQ ID NO: 352314 - RNA, 19 nt, Artificial Sequence
  Description of Artificial Sequence: Synthetic oligonucleotide
ccggccgaaaacucuugau

SEQ ID NO: 352315 - RNA, 19 nt, Artificial Sequence
  Description of Artificial Sequence: Synthetic oligonucleotide
cggccgaaaacucuugauu

SEQ ID NO: 352316 - RNA, 19 nt, Artificial Sequence
  Description of Artificial Sequence: Synthetic oligonucleotide
cgccgggcuccucacuauc

SEQ ID NO: 352317 - RNA, 19 nt, Artificial Sequence
  Description of Artificial Sequence: Synthetic oligonucleotide
ggcccggccgaaaacucuu

SEQ ID NO: 352318 - RNA, 19 nt, Artificial Sequence
  Description of Artificial Sequence: Synthetic oligonucleotide
cgaggauggaucgucucuu

SEQ ID NO: 352319 - RNA, 19 nt, Artificial Sequence
  Description of Artificial Sequence: Synthetic oligonucleotide
ccccgcgcggcagcuggug

SEQ ID NO: 352320 - RNA, 19 nt, Artificial Sequence
  Description of Artificial Sequence: Synthetic oligonucleotide
cggcgaggauggaucgucu

SEQ ID NO: 352321 - RNA, 19 nt, Artificial Sequence
  Description of Artificial Sequence: Synthetic oligonucleotide
cgcgcacggcacagccaca

SEQ ID NO: 352322 - RNA, 19 nt, Artificial Sequence
  Description of Artificial Sequence: Synthetic oligonucleotide
ccggcccuacggggcucac

SEQ ID NO: 352323 - RNA, 19 nt, Artificial Sequence
  Description of Artificial Sequence: Synthetic oligonucleotide
ccccggcccuacggggcuc

SEQ ID NO: 352324 - RNA, 19 nt, Artificial Sequence
  Description of Artificial Sequence: Synthetic oligonucleotide
aucauaacgaucucgauac

SEQ ID NO: 352325 - RNA, 19 nt, Artificial Sequence
  Description of Artificial Sequence: Synthetic oligonucleotide
aacccuacaacccaaagga

SEQ ID NO: 352326 - RNA, 19 nt, Artificial Sequence
  Description of Artificial Sequence: Synthetic oligonucleotide
ucgccuauuaccuagagac

SEQ ID NO: 352327 - RNA, 19 nt, Artificial Sequence
  Description of Artificial Sequence: Synthetic oligonucleotide
uaucccgaccaaaagaacg

SEQ ID NO: 352328 - RNA, 19 nt, Artificial Sequence
  Description of Artificial Sequence: Synthetic oligonucleotide
ugaaucauaacgaucucga

SEQ ID NO: 352329 - RNA, 19 nt, Artificial Sequence
  Description of Artificial Sequence: Synthetic oligonucleotide
uugucuacaaccaagguuu

SEQ ID NO: 352330 - RNA, 19 nt, Artificial Sequence
  Description of Artificial Sequence: Synthetic oligonucleotide
uggugauuugggaagacgg

SEQ ID NO: 352331 - RNA, 19 nt, Artificial Sequence
  Description of Artificial Sequence: Synthetic oligonucleotide
gucauaucggucuucauag

SEQ ID NO: 352332 - RNA, 19 nt, Artificial Sequence
  Description of Artificial Sequence: Synthetic oligonucleotide
aaaggaugggauuuuacau

SEQ ID NO: 352333 - RNA, 19 nt, Artificial Sequence
  Description of Artificial Sequence: Synthetic oligonucleotide
uaccuuuagaggcugauca

SEQ ID NO: 352334 - RNA, 19 nt, Artificial Sequence
  Description of Artificial Sequence: Synthetic oligonucleotide
acuccgaggcuuuagauuc

SEQ ID NO: 352335 - RNA, 19 nt, Artificial Sequence
  Description of Artificial Sequence: Synthetic oligonucleotide
cuuaacuuuaaagacuggg

SEQ ID NO: 352336 - RNA, 19 nt, Artificial Sequence
  Description of Artificial Sequence: Synthetic oligonucleotide
accggucugaaucauaacg

SEQ ID NO: 352337 - RNA, 19 nt, Artificial Sequence
  Description of Artificial Sequence: Synthetic oligonucleotide
aaugucuacagauuacaaa

SEQ ID NO: 352338 - RNA, 19 nt, Artificial Sequence
  Description of Artificial Sequence: Synthetic oligonucleotide
ucgaauucgccuauuaccu

SEQ ID NO: 352339 - RNA, 19 nt, Artificial Sequence
  Description of Artificial Sequence: Synthetic oligonucleotide
acagcgcugauauuuaauc

SEQ ID NO: 352340 - RNA, 19 nt, Artificial Sequence
  Description of Artificial Sequence: Synthetic oligonucleotide
uacuaugccaaguuguuga

SEQ ID NO: 352341 - RNA, 19 nt, Artificial Sequence
  Description of Artificial Sequence: Synthetic oligonucleotide
auuaccuagagacucuuca

SEQ ID NO: 352342 - RNA, 19 nt, Artificial Sequence
  Description of Artificial Sequence: Synthetic oligonucleotide
cugagaucgagcaggaggg

SEQ ID NO: 352343 - RNA, 19 nt, Artificial Sequence
  Description of Artificial Sequence: Synthetic oligonucleotide
gaauucgccuauuaccuag

SEQ ID NO: 352344 - RNA, 19 nt, Artificial Sequence
  Description of Artificial Sequence: Synthetic oligonucleotide
aaguaaugucuacagauua

SEQ ID NO: 352345 - RNA, 19 nt, Artificial Sequence
  Description of Artificial Sequence: Synthetic oligonucleotide
cauaucggucuucauagcg

SEQ ID NO: 352346 - RNA, 19 nt, Artificial Sequence
  Description of Artificial Sequence: Synthetic oligonucleotide
caaagauagaagccgcucg

SEQ ID NO: 352347 - RNA, 19 nt, Artificial Sequence
  Description of Artificial Sequence: Synthetic oligonucleotide
cuggcauuaccuuuagagg

SEQ ID NO: 352348 - RNA, 19 nt, Artificial Sequence
  Description of Artificial Sequence: Synthetic oligonucleotide
gcuggcauuaccuuuagag

SEQ ID NO: 352349 - RNA, 19 nt, Artificial Sequence
  Description of Artificial Sequence: Synthetic oligonucleotide
uaauccucuaaagaauucc

SEQ ID NO: 352350 - RNA, 19 nt, Artificial Sequence
  Description of Artificial Sequence: Synthetic oligonucleotide
cuuccuuaggaguacuccg

SEQ ID NO: 352351 - RNA, 19 nt, Artificial Sequence
  Description of Artificial Sequence: Synthetic oligonucleotide
aaaccaacgcuccugcaga

SEQ ID NO: 352352 - RNA, 19 nt, Artificial Sequence
  Description of Artificial Sequence: Synthetic oligonucleotide
acgugguaagcguacagcg

SEQ ID NO: 352353 - RNA, 19 nt, Artificial Sequence
  Description of Artificial Sequence: Synthetic oligonucleotide
aacuccaggaccgaucguc

SEQ ID NO: 352354 - RNA, 19 nt, Artificial Sequence
  Description of Artificial Sequence: Synthetic oligonucleotide
aggguuagagcuucgcuuc

SEQ ID NO: 352355 - RNA, 19 nt, Artificial Sequence
  Description of Artificial Sequence: Synthetic oligonucleotide
cacgcauucuccuuuggcg

SEQ ID NO: 352356 - RNA, 19 nt, Artificial Sequence
  Description of Artificial Sequence: Synthetic oligonucleotide
ugagacucagagcacugag

SEQ ID NO: 352357 - RNA, 19 nt, Artificial Sequence
  Description of Artificial Sequence: Synthetic oligonucleotide
uuucuaucccgaccaaaag

SEQ ID NO: 352358 - RNA, 19 nt, Artificial Sequence
  Description of Artificial Sequence: Synthetic oligonucleotide
aucacgccuauaaucaucc

SEQ ID NO: 352359 - RNA, 19 nt, Artificial Sequence
  Description of Artificial Sequence: Synthetic oligonucleotide
ugucauaucggucuucaua

SEQ ID NO: 352360 - RNA, 19 nt, Artificial Sequence
  Description of Artificial Sequence: Synthetic oligonucleotide
ucaggagcgggacauaagu

SEQ ID NO: 352361 - RNA, 19 nt, Artificial Sequence
  Description of Artificial Sequence: Synthetic oligonucleotide
acucgaauucgccuauuac

SEQ ID NO: 352362 - RNA, 19 nt, Artificial Sequence
  Description of Artificial Sequence: Synthetic oligonucleotide
auugucuacaaccaagguu

SEQ ID NO: 352363 - RNA, 19 nt, Artificial Sequence
  Description of Artificial Sequence: Synthetic oligonucleotide
agaguaaucaucccuggaa

SEQ ID NO: 352364 - RNA, 19 nt, Artificial Sequence
  Description of Artificial Sequence: Synthetic oligonucleotide
ggauuuuacaucucaagac

SEQ ID NO: 352365 - RNA, 19 nt, Artificial Sequence
  Description of Artificial Sequence: Synthetic oligonucleotide
aauuccuuaauggagucuu

SEQ ID NO: 352366 - RNA, 19 nt, Artificial Sequence
  Description of Artificial Sequence: Synthetic oligonucleotide
gauauccaucccgauaccg

SEQ ID NO: 352367 - RNA, 19 nt, Artificial Sequence
  Description of Artificial Sequence: Synthetic oligonucleotide
aguaaugucuacagauuac

SEQ ID NO: 352368 - RNA, 19 nt, Artificial Sequence
  Description of Artificial Sequence: Synthetic oligonucleotide
ugagcgacuugcuaugccc

SEQ ID NO: 352369 - RNA, 19 nt, Artificial Sequence
  Description of Artificial Sequence: Synthetic oligonucleotide
uuucaaccugucaggauug

SEQ ID NO: 352370 - RNA, 19 nt, Artificial Sequence
  Description of Artificial Sequence: Synthetic oligonucleotide
aagauagaagccgcucgac

SEQ ID NO: 352371 - RNA, 19 nt, Artificial Sequence
  Description of Artificial Sequence: Synthetic oligonucleotide
acgcauucuccuuuggcgg

SEQ ID NO: 352372 - RNA, 19 nt, Artificial Sequence
  Description of Artificial Sequence: Synthetic oligonucleotide
cacgccuauaaucaucccg

SEQ ID NO: 352373 - RNA, 19 nt, Artificial Sequence
  Description of Artificial Sequence: Synthetic oligonucleotide
aagagggcuaucuaccuuu

SEQ ID NO: 352374 - RNA, 19 nt, Artificial Sequence
  Description of Artificial Sequence: Synthetic oligonucleotide
aaagcuaucaucaccucuu

SEQ ID NO: 352375 - RNA, 19 nt, Artificial Sequence
  Description of Artificial Sequence: Synthetic oligonucleotide
agcuagaaagucuguuagg

SEQ ID NO: 352376 - RNA, 19 nt, Artificial Sequence
  Description of Artificial Sequence: Synthetic oligonucleotide
ucuacaaccaagguuuaaa

SEQ ID NO: 352377 - RNA, 19 nt, Artificial Sequence
  Description of Artificial Sequence: Synthetic oligonucleotide
uguagucaucaucccuucg

SEQ ID NO: 352378 - RNA, 19 nt, Artificial Sequence
  Description of Artificial Sequence: Synthetic oligonucleotide
gcuaucuaccuuuucauug

SEQ ID NO: 352379 - RNA, 19 nt, Artificial Sequence
  Description of Artificial Sequence: Synthetic oligonucleotide
ucuagguggguagucauca

SEQ ID NO: 352380 - RNA, 19 nt, Artificial Sequence
  Description of Artificial Sequence: Synthetic oligonucleotide
acuaugccaaguuguugac

SEQ ID NO: 352381 - RNA, 19 nt, Artificial Sequence
  Description of Artificial Sequence: Synthetic oligonucleotide
uagcuacuagccaaucaag

SEQ ID NO: 352382 - RNA, 19 nt, Artificial Sequence
  Description of Artificial Sequence: Synthetic oligonucleotide
uccaucccgauauccaucc

SEQ ID NO: 352383 - RNA, 19 nt, Artificial Sequence
  Description of Artificial Sequence: Synthetic oligonucleotide
uccucuaaagaauuccuua

SEQ ID NO: 352384 - RNA, 19 nt, Artificial Sequence
  Description of Artificial Sequence: Synthetic oligonucleotide
agcauguggaggucuacuc

SEQ ID NO: 352385 - RNA, 19 nt, Artificial Sequence
  Description of Artificial Sequence: Synthetic oligonucleotide
cacuucgccaacuugggug

SEQ ID NO: 352386 - RNA, 19 nt, Artificial Sequence
  Description of Artificial Sequence: Synthetic oligonucleotide
aagcuaucaucaccucuuc

SEQ ID NO: 352387 - RNA, 19 nt, Artificial Sequence
  Description of Artificial Sequence: Synthetic oligonucleotide
ucuuccuuaggaguacucc

SEQ ID NO: 352388 - RNA, 19 nt, Artificial Sequence
  Description of Artificial Sequence: Synthetic oligonucleotide
uggaugagcgacuugcuau

SEQ ID NO: 352389 - RNA, 19 nt, Artificial Sequence
  Description of Artificial Sequence: Synthetic oligonucleotide
aggagcgggacauaaguca

SEQ ID NO: 352390 - RNA, 19 nt, Artificial Sequence
  Description of Artificial Sequence: Synthetic oligonucleotide
agcgggacauaagucaacc

SEQ ID NO: 352391 - RNA, 19 nt, Artificial Sequence
  Description of Artificial Sequence: Synthetic oligonucleotide
gaacuuagaggcuggguuc

SEQ ID NO: 352392 - RNA, 19 nt, Artificial Sequence
  Description of Artificial Sequence: Synthetic oligonucleotide
caucccgauauccaucccg

SEQ ID NO: 352393 - RNA, 19 nt, Artificial Sequence
  Description of Artificial Sequence: Synthetic oligonucleotide
auaacgaucucgauacuug

SEQ ID NO: 352394 - RNA, 19 nt, Artificial Sequence
  Description of Artificial Sequence: Synthetic oligonucleotide
ggaacuccaggaccgaucg

SEQ ID NO: 352395 - RNA, 19 nt, Artificial Sequence
  Description of Artificial Sequence: Synthetic oligonucleotide
auaucggucuucauagcgg

SEQ ID NO: 352396 - RNA, 19 nt, Artificial Sequence
  Description of Artificial Sequence: Synthetic oligonucleotide
uccuuaggaguacuccgag

SEQ ID NO: 352397 - RNA, 19 nt, Artificial Sequence
  Description of Artificial Sequence: Synthetic oligonucleotide
uucgguacccacuaccaaa

SEQ ID NO: 352398 - RNA, 19 nt, Artificial Sequence
  Description of Artificial Sequence: Synthetic oligonucleotide
aaaaccccauucaauggug

SEQ ID NO: 352399 - RNA, 19 nt, Artificial Sequence
  Description of Artificial Sequence: Synthetic oligonucleotide
uuccuuaggaguacuccga

SEQ ID NO: 352400 - RNA, 19 nt, Artificial Sequence
  Description of Artificial Sequence: Synthetic oligonucleotide
aacgcuccugcagagcagg

SEQ ID NO: 352401 - RNA, 19 nt, Artificial Sequence
  Description of Artificial Sequence: Synthetic oligonucleotide
ggaugcaacuaucuggaag

SEQ ID NO: 352402 - RNA, 19 nt, Artificial Sequence
  Description of Artificial Sequence: Synthetic oligonucleotide
uauccaucccgauaccggu

SEQ ID NO: 352403 - RNA, 19 nt, Artificial Sequence
  Description of Artificial Sequence: Synthetic oligonucleotide
uaucggucuucauagcggu

SEQ ID NO: 352404 - RNA, 19 nt, Artificial Sequence
  Description of Artificial Sequence: Synthetic oligonucleotide
aagacaucucccaaguaau

SEQ ID NO: 352405 - RNA, 19 nt, Artificial Sequence
  Description of Artificial Sequence: Synthetic oligonucleotide
cagcgcugauauuuaaucc

SEQ ID NO: 352406 - RNA, 19 nt, Artificial Sequence
  Description of Artificial Sequence: Synthetic oligonucleotide
ucugucauaucggucuuca

SEQ ID NO: 352407 - RNA, 19 nt, Artificial Sequence
  Description of Artificial Sequence: Synthetic oligonucleotide
agauagaagccgcucgacu

SEQ ID NO: 352408 - RNA, 19 nt, Artificial Sequence
  Description of Artificial Sequence: Synthetic oligonucleotide
uaacgaucucgauacuugu

SEQ ID NO: 352409 - RNA, 19 nt, Artificial Sequence
  Description of Artificial Sequence: Synthetic oligonucleotide
cuagcuacuagccaaucaa

SEQ ID NO: 352410 - RNA, 19 nt, Artificial Sequence
  Description of Artificial Sequence: Synthetic oligonucleotide
uccucgaccguucucuuuc

SEQ ID NO: 352411 - RNA, 19 nt, Artificial Sequence
  Description of Artificial Sequence: Synthetic oligonucleotide
aucgucauuacuaugccaa

SEQ ID NO: 352412 - RNA, 19 nt, Artificial Sequence
  Description of Artificial Sequence: Synthetic oligonucleotide
uucgccuauuaccuagaga

SEQ ID NO: 352413 - RNA, 19 nt, Artificial Sequence
  Description of Artificial Sequence: Synthetic oligonucleotide
caucccgagaguaaucauc

SEQ ID NO: 352414 - RNA, 19 nt, Artificial Sequence
  Description of Artificial Sequence: Synthetic oligonucleotide
aagccgcucgacuggacug

SEQ ID NO: 352415 - RNA, 19 nt, Artificial Sequence
  Description of Artificial Sequence: Synthetic oligonucleotide
aguacuccgaggcuuuaga

SEQ ID NO: 352416 - RNA, 19 nt, Artificial Sequence
  Description of Artificial Sequence: Synthetic oligonucleotide
cauaggugcuuccuccacc

SEQ ID NO: 352417 - RNA, 19 nt, Artificial Sequence
  Description of Artificial Sequence: Synthetic oligonucleotide
uccauaucucuucgugggc

SEQ ID NO: 352418 - RNA, 19 nt, Artificial Sequence
  Description of Artificial Sequence: Synthetic oligonucleotide
gacuagaagaaagcacagc

SEQ ID NO: 352419 - RNA, 19 nt, Artificial Sequence
  Description of Artificial Sequence: Synthetic oligonucleotide
uggguucacgugguaagcg

SEQ ID NO: 352420 - RNA, 19 nt, Artificial Sequence
  Description of Artificial Sequence: Synthetic oligonucleotide
ucgugggccaucccgauau

SEQ ID NO: 352421 - RNA, 19 nt, Artificial Sequence
  Description of Artificial Sequence: Synthetic oligonucleotide
uuaccuagagacucuucau

SEQ ID NO: 352422 - RNA, 19 nt, Artificial Sequence
  Description of Artificial Sequence: Synthetic oligonucleotide
ucgucauuacuaugccaag

SEQ ID NO: 352423 - RNA, 19 nt, Artificial Sequence
  Description of Artificial Sequence: Synthetic oligonucleotide
aacguccacucgaauucgc

SEQ ID NO: 352424 - RNA, 19 nt, Artificial Sequence
  Description of Artificial Sequence: Synthetic oligonucleotide
ucagcaacguccacucgaa

SEQ ID NO: 352425 - RNA, 19 nt, Artificial Sequence
  Description of Artificial Sequence: Synthetic oligonucleotide
uucaggagcgggacauaag

SEQ ID NO: 352426 - RNA, 19 nt, Artificial Sequence
  Description of Artificial Sequence: Synthetic oligonucleotide
uaaucaucccgagaguaau

SEQ ID NO: 352427 - RNA, 19 nt, Artificial Sequence
  Description of Artificial Sequence: Synthetic oligonucleotide
uaccuagagacucuucauu

SEQ ID NO: 352428 - RNA, 19 nt, Artificial Sequence
  Description of Artificial Sequence: Synthetic oligonucleotide
agcaacguccacucgaauu

SEQ ID NO: 352429 - RNA, 19 nt, Artificial Sequence
  Description of Artificial Sequence: Synthetic oligonucleotide
aggagcaaaguaggagagc

SEQ ID NO: 352430 - RNA, 19 nt, Artificial Sequence
  Description of Artificial Sequence: Synthetic oligonucleotide
ucauaucggucuucauagc

SEQ ID NO: 352431 - RNA, 19 nt, Artificial Sequence
  Description of Artificial Sequence: Synthetic oligonucleotide
ggacauaggugcuuccucc

SEQ ID NO: 352432 - RNA, 19 nt, Artificial Sequence
  Description of Artificial Sequence: Synthetic oligonucleotide
ccgauauccaucccgauac

SEQ ID NO: 352433 - RNA, 19 nt, Artificial Sequence
  Description of Artificial Sequence: Synthetic oligonucleotide
ggcugaucagguuuagaag

SEQ ID NO: 352434 - RNA, 19 nt, Artificial Sequence
  Description of Artificial Sequence: Synthetic oligonucleotide
ucgguacccacuaccaaau

SEQ ID NO: 352435 - RNA, 19 nt, Artificial Sequence
  Description of Artificial Sequence: Synthetic oligonucleotide
agcgacuugcuaugcccac

SEQ ID NO: 352436 - RNA, 19 nt, Artificial Sequence
  Description of Artificial Sequence: Synthetic oligonucleotide
ugccccuccaaagauagaa

SEQ ID NO: 352437 - RNA, 19 nt, Artificial Sequence
  Description of Artificial Sequence: Synthetic oligonucleotide
agacuggguuuauuuggag

SEQ ID NO: 352438 - RNA, 19 nt, Artificial Sequence
  Description of Artificial Sequence: Synthetic oligonucleotide
auucgccuauuaccuagag

SEQ ID NO: 352439 - RNA, 19 nt, Artificial Sequence
  Description of Artificial Sequence: Synthetic oligonucleotide
ugugcuugaucagcaacgu

SEQ ID NO: 352440 - RNA, 19 nt, Artificial Sequence
  Description of Artificial Sequence: Synthetic oligonucleotide
caucacgccuauaaucauc

SEQ ID NO: 352441 - RNA, 19 nt, Artificial Sequence
  Description of Artificial Sequence: Synthetic oligonucleotide
gaaucccgauuucuauccc

SEQ ID NO: 352442 - RNA, 19 nt, Artificial Sequence
  Description of Artificial Sequence: Synthetic oligonucleotide
uaucuaccuuuucauuguc

SEQ ID NO: 352443 - RNA, 19 nt, Artificial Sequence
  Description of Artificial Sequence: Synthetic oligonucleotide
acgccuauaaucaucccga

SEQ ID NO: 352444 - RNA, 19 nt, Artificial Sequence
  Description of Artificial Sequence: Synthetic oligonucleotide
uacuccgaggcuuuagauu

SEQ ID NO: 352445 - RNA, 19 nt, Artificial Sequence
  Description of Artificial Sequence: Synthetic oligonucleotide
uacauguauucaggagcgg

SEQ ID NO: 352446 - RNA, 19 nt, Artificial Sequence
  Description of Artificial Sequence: Synthetic oligonucleotide
guggugauuugggaagacg

SEQ ID NO: 352447 - RNA, 19 nt, Artificial Sequence
  Description of Artificial Sequence: Synthetic oligonucleotide
gcuacuagccaaucaaguc

SEQ ID NO: 352448 - RNA, 19 nt, Artificial Sequence
  Description of Artificial Sequence: Synthetic oligonucleotide
aagcaguguagggugguga

SEQ ID NO: 352449 - RNA, 19 nt, Artificial Sequence
  Description of Artificial Sequence: Synthetic oligonucleotide
gcaacguccacucgaauuc

SEQ ID NO: 352450 - RNA, 19 nt, Artificial Sequence
  Description of Artificial Sequence: Synthetic oligonucleotide
cccgauaccggucugaauc

SEQ ID NO: 352451 - RNA, 19 nt, Artificial Sequence
  Description of Artificial Sequence: Synthetic oligonucleotide
cacgugguaagcguacagc

SEQ ID NO: 352452 - RNA, 19 nt, Artificial Sequence
  Description of Artificial Sequence: Synthetic oligonucleotide
ugguaagcguacagcgcug

SEQ ID NO: 352453 - RNA, 19 nt, Artificial Sequence
  Description of Artificial Sequence: Synthetic oligonucleotide
agcuacuagccaaucaagu

SEQ ID NO: 352454 - RNA, 19 nt, Artificial Sequence
  Description of Artificial Sequence: Synthetic oligonucleotide
acguccacucgaauucgcc

SEQ ID NO: 352455 - RNA, 19 nt, Artificial Sequence
  Description of Artificial Sequence: Synthetic oligonucleotide
gcucuugaaucuuccgggg

SEQ ID NO: 352456 - RNA, 19 nt, Artificial Sequence
  Description of Artificial Sequence: Synthetic oligonucleotide
aauucgccuauuaccuaga

SEQ ID NO: 352457 - RNA, 19 nt, Artificial Sequence
  Description of Artificial Sequence: Synthetic oligonucleotide
ucauaacgaucucgauacu

SEQ ID NO: 352458 - RNA, 19 nt, Artificial Sequence
  Description of Artificial Sequence: Synthetic oligonucleotide
uuaccuuuagaggcugauc

SEQ ID NO: 352459 - RNA, 19 nt, Artificial Sequence
  Description of Artificial Sequence: Synthetic oligonucleotide
gugguaagcguacagcgcu

SEQ ID NO: 352460 - RNA, 19 nt, Artificial Sequence
  Description of Artificial Sequence: Synthetic oligonucleotide
acgacuugggaacccaguu

SEQ ID NO: 352461 - RNA, 19 nt, Artificial Sequence
  Description of Artificial Sequence: Synthetic oligonucleotide
ucaucacgccuauaaucau

SEQ ID NO: 352462 - RNA, 19 nt, Artificial Sequence
  Description of Artificial Sequence: Synthetic oligonucleotide
accgaucgucccuucuguc

SEQ ID NO: 352463 - RNA, 19 nt, Artificial Sequence
  Description of Artificial Sequence: Synthetic oligonucleotide
ugguccguccucagagggc

SEQ ID NO: 352464 - RNA, 19 nt, Artificial Sequence
  Description of Artificial Sequence: Synthetic oligonucleotide
uuccuagcuacuagccaau

SEQ ID NO: 352465 - RNA, 19 nt, Artificial Sequence
  Description of Artificial Sequence: Synthetic oligonucleotide
uaggaguacuccgaggcuu

SEQ ID NO: 352466 - RNA, 19 nt, Artificial Sequence
  Description of Artificial Sequence: Synthetic oligonucleotide
gcaacuaucuggaagggaa

SEQ ID NO: 352467 - RNA, 19 nt, Artificial Sequence
  Description of Artificial Sequence: Synthetic oligonucleotide
cuuucaaccugucaggauu

SEQ ID NO: 352468 - RNA, 19 nt, Artificial Sequence
  Description of Artificial Sequence: Synthetic oligonucleotide
auagcgauccauaucucuu

SEQ ID NO: 352469 - RNA, 19 nt, Artificial Sequence
  Description of Artificial Sequence: Synthetic oligonucleotide
cgggacauaagucaacccc

SEQ ID NO: 352470 - RNA, 19 nt, Artificial Sequence
  Description of Artificial Sequence: Synthetic oligonucleotide
ccgagaguaaucaucccug

SEQ ID NO: 352471 - RNA, 19 nt, Artificial Sequence
  Description of Artificial Sequence: Synthetic oligonucleotide
uccgggguggagacuagaa

SEQ ID NO: 352472 - RNA, 19 nt, Artificial Sequence
  Description of Artificial Sequence: Synthetic oligonucleotide
ggugucucucacguggccg

SEQ ID NO: 352473 - RNA, 19 nt, Artificial Sequence
  Description of Artificial Sequence: Synthetic oligonucleotide
aucccgaccaaaagaacga

SEQ ID NO: 352474 - RNA, 19 nt, Artificial Sequence
  Description of Artificial Sequence: Synthetic oligonucleotide
caggagcgggacauaaguc

SEQ ID NO: 352475 - RNA, 19 nt, Artificial Sequence
  Description of Artificial Sequence: Synthetic oligonucleotide
uccggucaauauuggguuc

SEQ ID NO: 352476 - RNA, 19 nt, Artificial Sequence
  Description of Artificial Sequence: Synthetic oligonucleotide
cuacaacccaaaggauggg

SEQ ID NO: 352477 - RNA, 19 nt, Artificial Sequence
  Description of Artificial Sequence: Synthetic oligonucleotide
uucacgugguaagcguaca

SEQ ID NO: 352478 - RNA, 19 nt, Artificial Sequence
  Description of Artificial Sequence: Synthetic oligonucleotide
gccuauuaccuagagacuc

SEQ ID NO: 352479 - RNA, 19 nt, Artificial Sequence
  Description of Artificial Sequence: Synthetic oligonucleotide
gaguacuccgaggcuuuag

SEQ ID NO: 352480 - RNA, 19 nt, Artificial Sequence
  Description of Artificial Sequence: Synthetic oligonucleotide
uggccggcggucuaguuuu

SEQ ID NO: 352481 - RNA, 19 nt, Artificial Sequence
  Description of Artificial Sequence: Synthetic oligonucleotide
ggcuuuagauucaguuugg

SEQ ID NO: 352482 - RNA, 19 nt, Artificial Sequence
  Description of Artificial Sequence: Synthetic oligonucleotide
ugucuacaaccaagguuua

SEQ ID NO: 352483 - RNA, 19 nt, Artificial Sequence
  Description of Artificial Sequence: Synthetic oligonucleotide
ucccgagaguaaucauccc

SEQ ID NO: 352484 - RNA, 19 nt, Artificial Sequence
  Description of Artificial Sequence: Synthetic oligonucleotide
ucacgccuauaaucauccc

SEQ ID NO: 352485 - RNA, 19 nt, Artificial Sequence
  Description of Artificial Sequence: Synthetic oligonucleotide
caucgucauuacuaugcca

SEQ ID NO: 352486 - RNA, 19 nt, Artificial Sequence
  Description of Artificial Sequence: Synthetic oligonucleotide
guucacgugguaagcguac

SEQ ID NO: 352487 - RNA, 19 nt, Artificial Sequence
  Description of Artificial Sequence: Synthetic oligonucleotide
ggcggucuaguuuuggcuc

SEQ ID NO: 352488 - RNA, 19 nt, Artificial Sequence
  Description of Artificial Sequence: Synthetic oligonucleotide
ccuuaggaguacuccgagg

SEQ ID NO: 352489 - RNA, 19 nt, Artificial Sequence
  Description of Artificial Sequence: Synthetic oligonucleotide
gaaucauaacgaucucgau

SEQ ID NO: 352490 - RNA, 19 nt, Artificial Sequence
  Description of Artificial Sequence: Synthetic oligonucleotide
ucccgauuucuaucccgac

SEQ ID NO: 352491 - RNA, 19 nt, Artificial Sequence
  Description of Artificial Sequence: Synthetic oligonucleotide
uaccggucugaaucauaac

SEQ ID NO: 352492 - RNA, 19 nt, Artificial Sequence
  Description of Artificial Sequence: Synthetic oligonucleotide
cccgauuucuaucccgacc

SEQ ID NO: 352493 - RNA, 19 nt, Artificial Sequence
  Description of Artificial Sequence: Synthetic oligonucleotide
gaagccgcucgacuggacu

SEQ ID NO: 352494 - RNA, 19 nt, Artificial Sequence
  Description of Artificial Sequence: Synthetic oligonucleotide
aucccgauuucuaucccga

SEQ ID NO: 352495 - RNA, 19 nt, Artificial Sequence
  Description of Artificial Sequence: Synthetic oligonucleotide
caacgcuccugcagagcag

SEQ ID NO: 352496 - RNA, 19 nt, Artificial Sequence
  Description of Artificial Sequence: Synthetic oligonucleotide
uccacuggaugagcgacuu

SEQ ID NO: 352497 - RNA, 19 nt, Artificial Sequence
  Description of Artificial Sequence: Synthetic oligonucleotide
acccacgcauucuccuuug

SEQ ID NO: 352498 - RNA, 19 nt, Artificial Sequence
  Description of Artificial Sequence: Synthetic oligonucleotide
agccgcucgacuggacugg

SEQ ID NO: 352499 - RNA, 19 nt, Artificial Sequence
  Description of Artificial Sequence: Synthetic oligonucleotide
agaucgagcaggaggguua

SEQ ID NO: 352500 - RNA, 19 nt, Artificial Sequence
  Description of Artificial Sequence: Synthetic oligonucleotide
ggucaauauuggguucccg

SEQ ID NO: 352501 - RNA, 19 nt, Artificial Sequence
  Description of Artificial Sequence: Synthetic oligonucleotide
ggacauaagucaaccccug

SEQ ID NO: 352502 - RNA, 19 nt, Artificial Sequence
  Description of Artificial Sequence: Synthetic oligonucleotide
gagcgacuugcuaugccca

SEQ ID NO: 352503 - RNA, 19 nt, Artificial Sequence
  Description of Artificial Sequence: Synthetic oligonucleotide
aggaccgaucgucccuucu

SEQ ID NO: 352504 - RNA, 19 nt, Artificial Sequence
  Description of Artificial Sequence: Synthetic oligonucleotide
gcuagcagaggaaucaucu

SEQ ID NO: 352505 - RNA, 19 nt, Artificial Sequence
  Description of Artificial Sequence: Synthetic oligonucleotide
ccggucugaaucauaacga

SEQ ID NO: 352506 - RNA, 19 nt, Artificial Sequence
  Description of Artificial Sequence: Synthetic oligonucleotide
gcugauauuuaauccucua

SEQ ID NO: 352507 - RNA, 19 nt, Artificial Sequence
  Description of Artificial Sequence: Synthetic oligonucleotide
cccuucgguacccacuacc

SEQ ID NO: 352508 - RNA, 19 nt, Artificial Sequence
  Description of Artificial Sequence: Synthetic oligonucleotide
auagcgguccccaccuccu

SEQ ID NO: 352509 - RNA, 19 nt, Artificial Sequence
  Description of Artificial Sequence: Synthetic oligonucleotide
aaggcccgcuuccuagcua

SEQ ID NO: 352510 - RNA, 19 nt, Artificial Sequence
  Description of Artificial Sequence: Synthetic oligonucleotide
cgugguaagcguacagcgc

SEQ ID NO: 352511 - RNA, 19 nt, Artificial Sequence
  Description of Artificial Sequence: Synthetic oligonucleotide
uucgugggccaucccgaua

SEQ ID NO: 352512 - RNA, 19 nt, Artificial Sequence
  Description of Artificial Sequence: Synthetic oligonucleotide
cucuucuagguggguaguc

SEQ ID NO: 352513 - RNA, 19 nt, Artificial Sequence
  Description of Artificial Sequence: Synthetic oligonucleotide
gaccgaucgucccuucugu

SEQ ID NO: 352514 - RNA, 19 nt, Artificial Sequence
  Description of Artificial Sequence: Synthetic oligonucleotide
gauaccggucugaaucaua

SEQ ID NO: 352515 - RNA, 19 nt, Artificial Sequence
  Description of Artificial Sequence: Synthetic oligonucleotide
guacagcgcugauauuuaa

SEQ ID NO: 352516 - RNA, 19 nt, Artificial Sequence
  Description of Artificial Sequence: Synthetic oligonucleotide
gcuugcagaacugaacuua

SEQ ID NO: 352517 - RNA, 19 nt, Artificial Sequence
  Description of Artificial Sequence: Synthetic oligonucleotide
gggacauuuaccccaucua

SEQ ID NO: 352518 - RNA, 19 nt, Artificial Sequence
  Description of Artificial Sequence: Synthetic oligonucleotide
aucgucccuucugucauau

SEQ ID NO: 352519 - RNA, 19 nt, Artificial Sequence
  Description of Artificial Sequence: Synthetic oligonucleotide
ucccgaccaaaagaacgau

SEQ ID NO: 352520 - RNA, 19 nt, Artificial Sequence
  Description of Artificial Sequence: Synthetic oligonucleotide
ccggucaauauuggguucc

SEQ ID NO: 352521 - RNA, 19 nt, Artificial Sequence
  Description of Artificial Sequence: Synthetic oligonucleotide
gagcgggacauaagucaac

SEQ ID NO: 352522 - RNA, 19 nt, Artificial Sequence
  Description of Artificial Sequence: Synthetic oligonucleotide
gccuauaaucaucccgaga

SEQ ID NO: 352523 - RNA, 19 nt, Artificial Sequence
  Description of Artificial Sequence: Synthetic oligonucleotide
gcgggacauaagucaaccc

SEQ ID NO: 352524 - RNA, 19 nt, Artificial Sequence
  Description of Artificial Sequence: Synthetic oligonucleotide
gcauuaccuuuagaggcug

SEQ ID NO: 352525 - RNA, 19 nt, Artificial Sequence
  Description of Artificial Sequence: Synthetic oligonucleotide
caauuggaggugcucuaua

SEQ ID NO: 352526 - RNA, 19 nt, Artificial Sequence
  Description of Artificial Sequence: Synthetic oligonucleotide
cuccggucaauauuggguu

SEQ ID NO: 352527 - RNA, 19 nt, Artificial Sequence
  Description of Artificial Sequence: Synthetic oligonucleotide
ccgcuuccuagcuacuagc

SEQ ID NO: 352528 - RNA, 19 nt, Artificial Sequence
  Description of Artificial Sequence: Synthetic oligonucleotide
cauaacgaucucgauacuu

SEQ ID NO: 352529 - RNA, 19 nt, Artificial Sequence
  Description of Artificial Sequence: Synthetic oligonucleotide
cuucgguacccacuaccaa

SEQ ID NO: 352530 - RNA, 19 nt, Artificial Sequence
  Description of Artificial Sequence: Synthetic oligonucleotide
cuuguaggggacugcugcu

SEQ ID NO: 352531 - RNA, 19 nt, Artificial Sequence
  Description of Artificial Sequence: Synthetic oligonucleotide
ccaacgcuccugcagagca

SEQ ID NO: 352532 - RNA, 19 nt, Artificial Sequence
  Description of Artificial Sequence: Synthetic oligonucleotide
ucccgauauccaucccgau

SEQ ID NO: 352533 - RNA, 19 nt, Artificial Sequence
  Description of Artificial Sequence: Synthetic oligonucleotide
cgcuuccuagcuacuagcc

SEQ ID NO: 352534 - RNA, 19 nt, Artificial Sequence
  Description of Artificial Sequence: Synthetic oligonucleotide
uguccucgaccguucucuu

SEQ ID NO: 352535 - RNA, 19 nt, Artificial Sequence
  Description of Artificial Sequence: Synthetic oligonucleotide
cccgcuuccuagcuacuag

SEQ ID NO: 352536 - RNA, 19 nt, Artificial Sequence
  Description of Artificial Sequence: Synthetic oligonucleotide
cacucgaauucgccuauua

SEQ ID NO: 352537 - RNA, 19 nt, Artificial Sequence
  Description of Artificial Sequence: Synthetic oligonucleotide
cucggucaucauagcgauc

SEQ ID NO: 352538 - RNA, 19 nt, Artificial Sequence
  Description of Artificial Sequence: Synthetic oligonucleotide
ucccgauaccggucugaau

SEQ ID NO: 352539 - RNA, 19 nt, Artificial Sequence
  Description of Artificial Sequence: Synthetic oligonucleotide
guacuccgaggcuuuagau

SEQ ID NO: 352540 - RNA, 19 nt, Artificial Sequence
  Description of Artificial Sequence: Synthetic oligonucleotide
cucuugaaucuuccggggu

SEQ ID NO: 352541 - RNA, 19 nt, Artificial Sequence
  Description of Artificial Sequence: Synthetic oligonucleotide
ccuagcuacuagccaauca

SEQ ID NO: 352542 - RNA, 19 nt, Artificial Sequence
  Description of Artificial Sequence: Synthetic oligonucleotide
auaucucuucgugggccau

SEQ ID NO: 352543 - RNA, 19 nt, Artificial Sequence
  Description of Artificial Sequence: Synthetic oligonucleotide
ccgggguggagacuagaag

SEQ ID NO: 352544 - RNA, 19 nt, Artificial Sequence
  Description of Artificial Sequence: Synthetic oligonucleotide
ccgauauccaucccgauau

SEQ ID NO: 352545 - RNA, 19 nt, Artificial Sequence
  Description of Artificial Sequence: Synthetic oligonucleotide
gguuagagcuucgcuucac

SEQ ID NO: 352546 - RNA, 19 nt, Artificial Sequence
  Description of Artificial Sequence: Synthetic oligonucleotide
gcgcugauauuuaauccuc

SEQ ID NO: 352547 - RNA, 19 nt, Artificial Sequence
  Description of Artificial Sequence: Synthetic oligonucleotide
cuagguggguagucaucaa

SEQ ID NO: 352548 - RNA, 19 nt, Artificial Sequence
  Description of Artificial Sequence: Synthetic oligonucleotide
ggaggguuagagcuucgcu

SEQ ID NO: 352549 - RNA, 19 nt, Artificial Sequence
  Description of Artificial Sequence: Synthetic oligonucleotide
ccggcggucuaguuuuggc

SEQ ID NO: 352550 - RNA, 19 nt, Artificial Sequence
  Description of Artificial Sequence: Synthetic oligonucleotide
gcggucuaguuuuggcuca

SEQ ID NO: 352551 - RNA, 19 nt, Artificial Sequence
  Description of Artificial Sequence: Synthetic oligonucleotide
ggagcgggacauaagucaa

SEQ ID NO: 352552 - RNA, 19 nt, Artificial Sequence
  Description of Artificial Sequence: Synthetic oligonucleotide
gcuccggucaauauugggu

SEQ ID NO: 352553 - RNA, 19 nt, Artificial Sequence
  Description of Artificial Sequence: Synthetic oligonucleotide
ggcauuaccuuuagaggcu

SEQ ID NO: 352554 - RNA, 19 nt, Artificial Sequence
  Description of Artificial Sequence: Synthetic oligonucleotide
cacgacuugggaacccagu

SEQ ID NO: 352555 - RNA, 19 nt, Artificial Sequence
  Description of Artificial Sequence: Synthetic oligonucleotide
ccgaucgucccuucuguca

SEQ ID NO: 352556 - RNA, 19 nt, Artificial Sequence
  Description of Artificial Sequence: Synthetic oligonucleotide
ccgauaccggucugaauca

SEQ ID NO: 352557 - RNA, 19 nt, Artificial Sequence
  Description of Artificial Sequence: Synthetic oligonucleotide
gagaucgagcaggaggguu

SEQ ID NO: 352558 - RNA, 19 nt, Artificial Sequence
  Description of Artificial Sequence: Synthetic oligonucleotide
ggguucacgugguaagcgu

SEQ ID NO: 352559 - RNA, 19 nt, Artificial Sequence
  Description of Artificial Sequence: Synthetic oligonucleotide
ccccauagcgauccauauc

SEQ ID NO: 352560 - RNA, 19 nt, Artificial Sequence
  Description of Artificial Sequence: Synthetic oligonucleotide
cuguuagggagauggucuu

SEQ ID NO: 352561 - RNA, 19 nt, Artificial Sequence
  Description of Artificial Sequence: Synthetic oligonucleotide
gguucacgugguaagcgua

SEQ ID NO: 352562 - RNA, 19 nt, Artificial Sequence
  Description of Artificial Sequence: Synthetic oligonucleotide
ccucgaccguucucuuucc

SEQ ID NO: 352563 - RNA, 19 nt, Artificial Sequence
  Description of Artificial Sequence: Synthetic oligonucleotide
cgauauccaucccgauacc

SEQ ID NO: 352564 - RNA, 19 nt, Artificial Sequence
  Description of Artificial Sequence: Synthetic oligonucleotide
gaacuccaggaccgaucgu

SEQ ID NO: 352565 - RNA, 19 nt, Artificial Sequence
  Description of Artificial Sequence: Synthetic oligonucleotide
cgccuauaaucaucccgag

SEQ ID NO: 352566 - RNA, 19 nt, Artificial Sequence
  Description of Artificial Sequence: Synthetic oligonucleotide
gcuuugccccuccaaagau

SEQ ID NO: 352567 - RNA, 19 nt, Artificial Sequence
  Description of Artificial Sequence: Synthetic oligonucleotide
guaagcguacagcgcugau

SEQ ID NO: 352568 - RNA, 19 nt, Artificial Sequence
  Description of Artificial Sequence: Synthetic oligonucleotide
guggccggcggucuaguuu

SEQ ID NO: 352569 - RNA, 19 nt, Artificial Sequence
  Description of Artificial Sequence: Synthetic oligonucleotide
cccgauauccaucccgaua

SEQ ID NO: 352570 - RNA, 19 nt, Artificial Sequence
  Description of Artificial Sequence: Synthetic oligonucleotide
ccaucccgauauccauccc

SEQ ID NO: 352571 - RNA, 19 nt, Artificial Sequence
  Description of Artificial Sequence: Synthetic oligonucleotide
ugacugguuuggggacaua

SEQ ID NO: 352572 - RNA, 19 nt, Artificial Sequence
  Description of Artificial Sequence: Synthetic oligonucleotide
gccgcucgacuggacuggg

SEQ ID NO: 352573 - RNA, 19 nt, Artificial Sequence
  Description of Artificial Sequence: Synthetic oligonucleotide
cuucgugggccaucccgau

SEQ ID NO: 352574 - RNA, 19 nt, Artificial Sequence
  Description of Artificial Sequence: Synthetic oligonucleotide
guccacuggaugagcgacu

SEQ ID NO: 352575 - RNA, 19 nt, Artificial Sequence
  Description of Artificial Sequence: Synthetic oligonucleotide
cucgaccguucucuuuccu

SEQ ID NO: 352576 - RNA, 19 nt, Artificial Sequence
  Description of Artificial Sequence: Synthetic oligonucleotide
gguucccgagcagcccgug

SEQ ID NO: 352577 - RNA, 19 nt, Artificial Sequence
  Description of Artificial Sequence: Synthetic oligonucleotide
gcgauccauaucucuucgu

SEQ ID NO: 352578 - RNA, 19 nt, Artificial Sequence
  Description of Artificial Sequence: Synthetic oligonucleotide
cacccacgcauucuccuuu

SEQ ID NO: 352579 - RNA, 19 nt, Artificial Sequence
  Description of Artificial Sequence: Synthetic oligonucleotide
ccacuggaugagcgacuug

SEQ ID NO: 352580 - RNA, 19 nt, Artificial Sequence
  Description of Artificial Sequence: Synthetic oligonucleotide
ccaucccgauaccggucug

SEQ ID NO: 352581 - RNA, 19 nt, Artificial Sequence
  Description of Artificial Sequence: Synthetic oligonucleotide
cgaauucgccuauuaccua

SEQ ID NO: 352582 - RNA, 19 nt, Artificial Sequence
  Description of Artificial Sequence: Synthetic oligonucleotide
cguccacucgaauucgccu

SEQ ID NO: 352583 - RNA, 19 nt, Artificial Sequence
  Description of Artificial Sequence: Synthetic oligonucleotide
cggucaauuggaggugcuc

SEQ ID NO: 352584 - RNA, 19 nt, Artificial Sequence
  Description of Artificial Sequence: Synthetic oligonucleotide
cgucauuacuaugccaagu

SEQ ID NO: 352585 - RNA, 19 nt, Artificial Sequence
  Description of Artificial Sequence: Synthetic oligonucleotide
gacgggcccuccagucugu

SEQ ID NO: 352586 - RNA, 19 nt, Artificial Sequence
  Description of Artificial Sequence: Synthetic oligonucleotide
ggaguacuccgaggcuuua

SEQ ID NO: 352587 - RNA, 19 nt, Artificial Sequence
  Description of Artificial Sequence: Synthetic oligonucleotide
gcgacuugcuaugcccacu

SEQ ID NO: 352588 - RNA, 19 nt, Artificial Sequence
  Description of Artificial Sequence: Synthetic oligonucleotide
cgaucgucccuucugucau

SEQ ID NO: 352589 - RNA, 19 nt, Artificial Sequence
  Description of Artificial Sequence: Synthetic oligonucleotide
cgccuauuaccuagagacu

SEQ ID NO: 352590 - RNA, 19 nt, Artificial Sequence
  Description of Artificial Sequence: Synthetic oligonucleotide
gcccgcuuccuagcuacua

SEQ ID NO: 352591 - RNA, 19 nt, Artificial Sequence
  Description of Artificial Sequence: Synthetic oligonucleotide
cgacuugggaacccaguuu

SEQ ID NO: 352592 - RNA, 19 nt, Artificial Sequence
  Description of Artificial Sequence: Synthetic oligonucleotide
cgugggccaucccgauauc

SEQ ID NO: 352593 - RNA, 19 nt, Artificial Sequence
  Description of Artificial Sequence: Synthetic oligonucleotide
ccgcucgacuggacuggga

SEQ ID NO: 352594 - RNA, 19 nt, Artificial Sequence
  Description of Artificial Sequence: Synthetic oligonucleotide
ccgaggcuuuagauucagu

SEQ ID NO: 352595 - RNA, 19 nt, Artificial Sequence
  Description of Artificial Sequence: Synthetic oligonucleotide
ggguucccgagcagcccgu

SEQ ID NO: 352596 - RNA, 19 nt, Artificial Sequence
  Description of Artificial Sequence: Synthetic oligonucleotide
ccaggaccgaucgucccuu

SEQ ID NO: 352597 - RNA, 19 nt, Artificial Sequence
  Description of Artificial Sequence: Synthetic oligonucleotide
cgauaccggucugaaucau

SEQ ID NO: 352598 - RNA, 19 nt, Artificial Sequence
  Description of Artificial Sequence: Synthetic oligonucleotide
ccacucgaauucgccuauu

SEQ ID NO: 352599 - RNA, 19 nt, Artificial Sequence
  Description of Artificial Sequence: Synthetic oligonucleotide
cggucuaguuuuggcucau

SEQ ID NO: 352600 - RNA, 19 nt, Artificial Sequence
  Description of Artificial Sequence: Synthetic oligonucleotide
cguggucaucucccucauu

SEQ ID NO: 352601 - RNA, 19 nt, Artificial Sequence
  Description of Artificial Sequence: Synthetic oligonucleotide
agcuaaacaaaauagggac

SEQ ID NO: 352602 - RNA, 19 nt, Artificial Sequence
  Description of Artificial Sequence: Synthetic oligonucleotide
aaaagugugaacuguauca

SEQ ID NO: 352603 - RNA, 19 nt, Artificial Sequence
  Description of Artificial Sequence: Synthetic oligonucleotide
aagauuagggcauaaaagu

SEQ ID NO: 352604 - RNA, 19 nt, Artificial Sequence
  Description of Artificial Sequence: Synthetic oligonucleotide
uaagauuagggcauaaaag

SEQ ID NO: 352605 - RNA, 19 nt, Artificial Sequence
  Description of Artificial Sequence: Synthetic oligonucleotide
ucaacuuaagauuagggca

SEQ ID NO: 352606 - RNA, 19 nt, Artificial Sequence
  Description of Artificial Sequence: Synthetic oligonucleotide
acuucauuuauguacaguc

SEQ ID NO: 352607 - RNA, 19 nt, Artificial Sequence
  Description of Artificial Sequence: Synthetic oligonucleotide
cuaccuguaaccuagaaug

SEQ ID NO: 352608 - RNA, 19 nt, Artificial Sequence
  Description of Artificial Sequence: Synthetic oligonucleotide
aaugcugaggaaauggagc

SEQ ID NO: 352609 - RNA, 19 nt, Artificial Sequence
  Description of Artificial Sequence: Synthetic oligonucleotide
aaaaggguccugcauaguc

SEQ ID NO: 352610 - RNA, 19 nt, Artificial Sequence
  Description of Artificial Sequence: Synthetic oligonucleotide
gaagauugucacuugaaag

SEQ ID NO: 352611 - RNA, 19 nt, Artificial Sequence
  Description of Artificial Sequence: Synthetic oligonucleotide
ugauucaaccagcugaagg

SEQ ID NO: 352612 - RNA, 19 nt, Artificial Sequence
  Description of Artificial Sequence: Synthetic oligonucleotide
ucauugacuaguauucagg

SEQ ID NO: 352613 - RNA, 19 nt, Artificial Sequence
  Description of Artificial Sequence: Synthetic oligonucleotide
uaaccuagaaugcugagga

SEQ ID NO: 352614 - RNA, 19 nt, Artificial Sequence
  Description of Artificial Sequence: Synthetic oligonucleotide
uuaagauuagggcauaaaa

SEQ ID NO: 352615 - RNA, 19 nt, Artificial Sequence
  Description of Artificial Sequence: Synthetic oligonucleotide
uugacuaguauucaggaaa

SEQ ID NO: 352616 - RNA, 19 nt, Artificial Sequence
  Description of Artificial Sequence: Synthetic oligonucleotide
aaaagucaggcugcuaugc

SEQ ID NO: 352617 - RNA, 19 nt, Artificial Sequence
  Description of Artificial Sequence: Synthetic oligonucleotide
uuucaaaucagugauugug

SEQ ID NO: 352618 - RNA, 19 nt, Artificial Sequence
  Description of Artificial Sequence: Synthetic oligonucleotide
cucaacuuaagauuagggc

SEQ ID NO: 352619 - RNA, 19 nt, Artificial Sequence
  Description of Artificial Sequence: Synthetic oligonucleotide
uuacuuucuaccuguaacc

SEQ ID NO: 352620 - RNA, 19 nt, Artificial Sequence
  Description of Artificial Sequence: Synthetic oligonucleotide
aauaauaggggaagggaag

SEQ ID NO: 352621 - RNA, 19 nt, Artificial Sequence
  Description of Artificial Sequence: Synthetic oligonucleotide
cuuucuaccuguaaccuag

SEQ ID NO: 352622 - RNA, 19 nt, Artificial Sequence
  Description of Artificial Sequence: Synthetic oligonucleotide
cuagguaaagcuuacugac

SEQ ID NO: 352623 - RNA, 19 nt, Artificial Sequence
  Description of Artificial Sequence: Synthetic oligonucleotide
auugugggaacacaguaag

SEQ ID NO: 352624 - RNA, 19 nt, Artificial Sequence
  Description of Artificial Sequence: Synthetic oligonucleotide
cacaaaaguacccuggccc

SEQ ID NO: 352625 - RNA, 19 nt, Artificial Sequence
  Description of Artificial Sequence: Synthetic oligonucleotide
aaacagauaaccaaccaga

SEQ ID NO: 352626 - RNA, 19 nt, Artificial Sequence
  Description of Artificial Sequence: Synthetic oligonucleotide
aguggcucaagucccauac

SEQ ID NO: 352627 - RNA, 19 nt, Artificial Sequence
  Description of Artificial Sequence: Synthetic oligonucleotide
uuugaagggagaugcacag

SEQ ID NO: 352628 - RNA, 19 nt, Artificial Sequence
  Description of Artificial Sequence: Synthetic oligonucleotide
uugcggacacuuuugaagg

SEQ ID NO: 352629 - RNA, 19 nt, Artificial Sequence
  Description of Artificial Sequence: Synthetic oligonucleotide
uugacuauagccccaggug

SEQ ID NO: 352630 - RNA, 19 nt, Artificial Sequence
  Description of Artificial Sequence: Synthetic oligonucleotide
ugacuauagccccaggugc

SEQ ID NO: 352631 - RNA, 19 nt, Artificial Sequence
  Description of Artificial Sequence: Synthetic oligonucleotide
agguaaagcuuacugacag

SEQ ID NO: 352632 - RNA, 19 nt, Artificial Sequence
  Description of Artificial Sequence: Synthetic oligonucleotide
aaccagacugcuuaagugu

SEQ ID NO: 352633 - RNA, 19 nt, Artificial Sequence
  Description of Artificial Sequence: Synthetic oligonucleotide
acuaguauucaggaaaauc

SEQ ID NO: 352634 - RNA, 19 nt, Artificial Sequence
  Description of Artificial Sequence: Synthetic oligonucleotide
ugcuagguaaagcuuacug

SEQ ID NO: 352635 - RNA, 19 nt, Artificial Sequence
  Description of Artificial Sequence: Synthetic oligonucleotide
cuugcggacacuuuugaag

SEQ ID NO: 352636 - RNA, 19 nt, Artificial Sequence
  Description of Artificial Sequence: Synthetic oligonucleotide
aggaaaggcggcccgaacc

SEQ ID NO: 352637 - RNA, 19 nt, Artificial Sequence
  Description of Artificial Sequence: Synthetic oligonucleotide
cuaaacgaacuucuguucc

SEQ ID NO: 352638 - RNA, 19 nt, Artificial Sequence
  Description of Artificial Sequence: Synthetic oligonucleotide
ugcuaugccagacacacuc

SEQ ID NO: 352639 - RNA, 19 nt, Artificial Sequence
  Description of Artificial Sequence: Synthetic oligonucleotide
aacagauaaccaaccagac

SEQ ID NO: 352640 - RNA, 19 nt, Artificial Sequence
  Description of Artificial Sequence: Synthetic oligonucleotide
auagggacuaccaucaguc

SEQ ID NO: 352641 - RNA, 19 nt, Artificial Sequence
  Description of Artificial Sequence: Synthetic oligonucleotide
uuuauguaguggcucaagu

SEQ ID NO: 352642 - RNA, 19 nt, Artificial Sequence
  Description of Artificial Sequence: Synthetic oligonucleotide
agugugaacuguaucaaac

SEQ ID NO: 352643 - RNA, 19 nt, Artificial Sequence
  Description of Artificial Sequence: Synthetic oligonucleotide
aauagggacuaccaucagu

SEQ ID NO: 352644 - RNA, 19 nt, Artificial Sequence
  Description of Artificial Sequence: Synthetic oligonucleotide
ucuccaaggagucccauga

SEQ ID NO: 352645 - RNA, 19 nt, Artificial Sequence
  Description of Artificial Sequence: Synthetic oligonucleotide
aucccuaauuagcuggccc

SEQ ID NO: 352646 - RNA, 19 nt, Artificial Sequence
  Description of Artificial Sequence: Synthetic oligonucleotide
gaaccuuucaaaucaguga

SEQ ID NO: 352647 - RNA, 19 nt, Artificial Sequence
  Description of Artificial Sequence: Synthetic oligonucleotide
aaucagugauugugggaac

SEQ ID NO: 352648 - RNA, 19 nt, Artificial Sequence
  Description of Artificial Sequence: Synthetic oligonucleotide
ccaguuaucccuauaaacc

SEQ ID NO: 352649 - RNA, 19 nt, Artificial Sequence
  Description of Artificial Sequence: Synthetic oligonucleotide
aaauaauaggggaagggaa

SEQ ID NO: 352650 - RNA, 19 nt, Artificial Sequence
  Description of Artificial Sequence: Synthetic oligonucleotide
ucccuauaaaccacuuggg

SEQ ID NO: 352651 - RNA, 19 nt, Artificial Sequence
  Description of Artificial Sequence: Synthetic oligonucleotide
ucaccacccaccuacuagg

SEQ ID NO: 352652 - RNA, 19 nt, Artificial Sequence
  Description of Artificial Sequence: Synthetic oligonucleotide
ugaaggaucacuguaguua

SEQ ID NO: 352653 - RNA, 19 nt, Artificial Sequence
  Description of Artificial Sequence: Synthetic oligonucleotide
gaaauaauaggggaaggga

SEQ ID NO: 352654 - RNA, 19 nt, Artificial Sequence
  Description of Artificial Sequence: Synthetic oligonucleotide
auguaggcgaucuuugcag

SEQ ID NO: 352655 - RNA, 19 nt, Artificial Sequence
  Description of Artificial Sequence: Synthetic oligonucleotide
uuuggucugccuagaacag

SEQ ID NO: 352656 - RNA, 19 nt, Artificial Sequence
  Description of Artificial Sequence: Synthetic oligonucleotide
uacucucacaaaaguaccc

SEQ ID NO: 352657 - RNA, 19 nt, Artificial Sequence
  Description of Artificial Sequence: Synthetic oligonucleotide
uucuccuaucccuaauuag

SEQ ID NO: 352658 - RNA, 19 nt, Artificial Sequence
  Description of Artificial Sequence: Synthetic oligonucleotide
auugacuauagccccaggu

SEQ ID NO: 352659 - RNA, 19 nt, Artificial Sequence
  Description of Artificial Sequence: Synthetic oligonucleotide
auugucacuugaaaguggg

SEQ ID NO: 352660 - RNA, 19 nt, Artificial Sequence
  Description of Artificial Sequence: Synthetic oligonucleotide
ucccagacgcaucaagagg

SEQ ID NO: 352661 - RNA, 19 nt, Artificial Sequence
  Description of Artificial Sequence: Synthetic oligonucleotide
ucucgugccggauacauuc

SEQ ID NO: 352662 - RNA, 19 nt, Artificial Sequence
  Description of Artificial Sequence: Synthetic oligonucleotide
uguaggcgaucuuugcagg

SEQ ID NO: 352663 - RNA, 19 nt, Artificial Sequence
  Description of Artificial Sequence: Synthetic oligonucleotide
ugauugugggaacacagua

SEQ ID NO: 352664 - RNA, 19 nt, Artificial Sequence
  Description of Artificial Sequence: Synthetic oligonucleotide
uccagguacucucacaaaa

SEQ ID NO: 352665 - RNA, 19 nt, Artificial Sequence
  Description of Artificial Sequence: Synthetic oligonucleotide
aaagguaaaaggaggaguu

SEQ ID NO: 352666 - RNA, 19 nt, Artificial Sequence
  Description of Artificial Sequence: Synthetic oligonucleotide
gcuaacgccgaccacaccg

SEQ ID NO: 352667 - RNA, 19 nt, Artificial Sequence
  Description of Artificial Sequence: Synthetic oligonucleotide
gauuccucugaccucgagc

SEQ ID NO: 352668 - RNA, 19 nt, Artificial Sequence
  Description of Artificial Sequence: Synthetic oligonucleotide
uggucugccuagaacagug

SEQ ID NO: 352669 - RNA, 19 nt, Artificial Sequence
  Description of Artificial Sequence: Synthetic oligonucleotide
uuuugcugucuccuggaug

SEQ ID NO: 352670 - RNA, 19 nt, Artificial Sequence
  Description of Artificial Sequence: Synthetic oligonucleotide
gauugucacuugaaagugg

SEQ ID NO: 352671 - RNA, 19 nt, Artificial Sequence
  Description of Artificial Sequence: Synthetic oligonucleotide
guaaccuagaaugcugagg

SEQ ID NO: 352672 - RNA, 19 nt, Artificial Sequence
  Description of Artificial Sequence: Synthetic oligonucleotide
aucaccacccaccuacuag

SEQ ID NO: 352673 - RNA, 19 nt, Artificial Sequence
  Description of Artificial Sequence: Synthetic oligonucleotide
cuaucagaguccauuucag

SEQ ID NO: 352674 - RNA, 19 nt, Artificial Sequence
  Description of Artificial Sequence: Synthetic oligonucleotide
ugaaaagugugaacuguau

SEQ ID NO: 352675 - RNA, 19 nt, Artificial Sequence
  Description of Artificial Sequence: Synthetic oligonucleotide
cugguagucaaaguggccc

SEQ ID NO: 352676 - RNA, 19 nt, Artificial Sequence
  Description of Artificial Sequence: Synthetic oligonucleotide
uggacccacagaccaaagg

SEQ ID NO: 352677 - RNA, 19 nt, Artificial Sequence
  Description of Artificial Sequence: Synthetic oligonucleotide
gacacacucugccccaugg

SEQ ID NO: 352678 - RNA, 19 nt, Artificial Sequence
  Description of Artificial Sequence: Synthetic oligonucleotide
cugcuuaagugucacagac

SEQ ID NO: 352679 - RNA, 19 nt, Artificial Sequence
  Description of Artificial Sequence: Synthetic oligonucleotide
cccaugggaaauaauaggg

SEQ ID NO: 352680 - RNA, 19 nt, Artificial Sequence
  Description of Artificial Sequence: Synthetic oligonucleotide
auggucucgugccggauac

SEQ ID NO: 352681 - RNA, 19 nt, Artificial Sequence
  Description of Artificial Sequence: Synthetic oligonucleotide
uguaaccuagaaugcugag

SEQ ID NO: 352682 - RNA, 19 nt, Artificial Sequence
  Description of Artificial Sequence: Synthetic oligonucleotide
acaaaaguacccuggcccu

SEQ ID NO: 352683 - RNA, 19 nt, Artificial Sequence
  Description of Artificial Sequence: Synthetic oligonucleotide
uguugggaagcccugcuuc

SEQ ID NO: 352684 - RNA, 19 nt, Artificial Sequence
  Description of Artificial Sequence: Synthetic oligonucleotide
ggaaauaauaggggaaggg

SEQ ID NO: 352685 - RNA, 19 nt, Artificial Sequence
  Description of Artificial Sequence: Synthetic oligonucleotide
guaagagacuauuuuaugu

SEQ ID NO: 352686 - RNA, 19 nt, Artificial Sequence
  Description of Artificial Sequence: Synthetic oligonucleotide
agacugaagacaaacagau

SEQ ID NO: 352687 - RNA, 19 nt, Artificial Sequence
  Description of Artificial Sequence: Synthetic oligonucleotide
aaaggguguugggaagccc

SEQ ID NO: 352688 - RNA, 19 nt, Artificial Sequence
  Description of Artificial Sequence: Synthetic oligonucleotide
auuagggcauaaaagucag

SEQ ID NO: 352689 - RNA, 19 nt, Artificial Sequence
  Description of Artificial Sequence: Synthetic oligonucleotide
uuuuauguaguggcucaag

SEQ ID NO: 352690 - RNA, 19 nt, Artificial Sequence
  Description of Artificial Sequence: Synthetic oligonucleotide
agauugucacuugaaagug

SEQ ID NO: 352691 - RNA, 19 nt, Artificial Sequence
  Description of Artificial Sequence: Synthetic oligonucleotide
aaagugugaacuguaucaa

SEQ ID NO: 352692 - RNA, 19 nt, Artificial Sequence
  Description of Artificial Sequence: Synthetic oligonucleotide
auguaguggcucaaguccc

SEQ ID NO: 352693 - RNA, 19 nt, Artificial Sequence
  Description of Artificial Sequence: Synthetic oligonucleotide
caaccagacugcuuaagug

SEQ ID NO: 352694 - RNA, 19 nt, Artificial Sequence
  Description of Artificial Sequence: Synthetic oligonucleotide
uggcccaugggaaauaaua

SEQ ID NO: 352695 - RNA, 19 nt, Artificial Sequence
  Description of Artificial Sequence: Synthetic oligonucleotide
gguacucucacaaaaguac

SEQ ID NO: 352696 - RNA, 19 nt, Artificial Sequence
  Description of Artificial Sequence: Synthetic oligonucleotide
gagaccuuuauagcagcgg

SEQ ID NO: 352697 - RNA, 19 nt, Artificial Sequence
  Description of Artificial Sequence: Synthetic oligonucleotide
ccuaucccuaauuagcugg

SEQ ID NO: 352698 - RNA, 19 nt, Artificial Sequence
  Description of Artificial Sequence: Synthetic oligonucleotide
aagauguaggcgaucuuug

SEQ ID NO: 352699 - RNA, 19 nt, Artificial Sequence
  Description of Artificial Sequence: Synthetic oligonucleotide
acaccggcaacaccgcucg

SEQ ID NO: 352700 - RNA, 19 nt, Artificial Sequence
  Description of Artificial Sequence: Synthetic oligonucleotide
aggcugcuaugccagacac

SEQ ID NO: 352701 - RNA, 19 nt, Artificial Sequence
  Description of Artificial Sequence: Synthetic oligonucleotide
aacugggauggauuccucu

SEQ ID NO: 352702 - RNA, 19 nt, Artificial Sequence
  Description of Artificial Sequence: Synthetic oligonucleotide
cauugacuaguauucagga

SEQ ID NO: 352703 - RNA, 19 nt, Artificial Sequence
  Description of Artificial Sequence: Synthetic oligonucleotide
cauccgggcaggaaaggcg

SEQ ID NO: 352704 - RNA, 19 nt, Artificial Sequence
  Description of Artificial Sequence: Synthetic oligonucleotide
aacuucauuuauguacagu

SEQ ID NO: 352705 - RNA, 19 nt, Artificial Sequence
  Description of Artificial Sequence: Synthetic oligonucleotide
ggucagauuggaaacagcc

SEQ ID NO: 352706 - RNA, 19 nt, Artificial Sequence
  Description of Artificial Sequence: Synthetic oligonucleotide
ugcuuaagugucacagaca

SEQ ID NO: 352707 - RNA, 19 nt, Artificial Sequence
  Description of Artificial Sequence: Synthetic oligonucleotide
caguuaucccuauaaacca

SEQ ID NO: 352708 - RNA, 19 nt, Artificial Sequence
  Description of Artificial Sequence: Synthetic oligonucleotide
accucgagccacugaaaac

SEQ ID NO: 352709 - RNA, 19 nt, Artificial Sequence
  Description of Artificial Sequence: Synthetic oligonucleotide
cuacagacaacagcuaaac

SEQ ID NO: 352710 - RNA, 19 nt, Artificial Sequence
  Description of Artificial Sequence: Synthetic oligonucleotide
aagugugaacuguaucaaa

SEQ ID NO: 352711 - RNA, 19 nt, Artificial Sequence
  Description of Artificial Sequence: Synthetic oligonucleotide
gcucaagucccauacacgc

SEQ ID NO: 352712 - RNA, 19 nt, Artificial Sequence
  Description of Artificial Sequence: Synthetic oligonucleotide
ggacccacagaccaaaggc

SEQ ID NO: 352713 - RNA, 19 nt, Artificial Sequence
  Description of Artificial Sequence: Synthetic oligonucleotide
ucccuaauuagcuggcccu

SEQ ID NO: 352714 - RNA, 19 nt, Artificial Sequence
  Description of Artificial Sequence: Synthetic oligonucleotide
agagucccagccacaaucc

SEQ ID NO: 352715 - RNA, 19 nt, Artificial Sequence
  Description of Artificial Sequence: Synthetic oligonucleotide
uugaaagugggaacacuua

SEQ ID NO: 352716 - RNA, 19 nt, Artificial Sequence
  Description of Artificial Sequence: Synthetic oligonucleotide
aucaagagggacugguagu

SEQ ID NO: 352717 - RNA, 19 nt, Artificial Sequence
  Description of Artificial Sequence: Synthetic oligonucleotide
accugaaaagugugaacug

SEQ ID NO: 352718 - RNA, 19 nt, Artificial Sequence
  Description of Artificial Sequence: Synthetic oligonucleotide
agccuaaacgaacuucugu

SEQ ID NO: 352719 - RNA, 19 nt, Artificial Sequence
  Description of Artificial Sequence: Synthetic oligonucleotide
ggaacacuuaaauggauga

SEQ ID NO: 352720 - RNA, 19 nt, Artificial Sequence
  Description of Artificial Sequence: Synthetic oligonucleotide
aaaggguccugcauagucu

SEQ ID NO: 352721 - RNA, 19 nt, Artificial Sequence
  Description of Artificial Sequence: Synthetic oligonucleotide
aagagggacugguagucaa

SEQ ID NO: 352722 - RNA, 19 nt, Artificial Sequence
  Description of Artificial Sequence: Synthetic oligonucleotide
accuacuaggagucagaac

SEQ ID NO: 352723 - RNA, 19 nt, Artificial Sequence
  Description of Artificial Sequence: Synthetic oligonucleotide
gacugguagucaaaguggc

SEQ ID NO: 352724 - RNA, 19 nt, Artificial Sequence
  Description of Artificial Sequence: Synthetic oligonucleotide
aguauucaggaaaaucugu

SEQ ID NO: 352725 - RNA, 19 nt, Artificial Sequence
  Description of Artificial Sequence: Synthetic oligonucleotide
auugacuaguauucaggaa

SEQ ID NO: 352726 - RNA, 19 nt, Artificial Sequence
  Description of Artificial Sequence: Synthetic oligonucleotide
ucccaugauccacaaggca

SEQ ID NO: 352727 - RNA, 19 nt, Artificial Sequence
  Description of Artificial Sequence: Synthetic oligonucleotide
auaauaggggaagggaaga

SEQ ID NO: 352728 - RNA, 19 nt, Artificial Sequence
  Description of Artificial Sequence: Synthetic oligonucleotide
cagaaggccugcaucacac

SEQ ID NO: 352729 - RNA, 19 nt, Artificial Sequence
  Description of Artificial Sequence: Synthetic oligonucleotide
cucccauacccacaggcgc

SEQ ID NO: 352730 - RNA, 19 nt, Artificial Sequence
  Description of Artificial Sequence: Synthetic oligonucleotide
cccagacgcaucaagaggg

SEQ ID NO: 352731 - RNA, 19 nt, Artificial Sequence
  Description of Artificial Sequence: Synthetic oligonucleotide
aaaggcggcccgaacccgc

SEQ ID NO: 352732 - RNA, 19 nt, Artificial Sequence
  Description of Artificial Sequence: Synthetic oligonucleotide
uacuuucuaccuguaaccu

SEQ ID NO: 352733 - RNA, 19 nt, Artificial Sequence
  Description of Artificial Sequence: Synthetic oligonucleotide
gaggucagauuggaaacag

SEQ ID NO: 352734 - RNA, 19 nt, Artificial Sequence
  Description of Artificial Sequence: Synthetic oligonucleotide
cuaacgccgaccacaccgg

SEQ ID NO: 352735 - RNA, 19 nt, Artificial Sequence
  Description of Artificial Sequence: Synthetic oligonucleotide
ugcggacacuuuugaaggg

SEQ ID NO: 352736 - RNA, 19 nt, Artificial Sequence
  Description of Artificial Sequence: Synthetic oligonucleotide
aucagucccagacgcauca

SEQ ID NO: 352737 - RNA, 19 nt, Artificial Sequence
  Description of Artificial Sequence: Synthetic oligonucleotide
gaggaguuuccagaguccc

SEQ ID NO: 352738 - RNA, 19 nt, Artificial Sequence
  Description of Artificial Sequence: Synthetic oligonucleotide
uccuaucccuaauuagcug

SEQ ID NO: 352739 - RNA, 19 nt, Artificial Sequence
  Description of Artificial Sequence: Synthetic oligonucleotide
acauccgggcaggaaaggc

SEQ ID NO: 352740 - RNA, 19 nt, Artificial Sequence
  Description of Artificial Sequence: Synthetic oligonucleotide
uguuccccaagugagcugu

SEQ ID NO: 352741 - RNA, 19 nt, Artificial Sequence
  Description of Artificial Sequence: Synthetic oligonucleotide
ugcacagugccucuccguc

SEQ ID NO: 352742 - RNA, 19 nt, Artificial Sequence
  Description of Artificial Sequence: Synthetic oligonucleotide
aaaaguacccuggcccuga

SEQ ID NO: 352743 - RNA, 19 nt, Artificial Sequence
  Description of Artificial Sequence: Synthetic oligonucleotide
aggagucagaacagcaaac

SEQ ID NO: 352744 - RNA, 19 nt, Artificial Sequence
  Description of Artificial Sequence: Synthetic oligonucleotide
agggcauaaaagucaggcu

SEQ ID NO: 352745 - RNA, 19 nt, Artificial Sequence
  Description of Artificial Sequence: Synthetic oligonucleotide
gucccagacgcaucaagag

SEQ ID NO: 352746 - RNA, 19 nt, Artificial Sequence
  Description of Artificial Sequence: Synthetic oligonucleotide
agguguguugguuguuuag

SEQ ID NO: 352747 - RNA, 19 nt, Artificial Sequence
  Description of Artificial Sequence: Synthetic oligonucleotide
cucagucggacucuccgcc

SEQ ID NO: 352748 - RNA, 19 nt, Artificial Sequence
  Description of Artificial Sequence: Synthetic oligonucleotide
ccucaacuuaagauuaggg

SEQ ID NO: 352749 - RNA, 19 nt, Artificial Sequence
  Description of Artificial Sequence: Synthetic oligonucleotide
gucagauauaaagacaucu

SEQ ID NO: 352750 - RNA, 19 nt, Artificial Sequence
  Description of Artificial Sequence: Synthetic oligonucleotide
gucaaaguggccccgcuuc

SEQ ID NO: 352751 - RNA, 19 nt, Artificial Sequence
  Description of Artificial Sequence: Synthetic oligonucleotide
ucuccaaaaggguccugca

SEQ ID NO: 352752 - RNA, 19 nt, Artificial Sequence
  Description of Artificial Sequence: Synthetic oligonucleotide
acugguagucaaaguggcc

SEQ ID NO: 352753 - RNA, 19 nt, Artificial Sequence
  Description of Artificial Sequence: Synthetic oligonucleotide
ugcaacucugauggucucg

SEQ ID NO: 352754 - RNA, 19 nt, Artificial Sequence
  Description of Artificial Sequence: Synthetic oligonucleotide
ucccauacacgcugcagcu

SEQ ID NO: 352755 - RNA, 19 nt, Artificial Sequence
  Description of Artificial Sequence: Synthetic oligonucleotide
gauugacuauagccccagg

SEQ ID NO: 352756 - RNA, 19 nt, Artificial Sequence
  Description of Artificial Sequence: Synthetic oligonucleotide
aacgaacuucuguucccca

SEQ ID NO: 352757 - RNA, 19 nt, Artificial Sequence
  Description of Artificial Sequence: Synthetic oligonucleotide
ccuauaaaccacuugggca

SEQ ID NO: 352758 - RNA, 19 nt, Artificial Sequence
  Description of Artificial Sequence: Synthetic oligonucleotide
gcccaugggaaauaauagg

SEQ ID NO: 352759 - RNA, 19 nt, Artificial Sequence
  Description of Artificial Sequence: Synthetic oligonucleotide
gucagauuggaaacagccc

SEQ ID NO: 352760 - RNA, 19 nt, Artificial Sequence
  Description of Artificial Sequence: Synthetic oligonucleotide
aacaccgcucgccccuggg

SEQ ID NO: 352761 - RNA, 19 nt, Artificial Sequence
  Description of Artificial Sequence: Synthetic oligonucleotide
acccucauugacuaguauu

SEQ ID NO: 352762 - RNA, 19 nt, Artificial Sequence
  Description of Artificial Sequence: Synthetic oligonucleotide
cuaugccagacacacucug

SEQ ID NO: 352763 - RNA, 19 nt, Artificial Sequence
  Description of Artificial Sequence: Synthetic oligonucleotide
aaucagucccagacgcauc

SEQ ID NO: 352764 - RNA, 19 nt, Artificial Sequence
  Description of Artificial Sequence: Synthetic oligonucleotide
uagccuaaacgaacuucug

SEQ ID NO: 352765 - RNA, 19 nt, Artificial Sequence
  Description of Artificial Sequence: Synthetic oligonucleotide
gcuagguaaagcuuacuga

SEQ ID NO: 352766 - RNA, 19 nt, Artificial Sequence
  Description of Artificial Sequence: Synthetic oligonucleotide
acucucacaaaaguacccu

SEQ ID NO: 352767 - RNA, 19 nt, Artificial Sequence
  Description of Artificial Sequence: Synthetic oligonucleotide
gguaaaaggaggaguuucc

SEQ ID NO: 352768 - RNA, 19 nt, Artificial Sequence
  Description of Artificial Sequence: Synthetic oligonucleotide
cagucagauauaaagacau

SEQ ID NO: 352769 - RNA, 19 nt, Artificial Sequence
  Description of Artificial Sequence: Synthetic oligonucleotide
agucagauauaaagacauc

SEQ ID NO: 352770 - RNA, 19 nt, Artificial Sequence
  Description of Artificial Sequence: Synthetic oligonucleotide
guaggcgaucuuugcaggc

SEQ ID NO: 352771 - RNA, 19 nt, Artificial Sequence
  Description of Artificial Sequence: Synthetic oligonucleotide
caagugagcugucuuuguc

SEQ ID NO: 352772 - RNA, 19 nt, Artificial Sequence
  Description of Artificial Sequence: Synthetic oligonucleotide
gaccuuuauagcagcgggc

SEQ ID NO: 352773 - RNA, 19 nt, Artificial Sequence
  Description of Artificial Sequence: Synthetic oligonucleotide
ugccagacacacucugccc

SEQ ID NO: 352774 - RNA, 19 nt, Artificial Sequence
  Description of Artificial Sequence: Synthetic oligonucleotide
caccucauaaaagucauaa

SEQ ID NO: 352775 - RNA, 19 nt, Artificial Sequence
  Description of Artificial Sequence: Synthetic oligonucleotide
acaccgcucgccccugggc

SEQ ID NO: 352776 - RNA, 19 nt, Artificial Sequence
  Description of Artificial Sequence: Synthetic oligonucleotide
accucauaaaagucauaau

SEQ ID NO: 352777 - RNA, 19 nt, Artificial Sequence
  Description of Artificial Sequence: Synthetic oligonucleotide
ucuugcggacacuuuugaa

SEQ ID NO: 352778 - RNA, 19 nt, Artificial Sequence
  Description of Artificial Sequence: Synthetic oligonucleotide
ggaaaggcggcccgaaccc

SEQ ID NO: 352779 - RNA, 19 nt, Artificial Sequence
  Description of Artificial Sequence: Synthetic oligonucleotide
ccuccagguagccuaaacg

SEQ ID NO: 352780 - RNA, 19 nt, Artificial Sequence
  Description of Artificial Sequence: Synthetic oligonucleotide
gggacuaccaucagucucc

SEQ ID NO: 352781 - RNA, 19 nt, Artificial Sequence
  Description of Artificial Sequence: Synthetic oligonucleotide
gggacuuacuuucuaccug

SEQ ID NO: 352782 - RNA, 19 nt, Artificial Sequence
  Description of Artificial Sequence: Synthetic oligonucleotide
gacucuccgccaucgcugc

SEQ ID NO: 352783 - RNA, 19 nt, Artificial Sequence
  Description of Artificial Sequence: Synthetic oligonucleotide
ccgaaucagucccagacgc

SEQ ID NO: 352784 - RNA, 19 nt, Artificial Sequence
  Description of Artificial Sequence: Synthetic oligonucleotide
cccuauaaaccacuugggc

SEQ ID NO: 352785 - RNA, 19 nt, Artificial Sequence
  Description of Artificial Sequence: Synthetic oligonucleotide
accuguaaccuagaaugcu

SEQ ID NO: 352786 - RNA, 19 nt, Artificial Sequence
  Description of Artificial Sequence: Synthetic oligonucleotide
guaaaaggaggaguuucca

SEQ ID NO: 352787 - RNA, 19 nt, Artificial Sequence
  Description of Artificial Sequence: Synthetic oligonucleotide
aagguaaaaggaggaguuu

SEQ ID NO: 352788 - RNA, 19 nt, Artificial Sequence
  Description of Artificial Sequence: Synthetic oligonucleotide
acuauagccccaggugcuc

SEQ ID NO: 352789 - RNA, 19 nt, Artificial Sequence
  Description of Artificial Sequence: Synthetic oligonucleotide
cucugauggucucgugccg

SEQ ID NO: 352790 - RNA, 19 nt, Artificial Sequence
  Description of Artificial Sequence: Synthetic oligonucleotide
gaccucgagccacugaaaa

SEQ ID NO: 352791 - RNA, 19 nt, Artificial Sequence
  Description of Artificial Sequence: Synthetic oligonucleotide
gguaaagcuuacugacagc

SEQ ID NO: 352792 - RNA, 19 nt, Artificial Sequence
  Description of Artificial Sequence: Synthetic oligonucleotide
auccgggcaggaaaggcgg

SEQ ID NO: 352793 - RNA, 19 nt, Artificial Sequence
  Description of Artificial Sequence: Synthetic oligonucleotide
aagucccauacacgcugca

SEQ ID NO: 352794 - RNA, 19 nt, Artificial Sequence
  Description of Artificial Sequence: Synthetic oligonucleotide
gggaacacuuaaauggaug

SEQ ID NO: 352795 - RNA, 19 nt, Artificial Sequence
  Description of Artificial Sequence: Synthetic oligonucleotide
gaaaggcggcccgaacccg

SEQ ID NO: 352796 - RNA, 19 nt, Artificial Sequence
  Description of Artificial Sequence: Synthetic oligonucleotide
cccgcuucucuccaaaagg

SEQ ID NO: 352797 - RNA, 19 nt, Artificial Sequence
  Description of Artificial Sequence: Synthetic oligonucleotide
uagucaaaguggccccgcu

SEQ ID NO: 352798 - RNA, 19 nt, Artificial Sequence
  Description of Artificial Sequence: Synthetic oligonucleotide
ggagcaagggagaaaggug

SEQ ID NO: 352799 - RNA, 19 nt, Artificial Sequence
  Description of Artificial Sequence: Synthetic oligonucleotide
cauacccacaggcgcuucc

SEQ ID NO: 352800 - RNA, 19 nt, Artificial Sequence
  Description of Artificial Sequence: Synthetic oligonucleotide
gacccacagaccaaaggca

SEQ ID NO: 352801 - RNA, 19 nt, Artificial Sequence
  Description of Artificial Sequence: Synthetic oligonucleotide
agacgcaucaagagggacu

SEQ ID NO: 352802 - RNA, 19 nt, Artificial Sequence
  Description of Artificial Sequence: Synthetic oligonucleotide
guagccuaaacgaacuucu

SEQ ID NO: 352803 - RNA, 19 nt, Artificial Sequence
  Description of Artificial Sequence: Synthetic oligonucleotide
ggcccaugggaaauaauag

SEQ ID NO: 352804 - RNA, 19 nt, Artificial Sequence
  Description of Artificial Sequence: Synthetic oligonucleotide
agaaaggugcucaggugcu

SEQ ID NO: 352805 - RNA, 19 nt, Artificial Sequence
  Description of Artificial Sequence: Synthetic oligonucleotide
cauguucacaaagccccag

SEQ ID NO: 352806 - RNA, 19 nt, Artificial Sequence
  Description of Artificial Sequence: Synthetic oligonucleotide
ggucuagacccucaggcuc

SEQ ID NO: 352807 - RNA, 19 nt, Artificial Sequence
  Description of Artificial Sequence: Synthetic oligonucleotide
gugccggauacauucauua

SEQ ID NO: 352808 - RNA, 19 nt, Artificial Sequence
  Description of Artificial Sequence: Synthetic oligonucleotide
gaagauguaggcgaucuuu

SEQ ID NO: 352809 - RNA, 19 nt, Artificial Sequence
  Description of Artificial Sequence: Synthetic oligonucleotide
ccgcuucucuccaaaaggg

SEQ ID NO: 352810 - RNA, 19 nt, Artificial Sequence
  Description of Artificial Sequence: Synthetic oligonucleotide
ucucgccaaaggcucucca

SEQ ID NO: 352811 - RNA, 19 nt, Artificial Sequence
  Description of Artificial Sequence: Synthetic oligonucleotide
acgaacuucuguuccccaa

SEQ ID NO: 352812 - RNA, 19 nt, Artificial Sequence
  Description of Artificial Sequence: Synthetic oligonucleotide
ccuaaacgaacuucuguuc

SEQ ID NO: 352813 - RNA, 19 nt, Artificial Sequence
  Description of Artificial Sequence: Synthetic oligonucleotide
gugcccuaucuucuccccg

SEQ ID NO: 352814 - RNA, 19 nt, Artificial Sequence
  Description of Artificial Sequence: Synthetic oligonucleotide
gacacuuuugaagggagau

SEQ ID NO: 352815 - RNA, 19 nt, Artificial Sequence
  Description of Artificial Sequence: Synthetic oligonucleotide
cagacugcuuaagugucac

SEQ ID NO: 352816 - RNA, 19 nt, Artificial Sequence
  Description of Artificial Sequence: Synthetic oligonucleotide
cuaauuagcuggcccugca

SEQ ID NO: 352817 - RNA, 19 nt, Artificial Sequence
  Description of Artificial Sequence: Synthetic oligonucleotide
ucuccccgugcucuacccc

SEQ ID NO: 352818 - RNA, 19 nt, Artificial Sequence
  Description of Artificial Sequence: Synthetic oligonucleotide
ugccggauacauucauuau

SEQ ID NO: 352819 - RNA, 19 nt, Artificial Sequence
  Description of Artificial Sequence: Synthetic oligonucleotide
uaacgccgaccacaccggc

SEQ ID NO: 352820 - RNA, 19 nt, Artificial Sequence
  Description of Artificial Sequence: Synthetic oligonucleotide
auggaagaggggaauugga

SEQ ID NO: 352821 - RNA, 19 nt, Artificial Sequence
  Description of Artificial Sequence: Synthetic oligonucleotide
gugcucuaccccaagaaaa

SEQ ID NO: 352822 - RNA, 19 nt, Artificial Sequence
  Description of Artificial Sequence: Synthetic oligonucleotide
cuuaagauuagggcauaaa

SEQ ID NO: 352823 - RNA, 19 nt, Artificial Sequence
  Description of Artificial Sequence: Synthetic oligonucleotide
gguagccuaaacgaacuuc

SEQ ID NO: 352824 - RNA, 19 nt, Artificial Sequence
  Description of Artificial Sequence: Synthetic oligonucleotide
ucacacggaucaccaccca

SEQ ID NO: 352825 - RNA, 19 nt, Artificial Sequence
  Description of Artificial Sequence: Synthetic oligonucleotide
caccgcucgccccugggcc

SEQ ID NO: 352826 - RNA, 19 nt, Artificial Sequence
  Description of Artificial Sequence: Synthetic oligonucleotide
agguacucucacaaaagua

SEQ ID NO: 352827 - RNA, 19 nt, Artificial Sequence
  Description of Artificial Sequence: Synthetic oligonucleotide
cggaucaccacccaccuac

SEQ ID NO: 352828 - RNA, 19 nt, Artificial Sequence
  Description of Artificial Sequence: Synthetic oligonucleotide
accacaccggcaacaccgc

SEQ ID NO: 352829 - RNA, 19 nt, Artificial Sequence
  Description of Artificial Sequence: Synthetic oligonucleotide
ucgugccggauacauucau

SEQ ID NO: 352830 - RNA, 19 nt, Artificial Sequence
  Description of Artificial Sequence: Synthetic oligonucleotide
cagcaaaccugaaaagugu

SEQ ID NO: 352831 - RNA, 19 nt, Artificial Sequence
  Description of Artificial Sequence: Synthetic oligonucleotide
cuucuccuaucccuaauua

SEQ ID NO: 352832 - RNA, 19 nt, Artificial Sequence
  Description of Artificial Sequence: Synthetic oligonucleotide
guagucaaaguggccccgc

SEQ ID NO: 352833 - RNA, 19 nt, Artificial Sequence
  Description of Artificial Sequence: Synthetic oligonucleotide
caaaaguacccuggcccug

SEQ ID NO: 352834 - RNA, 19 nt, Artificial Sequence
  Description of Artificial Sequence: Synthetic oligonucleotide
augcacagugccucuccgu

SEQ ID NO: 352835 - RNA, 19 nt, Artificial Sequence
  Description of Artificial Sequence: Synthetic oligonucleotide
aggugcuagguaaagcuua

SEQ ID NO: 352836 - RNA, 19 nt, Artificial Sequence
  Description of Artificial Sequence: Synthetic oligonucleotide
ucgccccugggccugccgc

SEQ ID NO: 352837 - RNA, 19 nt, Artificial Sequence
  Description of Artificial Sequence: Synthetic oligonucleotide
gaacccgccgccgcucccg

SEQ ID NO: 352838 - RNA, 19 nt, Artificial Sequence
  Description of Artificial Sequence: Synthetic oligonucleotide
agacugcuuaagugucaca

SEQ ID NO: 352839 - RNA, 19 nt, Artificial Sequence
  Description of Artificial Sequence: Synthetic oligonucleotide
ugacuccugugcauauauu

SEQ ID NO: 352840 - RNA, 19 nt, Artificial Sequence
  Description of Artificial Sequence: Synthetic oligonucleotide
gcugcuucgcuuccgggac

SEQ ID NO: 352841 - RNA, 19 nt, Artificial Sequence
  Description of Artificial Sequence: Synthetic oligonucleotide
caucugacccagccuccag

SEQ ID NO: 352842 - RNA, 19 nt, Artificial Sequence
  Description of Artificial Sequence: Synthetic oligonucleotide
aacgccgaccacaccggca

SEQ ID NO: 352843 - RNA, 19 nt, Artificial Sequence
  Description of Artificial Sequence: Synthetic oligonucleotide
ccgucccugggguugaggg

SEQ ID NO: 352844 - RNA, 19 nt, Artificial Sequence
  Description of Artificial Sequence: Synthetic oligonucleotide
gagguguguugguuguuua

SEQ ID NO: 352845 - RNA, 19 nt, Artificial Sequence
  Description of Artificial Sequence: Synthetic oligonucleotide
ggaggaguuuccagagucc

SEQ ID NO: 352846 - RNA, 19 nt, Artificial Sequence
  Description of Artificial Sequence: Synthetic oligonucleotide
cagguacucucacaaaagu

SEQ ID NO: 352847 - RNA, 19 nt, Artificial Sequence
  Description of Artificial Sequence: Synthetic oligonucleotide
uucucggcccuggacuaga

SEQ ID NO: 352848 - RNA, 19 nt, Artificial Sequence
  Description of Artificial Sequence: Synthetic oligonucleotide
agggagaugcacagugccu

SEQ ID NO: 352849 - RNA, 19 nt, Artificial Sequence
  Description of Artificial Sequence: Synthetic oligonucleotide
gacuaccaucagucucccc

SEQ ID NO: 352850 - RNA, 19 nt, Artificial Sequence
  Description of Artificial Sequence: Synthetic oligonucleotide
agguagccuaaacgaacuu

SEQ ID NO: 352851 - RNA, 19 nt, Artificial Sequence
  Description of Artificial Sequence: Synthetic oligonucleotide
caacucugauggucucgug

SEQ ID NO: 352852 - RNA, 19 nt, Artificial Sequence
  Description of Artificial Sequence: Synthetic oligonucleotide
uaguggcucaagucccaua

SEQ ID NO: 352853 - RNA, 19 nt, Artificial Sequence
  Description of Artificial Sequence: Synthetic oligonucleotide
caggaaaggcggcccgaac

SEQ ID NO: 352854 - RNA, 19 nt, Artificial Sequence
  Description of Artificial Sequence: Synthetic oligonucleotide
cuccccgucucuccaagga

SEQ ID NO: 352855 - RNA, 19 nt, Artificial Sequence
  Description of Artificial Sequence: Synthetic oligonucleotide
cugcaacucugauggucuc

SEQ ID NO: 352856 - RNA, 19 nt, Artificial Sequence
  Description of Artificial Sequence: Synthetic oligonucleotide
uuauagcagcgggcagggc

SEQ ID NO: 352857 - RNA, 19 nt, Artificial Sequence
  Description of Artificial Sequence: Synthetic oligonucleotide
uccgucccugggguugagg

SEQ ID NO: 352858 - RNA, 19 nt, Artificial Sequence
  Description of Artificial Sequence: Synthetic oligonucleotide
cucccgcuaacgccgacca

SEQ ID NO: 352859 - RNA, 19 nt, Artificial Sequence
  Description of Artificial Sequence: Synthetic oligonucleotide
uugucaucuugcggacacu

SEQ ID NO: 352860 - RNA, 19 nt, Artificial Sequence
  Description of Artificial Sequence: Synthetic oligonucleotide
gcuaaacaaaauagggacu

SEQ ID NO: 352861 - RNA, 19 nt, Artificial Sequence
  Description of Artificial Sequence: Synthetic oligonucleotide
gccuaaacgaacuucuguu

SEQ ID NO: 352862 - RNA, 19 nt, Artificial Sequence
  Description of Artificial Sequence: Synthetic oligonucleotide
gagaugcacagugccucuc

SEQ ID NO: 352863 - RNA, 19 nt, Artificial Sequence
  Description of Artificial Sequence: Synthetic oligonucleotide
guggcucaagucccauaca

SEQ ID NO: 352864 - RNA, 19 nt, Artificial Sequence
  Description of Artificial Sequence: Synthetic oligonucleotide
caaaguggccccgcuucuc

SEQ ID NO: 352865 - RNA, 19 nt, Artificial Sequence
  Description of Artificial Sequence: Synthetic oligonucleotide
ccuaauuagcuggcccugc

SEQ ID NO: 352866 - RNA, 19 nt, Artificial Sequence
  Description of Artificial Sequence: Synthetic oligonucleotide
ugccuagaacagugacuau

SEQ ID NO: 352867 - RNA, 19 nt, Artificial Sequence
  Description of Artificial Sequence: Synthetic oligonucleotide
ccucagucggacucuccgc

SEQ ID NO: 352868 - RNA, 19 nt, Artificial Sequence
  Description of Artificial Sequence: Synthetic oligonucleotide
cucaagucccauacacgcu

SEQ ID NO: 352869 - RNA, 19 nt, Artificial Sequence
  Description of Artificial Sequence: Synthetic oligonucleotide
ucuccgucccugggguuga

SEQ ID NO: 352870 - RNA, 19 nt, Artificial Sequence
  Description of Artificial Sequence: Synthetic oligonucleotide
gugauugugggaacacagu

SEQ ID NO: 352871 - RNA, 19 nt, Artificial Sequence
  Description of Artificial Sequence: Synthetic oligonucleotide
cucucgccaaaggcucucc

SEQ ID NO: 352872 - RNA, 19 nt, Artificial Sequence
  Description of Artificial Sequence: Synthetic oligonucleotide
aggguguugggaagcccug

SEQ ID NO: 352873 - RNA, 19 nt, Artificial Sequence
  Description of Artificial Sequence: Synthetic oligonucleotide
cucgugccggauacauuca

SEQ ID NO: 352874 - RNA, 19 nt, Artificial Sequence
  Description of Artificial Sequence: Synthetic oligonucleotide
uccccgugcucuaccccaa

SEQ ID NO: 352875 - RNA, 19 nt, Artificial Sequence
  Description of Artificial Sequence: Synthetic oligonucleotide
caagagggacugguaguca

SEQ ID NO: 352876 - RNA, 19 nt, Artificial Sequence
  Description of Artificial Sequence: Synthetic oligonucleotide
cccaagugagcugucuuug

SEQ ID NO: 352877 - RNA, 19 nt, Artificial Sequence
  Description of Artificial Sequence: Synthetic oligonucleotide
ucucggcccuggacuagau

SEQ ID NO: 352878 - RNA, 19 nt, Artificial Sequence
  Description of Artificial Sequence: Synthetic oligonucleotide
ccuagaacagugacuauau

SEQ ID NO: 352879 - RNA, 19 nt, Artificial Sequence
  Description of Artificial Sequence: Synthetic oligonucleotide
gccuagaacagugacuaua

SEQ ID NO: 352880 - RNA, 19 nt, Artificial Sequence
  Description of Artificial Sequence: Synthetic oligonucleotide
guacccuggcccugaucca

SEQ ID NO: 352881 - RNA, 19 nt, Artificial Sequence
  Description of Artificial Sequence: Synthetic oligonucleotide
cacaggcgcuuccuccuuc

SEQ ID NO: 352882 - RNA, 19 nt, Artificial Sequence
  Description of Artificial Sequence: Synthetic oligonucleotide
ugauggucucgugccggau

SEQ ID NO: 352883 - RNA, 19 nt, Artificial Sequence
  Description of Artificial Sequence: Synthetic oligonucleotide
aggggcacuuucccuccau

SEQ ID NO: 352884 - RNA, 19 nt, Artificial Sequence
  Description of Artificial Sequence: Synthetic oligonucleotide
ccccgcuucucuccaaaag

SEQ ID NO: 352885 - RNA, 19 nt, Artificial Sequence
  Description of Artificial Sequence: Synthetic oligonucleotide
ucccgcuaacgccgaccac

SEQ ID NO: 352886 - RNA, 19 nt, Artificial Sequence
  Description of Artificial Sequence: Synthetic oligonucleotide
caccuacuaggagucagaa

SEQ ID NO: 352887 - RNA, 19 nt, Artificial Sequence
  Description of Artificial Sequence: Synthetic oligonucleotide
cucggcccuggacuagauc

SEQ ID NO: 352888 - RNA, 19 nt, Artificial Sequence
  Description of Artificial Sequence: Synthetic oligonucleotide
ccuagaaugcugaggaaau

SEQ ID NO: 352889 - RNA, 19 nt, Artificial Sequence
  Description of Artificial Sequence: Synthetic oligonucleotide
caccacccaccuacuagga

SEQ ID NO: 352890 - RNA, 19 nt, Artificial Sequence
  Description of Artificial Sequence: Synthetic oligonucleotide
agucccagugggacuuacu

SEQ ID NO: 352891 - RNA, 19 nt, Artificial Sequence
  Description of Artificial Sequence: Synthetic oligonucleotide
cuggcucguuguccccggc

SEQ ID NO: 352892 - RNA, 19 nt, Artificial Sequence
  Description of Artificial Sequence: Synthetic oligonucleotide
cacggaucaccacccaccu

SEQ ID NO: 352893 - RNA, 19 nt, Artificial Sequence
  Description of Artificial Sequence: Synthetic oligonucleotide
ggacuaccaucagucuccc

SEQ ID NO: 352894 - RNA, 19 nt, Artificial Sequence
  Description of Artificial Sequence: Synthetic oligonucleotide
gcggacacuuuugaaggga

SEQ ID NO: 352895 - RNA, 19 nt, Artificial Sequence
  Description of Artificial Sequence: Synthetic oligonucleotide
ccacccaccuacuaggagu

SEQ ID NO: 352896 - RNA, 19 nt, Artificial Sequence
  Description of Artificial Sequence: Synthetic oligonucleotide
ccuggcucguuguccccgg

SEQ ID NO: 352897 - RNA, 19 nt, Artificial Sequence
  Description of Artificial Sequence: Synthetic oligonucleotide
uggucucgugccggauaca

SEQ ID NO: 352898 - RNA, 19 nt, Artificial Sequence
  Description of Artificial Sequence: Synthetic oligonucleotide
gcucguuguccccggcccc

SEQ ID NO: 352899 - RNA, 19 nt, Artificial Sequence
  Description of Artificial Sequence: Synthetic oligonucleotide
ggguguugggaagcccugc

SEQ ID NO: 352900 - RNA, 19 nt, Artificial Sequence
  Description of Artificial Sequence: Synthetic oligonucleotide
cucgccccugggccugccg

SEQ ID NO: 352901 - RNA, 19 nt, Artificial Sequence
  Description of Artificial Sequence: Synthetic oligonucleotide
ccgcuaacgccgaccacac

SEQ ID NO: 352902 - RNA, 19 nt, Artificial Sequence
  Description of Artificial Sequence: Synthetic oligonucleotide
cccgcuaacgccgaccaca

SEQ ID NO: 352903 - RNA, 19 nt, Artificial Sequence
  Description of Artificial Sequence: Synthetic oligonucleotide
gcgaucuuugcaggccacc

SEQ ID NO: 352904 - RNA, 19 nt, Artificial Sequence
  Description of Artificial Sequence: Synthetic oligonucleotide
acggaucaccacccaccua

SEQ ID NO: 352905 - RNA, 19 nt, Artificial Sequence
  Description of Artificial Sequence: Synthetic oligonucleotide
cucgagccacugaaaacau

SEQ ID NO: 352906 - RNA, 19 nt, Artificial Sequence
  Description of Artificial Sequence: Synthetic oligonucleotide
gagcagggucuagacccuc

SEQ ID NO: 352907 - RNA, 19 nt, Artificial Sequence
  Description of Artificial Sequence: Synthetic oligonucleotide
caggugcuagguaaagcuu

SEQ ID NO: 352908 - RNA, 19 nt, Artificial Sequence
  Description of Artificial Sequence: Synthetic oligonucleotide
ccaccuacuaggagucaga

SEQ ID NO: 352909 - RNA, 19 nt, Artificial Sequence
  Description of Artificial Sequence: Synthetic oligonucleotide
acccaccuacuaggaguca

SEQ ID NO: 352910 - RNA, 19 nt, Artificial Sequence
  Description of Artificial Sequence: Synthetic oligonucleotide
ggucugccuagaacaguga

SEQ ID NO: 352911 - RNA, 19 nt, Artificial Sequence
  Description of Artificial Sequence: Synthetic oligonucleotide
cugcauagucuggccuuga

SEQ ID NO: 352912 - RNA, 19 nt, Artificial Sequence
  Description of Artificial Sequence: Synthetic oligonucleotide
ccgugcucuaccccaagaa

SEQ ID NO: 352913 - RNA, 19 nt, Artificial Sequence
  Description of Artificial Sequence: Synthetic oligonucleotide
ccgggcaggaaaggcggcc

SEQ ID NO: 352914 - RNA, 19 nt, Artificial Sequence
  Description of Artificial Sequence: Synthetic oligonucleotide
caccggcaacaccgcucgc

SEQ ID NO: 352915 - RNA, 19 nt, Artificial Sequence
  Description of Artificial Sequence: Synthetic oligonucleotide
agcgggcagggcagguagu

SEQ ID NO: 352916 - RNA, 19 nt, Artificial Sequence
  Description of Artificial Sequence: Synthetic oligonucleotide
guuccccaagugagcuguc

SEQ ID NO: 352917 - RNA, 19 nt, Artificial Sequence
  Description of Artificial Sequence: Synthetic oligonucleotide
ggucucgugccggauacau

SEQ ID NO: 352918 - RNA, 19 nt, Artificial Sequence
  Description of Artificial Sequence: Synthetic oligonucleotide
gugcuagguaaagcuuacu

SEQ ID NO: 352919 - RNA, 19 nt, Artificial Sequence
  Description of Artificial Sequence: Synthetic oligonucleotide
ggcugcuaugccagacaca

SEQ ID NO: 352920 - RNA, 19 nt, Artificial Sequence
  Description of Artificial Sequence: Synthetic oligonucleotide
gggauugaguuugcuugcu

SEQ ID NO: 352921 - RNA, 19 nt, Artificial Sequence
  Description of Artificial Sequence: Synthetic oligonucleotide
guaguggcucaagucccau

SEQ ID NO: 352922 - RNA, 19 nt, Artificial Sequence
  Description of Artificial Sequence: Synthetic oligonucleotide
ccgccgcucccgcuaacgc

SEQ ID NO: 352923 - RNA, 19 nt, Artificial Sequence
  Description of Artificial Sequence: Synthetic oligonucleotide
gcuggcccaugggaaauaa

SEQ ID NO: 352924 - RNA, 19 nt, Artificial Sequence
  Description of Artificial Sequence: Synthetic oligonucleotide
gccucuccgucccuggggu

SEQ ID NO: 352925 - RNA, 19 nt, Artificial Sequence
  Description of Artificial Sequence: Synthetic oligonucleotide
ccucccaagaggucccucu

SEQ ID NO: 352926 - RNA, 19 nt, Artificial Sequence
  Description of Artificial Sequence: Synthetic oligonucleotide
gcaggaaaggcggcccgaa

SEQ ID NO: 352927 - RNA, 19 nt, Artificial Sequence
  Description of Artificial Sequence: Synthetic oligonucleotide
gcuaugccagacacacucu

SEQ ID NO: 352928 - RNA, 19 nt, Artificial Sequence
  Description of Artificial Sequence: Synthetic oligonucleotide
cacccucauugacuaguau

SEQ ID NO: 352929 - RNA, 19 nt, Artificial Sequence
  Description of Artificial Sequence: Synthetic oligonucleotide
ggccccgcuucucuccaaa

SEQ ID NO: 352930 - RNA, 19 nt, Artificial Sequence
  Description of Artificial Sequence: Synthetic oligonucleotide
ggcgucugcugggacucuc

SEQ ID NO: 352931 - RNA, 19 nt, Artificial Sequence
  Description of Artificial Sequence: Synthetic oligonucleotide
gagagguguguugguuguu

SEQ ID NO: 352932 - RNA, 19 nt, Artificial Sequence
  Description of Artificial Sequence: Synthetic oligonucleotide
ccucucgccaaaggcucuc

SEQ ID NO: 352933 - RNA, 19 nt, Artificial Sequence
  Description of Artificial Sequence: Synthetic oligonucleotide
ccgcccacacauccgggca

SEQ ID NO: 352934 - RNA, 19 nt, Artificial Sequence
  Description of Artificial Sequence: Synthetic oligonucleotide
caaagccccaggggaugua

SEQ ID NO: 352935 - RNA, 19 nt, Artificial Sequence
  Description of Artificial Sequence: Synthetic oligonucleotide
cugccugugcugggaaccu

SEQ ID NO: 352936 - RNA, 19 nt, Artificial Sequence
  Description of Artificial Sequence: Synthetic oligonucleotide
cuccgucccugggguugag

SEQ ID NO: 352937 - RNA, 19 nt, Artificial Sequence
  Description of Artificial Sequence: Synthetic oligonucleotide
cccgccgccgccgccgccg

SEQ ID NO: 352938 - RNA, 19 nt, Artificial Sequence
  Description of Artificial Sequence: Synthetic oligonucleotide
ggaucaccacccaccuacu

SEQ ID NO: 352939 - RNA, 19 nt, Artificial Sequence
  Description of Artificial Sequence: Synthetic oligonucleotide
gccgccgccgccgccgccc

SEQ ID NO: 352940 - RNA, 19 nt, Artificial Sequence
  Description of Artificial Sequence: Synthetic oligonucleotide
gucucgugccggauacauu

SEQ ID NO: 352941 - RNA, 19 nt, Artificial Sequence
  Description of Artificial Sequence: Synthetic oligonucleotide
cgcuaacgccgaccacacc

SEQ ID NO: 352942 - RNA, 19 nt, Artificial Sequence
  Description of Artificial Sequence: Synthetic oligonucleotide
ccauacccacaggcgcuuc

SEQ ID NO: 352943 - RNA, 19 nt, Artificial Sequence
  Description of Artificial Sequence: Synthetic oligonucleotide
ggucccucucugugcccua

SEQ ID NO: 352944 - RNA, 19 nt, Artificial Sequence
  Description of Artificial Sequence: Synthetic oligonucleotide
cgcuuccgggacugcucag

SEQ ID NO: 352945 - RNA, 19 nt, Artificial Sequence
  Description of Artificial Sequence: Synthetic oligonucleotide
cgaucuuugcaggccaccu

SEQ ID NO: 352946 - RNA, 19 nt, Artificial Sequence
  Description of Artificial Sequence: Synthetic oligonucleotide
ccgcccgccgccgccgccg

SEQ ID NO: 352947 - RNA, 19 nt, Artificial Sequence
  Description of Artificial Sequence: Synthetic oligonucleotide
cgugccggauacauucauu

SEQ ID NO: 352948 - RNA, 19 nt, Artificial Sequence
  Description of Artificial Sequence: Synthetic oligonucleotide
ccacaccggcaacaccgcu

SEQ ID NO: 352949 - RNA, 19 nt, Artificial Sequence
  Description of Artificial Sequence: Synthetic oligonucleotide
cgccgaccacaccggcaac

SEQ ID NO: 352950 - RNA, 19 nt, Artificial Sequence
  Description of Artificial Sequence: Synthetic oligonucleotide
ccgccgccgccgccgccgc

SEQ ID NO: 352951 - RNA, 19 nt, Artificial Sequence
  Description of Artificial Sequence: Synthetic oligonucleotide
gcccgccgccgccgccgcc

SEQ ID NO: 352952 - RNA, 19 nt, Artificial Sequence
  Description of Artificial Sequence: Synthetic oligonucleotide
gggcgucugcugggacucu

SEQ ID NO: 352953 - RNA, 19 nt, Artificial Sequence
  Description of Artificial Sequence: Synthetic oligonucleotide
cgccgccuccucagucgga

SEQ ID NO: 352954 - RNA, 19 nt, Artificial Sequence
  Description of Artificial Sequence: Synthetic oligonucleotide
cgcccgccgccgccgccgc

SEQ ID NO: 352955 - RNA, 19 nt, Artificial Sequence
  Description of Artificial Sequence: Synthetic oligonucleotide
ccgccgccgccgccgccca

SEQ ID NO: 352956 - RNA, 19 nt, Artificial Sequence
  Description of Artificial Sequence: Synthetic oligonucleotide
cgccgccgccgccgccgcc

SEQ ID NO: 352957 - RNA, 19 nt, Artificial Sequence
  Description of Artificial Sequence: Synthetic oligonucleotide
aauuauaauuccauuaagc

SEQ ID NO: 352958 - RNA, 19 nt, Artificial Sequence
  Description of Artificial Sequence: Synthetic oligonucleotide
uauaauuccauuaagcuuc

SEQ ID NO: 352959 - RNA, 19 nt, Artificial Sequence
  Description of Artificial Sequence: Synthetic oligonucleotide
uucuuuaucauuuaggacu

SEQ ID NO: 352960 - RNA, 19 nt, Artificial Sequence
  Description of Artificial Sequence: Synthetic oligonucleotide
uucaguguucaucugaugg

SEQ ID NO: 352961 - RNA, 19 nt, Artificial Sequence
  Description of Artificial Sequence: Synthetic oligonucleotide
ugagaauuuucauucaagg

SEQ ID NO: 352962 - RNA, 19 nt, Artificial Sequence
  Description of Artificial Sequence: Synthetic oligonucleotide
gaagaaaugacugacuccg

SEQ ID NO: 352963 - RNA, 19 nt, Artificial Sequence
  Description of Artificial Sequence: Synthetic oligonucleotide
aaucacauaaguaacagca

SEQ ID NO: 352964 - RNA, 19 nt, Artificial Sequence
  Description of Artificial Sequence: Synthetic oligonucleotide
uuugucuacaccaugguga

SEQ ID NO: 352965 - RNA, 19 nt, Artificial Sequence
  Description of Artificial Sequence: Synthetic oligonucleotide
uggaauaucaggugcauag

SEQ ID NO: 352966 - RNA, 19 nt, Artificial Sequence
  Description of Artificial Sequence: Synthetic oligonucleotide
ucuagauuuucauaggucu

SEQ ID NO: 352967 - RNA, 19 nt, Artificial Sequence
  Description of Artificial Sequence: Synthetic oligonucleotide
aucggcuuugaauugaucg

SEQ ID NO: 352968 - RNA, 19 nt, Artificial Sequence
  Description of Artificial Sequence: Synthetic oligonucleotide
aaaggaggggccaucaucc

SEQ ID NO: 352969 - RNA, 19 nt, Artificial Sequence
  Description of Artificial Sequence: Synthetic oligonucleotide
auaaaaucggcuuugaauu

SEQ ID NO: 352970 - RNA, 19 nt, Artificial Sequence
  Description of Artificial Sequence: Synthetic oligonucleotide
cuuccauuagcacagaaag

SEQ ID NO: 352971 - RNA, 19 nt, Artificial Sequence
  Description of Artificial Sequence: Synthetic oligonucleotide
aauaaccugcccuugauaa

SEQ ID NO: 352972 - RNA, 19 nt, Artificial Sequence
  Description of Artificial Sequence: Synthetic oligonucleotide
uuuaaauccuuuauuuaca

SEQ ID NO: 352973 - RNA, 19 nt, Artificial Sequence
  Description of Artificial Sequence: Synthetic oligonucleotide
ucuauugagagcauuuucu

SEQ ID NO: 352974 - RNA, 19 nt, Artificial Sequence
  Description of Artificial Sequence: Synthetic oligonucleotide
uuuucaugagcaauaaccu

SEQ ID NO: 352975 - RNA, 19 nt, Artificial Sequence
  Description of Artificial Sequence: Synthetic oligonucleotide
aacaguuaccuuuacauuu

SEQ ID NO: 352976 - RNA, 19 nt, Artificial Sequence
  Description of Artificial Sequence: Synthetic oligonucleotide
ugauuauucaguuggucag

SEQ ID NO: 352977 - RNA, 19 nt, Artificial Sequence
  Description of Artificial Sequence: Synthetic oligonucleotide
ucauaaugggucuucuugg

SEQ ID NO: 352978 - RNA, 19 nt, Artificial Sequence
  Description of Artificial Sequence: Synthetic oligonucleotide
uuccuuaaaucauugaugu

SEQ ID NO: 352979 - RNA, 19 nt, Artificial Sequence
  Description of Artificial Sequence: Synthetic oligonucleotide
ugaaggucggcccaguggg

SEQ ID NO: 352980 - RNA, 19 nt, Artificial Sequence
  Description of Artificial Sequence: Synthetic oligonucleotide
auaauuauggaugagguaa

SEQ ID NO: 352981 - RNA, 19 nt, Artificial Sequence
  Description of Artificial Sequence: Synthetic oligonucleotide
cuguauuuggaauaucagg

SEQ ID NO: 352982 - RNA, 19 nt, Artificial Sequence
  Description of Artificial Sequence: Synthetic oligonucleotide
uguaauuuugguuucuuuc

SEQ ID NO: 352983 - RNA, 19 nt, Artificial Sequence
  Description of Artificial Sequence: Synthetic oligonucleotide
ucuuaccacauaaaaucgg

SEQ ID NO: 352984 - RNA, 19 nt, Artificial Sequence
  Description of Artificial Sequence: Synthetic oligonucleotide
ucguuucagaugaaggucg

SEQ ID NO: 352985 - RNA, 19 nt, Artificial Sequence
  Description of Artificial Sequence: Synthetic oligonucleotide
cuuugaauugaucggaagc

SEQ ID NO: 352986 - RNA, 19 nt, Artificial Sequence
  Description of Artificial Sequence: Synthetic oligonucleotide
ugauuaaacaguuaccuuu

SEQ ID NO: 352987 - RNA, 19 nt, Artificial Sequence
  Description of Artificial Sequence: Synthetic oligonucleotide
uuaguagcauaaauuagcu

SEQ ID NO: 352988 - RNA, 19 nt, Artificial Sequence
  Description of Artificial Sequence: Synthetic oligonucleotide
aaguuggccuccuuuaaag

SEQ ID NO: 352989 - RNA, 19 nt, Artificial Sequence
  Description of Artificial Sequence: Synthetic oligonucleotide
ucuucuagagauuguauac

SEQ ID NO: 352990 - RNA, 19 nt, Artificial Sequence
  Description of Artificial Sequence: Synthetic oligonucleotide
gaaaugacugacuccgagg

SEQ ID NO: 352991 - RNA, 19 nt, Artificial Sequence
  Description of Artificial Sequence: Synthetic oligonucleotide
cuuaccacauaaaaucggc

SEQ ID NO: 352992 - RNA, 19 nt, Artificial Sequence
  Description of Artificial Sequence: Synthetic oligonucleotide
aauuugagcaacaauguaa

SEQ ID NO: 352993 - RNA, 19 nt, Artificial Sequence
  Description of Artificial Sequence: Synthetic oligonucleotide
agaacgaauuguucucucc

SEQ ID NO: 352994 - RNA, 19 nt, Artificial Sequence
  Description of Artificial Sequence: Synthetic oligonucleotide
ucuaaaucaagauuaccau

SEQ ID NO: 352995 - RNA, 19 nt, Artificial Sequence
  Description of Artificial Sequence: Synthetic oligonucleotide
uuaaagaagcacuuaacuu

SEQ ID NO: 352996 - RNA, 19 nt, Artificial Sequence
  Description of Artificial Sequence: Synthetic oligonucleotide
gauaagaacgaauuguucu

SEQ ID NO: 352997 - RNA, 19 nt, Artificial Sequence
  Description of Artificial Sequence: Synthetic oligonucleotide
ucucuaaucggcaauuuuc

SEQ ID NO: 352998 - RNA, 19 nt, Artificial Sequence
  Description of Artificial Sequence: Synthetic oligonucleotide
ucuguuauagcuugucucu

SEQ ID NO: 352999 - RNA, 19 nt, Artificial Sequence
  Description of Artificial Sequence: Synthetic oligonucleotide
uauuauucccugaagucgu

SEQ ID NO: 353000 - RNA, 19 nt, Artificial Sequence
  Description of Artificial Sequence: Synthetic oligonucleotide
uaacugaguguaauuuugg

SEQ ID NO: 353001 - RNA, 19 nt, Artificial Sequence
  Description of Artificial Sequence: Synthetic oligonucleotide
uguuacaucuucuccaaac

SEQ ID NO: 353002 - RNA, 19 nt, Artificial Sequence
  Description of Artificial Sequence: Synthetic oligonucleotide
uuauaauuccauuaagcuu

SEQ ID NO: 353003 - RNA, 19 nt, Artificial Sequence
  Description of Artificial Sequence: Synthetic oligonucleotide
accauaauuauggaugagg

SEQ ID NO: 353004 - RNA, 19 nt, Artificial Sequence
  Description of Artificial Sequence: Synthetic oligonucleotide
uauagcuugucucuccucu

SEQ ID NO: 353005 - RNA, 19 nt, Artificial Sequence
  Description of Artificial Sequence: Synthetic oligonucleotide
uagaaucaaagcuugcugu

SEQ ID NO: 353006 - RNA, 19 nt, Artificial Sequence
  Description of Artificial Sequence: Synthetic oligonucleotide
uaacuuaguagcauaaauu

SEQ ID NO: 353007 - RNA, 19 nt, Artificial Sequence
  Description of Artificial Sequence: Synthetic oligonucleotide
uucucuaaaaguaguauuu

SEQ ID NO: 353008 - RNA, 19 nt, Artificial Sequence
  Description of Artificial Sequence: Synthetic oligonucleotide
ucugauacacucuguaaga

SEQ ID NO: 353009 - RNA, 19 nt, Artificial Sequence
  Description of Artificial Sequence: Synthetic oligonucleotide
cauccuucggucuuguucc

SEQ ID NO: 353010 - RNA, 19 nt, Artificial Sequence
  Description of Artificial Sequence: Synthetic oligonucleotide
cagccaauuaucaugugcc

SEQ ID NO: 353011 - RNA, 19 nt, Artificial Sequence
  Description of Artificial Sequence: Synthetic oligonucleotide
ugacucuaagccuucauac

SEQ ID NO: 353012 - RNA, 19 nt, Artificial Sequence
  Description of Artificial Sequence: Synthetic oligonucleotide
ucggcuuugaauugaucgg

SEQ ID NO: 353013 - RNA, 19 nt, Artificial Sequence
  Description of Artificial Sequence: Synthetic oligonucleotide
uaucauuuaggacuugcuc

SEQ ID NO: 353014 - RNA, 19 nt, Artificial Sequence
  Description of Artificial Sequence: Synthetic oligonucleotide
ucauuuaggacuugcucug

SEQ ID NO: 353015 - RNA, 19 nt, Artificial Sequence
  Description of Artificial Sequence: Synthetic oligonucleotide
cauuucguugucuugguac

SEQ ID NO: 353016 - RNA, 19 nt, Artificial Sequence
  Description of Artificial Sequence: Synthetic oligonucleotide
aagaacgaauuguucucuc

SEQ ID NO: 353017 - RNA, 19 nt, Artificial Sequence
  Description of Artificial Sequence: Synthetic oligonucleotide
augaugccccacuagaauc

SEQ ID NO: 353018 - RNA, 19 nt, Artificial Sequence
  Description of Artificial Sequence: Synthetic oligonucleotide
ugccccacuagaaucaaag

SEQ ID NO: 353019 - RNA, 19 nt, Artificial Sequence
  Description of Artificial Sequence: Synthetic oligonucleotide
ccuucuaaggcuuuuaaag

SEQ ID NO: 353020 - RNA, 19 nt, Artificial Sequence
  Description of Artificial Sequence: Synthetic oligonucleotide
ucucguuucagaugaaggu

SEQ ID NO: 353021 - RNA, 19 nt, Artificial Sequence
  Description of Artificial Sequence: Synthetic oligonucleotide
agauuacauguauaaaacu

SEQ ID NO: 353022 - RNA, 19 nt, Artificial Sequence
  Description of Artificial Sequence: Synthetic oligonucleotide
gcuacuugugucuugacag

SEQ ID NO: 353023 - RNA, 19 nt, Artificial Sequence
  Description of Artificial Sequence: Synthetic oligonucleotide
cuaaaucaagauuaccauc

SEQ ID NO: 353024 - RNA, 19 nt, Artificial Sequence
  Description of Artificial Sequence: Synthetic oligonucleotide
cuaaucggcaauuuucuuc

SEQ ID NO: 353025 - RNA, 19 nt, Artificial Sequence
  Description of Artificial Sequence: Synthetic oligonucleotide
uucuucgacauccuuggca

SEQ ID NO: 353026 - RNA, 19 nt, Artificial Sequence
  Description of Artificial Sequence: Synthetic oligonucleotide
cucucguuucagaugaagg

SEQ ID NO: 353027 - RNA, 19 nt, Artificial Sequence
  Description of Artificial Sequence: Synthetic oligonucleotide
auauuccugguagaaacac

SEQ ID NO: 353028 - RNA, 19 nt, Artificial Sequence
  Description of Artificial Sequence: Synthetic oligonucleotide
auugaucggaagccucucc

SEQ ID NO: 353029 - RNA, 19 nt, Artificial Sequence
  Description of Artificial Sequence: Synthetic oligonucleotide
aacugaguguaauuuuggu

SEQ ID NO: 353030 - RNA, 19 nt, Artificial Sequence
  Description of Artificial Sequence: Synthetic oligonucleotide
uuaucauuuaggacuugcu

SEQ ID NO: 353031 - RNA, 19 nt, Artificial Sequence
  Description of Artificial Sequence: Synthetic oligonucleotide
uaaaaucggcuuugaauug

SEQ ID NO: 353032 - RNA, 19 nt, Artificial Sequence
  Description of Artificial Sequence: Synthetic oligonucleotide
aagauuaccaucaucuguu

SEQ ID NO: 353033 - RNA, 19 nt, Artificial Sequence
  Description of Artificial Sequence: Synthetic oligonucleotide
uggaaagccccucgguucg

SEQ ID NO: 353034 - RNA, 19 nt, Artificial Sequence
  Description of Artificial Sequence: Synthetic oligonucleotide
caucguuugcuuuaucuac

SEQ ID NO: 353035 - RNA, 19 nt, Artificial Sequence
  Description of Artificial Sequence: Synthetic oligonucleotide
uuaccuuuacauuugucua

SEQ ID NO: 353036 - RNA, 19 nt, Artificial Sequence
  Description of Artificial Sequence: Synthetic oligonucleotide
aaaauagucuggaggaccu

SEQ ID NO: 353037 - RNA, 19 nt, Artificial Sequence
  Description of Artificial Sequence: Synthetic oligonucleotide
acgaauuguucucuccaac

SEQ ID NO: 353038 - RNA, 19 nt, Artificial Sequence
  Description of Artificial Sequence: Synthetic oligonucleotide
aauacuauccugagaauua

SEQ ID NO: 353039 - RNA, 19 nt, Artificial Sequence
  Description of Artificial Sequence: Synthetic oligonucleotide
uacauuugucuacaccaug

SEQ ID NO: 353040 - RNA, 19 nt, Artificial Sequence
  Description of Artificial Sequence: Synthetic oligonucleotide
aaucaaagcuugcugucau

SEQ ID NO: 353041 - RNA, 19 nt, Artificial Sequence
  Description of Artificial Sequence: Synthetic oligonucleotide
gacccuccaacaaaguugg

SEQ ID NO: 353042 - RNA, 19 nt, Artificial Sequence
  Description of Artificial Sequence: Synthetic oligonucleotide
aauaucaggugcauaggga

SEQ ID NO: 353043 - RNA, 19 nt, Artificial Sequence
  Description of Artificial Sequence: Synthetic oligonucleotide
auuugucuacaccauggug

SEQ ID NO: 353044 - RNA, 19 nt, Artificial Sequence
  Description of Artificial Sequence: Synthetic oligonucleotide
gguucguacacauuucucc

SEQ ID NO: 353045 - RNA, 19 nt, Artificial Sequence
  Description of Artificial Sequence: Synthetic oligonucleotide
aaaguccgagcugccagcc

SEQ ID NO: 353046 - RNA, 19 nt, Artificial Sequence
  Description of Artificial Sequence: Synthetic oligonucleotide
cugauuauucaguugguca

SEQ ID NO: 353047 - RNA, 19 nt, Artificial Sequence
  Description of Artificial Sequence: Synthetic oligonucleotide
uccuguaaaagcuccuucu

SEQ ID NO: 353048 - RNA, 19 nt, Artificial Sequence
  Description of Artificial Sequence: Synthetic oligonucleotide
ucaucaauucauucuguuc

SEQ ID NO: 353049 - RNA, 19 nt, Artificial Sequence
  Description of Artificial Sequence: Synthetic oligonucleotide
uuggucgcauggcugaucc

SEQ ID NO: 353050 - RNA, 19 nt, Artificial Sequence
  Description of Artificial Sequence: Synthetic oligonucleotide
ucuuuaucauuuaggacuu

SEQ ID NO: 353051 - RNA, 19 nt, Artificial Sequence
  Description of Artificial Sequence: Synthetic oligonucleotide
auaacugaguguaauuuug

SEQ ID NO: 353052 - RNA, 19 nt, Artificial Sequence
  Description of Artificial Sequence: Synthetic oligonucleotide
aaaauacuauccugagaau

SEQ ID NO: 353053 - RNA, 19 nt, Artificial Sequence
  Description of Artificial Sequence: Synthetic oligonucleotide
ggaggaaucaagucugggg

SEQ ID NO: 353054 - RNA, 19 nt, Artificial Sequence
  Description of Artificial Sequence: Synthetic oligonucleotide
auacuauccagaaugaaau

SEQ ID NO: 353055 - RNA, 19 nt, Artificial Sequence
  Description of Artificial Sequence: Synthetic oligonucleotide
ucuguuggcgccuugucaa

SEQ ID NO: 353056 - RNA, 19 nt, Artificial Sequence
  Description of Artificial Sequence: Synthetic oligonucleotide
aaaaucggcuuugaauuga

SEQ ID NO: 353057 - RNA, 19 nt, Artificial Sequence
  Description of Artificial Sequence: Synthetic oligonucleotide
uguauaaaacuaccauaau

SEQ ID NO: 353058 - RNA, 19 nt, Artificial Sequence
  Description of Artificial Sequence: Synthetic oligonucleotide
gauucugagggccucguga

SEQ ID NO: 353059 - RNA, 19 nt, Artificial Sequence
  Description of Artificial Sequence: Synthetic oligonucleotide
aauauucucaggguaguuu

SEQ ID NO: 353060 - RNA, 19 nt, Artificial Sequence
  Description of Artificial Sequence: Synthetic oligonucleotide
agacuucugauacacucug

SEQ ID NO: 353061 - RNA, 19 nt, Artificial Sequence
  Description of Artificial Sequence: Synthetic oligonucleotide
uucauuaugcuuagcucuc

SEQ ID NO: 353062 - RNA, 19 nt, Artificial Sequence
  Description of Artificial Sequence: Synthetic oligonucleotide
uuaccacauaaaaucggcu

SEQ ID NO: 353063 - RNA, 19 nt, Artificial Sequence
  Description of Artificial Sequence: Synthetic oligonucleotide
auuucguugucuugguaca

SEQ ID NO: 353064 - RNA, 19 nt, Artificial Sequence
  Description of Artificial Sequence: Synthetic oligonucleotide
cuacuguuaauuuccugug

SEQ ID NO: 353065 - RNA, 19 nt, Artificial Sequence
  Description of Artificial Sequence: Synthetic oligonucleotide
aaguucaagagcaagucuu

SEQ ID NO: 353066 - RNA, 19 nt, Artificial Sequence
  Description of Artificial Sequence: Synthetic oligonucleotide
aaaguuggccuccuuuaaa

SEQ ID NO: 353067 - RNA, 19 nt, Artificial Sequence
  Description of Artificial Sequence: Synthetic oligonucleotide
gaacgaauuguucucucca

SEQ ID NO: 353068 - RNA, 19 nt, Artificial Sequence
  Description of Artificial Sequence: Synthetic oligonucleotide
gaguuagcugacugcagag

SEQ ID NO: 353069 - RNA, 19 nt, Artificial Sequence
  Description of Artificial Sequence: Synthetic oligonucleotide
cauuagcacagaaaguuca

SEQ ID NO: 353070 - RNA, 19 nt, Artificial Sequence
  Description of Artificial Sequence: Synthetic oligonucleotide
cucgugaaccucuuccucc

SEQ ID NO: 353071 - RNA, 19 nt, Artificial Sequence
  Description of Artificial Sequence: Synthetic oligonucleotide
aaagccccucgguucguac

SEQ ID NO: 353072 - RNA, 19 nt, Artificial Sequence
  Description of Artificial Sequence: Synthetic oligonucleotide
uuagcacagaaaguucaag

SEQ ID NO: 353073 - RNA, 19 nt, Artificial Sequence
  Description of Artificial Sequence: Synthetic oligonucleotide
auuaugcuuagcucucucu

SEQ ID NO: 353074 - RNA, 19 nt, Artificial Sequence
  Description of Artificial Sequence: Synthetic oligonucleotide
uaauuauggaugagguaau

SEQ ID NO: 353075 - RNA, 19 nt, Artificial Sequence
  Description of Artificial Sequence: Synthetic oligonucleotide
acuauccagaaugaaauaa

SEQ ID NO: 353076 - RNA, 19 nt, Artificial Sequence
  Description of Artificial Sequence: Synthetic oligonucleotide
uggaggaccugcauagaug

SEQ ID NO: 353077 - RNA, 19 nt, Artificial Sequence
  Description of Artificial Sequence: Synthetic oligonucleotide
aacgaauuguucucuccaa

SEQ ID NO: 353078 - RNA, 19 nt, Artificial Sequence
  Description of Artificial Sequence: Synthetic oligonucleotide
ucguacacauuucucccug

SEQ ID NO: 353079 - RNA, 19 nt, Artificial Sequence
  Description of Artificial Sequence: Synthetic oligonucleotide
ucaaagcucccuucggcug

SEQ ID NO: 353080 - RNA, 19 nt, Artificial Sequence
  Description of Artificial Sequence: Synthetic oligonucleotide
uugucuauugagagcauuu

SEQ ID NO: 353081 - RNA, 19 nt, Artificial Sequence
  Description of Artificial Sequence: Synthetic oligonucleotide
uaccacauaaaaucggcuu

SEQ ID NO: 353082 - RNA, 19 nt, Artificial Sequence
  Description of Artificial Sequence: Synthetic oligonucleotide
gauuauucaguuggucagc

SEQ ID NO: 353083 - RNA, 19 nt, Artificial Sequence
  Description of Artificial Sequence: Synthetic oligonucleotide
cauaaaaucggcuuugaau

SEQ ID NO: 353084 - RNA, 19 nt, Artificial Sequence
  Description of Artificial Sequence: Synthetic oligonucleotide
aagcacacauaucaccaau

SEQ ID NO: 353085 - RNA, 19 nt, Artificial Sequence
  Description of Artificial Sequence: Synthetic oligonucleotide
aucuucuagagauuguaua

SEQ ID NO: 353086 - RNA, 19 nt, Artificial Sequence
  Description of Artificial Sequence: Synthetic oligonucleotide
ucaucguuugcuuuaucua

SEQ ID NO: 353087 - RNA, 19 nt, Artificial Sequence
  Description of Artificial Sequence: Synthetic oligonucleotide
ucagauaacugaguguaau

SEQ ID NO: 353088 - RNA, 19 nt, Artificial Sequence
  Description of Artificial Sequence: Synthetic oligonucleotide
auaaccugcccuugauaag

SEQ ID NO: 353089 - RNA, 19 nt, Artificial Sequence
  Description of Artificial Sequence: Synthetic oligonucleotide
ccuccuuuaaagaugacuc

SEQ ID NO: 353090 - RNA, 19 nt, Artificial Sequence
  Description of Artificial Sequence: Synthetic oligonucleotide
ucggcugguuaccuaagug

SEQ ID NO: 353091 - RNA, 19 nt, Artificial Sequence
  Description of Artificial Sequence: Synthetic oligonucleotide
agagcauuuucuuuccuua

SEQ ID NO: 353092 - RNA, 19 nt, Artificial Sequence
  Description of Artificial Sequence: Synthetic oligonucleotide
ccugcccuugauaagaacg

SEQ ID NO: 353093 - RNA, 19 nt, Artificial Sequence
  Description of Artificial Sequence: Synthetic oligonucleotide
uaagaacgaauuguucucu

SEQ ID NO: 353094 - RNA, 19 nt, Artificial Sequence
  Description of Artificial Sequence: Synthetic oligonucleotide
uugauuaaacaguuaccuu

SEQ ID NO: 353095 - RNA, 19 nt, Artificial Sequence
  Description of Artificial Sequence: Synthetic oligonucleotide
ucuagagauuguauacuuu

SEQ ID NO: 353096 - RNA, 19 nt, Artificial Sequence
  Description of Artificial Sequence: Synthetic oligonucleotide
aauggcgggaagggugggc

SEQ ID NO: 353097 - RNA, 19 nt, Artificial Sequence
  Description of Artificial Sequence: Synthetic oligonucleotide
agauaacugaguguaauuu

SEQ ID NO: 353098 - RNA, 19 nt, Artificial Sequence
  Description of Artificial Sequence: Synthetic oligonucleotide
agauauccccaacucuaag

SEQ ID NO: 353099 - RNA, 19 nt, Artificial Sequence
  Description of Artificial Sequence: Synthetic oligonucleotide
aauucauauuuaaauccuu

SEQ ID NO: 353100 - RNA, 19 nt, Artificial Sequence
  Description of Artificial Sequence: Synthetic oligonucleotide
ugcugucauaucuuccggc

SEQ ID NO: 353101 - RNA, 19 nt, Artificial Sequence
  Description of Artificial Sequence: Synthetic oligonucleotide
acauaucaccaauuggaau

SEQ ID NO: 353102 - RNA, 19 nt, Artificial Sequence
  Description of Artificial Sequence: Synthetic oligonucleotide
ucgguucguacacauuucu

SEQ ID NO: 353103 - RNA, 19 nt, Artificial Sequence
  Description of Artificial Sequence: Synthetic oligonucleotide
ucggaagccucuccaaaga

SEQ ID NO: 353104 - RNA, 19 nt, Artificial Sequence
  Description of Artificial Sequence: Synthetic oligonucleotide
agcuacuugugucuugaca

SEQ ID NO: 353105 - RNA, 19 nt, Artificial Sequence
  Description of Artificial Sequence: Synthetic oligonucleotide
ucuaagccuucauacuccu

SEQ ID NO: 353106 - RNA, 19 nt, Artificial Sequence
  Description of Artificial Sequence: Synthetic oligonucleotide
ucagcuacuugugucuuga

SEQ ID NO: 353107 - RNA, 19 nt, Artificial Sequence
  Description of Artificial Sequence: Synthetic oligonucleotide
ucugauuauucaguugguc

SEQ ID NO: 353108 - RNA, 19 nt, Artificial Sequence
  Description of Artificial Sequence: Synthetic oligonucleotide
uugucuacaccauggugaa

SEQ ID NO: 353109 - RNA, 19 nt, Artificial Sequence
  Description of Artificial Sequence: Synthetic oligonucleotide
uucgacauccuuggcacgc

SEQ ID NO: 353110 - RNA, 19 nt, Artificial Sequence
  Description of Artificial Sequence: Synthetic oligonucleotide
acugacuccgaggaaaccu

SEQ ID NO: 353111 - RNA, 19 nt, Artificial Sequence
  Description of Artificial Sequence: Synthetic oligonucleotide
uaaucuguuauagcuuguc

SEQ ID NO: 353112 - RNA, 19 nt, Artificial Sequence
  Description of Artificial Sequence: Synthetic oligonucleotide
uaucaggugcauagggauc

SEQ ID NO: 353113 - RNA, 19 nt, Artificial Sequence
  Description of Artificial Sequence: Synthetic oligonucleotide
gucuauugagagcauuuuc

SEQ ID NO: 353114 - RNA, 19 nt, Artificial Sequence
  Description of Artificial Sequence: Synthetic oligonucleotide
uaucuuccggcagugcugc

SEQ ID NO: 353115 - RNA, 19 nt, Artificial Sequence
  Description of Artificial Sequence: Synthetic oligonucleotide
uucucuaaucggcaauuuu

SEQ ID NO: 353116 - RNA, 19 nt, Artificial Sequence
  Description of Artificial Sequence: Synthetic oligonucleotide
aucaggugcauagggaucu

SEQ ID NO: 353117 - RNA, 19 nt, Artificial Sequence
  Description of Artificial Sequence: Synthetic oligonucleotide
acaguuaccuuuacauuug

SEQ ID NO: 353118 - RNA, 19 nt, Artificial Sequence
  Description of Artificial Sequence: Synthetic oligonucleotide
ucugggagcaucagauaau

SEQ ID NO: 353119 - RNA, 19 nt, Artificial Sequence
  Description of Artificial Sequence: Synthetic oligonucleotide
uaagcacacauaucaccaa

SEQ ID NO: 353120 - RNA, 19 nt, Artificial Sequence
  Description of Artificial Sequence: Synthetic oligonucleotide
auaucaccaauuggaauga

SEQ ID NO: 353121 - RNA, 19 nt, Artificial Sequence
  Description of Artificial Sequence: Synthetic oligonucleotide
caaaguccgagcugccagc

SEQ ID NO: 353122 - RNA, 19 nt, Artificial Sequence
  Description of Artificial Sequence: Synthetic oligonucleotide
augacucuaagccuucaua

SEQ ID NO: 353123 - RNA, 19 nt, Artificial Sequence
  Description of Artificial Sequence: Synthetic oligonucleotide
aguuggccuccuuuaaaga

SEQ ID NO: 353124 - RNA, 19 nt, Artificial Sequence
  Description of Artificial Sequence: Synthetic oligonucleotide
gauaacugaguguaauuuu

SEQ ID NO: 353125 - RNA, 19 nt, Artificial Sequence
  Description of Artificial Sequence: Synthetic oligonucleotide
agccccucgguucguacac

SEQ ID NO: 353126 - RNA, 19 nt, Artificial Sequence
  Description of Artificial Sequence: Synthetic oligonucleotide
ggcgccuugucaaaguugg

SEQ ID NO: 353127 - RNA, 19 nt, Artificial Sequence
  Description of Artificial Sequence: Synthetic oligonucleotide
auucugagggccucgugaa

SEQ ID NO: 353128 - RNA, 19 nt, Artificial Sequence
  Description of Artificial Sequence: Synthetic oligonucleotide
uaccuaagugcacaucauu

SEQ ID NO: 353129 - RNA, 19 nt, Artificial Sequence
  Description of Artificial Sequence: Synthetic oligonucleotide
agcacuuaacuuaguagca

SEQ ID NO: 353130 - RNA, 19 nt, Artificial Sequence
  Description of Artificial Sequence: Synthetic oligonucleotide
gaugaaggucggcccagug

SEQ ID NO: 353131 - RNA, 19 nt, Artificial Sequence
  Description of Artificial Sequence: Synthetic oligonucleotide
ccaacucuaagauuacaug

SEQ ID NO: 353132 - RNA, 19 nt, Artificial Sequence
  Description of Artificial Sequence: Synthetic oligonucleotide
caagaguaagcacacauau

SEQ ID NO: 353133 - RNA, 19 nt, Artificial Sequence
  Description of Artificial Sequence: Synthetic oligonucleotide
cacuagaaucaaagcuugc

SEQ ID NO: 353134 - RNA, 19 nt, Artificial Sequence
  Description of Artificial Sequence: Synthetic oligonucleotide
uacuauccagaaugaaaua

SEQ ID NO: 353135 - RNA, 19 nt, Artificial Sequence
  Description of Artificial Sequence: Synthetic oligonucleotide
ucgugaaccucuuccuccu

SEQ ID NO: 353136 - RNA, 19 nt, Artificial Sequence
  Description of Artificial Sequence: Synthetic oligonucleotide
uuggaaugaugccccacua

SEQ ID NO: 353137 - RNA, 19 nt, Artificial Sequence
  Description of Artificial Sequence: Synthetic oligonucleotide
uucagcuacuugugucuug

SEQ ID NO: 353138 - RNA, 19 nt, Artificial Sequence
  Description of Artificial Sequence: Synthetic oligonucleotide
agccaauuaucaugugccu

SEQ ID NO: 353139 - RNA, 19 nt, Artificial Sequence
  Description of Artificial Sequence: Synthetic oligonucleotide
ggacccuccaacaaaguug

SEQ ID NO: 353140 - RNA, 19 nt, Artificial Sequence
  Description of Artificial Sequence: Synthetic oligonucleotide
aucaccaauuggaaugaug

SEQ ID NO: 353141 - RNA, 19 nt, Artificial Sequence
  Description of Artificial Sequence: Synthetic oligonucleotide
accauauggggagugcucu

SEQ ID NO: 353142 - RNA, 19 nt, Artificial Sequence
  Description of Artificial Sequence: Synthetic oligonucleotide
aagauauccccaacucuaa

SEQ ID NO: 353143 - RNA, 19 nt, Artificial Sequence
  Description of Artificial Sequence: Synthetic oligonucleotide
cauaauuauggaugaggua

SEQ ID NO: 353144 - RNA, 19 nt, Artificial Sequence
  Description of Artificial Sequence: Synthetic oligonucleotide
uggcgccuugucaaaguug

SEQ ID NO: 353145 - RNA, 19 nt, Artificial Sequence
  Description of Artificial Sequence: Synthetic oligonucleotide
auaucuuccggcagugcug

SEQ ID NO: 353146 - RNA, 19 nt, Artificial Sequence
  Description of Artificial Sequence: Synthetic oligonucleotide
uucggcugguuaccuaagu

SEQ ID NO: 353147 - RNA, 19 nt, Artificial Sequence
  Description of Artificial Sequence: Synthetic oligonucleotide
cugagaauuauaauuccau

SEQ ID NO: 353148 - RNA, 19 nt, Artificial Sequence
  Description of Artificial Sequence: Synthetic oligonucleotide
uuauagcuugucucuccuc

SEQ ID NO: 353149 - RNA, 19 nt, Artificial Sequence
  Description of Artificial Sequence: Synthetic oligonucleotide
uaguagcauaaauuagcuu

SEQ ID NO: 353150 - RNA, 19 nt, Artificial Sequence
  Description of Artificial Sequence: Synthetic oligonucleotide
ugaucggaagccucuccaa

SEQ ID NO: 353151 - RNA, 19 nt, Artificial Sequence
  Description of Artificial Sequence: Synthetic oligonucleotide
uacuauccugagaauuaua

SEQ ID NO: 353152 - RNA, 19 nt, Artificial Sequence
  Description of Artificial Sequence: Synthetic oligonucleotide
agugcacaucauuuucuaa

SEQ ID NO: 353153 - RNA, 19 nt, Artificial Sequence
  Description of Artificial Sequence: Synthetic oligonucleotide
uguuggcgccuugucaaag

SEQ ID NO: 353154 - RNA, 19 nt, Artificial Sequence
  Description of Artificial Sequence: Synthetic oligonucleotide
ugucuauugagagcauuuu

SEQ ID NO: 353155 - RNA, 19 nt, Artificial Sequence
  Description of Artificial Sequence: Synthetic oligonucleotide
cuaagauuacauguauaaa

SEQ ID NO: 353156 - RNA, 19 nt, Artificial Sequence
  Description of Artificial Sequence: Synthetic oligonucleotide
cucuaaucggcaauuuucu

SEQ ID NO: 353157 - RNA, 19 nt, Artificial Sequence
  Description of Artificial Sequence: Synthetic oligonucleotide
gacucuaagccuucauacu

SEQ ID NO: 353158 - RNA, 19 nt, Artificial Sequence
  Description of Artificial Sequence: Synthetic oligonucleotide
cuucgacauccuuggcacg

SEQ ID NO: 353159 - RNA, 19 nt, Artificial Sequence
  Description of Artificial Sequence: Synthetic oligonucleotide
gacacuuguucagacucca

SEQ ID NO: 353160 - RNA, 19 nt, Artificial Sequence
  Description of Artificial Sequence: Synthetic oligonucleotide
aucguuugcuuuaucuacu

SEQ ID NO: 353161 - RNA, 19 nt, Artificial Sequence
  Description of Artificial Sequence: Synthetic oligonucleotide
aagucguucuucauuuauu

SEQ ID NO: 353162 - RNA, 19 nt, Artificial Sequence
  Description of Artificial Sequence: Synthetic oligonucleotide
ccacuagaaucaaagcuug

SEQ ID NO: 353163 - RNA, 19 nt, Artificial Sequence
  Description of Artificial Sequence: Synthetic oligonucleotide
ucauuaugcuuagcucucu

SEQ ID NO: 353164 - RNA, 19 nt, Artificial Sequence
  Description of Artificial Sequence: Synthetic oligonucleotide
gaagucguucuucauuuau

SEQ ID NO: 353165 - RNA, 19 nt, Artificial Sequence
  Description of Artificial Sequence: Synthetic oligonucleotide
gaucggaagccucuccaaa

SEQ ID NO: 353166 - RNA, 19 nt, Artificial Sequence
  Description of Artificial Sequence: Synthetic oligonucleotide
auacuauccugagaauuau

SEQ ID NO: 353167 - RNA, 19 nt, Artificial Sequence
  Description of Artificial Sequence: Synthetic oligonucleotide
aaaucggcuuugaauugau

SEQ ID NO: 353168 - RNA, 19 nt, Artificial Sequence
  Description of Artificial Sequence: Synthetic oligonucleotide
cugggagcaucagauaauc

SEQ ID NO: 353169 - RNA, 19 nt, Artificial Sequence
  Description of Artificial Sequence: Synthetic oligonucleotide
ggccucgugaaccucuucc

SEQ ID NO: 353170 - RNA, 19 nt, Artificial Sequence
  Description of Artificial Sequence: Synthetic oligonucleotide
ucguuugcuuuaucuacuu

SEQ ID NO: 353171 - RNA, 19 nt, Artificial Sequence
  Description of Artificial Sequence: Synthetic oligonucleotide
ucuacaccauggugaacau

SEQ ID NO: 353172 - RNA, 19 nt, Artificial Sequence
  Description of Artificial Sequence: Synthetic oligonucleotide
cauuuaggacuugcucugc

SEQ ID NO: 353173 - RNA, 19 nt, Artificial Sequence
  Description of Artificial Sequence: Synthetic oligonucleotide
cccuugguggaaaauaguc

SEQ ID NO: 353174 - RNA, 19 nt, Artificial Sequence
  Description of Artificial Sequence: Synthetic oligonucleotide
cucgguucguacacauuuc

SEQ ID NO: 353175 - RNA, 19 nt, Artificial Sequence
  Description of Artificial Sequence: Synthetic oligonucleotide
cugaguggacccuccaaca

SEQ ID NO: 353176 - RNA, 19 nt, Artificial Sequence
  Description of Artificial Sequence: Synthetic oligonucleotide
ugucaggucuccuguguuu

SEQ ID NO: 353177 - RNA, 19 nt, Artificial Sequence
  Description of Artificial Sequence: Synthetic oligonucleotide
acaguuccgucaucacugu

SEQ ID NO: 353178 - RNA, 19 nt, Artificial Sequence
  Description of Artificial Sequence: Synthetic oligonucleotide
guaaaagcuccuucuggcu

SEQ ID NO: 353179 - RNA, 19 nt, Artificial Sequence
  Description of Artificial Sequence: Synthetic oligonucleotide
agguuguuuggaaggagga

SEQ ID NO: 353180 - RNA, 19 nt, Artificial Sequence
  Description of Artificial Sequence: Synthetic oligonucleotide
guuguuuggaaggaggaau

SEQ ID NO: 353181 - RNA, 19 nt, Artificial Sequence
  Description of Artificial Sequence: Synthetic oligonucleotide
cucucuuaccacauaaaau

SEQ ID NO: 353182 - RNA, 19 nt, Artificial Sequence
  Description of Artificial Sequence: Synthetic oligonucleotide
cuacuugugucuugacaga

SEQ ID NO: 353183 - RNA, 19 nt, Artificial Sequence
  Description of Artificial Sequence: Synthetic oligonucleotide
cugguuaccuaagugcaca

SEQ ID NO: 353184 - RNA, 19 nt, Artificial Sequence
  Description of Artificial Sequence: Synthetic oligonucleotide
uccccaacucuaagauuac

SEQ ID NO: 353185 - RNA, 19 nt, Artificial Sequence
  Description of Artificial Sequence: Synthetic oligonucleotide
uuauucccugaagucguuc

SEQ ID NO: 353186 - RNA, 19 nt, Artificial Sequence
  Description of Artificial Sequence: Synthetic oligonucleotide
guuauagcuugucucuccu

SEQ ID NO: 353187 - RNA, 19 nt, Artificial Sequence
  Description of Artificial Sequence: Synthetic oligonucleotide
gugacagggaccugucaga

SEQ ID NO: 353188 - RNA, 19 nt, Artificial Sequence
  Description of Artificial Sequence: Synthetic oligonucleotide
agauuaccaucaucuguua

SEQ ID NO: 353189 - RNA, 19 nt, Artificial Sequence
  Description of Artificial Sequence: Synthetic oligonucleotide
ggaagguaagguggaaagc

SEQ ID NO: 353190 - RNA, 19 nt, Artificial Sequence
  Description of Artificial Sequence: Synthetic oligonucleotide
ugaagucguucuucauuua

SEQ ID NO: 353191 - RNA, 19 nt, Artificial Sequence
  Description of Artificial Sequence: Synthetic oligonucleotide
cuucggcugguuaccuaag

SEQ ID NO: 353192 - RNA, 19 nt, Artificial Sequence
  Description of Artificial Sequence: Synthetic oligonucleotide
aguguaauuuugguuucuu

SEQ ID NO: 353193 - RNA, 19 nt, Artificial Sequence
  Description of Artificial Sequence: Synthetic oligonucleotide
cagcuuguucuuucauaac

SEQ ID NO: 353194 - RNA, 19 nt, Artificial Sequence
  Description of Artificial Sequence: Synthetic oligonucleotide
aaguccgagcugccagcca

SEQ ID NO: 353195 - RNA, 19 nt, Artificial Sequence
  Description of Artificial Sequence: Synthetic oligonucleotide
uuggcgccuugucaaaguu

SEQ ID NO: 353196 - RNA, 19 nt, Artificial Sequence
  Description of Artificial Sequence: Synthetic oligonucleotide
ugguuaccuaagugcacau

SEQ ID NO: 353197 - RNA, 19 nt, Artificial Sequence
  Description of Artificial Sequence: Synthetic oligonucleotide
cugaagucguucuucauuu

SEQ ID NO: 353198 - RNA, 19 nt, Artificial Sequence
  Description of Artificial Sequence: Synthetic oligonucleotide
uccucucguccacuuugga

SEQ ID NO: 353199 - RNA, 19 nt, Artificial Sequence
  Description of Artificial Sequence: Synthetic oligonucleotide
cuguuauagcuugucucuc

SEQ ID NO: 353200 - RNA, 19 nt, Artificial Sequence
  Description of Artificial Sequence: Synthetic oligonucleotide
gaaggucggcccagugggg

SEQ ID NO: 353201 - RNA, 19 nt, Artificial Sequence
  Description of Artificial Sequence: Synthetic oligonucleotide
uuggaauaucaggugcaua

SEQ ID NO: 353202 - RNA, 19 nt, Artificial Sequence
  Description of Artificial Sequence: Synthetic oligonucleotide
gaccauauggggagugcuc

SEQ ID NO: 353203 - RNA, 19 nt, Artificial Sequence
  Description of Artificial Sequence: Synthetic oligonucleotide
ggaaaauagucuggaggac

SEQ ID NO: 353204 - RNA, 19 nt, Artificial Sequence
  Description of Artificial Sequence: Synthetic oligonucleotide
gggaggcccucucauaaug

SEQ ID NO: 353205 - RNA, 19 nt, Artificial Sequence
  Description of Artificial Sequence: Synthetic oligonucleotide
cacauaaguaacagcaguu

SEQ ID NO: 353206 - RNA, 19 nt, Artificial Sequence
  Description of Artificial Sequence: Synthetic oligonucleotide
aaucggcaauuuucuucua

SEQ ID NO: 353207 - RNA, 19 nt, Artificial Sequence
  Description of Artificial Sequence: Synthetic oligonucleotide
ccauaauuauggaugaggu

SEQ ID NO: 353208 - RNA, 19 nt, Artificial Sequence
  Description of Artificial Sequence: Synthetic oligonucleotide
aggaaaccugucaggucuc

SEQ ID NO: 353209 - RNA, 19 nt, Artificial Sequence
  Description of Artificial Sequence: Synthetic oligonucleotide
gaucaucguuugcuuuauc

SEQ ID NO: 353210 - RNA, 19 nt, Artificial Sequence
  Description of Artificial Sequence: Synthetic oligonucleotide
ggaggcccucucauaaugg

SEQ ID NO: 353211 - RNA, 19 nt, Artificial Sequence
  Description of Artificial Sequence: Synthetic oligonucleotide
agaucaucguuugcuuuau

SEQ ID NO: 353212 - RNA, 19 nt, Artificial Sequence
  Description of Artificial Sequence: Synthetic oligonucleotide
aucuuccggcagugcugcc

SEQ ID NO: 353213 - RNA, 19 nt, Artificial Sequence
  Description of Artificial Sequence: Synthetic oligonucleotide
ugcccuugauaagaacgaa

SEQ ID NO: 353214 - RNA, 19 nt, Artificial Sequence
  Description of Artificial Sequence: Synthetic oligonucleotide
gucaggucuccuguguuuc

SEQ ID NO: 353215 - RNA, 19 nt, Artificial Sequence
  Description of Artificial Sequence: Synthetic oligonucleotide
cuucuagagauuguauacu

SEQ ID NO: 353216 - RNA, 19 nt, Artificial Sequence
  Description of Artificial Sequence: Synthetic oligonucleotide
cuuuaucauuuaggacuug

SEQ ID NO: 353217 - RNA, 19 nt, Artificial Sequence
  Description of Artificial Sequence: Synthetic oligonucleotide
cucccuucggcugguuacc

SEQ ID NO: 353218 - RNA, 19 nt, Artificial Sequence
  Description of Artificial Sequence: Synthetic oligonucleotide
aggugacagggaccuguca

SEQ ID NO: 353219 - RNA, 19 nt, Artificial Sequence
  Description of Artificial Sequence: Synthetic oligonucleotide
caauaaccugcccuugaua

SEQ ID NO: 353220 - RNA, 19 nt, Artificial Sequence
  Description of Artificial Sequence: Synthetic oligonucleotide
caaauauucucaggguagu

SEQ ID NO: 353221 - RNA, 19 nt, Artificial Sequence
  Description of Artificial Sequence: Synthetic oligonucleotide
caauuggaaugaugcccca

SEQ ID NO: 353222 - RNA, 19 nt, Artificial Sequence
  Description of Artificial Sequence: Synthetic oligonucleotide
uccggcagugcugccacaa

SEQ ID NO: 353223 - RNA, 19 nt, Artificial Sequence
  Description of Artificial Sequence: Synthetic oligonucleotide
ggucgcauggcugauccuc

SEQ ID NO: 353224 - RNA, 19 nt, Artificial Sequence
  Description of Artificial Sequence: Synthetic oligonucleotide
aggaggggccaucauccuu

SEQ ID NO: 353225 - RNA, 19 nt, Artificial Sequence
  Description of Artificial Sequence: Synthetic oligonucleotide
ugcuucuguuggcgccuug

SEQ ID NO: 353226 - RNA, 19 nt, Artificial Sequence
  Description of Artificial Sequence: Synthetic oligonucleotide
aaccugcccuugauaagaa

SEQ ID NO: 353227 - RNA, 19 nt, Artificial Sequence
  Description of Artificial Sequence: Synthetic oligonucleotide
uucaguuggucagcuuguu

SEQ ID NO: 353228 - RNA, 19 nt, Artificial Sequence
  Description of Artificial Sequence: Synthetic oligonucleotide
ucgacauccuuggcacgcu

SEQ ID NO: 353229 - RNA, 19 nt, Artificial Sequence
  Description of Artificial Sequence: Synthetic oligonucleotide
uaucaccaauuggaaugau

SEQ ID NO: 353230 - RNA, 19 nt, Artificial Sequence
  Description of Artificial Sequence: Synthetic oligonucleotide
aggugcauagggaucuuuu

SEQ ID NO: 353231 - RNA, 19 nt, Artificial Sequence
  Description of Artificial Sequence: Synthetic oligonucleotide
gacuccgaggaaaccuguc

SEQ ID NO: 353232 - RNA, 19 nt, Artificial Sequence
  Description of Artificial Sequence: Synthetic oligonucleotide
cagauaacugaguguaauu

SEQ ID NO: 353233 - RNA, 19 nt, Artificial Sequence
  Description of Artificial Sequence: Synthetic oligonucleotide
guuggcgccuugucaaagu

SEQ ID NO: 353234 - RNA, 19 nt, Artificial Sequence
  Description of Artificial Sequence: Synthetic oligonucleotide
gaguguaauuuugguuucu

SEQ ID NO: 353235 - RNA, 19 nt, Artificial Sequence
  Description of Artificial Sequence: Synthetic oligonucleotide
cuuggucgcauggcugauc

SEQ ID NO: 353236 - RNA, 19 nt, Artificial Sequence
  Description of Artificial Sequence: Synthetic oligonucleotide
cguacacauuucucccugg

SEQ ID NO: 353237 - RNA, 19 nt, Artificial Sequence
  Description of Artificial Sequence: Synthetic oligonucleotide
cccacuagaaucaaagcuu

SEQ ID NO: 353238 - RNA, 19 nt, Artificial Sequence
  Description of Artificial Sequence: Synthetic oligonucleotide
ggaaaccugucaggucucc

SEQ ID NO: 353239 - RNA, 19 nt, Artificial Sequence
  Description of Artificial Sequence: Synthetic oligonucleotide
auuauucccugaagucguu

SEQ ID NO: 353240 - RNA, 19 nt, Artificial Sequence
  Description of Artificial Sequence: Synthetic oligonucleotide
ccaagaguaagcacacaua

SEQ ID NO: 353241 - RNA, 19 nt, Artificial Sequence
  Description of Artificial Sequence: Synthetic oligonucleotide
agcucccuucggcugguua

SEQ ID NO: 353242 - RNA, 19 nt, Artificial Sequence
  Description of Artificial Sequence: Synthetic oligonucleotide
ucccuucggcugguuaccu

SEQ ID NO: 353243 - RNA, 19 nt, Artificial Sequence
  Description of Artificial Sequence: Synthetic oligonucleotide
gguuaccuaagugcacauc

SEQ ID NO: 353244 - RNA, 19 nt, Artificial Sequence
  Description of Artificial Sequence: Synthetic oligonucleotide
ccaauuaucaugugccuuu

SEQ ID NO: 353245 - RNA, 19 nt, Artificial Sequence
  Description of Artificial Sequence: Synthetic oligonucleotide
cauauggggagugcucucu

SEQ ID NO: 353246 - RNA, 19 nt, Artificial Sequence
  Description of Artificial Sequence: Synthetic oligonucleotide
gggaccauauggggagugc

SEQ ID NO: 353247 - RNA, 19 nt, Artificial Sequence
  Description of Artificial Sequence: Synthetic oligonucleotide
gcugguuaccuaagugcac

SEQ ID NO: 353248 - RNA, 19 nt, Artificial Sequence
  Description of Artificial Sequence: Synthetic oligonucleotide
cccuugauaagaacgaauu

SEQ ID NO: 353249 - RNA, 19 nt, Artificial Sequence
  Description of Artificial Sequence: Synthetic oligonucleotide
cugauacacucuguaagau

SEQ ID NO: 353250 - RNA, 19 nt, Artificial Sequence
  Description of Artificial Sequence: Synthetic oligonucleotide
ggggagugcucucugccaa

SEQ ID NO: 353251 - RNA, 19 nt, Artificial Sequence
  Description of Artificial Sequence: Synthetic oligonucleotide
cuguuacaucuucuccaaa

SEQ ID NO: 353252 - RNA, 19 nt, Artificial Sequence
  Description of Artificial Sequence: Synthetic oligonucleotide
aucauccuucggucuuguu

SEQ ID NO: 353253 - RNA, 19 nt, Artificial Sequence
  Description of Artificial Sequence: Synthetic oligonucleotide
gccuccuuuaaagaugacu

SEQ ID NO: 353254 - RNA, 19 nt, Artificial Sequence
  Description of Artificial Sequence: Synthetic oligonucleotide
cccaacucuaagauuacau

SEQ ID NO: 353255 - RNA, 19 nt, Artificial Sequence
  Description of Artificial Sequence: Synthetic oligonucleotide
uccgagcugccagccaauu

SEQ ID NO: 353256 - RNA, 19 nt, Artificial Sequence
  Description of Artificial Sequence: Synthetic oligonucleotide
cgaauuguucucuccaacu

SEQ ID NO: 353257 - RNA, 19 nt, Artificial Sequence
  Description of Artificial Sequence: Synthetic oligonucleotide
ccucucauaaugggucuuc

SEQ ID NO: 353258 - RNA, 19 nt, Artificial Sequence
  Description of Artificial Sequence: Synthetic oligonucleotide
cuguuggcgccuugucaaa

SEQ ID NO: 353259 - RNA, 19 nt, Artificial Sequence
  Description of Artificial Sequence: Synthetic oligonucleotide
cucucauaaugggucuucu

SEQ ID NO: 353260 - RNA, 19 nt, Artificial Sequence
  Description of Artificial Sequence: Synthetic oligonucleotide
gaaagccccucgguucgua

SEQ ID NO: 353261 - RNA, 19 nt, Artificial Sequence
  Description of Artificial Sequence: Synthetic oligonucleotide
cgguucguacacauuucuc

SEQ ID NO: 353262 - RNA, 19 nt, Artificial Sequence
  Description of Artificial Sequence: Synthetic oligonucleotide
ggcacgcugucuguagguc

SEQ ID NO: 353263 - RNA, 19 nt, Artificial Sequence
  Description of Artificial Sequence: Synthetic oligonucleotide
gucgcauggcugauccucu

SEQ ID NO: 353264 - RNA, 19 nt, Artificial Sequence
  Description of Artificial Sequence: Synthetic oligonucleotide
ccucgguucguacacauuu

SEQ ID NO: 353265 - RNA, 19 nt, Artificial Sequence
  Description of Artificial Sequence: Synthetic oligonucleotide
gcacgcugucuguaggucu

SEQ ID NO: 353266 - RNA, 19 nt, Artificial Sequence
  Description of Artificial Sequence: Synthetic oligonucleotide
gccucgugaaccucuuccu

SEQ ID NO: 353267 - RNA, 19 nt, Artificial Sequence
  Description of Artificial Sequence: Synthetic oligonucleotide
gcaaagucccuugguggaa

SEQ ID NO: 353268 - RNA, 19 nt, Artificial Sequence
  Description of Artificial Sequence: Synthetic oligonucleotide
gcaagcaguccaagaguaa

SEQ ID NO: 353269 - RNA, 19 nt, Artificial Sequence
  Description of Artificial Sequence: Synthetic oligonucleotide
gggagugcucucugccaaa

SEQ ID NO: 353270 - RNA, 19 nt, Artificial Sequence
  Description of Artificial Sequence: Synthetic oligonucleotide
gccaauuaucaugugccuu

SEQ ID NO: 353271 - RNA, 19 nt, Artificial Sequence
  Description of Artificial Sequence: Synthetic oligonucleotide
gagggaccauauggggagu

SEQ ID NO: 353272 - RNA, 19 nt, Artificial Sequence
  Description of Artificial Sequence: Synthetic oligonucleotide
ccgaggaaaccugucaggu

SEQ ID NO: 353273 - RNA, 19 nt, Artificial Sequence
  Description of Artificial Sequence: Synthetic oligonucleotide
gcccuugauaagaacgaau

SEQ ID NO: 353274 - RNA, 19 nt, Artificial Sequence
  Description of Artificial Sequence: Synthetic oligonucleotide
guggacccuccaacaaagu

SEQ ID NO: 353275 - RNA, 19 nt, Artificial Sequence
  Description of Artificial Sequence: Synthetic oligonucleotide
gcgccuugucaaaguuggc

SEQ ID NO: 353276 - RNA, 19 nt, Artificial Sequence
  Description of Artificial Sequence: Synthetic oligonucleotide
aagcucccuucggcugguu

SEQ ID NO: 353277 - RNA, 19 nt, Artificial Sequence
  Description of Artificial Sequence: Synthetic oligonucleotide
ccccaacucuaagauuaca

SEQ ID NO: 353278 - RNA, 19 nt, Artificial Sequence
  Description of Artificial Sequence: Synthetic oligonucleotide
ggccuccuuuaaagaugac

SEQ ID NO: 353279 - RNA, 19 nt, Artificial Sequence
  Description of Artificial Sequence: Synthetic oligonucleotide
ccgagcugccagccaauua

SEQ ID NO: 353280 - RNA, 19 nt, Artificial Sequence
  Description of Artificial Sequence: Synthetic oligonucleotide
caggugcauagggaucuuu

SEQ ID NO: 353281 - RNA, 19 nt, Artificial Sequence
  Description of Artificial Sequence: Synthetic oligonucleotide
ggaaagccccucgguucgu

SEQ ID NO: 353282 - RNA, 19 nt, Artificial Sequence
  Description of Artificial Sequence: Synthetic oligonucleotide
cccuucggcugguuaccua

SEQ ID NO: 353283 - RNA, 19 nt, Artificial Sequence
  Description of Artificial Sequence: Synthetic oligonucleotide
ccccucgguucguacacau

SEQ ID NO: 353284 - RNA, 19 nt, Artificial Sequence
  Description of Artificial Sequence: Synthetic oligonucleotide
ccgucaucacugugaguuu

SEQ ID NO: 353285 - RNA, 19 nt, Artificial Sequence
  Description of Artificial Sequence: Synthetic oligonucleotide
cccucucauaaugggucuu

SEQ ID NO: 353286 - RNA, 19 nt, Artificial Sequence
  Description of Artificial Sequence: Synthetic oligonucleotide
aauaguuguauccagagcg

SEQ ID NO: 353287 - RNA, 19 nt, Artificial Sequence
  Description of Artificial Sequence: Synthetic oligonucleotide
aaugcguucaaccuuagag

SEQ ID NO: 353288 - RNA, 19 nt, Artificial Sequence
  Description of Artificial Sequence: Synthetic oligonucleotide
uucuauaacaucaugaccu

SEQ ID NO: 353289 - RNA, 19 nt, Artificial Sequence
  Description of Artificial Sequence: Synthetic oligonucleotide
aaucacgauccuuauauuc

SEQ ID NO: 353290 - RNA, 19 nt, Artificial Sequence
  Description of Artificial Sequence: Synthetic oligonucleotide
aagagagaugaagagaggg

SEQ ID NO: 353291 - RNA, 19 nt, Artificial Sequence
  Description of Artificial Sequence: Synthetic oligonucleotide
ugggauagagagaagagug

SEQ ID NO: 353292 - RNA, 19 nt, Artificial Sequence
  Description of Artificial Sequence: Synthetic oligonucleotide
acaggauacaacuagggca

SEQ ID NO: 353293 - RNA, 19 nt, Artificial Sequence
  Description of Artificial Sequence: Synthetic oligonucleotide
augcguucaaccuuagagc

SEQ ID NO: 353294 - RNA, 19 nt, Artificial Sequence
  Description of Artificial Sequence: Synthetic oligonucleotide
guagacaacuguuagggag

SEQ ID NO: 353295 - RNA, 19 nt, Artificial Sequence
  Description of Artificial Sequence: Synthetic oligonucleotide
agccauguaaucacgaucc

SEQ ID NO: 353296 - RNA, 19 nt, Artificial Sequence
  Description of Artificial Sequence: Synthetic oligonucleotide
agugaaaucugcauagcgc

SEQ ID NO: 353297 - RNA, 19 nt, Artificial Sequence
  Description of Artificial Sequence: Synthetic oligonucleotide
ugaaaguugauaggaaucc

SEQ ID NO: 353298 - RNA, 19 nt, Artificial Sequence
  Description of Artificial Sequence: Synthetic oligonucleotide
gaaaacguugucagaaugg

SEQ ID NO: 353299 - RNA, 19 nt, Artificial Sequence
  Description of Artificial Sequence: Synthetic oligonucleotide
ugaaaacguugucagaaug

SEQ ID NO: 353300 - RNA, 19 nt, Artificial Sequence
  Description of Artificial Sequence: Synthetic oligonucleotide
uguuagggagcucauccgg

SEQ ID NO: 353301 - RNA, 19 nt, Artificial Sequence
  Description of Artificial Sequence: Synthetic oligonucleotide
agacaucucuucucaaugc

SEQ ID NO: 353302 - RNA, 19 nt, Artificial Sequence
  Description of Artificial Sequence: Synthetic oligonucleotide
gagugaaaucugcauagcg

SEQ ID NO: 353303 - RNA, 19 nt, Artificial Sequence
  Description of Artificial Sequence: Synthetic oligonucleotide
agugacucuuccuccaagc

SEQ ID NO: 353304 - RNA, 19 nt, Artificial Sequence
  Description of Artificial Sequence: Synthetic oligonucleotide
aguugauaggaauccaaag

SEQ ID NO: 353305 - RNA, 19 nt, Artificial Sequence
  Description of Artificial Sequence: Synthetic oligonucleotide
ucugauauuggcuccaguc

SEQ ID NO: 353306 - RNA, 19 nt, Artificial Sequence
  Description of Artificial Sequence: Synthetic oligonucleotide
ugcguucaaccuuagagcc

SEQ ID NO: 353307 - RNA, 19 nt, Artificial Sequence
  Description of Artificial Sequence: Synthetic oligonucleotide
aguaccuugauuuuauuuu

SEQ ID NO: 353308 - RNA, 19 nt, Artificial Sequence
  Description of Artificial Sequence: Synthetic oligonucleotide
gacaucucuucucaaugcg

SEQ ID NO: 353309 - RNA, 19 nt, Artificial Sequence
  Description of Artificial Sequence: Synthetic oligonucleotide
ugcuaugugcaugauagag

SEQ ID NO: 353310 - RNA, 19 nt, Artificial Sequence
  Description of Artificial Sequence: Synthetic oligonucleotide
ugacugacagguaucgaag

SEQ ID NO: 353311 - RNA, 19 nt, Artificial Sequence
  Description of Artificial Sequence: Synthetic oligonucleotide
acaaguuccacagucucac

SEQ ID NO: 353312 - RNA, 19 nt, Artificial Sequence
  Description of Artificial Sequence: Synthetic oligonucleotide
agguauacgauguggcggg

SEQ ID NO: 353313 - RNA, 19 nt, Artificial Sequence
  Description of Artificial Sequence: Synthetic oligonucleotide
acuucgaagagcacagucc

SEQ ID NO: 353314 - RNA, 19 nt, Artificial Sequence
  Description of Artificial Sequence: Synthetic oligonucleotide
uuauuuugugauuggugug

SEQ ID NO: 353315 - RNA, 19 nt, Artificial Sequence
  Description of Artificial Sequence: Synthetic oligonucleotide
gagcuagaaaaucccaucc

SEQ ID NO: 353316 - RNA, 19 nt, Artificial Sequence
  Description of Artificial Sequence: Synthetic oligonucleotide
ugauuggugugaaacugcc

SEQ ID NO: 353317 - RNA, 19 nt, Artificial Sequence
  Description of Artificial Sequence: Synthetic oligonucleotide
ugugauuggugugaaacug

SEQ ID NO: 353318 - RNA, 19 nt, Artificial Sequence
  Description of Artificial Sequence: Synthetic oligonucleotide
gguaaaggaucucagcagg

SEQ ID NO: 353319 - RNA, 19 nt, Artificial Sequence
  Description of Artificial Sequence: Synthetic oligonucleotide
ugcacggugcucuggaacg

SEQ ID NO: 353320 - RNA, 19 nt, Artificial Sequence
  Description of Artificial Sequence: Synthetic oligonucleotide
aaaacguugucagaauggu

SEQ ID NO: 353321 - RNA, 19 nt, Artificial Sequence
  Description of Artificial Sequence: Synthetic oligonucleotide
aauugaagcaaaagaagaa

SEQ ID NO: 353322 - RNA, 19 nt, Artificial Sequence
  Description of Artificial Sequence: Synthetic oligonucleotide
uucucaaugcguucaaccu

SEQ ID NO: 353323 - RNA, 19 nt, Artificial Sequence
  Description of Artificial Sequence: Synthetic oligonucleotide
gaacaggauacaacuaggg

SEQ ID NO: 353324 - RNA, 19 nt, Artificial Sequence
  Description of Artificial Sequence: Synthetic oligonucleotide
aguggccgcagauaucacc

SEQ ID NO: 353325 - RNA, 19 nt, Artificial Sequence
  Description of Artificial Sequence: Synthetic oligonucleotide
ucgagagaggucaccaucc

SEQ ID NO: 353326 - RNA, 19 nt, Artificial Sequence
  Description of Artificial Sequence: Synthetic oligonucleotide
guaggcgguccucagaggg

SEQ ID NO: 353327 - RNA, 19 nt, Artificial Sequence
  Description of Artificial Sequence: Synthetic oligonucleotide
uguggucggcuccagagca

SEQ ID NO: 353328 - RNA, 19 nt, Artificial Sequence
  Description of Artificial Sequence: Synthetic oligonucleotide
agggauguguggauuagcc

SEQ ID NO: 353329 - RNA, 19 nt, Artificial Sequence
  Description of Artificial Sequence: Synthetic oligonucleotide
uucaaaggggcaucaacgu

SEQ ID NO: 353330 - RNA, 19 nt, Artificial Sequence
  Description of Artificial Sequence: Synthetic oligonucleotide
acucucauacuccagguau

SEQ ID NO: 353331 - RNA, 19 nt, Artificial Sequence
  Description of Artificial Sequence: Synthetic oligonucleotide
auacaguguaccagcagcc

SEQ ID NO: 353332 - RNA, 19 nt, Artificial Sequence
  Description of Artificial Sequence: Synthetic oligonucleotide
acaaaccguccucugcacc

SEQ ID NO: 353333 - RNA, 19 nt, Artificial Sequence
  Description of Artificial Sequence: Synthetic oligonucleotide
cuugcugcgauggaugagg

SEQ ID NO: 353334 - RNA, 19 nt, Artificial Sequence
  Description of Artificial Sequence: Synthetic oligonucleotide
auaugggauagagagaaga

SEQ ID NO: 353335 - RNA, 19 nt, Artificial Sequence
  Description of Artificial Sequence: Synthetic oligonucleotide
aguuguauccagagcgucc

SEQ ID NO: 353336 - RNA, 19 nt, Artificial Sequence
  Description of Artificial Sequence: Synthetic oligonucleotide
acaacuguuagggagcuca

SEQ ID NO: 353337 - RNA, 19 nt, Artificial Sequence
  Description of Artificial Sequence: Synthetic oligonucleotide
aucacgcugaaacaguagu

SEQ ID NO: 353338 - RNA, 19 nt, Artificial Sequence
  Description of Artificial Sequence: Synthetic oligonucleotide
augauagagauggagggug

SEQ ID NO: 353339 - RNA, 19 nt, Artificial Sequence
  Description of Artificial Sequence: Synthetic oligonucleotide
uccgaucccagccugagau

SEQ ID NO: 353340 - RNA, 19 nt, Artificial Sequence
  Description of Artificial Sequence: Synthetic oligonucleotide
agaauucacagccuggaua

SEQ ID NO: 353341 - RNA, 19 nt, Artificial Sequence
  Description of Artificial Sequence: Synthetic oligonucleotide
aguuaaauaugagcccuuc

SEQ ID NO: 353342 - RNA, 19 nt, Artificial Sequence
  Description of Artificial Sequence: Synthetic oligonucleotide
ugaaaucugcauagcgcug

SEQ ID NO: 353343 - RNA, 19 nt, Artificial Sequence
  Description of Artificial Sequence: Synthetic oligonucleotide
ugcuuccaguuaaauauga

SEQ ID NO: 353344 - RNA, 19 nt, Artificial Sequence
  Description of Artificial Sequence: Synthetic oligonucleotide
uguguuuguugcaccaggu

SEQ ID NO: 353345 - RNA, 19 nt, Artificial Sequence
  Description of Artificial Sequence: Synthetic oligonucleotide
uccaagcugccugaguugg

SEQ ID NO: 353346 - RNA, 19 nt, Artificial Sequence
  Description of Artificial Sequence: Synthetic oligonucleotide
gaggaugagugacucuucc

SEQ ID NO: 353347 - RNA, 19 nt, Artificial Sequence
  Description of Artificial Sequence: Synthetic oligonucleotide
cgaucuaccaacaugugcc

SEQ ID NO: 353348 - RNA, 19 nt, Artificial Sequence
  Description of Artificial Sequence: Synthetic oligonucleotide
uuggaaucacgcugaaaca

SEQ ID NO: 353349 - RNA, 19 nt, Artificial Sequence
  Description of Artificial Sequence: Synthetic oligonucleotide
cagguauacgauguggcgg

SEQ ID NO: 353350 - RNA, 19 nt, Artificial Sequence
  Description of Artificial Sequence: Synthetic oligonucleotide
agagcgcaccuccuguagc

SEQ ID NO: 353351 - RNA, 19 nt, Artificial Sequence
  Description of Artificial Sequence: Synthetic oligonucleotide
ucuggaacgugucuuucuc

SEQ ID NO: 353352 - RNA, 19 nt, Artificial Sequence
  Description of Artificial Sequence: Synthetic oligonucleotide
ugcccaaagaggaaccagu

SEQ ID NO: 353353 - RNA, 19 nt, Artificial Sequence
  Description of Artificial Sequence: Synthetic oligonucleotide
uguaugcagccaagaaggc

SEQ ID NO: 353354 - RNA, 19 nt, Artificial Sequence
  Description of Artificial Sequence: Synthetic oligonucleotide
cauccgggaagcugaaagg

SEQ ID NO: 353355 - RNA, 19 nt, Artificial Sequence
  Description of Artificial Sequence: Synthetic oligonucleotide
auuggcuccagucaauguu

SEQ ID NO: 353356 - RNA, 19 nt, Artificial Sequence
  Description of Artificial Sequence: Synthetic oligonucleotide
uccagagcguccauacagc

SEQ ID NO: 353357 - RNA, 19 nt, Artificial Sequence
  Description of Artificial Sequence: Synthetic oligonucleotide
agauacaguguaccagcag

SEQ ID NO: 353358 - RNA, 19 nt, Artificial Sequence
  Description of Artificial Sequence: Synthetic oligonucleotide
uagucucggccaaauagcu

SEQ ID NO: 353359 - RNA, 19 nt, Artificial Sequence
  Description of Artificial Sequence: Synthetic oligonucleotide
ucacgauccuuauauuccu

SEQ ID NO: 353360 - RNA, 19 nt, Artificial Sequence
  Description of Artificial Sequence: Synthetic oligonucleotide
accuuagagccgcucgccc

SEQ ID NO: 353361 - RNA, 19 nt, Artificial Sequence
  Description of Artificial Sequence: Synthetic oligonucleotide
uccgacuccagcucuaaaa

SEQ ID NO: 353362 - RNA, 19 nt, Artificial Sequence
  Description of Artificial Sequence: Synthetic oligonucleotide
auaucauggccucucacuu

SEQ ID NO: 353363 - RNA, 19 nt, Artificial Sequence
  Description of Artificial Sequence: Synthetic oligonucleotide
acgauccuuauauuccuug

SEQ ID NO: 353364 - RNA, 19 nt, Artificial Sequence
  Description of Artificial Sequence: Synthetic oligonucleotide
caggguuuucuucaccggg

SEQ ID NO: 353365 - RNA, 19 nt, Artificial Sequence
  Description of Artificial Sequence: Synthetic oligonucleotide
ucuaccaacaugugcccaa

SEQ ID NO: 353366 - RNA, 19 nt, Artificial Sequence
  Description of Artificial Sequence: Synthetic oligonucleotide
guuuguugcaccagguccc

SEQ ID NO: 353367 - RNA, 19 nt, Artificial Sequence
  Description of Artificial Sequence: Synthetic oligonucleotide
gaacgugucuuucucuuuc

SEQ ID NO: 353368 - RNA, 19 nt, Artificial Sequence
  Description of Artificial Sequence: Synthetic oligonucleotide
agcuagaaaaucccauccu

SEQ ID NO: 353369 - RNA, 19 nt, Artificial Sequence
  Description of Artificial Sequence: Synthetic oligonucleotide
cagguaucgaagcagccug

SEQ ID NO: 353370 - RNA, 19 nt, Artificial Sequence
  Description of Artificial Sequence: Synthetic oligonucleotide
acgcugaaacaguagucuc

SEQ ID NO: 353371 - RNA, 19 nt, Artificial Sequence
  Description of Artificial Sequence: Synthetic oligonucleotide
agaauggggucuucuauaa

SEQ ID NO: 353372 - RNA, 19 nt, Artificial Sequence
  Description of Artificial Sequence: Synthetic oligonucleotide
ggaaaggcguagaagagag

SEQ ID NO: 353373 - RNA, 19 nt, Artificial Sequence
  Description of Artificial Sequence: Synthetic oligonucleotide
caucugcccauaaggaaag

SEQ ID NO: 353374 - RNA, 19 nt, Artificial Sequence
  Description of Artificial Sequence: Synthetic oligonucleotide
ucucaaugcguucaaccuu

SEQ ID NO: 353375 - RNA, 19 nt, Artificial Sequence
  Description of Artificial Sequence: Synthetic oligonucleotide
cuuagagccgcucgccccg

SEQ ID NO: 353376 - RNA, 19 nt, Artificial Sequence
  Description of Artificial Sequence: Synthetic oligonucleotide
ugauaucauggccucucac

SEQ ID NO: 353377 - RNA, 19 nt, Artificial Sequence
  Description of Artificial Sequence: Synthetic oligonucleotide
aggguuuucuucaccgggc

SEQ ID NO: 353378 - RNA, 19 nt, Artificial Sequence
  Description of Artificial Sequence: Synthetic oligonucleotide
ccaacaugugcccaaagag

SEQ ID NO: 353379 - RNA, 19 nt, Artificial Sequence
  Description of Artificial Sequence: Synthetic oligonucleotide
aaucacgcugaaacaguag

SEQ ID NO: 353380 - RNA, 19 nt, Artificial Sequence
  Description of Artificial Sequence: Synthetic oligonucleotide
uguagaugucuuccagagu

SEQ ID NO: 353381 - RNA, 19 nt, Artificial Sequence
  Description of Artificial Sequence: Synthetic oligonucleotide
auacuccagguauacgaug

SEQ ID NO: 353382 - RNA, 19 nt, Artificial Sequence
  Description of Artificial Sequence: Synthetic oligonucleotide
ugugugucaccacuucgaa

SEQ ID NO: 353383 - RNA, 19 nt, Artificial Sequence
  Description of Artificial Sequence: Synthetic oligonucleotide
uggaagacuuggcuucagc

SEQ ID NO: 353384 - RNA, 19 nt, Artificial Sequence
  Description of Artificial Sequence: Synthetic oligonucleotide
aacuguuagggagcucauc

SEQ ID NO: 353385 - RNA, 19 nt, Artificial Sequence
  Description of Artificial Sequence: Synthetic oligonucleotide
ucaaaggggcaucaacgua

SEQ ID NO: 353386 - RNA, 19 nt, Artificial Sequence
  Description of Artificial Sequence: Synthetic oligonucleotide
cuuucucagaggagguuac

SEQ ID NO: 353387 - RNA, 19 nt, Artificial Sequence
  Description of Artificial Sequence: Synthetic oligonucleotide
agccugauaucauggccuc

SEQ ID NO: 353388 - RNA, 19 nt, Artificial Sequence
  Description of Artificial Sequence: Synthetic oligonucleotide
agccgaucuaccaacaugu

SEQ ID NO: 353389 - RNA, 19 nt, Artificial Sequence
  Description of Artificial Sequence: Synthetic oligonucleotide
uguugcaccaggucccaac

SEQ ID NO: 353390 - RNA, 19 nt, Artificial Sequence
  Description of Artificial Sequence: Synthetic oligonucleotide
ggucacucagggcugaaag

SEQ ID NO: 353391 - RNA, 19 nt, Artificial Sequence
  Description of Artificial Sequence: Synthetic oligonucleotide
agugucgagagaggucacc

SEQ ID NO: 353392 - RNA, 19 nt, Artificial Sequence
  Description of Artificial Sequence: Synthetic oligonucleotide
gagaagucgcugccuaggc

SEQ ID NO: 353393 - RNA, 19 nt, Artificial Sequence
  Description of Artificial Sequence: Synthetic oligonucleotide
uccgugaggcccuaggaau

SEQ ID NO: 353394 - RNA, 19 nt, Artificial Sequence
  Description of Artificial Sequence: Synthetic oligonucleotide
ucccgaguuggcaaacucu

SEQ ID NO: 353395 - RNA, 19 nt, Artificial Sequence
  Description of Artificial Sequence: Synthetic oligonucleotide
ccagguaucaucuguuccc

SEQ ID NO: 353396 - RNA, 19 nt, Artificial Sequence
  Description of Artificial Sequence: Synthetic oligonucleotide
aucccgaguuggcaaacuc

SEQ ID NO: 353397 - RNA, 19 nt, Artificial Sequence
  Description of Artificial Sequence: Synthetic oligonucleotide
aaucccauccucaggccug

SEQ ID NO: 353398 - RNA, 19 nt, Artificial Sequence
  Description of Artificial Sequence: Synthetic oligonucleotide
uacuugacugacagguauc

SEQ ID NO: 353399 - RNA, 19 nt, Artificial Sequence
  Description of Artificial Sequence: Synthetic oligonucleotide
augggauagagagaagagu

SEQ ID NO: 353400 - RNA, 19 nt, Artificial Sequence
  Description of Artificial Sequence: Synthetic oligonucleotide
gucucugcgucucaacgug

SEQ ID NO: 353401 - RNA, 19 nt, Artificial Sequence
  Description of Artificial Sequence: Synthetic oligonucleotide
agaggugauaugcuucaaa

SEQ ID NO: 353402 - RNA, 19 nt, Artificial Sequence
  Description of Artificial Sequence: Synthetic oligonucleotide
aacucucauacuccaggua

SEQ ID NO: 353403 - RNA, 19 nt, Artificial Sequence
  Description of Artificial Sequence: Synthetic oligonucleotide
gagcgcaccuccuguagcc

SEQ ID NO: 353404 - RNA, 19 nt, Artificial Sequence
  Description of Artificial Sequence: Synthetic oligonucleotide
auauuggcuccagucaaug

SEQ ID NO: 353405 - RNA, 19 nt, Artificial Sequence
  Description of Artificial Sequence: Synthetic oligonucleotide
ggucccaacucugauauug

SEQ ID NO: 353406 - RNA, 19 nt, Artificial Sequence
  Description of Artificial Sequence: Synthetic oligonucleotide
ugcgucucaacguguagau

SEQ ID NO: 353407 - RNA, 19 nt, Artificial Sequence
  Description of Artificial Sequence: Synthetic oligonucleotide
uacaacuagggcagacaaa

SEQ ID NO: 353408 - RNA, 19 nt, Artificial Sequence
  Description of Artificial Sequence: Synthetic oligonucleotide
cacuucgaagagcacaguc

SEQ ID NO: 353409 - RNA, 19 nt, Artificial Sequence
  Description of Artificial Sequence: Synthetic oligonucleotide
agagcacaguccuccuccg

SEQ ID NO: 353410 - RNA, 19 nt, Artificial Sequence
  Description of Artificial Sequence: Synthetic oligonucleotide
augugcccaaagaggaacc

SEQ ID NO: 353411 - RNA, 19 nt, Artificial Sequence
  Description of Artificial Sequence: Synthetic oligonucleotide
ccuguuaccaucugccagc

SEQ ID NO: 353412 - RNA, 19 nt, Artificial Sequence
  Description of Artificial Sequence: Synthetic oligonucleotide
guccauacagcucucccca

SEQ ID NO: 353413 - RNA, 19 nt, Artificial Sequence
  Description of Artificial Sequence: Synthetic oligonucleotide
ccagucauaggccacaguc

SEQ ID NO: 353414 - RNA, 19 nt, Artificial Sequence
  Description of Artificial Sequence: Synthetic oligonucleotide
gagaagagugaaaucugca

SEQ ID NO: 353415 - RNA, 19 nt, Artificial Sequence
  Description of Artificial Sequence: Synthetic oligonucleotide
uagcccaucugcccauaag

SEQ ID NO: 353416 - RNA, 19 nt, Artificial Sequence
  Description of Artificial Sequence: Synthetic oligonucleotide
cacucagggcugaaaguag

SEQ ID NO: 353417 - RNA, 19 nt, Artificial Sequence
  Description of Artificial Sequence: Synthetic oligonucleotide
ucgcugccuaggcuggugg

SEQ ID NO: 353418 - RNA, 19 nt, Artificial Sequence
  Description of Artificial Sequence: Synthetic oligonucleotide
acagcccguuccugaauac

SEQ ID NO: 353419 - RNA, 19 nt, Artificial Sequence
  Description of Artificial Sequence: Synthetic oligonucleotide
gcuagaaaaucccauccuc

SEQ ID NO: 353420 - RNA, 19 nt, Artificial Sequence
  Description of Artificial Sequence: Synthetic oligonucleotide
ucaaugcguucaaccuuag

SEQ ID NO: 353421 - RNA, 19 nt, Artificial Sequence
  Description of Artificial Sequence: Synthetic oligonucleotide
uauccagagcguccauaca

SEQ ID NO: 353422 - RNA, 19 nt, Artificial Sequence
  Description of Artificial Sequence: Synthetic oligonucleotide
ugcugagccgaucuaccaa

SEQ ID NO: 353423 - RNA, 19 nt, Artificial Sequence
  Description of Artificial Sequence: Synthetic oligonucleotide
gaugguccacugaucuggg

SEQ ID NO: 353424 - RNA, 19 nt, Artificial Sequence
  Description of Artificial Sequence: Synthetic oligonucleotide
caacuagggcagacaaacc

SEQ ID NO: 353425 - RNA, 19 nt, Artificial Sequence
  Description of Artificial Sequence: Synthetic oligonucleotide
gggguuacugcucgaagcc

SEQ ID NO: 353426 - RNA, 19 nt, Artificial Sequence
  Description of Artificial Sequence: Synthetic oligonucleotide
aucaccauucacauuugga

SEQ ID NO: 353427 - RNA, 19 nt, Artificial Sequence
  Description of Artificial Sequence: Synthetic oligonucleotide
aaggggcaucaacguaguc

SEQ ID NO: 353428 - RNA, 19 nt, Artificial Sequence
  Description of Artificial Sequence: Synthetic oligonucleotide
ucggccaaauagcuccaga

SEQ ID NO: 353429 - RNA, 19 nt, Artificial Sequence
  Description of Artificial Sequence: Synthetic oligonucleotide
ugaggaugagugacucuuc

SEQ ID NO: 353430 - RNA, 19 nt, Artificial Sequence
  Description of Artificial Sequence: Synthetic oligonucleotide
ggagcuagaaaaucccauc

SEQ ID NO: 353431 - RNA, 19 nt, Artificial Sequence
  Description of Artificial Sequence: Synthetic oligonucleotide
guguggauuagcccaucug

SEQ ID NO: 353432 - RNA, 19 nt, Artificial Sequence
  Description of Artificial Sequence: Synthetic oligonucleotide
cucagggcugaaaguagac

SEQ ID NO: 353433 - RNA, 19 nt, Artificial Sequence
  Description of Artificial Sequence: Synthetic oligonucleotide
uucagugcgggugacucuc

SEQ ID NO: 353434 - RNA, 19 nt, Artificial Sequence
  Description of Artificial Sequence: Synthetic oligonucleotide
gucgagagaggucaccauc

SEQ ID NO: 353435 - RNA, 19 nt, Artificial Sequence
  Description of Artificial Sequence: Synthetic oligonucleotide
uucucagaggagguuacau

SEQ ID NO: 353436 - RNA, 19 nt, Artificial Sequence
  Description of Artificial Sequence: Synthetic oligonucleotide
gaauggggucuucuauaac

SEQ ID NO: 353437 - RNA, 19 nt, Artificial Sequence
  Description of Artificial Sequence: Synthetic oligonucleotide
gacaaaccguccucugcac

SEQ ID NO: 353438 - RNA, 19 nt, Artificial Sequence
  Description of Artificial Sequence: Synthetic oligonucleotide
cucaaugcguucaaccuua

SEQ ID NO: 353439 - RNA, 19 nt, Artificial Sequence
  Description of Artificial Sequence: Synthetic oligonucleotide
auaguuguauccagagcgu

SEQ ID NO: 353440 - RNA, 19 nt, Artificial Sequence
  Description of Artificial Sequence: Synthetic oligonucleotide
ccagguauacgauguggcg

SEQ ID NO: 353441 - RNA, 19 nt, Artificial Sequence
  Description of Artificial Sequence: Synthetic oligonucleotide
accuccgugaggcccuagg

SEQ ID NO: 353442 - RNA, 19 nt, Artificial Sequence
  Description of Artificial Sequence: Synthetic oligonucleotide
accugcaaaugugcuugcc

SEQ ID NO: 353443 - RNA, 19 nt, Artificial Sequence
  Description of Artificial Sequence: Synthetic oligonucleotide
ugcaaaugugcuugccuuu

SEQ ID NO: 353444 - RNA, 19 nt, Artificial Sequence
  Description of Artificial Sequence: Synthetic oligonucleotide
aauugcagaauggggucuu

SEQ ID NO: 353445 - RNA, 19 nt, Artificial Sequence
  Description of Artificial Sequence: Synthetic oligonucleotide
agaggcgguggaccccgcc

SEQ ID NO: 353446 - RNA, 19 nt, Artificial Sequence
  Description of Artificial Sequence: Synthetic oligonucleotide
gcguagaagagagaugaag

SEQ ID NO: 353447 - RNA, 19 nt, Artificial Sequence
  Description of Artificial Sequence: Synthetic oligonucleotide
ugagccgaucuaccaacau

SEQ ID NO: 353448 - RNA, 19 nt, Artificial Sequence
  Description of Artificial Sequence: Synthetic oligonucleotide
cuuugccaggcauggcuug

SEQ ID NO: 353449 - RNA, 19 nt, Artificial Sequence
  Description of Artificial Sequence: Synthetic oligonucleotide
uacugcucgaagccccacu

SEQ ID NO: 353450 - RNA, 19 nt, Artificial Sequence
  Description of Artificial Sequence: Synthetic oligonucleotide
ugccgggacaaguuccaca

SEQ ID NO: 353451 - RNA, 19 nt, Artificial Sequence
  Description of Artificial Sequence: Synthetic oligonucleotide
gacaaguuccacagucuca

SEQ ID NO: 353452 - RNA, 19 nt, Artificial Sequence
  Description of Artificial Sequence: Synthetic oligonucleotide
cucauacuccagguauacg

SEQ ID NO: 353453 - RNA, 19 nt, Artificial Sequence
  Description of Artificial Sequence: Synthetic oligonucleotide
ggagaagucgcugccuagg

SEQ ID NO: 353454 - RNA, 19 nt, Artificial Sequence
  Description of Artificial Sequence: Synthetic oligonucleotide
gucccaacucugauauugg

SEQ ID NO: 353455 - RNA, 19 nt, Artificial Sequence
  Description of Artificial Sequence: Synthetic oligonucleotide
ggagagagaggauccgggc

SEQ ID NO: 353456 - RNA, 19 nt, Artificial Sequence
  Description of Artificial Sequence: Synthetic oligonucleotide
cguagaagagagaugaaga

SEQ ID NO: 353457 - RNA, 19 nt, Artificial Sequence
  Description of Artificial Sequence: Synthetic oligonucleotide
ugcaucccgaguuggcaaa

SEQ ID NO: 353458 - RNA, 19 nt, Artificial Sequence
  Description of Artificial Sequence: Synthetic oligonucleotide
cugaaacaguagucucggc

SEQ ID NO: 353459 - RNA, 19 nt, Artificial Sequence
  Description of Artificial Sequence: Synthetic oligonucleotide
cuguggucggcuccagagc

SEQ ID NO: 353460 - RNA, 19 nt, Artificial Sequence
  Description of Artificial Sequence: Synthetic oligonucleotide
agcguccauacagcucucc

SEQ ID NO: 353461 - RNA, 19 nt, Artificial Sequence
  Description of Artificial Sequence: Synthetic oligonucleotide
uuugccaggcauggcuuga

SEQ ID NO: 353462 - RNA, 19 nt, Artificial Sequence
  Description of Artificial Sequence: Synthetic oligonucleotide
guacuugacugacagguau

SEQ ID NO: 353463 - RNA, 19 nt, Artificial Sequence
  Description of Artificial Sequence: Synthetic oligonucleotide
ggacaaguuccacagucuc

SEQ ID NO: 353464 - RNA, 19 nt, Artificial Sequence
  Description of Artificial Sequence: Synthetic oligonucleotide
cagauaucaccauucacau

SEQ ID NO: 353465 - RNA, 19 nt, Artificial Sequence
  Description of Artificial Sequence: Synthetic oligonucleotide
ugcuugccuuuugaacagg

SEQ ID NO: 353466 - RNA, 19 nt, Artificial Sequence
  Description of Artificial Sequence: Synthetic oligonucleotide
ccgaucuaccaacaugugc

SEQ ID NO: 353467 - RNA, 19 nt, Artificial Sequence
  Description of Artificial Sequence: Synthetic oligonucleotide
ugcccauccugaaaacguu

SEQ ID NO: 353468 - RNA, 19 nt, Artificial Sequence
  Description of Artificial Sequence: Synthetic oligonucleotide
ccuuauauuccuugaagaa

SEQ ID NO: 353469 - RNA, 19 nt, Artificial Sequence
  Description of Artificial Sequence: Synthetic oligonucleotide
uuucucagaggagguuaca

SEQ ID NO: 353470 - RNA, 19 nt, Artificial Sequence
  Description of Artificial Sequence: Synthetic oligonucleotide
ugggaagguaggcgguccu

SEQ ID NO: 353471 - RNA, 19 nt, Artificial Sequence
  Description of Artificial Sequence: Synthetic oligonucleotide
gugucaccacuucgaagag

SEQ ID NO: 353472 - RNA, 19 nt, Artificial Sequence
  Description of Artificial Sequence: Synthetic oligonucleotide
ugcgggugacucuccuucc

SEQ ID NO: 353473 - RNA, 19 nt, Artificial Sequence
  Description of Artificial Sequence: Synthetic oligonucleotide
agcccguuccugaauacug

SEQ ID NO: 353474 - RNA, 19 nt, Artificial Sequence
  Description of Artificial Sequence: Synthetic oligonucleotide
gaaucacgcugaaacagua

SEQ ID NO: 353475 - RNA, 19 nt, Artificial Sequence
  Description of Artificial Sequence: Synthetic oligonucleotide
guggccgcagauaucacca

SEQ ID NO: 353476 - RNA, 19 nt, Artificial Sequence
  Description of Artificial Sequence: Synthetic oligonucleotide
aucccauccucaggccugc

SEQ ID NO: 353477 - RNA, 19 nt, Artificial Sequence
  Description of Artificial Sequence: Synthetic oligonucleotide
gcagugucgagagagguca

SEQ ID NO: 353478 - RNA, 19 nt, Artificial Sequence
  Description of Artificial Sequence: Synthetic oligonucleotide
agcauacucuguggugagg

SEQ ID NO: 353479 - RNA, 19 nt, Artificial Sequence
  Description of Artificial Sequence: Synthetic oligonucleotide
agucucggccaaauagcuc

SEQ ID NO: 353480 - RNA, 19 nt, Artificial Sequence
  Description of Artificial Sequence: Synthetic oligonucleotide
cugccuaggcugguggugc

SEQ ID NO: 353481 - RNA, 19 nt, Artificial Sequence
  Description of Artificial Sequence: Synthetic oligonucleotide
ugucgagagaggucaccau

SEQ ID NO: 353482 - RNA, 19 nt, Artificial Sequence
  Description of Artificial Sequence: Synthetic oligonucleotide
gcugagccgaucuaccaac

SEQ ID NO: 353483 - RNA, 19 nt, Artificial Sequence
  Description of Artificial Sequence: Synthetic oligonucleotide
cagagcgcaccuccuguag

SEQ ID NO: 353484 - RNA, 19 nt, Artificial Sequence
  Description of Artificial Sequence: Synthetic oligonucleotide
ucagugcgggugacucucc

SEQ ID NO: 353485 - RNA, 19 nt, Artificial Sequence
  Description of Artificial Sequence: Synthetic oligonucleotide
cagaauggggucuucuaua

SEQ ID NO: 353486 - RNA, 19 nt, Artificial Sequence
  Description of Artificial Sequence: Synthetic oligonucleotide
cucuccuuugcugagccga

SEQ ID NO: 353487 - RNA, 19 nt, Artificial Sequence
  Description of Artificial Sequence: Synthetic oligonucleotide
cgcugaaacaguagucucg

SEQ ID NO: 353488 - RNA, 19 nt, Artificial Sequence
  Description of Artificial Sequence: Synthetic oligonucleotide
ccgggaagcugaaagggag

SEQ ID NO: 353489 - RNA, 19 nt, Artificial Sequence
  Description of Artificial Sequence: Synthetic oligonucleotide
ggccaaauagcuccagaca

SEQ ID NO: 353490 - RNA, 19 nt, Artificial Sequence
  Description of Artificial Sequence: Synthetic oligonucleotide
gccucauuuucagugcggg

SEQ ID NO: 353491 - RNA, 19 nt, Artificial Sequence
  Description of Artificial Sequence: Synthetic oligonucleotide
cauagcgcugggcuuuguc

SEQ ID NO: 353492 - RNA, 19 nt, Artificial Sequence
  Description of Artificial Sequence: Synthetic oligonucleotide
aggcccuaggaauucugaa

SEQ ID NO: 353493 - RNA, 19 nt, Artificial Sequence
  Description of Artificial Sequence: Synthetic oligonucleotide
cagagcguccauacagcuc

SEQ ID NO: 353494 - RNA, 19 nt, Artificial Sequence
  Description of Artificial Sequence: Synthetic oligonucleotide
caccugaaacuccgacucc

SEQ ID NO: 353495 - RNA, 19 nt, Artificial Sequence
  Description of Artificial Sequence: Synthetic oligonucleotide
caagugccccuuugccagg

SEQ ID NO: 353496 - RNA, 19 nt, Artificial Sequence
  Description of Artificial Sequence: Synthetic oligonucleotide
auaucaccauucacauuug

SEQ ID NO: 353497 - RNA, 19 nt, Artificial Sequence
  Description of Artificial Sequence: Synthetic oligonucleotide
cagcccgcugucaucauca

SEQ ID NO: 353498 - RNA, 19 nt, Artificial Sequence
  Description of Artificial Sequence: Synthetic oligonucleotide
gugugaaacugccucauuu

SEQ ID NO: 353499 - RNA, 19 nt, Artificial Sequence
  Description of Artificial Sequence: Synthetic oligonucleotide
cccagguaucaucuguucc

SEQ ID NO: 353500 - RNA, 19 nt, Artificial Sequence
  Description of Artificial Sequence: Synthetic oligonucleotide
agggcucaacugaaacagg

SEQ ID NO: 353501 - RNA, 19 nt, Artificial Sequence
  Description of Artificial Sequence: Synthetic oligonucleotide
uucaaccuuagagccgcuc

SEQ ID NO: 353502 - RNA, 19 nt, Artificial Sequence
  Description of Artificial Sequence: Synthetic oligonucleotide
gcuuccaguuaaauaugag

SEQ ID NO: 353503 - RNA, 19 nt, Artificial Sequence
  Description of Artificial Sequence: Synthetic oligonucleotide
gccugagauacaguguacc

SEQ ID NO: 353504 - RNA, 19 nt, Artificial Sequence
  Description of Artificial Sequence: Synthetic oligonucleotide
gugucgagagaggucacca

SEQ ID NO: 353505 - RNA, 19 nt, Artificial Sequence
  Description of Artificial Sequence: Synthetic oligonucleotide
cuaggcugguggugcugcc

SEQ ID NO: 353506 - RNA, 19 nt, Artificial Sequence
  Description of Artificial Sequence: Synthetic oligonucleotide
ucggucucugcgucucaac

SEQ ID NO: 353507 - RNA, 19 nt, Artificial Sequence
  Description of Artificial Sequence: Synthetic oligonucleotide
ggcggguugcccgaagagg

SEQ ID NO: 353508 - RNA, 19 nt, Artificial Sequence
  Description of Artificial Sequence: Synthetic oligonucleotide
aggaauucugaaaguugau

SEQ ID NO: 353509 - RNA, 19 nt, Artificial Sequence
  Description of Artificial Sequence: Synthetic oligonucleotide
cugcccauccugaaaacgu

SEQ ID NO: 353510 - RNA, 19 nt, Artificial Sequence
  Description of Artificial Sequence: Synthetic oligonucleotide
gguaggcgguccucagagg

SEQ ID NO: 353511 - RNA, 19 nt, Artificial Sequence
  Description of Artificial Sequence: Synthetic oligonucleotide
gcggguugcccgaagaggc

SEQ ID NO: 353512 - RNA, 19 nt, Artificial Sequence
  Description of Artificial Sequence: Synthetic oligonucleotide
aggggaugguccacugauc

SEQ ID NO: 353513 - RNA, 19 nt, Artificial Sequence
  Description of Artificial Sequence: Synthetic oligonucleotide
cugauaucauggccucuca

SEQ ID NO: 353514 - RNA, 19 nt, Artificial Sequence
  Description of Artificial Sequence: Synthetic oligonucleotide
ugcgauggaugaggucuug

SEQ ID NO: 353515 - RNA, 19 nt, Artificial Sequence
  Description of Artificial Sequence: Synthetic oligonucleotide
ggcugaaaguagacaacug

SEQ ID NO: 353516 - RNA, 19 nt, Artificial Sequence
  Description of Artificial Sequence: Synthetic oligonucleotide
gguacugaguccgggagaa

SEQ ID NO: 353517 - RNA, 19 nt, Artificial Sequence
  Description of Artificial Sequence: Synthetic oligonucleotide
agacugagucaggaagcca

SEQ ID NO: 353518 - RNA, 19 nt, Artificial Sequence
  Description of Artificial Sequence: Synthetic oligonucleotide
accagucauaggccacagu

SEQ ID NO: 353519 - RNA, 19 nt, Artificial Sequence
  Description of Artificial Sequence: Synthetic oligonucleotide
ggcccuaggaauucugaaa

SEQ ID NO: 353520 - RNA, 19 nt, Artificial Sequence
  Description of Artificial Sequence: Synthetic oligonucleotide
cguccauacagcucucccc

SEQ ID NO: 353521 - RNA, 19 nt, Artificial Sequence
  Description of Artificial Sequence: Synthetic oligonucleotide
cccguuccugaauacugcc

SEQ ID NO: 353522 - RNA, 19 nt, Artificial Sequence
  Description of Artificial Sequence: Synthetic oligonucleotide
gucacucagggcugaaagu

SEQ ID NO: 353523 - RNA, 19 nt, Artificial Sequence
  Description of Artificial Sequence: Synthetic oligonucleotide
ccugauaucauggccucuc

SEQ ID NO: 353524 - RNA, 19 nt, Artificial Sequence
  Description of Artificial Sequence: Synthetic oligonucleotide
gcguccauacagcucuccc

SEQ ID NO: 353525 - RNA, 19 nt, Artificial Sequence
  Description of Artificial Sequence: Synthetic oligonucleotide
ugcauagcgcugggcuuug

SEQ ID NO: 353526 - RNA, 19 nt, Artificial Sequence
  Description of Artificial Sequence: Synthetic oligonucleotide
cugcgucucaacguguaga

SEQ ID NO: 353527 - RNA, 19 nt, Artificial Sequence
  Description of Artificial Sequence: Synthetic oligonucleotide
uaguggccgcagauaucac

SEQ ID NO: 353528 - RNA, 19 nt, Artificial Sequence
  Description of Artificial Sequence: Synthetic oligonucleotide
ccggagcccaacaccacgg

SEQ ID NO: 353529 - RNA, 19 nt, Artificial Sequence
  Description of Artificial Sequence: Synthetic oligonucleotide
ggcugaccugcaaaugugc

SEQ ID NO: 353530 - RNA, 19 nt, Artificial Sequence
  Description of Artificial Sequence: Synthetic oligonucleotide
cugagccgaucuaccaaca

SEQ ID NO: 353531 - RNA, 19 nt, Artificial Sequence
  Description of Artificial Sequence: Synthetic oligonucleotide
gcguucaaccuuagagccg

SEQ ID NO: 353532 - RNA, 19 nt, Artificial Sequence
  Description of Artificial Sequence: Synthetic oligonucleotide
cuguggugaggaugaguga

SEQ ID NO: 353533 - RNA, 19 nt, Artificial Sequence
  Description of Artificial Sequence: Synthetic oligonucleotide
aagaggcgguggaccccgc

SEQ ID NO: 353534 - RNA, 19 nt, Artificial Sequence
  Description of Artificial Sequence: Synthetic oligonucleotide
gauauuggcuccagucaau

SEQ ID NO: 353535 - RNA, 19 nt, Artificial Sequence
  Description of Artificial Sequence: Synthetic oligonucleotide
guaucgaagcagccugaua

SEQ ID NO: 353536 - RNA, 19 nt, Artificial Sequence
  Description of Artificial Sequence: Synthetic oligonucleotide
uuacugcucgaagccccac

SEQ ID NO: 353537 - RNA, 19 nt, Artificial Sequence
  Description of Artificial Sequence: Synthetic oligonucleotide
agugcgggugacucuccuu

SEQ ID NO: 353538 - RNA, 19 nt, Artificial Sequence
  Description of Artificial Sequence: Synthetic oligonucleotide
cugcaucccgaguuggcaa

SEQ ID NO: 353539 - RNA, 19 nt, Artificial Sequence
  Description of Artificial Sequence: Synthetic oligonucleotide
cggccaaauagcuccagac

SEQ ID NO: 353540 - RNA, 19 nt, Artificial Sequence
  Description of Artificial Sequence: Synthetic oligonucleotide
gccgcagauaucaccauuc

SEQ ID NO: 353541 - RNA, 19 nt, Artificial Sequence
  Description of Artificial Sequence: Synthetic oligonucleotide
ggauguucaaaggggcauc

SEQ ID NO: 353542 - RNA, 19 nt, Artificial Sequence
  Description of Artificial Sequence: Synthetic oligonucleotide
ccgguacugaguccgggag

SEQ ID NO: 353543 - RNA, 19 nt, Artificial Sequence
  Description of Artificial Sequence: Synthetic oligonucleotide
cuggaagacuuggcuucag

SEQ ID NO: 353544 - RNA, 19 nt, Artificial Sequence
  Description of Artificial Sequence: Synthetic oligonucleotide
ggaaccagucauaggccac

SEQ ID NO: 353545 - RNA, 19 nt, Artificial Sequence
  Description of Artificial Sequence: Synthetic oligonucleotide
caaugcguucaaccuuaga

SEQ ID NO: 353546 - RNA, 19 nt, Artificial Sequence
  Description of Artificial Sequence: Synthetic oligonucleotide
gguauacgauguggcgggg

SEQ ID NO: 353547 - RNA, 19 nt, Artificial Sequence
  Description of Artificial Sequence: Synthetic oligonucleotide
cuugacugacagguaucga

SEQ ID NO: 353548 - RNA, 19 nt, Artificial Sequence
  Description of Artificial Sequence: Synthetic oligonucleotide
gaguccgggagaacuccuc

SEQ ID NO: 353549 - RNA, 19 nt, Artificial Sequence
  Description of Artificial Sequence: Synthetic oligonucleotide
agguaucgaagcagccuga

SEQ ID NO: 353550 - RNA, 19 nt, Artificial Sequence
  Description of Artificial Sequence: Synthetic oligonucleotide
uuagagccgcucgccccgc

SEQ ID NO: 353551 - RNA, 19 nt, Artificial Sequence
  Description of Artificial Sequence: Synthetic oligonucleotide
agcgccggccaugcccagc

SEQ ID NO: 353552 - RNA, 19 nt, Artificial Sequence
  Description of Artificial Sequence: Synthetic oligonucleotide
gggaccucaagaggacugc

SEQ ID NO: 353553 - RNA, 19 nt, Artificial Sequence
  Description of Artificial Sequence: Synthetic oligonucleotide
ggagggugugagauauccc

SEQ ID NO: 353554 - RNA, 19 nt, Artificial Sequence
  Description of Artificial Sequence: Synthetic oligonucleotide
cucaacguguagaugucuu

SEQ ID NO: 353555 - RNA, 19 nt, Artificial Sequence
  Description of Artificial Sequence: Synthetic oligonucleotide
cccggagcccaacaccacg

SEQ ID NO: 353556 - RNA, 19 nt, Artificial Sequence
  Description of Artificial Sequence: Synthetic oligonucleotide
ccgagcgccggccaugccc

SEQ ID NO: 353557 - RNA, 19 nt, Artificial Sequence
  Description of Artificial Sequence: Synthetic oligonucleotide
uggccgcagauaucaccau

SEQ ID NO: 353558 - RNA, 19 nt, Artificial Sequence
  Description of Artificial Sequence: Synthetic oligonucleotide
ggccucucacuuuaucaaa

SEQ ID NO: 353559 - RNA, 19 nt, Artificial Sequence
  Description of Artificial Sequence: Synthetic oligonucleotide
guugcccgaagaggcggug

SEQ ID NO: 353560 - RNA, 19 nt, Artificial Sequence
  Description of Artificial Sequence: Synthetic oligonucleotide
ggaaucacgcugaaacagu

SEQ ID NO: 353561 - RNA, 19 nt, Artificial Sequence
  Description of Artificial Sequence: Synthetic oligonucleotide
ccuaggcugguggugcugc

SEQ ID NO: 353562 - RNA, 19 nt, Artificial Sequence
  Description of Artificial Sequence: Synthetic oligonucleotide
cgcagauaucaccauucac

SEQ ID NO: 353563 - RNA, 19 nt, Artificial Sequence
  Description of Artificial Sequence: Synthetic oligonucleotide
ccauccugaaaacguuguc

SEQ ID NO: 353564 - RNA, 19 nt, Artificial Sequence
  Description of Artificial Sequence: Synthetic oligonucleotide
ggucucugcgucucaacgu

SEQ ID NO: 353565 - RNA, 19 nt, Artificial Sequence
  Description of Artificial Sequence: Synthetic oligonucleotide
ggguaguggccgcagauau

SEQ ID NO: 353566 - RNA, 19 nt, Artificial Sequence
  Description of Artificial Sequence: Synthetic oligonucleotide
ggccaugcccagccucgcg

SEQ ID NO: 353567 - RNA, 19 nt, Artificial Sequence
  Description of Artificial Sequence: Synthetic oligonucleotide
aggauccgggcaggggaug

SEQ ID NO: 353568 - RNA, 19 nt, Artificial Sequence
  Description of Artificial Sequence: Synthetic oligonucleotide
gcccguuccugaauacugc

SEQ ID NO: 353569 - RNA, 19 nt, Artificial Sequence
  Description of Artificial Sequence: Synthetic oligonucleotide
ucgcguccccucaggguuu

SEQ ID NO: 353570 - RNA, 19 nt, Artificial Sequence
  Description of Artificial Sequence: Synthetic oligonucleotide
gcccagguaucaucuguuc

SEQ ID NO: 353571 - RNA, 19 nt, Artificial Sequence
  Description of Artificial Sequence: Synthetic oligonucleotide
ggcagugucgagagagguc

SEQ ID NO: 353572 - RNA, 19 nt, Artificial Sequence
  Description of Artificial Sequence: Synthetic oligonucleotide
gcgauggaugaggucuugc

SEQ ID NO: 353573 - RNA, 19 nt, Artificial Sequence
  Description of Artificial Sequence: Synthetic oligonucleotide
gcccaucugcccauaagga

SEQ ID NO: 353574 - RNA, 19 nt, Artificial Sequence
  Description of Artificial Sequence: Synthetic oligonucleotide
cccaacucugauauuggcu

SEQ ID NO: 353575 - RNA, 19 nt, Artificial Sequence
  Description of Artificial Sequence: Synthetic oligonucleotide
ccgaguuggcaaacucuuc

SEQ ID NO: 353576 - RNA, 19 nt, Artificial Sequence
  Description of Artificial Sequence: Synthetic oligonucleotide
guguaccagcagcccgcug

SEQ ID NO: 353577 - RNA, 19 nt, Artificial Sequence
  Description of Artificial Sequence: Synthetic oligonucleotide
cagccucgcguccccucag

SEQ ID NO: 353578 - RNA, 19 nt, Artificial Sequence
  Description of Artificial Sequence: Synthetic oligonucleotide
caguuaaauaugagcccuu

SEQ ID NO: 353579 - RNA, 19 nt, Artificial Sequence
  Description of Artificial Sequence: Synthetic oligonucleotide
guccgaucccagccugaga

SEQ ID NO: 353580 - RNA, 19 nt, Artificial Sequence
  Description of Artificial Sequence: Synthetic oligonucleotide
auuagcccaucugcccaua

SEQ ID NO: 353581 - RNA, 19 nt, Artificial Sequence
  Description of Artificial Sequence: Synthetic oligonucleotide
gccccggcuccugaggcgg

SEQ ID NO: 353582 - RNA, 19 nt, Artificial Sequence
  Description of Artificial Sequence: Synthetic oligonucleotide
guacugaguccgggagaac

SEQ ID NO: 353583 - RNA, 19 nt, Artificial Sequence
  Description of Artificial Sequence: Synthetic oligonucleotide
gccgaucuaccaacaugug

SEQ ID NO: 353584 - RNA, 19 nt, Artificial Sequence
  Description of Artificial Sequence: Synthetic oligonucleotide
ggugaggaugagugacucu

SEQ ID NO: 353585 - RNA, 19 nt, Artificial Sequence
  Description of Artificial Sequence: Synthetic oligonucleotide
cugccgggacaaguuccac

SEQ ID NO: 353586 - RNA, 19 nt, Artificial Sequence
  Description of Artificial Sequence: Synthetic oligonucleotide
aggucccaacucugauauu

SEQ ID NO: 353587 - RNA, 19 nt, Artificial Sequence
  Description of Artificial Sequence: Synthetic oligonucleotide
gcgucucaacguguagaug

SEQ ID NO: 353588 - RNA, 19 nt, Artificial Sequence
  Description of Artificial Sequence: Synthetic oligonucleotide
ccuaggaauucugaaaguu

SEQ ID NO: 353589 - RNA, 19 nt, Artificial Sequence
  Description of Artificial Sequence: Synthetic oligonucleotide
cugaggcggcggguugccc

SEQ ID NO: 353590 - RNA, 19 nt, Artificial Sequence
  Description of Artificial Sequence: Synthetic oligonucleotide
ccugcaucccgaguuggca

SEQ ID NO: 353591 - RNA, 19 nt, Artificial Sequence
  Description of Artificial Sequence: Synthetic oligonucleotide
ccgcagauaucaccauuca

SEQ ID NO: 353592 - RNA, 19 nt, Artificial Sequence
  Description of Artificial Sequence: Synthetic oligonucleotide
cccauccugaaaacguugu

SEQ ID NO: 353593 - RNA, 19 nt, Artificial Sequence
  Description of Artificial Sequence: Synthetic oligonucleotide
gcugaccugcaaaugugcu

SEQ ID NO: 353594 - RNA, 19 nt, Artificial Sequence
  Description of Artificial Sequence: Synthetic oligonucleotide
gucggcuccagagcauacu

SEQ ID NO: 353595 - RNA, 19 nt, Artificial Sequence
  Description of Artificial Sequence: Synthetic oligonucleotide
cacgauccuuauauuccuu

SEQ ID NO: 353596 - RNA, 19 nt, Artificial Sequence
  Description of Artificial Sequence: Synthetic oligonucleotide
cucggucucugcgucucaa

SEQ ID NO: 353597 - RNA, 19 nt, Artificial Sequence
  Description of Artificial Sequence: Synthetic oligonucleotide
gcccgguacugaguccggg

SEQ ID NO: 353598 - RNA, 19 nt, Artificial Sequence
  Description of Artificial Sequence: Synthetic oligonucleotide
gggaagguaggcgguccuc

SEQ ID NO: 353599 - RNA, 19 nt, Artificial Sequence
  Description of Artificial Sequence: Synthetic oligonucleotide
gagcguccauacagcucuc

SEQ ID NO: 353600 - RNA, 19 nt, Artificial Sequence
  Description of Artificial Sequence: Synthetic oligonucleotide
ccuccgugaggcccuagga

SEQ ID NO: 353601 - RNA, 19 nt, Artificial Sequence
  Description of Artificial Sequence: Synthetic oligonucleotide
ggaacgugucuuucucuuu

SEQ ID NO: 353602 - RNA, 19 nt, Artificial Sequence
  Description of Artificial Sequence: Synthetic oligonucleotide
gcaucccgaguuggcaaac

SEQ ID NO: 353603 - RNA, 19 nt, Artificial Sequence
  Description of Artificial Sequence: Synthetic oligonucleotide
cccgguacugaguccggga

SEQ ID NO: 353604 - RNA, 19 nt, Artificial Sequence
  Description of Artificial Sequence: Synthetic oligonucleotide
gaccuccgugaggcccuag

SEQ ID NO: 353605 - RNA, 19 nt, Artificial Sequence
  Description of Artificial Sequence: Synthetic oligonucleotide
ggucggcuccagagcauac

SEQ ID NO: 353606 - RNA, 19 nt, Artificial Sequence
  Description of Artificial Sequence: Synthetic oligonucleotide
caauggcaccagagggacu

SEQ ID NO: 353607 - RNA, 19 nt, Artificial Sequence
  Description of Artificial Sequence: Synthetic oligonucleotide
ccagagcguccauacagcu

SEQ ID NO: 353608 - RNA, 19 nt, Artificial Sequence
  Description of Artificial Sequence: Synthetic oligonucleotide
gccauguaaucacgauccu

SEQ ID NO: 353609 - RNA, 19 nt, Artificial Sequence
  Description of Artificial Sequence: Synthetic oligonucleotide
gguaucgaagcagccugau

SEQ ID NO: 353610 - RNA, 19 nt, Artificial Sequence
  Description of Artificial Sequence: Synthetic oligonucleotide
gcggcggguugcccgaaga

SEQ ID NO: 353611 - RNA, 19 nt, Artificial Sequence
  Description of Artificial Sequence: Synthetic oligonucleotide
caucaacguaguccugcuu

SEQ ID NO: 353612 - RNA, 19 nt, Artificial Sequence
  Description of Artificial Sequence: Synthetic oligonucleotide
ccugaggcggcggguugcc

SEQ ID NO: 353613 - RNA, 19 nt, Artificial Sequence
  Description of Artificial Sequence: Synthetic oligonucleotide
ggcccgguacugaguccgg

SEQ ID NO: 353614 - RNA, 19 nt, Artificial Sequence
  Description of Artificial Sequence: Synthetic oligonucleotide
cgugaggcccuaggaauuc

SEQ ID NO: 353615 - RNA, 19 nt, Artificial Sequence
  Description of Artificial Sequence: Synthetic oligonucleotide
cccuaggaauucugaaagu

SEQ ID NO: 353616 - RNA, 19 nt, Artificial Sequence
  Description of Artificial Sequence: Synthetic oligonucleotide
cagcccguuccugaauacu

SEQ ID NO: 353617 - RNA, 19 nt, Artificial Sequence
  Description of Artificial Sequence: Synthetic oligonucleotide
ggugugaaacugccucauu

SEQ ID NO: 353618 - RNA, 19 nt, Artificial Sequence
  Description of Artificial Sequence: Synthetic oligonucleotide
gcgguggaccccgccucgg

SEQ ID NO: 353619 - RNA, 19 nt, Artificial Sequence
  Description of Artificial Sequence: Synthetic oligonucleotide
cggcggguugcccgaagag

SEQ ID NO: 353620 - RNA, 19 nt, Artificial Sequence
  Description of Artificial Sequence: Synthetic oligonucleotide
cagugcgggugacucuccu

SEQ ID NO: 353621 - RNA, 19 nt, Artificial Sequence
  Description of Artificial Sequence: Synthetic oligonucleotide
ccucauuuucagugcgggu

SEQ ID NO: 353622 - RNA, 19 nt, Artificial Sequence
  Description of Artificial Sequence: Synthetic oligonucleotide
ggccgcagauaucaccauu

SEQ ID NO: 353623 - RNA, 19 nt, Artificial Sequence
  Description of Artificial Sequence: Synthetic oligonucleotide
cgguacugaguccgggaga

SEQ ID NO: 353624 - RNA, 19 nt, Artificial Sequence
  Description of Artificial Sequence: Synthetic oligonucleotide
ccauguaaucacgauccuu

SEQ ID NO: 353625 - RNA, 19 nt, Artificial Sequence
  Description of Artificial Sequence: Synthetic oligonucleotide
gguugcccgaagaggcggu

SEQ ID NO: 353626 - RNA, 19 nt, Artificial Sequence
  Description of Artificial Sequence: Synthetic oligonucleotide
guggucggcuccagagcau

SEQ ID NO: 353627 - RNA, 19 nt, Artificial Sequence
  Description of Artificial Sequence: Synthetic oligonucleotide
ccucgcguccccucagggu

SEQ ID NO: 353628 - RNA, 19 nt, Artificial Sequence
  Description of Artificial Sequence: Synthetic oligonucleotide
ccgugaggcccuaggaauu

SEQ ID NO: 353629 - RNA, 19 nt, Artificial Sequence
  Description of Artificial Sequence: Synthetic oligonucleotide
gccugauaucauggccucu

SEQ ID NO: 353630 - RNA, 19 nt, Artificial Sequence
  Description of Artificial Sequence: Synthetic oligonucleotide
caccgggcccauggcaccu

SEQ ID NO: 353631 - RNA, 19 nt, Artificial Sequence
  Description of Artificial Sequence: Synthetic oligonucleotide
gcgcaccuccuguagccuu

SEQ ID NO: 353632 - RNA, 19 nt, Artificial Sequence
  Description of Artificial Sequence: Synthetic oligonucleotide
cccgagcgccggccaugcc

SEQ ID NO: 353633 - RNA, 19 nt, Artificial Sequence
  Description of Artificial Sequence: Synthetic oligonucleotide
ccgccucggcggaggcggc

SEQ ID NO: 353634 - RNA, 19 nt, Artificial Sequence
  Description of Artificial Sequence: Synthetic oligonucleotide
gccuugucucccggucacu

SEQ ID NO: 353635 - RNA, 19 nt, Artificial Sequence
  Description of Artificial Sequence: Synthetic oligonucleotide
ccacuucgaagagcacagu

SEQ ID NO: 353636 - RNA, 19 nt, Artificial Sequence
  Description of Artificial Sequence: Synthetic oligonucleotide
cguccccucaggguuuucu

SEQ ID NO: 353637 - RNA, 19 nt, Artificial Sequence
  Description of Artificial Sequence: Synthetic oligonucleotide
cgcugccuaggcugguggu

SEQ ID NO: 353638 - RNA, 19 nt, Artificial Sequence
  Description of Artificial Sequence: Synthetic oligonucleotide
gggcugcuaugugcaugau

SEQ ID NO: 353639 - RNA, 19 nt, Artificial Sequence
  Description of Artificial Sequence: Synthetic oligonucleotide
cgccgucccuggcccggua

SEQ ID NO: 353640 - RNA, 19 nt, Artificial Sequence
  Description of Artificial Sequence: Synthetic oligonucleotide
ccgccgucccuggcccggu

SEQ ID NO: 353641 - RNA, 19 nt, Artificial Sequence
  Description of Artificial Sequence: Synthetic oligonucleotide
cgcguccccucaggguuuu

SEQ ID NO: 353642 - RNA, 19 nt, Artificial Sequence
  Description of Artificial Sequence: Synthetic oligonucleotide
agaaaacagaaccaagucc

SEQ ID NO: 353643 - RNA, 19 nt, Artificial Sequence
  Description of Artificial Sequence: Synthetic oligonucleotide
aaguguuggacauagaccu

SEQ ID NO: 353644 - RNA, 19 nt, Artificial Sequence
  Description of Artificial Sequence: Synthetic oligonucleotide
aucgagguuguuuagagac

SEQ ID NO: 353645 - RNA, 19 nt, Artificial Sequence
  Description of Artificial Sequence: Synthetic oligonucleotide
auagaauacaauaauguuc

SEQ ID NO: 353646 - RNA, 19 nt, Artificial Sequence
  Description of Artificial Sequence: Synthetic oligonucleotide
cauauuucgagcauccccg

SEQ ID NO: 353647 - RNA, 19 nt, Artificial Sequence
  Description of Artificial Sequence: Synthetic oligonucleotide
aaguagacacuucuucggc

SEQ ID NO: 353648 - RNA, 19 nt, Artificial Sequence
  Description of Artificial Sequence: Synthetic oligonucleotide
uuguuuagagacaugacaa

SEQ ID NO: 353649 - RNA, 19 nt, Artificial Sequence
  Description of Artificial Sequence: Synthetic oligonucleotide
ugagauuugcguacgaaca

SEQ ID NO: 353650 - RNA, 19 nt, Artificial Sequence
  Description of Artificial Sequence: Synthetic oligonucleotide
gacuacuagagacuugucg

SEQ ID NO: 353651 - RNA, 19 nt, Artificial Sequence
  Description of Artificial Sequence: Synthetic oligonucleotide
ugugucgaggccaagcagg

SEQ ID NO: 353652 - RNA, 19 nt, Artificial Sequence
  Description of Artificial Sequence: Synthetic oligonucleotide
aaaaucaugugguggggcu

SEQ ID NO: 353653 - RNA, 19 nt, Artificial Sequence
  Description of Artificial Sequence: Synthetic oligonucleotide
aauggcuaagaugugccuc

SEQ ID NO: 353654 - RNA, 19 nt, Artificial Sequence
  Description of Artificial Sequence: Synthetic oligonucleotide
aagacuacuagagacuugu

SEQ ID NO: 353655 - RNA, 19 nt, Artificial Sequence
  Description of Artificial Sequence: Synthetic oligonucleotide
uuugcguacgaacaugggu

SEQ ID NO: 353656 - RNA, 19 nt, Artificial Sequence
  Description of Artificial Sequence: Synthetic oligonucleotide
agaaccaaguccgucgugc

SEQ ID NO: 353657 - RNA, 19 nt, Artificial Sequence
  Description of Artificial Sequence: Synthetic oligonucleotide
agucuuuugugagagcccc

SEQ ID NO: 353658 - RNA, 19 nt, Artificial Sequence
  Description of Artificial Sequence: Synthetic oligonucleotide
ucaucgagguuguuuagag

SEQ ID NO: 353659 - RNA, 19 nt, Artificial Sequence
  Description of Artificial Sequence: Synthetic oligonucleotide
gauuugcguacgaacaugg

SEQ ID NO: 353660 - RNA, 19 nt, Artificial Sequence
  Description of Artificial Sequence: Synthetic oligonucleotide
auuacagggagcaagguga

SEQ ID NO: 353661 - RNA, 19 nt, Artificial Sequence
  Description of Artificial Sequence: Synthetic oligonucleotide
ggugugguggacuugaaag

SEQ ID NO: 353662 - RNA, 19 nt, Artificial Sequence
  Description of Artificial Sequence: Synthetic oligonucleotide
uggguacacagccacauga

SEQ ID NO: 353663 - RNA, 19 nt, Artificial Sequence
  Description of Artificial Sequence: Synthetic oligonucleotide
cucuucgcgguacagauag

SEQ ID NO: 353664 - RNA, 19 nt, Artificial Sequence
  Description of Artificial Sequence: Synthetic oligonucleotide
aauaauguuccuucccguu

SEQ ID NO: 353665 - RNA, 19 nt, Artificial Sequence
  Description of Artificial Sequence: Synthetic oligonucleotide
uugaaaggaaggcggaacu

SEQ ID NO: 353666 - RNA, 19 nt, Artificial Sequence
  Description of Artificial Sequence: Synthetic oligonucleotide
aggaagugauuacagggag

SEQ ID NO: 353667 - RNA, 19 nt, Artificial Sequence
  Description of Artificial Sequence: Synthetic oligonucleotide
auuucgagcauccccgcag

SEQ ID NO: 353668 - RNA, 19 nt, Artificial Sequence
  Description of Artificial Sequence: Synthetic oligonucleotide
gaagugauuacagggagca

SEQ ID NO: 353669 - RNA, 19 nt, Artificial Sequence
  Description of Artificial Sequence: Synthetic oligonucleotide
agaacucgcacacggcugg

SEQ ID NO: 353670 - RNA, 19 nt, Artificial Sequence
  Description of Artificial Sequence: Synthetic oligonucleotide
aagugcaucagaugccgcu

SEQ ID NO: 353671 - RNA, 19 nt, Artificial Sequence
  Description of Artificial Sequence: Synthetic oligonucleotide
auauuucgagcauccccgc

SEQ ID NO: 353672 - RNA, 19 nt, Artificial Sequence
  Description of Artificial Sequence: Synthetic oligonucleotide
ugccccgcaucccauagcg

SEQ ID NO: 353673 - RNA, 19 nt, Artificial Sequence
  Description of Artificial Sequence: Synthetic oligonucleotide
gaccuugugggccugcucc

SEQ ID NO: 353674 - RNA, 19 nt, Artificial Sequence
  Description of Artificial Sequence: Synthetic oligonucleotide
uggaccuuagaggaugagg

SEQ ID NO: 353675 - RNA, 19 nt, Artificial Sequence
  Description of Artificial Sequence: Synthetic oligonucleotide
aacuugacuccagugaggu

SEQ ID NO: 353676 - RNA, 19 nt, Artificial Sequence
  Description of Artificial Sequence: Synthetic oligonucleotide
auaguccacagccugggug

SEQ ID NO: 353677 - RNA, 19 nt, Artificial Sequence
  Description of Artificial Sequence: Synthetic oligonucleotide
acgaacauggguaccaggg

SEQ ID NO: 353678 - RNA, 19 nt, Artificial Sequence
  Description of Artificial Sequence: Synthetic oligonucleotide
caauucaaagaugcgcugg

SEQ ID NO: 353679 - RNA, 19 nt, Artificial Sequence
  Description of Artificial Sequence: Synthetic oligonucleotide
cuucaggcggcccaucucg

SEQ ID NO: 353680 - RNA, 19 nt, Artificial Sequence
  Description of Artificial Sequence: Synthetic oligonucleotide
acuggcgaaugcucgacuc

SEQ ID NO: 353681 - RNA, 19 nt, Artificial Sequence
  Description of Artificial Sequence: Synthetic oligonucleotide
gaaugcucgacuccucccc

SEQ ID NO: 353682 - RNA, 19 nt, Artificial Sequence
  Description of Artificial Sequence: Synthetic oligonucleotide
aagggaguuaaggaaguga

SEQ ID NO: 353683 - RNA, 19 nt, Artificial Sequence
  Description of Artificial Sequence: Synthetic oligonucleotide
agccauagaauacaauaau

SEQ ID NO: 353684 - RNA, 19 nt, Artificial Sequence
  Description of Artificial Sequence: Synthetic oligonucleotide
uggguagucuuggagaaug

SEQ ID NO: 353685 - RNA, 19 nt, Artificial Sequence
  Description of Artificial Sequence: Synthetic oligonucleotide
gauucauaccugaucuuug

SEQ ID NO: 353686 - RNA, 19 nt, Artificial Sequence
  Description of Artificial Sequence: Synthetic oligonucleotide
caucucgccaguguaaacc

SEQ ID NO: 353687 - RNA, 19 nt, Artificial Sequence
  Description of Artificial Sequence: Synthetic oligonucleotide
caucagaugccgcucagug

SEQ ID NO: 353688 - RNA, 19 nt, Artificial Sequence
  Description of Artificial Sequence: Synthetic oligonucleotide
gaguuaaggaagugauuac

SEQ ID NO: 353689 - RNA, 19 nt, Artificial Sequence
  Description of Artificial Sequence: Synthetic oligonucleotide
cagacauagaugugggcac

SEQ ID NO: 353690 - RNA, 19 nt, Artificial Sequence
  Description of Artificial Sequence: Synthetic oligonucleotide
ucgaggccaagcaggaacc

SEQ ID NO: 353691 - RNA, 19 nt, Artificial Sequence
  Description of Artificial Sequence: Synthetic oligonucleotide
caugcagaagacuacuaga

SEQ ID NO: 353692 - RNA, 19 nt, Artificial Sequence
  Description of Artificial Sequence: Synthetic oligonucleotide
ucuaaguucccaucaucau

SEQ ID NO: 353693 - RNA, 19 nt, Artificial Sequence
  Description of Artificial Sequence: Synthetic oligonucleotide
ggaacugagauuugcguac

SEQ ID NO: 353694 - RNA, 19 nt, Artificial Sequence
  Description of Artificial Sequence: Synthetic oligonucleotide
ggacuugaaaggaaggcgg

SEQ ID NO: 353695 - RNA, 19 nt, Artificial Sequence
  Description of Artificial Sequence: Synthetic oligonucleotide
uuccgguuaguggugacag

SEQ ID NO: 353696 - RNA, 19 nt, Artificial Sequence
  Description of Artificial Sequence: Synthetic oligonucleotide
gucuucguggaccacgagc

SEQ ID NO: 353697 - RNA, 19 nt, Artificial Sequence
  Description of Artificial Sequence: Synthetic oligonucleotide
aggagucggucccuuggcc

SEQ ID NO: 353698 - RNA, 19 nt, Artificial Sequence
  Description of Artificial Sequence: Synthetic oligonucleotide
gauggguagucuuggagaa

SEQ ID NO: 353699 - RNA, 19 nt, Artificial Sequence
  Description of Artificial Sequence: Synthetic oligonucleotide
caauggaguaguagcgggc

SEQ ID NO: 353700 - RNA, 19 nt, Artificial Sequence
  Description of Artificial Sequence: Synthetic oligonucleotide
cuugaaaggaaggcggaac

SEQ ID NO: 353701 - RNA, 19 nt, Artificial Sequence
  Description of Artificial Sequence: Synthetic oligonucleotide
uaauguuccuucccguuuu

SEQ ID NO: 353702 - RNA, 19 nt, Artificial Sequence
  Description of Artificial Sequence: Synthetic oligonucleotide
ggagccauagaauacaaua

SEQ ID NO: 353703 - RNA, 19 nt, Artificial Sequence
  Description of Artificial Sequence: Synthetic oligonucleotide
gacuuugcuucauacucca

SEQ ID NO: 353704 - RNA, 19 nt, Artificial Sequence
  Description of Artificial Sequence: Synthetic oligonucleotide
aguguaaaccuuggcagug

SEQ ID NO: 353705 - RNA, 19 nt, Artificial Sequence
  Description of Artificial Sequence: Synthetic oligonucleotide
uguaaaccuuggcaguguc

SEQ ID NO: 353706 - RNA, 19 nt, Artificial Sequence
  Description of Artificial Sequence: Synthetic oligonucleotide
uucgcgguacagauagucu

SEQ ID NO: 353707 - RNA, 19 nt, Artificial Sequence
  Description of Artificial Sequence: Synthetic oligonucleotide
gacuugucgaucucaggca

SEQ ID NO: 353708 - RNA, 19 nt, Artificial Sequence
  Description of Artificial Sequence: Synthetic oligonucleotide
ugcugaaaaguagacacuu

SEQ ID NO: 353709 - RNA, 19 nt, Artificial Sequence
  Description of Artificial Sequence: Synthetic oligonucleotide
ucuuggagaauggcuaaga

SEQ ID NO: 353710 - RNA, 19 nt, Artificial Sequence
  Description of Artificial Sequence: Synthetic oligonucleotide
gaacugagauuugcguacg

SEQ ID NO: 353711 - RNA, 19 nt, Artificial Sequence
  Description of Artificial Sequence: Synthetic oligonucleotide
uacucuucggggucugcag

SEQ ID NO: 353712 - RNA, 19 nt, Artificial Sequence
  Description of Artificial Sequence: Synthetic oligonucleotide
uucauaccugaucuuugaa

SEQ ID NO: 353713 - RNA, 19 nt, Artificial Sequence
  Description of Artificial Sequence: Synthetic oligonucleotide
caaaaucaugugguggggc

SEQ ID NO: 353714 - RNA, 19 nt, Artificial Sequence
  Description of Artificial Sequence: Synthetic oligonucleotide
acagcgcagaugugcacgg

SEQ ID NO: 353715 - RNA, 19 nt, Artificial Sequence
  Description of Artificial Sequence: Synthetic oligonucleotide
uauuucgagcauccccgca

SEQ ID NO: 353716 - RNA, 19 nt, Artificial Sequence
  Description of Artificial Sequence: Synthetic oligonucleotide
cucgccaguguaaaccuug

SEQ ID NO: 353717 - RNA, 19 nt, Artificial Sequence
  Description of Artificial Sequence: Synthetic oligonucleotide
ugguauaguggaccaggcu

SEQ ID NO: 353718 - RNA, 19 nt, Artificial Sequence
  Description of Artificial Sequence: Synthetic oligonucleotide
ccgggaaaaggccacaugg

SEQ ID NO: 353719 - RNA, 19 nt, Artificial Sequence
  Description of Artificial Sequence: Synthetic oligonucleotide
aagaacucgcacacggcug

SEQ ID NO: 353720 - RNA, 19 nt, Artificial Sequence
  Description of Artificial Sequence: Synthetic oligonucleotide
uccaccccgaagaacucgc

SEQ ID NO: 353721 - RNA, 19 nt, Artificial Sequence
  Description of Artificial Sequence: Synthetic oligonucleotide
uugucgaucucaggcaagc

SEQ ID NO: 353722 - RNA, 19 nt, Artificial Sequence
  Description of Artificial Sequence: Synthetic oligonucleotide
uugcccucgccugaggagg

SEQ ID NO: 353723 - RNA, 19 nt, Artificial Sequence
  Description of Artificial Sequence: Synthetic oligonucleotide
ccauauuucgagcaucccc

SEQ ID NO: 353724 - RNA, 19 nt, Artificial Sequence
  Description of Artificial Sequence: Synthetic oligonucleotide
ccuaaggcacccaucaccc

SEQ ID NO: 353725 - RNA, 19 nt, Artificial Sequence
  Description of Artificial Sequence: Synthetic oligonucleotide
auuggugcgugguggguug

SEQ ID NO: 353726 - RNA, 19 nt, Artificial Sequence
  Description of Artificial Sequence: Synthetic oligonucleotide
agcucuucgcgguacagau

SEQ ID NO: 353727 - RNA, 19 nt, Artificial Sequence
  Description of Artificial Sequence: Synthetic oligonucleotide
aacucgcacacggcuggcc

SEQ ID NO: 353728 - RNA, 19 nt, Artificial Sequence
  Description of Artificial Sequence: Synthetic oligonucleotide
agcgcagaugugcacggag

SEQ ID NO: 353729 - RNA, 19 nt, Artificial Sequence
  Description of Artificial Sequence: Synthetic oligonucleotide
gaugugcacggaguugggg

SEQ ID NO: 353730 - RNA, 19 nt, Artificial Sequence
  Description of Artificial Sequence: Synthetic oligonucleotide
agcauccccgcagacauag

SEQ ID NO: 353731 - RNA, 19 nt, Artificial Sequence
  Description of Artificial Sequence: Synthetic oligonucleotide
uuucgagcauccccgcaga

SEQ ID NO: 353732 - RNA, 19 nt, Artificial Sequence
  Description of Artificial Sequence: Synthetic oligonucleotide
agauuugcguacgaacaug

SEQ ID NO: 353733 - RNA, 19 nt, Artificial Sequence
  Description of Artificial Sequence: Synthetic oligonucleotide
uguuggacauagaccuugu

SEQ ID NO: 353734 - RNA, 19 nt, Artificial Sequence
  Description of Artificial Sequence: Synthetic oligonucleotide
uccgucgugcugaaaagua

SEQ ID NO: 353735 - RNA, 19 nt, Artificial Sequence
  Description of Artificial Sequence: Synthetic oligonucleotide
accugcgccgcucgguacc

SEQ ID NO: 353736 - RNA, 19 nt, Artificial Sequence
  Description of Artificial Sequence: Synthetic oligonucleotide
ugcguacgaacauggguac

SEQ ID NO: 353737 - RNA, 19 nt, Artificial Sequence
  Description of Artificial Sequence: Synthetic oligonucleotide
agauucauaccugaucuuu

SEQ ID NO: 353738 - RNA, 19 nt, Artificial Sequence
  Description of Artificial Sequence: Synthetic oligonucleotide
ugacagacggggucguugu

SEQ ID NO: 353739 - RNA, 19 nt, Artificial Sequence
  Description of Artificial Sequence: Synthetic oligonucleotide
aacugagauuugcguacga

SEQ ID NO: 353740 - RNA, 19 nt, Artificial Sequence
  Description of Artificial Sequence: Synthetic oligonucleotide
agcacauuggugcguggug

SEQ ID NO: 353741 - RNA, 19 nt, Artificial Sequence
  Description of Artificial Sequence: Synthetic oligonucleotide
ggaguuaaggaagugauua

SEQ ID NO: 353742 - RNA, 19 nt, Artificial Sequence
  Description of Artificial Sequence: Synthetic oligonucleotide
cugcagucgugguaggagc

SEQ ID NO: 353743 - RNA, 19 nt, Artificial Sequence
  Description of Artificial Sequence: Synthetic oligonucleotide
uucguggaccacgagcuca

SEQ ID NO: 353744 - RNA, 19 nt, Artificial Sequence
  Description of Artificial Sequence: Synthetic oligonucleotide
ucggccacaaugucauaga

SEQ ID NO: 353745 - RNA, 19 nt, Artificial Sequence
  Description of Artificial Sequence: Synthetic oligonucleotide
cauagaauacaauaauguu

SEQ ID NO: 353746 - RNA, 19 nt, Artificial Sequence
  Description of Artificial Sequence: Synthetic oligonucleotide
aaccugcgccgcucgguac

SEQ ID NO: 353747 - RNA, 19 nt, Artificial Sequence
  Description of Artificial Sequence: Synthetic oligonucleotide
acggaguugggguggaccu

SEQ ID NO: 353748 - RNA, 19 nt, Artificial Sequence
  Description of Artificial Sequence: Synthetic oligonucleotide
auacuggcgaaugcucgac

SEQ ID NO: 353749 - RNA, 19 nt, Artificial Sequence
  Description of Artificial Sequence: Synthetic oligonucleotide
gccauagaauacaauaaug

SEQ ID NO: 353750 - RNA, 19 nt, Artificial Sequence
  Description of Artificial Sequence: Synthetic oligonucleotide
cuguacaucugccgagggc

SEQ ID NO: 353751 - RNA, 19 nt, Artificial Sequence
  Description of Artificial Sequence: Synthetic oligonucleotide
guguuggacauagaccuug

SEQ ID NO: 353752 - RNA, 19 nt, Artificial Sequence
  Description of Artificial Sequence: Synthetic oligonucleotide
ucgaugggaggccgcagug

SEQ ID NO: 353753 - RNA, 19 nt, Artificial Sequence
  Description of Artificial Sequence: Synthetic oligonucleotide
agaauacaauaauguuccu

SEQ ID NO: 353754 - RNA, 19 nt, Artificial Sequence
  Description of Artificial Sequence: Synthetic oligonucleotide
auagcggugggcauccuug

SEQ ID NO: 353755 - RNA, 19 nt, Artificial Sequence
  Description of Artificial Sequence: Synthetic oligonucleotide
gaccacgagcucauacugg

SEQ ID NO: 353756 - RNA, 19 nt, Artificial Sequence
  Description of Artificial Sequence: Synthetic oligonucleotide
uauggaagcgggccagcuc

SEQ ID NO: 353757 - RNA, 19 nt, Artificial Sequence
  Description of Artificial Sequence: Synthetic oligonucleotide
uuggccauauuucgagcau

SEQ ID NO: 353758 - RNA, 19 nt, Artificial Sequence
  Description of Artificial Sequence: Synthetic oligonucleotide
ucgugcugaaaaguagaca

SEQ ID NO: 353759 - RNA, 19 nt, Artificial Sequence
  Description of Artificial Sequence: Synthetic oligonucleotide
gucgcccagacuuugcuuc

SEQ ID NO: 353760 - RNA, 19 nt, Artificial Sequence
  Description of Artificial Sequence: Synthetic oligonucleotide
gaaggcggaacugagauuu

SEQ ID NO: 353761 - RNA, 19 nt, Artificial Sequence
  Description of Artificial Sequence: Synthetic oligonucleotide
uggaggucggcagaaggga

SEQ ID NO: 353762 - RNA, 19 nt, Artificial Sequence
  Description of Artificial Sequence: Synthetic oligonucleotide
agggaguuaaggaagugau

SEQ ID NO: 353763 - RNA, 19 nt, Artificial Sequence
  Description of Artificial Sequence: Synthetic oligonucleotide
ucgcgguacagauagucuu

SEQ ID NO: 353764 - RNA, 19 nt, Artificial Sequence
  Description of Artificial Sequence: Synthetic oligonucleotide
ggcagaagggaguuaagga

SEQ ID NO: 353765 - RNA, 19 nt, Artificial Sequence
  Description of Artificial Sequence: Synthetic oligonucleotide
gauccgaggcauacugugc

SEQ ID NO: 353766 - RNA, 19 nt, Artificial Sequence
  Description of Artificial Sequence: Synthetic oligonucleotide
cuugcccucgccugaggag

SEQ ID NO: 353767 - RNA, 19 nt, Artificial Sequence
  Description of Artificial Sequence: Synthetic oligonucleotide
ucagucgcccagacuuugc

SEQ ID NO: 353768 - RNA, 19 nt, Artificial Sequence
  Description of Artificial Sequence: Synthetic oligonucleotide
uagcggugggcauccuugg

SEQ ID NO: 353769 - RNA, 19 nt, Artificial Sequence
  Description of Artificial Sequence: Synthetic oligonucleotide
cuaaggcacccaucacccg

SEQ ID NO: 353770 - RNA, 19 nt, Artificial Sequence
  Description of Artificial Sequence: Synthetic oligonucleotide
ugccugguauaguggacca

SEQ ID NO: 353771 - RNA, 19 nt, Artificial Sequence
  Description of Artificial Sequence: Synthetic oligonucleotide
gaccuuagaggaugaggca

SEQ ID NO: 353772 - RNA, 19 nt, Artificial Sequence
  Description of Artificial Sequence: Synthetic oligonucleotide
uacgguaggugguggggca

SEQ ID NO: 353773 - RNA, 19 nt, Artificial Sequence
  Description of Artificial Sequence: Synthetic oligonucleotide
auuugcguacgaacauggg

SEQ ID NO: 353774 - RNA, 19 nt, Artificial Sequence
  Description of Artificial Sequence: Synthetic oligonucleotide
cuucgcgguacagauaguc

SEQ ID NO: 353775 - RNA, 19 nt, Artificial Sequence
  Description of Artificial Sequence: Synthetic oligonucleotide
agaugugggcaccgccuuc

SEQ ID NO: 353776 - RNA, 19 nt, Artificial Sequence
  Description of Artificial Sequence: Synthetic oligonucleotide
cucgcuccuggaugaaacc

SEQ ID NO: 353777 - RNA, 19 nt, Artificial Sequence
  Description of Artificial Sequence: Synthetic oligonucleotide
gguggacuugaaaggaagg

SEQ ID NO: 353778 - RNA, 19 nt, Artificial Sequence
  Description of Artificial Sequence: Synthetic oligonucleotide
cacaugauccccagauuca

SEQ ID NO: 353779 - RNA, 19 nt, Artificial Sequence
  Description of Artificial Sequence: Synthetic oligonucleotide
cuuguucagucgcccagac

SEQ ID NO: 353780 - RNA, 19 nt, Artificial Sequence
  Description of Artificial Sequence: Synthetic oligonucleotide
uacuagagacuugucgauc

SEQ ID NO: 353781 - RNA, 19 nt, Artificial Sequence
  Description of Artificial Sequence: Synthetic oligonucleotide
ucggcagaagggaguuaag

SEQ ID NO: 353782 - RNA, 19 nt, Artificial Sequence
  Description of Artificial Sequence: Synthetic oligonucleotide
aguagcgggccugcagucg

SEQ ID NO: 353783 - RNA, 19 nt, Artificial Sequence
  Description of Artificial Sequence: Synthetic oligonucleotide
ccugguauaguggaccagg

SEQ ID NO: 353784 - RNA, 19 nt, Artificial Sequence
  Description of Artificial Sequence: Synthetic oligonucleotide
acagacggggucguuguug

SEQ ID NO: 353785 - RNA, 19 nt, Artificial Sequence
  Description of Artificial Sequence: Synthetic oligonucleotide
uucagucgcccagacuuug

SEQ ID NO: 353786 - RNA, 19 nt, Artificial Sequence
  Description of Artificial Sequence: Synthetic oligonucleotide
uuauggaagcgggccagcu

SEQ ID NO: 353787 - RNA, 19 nt, Artificial Sequence
  Description of Artificial Sequence: Synthetic oligonucleotide
ugccuuguucccgaagcca

SEQ ID NO: 353788 - RNA, 19 nt, Artificial Sequence
  Description of Artificial Sequence: Synthetic oligonucleotide
ggucagccaagucauacuc

SEQ ID NO: 353789 - RNA, 19 nt, Artificial Sequence
  Description of Artificial Sequence: Synthetic oligonucleotide
uuguucagucgcccagacu

SEQ ID NO: 353790 - RNA, 19 nt, Artificial Sequence
  Description of Artificial Sequence: Synthetic oligonucleotide
cacgagcucauacuggcga

SEQ ID NO: 353791 - RNA, 19 nt, Artificial Sequence
  Description of Artificial Sequence: Synthetic oligonucleotide
cugugucgaggccaagcag

SEQ ID NO: 353792 - RNA, 19 nt, Artificial Sequence
  Description of Artificial Sequence: Synthetic oligonucleotide
uacuggcgaaugcucgacu

SEQ ID NO: 353793 - RNA, 19 nt, Artificial Sequence
  Description of Artificial Sequence: Synthetic oligonucleotide
cuuagaggaugaggcaaug

SEQ ID NO: 353794 - RNA, 19 nt, Artificial Sequence
  Description of Artificial Sequence: Synthetic oligonucleotide
ugagcgccggcagccauag

SEQ ID NO: 353795 - RNA, 19 nt, Artificial Sequence
  Description of Artificial Sequence: Synthetic oligonucleotide
uucaggcggcccaucucgc

SEQ ID NO: 353796 - RNA, 19 nt, Artificial Sequence
  Description of Artificial Sequence: Synthetic oligonucleotide
uagaugugggcaccgccuu

SEQ ID NO: 353797 - RNA, 19 nt, Artificial Sequence
  Description of Artificial Sequence: Synthetic oligonucleotide
uucggggucugcagacaug

SEQ ID NO: 353798 - RNA, 19 nt, Artificial Sequence
  Description of Artificial Sequence: Synthetic oligonucleotide
ucgagcauccccgcagaca

SEQ ID NO: 353799 - RNA, 19 nt, Artificial Sequence
  Description of Artificial Sequence: Synthetic oligonucleotide
gagauuugcguacgaacau

SEQ ID NO: 353800 - RNA, 19 nt, Artificial Sequence
  Description of Artificial Sequence: Synthetic oligonucleotide
gugagcggguggcagcucc

SEQ ID NO: 353801 - RNA, 19 nt, Artificial Sequence
  Description of Artificial Sequence: Synthetic oligonucleotide
uaguaggugagggccguac

SEQ ID NO: 353802 - RNA, 19 nt, Artificial Sequence
  Description of Artificial Sequence: Synthetic oligonucleotide
gcuccgagggauccgaggc

SEQ ID NO: 353803 - RNA, 19 nt, Artificial Sequence
  Description of Artificial Sequence: Synthetic oligonucleotide
agguggucgaugggaggcc

SEQ ID NO: 353804 - RNA, 19 nt, Artificial Sequence
  Description of Artificial Sequence: Synthetic oligonucleotide
uccgaggcauacugugcca

SEQ ID NO: 353805 - RNA, 19 nt, Artificial Sequence
  Description of Artificial Sequence: Synthetic oligonucleotide
uggguaccagggcccggcg

SEQ ID NO: 353806 - RNA, 19 nt, Artificial Sequence
  Description of Artificial Sequence: Synthetic oligonucleotide
ggcgucauuggcuggguac

SEQ ID NO: 353807 - RNA, 19 nt, Artificial Sequence
  Description of Artificial Sequence: Synthetic oligonucleotide
cauacguggccaugcagaa

SEQ ID NO: 353808 - RNA, 19 nt, Artificial Sequence
  Description of Artificial Sequence: Synthetic oligonucleotide
ucaggcggcccaucucgcc

SEQ ID NO: 353809 - RNA, 19 nt, Artificial Sequence
  Description of Artificial Sequence: Synthetic oligonucleotide
caggagucggucccuuggc

SEQ ID NO: 353810 - RNA, 19 nt, Artificial Sequence
  Description of Artificial Sequence: Synthetic oligonucleotide
aguagcggcccuuggucau

SEQ ID NO: 353811 - RNA, 19 nt, Artificial Sequence
  Description of Artificial Sequence: Synthetic oligonucleotide
gagucggucccuuggccuc

SEQ ID NO: 353812 - RNA, 19 nt, Artificial Sequence
  Description of Artificial Sequence: Synthetic oligonucleotide
guaguagcgggccugcagu

SEQ ID NO: 353813 - RNA, 19 nt, Artificial Sequence
  Description of Artificial Sequence: Synthetic oligonucleotide
agucuugggcauugucggu

SEQ ID NO: 353814 - RNA, 19 nt, Artificial Sequence
  Description of Artificial Sequence: Synthetic oligonucleotide
cccuccuuauggaagcggg

SEQ ID NO: 353815 - RNA, 19 nt, Artificial Sequence
  Description of Artificial Sequence: Synthetic oligonucleotide
uccgguuaguggugacagc

SEQ ID NO: 353816 - RNA, 19 nt, Artificial Sequence
  Description of Artificial Sequence: Synthetic oligonucleotide
guacgguaggugguggggc

SEQ ID NO: 353817 - RNA, 19 nt, Artificial Sequence
  Description of Artificial Sequence: Synthetic oligonucleotide
gucgugcugaaaaguagac

SEQ ID NO: 353818 - RNA, 19 nt, Artificial Sequence
  Description of Artificial Sequence: Synthetic oligonucleotide
ggaagugauuacagggagc

SEQ ID NO: 353819 - RNA, 19 nt, Artificial Sequence
  Description of Artificial Sequence: Synthetic oligonucleotide
ggcggaacugagauuugcg

SEQ ID NO: 353820 - RNA, 19 nt, Artificial Sequence
  Description of Artificial Sequence: Synthetic oligonucleotide
cuuauggaagcgggccagc

SEQ ID NO: 353821 - RNA, 19 nt, Artificial Sequence
  Description of Artificial Sequence: Synthetic oligonucleotide
agucggucccuuggccucc

SEQ ID NO: 353822 - RNA, 19 nt, Artificial Sequence
  Description of Artificial Sequence: Synthetic oligonucleotide
ucacccgccaugugcccug

SEQ ID NO: 353823 - RNA, 19 nt, Artificial Sequence
  Description of Artificial Sequence: Synthetic oligonucleotide
guacgaacauggguaccag

SEQ ID NO: 353824 - RNA, 19 nt, Artificial Sequence
  Description of Artificial Sequence: Synthetic oligonucleotide
gucuuggagaauggcuaag

SEQ ID NO: 353825 - RNA, 19 nt, Artificial Sequence
  Description of Artificial Sequence: Synthetic oligonucleotide
ugagggcacccuccuuaug

SEQ ID NO: 353826 - RNA, 19 nt, Artificial Sequence
  Description of Artificial Sequence: Synthetic oligonucleotide
ccagauucauaccugaucu

SEQ ID NO: 353827 - RNA, 19 nt, Artificial Sequence
  Description of Artificial Sequence: Synthetic oligonucleotide
agggcacccuccuuaugga

SEQ ID NO: 353828 - RNA, 19 nt, Artificial Sequence
  Description of Artificial Sequence: Synthetic oligonucleotide
caugugaugaaauccucuu

SEQ ID NO: 353829 - RNA, 19 nt, Artificial Sequence
  Description of Artificial Sequence: Synthetic oligonucleotide
caauaauguuccuucccgu

SEQ ID NO: 353830 - RNA, 19 nt, Artificial Sequence
  Description of Artificial Sequence: Synthetic oligonucleotide
acccuccuuauggaagcgg

SEQ ID NO: 353831 - RNA, 19 nt, Artificial Sequence
  Description of Artificial Sequence: Synthetic oligonucleotide
uaguagcgggccugcaguc

SEQ ID NO: 353832 - RNA, 19 nt, Artificial Sequence
  Description of Artificial Sequence: Synthetic oligonucleotide
gguuguuuagagacaugac

SEQ ID NO: 353833 - RNA, 19 nt, Artificial Sequence
  Description of Artificial Sequence: Synthetic oligonucleotide
ucgcccagacuuugcuuca

SEQ ID NO: 353834 - RNA, 19 nt, Artificial Sequence
  Description of Artificial Sequence: Synthetic oligonucleotide
caucgagguuguuuagaga

SEQ ID NO: 353835 - RNA, 19 nt, Artificial Sequence
  Description of Artificial Sequence: Synthetic oligonucleotide
uuguugggaucuugcugaa

SEQ ID NO: 353836 - RNA, 19 nt, Artificial Sequence
  Description of Artificial Sequence: Synthetic oligonucleotide
acgagcucauacuggcgaa

SEQ ID NO: 353837 - RNA, 19 nt, Artificial Sequence
  Description of Artificial Sequence: Synthetic oligonucleotide
cccagacuuugcuucauac

SEQ ID NO: 353838 - RNA, 19 nt, Artificial Sequence
  Description of Artificial Sequence: Synthetic oligonucleotide
ccauacguggccaugcaga

SEQ ID NO: 353839 - RNA, 19 nt, Artificial Sequence
  Description of Artificial Sequence: Synthetic oligonucleotide
agacuacuagagacuuguc

SEQ ID NO: 353840 - RNA, 19 nt, Artificial Sequence
  Description of Artificial Sequence: Synthetic oligonucleotide
acggggucguuguugggau

SEQ ID NO: 353841 - RNA, 19 nt, Artificial Sequence
  Description of Artificial Sequence: Synthetic oligonucleotide
ucuucggggucugcagaca

SEQ ID NO: 353842 - RNA, 19 nt, Artificial Sequence
  Description of Artificial Sequence: Synthetic oligonucleotide
agccccgaggaucucccca

SEQ ID NO: 353843 - RNA, 19 nt, Artificial Sequence
  Description of Artificial Sequence: Synthetic oligonucleotide
gcgaaugcucgacuccucc

SEQ ID NO: 353844 - RNA, 19 nt, Artificial Sequence
  Description of Artificial Sequence: Synthetic oligonucleotide
ugggcaccgccuucgugga

SEQ ID NO: 353845 - RNA, 19 nt, Artificial Sequence
  Description of Artificial Sequence: Synthetic oligonucleotide
aagugauuacagggagcaa

SEQ ID NO: 353846 - RNA, 19 nt, Artificial Sequence
  Description of Artificial Sequence: Synthetic oligonucleotide
gucggcagaagggaguuaa

SEQ ID NO: 353847 - RNA, 19 nt, Artificial Sequence
  Description of Artificial Sequence: Synthetic oligonucleotide
ucugagcgccggcagccau

SEQ ID NO: 353848 - RNA, 19 nt, Artificial Sequence
  Description of Artificial Sequence: Synthetic oligonucleotide
gcacccaucacccgccaug

SEQ ID NO: 353849 - RNA, 19 nt, Artificial Sequence
  Description of Artificial Sequence: Synthetic oligonucleotide
ugagcggguggcagcuccu

SEQ ID NO: 353850 - RNA, 19 nt, Artificial Sequence
  Description of Artificial Sequence: Synthetic oligonucleotide
gaugccgcucagugcccug

SEQ ID NO: 353851 - RNA, 19 nt, Artificial Sequence
  Description of Artificial Sequence: Synthetic oligonucleotide
agucgugguaggagcucac

SEQ ID NO: 353852 - RNA, 19 nt, Artificial Sequence
  Description of Artificial Sequence: Synthetic oligonucleotide
agaaccugcgccgcucggu

SEQ ID NO: 353853 - RNA, 19 nt, Artificial Sequence
  Description of Artificial Sequence: Synthetic oligonucleotide
aagggccagguuauuuaaa

SEQ ID NO: 353854 - RNA, 19 nt, Artificial Sequence
  Description of Artificial Sequence: Synthetic oligonucleotide
uggucgaugggaggccgca

SEQ ID NO: 353855 - RNA, 19 nt, Artificial Sequence
  Description of Artificial Sequence: Synthetic oligonucleotide
ggcuaagaugugccuccgg

SEQ ID NO: 353856 - RNA, 19 nt, Artificial Sequence
  Description of Artificial Sequence: Synthetic oligonucleotide
ucuucgcgguacagauagu

SEQ ID NO: 353857 - RNA, 19 nt, Artificial Sequence
  Description of Artificial Sequence: Synthetic oligonucleotide
ucccauagcggugggcauc

SEQ ID NO: 353858 - RNA, 19 nt, Artificial Sequence
  Description of Artificial Sequence: Synthetic oligonucleotide
uuggugcgugguggguugg

SEQ ID NO: 353859 - RNA, 19 nt, Artificial Sequence
  Description of Artificial Sequence: Synthetic oligonucleotide
aaggcggaacugagauuug

SEQ ID NO: 353860 - RNA, 19 nt, Artificial Sequence
  Description of Artificial Sequence: Synthetic oligonucleotide
ucucgccaguguaaaccuu

SEQ ID NO: 353861 - RNA, 19 nt, Artificial Sequence
  Description of Artificial Sequence: Synthetic oligonucleotide
ggugagggcacccuccuua

SEQ ID NO: 353862 - RNA, 19 nt, Artificial Sequence
  Description of Artificial Sequence: Synthetic oligonucleotide
agucgcccagacuuugcuu

SEQ ID NO: 353863 - RNA, 19 nt, Artificial Sequence
  Description of Artificial Sequence: Synthetic oligonucleotide
ccgucgugcugaaaaguag

SEQ ID NO: 353864 - RNA, 19 nt, Artificial Sequence
  Description of Artificial Sequence: Synthetic oligonucleotide
gaaccugcgccgcucggua

SEQ ID NO: 353865 - RNA, 19 nt, Artificial Sequence
  Description of Artificial Sequence: Synthetic oligonucleotide
cagaugccgcucagugccc

SEQ ID NO: 353866 - RNA, 19 nt, Artificial Sequence
  Description of Artificial Sequence: Synthetic oligonucleotide
ugcgccgcucgguaccgac

SEQ ID NO: 353867 - RNA, 19 nt, Artificial Sequence
  Description of Artificial Sequence: Synthetic oligonucleotide
agaugcgcugggcgccaag

SEQ ID NO: 353868 - RNA, 19 nt, Artificial Sequence
  Description of Artificial Sequence: Synthetic oligonucleotide
cuuggagaauggcuaagau

SEQ ID NO: 353869 - RNA, 19 nt, Artificial Sequence
  Description of Artificial Sequence: Synthetic oligonucleotide
cagccagucauagaagucu

SEQ ID NO: 353870 - RNA, 19 nt, Artificial Sequence
  Description of Artificial Sequence: Synthetic oligonucleotide
uggccagaacugcucccuc

SEQ ID NO: 353871 - RNA, 19 nt, Artificial Sequence
  Description of Artificial Sequence: Synthetic oligonucleotide
gguggucgaugggaggccg

SEQ ID NO: 353872 - RNA, 19 nt, Artificial Sequence
  Description of Artificial Sequence: Synthetic oligonucleotide
uccaaccuccuugccuugu

SEQ ID NO: 353873 - RNA, 19 nt, Artificial Sequence
  Description of Artificial Sequence: Synthetic oligonucleotide
aggugagggccguacggua

SEQ ID NO: 353874 - RNA, 19 nt, Artificial Sequence
  Description of Artificial Sequence: Synthetic oligonucleotide
gacuccagugagguccaca

SEQ ID NO: 353875 - RNA, 19 nt, Artificial Sequence
  Description of Artificial Sequence: Synthetic oligonucleotide
cagaaccugcgccgcucgg

SEQ ID NO: 353876 - RNA, 19 nt, Artificial Sequence
  Description of Artificial Sequence: Synthetic oligonucleotide
agcggugggcauccuugga

SEQ ID NO: 353877 - RNA, 19 nt, Artificial Sequence
  Description of Artificial Sequence: Synthetic oligonucleotide
agacacuucuucggccacu

SEQ ID NO: 353878 - RNA, 19 nt, Artificial Sequence
  Description of Artificial Sequence: Synthetic oligonucleotide
aucccauagcggugggcau

SEQ ID NO: 353879 - RNA, 19 nt, Artificial Sequence
  Description of Artificial Sequence: Synthetic oligonucleotide
ggaggucggcagaagggag

SEQ ID NO: 353880 - RNA, 19 nt, Artificial Sequence
  Description of Artificial Sequence: Synthetic oligonucleotide
ccuuauggaagcgggccag

SEQ ID NO: 353881 - RNA, 19 nt, Artificial Sequence
  Description of Artificial Sequence: Synthetic oligonucleotide
gcggugggcauccuuggac

SEQ ID NO: 353882 - RNA, 19 nt, Artificial Sequence
  Description of Artificial Sequence: Synthetic oligonucleotide
gaguugggguggaccuuag

SEQ ID NO: 353883 - RNA, 19 nt, Artificial Sequence
  Description of Artificial Sequence: Synthetic oligonucleotide
gaacucgcacacggcuggc

SEQ ID NO: 353884 - RNA, 19 nt, Artificial Sequence
  Description of Artificial Sequence: Synthetic oligonucleotide
cuuccgguuaguggugaca

SEQ ID NO: 353885 - RNA, 19 nt, Artificial Sequence
  Description of Artificial Sequence: Synthetic oligonucleotide
guggaccuuagaggaugag

SEQ ID NO: 353886 - RNA, 19 nt, Artificial Sequence
  Description of Artificial Sequence: Synthetic oligonucleotide
gccagguuauuuaaaguua

SEQ ID NO: 353887 - RNA, 19 nt, Artificial Sequence
  Description of Artificial Sequence: Synthetic oligonucleotide
acacggcuggccagaacug

SEQ ID NO: 353888 - RNA, 19 nt, Artificial Sequence
  Description of Artificial Sequence: Synthetic oligonucleotide
uagcgggccugcagucgug

SEQ ID NO: 353889 - RNA, 19 nt, Artificial Sequence
  Description of Artificial Sequence: Synthetic oligonucleotide
agcuuccgguuagugguga

SEQ ID NO: 353890 - RNA, 19 nt, Artificial Sequence
  Description of Artificial Sequence: Synthetic oligonucleotide
gugucgaggccaagcagga

SEQ ID NO: 353891 - RNA, 19 nt, Artificial Sequence
  Description of Artificial Sequence: Synthetic oligonucleotide
cugccucggccaugguggc

SEQ ID NO: 353892 - RNA, 19 nt, Artificial Sequence
  Description of Artificial Sequence: Synthetic oligonucleotide
agaugccgcucagugcccu

SEQ ID NO: 353893 - RNA, 19 nt, Artificial Sequence
  Description of Artificial Sequence: Synthetic oligonucleotide
cgaaugcucgacuccuccc

SEQ ID NO: 353894 - RNA, 19 nt, Artificial Sequence
  Description of Artificial Sequence: Synthetic oligonucleotide
ugagggccguacgguaggu

SEQ ID NO: 353895 - RNA, 19 nt, Artificial Sequence
  Description of Artificial Sequence: Synthetic oligonucleotide
cggcagaagggaguuaagg

SEQ ID NO: 353896 - RNA, 19 nt, Artificial Sequence
  Description of Artificial Sequence: Synthetic oligonucleotide
aggucggcagaagggaguu

SEQ ID NO: 353897 - RNA, 19 nt, Artificial Sequence
  Description of Artificial Sequence: Synthetic oligonucleotide
uggcgucauuggcugggua

SEQ ID NO: 353898 - RNA, 19 nt, Artificial Sequence
  Description of Artificial Sequence: Synthetic oligonucleotide
ccgguuaguggugacagca

SEQ ID NO: 353899 - RNA, 19 nt, Artificial Sequence
  Description of Artificial Sequence: Synthetic oligonucleotide
uuugacagacggggucguu

SEQ ID NO: 353900 - RNA, 19 nt, Artificial Sequence
  Description of Artificial Sequence: Synthetic oligonucleotide
gucgaugggaggccgcagu

SEQ ID NO: 353901 - RNA, 19 nt, Artificial Sequence
  Description of Artificial Sequence: Synthetic oligonucleotide
guagcgggccugcagucgu

SEQ ID NO: 353902 - RNA, 19 nt, Artificial Sequence
  Description of Artificial Sequence: Synthetic oligonucleotide
ugucgaggccaagcaggaa

SEQ ID NO: 353903 - RNA, 19 nt, Artificial Sequence
  Description of Artificial Sequence: Synthetic oligonucleotide
cagucgugguaggagcuca

SEQ ID NO: 353904 - RNA, 19 nt, Artificial Sequence
  Description of Artificial Sequence: Synthetic oligonucleotide
cccucuguacaucugccga

SEQ ID NO: 353905 - RNA, 19 nt, Artificial Sequence
  Description of Artificial Sequence: Synthetic oligonucleotide
guugaccaggguggcguca

SEQ ID NO: 353906 - RNA, 19 nt, Artificial Sequence
  Description of Artificial Sequence: Synthetic oligonucleotide
auggguagucuuggagaau

SEQ ID NO: 353907 - RNA, 19 nt, Artificial Sequence
  Description of Artificial Sequence: Synthetic oligonucleotide
cuccgagggauccgaggca

SEQ ID NO: 353908 - RNA, 19 nt, Artificial Sequence
  Description of Artificial Sequence: Synthetic oligonucleotide
gaggucggcagaagggagu

SEQ ID NO: 353909 - RNA, 19 nt, Artificial Sequence
  Description of Artificial Sequence: Synthetic oligonucleotide
ggucguuguugggaucuug

SEQ ID NO: 353910 - RNA, 19 nt, Artificial Sequence
  Description of Artificial Sequence: Synthetic oligonucleotide
gcggaacugagauuugcgu

SEQ ID NO: 353911 - RNA, 19 nt, Artificial Sequence
  Description of Artificial Sequence: Synthetic oligonucleotide
ccguacgguaggugguggg

SEQ ID NO: 353912 - RNA, 19 nt, Artificial Sequence
  Description of Artificial Sequence: Synthetic oligonucleotide
acccaucacccgccaugug

SEQ ID NO: 353913 - RNA, 19 nt, Artificial Sequence
  Description of Artificial Sequence: Synthetic oligonucleotide
gccauauuucgagcauccc

SEQ ID NO: 353914 - RNA, 19 nt, Artificial Sequence
  Description of Artificial Sequence: Synthetic oligonucleotide
gugcugaaaaguagacacu

SEQ ID NO: 353915 - RNA, 19 nt, Artificial Sequence
  Description of Artificial Sequence: Synthetic oligonucleotide
cgucgugcugaaaaguaga

SEQ ID NO: 353916 - RNA, 19 nt, Artificial Sequence
  Description of Artificial Sequence: Synthetic oligonucleotide
ggagucggucccuuggccu

SEQ ID NO: 353917 - RNA, 19 nt, Artificial Sequence
  Description of Artificial Sequence: Synthetic oligonucleotide
ugccagggcccaccaugau

SEQ ID NO: 353918 - RNA, 19 nt, Artificial Sequence
  Description of Artificial Sequence: Synthetic oligonucleotide
ggcauugucgguggggucu

SEQ ID NO: 353919 - RNA, 19 nt, Artificial Sequence
  Description of Artificial Sequence: Synthetic oligonucleotide
ccauaguagagcagugucu

SEQ ID NO: 353920 - RNA, 19 nt, Artificial Sequence
  Description of Artificial Sequence: Synthetic oligonucleotide
gugccagggcccaccauga

SEQ ID NO: 353921 - RNA, 19 nt, Artificial Sequence
  Description of Artificial Sequence: Synthetic oligonucleotide
ggcaccgccuucguggauc

SEQ ID NO: 353922 - RNA, 19 nt, Artificial Sequence
  Description of Artificial Sequence: Synthetic oligonucleotide
cagguuauuuaaaguuauu

SEQ ID NO: 353923 - RNA, 19 nt, Artificial Sequence
  Description of Artificial Sequence: Synthetic oligonucleotide
guguaaaccuuggcagugu

SEQ ID NO: 353924 - RNA, 19 nt, Artificial Sequence
  Description of Artificial Sequence: Synthetic oligonucleotide
ccgcaucccauagcggugg

SEQ ID NO: 353925 - RNA, 19 nt, Artificial Sequence
  Description of Artificial Sequence: Synthetic oligonucleotide
guggucgaugggaggccgc

SEQ ID NO: 353926 - RNA, 19 nt, Artificial Sequence
  Description of Artificial Sequence: Synthetic oligonucleotide
agcaaguguuggacauaga

SEQ ID NO: 353927 - RNA, 19 nt, Artificial Sequence
  Description of Artificial Sequence: Synthetic oligonucleotide
gggaacggaugcuucuugu

SEQ ID NO: 353928 - RNA, 19 nt, Artificial Sequence
  Description of Artificial Sequence: Synthetic oligonucleotide
ccaugggcccaaacucggc

SEQ ID NO: 353929 - RNA, 19 nt, Artificial Sequence
  Description of Artificial Sequence: Synthetic oligonucleotide
cauugucgguggggucucc

SEQ ID NO: 353930 - RNA, 19 nt, Artificial Sequence
  Description of Artificial Sequence: Synthetic oligonucleotide
uggugcgugguggguuggu

SEQ ID NO: 353931 - RNA, 19 nt, Artificial Sequence
  Description of Artificial Sequence: Synthetic oligonucleotide
ccaucucgccaguguaaac

SEQ ID NO: 353932 - RNA, 19 nt, Artificial Sequence
  Description of Artificial Sequence: Synthetic oligonucleotide
cguacgaacauggguacca

SEQ ID NO: 353933 - RNA, 19 nt, Artificial Sequence
  Description of Artificial Sequence: Synthetic oligonucleotide
caucugccgagggccuaag

SEQ ID NO: 353934 - RNA, 19 nt, Artificial Sequence
  Description of Artificial Sequence: Synthetic oligonucleotide
gccguacgguagguggugg

SEQ ID NO: 353935 - RNA, 19 nt, Artificial Sequence
  Description of Artificial Sequence: Synthetic oligonucleotide
cagccccgaggaucucccc

SEQ ID NO: 353936 - RNA, 19 nt, Artificial Sequence
  Description of Artificial Sequence: Synthetic oligonucleotide
gccacagcgcagaugugca

SEQ ID NO: 353937 - RNA, 19 nt, Artificial Sequence
  Description of Artificial Sequence: Synthetic oligonucleotide
acccgccaugugcccuggg

SEQ ID NO: 353938 - RNA, 19 nt, Artificial Sequence
  Description of Artificial Sequence: Synthetic oligonucleotide
cagauucauaccugaucuu

SEQ ID NO: 353939 - RNA, 19 nt, Artificial Sequence
  Description of Artificial Sequence: Synthetic oligonucleotide
ggaguugggguggaccuua

SEQ ID NO: 353940 - RNA, 19 nt, Artificial Sequence
  Description of Artificial Sequence: Synthetic oligonucleotide
gcuuccgguuaguggugac

SEQ ID NO: 353941 - RNA, 19 nt, Artificial Sequence
  Description of Artificial Sequence: Synthetic oligonucleotide
ggccguacgguagguggug

SEQ ID NO: 353942 - RNA, 19 nt, Artificial Sequence
  Description of Artificial Sequence: Synthetic oligonucleotide
cccgaagaacucgcacacg

SEQ ID NO: 353943 - RNA, 19 nt, Artificial Sequence
  Description of Artificial Sequence: Synthetic oligonucleotide
gcguacgaacauggguacc

SEQ ID NO: 353944 - RNA, 19 nt, Artificial Sequence
  Description of Artificial Sequence: Synthetic oligonucleotide
ccgaggaucuccccaaucu

SEQ ID NO: 353945 - RNA, 19 nt, Artificial Sequence
  Description of Artificial Sequence: Synthetic oligonucleotide
ggaacggaugcuucuuguu

SEQ ID NO: 353946 - RNA, 19 nt, Artificial Sequence
  Description of Artificial Sequence: Synthetic oligonucleotide
ggggucguuguugggaucu

SEQ ID NO: 353947 - RNA, 19 nt, Artificial Sequence
  Description of Artificial Sequence: Synthetic oligonucleotide
gagggauccgaggcauacu

SEQ ID NO: 353948 - RNA, 19 nt, Artificial Sequence
  Description of Artificial Sequence: Synthetic oligonucleotide
cgagggauccgaggcauac

SEQ ID NO: 353949 - RNA, 19 nt, Artificial Sequence
  Description of Artificial Sequence: Synthetic oligonucleotide
ccacagcgcagaugugcac

SEQ ID NO: 353950 - RNA, 19 nt, Artificial Sequence
  Description of Artificial Sequence: Synthetic oligonucleotide
ggacagccgguuggcaaac

SEQ ID NO: 353951 - RNA, 19 nt, Artificial Sequence
  Description of Artificial Sequence: Synthetic oligonucleotide
cuuugacagacggggucgu

SEQ ID NO: 353952 - RNA, 19 nt, Artificial Sequence
  Description of Artificial Sequence: Synthetic oligonucleotide
guucccgucugggagccau

SEQ ID NO: 353953 - RNA, 19 nt, Artificial Sequence
  Description of Artificial Sequence: Synthetic oligonucleotide
gcagucgugguaggagcuc

SEQ ID NO: 353954 - RNA, 19 nt, Artificial Sequence
  Description of Artificial Sequence: Synthetic oligonucleotide
cccgaggaucuccccaauc

SEQ ID NO: 353955 - RNA, 19 nt, Artificial Sequence
  Description of Artificial Sequence: Synthetic oligonucleotide
ggucucccucgccauacgu

SEQ ID NO: 353956 - RNA, 19 nt, Artificial Sequence
  Description of Artificial Sequence: Synthetic oligonucleotide
cauuggugcgugguggguu

SEQ ID NO: 353957 - RNA, 19 nt, Artificial Sequence
  Description of Artificial Sequence: Synthetic oligonucleotide
gcaccgccuucguggauca

SEQ ID NO: 353958 - RNA, 19 nt, Artificial Sequence
  Description of Artificial Sequence: Synthetic oligonucleotide
cauagcggugggcauccuu

SEQ ID NO: 353959 - RNA, 19 nt, Artificial Sequence
  Description of Artificial Sequence: Synthetic oligonucleotide
cacccaucacccgccaugu

SEQ ID NO: 353960 - RNA, 19 nt, Artificial Sequence
  Description of Artificial Sequence: Synthetic oligonucleotide
cacccgccaugugcccugg

SEQ ID NO: 353961 - RNA, 19 nt, Artificial Sequence
  Description of Artificial Sequence: Synthetic oligonucleotide
ccuucccguuuucuucauc

SEQ ID NO: 353962 - RNA, 19 nt, Artificial Sequence
  Description of Artificial Sequence: Synthetic oligonucleotide
ccccgcaucccauagcggu

SEQ ID NO: 353963 - RNA, 19 nt, Artificial Sequence
  Description of Artificial Sequence: Synthetic oligonucleotide
cgagcauccccgcagacau

SEQ ID NO: 353964 - RNA, 19 nt, Artificial Sequence
  Description of Artificial Sequence: Synthetic oligonucleotide
gacagacggggucguuguu

SEQ ID NO: 353965 - RNA, 19 nt, Artificial Sequence
  Description of Artificial Sequence: Synthetic oligonucleotide
gccgagggccuaaggcacc

SEQ ID NO: 353966 - RNA, 19 nt, Artificial Sequence
  Description of Artificial Sequence: Synthetic oligonucleotide
ccugcgccgcucgguaccg

SEQ ID NO: 353967 - RNA, 19 nt, Artificial Sequence
  Description of Artificial Sequence: Synthetic oligonucleotide
ggcccaaacucggccacaa

SEQ ID NO: 353968 - RNA, 19 nt, Artificial Sequence
  Description of Artificial Sequence: Synthetic oligonucleotide
gccccgcaucccauagcgg

SEQ ID NO: 353969 - RNA, 19 nt, Artificial Sequence
  Description of Artificial Sequence: Synthetic oligonucleotide
guaguaggugagggccgua

SEQ ID NO: 353970 - RNA, 19 nt, Artificial Sequence
  Description of Artificial Sequence: Synthetic oligonucleotide
gcggccauucucuccugcu

SEQ ID NO: 353971 - RNA, 19 nt, Artificial Sequence
  Description of Artificial Sequence: Synthetic oligonucleotide
gcgugguggguuggugaug

SEQ ID NO: 353972 - RNA, 19 nt, Artificial Sequence
  Description of Artificial Sequence: Synthetic oligonucleotide
gggaguuaaggaagugauu

SEQ ID NO: 353973 - RNA, 19 nt, Artificial Sequence
  Description of Artificial Sequence: Synthetic oligonucleotide
gagcauccccgcagacaua

SEQ ID NO: 353974 - RNA, 19 nt, Artificial Sequence
  Description of Artificial Sequence: Synthetic oligonucleotide
cagcgcagaugugcacgga

SEQ ID NO: 353975 - RNA, 19 nt, Artificial Sequence
  Description of Artificial Sequence: Synthetic oligonucleotide
ccggcggccauucucuccu

SEQ ID NO: 353976 - RNA, 19 nt, Artificial Sequence
  Description of Artificial Sequence: Synthetic oligonucleotide
ggcucgcuccuggaugaaa

SEQ ID NO: 353977 - RNA, 19 nt, Artificial Sequence
  Description of Artificial Sequence: Synthetic oligonucleotide
guggcgucauuggcugggu

SEQ ID NO: 353978 - RNA, 19 nt, Artificial Sequence
  Description of Artificial Sequence: Synthetic oligonucleotide
ccaccccgaagaacucgca

SEQ ID NO: 353979 - RNA, 19 nt, Artificial Sequence
  Description of Artificial Sequence: Synthetic oligonucleotide
caaguccgucgugcugaaa

SEQ ID NO: 353980 - RNA, 19 nt, Artificial Sequence
  Description of Artificial Sequence: Synthetic oligonucleotide
ccaaguccgucgugcugaa

SEQ ID NO: 353981 - RNA, 19 nt, Artificial Sequence
  Description of Artificial Sequence: Synthetic oligonucleotide
gcucuucgcgguacagaua

SEQ ID NO: 353982 - RNA, 19 nt, Artificial Sequence
  Description of Artificial Sequence: Synthetic oligonucleotide
ccacgaaacugcucucuuu

SEQ ID NO: 353983 - RNA, 19 nt, Artificial Sequence
  Description of Artificial Sequence: Synthetic oligonucleotide
ccaugaugacagguguggu

SEQ ID NO: 353984 - RNA, 19 nt, Artificial Sequence
  Description of Artificial Sequence: Synthetic oligonucleotide
gcggcccaucucgccagug

SEQ ID NO: 353985 - RNA, 19 nt, Artificial Sequence
  Description of Artificial Sequence: Synthetic oligonucleotide
cgcagugauggguagucuu

SEQ ID NO: 353986 - RNA, 19 nt, Artificial Sequence
  Description of Artificial Sequence: Synthetic oligonucleotide
gggccguacgguagguggu

SEQ ID NO: 353987 - RNA, 19 nt, Artificial Sequence
  Description of Artificial Sequence: Synthetic oligonucleotide
ggcacccaucacccgccau

SEQ ID NO: 353988 - RNA, 19 nt, Artificial Sequence
  Description of Artificial Sequence: Synthetic oligonucleotide
cugcgccgcucgguaccga

SEQ ID NO: 353989 - RNA, 19 nt, Artificial Sequence
  Description of Artificial Sequence: Synthetic oligonucleotide
ccgagggauccgaggcaua

SEQ ID NO: 353990 - RNA, 19 nt, Artificial Sequence
  Description of Artificial Sequence: Synthetic oligonucleotide
gcgggccugcagucguggu

SEQ ID NO: 353991 - RNA, 19 nt, Artificial Sequence
  Description of Artificial Sequence: Synthetic oligonucleotide
ccgcagugauggguagucu

SEQ ID NO: 353992 - RNA, 19 nt, Artificial Sequence
  Description of Artificial Sequence: Synthetic oligonucleotide
gggucguuguugggaucuu

SEQ ID NO: 353993 - RNA, 19 nt, Artificial Sequence
  Description of Artificial Sequence: Synthetic oligonucleotide
gggcaccgccuucguggau

SEQ ID NO: 353994 - RNA, 19 nt, Artificial Sequence
  Description of Artificial Sequence: Synthetic oligonucleotide
cgagggccuaaggcaccca

SEQ ID NO: 353995 - RNA, 19 nt, Artificial Sequence
  Description of Artificial Sequence: Synthetic oligonucleotide
aauauuaguagaucaaaac

SEQ ID NO: 353996 - RNA, 19 nt, Artificial Sequence
  Description of Artificial Sequence: Synthetic oligonucleotide
ugaacuaaaagucagcuag

SEQ ID NO: 353997 - RNA, 19 nt, Artificial Sequence
  Description of Artificial Sequence: Synthetic oligonucleotide
aacauaaucaucccaaugu

SEQ ID NO: 353998 - RNA, 19 nt, Artificial Sequence
  Description of Artificial Sequence: Synthetic oligonucleotide
aguagaucaaaacuuuugc

SEQ ID NO: 353999 - RNA, 19 nt, Artificial Sequence
  Description of Artificial Sequence: Synthetic oligonucleotide
uguaaugccacuuauguac

SEQ ID NO: 354000 - RNA, 19 nt, Artificial Sequence
  Description of Artificial Sequence: Synthetic oligonucleotide
cauaucucaaguaaaauug

SEQ ID NO: 354001 - RNA, 19 nt, Artificial Sequence
  Description of Artificial Sequence: Synthetic oligonucleotide
uguagaaauuuugugaugg

SEQ ID NO: 354002 - RNA, 19 nt, Artificial Sequence
  Description of Artificial Sequence: Synthetic oligonucleotide
ggagauauuauucugagag

SEQ ID NO: 354003 - RNA, 19 nt, Artificial Sequence
  Description of Artificial Sequence: Synthetic oligonucleotide
uuuguaaugccacuuaugu

SEQ ID NO: 354004 - RNA, 19 nt, Artificial Sequence
  Description of Artificial Sequence: Synthetic oligonucleotide
ugacguaauguauuuaugg

SEQ ID NO: 354005 - RNA, 19 nt, Artificial Sequence
  Description of Artificial Sequence: Synthetic oligonucleotide
acaaaggcaaccuaucuac

SEQ ID NO: 354006 - RNA, 19 nt, Artificial Sequence
  Description of Artificial Sequence: Synthetic oligonucleotide
uaauugauuggcuacauac

SEQ ID NO: 354007 - RNA, 19 nt, Artificial Sequence
  Description of Artificial Sequence: Synthetic oligonucleotide
uaccaauucaacaaaacga

SEQ ID NO: 354008 - RNA, 19 nt, Artificial Sequence
  Description of Artificial Sequence: Synthetic oligonucleotide
gaauucauuacagagcacg

SEQ ID NO: 354009 - RNA, 19 nt, Artificial Sequence
  Description of Artificial Sequence: Synthetic oligonucleotide
auuuugacgaaauauggug

SEQ ID NO: 354010 - RNA, 19 nt, Artificial Sequence
  Description of Artificial Sequence: Synthetic oligonucleotide
aaguaaaauugguaugcac

SEQ ID NO: 354011 - RNA, 19 nt, Artificial Sequence
  Description of Artificial Sequence: Synthetic oligonucleotide
uugucagugaccaaaaggu

SEQ ID NO: 354012 - RNA, 19 nt, Artificial Sequence
  Description of Artificial Sequence: Synthetic oligonucleotide
uuuauggacuuuauguugc

SEQ ID NO: 354013 - RNA, 19 nt, Artificial Sequence
  Description of Artificial Sequence: Synthetic oligonucleotide
agaagggugaacuaaaagu

SEQ ID NO: 354014 - RNA, 19 nt, Artificial Sequence
  Description of Artificial Sequence: Synthetic oligonucleotide
uuaaggguacauuaaagga

SEQ ID NO: 354015 - RNA, 19 nt, Artificial Sequence
  Description of Artificial Sequence: Synthetic oligonucleotide
uguauggaauucauuacag

SEQ ID NO: 354016 - RNA, 19 nt, Artificial Sequence
  Description of Artificial Sequence: Synthetic oligonucleotide
uauuaguagaucaaaacuu

SEQ ID NO: 354017 - RNA, 19 nt, Artificial Sequence
  Description of Artificial Sequence: Synthetic oligonucleotide
uugucuaucaaugucauac

SEQ ID NO: 354018 - RNA, 19 nt, Artificial Sequence
  Description of Artificial Sequence: Synthetic oligonucleotide
auuauucugagagugacuc

SEQ ID NO: 354019 - RNA, 19 nt, Artificial Sequence
  Description of Artificial Sequence: Synthetic oligonucleotide
uugaagcauauaaagaucu

SEQ ID NO: 354020 - RNA, 19 nt, Artificial Sequence
  Description of Artificial Sequence: Synthetic oligonucleotide
aucgaggaaauauacacag

SEQ ID NO: 354021 - RNA, 19 nt, Artificial Sequence
  Description of Artificial Sequence: Synthetic oligonucleotide
acuagaagccuuuauucac

SEQ ID NO: 354022 - RNA, 19 nt, Artificial Sequence
  Description of Artificial Sequence: Synthetic oligonucleotide
ugguuuaucagucuccuca

SEQ ID NO: 354023 - RNA, 19 nt, Artificial Sequence
  Description of Artificial Sequence: Synthetic oligonucleotide
acguaauguauuuauggac

SEQ ID NO: 354024 - RNA, 19 nt, Artificial Sequence
  Description of Artificial Sequence: Synthetic oligonucleotide
guaaaauugguaugcacag

SEQ ID NO: 354025 - RNA, 19 nt, Artificial Sequence
  Description of Artificial Sequence: Synthetic oligonucleotide
uuuggugugguacuagaag

SEQ ID NO: 354026 - RNA, 19 nt, Artificial Sequence
  Description of Artificial Sequence: Synthetic oligonucleotide
aaacuuuuggguaccaagg

SEQ ID NO: 354027 - RNA, 19 nt, Artificial Sequence
  Description of Artificial Sequence: Synthetic oligonucleotide
aauuaugggagauauuauu

SEQ ID NO: 354028 - RNA, 19 nt, Artificial Sequence
  Description of Artificial Sequence: Synthetic oligonucleotide
aguaaacagcaucuauugc

SEQ ID NO: 354029 - RNA, 19 nt, Artificial Sequence
  Description of Artificial Sequence: Synthetic oligonucleotide
ugauguaccaauucaacaa

SEQ ID NO: 354030 - RNA, 19 nt, Artificial Sequence
  Description of Artificial Sequence: Synthetic oligonucleotide
agcagauucccauaaaaug

SEQ ID NO: 354031 - RNA, 19 nt, Artificial Sequence
  Description of Artificial Sequence: Synthetic oligonucleotide
uguauuuauggacuuuaug

SEQ ID NO: 354032 - RNA, 19 nt, Artificial Sequence
  Description of Artificial Sequence: Synthetic oligonucleotide
uaggguaucaugacacugg

SEQ ID NO: 354033 - RNA, 19 nt, Artificial Sequence
  Description of Artificial Sequence: Synthetic oligonucleotide
aggaauugguuccaggagg

SEQ ID NO: 354034 - RNA, 19 nt, Artificial Sequence
  Description of Artificial Sequence: Synthetic oligonucleotide
cauagcaaaagaagugugg

SEQ ID NO: 354035 - RNA, 19 nt, Artificial Sequence
  Description of Artificial Sequence: Synthetic oligonucleotide
augucgaaaauuuucauaa

SEQ ID NO: 354036 - RNA, 19 nt, Artificial Sequence
  Description of Artificial Sequence: Synthetic oligonucleotide
aauauauuccugauaugag

SEQ ID NO: 354037 - RNA, 19 nt, Artificial Sequence
  Description of Artificial Sequence: Synthetic oligonucleotide
auauuauucugagagugac

SEQ ID NO: 354038 - RNA, 19 nt, Artificial Sequence
  Description of Artificial Sequence: Synthetic oligonucleotide
ugaccaaaagguagcauag

SEQ ID NO: 354039 - RNA, 19 nt, Artificial Sequence
  Description of Artificial Sequence: Synthetic oligonucleotide
aaggcaaugcaccgaugcc

SEQ ID NO: 354040 - RNA, 19 nt, Artificial Sequence
  Description of Artificial Sequence: Synthetic oligonucleotide
cuguacuuagauuggaugc

SEQ ID NO: 354041 - RNA, 19 nt, Artificial Sequence
  Description of Artificial Sequence: Synthetic oligonucleotide
uaguagaucaaaacuuuug

SEQ ID NO: 354042 - RNA, 19 nt, Artificial Sequence
  Description of Artificial Sequence: Synthetic oligonucleotide
auggugugcauacauuggc

SEQ ID NO: 354043 - RNA, 19 nt, Artificial Sequence
  Description of Artificial Sequence: Synthetic oligonucleotide
agauauuauucugagagug

SEQ ID NO: 354044 - RNA, 19 nt, Artificial Sequence
  Description of Artificial Sequence: Synthetic oligonucleotide
uaaggaauugguuccagga

SEQ ID NO: 354045 - RNA, 19 nt, Artificial Sequence
  Description of Artificial Sequence: Synthetic oligonucleotide
agaucaaaacuuuugccug

SEQ ID NO: 354046 - RNA, 19 nt, Artificial Sequence
  Description of Artificial Sequence: Synthetic oligonucleotide
uauggugugcauacauugg

SEQ ID NO: 354047 - RNA, 19 nt, Artificial Sequence
  Description of Artificial Sequence: Synthetic oligonucleotide
aagcucuuaauuaugggag

SEQ ID NO: 354048 - RNA, 19 nt, Artificial Sequence
  Description of Artificial Sequence: Synthetic oligonucleotide
auuaugggagauauuauuc

SEQ ID NO: 354049 - RNA, 19 nt, Artificial Sequence
  Description of Artificial Sequence: Synthetic oligonucleotide
uauuuugacgaaauauggu

SEQ ID NO: 354050 - RNA, 19 nt, Artificial Sequence
  Description of Artificial Sequence: Synthetic oligonucleotide
aaauauggugugcauacau

SEQ ID NO: 354051 - RNA, 19 nt, Artificial Sequence
  Description of Artificial Sequence: Synthetic oligonucleotide
ucuucuguacuuagauugg

SEQ ID NO: 354052 - RNA, 19 nt, Artificial Sequence
  Description of Artificial Sequence: Synthetic oligonucleotide
ugucucaaggcaaugcacc

SEQ ID NO: 354053 - RNA, 19 nt, Artificial Sequence
  Description of Artificial Sequence: Synthetic oligonucleotide
uuucaguacagcuugcgac

SEQ ID NO: 354054 - RNA, 19 nt, Artificial Sequence
  Description of Artificial Sequence: Synthetic oligonucleotide
auauucgccugucucaagg

SEQ ID NO: 354055 - RNA, 19 nt, Artificial Sequence
  Description of Artificial Sequence: Synthetic oligonucleotide
uauauaaucuucuguacuu

SEQ ID NO: 354056 - RNA, 19 nt, Artificial Sequence
  Description of Artificial Sequence: Synthetic oligonucleotide
uucaauauuaguagaucaa

SEQ ID NO: 354057 - RNA, 19 nt, Artificial Sequence
  Description of Artificial Sequence: Synthetic oligonucleotide
cuaucuacaucuuuaagga

SEQ ID NO: 354058 - RNA, 19 nt, Artificial Sequence
  Description of Artificial Sequence: Synthetic oligonucleotide
uacuaggguaucaugacac

SEQ ID NO: 354059 - RNA, 19 nt, Artificial Sequence
  Description of Artificial Sequence: Synthetic oligonucleotide
uugauguaccaauucaaca

SEQ ID NO: 354060 - RNA, 19 nt, Artificial Sequence
  Description of Artificial Sequence: Synthetic oligonucleotide
agaaauggggucucaauca

SEQ ID NO: 354061 - RNA, 19 nt, Artificial Sequence
  Description of Artificial Sequence: Synthetic oligonucleotide
aguaaaauugguaugcaca

SEQ ID NO: 354062 - RNA, 19 nt, Artificial Sequence
  Description of Artificial Sequence: Synthetic oligonucleotide
gaagcucuuaauuauggga

SEQ ID NO: 354063 - RNA, 19 nt, Artificial Sequence
  Description of Artificial Sequence: Synthetic oligonucleotide
gaccguguaaauuauguca

SEQ ID NO: 354064 - RNA, 19 nt, Artificial Sequence
  Description of Artificial Sequence: Synthetic oligonucleotide
caauucaacaaaacgagca

SEQ ID NO: 354065 - RNA, 19 nt, Artificial Sequence
  Description of Artificial Sequence: Synthetic oligonucleotide
cuuauguacaacaugucga

SEQ ID NO: 354066 - RNA, 19 nt, Artificial Sequence
  Description of Artificial Sequence: Synthetic oligonucleotide
uuaugggagauauuauucu

SEQ ID NO: 354067 - RNA, 19 nt, Artificial Sequence
  Description of Artificial Sequence: Synthetic oligonucleotide
ugaugaugucacauuauga

SEQ ID NO: 354068 - RNA, 19 nt, Artificial Sequence
  Description of Artificial Sequence: Synthetic oligonucleotide
ucauacauugucagugacc

SEQ ID NO: 354069 - RNA, 19 nt, Artificial Sequence
  Description of Artificial Sequence: Synthetic oligonucleotide
uucaguacagcuugcgacc

SEQ ID NO: 354070 - RNA, 19 nt, Artificial Sequence
  Description of Artificial Sequence: Synthetic oligonucleotide
agaaauugccugcagguga

SEQ ID NO: 354071 - RNA, 19 nt, Artificial Sequence
  Description of Artificial Sequence: Synthetic oligonucleotide
aacaacauaaucaucccaa

SEQ ID NO: 354072 - RNA, 19 nt, Artificial Sequence
  Description of Artificial Sequence: Synthetic oligonucleotide
uagacguugcuucuggaug

SEQ ID NO: 354073 - RNA, 19 nt, Artificial Sequence
  Description of Artificial Sequence: Synthetic oligonucleotide
aguauauucgccugucuca

SEQ ID NO: 354074 - RNA, 19 nt, Artificial Sequence
  Description of Artificial Sequence: Synthetic oligonucleotide
agcaagaucaugguccagc

SEQ ID NO: 354075 - RNA, 19 nt, Artificial Sequence
  Description of Artificial Sequence: Synthetic oligonucleotide
cuugcuccaagaaauugcc

SEQ ID NO: 354076 - RNA, 19 nt, Artificial Sequence
  Description of Artificial Sequence: Synthetic oligonucleotide
uaugggagauauuauucug

SEQ ID NO: 354077 - RNA, 19 nt, Artificial Sequence
  Description of Artificial Sequence: Synthetic oligonucleotide
uguugauguaccaauucaa

SEQ ID NO: 354078 - RNA, 19 nt, Artificial Sequence
  Description of Artificial Sequence: Synthetic oligonucleotide
cuugguuaguuuguaaugc

SEQ ID NO: 354079 - RNA, 19 nt, Artificial Sequence
  Description of Artificial Sequence: Synthetic oligonucleotide
uguuuacuucccuuuuccg

SEQ ID NO: 354080 - RNA, 19 nt, Artificial Sequence
  Description of Artificial Sequence: Synthetic oligonucleotide
aacuuuuggguaccaagga

SEQ ID NO: 354081 - RNA, 19 nt, Artificial Sequence
  Description of Artificial Sequence: Synthetic oligonucleotide
ugagagugacucauggagc

SEQ ID NO: 354082 - RNA, 19 nt, Artificial Sequence
  Description of Artificial Sequence: Synthetic oligonucleotide
gaagggugaacuaaaaguc

SEQ ID NO: 354083 - RNA, 19 nt, Artificial Sequence
  Description of Artificial Sequence: Synthetic oligonucleotide
aacaugucgaaaauuuuca

SEQ ID NO: 354084 - RNA, 19 nt, Artificial Sequence
  Description of Artificial Sequence: Synthetic oligonucleotide
uagcauagaacugagggcu

SEQ ID NO: 354085 - RNA, 19 nt, Artificial Sequence
  Description of Artificial Sequence: Synthetic oligonucleotide
uuauguacaacaugucgaa

SEQ ID NO: 354086 - RNA, 19 nt, Artificial Sequence
  Description of Artificial Sequence: Synthetic oligonucleotide
ucaugugugacuuucuaua

SEQ ID NO: 354087 - RNA, 19 nt, Artificial Sequence
  Description of Artificial Sequence: Synthetic oligonucleotide
ucgacuagcuucauuuuca

SEQ ID NO: 354088 - RNA, 19 nt, Artificial Sequence
  Description of Artificial Sequence: Synthetic oligonucleotide
caaaagguagcauagaacu

SEQ ID NO: 354089 - RNA, 19 nt, Artificial Sequence
  Description of Artificial Sequence: Synthetic oligonucleotide
ugggagauauuauucugag

SEQ ID NO: 354090 - RNA, 19 nt, Artificial Sequence
  Description of Artificial Sequence: Synthetic oligonucleotide
ucccauaaaauggacagca

SEQ ID NO: 354091 - RNA, 19 nt, Artificial Sequence
  Description of Artificial Sequence: Synthetic oligonucleotide
ucuggccaaaauaaccacc

SEQ ID NO: 354092 - RNA, 19 nt, Artificial Sequence
  Description of Artificial Sequence: Synthetic oligonucleotide
gauggcauaucucaaguaa

SEQ ID NO: 354093 - RNA, 19 nt, Artificial Sequence
  Description of Artificial Sequence: Synthetic oligonucleotide
uuuccuguauugucuauca

SEQ ID NO: 354094 - RNA, 19 nt, Artificial Sequence
  Description of Artificial Sequence: Synthetic oligonucleotide
ucuaauugcuccguuguca

SEQ ID NO: 354095 - RNA, 19 nt, Artificial Sequence
  Description of Artificial Sequence: Synthetic oligonucleotide
uguacaacaugucgaaaau

SEQ ID NO: 354096 - RNA, 19 nt, Artificial Sequence
  Description of Artificial Sequence: Synthetic oligonucleotide
aacuaaaagucagcuagug

SEQ ID NO: 354097 - RNA, 19 nt, Artificial Sequence
  Description of Artificial Sequence: Synthetic oligonucleotide
uggggucucaaucaugaug

SEQ ID NO: 354098 - RNA, 19 nt, Artificial Sequence
  Description of Artificial Sequence: Synthetic oligonucleotide
uguacuaggguaucaugac

SEQ ID NO: 354099 - RNA, 19 nt, Artificial Sequence
  Description of Artificial Sequence: Synthetic oligonucleotide
cuccguaucgacuagcuuc

SEQ ID NO: 354100 - RNA, 19 nt, Artificial Sequence
  Description of Artificial Sequence: Synthetic oligonucleotide
aaaggcaaccuaucuacau

SEQ ID NO: 354101 - RNA, 19 nt, Artificial Sequence
  Description of Artificial Sequence: Synthetic oligonucleotide
ucaauauuaguagaucaaa

SEQ ID NO: 354102 - RNA, 19 nt, Artificial Sequence
  Description of Artificial Sequence: Synthetic oligonucleotide
aucgacuagcuucauuuuc

SEQ ID NO: 354103 - RNA, 19 nt, Artificial Sequence
  Description of Artificial Sequence: Synthetic oligonucleotide
aacucggucauagcaaaag

SEQ ID NO: 354104 - RNA, 19 nt, Artificial Sequence
  Description of Artificial Sequence: Synthetic oligonucleotide
uuuucaguacagcuugcga

SEQ ID NO: 354105 - RNA, 19 nt, Artificial Sequence
  Description of Artificial Sequence: Synthetic oligonucleotide
ucucacaugacguaaugua

SEQ ID NO: 354106 - RNA, 19 nt, Artificial Sequence
  Description of Artificial Sequence: Synthetic oligonucleotide
gacguaauguauuuaugga

SEQ ID NO: 354107 - RNA, 19 nt, Artificial Sequence
  Description of Artificial Sequence: Synthetic oligonucleotide
caaaauaaccacccucagc

SEQ ID NO: 354108 - RNA, 19 nt, Artificial Sequence
  Description of Artificial Sequence: Synthetic oligonucleotide
gagcacgucaauugaaggc

SEQ ID NO: 354109 - RNA, 19 nt, Artificial Sequence
  Description of Artificial Sequence: Synthetic oligonucleotide
ugcuucguggacaggagcc

SEQ ID NO: 354110 - RNA, 19 nt, Artificial Sequence
  Description of Artificial Sequence: Synthetic oligonucleotide
ucuguugauguaccaauuc

SEQ ID NO: 354111 - RNA, 19 nt, Artificial Sequence
  Description of Artificial Sequence: Synthetic oligonucleotide
uugauuggcuacauacuga

SEQ ID NO: 354112 - RNA, 19 nt, Artificial Sequence
  Description of Artificial Sequence: Synthetic oligonucleotide
cucgcuuuauauaaucuuc

SEQ ID NO: 354113 - RNA, 19 nt, Artificial Sequence
  Description of Artificial Sequence: Synthetic oligonucleotide
cauacuuaaggguacauua

SEQ ID NO: 354114 - RNA, 19 nt, Artificial Sequence
  Description of Artificial Sequence: Synthetic oligonucleotide
gauaugaguauauucgccu

SEQ ID NO: 354115 - RNA, 19 nt, Artificial Sequence
  Description of Artificial Sequence: Synthetic oligonucleotide
auaugaguauauucgccug

SEQ ID NO: 354116 - RNA, 19 nt, Artificial Sequence
  Description of Artificial Sequence: Synthetic oligonucleotide
guaauuucgauuccugcca

SEQ ID NO: 354117 - RNA, 19 nt, Artificial Sequence
  Description of Artificial Sequence: Synthetic oligonucleotide
gucaauugaaggcacucgc

SEQ ID NO: 354118 - RNA, 19 nt, Artificial Sequence
  Description of Artificial Sequence: Synthetic oligonucleotide
ucgcuuuauauaaucuucu

SEQ ID NO: 354119 - RNA, 19 nt, Artificial Sequence
  Description of Artificial Sequence: Synthetic oligonucleotide
uccugauaugaguauauuc

SEQ ID NO: 354120 - RNA, 19 nt, Artificial Sequence
  Description of Artificial Sequence: Synthetic oligonucleotide
uacauugucagugaccaaa

SEQ ID NO: 354121 - RNA, 19 nt, Artificial Sequence
  Description of Artificial Sequence: Synthetic oligonucleotide
aaacccuccaaacaacaua

SEQ ID NO: 354122 - RNA, 19 nt, Artificial Sequence
  Description of Artificial Sequence: Synthetic oligonucleotide
ugguuaguuuguaaugcca

SEQ ID NO: 354123 - RNA, 19 nt, Artificial Sequence
  Description of Artificial Sequence: Synthetic oligonucleotide
ucuacuuuuccuguauugu

SEQ ID NO: 354124 - RNA, 19 nt, Artificial Sequence
  Description of Artificial Sequence: Synthetic oligonucleotide
ugguugacuuugcuaaaag

SEQ ID NO: 354125 - RNA, 19 nt, Artificial Sequence
  Description of Artificial Sequence: Synthetic oligonucleotide
aauaaccacccucagccuu

SEQ ID NO: 354126 - RNA, 19 nt, Artificial Sequence
  Description of Artificial Sequence: Synthetic oligonucleotide
ucaauugaaggcacucgcu

SEQ ID NO: 354127 - RNA, 19 nt, Artificial Sequence
  Description of Artificial Sequence: Synthetic oligonucleotide
ugauuggcuacauacugaa

SEQ ID NO: 354128 - RNA, 19 nt, Artificial Sequence
  Description of Artificial Sequence: Synthetic oligonucleotide
ucucccuugguuuaucagu

SEQ ID NO: 354129 - RNA, 19 nt, Artificial Sequence
  Description of Artificial Sequence: Synthetic oligonucleotide
agaaacaucaugguaucca

SEQ ID NO: 354130 - RNA, 19 nt, Artificial Sequence
  Description of Artificial Sequence: Synthetic oligonucleotide
cuguuuacuucccuuuucc

SEQ ID NO: 354131 - RNA, 19 nt, Artificial Sequence
  Description of Artificial Sequence: Synthetic oligonucleotide
uccuguauugucuaucaau

SEQ ID NO: 354132 - RNA, 19 nt, Artificial Sequence
  Description of Artificial Sequence: Synthetic oligonucleotide
uuauguugcuguuuacuuc

SEQ ID NO: 354133 - RNA, 19 nt, Artificial Sequence
  Description of Artificial Sequence: Synthetic oligonucleotide
aggacaaggaacuuuugau

SEQ ID NO: 354134 - RNA, 19 nt, Artificial Sequence
  Description of Artificial Sequence: Synthetic oligonucleotide
uaacaugcagcagaggaac

SEQ ID NO: 354135 - RNA, 19 nt, Artificial Sequence
  Description of Artificial Sequence: Synthetic oligonucleotide
cauuagacguugcuucugg

SEQ ID NO: 354136 - RNA, 19 nt, Artificial Sequence
  Description of Artificial Sequence: Synthetic oligonucleotide
uacagagcacgucaauuga

SEQ ID NO: 354137 - RNA, 19 nt, Artificial Sequence
  Description of Artificial Sequence: Synthetic oligonucleotide
acuaaaagucagcuaguga

SEQ ID NO: 354138 - RNA, 19 nt, Artificial Sequence
  Description of Artificial Sequence: Synthetic oligonucleotide
cauacauugucagugacca

SEQ ID NO: 354139 - RNA, 19 nt, Artificial Sequence
  Description of Artificial Sequence: Synthetic oligonucleotide
aauugcuccguugucauuu

SEQ ID NO: 354140 - RNA, 19 nt, Artificial Sequence
  Description of Artificial Sequence: Synthetic oligonucleotide
caaguguuucucuccaccc

SEQ ID NO: 354141 - RNA, 19 nt, Artificial Sequence
  Description of Artificial Sequence: Synthetic oligonucleotide
gaguauauucgccugucuc

SEQ ID NO: 354142 - RNA, 19 nt, Artificial Sequence
  Description of Artificial Sequence: Synthetic oligonucleotide
ugugcaacgcuccuucuuc

SEQ ID NO: 354143 - RNA, 19 nt, Artificial Sequence
  Description of Artificial Sequence: Synthetic oligonucleotide
gcaucgaggaaauauacac

SEQ ID NO: 354144 - RNA, 19 nt, Artificial Sequence
  Description of Artificial Sequence: Synthetic oligonucleotide
uccguaucgacuagcuuca

SEQ ID NO: 354145 - RNA, 19 nt, Artificial Sequence
  Description of Artificial Sequence: Synthetic oligonucleotide
uccguaauuucgauuccug

SEQ ID NO: 354146 - RNA, 19 nt, Artificial Sequence
  Description of Artificial Sequence: Synthetic oligonucleotide
uggugugcauacauuggcc

SEQ ID NO: 354147 - RNA, 19 nt, Artificial Sequence
  Description of Artificial Sequence: Synthetic oligonucleotide
agaugcacuuccuagggau

SEQ ID NO: 354148 - RNA, 19 nt, Artificial Sequence
  Description of Artificial Sequence: Synthetic oligonucleotide
ucccacaaguuucaagugu

SEQ ID NO: 354149 - RNA, 19 nt, Artificial Sequence
  Description of Artificial Sequence: Synthetic oligonucleotide
auuuuguacacuggcaaca

SEQ ID NO: 354150 - RNA, 19 nt, Artificial Sequence
  Description of Artificial Sequence: Synthetic oligonucleotide
aaauaaccacccucagccu

SEQ ID NO: 354151 - RNA, 19 nt, Artificial Sequence
  Description of Artificial Sequence: Synthetic oligonucleotide
guauugucuaucaauguca

SEQ ID NO: 354152 - RNA, 19 nt, Artificial Sequence
  Description of Artificial Sequence: Synthetic oligonucleotide
uuaguagaucaaaacuuuu

SEQ ID NO: 354153 - RNA, 19 nt, Artificial Sequence
  Description of Artificial Sequence: Synthetic oligonucleotide
ugucuaucaaugucauaca

SEQ ID NO: 354154 - RNA, 19 nt, Artificial Sequence
  Description of Artificial Sequence: Synthetic oligonucleotide
uucauuagacguugcuucu

SEQ ID NO: 354155 - RNA, 19 nt, Artificial Sequence
  Description of Artificial Sequence: Synthetic oligonucleotide
aaacguguaaggagaccac

SEQ ID NO: 354156 - RNA, 19 nt, Artificial Sequence
  Description of Artificial Sequence: Synthetic oligonucleotide
cuuucaauauuaguagauc

SEQ ID NO: 354157 - RNA, 19 nt, Artificial Sequence
  Description of Artificial Sequence: Synthetic oligonucleotide
gucucaaggcaaugcaccg

SEQ ID NO: 354158 - RNA, 19 nt, Artificial Sequence
  Description of Artificial Sequence: Synthetic oligonucleotide
guguauggaauucauuaca

SEQ ID NO: 354159 - RNA, 19 nt, Artificial Sequence
  Description of Artificial Sequence: Synthetic oligonucleotide
uaagaaauggggucucaau

SEQ ID NO: 354160 - RNA, 19 nt, Artificial Sequence
  Description of Artificial Sequence: Synthetic oligonucleotide
aaacagcaucuauugcuga

SEQ ID NO: 354161 - RNA, 19 nt, Artificial Sequence
  Description of Artificial Sequence: Synthetic oligonucleotide
auucauuacagagcacguc

SEQ ID NO: 354162 - RNA, 19 nt, Artificial Sequence
  Description of Artificial Sequence: Synthetic oligonucleotide
aaugcaucgaggaaauaua

SEQ ID NO: 354163 - RNA, 19 nt, Artificial Sequence
  Description of Artificial Sequence: Synthetic oligonucleotide
accguguaaauuaugucag

SEQ ID NO: 354164 - RNA, 19 nt, Artificial Sequence
  Description of Artificial Sequence: Synthetic oligonucleotide
acaagaagccaaaacccuc

SEQ ID NO: 354165 - RNA, 19 nt, Artificial Sequence
  Description of Artificial Sequence: Synthetic oligonucleotide
uuuuggugugguacuagaa

SEQ ID NO: 354166 - RNA, 19 nt, Artificial Sequence
  Description of Artificial Sequence: Synthetic oligonucleotide
agcacaguaaacagcaucu

SEQ ID NO: 354167 - RNA, 19 nt, Artificial Sequence
  Description of Artificial Sequence: Synthetic oligonucleotide
caaaacgagcacaguaaac

SEQ ID NO: 354168 - RNA, 19 nt, Artificial Sequence
  Description of Artificial Sequence: Synthetic oligonucleotide
aagggugaacuaaaaguca

SEQ ID NO: 354169 - RNA, 19 nt, Artificial Sequence
  Description of Artificial Sequence: Synthetic oligonucleotide
uuucagguaucauguguga

SEQ ID NO: 354170 - RNA, 19 nt, Artificial Sequence
  Description of Artificial Sequence: Synthetic oligonucleotide
cuguacuaggguaucauga

SEQ ID NO: 354171 - RNA, 19 nt, Artificial Sequence
  Description of Artificial Sequence: Synthetic oligonucleotide
ugacuuuggaaugucuugu

SEQ ID NO: 354172 - RNA, 19 nt, Artificial Sequence
  Description of Artificial Sequence: Synthetic oligonucleotide
cagagcacgucaauugaag

SEQ ID NO: 354173 - RNA, 19 nt, Artificial Sequence
  Description of Artificial Sequence: Synthetic oligonucleotide
ccaguugcccgcaauaugg

SEQ ID NO: 354174 - RNA, 19 nt, Artificial Sequence
  Description of Artificial Sequence: Synthetic oligonucleotide
aauccaguugcccgcaaua

SEQ ID NO: 354175 - RNA, 19 nt, Artificial Sequence
  Description of Artificial Sequence: Synthetic oligonucleotide
ugacgaaauauggugugca

SEQ ID NO: 354176 - RNA, 19 nt, Artificial Sequence
  Description of Artificial Sequence: Synthetic oligonucleotide
acaaaacgagcacaguaaa

SEQ ID NO: 354177 - RNA, 19 nt, Artificial Sequence
  Description of Artificial Sequence: Synthetic oligonucleotide
acuguacuaggguaucaug

SEQ ID NO: 354178 - RNA, 19 nt, Artificial Sequence
  Description of Artificial Sequence: Synthetic oligonucleotide
ucgaggaaauauacacagc

SEQ ID NO: 354179 - RNA, 19 nt, Artificial Sequence
  Description of Artificial Sequence: Synthetic oligonucleotide
cuugcgaccguguaaauua

SEQ ID NO: 354180 - RNA, 19 nt, Artificial Sequence
  Description of Artificial Sequence: Synthetic oligonucleotide
uuagacguugcuucuggau

SEQ ID NO: 354181 - RNA, 19 nt, Artificial Sequence
  Description of Artificial Sequence: Synthetic oligonucleotide
gauauuauucugagaguga

SEQ ID NO: 354182 - RNA, 19 nt, Artificial Sequence
  Description of Artificial Sequence: Synthetic oligonucleotide
aguuuguaaugccacuuau

SEQ ID NO: 354183 - RNA, 19 nt, Artificial Sequence
  Description of Artificial Sequence: Synthetic oligonucleotide
aaauuuugugauggucuca

SEQ ID NO: 354184 - RNA, 19 nt, Artificial Sequence
  Description of Artificial Sequence: Synthetic oligonucleotide
uugguaugcacagggaccu

SEQ ID NO: 354185 - RNA, 19 nt, Artificial Sequence
  Description of Artificial Sequence: Synthetic oligonucleotide
uauucgccugucucaaggc

SEQ ID NO: 354186 - RNA, 19 nt, Artificial Sequence
  Description of Artificial Sequence: Synthetic oligonucleotide
auuaguagaucaaaacuuu

SEQ ID NO: 354187 - RNA, 19 nt, Artificial Sequence
  Description of Artificial Sequence: Synthetic oligonucleotide
agcacgucaauugaaggca

SEQ ID NO: 354188 - RNA, 19 nt, Artificial Sequence
  Description of Artificial Sequence: Synthetic oligonucleotide
ugaucagcuuuauuuccac

SEQ ID NO: 354189 - RNA, 19 nt, Artificial Sequence
  Description of Artificial Sequence: Synthetic oligonucleotide
guaaggagaccacugcuuc

SEQ ID NO: 354190 - RNA, 19 nt, Artificial Sequence
  Description of Artificial Sequence: Synthetic oligonucleotide
uuaauugauuggcuacaua

SEQ ID NO: 354191 - RNA, 19 nt, Artificial Sequence
  Description of Artificial Sequence: Synthetic oligonucleotide
gaccagcaagaucaaucgg

SEQ ID NO: 354192 - RNA, 19 nt, Artificial Sequence
  Description of Artificial Sequence: Synthetic oligonucleotide
aaggcacucgcuuuauaua

SEQ ID NO: 354193 - RNA, 19 nt, Artificial Sequence
  Description of Artificial Sequence: Synthetic oligonucleotide
aagaagccaaaacccucca

SEQ ID NO: 354194 - RNA, 19 nt, Artificial Sequence
  Description of Artificial Sequence: Synthetic oligonucleotide
ugcaccgaugccuugguua

SEQ ID NO: 354195 - RNA, 19 nt, Artificial Sequence
  Description of Artificial Sequence: Synthetic oligonucleotide
agccaaaacccuccaaaca

SEQ ID NO: 354196 - RNA, 19 nt, Artificial Sequence
  Description of Artificial Sequence: Synthetic oligonucleotide
acuuuuggguaccaaggaa

SEQ ID NO: 354197 - RNA, 19 nt, Artificial Sequence
  Description of Artificial Sequence: Synthetic oligonucleotide
ugaguauauucgccugucu

SEQ ID NO: 354198 - RNA, 19 nt, Artificial Sequence
  Description of Artificial Sequence: Synthetic oligonucleotide
uuauucugagagugacuca

SEQ ID NO: 354199 - RNA, 19 nt, Artificial Sequence
  Description of Artificial Sequence: Synthetic oligonucleotide
uaguuuguaaugccacuua

SEQ ID NO: 354200 - RNA, 19 nt, Artificial Sequence
  Description of Artificial Sequence: Synthetic oligonucleotide
ugccuuuaauugauuggcu

SEQ ID NO: 354201 - RNA, 19 nt, Artificial Sequence
  Description of Artificial Sequence: Synthetic oligonucleotide
aaugcaccgaugccuuggu

SEQ ID NO: 354202 - RNA, 19 nt, Artificial Sequence
  Description of Artificial Sequence: Synthetic oligonucleotide
aaccuccguaucgacuagc

SEQ ID NO: 354203 - RNA, 19 nt, Artificial Sequence
  Description of Artificial Sequence: Synthetic oligonucleotide
acucgcuuuauauaaucuu

SEQ ID NO: 354204 - RNA, 19 nt, Artificial Sequence
  Description of Artificial Sequence: Synthetic oligonucleotide
aacguguaaggagaccacu

SEQ ID NO: 354205 - RNA, 19 nt, Artificial Sequence
  Description of Artificial Sequence: Synthetic oligonucleotide
gguguauggaauucauuac

SEQ ID NO: 354206 - RNA, 19 nt, Artificial Sequence
  Description of Artificial Sequence: Synthetic oligonucleotide
uaauuucgauuccugccau

SEQ ID NO: 354207 - RNA, 19 nt, Artificial Sequence
  Description of Artificial Sequence: Synthetic oligonucleotide
ggagacguucagcuuaggg

SEQ ID NO: 354208 - RNA, 19 nt, Artificial Sequence
  Description of Artificial Sequence: Synthetic oligonucleotide
uugcccgcaauaugguaag

SEQ ID NO: 354209 - RNA, 19 nt, Artificial Sequence
  Description of Artificial Sequence: Synthetic oligonucleotide
uaucuacaucuuuaaggaa

SEQ ID NO: 354210 - RNA, 19 nt, Artificial Sequence
  Description of Artificial Sequence: Synthetic oligonucleotide
ugggagacguucagcuuag

SEQ ID NO: 354211 - RNA, 19 nt, Artificial Sequence
  Description of Artificial Sequence: Synthetic oligonucleotide
ugcuccguugucauuuccu

SEQ ID NO: 354212 - RNA, 19 nt, Artificial Sequence
  Description of Artificial Sequence: Synthetic oligonucleotide
cuguagaaauuuugugaug

SEQ ID NO: 354213 - RNA, 19 nt, Artificial Sequence
  Description of Artificial Sequence: Synthetic oligonucleotide
ugucagugaccaaaaggua

SEQ ID NO: 354214 - RNA, 19 nt, Artificial Sequence
  Description of Artificial Sequence: Synthetic oligonucleotide
uguuugcaucuucugacuu

SEQ ID NO: 354215 - RNA, 19 nt, Artificial Sequence
  Description of Artificial Sequence: Synthetic oligonucleotide
uauauucgccugucucaag

SEQ ID NO: 354216 - RNA, 19 nt, Artificial Sequence
  Description of Artificial Sequence: Synthetic oligonucleotide
guaucgacuagcuucauuu

SEQ ID NO: 354217 - RNA, 19 nt, Artificial Sequence
  Description of Artificial Sequence: Synthetic oligonucleotide
ccgauuuagaugcacuucc

SEQ ID NO: 354218 - RNA, 19 nt, Artificial Sequence
  Description of Artificial Sequence: Synthetic oligonucleotide
auugaaggcacucgcuuua

SEQ ID NO: 354219 - RNA, 19 nt, Artificial Sequence
  Description of Artificial Sequence: Synthetic oligonucleotide
agauucccauaaaauggac

SEQ ID NO: 354220 - RNA, 19 nt, Artificial Sequence
  Description of Artificial Sequence: Synthetic oligonucleotide
ugaagcauauaaagaucuu

SEQ ID NO: 354221 - RNA, 19 nt, Artificial Sequence
  Description of Artificial Sequence: Synthetic oligonucleotide
uuuccucuccuuucugaga

SEQ ID NO: 354222 - RNA, 19 nt, Artificial Sequence
  Description of Artificial Sequence: Synthetic oligonucleotide
gguuuaucagucuccucag

SEQ ID NO: 354223 - RNA, 19 nt, Artificial Sequence
  Description of Artificial Sequence: Synthetic oligonucleotide
acuggucauagagcuuucc

SEQ ID NO: 354224 - RNA, 19 nt, Artificial Sequence
  Description of Artificial Sequence: Synthetic oligonucleotide
acgucaauugaaggcacuc

SEQ ID NO: 354225 - RNA, 19 nt, Artificial Sequence
  Description of Artificial Sequence: Synthetic oligonucleotide
cugucucaaggcaaugcac

SEQ ID NO: 354226 - RNA, 19 nt, Artificial Sequence
  Description of Artificial Sequence: Synthetic oligonucleotide
uugcuaaaagccaguuguc

SEQ ID NO: 354227 - RNA, 19 nt, Artificial Sequence
  Description of Artificial Sequence: Synthetic oligonucleotide
guuccaggaggcaauuucc

SEQ ID NO: 354228 - RNA, 19 nt, Artificial Sequence
  Description of Artificial Sequence: Synthetic oligonucleotide
auuacagagcacgucaauu

SEQ ID NO: 354229 - RNA, 19 nt, Artificial Sequence
  Description of Artificial Sequence: Synthetic oligonucleotide
ugucgaaaauuuucauaau

SEQ ID NO: 354230 - RNA, 19 nt, Artificial Sequence
  Description of Artificial Sequence: Synthetic oligonucleotide
cuaggguaucaugacacug

SEQ ID NO: 354231 - RNA, 19 nt, Artificial Sequence
  Description of Artificial Sequence: Synthetic oligonucleotide
ccaauuucagucucugaag

SEQ ID NO: 354232 - RNA, 19 nt, Artificial Sequence
  Description of Artificial Sequence: Synthetic oligonucleotide
aacuguacuaggguaucau

SEQ ID NO: 354233 - RNA, 19 nt, Artificial Sequence
  Description of Artificial Sequence: Synthetic oligonucleotide
acaugucgaaaauuuucau

SEQ ID NO: 354234 - RNA, 19 nt, Artificial Sequence
  Description of Artificial Sequence: Synthetic oligonucleotide
acuuagauuggaugcuaaa

SEQ ID NO: 354235 - RNA, 19 nt, Artificial Sequence
  Description of Artificial Sequence: Synthetic oligonucleotide
cauuuucagguaucaugug

SEQ ID NO: 354236 - RNA, 19 nt, Artificial Sequence
  Description of Artificial Sequence: Synthetic oligonucleotide
gacaggagccaucaccauc

SEQ ID NO: 354237 - RNA, 19 nt, Artificial Sequence
  Description of Artificial Sequence: Synthetic oligonucleotide
uuugguugacuuugcuaaa

SEQ ID NO: 354238 - RNA, 19 nt, Artificial Sequence
  Description of Artificial Sequence: Synthetic oligonucleotide
caugucgaaaauuuucaua

SEQ ID NO: 354239 - RNA, 19 nt, Artificial Sequence
  Description of Artificial Sequence: Synthetic oligonucleotide
cuuagauuggaugcuaaaa

SEQ ID NO: 354240 - RNA, 19 nt, Artificial Sequence
  Description of Artificial Sequence: Synthetic oligonucleotide
uucuguugauguaccaauu

SEQ ID NO: 354241 - RNA, 19 nt, Artificial Sequence
  Description of Artificial Sequence: Synthetic oligonucleotide
uggcuacauacugaagaag

SEQ ID NO: 354242 - RNA, 19 nt, Artificial Sequence
  Description of Artificial Sequence: Synthetic oligonucleotide
aggguaucaugacacuggu

SEQ ID NO: 354243 - RNA, 19 nt, Artificial Sequence
  Description of Artificial Sequence: Synthetic oligonucleotide
acuaggguaucaugacacu

SEQ ID NO: 354244 - RNA, 19 nt, Artificial Sequence
  Description of Artificial Sequence: Synthetic oligonucleotide
ccaaaagguagcauagaac

SEQ ID NO: 354245 - RNA, 19 nt, Artificial Sequence
  Description of Artificial Sequence: Synthetic oligonucleotide
caaugcaccgaugccuugg

SEQ ID NO: 354246 - RNA, 19 nt, Artificial Sequence
  Description of Artificial Sequence: Synthetic oligonucleotide
aauugccugcaggugaaaa

SEQ ID NO: 354247 - RNA, 19 nt, Artificial Sequence
  Description of Artificial Sequence: Synthetic oligonucleotide
uucccauaaaauggacagc

SEQ ID NO: 354248 - RNA, 19 nt, Artificial Sequence
  Description of Artificial Sequence: Synthetic oligonucleotide
auucgccugucucaaggca

SEQ ID NO: 354249 - RNA, 19 nt, Artificial Sequence
  Description of Artificial Sequence: Synthetic oligonucleotide
uccgauuuagaugcacuuc

SEQ ID NO: 354250 - RNA, 19 nt, Artificial Sequence
  Description of Artificial Sequence: Synthetic oligonucleotide
aauuucgauuccugccauu

SEQ ID NO: 354251 - RNA, 19 nt, Artificial Sequence
  Description of Artificial Sequence: Synthetic oligonucleotide
ccaauucaacaaaacgagc

SEQ ID NO: 354252 - RNA, 19 nt, Artificial Sequence
  Description of Artificial Sequence: Synthetic oligonucleotide
augggagauauuauucuga

SEQ ID NO: 354253 - RNA, 19 nt, Artificial Sequence
  Description of Artificial Sequence: Synthetic oligonucleotide
guacuaggguaucaugaca

SEQ ID NO: 354254 - RNA, 19 nt, Artificial Sequence
  Description of Artificial Sequence: Synthetic oligonucleotide
ccaccaaacuguacuaggg

SEQ ID NO: 354255 - RNA, 19 nt, Artificial Sequence
  Description of Artificial Sequence: Synthetic oligonucleotide
gguuaguuuguaaugccac

SEQ ID NO: 354256 - RNA, 19 nt, Artificial Sequence
  Description of Artificial Sequence: Synthetic oligonucleotide
gagauauuauucugagagu

SEQ ID NO: 354257 - RNA, 19 nt, Artificial Sequence
  Description of Artificial Sequence: Synthetic oligonucleotide
ccauagccaaugcauauag

SEQ ID NO: 354258 - RNA, 19 nt, Artificial Sequence
  Description of Artificial Sequence: Synthetic oligonucleotide
cuuaaagcagauucccaua

SEQ ID NO: 354259 - RNA, 19 nt, Artificial Sequence
  Description of Artificial Sequence: Synthetic oligonucleotide
cacauuaugagaauuccuu

SEQ ID NO: 354260 - RNA, 19 nt, Artificial Sequence
  Description of Artificial Sequence: Synthetic oligonucleotide
auccgauuuagaugcacuu

SEQ ID NO: 354261 - RNA, 19 nt, Artificial Sequence
  Description of Artificial Sequence: Synthetic oligonucleotide
auuucgauuccugccauuu

SEQ ID NO: 354262 - RNA, 19 nt, Artificial Sequence
  Description of Artificial Sequence: Synthetic oligonucleotide
gguaucaugugugacuuuc

SEQ ID NO: 354263 - RNA, 19 nt, Artificial Sequence
  Description of Artificial Sequence: Synthetic oligonucleotide
ugcgaccguguaaauuaug

SEQ ID NO: 354264 - RNA, 19 nt, Artificial Sequence
  Description of Artificial Sequence: Synthetic oligonucleotide
uggguaccaaggaaguauu

SEQ ID NO: 354265 - RNA, 19 nt, Artificial Sequence
  Description of Artificial Sequence: Synthetic oligonucleotide
ggcuacauacugaagaaga

SEQ ID NO: 354266 - RNA, 19 nt, Artificial Sequence
  Description of Artificial Sequence: Synthetic oligonucleotide
uugguugacuuugcuaaaa

SEQ ID NO: 354267 - RNA, 19 nt, Artificial Sequence
  Description of Artificial Sequence: Synthetic oligonucleotide
aggcaaugcaccgaugccu

SEQ ID NO: 354268 - RNA, 19 nt, Artificial Sequence
  Description of Artificial Sequence: Synthetic oligonucleotide
gucauagcaaaagaagugu

SEQ ID NO: 354269 - RNA, 19 nt, Artificial Sequence
  Description of Artificial Sequence: Synthetic oligonucleotide
ucauccgauuuagaugcac

SEQ ID NO: 354270 - RNA, 19 nt, Artificial Sequence
  Description of Artificial Sequence: Synthetic oligonucleotide
gccaaaacccuccaaacaa

SEQ ID NO: 354271 - RNA, 19 nt, Artificial Sequence
  Description of Artificial Sequence: Synthetic oligonucleotide
ggaauugguuccaggaggc

SEQ ID NO: 354272 - RNA, 19 nt, Artificial Sequence
  Description of Artificial Sequence: Synthetic oligonucleotide
ugucucuaacaugcagcag

SEQ ID NO: 354273 - RNA, 19 nt, Artificial Sequence
  Description of Artificial Sequence: Synthetic oligonucleotide
ucucaaggcaaugcaccga

SEQ ID NO: 354274 - RNA, 19 nt, Artificial Sequence
  Description of Artificial Sequence: Synthetic oligonucleotide
accuugcuccaagaaauug

SEQ ID NO: 354275 - RNA, 19 nt, Artificial Sequence
  Description of Artificial Sequence: Synthetic oligonucleotide
gcugauaucaucccagacu

SEQ ID NO: 354276 - RNA, 19 nt, Artificial Sequence
  Description of Artificial Sequence: Synthetic oligonucleotide
cugauaucaucccagacuu

SEQ ID NO: 354277 - RNA, 19 nt, Artificial Sequence
  Description of Artificial Sequence: Synthetic oligonucleotide
uaucgacuagcuucauuuu

SEQ ID NO: 354278 - RNA, 19 nt, Artificial Sequence
  Description of Artificial Sequence: Synthetic oligonucleotide
ggccaaaauaaccacccuc

SEQ ID NO: 354279 - RNA, 19 nt, Artificial Sequence
  Description of Artificial Sequence: Synthetic oligonucleotide
aaggaauccuggauaguuu

SEQ ID NO: 354280 - RNA, 19 nt, Artificial Sequence
  Description of Artificial Sequence: Synthetic oligonucleotide
cagacuuuggaaacgugua

SEQ ID NO: 354281 - RNA, 19 nt, Artificial Sequence
  Description of Artificial Sequence: Synthetic oligonucleotide
guagcccauagccaaugca

SEQ ID NO: 354282 - RNA, 19 nt, Artificial Sequence
  Description of Artificial Sequence: Synthetic oligonucleotide
uacagcuugcgaccgugua

SEQ ID NO: 354283 - RNA, 19 nt, Artificial Sequence
  Description of Artificial Sequence: Synthetic oligonucleotide
gaaauugccugcaggugaa

SEQ ID NO: 354284 - RNA, 19 nt, Artificial Sequence
  Description of Artificial Sequence: Synthetic oligonucleotide
cuuaggggucuguccacac

SEQ ID NO: 354285 - RNA, 19 nt, Artificial Sequence
  Description of Artificial Sequence: Synthetic oligonucleotide
gaaccuccguaucgacuag

SEQ ID NO: 354286 - RNA, 19 nt, Artificial Sequence
  Description of Artificial Sequence: Synthetic oligonucleotide
gcccauuuuguacacuggc

SEQ ID NO: 354287 - RNA, 19 nt, Artificial Sequence
  Description of Artificial Sequence: Synthetic oligonucleotide
caggaggcaauuuccucuc

SEQ ID NO: 354288 - RNA, 19 nt, Artificial Sequence
  Description of Artificial Sequence: Synthetic oligonucleotide
uuucgauuccugccauuuu

SEQ ID NO: 354289 - RNA, 19 nt, Artificial Sequence
  Description of Artificial Sequence: Synthetic oligonucleotide
acguguaaggagaccacug

SEQ ID NO: 354290 - RNA, 19 nt, Artificial Sequence
  Description of Artificial Sequence: Synthetic oligonucleotide
cugcuucguggacaggagc

SEQ ID NO: 354291 - RNA, 19 nt, Artificial Sequence
  Description of Artificial Sequence: Synthetic oligonucleotide
gugaacuaaaagucagcua

SEQ ID NO: 354292 - RNA, 19 nt, Artificial Sequence
  Description of Artificial Sequence: Synthetic oligonucleotide
guugcccgcaauaugguaa

SEQ ID NO: 354293 - RNA, 19 nt, Artificial Sequence
  Description of Artificial Sequence: Synthetic oligonucleotide
gcuguagaaauuuugugau

SEQ ID NO: 354294 - RNA, 19 nt, Artificial Sequence
  Description of Artificial Sequence: Synthetic oligonucleotide
uucagcuuaggggucuguc

SEQ ID NO: 354295 - RNA, 19 nt, Artificial Sequence
  Description of Artificial Sequence: Synthetic oligonucleotide
acgaaauauggugugcaua

SEQ ID NO: 354296 - RNA, 19 nt, Artificial Sequence
  Description of Artificial Sequence: Synthetic oligonucleotide
ccguaauuucgauuccugc

SEQ ID NO: 354297 - RNA, 19 nt, Artificial Sequence
  Description of Artificial Sequence: Synthetic oligonucleotide
guaugcacagggaccuugc

SEQ ID NO: 354298 - RNA, 19 nt, Artificial Sequence
  Description of Artificial Sequence: Synthetic oligonucleotide
guauauucgccugucucaa

SEQ ID NO: 354299 - RNA, 19 nt, Artificial Sequence
  Description of Artificial Sequence: Synthetic oligonucleotide
ccagaagcucuuaauuaug

SEQ ID NO: 354300 - RNA, 19 nt, Artificial Sequence
  Description of Artificial Sequence: Synthetic oligonucleotide
caaucaauauauuccugau

SEQ ID NO: 354301 - RNA, 19 nt, Artificial Sequence
  Description of Artificial Sequence: Synthetic oligonucleotide
auuggccuagacaggaaaa

SEQ ID NO: 354302 - RNA, 19 nt, Artificial Sequence
  Description of Artificial Sequence: Synthetic oligonucleotide
gcuacauacugaagaagac

SEQ ID NO: 354303 - RNA, 19 nt, Artificial Sequence
  Description of Artificial Sequence: Synthetic oligonucleotide
auugucuaucaaugucaua

SEQ ID NO: 354304 - RNA, 19 nt, Artificial Sequence
  Description of Artificial Sequence: Synthetic oligonucleotide
uugcgaccguguaaauuau

SEQ ID NO: 354305 - RNA, 19 nt, Artificial Sequence
  Description of Artificial Sequence: Synthetic oligonucleotide
acuuugcuaaaagccaguu

SEQ ID NO: 354306 - RNA, 19 nt, Artificial Sequence
  Description of Artificial Sequence: Synthetic oligonucleotide
cauuggccuagacaggaaa

SEQ ID NO: 354307 - RNA, 19 nt, Artificial Sequence
  Description of Artificial Sequence: Synthetic oligonucleotide
gaugccuugguuaguuugu

SEQ ID NO: 354308 - RNA, 19 nt, Artificial Sequence
  Description of Artificial Sequence: Synthetic oligonucleotide
gucuaucaaugucauacau

SEQ ID NO: 354309 - RNA, 19 nt, Artificial Sequence
  Description of Artificial Sequence: Synthetic oligonucleotide
agguagcauagaacugagg

SEQ ID NO: 354310 - RNA, 19 nt, Artificial Sequence
  Description of Artificial Sequence: Synthetic oligonucleotide
guguaaggagaccacugcu

SEQ ID NO: 354311 - RNA, 19 nt, Artificial Sequence
  Description of Artificial Sequence: Synthetic oligonucleotide
gaacuaaaagucagcuagu

SEQ ID NO: 354312 - RNA, 19 nt, Artificial Sequence
  Description of Artificial Sequence: Synthetic oligonucleotide
cuaauugcuccguugucau

SEQ ID NO: 354313 - RNA, 19 nt, Artificial Sequence
  Description of Artificial Sequence: Synthetic oligonucleotide
gugacucauggagcuuugg

SEQ ID NO: 354314 - RNA, 19 nt, Artificial Sequence
  Description of Artificial Sequence: Synthetic oligonucleotide
acccuugguugcuuguaau

SEQ ID NO: 354315 - RNA, 19 nt, Artificial Sequence
  Description of Artificial Sequence: Synthetic oligonucleotide
gccucuaauugcuccguug

SEQ ID NO: 354316 - RNA, 19 nt, Artificial Sequence
  Description of Artificial Sequence: Synthetic oligonucleotide
cguaauguauuuauggacu

SEQ ID NO: 354317 - RNA, 19 nt, Artificial Sequence
  Description of Artificial Sequence: Synthetic oligonucleotide
ggaauccuggauaguuucc

SEQ ID NO: 354318 - RNA, 19 nt, Artificial Sequence
  Description of Artificial Sequence: Synthetic oligonucleotide
cauccgauuuagaugcacu

SEQ ID NO: 354319 - RNA, 19 nt, Artificial Sequence
  Description of Artificial Sequence: Synthetic oligonucleotide
ggcugauaucaucccagac

SEQ ID NO: 354320 - RNA, 19 nt, Artificial Sequence
  Description of Artificial Sequence: Synthetic oligonucleotide
caugugugacuuucuauau

SEQ ID NO: 354321 - RNA, 19 nt, Artificial Sequence
  Description of Artificial Sequence: Synthetic oligonucleotide
ccuugguugcuuguaauuc

SEQ ID NO: 354322 - RNA, 19 nt, Artificial Sequence
  Description of Artificial Sequence: Synthetic oligonucleotide
aggaaccuccguaucgacu

SEQ ID NO: 354323 - RNA, 19 nt, Artificial Sequence
  Description of Artificial Sequence: Synthetic oligonucleotide
ggaaauauacacagcugua

SEQ ID NO: 354324 - RNA, 19 nt, Artificial Sequence
  Description of Artificial Sequence: Synthetic oligonucleotide
ggugugcauacauuggccu

SEQ ID NO: 354325 - RNA, 19 nt, Artificial Sequence
  Description of Artificial Sequence: Synthetic oligonucleotide
auacauugucagugaccaa

SEQ ID NO: 354326 - RNA, 19 nt, Artificial Sequence
  Description of Artificial Sequence: Synthetic oligonucleotide
uaauugcuccguugucauu

SEQ ID NO: 354327 - RNA, 19 nt, Artificial Sequence
  Description of Artificial Sequence: Synthetic oligonucleotide
ugcaacgcuccuucuucuu

SEQ ID NO: 354328 - RNA, 19 nt, Artificial Sequence
  Description of Artificial Sequence: Synthetic oligonucleotide
ugcccgcaauaugguaagg

SEQ ID NO: 354329 - RNA, 19 nt, Artificial Sequence
  Description of Artificial Sequence: Synthetic oligonucleotide
auaaccacccucagccuuu

SEQ ID NO: 354330 - RNA, 19 nt, Artificial Sequence
  Description of Artificial Sequence: Synthetic oligonucleotide
aaauugccugcaggugaaa

SEQ ID NO: 354331 - RNA, 19 nt, Artificial Sequence
  Description of Artificial Sequence: Synthetic oligonucleotide
caauugaaggcacucgcuu

SEQ ID NO: 354332 - RNA, 19 nt, Artificial Sequence
  Description of Artificial Sequence: Synthetic oligonucleotide
acaugacguaauguauuua

SEQ ID NO: 354333 - RNA, 19 nt, Artificial Sequence
  Description of Artificial Sequence: Synthetic oligonucleotide
gacguucagcuuagggguc

SEQ ID NO: 354334 - RNA, 19 nt, Artificial Sequence
  Description of Artificial Sequence: Synthetic oligonucleotide
acguucagcuuaggggucu

SEQ ID NO: 354335 - RNA, 19 nt, Artificial Sequence
  Description of Artificial Sequence: Synthetic oligonucleotide
cgcuuuauauaaucuucug

SEQ ID NO: 354336 - RNA, 19 nt, Artificial Sequence
  Description of Artificial Sequence: Synthetic oligonucleotide
accuccguaucgacuagcu

SEQ ID NO: 354337 - RNA, 19 nt, Artificial Sequence
  Description of Artificial Sequence: Synthetic oligonucleotide
uccuagggaugaugaugaa

SEQ ID NO: 354338 - RNA, 19 nt, Artificial Sequence
  Description of Artificial Sequence: Synthetic oligonucleotide
cccauaaaauggacagcac

SEQ ID NO: 354339 - RNA, 19 nt, Artificial Sequence
  Description of Artificial Sequence: Synthetic oligonucleotide
cacaugacguaauguauuu

SEQ ID NO: 354340 - RNA, 19 nt, Artificial Sequence
  Description of Artificial Sequence: Synthetic oligonucleotide
caccaaacuguacuagggu

SEQ ID NO: 354341 - RNA, 19 nt, Artificial Sequence
  Description of Artificial Sequence: Synthetic oligonucleotide
cagcuugcgaccguguaaa

SEQ ID NO: 354342 - RNA, 19 nt, Artificial Sequence
  Description of Artificial Sequence: Synthetic oligonucleotide
gacuuugcuaaaagccagu

SEQ ID NO: 354343 - RNA, 19 nt, Artificial Sequence
  Description of Artificial Sequence: Synthetic oligonucleotide
guaucaugacacuggucau

SEQ ID NO: 354344 - RNA, 19 nt, Artificial Sequence
  Description of Artificial Sequence: Synthetic oligonucleotide
cgucaauugaaggcacucg

SEQ ID NO: 354345 - RNA, 19 nt, Artificial Sequence
  Description of Artificial Sequence: Synthetic oligonucleotide
ccugucucaaggcaaugca

SEQ ID NO: 354346 - RNA, 19 nt, Artificial Sequence
  Description of Artificial Sequence: Synthetic oligonucleotide
caguaccacucucauccga

SEQ ID NO: 354347 - RNA, 19 nt, Artificial Sequence
  Description of Artificial Sequence: Synthetic oligonucleotide
cucuuaauuaugggagaua

SEQ ID NO: 354348 - RNA, 19 nt, Artificial Sequence
  Description of Artificial Sequence: Synthetic oligonucleotide
ccagacuuuggaaacgugu

SEQ ID NO: 354349 - RNA, 19 nt, Artificial Sequence
  Description of Artificial Sequence: Synthetic oligonucleotide
ccuccguaauuucgauucc

SEQ ID NO: 354350 - RNA, 19 nt, Artificial Sequence
  Description of Artificial Sequence: Synthetic oligonucleotide
cuaauugaucagcuuuauu

SEQ ID NO: 354351 - RNA, 19 nt, Artificial Sequence
  Description of Artificial Sequence: Synthetic oligonucleotide
gccuugguuaguuuguaau

SEQ ID NO: 354352 - RNA, 19 nt, Artificial Sequence
  Description of Artificial Sequence: Synthetic oligonucleotide
caccaucucacaugacgua

SEQ ID NO: 354353 - RNA, 19 nt, Artificial Sequence
  Description of Artificial Sequence: Synthetic oligonucleotide
agguaucaugugugacuuu

SEQ ID NO: 354354 - RNA, 19 nt, Artificial Sequence
  Description of Artificial Sequence: Synthetic oligonucleotide
ggaauucauuacagagcac

SEQ ID NO: 354355 - RNA, 19 nt, Artificial Sequence
  Description of Artificial Sequence: Synthetic oligonucleotide
cccgcaauaugguaaggaa

SEQ ID NO: 354356 - RNA, 19 nt, Artificial Sequence
  Description of Artificial Sequence: Synthetic oligonucleotide
cauuacagagcacgucaau

SEQ ID NO: 354357 - RNA, 19 nt, Artificial Sequence
  Description of Artificial Sequence: Synthetic oligonucleotide
cacccuugguugcuuguaa

SEQ ID NO: 354358 - RNA, 19 nt, Artificial Sequence
  Description of Artificial Sequence: Synthetic oligonucleotide
gguaccaaggaaguauuuu

SEQ ID NO: 354359 - RNA, 19 nt, Artificial Sequence
  Description of Artificial Sequence: Synthetic oligonucleotide
cgaccguguaaauuauguc

SEQ ID NO: 354360 - RNA, 19 nt, Artificial Sequence
  Description of Artificial Sequence: Synthetic oligonucleotide
gcgaccguguaaauuaugu

SEQ ID NO: 354361 - RNA, 19 nt, Artificial Sequence
  Description of Artificial Sequence: Synthetic oligonucleotide
agcuugcgaccguguaaau

SEQ ID NO: 354362 - RNA, 19 nt, Artificial Sequence
  Description of Artificial Sequence: Synthetic oligonucleotide
gcaaugcaccgaugccuug

SEQ ID NO: 354363 - RNA, 19 nt, Artificial Sequence
  Description of Artificial Sequence: Synthetic oligonucleotide
acauuggccuagacaggaa

SEQ ID NO: 354364 - RNA, 19 nt, Artificial Sequence
  Description of Artificial Sequence: Synthetic oligonucleotide
acguugcuucuggauggca

SEQ ID NO: 354365 - RNA, 19 nt, Artificial Sequence
  Description of Artificial Sequence: Synthetic oligonucleotide
ccucuaauugcuccguugu

SEQ ID NO: 354366 - RNA, 19 nt, Artificial Sequence
  Description of Artificial Sequence: Synthetic oligonucleotide
cacgucaauugaaggcacu

SEQ ID NO: 354367 - RNA, 19 nt, Artificial Sequence
  Description of Artificial Sequence: Synthetic oligonucleotide
gcacgucaauugaaggcac

SEQ ID NO: 354368 - RNA, 19 nt, Artificial Sequence
  Description of Artificial Sequence: Synthetic oligonucleotide
gugcaacgcuccuucuucu

SEQ ID NO: 354369 - RNA, 19 nt, Artificial Sequence
  Description of Artificial Sequence: Synthetic oligonucleotide
gcccgcaauaugguaagga

SEQ ID NO: 354370 - RNA, 19 nt, Artificial Sequence
  Description of Artificial Sequence: Synthetic oligonucleotide
cuccguaauuucgauuccu

SEQ ID NO: 354371 - RNA, 19 nt, Artificial Sequence
  Description of Artificial Sequence: Synthetic oligonucleotide
agccugacccagauucaaa

SEQ ID NO: 354372 - RNA, 19 nt, Artificial Sequence
  Description of Artificial Sequence: Synthetic oligonucleotide
augcaccgaugccuugguu

SEQ ID NO: 354373 - RNA, 19 nt, Artificial Sequence
  Description of Artificial Sequence: Synthetic oligonucleotide
caguugcccgcaauauggu

SEQ ID NO: 354374 - RNA, 19 nt, Artificial Sequence
  Description of Artificial Sequence: Synthetic oligonucleotide
ccguguaaauuaugucaga

SEQ ID NO: 354375 - RNA, 19 nt, Artificial Sequence
  Description of Artificial Sequence: Synthetic oligonucleotide
gcuuaggggucuguccaca

SEQ ID NO: 354376 - RNA, 19 nt, Artificial Sequence
  Description of Artificial Sequence: Synthetic oligonucleotide
gcuucguggacaggagcca

SEQ ID NO: 354377 - RNA, 19 nt, Artificial Sequence
  Description of Artificial Sequence: Synthetic oligonucleotide
ggggucuacuuuuccugua

SEQ ID NO: 354378 - RNA, 19 nt, Artificial Sequence
  Description of Artificial Sequence: Synthetic oligonucleotide
gcccauagccaaugcauau

SEQ ID NO: 354379 - RNA, 19 nt, Artificial Sequence
  Description of Artificial Sequence: Synthetic oligonucleotide
ccgcaauaugguaaggaau

SEQ ID NO: 354380 - RNA, 19 nt, Artificial Sequence
  Description of Artificial Sequence: Synthetic oligonucleotide
gggagacguucagcuuagg

SEQ ID NO: 354381 - RNA, 19 nt, Artificial Sequence
  Description of Artificial Sequence: Synthetic oligonucleotide
guacagcuugcgaccgugu

SEQ ID NO: 354382 - RNA, 19 nt, Artificial Sequence
  Description of Artificial Sequence: Synthetic oligonucleotide
ggcaaugcaccgaugccuu

SEQ ID NO: 354383 - RNA, 19 nt, Artificial Sequence
  Description of Artificial Sequence: Synthetic oligonucleotide
cgauuuagaugcacuuccu

SEQ ID NO: 354384 - RNA, 19 nt, Artificial Sequence
  Description of Artificial Sequence: Synthetic oligonucleotide
guccacacccuugguugcu

SEQ ID NO: 354385 - RNA, 19 nt, Artificial Sequence
  Description of Artificial Sequence: Synthetic oligonucleotide
cccauagccaaugcauaua

SEQ ID NO: 354386 - RNA, 19 nt, Artificial Sequence
  Description of Artificial Sequence: Synthetic oligonucleotide
gcuugcgaccguguaaauu

SEQ ID NO: 354387 - RNA, 19 nt, Artificial Sequence
  Description of Artificial Sequence: Synthetic oligonucleotide
ccacaaguuucaaguguuu

SEQ ID NO: 354388 - RNA, 19 nt, Artificial Sequence
  Description of Artificial Sequence: Synthetic oligonucleotide
ggccucuaauugcuccguu

SEQ ID NO: 354389 - RNA, 19 nt, Artificial Sequence
  Description of Artificial Sequence: Synthetic oligonucleotide
ccaccuggucacugucucu

SEQ ID NO: 354390 - RNA, 19 nt, Artificial Sequence
  Description of Artificial Sequence: Synthetic oligonucleotide
caccgaugccuugguuagu

SEQ ID NO: 354391 - RNA, 19 nt, Artificial Sequence
  Description of Artificial Sequence: Synthetic oligonucleotide
cguaucgacuagcuucauu

SEQ ID NO: 354392 - RNA, 19 nt, Artificial Sequence
  Description of Artificial Sequence: Synthetic oligonucleotide
ccuuaaggacaaggaacuu

SEQ ID NO: 354393 - RNA, 19 nt, Artificial Sequence
  Description of Artificial Sequence: Synthetic oligonucleotide
ccuccguaucgacuagcuu

SEQ ID NO: 354394 - RNA, 19 nt, Artificial Sequence
  Description of Artificial Sequence: Synthetic oligonucleotide
ccguaucgacuagcuucau

SEQ ID NO: 354395 - RNA, 19 nt, Artificial Sequence
  Description of Artificial Sequence: Synthetic oligonucleotide
gaucaauucacaaagagcg

SEQ ID NO: 354396 - RNA, 19 nt, Artificial Sequence
  Description of Artificial Sequence: Synthetic oligonucleotide
aacauaaugauugugaacu

SEQ ID NO: 354397 - RNA, 19 nt, Artificial Sequence
  Description of Artificial Sequence: Synthetic oligonucleotide
ugaacuagaauguaagcag

SEQ ID NO: 354398 - RNA, 19 nt, Artificial Sequence
  Description of Artificial Sequence: Synthetic oligonucleotide
ugaagcaccauuuucuacg

SEQ ID NO: 354399 - RNA, 19 nt, Artificial Sequence
  Description of Artificial Sequence: Synthetic oligonucleotide
ucggaaaugacccugggcc

SEQ ID NO: 354400 - RNA, 19 nt, Artificial Sequence
  Description of Artificial Sequence: Synthetic oligonucleotide
caaggaucaauucacaaag

SEQ ID NO: 354401 - RNA, 19 nt, Artificial Sequence
  Description of Artificial Sequence: Synthetic oligonucleotide
ucuuaaugaggucuugucc

SEQ ID NO: 354402 - RNA, 19 nt, Artificial Sequence
  Description of Artificial Sequence: Synthetic oligonucleotide
aguacagacaucauucacc

SEQ ID NO: 354403 - RNA, 19 nt, Artificial Sequence
  Description of Artificial Sequence: Synthetic oligonucleotide
ucaugagggaagcaugucg

SEQ ID NO: 354404 - RNA, 19 nt, Artificial Sequence
  Description of Artificial Sequence: Synthetic oligonucleotide
gacauucucuguuucacgg

SEQ ID NO: 354405 - RNA, 19 nt, Artificial Sequence
  Description of Artificial Sequence: Synthetic oligonucleotide
uuugguagcuuccagcuga

SEQ ID NO: 354406 - RNA, 19 nt, Artificial Sequence
  Description of Artificial Sequence: Synthetic oligonucleotide
uaccuuucggaaaugaccc

SEQ ID NO: 354407 - RNA, 19 nt, Artificial Sequence
  Description of Artificial Sequence: Synthetic oligonucleotide
uccauuaguacagacauca

SEQ ID NO: 354408 - RNA, 19 nt, Artificial Sequence
  Description of Artificial Sequence: Synthetic oligonucleotide
uuuucuacgaagucuuacc

SEQ ID NO: 354409 - RNA, 19 nt, Artificial Sequence
  Description of Artificial Sequence: Synthetic oligonucleotide
cuaccuuucggaaaugacc

SEQ ID NO: 354410 - RNA, 19 nt, Artificial Sequence
  Description of Artificial Sequence: Synthetic oligonucleotide
aggaucaauucacaaagag

SEQ ID NO: 354411 - RNA, 19 nt, Artificial Sequence
  Description of Artificial Sequence: Synthetic oligonucleotide
uuucuacgaagucuuaccc

SEQ ID NO: 354412 - RNA, 19 nt, Artificial Sequence
  Description of Artificial Sequence: Synthetic oligonucleotide
ucaauucacaaagagcgag

SEQ ID NO: 354413 - RNA, 19 nt, Artificial Sequence
  Description of Artificial Sequence: Synthetic oligonucleotide
ucuacgaagucuuacccca

SEQ ID NO: 354414 - RNA, 19 nt, Artificial Sequence
  Description of Artificial Sequence: Synthetic oligonucleotide
uugagugcagugauauugg

SEQ ID NO: 354415 - RNA, 19 nt, Artificial Sequence
  Description of Artificial Sequence: Synthetic oligonucleotide
aaugauugugaacuagaau

SEQ ID NO: 354416 - RNA, 19 nt, Artificial Sequence
  Description of Artificial Sequence: Synthetic oligonucleotide
aaacucuugaucuggcggu

SEQ ID NO: 354417 - RNA, 19 nt, Artificial Sequence
  Description of Artificial Sequence: Synthetic oligonucleotide
uagaauguaagcaguuuac

SEQ ID NO: 354418 - RNA, 19 nt, Artificial Sequence
  Description of Artificial Sequence: Synthetic oligonucleotide
uuaccccaagcuaagcagg

SEQ ID NO: 354419 - RNA, 19 nt, Artificial Sequence
  Description of Artificial Sequence: Synthetic oligonucleotide
agcaccauuuucuacgaag

SEQ ID NO: 354420 - RNA, 19 nt, Artificial Sequence
  Description of Artificial Sequence: Synthetic oligonucleotide
gaaaguaacacugucugga

SEQ ID NO: 354421 - RNA, 19 nt, Artificial Sequence
  Description of Artificial Sequence: Synthetic oligonucleotide
guaagcaguuuacugaagc

SEQ ID NO: 354422 - RNA, 19 nt, Artificial Sequence
  Description of Artificial Sequence: Synthetic oligonucleotide
gauggccuuagacugaaug

SEQ ID NO: 354423 - RNA, 19 nt, Artificial Sequence
  Description of Artificial Sequence: Synthetic oligonucleotide
ucagcuagcugguugaagu

SEQ ID NO: 354424 - RNA, 19 nt, Artificial Sequence
  Description of Artificial Sequence: Synthetic oligonucleotide
uuagacugaaugugcuugg

SEQ ID NO: 354425 - RNA, 19 nt, Artificial Sequence
  Description of Artificial Sequence: Synthetic oligonucleotide
guacagacaucauucaccc

SEQ ID NO: 354426 - RNA, 19 nt, Artificial Sequence
  Description of Artificial Sequence: Synthetic oligonucleotide
ucucgaagggcuuugauuu

SEQ ID NO: 354427 - RNA, 19 nt, Artificial Sequence
  Description of Artificial Sequence: Synthetic oligonucleotide
ugugaacuagaauguaagc

SEQ ID NO: 354428 - RNA, 19 nt, Artificial Sequence
  Description of Artificial Sequence: Synthetic oligonucleotide
agcaguuuacugaagcacc

SEQ ID NO: 354429 - RNA, 19 nt, Artificial Sequence
  Description of Artificial Sequence: Synthetic oligonucleotide
ucgauguagucgaaggcag

SEQ ID NO: 354430 - RNA, 19 nt, Artificial Sequence
  Description of Artificial Sequence: Synthetic oligonucleotide
aggagauacguucuggucu

SEQ ID NO: 354431 - RNA, 19 nt, Artificial Sequence
  Description of Artificial Sequence: Synthetic oligonucleotide
ucaugugggagacacaaua

SEQ ID NO: 354432 - RNA, 19 nt, Artificial Sequence
  Description of Artificial Sequence: Synthetic oligonucleotide
ucaccuacgagccaaggau

SEQ ID NO: 354433 - RNA, 19 nt, Artificial Sequence
  Description of Artificial Sequence: Synthetic oligonucleotide
cuuaccccaagcuaagcag

SEQ ID NO: 354434 - RNA, 19 nt, Artificial Sequence
  Description of Artificial Sequence: Synthetic oligonucleotide
accauuggcaggucguagc

SEQ ID NO: 354435 - RNA, 19 nt, Artificial Sequence
  Description of Artificial Sequence: Synthetic oligonucleotide
agaguugcagcgcacuggg

SEQ ID NO: 354436 - RNA, 19 nt, Artificial Sequence
  Description of Artificial Sequence: Synthetic oligonucleotide
cuaugguuacacuggaaag

SEQ ID NO: 354437 - RNA, 19 nt, Artificial Sequence
  Description of Artificial Sequence: Synthetic oligonucleotide
aggacucuaccacaucagc

SEQ ID NO: 354438 - RNA, 19 nt, Artificial Sequence
  Description of Artificial Sequence: Synthetic oligonucleotide
ucuuaccccaagcuaagca

SEQ ID NO: 354439 - RNA, 19 nt, Artificial Sequence
  Description of Artificial Sequence: Synthetic oligonucleotide
cacuuucccguucagaccc

SEQ ID NO: 354440 - RNA, 19 nt, Artificial Sequence
  Description of Artificial Sequence: Synthetic oligonucleotide
uuccugguagcugaguugg

SEQ ID NO: 354441 - RNA, 19 nt, Artificial Sequence
  Description of Artificial Sequence: Synthetic oligonucleotide
ugaugguucagccggccag

SEQ ID NO: 354442 - RNA, 19 nt, Artificial Sequence
  Description of Artificial Sequence: Synthetic oligonucleotide
cuuuucaccaauccaggac

SEQ ID NO: 354443 - RNA, 19 nt, Artificial Sequence
  Description of Artificial Sequence: Synthetic oligonucleotide
ucagagcucacuagcaacu

SEQ ID NO: 354444 - RNA, 19 nt, Artificial Sequence
  Description of Artificial Sequence: Synthetic oligonucleotide
uucuacgaagucuuacccc

SEQ ID NO: 354445 - RNA, 19 nt, Artificial Sequence
  Description of Artificial Sequence: Synthetic oligonucleotide
ugaccggaaggcaucauga

SEQ ID NO: 354446 - RNA, 19 nt, Artificial Sequence
  Description of Artificial Sequence: Synthetic oligonucleotide
ucaugaaagccauguauuc

SEQ ID NO: 354447 - RNA, 19 nt, Artificial Sequence
  Description of Artificial Sequence: Synthetic oligonucleotide
ucuaccauuggcaggucgu

SEQ ID NO: 354448 - RNA, 19 nt, Artificial Sequence
  Description of Artificial Sequence: Synthetic oligonucleotide
uguuucacggcugaucaug

SEQ ID NO: 354449 - RNA, 19 nt, Artificial Sequence
  Description of Artificial Sequence: Synthetic oligonucleotide
gucgcggaagaacugaugc

SEQ ID NO: 354450 - RNA, 19 nt, Artificial Sequence
  Description of Artificial Sequence: Synthetic oligonucleotide
gaagugacaugcagcaagg

SEQ ID NO: 354451 - RNA, 19 nt, Artificial Sequence
  Description of Artificial Sequence: Synthetic oligonucleotide
cauaaugauugugaacuag

SEQ ID NO: 354452 - RNA, 19 nt, Artificial Sequence
  Description of Artificial Sequence: Synthetic oligonucleotide
uuggaggccacccggaaac

SEQ ID NO: 354453 - RNA, 19 nt, Artificial Sequence
  Description of Artificial Sequence: Synthetic oligonucleotide
accuccgucgaggagauac

SEQ ID NO: 354454 - RNA, 19 nt, Artificial Sequence
  Description of Artificial Sequence: Synthetic oligonucleotide
ucuaccaugcaggaccucc

SEQ ID NO: 354455 - RNA, 19 nt, Artificial Sequence
  Description of Artificial Sequence: Synthetic oligonucleotide
agggcaagcaguauggguc

SEQ ID NO: 354456 - RNA, 19 nt, Artificial Sequence
  Description of Artificial Sequence: Synthetic oligonucleotide
ucuaccuuucggaaaugac

SEQ ID NO: 354457 - RNA, 19 nt, Artificial Sequence
  Description of Artificial Sequence: Synthetic oligonucleotide
aucucgaccauagucaucu

SEQ ID NO: 354458 - RNA, 19 nt, Artificial Sequence
  Description of Artificial Sequence: Synthetic oligonucleotide
aacugguucaaacggguuu

SEQ ID NO: 354459 - RNA, 19 nt, Artificial Sequence
  Description of Artificial Sequence: Synthetic oligonucleotide
agaguuuggacagaagaca

SEQ ID NO: 354460 - RNA, 19 nt, Artificial Sequence
  Description of Artificial Sequence: Synthetic oligonucleotide
cuuucggaaaugacccugg

SEQ ID NO: 354461 - RNA, 19 nt, Artificial Sequence
  Description of Artificial Sequence: Synthetic oligonucleotide
aaggcguuggcaugcugag

SEQ ID NO: 354462 - RNA, 19 nt, Artificial Sequence
  Description of Artificial Sequence: Synthetic oligonucleotide
caugugggagacacaauag

SEQ ID NO: 354463 - RNA, 19 nt, Artificial Sequence
  Description of Artificial Sequence: Synthetic oligonucleotide
gagaacaaggaagaugaac

SEQ ID NO: 354464 - RNA, 19 nt, Artificial Sequence
  Description of Artificial Sequence: Synthetic oligonucleotide
uccuugugaacagugaagu

SEQ ID NO: 354465 - RNA, 19 nt, Artificial Sequence
  Description of Artificial Sequence: Synthetic oligonucleotide
agcaugucgagccucgaug

SEQ ID NO: 354466 - RNA, 19 nt, Artificial Sequence
  Description of Artificial Sequence: Synthetic oligonucleotide
caacauaaugauugugaac

SEQ ID NO: 354467 - RNA, 19 nt, Artificial Sequence
  Description of Artificial Sequence: Synthetic oligonucleotide
aagucuuaccccaagcuaa

SEQ ID NO: 354468 - RNA, 19 nt, Artificial Sequence
  Description of Artificial Sequence: Synthetic oligonucleotide
uucggaaaugacccugggc

SEQ ID NO: 354469 - RNA, 19 nt, Artificial Sequence
  Description of Artificial Sequence: Synthetic oligonucleotide
gugaacuagaauguaagca

SEQ ID NO: 354470 - RNA, 19 nt, Artificial Sequence
  Description of Artificial Sequence: Synthetic oligonucleotide
auggccuuagacugaaugu

SEQ ID NO: 354471 - RNA, 19 nt, Artificial Sequence
  Description of Artificial Sequence: Synthetic oligonucleotide
caggucucggccauagucc

SEQ ID NO: 354472 - RNA, 19 nt, Artificial Sequence
  Description of Artificial Sequence: Synthetic oligonucleotide
auuggcaggucguagccca

SEQ ID NO: 354473 - RNA, 19 nt, Artificial Sequence
  Description of Artificial Sequence: Synthetic oligonucleotide
ugaggucuuguccauuagu

SEQ ID NO: 354474 - RNA, 19 nt, Artificial Sequence
  Description of Artificial Sequence: Synthetic oligonucleotide
uggccuuagacugaaugug

SEQ ID NO: 354475 - RNA, 19 nt, Artificial Sequence
  Description of Artificial Sequence: Synthetic oligonucleotide
agccucgauggccuuagac

SEQ ID NO: 354476 - RNA, 19 nt, Artificial Sequence
  Description of Artificial Sequence: Synthetic oligonucleotide
ucccuguugggaucaacag

SEQ ID NO: 354477 - RNA, 19 nt, Artificial Sequence
  Description of Artificial Sequence: Synthetic oligonucleotide
gaaugagggcaacugguuc

SEQ ID NO: 354478 - RNA, 19 nt, Artificial Sequence
  Description of Artificial Sequence: Synthetic oligonucleotide
caugcgcaugcccagcugg

SEQ ID NO: 354479 - RNA, 19 nt, Artificial Sequence
  Description of Artificial Sequence: Synthetic oligonucleotide
gauacguucuggucuccug

SEQ ID NO: 354480 - RNA, 19 nt, Artificial Sequence
  Description of Artificial Sequence: Synthetic oligonucleotide
uggugauuguucuucuuaa

SEQ ID NO: 354481 - RNA, 19 nt, Artificial Sequence
  Description of Artificial Sequence: Synthetic oligonucleotide
gagaguugcagcgcacugg

SEQ ID NO: 354482 - RNA, 19 nt, Artificial Sequence
  Description of Artificial Sequence: Synthetic oligonucleotide
agagcgagcgggugaacuc

SEQ ID NO: 354483 - RNA, 19 nt, Artificial Sequence
  Description of Artificial Sequence: Synthetic oligonucleotide
ugcaagacgcugcuggauc

SEQ ID NO: 354484 - RNA, 19 nt, Artificial Sequence
  Description of Artificial Sequence: Synthetic oligonucleotide
gagggcaacugguucaaac

SEQ ID NO: 354485 - RNA, 19 nt, Artificial Sequence
  Description of Artificial Sequence: Synthetic oligonucleotide
ggaucaauucacaaagagc

SEQ ID NO: 354486 - RNA, 19 nt, Artificial Sequence
  Description of Artificial Sequence: Synthetic oligonucleotide
auucacccgauccuuguga

SEQ ID NO: 354487 - RNA, 19 nt, Artificial Sequence
  Description of Artificial Sequence: Synthetic oligonucleotide
ucacauaaggcuugcccuc

SEQ ID NO: 354488 - RNA, 19 nt, Artificial Sequence
  Description of Artificial Sequence: Synthetic oligonucleotide
ggaaaguaacacugucugg

SEQ ID NO: 354489 - RNA, 19 nt, Artificial Sequence
  Description of Artificial Sequence: Synthetic oligonucleotide
gagccaaggaucaauucac

SEQ ID NO: 354490 - RNA, 19 nt, Artificial Sequence
  Description of Artificial Sequence: Synthetic oligonucleotide
cugagggaugaccggaagg

SEQ ID NO: 354491 - RNA, 19 nt, Artificial Sequence
  Description of Artificial Sequence: Synthetic oligonucleotide
gaagucuuaccccaagcua

SEQ ID NO: 354492 - RNA, 19 nt, Artificial Sequence
  Description of Artificial Sequence: Synthetic oligonucleotide
ucgaggagauacguucugg

SEQ ID NO: 354493 - RNA, 19 nt, Artificial Sequence
  Description of Artificial Sequence: Synthetic oligonucleotide
gucuccguaaucuucacua

SEQ ID NO: 354494 - RNA, 19 nt, Artificial Sequence
  Description of Artificial Sequence: Synthetic oligonucleotide
ugagugcagugauauuggc

SEQ ID NO: 354495 - RNA, 19 nt, Artificial Sequence
  Description of Artificial Sequence: Synthetic oligonucleotide
ugcguuugguagcuuccag

SEQ ID NO: 354496 - RNA, 19 nt, Artificial Sequence
  Description of Artificial Sequence: Synthetic oligonucleotide
augaccggaaggcaucaug

SEQ ID NO: 354497 - RNA, 19 nt, Artificial Sequence
  Description of Artificial Sequence: Synthetic oligonucleotide
cuagaauguaagcaguuua

SEQ ID NO: 354498 - RNA, 19 nt, Artificial Sequence
  Description of Artificial Sequence: Synthetic oligonucleotide
uaccccaagcuaagcaggc

SEQ ID NO: 354499 - RNA, 19 nt, Artificial Sequence
  Description of Artificial Sequence: Synthetic oligonucleotide
acgagccaaggaucaauuc

SEQ ID NO: 354500 - RNA, 19 nt, Artificial Sequence
  Description of Artificial Sequence: Synthetic oligonucleotide
ugucgagccucgauggccu

SEQ ID NO: 354501 - RNA, 19 nt, Artificial Sequence
  Description of Artificial Sequence: Synthetic oligonucleotide
gaacacccugaauggcugg

SEQ ID NO: 354502 - RNA, 19 nt, Artificial Sequence
  Description of Artificial Sequence: Synthetic oligonucleotide
uggacuugacauucucugu

SEQ ID NO: 354503 - RNA, 19 nt, Artificial Sequence
  Description of Artificial Sequence: Synthetic oligonucleotide
gaggagauacguucugguc

SEQ ID NO: 354504 - RNA, 19 nt, Artificial Sequence
  Description of Artificial Sequence: Synthetic oligonucleotide
gaagcaccauuuucuacga

SEQ ID NO: 354505 - RNA, 19 nt, Artificial Sequence
  Description of Artificial Sequence: Synthetic oligonucleotide
gaguucccgacucuucuac

SEQ ID NO: 354506 - RNA, 19 nt, Artificial Sequence
  Description of Artificial Sequence: Synthetic oligonucleotide
gcaugucgagccucgaugg

SEQ ID NO: 354507 - RNA, 19 nt, Artificial Sequence
  Description of Artificial Sequence: Synthetic oligonucleotide
uuccucguggugauuguuc

SEQ ID NO: 354508 - RNA, 19 nt, Artificial Sequence
  Description of Artificial Sequence: Synthetic oligonucleotide
auauuggcaaugcccuccu

SEQ ID NO: 354509 - RNA, 19 nt, Artificial Sequence
  Description of Artificial Sequence: Synthetic oligonucleotide
aaggaucaauucacaaaga

SEQ ID NO: 354510 - RNA, 19 nt, Artificial Sequence
  Description of Artificial Sequence: Synthetic oligonucleotide
ggugcuugcguuugguagc

SEQ ID NO: 354511 - RNA, 19 nt, Artificial Sequence
  Description of Artificial Sequence: Synthetic oligonucleotide
gaaggcguuggcaugcuga

SEQ ID NO: 354512 - RNA, 19 nt, Artificial Sequence
  Description of Artificial Sequence: Synthetic oligonucleotide
aacuagaauguaagcaguu

SEQ ID NO: 354513 - RNA, 19 nt, Artificial Sequence
  Description of Artificial Sequence: Synthetic oligonucleotide
uacgagccaaggaucaauu

SEQ ID NO: 354514 - RNA, 19 nt, Artificial Sequence
  Description of Artificial Sequence: Synthetic oligonucleotide
ugcccgaugguguugucau

SEQ ID NO: 354515 - RNA, 19 nt, Artificial Sequence
  Description of Artificial Sequence: Synthetic oligonucleotide
gucacuccuguuguguucc

SEQ ID NO: 354516 - RNA, 19 nt, Artificial Sequence
  Description of Artificial Sequence: Synthetic oligonucleotide
ggcaucaugagccucucga

SEQ ID NO: 354517 - RNA, 19 nt, Artificial Sequence
  Description of Artificial Sequence: Synthetic oligonucleotide
gagcgggugaacucgaugu

SEQ ID NO: 354518 - RNA, 19 nt, Artificial Sequence
  Description of Artificial Sequence: Synthetic oligonucleotide
aacggguuugggucccaca

SEQ ID NO: 354519 - RNA, 19 nt, Artificial Sequence
  Description of Artificial Sequence: Synthetic oligonucleotide
aagcaugucgagccucgau

SEQ ID NO: 354520 - RNA, 19 nt, Artificial Sequence
  Description of Artificial Sequence: Synthetic oligonucleotide
agcaggccuaugguuacac

SEQ ID NO: 354521 - RNA, 19 nt, Artificial Sequence
  Description of Artificial Sequence: Synthetic oligonucleotide
ucgaagggcuuugauuucu

SEQ ID NO: 354522 - RNA, 19 nt, Artificial Sequence
  Description of Artificial Sequence: Synthetic oligonucleotide
acauaaugauugugaacua

SEQ ID NO: 354523 - RNA, 19 nt, Artificial Sequence
  Description of Artificial Sequence: Synthetic oligonucleotide
aaugacccugggccuccag

SEQ ID NO: 354524 - RNA, 19 nt, Artificial Sequence
  Description of Artificial Sequence: Synthetic oligonucleotide
cuagcugguugaagucugc

SEQ ID NO: 354525 - RNA, 19 nt, Artificial Sequence
  Description of Artificial Sequence: Synthetic oligonucleotide
cacggcugaucaugaaagc

SEQ ID NO: 354526 - RNA, 19 nt, Artificial Sequence
  Description of Artificial Sequence: Synthetic oligonucleotide
cacuagcaacuucuuuucc

SEQ ID NO: 354527 - RNA, 19 nt, Artificial Sequence
  Description of Artificial Sequence: Synthetic oligonucleotide
ggcguuggcaugcugagca

SEQ ID NO: 354528 - RNA, 19 nt, Artificial Sequence
  Description of Artificial Sequence: Synthetic oligonucleotide
agaacacccugaauggcug

SEQ ID NO: 354529 - RNA, 19 nt, Artificial Sequence
  Description of Artificial Sequence: Synthetic oligonucleotide
guuugguagcuuccagcug

SEQ ID NO: 354530 - RNA, 19 nt, Artificial Sequence
  Description of Artificial Sequence: Synthetic oligonucleotide
aaccagguguagggguugg

SEQ ID NO: 354531 - RNA, 19 nt, Artificial Sequence
  Description of Artificial Sequence: Synthetic oligonucleotide
ugugaacagugaagucugu

SEQ ID NO: 354532 - RNA, 19 nt, Artificial Sequence
  Description of Artificial Sequence: Synthetic oligonucleotide
cugucagguccucuucugc

SEQ ID NO: 354533 - RNA, 19 nt, Artificial Sequence
  Description of Artificial Sequence: Synthetic oligonucleotide
augguuacacuggaaagua

SEQ ID NO: 354534 - RNA, 19 nt, Artificial Sequence
  Description of Artificial Sequence: Synthetic oligonucleotide
gaagucugucucaaaagcu

SEQ ID NO: 354535 - RNA, 19 nt, Artificial Sequence
  Description of Artificial Sequence: Synthetic oligonucleotide
acuagaauguaagcaguuu

SEQ ID NO: 354536 - RNA, 19 nt, Artificial Sequence
  Description of Artificial Sequence: Synthetic oligonucleotide
ucaaacggguuuggguccc

SEQ ID NO: 354537 - RNA, 19 nt, Artificial Sequence
  Description of Artificial Sequence: Synthetic oligonucleotide
ggcucgaaucuccuggugc

SEQ ID NO: 354538 - RNA, 19 nt, Artificial Sequence
  Description of Artificial Sequence: Synthetic oligonucleotide
caccaauccaggacucuac

SEQ ID NO: 354539 - RNA, 19 nt, Artificial Sequence
  Description of Artificial Sequence: Synthetic oligonucleotide
acauuggcuacgaacugcu

SEQ ID NO: 354540 - RNA, 19 nt, Artificial Sequence
  Description of Artificial Sequence: Synthetic oligonucleotide
gcaacauaaugauugugaa

SEQ ID NO: 354541 - RNA, 19 nt, Artificial Sequence
  Description of Artificial Sequence: Synthetic oligonucleotide
aaagagcgagcgggugaac

SEQ ID NO: 354542 - RNA, 19 nt, Artificial Sequence
  Description of Artificial Sequence: Synthetic oligonucleotide
acccagguccucaauuuuc

SEQ ID NO: 354543 - RNA, 19 nt, Artificial Sequence
  Description of Artificial Sequence: Synthetic oligonucleotide
aguucucggcccuugccau

SEQ ID NO: 354544 - RNA, 19 nt, Artificial Sequence
  Description of Artificial Sequence: Synthetic oligonucleotide
ggagauacguucuggucuc

SEQ ID NO: 354545 - RNA, 19 nt, Artificial Sequence
  Description of Artificial Sequence: Synthetic oligonucleotide
ggcaacugguucaaacggg

SEQ ID NO: 354546 - RNA, 19 nt, Artificial Sequence
  Description of Artificial Sequence: Synthetic oligonucleotide
gauccuugagugcagugau

SEQ ID NO: 354547 - RNA, 19 nt, Artificial Sequence
  Description of Artificial Sequence: Synthetic oligonucleotide
ggcuacgaacugcugauac

SEQ ID NO: 354548 - RNA, 19 nt, Artificial Sequence
  Description of Artificial Sequence: Synthetic oligonucleotide
aucaauucacaaagagcga

SEQ ID NO: 354549 - RNA, 19 nt, Artificial Sequence
  Description of Artificial Sequence: Synthetic oligonucleotide
caccuacgagccaaggauc

SEQ ID NO: 354550 - RNA, 19 nt, Artificial Sequence
  Description of Artificial Sequence: Synthetic oligonucleotide
ucggucacuccuguugugu

SEQ ID NO: 354551 - RNA, 19 nt, Artificial Sequence
  Description of Artificial Sequence: Synthetic oligonucleotide
uaccaugcaggaccuccgu

SEQ ID NO: 354552 - RNA, 19 nt, Artificial Sequence
  Description of Artificial Sequence: Synthetic oligonucleotide
gucgaggagauacguucug

SEQ ID NO: 354553 - RNA, 19 nt, Artificial Sequence
  Description of Artificial Sequence: Synthetic oligonucleotide
caugucgagccucgauggc

SEQ ID NO: 354554 - RNA, 19 nt, Artificial Sequence
  Description of Artificial Sequence: Synthetic oligonucleotide
ggagacacaauagucagcu

SEQ ID NO: 354555 - RNA, 19 nt, Artificial Sequence
  Description of Artificial Sequence: Synthetic oligonucleotide
aagugacaugcagcaaggu

SEQ ID NO: 354556 - RNA, 19 nt, Artificial Sequence
  Description of Artificial Sequence: Synthetic oligonucleotide
cauucacccgauccuugug

SEQ ID NO: 354557 - RNA, 19 nt, Artificial Sequence
  Description of Artificial Sequence: Synthetic oligonucleotide
cacccgauccuugugaaca

SEQ ID NO: 354558 - RNA, 19 nt, Artificial Sequence
  Description of Artificial Sequence: Synthetic oligonucleotide
ggaagcaugucgagccucg

SEQ ID NO: 354559 - RNA, 19 nt, Artificial Sequence
  Description of Artificial Sequence: Synthetic oligonucleotide
caagagugucuccguaauc

SEQ ID NO: 354560 - RNA, 19 nt, Artificial Sequence
  Description of Artificial Sequence: Synthetic oligonucleotide
uucccgacucuucuaccau

SEQ ID NO: 354561 - RNA, 19 nt, Artificial Sequence
  Description of Artificial Sequence: Synthetic oligonucleotide
gaugaaccagcugcuuuga

SEQ ID NO: 354562 - RNA, 19 nt, Artificial Sequence
  Description of Artificial Sequence: Synthetic oligonucleotide
uucaccaauccaggacucu

SEQ ID NO: 354563 - RNA, 19 nt, Artificial Sequence
  Description of Artificial Sequence: Synthetic oligonucleotide
cucaccuacgagccaagga

SEQ ID NO: 354564 - RNA, 19 nt, Artificial Sequence
  Description of Artificial Sequence: Synthetic oligonucleotide
ccuaugguuacacuggaaa

SEQ ID NO: 354565 - RNA, 19 nt, Artificial Sequence
  Description of Artificial Sequence: Synthetic oligonucleotide
ucugaacaccugucagguc

SEQ ID NO: 354566 - RNA, 19 nt, Artificial Sequence
  Description of Artificial Sequence: Synthetic oligonucleotide
cauuggcaggucguagccc

SEQ ID NO: 354567 - RNA, 19 nt, Artificial Sequence
  Description of Artificial Sequence: Synthetic oligonucleotide
accuacgagccaaggauca

SEQ ID NO: 354568 - RNA, 19 nt, Artificial Sequence
  Description of Artificial Sequence: Synthetic oligonucleotide
accuuucggaaaugacccu

SEQ ID NO: 354569 - RNA, 19 nt, Artificial Sequence
  Description of Artificial Sequence: Synthetic oligonucleotide
gaugguucagccggccaga

SEQ ID NO: 354570 - RNA, 19 nt, Artificial Sequence
  Description of Artificial Sequence: Synthetic oligonucleotide
aagcaccauuuucuacgaa

SEQ ID NO: 354571 - RNA, 19 nt, Artificial Sequence
  Description of Artificial Sequence: Synthetic oligonucleotide
gcagugauauuggcaaugc

SEQ ID NO: 354572 - RNA, 19 nt, Artificial Sequence
  Description of Artificial Sequence: Synthetic oligonucleotide
cucgaagggcuuugauuuc

SEQ ID NO: 354573 - RNA, 19 nt, Artificial Sequence
  Description of Artificial Sequence: Synthetic oligonucleotide
ccgucgaggagauacguuc

SEQ ID NO: 354574 - RNA, 19 nt, Artificial Sequence
  Description of Artificial Sequence: Synthetic oligonucleotide
ggcagugggcaguucucgg

SEQ ID NO: 354575 - RNA, 19 nt, Artificial Sequence
  Description of Artificial Sequence: Synthetic oligonucleotide
agacacuuucccguucaga

SEQ ID NO: 354576 - RNA, 19 nt, Artificial Sequence
  Description of Artificial Sequence: Synthetic oligonucleotide
ucgauggccuuagacugaa

SEQ ID NO: 354577 - RNA, 19 nt, Artificial Sequence
  Description of Artificial Sequence: Synthetic oligonucleotide
ucacccgauccuugugaac

SEQ ID NO: 354578 - RNA, 19 nt, Artificial Sequence
  Description of Artificial Sequence: Synthetic oligonucleotide
caguucucggcccuugcca

SEQ ID NO: 354579 - RNA, 19 nt, Artificial Sequence
  Description of Artificial Sequence: Synthetic oligonucleotide
cagaacacccugaauggcu

SEQ ID NO: 354580 - RNA, 19 nt, Artificial Sequence
  Description of Artificial Sequence: Synthetic oligonucleotide
uggcaggucguagcccagg

SEQ ID NO: 354581 - RNA, 19 nt, Artificial Sequence
  Description of Artificial Sequence: Synthetic oligonucleotide
ccaaggaucaauucacaaa

SEQ ID NO: 354582 - RNA, 19 nt, Artificial Sequence
  Description of Artificial Sequence: Synthetic oligonucleotide
cauuggcuacgaacugcug

SEQ ID NO: 354583 - RNA, 19 nt, Artificial Sequence
  Description of Artificial Sequence: Synthetic oligonucleotide
uccgucgaggagauacguu

SEQ ID NO: 354584 - RNA, 19 nt, Artificial Sequence
  Description of Artificial Sequence: Synthetic oligonucleotide
guuuacugaagcaccauuu

SEQ ID NO: 354585 - RNA, 19 nt, Artificial Sequence
  Description of Artificial Sequence: Synthetic oligonucleotide
guuucacggcugaucauga

SEQ ID NO: 354586 - RNA, 19 nt, Artificial Sequence
  Description of Artificial Sequence: Synthetic oligonucleotide
guugcagcgcacugggucu

SEQ ID NO: 354587 - RNA, 19 nt, Artificial Sequence
  Description of Artificial Sequence: Synthetic oligonucleotide
aggcguuggcaugcugagc

SEQ ID NO: 354588 - RNA, 19 nt, Artificial Sequence
  Description of Artificial Sequence: Synthetic oligonucleotide
ggcaggucguagcccaggg

SEQ ID NO: 354589 - RNA, 19 nt, Artificial Sequence
  Description of Artificial Sequence: Synthetic oligonucleotide
guagcuuccagcugagauu

SEQ ID NO: 354590 - RNA, 19 nt, Artificial Sequence
  Description of Artificial Sequence: Synthetic oligonucleotide
uagccgcuggccccgugca

SEQ ID NO: 354591 - RNA, 19 nt, Artificial Sequence
  Description of Artificial Sequence: Synthetic oligonucleotide
cccgacucuucuaccaugc

SEQ ID NO: 354592 - RNA, 19 nt, Artificial Sequence
  Description of Artificial Sequence: Synthetic oligonucleotide
agauacguucuggucuccu

SEQ ID NO: 354593 - RNA, 19 nt, Artificial Sequence
  Description of Artificial Sequence: Synthetic oligonucleotide
ccggaaacucuugaucugg

SEQ ID NO: 354594 - RNA, 19 nt, Artificial Sequence
  Description of Artificial Sequence: Synthetic oligonucleotide
ccauuggcaggucguagcc

SEQ ID NO: 354595 - RNA, 19 nt, Artificial Sequence
  Description of Artificial Sequence: Synthetic oligonucleotide
agccggccagacuuguccu

SEQ ID NO: 354596 - RNA, 19 nt, Artificial Sequence
  Description of Artificial Sequence: Synthetic oligonucleotide
caugcaggaccuccgucga

SEQ ID NO: 354597 - RNA, 19 nt, Artificial Sequence
  Description of Artificial Sequence: Synthetic oligonucleotide
guuggccaacagcuggguc

SEQ ID NO: 354598 - RNA, 19 nt, Artificial Sequence
  Description of Artificial Sequence: Synthetic oligonucleotide
gcggaagaacugaugcagg

SEQ ID NO: 354599 - RNA, 19 nt, Artificial Sequence
  Description of Artificial Sequence: Synthetic oligonucleotide
ucucgaccauagucaucug

SEQ ID NO: 354600 - RNA, 19 nt, Artificial Sequence
  Description of Artificial Sequence: Synthetic oligonucleotide
augcaggaccuccgucgag

SEQ ID NO: 354601 - RNA, 19 nt, Artificial Sequence
  Description of Artificial Sequence: Synthetic oligonucleotide
ccgauccuugugaacagug

SEQ ID NO: 354602 - RNA, 19 nt, Artificial Sequence
  Description of Artificial Sequence: Synthetic oligonucleotide
ggucaggcucaccuacgag

SEQ ID NO: 354603 - RNA, 19 nt, Artificial Sequence
  Description of Artificial Sequence: Synthetic oligonucleotide
gcuagcugguugaagucug

SEQ ID NO: 354604 - RNA, 19 nt, Artificial Sequence
  Description of Artificial Sequence: Synthetic oligonucleotide
gucuuaccccaagcuaagc

SEQ ID NO: 354605 - RNA, 19 nt, Artificial Sequence
  Description of Artificial Sequence: Synthetic oligonucleotide
ccaggacucuaccacauca

SEQ ID NO: 354606 - RNA, 19 nt, Artificial Sequence
  Description of Artificial Sequence: Synthetic oligonucleotide
gaagacagaucucgaccau

SEQ ID NO: 354607 - RNA, 19 nt, Artificial Sequence
  Description of Artificial Sequence: Synthetic oligonucleotide
gaucucgaccauagucauc

SEQ ID NO: 354608 - RNA, 19 nt, Artificial Sequence
  Description of Artificial Sequence: Synthetic oligonucleotide
caaagagcgagcgggugaa

SEQ ID NO: 354609 - RNA, 19 nt, Artificial Sequence
  Description of Artificial Sequence: Synthetic oligonucleotide
gaucagacacuuucccguu

SEQ ID NO: 354610 - RNA, 19 nt, Artificial Sequence
  Description of Artificial Sequence: Synthetic oligonucleotide
aagcaggccuaugguuaca

SEQ ID NO: 354611 - RNA, 19 nt, Artificial Sequence
  Description of Artificial Sequence: Synthetic oligonucleotide
ccuugugaacagugaaguc

SEQ ID NO: 354612 - RNA, 19 nt, Artificial Sequence
  Description of Artificial Sequence: Synthetic oligonucleotide
ggaaaugacccugggccuc

SEQ ID NO: 354613 - RNA, 19 nt, Artificial Sequence
  Description of Artificial Sequence: Synthetic oligonucleotide
uugcagcgcacugggucug

SEQ ID NO: 354614 - RNA, 19 nt, Artificial Sequence
  Description of Artificial Sequence: Synthetic oligonucleotide
gcaagcaguaugggucagg

SEQ ID NO: 354615 - RNA, 19 nt, Artificial Sequence
  Description of Artificial Sequence: Synthetic oligonucleotide
ucguagcccagggaacgaa

SEQ ID NO: 354616 - RNA, 19 nt, Artificial Sequence
  Description of Artificial Sequence: Synthetic oligonucleotide
cugaugguucagccggcca

SEQ ID NO: 354617 - RNA, 19 nt, Artificial Sequence
  Description of Artificial Sequence: Synthetic oligonucleotide
ccuccgucgaggagauacg

SEQ ID NO: 354618 - RNA, 19 nt, Artificial Sequence
  Description of Artificial Sequence: Synthetic oligonucleotide
guccauuaguacagacauc

SEQ ID NO: 354619 - RNA, 19 nt, Artificial Sequence
  Description of Artificial Sequence: Synthetic oligonucleotide
cuacgaagucuuaccccaa

SEQ ID NO: 354620 - RNA, 19 nt, Artificial Sequence
  Description of Artificial Sequence: Synthetic oligonucleotide
gaucaacaguauccaggau

SEQ ID NO: 354621 - RNA, 19 nt, Artificial Sequence
  Description of Artificial Sequence: Synthetic oligonucleotide
guucagccggccagacuug

SEQ ID NO: 354622 - RNA, 19 nt, Artificial Sequence
  Description of Artificial Sequence: Synthetic oligonucleotide
cccggaaacucuugaucug

SEQ ID NO: 354623 - RNA, 19 nt, Artificial Sequence
  Description of Artificial Sequence: Synthetic oligonucleotide
cacuccuguuguguuccug

SEQ ID NO: 354624 - RNA, 19 nt, Artificial Sequence
  Description of Artificial Sequence: Synthetic oligonucleotide
uggaaggcguuggcaugcu

SEQ ID NO: 354625 - RNA, 19 nt, Artificial Sequence
  Description of Artificial Sequence: Synthetic oligonucleotide
cuucuagccgcuuguguuu

SEQ ID NO: 354626 - RNA, 19 nt, Artificial Sequence
  Description of Artificial Sequence: Synthetic oligonucleotide
caucccuguugggaucaac

SEQ ID NO: 354627 - RNA, 19 nt, Artificial Sequence
  Description of Artificial Sequence: Synthetic oligonucleotide
cagggaacgaagacaggau

SEQ ID NO: 354628 - RNA, 19 nt, Artificial Sequence
  Description of Artificial Sequence: Synthetic oligonucleotide
augucgcggaagaacugau

SEQ ID NO: 354629 - RNA, 19 nt, Artificial Sequence
  Description of Artificial Sequence: Synthetic oligonucleotide
cucuugcccgaugguguug

SEQ ID NO: 354630 - RNA, 19 nt, Artificial Sequence
  Description of Artificial Sequence: Synthetic oligonucleotide
caucuagcuuugcuuuucu

SEQ ID NO: 354631 - RNA, 19 nt, Artificial Sequence
  Description of Artificial Sequence: Synthetic oligonucleotide
ccaugucgcggaagaacug

SEQ ID NO: 354632 - RNA, 19 nt, Artificial Sequence
  Description of Artificial Sequence: Synthetic oligonucleotide
caguaugggucaggcucac

SEQ ID NO: 354633 - RNA, 19 nt, Artificial Sequence
  Description of Artificial Sequence: Synthetic oligonucleotide
gcuacgaacugcugauacu

SEQ ID NO: 354634 - RNA, 19 nt, Artificial Sequence
  Description of Artificial Sequence: Synthetic oligonucleotide
ggaaggcguuggcaugcug

SEQ ID NO: 354635 - RNA, 19 nt, Artificial Sequence
  Description of Artificial Sequence: Synthetic oligonucleotide
gcucaccuacgagccaagg

SEQ ID NO: 354636 - RNA, 19 nt, Artificial Sequence
  Description of Artificial Sequence: Synthetic oligonucleotide
uggcuacgaacugcugaua

SEQ ID NO: 354637 - RNA, 19 nt, Artificial Sequence
  Description of Artificial Sequence: Synthetic oligonucleotide
cagcgcacugggucuguca

SEQ ID NO: 354638 - RNA, 19 nt, Artificial Sequence
  Description of Artificial Sequence: Synthetic oligonucleotide
gcaagagugucuccguaau

SEQ ID NO: 354639 - RNA, 19 nt, Artificial Sequence
  Description of Artificial Sequence: Synthetic oligonucleotide
ccguucagacccuucaucu

SEQ ID NO: 354640 - RNA, 19 nt, Artificial Sequence
  Description of Artificial Sequence: Synthetic oligonucleotide
ccguaaucuucacuagcca

SEQ ID NO: 354641 - RNA, 19 nt, Artificial Sequence
  Description of Artificial Sequence: Synthetic oligonucleotide
gcaagacgcugcuggaucu

SEQ ID NO: 354642 - RNA, 19 nt, Artificial Sequence
  Description of Artificial Sequence: Synthetic oligonucleotide
cuugcccgaugguguuguc

SEQ ID NO: 354643 - RNA, 19 nt, Artificial Sequence
  Description of Artificial Sequence: Synthetic oligonucleotide
gccccgugcagcugcuugc

SEQ ID NO: 354644 - RNA, 19 nt, Artificial Sequence
  Description of Artificial Sequence: Synthetic oligonucleotide
cagcaagagugucuccgua

SEQ ID NO: 354645 - RNA, 19 nt, Artificial Sequence
  Description of Artificial Sequence: Synthetic oligonucleotide
ggaugaccggaaggcauca

SEQ ID NO: 354646 - RNA, 19 nt, Artificial Sequence
  Description of Artificial Sequence: Synthetic oligonucleotide
gggaagcaugucgagccuc

SEQ ID NO: 354647 - RNA, 19 nt, Artificial Sequence
  Description of Artificial Sequence: Synthetic oligonucleotide
gcaugcgcaugcccagcug

SEQ ID NO: 354648 - RNA, 19 nt, Artificial Sequence
  Description of Artificial Sequence: Synthetic oligonucleotide
gucguagcccagggaacga

SEQ ID NO: 354649 - RNA, 19 nt, Artificial Sequence
  Description of Artificial Sequence: Synthetic oligonucleotide
accagguguagggguugga

SEQ ID NO: 354650 - RNA, 19 nt, Artificial Sequence
  Description of Artificial Sequence: Synthetic oligonucleotide
ggcaagcaguaugggucag

SEQ ID NO: 354651 - RNA, 19 nt, Artificial Sequence
  Description of Artificial Sequence: Synthetic oligonucleotide
agcgagcgggugaacucga

SEQ ID NO: 354652 - RNA, 19 nt, Artificial Sequence
  Description of Artificial Sequence: Synthetic oligonucleotide
cuacgagccaaggaucaau

SEQ ID NO: 354653 - RNA, 19 nt, Artificial Sequence
  Description of Artificial Sequence: Synthetic oligonucleotide
cucggccauaguccucaga

SEQ ID NO: 354654 - RNA, 19 nt, Artificial Sequence
  Description of Artificial Sequence: Synthetic oligonucleotide
gggcccggaaagcacucuc

SEQ ID NO: 354655 - RNA, 19 nt, Artificial Sequence
  Description of Artificial Sequence: Synthetic oligonucleotide
gcagcaagagugucuccgu

SEQ ID NO: 354656 - RNA, 19 nt, Artificial Sequence
  Description of Artificial Sequence: Synthetic oligonucleotide
ccucagguucugaacaccu

SEQ ID NO: 354657 - RNA, 19 nt, Artificial Sequence
  Description of Artificial Sequence: Synthetic oligonucleotide
gcccggaaagcacucucaa

SEQ ID NO: 354658 - RNA, 19 nt, Artificial Sequence
  Description of Artificial Sequence: Synthetic oligonucleotide
caggcucaccuacgagcca

SEQ ID NO: 354659 - RNA, 19 nt, Artificial Sequence
  Description of Artificial Sequence: Synthetic oligonucleotide
ggaggccacccggaaacuc

SEQ ID NO: 354660 - RNA, 19 nt, Artificial Sequence
  Description of Artificial Sequence: Synthetic oligonucleotide
gccuuagacugaaugugcu

SEQ ID NO: 354661 - RNA, 19 nt, Artificial Sequence
  Description of Artificial Sequence: Synthetic oligonucleotide
cgagcgggugaacucgaug

SEQ ID NO: 354662 - RNA, 19 nt, Artificial Sequence
  Description of Artificial Sequence: Synthetic oligonucleotide
ggcccggaaagcacucuca

SEQ ID NO: 354663 - RNA, 19 nt, Artificial Sequence
  Description of Artificial Sequence: Synthetic oligonucleotide
ccacugguggaaggcguug

SEQ ID NO: 354664 - RNA, 19 nt, Artificial Sequence
  Description of Artificial Sequence: Synthetic oligonucleotide
cuccgucgaggagauacgu

SEQ ID NO: 354665 - RNA, 19 nt, Artificial Sequence
  Description of Artificial Sequence: Synthetic oligonucleotide
gaugaccggaaggcaucau

SEQ ID NO: 354666 - RNA, 19 nt, Artificial Sequence
  Description of Artificial Sequence: Synthetic oligonucleotide
cgaggagauacguucuggu

SEQ ID NO: 354667 - RNA, 19 nt, Artificial Sequence
  Description of Artificial Sequence: Synthetic oligonucleotide
acuagccaccagagucauu

SEQ ID NO: 354668 - RNA, 19 nt, Artificial Sequence
  Description of Artificial Sequence: Synthetic oligonucleotide
gcaggccuaugguuacacu

SEQ ID NO: 354669 - RNA, 19 nt, Artificial Sequence
  Description of Artificial Sequence: Synthetic oligonucleotide
gcguuggcaugcugagcaa

SEQ ID NO: 354670 - RNA, 19 nt, Artificial Sequence
  Description of Artificial Sequence: Synthetic oligonucleotide
ccgacucuucuaccaugca

SEQ ID NO: 354671 - RNA, 19 nt, Artificial Sequence
  Description of Artificial Sequence: Synthetic oligonucleotide
ccauuaguacagacaucau

SEQ ID NO: 354672 - RNA, 19 nt, Artificial Sequence
  Description of Artificial Sequence: Synthetic oligonucleotide
cgucgaggagauacguucu

SEQ ID NO: 354673 - RNA, 19 nt, Artificial Sequence
  Description of Artificial Sequence: Synthetic oligonucleotide
ccuacgagccaaggaucaa

SEQ ID NO: 354674 - RNA, 19 nt, Artificial Sequence
  Description of Artificial Sequence: Synthetic oligonucleotide
gcagcgcacugggucuguc

SEQ ID NO: 354675 - RNA, 19 nt, Artificial Sequence
  Description of Artificial Sequence: Synthetic oligonucleotide
ccaagcuaagcaggccuau

SEQ ID NO: 354676 - RNA, 19 nt, Artificial Sequence
  Description of Artificial Sequence: Synthetic oligonucleotide
gaccuccgucgaggagaua

SEQ ID NO: 354677 - RNA, 19 nt, Artificial Sequence
  Description of Artificial Sequence: Synthetic oligonucleotide
cccgauccuugugaacagu

SEQ ID NO: 354678 - RNA, 19 nt, Artificial Sequence
  Description of Artificial Sequence: Synthetic oligonucleotide
ccccgugcagcugcuugcu

SEQ ID NO: 354679 - RNA, 19 nt, Artificial Sequence
  Description of Artificial Sequence: Synthetic oligonucleotide
gcgagcgggugaacucgau

SEQ ID NO: 354680 - RNA, 19 nt, Artificial Sequence
  Description of Artificial Sequence: Synthetic oligonucleotide
cgauggccuuagacugaau

SEQ ID NO: 354681 - RNA, 19 nt, Artificial Sequence
  Description of Artificial Sequence: Synthetic oligonucleotide
aauuucuuaccgcagaccc

SEQ ID NO: 354682 - RNA, 19 nt, Artificial Sequence
  Description of Artificial Sequence: Synthetic oligonucleotide
agauauuacacucauaggg

SEQ ID NO: 354683 - RNA, 19 nt, Artificial Sequence
  Description of Artificial Sequence: Synthetic oligonucleotide
aauucuuccauggaggagc

SEQ ID NO: 354684 - RNA, 19 nt, Artificial Sequence
  Description of Artificial Sequence: Synthetic oligonucleotide
auuagauucccauccaacc

SEQ ID NO: 354685 - RNA, 19 nt, Artificial Sequence
  Description of Artificial Sequence: Synthetic oligonucleotide
aaugcaacaggacuucagg

SEQ ID NO: 354686 - RNA, 19 nt, Artificial Sequence
  Description of Artificial Sequence: Synthetic oligonucleotide
auucaguuaaaacccacgc

SEQ ID NO: 354687 - RNA, 19 nt, Artificial Sequence
  Description of Artificial Sequence: Synthetic oligonucleotide
augauaugcaccuaaugac

SEQ ID NO: 354688 - RNA, 19 nt, Artificial Sequence
  Description of Artificial Sequence: Synthetic oligonucleotide
auagacaacugcuaccacc

SEQ ID NO: 354689 - RNA, 19 nt, Artificial Sequence
  Description of Artificial Sequence: Synthetic oligonucleotide
uuaauggccuauuagagcu

SEQ ID NO: 354690 - RNA, 19 nt, Artificial Sequence
  Description of Artificial Sequence: Synthetic oligonucleotide
gcaauuacaaacuaguacc

SEQ ID NO: 354691 - RNA, 19 nt, Artificial Sequence
  Description of Artificial Sequence: Synthetic oligonucleotide
aguaacuaacaauuucugg

SEQ ID NO: 354692 - RNA, 19 nt, Artificial Sequence
  Description of Artificial Sequence: Synthetic oligonucleotide
ucuguuuaucaucccaugg

SEQ ID NO: 354693 - RNA, 19 nt, Artificial Sequence
  Description of Artificial Sequence: Synthetic oligonucleotide
cauuuugaauuucuuaccg

SEQ ID NO: 354694 - RNA, 19 nt, Artificial Sequence
  Description of Artificial Sequence: Synthetic oligonucleotide
auguaaauaucagagagag

SEQ ID NO: 354695 - RNA, 19 nt, Artificial Sequence
  Description of Artificial Sequence: Synthetic oligonucleotide
aaauaaaaugcaacaggac

SEQ ID NO: 354696 - RNA, 19 nt, Artificial Sequence
  Description of Artificial Sequence: Synthetic oligonucleotide
ucaggcaacacaauucucc

SEQ ID NO: 354697 - RNA, 19 nt, Artificial Sequence
  Description of Artificial Sequence: Synthetic oligonucleotide
uaacuaacaauuucuggag

SEQ ID NO: 354698 - RNA, 19 nt, Artificial Sequence
  Description of Artificial Sequence: Synthetic oligonucleotide
aacuaguaccuuuaaauau

SEQ ID NO: 354699 - RNA, 19 nt, Artificial Sequence
  Description of Artificial Sequence: Synthetic oligonucleotide
cagauuugcauuaauuacc

SEQ ID NO: 354700 - RNA, 19 nt, Artificial Sequence
  Description of Artificial Sequence: Synthetic oligonucleotide
uuauaguuacugcuacugg

SEQ ID NO: 354701 - RNA, 19 nt, Artificial Sequence
  Description of Artificial Sequence: Synthetic oligonucleotide
aauggacucagugacuugg

SEQ ID NO: 354702 - RNA, 19 nt, Artificial Sequence
  Description of Artificial Sequence: Synthetic oligonucleotide
aauauucucacuguagccu

SEQ ID NO: 354703 - RNA, 19 nt, Artificial Sequence
  Description of Artificial Sequence: Synthetic oligonucleotide
uguguagcuagauaggaga

SEQ ID NO: 354704 - RNA, 19 nt, Artificial Sequence
  Description of Artificial Sequence: Synthetic oligonucleotide
uuuaauggccuauuagagc

SEQ ID NO: 354705 - RNA, 19 nt, Artificial Sequence
  Description of Artificial Sequence: Synthetic oligonucleotide
aaccuagcaguguagugcg

SEQ ID NO: 354706 - RNA, 19 nt, Artificial Sequence
  Description of Artificial Sequence: Synthetic oligonucleotide
ucagcuagaacuuuagaaa

SEQ ID NO: 354707 - RNA, 19 nt, Artificial Sequence
  Description of Artificial Sequence: Synthetic oligonucleotide
auaauagcaaguggcacgc

SEQ ID NO: 354708 - RNA, 19 nt, Artificial Sequence
  Description of Artificial Sequence: Synthetic oligonucleotide
ugauaugcaccuaaugaca

SEQ ID NO: 354709 - RNA, 19 nt, Artificial Sequence
  Description of Artificial Sequence: Synthetic oligonucleotide
uuucauguggcccacgaga

SEQ ID NO: 354710 - RNA, 19 nt, Artificial Sequence
  Description of Artificial Sequence: Synthetic oligonucleotide
ucugugcccaauuagauuc

SEQ ID NO: 354711 - RNA, 19 nt, Artificial Sequence
  Description of Artificial Sequence: Synthetic oligonucleotide
uauguaaauaucagagaga

SEQ ID NO: 354712 - RNA, 19 nt, Artificial Sequence
  Description of Artificial Sequence: Synthetic oligonucleotide
uagucugccaccaagucca

SEQ ID NO: 354713 - RNA, 19 nt, Artificial Sequence
  Description of Artificial Sequence: Synthetic oligonucleotide
ugugauagacaacugcuac

SEQ ID NO: 354714 - RNA, 19 nt, Artificial Sequence
  Description of Artificial Sequence: Synthetic oligonucleotide
uucagcuagaacuuuagaa

SEQ ID NO: 354715 - RNA, 19 nt, Artificial Sequence
  Description of Artificial Sequence: Synthetic oligonucleotide
acagguaacauuuauuaaa

SEQ ID NO: 354716 - RNA, 19 nt, Artificial Sequence
  Description of Artificial Sequence: Synthetic oligonucleotide
aaacuaguaccuuuaaaua

SEQ ID NO: 354717 - RNA, 19 nt, Artificial Sequence
  Description of Artificial Sequence: Synthetic oligonucleotide
auucauuggauaguuaguc

SEQ ID NO: 354718 - RNA, 19 nt, Artificial Sequence
  Description of Artificial Sequence: Synthetic oligonucleotide
caaggauacagcuugucag

SEQ ID NO: 354719 - RNA, 19 nt, Artificial Sequence
  Description of Artificial Sequence: Synthetic oligonucleotide
uuugugagccauuaugcug

SEQ ID NO: 354720 - RNA, 19 nt, Artificial Sequence
  Description of Artificial Sequence: Synthetic oligonucleotide
uccauucuaggccaggacc

SEQ ID NO: 354721 - RNA, 19 nt, Artificial Sequence
  Description of Artificial Sequence: Synthetic oligonucleotide
agaacuaacuucugcaaca

SEQ ID NO: 354722 - RNA, 19 nt, Artificial Sequence
  Description of Artificial Sequence: Synthetic oligonucleotide
aaagaacuaacuucugcaa

SEQ ID NO: 354723 - RNA, 19 nt, Artificial Sequence
  Description of Artificial Sequence: Synthetic oligonucleotide
ucauuggauaguuagucac

SEQ ID NO: 354724 - RNA, 19 nt, Artificial Sequence
  Description of Artificial Sequence: Synthetic oligonucleotide
ucaugugucgaucucgcug

SEQ ID NO: 354725 - RNA, 19 nt, Artificial Sequence
  Description of Artificial Sequence: Synthetic oligonucleotide
auuauaguuacugcuacug

SEQ ID NO: 354726 - RNA, 19 nt, Artificial Sequence
  Description of Artificial Sequence: Synthetic oligonucleotide
uuagucugccaccaagucc

SEQ ID NO: 354727 - RNA, 19 nt, Artificial Sequence
  Description of Artificial Sequence: Synthetic oligonucleotide
acuaacaauuucuggagca

SEQ ID NO: 354728 - RNA, 19 nt, Artificial Sequence
  Description of Artificial Sequence: Synthetic oligonucleotide
aggaccagaacauacaaau

SEQ ID NO: 354729 - RNA, 19 nt, Artificial Sequence
  Description of Artificial Sequence: Synthetic oligonucleotide
caugauaugcaccuaauga

SEQ ID NO: 354730 - RNA, 19 nt, Artificial Sequence
  Description of Artificial Sequence: Synthetic oligonucleotide
gaugacagcucaucuuugg

SEQ ID NO: 354731 - RNA, 19 nt, Artificial Sequence
  Description of Artificial Sequence: Synthetic oligonucleotide
accugcucgucauaguugc

SEQ ID NO: 354732 - RNA, 19 nt, Artificial Sequence
  Description of Artificial Sequence: Synthetic oligonucleotide
ugaguuacugggcaaguac

SEQ ID NO: 354733 - RNA, 19 nt, Artificial Sequence
  Description of Artificial Sequence: Synthetic oligonucleotide
uguagugcgacccugcuuu

SEQ ID NO: 354734 - RNA, 19 nt, Artificial Sequence
  Description of Artificial Sequence: Synthetic oligonucleotide
aauuggacagguaacauuu

SEQ ID NO: 354735 - RNA, 19 nt, Artificial Sequence
  Description of Artificial Sequence: Synthetic oligonucleotide
uauuaaaacgugucauaca

SEQ ID NO: 354736 - RNA, 19 nt, Artificial Sequence
  Description of Artificial Sequence: Synthetic oligonucleotide
uguuuaucaucccaugguc

SEQ ID NO: 354737 - RNA, 19 nt, Artificial Sequence
  Description of Artificial Sequence: Synthetic oligonucleotide
auuucaauauucucacugu

SEQ ID NO: 354738 - RNA, 19 nt, Artificial Sequence
  Description of Artificial Sequence: Synthetic oligonucleotide
uguaguggaacuccgcgcu

SEQ ID NO: 354739 - RNA, 19 nt, Artificial Sequence
  Description of Artificial Sequence: Synthetic oligonucleotide
gacgccucuucuuuuaucc

SEQ ID NO: 354740 - RNA, 19 nt, Artificial Sequence
  Description of Artificial Sequence: Synthetic oligonucleotide
acaaaauuggacagguaac

SEQ ID NO: 354741 - RNA, 19 nt, Artificial Sequence
  Description of Artificial Sequence: Synthetic oligonucleotide
uggccuaagagucaccuga

SEQ ID NO: 354742 - RNA, 19 nt, Artificial Sequence
  Description of Artificial Sequence: Synthetic oligonucleotide
uuaauuaccauaguuuauu

SEQ ID NO: 354743 - RNA, 19 nt, Artificial Sequence
  Description of Artificial Sequence: Synthetic oligonucleotide
cuaagagucaccugacuug

SEQ ID NO: 354744 - RNA, 19 nt, Artificial Sequence
  Description of Artificial Sequence: Synthetic oligonucleotide
cagugaugcgcuaacaaag

SEQ ID NO: 354745 - RNA, 19 nt, Artificial Sequence
  Description of Artificial Sequence: Synthetic oligonucleotide
ugacuugcauaaauaaagu

SEQ ID NO: 354746 - RNA, 19 nt, Artificial Sequence
  Description of Artificial Sequence: Synthetic oligonucleotide
aauggccuauuagagcugg

SEQ ID NO: 354747 - RNA, 19 nt, Artificial Sequence
  Description of Artificial Sequence: Synthetic oligonucleotide
ucccucuagaaccucagug

SEQ ID NO: 354748 - RNA, 19 nt, Artificial Sequence
  Description of Artificial Sequence: Synthetic oligonucleotide
agaacccuaagugggacgc

SEQ ID NO: 354749 - RNA, 19 nt, Artificial Sequence
  Description of Artificial Sequence: Synthetic oligonucleotide
ugcauaaauaaaguuauuu

SEQ ID NO: 354750 - RNA, 19 nt, Artificial Sequence
  Description of Artificial Sequence: Synthetic oligonucleotide
ugcuguuaaguaacuaaca

SEQ ID NO: 354751 - RNA, 19 nt, Artificial Sequence
  Description of Artificial Sequence: Synthetic oligonucleotide
aauagcaaguggcacgcau

SEQ ID NO: 354752 - RNA, 19 nt, Artificial Sequence
  Description of Artificial Sequence: Synthetic oligonucleotide
auggagacgucacauaacu

SEQ ID NO: 354753 - RNA, 19 nt, Artificial Sequence
  Description of Artificial Sequence: Synthetic oligonucleotide
acacgucuguuccaggcgc

SEQ ID NO: 354754 - RNA, 19 nt, Artificial Sequence
  Description of Artificial Sequence: Synthetic oligonucleotide
agccauaagggcgaagacc

SEQ ID NO: 354755 - RNA, 19 nt, Artificial Sequence
  Description of Artificial Sequence: Synthetic oligonucleotide
auuaugcugggcuugcugu

SEQ ID NO: 354756 - RNA, 19 nt, Artificial Sequence
  Description of Artificial Sequence: Synthetic oligonucleotide
aggccauuauaguuacugc

SEQ ID NO: 354757 - RNA, 19 nt, Artificial Sequence
  Description of Artificial Sequence: Synthetic oligonucleotide
ugcgcuaacaaagcaaagc

SEQ ID NO: 354758 - RNA, 19 nt, Artificial Sequence
  Description of Artificial Sequence: Synthetic oligonucleotide
cauuuguccaccacaugcc

SEQ ID NO: 354759 - RNA, 19 nt, Artificial Sequence
  Description of Artificial Sequence: Synthetic oligonucleotide
acuaguaccuuuaaauaug

SEQ ID NO: 354760 - RNA, 19 nt, Artificial Sequence
  Description of Artificial Sequence: Synthetic oligonucleotide
accuggauucauuggauag

SEQ ID NO: 354761 - RNA, 19 nt, Artificial Sequence
  Description of Artificial Sequence: Synthetic oligonucleotide
aaguaacuaacaauuucug

SEQ ID NO: 354762 - RNA, 19 nt, Artificial Sequence
  Description of Artificial Sequence: Synthetic oligonucleotide
agugaugcgcuaacaaagc

SEQ ID NO: 354763 - RNA, 19 nt, Artificial Sequence
  Description of Artificial Sequence: Synthetic oligonucleotide
auauucucacuguagccug

SEQ ID NO: 354764 - RNA, 19 nt, Artificial Sequence
  Description of Artificial Sequence: Synthetic oligonucleotide
cucucauaauagcaagugg

SEQ ID NO: 354765 - RNA, 19 nt, Artificial Sequence
  Description of Artificial Sequence: Synthetic oligonucleotide
cacauaacuguccuuguug

SEQ ID NO: 354766 - RNA, 19 nt, Artificial Sequence
  Description of Artificial Sequence: Synthetic oligonucleotide
aucaguagagaucugcaau

SEQ ID NO: 354767 - RNA, 19 nt, Artificial Sequence
  Description of Artificial Sequence: Synthetic oligonucleotide
uuucuuaccgcagacccca

SEQ ID NO: 354768 - RNA, 19 nt, Artificial Sequence
  Description of Artificial Sequence: Synthetic oligonucleotide
uuacaaacuaguaccuuua

SEQ ID NO: 354769 - RNA, 19 nt, Artificial Sequence
  Description of Artificial Sequence: Synthetic oligonucleotide
gauccagcguuugugagcc

SEQ ID NO: 354770 - RNA, 19 nt, Artificial Sequence
  Description of Artificial Sequence: Synthetic oligonucleotide
aacagcuuugugugcccgg

SEQ ID NO: 354771 - RNA, 19 nt, Artificial Sequence
  Description of Artificial Sequence: Synthetic oligonucleotide
cuagauaggagaauguucu

SEQ ID NO: 354772 - RNA, 19 nt, Artificial Sequence
  Description of Artificial Sequence: Synthetic oligonucleotide
uuuggaaguccucuuccac

SEQ ID NO: 354773 - RNA, 19 nt, Artificial Sequence
  Description of Artificial Sequence: Synthetic oligonucleotide
ugucauacaaaagggcaug

SEQ ID NO: 354774 - RNA, 19 nt, Artificial Sequence
  Description of Artificial Sequence: Synthetic oligonucleotide
caaccuagcaguguagugc

SEQ ID NO: 354775 - RNA, 19 nt, Artificial Sequence
  Description of Artificial Sequence: Synthetic oligonucleotide
caaacuaguaccuuuaaau

SEQ ID NO: 354776 - RNA, 19 nt, Artificial Sequence
  Description of Artificial Sequence: Synthetic oligonucleotide
gauaggagaauguucucaa

SEQ ID NO: 354777 - RNA, 19 nt, Artificial Sequence
  Description of Artificial Sequence: Synthetic oligonucleotide
ugaacugguggguuagucu

SEQ ID NO: 354778 - RNA, 19 nt, Artificial Sequence
  Description of Artificial Sequence: Synthetic oligonucleotide
aguuagucaccagucaaag

SEQ ID NO: 354779 - RNA, 19 nt, Artificial Sequence
  Description of Artificial Sequence: Synthetic oligonucleotide
ucccauccaaccuuucucc

SEQ ID NO: 354780 - RNA, 19 nt, Artificial Sequence
  Description of Artificial Sequence: Synthetic oligonucleotide
uaugcaccuaaugacaauc

SEQ ID NO: 354781 - RNA, 19 nt, Artificial Sequence
  Description of Artificial Sequence: Synthetic oligonucleotide
ucauaauagcaaguggcac

SEQ ID NO: 354782 - RNA, 19 nt, Artificial Sequence
  Description of Artificial Sequence: Synthetic oligonucleotide
uucaggaguacuuggucac

SEQ ID NO: 354783 - RNA, 19 nt, Artificial Sequence
  Description of Artificial Sequence: Synthetic oligonucleotide
ggagaauguucucaaauac

SEQ ID NO: 354784 - RNA, 19 nt, Artificial Sequence
  Description of Artificial Sequence: Synthetic oligonucleotide
ucaaagcaaccuagcagug

SEQ ID NO: 354785 - RNA, 19 nt, Artificial Sequence
  Description of Artificial Sequence: Synthetic oligonucleotide
gugauagacaacugcuacc

SEQ ID NO: 354786 - RNA, 19 nt, Artificial Sequence
  Description of Artificial Sequence: Synthetic oligonucleotide
cccaauuagauucccaucc

SEQ ID NO: 354787 - RNA, 19 nt, Artificial Sequence
  Description of Artificial Sequence: Synthetic oligonucleotide
cuuaccgcagaccccacag

SEQ ID NO: 354788 - RNA, 19 nt, Artificial Sequence
  Description of Artificial Sequence: Synthetic oligonucleotide
gguguaguggaacuccgcg

SEQ ID NO: 354789 - RNA, 19 nt, Artificial Sequence
  Description of Artificial Sequence: Synthetic oligonucleotide
gccauaagggcgaagaccg

SEQ ID NO: 354790 - RNA, 19 nt, Artificial Sequence
  Description of Artificial Sequence: Synthetic oligonucleotide
uuagccucaguuguagucu

SEQ ID NO: 354791 - RNA, 19 nt, Artificial Sequence
  Description of Artificial Sequence: Synthetic oligonucleotide
ugacucuugugugugaaac

SEQ ID NO: 354792 - RNA, 19 nt, Artificial Sequence
  Description of Artificial Sequence: Synthetic oligonucleotide
ugcucaugugucgaucucg

SEQ ID NO: 354793 - RNA, 19 nt, Artificial Sequence
  Description of Artificial Sequence: Synthetic oligonucleotide
cauaguugcucuccucugc

SEQ ID NO: 354794 - RNA, 19 nt, Artificial Sequence
  Description of Artificial Sequence: Synthetic oligonucleotide
acgugucauacaaaagggc

SEQ ID NO: 354795 - RNA, 19 nt, Artificial Sequence
  Description of Artificial Sequence: Synthetic oligonucleotide
uaucaguagagaucugcaa

SEQ ID NO: 354796 - RNA, 19 nt, Artificial Sequence
  Description of Artificial Sequence: Synthetic oligonucleotide
uggguucaucacaucaggc

SEQ ID NO: 354797 - RNA, 19 nt, Artificial Sequence
  Description of Artificial Sequence: Synthetic oligonucleotide
gaauuucuuaccgcagacc

SEQ ID NO: 354798 - RNA, 19 nt, Artificial Sequence
  Description of Artificial Sequence: Synthetic oligonucleotide
uccaccaggggaaaauaaa

SEQ ID NO: 354799 - RNA, 19 nt, Artificial Sequence
  Description of Artificial Sequence: Synthetic oligonucleotide
aggggaguagcauccagug

SEQ ID NO: 354800 - RNA, 19 nt, Artificial Sequence
  Description of Artificial Sequence: Synthetic oligonucleotide
cucgucguaggcugcaugc

SEQ ID NO: 354801 - RNA, 19 nt, Artificial Sequence
  Description of Artificial Sequence: Synthetic oligonucleotide
ccagauuugcauuaauuac

SEQ ID NO: 354802 - RNA, 19 nt, Artificial Sequence
  Description of Artificial Sequence: Synthetic oligonucleotide
uggaacuccgcgcugucac

SEQ ID NO: 354803 - RNA, 19 nt, Artificial Sequence
  Description of Artificial Sequence: Synthetic oligonucleotide
caggccauuauaguuacug

SEQ ID NO: 354804 - RNA, 19 nt, Artificial Sequence
  Description of Artificial Sequence: Synthetic oligonucleotide
uuggacagguaacauuuau

SEQ ID NO: 354805 - RNA, 19 nt, Artificial Sequence
  Description of Artificial Sequence: Synthetic oligonucleotide
ugguggguuagucugccac

SEQ ID NO: 354806 - RNA, 19 nt, Artificial Sequence
  Description of Artificial Sequence: Synthetic oligonucleotide
caaagcaaagccccagaac

SEQ ID NO: 354807 - RNA, 19 nt, Artificial Sequence
  Description of Artificial Sequence: Synthetic oligonucleotide
aucuguuuaucaucccaug

SEQ ID NO: 354808 - RNA, 19 nt, Artificial Sequence
  Description of Artificial Sequence: Synthetic oligonucleotide
gucauugccaugauuuagc

SEQ ID NO: 354809 - RNA, 19 nt, Artificial Sequence
  Description of Artificial Sequence: Synthetic oligonucleotide
cauaggacuugguacaaga

SEQ ID NO: 354810 - RNA, 19 nt, Artificial Sequence
  Description of Artificial Sequence: Synthetic oligonucleotide
gauuuagcuucuggcaaag

SEQ ID NO: 354811 - RNA, 19 nt, Artificial Sequence
  Description of Artificial Sequence: Synthetic oligonucleotide
aucaaacucugcuucuacu

SEQ ID NO: 354812 - RNA, 19 nt, Artificial Sequence
  Description of Artificial Sequence: Synthetic oligonucleotide
uuuauccccgucaccauuu

SEQ ID NO: 354813 - RNA, 19 nt, Artificial Sequence
  Description of Artificial Sequence: Synthetic oligonucleotide
uaguuagccucaguuguag

SEQ ID NO: 354814 - RNA, 19 nt, Artificial Sequence
  Description of Artificial Sequence: Synthetic oligonucleotide
aaagggcauggucucuucu

SEQ ID NO: 354815 - RNA, 19 nt, Artificial Sequence
  Description of Artificial Sequence: Synthetic oligonucleotide
gaccagaacauacaaauuu

SEQ ID NO: 354816 - RNA, 19 nt, Artificial Sequence
  Description of Artificial Sequence: Synthetic oligonucleotide
gaaagagcucaguucacaa

SEQ ID NO: 354817 - RNA, 19 nt, Artificial Sequence
  Description of Artificial Sequence: Synthetic oligonucleotide
caaaauuggacagguaaca

SEQ ID NO: 354818 - RNA, 19 nt, Artificial Sequence
  Description of Artificial Sequence: Synthetic oligonucleotide
gcgcuaacaaagcaaagcc

SEQ ID NO: 354819 - RNA, 19 nt, Artificial Sequence
  Description of Artificial Sequence: Synthetic oligonucleotide
aaccuuucuccagagaauu

SEQ ID NO: 354820 - RNA, 19 nt, Artificial Sequence
  Description of Artificial Sequence: Synthetic oligonucleotide
aucccaugguccuguggcc

SEQ ID NO: 354821 - RNA, 19 nt, Artificial Sequence
  Description of Artificial Sequence: Synthetic oligonucleotide
guuaaaacccacgcuguac

SEQ ID NO: 354822 - RNA, 19 nt, Artificial Sequence
  Description of Artificial Sequence: Synthetic oligonucleotide
gaugcgcuaacaaagcaaa

SEQ ID NO: 354823 - RNA, 19 nt, Artificial Sequence
  Description of Artificial Sequence: Synthetic oligonucleotide
caugugucgaucucgcuga

SEQ ID NO: 354824 - RNA, 19 nt, Artificial Sequence
  Description of Artificial Sequence: Synthetic oligonucleotide
uuugugcaugccacucaag

SEQ ID NO: 354825 - RNA, 19 nt, Artificial Sequence
  Description of Artificial Sequence: Synthetic oligonucleotide
agugcgacccugcuuucag

SEQ ID NO: 354826 - RNA, 19 nt, Artificial Sequence
  Description of Artificial Sequence: Synthetic oligonucleotide
aacuccgcgcugucacugg

SEQ ID NO: 354827 - RNA, 19 nt, Artificial Sequence
  Description of Artificial Sequence: Synthetic oligonucleotide
acaaaguauccaugauaug

SEQ ID NO: 354828 - RNA, 19 nt, Artificial Sequence
  Description of Artificial Sequence: Synthetic oligonucleotide
ucuagaaccucagugcauu

SEQ ID NO: 354829 - RNA, 19 nt, Artificial Sequence
  Description of Artificial Sequence: Synthetic oligonucleotide
ggacucagugacuuggugc

SEQ ID NO: 354830 - RNA, 19 nt, Artificial Sequence
  Description of Artificial Sequence: Synthetic oligonucleotide
uggacagguaacauuuauu

SEQ ID NO: 354831 - RNA, 19 nt, Artificial Sequence
  Description of Artificial Sequence: Synthetic oligonucleotide
uaagugggacgccucuucu

SEQ ID NO: 354832 - RNA, 19 nt, Artificial Sequence
  Description of Artificial Sequence: Synthetic oligonucleotide
aucugcaauuacaaacuag

SEQ ID NO: 354833 - RNA, 19 nt, Artificial Sequence
  Description of Artificial Sequence: Synthetic oligonucleotide
ggacagguaacauuuauua

SEQ ID NO: 354834 - RNA, 19 nt, Artificial Sequence
  Description of Artificial Sequence: Synthetic oligonucleotide
uggugcucgucguaggcug

SEQ ID NO: 354835 - RNA, 19 nt, Artificial Sequence
  Description of Artificial Sequence: Synthetic oligonucleotide
cuagcaguguagugcgacc

SEQ ID NO: 354836 - RNA, 19 nt, Artificial Sequence
  Description of Artificial Sequence: Synthetic oligonucleotide
gauaugcaccuaaugacaa

SEQ ID NO: 354837 - RNA, 19 nt, Artificial Sequence
  Description of Artificial Sequence: Synthetic oligonucleotide
gucauacaaaagggcaugg

SEQ ID NO: 354838 - RNA, 19 nt, Artificial Sequence
  Description of Artificial Sequence: Synthetic oligonucleotide
cauuaugcugggcuugcug

SEQ ID NO: 354839 - RNA, 19 nt, Artificial Sequence
  Description of Artificial Sequence: Synthetic oligonucleotide
ugguuuaguuucugcagaa

SEQ ID NO: 354840 - RNA, 19 nt, Artificial Sequence
  Description of Artificial Sequence: Synthetic oligonucleotide
uggacucagugacuuggug

SEQ ID NO: 354841 - RNA, 19 nt, Artificial Sequence
  Description of Artificial Sequence: Synthetic oligonucleotide
uggagacgucacauaacug

SEQ ID NO: 354842 - RNA, 19 nt, Artificial Sequence
  Description of Artificial Sequence: Synthetic oligonucleotide
uguacaccgaagacagcaa

SEQ ID NO: 354843 - RNA, 19 nt, Artificial Sequence
  Description of Artificial Sequence: Synthetic oligonucleotide
auuaauuaccauaguuuau

SEQ ID NO: 354844 - RNA, 19 nt, Artificial Sequence
  Description of Artificial Sequence: Synthetic oligonucleotide
auaagggcgaagaccgagg

SEQ ID NO: 354845 - RNA, 19 nt, Artificial Sequence
  Description of Artificial Sequence: Synthetic oligonucleotide
ugacaugacacaggcuuca

SEQ ID NO: 354846 - RNA, 19 nt, Artificial Sequence
  Description of Artificial Sequence: Synthetic oligonucleotide
aggugcaugcucauguguc

SEQ ID NO: 354847 - RNA, 19 nt, Artificial Sequence
  Description of Artificial Sequence: Synthetic oligonucleotide
uuauccccaucauccauuc

SEQ ID NO: 354848 - RNA, 19 nt, Artificial Sequence
  Description of Artificial Sequence: Synthetic oligonucleotide
acaauuuggaaguccucuu

SEQ ID NO: 354849 - RNA, 19 nt, Artificial Sequence
  Description of Artificial Sequence: Synthetic oligonucleotide
ggggaaaauaaaaugcaac

SEQ ID NO: 354850 - RNA, 19 nt, Artificial Sequence
  Description of Artificial Sequence: Synthetic oligonucleotide
cacacgucuguuccaggcg

SEQ ID NO: 354851 - RNA, 19 nt, Artificial Sequence
  Description of Artificial Sequence: Synthetic oligonucleotide
acgagauggugcuucauuu

SEQ ID NO: 354852 - RNA, 19 nt, Artificial Sequence
  Description of Artificial Sequence: Synthetic oligonucleotide
cucgucauaguugcucucc

SEQ ID NO: 354853 - RNA, 19 nt, Artificial Sequence
  Description of Artificial Sequence: Synthetic oligonucleotide
cguuugugagccauuaugc

SEQ ID NO: 354854 - RNA, 19 nt, Artificial Sequence
  Description of Artificial Sequence: Synthetic oligonucleotide
ucauacaaaagggcauggu

SEQ ID NO: 354855 - RNA, 19 nt, Artificial Sequence
  Description of Artificial Sequence: Synthetic oligonucleotide
ugugagccauuaugcuggg

SEQ ID NO: 354856 - RNA, 19 nt, Artificial Sequence
  Description of Artificial Sequence: Synthetic oligonucleotide
uggcucgccaucucagugc
